United States Patent Application Publication US 2007/0031850 A1 - sequence listing, part 6

SEQ ID NO: 141879 - DNA, 25 bp, Probe sequence
atgaagcacatcaaatttgggaatg

SEQ ID NO: 141880 - DNA, 25 bp, Probe sequence
atggtactaaatatgaagcacatca

SEQ ID NO: 141881 - DNA, 25 bp, Probe sequence
aggttaaagaatatcagaaacattt

SEQ ID NO: 141882 - DNA, 25 bp, Probe sequence
agtcgatattcgcatggataaatag

SEQ ID NO: 141883 - DNA, 25 bp, Probe sequence
agaagaagtcgatattcgcatggat

SEQ ID NO: 141884 - DNA, 25 bp, Probe sequence
agaagtcgatattcgcatggataaa

SEQ ID NO: 141885 - DNA, 25 bp, Probe sequence
agcacatcaaatttgggaatgggag

SEQ ID NO: 141886 - DNA, 25 bp, Probe sequence
aaatttgggaatgggagaatcatca

SEQ ID NO: 141887 - DNA, 25 bp, Probe sequence
aagcacatcaaatttgggaatggga

SEQ ID NO: 141888 - DNA, 25 bp, Probe sequence
aagaagtcgatattcgcatggataa

SEQ ID NO: 141889 - DNA, 25 bp, Probe sequence
aagtcgatattcgcatggataaata

SEQ ID NO: 141890 - DNA, 25 bp, Probe sequence
aatatgaagcacatcaaatttggga

SEQ ID NO: 141891 - DNA, 25 bp, Probe sequence
catcaaatttgggaatgggagaatc

SEQ ID NO: 141892 - DNA, 25 bp, Probe sequence
gcacatcaaatttgggaatgggaga

SEQ ID NO: 141893 - DNA, 25 bp, Probe sequence
gaagtcgatattcgcatggataaat

SEQ ID NO: 141894 - DNA, 25 bp, Probe sequence
gaagaagtcgatattcgcatggata

SEQ ID NO: 141895 - DNA, 25 bp, Probe sequence
gaagcacatcaaatttgggaatggg

SEQ ID NO: 141896 - DNA, 25 bp, Probe sequence
gaaacatttagaagaagtcgatatt

SEQ ID NO: 141897 - DNA, 25 bp, Probe sequence
gatgcaccatatgaaatgtttttag

SEQ ID NO: 141898 - DNA, 25 bp, Probe sequence
ggtactaaatatgaagcacatcaaa

SEQ ID NO: 141899 - DNA, 25 bp, Probe sequence
tggtactaaatatgaagcacatcaa

SEQ ID NO: 141900 - DNA, 25 bp, Probe sequence
tgatgcaccatatgaaatgttttta

SEQ ID NO: 141901 - DNA, 25 bp, Probe sequence
tgaagcacatcaaatttgggaatgg

SEQ ID NO: 141902 - DNA, 25 bp, Probe sequence
tagaagaagtcgatattcgcatgga

SEQ ID NO: 141903 - DNA, 25 bp, Probe sequence
tatggtactaaatatgaagcacatc

SEQ ID NO: 141904 - DNA, 25 bp, Probe sequence
tatgaagcacatcaaatttgggaat

SEQ ID NO: 141905 - DNA, 25 bp, Probe sequence
tataacttacgaactaaacataatt

SEQ ID NO: 141906 - DNA, 25 bp, Probe sequence
ttagaagaagtcgatattcgcatgg

SEQ ID NO: 141907 - DNA, 25 bp, Probe sequence
ttatataacttacgaactaaacata

SEQ ID NO: 141908 - DNA, 25 bp, Probe sequence
attggtacaggtcgaattggccgtg

SEQ ID NO: 141909 - DNA, 25 bp, Probe sequence
attgcgttttatactgaagctgcag

SEQ ID NO: 141910 - DNA, 25 bp, Probe sequence
atttgtcaattgtgcgagaggttct

SEQ ID NO: 141911 - DNA, 25 bp, Probe sequence
atggcttatcgctatcacaacaaat

SEQ ID NO: 141912 - DNA, 25 bp, Probe sequence
acaccacatattgcgttttatactg

SEQ ID NO: 141913 - DNA, 25 bp, Probe sequence
aaattgcaacgtatgtcgattacaa

SEQ ID NO: 141914 - DNA, 25 bp, Probe sequence
aaatcgcacaacgtagtgctggatt

SEQ ID NO: 141915 - DNA, 25 bp, Probe sequence
aacattagatgtattgcagactgga

SEQ ID NO: 141916 - DNA, 25 bp, Probe sequence
aagatgtcatattaacaccacatat

SEQ ID NO: 141917 - DNA, 25 bp, Probe sequence
caatgttgaaggtgtcgctggttat

SEQ ID NO: 141918 - DNA, 25 bp, Probe sequence
caaataccattatcagagcatgttt

SEQ ID NO: 141919 - DNA, 25 bp, Probe sequence
cgtcatactctccgaattcaattgc

SEQ ID NO: 141920 - DNA, 25 bp, Probe sequence
ccaggctattaatgtggttcgtcat

SEQ ID NO: 141921 - DNA, 25 bp, Probe sequence
gcgagaggttctttagtagatacta

SEQ ID NO: 141922 - DNA, 25 bp, Probe sequence
gcagactggagatactaggttacga

SEQ ID NO: 141923 - DNA, 25 bp, Probe sequence
gaattggccgtgtagtagccgatat

SEQ ID NO: 141924 - DNA, 25 bp, Probe sequence
gaattcaattgcggagtttgctgtg

SEQ ID NO: 141925 - DNA, 25 bp, Probe sequence
gaaggtgctgatatcgtgacattac

SEQ ID NO: 141926 - DNA, 25 bp, Probe sequence
gaacgcaaacttttcccaagtgatc

SEQ ID NO: 141927 - DNA, 25 bp, Probe sequence
gacccgtttcctaatgctaaaattg

SEQ ID NO: 141928 - DNA, 25 bp, Probe sequence
gagtgtacgtgatgaagatatgcct

SEQ ID NO: 141929 - DNA, 25 bp, Probe sequence
gatgtggtcgcatacgacccgtttc

SEQ ID NO: 141930 - DNA, 25 bp, Probe sequence
gatgggaacctactattttatcgaa

SEQ ID NO: 141931 - DNA, 25 bp, Probe sequence
gatccattgttagaatcgttgattg

SEQ ID NO: 141932 - DNA, 25 bp, Probe sequence
gatacgattgaggaagcggttgaag

SEQ ID NO: 141933 - DNA, 25 bp, Probe sequence
gtagccgatatatttgccaatggtt

SEQ ID NO: 141934 - DNA, 25 bp, Probe sequence
gtgacattacatgtacctgcaacga

SEQ ID NO: 141935 - DNA, 25 bp, Probe sequence
gtgtcgctggttatgatggcttatc

SEQ ID NO: 141936 - DNA, 25 bp, Probe sequence
gtgtcaaatgtgccgtcatactctc

SEQ ID NO: 141937 - DNA, 25 bp, Probe sequence
gtggttcgtcattttaatcaaattc

SEQ ID NO: 141938 - DNA, 25 bp, Probe sequence
ggtgcagcacttgatacgtatgaat

SEQ ID NO: 141939 - DNA, 25 bp, Probe sequence
ggagtttgctgtgaaccaggctatt

SEQ ID NO: 141940 - DNA, 25 bp, Probe sequence
ggcgtgggcagagaaacatcatgtt

SEQ ID NO: 141941 - DNA, 25 bp, Probe sequence
tatgccttatatcaaggcgtgggca

SEQ ID NO: 141942 - DNA, 25 bp, Probe sequence
atccaggagactatgtattactacc

SEQ ID NO: 141943 - DNA, 25 bp, Probe sequence
atgggaaagatgttgcgattgaaat

SEQ ID NO: 141944 - DNA, 25 bp, Probe sequence
cacgtcgtgaccgattcgaagccat

SEQ ID NO: 141945 - DNA, 25 bp, Probe sequence
acatgtcaggttttagagtcggttt

SEQ ID NO: 141946 - DNA, 25 bp, Probe sequence
aaatcctagtatacttgcttcggaa

SEQ ID NO: 141947 - DNA, 25 bp, Probe sequence
aaacgcacacaaatgctgggatgtt

SEQ ID NO: 141948 - DNA, 25 bp, Probe sequence
aaaatatggtgcttttcatggtaaa

SEQ ID NO: 141949 - DNA, 25 bp, Probe sequence
aagcactaactattcctgaaaatca

SEQ ID NO: 141950 - DNA, 25 bp, Probe sequence
aatccaactggatcgacagctacga

SEQ ID NO: 141951 - DNA, 25 bp, Probe sequence
caaattagcaaatatccctgatagt

SEQ ID NO: 141952 - DNA, 25 bp, Probe sequence
caccgcctggttatgacagcgagca

SEQ ID NO: 141953 - DNA, 25 bp, Probe sequence
ccaacatgtgttatcaatccaggag

SEQ ID NO: 141954 - DNA, 25 bp, Probe sequence
gcgattgaaatttattccttgtcta

SEQ ID NO: 141955 - DNA, 25 bp, Probe sequence
gctgggatgtttggtgcattacaag

SEQ ID NO: 141956 - DNA, 25 bp, Probe sequence
gcaggtgtacttttagctgatggca

SEQ ID NO: 141957 - DNA, 25 bp, Probe sequence
gaagtcaatacttgttgctccaggg

SEQ ID NO: 141958 - DNA, 25 bp, Probe sequence
gaagtttttgatgaagcgatagcta

SEQ ID NO: 141959 - DNA, 25 bp, Probe sequence
gaagcgttcaagcaagctattgtag

SEQ ID NO: 141960 - DNA, 25 bp, Probe sequence
gaacatggaccattgccattaatta

SEQ ID NO: 141961 - DNA, 25 bp, Probe sequence
gaaaaagtaccaaacgcacacaaat

SEQ ID NO: 141962 - DNA, 25 bp, Probe sequence
gacagcgagcaatttgagcaatttt

SEQ ID NO: 141963 - DNA, 25 bp, Probe sequence
gagagaatggtaatcgttatgtgag

SEQ ID NO: 141964 - DNA, 25 bp, Probe sequence
gatgccgcaatatatgctttgaatc

SEQ ID NO: 141965 - DNA, 25 bp, Probe sequence
gggacgtaaaatcgaacatggacca

SEQ ID NO: 141966 - DNA, 25 bp, Probe sequence
tcggtttcgacgctaaaaatcctag

SEQ ID NO: 141967 - DNA, 25 bp, Probe sequence
ggattagtggcagtaccaacatgtg

SEQ ID NO: 141968 - DNA, 25 bp, Probe sequence
tgtatggttggaaacaccgcctggt

SEQ ID NO: 141969 - DNA, 25 bp, Probe sequence
ttgttgctccagggaaaccatttgg

SEQ ID NO: 141970 - DNA, 25 bp, Probe sequence
tcgtgaccgattcgaagccatgctt

SEQ ID NO: 141971 - DNA, 25 bp, Probe sequence
tcgtgcatgattttgcttatggtgc

SEQ ID NO: 141972 - DNA, 25 bp, Probe sequence
tacagacactaaaatcgtgcatgat

SEQ ID NO: 141973 - DNA, 25 bp, Probe sequence
tagagtcggttttgcagttggtaat

SEQ ID NO: 141974 - DNA, 25 bp, Probe sequence
ttaacgtatccaaataatccaactg

SEQ ID NO: 141975 - DNA, 25 bp, Probe sequence
ttggtgcattacaagatgccgcaat

SEQ ID NO: 141976 - DNA, 25 bp, Probe sequence
ataacggtgcctacagatttagctg

SEQ ID NO: 141977 - DNA, 25 bp, Probe sequence
atgacgtcacttgtgcaaggtgcta

SEQ ID NO: 141978 - DNA, 25 bp, Probe sequence
atgatccttctatttatgtgtatgt

SEQ ID NO: 141979 - DNA, 25 bp, Probe sequence
atgtacggctgatttccctagtgtt

SEQ ID NO: 141980 - DNA, 25 bp, Probe sequence
atggctcaagggctagcgcaattaa

SEQ ID NO: 141981 - DNA, 25 bp, Probe sequence
agtgttgcggaatcattaatgccag

SEQ ID NO: 141982 - DNA, 25 bp, Probe sequence
agaacctggttcaacgcatggtttt

SEQ ID NO: 141983 - DNA, 25 bp, Probe sequence
aaattgcacgtcgctatttcttaga

SEQ ID NO: 141984 - DNA, 25 bp, Probe sequence
aaacgaggcccgtcactatattcaa

SEQ ID NO: 141985 - DNA, 25 bp, Probe sequence
aacgttaaatcatgcagatcagcta

SEQ ID NO: 141986 - DNA, 25 bp, Probe sequence
caattgtcatgatgccagatgttta

SEQ ID NO: 141987 - DNA, 25 bp, Probe sequence
caacgcatggttttatgtccttttt

SEQ ID NO: 141988 - DNA, 25 bp, Probe sequence
caggtagcggaatcgattggtcaga

SEQ ID NO: 141989 - DNA, 25 bp, Probe sequence
gccgatgcgataaaagtgaatggtg

SEQ ID NO: 141990 - DNA, 25 bp, Probe sequence
gcgaaatttggttcggcattcggtt

SEQ ID NO: 141991 - DNA, 25 bp, Probe sequence
gcccgtcactatattcaattattcc

SEQ ID NO: 141992 - DNA, 25 bp, Probe sequence
gcgcaaagtaattattatcgtccac

SEQ ID NO: 141993 - DNA, 25 bp, Probe sequence
gcacctattaaaaagtatccaccac

SEQ ID NO: 141994 - DNA, 25 bp, Probe sequence
gaattgatccaaaacgaggcccgtc

SEQ ID NO: 141995 - DNA, 25 bp, Probe sequence
gatgtttggtgtgcattttattaaa

SEQ ID NO: 141996 - DNA, 25 bp, Probe sequence
gatgtgacagatcaagtgagacttc

SEQ ID NO: 141997 - DNA, 25 bp, Probe sequence
gatacaaaagcttttagcgtttcaa

SEQ ID NO: 141998 - DNA, 25 bp, Probe sequence
gattactcttgttcagcatttttaa

SEQ ID NO: 141999 - DNA, 25 bp, Probe sequence
gtatccaccacataaaattgcagac

SEQ ID NO: 142000 - DNA, 25 bp, Probe sequence
gtgcaggcgttcctattgtcttaac

SEQ ID NO: 142001 - DNA, 25 bp, Probe sequence
ggctgatttccctagtgttgcggaa

SEQ ID NO: 142002 - DNA, 25 bp, Probe sequence
tgagcaaacgtatcatgcgaaattt

SEQ ID NO: 142003 - DNA, 25 bp, Probe sequence
tgcagacttagattactcttgttca

SEQ ID NO: 142004 - DNA, 25 bp, Probe sequence
taaaatcgcatattgtttcagaaac

SEQ ID NO: 142005 - DNA, 25 bp, Probe sequence
tatgtcctttttaacggatgtttat

SEQ ID NO: 142006 - DNA, 25 bp, Probe sequence
tatcgtccacaaaatgtatcgcgag

SEQ ID NO: 142007 - DNA, 25 bp, Probe sequence
tttcagaaacaatctttacgccaaa

SEQ ID NO: 142008 - DNA, 25 bp, Probe sequence
ttaatgccagattttgcacctatta

SEQ ID NO: 142009 - DNA, 25 bp, Probe sequence
ttcggtttaatgccaactttagcgc

SEQ ID NO: 142010 - DNA, 25 bp, Probe sequence
attgctgaagtgtaccaaaatggtg

SEQ ID NO: 142011 - DNA, 25 bp, Probe sequence
attagcagcacgtatatatattgaa

SEQ ID NO: 142012 - DNA, 25 bp, Probe sequence
ataaaaatatcgcctttcaatcttt

SEQ ID NO: 142013 - DNA, 25 bp, Probe sequence
ataatctcattgatactgtatataa

SEQ ID NO: 142014 - DNA, 25 bp, Probe sequence
atgctgtgtgtcgtaaaattgatga

SEQ ID NO: 142015 - DNA, 25 bp, Probe sequence
agcttttcttacgcttttgacttgt

SEQ ID NO: 142016 - DNA, 25 bp, Probe sequence
accaatcatagaattagcagcacgt

SEQ ID NO: 142017 - DNA, 25 bp, Probe sequence
aatactggacgaagtgagacaggct

SEQ ID NO: 142018 - DNA, 25 bp, Probe sequence
aatcattatattgacttatgggaat

SEQ ID NO: 142019 - DNA, 25 bp, Probe sequence
caatctattgaaaaatacccatatg

SEQ ID NO: 142020 - DNA, 25 bp, Probe sequence
cattacatgaacgtgtttttgtgga

SEQ ID NO: 142021 - DNA, 25 bp, Probe sequence
cttggtgaatcgttgcaattgatta

SEQ ID NO: 142022 - DNA, 25 bp, Probe sequence
gcttttgacttgttaccagaagatc

SEQ ID NO: 142023 - DNA, 25 bp, Probe sequence
gcagctatcgcagaaaaagattttc

SEQ ID NO: 142024 - DNA, 25 bp, Probe sequence
gaagttgatattgctgaagtgtacc

SEQ ID NO: 142025 - DNA, 25 bp, Probe sequence
gaaaagcggtttgggcaatttatgc

SEQ ID NO: 142026 - DNA, 25 bp, Probe sequence
gaaacggacgctgaattattcggat

SEQ ID NO: 142027 - DNA, 25 bp, Probe sequence
gacagtatagatgtttatggcgata

SEQ ID NO: 142028 - DNA, 25 bp, Probe sequence
gacaggctaactatacattacatga

SEQ ID NO: 142029 - DNA, 25 bp, Probe sequence
gacgctgaattattcggatattgtt

SEQ ID NO: 142030 - DNA, 25 bp, Probe sequence
gacgccgattttaagtgatcatgaa

SEQ ID NO: 142031 - DNA, 25 bp, Probe sequence
gtttatggcgatattcaatttttaa

SEQ ID NO: 142032 - DNA, 25 bp, Probe sequence
gtattgacgccgattttaagtgatc

SEQ ID NO: 142033 - DNA, 25 bp, Probe sequence
gtaggtgaagtattgacgccgattt

SEQ ID NO: 142034 - DNA, 25 bp, Probe sequence
gtgagacaggctaactatacattac

SEQ ID NO: 142035 - DNA, 25 bp, Probe sequence
ggtgttgctggtacagtaggtgaag

SEQ ID NO: 142036 - DNA, 25 bp, Probe sequence
ggatattgttatggtgttgctggta

SEQ ID NO: 142037 - DNA, 25 bp, Probe sequence
ggaatattatgcagctatcgcagaa

SEQ ID NO: 142038 - DNA, 25 bp, Probe sequence
tgggcaatttatgctgtgtgtcgta

SEQ ID NO: 142039 - DNA, 25 bp, Probe sequence
taagagatgtcggtgaagattttga

SEQ ID NO: 142040 - DNA, 25 bp, Probe sequence
ttacaatgtttgaaacggacgctga

SEQ ID NO: 142041 - DNA, 25 bp, Probe sequence
tatgggaatattatgcagctatcgc

SEQ ID NO: 142042 - DNA, 25 bp, Probe sequence
ttacgcttttgacttgttaccagaa

SEQ ID NO: 142043 - DNA, 25 bp, Probe sequence
ttcttacgcttttgacttgttacca

SEQ ID NO: 142044 - DNA, 25 bp, Probe sequence
atgacggatcgacagatgaaacagc

SEQ ID NO: 142045 - DNA, 25 bp, Probe sequence
atgggaaatcacatgcttgttatca

SEQ ID NO: 142046 - DNA, 25 bp, Probe sequence
agcatgcatttggaccggtgacatt

SEQ ID NO: 142047 - DNA, 25 bp, Probe sequence
acgctgaacttcaatcataaagcat

SEQ ID NO: 142048 - DNA, 25 bp, Probe sequence
acggtcggactaaccagcatgcatt

SEQ ID NO: 142049 - DNA, 25 bp, Probe sequence
actggggcaggtggcacaaagccta

SEQ ID NO: 142050 - DNA, 25 bp, Probe sequence
actaaaattttcatccaatcttgga

SEQ ID NO: 142051 - DNA, 25 bp, Probe sequence
acacaatttatttatctgcatcgaa

SEQ ID NO: 142052 - DNA, 25 bp, Probe sequence
acaatcattgcccgtaacagtttat

SEQ ID NO: 142053 - DNA, 25 bp, Probe sequence
aagcgtacagccttatcatataaca

SEQ ID NO: 142054 - DNA, 25 bp, Probe sequence
aagaaggatttcagtcattacaaga

SEQ ID NO: 142055 - DNA, 25 bp, Probe sequence
catatacttcacaatcattgcccgt

SEQ ID NO: 142056 - DNA, 25 bp, Probe sequence
cgttcatatggtgcgactgtagtag

SEQ ID NO: 142057 - DNA, 25 bp, Probe sequence
ccatttgttgcatttcgcatgtatc

SEQ ID NO: 142058 - DNA, 25 bp, Probe sequence
gcgactgtagtagatgttgttgatg

SEQ ID NO: 142059 - DNA, 25 bp, Probe sequence
gcgagtattttagggctatgtctta

SEQ ID NO: 142060 - DNA, 25 bp, Probe sequence
gcatcgaagggtcggccaattttct

SEQ ID NO: 142061 - DNA, 25 bp, Probe sequence
gcttgttatcaaggtgtgacgcatg

SEQ ID NO: 142062 - DNA, 25 bp, Probe sequence
gcattaacaattattattccggcta

SEQ ID NO: 142063 - DNA, 25 bp, Probe sequence
gcaagttccagtagatgtcattgtt

SEQ ID NO: 142064 - DNA, 25 bp, Probe sequence
gaagattattatgcaactggaggtc

SEQ ID NO: 142065 - DNA, 25 bp, Probe sequence
gaaaggtcgtcaatattctatatct

SEQ ID NO: 142066 - DNA, 25 bp, Probe sequence
gatgctgatgtaactttcttaagga

SEQ ID NO: 142067 - DNA, 25 bp, Probe sequence
gtttaaaatatcgccaaatgtctgt

SEQ ID NO: 142068 - DNA, 25 bp, Probe sequence
gtatgaatgtattttctaccttaga

SEQ ID NO: 142069 - DNA, 25 bp, Probe sequence
gtgaccatgtctatggcgtgtggtg

SEQ ID NO: 142070 - DNA, 25 bp, Probe sequence
gtgtgacgcatgcatgtacgaatcg

SEQ ID NO: 142071 - DNA, 25 bp, Probe sequence
ggtatgtcatccattgttatttatg

SEQ ID NO: 142072 - DNA, 25 bp, Probe sequence
ggattgttaagcgtacagccttatc

SEQ ID NO: 142073 - DNA, 25 bp, Probe sequence
tggcgtgtggtgcattgatatttaa

SEQ ID NO: 142074 - DNA, 25 bp, Probe sequence
taggtcatttactacattcgataat

SEQ ID NO: 142075 - DNA, 25 bp, Probe sequence
ttacttgagctatactacacaattt

SEQ ID NO: 142076 - DNA, 25 bp, Probe sequence
ttaatgacagtcgttggtatgaatg

SEQ ID NO: 142077 - DNA, 25 bp, Probe sequence
ttctaccttagacgacggtcggact

SEQ ID NO: 142078 - DNA, 25 bp, Probe sequence
atacttgcgacaaatgttaggctat

SEQ ID NO: 142079 - DNA, 25 bp, Probe sequence
atcacacacaagcgccagtaggtta

SEQ ID NO: 142080 - DNA, 25 bp, Probe sequence
atgtacatactatgcaacaggccat

SEQ ID NO: 142081 - DNA, 25 bp, Probe sequence
agaaggtgtcacaattcatacaggt

SEQ ID NO: 142082 - DNA, 25 bp, Probe sequence
agctgtattatctatgttattccat

SEQ ID NO: 142083 - DNA, 25 bp, Probe sequence
acgactatcgatttgtatgaaggta

SEQ ID NO: 142084 - DNA, 25 bp, Probe sequence
acggaaaatgcttatctcaattatc

SEQ ID NO: 142085 - DNA, 25 bp, Probe sequence
acaggccatagacaagcgtatctcg

SEQ ID NO: 142086 - DNA, 25 bp, Probe sequence
aaagtcttaccacatattccatata

SEQ ID NO: 142087 - DNA, 25 bp, Probe sequence
aaagctagcgcgtgaagaaggtgtc

SEQ ID NO: 142088 - DNA, 25 bp, Probe sequence
aagtgggcaacaagtcgcagacaaa

SEQ ID NO: 142089 - DNA, 25 bp, Probe sequence
aatggcgtagcttttttccagatgg

SEQ ID NO: 142090 - DNA, 25 bp, Probe sequence
aatatggaagtcatacctacttata

SEQ ID NO: 142091 - DNA, 25 bp, Probe sequence
caatacccgcaattagcacatcata

SEQ ID NO: 142092 - DNA, 25 bp, Probe sequence
gccaatgccttggaaaagctagcgc

SEQ ID NO: 142093 - DNA, 25 bp, Probe sequence
gcgtatctcgaatccatacttgcga

SEQ ID NO: 142094 - DNA, 25 bp, Probe sequence
gcacatcataatttcttttttacgg

SEQ ID NO: 142095 - DNA, 25 bp, Probe sequence
gcaacaagagcaaggcctttggtat

SEQ ID NO: 142096 - DNA, 25 bp, Probe sequence
gcaagctcaggatatgtgatgcatt

SEQ ID NO: 142097 - DNA, 25 bp, Probe sequence
gcaagaagcaaatgtcagactacgt

SEQ ID NO: 142098 - DNA, 25 bp, Probe sequence
gaagatgtttggacaccggaggata

SEQ ID NO: 142099 - DNA, 25 bp, Probe sequence
gatcagtaaatcctggtggtggcat

SEQ ID NO: 142100 - DNA, 25 bp, Probe sequence
gtattgccagatgatccgaccattt

SEQ ID NO: 142101 - DNA, 25 bp, Probe sequence
gtgacgggtgtcagattagatacag

SEQ ID NO: 142102 - DNA, 25 bp, Probe sequence
ggtccatctattttaacgatgcctt

SEQ ID NO: 142103 - DNA, 25 bp, Probe sequence
ggaatccatcatttagccaatgcct

SEQ ID NO: 142104 - DNA, 25 bp, Probe sequence
tgtcagactacgttacaatcaagcg

SEQ ID NO: 142105 - DNA, 25 bp, Probe sequence
taaaactgatcacacacaagcgcca

SEQ ID NO: 142106 - DNA, 25 bp, Probe sequence
tacgatgcgccagctgtattatcta

SEQ ID NO: 142107 - DNA, 25 bp, Probe sequence
tttggctttgatttaggtccatcta

SEQ ID NO: 142108 - DNA, 25 bp, Probe sequence
ttatcgttctaatcgtggtgcaata

SEQ ID NO: 142109 - DNA, 25 bp, Probe sequence
ttaggtgttgcttgccaatacccgc

SEQ ID NO: 142110 - DNA, 25 bp, Probe sequence
ttaacgatgccttatatttttgaaa

SEQ ID NO: 142111 - DNA, 25 bp, Probe sequence
ttcaccttgatactcaacgattaaa

SEQ ID NO: 142112 - DNA, 25 bp, Probe sequence
attgtgcaacgctataatcgaccga

SEQ ID NO: 142113 - DNA, 25 bp, Probe sequence
attggatatcgatacttccagtcat

SEQ ID NO: 142114 - DNA, 25 bp, Probe sequence
attaacgcagttactacgcatatta

SEQ ID NO: 142115 - DNA, 25 bp, Probe sequence
atcgaccgagattaacgcagttact

SEQ ID NO: 142116 - DNA, 25 bp, Probe sequence
aaatatatatgatcagcgtcattta

SEQ ID NO: 142117 - DNA, 25 bp, Probe sequence
aacgcagttactacgcatattaaaa

SEQ ID NO: 142118 - DNA, 25 bp, Probe sequence
aagagggcagagttgattcattgga

SEQ ID NO: 142119 - DNA, 25 bp, Probe sequence
aatgttccaatcattattgtgcaac

SEQ ID NO: 142120 - DNA, 25 bp, Probe sequence
ccgagattaacgcagttactacgca

SEQ ID NO: 142121 - DNA, 25 bp, Probe sequence
ccaatcattattgtgcaacgctata

SEQ ID NO: 142122 - DNA, 25 bp, Probe sequence
gcaaatttaggtacaagaattcctg

SEQ ID NO: 142123 - DNA, 25 bp, Probe sequence
gcagttactacgcatattaaaacga

SEQ ID NO: 142124 - DNA, 25 bp, Probe sequence
gcaacgctataatcgaccgagatta

SEQ ID NO: 142125 - DNA, 25 bp, Probe sequence
gcaatgatagctaatgttccaatca

SEQ ID NO: 142126 - DNA, 25 bp, Probe sequence
gaccgagattaacgcagttactacg

SEQ ID NO: 142127 - DNA, 25 bp, Probe sequence
gagaagcatggaaaattttggaaca

SEQ ID NO: 142128 - DNA, 25 bp, Probe sequence
gagattaacgcagttactacgcata

SEQ ID NO: 142129 - DNA, 25 bp, Probe sequence
gagttgattcattggatatcgatac

SEQ ID NO: 142130 - DNA, 25 bp, Probe sequence
gagggcagagttgattcattggata

SEQ ID NO: 142131 - DNA, 25 bp, Probe sequence
gatcagcgtcatttaatgacaatca

SEQ ID NO: 142132 - DNA, 25 bp, Probe sequence
gattatagagacaaagagggcagag

SEQ ID NO: 142133 - DNA, 25 bp, Probe sequence
gattcattggatatcgatacttcca

SEQ ID NO: 142134 - DNA, 25 bp, Probe sequence
gttccaatcattattgtgcaacgct

SEQ ID NO: 142135 - DNA, 25 bp, Probe sequence
gtattggttaattgttcaactaaat

SEQ ID NO: 142136 - DNA, 25 bp, Probe sequence
gtatataaatattttctatgcaatg

SEQ ID NO: 142137 - DNA, 25 bp, Probe sequence
gtatgtattggttaattgttcaact

SEQ ID NO: 142138 - DNA, 25 bp, Probe sequence
gtagtatgtattggttaattgttca

SEQ ID NO: 142139 - DNA, 25 bp, Probe sequence
gtgcaacgctataatcgaccgagat

SEQ ID NO: 142140 - DNA, 25 bp, Probe sequence
ggttaattgttcaactaaatatagc

SEQ ID NO: 142141 - DNA, 25 bp, Probe sequence
ggcagagttgattcattggatatcg

SEQ ID NO: 142142 - DNA, 25 bp, Probe sequence
tgtgcaacgctataatcgaccgaga

SEQ ID NO: 142143 - DNA, 25 bp, Probe sequence
tatgcaatgatagctaatgttccaa

SEQ ID NO: 142144 - DNA, 25 bp, Probe sequence
tatatgatcagcgtcatttaatgac

SEQ ID NO: 142145 - DNA, 25 bp, Probe sequence
tattgtgcaacgctataatcgaccg

SEQ ID NO: 142146 - DNA, 25 bp, Probe sequence
atttctaatggttatgcatcaggaa

SEQ ID NO: 142147 - DNA, 25 bp, Probe sequence
atggacatggtgctggtgtggttac

SEQ ID NO: 142148 - DNA, 25 bp, Probe sequence
aggctattacggtcatgttgcttac

SEQ ID NO: 142149 - DNA, 25 bp, Probe sequence
agcaacggttctgttcgtgtttcag

SEQ ID NO: 142150 - DNA, 25 bp, Probe sequence
agcaggttcatataatttcattcat

SEQ ID NO: 142151 - DNA, 25 bp, Probe sequence
aaatcgttacagctacaatcgctac

SEQ ID NO: 142152 - DNA, 25 bp, Probe sequence
aacaacacaaggctattacggtcat

SEQ ID NO: 142153 - DNA, 25 bp, Probe sequence
aacaatgcatcttacaataactact

SEQ ID NO: 142154 - DNA, 25 bp, Probe sequence
aatggtcgttcaatttctaatggtt

SEQ ID NO: 142155 - DNA, 25 bp, Probe sequence
aattaacgcaaaacaacacatacta

SEQ ID NO: 142156 - DNA, 25 bp, Probe sequence
caatcgctacagcaggacttgccac

SEQ ID NO: 142157 - DNA, 25 bp, Probe sequence
cattacacttggacaggaaattgga

SEQ ID NO: 142158 - DNA, 25 bp, Probe sequence
ctggtggttcaggtgcaagttatag

SEQ ID NO: 142159 - DNA, 25 bp, Probe sequence
gccactatcgcatttgcaggacatg

SEQ ID NO: 142160 - DNA, 25 bp, Probe sequence
gcaggacatgatgcacaagccgcag

SEQ ID NO: 142161 - DNA, 25 bp, Probe sequence
gctatacgtatacaattgatgcaca

SEQ ID NO: 142162 - DNA, 25 bp, Probe sequence
gcatcatctggctatacagtgaaca

SEQ ID NO: 142163 - DNA, 25 bp, Probe sequence
gcagctgcatcatctggctatacag

SEQ ID NO: 142164 - DNA, 25 bp, Probe sequence
gcagcgccatcttcaaatggtcgtt

SEQ ID NO: 142165 - DNA, 25 bp, Probe sequence
gcacaagccgcagaacaaaataaca

SEQ ID NO: 142166 - DNA, 25 bp, Probe sequence
gaaggcgttaacagcaacggttctg

SEQ ID NO: 142167 - DNA, 25 bp, Probe sequence
gaactatggacatggtgctggtgtg

SEQ ID NO: 142168 - DNA, 25 bp, Probe sequence
gacgctcaatcatacagctatacgt

SEQ ID NO: 142169 - DNA, 25 bp, Probe sequence
gatcgtgttggtgggaaaattggtt

SEQ ID NO: 142170 - DNA, 25 bp, Probe sequence
gatataattctaatgacgctcaatc

SEQ ID NO: 142171 - DNA, 25 bp, Probe sequence
ggtcatgttgcttacgttgaaggcg

SEQ ID NO: 142172 - DNA, 25 bp, Probe sequence
tggaatccaagtcaattaacgcaaa

SEQ ID NO: 142173 - DNA, 25 bp, Probe sequence
tggtgctatcatgcaaacaacacaa

SEQ ID NO: 142174 - DNA, 25 bp, Probe sequence
tctcgtacaatttcagcaaaccaag

SEQ ID NO: 142175 - DNA, 25 bp, Probe sequence
tcatgtgactacaactgcagcgcca

SEQ ID NO: 142176 - DNA, 25 bp, Probe sequence
tacagcaggacttgccactatcgca

SEQ ID NO: 142177 - DNA, 25 bp, Probe sequence
taactactataatcattcatatcaa

SEQ ID NO: 142178 - DNA, 25 bp, Probe sequence
tatacttcaggacaatgtacttatt

SEQ ID NO: 142179 - DNA, 25 bp, Probe sequence
ttatgtatttgatcgtgttggtggg

SEQ ID NO: 142180 - DNA, 25 bp, Probe sequence
attgcggtacatccttctagtttat

SEQ ID NO: 142181 - DNA, 25 bp, Probe sequence
attagcatttatttggcctccgttt

SEQ ID NO: 142182 - DNA, 25 bp, Probe sequence
atcatttgcaactttattcattatt

SEQ ID NO: 142183 - DNA, 25 bp, Probe sequence
atgaggcagctgaaaagcgctctaa

SEQ ID NO: 142184 - DNA, 25 bp, Probe sequence
agagcttggtacaaatggggcattt

SEQ ID NO: 142185 - DNA, 25 bp, Probe sequence
agcgctctaatgtacatctagtcga

SEQ ID NO: 142186 - DNA, 25 bp, Probe sequence
actttgcatatgacggtattcactt

SEQ ID NO: 142187 - DNA, 25 bp, Probe sequence
aaaaagtcatcaccactattaattg

SEQ ID NO: 142188 - DNA, 25 bp, Probe sequence
aaccaatttgctattgaaccactca

SEQ ID NO: 142189 - DNA, 25 bp, Probe sequence
aattcacgtgtgtattttgggacag

SEQ ID NO: 142190 - DNA, 25 bp, Probe sequence
gcggttctaatgactttgttcttta

SEQ ID NO: 142191 - DNA, 25 bp, Probe sequence
gaaccactcaaacatttatggtctt

SEQ ID NO: 142192 - DNA, 25 bp, Probe sequence
gaacaattttacttgcttttcccat

SEQ ID NO: 142193 - DNA, 25 bp, Probe sequence
gaaaaaatgtattccccgcgatact

SEQ ID NO: 142194 - DNA, 25 bp, Probe sequence
gactgcaaactttattgcttggttg

SEQ ID NO: 142195 - DNA, 25 bp, Probe sequence
gagggcattcgcagttataggaatc

SEQ ID NO: 142196 - DNA, 25 bp, Probe sequence
gatgctattgcagctatattctatg

SEQ ID NO: 142197 - DNA, 25 bp, Probe sequence
gatgctacaccaattgtgaaatcgc

SEQ ID NO: 142198 - DNA, 25 bp, Probe sequence
gatacattcttcgttatttcaggtt

SEQ ID NO: 142199 - DNA, 25 bp, Probe sequence
gattcatttcatcactggagataat

SEQ ID NO: 142200 - DNA, 25 bp, Probe sequence
gtatcgttgatttctttaggactta

SEQ ID NO: 142201 - DNA, 25 bp, Probe sequence
gtaaagcgctgactgatttgattgt

SEQ ID NO: 142202 - DNA, 25 bp, Probe sequence
gggacagatacacgactgcaaactt

SEQ ID NO: 142203 - DNA, 25 bp, Probe sequence
ggatatctggttttgcggttctaat

SEQ ID NO: 142204 - DNA, 25 bp, Probe sequence
ggacggcaactcgttgatgctacac

SEQ ID NO: 142205 - DNA, 25 bp, Probe sequence
tggcctccgtttgctttgaaaaaag

SEQ ID NO: 142206 - DNA, 25 bp, Probe sequence
ggcattatcctatcattgtttttgt

SEQ ID NO: 142207 - DNA, 25 bp, Probe sequence
ggctgaaatttcgtatcgctttatt

SEQ ID NO: 142208 - DNA, 25 bp, Probe sequence
tggttatcacgttcttattacatag

SEQ ID NO: 142209 - DNA, 25 bp, Probe sequence
tgggggctttttaggagtagataca

SEQ ID NO: 142210 - DNA, 25 bp, Probe sequence
tgaaacgactcattccggcagtgtt

SEQ ID NO: 142211 - DNA, 25 bp, Probe sequence
tagagttttggaagcgacgattgaa

SEQ ID NO: 142212 - DNA, 25 bp, Probe sequence
tataaagcttctgcaggtcatccgg

SEQ ID NO: 142213 - DNA, 25 bp, Probe sequence
ttttcccattggttatcacgttctt

SEQ ID NO: 142214 - DNA, 25 bp, Probe sequence
attgttggtactataggtttgatta

SEQ ID NO: 142215 - DNA, 25 bp, Probe sequence
atatcgatggtatttatttaggaac

SEQ ID NO: 142216 - DNA, 25 bp, Probe sequence
ataggtcttataaggaagagctaat

SEQ ID NO: 142217 - DNA, 25 bp, Probe sequence
atatgtctgcacttaaaaaaatgtt

SEQ ID NO: 142218 - DNA, 25 bp, Probe sequence
atcatcaaaatattgttggtactat

SEQ ID NO: 142219 - DNA, 25 bp, Probe sequence
aggaagagctaatcgagtttatttt

SEQ ID NO: 142220 - DNA, 25 bp, Probe sequence
agggcaattttggcttgcaataaac

SEQ ID NO: 142221 - DNA, 25 bp, Probe sequence
aaatattgttggtactataggtttg

SEQ ID NO: 142222 - DNA, 25 bp, Probe sequence
aagagctaatcgagtttattttatc

SEQ ID NO: 142223 - DNA, 25 bp, Probe sequence
caacctgatttggagaacatcgaac

SEQ ID NO: 142224 - DNA, 25 bp, Probe sequence
cttccgtgaaattaagcgaggagat

SEQ ID NO: 142225 - DNA, 25 bp, Probe sequence
ccaagtagttttcctaaattagatg

SEQ ID NO: 142226 - DNA, 25 bp, Probe sequence
gcgaggagatttaccaagtagtttt

SEQ ID NO: 142227 - DNA, 25 bp, Probe sequence
gaacatcgaacataactatttgaat

SEQ ID NO: 142228 - DNA, 25 bp, Probe sequence
gactagataataatatgtctgcact

SEQ ID NO: 142229 - DNA, 25 bp, Probe sequence
gagatgatcaacctgatttggagaa

SEQ ID NO: 142230 - DNA, 25 bp, Probe sequence
gatggtatttatttaggaacaattg

SEQ ID NO: 142231 - DNA, 25 bp, Probe sequence
gatcaacctgatttggagaacatcg

SEQ ID NO: 142232 - DNA, 25 bp, Probe sequence
gataataatatgtctgcacttaaaa

SEQ ID NO: 142233 - DNA, 25 bp, Probe sequence
gataaatttattagtgcacagtatt

SEQ ID NO: 142234 - DNA, 25 bp, Probe sequence
gatagagatgatcaacctgatttgg

SEQ ID NO: 142235 - DNA, 25 bp, Probe sequence
gtagttttcctaaattagatgtaga

SEQ ID NO: 142236 - DNA, 25 bp, Probe sequence
gtctgcacttaaaaaaatgtttgtt

SEQ ID NO: 142237 - DNA, 25 bp, Probe sequence
acctgatttggagaacatcgaacat

SEQ ID NO: 142238 - DNA, 25 bp, Probe sequence
gtgcacagtatttttattctaataa

SEQ ID NO: 142239 - DNA, 25 bp, Probe sequence
ggtactataggtttgattagactag

SEQ ID NO: 142240 - DNA, 25 bp, Probe sequence
ggcttgcaataaacaatcatcaaaa

SEQ ID NO: 142241 - DNA, 25 bp, Probe sequence
tggagaacatcgaacataactattt

SEQ ID NO: 142242 - DNA, 25 bp, Probe sequence
tggagggcaattttggcttgcaata

SEQ ID NO: 142243 - DNA, 25 bp, Probe sequence
tcgagtttattttatcgattcaaaa

SEQ ID NO: 142244 - DNA, 25 bp, Probe sequence
taagcgaggagatttaccaagtagt

SEQ ID NO: 142245 - DNA, 25 bp, Probe sequence
tagtgcacagtatttttattctaat

SEQ ID NO: 142246 - DNA, 25 bp, Probe sequence
tattagtgcacagtatttttattct

SEQ ID NO: 142247 - DNA, 25 bp, Probe sequence
tttggcttgcaataaacaatcatca

SEQ ID NO: 142248 - DNA, 25 bp, Probe sequence
atttctaggggctatctcttggttc

SEQ ID NO: 142249 - DNA, 25 bp, Probe sequence
attagcgtcatttataacttcaatt

SEQ ID NO: 142250 - DNA, 25 bp, Probe sequence
attattttagcaattttatcgacga

SEQ ID NO: 142251 - DNA, 25 bp, Probe sequence
atttcttctgctattttacaatttc

SEQ ID NO: 142252 - DNA, 25 bp, Probe sequence
atttacaccttttacattagcgtca

SEQ ID NO: 142253 - DNA, 25 bp, Probe sequence
atctcttggttctttttatcattga

SEQ ID NO: 142254 - DNA, 25 bp, Probe sequence
atcgacgattgtttgcttgttctta

SEQ ID NO: 142255 - DNA, 25 bp, Probe sequence
atgagttttagaatttcttctgcta

SEQ ID NO: 142256 - DNA, 25 bp, Probe sequence
acaatttacaccttttacattagcg

SEQ ID NO: 142257 - DNA, 25 bp, Probe sequence
caatttctaggggctatctcttggt

SEQ ID NO: 142258 - DNA, 25 bp, Probe sequence
cacacaatttacaccttttacatta

SEQ ID NO: 142259 - DNA, 25 bp, Probe sequence
cttggttctttttatcattgatatt

SEQ ID NO: 142260 - DNA, 25 bp, Probe sequence
cttctgctattttacaatttctagg

SEQ ID NO: 142261 - DNA, 25 bp, Probe sequence
ctatctcttggttctttttatcatt

SEQ ID NO: 142262 - DNA, 25 bp, Probe sequence
ctcacacaatttacaccttttacat

SEQ ID NO: 142263 - DNA, 25 bp, Probe sequence
ctcttggttctttttatcattgata

SEQ ID NO: 142264 - DNA, 25 bp, Probe sequence
cgctcacacaatttacaccttttac

SEQ ID NO: 142265 - DNA, 25 bp, Probe sequence
gcgtcatttataacttcaattattt

SEQ ID NO: 142266 - DNA, 25 bp, Probe sequence
gctcacacaatttacaccttttaca

SEQ ID NO: 142267 - DNA, 25 bp, Probe sequence
gctatctcttggttctttttatcat

SEQ ID NO: 142268 - DNA, 25 bp, Probe sequence
ggctatctcttggttctttttatca

SEQ ID NO: 142269 - DNA, 25 bp, Probe sequence
tgatattatcgctcacacaatttac

SEQ ID NO: 142270 - DNA, 25 bp, Probe sequence
tcgctcacacaatttacacctttta

SEQ ID NO: 142271 - DNA, 25 bp, Probe sequence
tacaatttctaggggctatctcttg

SEQ ID NO: 142272 - DNA, 25 bp, Probe sequence
tacattagcgtcatttataacttca

SEQ ID NO: 142273 - DNA, 25 bp, Probe sequence
tagaatttcttctgctattttacaa

SEQ ID NO: 142274 - DNA, 25 bp, Probe sequence
tatcgacgattgtttgcttgttctt

SEQ ID NO: 142275 - DNA, 25 bp, Probe sequence
tattttacaatttctaggggctatc

SEQ ID NO: 142276 - DNA, 25 bp, Probe sequence
tttctaggggctatctcttggttct

SEQ ID NO: 142277 - DNA, 25 bp, Probe sequence
tattatcgctcacacaatttacacc

SEQ ID NO: 142278 - DNA, 25 bp, Probe sequence
ttatcgctcacacaatttacacctt

SEQ ID NO: 142279 - DNA, 25 bp, Probe sequence
tttatcgacgattgtttgcttgttc

SEQ ID NO: 142280 - DNA, 25 bp, Probe sequence
ttatcattgatattatcgctcacac

SEQ ID NO: 142281 - DNA, 25 bp, Probe sequence
ttcttctgctattttacaatttcta

SEQ ID NO: 142282 - DNA, 25 bp, Probe sequence
atcgctcgtgaatcaaatggtcaag

SEQ ID NO: 142283 - DNA, 25 bp, Probe sequence
atgcagctccaatcaaagatggtgc

SEQ ID NO: 142284 - DNA, 25 bp, Probe sequence
atggtgcatatgacatccactttgt

SEQ ID NO: 142285 - DNA, 25 bp, Probe sequence
agtaagctacaatgcacaatcaagt

SEQ ID NO: 142286 - DNA, 25 bp, Probe sequence
agatcaattaaatgcagctccaatc

SEQ ID NO: 142287 - DNA, 25 bp, Probe sequence
agactacactacttcatacaaccaa

SEQ ID NO: 142288 - DNA, 25 bp, Probe sequence
agcagtggcattaggtgtaacaggt

SEQ ID NO: 142289 - DNA, 25 bp, Probe sequence
aaatcatggctcaacgtactggtgt

SEQ ID NO: 142290 - DNA, 25 bp, Probe sequence
aaatgcttacaacccatcaggtgct

SEQ ID NO: 142291 - DNA, 25 bp, Probe sequence
aatggtcaaactgctggtttctcaa

SEQ ID NO: 142292 - DNA, 25 bp, Probe sequence
caaggtttaggtgcttggggattct

SEQ ID NO: 142293 - DNA, 25 bp, Probe sequence
cagctccaacttaccataactacag

SEQ ID NO: 142294 - DNA, 25 bp, Probe sequence
catcaggtgcttcaggtttattcca

SEQ ID NO: 142295 - DNA, 25 bp, Probe sequence
gctgcaatcatcgctcgtgaatcaa

SEQ ID NO: 142296 - DNA, 25 bp, Probe sequence
gcttctacatgggctgcaatcatcg

SEQ ID NO: 142297 - DNA, 25 bp, Probe sequence
gcaggtacaggacatcaagcacacg

SEQ ID NO: 142298 - DNA, 25 bp, Probe sequence
gcaggtgcagactacactacttcat

SEQ ID NO: 142299 - DNA, 25 bp, Probe sequence
gcagctgttaaagcatacaaagcac

SEQ ID NO: 142300 - DNA, 25 bp, Probe sequence
gcacttcaactacttcaagttcagt

SEQ ID NO: 142301 - DNA, 25 bp, Probe sequence
gcaatggtaatactgcaggtgctac

SEQ ID NO: 142302 - DNA, 25 bp, Probe sequence
gaagctgtttcagctccaacttacc

SEQ ID NO: 142303 - DNA, 25 bp, Probe sequence
gacaattatggcatcatcattagca

SEQ ID NO: 142304 - DNA, 25 bp, Probe sequence
gacatcaagcacacgctgctgaagt

SEQ ID NO: 142305 - DNA, 25 bp, Probe sequence
gaccaacaaatcaacgcagctgtta

SEQ ID NO: 142306 - DNA, 25 bp, Probe sequence
gatcaagcacacttagttgacttag

SEQ ID NO: 142307 - DNA, 25 bp, Probe sequence
gtttattccaaactatgccaggttg

SEQ ID NO: 142308 - DNA, 25 bp, Probe sequence
gtaacaggttacgcagcaggtacag

SEQ ID NO: 142309 - DNA, 25 bp, Probe sequence
gtaactcaaacgttgaagctgtttc

SEQ ID NO: 142310 - DNA, 25 bp, Probe sequence
ggtgctactggttcatcagcagctc

SEQ ID NO: 142311 - DNA, 25 bp, Probe sequence
ggtactacatggtcatggagctatg

SEQ ID NO: 142312 - DNA, 25 bp, Probe sequence
ggtttctcaaacgttgcaggtgcag

SEQ ID NO: 142313 - DNA, 25 bp, Probe sequence
ggagctatgaagcagctaatggtca

SEQ ID NO: 142314 - DNA, 25 bp, Probe sequence
tcagcagctcaaatcatggctcaac

SEQ ID NO: 142315 - DNA, 25 bp, Probe sequence
taactacagcacttcaactacttca

SEQ ID NO: 142316 - DNA, 25 bp, Probe sequence
agtgcagcatatgtaggaagcggtg

SEQ ID NO: 142317 - DNA, 25 bp, Probe sequence
agcttggcttgcagatatcatttat

SEQ ID NO: 142318 - DNA, 25 bp, Probe sequence
acagtacctgctttgattggtgcat

SEQ ID NO: 142319 - DNA, 25 bp, Probe sequence
acagttgttggcggtatttcaggtg

SEQ ID NO: 142320 - DNA, 25 bp, Probe sequence
cactatcaactgtggccattgcctt

SEQ ID NO: 142321 - DNA, 25 bp, Probe sequence
caggtgtcgccataggtattgttgc

SEQ ID NO: 142322 - DNA, 25 bp, Probe sequence
gccgttatccgtcttctttggaggc

SEQ ID NO: 142323 - DNA, 25 bp, Probe sequence
ccatttgtaacagcttggcttgcag

SEQ ID NO: 142324 - DNA, 25 bp, Probe sequence
gcaattcaatttacagtacctgctt

SEQ ID NO: 142325 - DNA, 25 bp, Probe sequence
gaaaatgattacaacagccatcggt

SEQ ID NO: 142326 - DNA, 25 bp, Probe sequence
gaaatatccaattcttatgttacca

SEQ ID NO: 142327 - DNA, 25 bp, Probe sequence
gacctatcgccattagcaattgctg

SEQ ID NO: 142328 - DNA, 25 bp, Probe sequence
gatttcaatggtatttagtcttatt

SEQ ID NO: 142329 - DNA, 25 bp, Probe sequence
gattctgcttggttgagtgtcttac

SEQ ID NO: 142330 - DNA, 25 bp, Probe sequence
gattggtgcattggttgccatgaaa

SEQ ID NO: 142331 - DNA, 25 bp, Probe sequence
gtttagttcctaatgcgatacttgg

SEQ ID NO: 142332 - DNA, 25 bp, Probe sequence
gtcttattattatttcgccactatc

SEQ ID NO: 142333 - DNA, 25 bp, Probe sequence
ggtgcttggatgattacgggtattg

SEQ ID NO: 142334 - DNA, 25 bp, Probe sequence
ggtatcagcattagtaggtattcat

SEQ ID NO: 142335 - DNA, 25 bp, Probe sequence
ggattatcatccgatttttaaaacg

SEQ ID NO: 142336 - DNA, 25 bp, Probe sequence
ggaagcggtgcagcgcagtttaaaa

SEQ ID NO: 142337 - DNA, 25 bp, Probe sequence
ggccattgcctttgcgataggtatt

SEQ ID NO: 142338 - DNA, 25 bp, Probe sequence
tggcggtatttcaggtgcaattggt

SEQ ID NO: 142339 - DNA, 25 bp, Probe sequence
tggtaggaccgattaatgcatttaa

SEQ ID NO: 142340 - DNA, 25 bp, Probe sequence
tgattacagcagcgattgcagtgtt

SEQ ID NO: 142341 - DNA, 25 bp, Probe sequence
tgccatgaaatttgacctatcgcca

SEQ ID NO: 142342 - DNA, 25 bp, Probe sequence
tcagctggatttggttttataggaa

SEQ ID NO: 142343 - DNA, 25 bp, Probe sequence
taattgtagtagcgttctttgttgt

SEQ ID NO: 142344 - DNA, 25 bp, Probe sequence
tatccgtcttctttggaggcgttaa

SEQ ID NO: 142345 - DNA, 25 bp, Probe sequence
tatggaggttgattctgcttggttg

SEQ ID NO: 142346 - DNA, 25 bp, Probe sequence
tattgttgcgggtttagttcctaat

SEQ ID NO: 142347 - DNA, 25 bp, Probe sequence
ttagagttttatcaggtgtcgccat

SEQ ID NO: 142348 - DNA, 25 bp, Probe sequence
ttaggcgttgtcgttgcaattcaat

SEQ ID NO: 142349 - DNA, 25 bp, Probe sequence
ttgattgtattcccaacagttgttg

SEQ ID NO: 142350 - DNA, 25 bp, Probe sequence
atgattcaatcaatgtggtttaatt

SEQ ID NO: 142351 - DNA, 25 bp, Probe sequence
atgtggtttaatttgcatgtgcaag

SEQ ID NO: 142352 - DNA, 25 bp, Probe sequence
caagaaccaacagtaagccaagggt

SEQ ID NO: 142353 - DNA, 25 bp, Probe sequence
agatttagaaaagagcgcacagttt

SEQ ID NO: 142354 - DNA, 25 bp, Probe sequence
aaatgaagaagttgaccagttggtg

SEQ ID NO: 142355 - DNA, 25 bp, Probe sequence
aaagatcttgatggacaccatttta

SEQ ID NO: 142356 - DNA, 25 bp, Probe sequence
aaaagagcgcacagttttataaagc

SEQ ID NO: 142357 - DNA, 25 bp, Probe sequence
aaaatgtaagtcagcaaagccttaa

SEQ ID NO: 142358 - DNA, 25 bp, Probe sequence
aagagcgcacagttttataaagcgt

SEQ ID NO: 142359 - DNA, 25 bp, Probe sequence
aatgaagaagttgaccagttggtga

SEQ ID NO: 142360 - DNA, 25 bp, Probe sequence
aatagaaacccacaaatgttagata

SEQ ID NO: 142361 - DNA, 25 bp, Probe sequence
caatcaatgtggtttaatttgcatg

SEQ ID NO: 142362 - DNA, 25 bp, Probe sequence
caatgtggtttaatttgcatgtgca

SEQ ID NO: 142363 - DNA, 25 bp, Probe sequence
caacagtaagccaagggttttatgg

SEQ ID NO: 142364 - DNA, 25 bp, Probe sequence
ccaacagtaagccaagggttttatg

SEQ ID NO: 142365 - DNA, 25 bp, Probe sequence
gcacagttttataaagcgttaggat

SEQ ID NO: 142366 - DNA, 25 bp, Probe sequence
gaataaagtgaaagaagcgggtggc

SEQ ID NO: 142367 - DNA, 25 bp, Probe sequence
gcaagatttagaaaagagcgcacag

SEQ ID NO: 142368 - DNA, 25 bp, Probe sequence
gcaatgttcaaagatcttgatggac

SEQ ID NO: 142369 - DNA, 25 bp, Probe sequence
gaagaagttgaccagttggtgaata

SEQ ID NO: 142370 - DNA, 25 bp, Probe sequence
gaaacccacaaatgttagataaaat

SEQ ID NO: 142371 - DNA, 25 bp, Probe sequence
gagcgcacagttttataaagcgtta

SEQ ID NO: 142372 - DNA, 25 bp, Probe sequence
gatcttgatggacaccattttaatt

SEQ ID NO: 142373 - DNA, 25 bp, Probe sequence
gttcaagaaccaacagtaagccaag

SEQ ID NO: 142374 - DNA, 25 bp, Probe sequence
gttcaaagatcttgatggacaccat

SEQ ID NO: 142375 - DNA, 25 bp, Probe sequence
gtcgttcaagaaccaacagtaagcc

SEQ ID NO: 142376 - DNA, 25 bp, Probe sequence
tgaccagttggtgaataaagtgaaa

SEQ ID NO: 142377 - DNA, 25 bp, Probe sequence
tgaaccaaatgaagtgatgatttct

SEQ ID NO: 142378 - DNA, 25 bp, Probe sequence
tcaagaaccaacagtaagccaaggg

SEQ ID NO: 142379 - DNA, 25 bp, Probe sequence
tcaaataggtcaaacaaccgtaatt

SEQ ID NO: 142380 - DNA, 25 bp, Probe sequence
tcaaagatcttgatggacaccattt

SEQ ID NO: 142381 - DNA, 25 bp, Probe sequence
ttcaaaatgtaagtcagcaaagcct

SEQ ID NO: 142382 - DNA, 25 bp, Probe sequence
ttgatggacaccattttaatttttt

SEQ ID NO: 142383 - DNA, 25 bp, Probe sequence
ttgcatgtgcaagatttagaaaaga

SEQ ID NO: 142384 - DNA, 25 bp, Probe sequence
attgctaaagtcgaagatgaacgta

SEQ ID NO: 142385 - DNA, 25 bp, Probe sequence
attaccagaatttattaatccgaat

SEQ ID NO: 142386 - DNA, 25 bp, Probe sequence
attttagtaataggcgcaacaggga

SEQ ID NO: 142387 - DNA, 25 bp, Probe sequence
atgatttcttctattgatatagcta

SEQ ID NO: 142388 - DNA, 25 bp, Probe sequence
aggacatccgcatttatcaatcgtt

SEQ ID NO: 142389 - DNA, 25 bp, Probe sequence
agtagactttgaattaatggctgaa

SEQ ID NO: 142390 - DNA, 25 bp, Probe sequence
agattatcattaagtgattggctta

SEQ ID NO: 142391 - DNA, 25 bp, Probe sequence
agctttacgcatcaatcaatagaga

SEQ ID NO: 142392 - DNA, 25 bp, Probe sequence
acatccgcatttatcaatcgttgaa

SEQ ID NO: 142393 - DNA, 25 bp, Probe sequence
acatccacaaagctttacgcatcaa

SEQ ID NO: 142394 - DNA, 25 bp, Probe sequence
acaaagctttacgcatcaatcaata

SEQ ID NO: 142395 - DNA, 25 bp, Probe sequence
aaaccatcattctttatggataatt

SEQ ID NO: 142396 - DNA, 25 bp, Probe sequence
aaaattcacaatgatttcttctatt

SEQ ID NO: 142397 - DNA, 25 bp, Probe sequence
aacagttgttagaggatggatggta

SEQ ID NO: 142398 - DNA, 25 bp, Probe sequence
aactttcagacataggacatccgca

SEQ ID NO: 142399 - DNA, 25 bp, Probe sequence
aatcgttgaaggtgatctgagtgat

SEQ ID NO: 142400 - DNA, 25 bp, Probe sequence
cagttatcaaaccatcattctttat

SEQ ID NO: 142401 - DNA, 25 bp, Probe sequence
gcaacagttatcaaaccatcattct

SEQ ID NO: 142402 - DNA, 25 bp, Probe sequence
gaagttacattaagtgaagcagcaa

SEQ ID NO: 142403 - DNA, 25 bp, Probe sequence
gaagcagcaacaatttttagtgaag

SEQ ID NO: 142404 - DNA, 25 bp, Probe sequence
gagattggttccgatgaagttacat

SEQ ID NO: 142405 - DNA, 25 bp, Probe sequence
gatgaacgtattacattaccagaat

SEQ ID NO: 142406 - DNA, 25 bp, Probe sequence
gttagtttgcaatcagcgatgaaag

SEQ ID NO: 142407 - DNA, 25 bp, Probe sequence
gtattcagccaatcgttaaagatga

SEQ ID NO: 142408 - DNA, 25 bp, Probe sequence
gtaatgcagttgtaaaacagttgtt

SEQ ID NO: 142409 - DNA, 25 bp, Probe sequence
ggatggtatgtaagtgcattaacta

SEQ ID NO: 142410 - DNA, 25 bp, Probe sequence
ggagaatttgttagtggtgttgcag

SEQ ID NO: 142411 - DNA, 25 bp, Probe sequence
ggaatctaatataaatgcaacagtt

SEQ ID NO: 142412 - DNA, 25 bp, Probe sequence
ggcgcaacagggaagcaaggtaatg

SEQ ID NO: 142413 - DNA, 25 bp, Probe sequence
ggcccacactttgaagtactagcaa

SEQ ID NO: 142414 - DNA, 25 bp, Probe sequence
tgcgggaggggttaatcgaaatcga

SEQ ID NO: 142415 - DNA, 25 bp, Probe sequence
tgatatagctaaaattgcatcgtat

SEQ ID NO: 142416 - DNA, 25 bp, Probe sequence
tatacagtattcagccaatcgttaa

SEQ ID NO: 142417 - DNA, 25 bp, Probe sequence
ttgttagtggtgttgcagaaaagca

SEQ ID NO: 142418 - DNA, 25 bp, Probe sequence
atttagtatgggatgtcagagatgt

SEQ ID NO: 142419 - DNA, 25 bp, Probe sequence
atctaccttatcggttcaaatgatt

SEQ ID NO: 142420 - DNA, 25 bp, Probe sequence
agcgccactaggcatttttagtcat

SEQ ID NO: 142421 - DNA, 25 bp, Probe sequence
acaccagaaccatatacgtatttaa

SEQ ID NO: 142422 - DNA, 25 bp, Probe sequence
acaacgatttattcatttagtatgg

SEQ ID NO: 142423 - DNA, 25 bp, Probe sequence
acaaacaccagaaccatatacgtat

SEQ ID NO: 142424 - DNA, 25 bp, Probe sequence
aaacaccagaaccatatacgtattt

SEQ ID NO: 142425 - DNA, 25 bp, Probe sequence
aacaccagaaccatatacgtattta

SEQ ID NO: 142426 - DNA, 25 bp, Probe sequence
aacgatttattcatttagtatggga

SEQ ID NO: 142427 - DNA, 25 bp, Probe sequence
aattacaacgatttattcatttagt

SEQ ID NO: 142428 - DNA, 25 bp, Probe sequence
caaacaccagaaccatatacgtatt

SEQ ID NO: 142429 - DNA, 25 bp, Probe sequence
caccagaaccatatacgtatttaaa

SEQ ID NO: 142430 - DNA, 25 bp, Probe sequence
catcaattacaacgatttattcatt

SEQ ID NO: 142431 - DNA, 25 bp, Probe sequence
catttttagtcatcaattacaacga

SEQ ID NO: 142432 - DNA, 25 bp, Probe sequence
ctaggcatttttagtcatcaattac

SEQ ID NO: 142433 - DNA, 25 bp, Probe sequence
ctaccttatcggttcaaatgattgc

SEQ ID NO: 142434 - DNA, 25 bp, Probe sequence
cgccactaggcatttttagtcatca

SEQ ID NO: 142435 - DNA, 25 bp, Probe sequence
gcgccactaggcatttttagtcatc

SEQ ID NO: 142436 - DNA, 25 bp, Probe sequence
ccagaaccatatacgtatttaaaag

SEQ ID NO: 142437 - DNA, 25 bp, Probe sequence
ccactaggcatttttagtcatcaat

SEQ ID NO: 142438 - DNA, 25 bp, Probe sequence
gccactaggcatttttagtcatcaa

SEQ ID NO: 142439 - DNA, 25 bp, Probe sequence
gcatttttagtcatcaattacaacg

SEQ ID NO: 142440 - DNA, 25 bp, Probe sequence
gaaccatatacgtatttaaaaggtg

SEQ ID NO: 142441 - DNA, 25 bp, Probe sequence
gacaaacaccagaaccatatacgta

SEQ ID NO: 142442 - DNA, 25 bp, Probe sequence
gatttattcatttagtatgggatgt

SEQ ID NO: 142443 - DNA, 25 bp, Probe sequence
gtatgggatgtcagagatgtaataa

SEQ ID NO: 142444 - DNA, 25 bp, Probe sequence
gtcatcaattacaacgatttattca

SEQ ID NO: 142445 - DNA, 25 bp, Probe sequence
ggacaaacaccagaaccatatacgt

SEQ ID NO: 142446 - DNA, 25 bp, Probe sequence
ggcatttttagtcatcaattacaac

SEQ ID NO: 142447 - DNA, 25 bp, Probe sequence
tcaattacaacgatttattcattta

SEQ ID NO: 142448 - DNA, 25 bp, Probe sequence
tagtatgggatgtcagagatgtaat

SEQ ID NO: 142449 - DNA, 25 bp, Probe sequence
taggcatttttagtcatcaattaca

SEQ ID NO: 142450 - DNA, 25 bp, Probe sequence
tattcatttagtatgggatgtcaga

SEQ ID NO: 142451 - DNA, 25 bp, Probe sequence
tttagtcatcaattacaacgattta

SEQ ID NO: 142452 - DNA, 25 bp, Probe sequence
atttgctcgctgaatcattaaagga

SEQ ID NO: 142453 - DNA, 25 bp, Probe sequence
atattgttctgtcttatttgttaat

SEQ ID NO: 142454 - DNA, 25 bp, Probe sequence
aggcttattttatgagcaattagca

SEQ ID NO: 142455 - DNA, 25 bp, Probe sequence
agggtttatgacatttgaagacacc

SEQ ID NO: 142456 - DNA, 25 bp, Probe sequence
agtgaactgacagaggggtgtatct

SEQ ID NO: 142457 - DNA, 25 bp, Probe sequence
agagcaaccagacattgtatttatt

SEQ ID NO: 142458 - DNA, 25 bp, Probe sequence
agaacagttacatcaattatattta

SEQ ID NO: 142459 - DNA, 25 bp, Probe sequence
aaatcatttgctcgctgaatcatta

SEQ ID NO: 142460 - DNA, 25 bp, Probe sequence
aaatgacagcaacttctgacaataa

SEQ ID NO: 142461 - DNA, 25 bp, Probe sequence
aaatgagtgttgatggtgccttagt

SEQ ID NO: 142462 - DNA, 25 bp, Probe sequence
aaagacatccaaggcttattttatg

SEQ ID NO: 142463 - DNA, 25 bp, Probe sequence
aagacatacctttaagtgaactgac

SEQ ID NO: 142464 - DNA, 25 bp, Probe sequence
aatcatcaatttgtgcaatcaccag

SEQ ID NO: 142465 - DNA, 25 bp, Probe sequence
aattagcatattgttctgtcttatt

SEQ ID NO: 142466 - DNA, 25 bp, Probe sequence
cacatacgtatctcattcaatttac

SEQ ID NO: 142467 - DNA, 25 bp, Probe sequence
ctgtcttagatgcttgtttaacgcc

SEQ ID NO: 142468 - DNA, 25 bp, Probe sequence
cgtatctcattcaatttacacaagg

SEQ ID NO: 142469 - DNA, 25 bp, Probe sequence
gccagaatatttggtgcttatcgga

SEQ ID NO: 142470 - DNA, 25 bp, Probe sequence
gcgtcactttgccaatatcagttag

SEQ ID NO: 142471 - DNA, 25 bp, Probe sequence
gcagcgtcactttgccaatatcagt

SEQ ID NO: 142472 - DNA, 25 bp, Probe sequence
gaattaacacctgtagcattttcaa

SEQ ID NO: 142473 - DNA, 25 bp, Probe sequence
gaagttattaacccagaggccgata

SEQ ID NO: 142474 - DNA, 25 bp, Probe sequence
gaagactatcaatgtttggaacagt

SEQ ID NO: 142475 - DNA, 25 bp, Probe sequence
gactgtcttaaatcatttgctcgct

SEQ ID NO: 142476 - DNA, 25 bp, Probe sequence
gatggtgccttagtatctgaagaca

SEQ ID NO: 142477 - DNA, 25 bp, Probe sequence
gtctctgtcttagatgcttgtttaa

SEQ ID NO: 142478 - DNA, 25 bp, Probe sequence
ggtatgcatggcagcgtcactttgc

SEQ ID NO: 142479 - DNA, 25 bp, Probe sequence
tggtgcttatcggaaagggtatttc

SEQ ID NO: 142480 - DNA, 25 bp, Probe sequence
tgaaagcagatgtatcagaacagtt

SEQ ID NO: 142481 - DNA, 25 bp, Probe sequence
taggtggcggtaaaacgactgtctt

SEQ ID NO: 142482 - DNA, 25 bp, Probe sequence
tataaaacgtttagcatgccttccg

SEQ ID NO: 142483 - DNA, 25 bp, Probe sequence
ttagctccgtttacaacaattacac

SEQ ID NO: 142484 - DNA, 25 bp, Probe sequence
ttaacccagaggccgatatacaagt

SEQ ID NO: 142485 - DNA, 25 bp, Probe sequence
ttgaatgtagtgggattgcagaacc

SEQ ID NO: 142486 - DNA, 25 bp, Probe sequence
atcacttggaacatattcgctcgta

SEQ ID NO: 142487 - DNA, 25 bp, Probe sequence
atgattcgaaaagacggcatgctct

SEQ ID NO: 142488 - DNA, 25 bp, Probe sequence
agtgtagtttcttcgcctatagcga

SEQ ID NO: 142489 - DNA, 25 bp, Probe sequence
agtcatggctatttatgccgtactt

SEQ ID NO: 142490 - DNA, 25 bp, Probe sequence
agtacttttaggtggcatcttacat

SEQ ID NO: 142491 - DNA, 25 bp, Probe sequence
agctttggtagttcttgtagttatc

SEQ ID NO: 142492 - DNA, 25 bp, Probe sequence
acctatttttatcacaatctgtctt

SEQ ID NO: 142493 - DNA, 25 bp, Probe sequence
acatttaggtggtcagtcagcacta

SEQ ID NO: 142494 - DNA, 25 bp, Probe sequence
aactcaaacaacattgctcaatcac

SEQ ID NO: 142495 - DNA, 25 bp, Probe sequence
aagtgcgacatttttagcctggttg

SEQ ID NO: 142496 - DNA, 25 bp, Probe sequence
aaggtaatgatatcgtgccactatt

SEQ ID NO: 142497 - DNA, 25 bp, Probe sequence
aatgtttatcgttcaagcgctacct

SEQ ID NO: 142498 - DNA, 25 bp, Probe sequence
aatgccatacctgcacgaagacaca

SEQ ID NO: 142499 - DNA, 25 bp, Probe sequence
caagcgctacctatttttatcacaa

SEQ ID NO: 142500 - DNA, 25 bp, Probe sequence
cacaagcagcacaccaatgccatac

SEQ ID NO: 142501 - DNA, 25 bp, Probe sequence
catattcgctcgtatgggcattgcc

SEQ ID NO: 142502 - DNA, 25 bp, Probe sequence
gctcaatcacgatatattacagcat

SEQ ID NO: 142503 - DNA, 25 bp, Probe sequence
gcagcagctatttcacaagcagcac

SEQ ID NO: 142504 - DNA, 25 bp, Probe sequence
gaattgtcaccagggattttatttt

SEQ ID NO: 142505 - DNA, 25 bp, Probe sequence
gaacaattgacactatttcaacatg

SEQ ID NO: 142506 - DNA, 25 bp, Probe sequence
gacagcaacacagttactactactt

SEQ ID NO: 142507 - DNA, 25 bp, Probe sequence
gacatcattgtctttagttattggt

SEQ ID NO: 142508 - DNA, 25 bp, Probe sequence
gacggcatgctcttgtttaatttgc

SEQ ID NO: 142509 - DNA, 25 bp, Probe sequence
gacgatgcttttgaaacatttaggt

SEQ ID NO: 142510 - DNA, 25 bp, Probe sequence
gattatggtgtgctatcacttggaa

SEQ ID NO: 142511 - DNA, 25 bp, Probe sequence
gttattggtgtaggcatcattgtta

SEQ ID NO: 142512 - DNA, 25 bp, Probe sequence
gtattttatcactaacgccaatttt

SEQ ID NO: 142513 - DNA, 25 bp, Probe sequence
gtgctcggtcacaatgacgatgctt

SEQ ID NO: 142514 - DNA, 25 bp, Probe sequence
ggtgcgacattatctatttttagtg

SEQ ID NO: 142515 - DNA, 25 bp, Probe sequence
ggtatcgcttatcaattttcagatt

SEQ ID NO: 142516 - DNA, 25 bp, Probe sequence
ggatgtaatgcagcagctatttcac

SEQ ID NO: 142517 - DNA, 25 bp, Probe sequence
tctgtcttattgttagtattttatc

SEQ ID NO: 142518 - DNA, 25 bp, Probe sequence
tagcctggttgttgatatttttaat

SEQ ID NO: 142519 - DNA, 25 bp, Probe sequence
tatttacacctatattatcgttatt

SEQ ID NO: 142520 - DNA, 25 bp, Probe sequence
atttccatggatacttcaccagcat

SEQ ID NO: 142521 - DNA, 25 bp, Probe sequence
atatctttgtcgcaacaggtgatta

SEQ ID NO: 142522 - DNA, 25 bp, Probe sequence
atcgcactttatactagcacaaccg

SEQ ID NO: 142523 - DNA, 25 bp, Probe sequence
atggacagtatcatatcagttttga

SEQ ID NO: 142524 - DNA, 25 bp, Probe sequence
agatttcggtataacagatgtcatt

SEQ ID NO: 142525 - DNA, 25 bp, Probe sequence
acgccatcatttacgtctaatggat

SEQ ID NO: 142526 - DNA, 25 bp, Probe sequence
acatgatgaatcgacacgttatccg

SEQ ID NO: 142527 - DNA, 25 bp, Probe sequence
acacgtcagcgactaggtaatgtca

SEQ ID NO: 142528 - DNA, 25 bp, Probe sequence
aaaatggctctgacatcgcacttta

SEQ ID NO: 142529 - DNA, 25 bp, Probe sequence
aacacagcgggaaggcttaccagct

SEQ ID NO: 142530 - DNA, 25 bp, Probe sequence
aagtggctattatcggtgccggtgc

SEQ ID NO: 142531 - DNA, 25 bp, Probe sequence
aatgatccggatgctgatcctagtg

SEQ ID NO: 142532 - DNA, 25 bp, Probe sequence
ctagcacaaccggtttaaatgatcc

SEQ ID NO: 142533 - DNA, 25 bp, Probe sequence
gcctgatatgaatgcaatttccatg

SEQ ID NO: 142534 - DNA, 25 bp, Probe sequence
gcgggaaggcttaccagctaaacaa

SEQ ID NO: 142535 - DNA, 25 bp, Probe sequence
gctgcaggtataggtatggccatta

SEQ ID NO: 142536 - DNA, 25 bp, Probe sequence
gaatatttacaagtggttgccaacc

SEQ ID NO: 142537 - DNA, 25 bp, Probe sequence
gaaagtggctttgatgctgcatatc

SEQ ID NO: 142538 - DNA, 25 bp, Probe sequence
gacacgttatccgaatatttttatg

SEQ ID NO: 142539 - DNA, 25 bp, Probe sequence
gatcctagtgttagattgtcacctt

SEQ ID NO: 142540 - DNA, 25 bp, Probe sequence
gattataatttccctaaaaagccat

SEQ ID NO: 142541 - DNA, 25 bp, Probe sequence
gattgtcaccttatacacgtcagcg

SEQ ID NO: 142542 - DNA, 25 bp, Probe sequence
gttgtgaagtgtcatgcacatgtta

SEQ ID NO: 142543 - DNA, 25 bp, Probe sequence
gttgccaaccattacgagctgaata

SEQ ID NO: 142544 - DNA, 25 bp, Probe sequence
gtctaatggatttggcatgcctgat

SEQ ID NO: 142545 - DNA, 25 bp, Probe sequence
ggggcaatatgtggttatcggaggt

SEQ ID NO: 142546 - DNA, 25 bp, Probe sequence
ggtgccggtgctgcaggtataggta

SEQ ID NO: 142547 - DNA, 25 bp, Probe sequence
ggacattcatttaaacattggccga

SEQ ID NO: 142548 - DNA, 25 bp, Probe sequence
tggccattaccttaaaagatttcgg

SEQ ID NO: 142549 - DNA, 25 bp, Probe sequence
tgatgctgcatatcaacttgcaaaa

SEQ ID NO: 142550 - DNA, 25 bp, Probe sequence
taatgccaaattatgctatatctat

SEQ ID NO: 142551 - DNA, 25 bp, Probe sequence
tagcaactggctttgatgcaacaaa

SEQ ID NO: 142552 - DNA, 25 bp, Probe sequence
tatcacgcggattatatctttgtcg

SEQ ID NO: 142553 - DNA, 25 bp, Probe sequence
tatacgattgcaacgacaacagaga

SEQ ID NO: 142554 - DNA, 25 bp, Probe sequence
attccaacgaagcccataacggacg

SEQ ID NO: 142555 - DNA, 25 bp, Probe sequence
atcaaccaaaagggcacctgaatta

SEQ ID NO: 142556 - DNA, 25 bp, Probe sequence
ataattccaacgaagcccataacgg

SEQ ID NO: 142557 - DNA, 25 bp, Probe sequence
atcgaataattccaacgaagcccat

SEQ ID NO: 142558 - DNA, 25 bp, Probe sequence
atgtgtatttttctgatggtattaa

SEQ ID NO: 142559 - DNA, 25 bp, Probe sequence
aggctcatccgtaggttctaaagaa

SEQ ID NO: 142560 - DNA, 25 bp, Probe sequence
aggatctggcgatttaaaaggctca

SEQ ID NO: 142561 - DNA, 25 bp, Probe sequence
acgaagcccataacggacgagaagt

SEQ ID NO: 142562 - DNA, 25 bp, Probe sequence
aaatgtgtatccaaccaagaatctt

SEQ ID NO: 142563 - DNA, 25 bp, Probe sequence
aaatgtgtatttttctgatggtatt

SEQ ID NO: 142564 - DNA, 25 bp, Probe sequence
aaaggatacgttcataataaagata

SEQ ID NO: 142565 - DNA, 25 bp, Probe sequence
aaagggcacctgaattaaaattgag

SEQ ID NO: 142566 - DNA, 25 bp, Probe sequence
aaacattaaatgtgtatccaaccaa

SEQ ID NO: 142567 - DNA, 25 bp, Probe sequence
aacctactgaggaaatgaatcatga

SEQ ID NO: 142568 - DNA, 25 bp, Probe sequence
aataagtgagacaacagaagacaaa

SEQ ID NO: 142569 - DNA, 25 bp, Probe sequence
aattgagaggatctggcgatttaaa

SEQ ID NO: 142570 - DNA, 25 bp, Probe sequence
caacgaagcccataacggacgagaa

SEQ ID NO: 142571 - DNA, 25 bp, Probe sequence
catccgtaggttctaaagaactaga

SEQ ID NO: 142572 - DNA, 25 bp, Probe sequence
ccaacgaagcccataacggacgaga

SEQ ID NO: 142573 - DNA, 25 bp, Probe sequence
gctcatccgtaggttctaaagaact

SEQ ID NO: 142574 - DNA, 25 bp, Probe sequence
gaataattccaacgaagcccataac

SEQ ID NO: 142575 - DNA, 25 bp, Probe sequence
gaagcccataacggacgagaagtta

SEQ ID NO: 142576 - DNA, 25 bp, Probe sequence
gaacgtaatcgaataattccaacga

SEQ ID NO: 142577 - DNA, 25 bp, Probe sequence
gaacagctaagggatattttttaat

SEQ ID NO: 142578 - DNA, 25 bp, Probe sequence
gagaggatctggcgatttaaaaggc

SEQ ID NO: 142579 - DNA, 25 bp, Probe sequence
gatatatcaaccaaaagggcacctg

SEQ ID NO: 142580 - DNA, 25 bp, Probe sequence
gtatccaaccaagaatcttgatgat

SEQ ID NO: 142581 - DNA, 25 bp, Probe sequence
gtaacactagaacagctaagggata

SEQ ID NO: 142582 - DNA, 25 bp, Probe sequence
gggcacctgaattaaaattgagagg

SEQ ID NO: 142583 - DNA, 25 bp, Probe sequence
ggctcatccgtaggttctaaagaac

SEQ ID NO: 142584 - DNA, 25 bp, Probe sequence
tgtgtatccaaccaagaatcttgat

SEQ ID NO: 142585 - DNA, 25 bp, Probe sequence
ttccaacgaagcccataacggacga

SEQ ID NO: 142586 - DNA, 25 bp, Probe sequence
tatatcaaccaaaagggcacctgaa

SEQ ID NO: 142587 - DNA, 25 bp, Probe sequence
ttattaattctggaatgtacatcca

SEQ ID NO: 142588 - DNA, 25 bp, Probe sequence
attctgcatgtaaatatccgattgg

SEQ ID NO: 142589 - DNA, 25 bp, Probe sequence
atatgtttgactattctgcatgtaa

SEQ ID NO: 142590 - DNA, 25 bp, Probe sequence
atgtttgactattctgcatgtaaat

SEQ ID NO: 142591 - DNA, 25 bp, Probe sequence
agtatatgtttgactattctgcatg

SEQ ID NO: 142592 - DNA, 25 bp, Probe sequence
actattctgcatgtaaatatccgat

SEQ ID NO: 142593 - DNA, 25 bp, Probe sequence
aaagtatatgtttgactattctgca

SEQ ID NO: 142594 - DNA, 25 bp, Probe sequence
aaaagtatatgtttgactattctgc

SEQ ID NO: 142595 - DNA, 25 bp, Probe sequence
aagaaggttcgcaaaagttaatgat

SEQ ID NO: 142596 - DNA, 25 bp, Probe sequence
aagtatatgtttgactattctgcat

SEQ ID NO: 142597 - DNA, 25 bp, Probe sequence
aaggttattctgatcaagatgaggt

SEQ ID NO: 142598 - DNA, 25 bp, Probe sequence
catgtaaatatccgattggtgttgt

SEQ ID NO: 142599 - DNA, 25 bp, Probe sequence
gcatgtaaatatccgattggtgttg

SEQ ID NO: 142600 - DNA, 25 bp, Probe sequence
gaaggttcgcaaaagttaatgatta

SEQ ID NO: 142601 - DNA, 25 bp, Probe sequence
gaaacaataggaagcattatttatt

SEQ ID NO: 142602 - DNA, 25 bp, Probe sequence
gactattctgcatgtaaatatccga

SEQ ID NO: 142603 - DNA, 25 bp, Probe sequence
gaggttagatttcaagagttgtttg

SEQ ID NO: 142604 - DNA, 25 bp, Probe sequence
gatgaggttagatttcaagagttgt

SEQ ID NO: 142605 - DNA, 25 bp, Probe sequence
gatcaagatgaggttagatttcaag

SEQ ID NO: 142606 - DNA, 25 bp, Probe sequence
gatagtgaaatacaacgtggagaag

SEQ ID NO: 142607 - DNA, 25 bp, Probe sequence
gattattaatagaggaccaattgta

SEQ ID NO: 142608 - DNA, 25 bp, Probe sequence
gttattctgatcaagatgaggttag

SEQ ID NO: 142609 - DNA, 25 bp, Probe sequence
gtttgactattctgcatgtaaatat

SEQ ID NO: 142610 - DNA, 25 bp, Probe sequence
gtatatgtttgactattctgcatgt

SEQ ID NO: 142611 - DNA, 25 bp, Probe sequence
gtgaaatacaacgtggagaagttac

SEQ ID NO: 142612 - DNA, 25 bp, Probe sequence
ggttcgcaaaagttaatgattatta

SEQ ID NO: 142613 - DNA, 25 bp, Probe sequence
tggatagtgaaatacaacgtggaga

SEQ ID NO: 142614 - DNA, 25 bp, Probe sequence
tctgcatgtaaatatccgattggtg

SEQ ID NO: 142615 - DNA, 25 bp, Probe sequence
taatagaggaccaattgtagaaatt

SEQ ID NO: 142616 - DNA, 25 bp, Probe sequence
tatgtttgactattctgcatgtaaa

SEQ ID NO: 142617 - DNA, 25 bp, Probe sequence
tatatgtttgactattctgcatgta

SEQ ID NO: 142618 - DNA, 25 bp, Probe sequence
tatagattcagttatttttaaaggt

SEQ ID NO: 142619 - DNA, 25 bp, Probe sequence
tatttttaaaggttattctgatcaa

SEQ ID NO: 142620 - DNA, 25 bp, Probe sequence
ttctgcatgtaaatatccgattggt

SEQ ID NO: 142621 - DNA, 25 bp, Probe sequence
ttgactattctgcatgtaaatatcc

SEQ ID NO: 142622 - DNA, 25 bp, Probe sequence
atatggctagtcgtatggaacagtt

SEQ ID NO: 142623 - DNA, 25 bp, Probe sequence
atagtagcaatatggctagtcgtat

SEQ ID NO: 142624 - DNA, 25 bp, Probe sequence
atggaacagttccgcgatgaatttc

SEQ ID NO: 142625 - DNA, 25 bp, Probe sequence
atggctagtcgtatggaacagttcc

SEQ ID NO: 142626 - DNA, 25 bp, Probe sequence
agcaatatggctagtcgtatggaac

SEQ ID NO: 142627 - DNA, 25 bp, Probe sequence
agcaaatggatgacttatatgatga

SEQ ID NO: 142628 - DNA, 25 bp, Probe sequence
acggaagcgttatacgagcagcaac

SEQ ID NO: 142629 - DNA, 25 bp, Probe sequence
acagttccgcgatgaatttcatttt

SEQ ID NO: 142630 - DNA, 25 bp, Probe sequence
aaatggatgacttatatgatgaaaa

SEQ ID NO: 142631 - DNA, 25 bp, Probe sequence
aacagttccgcgatgaatttcattt

SEQ ID NO: 142632 - DNA, 25 bp, Probe sequence
aagcgttatacgagcagcaacagca

SEQ ID NO: 142633 - DNA, 25 bp, Probe sequence
caacggaagcgttatacgagcagca

SEQ ID NO: 142634 - DNA, 25 bp, Probe sequence
cattttgcgaaacgacgttcaacgg

SEQ ID NO: 142635 - DNA, 25 bp, Probe sequence
gcgaaacgacgttcaacggaagcgt

SEQ ID NO: 142636 - DNA, 25 bp, Probe sequence
gcgttatacgagcagcaacagcaaa

SEQ ID NO: 142637 - DNA, 25 bp, Probe sequence
gctagtcgtatggaacagttccgcg

SEQ ID NO: 142638 - DNA, 25 bp, Probe sequence
gcaatatggctagtcgtatggaaca

SEQ ID NO: 142639 - DNA, 25 bp, Probe sequence
gaatttcattttgcgaaacgacgtt

SEQ ID NO: 142640 - DNA, 25 bp, Probe sequence
gaagcgttatacgagcagcaacagc

SEQ ID NO: 142641 - DNA, 25 bp, Probe sequence
gaacagttccgcgatgaatttcatt

SEQ ID NO: 142642 - DNA, 25 bp, Probe sequence
gacgttcaacggaagcgttatacga

SEQ ID NO: 142643 - DNA, 25 bp, Probe sequence
gagatgattgacttggaaatgcgaa

SEQ ID NO: 142644 - DNA, 25 bp, Probe sequence
gatgaatttcattttgcgaaacgac

SEQ ID NO: 142645 - DNA, 25 bp, Probe sequence
gttccgcgatgaatttcattttgcg

SEQ ID NO: 142646 - DNA, 25 bp, Probe sequence
gtcgtatggaacagttccgcgatga

SEQ ID NO: 142647 - DNA, 25 bp, Probe sequence
tggctagtcgtatggaacagttccg

SEQ ID NO: 142648 - DNA, 25 bp, Probe sequence
ggctagtcgtatggaacagttccgc

SEQ ID NO: 142649 - DNA, 25 bp, Probe sequence
ggaacagttccgcgatgaatttcat

SEQ ID NO: 142650 - DNA, 25 bp, Probe sequence
ggaagcgttatacgagcagcaacag

SEQ ID NO: 142651 - DNA, 25 bp, Probe sequence
ttgcgaaacgacgttcaacggaagc

SEQ ID NO: 142652 - DNA, 25 bp, Probe sequence
tccgcgatgaatttcattttgcgaa

SEQ ID NO: 142653 - DNA, 25 bp, Probe sequence
tagtcgtatggaacagttccgcgat

SEQ ID NO: 142654 - DNA, 25 bp, Probe sequence
tatacgagcagcaacagcaaattca

SEQ ID NO: 142655 - DNA, 25 bp, Probe sequence
ttcattttgcgaaacgacgttcaac

SEQ ID NO: 142656 - DNA, 25 bp, Probe sequence
agtactggcatccatgcacctaaaa

SEQ ID NO: 142657 - DNA, 25 bp, Probe sequence
agaaacccgttgaattaatgatgaa

SEQ ID NO: 142658 - DNA, 25 bp, Probe sequence
agcttagctatcaaccgcaaaataa

SEQ ID NO: 142659 - DNA, 25 bp, Probe sequence
agctttaaatagtacaatcgccaat

SEQ ID NO: 142660 - DNA, 25 bp, Probe sequence
acaagtactggcatccatgcaccta

SEQ ID NO: 142661 - DNA, 25 bp, Probe sequence
aaatatgccggtgatgttaataaaa

SEQ ID NO: 142662 - DNA, 25 bp, Probe sequence
aacaagcagaaacacttagccactt

SEQ ID NO: 142663 - DNA, 25 bp, Probe sequence
aacacttagccacttatctaactta

SEQ ID NO: 142664 - DNA, 25 bp, Probe sequence
aagagattactactaagtacatttt

SEQ ID NO: 142665 - DNA, 25 bp, Probe sequence
aatagtgatattagtgatgcagaga

SEQ ID NO: 142666 - DNA, 25 bp, Probe sequence
catgcacctaaaagcgctaaaaaat

SEQ ID NO: 142667 - DNA, 25 bp, Probe sequence
cattaattcttacaggttgcgcgtc

SEQ ID NO: 142668 - DNA, 25 bp, Probe sequence
gccacttatctaacttagctgttaa

SEQ ID NO: 142669 - DNA, 25 bp, Probe sequence
gcgcgtccgatcaatctgataacga

SEQ ID NO: 142670 - DNA, 25 bp, Probe sequence
gctatcaaccgcaaaataaaatcaa

SEQ ID NO: 142671 - DNA, 25 bp, Probe sequence
gctatagaaaagtatttgtctgtaa

SEQ ID NO: 142672 - DNA, 25 bp, Probe sequence
gcatttcaagaaatttgtcactgaa

SEQ ID NO: 142673 - DNA, 25 bp, Probe sequence
gcatccatgcacctaaaagcgctaa

SEQ ID NO: 142674 - DNA, 25 bp, Probe sequence
gcagaaacacttagccacttatcta

SEQ ID NO: 142675 - DNA, 25 bp, Probe sequence
gaaaagcttagctatcaaccgcaaa

SEQ ID NO: 142676 - DNA, 25 bp, Probe sequence
gacgtgccaacaaaatatgccggtg

SEQ ID NO: 142677 - DNA, 25 bp, Probe sequence
gatgaattacttcaaagctttaaat

SEQ ID NO: 142678 - DNA, 25 bp, Probe sequence
gatgcagagatgaagcaagctatag

SEQ ID NO: 142679 - DNA, 25 bp, Probe sequence
gatcaatctgataacgaagatcatc

SEQ ID NO: 142680 - DNA, 25 bp, Probe sequence
gtcactgaaaacaatattcctaaag

SEQ ID NO: 142681 - DNA, 25 bp, Probe sequence
gtcgacgtgccaacaaaatatgccg

SEQ ID NO: 142682 - DNA, 25 bp, Probe sequence
gtgccaacaaaatatgccggtgatg

SEQ ID NO: 142683 - DNA, 25 bp, Probe sequence
ggtatcaagagtgatgttatcgata

SEQ ID NO: 142684 - DNA, 25 bp, Probe sequence
tggcatccatgcacctaaaagcgct

SEQ ID NO: 142685 - DNA, 25 bp, Probe sequence
taattcttacaggttgcgcgtccga

SEQ ID NO: 142686 - DNA, 25 bp, Probe sequence
tactactaagtacatttttagcatc

SEQ ID NO: 142687 - DNA, 25 bp, Probe sequence
tagccacttatctaacttagctgtt

SEQ ID NO: 142688 - DNA, 25 bp, Probe sequence
ttgcgcgtccgatcaatctgataac

SEQ ID NO: 142689 - DNA, 25 bp, Probe sequence
ttgtctgtaaatagcgatatacttg

SEQ ID NO: 142690 - DNA, 25 bp, Probe sequence
atttcttttgataatcattggcaag

SEQ ID NO: 142691 - DNA, 25 bp, Probe sequence
atcggtattacaacggtatttggtg

SEQ ID NO: 142692 - DNA, 25 bp, Probe sequence
aaatttggcttctcattaccttatg

SEQ ID NO: 142693 - DNA, 25 bp, Probe sequence
aaatgaatttgaacgtgcaggtatc

SEQ ID NO: 142694 - DNA, 25 bp, Probe sequence
aaggcaaatttggcttctcattacc

SEQ ID NO: 142695 - DNA, 25 bp, Probe sequence
caactcgtagctcaattacacagtc

SEQ ID NO: 142696 - DNA, 25 bp, Probe sequence
caacgtggacgtaaagaatcatttt

SEQ ID NO: 142697 - DNA, 25 bp, Probe sequence
catttttcttacttgtccaacgtgg

SEQ ID NO: 142698 - DNA, 25 bp, Probe sequence
ctcaattacacagtcagcaacaaga

SEQ ID NO: 142699 - DNA, 25 bp, Probe sequence
gcatcctatagacttgaattttatc

SEQ ID NO: 142700 - DNA, 25 bp, Probe sequence
gcaaatttggcttctcattacctta

SEQ ID NO: 142701 - DNA, 25 bp, Probe sequence
gaattttatcgtttatatttattga

SEQ ID NO: 142702 - DNA, 25 bp, Probe sequence
gaatcattttatgctgcagaaattg

SEQ ID NO: 142703 - DNA, 25 bp, Probe sequence
gaaggtggcgatatttcttttgata

SEQ ID NO: 142704 - DNA, 25 bp, Probe sequence
gaacgtgcaggtatcacggcaccta

SEQ ID NO: 142705 - DNA, 25 bp, Probe sequence
gagttgctaaatagagggctatggg

SEQ ID NO: 142706 - DNA, 25 bp, Probe sequence
gagggctatgggatgccaacgatat

SEQ ID NO: 142707 - DNA, 25 bp, Probe sequence
gatacggatacatttttcttacttg

SEQ ID NO: 142708 - DNA, 25 bp, Probe sequence
gatacatttttcttacttgtccaac

SEQ ID NO: 142709 - DNA, 25 bp, Probe sequence
gatatcggtattacaacggtatttg

SEQ ID NO: 142710 - DNA, 25 bp, Probe sequence
gtatcacggcacctagagtaattgc

SEQ ID NO: 142711 - DNA, 25 bp, Probe sequence
gtatttagtgatgacgtatttagaa

SEQ ID NO: 142712 - DNA, 25 bp, Probe sequence
gtatttggtggttttacgagcgaat

SEQ ID NO: 142713 - DNA, 25 bp, Probe sequence
gtagctcaattacacagtcagcaac

SEQ ID NO: 142714 - DNA, 25 bp, Probe sequence
gtaaacgaagcatatcgagtcgaaa

SEQ ID NO: 142715 - DNA, 25 bp, Probe sequence
gtcagcaacaagaagaaggcaaatt

SEQ ID NO: 142716 - DNA, 25 bp, Probe sequence
gtgcaggtatcacggcacctagagt

SEQ ID NO: 142717 - DNA, 25 bp, Probe sequence
gtggcgatatttcttttgataatca

SEQ ID NO: 142718 - DNA, 25 bp, Probe sequence
gggatgccaacgatatcaaagtata

SEQ ID NO: 142719 - DNA, 25 bp, Probe sequence
ggcacctagagtaattgcaagtggc

SEQ ID NO: 142720 - DNA, 25 bp, Probe sequence
ggcttctcattaccttatgaaggtg

SEQ ID NO: 142721 - DNA, 25 bp, Probe sequence
tgcagaaattgcaggtttaaatgaa

SEQ ID NO: 142722 - DNA, 25 bp, Probe sequence
tagacttgaattttatcgtttatat

SEQ ID NO: 142723 - DNA, 25 bp, Probe sequence
ttcttacttgtccaacgtggacgta

SEQ ID NO: 142724 - DNA, 25 bp, Probe sequence
atagttgttgtgcaccttgtagtac

SEQ ID NO: 142725 - DNA, 25 bp, Probe sequence
atcaatgaacttggtatggatgtcc

SEQ ID NO: 142726 - DNA, 25 bp, Probe sequence
atgattaatgctgaacctattatca

SEQ ID NO: 142727 - DNA, 25 bp, Probe sequence
agcagctgtagaacatggctatgat

SEQ ID NO: 142728 - DNA, 25 bp, Probe sequence
aaagtaaaggttatgagcgttccat

SEQ ID NO: 142729 - DNA, 25 bp, Probe sequence
aaaatcttattgcatagttgttgtg

SEQ ID NO: 142730 - DNA, 25 bp, Probe sequence
aatgactataatatctttaggcagt

SEQ ID NO: 142731 - DNA, 25 bp, Probe sequence
gcggcttacgttgtaccgcttgttt

SEQ ID NO: 142732 - DNA, 25 bp, Probe sequence
gcatttttagaacaatatccagatt

SEQ ID NO: 142733 - DNA, 25 bp, Probe sequence
gcagacattgcaatttatttcgcga

SEQ ID NO: 142734 - DNA, 25 bp, Probe sequence
gcagcgatgcaacaaggtattgatt

SEQ ID NO: 142735 - DNA, 25 bp, Probe sequence
gcaagactggtgcgaatgtgaagta

SEQ ID NO: 142736 - DNA, 25 bp, Probe sequence
gaaggcggcttacgttgtaccgctt

SEQ ID NO: 142737 - DNA, 25 bp, Probe sequence
gaagattttaatcgcaagactggtg

SEQ ID NO: 142738 - DNA, 25 bp, Probe sequence
gaagaaattaatcgggcagtgggaa

SEQ ID NO: 142739 - DNA, 25 bp, Probe sequence
gaagcaatcagacctaaaatcttat

SEQ ID NO: 142740 - DNA, 25 bp, Probe sequence
gaagcgaaagcatttttagaacaat

SEQ ID NO: 142741 - DNA, 25 bp, Probe sequence
gaaatgcgtttggatattgtagcga

SEQ ID NO: 142742 - DNA, 25 bp, Probe sequence
gagcgttccatagaaatgtgtaatg

SEQ ID NO: 142743 - DNA, 25 bp, Probe sequence
gagtttttaacacaatatgcagaca

SEQ ID NO: 142744 - DNA, 25 bp, Probe sequence
gtaccgcttgttttgaaatgcgttt

SEQ ID NO: 142745 - DNA, 25 bp, Probe sequence
gtgcaccttgtagtacatatacatt

SEQ ID NO: 142746 - DNA, 25 bp, Probe sequence
gtgaactatttgccaagtgatttta

SEQ ID NO: 142747 - DNA, 25 bp, Probe sequence
gtggatgtgtctttgcagcgatgca

SEQ ID NO: 142748 - DNA, 25 bp, Probe sequence
gggcagtgggaaagagaagcaatca

SEQ ID NO: 142749 - DNA, 25 bp, Probe sequence
ggatattgtagcgaaagcagctgta

SEQ ID NO: 142750 - DNA, 25 bp, Probe sequence
ggatgtccaaaaaatatacgatgtg

SEQ ID NO: 142751 - DNA, 25 bp, Probe sequence
ggctatgattattttggcagtgcaa

SEQ ID NO: 142752 - DNA, 25 bp, Probe sequence
tacgttgtaccgcttgttttgaaat

SEQ ID NO: 142753 - DNA, 25 bp, Probe sequence
taggcagtgttattgtggatgtgtc

SEQ ID NO: 142754 - DNA, 25 bp, Probe sequence
tatcacctaaaaagaacgcacaatt

SEQ ID NO: 142755 - DNA, 25 bp, Probe sequence
tatacgatgtgaactatttgccaag

SEQ ID NO: 142756 - DNA, 25 bp, Probe sequence
ttacgacgtgctaaagtgcaagaac

SEQ ID NO: 142757 - DNA, 25 bp, Probe sequence
ttcgcgaattcaaatattcatccga

SEQ ID NO: 142758 - DNA, 25 bp, Probe sequence
attagaagagattactgtgcaacaa

SEQ ID NO: 142759 - DNA, 25 bp, Probe sequence
atttagctgatgttaaccgtagtac

SEQ ID NO: 142760 - DNA, 25 bp, Probe sequence
atttcatgagttatgtttcaggtgc

SEQ ID NO: 142761 - DNA, 25 bp, Probe sequence
atgtttcaggtgcgggattgtcttt

SEQ ID NO: 142762 - DNA, 25 bp, Probe sequence
accgtatagacaaagttgacttaat

SEQ ID NO: 142763 - DNA, 25 bp, Probe sequence
acaaattgcagatttagctgatgtt

SEQ ID NO: 142764 - DNA, 25 bp, Probe sequence
aaagacatcgcattttatcaattga

SEQ ID NO: 142765 - DNA, 25 bp, Probe sequence
aaccgtagtacattttatacgcatt

SEQ ID NO: 142766 - DNA, 25 bp, Probe sequence
aagatccaaaccgtatagacaaagt

SEQ ID NO: 142767 - DNA, 25 bp, Probe sequence
aagagattactgtgcaacaaattgc

SEQ ID NO: 142768 - DNA, 25 bp, Probe sequence
caagggccagcaacgataattaaaa

SEQ ID NO: 142769 - DNA, 25 bp, Probe sequence
gctgatgttaaccgtagtacatttt

SEQ ID NO: 142770 - DNA, 25 bp, Probe sequence
gcattttaatacgattgtcaatcaa

SEQ ID NO: 142771 - DNA, 25 bp, Probe sequence
gcagatttagctgatgttaaccgta

SEQ ID NO: 142772 - DNA, 25 bp, Probe sequence
gaacttttacatcaacaccaattag

SEQ ID NO: 142773 - DNA, 25 bp, Probe sequence
gaaaatcacaagttgcaatgagaaa

SEQ ID NO: 142774 - DNA, 25 bp, Probe sequence
gaaaaattagaggaccagcagttgg

SEQ ID NO: 142775 - DNA, 25 bp, Probe sequence
gacattgggtagaagatccaaaccg

SEQ ID NO: 142776 - DNA, 25 bp, Probe sequence
gaaatgcatttattgaacttttaca

SEQ ID NO: 142777 - DNA, 25 bp, Probe sequence
gagttatgtttcaggtgcgggattg

SEQ ID NO: 142778 - DNA, 25 bp, Probe sequence
gaggaccagcagttggaggaaataa

SEQ ID NO: 142779 - DNA, 25 bp, Probe sequence
gaggaaataagagacttcattcatg

SEQ ID NO: 142780 - DNA, 25 bp, Probe sequence
gatgtttcgtatgggtaaagattca

SEQ ID NO: 142781 - DNA, 25 bp, Probe sequence
gattgtcaatcaagggccagcaacg

SEQ ID NO: 142782 - DNA, 25 bp, Probe sequence
gtagaagatccaaaccgtatagaca

SEQ ID NO: 142783 - DNA, 25 bp, Probe sequence
gtacattttatacgcattattatga

SEQ ID NO: 142784 - DNA, 25 bp, Probe sequence
gtcaatcaagggccagcaacgataa

SEQ ID NO: 142785 - DNA, 25 bp, Probe sequence
gggccagcaacgataattaaaaata

SEQ ID NO: 142786 - DNA, 25 bp, Probe sequence
ggagcagttaagttatccacggata

SEQ ID NO: 142787 - DNA, 25 bp, Probe sequence
tgatgagaagttaaatggagcagtt

SEQ ID NO: 142788 - DNA, 25 bp, Probe sequence
taagagacttcattcatgatgagaa

SEQ ID NO: 142789 - DNA, 25 bp, Probe sequence
tatccacggataacatacatcaaat

SEQ ID NO: 142790 - DNA, 25 bp, Probe sequence
tatcaattgatgtttcgtatgggta

SEQ ID NO: 142791 - DNA, 25 bp, Probe sequence
tttacatcaacaccaattagaagag

SEQ ID NO: 142792 - DNA, 25 bp, Probe sequence
attggggaggacttgatataaatga

SEQ ID NO: 142793 - DNA, 25 bp, Probe sequence
ataatcattggggaggacttgatat

SEQ ID NO: 142794 - DNA, 25 bp, Probe sequence
ataacgtttataatcattggggagg

SEQ ID NO: 142795 - DNA, 25 bp, Probe sequence
atcaatgttggagatttgtgggata

SEQ ID NO: 142796 - DNA, 25 bp, Probe sequence
atgttggagatttgtgggataatga

SEQ ID NO: 142797 - DNA, 25 bp, Probe sequence
acgtttataatcattggggaggact

SEQ ID NO: 142798 - DNA, 25 bp, Probe sequence
acataacgtttataatcattgggga

SEQ ID NO: 142799 - DNA, 25 bp, Probe sequence
aatgttggagatttgtgggataatg

SEQ ID NO: 142800 - DNA, 25 bp, Probe sequence
aatcattggggaggacttgatataa

SEQ ID NO: 142801 - DNA, 25 bp, Probe sequence
cataacgtttataatcattggggag

SEQ ID NO: 142802 - DNA, 25 bp, Probe sequence
catcaatgttggagatttgtgggat

SEQ ID NO: 142803 - DNA, 25 bp, Probe sequence
cgtttataatcattggggaggactt

SEQ ID NO: 142804 - DNA, 25 bp, Probe sequence
ccaatcatcaatgttggagatttgt

SEQ ID NO: 142805 - DNA, 25 bp, Probe sequence
gccaatcatcaatgttggagatttg

SEQ ID NO: 142806 - DNA, 25 bp, Probe sequence
gaacataacgtttataatcattggg

SEQ ID NO: 142807 - DNA, 25 bp, Probe sequence
gacttgatataaatgactatagatc

SEQ ID NO: 142808 - DNA, 25 bp, Probe sequence
gaggacttgatataaatgactatag

SEQ ID NO: 142809 - DNA, 25 bp, Probe sequence
gataatgaacataacgtttataatc

SEQ ID NO: 142810 - DNA, 25 bp, Probe sequence
gatttgtgggataatgaacataacg

SEQ ID NO: 142811 - DNA, 25 bp, Probe sequence
gttggagatttgtgggataatgaac

SEQ ID NO: 142812 - DNA, 25 bp, Probe sequence
gtttataatcattggggaggacttg

SEQ ID NO: 142813 - DNA, 25 bp, Probe sequence
gtgccaatcatcaatgttggagatt

SEQ ID NO: 142814 - DNA, 25 bp, Probe sequence
gtgggataatgaacataacgtttat

SEQ ID NO: 142815 - DNA, 25 bp, Probe sequence
gggaggacttgatataaatgactat

SEQ ID NO: 142816 - DNA, 25 bp, Probe sequence
ggggaggacttgatataaatgacta

SEQ ID NO: 142817 - DNA, 25 bp, Probe sequence
ggagatttgtgggataatgaacata

SEQ ID NO: 142818 - DNA, 25 bp, Probe sequence
tggggaggacttgatataaatgact

SEQ ID NO: 142819 - DNA, 25 bp, Probe sequence
tgtgggataatgaacataacgttta

SEQ ID NO: 142820 - DNA, 25 bp, Probe sequence
tgccaatcatcaatgttggagattt

SEQ ID NO: 142821 - DNA, 25 bp, Probe sequence
tcattggggaggacttgatataaat

SEQ ID NO: 142822 - DNA, 25 bp, Probe sequence
taatcattggggaggacttgatata

SEQ ID NO: 142823 - DNA, 25 bp, Probe sequence
taacgtttataatcattggggagga

SEQ ID NO: 142824 - DNA, 25 bp, Probe sequence
tttataatcattggggaggacttga

SEQ ID NO: 142825 - DNA, 25 bp, Probe sequence
ttggggaggacttgatataaatgac

SEQ ID NO: 142826 - DNA, 25 bp, Probe sequence
atagagcaagagtgactgagtcaaa

SEQ ID NO: 142827 - DNA, 25 bp, Probe sequence
ataatggtgcacgttttgaaacata

SEQ ID NO: 142828 - DNA, 25 bp, Probe sequence
agctggtgaaagaggtagtggtaaa

SEQ ID NO: 142829 - DNA, 25 bp, Probe sequence
agtagccatcgtgaataataataat

SEQ ID NO: 142830 - DNA, 25 bp, Probe sequence
agcggtagacatcttgccaaatgaa

SEQ ID NO: 142831 - DNA, 25 bp, Probe sequence
acatacgtaatagctggtgaaagag

SEQ ID NO: 142832 - DNA, 25 bp, Probe sequence
aaagtagccatcgtgaataataata

SEQ ID NO: 142833 - DNA, 25 bp, Probe sequence
aagcggtagacatcttgccaaatga

SEQ ID NO: 142834 - DNA, 25 bp, Probe sequence
aatggtgcacgttttgaaacatacg

SEQ ID NO: 142835 - DNA, 25 bp, Probe sequence
aatagctggtgaaagaggtagtggt

SEQ ID NO: 142836 - DNA, 25 bp, Probe sequence
cctaaagtagcagtaatgaatgaag

SEQ ID NO: 142837 - DNA, 25 bp, Probe sequence
gccaaatgaaaaagtagccatcgtg

SEQ ID NO: 142838 - DNA, 25 bp, Probe sequence
gcggtagacatcttgccaaatgaaa

SEQ ID NO: 142839 - DNA, 25 bp, Probe sequence
gaataataataatggtgcacgtttt

SEQ ID NO: 142840 - DNA, 25 bp, Probe sequence
gaatgctaaaattcatagagcaaga

SEQ ID NO: 142841 - DNA, 25 bp, Probe sequence
gaagtaggcgatgtagtcataatca

SEQ ID NO: 142842 - DNA, 25 bp, Probe sequence
gaagcggtagacatcttgccaaatg

SEQ ID NO: 142843 - DNA, 25 bp, Probe sequence
gaaaaagtagccatcgtgaataata

SEQ ID NO: 142844 - DNA, 25 bp, Probe sequence
gaaacatacgtaatagctggtgaaa

SEQ ID NO: 142845 - DNA, 25 bp, Probe sequence
gacttgttgaagtaggcgatgtagt

SEQ ID NO: 142846 - DNA, 25 bp, Probe sequence
gttgaagtaggcgatgtagtcataa

SEQ ID NO: 142847 - DNA, 25 bp, Probe sequence
gttttgaaacatacgtaatagctgg

SEQ ID NO: 142848 - DNA, 25 bp, Probe sequence
gtaggcgatgtagtcataatcatga

SEQ ID NO: 142849 - DNA, 25 bp, Probe sequence
gtcataatcatgacttatgcacagt

SEQ ID NO: 142850 - DNA, 25 bp, Probe sequence
gtgactgagtcaaatttaaattatg

SEQ ID NO: 142851 - DNA, 25 bp, Probe sequence
gtgataagaacaatgatgaatgcta

SEQ ID NO: 142852 - DNA, 25 bp, Probe sequence
ggtgcacgttttgaaacatacgtaa

SEQ ID NO: 142853 - DNA, 25 bp, Probe sequence
ggtagacatcttgccaaatgaaaaa

SEQ ID NO: 142854 - DNA, 25 bp, Probe sequence
ggaagcggtagacatcttgccaaat

SEQ ID NO: 142855 - DNA, 25 bp, Probe sequence
tggaagcggtagacatcttgccaaa

SEQ ID NO: 142856 - DNA, 25 bp, Probe sequence
tcaagacttgttgaagtaggcgatg

SEQ ID NO: 142857 - DNA, 25 bp, Probe sequence
taataatggtgcacgttttgaaaca

SEQ ID NO: 142858 - DNA, 25 bp, Probe sequence
taataataatggtgcacgttttgaa

SEQ ID NO: 142859 - DNA, 25 bp, Probe sequence
tagacatcttgccaaatgaaaaagt

SEQ ID NO: 142860 - DNA, 25 bp, Probe sequence
attttcaaaagcgcgtttaatagat

SEQ ID NO: 142861 - DNA, 25 bp, Probe sequence
atgactaagctgattactacggtaa

SEQ ID NO: 142862 - DNA, 25 bp, Probe sequence
atcctcaattagtagaacaacacga

SEQ ID NO: 142863 - DNA, 25 bp, Probe sequence
atgccggattatgcttattttggta

SEQ ID NO: 142864 - DNA, 25 bp, Probe sequence
atgggtgccttacatgatggacatt

SEQ ID NO: 142865 - DNA, 25 bp, Probe sequence
cgttcgagaagcagatggtttggcg

SEQ ID NO: 142866 - DNA, 25 bp, Probe sequence
agcagatggtttggcgaaaagttca

SEQ ID NO: 142867 - DNA, 25 bp, Probe sequence
acaacacgaaataactggacgcata

SEQ ID NO: 142868 - DNA, 25 bp, Probe sequence
aacgattggttttatcccaacaatg

SEQ ID NO: 142869 - DNA, 25 bp, Probe sequence
aacgatggtacgcgaatcagttagt

SEQ ID NO: 142870 - DNA, 25 bp, Probe sequence
aatccattacaatttggtccaaacg

SEQ ID NO: 142871 - DNA, 25 bp, Probe sequence
caagcgttgtatcaagacggtgaac

SEQ ID NO: 142872 - DNA, 25 bp, Probe sequence
cgatgcttatccgagacaaattgat

SEQ ID NO: 142873 - DNA, 25 bp, Probe sequence
cccaacaatgggtgccttacatgat

SEQ ID NO: 142874 - DNA, 25 bp, Probe sequence
gcgaagcgtccagggcattttgatg

SEQ ID NO: 142875 - DNA, 25 bp, Probe sequence
gcggacattgtttttcatcctgcag

SEQ ID NO: 142876 - DNA, 25 bp, Probe sequence
gctgtttatagttatcctcaattag

SEQ ID NO: 142877 - DNA, 25 bp, Probe sequence
gctatttaatattgttatgccggat

SEQ ID NO: 142878 - DNA, 25 bp, Probe sequence
gaaggagcgaagcgtccagggcatt

SEQ ID NO: 142879 - DNA, 25 bp, Probe sequence
gaagatttcgatgcttatccgagac

SEQ ID NO: 142880 - DNA, 25 bp, Probe sequence
gaacgacaagaagcggtacatttaa

SEQ ID NO: 142881 - DNA, 25 bp, Probe sequence
gacgcatatttatctcgttagctgt

SEQ ID NO: 142882 - DNA, 25 bp, Probe sequence
gatggacatttaacgatggtacgcg

SEQ ID NO: 142883 - DNA, 25 bp, Probe sequence
gatgcaacacattgttaaagcagcc

SEQ ID NO: 142884 - DNA, 25 bp, Probe sequence
gatgcccagcaattggctattgtcg

SEQ ID NO: 142885 - DNA, 25 bp, Probe sequence
gtttttcatcctgcagtagaagata

SEQ ID NO: 142886 - DNA, 25 bp, Probe sequence
gtttgctattagcacaagcgttgta

SEQ ID NO: 142887 - DNA, 25 bp, Probe sequence
gtgagtgtatttgttaatccattac

SEQ ID NO: 142888 - DNA, 25 bp, Probe sequence
ggtaaaagacttcaatcatgccgtt

SEQ ID NO: 142889 - DNA, 25 bp, Probe sequence
ggcattttgatggggtggtaacagt

SEQ ID NO: 142890 - DNA, 25 bp, Probe sequence
tcatgccgttgaaattattggtatt

SEQ ID NO: 142891 - DNA, 25 bp, Probe sequence
tattggtattgatatcgttcgagaa

SEQ ID NO: 142892 - DNA, 25 bp, Probe sequence
ttgttaaagcagccaaacgctcagg

SEQ ID NO: 142893 - DNA, 25 bp, Probe sequence
ttggctattgtcgagcaaatggtaa

SEQ ID NO: 142894 - DNA, 25 bp, Probe sequence
attccagtcattggtattggtgcag

SEQ ID NO: 142895 - DNA, 25 bp, Probe sequence
agtaccgtacaagtgacgttagcag

SEQ ID NO: 142896 - DNA, 25 bp, Probe sequence
agcaacggcaattggtattcctgtt

SEQ ID NO: 142897 - DNA, 25 bp, Probe sequence
acggtcgtgcagtaagaagaggcgc

SEQ ID NO: 142898 - DNA, 25 bp, Probe sequence
acagcttatgattttccaagtgcta

SEQ ID NO: 142899 - DNA, 25 bp, Probe sequence
aaagcagaaggagcgcatattacac

SEQ ID NO: 142900 - DNA, 25 bp, Probe sequence
aaaatttctatggtaacagcttatg

SEQ ID NO: 142901 - DNA, 25 bp, Probe sequence
aagctggtgcagttgcgttagtact

SEQ ID NO: 142902 - DNA, 25 bp, Probe sequence
aagctttatcaggagacgaatgcaa

SEQ ID NO: 142903 - DNA, 25 bp, Probe sequence
aatcatgctctaaagctttatcagg

SEQ ID NO: 142904 - DNA, 25 bp, Probe sequence
cacctcaaagtgttggcgttatggg

SEQ ID NO: 142905 - DNA, 25 bp, Probe sequence
ctaaacaagtggaagcagcgggtat

SEQ ID NO: 142906 - DNA, 25 bp, Probe sequence
gccgattggtgcagtaggcatctct

SEQ ID NO: 142907 - DNA, 25 bp, Probe sequence
gcgttagtacttgaagcaattccaa

SEQ ID NO: 142908 - DNA, 25 bp, Probe sequence
gcacatttaggattaacacctcaaa

SEQ ID NO: 142909 - DNA, 25 bp, Probe sequence
gcagcgggtattgatatgattcttg

SEQ ID NO: 142910 - DNA, 25 bp, Probe sequence
gcaagcacttaacaattccagtcat

SEQ ID NO: 142911 - DNA, 25 bp, Probe sequence
gaagaggcgcaccaaatacatttgt

SEQ ID NO: 142912 - DNA, 25 bp, Probe sequence
gaagcaatttgctgattttagtgtt

SEQ ID NO: 142913 - DNA, 25 bp, Probe sequence
gaagcagcggagcaacttattttag

SEQ ID NO: 142914 - DNA, 25 bp, Probe sequence
gacacaagacttaaatcatgctcta

SEQ ID NO: 142915 - DNA, 25 bp, Probe sequence
gacgttagcagatatgattcatcac

SEQ ID NO: 142916 - DNA, 25 bp, Probe sequence
gatatgattcatcacggtcgtgcag

SEQ ID NO: 142917 - DNA, 25 bp, Probe sequence
gattttagtgttggtgtggatggtt

SEQ ID NO: 142918 - DNA, 25 bp, Probe sequence
gattcttgttggggattcacttggt

SEQ ID NO: 142919 - DNA, 25 bp, Probe sequence
gttaaatctggtgcatttccatcag

SEQ ID NO: 142920 - DNA, 25 bp, Probe sequence
gtaggcatctctatgacacaagact

SEQ ID NO: 142921 - DNA, 25 bp, Probe sequence
gtagttgttgatatgccgattggtg

SEQ ID NO: 142922 - DNA, 25 bp, Probe sequence
ggggattcacttggtatgactgtat

SEQ ID NO: 142923 - DNA, 25 bp, Probe sequence
ggtgcaggaaaaggtacagatggtc

SEQ ID NO: 142924 - DNA, 25 bp, Probe sequence
ggtgcatttccatcagaagaatata

SEQ ID NO: 142925 - DNA, 25 bp, Probe sequence
ggtcaagtattggtttatcacgata

SEQ ID NO: 142926 - DNA, 25 bp, Probe sequence
ggtattcctgttgttgcacatttag

SEQ ID NO: 142927 - DNA, 25 bp, Probe sequence
ggagcgcatattacaccatttattg

SEQ ID NO: 142928 - DNA, 25 bp, Probe sequence
atattcgtggtgccattgttggatt

SEQ ID NO: 142929 - DNA, 25 bp, Probe sequence
atgacgaatgtcttgtatcaacatg

SEQ ID NO: 142930 - DNA, 25 bp, Probe sequence
atgtcttgtatcaacatggtacatt

SEQ ID NO: 142931 - DNA, 25 bp, Probe sequence
atggtggacatgttcttgactttga

SEQ ID NO: 142932 - DNA, 25 bp, Probe sequence
accgccatatacacgtttgattgat

SEQ ID NO: 142933 - DNA, 25 bp, Probe sequence
acaccagaattatttcatggcgtag

SEQ ID NO: 142934 - DNA, 25 bp, Probe sequence
aaggcgatgagaaagtaccgtatgc

SEQ ID NO: 142935 - DNA, 25 bp, Probe sequence
aaggcatatcatgctaacgagcata

SEQ ID NO: 142936 - DNA, 25 bp, Probe sequence
cagcacgcagacaacctgaggaaaa

SEQ ID NO: 142937 - DNA, 25 bp, Probe sequence
catgtacgaatgatgcctgctcagc

SEQ ID NO: 142938 - DNA, 25 bp, Probe sequence
cattgcaacaattatcacaagatga

SEQ ID NO: 142939 - DNA, 25 bp, Probe sequence
ctttgaagtggatgacgttgtcgtt

SEQ ID NO: 142940 - DNA, 25 bp, Probe sequence
ctgctggttttcatatacattttgc

SEQ ID NO: 142941 - DNA, 25 bp, Probe sequence
cgttaatggctggcttactagaagg

SEQ ID NO: 142942 - DNA, 25 bp, Probe sequence
gcatcgattactaattttaaagcga

SEQ ID NO: 142943 - DNA, 25 bp, Probe sequence
gcaaccgccatatacacgtttgatt

SEQ ID NO: 142944 - DNA, 25 bp, Probe sequence
gcaacgttaacagggtctgatggcg

SEQ ID NO: 142945 - DNA, 25 bp, Probe sequence
gaaagagcttatggtggacatgttc

SEQ ID NO: 142946 - DNA, 25 bp, Probe sequence
gacgttgtcgttgagatacaaaact

SEQ ID NO: 142947 - DNA, 25 bp, Probe sequence
gagacgtttgttaaagcgaaaatag

SEQ ID NO: 142948 - DNA, 25 bp, Probe sequence
gagaaagtaccgtatgcatcgatta

SEQ ID NO: 142949 - DNA, 25 bp, Probe sequence
gattgattcagcacgcagacaacct

SEQ ID NO: 142950 - DNA, 25 bp, Probe sequence
gttggattttttacaccagaattat

SEQ ID NO: 142951 - DNA, 25 bp, Probe sequence
gtgccattgttggattttttacacc

SEQ ID NO: 142952 - DNA, 25 bp, Probe sequence
gtgagaatttattttcggctgttaa

SEQ ID NO: 142953 - DNA, 25 bp, Probe sequence
gtggatgacgttgtcgttgagatac

SEQ ID NO: 142954 - DNA, 25 bp, Probe sequence
gggattgcaacgttaacagggtctg

SEQ ID NO: 142955 - DNA, 25 bp, Probe sequence
gggtctgatggcgaagtaatatttt

SEQ ID NO: 142956 - DNA, 25 bp, Probe sequence
ggacatgttcttgactttgaagtgg

SEQ ID NO: 142957 - DNA, 25 bp, Probe sequence
tcggctgttaaaatttatggcacat

SEQ ID NO: 142958 - DNA, 25 bp, Probe sequence
tcagcaaccgccatatacacgtttg

SEQ ID NO: 142959 - DNA, 25 bp, Probe sequence
tacgaatgatgcctgctcagcaacc

SEQ ID NO: 142960 - DNA, 25 bp, Probe sequence
tacacgtttgattgattcagcacgc

SEQ ID NO: 142961 - DNA, 25 bp, Probe sequence
taggtacgttaatggctggcttact

SEQ ID NO: 142962 - DNA, 25 bp, Probe sequence
attgcattagcattgatgcgcattt

SEQ ID NO: 142963 - DNA, 25 bp, Probe sequence
atatttcttaatcgcggcaaaccct

SEQ ID NO: 142964 - DNA, 25 bp, Probe sequence
atacacgtgacgctgcttatgaaat

SEQ ID NO: 142965 - DNA, 25 bp, Probe sequence
atcggttcaggtactgtattggaca

SEQ ID NO: 142966 - DNA, 25 bp, Probe sequence
agccaagaacttggtgttgcacctt

SEQ ID NO: 142967 - DNA, 25 bp, Probe sequence
aaaggttgtattaatcggagatgga

SEQ ID NO: 142968 - DNA, 25 bp, Probe sequence
aaccatggtacagtccacagtcctt

SEQ ID NO: 142969 - DNA, 25 bp, Probe sequence
aagctaaagggtcaacatactatgg

SEQ ID NO: 142970 - DNA, 25 bp, Probe sequence
aaccaacatggcgcagttaaaattt

SEQ ID NO: 142971 - DNA, 25 bp, Probe sequence
aagaacaaactggtagcgaagctaa

SEQ ID NO: 142972 - DNA, 25 bp, Probe sequence
aataatgtcttaaatgtttctatac

SEQ ID NO: 142973 - DNA, 25 bp, Probe sequence
caagtgttgacgctagtattattgg

SEQ ID NO: 142974 - DNA, 25 bp, Probe sequence
ctgtattggacagtgcacgtttaca

SEQ ID NO: 142975 - DNA, 25 bp, Probe sequence
ccacagtccttcaccagttgatgtg

SEQ ID NO: 142976 - DNA, 25 bp, Probe sequence
ccagcagagcgtgttatcggttcag

SEQ ID NO: 142977 - DNA, 25 bp, Probe sequence
gctatgcctttgcaatggttacgca

SEQ ID NO: 142978 - DNA, 25 bp, Probe sequence
gcagatgttcaagatttaaaccatg

SEQ ID NO: 142979 - DNA, 25 bp, Probe sequence
gcaccttcaagtgttgacgctagta

SEQ ID NO: 142980 - DNA, 25 bp, Probe sequence
gaatttgtaattattgacattgcaa

SEQ ID NO: 142981 - DNA, 25 bp, Probe sequence
gaacttgcagtttggtcacaagcaa

SEQ ID NO: 142982 - DNA, 25 bp, Probe sequence
gaaattatccaagctaaagggtcaa

SEQ ID NO: 142983 - DNA, 25 bp, Probe sequence
gagcgtgttatcggttcaggtactg

SEQ ID NO: 142984 - DNA, 25 bp, Probe sequence
gagcatggtgatactgaacttgcag

SEQ ID NO: 142985 - DNA, 25 bp, Probe sequence
gatgcgcatttcaaaagccatttta

SEQ ID NO: 142986 - DNA, 25 bp, Probe sequence
gatgcagatttagttgttattacag

SEQ ID NO: 142987 - DNA, 25 bp, Probe sequence
gtaggatcaagctatgcctttgcaa

SEQ ID NO: 142988 - DNA, 25 bp, Probe sequence
gtgaaagcaggtgaatacgaagact

SEQ ID NO: 142989 - DNA, 25 bp, Probe sequence
gtgacgctgcttatgaaattatcca

SEQ ID NO: 142990 - DNA, 25 bp, Probe sequence
ggtgttgcaccttcaagtgttgacg

SEQ ID NO: 142991 - DNA, 25 bp, Probe sequence
ggttacgcaaggtgttgctgatgaa

SEQ ID NO: 142992 - DNA, 25 bp, Probe sequence
ggagatggatctgtaggatcaagct

SEQ ID NO: 142993 - DNA, 25 bp, Probe sequence
ggacagtgcacgtttacaatattta

SEQ ID NO: 142994 - DNA, 25 bp, Probe sequence
ggctttgatggatatttcttaatcg

SEQ ID NO: 142995 - DNA, 25 bp, Probe sequence
tgtagcaggtatttcagtatatgac

SEQ ID NO: 142996 - DNA, 25 bp, Probe sequence
attggtattgatattgtttccgaca

SEQ ID NO: 142997 - DNA, 25 bp, Probe sequence
attactgctttgagcatggcgtagt

SEQ ID NO: 142998 - DNA, 25 bp, Probe sequence
atgcgcaaacattatggtccgttat

SEQ ID NO: 142999 - DNA, 25 bp, Probe sequence
atgacatatctggacaaggttggta

SEQ ID NO: 143000 - DNA, 25 bp, Probe sequence
atgtacctgctgacgaagtagcatg

SEQ ID NO: 143001 - DNA, 25 bp, Probe sequence
aaatgtgttgcgattccaaccgcca

SEQ ID NO: 143002 - DNA, 25 bp, Probe sequence
aatcgctgtcgatgatattcaacaa

SEQ ID NO: 143003 - DNA, 25 bp, Probe sequence
aatccagttagttgtgaagctgcat

SEQ ID NO: 143004 - DNA, 25 bp, Probe sequence
aattttacgcctgatttaatcactt

SEQ ID NO: 143005 - DNA, 25 bp, Probe sequence
catgaaccgttggtacgtttagcta

SEQ ID NO: 143006 - DNA, 25 bp, Probe sequence
cagtgcggcacttaaaatttgtaat

SEQ ID NO: 143007 - DNA, 25 bp, Probe sequence
ggtggacttttagaaccagttccag

SEQ ID NO: 143008 - DNA, 25 bp, Probe sequence
ccagagcatatacagggcgtcctta

SEQ ID NO: 143009 - DNA, 25 bp, Probe sequence
ccagttccagggtattttgaagcgt

SEQ ID NO: 143010 - DNA, 25 bp, Probe sequence
gcatatcatggttcaacttttggct

SEQ ID NO: 143011 - DNA, 25 bp, Probe sequence
gaagatcagtcgcttcttcaggcta

SEQ ID NO: 143012 - DNA, 25 bp, Probe sequence
gaagatgcactgactgctttggaag

SEQ ID NO: 143013 - DNA, 25 bp, Probe sequence
gaagctgcattagccacaattcaaa

SEQ ID NO: 143014 - DNA, 25 bp, Probe sequence
gaaacgatacaaggcgatggtggac

SEQ ID NO: 143015 - DNA, 25 bp, Probe sequence
gagcagccacaagctaattcagtag

SEQ ID NO: 143016 - DNA, 25 bp, Probe sequence
gttctcaaaacgtaggtcatgcacc

SEQ ID NO: 143017 - DNA, 25 bp, Probe sequence
gtctcgcattttaattttacgcctg

SEQ ID NO: 143018 - DNA, 25 bp, Probe sequence
ggtcatgcacctagagaagtaacag

SEQ ID NO: 143019 - DNA, 25 bp, Probe sequence
ggtacatggagttcagtctcgcatt

SEQ ID NO: 143020 - DNA, 25 bp, Probe sequence
ggtatgtacgagcagccacaagcta

SEQ ID NO: 143021 - DNA, 25 bp, Probe sequence
ggatcagacgcaaatgatggcatca

SEQ ID NO: 143022 - DNA, 25 bp, Probe sequence
ggcgtagttattatagctgtagcag

SEQ ID NO: 143023 - DNA, 25 bp, Probe sequence
ggcgtccttatatcattagtttcac

SEQ ID NO: 143024 - DNA, 25 bp, Probe sequence
tgtcagcaattgttggacgcaaaga

SEQ ID NO: 143025 - DNA, 25 bp, Probe sequence
tgagcaattagacacggcgttaaac

SEQ ID NO: 143026 - DNA, 25 bp, Probe sequence
tcgcttcttcaggctagtgcggaaa

SEQ ID NO: 143027 - DNA, 25 bp, Probe sequence
tatttacaacaggtgctaatccagt

SEQ ID NO: 143028 - DNA, 25 bp, Probe sequence
ttttatcatattccgtttccagata

SEQ ID NO: 143029 - DNA, 25 bp, Probe sequence
ttgtctatgtcagctattagtttaa

SEQ ID NO: 143030 - DNA, 25 bp, Probe sequence
atcaatccattaccacacatcagtt

SEQ ID NO: 143031 - DNA, 25 bp, Probe sequence
aggggcttcaacttcagtttcagtt

SEQ ID NO: 143032 - DNA, 25 bp, Probe sequence
aaatcgcctaactggtgagaaattc

SEQ ID NO: 143033 - DNA, 25 bp, Probe sequence
acattacaactttattagcagcagc

SEQ ID NO: 143034 - DNA, 25 bp, Probe sequence
aaagcggtagcatcgagaacccaag

SEQ ID NO: 143035 - DNA, 25 bp, Probe sequence
aaacaattctggggtcacttagtga

SEQ ID NO: 143036 - DNA, 25 bp, Probe sequence
aaggattcatccaattcggtacaga

SEQ ID NO: 143037 - DNA, 25 bp, Probe sequence
aataatgctggtacgggtcatgcag

SEQ ID NO: 143038 - DNA, 25 bp, Probe sequence
aattcttagcttgtacaaacccaca

SEQ ID NO: 143039 - DNA, 25 bp, Probe sequence
caacctgatggttctatcgacatcg

SEQ ID NO: 143040 - DNA, 25 bp, Probe sequence
cgtactttctatccagaagcacgta

SEQ ID NO: 143041 - DNA, 25 bp, Probe sequence
gaactacacagttttacaacctgat

SEQ ID NO: 143042 - DNA, 25 bp, Probe sequence
gaacaacacgatgccaaagtttatg

SEQ ID NO: 143043 - DNA, 25 bp, Probe sequence
gaaaggccgtgaagataaccctggt

SEQ ID NO: 143044 - DNA, 25 bp, Probe sequence
gacatcgttttaattggagccggtg

SEQ ID NO: 143045 - DNA, 25 bp, Probe sequence
gagccagactggaatatccacgttt

SEQ ID NO: 143046 - DNA, 25 bp, Probe sequence
gatgaaagctttccctatgttcgat

SEQ ID NO: 143047 - DNA, 25 bp, Probe sequence
gattggcaattatacactgctggta

SEQ ID NO: 143048 - DNA, 25 bp, Probe sequence
gttaactcacaagaccacactgtaa

SEQ ID NO: 143049 - DNA, 25 bp, Probe sequence
ggtgaatcaccaggggcttcaactt

SEQ ID NO: 143050 - DNA, 25 bp, Probe sequence
ggattccctatcagtggtcaattct

SEQ ID NO: 143051 - DNA, 25 bp, Probe sequence
ggtaaagagccacctggtacaccac

SEQ ID NO: 143052 - DNA, 25 bp, Probe sequence
ggtcatgcagcattatgtgagttga

SEQ ID NO: 143053 - DNA, 25 bp, Probe sequence
ggtacagatgtaaacttcggtgaat

SEQ ID NO: 143054 - DNA, 25 bp, Probe sequence
ggagccggtgtacttagcacaacat

SEQ ID NO: 143055 - DNA, 25 bp, Probe sequence
ggatcgtcctgcaatcgaaagttca

SEQ ID NO: 143056 - DNA, 25 bp, Probe sequence
ggaccatttgctaatgttggaccta

SEQ ID NO: 143057 - DNA, 25 bp, Probe sequence
tgaaccacttacgtactttctatcc

SEQ ID NO: 143058 - DNA, 25 bp, Probe sequence
taaccctggtatcatggcggcaagt

SEQ ID NO: 143059 - DNA, 25 bp, Probe sequence
tacaccaccaatgactgtacctcat

SEQ ID NO: 143060 - DNA, 25 bp, Probe sequence
tacctcatttagatacgcgttacat

SEQ ID NO: 143061 - DNA, 25 bp, Probe sequence
tagaacgtaacttccctgaatacaa

SEQ ID NO: 143062 - DNA, 25 bp, Probe sequence
tattcatcggtgctggcggtggagc

SEQ ID NO: 143063 - DNA, 25 bp, Probe sequence
ttacgaacgcttggatcgtcctgca

SEQ ID NO: 143064 - DNA, 25 bp, Probe sequence
atatcagtcacttaccaacagctca

SEQ ID NO: 143065 - DNA, 25 bp, Probe sequence
atcactggtgacttagctcatgtag

SEQ ID NO: 143066 - DNA, 25 bp, Probe sequence
atgcgttaacgaatcatccagccgt

SEQ ID NO: 143067 - DNA, 25 bp, Probe sequence
atggatggggatttgcacatttaca

SEQ ID NO: 143068 - DNA, 25 bp, Probe sequence
atggccagactgaaagtaccttgct

SEQ ID NO: 143069 - DNA, 25 bp, Probe sequence
agatggatggatttcacttgaagct

SEQ ID NO: 143070 - DNA, 25 bp, Probe sequence
agaaatggcagatacgacgcgtgat

SEQ ID NO: 143071 - DNA, 25 bp, Probe sequence
agcattcgttattttacaggaccat

SEQ ID NO: 143072 - DNA, 25 bp, Probe sequence
accaacagctcattgaacagtctaa

SEQ ID NO: 143073 - DNA, 25 bp, Probe sequence
aatgttttatgttgtacaccgacag

SEQ ID NO: 143074 - DNA, 25 bp, Probe sequence
caaactcaggtaaaattcgtcgtgt

SEQ ID NO: 143075 - DNA, 25 bp, Probe sequence
cgcatttacatagtgccgtttctgc

SEQ ID NO: 143076 - DNA, 25 bp, Probe sequence
ccgtttctgcaggtgagccactaaa

SEQ ID NO: 143077 - DNA, 25 bp, Probe sequence
gccgttacacattgtcatggatggg

SEQ ID NO: 143078 - DNA, 25 bp, Probe sequence
gctatacgattgggccttttgaagt

SEQ ID NO: 143079 - DNA, 25 bp, Probe sequence
gcagtaccacttgatttgccagcac

SEQ ID NO: 143080 - DNA, 25 bp, Probe sequence
gcaaaagtcagctctattcgcgcct

SEQ ID NO: 143081 - DNA, 25 bp, Probe sequence
gaaagtaccttgcttataggctttt

SEQ ID NO: 143082 - DNA, 25 bp, Probe sequence
gacgacttaccaaaaacaaactcag

SEQ ID NO: 143083 - DNA, 25 bp, Probe sequence
gacgcgtgatgatatggcgattctg

SEQ ID NO: 143084 - DNA, 25 bp, Probe sequence
gagccagaacgtacggcgaaagcgc

SEQ ID NO: 143085 - DNA, 25 bp, Probe sequence
gatgacttagtttgggcaacagcag

SEQ ID NO: 143086 - DNA, 25 bp, Probe sequence
gttattgcactagagccattcacag

SEQ ID NO: 143087 - DNA, 25 bp, Probe sequence
gtatggagtcctttcttatctgtat

SEQ ID NO: 143088 - DNA, 25 bp, Probe sequence
ggggaatagcgtacctgctaatacg

SEQ ID NO: 143089 - DNA, 25 bp, Probe sequence
ggtgttgcaatcattccatgttctg

SEQ ID NO: 143090 - DNA, 25 bp, Probe sequence
ggtaaatactacatcactggtgact

SEQ ID NO: 143091 - DNA, 25 bp, Probe sequence
ggaccatactgcgggtgatgatacg

SEQ ID NO: 143092 - DNA, 25 bp, Probe sequence
ggcaacagcagcaccaggttggcaa

SEQ ID NO: 143093 - DNA, 25 bp, Probe sequence
ggcaatcctaaagccgttacacatt

SEQ ID NO: 143094 - DNA, 25 bp, Probe sequence
ggcgattctgtcatatacatctggt

SEQ ID NO: 143095 - DNA, 25 bp, Probe sequence
tgatgatggttatttctggtttgaa

SEQ ID NO: 143096 - DNA, 25 bp, Probe sequence
tagttcggtcactgtagtagatgat

SEQ ID NO: 143097 - DNA, 25 bp, Probe sequence
ttatgatgccacgatctattgcgac

SEQ ID NO: 143098 - DNA, 25 bp, Probe sequence
attacgctgtgggaaaataggcaag

SEQ ID NO: 143099 - DNA, 25 bp, Probe sequence
atattcgtattgaattagctgatat

SEQ ID NO: 143100 - DNA, 25 bp, Probe sequence
atatcattattacgctgtgggaaaa

SEQ ID NO: 143101 - DNA, 25 bp, Probe sequence
ataggcaagcattttatcattggca

SEQ ID NO: 143102 - DNA, 25 bp, Probe sequence
ataatgacactgcatattacgatgt

SEQ ID NO: 143103 - DNA, 25 bp, Probe sequence
atcattggcaaaattcagctgagta

SEQ ID NO: 143104 - DNA, 25 bp, Probe sequence
aggacaagaagaaacattcgagcaa

SEQ ID NO: 143105 - DNA, 25 bp, Probe sequence
agaaacattcgagcaaaaatttttg

SEQ ID NO: 143106 - DNA, 25 bp, Probe sequence
agacactatatcattattacgctgt

SEQ ID NO: 143107 - DNA, 25 bp, Probe sequence
agctgagtacaagcatacacacaag

SEQ ID NO: 143108 - DNA, 25 bp, Probe sequence
actatatcattattacgctgtggga

SEQ ID NO: 143109 - DNA, 25 bp, Probe sequence
acagctggtagacactatatcatta

SEQ ID NO: 143110 - DNA, 25 bp, Probe sequence
aagcatcgtggcacttcgaaaggtg

SEQ ID NO: 143111 - DNA, 25 bp, Probe sequence
aagacctagaacagctggtagacac

SEQ ID NO: 143112 - DNA, 25 bp, Probe sequence
aattcagctgagtacaagcatacac

SEQ ID NO: 143113 - DNA, 25 bp, Probe sequence
aattaatcgtgaattatcatacaat

SEQ ID NO: 143114 - DNA, 25 bp, Probe sequence
caagcatacacacaagcatcgtggc

SEQ ID NO: 143115 - DNA, 25 bp, Probe sequence
cacaagcatcgtggcacttcgaaag

SEQ ID NO: 143116 - DNA, 25 bp, Probe sequence
cacacaagcatcgtggcacttcgaa

SEQ ID NO: 143117 - DNA, 25 bp, Probe sequence
cattatgtgtgttaaatcatttata

SEQ ID NO: 143118 - DNA, 25 bp, Probe sequence
cgtggcacttcgaaaggtgcagatg

SEQ ID NO: 143119 - DNA, 25 bp, Probe sequence
gcatacacacaagcatcgtggcact

SEQ ID NO: 143120 - DNA, 25 bp, Probe sequence
gcatcgtggcacttcgaaaggtgca

SEQ ID NO: 143121 - DNA, 25 bp, Probe sequence
gaattatcatacaatattcgtattg

SEQ ID NO: 143122 - DNA, 25 bp, Probe sequence
gaagaactggatgattgtctcacaa

SEQ ID NO: 143123 - DNA, 25 bp, Probe sequence
gaactggatgattgtctcacaatac

SEQ ID NO: 143124 - DNA, 25 bp, Probe sequence
gaacagctggtagacactatatcat

SEQ ID NO: 143125 - DNA, 25 bp, Probe sequence
gacctagaacagctggtagacacta

SEQ ID NO: 143126 - DNA, 25 bp, Probe sequence
gtacaagcatacacacaagcatcgt

SEQ ID NO: 143127 - DNA, 25 bp, Probe sequence
ggtagacactatatcattattacgc

SEQ ID NO: 143128 - DNA, 25 bp, Probe sequence
ggtttttaagacctagaacagctgg

SEQ ID NO: 143129 - DNA, 25 bp, Probe sequence
ggatgattgtctcacaatacaaaaa

SEQ ID NO: 143130 - DNA, 25 bp, Probe sequence
ggcaagcattttatcattggcaaaa

SEQ ID NO: 143131 - DNA, 25 bp, Probe sequence
tacacacaagcatcgtggcacttcg

SEQ ID NO: 143132 - DNA, 25 bp, Probe sequence
attgtaaaaagatcactttctctgt

SEQ ID NO: 143133 - DNA, 25 bp, Probe sequence
attttcatcaaatgtccaatataga

SEQ ID NO: 143134 - DNA, 25 bp, Probe sequence
atcactttctctgtatgatcaatta

SEQ ID NO: 143135 - DNA, 25 bp, Probe sequence
atgagcttttacgaatatatacaaa

SEQ ID NO: 143136 - DNA, 25 bp, Probe sequence
agatcactttctctgtatgatcaat

SEQ ID NO: 143137 - DNA, 25 bp, Probe sequence
agatcatgagtttttagaaattgta

SEQ ID NO: 143138 - DNA, 25 bp, Probe sequence
acattttgtcttattttcatcaaat

SEQ ID NO: 143139 - DNA, 25 bp, Probe sequence
aaatgtccaatatagatcatgagtt

SEQ ID NO: 143140 - DNA, 25 bp, Probe sequence
aaagatcactttctctgtatgatca

SEQ ID NO: 143141 - DNA, 25 bp, Probe sequence
aaagaagatgattcattcccaaaac

SEQ ID NO: 143142 - DNA, 25 bp, Probe sequence
aaacattttgtcttattttcatcaa

SEQ ID NO: 143143 - DNA, 25 bp, Probe sequence
aaaacaccattaggcgaattagcga

SEQ ID NO: 143144 - DNA, 25 bp, Probe sequence
aaaaagatcactttctctgtatgat

SEQ ID NO: 143145 - DNA, 25 bp, Probe sequence
aacaccattaggcgaattagcgatt

SEQ ID NO: 143146 - DNA, 25 bp, Probe sequence
aagatgattcattcccaaaacaaga

SEQ ID NO: 143147 - DNA, 25 bp, Probe sequence
cactttctctgtatgatcaattaaa

SEQ ID NO: 143148 - DNA, 25 bp, Probe sequence
caccattaggcgaattagcgatttg

SEQ ID NO: 143149 - DNA, 25 bp, Probe sequence
cattaggcgaattagcgatttggat

SEQ ID NO: 143150 - DNA, 25 bp, Probe sequence
cattcccaaaacaagagaagctaac

SEQ ID NO: 143151 - DNA, 25 bp, Probe sequence
ctttctctgtatgatcaattaaaat

SEQ ID NO: 143152 - DNA, 25 bp, Probe sequence
gaattagcgatttggattaaagaag

SEQ ID NO: 143153 - DNA, 25 bp, Probe sequence
gaagatgattcattcccaaaacaag

SEQ ID NO: 143154 - DNA, 25 bp, Probe sequence
gaagctaacagaaaacattttgtct

SEQ ID NO: 143155 - DNA, 25 bp, Probe sequence
gagcttttacgaatatatacaaaca

SEQ ID NO: 143156 - DNA, 25 bp, Probe sequence
gatgattcattcccaaaacaagaga

SEQ ID NO: 143157 - DNA, 25 bp, Probe sequence
gatgataaaacaccattaggcgaat

SEQ ID NO: 143158 - DNA, 25 bp, Probe sequence
gataaaacaccattaggcgaattag

SEQ ID NO: 143159 - DNA, 25 bp, Probe sequence
gattcattcccaaaacaagagaagc

SEQ ID NO: 143160 - DNA, 25 bp, Probe sequence
gtaaaaagatcactttctctgtatg

SEQ ID NO: 143161 - DNA, 25 bp, Probe sequence
gtcttattttcatcaaatgtccaat

SEQ ID NO: 143162 - DNA, 25 bp, Probe sequence
gtccaatatagatcatgagttttta

SEQ ID NO: 143163 - DNA, 25 bp, Probe sequence
ggcgaattagcgatttggattaaag

SEQ ID NO: 143164 - DNA, 25 bp, Probe sequence
ttaggcgaattagcgatttggatta

SEQ ID NO: 143165 - DNA, 25 bp, Probe sequence
ttgtcttattttcatcaaatgtcca

SEQ ID NO: 143166 - DNA, 25 bp, Probe sequence
atagtcaagtacatcgtggtcgccg

SEQ ID NO: 143167 - DNA, 25 bp, Probe sequence
atcctttattccagtcattctttga

SEQ ID NO: 143168 - DNA, 25 bp, Probe sequence
atgttccatttcttaccaatagctg

SEQ ID NO: 143169 - DNA, 25 bp, Probe sequence
atgtcatcattggaggaggcagtgc

SEQ ID NO: 143170 - DNA, 25 bp, Probe sequence
agatatcaagcgcatgccatttatt

SEQ ID NO: 143171 - DNA, 25 bp, Probe sequence
agcagcagacattatacgtggcaga

SEQ ID NO: 143172 - DNA, 25 bp, Probe sequence
aaatgggtcctgcttcagatccaat

SEQ ID NO: 143173 - DNA, 25 bp, Probe sequence
aacatacggtgcagcgccttatgat

SEQ ID NO: 143174 - DNA, 25 bp, Probe sequence
aaggcattgagccacgtgttcattt

SEQ ID NO: 143175 - DNA, 25 bp, Probe sequence
caaatggcaatatacacgcacctgt

SEQ ID NO: 143176 - DNA, 25 bp, Probe sequence
cacgcacctgttttaatgttagctg

SEQ ID NO: 143177 - DNA, 25 bp, Probe sequence
ctgcgttaatgttcccttcaggcaa

SEQ ID NO: 143178 - DNA, 25 bp, Probe sequence
gcgggtcgcagtgattatttttggg

SEQ ID NO: 143179 - DNA, 25 bp, Probe sequence
gcattacacccatcttgtagtgcta

SEQ ID NO: 143180 - DNA, 25 bp, Probe sequence
gaaggtggcggatttgtacgttcaa

SEQ ID NO: 143181 - DNA, 25 bp, Probe sequence
gaagaaccacatatgggcggtcgta

SEQ ID NO: 143182 - DNA, 25 bp, Probe sequence
gaaagcctttagagccacaatatat

SEQ ID NO: 143183 - DNA, 25 bp, Probe sequence
gagggccagcaacgaatcctttatt

SEQ ID NO: 143184 - DNA, 25 bp, Probe sequence
gatccaatggcagtagttgacccgt

SEQ ID NO: 143185 - DNA, 25 bp, Probe sequence
gatggtcaaaaggcagcggtcgcac

SEQ ID NO: 143186 - DNA, 25 bp, Probe sequence
gaggcagtgcaggttctgtactagg

SEQ ID NO: 143187 - DNA, 25 bp, Probe sequence
gattatcctaacttaatgttccatt

SEQ ID NO: 143188 - DNA, 25 bp, Probe sequence
gtagcacatgcccgaggtaaagttt

SEQ ID NO: 143189 - DNA, 25 bp, Probe sequence
gtcgccgaatgtcagcttcaagagc

SEQ ID NO: 143190 - DNA, 25 bp, Probe sequence
gtgcagcagcatctaaccattttga

SEQ ID NO: 143191 - DNA, 25 bp, Probe sequence
ggttttggaccgttcgatagtcaag

SEQ ID NO: 143192 - DNA, 25 bp, Probe sequence
ggaccaatgtattcaaactctcgtg

SEQ ID NO: 143193 - DNA, 25 bp, Probe sequence
ggaacctgtatcattacagccaagc

SEQ ID NO: 143194 - DNA, 25 bp, Probe sequence
ggcaaactacataccatcgatgcta

SEQ ID NO: 143195 - DNA, 25 bp, Probe sequence
tgggcggtcgtaaagtagcacatgc

SEQ ID NO: 143196 - DNA, 25 bp, Probe sequence
tggggcattcaatacgccacaatta

SEQ ID NO: 143197 - DNA, 25 bp, Probe sequence
taaccgttgaaacacgtgcctttgt

SEQ ID NO: 143198 - DNA, 25 bp, Probe sequence
tatcaagttcacgtaggaccaatgt

SEQ ID NO: 143199 - DNA, 25 bp, Probe sequence
tatttatccaaatgcctgctgcgtt

SEQ ID NO: 143200 - DNA, 25 bp, Probe sequence
attaggtaatggttttgatgctgat

SEQ ID NO: 143201 - DNA, 25 bp, Probe sequence
atgttacgaatattgccttggaact

SEQ ID NO: 143202 - DNA, 25 bp, Probe sequence
aggtcaagtttgttcagcaggatca

SEQ ID NO: 143203 - DNA, 25 bp, Probe sequence
acgtgcgtttgagtctggtgaatgg

SEQ ID NO: 143204 - DNA, 25 bp, Probe sequence
aaaaagtacgtgccatcgcggacaa

SEQ ID NO: 143205 - DNA, 25 bp, Probe sequence
aaatgctgctaataatgttacgaat

SEQ ID NO: 143206 - DNA, 25 bp, Probe sequence
aaaacatttatctcagcgtcaatat

SEQ ID NO: 143207 - DNA, 25 bp, Probe sequence
aaaattgcgccagcgcttgctacgg

SEQ ID NO: 143208 - DNA, 25 bp, Probe sequence
aagaaccagtaggtgtagttacaca

SEQ ID NO: 143209 - DNA, 25 bp, Probe sequence
aacattatctttgatgatgctgatt

SEQ ID NO: 143210 - DNA, 25 bp, Probe sequence
aatgggaccagtgatttcaacagaa

SEQ ID NO: 143211 - DNA, 25 bp, Probe sequence
aatcttagctgcaagacgtgcgttt

SEQ ID NO: 143212 - DNA, 25 bp, Probe sequence
aattacaccattaacaacaatacgt

SEQ ID NO: 143213 - DNA, 25 bp, Probe sequence
gcttgctacgggttgttcactagtt

SEQ ID NO: 143214 - DNA, 25 bp, Probe sequence
gcatcatggaaaattgcgccagcgc

SEQ ID NO: 143215 - DNA, 25 bp, Probe sequence
gaatggtcgcaagaaactgctgaaa

SEQ ID NO: 143216 - DNA, 25 bp, Probe sequence
gaacatcgcgaagcgttagcacgat

SEQ ID NO: 143217 - DNA, 25 bp, Probe sequence
gagcaagcacttattgatcgcgtga

SEQ ID NO: 143218 - DNA, 25 bp, Probe sequence
gagatattatcaatccttacaatca

SEQ ID NO: 143219 - DNA, 25 bp, Probe sequence
gttggtgacgtaatgtcaggtcata

SEQ ID NO: 143220 - DNA, 25 bp, Probe sequence
gtatcatttacaggtggcattgaga

SEQ ID NO: 143221 - DNA, 25 bp, Probe sequence
gtagttacacaaattacaccttgga

SEQ ID NO: 143222 - DNA, 25 bp, Probe sequence
gtgcaggttctgaagttggtgacgt

SEQ ID NO: 143223 - DNA, 25 bp, Probe sequence
gtgatatttacggtttctgaaggga

SEQ ID NO: 143224 - DNA, 25 bp, Probe sequence
gtgtttatgtattttgctggattag

SEQ ID NO: 143225 - DNA, 25 bp, Probe sequence
gtggcgaaatgattgattcaccaat

SEQ ID NO: 143226 - DNA, 25 bp, Probe sequence
ggtggcattgagactggtaagcata

SEQ ID NO: 143227 - DNA, 25 bp, Probe sequence
ggatgcagaacgtgcaatcttagct

SEQ ID NO: 143228 - DNA, 25 bp, Probe sequence
ggcggtaaaaatccaaacattatct

SEQ ID NO: 143229 - DNA, 25 bp, Probe sequence
tgatgctgatactgaaatgggacca

SEQ ID NO: 143230 - DNA, 25 bp, Probe sequence
tacaccttggaattatccgttatta

SEQ ID NO: 143231 - DNA, 25 bp, Probe sequence
tattgccttggaacttggcggtaaa

SEQ ID NO: 143232 - DNA, 25 bp, Probe sequence
tattgatggtgagtgggttgaaagc

SEQ ID NO: 143233 - DNA, 25 bp, Probe sequence
ttatccgttattacaagcatcatgg

SEQ ID NO: 143234 - DNA, 25 bp, Probe sequence
attccggacacttaggtgactccca

SEQ ID NO: 143235 - DNA, 25 bp, Probe sequence
attagattttgatgtacttgtacct

SEQ ID NO: 143236 - DNA, 25 bp, Probe sequence
atatgcgacacctacttcggaactg

SEQ ID NO: 143237 - DNA, 25 bp, Probe sequence
agccccttactttatacatgaaaat

SEQ ID NO: 143238 - DNA, 25 bp, Probe sequence
actggagattttatatgttttgaag

SEQ ID NO: 143239 - DNA, 25 bp, Probe sequence
aaaacttatatgcgacacctacttc

SEQ ID NO: 143240 - DNA, 25 bp, Probe sequence
gttgaagccccttactttatacatg

SEQ ID NO: 143241 - DNA, 25 bp, Probe sequence
caccgttacttatttactggagatt

SEQ ID NO: 143242 - DNA, 25 bp, Probe sequence
cccgcgcctggacatacaccaggga

SEQ ID NO: 143243 - DNA, 25 bp, Probe sequence
cagtccaaattacatgacagtttag

SEQ ID NO: 143244 - DNA, 25 bp, Probe sequence
cattgcatcattaggtggtgtttca

SEQ ID NO: 143245 - DNA, 25 bp, Probe sequence
cctacttcggaactgccttttgata

SEQ ID NO: 143246 - DNA, 25 bp, Probe sequence
gaagggaagagatggcgtacagtta

SEQ ID NO: 143247 - DNA, 25 bp, Probe sequence
gaaaatgatgtggctgcactgaaac

SEQ ID NO: 143248 - DNA, 25 bp, Probe sequence
gacagtttagaatccatcacaaaaa

SEQ ID NO: 143249 - DNA, 25 bp, Probe sequence
gacacttaggtgactcccaacaaga

SEQ ID NO: 143250 - DNA, 25 bp, Probe sequence
gactcccaacaagacattgcatcat

SEQ ID NO: 143251 - DNA, 25 bp, Probe sequence
gacatacaccagggacgacactatt

SEQ ID NO: 143252 - DNA, 25 bp, Probe sequence
gagtacgtgagggcgagaatagcta

SEQ ID NO: 143253 - DNA, 25 bp, Probe sequence
gaggttctaatcaagttgaagcccc

SEQ ID NO: 143254 - DNA, 25 bp, Probe sequence
gatgatggtcatcaccgttacttat

SEQ ID NO: 143255 - DNA, 25 bp, Probe sequence
gatgaaccgttagtttattttgtag

SEQ ID NO: 143256 - DNA, 25 bp, Probe sequence
gatcatgaatctataggaggttcta

SEQ ID NO: 143257 - DNA, 25 bp, Probe sequence
gttatctatcattccggacacttag

SEQ ID NO: 143258 - DNA, 25 bp, Probe sequence
gtaccttgggttactatcaaagatg

SEQ ID NO: 143259 - DNA, 25 bp, Probe sequence
gtacttgtaccttgggttactatca

SEQ ID NO: 143260 - DNA, 25 bp, Probe sequence
gtaatattgttatctatcattccgg

SEQ ID NO: 143261 - DNA, 25 bp, Probe sequence
gtggctgcactgaaacataagattt

SEQ ID NO: 143262 - DNA, 25 bp, Probe sequence
gggacgacactatttttatgggatg

SEQ ID NO: 143263 - DNA, 25 bp, Probe sequence
ggtcatcaccgttacttatttactg

SEQ ID NO: 143264 - DNA, 25 bp, Probe sequence
ggatttagaagttattcccgcgcct

SEQ ID NO: 143265 - DNA, 25 bp, Probe sequence
ggaactgccttttgataatcgattt

SEQ ID NO: 143266 - DNA, 25 bp, Probe sequence
ggcgtacagttatattaggttcaag

SEQ ID NO: 143267 - DNA, 25 bp, Probe sequence
ttattgatagagtacgtgagggcga

SEQ ID NO: 143268 - DNA, 25 bp, Probe sequence
aacgaatttcccacaagactggaca

SEQ ID NO: 143269 - DNA, 25 bp, Probe sequence
atttaccattcccatcattgatgat

SEQ ID NO: 143270 - DNA, 25 bp, Probe sequence
atgcgccatttatcggtttatttat

SEQ ID NO: 143271 - DNA, 25 bp, Probe sequence
atggggctggcgattttttgctttg

SEQ ID NO: 143272 - DNA, 25 bp, Probe sequence
atgggcggcaatgctgttttgtgca

SEQ ID NO: 143273 - DNA, 25 bp, Probe sequence
aggtgtgccattaatttctgcaggc

SEQ ID NO: 143274 - DNA, 25 bp, Probe sequence
actggggcgttattgaatgggcttt

SEQ ID NO: 143275 - DNA, 25 bp, Probe sequence
acatcactagcgttaggtgtgccat

SEQ ID NO: 143276 - DNA, 25 bp, Probe sequence
acaatattctactggtcatggtggt

SEQ ID NO: 143277 - DNA, 25 bp, Probe sequence
aatagtgccatttctgattcaattg

SEQ ID NO: 143278 - DNA, 25 bp, Probe sequence
cattgtgcttattgccattttcatt

SEQ ID NO: 143279 - DNA, 25 bp, Probe sequence
cttagtatctgctttcttattctta

SEQ ID NO: 143280 - DNA, 25 bp, Probe sequence
cgcttggatgcgtattattctttgg

SEQ ID NO: 143281 - DNA, 25 bp, Probe sequence
gctaggtggtgcggcaacatcacta

SEQ ID NO: 143282 - DNA, 25 bp, Probe sequence
gcaacaacatttgattcgggttcat

SEQ ID NO: 143283 - DNA, 25 bp, Probe sequence
gaagcactccaatatgcgacgcaat

SEQ ID NO: 143284 - DNA, 25 bp, Probe sequence
gacgcaatatggtatgttccactgg

SEQ ID NO: 143285 - DNA, 25 bp, Probe sequence
gacgccttaaagaagtcgtgctagg

SEQ ID NO: 143286 - DNA, 25 bp, Probe sequence
gtaggcgaaccattacgtgccaatc

SEQ ID NO: 143287 - DNA, 25 bp, Probe sequence
gttatggactggacgacctttatag

SEQ ID NO: 143288 - DNA, 25 bp, Probe sequence
gttatacctatgatggcttttccaa

SEQ ID NO: 143289 - DNA, 25 bp, Probe sequence
gttttgtgcaggcataggctctgat

SEQ ID NO: 143290 - DNA, 25 bp, Probe sequence
gtacttctttttgcagttataccta

SEQ ID NO: 143291 - DNA, 25 bp, Probe sequence
gtggtgcatcatttaccattcccat

SEQ ID NO: 143292 - DNA, 25 bp, Probe sequence
gggttcatatattttagcggcagca

SEQ ID NO: 143293 - DNA, 25 bp, Probe sequence
ggtcatggtggttagtatatgcgcc

SEQ ID NO: 143294 - DNA, 25 bp, Probe sequence
ggtatttttggtaactatgctgtgt

SEQ ID NO: 143295 - DNA, 25 bp, Probe sequence
ggaaacgacagtgacagggttcgga

SEQ ID NO: 143296 - DNA, 25 bp, Probe sequence
ggacagtagctgtacttctttttgc

SEQ ID NO: 143297 - DNA, 25 bp, Probe sequence
ggctctgatattttatactggggcg

SEQ ID NO: 143298 - DNA, 25 bp, Probe sequence
tgggctttttactatcaagttccac

SEQ ID NO: 143299 - DNA, 25 bp, Probe sequence
tcaagttccaccaaatggcgcgaaa

SEQ ID NO: 143300 - DNA, 25 bp, Probe sequence
tacgtgccaatcgtttattctgggc

SEQ ID NO: 143301 - DNA, 25 bp, Probe sequence
tattggaccgactgtttttattatg

SEQ ID NO: 143302 - DNA, 25 bp, Probe sequence
atcattaagctgtttctgactttga

SEQ ID NO: 143303 - DNA, 25 bp, Probe sequence
agtgaagcaggactctcagagacat

SEQ ID NO: 143304 - DNA, 25 bp, Probe sequence
agctgtttctgactttgataataat

SEQ ID NO: 143305 - DNA, 25 bp, Probe sequence
acatacttacagtcatgctaattgg

SEQ ID NO: 143306 - DNA, 25 bp, Probe sequence
acagtcatgctaattggtacgtcga

SEQ ID NO: 143307 - DNA, 25 bp, Probe sequence
aaatctatattctctgcaacgttaa

SEQ ID NO: 143308 - DNA, 25 bp, Probe sequence
aagtgccggtttatcattaattgac

SEQ ID NO: 143309 - DNA, 25 bp, Probe sequence
aaggaaatcgcattctgggtacttt

SEQ ID NO: 143310 - DNA, 25 bp, Probe sequence
aatatccgcattcaaccaaagttaa

SEQ ID NO: 143311 - DNA, 25 bp, Probe sequence
aatcactttgcaaatatccgcattc

SEQ ID NO: 143312 - DNA, 25 bp, Probe sequence
aattgactattctattactagttta

SEQ ID NO: 143313 - DNA, 25 bp, Probe sequence
cactttttctttgattagtattagc

SEQ ID NO: 143314 - DNA, 25 bp, Probe sequence
ctctgcaacgttaagctacatactg

SEQ ID NO: 143315 - DNA, 25 bp, Probe sequence
cgcattctgggtactttcgacttac

SEQ ID NO: 143316 - DNA, 25 bp, Probe sequence
gctaattggtacgtcgaaactttct

SEQ ID NO: 143317 - DNA, 25 bp, Probe sequence
gctacatactgtttacaaatgctat

SEQ ID NO: 143318 - DNA, 25 bp, Probe sequence
gaaactttctatacgagcatccact

SEQ ID NO: 143319 - DNA, 25 bp, Probe sequence
gactctcagagacatcattagcaca

SEQ ID NO: 143320 - DNA, 25 bp, Probe sequence
gagcatccactatttggggtattat

SEQ ID NO: 143321 - DNA, 25 bp, Probe sequence
gagttttcagcgtattatttacatt

SEQ ID NO: 143322 - DNA, 25 bp, Probe sequence
gttagtggactatctgtggactata

SEQ ID NO: 143323 - DNA, 25 bp, Probe sequence
gttacatatacatttgttagtggac

SEQ ID NO: 143324 - DNA, 25 bp, Probe sequence
gttatctctagaattatgcgctcag

SEQ ID NO: 143325 - DNA, 25 bp, Probe sequence
gtacaagcatacatacttacagtca

SEQ ID NO: 143326 - DNA, 25 bp, Probe sequence
gtcaaattagtatttttttctcaag

SEQ ID NO: 143327 - DNA, 25 bp, Probe sequence
tggggtattatatatcttattttaa

SEQ ID NO: 143328 - DNA, 25 bp, Probe sequence
ttaccatccaaataagtgccggttt

SEQ ID NO: 143329 - DNA, 25 bp, Probe sequence
tctgggtactttcgacttacaattt

SEQ ID NO: 143330 - DNA, 25 bp, Probe sequence
tctatacgagcatccactatttggg

SEQ ID NO: 143331 - DNA, 25 bp, Probe sequence
tcttattttaattatcactttttct

SEQ ID NO: 143332 - DNA, 25 bp, Probe sequence
tagtttaattatacttaccatccaa

SEQ ID NO: 143333 - DNA, 25 bp, Probe sequence
tttttaatcattctagttatctcta

SEQ ID NO: 143334 - DNA, 25 bp, Probe sequence
ttttctcaagagttttcagcgtatt

SEQ ID NO: 143335 - DNA, 25 bp, Probe sequence
ttatgcgctcagatgctaatacaaa

SEQ ID NO: 143336 - DNA, 25 bp, Probe sequence
attgatgattattatttcaaatcca

SEQ ID NO: 143337 - DNA, 25 bp, Probe sequence
attactgtattgatgattattattt

SEQ ID NO: 143338 - DNA, 25 bp, Probe sequence
attaggaattattactgtattgatg

SEQ ID NO: 143339 - DNA, 25 bp, Probe sequence
attattactgtattgatgattatta

SEQ ID NO: 143340 - DNA, 25 bp, Probe sequence
attattatttcaaatccaattatat

SEQ ID NO: 143341 - DNA, 25 bp, Probe sequence
attatttcaaatccaattatatata

SEQ ID NO: 143342 - DNA, 25 bp, Probe sequence
atgattattatttcaaatccaatta

SEQ ID NO: 143343 - DNA, 25 bp, Probe sequence
aggaattattactgtattgatgatt

SEQ ID NO: 143344 - DNA, 25 bp, Probe sequence
actgtattgatgattattatttcaa

SEQ ID NO: 143345 - DNA, 25 bp, Probe sequence
aaattaggaattattactgtattga

SEQ ID NO: 143346 - DNA, 25 bp, Probe sequence
aaatgtggagataaatacgaaggta

SEQ ID NO: 143347 - DNA, 25 bp, Probe sequence
aattattactgtattgatgattatt

SEQ ID NO: 143348 - DNA, 25 bp, Probe sequence
aattaggaattattactgtattgat

SEQ ID NO: 143349 - DNA, 25 bp, Probe sequence
gaattattactgtattgatgattat

SEQ ID NO: 143350 - DNA, 25 bp, Probe sequence
gaaatgtggagataaatacgaaggt

SEQ ID NO: 143351 - DNA, 25 bp, Probe sequence
gatgattattatttcaaatccaatt

SEQ ID NO: 143352 - DNA, 25 bp, Probe sequence
gattattatttcaaatccaattata

SEQ ID NO: 143353 - DNA, 25 bp, Probe sequence
gtattgatgattattatttcaaatc

SEQ ID NO: 143354 - DNA, 25 bp, Probe sequence
ggaattattactgtattgatgatta

SEQ ID NO: 143355 - DNA, 25 bp, Probe sequence
tgattattatttcaaatccaattat

SEQ ID NO: 143356 - DNA, 25 bp, Probe sequence
tgatgattattatttcaaatccaat

SEQ ID NO: 143357 - DNA, 25 bp, Probe sequence
taaattaggaattattactgtattg

SEQ ID NO: 143358 - DNA, 25 bp, Probe sequence
tactgtattgatgattattatttca

SEQ ID NO: 143359 - DNA, 25 bp, Probe sequence
taggaattattactgtattgatgat

SEQ ID NO: 143360 - DNA, 25 bp, Probe sequence
tatttcaaatccaattatatataaa

SEQ ID NO: 143361 - DNA, 25 bp, Probe sequence
tattatttcaaatccaattatatat

SEQ ID NO: 143362 - DNA, 25 bp, Probe sequence
tattactgtattgatgattattatt

SEQ ID NO: 143363 - DNA, 25 bp, Probe sequence
tattgatgattattatttcaaatcc

SEQ ID NO: 143364 - DNA, 25 bp, Probe sequence
tttcaaatccaattatatataaata

SEQ ID NO: 143365 - DNA, 25 bp, Probe sequence
ttattactgtattgatgattattat

SEQ ID NO: 143366 - DNA, 25 bp, Probe sequence
ttattatttcaaatccaattatata

SEQ ID NO: 143367 - DNA, 25 bp, Probe sequence
ttaggaattattactgtattgatga

SEQ ID NO: 143368 - DNA, 25 bp, Probe sequence
ttactgtattgatgattattatttc

SEQ ID NO: 143369 - DNA, 25 bp, Probe sequence
ttgatgattattatttcaaatccaa

SEQ ID NO: 143370 - DNA, 25 bp, Probe sequence
attggtttacttccaaacacatcat

SEQ ID NO: 143371 - DNA, 25 bp, Probe sequence
attcgttgccagccttggttcagat

SEQ ID NO: 143372 - DNA, 25 bp, Probe sequence
attccattaggtcacgagtttaact

SEQ ID NO: 143373 - DNA, 25 bp, Probe sequence
atattctttcgaaactaggcagtac

SEQ ID NO: 143374 - DNA, 25 bp, Probe sequence
atactgctggtattgagaacttcat

SEQ ID NO: 143375 - DNA, 25 bp, Probe sequence
ataaaggtgttgcattctgccctca

SEQ ID NO: 143376 - DNA, 25 bp, Probe sequence
atgtcttaatcgttggtggtggtcc

SEQ ID NO: 143377 - DNA, 25 bp, Probe sequence
agatcgtttacgttctttatcaaat

SEQ ID NO: 143378 - DNA, 25 bp, Probe sequence
actggtgcaggttggcgtaagctaa

SEQ ID NO: 143379 - DNA, 25 bp, Probe sequence
actggttctgaattttcttctaact

SEQ ID NO: 143380 - DNA, 25 bp, Probe sequence
acaggttagtggtcgtgcacctaaa

SEQ ID NO: 143381 - DNA, 25 bp, Probe sequence
aaacatcatggcagtccctgctgtc

SEQ ID NO: 143382 - DNA, 25 bp, Probe sequence
aacagtcattattgctactggtgca

SEQ ID NO: 143383 - DNA, 25 bp, Probe sequence
aacttagcagcgcacattgatcaat

SEQ ID NO: 143384 - DNA, 25 bp, Probe sequence
aaccctaacatcacgcattctatga

SEQ ID NO: 143385 - DNA, 25 bp, Probe sequence
aatgtcctgatgtcgttcaagcact

SEQ ID NO: 143386 - DNA, 25 bp, Probe sequence
caccggcgaagaacatctacttaac

SEQ ID NO: 143387 - DNA, 25 bp, Probe sequence
ctggtatagttgctgatcgtatcgg

SEQ ID NO: 143388 - DNA, 25 bp, Probe sequence
cgagtttaactcacttgttttagca

SEQ ID NO: 143389 - DNA, 25 bp, Probe sequence
cctggaatatttgctgctggcgatg

SEQ ID NO: 143390 - DNA, 25 bp, Probe sequence
gctgctggcgatgtcacagatcaga

SEQ ID NO: 143391 - DNA, 25 bp, Probe sequence
gaaggttcattccattttgaaacat

SEQ ID NO: 143392 - DNA, 25 bp, Probe sequence
gacgtagcagttatcggtggcggta

SEQ ID NO: 143393 - DNA, 25 bp, Probe sequence
gaccttgctggtatcgttaatcatg

SEQ ID NO: 143394 - DNA, 25 bp, Probe sequence
gattgatggtgcagtgttccgtgaa

SEQ ID NO: 143395 - DNA, 25 bp, Probe sequence
gtggcggtaactctggggttgaagc

SEQ ID NO: 143396 - DNA, 25 bp, Probe sequence
gttacattattcgaattcgctagcg

SEQ ID NO: 143397 - DNA, 25 bp, Probe sequence
gtggtagtgcagcgatttacacagc

SEQ ID NO: 143398 - DNA, 25 bp, Probe sequence
ggggttgaagcagcaattgaccttg

SEQ ID NO: 143399 - DNA, 25 bp, Probe sequence
ggcaatggtcgtatgacaatccaag

SEQ ID NO: 143400 - DNA, 25 bp, Probe sequence
ggcgtaagctaaacattccaggtga

SEQ ID NO: 143401 - DNA, 25 bp, Probe sequence
tggtggtcctgctagtggtagtgca

SEQ ID NO: 143402 - DNA, 25 bp, Probe sequence
taggcagtacggcagatgcatctga

SEQ ID NO: 143403 - DNA, 25 bp, Probe sequence
tttcaatgggcgctggtgcaaatgc

SEQ ID NO: 143404 - DNA, 25 bp, Probe sequence
attttgataccaatactaaaagttg

SEQ ID NO: 143405 - DNA, 25 bp, Probe sequence
atatgacctaacaatcattttgata

SEQ ID NO: 143406 - DNA, 25 bp, Probe sequence
atactaaaagttgcatatccgtttt

SEQ ID NO: 143407 - DNA, 25 bp, Probe sequence
ataccaatactaaaagttgcatatc

SEQ ID NO: 143408 - DNA, 25 bp, Probe sequence
atcattttgataccaatactaaaag

SEQ ID NO: 143409 - DNA, 25 bp, Probe sequence
atgacctaacaatcattttgatacc

SEQ ID NO: 143410 - DNA, 25 bp, Probe sequence
agaatatgacctaacaatcattttg

SEQ ID NO: 143411 - DNA, 25 bp, Probe sequence
accaatactaaaagttgcatatccg

SEQ ID NO: 143412 - DNA, 25 bp, Probe sequence
acctaacaatcattttgataccaat

SEQ ID NO: 143413 - DNA, 25 bp, Probe sequence
acaatcattttgataccaatactaa

SEQ ID NO: 143414 - DNA, 25 bp, Probe sequence
aacaatcattttgataccaatacta

SEQ ID NO: 143415 - DNA, 25 bp, Probe sequence
aatcattttgataccaatactaaaa

SEQ ID NO: 143416 - DNA, 25 bp, Probe sequence
aatactaaaagttgcatatccgttt

SEQ ID NO: 143417 - DNA, 25 bp, Probe sequence
aatatgacctaacaatcattttgat

SEQ ID NO: 143418 - DNA, 25 bp, Probe sequence
caatactaaaagttgcatatccgtt

SEQ ID NO: 143419 - DNA, 25 bp, Probe sequence
caatcattttgataccaatactaaa

SEQ ID NO: 143420 - DNA, 25 bp, Probe sequence
cattttgataccaatactaaaagtt

SEQ ID NO: 143421 - DNA, 25 bp, Probe sequence
ctaacaatcattttgataccaatac

SEQ ID NO: 143422 - DNA, 25 bp, Probe sequence
cctaacaatcattttgataccaata

SEQ ID NO: 143423 - DNA, 25 bp, Probe sequence
ccaatactaaaagttgcatatccgt

SEQ ID NO: 143424 - DNA, 25 bp, Probe sequence
gaatatgacctaacaatcattttga

SEQ ID NO: 143425 - DNA, 25 bp, Probe sequence
gacctaacaatcattttgataccaa

SEQ ID NO: 143426 - DNA, 25 bp, Probe sequence
gataccaatactaaaagttgcatat

SEQ ID NO: 143427 - DNA, 25 bp, Probe sequence
gatagaatatgacctaacaatcatt

SEQ ID NO: 143428 - DNA, 25 bp, Probe sequence
tgataccaatactaaaagttgcata

SEQ ID NO: 143429 - DNA, 25 bp, Probe sequence
tgacctaacaatcattttgatacca

SEQ ID NO: 143430 - DNA, 25 bp, Probe sequence
tcattttgataccaatactaaaagt

SEQ ID NO: 143431 - DNA, 25 bp, Probe sequence
taacaatcattttgataccaatact

SEQ ID NO: 143432 - DNA, 25 bp, Probe sequence
tactaaaagttgcatatccgttttt

SEQ ID NO: 143433 - DNA, 25 bp, Probe sequence
taccaatactaaaagttgcatatcc

SEQ ID NO: 143434 - DNA, 25 bp, Probe sequence
tatgacctaacaatcattttgatac

SEQ ID NO: 143435 - DNA, 25 bp, Probe sequence
tttgataccaatactaaaagttgca

SEQ ID NO: 143436 - DNA, 25 bp, Probe sequence
ttttgataccaatactaaaagttgc

SEQ ID NO: 143437 - DNA, 25 bp, Probe sequence
ttgataccaatactaaaagttgcat

SEQ ID NO: 143438 - DNA, 25 bp, Probe sequence
attacattaaatcttgtcaaagcat

SEQ ID NO: 143439 - DNA, 25 bp, Probe sequence
attaggtggcgaaccattttgtaat

SEQ ID NO: 143440 - DNA, 25 bp, Probe sequence
atagctttgttgacggtgaaggagt

SEQ ID NO: 143441 - DNA, 25 bp, Probe sequence
atcttgtcaaagcatttcgagcacg

SEQ ID NO: 143442 - DNA, 25 bp, Probe sequence
acacttattcaaacctgatttacca

SEQ ID NO: 143443 - DNA, 25 bp, Probe sequence
acaaagcctcacaaaagttcagata

SEQ ID NO: 143444 - DNA, 25 bp, Probe sequence
aaagcatttcgagcacgttttggaa

SEQ ID NO: 143445 - DNA, 25 bp, Probe sequence
aagcctcacaaaagttcagatatgg

SEQ ID NO: 143446 - DNA, 25 bp, Probe sequence
aagacaatttgggtatggactggat

SEQ ID NO: 143447 - DNA, 25 bp, Probe sequence
aaggttctttaaatcaacgcattat

SEQ ID NO: 143448 - DNA, 25 bp, Probe sequence
aatcaacgcattatagatgtacaac

SEQ ID NO: 143449 - DNA, 25 bp, Probe sequence
caatcactctcgcatgcgcgtatga

SEQ ID NO: 143450 - DNA, 25 bp, Probe sequence
catacattgacgttttagtagatgg

SEQ ID NO: 143451 - DNA, 25 bp, Probe sequence
ctctcgcatgcgcgtatgattgaat

SEQ ID NO: 143452 - DNA, 25 bp, Probe sequence
cgcatgcgcgtatgattgaatatat

SEQ ID NO: 143453 - DNA, 25 bp, Probe sequence
gcagtgtttatgtatcaggatgtcc

SEQ ID NO: 143454 - DNA, 25 bp, Probe sequence
gcagaaatattagatgattgcgatc

SEQ ID NO: 143455 - DNA, 25 bp, Probe sequence
gaatcaaatagctttgttgacggtg

SEQ ID NO: 143456 - DNA, 25 bp, Probe sequence
gaacgtcgagagttattatcataca

SEQ ID NO: 143457 - DNA, 25 bp, Probe sequence
gagttattatcatacattgacgttt

SEQ ID NO: 143458 - DNA, 25 bp, Probe sequence
gatgtacaacaatcactctcgcatg

SEQ ID NO: 143459 - DNA, 25 bp, Probe sequence
gattatatatctgggctaagtctat

SEQ ID NO: 143460 - DNA, 25 bp, Probe sequence
gattgcgatcatgattatatatctg

SEQ ID NO: 143461 - DNA, 25 bp, Probe sequence
gtggcgaaccattttgtaatttgga

SEQ ID NO: 143462 - DNA, 25 bp, Probe sequence
gggtatggactggatttttatatga

SEQ ID NO: 143463 - DNA, 25 bp, Probe sequence
ggtgaaggagtaagatgcagtgttt

SEQ ID NO: 143464 - DNA, 25 bp, Probe sequence
ggctaagtctattaggtggcgaacc

SEQ ID NO: 143465 - DNA, 25 bp, Probe sequence
tgtcaaagcatttcgagcacgtttt

SEQ ID NO: 143466 - DNA, 25 bp, Probe sequence
tgatttaccatataaaggttcttta

SEQ ID NO: 143467 - DNA, 25 bp, Probe sequence
tcactctcgcatgcgcgtatgattg

SEQ ID NO: 143468 - DNA, 25 bp, Probe sequence
tcaggatgtccatttaattgtgttg

SEQ ID NO: 143469 - DNA, 25 bp, Probe sequence
tatacaacacttattcaaacctgat

SEQ ID NO: 143470 - DNA, 25 bp, Probe sequence
tattcaaacctgatttaccatataa

SEQ ID NO: 143471 - DNA, 25 bp, Probe sequence
ttcagatatggcgagaaatacactg

SEQ ID NO: 143472 - DNA, 25 bp, Probe sequence
atatggtggctgtacggttgaccgc

SEQ ID NO: 143473 - DNA, 25 bp, Probe sequence
attacttagtacatatgcacgacat

SEQ ID NO: 143474 - DNA, 25 bp, Probe sequence
atggtcgttgtaatcttggtgttgt

SEQ ID NO: 143475 - DNA, 25 bp, Probe sequence
atggacagacaccttttgtaacatt

SEQ ID NO: 143476 - DNA, 25 bp, Probe sequence
atggcattagaatctgccggtaata

SEQ ID NO: 143477 - DNA, 25 bp, Probe sequence
aggggacatacattttcacgactta

SEQ ID NO: 143478 - DNA, 25 bp, Probe sequence
acagcaggtatcgtttctaaatctt

SEQ ID NO: 143479 - DNA, 25 bp, Probe sequence
aaaggatttaaatgcccgaactgtg

SEQ ID NO: 143480 - DNA, 25 bp, Probe sequence
aaagcgccaatgggttgtcgttcat

SEQ ID NO: 143481 - DNA, 25 bp, Probe sequence
aaactctttccattatgatgtacgt

SEQ ID NO: 143482 - DNA, 25 bp, Probe sequence
aacagctactgttttctatggtcca

SEQ ID NO: 143483 - DNA, 25 bp, Probe sequence
aacgtgcaacgatttcaatgggcta

SEQ ID NO: 143484 - DNA, 25 bp, Probe sequence
aagaccgcacgacagcgattttccc

SEQ ID NO: 143485 - DNA, 25 bp, Probe sequence
aagctatcttaaatactcgtatcaa

SEQ ID NO: 143486 - DNA, 25 bp, Probe sequence
aagatgctgtaccgaataacgcacc

SEQ ID NO: 143487 - DNA, 25 bp, Probe sequence
aagatcctgctattgttaacgaaaa

SEQ ID NO: 143488 - DNA, 25 bp, Probe sequence
caaactgcatcagcgcagcttgtac

SEQ ID NO: 143489 - DNA, 25 bp, Probe sequence
gaaccaactttagtccgcaagatcc

SEQ ID NO: 143490 - DNA, 25 bp, Probe sequence
gacttagattatcatccattccaac

SEQ ID NO: 143491 - DNA, 25 bp, Probe sequence
gatcgtttttgtcgtttagaccaag

SEQ ID NO: 143492 - DNA, 25 bp, Probe sequence
gtatgggactactcttatgacaaag

SEQ ID NO: 143493 - DNA, 25 bp, Probe sequence
gtacgccgagtgaatcgctaacgga

SEQ ID NO: 143494 - DNA, 25 bp, Probe sequence
gtcgcaaaattcaacaagctatctt

SEQ ID NO: 143495 - DNA, 25 bp, Probe sequence
gtgttgttacacttaatttacctag

SEQ ID NO: 143496 - DNA, 25 bp, Probe sequence
gtggtggtttcattcactattgtga

SEQ ID NO: 143497 - DNA, 25 bp, Probe sequence
gggtttgatttctaaagatcctgct

SEQ ID NO: 143498 - DNA, 25 bp, Probe sequence
ggttcagtatttacagtacgccgag

SEQ ID NO: 143499 - DNA, 25 bp, Probe sequence
ggttgaccgcgttgacgaattactt

SEQ ID NO: 143500 - DNA, 25 bp, Probe sequence
ggattcggcttaggtacagatcatt

SEQ ID NO: 143501 - DNA, 25 bp, Probe sequence
ggcaacgcgaatgtaacttcaccaa

SEQ ID NO: 143502 - DNA, 25 bp, Probe sequence
ggccgtcataaagaaatttgcgcac

SEQ ID NO: 143503 - DNA, 25 bp, Probe sequence
tgtcgttcatttttaccaagttgga

SEQ ID NO: 143504 - DNA, 25 bp, Probe sequence
tccgcaagatccgaactatgacatt

SEQ ID NO: 143505 - DNA, 25 bp, Probe sequence
taggcaatccagttcaacgtccagt

SEQ ID NO: 143506 - DNA, 25 bp, Probe sequence
attgcgccacctgaatttgcattca

SEQ ID NO: 143507 - DNA, 25 bp, Probe sequence
atgaaaccggtatgcttaaagcgat

SEQ ID NO: 143508 - DNA, 25 bp, Probe sequence
agagcgcatgcgccgaatgcattaa

SEQ ID NO: 143509 - DNA, 25 bp, Probe sequence
acgttgttattatgtttatctttgc

SEQ ID NO: 143510 - DNA, 25 bp, Probe sequence
aaatgaattaccgcaaacacaagat

SEQ ID NO: 143511 - DNA, 25 bp, Probe sequence
aaacagcagggcaatttggtgtacc

SEQ ID NO: 143512 - DNA, 25 bp, Probe sequence
aagcgcggcgattatgaacatggta

SEQ ID NO: 143513 - DNA, 25 bp, Probe sequence
aatgggtgaatacagctttaacttt

SEQ ID NO: 143514 - DNA, 25 bp, Probe sequence
aatggggctcattattattatttca

SEQ ID NO: 143515 - DNA, 25 bp, Probe sequence
aatgacagctttaattggcacaata

SEQ ID NO: 143516 - DNA, 25 bp, Probe sequence
aattgtaggtttactcattgccaaa

SEQ ID NO: 143517 - DNA, 25 bp, Probe sequence
gccggtgcggtaacatttttgcttt

SEQ ID NO: 143518 - DNA, 25 bp, Probe sequence
tgaacatggtaccttggggaggtcc

SEQ ID NO: 143519 - DNA, 25 bp, Probe sequence
gcagaggcaaacatgggcacgtata

SEQ ID NO: 143520 - DNA, 25 bp, Probe sequence
gacagatttggttggattttttgct

SEQ ID NO: 143521 - DNA, 25 bp, Probe sequence
gacgcttattattttgctgtgttac

SEQ ID NO: 143522 - DNA, 25 bp, Probe sequence
gagatcaagatgtaaggtttcctgt

SEQ ID NO: 143523 - DNA, 25 bp, Probe sequence
gatagtggtttattcaagccgcttg

SEQ ID NO: 143524 - DNA, 25 bp, Probe sequence
gttaataaatattgcgccacctgaa

SEQ ID NO: 143525 - DNA, 25 bp, Probe sequence
gtatgacaatcataccttgcttagg

SEQ ID NO: 143526 - DNA, 25 bp, Probe sequence
gtatgcattcttttggatttgggga

SEQ ID NO: 143527 - DNA, 25 bp, Probe sequence
gtaggtttacttggcgtaccattag

SEQ ID NO: 143528 - DNA, 25 bp, Probe sequence
gtaggaccatacttgcatattattg

SEQ ID NO: 143529 - DNA, 25 bp, Probe sequence
gtaacatttttgctttctattcctg

SEQ ID NO: 143530 - DNA, 25 bp, Probe sequence
gtgattcctgcagaagtaggaccat

SEQ ID NO: 143531 - DNA, 25 bp, Probe sequence
gtggttaacagtaatggggctcatt

SEQ ID NO: 143532 - DNA, 25 bp, Probe sequence
gggttagatcaagtcatcaacgttg

SEQ ID NO: 143533 - DNA, 25 bp, Probe sequence
ggttggcaattggtttagcagaggc

SEQ ID NO: 143534 - DNA, 25 bp, Probe sequence
tgcagcaggtatgtttttaggtgta

SEQ ID NO: 143535 - DNA, 25 bp, Probe sequence
tcaagccgcttgtcaaacgcttaat

SEQ ID NO: 143536 - DNA, 25 bp, Probe sequence
taatgatggctgcagtgattattgc

SEQ ID NO: 143537 - DNA, 25 bp, Probe sequence
tactattagcattaagcgcggcgat

SEQ ID NO: 143538 - DNA, 25 bp, Probe sequence
tattttctttggcatcatgaacgat

SEQ ID NO: 143539 - DNA, 25 bp, Probe sequence
ttttcaccagccttatggttggcaa

SEQ ID NO: 143540 - DNA, 25 bp, Probe sequence
atttaagcgataatgatatgcgttt

SEQ ID NO: 143541 - DNA, 25 bp, Probe sequence
ataatgaaggatttaagcgataatg

SEQ ID NO: 143542 - DNA, 25 bp, Probe sequence
atgaaggatttaagcgataatgata

SEQ ID NO: 143543 - DNA, 25 bp, Probe sequence
atgatatgcgttttaaatatgaata

SEQ ID NO: 143544 - DNA, 25 bp, Probe sequence
aggatttaagcgataatgatatgcg

SEQ ID NO: 143545 - DNA, 25 bp, Probe sequence
agcgataatgatatgcgttttaaat

SEQ ID NO: 143546 - DNA, 25 bp, Probe sequence
aagcgataatgatatgcgttttaaa

SEQ ID NO: 143547 - DNA, 25 bp, Probe sequence
aaggatttaagcgataatgatatgc

SEQ ID NO: 143548 - DNA, 25 bp, Probe sequence
aatgatatgcgttttaaatatgaat

SEQ ID NO: 143549 - DNA, 25 bp, Probe sequence
aatgaaggatttaagcgataatgat

SEQ ID NO: 143550 - DNA, 25 bp, Probe sequence
aataatgaaggatttaagcgataat

SEQ ID NO: 143551 - DNA, 25 bp, Probe sequence
aatagtctaataatgaaggatttaa

SEQ ID NO: 143552 - DNA, 25 bp, Probe sequence
ctttgtgaatagtctaataatgaag

SEQ ID NO: 143553 - DNA, 25 bp, Probe sequence
cgataatgatatgcgttttaaatat

SEQ ID NO: 143554 - DNA, 25 bp, Probe sequence
gcgataatgatatgcgttttaaata

SEQ ID NO: 143555 - DNA, 25 bp, Probe sequence
gctttgtgaatagtctaataatgaa

SEQ ID NO: 143556 - DNA, 25 bp, Probe sequence
gaatagtctaataatgaaggattta

SEQ ID NO: 143557 - DNA, 25 bp, Probe sequence
gaaggatttaagcgataatgatatg

SEQ ID NO: 143558 - DNA, 25 bp, Probe sequence
gagaaaaagatacgtagaacaaact

SEQ ID NO: 143559 - DNA, 25 bp, Probe sequence
gataatgatatgcgttttaaatatg

SEQ ID NO: 143560 - DNA, 25 bp, Probe sequence
gatatgcgttttaaatatgaatatt

SEQ ID NO: 143561 - DNA, 25 bp, Probe sequence
gatttaagcgataatgatatgcgtt

SEQ ID NO: 143562 - DNA, 25 bp, Probe sequence
gtctaataatgaaggatttaagcga

SEQ ID NO: 143563 - DNA, 25 bp, Probe sequence
gtgaatagtctaataatgaaggatt

SEQ ID NO: 143564 - DNA, 25 bp, Probe sequence
ggatttaagcgataatgatatgcgt

SEQ ID NO: 143565 - DNA, 25 bp, Probe sequence
ggctttgtgaatagtctaataatga

SEQ ID NO: 143566 - DNA, 25 bp, Probe sequence
tgatatgcgttttaaatatgaatat

SEQ ID NO: 143567 - DNA, 25 bp, Probe sequence
tgaaggatttaagcgataatgatat

SEQ ID NO: 143568 - DNA, 25 bp, Probe sequence
taatgatatgcgttttaaatatgaa

SEQ ID NO: 143569 - DNA, 25 bp, Probe sequence
taatgaaggatttaagcgataatga

SEQ ID NO: 143570 - DNA, 25 bp, Probe sequence
taagcgataatgatatgcgttttaa

SEQ ID NO: 143571 - DNA, 25 bp, Probe sequence
tatgcgttttaaatatgaatattac

SEQ ID NO: 143572 - DNA, 25 bp, Probe sequence
tttaagcgataatgatatgcgtttt

SEQ ID NO: 143573 - DNA, 25 bp, Probe sequence
ttaagcgataatgatatgcgtttta

SEQ ID NO: 143574 - DNA, 25 bp, Probe sequence
attatggcagagcttgaggcgttat

SEQ ID NO: 143575 - DNA, 25 bp, Probe sequence
atgagccacgtgtcaatgaagcggt

SEQ ID NO: 143576 - DNA, 25 bp, Probe sequence
agttcgtatatcgactttttatata

SEQ ID NO: 143577 - DNA, 25 bp, Probe sequence
agacgcgtatctagttattgcagca

SEQ ID NO: 143578 - DNA, 25 bp, Probe sequence
agcaaccaatgagccacgtgtcaat

SEQ ID NO: 143579 - DNA, 25 bp, Probe sequence
agctcaatttttagcgtggttggat

SEQ ID NO: 143580 - DNA, 25 bp, Probe sequence
agcatgccctttttaataatgttgg

SEQ ID NO: 143581 - DNA, 25 bp, Probe sequence
agcttgaggcgttatatccaccatc

SEQ ID NO: 143582 - DNA, 25 bp, Probe sequence
acctgagcatgccctttttaataat

SEQ ID NO: 143583 - DNA, 25 bp, Probe sequence
aaccaatgagccacgtgtcaatgaa

SEQ ID NO: 143584 - DNA, 25 bp, Probe sequence
aatgttgtatttccaagtgcactac

SEQ ID NO: 143585 - DNA, 25 bp, Probe sequence
caagctcaatttttagcgtggttgg

SEQ ID NO: 143586 - DNA, 25 bp, Probe sequence
ctttttatatacttgccgacagaaa

SEQ ID NO: 143587 - DNA, 25 bp, Probe sequence
cgactttttatatacttgccgacag

SEQ ID NO: 143588 - DNA, 25 bp, Probe sequence
gccacgtgtcaatgaagcggtaaaa

SEQ ID NO: 143589 - DNA, 25 bp, Probe sequence
gcgatattgtagacgcgtatctagt

SEQ ID NO: 143590 - DNA, 25 bp, Probe sequence
gcgtatctagttattgcagcaacca

SEQ ID NO: 143591 - DNA, 25 bp, Probe sequence
gcaagtcgtcgggcacaaacattaa

SEQ ID NO: 143592 - DNA, 25 bp, Probe sequence
gaaccaagcgatattgtagacgcgt

SEQ ID NO: 143593 - DNA, 25 bp, Probe sequence
gacaaacaagctcaatttttagcgt

SEQ ID NO: 143594 - DNA, 25 bp, Probe sequence
gagccacgtgtcaatgaagcggtaa

SEQ ID NO: 143595 - DNA, 25 bp, Probe sequence
gagatgcatcaaatggcaatgttgt

SEQ ID NO: 143596 - DNA, 25 bp, Probe sequence
agagcttgaggcgttatatccacca

SEQ ID NO: 143597 - DNA, 25 bp, Probe sequence
gttgcaagtcgtcgggcacaaacat

SEQ ID NO: 143598 - DNA, 25 bp, Probe sequence
gttattgcagcaaccaatgagccac

SEQ ID NO: 143599 - DNA, 25 bp, Probe sequence
gtccgacaatcactgaaaaacttca

SEQ ID NO: 143600 - DNA, 25 bp, Probe sequence
ggcaatgttgtatttccaagtgcac

SEQ ID NO: 143601 - DNA, 25 bp, Probe sequence
ggcagagcttgaggcgttatatcca

SEQ ID NO: 143602 - DNA, 25 bp, Probe sequence
taatgttggagatgcatcaaatggc

SEQ ID NO: 143603 - DNA, 25 bp, Probe sequence
tatatacttgccgacagaaaataaa

SEQ ID NO: 143604 - DNA, 25 bp, Probe sequence
ttacctgagcatgccctttttaata

SEQ ID NO: 143605 - DNA, 25 bp, Probe sequence
ttgcagcaaccaatgagccacgtgt

SEQ ID NO: 143606 - DNA, 25 bp, Probe sequence
ttgaggcgttatatccaccatcata

SEQ ID NO: 143607 - DNA, 25 bp, Probe sequence
ttgtatttccaagtgcactacaccg

SEQ ID NO: 143608 - DNA, 25 bp, Probe sequence
gtagcattaccgcaaaacgaccctg

SEQ ID NO: 143609 - DNA, 25 bp, Probe sequence
atgaagtgcatattaccgttggtac

SEQ ID NO: 143610 - DNA, 25 bp, Probe sequence
aggtaatgccatgcgtttagctgaa

SEQ ID NO: 143611 - DNA, 25 bp, Probe sequence
agtgctatatggttctgaatcaggt

SEQ ID NO: 143612 - DNA, 25 bp, Probe sequence
acacgcgtagatttagcattttcaa

SEQ ID NO: 143613 - DNA, 25 bp, Probe sequence
aaaccaggcgatatagtaccaattt

SEQ ID NO: 143614 - DNA, 25 bp, Probe sequence
aacattaacagagagccaacaacag

SEQ ID NO: 143615 - DNA, 25 bp, Probe sequence
aatccgaacttcaaatttccgatga

SEQ ID NO: 143616 - DNA, 25 bp, Probe sequence
ctgagcgtatatgtaagcgtgtaga

SEQ ID NO: 143617 - DNA, 25 bp, Probe sequence
gccacatatcgaagctaatcagcgg

SEQ ID NO: 143618 - DNA, 25 bp, Probe sequence
gcaaaacgaccctgaattggttgaa

SEQ ID NO: 143619 - DNA, 25 bp, Probe sequence
gcaatctccggtgccaattaatgat

SEQ ID NO: 143620 - DNA, 25 bp, Probe sequence
gaagacgataacgcacctaatttaa

SEQ ID NO: 143621 - DNA, 25 bp, Probe sequence
gaagcactaacatcacattttgaat

SEQ ID NO: 143622 - DNA, 25 bp, Probe sequence
gaaaatggaaacttaacacgcgtag

SEQ ID NO: 143623 - DNA, 25 bp, Probe sequence
gacgcagaaaagtggatggcagaca

SEQ ID NO: 143624 - DNA, 25 bp, Probe sequence
gagatattcagtactagctttaggt

SEQ ID NO: 143625 - DNA, 25 bp, Probe sequence
gagtattcgatttctagtagtttta

SEQ ID NO: 143626 - DNA, 25 bp, Probe sequence
gatcaacaccgtagttctgactttt

SEQ ID NO: 143627 - DNA, 25 bp, Probe sequence
gatttatttattattacgtctactc

SEQ ID NO: 143628 - DNA, 25 bp, Probe sequence
gttaggttgggatccgcaatctccg

SEQ ID NO: 143629 - DNA, 25 bp, Probe sequence
gtgaatcaattaagtctgccaaaga

SEQ ID NO: 143630 - DNA, 25 bp, Probe sequence
gtgtatgctcggttcattttgctga

SEQ ID NO: 143631 - DNA, 25 bp, Probe sequence
gtggcttagtggttttttactagct

SEQ ID NO: 143632 - DNA, 25 bp, Probe sequence
ggtacggttcgttatcaagcacatg

SEQ ID NO: 143633 - DNA, 25 bp, Probe sequence
ggagaaccgcctgataatgcatggg

SEQ ID NO: 143634 - DNA, 25 bp, Probe sequence
ggcgaaagatgtccatcaagccatt

SEQ ID NO: 143635 - DNA, 25 bp, Probe sequence
tcaaatccttagaaaattaccacca

SEQ ID NO: 143636 - DNA, 25 bp, Probe sequence
taatgcatgggatttctttgaattt

SEQ ID NO: 143637 - DNA, 25 bp, Probe sequence
tacatctaatagtccatttacagaa

SEQ ID NO: 143638 - DNA, 25 bp, Probe sequence
tagaaaatctaggcgctgagcgtat

SEQ ID NO: 143639 - DNA, 25 bp, Probe sequence
tatggcaacgccagatgaagtgcat

SEQ ID NO: 143640 - DNA, 25 bp, Probe sequence
ttattacgtctactcatggtgaagg

SEQ ID NO: 143641 - DNA, 25 bp, Probe sequence
ttaacaatctgctgcaaacattaac

SEQ ID NO: 143642 - DNA, 25 bp, Probe sequence
attattgcaagaatcttcatcttaa

SEQ ID NO: 143643 - DNA, 25 bp, Probe sequence
attttgacaatcgacaaccaggttc

SEQ ID NO: 143644 - DNA, 25 bp, Probe sequence
atatctgtgaacgggaacgatgaac

SEQ ID NO: 143645 - DNA, 25 bp, Probe sequence
atcgacaaccaggttctaatgaaga

SEQ ID NO: 143646 - DNA, 25 bp, Probe sequence
agttgttaatactgcaacagaatgt

SEQ ID NO: 143647 - DNA, 25 bp, Probe sequence
agaaatcttgaaaattagtcgtgag

SEQ ID NO: 143648 - DNA, 25 bp, Probe sequence
acgggaacgatgaacatccgttatt

SEQ ID NO: 143649 - DNA, 25 bp, Probe sequence
aaccaggttctaatgaagaaatctt

SEQ ID NO: 143650 - DNA, 25 bp, Probe sequence
aatggaagatccattggatatatcg

SEQ ID NO: 143651 - DNA, 25 bp, Probe sequence
aatgttgtaaatcgattcttgccaa

SEQ ID NO: 143652 - DNA, 25 bp, Probe sequence
aatataaggatcgtgggtttgtagt

SEQ ID NO: 143653 - DNA, 25 bp, Probe sequence
catccgttatttacgcatttaaaga

SEQ ID NO: 143654 - DNA, 25 bp, Probe sequence
cgattcttgccaatggaagatccat

SEQ ID NO: 143655 - DNA, 25 bp, Probe sequence
gcgaacaattgaaaaaactagagac

SEQ ID NO: 143656 - DNA, 25 bp, Probe sequence
gctaaaatatctgtgaacgggaacg

SEQ ID NO: 143657 - DNA, 25 bp, Probe sequence
gcaacagaatgtatatatagcgaac

SEQ ID NO: 143658 - DNA, 25 bp, Probe sequence
gaatctttgggtccccaataaaatg

SEQ ID NO: 143659 - DNA, 25 bp, Probe sequence
gaacatccgttatttacgcatttaa

SEQ ID NO: 143660 - DNA, 25 bp, Probe sequence
gaaatgtgtatgatatcgaagtaag

SEQ ID NO: 143661 - DNA, 25 bp, Probe sequence
gaaatattattgcaagaatcttcat

SEQ ID NO: 143662 - DNA, 25 bp, Probe sequence
gacaatcgacaaccaggttctaatg

SEQ ID NO: 143663 - DNA, 25 bp, Probe sequence
gatgaacatccgttatttacgcatt

SEQ ID NO: 143664 - DNA, 25 bp, Probe sequence
gtttgtagtgttgagttttccgaat

SEQ ID NO: 143665 - DNA, 25 bp, Probe sequence
gttgtaaatcgattcttgccaatgg

SEQ ID NO: 143666 - DNA, 25 bp, Probe sequence
gtagtgttgagttttccgaataata

SEQ ID NO: 143667 - DNA, 25 bp, Probe sequence
gtccccaataaaatggaatttcaca

SEQ ID NO: 143668 - DNA, 25 bp, Probe sequence
gtaaatcgattcttgccaatggaag

SEQ ID NO: 143669 - DNA, 25 bp, Probe sequence
ggatcgtgggtttgtagtgttgagt

SEQ ID NO: 143670 - DNA, 25 bp, Probe sequence
tgaacaaccaggaatctttgggtcc

SEQ ID NO: 143671 - DNA, 25 bp, Probe sequence
ttttccgaataataattttgacaat

SEQ ID NO: 143672 - DNA, 25 bp, Probe sequence
taaggatcgtgggtttgtagtgttg

SEQ ID NO: 143673 - DNA, 25 bp, Probe sequence
taaagtgattttagttgttaatact

SEQ ID NO: 143674 - DNA, 25 bp, Probe sequence
ttcacaaaatttataatcgatcgac

SEQ ID NO: 143675 - DNA, 25 bp, Probe sequence
ttgacaatcgacaaccaggttctaa

SEQ ID NO: 143676 - DNA, 25 bp, Probe sequence
attgatgaaaccctacgtggcagaa

SEQ ID NO: 143677 - DNA, 25 bp, Probe sequence
aaccctacgtggcagaatggaaacg

SEQ ID NO: 143678 - DNA, 25 bp, Probe sequence
atctctaagattttatcgttcgaaa

SEQ ID NO: 143679 - DNA, 25 bp, Probe sequence
aggcgacagatggcgacgtggaagc

SEQ ID NO: 143680 - DNA, 25 bp, Probe sequence
atggcgacgtggaagcaattaatca

SEQ ID NO: 143681 - DNA, 25 bp, Probe sequence
acctcaaaacgttcattacgtcgca

SEQ ID NO: 143682 - DNA, 25 bp, Probe sequence
acgttcattacgtcgcatgacagac

SEQ ID NO: 143683 - DNA, 25 bp, Probe sequence
aaaggcgacagatggcgacgtggaa

SEQ ID NO: 143684 - DNA, 25 bp, Probe sequence
aaaacgttcattacgtcgcatgaca

SEQ ID NO: 143685 - DNA, 25 bp, Probe sequence
cattacgtcgcatgacagacgaata

SEQ ID NO: 143686 - DNA, 25 bp, Probe sequence
cttccccctcattgtaaaggcgaca

SEQ ID NO: 143687 - DNA, 25 bp, Probe sequence
cccctcattgtaaaggcgacagatg

SEQ ID NO: 143688 - DNA, 25 bp, Probe sequence
gcgacagatggcgacgtggaagcaa

SEQ ID NO: 143689 - DNA, 25 bp, Probe sequence
gcgacgtggaagcaattaatcagat

SEQ ID NO: 143690 - DNA, 25 bp, Probe sequence
gaatggaaacgaaactcatctctaa

SEQ ID NO: 143691 - DNA, 25 bp, Probe sequence
gaaactcatctctaagattttatcg

SEQ ID NO: 143692 - DNA, 25 bp, Probe sequence
tgaaaccctacgtggcagaatggaa

SEQ ID NO: 143693 - DNA, 25 bp, Probe sequence
gacagatggcgacgtggaagcaatt

SEQ ID NO: 143694 - DNA, 25 bp, Probe sequence
gacagacgaatatggaaattctcat

SEQ ID NO: 143695 - DNA, 25 bp, Probe sequence
gagggtatacctcaaaacgttcatt

SEQ ID NO: 143696 - DNA, 25 bp, Probe sequence
gatgaaaccctacgtggcagaatgg

SEQ ID NO: 143697 - DNA, 25 bp, Probe sequence
gattttatcgttcgaaattaaatag

SEQ ID NO: 143698 - DNA, 25 bp, Probe sequence
gttcattacgtcgcatgacagacga

SEQ ID NO: 143699 - DNA, 25 bp, Probe sequence
gttaaacattatcgagggtatacct

SEQ ID NO: 143700 - DNA, 25 bp, Probe sequence
gttattgatgaaaccctacgtggca

SEQ ID NO: 143701 - DNA, 25 bp, Probe sequence
gtaaaggcgacagatggcgacgtgg

SEQ ID NO: 143702 - DNA, 25 bp, Probe sequence
gtcgcatgacagacgaatatggaaa

SEQ ID NO: 143703 - DNA, 25 bp, Probe sequence
gtggaagcaattaatcagattgtta

SEQ ID NO: 143704 - DNA, 25 bp, Probe sequence
ggtatacctcaaaacgttcattacg

SEQ ID NO: 143705 - DNA, 25 bp, Probe sequence
ggaaacgaaactcatctctaagatt

SEQ ID NO: 143706 - DNA, 25 bp, Probe sequence
ggaaattctcatatggttattgatg

SEQ ID NO: 143707 - DNA, 25 bp, Probe sequence
tgaaaacagcttatccaagggttcc

SEQ ID NO: 143708 - DNA, 25 bp, Probe sequence
tccccctcattgtaaaggcgacaga

SEQ ID NO: 143709 - DNA, 25 bp, Probe sequence
tcatctctaagattttatcgttcga

SEQ ID NO: 143710 - DNA, 25 bp, Probe sequence
attaagtgaagccctgcgtcatctt

SEQ ID NO: 143711 - DNA, 25 bp, Probe sequence
attacttcaaacatctagacagact

SEQ ID NO: 143712 - DNA, 25 bp, Probe sequence
atagataactaccttgtcaactctt

SEQ ID NO: 143713 - DNA, 25 bp, Probe sequence
ataaagaagcacatgccactccctt

SEQ ID NO: 143714 - DNA, 25 bp, Probe sequence
agggagataaagaagcacatgccac

SEQ ID NO: 143715 - DNA, 25 bp, Probe sequence
aaaatcagtttgactatatctgcaa

SEQ ID NO: 143716 - DNA, 25 bp, Probe sequence
aacatctagacagactatcagcaaa

SEQ ID NO: 143717 - DNA, 25 bp, Probe sequence
aactctttttctactgttgatacgt

SEQ ID NO: 143718 - DNA, 25 bp, Probe sequence
aaccatcttcttttcaagaaaccat

SEQ ID NO: 143719 - DNA, 25 bp, Probe sequence
cgtcactgatttccaactatttaaa

SEQ ID NO: 143720 - DNA, 25 bp, Probe sequence
ccttgtcaactctttttctactgtt

SEQ ID NO: 143721 - DNA, 25 bp, Probe sequence
gccactccctttcacgacagaaagg

SEQ ID NO: 143722 - DNA, 25 bp, Probe sequence
gaatcgttcgactgtttatcgtcat

SEQ ID NO: 143723 - DNA, 25 bp, Probe sequence
gccctgcgtcatctttcagagaaaa

SEQ ID NO: 143724 - DNA, 25 bp, Probe sequence
gcatgaaaccatcttcttttcaaga

SEQ ID NO: 143725 - DNA, 25 bp, Probe sequence
gaagtctcgttttctgatatagata

SEQ ID NO: 143726 - DNA, 25 bp, Probe sequence
gaacgaaaagattacttcaaacatc

SEQ ID NO: 143727 - DNA, 25 bp, Probe sequence
gactgtttatcgtcatcgaataagt

SEQ ID NO: 143728 - DNA, 25 bp, Probe sequence
gatgtggagattgcggagttactaa

SEQ ID NO: 143729 - DNA, 25 bp, Probe sequence
gatacgtacgtcactgatttccaac

SEQ ID NO: 143730 - DNA, 25 bp, Probe sequence
gatttattaagtgaagccctgcgtc

SEQ ID NO: 143731 - DNA, 25 bp, Probe sequence
gtacgtcactgatttccaactattt

SEQ ID NO: 143732 - DNA, 25 bp, Probe sequence
gtcatcgaataagtggactagccat

SEQ ID NO: 143733 - DNA, 25 bp, Probe sequence
gtctcgttttctgatatagataact

SEQ ID NO: 143734 - DNA, 25 bp, Probe sequence
gtgaaaagcatgaaaccatcttctt

SEQ ID NO: 143735 - DNA, 25 bp, Probe sequence
gtggactagccatgattaaagaatt

SEQ ID NO: 143736 - DNA, 25 bp, Probe sequence
ggatatgagtgatgtggagattgcg

SEQ ID NO: 143737 - DNA, 25 bp, Probe sequence
ggagttactaaatttgaatcgttcg

SEQ ID NO: 143738 - DNA, 25 bp, Probe sequence
tgactatatctgcaaacaagttatt

SEQ ID NO: 143739 - DNA, 25 bp, Probe sequence
tcgttcgactgtttatcgtcatcga

SEQ ID NO: 143740 - DNA, 25 bp, Probe sequence
tcagcaaaagaagtctcgttttctg

SEQ ID NO: 143741 - DNA, 25 bp, Probe sequence
taactaccttgtcaactctttttct

SEQ ID NO: 143742 - DNA, 25 bp, Probe sequence
tattttacttcattactttatggat

SEQ ID NO: 143743 - DNA, 25 bp, Probe sequence
ttctactgttgatacgtacgtcact

SEQ ID NO: 143744 - DNA, 25 bp, Probe sequence
cggaaaggacgtgaagacatgaaaa

SEQ ID NO: 143745 - DNA, 25 bp, Probe sequence
atcgtttctttgtttgtcgtcatac

SEQ ID NO: 143746 - DNA, 25 bp, Probe sequence
actcaaatacttagggattcccatt

SEQ ID NO: 143747 - DNA, 25 bp, Probe sequence
aagtaacctacgctggcaaacaaat

SEQ ID NO: 143748 - DNA, 25 bp, Probe sequence
aaccctatggatttctaaagtctat

SEQ ID NO: 143749 - DNA, 25 bp, Probe sequence
aatgacatggtttatcgtttctttg

SEQ ID NO: 143750 - DNA, 25 bp, Probe sequence
aattacctttacgcaaatgacatgg

SEQ ID NO: 143751 - DNA, 25 bp, Probe sequence
catggtttatcgtttctttgtttgt

SEQ ID NO: 143752 - DNA, 25 bp, Probe sequence
cttagggattcccattgttctcact

SEQ ID NO: 143753 - DNA, 25 bp, Probe sequence
cctacgctggcaaacaaatacgatt

SEQ ID NO: 143754 - DNA, 25 bp, Probe sequence
ccaccactttctctgattgacggag

SEQ ID NO: 143755 - DNA, 25 bp, Probe sequence
gaagttacaccagtatttggtcagt

SEQ ID NO: 143756 - DNA, 25 bp, Probe sequence
gaacaactagatggcatatccgatt

SEQ ID NO: 143757 - DNA, 25 bp, Probe sequence
gaaacaatgaatgaatcgattacga

SEQ ID NO: 143758 - DNA, 25 bp, Probe sequence
gaaaaagtgatttatgcgattaatg

SEQ ID NO: 143759 - DNA, 25 bp, Probe sequence
gacggagcactactcaaatacttag

SEQ ID NO: 143760 - DNA, 25 bp, Probe sequence
gagtgaacaactagatggcatatcc

SEQ ID NO: 143761 - DNA, 25 bp, Probe sequence
gattaatgatttacaactccctttc

SEQ ID NO: 143762 - DNA, 25 bp, Probe sequence
gattcccattgttctcactgggttc

SEQ ID NO: 143763 - DNA, 25 bp, Probe sequence
gttctcactgggttcatgtgccaaa

SEQ ID NO: 143764 - DNA, 25 bp, Probe sequence
gtttctttgtttgtcgtcatactct

SEQ ID NO: 143765 - DNA, 25 bp, Probe sequence
gtcgtcatactctttggcagtttac

SEQ ID NO: 143766 - DNA, 25 bp, Probe sequence
gggttcatgtgccaaaagacctttg

SEQ ID NO: 143767 - DNA, 25 bp, Probe sequence
tgtgccaaaagacctttgacggaaa

SEQ ID NO: 143768 - DNA, 25 bp, Probe sequence
tgattgttctttttctatttttacg

SEQ ID NO: 143769 - DNA, 25 bp, Probe sequence
tctatcattacctatgctctacgcc

SEQ ID NO: 143770 - DNA, 25 bp, Probe sequence
tctctgattgacggagcactactca

SEQ ID NO: 143771 - DNA, 25 bp, Probe sequence
tttcccaattacctttacgcaaatg

SEQ ID NO: 143772 - DNA, 25 bp, Probe sequence
tacgccctaaagtaacctacgctgg

SEQ ID NO: 143773 - DNA, 25 bp, Probe sequence
taaagtctatcattacctatgctct

SEQ ID NO: 143774 - DNA, 25 bp, Probe sequence
tactctttggcagtttaccaccact

SEQ ID NO: 143775 - DNA, 25 bp, Probe sequence
ttgacggaaagaaaccctatggatt

SEQ ID NO: 143776 - DNA, 25 bp, Probe sequence
tatgctctacgccctaaagtaacct

SEQ ID NO: 143777 - DNA, 25 bp, Probe sequence
ttgtttgtcgtcatactctttggca

SEQ ID NO: 143778 - DNA, 25 bp, Probe sequence
ctaatcgccgtcggacttgtgttca

SEQ ID NO: 143779 - DNA, 25 bp, Probe sequence
attggcttcttgattattgctctaa

SEQ ID NO: 143780 - DNA, 25 bp, Probe sequence
attttcaaaactcattggcttcttg

SEQ ID NO: 143781 - DNA, 25 bp, Probe sequence
atttaaccgaatcattggtgcttaa

SEQ ID NO: 143782 - DNA, 25 bp, Probe sequence
atcgccgtcggacttgtgttcaatg

SEQ ID NO: 143783 - DNA, 25 bp, Probe sequence
aactcattggcttcttgattattgc

SEQ ID NO: 143784 - DNA, 25 bp, Probe sequence
aatgcagctggcgtgaaagatgtgt

SEQ ID NO: 143785 - DNA, 25 bp, Probe sequence
aatcgccgtcggacttgtgttcaat

SEQ ID NO: 143786 - DNA, 25 bp, Probe sequence
caaaactcattggcttcttgattat

SEQ ID NO: 143787 - DNA, 25 bp, Probe sequence
cttgtgttcaatgcagctggcgtga

SEQ ID NO: 143788 - DNA, 25 bp, Probe sequence
ctctaatcgccgtcggacttgtgtt

SEQ ID NO: 143789 - DNA, 25 bp, Probe sequence
ctcattggcttcttgattattgctc

SEQ ID NO: 143790 - DNA, 25 bp, Probe sequence
cggacttgtgttcaatgcagctggc

SEQ ID NO: 143791 - DNA, 25 bp, Probe sequence
ccgtcggacttgtgttcaatgcagc

SEQ ID NO: 143792 - DNA, 25 bp, Probe sequence
gcgattgttgtcattggactgtttt

SEQ ID NO: 143793 - DNA, 25 bp, Probe sequence
gctggcgtgaaagatgtgttattaa

SEQ ID NO: 143794 - DNA, 25 bp, Probe sequence
gaattttgggcagaatttgtacaac

SEQ ID NO: 143795 - DNA, 25 bp, Probe sequence
gcttcttgattattgctctaatcgc

SEQ ID NO: 143796 - DNA, 25 bp, Probe sequence
gcagctggcgtgaaagatgtgttat

SEQ ID NO: 143797 - DNA, 25 bp, Probe sequence
gaattttcaaaactcattggcttct

SEQ ID NO: 143798 - DNA, 25 bp, Probe sequence
gaatttgtacaactggttcttggat

SEQ ID NO: 143799 - DNA, 25 bp, Probe sequence
gaaagatgtgttattaaacttattt

SEQ ID NO: 143800 - DNA, 25 bp, Probe sequence
gacttgtgttcaatgcagctggcgt

SEQ ID NO: 143801 - DNA, 25 bp, Probe sequence
gttagcgattgttgtcattggactg

SEQ ID NO: 143802 - DNA, 25 bp, Probe sequence
gtacaactggttcttggataatgca

SEQ ID NO: 143803 - DNA, 25 bp, Probe sequence
gtgttcaatgcagctggcgtgaaag

SEQ ID NO: 143804 - DNA, 25 bp, Probe sequence
ggtattgttagcgattgttgtcatt

SEQ ID NO: 143805 - DNA, 25 bp, Probe sequence
gtcggacttgtgttcaatgcagctg

SEQ ID NO: 143806 - DNA, 25 bp, Probe sequence
tggttcttggataatgcacagtcat

SEQ ID NO: 143807 - DNA, 25 bp, Probe sequence
tgggcagaatttgtacaactggttc

SEQ ID NO: 143808 - DNA, 25 bp, Probe sequence
tgtcattggactgtttttaggtttt

SEQ ID NO: 143809 - DNA, 25 bp, Probe sequence
tgattattgctctaatcgccgtcgg

SEQ ID NO: 143810 - DNA, 25 bp, Probe sequence
tgcacagtcattggtattgttagcg

SEQ ID NO: 143811 - DNA, 25 bp, Probe sequence
taaacttatttaaccgaatcattgg

SEQ ID NO: 143812 - DNA, 25 bp, Probe sequence
attttggcagtcaagctctttcagc

SEQ ID NO: 143813 - DNA, 25 bp, Probe sequence
ataccattattcaaagatactccct

SEQ ID NO: 143814 - DNA, 25 bp, Probe sequence
atcaagcgtccaacttcttttactg

SEQ ID NO: 143815 - DNA, 25 bp, Probe sequence
atgacaaacacaccattgattttga

SEQ ID NO: 143816 - DNA, 25 bp, Probe sequence
agctctttcagctctaattaagtgg

SEQ ID NO: 143817 - DNA, 25 bp, Probe sequence
agcgaatcgcttatcagaaatatga

SEQ ID NO: 143818 - DNA, 25 bp, Probe sequence
accaacttttgataaacaggctcgt

SEQ ID NO: 143819 - DNA, 25 bp, Probe sequence
acagttcccttcaaaccacagatta

SEQ ID NO: 143820 - DNA, 25 bp, Probe sequence
acacactctctatcgacgtcattat

SEQ ID NO: 143821 - DNA, 25 bp, Probe sequence
aaagatacaccctcgaagtgctcgc

SEQ ID NO: 143822 - DNA, 25 bp, Probe sequence
aaaagcattggctttcccaggcatt

SEQ ID NO: 143823 - DNA, 25 bp, Probe sequence
aacaggctcgtatctacaatacaca

SEQ ID NO: 143824 - DNA, 25 bp, Probe sequence
aactgttaggacacactctctatcg

SEQ ID NO: 143825 - DNA, 25 bp, Probe sequence
aattccgaaggatgaagccatttct

SEQ ID NO: 143826 - DNA, 25 bp, Probe sequence
aatggacgcatgtttcgctatctct

SEQ ID NO: 143827 - DNA, 25 bp, Probe sequence
cgacgtcattattatccgaaagaaa

SEQ ID NO: 143828 - DNA, 25 bp, Probe sequence
gaagtgctcgccttttattagagga

SEQ ID NO: 143829 - DNA, 25 bp, Probe sequence
gaagccatttcttttattcggcaat

SEQ ID NO: 143830 - DNA, 25 bp, Probe sequence
gaaaatgctcgctttgaacaggtag

SEQ ID NO: 143831 - DNA, 25 bp, Probe sequence
gaaagaacatacggactgtcatttt

SEQ ID NO: 143832 - DNA, 25 bp, Probe sequence
gaaagatgtgttttcttccagaaat

SEQ ID NO: 143833 - DNA, 25 bp, Probe sequence
gatactccctagattgtgtaaatac

SEQ ID NO: 143834 - DNA, 25 bp, Probe sequence
gtcattttttatatacactggcaga

SEQ ID NO: 143835 - DNA, 25 bp, Probe sequence
gtctatcgtgataagcagtcatggg

SEQ ID NO: 143836 - DNA, 25 bp, Probe sequence
ggctttcccaggcattttgcgaata

SEQ ID NO: 143837 - DNA, 25 bp, Probe sequence
tggaattaggctggggtacgcaacc

SEQ ID NO: 143838 - DNA, 25 bp, Probe sequence
tgtggctatgtctatcaagcgtcca

SEQ ID NO: 143839 - DNA, 25 bp, Probe sequence
tgaagccatttctcaaccaactttt

SEQ ID NO: 143840 - DNA, 25 bp, Probe sequence
tccaacttcttttactgcgggtatt

SEQ ID NO: 143841 - DNA, 25 bp, Probe sequence
tgcgggtatttcaagacaagtgtct

SEQ ID NO: 143842 - DNA, 25 bp, Probe sequence
tcgctatctctatccgttgacaaaa

SEQ ID NO: 143843 - DNA, 25 bp, Probe sequence
tacaaaccatacgcaaactctttcc

SEQ ID NO: 143844 - DNA, 25 bp, Probe sequence
tacactggcagatggaattgaggga

SEQ ID NO: 143845 - DNA, 25 bp, Probe sequence
taggcgttgtggaattaggctgggg

SEQ ID NO: 143846 - DNA, 25 bp, Probe sequence
attgctgtattaatgggcatgctac

SEQ ID NO: 143847 - DNA, 25 bp, Probe sequence
attatcggtacttatgcattttttg

SEQ ID NO: 143848 - DNA, 25 bp, Probe sequence
atttcgtttctatatatggcgatgt

SEQ ID NO: 143849 - DNA, 25 bp, Probe sequence
atagctaatttttttatggcgcttt

SEQ ID NO: 143850 - DNA, 25 bp, Probe sequence
atgactttcttgttcgcaataccaa

SEQ ID NO: 143851 - DNA, 25 bp, Probe sequence
agtgtcatatcacgatggttgcgtt

SEQ ID NO: 143852 - DNA, 25 bp, Probe sequence
agaaatgctaatggtttgggatcgt

SEQ ID NO: 143853 - DNA, 25 bp, Probe sequence
agcggtaagtgtactattcatgatt

SEQ ID NO: 143854 - DNA, 25 bp, Probe sequence
actatcatccacggtatttttttgt

SEQ ID NO: 143855 - DNA, 25 bp, Probe sequence
acttggtgcgatatttttcttgttt

SEQ ID NO: 143856 - DNA, 25 bp, Probe sequence
acaggctagtgatgatattccaata

SEQ ID NO: 143857 - DNA, 25 bp, Probe sequence
acaatcactttgctgtgtacatttt

SEQ ID NO: 143858 - DNA, 25 bp, Probe sequence
aaagcagtctaaggtcggtcttaat

SEQ ID NO: 143859 - DNA, 25 bp, Probe sequence
aaaagtttactatcatccacggtat

SEQ ID NO: 143860 - DNA, 25 bp, Probe sequence
aacgacattatttagagcttcttta

SEQ ID NO: 143861 - DNA, 25 bp, Probe sequence
cattccattcattttagcggtaagt

SEQ ID NO: 143862 - DNA, 25 bp, Probe sequence
gcatttttatgacattgggcatgac

SEQ ID NO: 143863 - DNA, 25 bp, Probe sequence
gcagtcagtcttgcaacaatcactt

SEQ ID NO: 143864 - DNA, 25 bp, Probe sequence
gcagcgacttgtaatcattccattc

SEQ ID NO: 143865 - DNA, 25 bp, Probe sequence
gaagcctatgcaaatcagcacaatt

SEQ ID NO: 143866 - DNA, 25 bp, Probe sequence
gacttcctagtaccatttattatca

SEQ ID NO: 143867 - DNA, 25 bp, Probe sequence
gacgtcaatttattacgcagcgact

SEQ ID NO: 143868 - DNA, 25 bp, Probe sequence
gatggttgcgttacgttttaattgt

SEQ ID NO: 143869 - DNA, 25 bp, Probe sequence
gatatcaccaaaacaaattacactt

SEQ ID NO: 143870 - DNA, 25 bp, Probe sequence
gatatacagggttcggttaatgcaa

SEQ ID NO: 143871 - DNA, 25 bp, Probe sequence
gttacgtactagctgtcattataat

SEQ ID NO: 143872 - DNA, 25 bp, Probe sequence
gtacatttttgattgtaacgctcac

SEQ ID NO: 143873 - DNA, 25 bp, Probe sequence
gggcatgctacttatattcaacttg

SEQ ID NO: 143874 - DNA, 25 bp, Probe sequence
ggtagttgggatgcgtgtacgtctt

SEQ ID NO: 143875 - DNA, 25 bp, Probe sequence
ggtggactaatatttgtaggtggcg

SEQ ID NO: 143876 - DNA, 25 bp, Probe sequence
tgccggcggatacttacttggtgcg

SEQ ID NO: 143877 - DNA, 25 bp, Probe sequence
tggcgatgtacaaaataacttccta

SEQ ID NO: 143878 - DNA, 25 bp, Probe sequence
taacttatcaacatcgttccgattc

SEQ ID NO: 143879 - DNA, 25 bp, Probe sequence
taggaagcgcagcactatatttagg

SEQ ID NO: 143880 - DNA, 25 bp, Probe sequence
aacaggccgaaggcgagctcgaaca

SEQ ID NO: 143881 - DNA, 25 bp, Probe sequence
attggaccttcaagagcgcggtttg

SEQ ID NO: 143882 - DNA, 25 bp, Probe sequence
ttccccttggccatacgcaagagta

SEQ ID NO: 143883 - DNA, 25 bp, Probe sequence
aggagcgattagtcggttctatccc

SEQ ID NO: 143884 - DNA, 25 bp, Probe sequence
agaggagaccgtcattcacctcttc

SEQ ID NO: 143885 - DNA, 25 bp, Probe sequence
acgtttcccgtaatatcagtcataa

SEQ ID NO: 143886 - DNA, 25 bp, Probe sequence
acattgttgtgtacacgtttcccgt

SEQ ID NO: 143887 - DNA, 25 bp, Probe sequence
acttgctcactttctatgatttccc

SEQ ID NO: 143888 - DNA, 25 bp, Probe sequence
aaattcctaggtcgcagtcataaag

SEQ ID NO: 143889 - DNA, 25 bp, Probe sequence
aaaccgtcgccaaggaagctattca

SEQ ID NO: 143890 - DNA, 25 bp, Probe sequence
cggcgtttaatgggcgggagcttca

SEQ ID NO: 143891 - DNA, 25 bp, Probe sequence
gcgcggtttgaaaaatgtcctcctg

SEQ ID NO: 143892 - DNA, 25 bp, Probe sequence
gcattcgcccggacggatcaaagga

SEQ ID NO: 143893 - DNA, 25 bp, Probe sequence
gcagtcaatacgcttctcaaaacgg

SEQ ID NO: 143894 - DNA, 25 bp, Probe sequence
gaattattccgtgtccatttggaga

SEQ ID NO: 143895 - DNA, 25 bp, Probe sequence
gactgttcctgcttatagacggacg

SEQ ID NO: 143896 - DNA, 25 bp, Probe sequence
gagttaacggctttcctagattacg

SEQ ID NO: 143897 - DNA, 25 bp, Probe sequence
gagcttcatgaccgttatgctgcta

SEQ ID NO: 143898 - DNA, 25 bp, Probe sequence
gtaacggctcctatgaccgtacggt

SEQ ID NO: 143899 - DNA, 25 bp, Probe sequence
gattctttcgaacgatcacttgctc

SEQ ID NO: 143900 - DNA, 25 bp, Probe sequence
gtatgggcattactacacgccccaa

SEQ ID NO: 143901 - DNA, 25 bp, Probe sequence
gtctcgtcttttgatacttacaacc

SEQ ID NO: 143902 - DNA, 25 bp, Probe sequence
ggtattaccatgtcggaaatcgcag

SEQ ID NO: 143903 - DNA, 25 bp, Probe sequence
ggaagcacgtggtacttttgcggaa

SEQ ID NO: 143904 - DNA, 25 bp, Probe sequence
tggaacgtttcttagtctcgtcttt

SEQ ID NO: 143905 - DNA, 25 bp, Probe sequence
tggtgtatcaagcctcatctaaaga

SEQ ID NO: 143906 - DNA, 25 bp, Probe sequence
ttccgcgcgaccgcaatggtgagtt

SEQ ID NO: 143907 - DNA, 25 bp, Probe sequence
tgagctatgcgattgcaccgactga

SEQ ID NO: 143908 - DNA, 25 bp, Probe sequence
tgcaccgactgaatccatcacgatt

SEQ ID NO: 143909 - DNA, 25 bp, Probe sequence
tcctcctgttcatcacggatggctt

SEQ ID NO: 143910 - DNA, 25 bp, Probe sequence
tatggggaacttcatctccagattc

SEQ ID NO: 143911 - DNA, 25 bp, Probe sequence
tacagccaccgcaaggaacagttcc

SEQ ID NO: 143912 - DNA, 25 bp, Probe sequence
ttcatatcgcagttggcattcgccc

SEQ ID NO: 143913 - DNA, 25 bp, Probe sequence
ttctatcccaaagctcgttttcaac

SEQ ID NO: 143914 - DNA, 25 bp, Probe sequence
attaggcgtaaatgtattctcagta

SEQ ID NO: 143915 - DNA, 25 bp, Probe sequence
atcaactgatactcacttcgtacac

SEQ ID NO: 143916 - DNA, 25 bp, Probe sequence
atgaccattcagatgcaattagcaa

SEQ ID NO: 143917 - DNA, 25 bp, Probe sequence
agaagacttacaaaaccaatatgaa

SEQ ID NO: 143918 - DNA, 25 bp, Probe sequence
acgctgacggaattggccgtgacgc

SEQ ID NO: 143919 - DNA, 25 bp, Probe sequence
agctcaacgtggtacattcattatc

SEQ ID NO: 143920 - DNA, 25 bp, Probe sequence
agcgtagtatgcttctatcctgctg

SEQ ID NO: 143921 - DNA, 25 bp, Probe sequence
aaaaggttcttggagcgtagtatgc

SEQ ID NO: 143922 - DNA, 25 bp, Probe sequence
aaatcaaagcagctcaatatgttcg

SEQ ID NO: 143923 - DNA, 25 bp, Probe sequence
aaaccctggcgaagtatgcccagct

SEQ ID NO: 143924 - DNA, 25 bp, Probe sequence
aagcatggcatgaccattcagatgc

SEQ ID NO: 143925 - DNA, 25 bp, Probe sequence
caatcactcgtaattttgatgtatt

SEQ ID NO: 143926 - DNA, 25 bp, Probe sequence
ctactggtttagctcaacgtggtac

SEQ ID NO: 143927 - DNA, 25 bp, Probe sequence
cagcgcaagctttcgatccaaaaaa

SEQ ID NO: 143928 - DNA, 25 bp, Probe sequence
cttctcattcgtttgtccaactgaa

SEQ ID NO: 143929 - DNA, 25 bp, Probe sequence
ctcacttcgtacacaaagcatggca

SEQ ID NO: 143930 - DNA, 25 bp, Probe sequence
gcatctgaaattaacgctgacggaa

SEQ ID NO: 143931 - DNA, 25 bp, Probe sequence
gaattggccgtgacgctagtacatt

SEQ ID NO: 143932 - DNA, 25 bp, Probe sequence
gaaatcttaccatttacagcgcaag

SEQ ID NO: 143933 - DNA, 25 bp, Probe sequence
gacggtgttgtacaagcatctgaaa

SEQ ID NO: 143934 - DNA, 25 bp, Probe sequence
gacccatcacaaacaatcactcgta

SEQ ID NO: 143935 - DNA, 25 bp, Probe sequence
gatgtattagatgaagctactggtt

SEQ ID NO: 143936 - DNA, 25 bp, Probe sequence
gtacattcattatcgacccagacgg

SEQ ID NO: 143937 - DNA, 25 bp, Probe sequence
gtaaatgtattctcagtatcaactg

SEQ ID NO: 143938 - DNA, 25 bp, Probe sequence
gtgacgctagtacattagctcacaa

SEQ ID NO: 143939 - DNA, 25 bp, Probe sequence
ggcgctaaaacattgcaacctggtt

SEQ ID NO: 143940 - DNA, 25 bp, Probe sequence
ggcgaagtatgcccagctaaatggg

SEQ ID NO: 143941 - DNA, 25 bp, Probe sequence
tgcaattagcaaaatcacttacact

SEQ ID NO: 143942 - DNA, 25 bp, Probe sequence
tgctgacttctcattcgtttgtcca

SEQ ID NO: 143943 - DNA, 25 bp, Probe sequence
ttatcgacccagacggtgttgtaca

SEQ ID NO: 143944 - DNA, 25 bp, Probe sequence
tacactatgattggtgacccatcac

SEQ ID NO: 143945 - DNA, 25 bp, Probe sequence
ttcgtttgtccaactgaattagaag

SEQ ID NO: 143946 - DNA, 25 bp, Probe sequence
tttacagcgcaagctttcgatccaa

SEQ ID NO: 143947 - DNA, 25 bp, Probe sequence
ttgcaacctggtttagatttagtag

SEQ ID NO: 143948 - DNA, 25 bp, Probe sequence
attgccattgcacgtgcattagtta

SEQ ID NO: 143949 - DNA, 25 bp, Probe sequence
attcaaatatcgatgcgtcttatgc

SEQ ID NO: 143950 - DNA, 25 bp, Probe sequence
atggtaaaggtttgaatgctacgac

SEQ ID NO: 143951 - DNA, 25 bp, Probe sequence
aggtgacattattgtggatggcgca

SEQ ID NO: 143952 - DNA, 25 bp, Probe sequence
agattttaatcttttaccaacaatg

SEQ ID NO: 143953 - DNA, 25 bp, Probe sequence
aaatttaattgcttcttttgatgga

SEQ ID NO: 143954 - DNA, 25 bp, Probe sequence
aatcttttaccaacaatgacgaata

SEQ ID NO: 143955 - DNA, 25 bp, Probe sequence
cgaataacagatagcttagcacttg

SEQ ID NO: 143956 - DNA, 25 bp, Probe sequence
cgacagcacttaatcaaatgaattt

SEQ ID NO: 143957 - DNA, 25 bp, Probe sequence
ccgacgattttactagccgatgaac

SEQ ID NO: 143958 - DNA, 25 bp, Probe sequence
gccattgcacgtgcattagttacta

SEQ ID NO: 143959 - DNA, 25 bp, Probe sequence
gaatttatcagttggagctggtgaa

SEQ ID NO: 143960 - DNA, 25 bp, Probe sequence
gaatgctacgacagcacttaatcaa

SEQ ID NO: 143961 - DNA, 25 bp, Probe sequence
gaatggaggaagtgtcaatatatga

SEQ ID NO: 143962 - DNA, 25 bp, Probe sequence
gaacagacaattttaatggtaactc

SEQ ID NO: 143963 - DNA, 25 bp, Probe sequence
gagattcatcaattggaacagacaa

SEQ ID NO: 143964 - DNA, 25 bp, Probe sequence
gatgggcgtctatatcatgaaatat

SEQ ID NO: 143965 - DNA, 25 bp, Probe sequence
gatgccattaattttagctggtgct

SEQ ID NO: 143966 - DNA, 25 bp, Probe sequence
gatagcttagcacttgtgaatggag

SEQ ID NO: 143967 - DNA, 25 bp, Probe sequence
gattttactagccgatgaacctaca

SEQ ID NO: 143968 - DNA, 25 bp, Probe sequence
gttgcaattatgggtgagtctgggt

SEQ ID NO: 143969 - DNA, 25 bp, Probe sequence
gtatcgtcaacaaatggtaggtttt

SEQ ID NO: 143970 - DNA, 25 bp, Probe sequence
gtacaattacatttagagggattct

SEQ ID NO: 143971 - DNA, 25 bp, Probe sequence
gtctacactactaaatttaattgct

SEQ ID NO: 143972 - DNA, 25 bp, Probe sequence
gtctgggtcagggaagtctacacta

SEQ ID NO: 143973 - DNA, 25 bp, Probe sequence
gggtgagtctgggtcagggaagtct

SEQ ID NO: 143974 - DNA, 25 bp, Probe sequence
gtggatggcgcacatttaaataata

SEQ ID NO: 143975 - DNA, 25 bp, Probe sequence
gggtcagggaagtctacactactaa

SEQ ID NO: 143976 - DNA, 25 bp, Probe sequence
ggtaactcattcaaatatcgatgcg

SEQ ID NO: 143977 - DNA, 25 bp, Probe sequence
ggagctggtgaatttgttgcaatta

SEQ ID NO: 143978 - DNA, 25 bp, Probe sequence
tcgatgcgtcttatgcagagcgagt

SEQ ID NO: 143979 - DNA, 25 bp, Probe sequence
taaagatgggcgtctatatcatgaa

SEQ ID NO: 143980 - DNA, 25 bp, Probe sequence
tagctggtgctaaacgaaaagatat

SEQ ID NO: 143981 - DNA, 25 bp, Probe sequence
tatagaacaaagggtacatcagttg

SEQ ID NO: 143982 - DNA, 25 bp, Probe sequence
attgttgctgttcatccattcatta

SEQ ID NO: 143983 - DNA, 25 bp, Probe sequence
attcgtcaattgttgctgttcatcc

SEQ ID NO: 143984 - DNA, 25 bp, Probe sequence
atagcgaccatgatttgtgattatt

SEQ ID NO: 143985 - DNA, 25 bp, Probe sequence
atgcattcgtcaattgttgctgttc

SEQ ID NO: 143986 - DNA, 25 bp, Probe sequence
agcgaccatgatttgtgattatttt

SEQ ID NO: 143987 - DNA, 25 bp, Probe sequence
actgcaacaatagcgaccatgattt

SEQ ID NO: 143988 - DNA, 25 bp, Probe sequence
aagagcaactaattactgcaacaat

SEQ ID NO: 143989 - DNA, 25 bp, Probe sequence
aatgatatgcattcgtcaattgttg

SEQ ID NO: 143990 - DNA, 25 bp, Probe sequence
aattactgcaacaatagcgaccatg

SEQ ID NO: 143991 - DNA, 25 bp, Probe sequence
caatagcgaccatgatttgtgatta

SEQ ID NO: 143992 - DNA, 25 bp, Probe sequence
aattgttgctgttcatccattcatt

SEQ ID NO: 143993 - DNA, 25 bp, Probe sequence
caattgttgctgttcatccattcat

SEQ ID NO: 143994 - DNA, 25 bp, Probe sequence
cattcattacaaactcccttttgct

SEQ ID NO: 143995 - DNA, 25 bp, Probe sequence
cgtcaattgttgctgttcatccatt

SEQ ID NO: 143996 - DNA, 25 bp, Probe sequence
gctgttcatccattcattacaaact

SEQ ID NO: 143997 - DNA, 25 bp, Probe sequence
gcattcgtcaattgttgctgttcat

SEQ ID NO: 143998 - DNA, 25 bp, Probe sequence
gcaactaattactgcaacaatagcg

SEQ ID NO: 143999 - DNA, 25 bp, Probe sequence
gcaacaatagcgaccatgatttgtg

SEQ ID NO: 144000 - DNA, 25 bp, Probe sequence
gatatgcattcgtcaattgttgctg

SEQ ID NO: 144001 - DNA, 25 bp, Probe sequence
gttcatccattcattacaaactccc

SEQ ID NO: 144002 - DNA, 25 bp, Probe sequence
gttgctgttcatccattcattacaa

SEQ ID NO: 144003 - DNA, 25 bp, Probe sequence
gtcaattgttgctgttcatccattc

SEQ ID NO: 144004 - DNA, 25 bp, Probe sequence
tgttgctgttcatccattcattaca

SEQ ID NO: 144005 - DNA, 25 bp, Probe sequence
tgccaaagagcaactaattactgca

SEQ ID NO: 144006 - DNA, 25 bp, Probe sequence
tccattcattacaaactcccttttg

SEQ ID NO: 144007 - DNA, 25 bp, Probe sequence
tcattacaaactcccttttgctttt

SEQ ID NO: 144008 - DNA, 25 bp, Probe sequence
tcaattgttgctgttcatccattca

SEQ ID NO: 144009 - DNA, 25 bp, Probe sequence
tacaaactcccttttgcttttatat

SEQ ID NO: 144010 - DNA, 25 bp, Probe sequence
ttactgcaacaatagcgaccatgat

SEQ ID NO: 144011 - DNA, 25 bp, Probe sequence
ttcattacaaactcccttttgcttt

SEQ ID NO: 144012 - DNA, 25 bp, Probe sequence
ttcatccattcattacaaactccct

SEQ ID NO: 144013 - DNA, 25 bp, Probe sequence
ttcgtcaattgttgctgttcatcca

SEQ ID NO: 144014 - DNA, 25 bp, Probe sequence
ttgctgttcatccattcattacaaa

SEQ ID NO: 144015 - DNA, 25 bp, Probe sequence
ttgttgctgttcatccattcattac

SEQ ID NO: 144016 - DNA, 25 bp, Probe sequence
attgcttactttgattttatgaaac

SEQ ID NO: 144017 - DNA, 25 bp, Probe sequence
attatcttccacaaacttcaacaaa

SEQ ID NO: 144018 - DNA, 25 bp, Probe sequence
atattgcttactttgattttatgaa

SEQ ID NO: 144019 - DNA, 25 bp, Probe sequence
atcttccacaaacttcaacaaaagc

SEQ ID NO: 144020 - DNA, 25 bp, Probe sequence
atgaaacaacttaattctaacacat

SEQ ID NO: 144021 - DNA, 25 bp, Probe sequence
acaaaagcccaaataaattacagca

SEQ ID NO: 144022 - DNA, 25 bp, Probe sequence
aaattatcttccacaaacttcaaca

SEQ ID NO: 144023 - DNA, 25 bp, Probe sequence
aaatattgcttactttgattttatg

SEQ ID NO: 144024 - DNA, 25 bp, Probe sequence
aaagcccaaataaattacagcaatt

SEQ ID NO: 144025 - DNA, 25 bp, Probe sequence
aaaagcccaaataaattacagcaat

SEQ ID NO: 144026 - DNA, 25 bp, Probe sequence
aagcccaaataaattacagcaattt

SEQ ID NO: 144027 - DNA, 25 bp, Probe sequence
aatattgcttactttgattttatga

SEQ ID NO: 144028 - DNA, 25 bp, Probe sequence
aatttatcaaatattgcttactttg

SEQ ID NO: 144029 - DNA, 25 bp, Probe sequence
aattatcttccacaaacttcaacaa

SEQ ID NO: 144030 - DNA, 25 bp, Probe sequence
cacaaacttcaacaaaagcccaaat

SEQ ID NO: 144031 - DNA, 25 bp, Probe sequence
caatttatcaaatattgcttacttt

SEQ ID NO: 144032 - DNA, 25 bp, Probe sequence
caacaaaagcccaaataaattacag

SEQ ID NO: 144033 - DNA, 25 bp, Probe sequence
caaatattgcttactttgattttat

SEQ ID NO: 144034 - DNA, 25 bp, Probe sequence
gcttactttgattttatgaaacaac

SEQ ID NO: 144035 - DNA, 25 bp, Probe sequence
gaaacaacttaattctaacacatac

SEQ ID NO: 144036 - DNA, 25 bp, Probe sequence
gattttatgaaacaacttaattcta

SEQ ID NO: 144037 - DNA, 25 bp, Probe sequence
gtataaaaattatcttccacaaact

SEQ ID NO: 144038 - DNA, 25 bp, Probe sequence
tccacaaacttcaacaaaagcccaa

SEQ ID NO: 144039 - DNA, 25 bp, Probe sequence
tcttccacaaacttcaacaaaagcc

SEQ ID NO: 144040 - DNA, 25 bp, Probe sequence
tcaacaaaagcccaaataaattaca

SEQ ID NO: 144041 - DNA, 25 bp, Probe sequence
taaaaattatcttccacaaacttca

SEQ ID NO: 144042 - DNA, 25 bp, Probe sequence
tactttgattttatgaaacaactta

SEQ ID NO: 144043 - DNA, 25 bp, Probe sequence
ttccacaaacttcaacaaaagccca

SEQ ID NO: 144044 - DNA, 25 bp, Probe sequence
tatcttccacaaacttcaacaaaag

SEQ ID NO: 144045 - DNA, 25 bp, Probe sequence
tataaaaattatcttccacaaactt

SEQ ID NO: 144046 - DNA, 25 bp, Probe sequence
tattgcttactttgattttatgaaa

SEQ ID NO: 144047 - DNA, 25 bp, Probe sequence
ttatcttccacaaacttcaacaaaa

SEQ ID NO: 144048 - DNA, 25 bp, Probe sequence
ttatgaaacaacttaattctaacac

SEQ ID NO: 144049 - DNA, 25 bp, Probe sequence
ttgcttactttgattttatgaaaca

SEQ ID NO: 144050 - DNA, 25 bp, Probe sequence
attattattactcatattcataggt

SEQ ID NO: 144051 - DNA, 25 bp, Probe sequence
atcgtgttcgtcaagaggttattca

SEQ ID NO: 144052 - DNA, 25 bp, Probe sequence
atgcacttaagtatgcgagaggtaa

SEQ ID NO: 144053 - DNA, 25 bp, Probe sequence
atgagggtacaacatttacgattca

SEQ ID NO: 144054 - DNA, 25 bp, Probe sequence
agcggacttgcctaaaatatttgat

SEQ ID NO: 144055 - DNA, 25 bp, Probe sequence
accatcctgtttcagtcgtatctaa

SEQ ID NO: 144056 - DNA, 25 bp, Probe sequence
acctgtatcatttgccattagaagc

SEQ ID NO: 144057 - DNA, 25 bp, Probe sequence
actatacaagtttagcacttagtta

SEQ ID NO: 144058 - DNA, 25 bp, Probe sequence
aaacttctgatatttctgtcactaa

SEQ ID NO: 144059 - DNA, 25 bp, Probe sequence
aactgacgttagatggacctcttta

SEQ ID NO: 144060 - DNA, 25 bp, Probe sequence
cacacaaaccatcctgtttcagtcg

SEQ ID NO: 144061 - DNA, 25 bp, Probe sequence
aacatttacgattcaatttccagat

SEQ ID NO: 144062 - DNA, 25 bp, Probe sequence
aactataagccaacaacaacaaatt

SEQ ID NO: 144063 - DNA, 25 bp, Probe sequence
aatccattatgaaccttgtcatcac

SEQ ID NO: 144064 - DNA, 25 bp, Probe sequence
aatatcattcgcccaattattatga

SEQ ID NO: 144065 - DNA, 25 bp, Probe sequence
caatagtcatagttatttttgcttt

SEQ ID NO: 144066 - DNA, 25 bp, Probe sequence
cacccattactgcagcacaactgtt

SEQ ID NO: 144067 - DNA, 25 bp, Probe sequence
gctactttttaacatgggtacatca

SEQ ID NO: 144068 - DNA, 25 bp, Probe sequence
gcagcacaactgttacttgaaagag

SEQ ID NO: 144069 - DNA, 25 bp, Probe sequence
gcacttggcgttattttattattat

SEQ ID NO: 144070 - DNA, 25 bp, Probe sequence
gaagcatatttactagcacttggcg

SEQ ID NO: 144071 - DNA, 25 bp, Probe sequence
gacctttcttaaaagtattactcag

SEQ ID NO: 144072 - DNA, 25 bp, Probe sequence
gttttacctgtatcatttgccatta

SEQ ID NO: 144073 - DNA, 25 bp, Probe sequence
gtagagagctactttttaacatggg

SEQ ID NO: 144074 - DNA, 25 bp, Probe sequence
ggtattagtgaagcggacttgccta

SEQ ID NO: 144075 - DNA, 25 bp, Probe sequence
gggctattcaggttataatggccag

SEQ ID NO: 144076 - DNA, 25 bp, Probe sequence
tgaaaacacccattactgcagcaca

SEQ ID NO: 144077 - DNA, 25 bp, Probe sequence
tgaaccttgtcatcacgaagtatta

SEQ ID NO: 144078 - DNA, 25 bp, Probe sequence
tgcgttgtatcagcttaaaaatgaa

SEQ ID NO: 144079 - DNA, 25 bp, Probe sequence
tcatcacgaagtattaactgacgtt

SEQ ID NO: 144080 - DNA, 25 bp, Probe sequence
tttggcttaatgttttacctgtatc

SEQ ID NO: 144081 - DNA, 25 bp, Probe sequence
tttctgtcactaaaatttcgattaa

SEQ ID NO: 144082 - DNA, 25 bp, Probe sequence
ttactagcacttggcgttattttat

SEQ ID NO: 144083 - DNA, 25 bp, Probe sequence
ttgaaagagatgagcctaatgttgt

SEQ ID NO: 144084 - DNA, 25 bp, Probe sequence
attacggtgttattgtcgttgaaca

SEQ ID NO: 144085 - DNA, 25 bp, Probe sequence
attagctgttaacatgacgcgcctg

SEQ ID NO: 144086 - DNA, 25 bp, Probe sequence
atatttattagttcccgtattgata

SEQ ID NO: 144087 - DNA, 25 bp, Probe sequence
atatggaccaaattatggcaataca

SEQ ID NO: 144088 - DNA, 25 bp, Probe sequence
atactattggcgttaatgattttat

SEQ ID NO: 144089 - DNA, 25 bp, Probe sequence
atcaacctcagcttgtattgctaga

SEQ ID NO: 144090 - DNA, 25 bp, Probe sequence
atggggggagatgattttatcgaaa

SEQ ID NO: 144091 - DNA, 25 bp, Probe sequence
atggcaatacaaatggggggagatg

SEQ ID NO: 144092 - DNA, 25 bp, Probe sequence
agtttagcatctgaacttaaaaaat

SEQ ID NO: 144093 - DNA, 25 bp, Probe sequence
aaatggaattacggtgttattgtcg

SEQ ID NO: 144094 - DNA, 25 bp, Probe sequence
aaacatctaatgtgccaattatatt

SEQ ID NO: 144095 - DNA, 25 bp, Probe sequence
aacctcagcttgtattgctagatat

SEQ ID NO: 144096 - DNA, 25 bp, Probe sequence
caattatatttattagttcccgtat

SEQ ID NO: 144097 - DNA, 25 bp, Probe sequence
caagcattattgagacgaacttatg

SEQ ID NO: 144098 - DNA, 25 bp, Probe sequence
catacagctatctttgactgaatta

SEQ ID NO: 144099 - DNA, 25 bp, Probe sequence
cattgacggttaaaggttgtacatt

SEQ ID NO: 144100 - DNA, 25 bp, Probe sequence
gaagcaaaagtcgtgtatcaagaac

SEQ ID NO: 144101 - DNA, 25 bp, Probe sequence
gacttgtcagtagctaatgattcat

SEQ ID NO: 144102 - DNA, 25 bp, Probe sequence
gacgcgcctgcgtaaaaaattaaat

SEQ ID NO: 144103 - DNA, 25 bp, Probe sequence
gagacgaacttatgacttgtcagta

SEQ ID NO: 144104 - DNA, 25 bp, Probe sequence
gatgatatactgtctatctttaacc

SEQ ID NO: 144105 - DNA, 25 bp, Probe sequence
gattgccaaaattcaagcattattg

SEQ ID NO: 144106 - DNA, 25 bp, Probe sequence
gttgggaatcagaaaacttcataga

SEQ ID NO: 144107 - DNA, 25 bp, Probe sequence
gttaacatgacgcgcctgcgtaaaa

SEQ ID NO: 144108 - DNA, 25 bp, Probe sequence
gttcccgtattgataatatggacca

SEQ ID NO: 144109 - DNA, 25 bp, Probe sequence
gtagctaatgattcattgacggtta

SEQ ID NO: 144110 - DNA, 25 bp, Probe sequence
gtaagtagaactgctttaattgaaa

SEQ ID NO: 144111 - DNA, 25 bp, Probe sequence
gtcgttgaacaatttgatgatatac

SEQ ID NO: 144112 - DNA, 25 bp, Probe sequence
ggtgtcaagaaatccgaaaaacatc

SEQ ID NO: 144113 - DNA, 25 bp, Probe sequence
ggttttcattggtgtcaagaaatcc

SEQ ID NO: 144114 - DNA, 25 bp, Probe sequence
tgctagatattaatttgccaacgtt

SEQ ID NO: 144115 - DNA, 25 bp, Probe sequence
tcatagatgataacacattagctgt

SEQ ID NO: 144116 - DNA, 25 bp, Probe sequence
taacttgtcattaacgattgccaaa

SEQ ID NO: 144117 - DNA, 25 bp, Probe sequence
ttgccaacgttaaatggttttcatt

SEQ ID NO: 144118 - DNA, 25 bp, Probe sequence
atttaagacatctggcaataagaat

SEQ ID NO: 144119 - DNA, 25 bp, Probe sequence
atagtttcccattatttaagacatc

SEQ ID NO: 144120 - DNA, 25 bp, Probe sequence
atgcggtcgcatttaaagcaacgac

SEQ ID NO: 144121 - DNA, 25 bp, Probe sequence
agtttcccattatttaagacatctg

SEQ ID NO: 144122 - DNA, 25 bp, Probe sequence
actagtaaactgaatgcggtcgcat

SEQ ID NO: 144123 - DNA, 25 bp, Probe sequence
aactagtaaactgaatgcggtcgca

SEQ ID NO: 144124 - DNA, 25 bp, Probe sequence
aactgaatgcggtcgcatttaaagc

SEQ ID NO: 144125 - DNA, 25 bp, Probe sequence
aagacatctggcaataagaatttaa

SEQ ID NO: 144126 - DNA, 25 bp, Probe sequence
aatgcggtcgcatttaaagcaacga

SEQ ID NO: 144127 - DNA, 25 bp, Probe sequence
ctagtaaactgaatgcggtcgcatt

SEQ ID NO: 144128 - DNA, 25 bp, Probe sequence
cggtcgcatttaaagcaacgacaca

SEQ ID NO: 144129 - DNA, 25 bp, Probe sequence
cgcatttaaagcaacgacacagaca

SEQ ID NO: 144130 - DNA, 25 bp, Probe sequence
cccattatttaagacatctggcaat

SEQ ID NO: 144131 - DNA, 25 bp, Probe sequence
ccattatttaagacatctggcaata

SEQ ID NO: 144132 - DNA, 25 bp, Probe sequence
gcggtcgcatttaaagcaacgacac

SEQ ID NO: 144133 - DNA, 25 bp, Probe sequence
gaatgcggtcgcatttaaagcaacg

SEQ ID NO: 144134 - DNA, 25 bp, Probe sequence
gacatctggcaataagaatttaact

SEQ ID NO: 144135 - DNA, 25 bp, Probe sequence
gtttcccattatttaagacatctgg

SEQ ID NO: 144136 - DNA, 25 bp, Probe sequence
gtatagtttcccattatttaagaca

SEQ ID NO: 144137 - DNA, 25 bp, Probe sequence
gtaaactgaatgcggtcgcatttaa

SEQ ID NO: 144138 - DNA, 25 bp, Probe sequence
gtgtatagtttcccattatttaaga

SEQ ID NO: 144139 - DNA, 25 bp, Probe sequence
ggtgtatagtttcccattatttaag

SEQ ID NO: 144140 - DNA, 25 bp, Probe sequence
ggtcgcatttaaagcaacgacacag

SEQ ID NO: 144141 - DNA, 25 bp, Probe sequence
tggtgtatagtttcccattatttaa

SEQ ID NO: 144142 - DNA, 25 bp, Probe sequence
tgtatagtttcccattatttaagac

SEQ ID NO: 144143 - DNA, 25 bp, Probe sequence
tgcggtcgcatttaaagcaacgaca

SEQ ID NO: 144144 - DNA, 25 bp, Probe sequence
tcccattatttaagacatctggcaa

SEQ ID NO: 144145 - DNA, 25 bp, Probe sequence
tcgcatttaaagcaacgacacagac

SEQ ID NO: 144146 - DNA, 25 bp, Probe sequence
tctggcaataagaatttaactagta

SEQ ID NO: 144147 - DNA, 25 bp, Probe sequence
tagtttcccattatttaagacatct

SEQ ID NO: 144148 - DNA, 25 bp, Probe sequence
tagtaaactgaatgcggtcgcattt

SEQ ID NO: 144149 - DNA, 25 bp, Probe sequence
tatagtttcccattatttaagacat

SEQ ID NO: 144150 - DNA, 25 bp, Probe sequence
tttcccattatttaagacatctggc

SEQ ID NO: 144151 - DNA, 25 bp, Probe sequence
ttcccattatttaagacatctggca

SEQ ID NO: 144152 - DNA, 25 bp, Probe sequence
attctttatagtgttgtctatttta

SEQ ID NO: 144153 - DNA, 25 bp, Probe sequence
atattctttatagtgttgtctattt

SEQ ID NO: 144154 - DNA, 25 bp, Probe sequence
atactagtaatgttatctccattat

SEQ ID NO: 144155 - DNA, 25 bp, Probe sequence
atcatattctttatagtgttgtcta

SEQ ID NO: 144156 - DNA, 25 bp, Probe sequence
atctccattattaatcatattcttt

SEQ ID NO: 144157 - DNA, 25 bp, Probe sequence
atgatactagtaatgttatctccat

SEQ ID NO: 144158 - DNA, 25 bp, Probe sequence
atgttatctccattattaatcatat

SEQ ID NO: 144159 - DNA, 25 bp, Probe sequence
agtaatgttatctccattattaatc

SEQ ID NO: 144160 - DNA, 25 bp, Probe sequence
agttcaaatcaagagccgtcattgc

SEQ ID NO: 144161 - DNA, 25 bp, Probe sequence
acgtacgaagaaaaagcaactcgag

SEQ ID NO: 144162 - DNA, 25 bp, Probe sequence
actagtaatgttatctccattatta

SEQ ID NO: 144163 - DNA, 25 bp, Probe sequence
aaagttcaaatcaagagccgtcatt

SEQ ID NO: 144164 - DNA, 25 bp, Probe sequence
aaagcaactcgagaaagaaaaagca

SEQ ID NO: 144165 - DNA, 25 bp, Probe sequence
aaatgacacggaaagttcaaatcaa

SEQ ID NO: 144166 - DNA, 25 bp, Probe sequence
aagttcaaatcaagagccgtcattg

SEQ ID NO: 144167 - DNA, 25 bp, Probe sequence
aatgttatctccattattaatcata

SEQ ID NO: 144168 - DNA, 25 bp, Probe sequence
aatcatattctttatagtgttgtct

SEQ ID NO: 144169 - DNA, 25 bp, Probe sequence
aatacaaatgacacggaaagttcaa

SEQ ID NO: 144170 - DNA, 25 bp, Probe sequence
ctccattattaatcatattctttat

SEQ ID NO: 144171 - DNA, 25 bp, Probe sequence
ccattattaatcatattctttatag

SEQ ID NO: 144172 - DNA, 25 bp, Probe sequence
gaagaaaaagcaactcgagaaagaa

SEQ ID NO: 144173 - DNA, 25 bp, Probe sequence
gaaagttcaaatcaagagccgtcat

SEQ ID NO: 144174 - DNA, 25 bp, Probe sequence
gacacggaaagttcaaatcaagagc

SEQ ID NO: 144175 - DNA, 25 bp, Probe sequence
gatactagtaatgttatctccatta

SEQ ID NO: 144176 - DNA, 25 bp, Probe sequence
gttcaaatcaagagccgtcattgca

SEQ ID NO: 144177 - DNA, 25 bp, Probe sequence
gttatctccattattaatcatattc

SEQ ID NO: 144178 - DNA, 25 bp, Probe sequence
ggaaagttcaaatcaagagccgtca

SEQ ID NO: 144179 - DNA, 25 bp, Probe sequence
tgatactagtaatgttatctccatt

SEQ ID NO: 144180 - DNA, 25 bp, Probe sequence
tctttatagtgttgtctattttaga

SEQ ID NO: 144181 - DNA, 25 bp, Probe sequence
tcatattctttatagtgttgtctat

SEQ ID NO: 144182 - DNA, 25 bp, Probe sequence
taatcatattctttatagtgttgtc

SEQ ID NO: 144183 - DNA, 25 bp, Probe sequence
tatctccattattaatcatattctt

SEQ ID NO: 144184 - DNA, 25 bp, Probe sequence
tattaatcatattctttatagtgtt

SEQ ID NO: 144185 - DNA, 25 bp, Probe sequence
ttatctccattattaatcatattct

SEQ ID NO: 144186 - DNA, 25 bp, Probe sequence
atatatcaacaagtcggttcggatt

SEQ ID NO: 144187 - DNA, 25 bp, Probe sequence
atgtcgaccaataaaaacgattatg

SEQ ID NO: 144188 - DNA, 25 bp, Probe sequence
agggcgacctggctttgattttatt

SEQ ID NO: 144189 - DNA, 25 bp, Probe sequence
acctggtattactattaaatcatta

SEQ ID NO: 144190 - DNA, 25 bp, Probe sequence
accgctgatgaaattatagagaagt

SEQ ID NO: 144191 - DNA, 25 bp, Probe sequence
acaaggatcacatgcaacacttcaa

SEQ ID NO: 144192 - DNA, 25 bp, Probe sequence
aaaggcgatcaactcattgctgaat

SEQ ID NO: 144193 - DNA, 25 bp, Probe sequence
aaagagcaaggtctcattattgaaa

SEQ ID NO: 144194 - DNA, 25 bp, Probe sequence
aagtcggttcggattggtatgatgt

SEQ ID NO: 144195 - DNA, 25 bp, Probe sequence
aagttttagagactgatcgacgtgt

SEQ ID NO: 144196 - DNA, 25 bp, Probe sequence
caacaagtcggttcggattggtatg

SEQ ID NO: 144197 - DNA, 25 bp, Probe sequence
cacatgcaacacttcaaaaattaaa

SEQ ID NO: 144198 - DNA, 25 bp, Probe sequence
cagcatcatcgttttttgtttttta

SEQ ID NO: 144199 - DNA, 25 bp, Probe sequence
ctcattgctgaattgaacaaggcgc

SEQ ID NO: 144200 - DNA, 25 bp, Probe sequence
cgtcagcatcatcgttttttgtttt

SEQ ID NO: 144201 - DNA, 25 bp, Probe sequence
gcgacctggctttgattttattaag

SEQ ID NO: 144202 - DNA, 25 bp, Probe sequence
gcattggctaaagggcgacctggct

SEQ ID NO: 144203 - DNA, 25 bp, Probe sequence
gaagcattggctaaagggcgacctg

SEQ ID NO: 144204 - DNA, 25 bp, Probe sequence
gcaaggtctcattattgaaaaagtt

SEQ ID NO: 144205 - DNA, 25 bp, Probe sequence
gaaatttctaaacaaggatcacatg

SEQ ID NO: 144206 - DNA, 25 bp, Probe sequence
gagcatatgttgttttattttgcat

SEQ ID NO: 144207 - DNA, 25 bp, Probe sequence
gatcgacgtgtcaaaaaattatatt

SEQ ID NO: 144208 - DNA, 25 bp, Probe sequence
gattatgagcatatgttgttttatt

SEQ ID NO: 144209 - DNA, 25 bp, Probe sequence
ggtatgatgtgatggaagcattggc

SEQ ID NO: 144210 - DNA, 25 bp, Probe sequence
ggttcggattggtatgatgtgatgg

SEQ ID NO: 144211 - DNA, 25 bp, Probe sequence
ggatcacatgcaacacttcaaaaat

SEQ ID NO: 144212 - DNA, 25 bp, Probe sequence
ggcgatcaactcattgctgaattga

SEQ ID NO: 144213 - DNA, 25 bp, Probe sequence
tggctaaagggcgacctggctttga

SEQ ID NO: 144214 - DNA, 25 bp, Probe sequence
tgaacaaggcgcaagatgaattatt

SEQ ID NO: 144215 - DNA, 25 bp, Probe sequence
tcgacggataaaggcgatcaactca

SEQ ID NO: 144216 - DNA, 25 bp, Probe sequence
taaagggcgacctggctttgatttt

SEQ ID NO: 144217 - DNA, 25 bp, Probe sequence
tagagactgatcgacgtgtcaaaaa

SEQ ID NO: 144218 - DNA, 25 bp, Probe sequence
tttattactaccgctgatgaaatta

SEQ ID NO: 144219 - DNA, 25 bp, Probe sequence
ttatcaataaattacctggtattac

SEQ ID NO: 144220 - DNA, 25 bp, Probe sequence
attccaaaattgctcattatgtgtg

SEQ ID NO: 144221 - DNA, 25 bp, Probe sequence
atttgccaaagctgtaccattatct

SEQ ID NO: 144222 - DNA, 25 bp, Probe sequence
atttgacagtcattttaccggaaga

SEQ ID NO: 144223 - DNA, 25 bp, Probe sequence
atagcaggtcactctatgggaggat

SEQ ID NO: 144224 - DNA, 25 bp, Probe sequence
atggcttatatttcattaaactatc

SEQ ID NO: 144225 - DNA, 25 bp, Probe sequence
accggaagatcaaagcttctttaat

SEQ ID NO: 144226 - DNA, 25 bp, Probe sequence
aaatttgcattaacacaaggggata

SEQ ID NO: 144227 - DNA, 25 bp, Probe sequence
aacatggcatatggtcatagctatt

SEQ ID NO: 144228 - DNA, 25 bp, Probe sequence
aagcgtgctataacatggatggtga

SEQ ID NO: 144229 - DNA, 25 bp, Probe sequence
aagaggccataattggcaatctttc

SEQ ID NO: 144230 - DNA, 25 bp, Probe sequence
aaggaactgaacatgatccgtatta

SEQ ID NO: 144231 - DNA, 25 bp, Probe sequence
aatgttgttacatggattatcaagt

SEQ ID NO: 144232 - DNA, 25 bp, Probe sequence
aattagctgtgattatgcccaatgt

SEQ ID NO: 144233 - DNA, 25 bp, Probe sequence
aattggcaatctttcaagtgttaaa

SEQ ID NO: 144234 - DNA, 25 bp, Probe sequence
caaggggataaatttgccaaagctg

SEQ ID NO: 144235 - DNA, 25 bp, Probe sequence
caagcgattaagcgtgctataacat

SEQ ID NO: 144236 - DNA, 25 bp, Probe sequence
catagcgcatatgctaacatggcat

SEQ ID NO: 144237 - DNA, 25 bp, Probe sequence
cattcaccaacaattggtatgcatc

SEQ ID NO: 144238 - DNA, 25 bp, Probe sequence
gctgtaccattatctgctgtgtttg

SEQ ID NO: 144239 - DNA, 25 bp, Probe sequence
gaagatggaccaggagatcatgatt

SEQ ID NO: 144240 - DNA, 25 bp, Probe sequence
gaagcgcaaaatttaatggatctag

SEQ ID NO: 144241 - DNA, 25 bp, Probe sequence
gaaaggtatgcgaatgaacacaaat

SEQ ID NO: 144242 - DNA, 25 bp, Probe sequence
gacaattttatagcaggtcactcta

SEQ ID NO: 144243 - DNA, 25 bp, Probe sequence
gacagtcattttaccggaagatcaa

SEQ ID NO: 144244 - DNA, 25 bp, Probe sequence
gatatggcacaattaaatttgcatt

SEQ ID NO: 144245 - DNA, 25 bp, Probe sequence
gttcatcaaatatttccactttcca

SEQ ID NO: 144246 - DNA, 25 bp, Probe sequence
gtggtaaacaagactttttatatca

SEQ ID NO: 144247 - DNA, 25 bp, Probe sequence
ggagatcatgattatgcatattggg

SEQ ID NO: 144248 - DNA, 25 bp, Probe sequence
ggaatgatttttcaaaagaggccat

SEQ ID NO: 144249 - DNA, 25 bp, Probe sequence
tgcccaatgtggatcatagcgcata

SEQ ID NO: 144250 - DNA, 25 bp, Probe sequence
tcactctatgggaggatatggcaca

SEQ ID NO: 144251 - DNA, 25 bp, Probe sequence
tagattttatcgattatttatcacg

SEQ ID NO: 144252 - DNA, 25 bp, Probe sequence
ttatctgctgtgtttgaagcgcaaa

SEQ ID NO: 144253 - DNA, 25 bp, Probe sequence
ttcattaaactatcattcaccaaca

SEQ ID NO: 144254 - DNA, 25 bp, Probe sequence
cccagacccggatccggattcggat

SEQ ID NO: 144255 - DNA, 25 bp, Probe sequence
atttaccacaatcatcaccacaaac

SEQ ID NO: 144256 - DNA, 25 bp, Probe sequence
ataggcaatcatcaagcacaagctt

SEQ ID NO: 144257 - DNA, 25 bp, Probe sequence
atagcgactcagaatcagatagcga

SEQ ID NO: 144258 - DNA, 25 bp, Probe sequence
ataccactacaacagagccagcttc

SEQ ID NO: 144259 - DNA, 25 bp, Probe sequence
aaatgcaagatcaaactgttcctca

SEQ ID NO: 144260 - DNA, 25 bp, Probe sequence
aatggcgcgaacatttcttctcaaa

SEQ ID NO: 144261 - DNA, 25 bp, Probe sequence
caccacaaacgatttccaatgcgca

SEQ ID NO: 144262 - DNA, 25 bp, Probe sequence
ctcaggctcagacagcgactcaggt

SEQ ID NO: 144263 - DNA, 25 bp, Probe sequence
ccagatccagaaccaagtccagacc

SEQ ID NO: 144264 - DNA, 25 bp, Probe sequence
gcgactcaggttcagatagcgactc

SEQ ID NO: 144265 - DNA, 25 bp, Probe sequence
gcagatccaaatgactctaacctta

SEQ ID NO: 144266 - DNA, 25 bp, Probe sequence
gacgttttacagtaggtaccacatc

SEQ ID NO: 144267 - DNA, 25 bp, Probe sequence
gaaccggtagtaaatgctgctgatg

SEQ ID NO: 144268 - DNA, 25 bp, Probe sequence
gaaaagactacatttgaccctaatc

SEQ ID NO: 144269 - DNA, 25 bp, Probe sequence
gaaacacctcaaccgacggcaatta

SEQ ID NO: 144270 - DNA, 25 bp, Probe sequence
gaacagaaagcaccatcaaatccta

SEQ ID NO: 144271 - DNA, 25 bp, Probe sequence
gacagcgactcagaatcagatagcg

SEQ ID NO: 144272 - DNA, 25 bp, Probe sequence
gacgtatacatttgtctttacagat

SEQ ID NO: 144273 - DNA, 25 bp, Probe sequence
gagactacagtattttcggttggaa

SEQ ID NO: 144274 - DNA, 25 bp, Probe sequence
gatagcgattcggattcagacagtg

SEQ ID NO: 144275 - DNA, 25 bp, Probe sequence
gttgacccagaaccaagtccagacc

SEQ ID NO: 144276 - DNA, 25 bp, Probe sequence
gattcagattcagacagcgactcag

SEQ ID NO: 144277 - DNA, 25 bp, Probe sequence
gtagtttagctgttgctgaaccggt

SEQ ID NO: 144278 - DNA, 25 bp, Probe sequence
gtacgttatggtggtggaagtgctg

SEQ ID NO: 144279 - DNA, 25 bp, Probe sequence
gtctacacaaacgagcaataccact

SEQ ID NO: 144280 - DNA, 25 bp, Probe sequence
gtggtaacacatttatggcggcaaa

SEQ ID NO: 144281 - DNA, 25 bp, Probe sequence
ggtgtagatacagcttcaggtcaaa

SEQ ID NO: 144282 - DNA, 25 bp, Probe sequence
ggattcagacagtgactcaggctca

SEQ ID NO: 144283 - DNA, 25 bp, Probe sequence
taaatccgaaagacccaactccagg

SEQ ID NO: 144284 - DNA, 25 bp, Probe sequence
tccgattcaagagttacaccaccaa

SEQ ID NO: 144285 - DNA, 25 bp, Probe sequence
taactatagttcgccaattgcagga

SEQ ID NO: 144286 - DNA, 25 bp, Probe sequence
tacagaccgagcaaaggcacctaaa

SEQ ID NO: 144287 - DNA, 25 bp, Probe sequence
ttcattacctttatttacagaccga

SEQ ID NO: 144288 - DNA, 25 bp, Probe sequence
cccagacccggatccggattcggat

SEQ ID NO: 144289 - DNA, 25 bp, Probe sequence
atttaccacaatcatcaccacaaac

SEQ ID NO: 144290 - DNA, 25 bp, Probe sequence
ataccactacaacagagccagcttc

SEQ ID NO: 144291 - DNA, 25 bp, Probe sequence
ctcggatagcgactcagactcagac

SEQ ID NO: 144292 - DNA, 25 bp, Probe sequence
gttgacccagaaccaagtccagacc

SEQ ID NO: 144293 - DNA, 25 bp, Probe sequence
agatagcgactcagactcagacagc

SEQ ID NO: 144294 - DNA, 25 bp, Probe sequence
agacagcgactcagactcggatagc

SEQ ID NO: 144295 - DNA, 25 bp, Probe sequence
aatggcgcgaacatttcttctcaaa

SEQ ID NO: 144296 - DNA, 25 bp, Probe sequence
caccacaaacgatttccaatgcgca

SEQ ID NO: 144297 - DNA, 25 bp, Probe sequence
cagactcagatagcgactcagactc

SEQ ID NO: 144298 - DNA, 25 bp, Probe sequence
ctcagacagcgactcagactcagat

SEQ ID NO: 144299 - DNA, 25 bp, Probe sequence
ccagatccagaaccaagtccagacc

SEQ ID NO: 144300 - DNA, 25 bp, Probe sequence
gcgactcagattcagacagcgactc

SEQ ID NO: 144301 - DNA, 25 bp, Probe sequence
gcgattcagactcagacagcgactc

SEQ ID NO: 144302 - DNA, 25 bp, Probe sequence
gcgattcagattcagacagcgactc

SEQ ID NO: 144303 - DNA, 25 bp, Probe sequence
gcgactcaggttcagatagcgactc

SEQ ID NO: 144304 - DNA, 25 bp, Probe sequence
gacagcgactcagattcagatagcg

SEQ ID NO: 144305 - DNA, 25 bp, Probe sequence
gaaacacctcaaccgacggcaatta

SEQ ID NO: 144306 - DNA, 25 bp, Probe sequence
gacagcgactcagactcggatagcg

SEQ ID NO: 144307 - DNA, 25 bp, Probe sequence
gacagcgactcagactcagatagcg

SEQ ID NO: 144308 - DNA, 25 bp, Probe sequence
gacagtgactcggactcagacagtg

SEQ ID NO: 144309 - DNA, 25 bp, Probe sequence
gactcagacagcgattcagactcag

SEQ ID NO: 144310 - DNA, 25 bp, Probe sequence
gactcagacagcgactcagattcag

SEQ ID NO: 144311 - DNA, 25 bp, Probe sequence
gactcagatagcgactcagattcag

SEQ ID NO: 144312 - DNA, 25 bp, Probe sequence
gactcagatagtgactccgattcaa

SEQ ID NO: 144313 - DNA, 25 bp, Probe sequence
gactcagactcggatagcgactcgg

SEQ ID NO: 144314 - DNA, 25 bp, Probe sequence
gatagcgattcggactcagacagcg

SEQ ID NO: 144315 - DNA, 25 bp, Probe sequence
gatagcgattcagactcagacagcg

SEQ ID NO: 144316 - DNA, 25 bp, Probe sequence
ggattcagatagcgactcagactca

SEQ ID NO: 144317 - DNA, 25 bp, Probe sequence
tgactcaggctcagacagcgactca

SEQ ID NO: 144318 - DNA, 25 bp, Probe sequence
taaatccgaaagacccaactccagg

SEQ ID NO: 144319 - DNA, 25 bp, Probe sequence
tcagacagcgactcagactcagaca

SEQ ID NO: 144320 - DNA, 25 bp, Probe sequence
ttacctttatttacagaccgagcaa

SEQ ID NO: 144321 - DNA, 25 bp, Probe sequence
gacagcgattcagattcagacagcg

SEQ ID NO: 144322 - DNA, 25 bp, Probe sequence
attttgactaagacatatacatttg

SEQ ID NO: 144323 - DNA, 25 bp, Probe sequence
atgccaattgcagatatagtaaacg

SEQ ID NO: 144324 - DNA, 25 bp, Probe sequence
atgtcgttttagtcgaaggtcatta

SEQ ID NO: 144325 - DNA, 25 bp, Probe sequence
atgggaaattttcattaccactatt

SEQ ID NO: 144326 - DNA, 25 bp, Probe sequence
atggcggcaaactttacagtgactg

SEQ ID NO: 144327 - DNA, 25 bp, Probe sequence
accactatttacagacagagcaaag

SEQ ID NO: 144328 - DNA, 25 bp, Probe sequence
actatttacagacagagcaaaggca

SEQ ID NO: 144329 - DNA, 25 bp, Probe sequence
acttttatggcggcaaactttacag

SEQ ID NO: 144330 - DNA, 25 bp, Probe sequence
aaatcacttataaataccaaaatgt

SEQ ID NO: 144331 - DNA, 25 bp, Probe sequence
aaagcgacatatgatattttgacta

SEQ ID NO: 144332 - DNA, 25 bp, Probe sequence
aaacttgaaaacgcaagtcattcaa

SEQ ID NO: 144333 - DNA, 25 bp, Probe sequence
aacgcaagtcattcaagaaaatgtt

SEQ ID NO: 144334 - DNA, 25 bp, Probe sequence
aagaagtaactgatcaatttaagga

SEQ ID NO: 144335 - DNA, 25 bp, Probe sequence
caaactttacagtgactggacaagt

SEQ ID NO: 144336 - DNA, 25 bp, Probe sequence
cattaccactatttacagacagagc

SEQ ID NO: 144337 - DNA, 25 bp, Probe sequence
cgtatgtcgttttagtcgaaggtca

SEQ ID NO: 144338 - DNA, 25 bp, Probe sequence
gccaattgcagatatagtaaacgat

SEQ ID NO: 144339 - DNA, 25 bp, Probe sequence
gcggcaaactttacagtgactggac

SEQ ID NO: 144340 - DNA, 25 bp, Probe sequence
gaagttgtagcaaaagcgacatatg

SEQ ID NO: 144341 - DNA, 25 bp, Probe sequence
gaaaacgcaagtcattcaagaaaat

SEQ ID NO: 144342 - DNA, 25 bp, Probe sequence
gacatatgatattttgactaagaca

SEQ ID NO: 144343 - DNA, 25 bp, Probe sequence
gttacggcaaaagattttcaattag

SEQ ID NO: 144344 - DNA, 25 bp, Probe sequence
gttttagtcgaaggtcattatgata

SEQ ID NO: 144345 - DNA, 25 bp, Probe sequence
gtcgaaggtcattatgataaaacag

SEQ ID NO: 144346 - DNA, 25 bp, Probe sequence
gtggtaatacttttatggcggcaaa

SEQ ID NO: 144347 - DNA, 25 bp, Probe sequence
ggcggcaaactttacagtgactgga

SEQ ID NO: 144348 - DNA, 25 bp, Probe sequence
ggtaatacttttatggcggcaaact

SEQ ID NO: 144349 - DNA, 25 bp, Probe sequence
ggcaaactttacagtgactggacaa

SEQ ID NO: 144350 - DNA, 25 bp, Probe sequence
tgggaaattttcattaccactattt

SEQ ID NO: 144351 - DNA, 25 bp, Probe sequence
taatacttttatggcggcaaacttt

SEQ ID NO: 144352 - DNA, 25 bp, Probe sequence
tacttttatggcggcaaactttaca

SEQ ID NO: 144353 - DNA, 25 bp, Probe sequence
ttttcattaccactatttacagaca

SEQ ID NO: 144354 - DNA, 25 bp, Probe sequence
ttaccactatttacagacagagcaa

SEQ ID NO: 144355 - DNA, 25 bp, Probe sequence
ttcattaccactatttacagacaga

SEQ ID NO: 144356 - DNA, 25 bp, Probe sequence
atttcatacaaatacgataacgtag

SEQ ID NO: 144357 - DNA, 25 bp, Probe sequence
atacgataacgtagcaagtattaat

SEQ ID NO: 144358 - DNA, 25 bp, Probe sequence
atccagttgatccaacaccgggacc

SEQ ID NO: 144359 - DNA, 25 bp, Probe sequence
aggcatcaaaacaacaccaaactga

SEQ ID NO: 144360 - DNA, 25 bp, Probe sequence
agtccagaaccagatccggattcgg

SEQ ID NO: 144361 - DNA, 25 bp, Probe sequence
aggtcactatgataatactggtaaa

SEQ ID NO: 144362 - DNA, 25 bp, Probe sequence
acgtatgttgtattagtggaaggtc

SEQ ID NO: 144363 - DNA, 25 bp, Probe sequence
aaatccagttgatccaacaccggga

SEQ ID NO: 144364 - DNA, 25 bp, Probe sequence
aaaacgtatgttgtattagtggaag

SEQ ID NO: 144365 - DNA, 25 bp, Probe sequence
aagtccagaaccagatccggattcg

SEQ ID NO: 144366 - DNA, 25 bp, Probe sequence
aaggcatcaaaacaacaccaaactg

SEQ ID NO: 144367 - DNA, 25 bp, Probe sequence
caagtccagaaccagatccggattc

SEQ ID NO: 144368 - DNA, 25 bp, Probe sequence
aatccagttgatccaacaccgggac

SEQ ID NO: 144369 - DNA, 25 bp, Probe sequence
caactttatttgatgcaatggtggc

SEQ ID NO: 144370 - DNA, 25 bp, Probe sequence
cagcagtaaatccagttgatccaac

SEQ ID NO: 144371 - DNA, 25 bp, Probe sequence
gtccagaaccagatccggattcgga

SEQ ID NO: 144372 - DNA, 25 bp, Probe sequence
ccaagtccagaaccagatccggatt

SEQ ID NO: 144373 - DNA, 25 bp, Probe sequence
gccaagtccagaaccagatccggat

SEQ ID NO: 144374 - DNA, 25 bp, Probe sequence
gcagtaaatccagttgatccaacac

SEQ ID NO: 144375 - DNA, 25 bp, Probe sequence
gaagtgactggtgagtttaaagata

SEQ ID NO: 144376 - DNA, 25 bp, Probe sequence
gatgcaatggtggcattattaggat

SEQ ID NO: 144377 - DNA, 25 bp, Probe sequence
gttatggaggcggaagtgctgatgg

SEQ ID NO: 144378 - DNA, 25 bp, Probe sequence
gtatgttgtattagtggaaggtcac

SEQ ID NO: 144379 - DNA, 25 bp, Probe sequence
gtacgttatggaggcggaagtgctg

SEQ ID NO: 144380 - DNA, 25 bp, Probe sequence
gtaaatccagttgatccaacaccgg

SEQ ID NO: 144381 - DNA, 25 bp, Probe sequence
ggaaggtcactatgataatactggt

SEQ ID NO: 144382 - DNA, 25 bp, Probe sequence
ggcaaattttaaagtgactggacaa

SEQ ID NO: 144383 - DNA, 25 bp, Probe sequence
tgttgtacgttatggaggcggaagt

SEQ ID NO: 144384 - DNA, 25 bp, Probe sequence
tccagttgatccaacaccgggacca

SEQ ID NO: 144385 - DNA, 25 bp, Probe sequence
tgactcaaactcagacagtgagtca

SEQ ID NO: 144386 - DNA, 25 bp, Probe sequence
tccagaaccagatccggattcggat

SEQ ID NO: 144387 - DNA, 25 bp, Probe sequence
taaccttaaagaagtgactggtgag

SEQ ID NO: 144388 - DNA, 25 bp, Probe sequence
ttatggaggcggaagtgctgatggt

SEQ ID NO: 144389 - DNA, 25 bp, Probe sequence
ttcagcagtaaatccagttgatcca

SEQ ID NO: 144390 - DNA, 25 bp, Probe sequence
atttttcgccacaagaaagtagcaa

SEQ ID NO: 144391 - DNA, 25 bp, Probe sequence
atccgaaagaggttaacgaattgtg

SEQ ID NO: 144392 - DNA, 25 bp, Probe sequence
agagcaagtattatttccaatcagt

SEQ ID NO: 144393 - DNA, 25 bp, Probe sequence
acagtttttaactattcaactcatg

SEQ ID NO: 144394 - DNA, 25 bp, Probe sequence
acagcattaaccgattgtacagttc

SEQ ID NO: 144395 - DNA, 25 bp, Probe sequence
acaaccatatcaaagtgaatgtttt

SEQ ID NO: 144396 - DNA, 25 bp, Probe sequence
aatggagatgtatatcgttatttta

SEQ ID NO: 144397 - DNA, 25 bp, Probe sequence
caatcagtaacttatttcatccgaa

SEQ ID NO: 144398 - DNA, 25 bp, Probe sequence
caagttatttatttttcgccacaag

SEQ ID NO: 144399 - DNA, 25 bp, Probe sequence
cttggattgcctagagaattgatgg

SEQ ID NO: 144400 - DNA, 25 bp, Probe sequence
ccatatagtatattacaaccatatc

SEQ ID NO: 144401 - DNA, 25 bp, Probe sequence
gccaagttatttatttttcgccaca

SEQ ID NO: 144402 - DNA, 25 bp, Probe sequence
gctggtcatattattcatgaactta

SEQ ID NO: 144403 - DNA, 25 bp, Probe sequence
gaactataacatggcattaacaagt

SEQ ID NO: 144404 - DNA, 25 bp, Probe sequence
gaaacagctggtcatattattcatg

SEQ ID NO: 144405 - DNA, 25 bp, Probe sequence
gagcagcaacacatgaactataaca

SEQ ID NO: 144406 - DNA, 25 bp, Probe sequence
gagtgatatggctgggatttcccgg

SEQ ID NO: 144407 - DNA, 25 bp, Probe sequence
gataatgagcagcaacacatgaact

SEQ ID NO: 144408 - DNA, 25 bp, Probe sequence
ggctgggatttcccgggaaacagct

SEQ ID NO: 144409 - DNA, 25 bp, Probe sequence
gatatatttttgacactttttgcat

SEQ ID NO: 144410 - DNA, 25 bp, Probe sequence
gatttcccgggaaacagctggtcat

SEQ ID NO: 144411 - DNA, 25 bp, Probe sequence
gattgtacagttcttggattgccta

SEQ ID NO: 144412 - DNA, 25 bp, Probe sequence
gtattatttccaatcagtaacttat

SEQ ID NO: 144413 - DNA, 25 bp, Probe sequence
gtacagttcttggattgcctagaga

SEQ ID NO: 144414 - DNA, 25 bp, Probe sequence
gtaacttatttcatccgaaagaggt

SEQ ID NO: 144415 - DNA, 25 bp, Probe sequence
gtcagacattatacgaaaggccaag

SEQ ID NO: 144416 - DNA, 25 bp, Probe sequence
gtgaatgttttgtcagacattatac

SEQ ID NO: 144417 - DNA, 25 bp, Probe sequence
ggttagtaagcaaacatttattcaa

SEQ ID NO: 144418 - DNA, 25 bp, Probe sequence
tcaactcatgagtgatatggctggg

SEQ ID NO: 144419 - DNA, 25 bp, Probe sequence
taaaggcattagcagattacattaa

SEQ ID NO: 144420 - DNA, 25 bp, Probe sequence
ttcccgggaaacagctggtcatatt

SEQ ID NO: 144421 - DNA, 25 bp, Probe sequence
tttattcaatgatgtatgtgtttaa

SEQ ID NO: 144422 - DNA, 25 bp, Probe sequence
tttttgacactttttgcattaataa

SEQ ID NO: 144423 - DNA, 25 bp, Probe sequence
ttttgtgcaaagctaatgatgatat

SEQ ID NO: 144424 - DNA, 25 bp, Probe sequence
attaccaatttagagcaggcatacg

SEQ ID NO: 144425 - DNA, 25 bp, Probe sequence
attaggcggtaatgcgatacagaca

SEQ ID NO: 144426 - DNA, 25 bp, Probe sequence
agttaattcgaactttagcagacgg

SEQ ID NO: 144427 - DNA, 25 bp, Probe sequence
atcgaacagtgacacaacgccggca

SEQ ID NO: 144428 - DNA, 25 bp, Probe sequence
atgataggctattggttggaaactg

SEQ ID NO: 144429 - DNA, 25 bp, Probe sequence
acctcaatctatactagaacaccag

SEQ ID NO: 144430 - DNA, 25 bp, Probe sequence
aaatacgcggcacaaggtaagtttg

SEQ ID NO: 144431 - DNA, 25 bp, Probe sequence
aaagttatcattaccaatttagagc

SEQ ID NO: 144432 - DNA, 25 bp, Probe sequence
aaacctttatttgattcaccagcgc

SEQ ID NO: 144433 - DNA, 25 bp, Probe sequence
aatccaacaagctaaatcgaacagt

SEQ ID NO: 144434 - DNA, 25 bp, Probe sequence
aataaaggtacacacattcacatgt

SEQ ID NO: 144435 - DNA, 25 bp, Probe sequence
caacgccggcaatgccattggatac

SEQ ID NO: 144436 - DNA, 25 bp, Probe sequence
ctgaagcacaacaaacagctattag

SEQ ID NO: 144437 - DNA, 25 bp, Probe sequence
cctatgaaggtgttgaagcggttat

SEQ ID NO: 144438 - DNA, 25 bp, Probe sequence
gctgattgaagcagataccttaatg

SEQ ID NO: 144439 - DNA, 25 bp, Probe sequence
gcaggcatacgaagctttgattggt

SEQ ID NO: 144440 - DNA, 25 bp, Probe sequence
gacacaacgccggcaatgccattgg

SEQ ID NO: 144441 - DNA, 25 bp, Probe sequence
gcaacactgaaaaaatacgcggcac

SEQ ID NO: 144442 - DNA, 25 bp, Probe sequence
gaaggtgttgaagcggttatagata

SEQ ID NO: 144443 - DNA, 25 bp, Probe sequence
gaagctgcgatacgatttgttgaaa

SEQ ID NO: 144444 - DNA, 25 bp, Probe sequence
gaacctaatcaacaacaaatcgatg

SEQ ID NO: 144445 - DNA, 25 bp, Probe sequence
gaacaccagttaattcgaactttag

SEQ ID NO: 144446 - DNA, 25 bp, Probe sequence
gaaaattgtcattgcattaggcggt

SEQ ID NO: 144447 - DNA, 25 bp, Probe sequence
gaaatcaatcgcattttaactgaaa

SEQ ID NO: 144448 - DNA, 25 bp, Probe sequence
gatgatattgatgtagcaacactga

SEQ ID NO: 144449 - DNA, 25 bp, Probe sequence
gataccttaatgattcttacgaatg

SEQ ID NO: 144450 - DNA, 25 bp, Probe sequence
gtgcgatgcaaaaccttaaaccttt

SEQ ID NO: 144451 - DNA, 25 bp, Probe sequence
gtgagaaattagcaacgctgattga

SEQ ID NO: 144452 - DNA, 25 bp, Probe sequence
ggttggaaactgaaatcaatcgcat

SEQ ID NO: 144453 - DNA, 25 bp, Probe sequence
ggaaggatcgatgttgccaaaaata

SEQ ID NO: 144454 - DNA, 25 bp, Probe sequence
tgttgccaaaaatagaagctgcgat

SEQ ID NO: 144455 - DNA, 25 bp, Probe sequence
tcaccactacctcaatctatactag

SEQ ID NO: 144456 - DNA, 25 bp, Probe sequence
tatttgattcaccagcgcgtattgt

SEQ ID NO: 144457 - DNA, 25 bp, Probe sequence
ttaactttaatgaacctaatcaaca

SEQ ID NO: 144458 - DNA, 25 bp, Probe sequence
atggcaaacgattagctaacgatca

SEQ ID NO: 144459 - DNA, 25 bp, Probe sequence
agctaacgatcattacaatacattg

SEQ ID NO: 144460 - DNA, 25 bp, Probe sequence
acctttgctgttgctatagagacgt

SEQ ID NO: 144461 - DNA, 25 bp, Probe sequence
acatttgtctaaacactttacttca

SEQ ID NO: 144462 - DNA, 25 bp, Probe sequence
acacactaaaggacatcgttgatga

SEQ ID NO: 144463 - DNA, 25 bp, Probe sequence
acaatacattgatatcgaagtcgaa

SEQ ID NO: 144464 - DNA, 25 bp, Probe sequence
aactacatttattacacgtctattt

SEQ ID NO: 144465 - DNA, 25 bp, Probe sequence
aacgggtagaaattgcttatagtat

SEQ ID NO: 144466 - DNA, 25 bp, Probe sequence
aagcacatgatgaaatacaaccgtt

SEQ ID NO: 144467 - DNA, 25 bp, Probe sequence
aagggagttgtatttgccagctgca

SEQ ID NO: 144468 - DNA, 25 bp, Probe sequence
aatcaaccattcacaagccggtgca

SEQ ID NO: 144469 - DNA, 25 bp, Probe sequence
caatctttttttgaagaaccttgca

SEQ ID NO: 144470 - DNA, 25 bp, Probe sequence
caagccggtgcagtagccaaaggtg

SEQ ID NO: 144471 - DNA, 25 bp, Probe sequence
tactacggaaaatatatcgggactg

SEQ ID NO: 144472 - DNA, 25 bp, Probe sequence
gcatcgttgttatctcaaatgacag

SEQ ID NO: 144473 - DNA, 25 bp, Probe sequence
gaatacttgcgtaattttttagaag

SEQ ID NO: 144474 - DNA, 25 bp, Probe sequence
gaaccttgcatcgttgttatctcaa

SEQ ID NO: 144475 - DNA, 25 bp, Probe sequence
gaacaatccggattattagatttta

SEQ ID NO: 144476 - DNA, 25 bp, Probe sequence
gacaccgattcaactatgtacacca

SEQ ID NO: 144477 - DNA, 25 bp, Probe sequence
gattcaactatgtacaccaaattat

SEQ ID NO: 144478 - DNA, 25 bp, Probe sequence
gattacaagatttcgatattttatc

SEQ ID NO: 144479 - DNA, 25 bp, Probe sequence
gttgatgatataactttttcttatc

SEQ ID NO: 144480 - DNA, 25 bp, Probe sequence
gttgctatagagacgtttttaatca

SEQ ID NO: 144481 - DNA, 25 bp, Probe sequence
gtagccaaaggtgattgcgacttcc

SEQ ID NO: 144482 - DNA, 25 bp, Probe sequence
gtaatactgatatcaaacatttgtc

SEQ ID NO: 144483 - DNA, 25 bp, Probe sequence
ggtgattgcgacttccttttaaaca

SEQ ID NO: 144484 - DNA, 25 bp, Probe sequence
ggaagccttcccattcatgagaaaa

SEQ ID NO: 144485 - DNA, 25 bp, Probe sequence
tattacacgtctatttactacggaa

SEQ ID NO: 144486 - DNA, 25 bp, Probe sequence
tgcgacttccttttaaacacactaa

SEQ ID NO: 144487 - DNA, 25 bp, Probe sequence
tcaaacataaagacaccgattcaac

SEQ ID NO: 144488 - DNA, 25 bp, Probe sequence
tagtagtaatccggaagccttccca

SEQ ID NO: 144489 - DNA, 25 bp, Probe sequence
taaacactttacttcatacatatat

SEQ ID NO: 144490 - DNA, 25 bp, Probe sequence
tacaaccgttcaaccacttagattt

SEQ ID NO: 144491 - DNA, 25 bp, Probe sequence
ttgccagctgcagcaacctttgctg

SEQ ID NO: 144492 - DNA, 25 bp, Probe sequence
attaaaagttccttgttcactaatg

SEQ ID NO: 144493 - DNA, 25 bp, Probe sequence
atagtagctatcgcttcagctaaaa

SEQ ID NO: 144494 - DNA, 25 bp, Probe sequence
atcgcttcagctaaaatcgaattca

SEQ ID NO: 144495 - DNA, 25 bp, Probe sequence
atcgcggaactgttgaaatatcaaa

SEQ ID NO: 144496 - DNA, 25 bp, Probe sequence
aggtcatcgcggaactgttgaaata

SEQ ID NO: 144497 - DNA, 25 bp, Probe sequence
agttccttgttcactaatggctcat

SEQ ID NO: 144498 - DNA, 25 bp, Probe sequence
aagttccttgttcactaatggctca

SEQ ID NO: 144499 - DNA, 25 bp, Probe sequence
acaaaatagtagctatcgcttcagc

SEQ ID NO: 144500 - DNA, 25 bp, Probe sequence
aaatagtagctatcgcttcagctaa

SEQ ID NO: 144501 - DNA, 25 bp, Probe sequence
aaagttccttgttcactaatggctc

SEQ ID NO: 144502 - DNA, 25 bp, Probe sequence
aaagtcaggtcatcgcggaactgtt

SEQ ID NO: 144503 - DNA, 25 bp, Probe sequence
aaaagttccttgttcactaatggct

SEQ ID NO: 144504 - DNA, 25 bp, Probe sequence
aagtcaggtcatcgcggaactgttg

SEQ ID NO: 144505 - DNA, 25 bp, Probe sequence
aagtgataaagtcaggtcatcgcgg

SEQ ID NO: 144506 - DNA, 25 bp, Probe sequence
aagcttgtttatatctttctaatga

SEQ ID NO: 144507 - DNA, 25 bp, Probe sequence
cactaatggctcatatacttttgtt

SEQ ID NO: 144508 - DNA, 25 bp, Probe sequence
cttgttcactaatggctcatatact

SEQ ID NO: 144509 - DNA, 25 bp, Probe sequence
gctcatatacttttgttggagacaa

SEQ ID NO: 144510 - DNA, 25 bp, Probe sequence
gctatcgcttcagctaaaatcgaat

SEQ ID NO: 144511 - DNA, 25 bp, Probe sequence
gcttcagctaaaatcgaattcatag

SEQ ID NO: 144512 - DNA, 25 bp, Probe sequence
gcttgtttatatctttctaatgata

SEQ ID NO: 144513 - DNA, 25 bp, Probe sequence
gagacaaaatagtagctatcgcttc

SEQ ID NO: 144514 - DNA, 25 bp, Probe sequence
gataaagtcaggtcatcgcggaact

SEQ ID NO: 144515 - DNA, 25 bp, Probe sequence
gttccttgttcactaatggctcata

SEQ ID NO: 144516 - DNA, 25 bp, Probe sequence
gttcactaatggctcatatactttt

SEQ ID NO: 144517 - DNA, 25 bp, Probe sequence
gtagctatcgcttcagctaaaatcg

SEQ ID NO: 144518 - DNA, 25 bp, Probe sequence
gtcaggtcatcgcggaactgttgaa

SEQ ID NO: 144519 - DNA, 25 bp, Probe sequence
gtcatcgcggaactgttgaaatatc

SEQ ID NO: 144520 - DNA, 25 bp, Probe sequence
gtgataaagtcaggtcatcgcggaa

SEQ ID NO: 144521 - DNA, 25 bp, Probe sequence
tggctcatatacttttgttggagac

SEQ ID NO: 144522 - DNA, 25 bp, Probe sequence
tccttgttcactaatggctcatata

SEQ ID NO: 144523 - DNA, 25 bp, Probe sequence
tcaggtcatcgcggaactgttgaaa

SEQ ID NO: 144524 - DNA, 25 bp, Probe sequence
taatggctcatatacttttgttgga

SEQ ID NO: 144525 - DNA, 25 bp, Probe sequence
ttccttgttcactaatggctcatat

SEQ ID NO: 144526 - DNA, 25 bp, Probe sequence
attcacatcacgctcaagcgcgggt

SEQ ID NO: 144527 - DNA, 25 bp, Probe sequence
atttgcttcgtttataggatttgct

SEQ ID NO: 144528 - DNA, 25 bp, Probe sequence
atgcctttaattttcatttctattg

SEQ ID NO: 144529 - DNA, 25 bp, Probe sequence
aacagcacatacgttaccacaacaa

SEQ ID NO: 144530 - DNA, 25 bp, Probe sequence
aacgtgcaacttccacgattgctgt

SEQ ID NO: 144531 - DNA, 25 bp, Probe sequence
aatggcgattgtgacgttcgtctta

SEQ ID NO: 144532 - DNA, 25 bp, Probe sequence
aatctttgcattcacatcacgctca

SEQ ID NO: 144533 - DNA, 25 bp, Probe sequence
cacaaacaagacgtctaggcgtgcc

SEQ ID NO: 144534 - DNA, 25 bp, Probe sequence
cattcttagatttcactggacaacg

SEQ ID NO: 144535 - DNA, 25 bp, Probe sequence
cttaatcgcatcgtacgctgcatta

SEQ ID NO: 144536 - DNA, 25 bp, Probe sequence
cgttaaacttgccagtcgctttagc

SEQ ID NO: 144537 - DNA, 25 bp, Probe sequence
gcgaaacgtgtgtttacagctttag

SEQ ID NO: 144538 - DNA, 25 bp, Probe sequence
gctcatctccgttgaaccattgatt

SEQ ID NO: 144539 - DNA, 25 bp, Probe sequence
gctagctggtacaggtaccgccaag

SEQ ID NO: 144540 - DNA, 25 bp, Probe sequence
gaatgcttttcttacactgattaat

SEQ ID NO: 144541 - DNA, 25 bp, Probe sequence
gactttggcgccatttggactttag

SEQ ID NO: 144542 - DNA, 25 bp, Probe sequence
gatcatggtgaattgcttaagcgtg

SEQ ID NO: 144543 - DNA, 25 bp, Probe sequence
gtattgccaatttcgctgcgacatt

SEQ ID NO: 144544 - DNA, 25 bp, Probe sequence
gtagcacgcaaacaacctgatcatg

SEQ ID NO: 144545 - DNA, 25 bp, Probe sequence
gtgactggttcaacattgtcggaca

SEQ ID NO: 144546 - DNA, 25 bp, Probe sequence
gtgcgattgacgctatctattcact

SEQ ID NO: 144547 - DNA, 25 bp, Probe sequence
gtgaacgattcaatgctagctggta

SEQ ID NO: 144548 - DNA, 25 bp, Probe sequence
gggctacatttgcatccatattggt

SEQ ID NO: 144549 - DNA, 25 bp, Probe sequence
ggtgttgtcaacgttaaacttgcca

SEQ ID NO: 144550 - DNA, 25 bp, Probe sequence
tgcttgcaattatggtcgcacccgt

SEQ ID NO: 144551 - DNA, 25 bp, Probe sequence
ggatttgcttatttacgcgtagcac

SEQ ID NO: 144552 - DNA, 25 bp, Probe sequence
tggtagtctcatttttatcttttta

SEQ ID NO: 144553 - DNA, 25 bp, Probe sequence
tgtcggacaaggttacgttgcattg

SEQ ID NO: 144554 - DNA, 25 bp, Probe sequence
tcgcacccgtcgctaatgtagaaat

SEQ ID NO: 144555 - DNA, 25 bp, Probe sequence
taatgctgcattaacttcacactaa

SEQ ID NO: 144556 - DNA, 25 bp, Probe sequence
tatcgacaagtgactttggcgccat

SEQ ID NO: 144557 - DNA, 25 bp, Probe sequence
tattagttcattcggcgttgctggc

SEQ ID NO: 144558 - DNA, 25 bp, Probe sequence
ttcgtcttacgtttaacgccatacg

SEQ ID NO: 144559 - DNA, 25 bp, Probe sequence
ttgtaacgttaatcgctgtcgtgat

SEQ ID NO: 144560 - DNA, 25 bp, Probe sequence
gaacggccggagctagacggtggta

SEQ ID NO: 144561 - DNA, 25 bp, Probe sequence
atttaaccaatgaacggccggagct

SEQ ID NO: 144562 - DNA, 25 bp, Probe sequence
atacccttacatgttcagtgcattt

SEQ ID NO: 144563 - DNA, 25 bp, Probe sequence
atgctcaagcaggatttggcgattt

SEQ ID NO: 144564 - DNA, 25 bp, Probe sequence
atgcagcaggtatcaattacttatt

SEQ ID NO: 144565 - DNA, 25 bp, Probe sequence
atgattattatcgtacttgcagtta

SEQ ID NO: 144566 - DNA, 25 bp, Probe sequence
aggtggttggggatctacacttgta

SEQ ID NO: 144567 - DNA, 25 bp, Probe sequence
agtgcttggggatattggttctcag

SEQ ID NO: 144568 - DNA, 25 bp, Probe sequence
aaatacactttagagcatcgacagc

SEQ ID NO: 144569 - DNA, 25 bp, Probe sequence
aaatgcactgcttattaccaatata

SEQ ID NO: 144570 - DNA, 25 bp, Probe sequence
aaagccggtggattagccattatta

SEQ ID NO: 144571 - DNA, 25 bp, Probe sequence
aatggagcacctgtaaatgcactgc

SEQ ID NO: 144572 - DNA, 25 bp, Probe sequence
cagtttgggtgtttatcggtatcga

SEQ ID NO: 144573 - DNA, 25 bp, Probe sequence
gcgagcacaatgagccaagttaaaa

SEQ ID NO: 144574 - DNA, 25 bp, Probe sequence
gcttgctggtgaattacctttcatt

SEQ ID NO: 144575 - DNA, 25 bp, Probe sequence
gaatgatttcattagcgttcgtatt

SEQ ID NO: 144576 - DNA, 25 bp, Probe sequence
gacggtggtatttatagttatgctc

SEQ ID NO: 144577 - DNA, 25 bp, Probe sequence
gacgtcagagggtgtattgccattt

SEQ ID NO: 144578 - DNA, 25 bp, Probe sequence
gacgatgttactttatattccagct

SEQ ID NO: 144579 - DNA, 25 bp, Probe sequence
gagcatcgacagcaagcaactacta

SEQ ID NO: 144580 - DNA, 25 bp, Probe sequence
gattcgccaagtatggcacaggtgc

SEQ ID NO: 144581 - DNA, 25 bp, Probe sequence
gtattagctcaaggcgtgattttgc

SEQ ID NO: 144582 - DNA, 25 bp, Probe sequence
gtacgatgctagtgacagtttgggt

SEQ ID NO: 144583 - DNA, 25 bp, Probe sequence
gtgctattttatacccttacatgtt

SEQ ID NO: 144584 - DNA, 25 bp, Probe sequence
gtgcgtatcaatttgcattttcact

SEQ ID NO: 144585 - DNA, 25 bp, Probe sequence
ggtagtgccacggttataggactta

SEQ ID NO: 144586 - DNA, 25 bp, Probe sequence
ggatccatgattggtggcggtgcgt

SEQ ID NO: 144587 - DNA, 25 bp, Probe sequence
ggcggtgcgttcaatataatgtctg

SEQ ID NO: 144588 - DNA, 25 bp, Probe sequence
tgttcagtgcattttaccaagttaa

SEQ ID NO: 144589 - DNA, 25 bp, Probe sequence
tgccatttagttgggcgagcacaat

SEQ ID NO: 144590 - DNA, 25 bp, Probe sequence
taaaggaggcaacacattaccaagt

SEQ ID NO: 144591 - DNA, 25 bp, Probe sequence
ttatttcggtactaggtgcatggtt

SEQ ID NO: 144592 - DNA, 25 bp, Probe sequence
ttatattccagctcttcttgtttat

SEQ ID NO: 144593 - DNA, 25 bp, Probe sequence
ttgcctatgcaacactattgatgtc

SEQ ID NO: 144594 - DNA, 25 bp, Probe sequence
atattgcactactattcgaaaagaa

SEQ ID NO: 144595 - DNA, 25 bp, Probe sequence
atgatacaaatacactttatggaca

SEQ ID NO: 144596 - DNA, 25 bp, Probe sequence
atgttagctgattttatgacaataa

SEQ ID NO: 144597 - DNA, 25 bp, Probe sequence
agcatcactacttatctggaaaaaa

SEQ ID NO: 144598 - DNA, 25 bp, Probe sequence
aaaagaattcgacgagaacgcgtgc

SEQ ID NO: 144599 - DNA, 25 bp, Probe sequence
aaaagcgagtcaatatggtggttca

SEQ ID NO: 144600 - DNA, 25 bp, Probe sequence
aaaagtgtttgatcaagctgaaaat

SEQ ID NO: 144601 - DNA, 25 bp, Probe sequence
aagaatttgtacacctaaatcatta

SEQ ID NO: 144602 - DNA, 25 bp, Probe sequence
cagatgtttgggtatcgatgggtga

SEQ ID NO: 144603 - DNA, 25 bp, Probe sequence
cagatgctatatatacagatgtttg

SEQ ID NO: 144604 - DNA, 25 bp, Probe sequence
cttacattgtttaccagcattccat

SEQ ID NO: 144605 - DNA, 25 bp, Probe sequence
cgtggtttttcacaacaagctgttg

SEQ ID NO: 144606 - DNA, 25 bp, Probe sequence
ccggtgtggaatggattaacagacg

SEQ ID NO: 144607 - DNA, 25 bp, Probe sequence
gcgtttacagttgcgtctattgatt

SEQ ID NO: 144608 - DNA, 25 bp, Probe sequence
gcgtctattgatttaggtgcgcatc

SEQ ID NO: 144609 - DNA, 25 bp, Probe sequence
gaatctgtagaggatactgcgaaag

SEQ ID NO: 144610 - DNA, 25 bp, Probe sequence
gaagatttagcgaagttctctggtg

SEQ ID NO: 144611 - DNA, 25 bp, Probe sequence
gacgattggcatcctacacaaatgt

SEQ ID NO: 144612 - DNA, 25 bp, Probe sequence
gatggtattgaattccgtggttttt

SEQ ID NO: 144613 - DNA, 25 bp, Probe sequence
gattacggataatattgcagaagca

SEQ ID NO: 144614 - DNA, 25 bp, Probe sequence
gattcaacgatattcttacattgtt

SEQ ID NO: 144615 - DNA, 25 bp, Probe sequence
gtttaccagcattccatgatacaaa

SEQ ID NO: 144616 - DNA, 25 bp, Probe sequence
gtagcaggtgctatgttaggtgtta

SEQ ID NO: 144617 - DNA, 25 bp, Probe sequence
gtgattttaccaaagcagaattcga

SEQ ID NO: 144618 - DNA, 25 bp, Probe sequence
ggacgtaataatattgcgcattcat

SEQ ID NO: 144619 - DNA, 25 bp, Probe sequence
ggaagttacagaccaaatctttaga

SEQ ID NO: 144620 - DNA, 25 bp, Probe sequence
ggcagtaatggcagcaacattgggg

SEQ ID NO: 144621 - DNA, 25 bp, Probe sequence
ggcatcctacacaaatgttagctga

SEQ ID NO: 144622 - DNA, 25 bp, Probe sequence
tgcgcattcattaatggtagcaggt

SEQ ID NO: 144623 - DNA, 25 bp, Probe sequence
taaacttaacttacgttggagatgg

SEQ ID NO: 144624 - DNA, 25 bp, Probe sequence
taggtagaatgttcgatggtattga

SEQ ID NO: 144625 - DNA, 25 bp, Probe sequence
ttaggtgcgcatccagaatttttag

SEQ ID NO: 144626 - DNA, 25 bp, Probe sequence
ttaacagacgattggcatcctacac

SEQ ID NO: 144627 - DNA, 25 bp, Probe sequence
ttcgaaggacttattgattttgcaa

SEQ ID NO: 144628 - DNA, 25 bp, Probe sequence
atttagatccaatgccaaaccttta

SEQ ID NO: 144629 - DNA, 25 bp, Probe sequence
atcaatcggatgttctggagagcac

SEQ ID NO: 144630 - DNA, 25 bp, Probe sequence
ataagtatccattctatttagatcc

SEQ ID NO: 144631 - DNA, 25 bp, Probe sequence
atgccaaacctttattttactagag

SEQ ID NO: 144632 - DNA, 25 bp, Probe sequence
atgttctggagagcacgacgacgag

SEQ ID NO: 144633 - DNA, 25 bp, Probe sequence
atgatggctcaaatacattatgtat

SEQ ID NO: 144634 - DNA, 25 bp, Probe sequence
agtcattgaaatatctggtagcgag

SEQ ID NO: 144635 - DNA, 25 bp, Probe sequence
agtagcaattgaaattccaactagt

SEQ ID NO: 144636 - DNA, 25 bp, Probe sequence
aactgtgttacttaagcgtcctgga

SEQ ID NO: 144637 - DNA, 25 bp, Probe sequence
ccatcaaacaatctagtcatttaaa

SEQ ID NO: 144638 - DNA, 25 bp, Probe sequence
gcgcgacgtatttttgaaaatccgc

SEQ ID NO: 144639 - DNA, 25 bp, Probe sequence
gcccattcaatattgaaggcggcga

SEQ ID NO: 144640 - DNA, 25 bp, Probe sequence
gcagctgaaagtattgaaaatcctc

SEQ ID NO: 144641 - DNA, 25 bp, Probe sequence
gcacgacgacgagaatcaatattta

SEQ ID NO: 144642 - DNA, 25 bp, Probe sequence
gaacgtacatctgcacaagctattg

SEQ ID NO: 144643 - DNA, 25 bp, Probe sequence
gaaaagttagcgcgacgtatttttg

SEQ ID NO: 144644 - DNA, 25 bp, Probe sequence
gaaattaatccgaaatgtacacatc

SEQ ID NO: 144645 - DNA, 25 bp, Probe sequence
gagggtgttgaagtactttaccttg

SEQ ID NO: 144646 - DNA, 25 bp, Probe sequence
gatggattactatttgatgatattc

SEQ ID NO: 144647 - DNA, 25 bp, Probe sequence
gatgatatccaattcattccaacag

SEQ ID NO: 144648 - DNA, 25 bp, Probe sequence
gatgcgaatattccaatctggttag

SEQ ID NO: 144649 - DNA, 25 bp, Probe sequence
gatattccatatttagaagtagctc

SEQ ID NO: 144650 - DNA, 25 bp, Probe sequence
gtcttggctataggcgtttcagaac

SEQ ID NO: 144651 - DNA, 25 bp, Probe sequence
ggttagatcgagattgcccattcaa

SEQ ID NO: 144652 - DNA, 25 bp, Probe sequence
ggtgatgtcattgatggtgctagag

SEQ ID NO: 144653 - DNA, 25 bp, Probe sequence
ggacacggtataacaatcaatcgga

SEQ ID NO: 144654 - DNA, 25 bp, Probe sequence
ggcggcgatgaacttgttttatcta

SEQ ID NO: 144655 - DNA, 25 bp, Probe sequence
ggcgtttcagaacgtacatctgcac

SEQ ID NO: 144656 - DNA, 25 bp, Probe sequence
tgaaaatccgcaggcgacgtttaaa

SEQ ID NO: 144657 - DNA, 25 bp, Probe sequence
tccacaagcctcaataggacacggt

SEQ ID NO: 144658 - DNA, 25 bp, Probe sequence
taccttgagaagttagcagctgaaa

SEQ ID NO: 144659 - DNA, 25 bp, Probe sequence
tatattgtaaagcatcatcctagat

SEQ ID NO: 144660 - DNA, 25 bp, Probe sequence
tttactagagatccacaagcctcaa

SEQ ID NO: 144661 - DNA, 25 bp, Probe sequence
ttatttgcgacactttctaatcaag

SEQ ID NO: 144662 - DNA, 25 bp, Probe sequence
atattaggtacggtgagtggaaatg

SEQ ID NO: 144663 - DNA, 25 bp, Probe sequence
attaggtacggtgagtggaaatgac

SEQ ID NO: 144664 - DNA, 25 bp, Probe sequence
atatatcgtgtccctatcgattgtg

SEQ ID NO: 144665 - DNA, 25 bp, Probe sequence
atatatatcgtgtccctatcgattg

SEQ ID NO: 144666 - DNA, 25 bp, Probe sequence
atatggcagaatacgtatatgcaaa

SEQ ID NO: 144667 - DNA, 25 bp, Probe sequence
atacgtatatgcaaaattatttaaa

SEQ ID NO: 144668 - DNA, 25 bp, Probe sequence
atgacactacattaatcttaactgc

SEQ ID NO: 144669 - DNA, 25 bp, Probe sequence
acggtgagtggaaatgacactacat

SEQ ID NO: 144670 - DNA, 25 bp, Probe sequence
acatggatttataaagctattaata

SEQ ID NO: 144671 - DNA, 25 bp, Probe sequence
aaatgacactacattaatcttaact

SEQ ID NO: 144672 - DNA, 25 bp, Probe sequence
aacgattagaaattgtttctacaat

SEQ ID NO: 144673 - DNA, 25 bp, Probe sequence
aagaacaaatcatttcatatattga

SEQ ID NO: 144674 - DNA, 25 bp, Probe sequence
aatatatatcgtgtccctatcgatt

SEQ ID NO: 144675 - DNA, 25 bp, Probe sequence
gcagaatacgtatatgcaaaattat

SEQ ID NO: 144676 - DNA, 25 bp, Probe sequence
gaacaaatcatttcatatattgaag

SEQ ID NO: 144677 - DNA, 25 bp, Probe sequence
gaaatgacactacattaatcttaac

SEQ ID NO: 144678 - DNA, 25 bp, Probe sequence
gagtggaaatgacactacattaatc

SEQ ID NO: 144679 - DNA, 25 bp, Probe sequence
gatatggcagaatacgtatatgcaa

SEQ ID NO: 144680 - DNA, 25 bp, Probe sequence
gatatagtgcaacaacaattgctaa

SEQ ID NO: 144681 - DNA, 25 bp, Probe sequence
gtacggtgagtggaaatgacactac

SEQ ID NO: 144682 - DNA, 25 bp, Probe sequence
gtaagatatagtgcaacaacaattg

SEQ ID NO: 144683 - DNA, 25 bp, Probe sequence
gtggaaatgacactacattaatctt

SEQ ID NO: 144684 - DNA, 25 bp, Probe sequence
ggtgtaagatatagtgcaacaacaa

SEQ ID NO: 144685 - DNA, 25 bp, Probe sequence
ggtgagtggaaatgacactacatta

SEQ ID NO: 144686 - DNA, 25 bp, Probe sequence
ggtacggtgagtggaaatgacacta

SEQ ID NO: 144687 - DNA, 25 bp, Probe sequence
ggaaatgacactacattaatcttaa

SEQ ID NO: 144688 - DNA, 25 bp, Probe sequence
tggcagaatacgtatatgcaaaatt

SEQ ID NO: 144689 - DNA, 25 bp, Probe sequence
tcaaatgatatggcagaatacgtat

SEQ ID NO: 144690 - DNA, 25 bp, Probe sequence
ttaggtacggtgagtggaaatgaca

SEQ ID NO: 144691 - DNA, 25 bp, Probe sequence
tatatcgtgtccctatcgattgtga

SEQ ID NO: 144692 - DNA, 25 bp, Probe sequence
tatatatcgtgtccctatcgattgt

SEQ ID NO: 144693 - DNA, 25 bp, Probe sequence
tattgaagaatattttggtgtaaga

SEQ ID NO: 144694 - DNA, 25 bp, Probe sequence
ttggtgtaagatatagtgcaacaac

SEQ ID NO: 144695 - DNA, 25 bp, Probe sequence
ttgtttctacaatagttaaaaagca

SEQ ID NO: 144696 - DNA, 25 bp, Probe sequence
atgccaaaggcttcgtcacacaagt

SEQ ID NO: 144697 - DNA, 25 bp, Probe sequence
agatcttaacagctctttagtatca

SEQ ID NO: 144698 - DNA, 25 bp, Probe sequence
acgggctctttattatcattatcaa

SEQ ID NO: 144699 - DNA, 25 bp, Probe sequence
acaacaacacaagtcagcacagcta

SEQ ID NO: 144700 - DNA, 25 bp, Probe sequence
aaaacatttcgccatacttaccatt

SEQ ID NO: 144701 - DNA, 25 bp, Probe sequence
aatgttacgcaaaataccgcaccaa

SEQ ID NO: 144702 - DNA, 25 bp, Probe sequence
aagcgggtattattgcaaatcctat

SEQ ID NO: 144703 - DNA, 25 bp, Probe sequence
ccatcgttctacgcttggtttaact

SEQ ID NO: 144704 - DNA, 25 bp, Probe sequence
ccagcgcagttccctaaaattaatc

SEQ ID NO: 144705 - DNA, 25 bp, Probe sequence
gcgcggcgaacaacgaaacatcaaa

SEQ ID NO: 144706 - DNA, 25 bp, Probe sequence
gctaagacgccagctgtgtggatta

SEQ ID NO: 144707 - DNA, 25 bp, Probe sequence
gcttagctattttgccatcgttcta

SEQ ID NO: 144708 - DNA, 25 bp, Probe sequence
gcaggtatttacatcccatctaagt

SEQ ID NO: 144709 - DNA, 25 bp, Probe sequence
gcaagcactcattgtatcggttgga

SEQ ID NO: 144710 - DNA, 25 bp, Probe sequence
gaataaccaccaagcggatttagat

SEQ ID NO: 144711 - DNA, 25 bp, Probe sequence
gaagactgttgatgttttcccagtt

SEQ ID NO: 144712 - DNA, 25 bp, Probe sequence
gaagaaaccagcaacagattcctca

SEQ ID NO: 144713 - DNA, 25 bp, Probe sequence
gaaacagtaggcggtattgttccgg

SEQ ID NO: 144714 - DNA, 25 bp, Probe sequence
gatccattgatgaagcgcgtatctg

SEQ ID NO: 144715 - DNA, 25 bp, Probe sequence
gatactggttcgtcagttgtcgttg

SEQ ID NO: 144716 - DNA, 25 bp, Probe sequence
gatacccaagcgaaagccgcacaaa

SEQ ID NO: 144717 - DNA, 25 bp, Probe sequence
gattcctcaaaatagcgcggcgaac

SEQ ID NO: 144718 - DNA, 25 bp, Probe sequence
gattaacgctgttgcgtctaagcta

SEQ ID NO: 144719 - DNA, 25 bp, Probe sequence
gtatcgactacaccacaaagtacaa

SEQ ID NO: 144720 - DNA, 25 bp, Probe sequence
gtcaatggtgctattccgcaactta

SEQ ID NO: 144721 - DNA, 25 bp, Probe sequence
gtcagcacagctaacgagaacacac

SEQ ID NO: 144722 - DNA, 25 bp, Probe sequence
gggacacatcaaggtcgcagtcgtt

SEQ ID NO: 144723 - DNA, 25 bp, Probe sequence
ggatccatatggcaacacgggacac

SEQ ID NO: 144724 - DNA, 25 bp, Probe sequence
ggacactacgtaagcagcctcaaaa

SEQ ID NO: 144725 - DNA, 25 bp, Probe sequence
ggaagcggcattaacgggctcttta

SEQ ID NO: 144726 - DNA, 25 bp, Probe sequence
tgtggattatcttagcaggcttagc

SEQ ID NO: 144727 - DNA, 25 bp, Probe sequence
tgcagctgatgacgtgccagcgcag

SEQ ID NO: 144728 - DNA, 25 bp, Probe sequence
tatacgtgcgtatcattacttggta

SEQ ID NO: 144729 - DNA, 25 bp, Probe sequence
ttctgttcgattattttcaactcaa

SEQ ID NO: 144730 - DNA, 25 bp, Probe sequence
ataccagtcattttcatacgtttag

SEQ ID NO: 144731 - DNA, 25 bp, Probe sequence
atgtctcgaaaaacggcgctattag

SEQ ID NO: 144732 - DNA, 25 bp, Probe sequence
agtggagctgtattgagcacggcat

SEQ ID NO: 144733 - DNA, 25 bp, Probe sequence
acatcgaataccagtcattttcata

SEQ ID NO: 144734 - DNA, 25 bp, Probe sequence
aaagctcaaggatatgcgattactg

SEQ ID NO: 144735 - DNA, 25 bp, Probe sequence
aacatgactttattattgaacaaat

SEQ ID NO: 144736 - DNA, 25 bp, Probe sequence
aagactattatattactgttttaga

SEQ ID NO: 144737 - DNA, 25 bp, Probe sequence
cacgctcatgtgacattgaatccgt

SEQ ID NO: 144738 - DNA, 25 bp, Probe sequence
ctaagcgacgctttagcgcatttac

SEQ ID NO: 144739 - DNA, 25 bp, Probe sequence
cggcgctattagttttggatatgca

SEQ ID NO: 144740 - DNA, 25 bp, Probe sequence
gccgattatttctaagcgacgcttt

SEQ ID NO: 144741 - DNA, 25 bp, Probe sequence
gcgcatttacaggtagttacttgga

SEQ ID NO: 144742 - DNA, 25 bp, Probe sequence
gcgattactgaagcagatgcatcta

SEQ ID NO: 144743 - DNA, 25 bp, Probe sequence
gcattttaatgatgtctcctcgagt

SEQ ID NO: 144744 - DNA, 25 bp, Probe sequence
gcagatgcatctacacgaatacttg

SEQ ID NO: 144745 - DNA, 25 bp, Probe sequence
gaatcagagagcaattgaagcagca

SEQ ID NO: 144746 - DNA, 25 bp, Probe sequence
gaagcagcaagacaacatcgaatac

SEQ ID NO: 144747 - DNA, 25 bp, Probe sequence
gaacaaattttatcacgctcatgtg

SEQ ID NO: 144748 - DNA, 25 bp, Probe sequence
gacgctttagcgcatttacaggtag

SEQ ID NO: 144749 - DNA, 25 bp, Probe sequence
gacattgaatccgtagagtcatgga

SEQ ID NO: 144750 - DNA, 25 bp, Probe sequence
gagcacggcattagaaagtgtagat

SEQ ID NO: 144751 - DNA, 25 bp, Probe sequence
gatgtctcctcgagtaataaagtgt

SEQ ID NO: 144752 - DNA, 25 bp, Probe sequence
gatgagccgattatttctaagcgac

SEQ ID NO: 144753 - DNA, 25 bp, Probe sequence
gatgcatctacacgaatacttgaag

SEQ ID NO: 144754 - DNA, 25 bp, Probe sequence
gatgctgttggtgatagatcagatg

SEQ ID NO: 144755 - DNA, 25 bp, Probe sequence
gtatagcgagtagtgtacctagaat

SEQ ID NO: 144756 - DNA, 25 bp, Probe sequence
gtcattttcatacgtttagtgttag

SEQ ID NO: 144757 - DNA, 25 bp, Probe sequence
gtgttttcaacaattaaagctcaag

SEQ ID NO: 144758 - DNA, 25 bp, Probe sequence
ggatatgcaagaaggtatagcgagt

SEQ ID NO: 144759 - DNA, 25 bp, Probe sequence
ggagctgtattgagcacggcattag

SEQ ID NO: 144760 - DNA, 25 bp, Probe sequence
tcatttagtattaacgggtgtctct

SEQ ID NO: 144761 - DNA, 25 bp, Probe sequence
tactgttttagaagatgctgttggt

SEQ ID NO: 144762 - DNA, 25 bp, Probe sequence
ttacttggaagtttatttacgtgca

SEQ ID NO: 144763 - DNA, 25 bp, Probe sequence
ttagcaccactagaagatgagccga

SEQ ID NO: 144764 - DNA, 25 bp, Probe sequence
atatacccacaccaaagccagaaaa

SEQ ID NO: 144765 - DNA, 25 bp, Probe sequence
atcaactggcgacacgtcttcagat

SEQ ID NO: 144766 - DNA, 25 bp, Probe sequence
atcaccaatagtaaatcgtccaagt

SEQ ID NO: 144767 - DNA, 25 bp, Probe sequence
aatatcttgccgtacgatgcccaag

SEQ ID NO: 144768 - DNA, 25 bp, Probe sequence
aaaacagttatcggcttcatctaaa

SEQ ID NO: 144769 - DNA, 25 bp, Probe sequence
aaaagtaatgcctcaacgcaacatt

SEQ ID NO: 144770 - DNA, 25 bp, Probe sequence
aagccagaaaagacgttaacacttg

SEQ ID NO: 144771 - DNA, 25 bp, Probe sequence
aagaacattggttgccgatatctgt

SEQ ID NO: 144772 - DNA, 25 bp, Probe sequence
aagtagctaaaacgccaaataatga

SEQ ID NO: 144773 - DNA, 25 bp, Probe sequence
aatctttagatcaacgtattgcaaa

SEQ ID NO: 144774 - DNA, 25 bp, Probe sequence
caaatcgccaaatcgttgaccaatt

SEQ ID NO: 144775 - DNA, 25 bp, Probe sequence
cgaggacgatcttaatgcaatgaaa

SEQ ID NO: 144776 - DNA, 25 bp, Probe sequence
gcctcaacgcaacattacacatatc

SEQ ID NO: 144777 - DNA, 25 bp, Probe sequence
gctgatggtaatgtatctttgccta

SEQ ID NO: 144778 - DNA, 25 bp, Probe sequence
gcaaatacgcaacttcctaaaaatc

SEQ ID NO: 144779 - DNA, 25 bp, Probe sequence
gaagagaatcaaagccatagtaatc

SEQ ID NO: 144780 - DNA, 25 bp, Probe sequence
gaaacattttgcatcaactggcgac

SEQ ID NO: 144781 - DNA, 25 bp, Probe sequence
gaaacgattttagcaacacgtatag

SEQ ID NO: 144782 - DNA, 25 bp, Probe sequence
gacagtattccagatatacccacac

SEQ ID NO: 144783 - DNA, 25 bp, Probe sequence
gatggttctggacatgttgtgttaa

SEQ ID NO: 144784 - DNA, 25 bp, Probe sequence
gatcaatcacaagataagtcgctat

SEQ ID NO: 144785 - DNA, 25 bp, Probe sequence
gatatgtcacaaacggctacaacaa

SEQ ID NO: 144786 - DNA, 25 bp, Probe sequence
gatttggttatcacgacgcaataag

SEQ ID NO: 144787 - DNA, 25 bp, Probe sequence
gatttattaacgtcattgattgatc

SEQ ID NO: 144788 - DNA, 25 bp, Probe sequence
gttgccgatatctgtaattgttggt

SEQ ID NO: 144789 - DNA, 25 bp, Probe sequence
gttatcgtgttcgacaatgatggcg

SEQ ID NO: 144790 - DNA, 25 bp, Probe sequence
gtatcattttaacgaatatcttgcc

SEQ ID NO: 144791 - DNA, 25 bp, Probe sequence
ggaagaacttgcacgtactgatgat

SEQ ID NO: 144792 - DNA, 25 bp, Probe sequence
ggcgacacgtcttcagatgatatat

SEQ ID NO: 144793 - DNA, 25 bp, Probe sequence
tgggtgtactaatgatttggttatc

SEQ ID NO: 144794 - DNA, 25 bp, Probe sequence
tgtatctttgcctaaagcgggggaa

SEQ ID NO: 144795 - DNA, 25 bp, Probe sequence
tcgtccaagtttactagatcgattg

SEQ ID NO: 144796 - DNA, 25 bp, Probe sequence
ttgcagatcaaattactcgtcatat

SEQ ID NO: 144797 - DNA, 25 bp, Probe sequence
ttgttggtgcaatgggtgtactaat

SEQ ID NO: 144798 - DNA, 25 bp, Probe sequence
atatagactatgttttatcaccaat

SEQ ID NO: 144799 - DNA, 25 bp, Probe sequence
atagactatgttttatcaccaatag

SEQ ID NO: 144800 - DNA, 25 bp, Probe sequence
atcggaagattcagcagtgtctaca

SEQ ID NO: 144801 - DNA, 25 bp, Probe sequence
agacttagaccatttgagtcagcaa

SEQ ID NO: 144802 - DNA, 25 bp, Probe sequence
agcatgctacacaacgcattttaga

SEQ ID NO: 144803 - DNA, 25 bp, Probe sequence
acaaatcggaagattcagcagtgtc

SEQ ID NO: 144804 - DNA, 25 bp, Probe sequence
acaaagcaaatcgtcaaattgagca

SEQ ID NO: 144805 - DNA, 25 bp, Probe sequence
aaatcggaagattcagcagtgtcta

SEQ ID NO: 144806 - DNA, 25 bp, Probe sequence
aaagcatgctacacaacgcatttta

SEQ ID NO: 144807 - DNA, 25 bp, Probe sequence
aaaaagcatgctacacaacgcattt

SEQ ID NO: 144808 - DNA, 25 bp, Probe sequence
aaaagcatgctacacaacgcatttt

SEQ ID NO: 144809 - DNA, 25 bp, Probe sequence
aaaattggccaaaagtaatgcctca

SEQ ID NO: 144810 - DNA, 25 bp, Probe sequence
aagcatgctacacaacgcattttag

SEQ ID NO: 144811 - DNA, 25 bp, Probe sequence
aagacttagaccatttgagtcagca

SEQ ID NO: 144812 - DNA, 25 bp, Probe sequence
aatcggaagattcagcagtgtctac

SEQ ID NO: 144813 - DNA, 25 bp, Probe sequence
aatttcaaaagagctattatctaag

SEQ ID NO: 144814 - DNA, 25 bp, Probe sequence
aattgaaatgaacggtcgaagtgat

SEQ ID NO: 144815 - DNA, 25 bp, Probe sequence
caaattgaaatgaacggtcgaagtg

SEQ ID NO: 144816 - DNA, 25 bp, Probe sequence
cggaagattcagcagtgtctacaac

SEQ ID NO: 144817 - DNA, 25 bp, Probe sequence
gcatgctacacaacgcattttagaa

SEQ ID NO: 144818 - DNA, 25 bp, Probe sequence
gcaaagacaataaaggttctcaaat

SEQ ID NO: 144819 - DNA, 25 bp, Probe sequence
gaagacttagaccatttgagtcagc

SEQ ID NO: 144820 - DNA, 25 bp, Probe sequence
gaaatttcaaaagagctattatcta

SEQ ID NO: 144821 - DNA, 25 bp, Probe sequence
gacaaagttgacaaagcaaatcgtc

SEQ ID NO: 144822 - DNA, 25 bp, Probe sequence
gacaaagcaaatcgtcaaattgagc

SEQ ID NO: 144823 - DNA, 25 bp, Probe sequence
gatggcgactagtatcattttaacg

SEQ ID NO: 144824 - DNA, 25 bp, Probe sequence
gataaaaagcatgctacacaacgca

SEQ ID NO: 144825 - DNA, 25 bp, Probe sequence
ggttctcaaattgaaatgaacggtc

SEQ ID NO: 144826 - DNA, 25 bp, Probe sequence
ggaagattcagcagtgtctacaaca

SEQ ID NO: 144827 - DNA, 25 bp, Probe sequence
tcgacaatgatggcgactagtatca

SEQ ID NO: 144828 - DNA, 25 bp, Probe sequence
tcggaagattcagcagtgtctacaa

SEQ ID NO: 144829 - DNA, 25 bp, Probe sequence
taaaaagcatgctacacaacgcatt

SEQ ID NO: 144830 - DNA, 25 bp, Probe sequence
tacacaaatcggaagattcagcagt

SEQ ID NO: 144831 - DNA, 25 bp, Probe sequence
tatagactatgttttatcaccaata

SEQ ID NO: 144832 - DNA, 25 bp, Probe sequence
attacggaacatcatttcgttatta

SEQ ID NO: 144833 - DNA, 25 bp, Probe sequence
ataccagttatgtgatatttatctt

SEQ ID NO: 144834 - DNA, 25 bp, Probe sequence
atcaggttactgtaccagctttttg

SEQ ID NO: 144835 - DNA, 25 bp, Probe sequence
atcaccgtatcaattttttgcagat

SEQ ID NO: 144836 - DNA, 25 bp, Probe sequence
atctcgtattttacaaggcggatat

SEQ ID NO: 144837 - DNA, 25 bp, Probe sequence
atgtcccgggaaatatgcaattgat

SEQ ID NO: 144838 - DNA, 25 bp, Probe sequence
agtcgtgtcgaatggtttgatgacc

SEQ ID NO: 144839 - DNA, 25 bp, Probe sequence
acatctgatgtcatattggattggc

SEQ ID NO: 144840 - DNA, 25 bp, Probe sequence
aaatctcgcgtgaacaattcgagca

SEQ ID NO: 144841 - DNA, 25 bp, Probe sequence
aacgatgctcaatatagcagacgca

SEQ ID NO: 144842 - DNA, 25 bp, Probe sequence
aagcacatgcacacgaaatctcgcg

SEQ ID NO: 144843 - DNA, 25 bp, Probe sequence
aaggtaacaacaattcggctacaat

SEQ ID NO: 144844 - DNA, 25 bp, Probe sequence
aatgcggtggaacaagcgtttgact

SEQ ID NO: 144845 - DNA, 25 bp, Probe sequence
aatttgcacaaactgtttacgattt

SEQ ID NO: 144846 - DNA, 25 bp, Probe sequence
caagcgtttgactatgagttgttga

SEQ ID NO: 144847 - DNA, 25 bp, Probe sequence
caacttgatcaatatgctaatgtgc

SEQ ID NO: 144848 - DNA, 25 bp, Probe sequence
ctagccctaccattttcagtgttat

SEQ ID NO: 144849 - DNA, 25 bp, Probe sequence
gcgccctagaattgttagtcgtgtc

SEQ ID NO: 144850 - DNA, 25 bp, Probe sequence
gatgaccaacaacgtgtccgatttg

SEQ ID NO: 144851 - DNA, 25 bp, Probe sequence
gagtcttttaaagccagtaagttgg

SEQ ID NO: 144852 - DNA, 25 bp, Probe sequence
gagatgtctgataagctaatgcaac

SEQ ID NO: 144853 - DNA, 25 bp, Probe sequence
gagttgttgattttaggttatcgtc

SEQ ID NO: 144854 - DNA, 25 bp, Probe sequence
ggtagtgatgttttggtatggcaag

SEQ ID NO: 144855 - DNA, 25 bp, Probe sequence
ggatcaacttcgtaacatcaaggta

SEQ ID NO: 144856 - DNA, 25 bp, Probe sequence
tccgatttgtcgattattattctaa

SEQ ID NO: 144857 - DNA, 25 bp, Probe sequence
tcttactttttcccttcaaagctcg

SEQ ID NO: 144858 - DNA, 25 bp, Probe sequence
tcagtgttatataatttgccatcaa

SEQ ID NO: 144859 - DNA, 25 bp, Probe sequence
taccggacgatgttatatcaccgta

SEQ ID NO: 144860 - DNA, 25 bp, Probe sequence
tatcagagcacttatttgagcataa

SEQ ID NO: 144861 - DNA, 25 bp, Probe sequence
tttcacatcgctgctattacagaga

SEQ ID NO: 144862 - DNA, 25 bp, Probe sequence
ttatcaaagtggagagcgccctaga

SEQ ID NO: 144863 - DNA, 25 bp, Probe sequence
ttcgttattaactcactagccctac

SEQ ID NO: 144864 - DNA, 25 bp, Probe sequence
ttaatgatatgggacgtctacgagg

SEQ ID NO: 144865 - DNA, 25 bp, Probe sequence
ttaactaactcggatcaacttcgta

SEQ ID NO: 144866 - DNA, 25 bp, Probe sequence
ataacgaagctacctttatcgataa

SEQ ID NO: 144867 - DNA, 25 bp, Probe sequence
accgggtcacacgccagaaagtata

SEQ ID NO: 144868 - DNA, 25 bp, Probe sequence
atgcctaaccacactcattttgttc

SEQ ID NO: 144869 - DNA, 25 bp, Probe sequence
agcatcttatttaatcggttgtcaa

SEQ ID NO: 144870 - DNA, 25 bp, Probe sequence
accttatacggtttatccagctaca

SEQ ID NO: 144871 - DNA, 25 bp, Probe sequence
aaaagtgcttcatacaccgggtcac

SEQ ID NO: 144872 - DNA, 25 bp, Probe sequence
aacacacaccttacaactcattgga

SEQ ID NO: 144873 - DNA, 25 bp, Probe sequence
aatttggcctggccatggcgctggt

SEQ ID NO: 144874 - DNA, 25 bp, Probe sequence
caacatctactcttggctatgaaaa

SEQ ID NO: 144875 - DNA, 25 bp, Probe sequence
caaattggctggtatctaaactatg

SEQ ID NO: 144876 - DNA, 25 bp, Probe sequence
gaagttcgatagctattggtatttt

SEQ ID NO: 144877 - DNA, 25 bp, Probe sequence
gaagccatgattattgatcctattc

SEQ ID NO: 144878 - DNA, 25 bp, Probe sequence
gagatatcggtagacctgatttact

SEQ ID NO: 144879 - DNA, 25 bp, Probe sequence
gattaacttttgatctccgcagtaa

SEQ ID NO: 144880 - DNA, 25 bp, Probe sequence
gatcctattcgtgacttatcttcat

SEQ ID NO: 144881 - DNA, 25 bp, Probe sequence
gattacattcaaatttggcctggcc

SEQ ID NO: 144882 - DNA, 25 bp, Probe sequence
gattcaaacacgttccattcatagt

SEQ ID NO: 144883 - DNA, 25 bp, Probe sequence
gattggagactatcaccttgtttca

SEQ ID NO: 144884 - DNA, 25 bp, Probe sequence
gttccaatgggactattcagtggtg

SEQ ID NO: 144885 - DNA, 25 bp, Probe sequence
tgtaccacacggcaaacttttagaa

SEQ ID NO: 144886 - DNA, 25 bp, Probe sequence
gtacactgtcagtctggcattagaa

SEQ ID NO: 144887 - DNA, 25 bp, Probe sequence
ggtgctggagcacaagttccaatgg

SEQ ID NO: 144888 - DNA, 25 bp, Probe sequence
ggatcatctgaaataggcgctaaac

SEQ ID NO: 144889 - DNA, 25 bp, Probe sequence
ggtttaaccattactcatgcagctg

SEQ ID NO: 144890 - DNA, 25 bp, Probe sequence
ggcgctggtagtccttgtggtaaat

SEQ ID NO: 144891 - DNA, 25 bp, Probe sequence
tcaagcggttcatgtaccacacggc

SEQ ID NO: 144892 - DNA, 25 bp, Probe sequence
taatggccacttatctcaagcggtt

SEQ ID NO: 144893 - DNA, 25 bp, Probe sequence
taaggaggcttatcatggtggacat

SEQ ID NO: 144894 - DNA, 25 bp, Probe sequence
taaactcatttctgaccaacctgca

SEQ ID NO: 144895 - DNA, 25 bp, Probe sequence
taggtgctattccaacatctactct

SEQ ID NO: 144896 - DNA, 25 bp, Probe sequence
tatacatgcagattttgcttcagga

SEQ ID NO: 144897 - DNA, 25 bp, Probe sequence
ttatcttcatatattcgagttgctg

SEQ ID NO: 144898 - DNA, 25 bp, Probe sequence
ttaaagacttgccagattacattca

SEQ ID NO: 144899 - DNA, 25 bp, Probe sequence
ttgctggatatcaattaccgcaatc

SEQ ID NO: 144900 - DNA, 25 bp, Probe sequence
atttgcacaacgcgtagaactaagt

SEQ ID NO: 144901 - DNA, 25 bp, Probe sequence
atagttatgatctagcgtttgatga

SEQ ID NO: 144902 - DNA, 25 bp, Probe sequence
agtagcagaagcccatgcagaagct

SEQ ID NO: 144903 - DNA, 25 bp, Probe sequence
agaacgtcacctacttggtcaaatg

SEQ ID NO: 144904 - DNA, 25 bp, Probe sequence
agcccatgcagaagcttctaaacaa

SEQ ID NO: 144905 - DNA, 25 bp, Probe sequence
acttcctgcaagtcattgtcaaaaa

SEQ ID NO: 144906 - DNA, 25 bp, Probe sequence
acatcacaagaggctatccaagaag

SEQ ID NO: 144907 - DNA, 25 bp, Probe sequence
aaatttctgcaactgaagcaattga

SEQ ID NO: 144908 - DNA, 25 bp, Probe sequence
aaatgcgcgaagaacgtcacctact

SEQ ID NO: 144909 - DNA, 25 bp, Probe sequence
aaagattcgaaggttgctggagtga

SEQ ID NO: 144910 - DNA, 25 bp, Probe sequence
aaaatgacagcacagcttcacagtc

SEQ ID NO: 144911 - DNA, 25 bp, Probe sequence
aaaagacttcctgcaagtcattgtc

SEQ ID NO: 144912 - DNA, 25 bp, Probe sequence
aactaaagaatttgcacaacgcgta

SEQ ID NO: 144913 - DNA, 25 bp, Probe sequence
aagaggatcaaatttctgcaactga

SEQ ID NO: 144914 - DNA, 25 bp, Probe sequence
aatcgattcaaatagcgaatcctta

SEQ ID NO: 144915 - DNA, 25 bp, Probe sequence
caagctacttcgaacgattcattgg

SEQ ID NO: 144916 - DNA, 25 bp, Probe sequence
cttctaaacaagctacttcgaacga

SEQ ID NO: 144917 - DNA, 25 bp, Probe sequence
cgatgacaaaaacttacctactaat

SEQ ID NO: 144918 - DNA, 25 bp, Probe sequence
cgcgaagaacgtcacctacttggtc

SEQ ID NO: 144919 - DNA, 25 bp, Probe sequence
gcaagactgaatatcgtggtcgtga

SEQ ID NO: 144920 - DNA, 25 bp, Probe sequence
gaagaacgtggttaccaactaagca

SEQ ID NO: 144921 - DNA, 25 bp, Probe sequence
gcaattgaaaaagccagcgttgagc

SEQ ID NO: 144922 - DNA, 25 bp, Probe sequence
gaatatcgtggtcgtgaagcaactg

SEQ ID NO: 144923 - DNA, 25 bp, Probe sequence
gaatcaagtacatcagcaacaacaa

SEQ ID NO: 144924 - DNA, 25 bp, Probe sequence
gaagatatcgagcttttcaaagaca

SEQ ID NO: 144925 - DNA, 25 bp, Probe sequence
gaacgattcattggaagcgaaagca

SEQ ID NO: 144926 - DNA, 25 bp, Probe sequence
gaacaacaagtagcagaagcccatg

SEQ ID NO: 144927 - DNA, 25 bp, Probe sequence
gaaatgtcagaaccaaaacctcaag

SEQ ID NO: 144928 - DNA, 25 bp, Probe sequence
gtcagaaccaaaacctcaagaagag

SEQ ID NO: 144929 - DNA, 25 bp, Probe sequence
gtcacctacttggtcaaatgatgaa

SEQ ID NO: 144930 - DNA, 25 bp, Probe sequence
gtggtcgtgaagcaactgatttcaa

SEQ ID NO: 144931 - DNA, 25 bp, Probe sequence
gtggttaccaactaagcaagactga

SEQ ID NO: 144932 - DNA, 25 bp, Probe sequence
tccaaacatcacaagaggctatcca

SEQ ID NO: 144933 - DNA, 25 bp, Probe sequence
tcaacagacgctaagacggatacta

SEQ ID NO: 144934 - DNA, 25 bp, Probe sequence
attgcatactttttacaacgattga

SEQ ID NO: 144935 - DNA, 25 bp, Probe sequence
atgagttatttctttctgcatcaac

SEQ ID NO: 144936 - DNA, 25 bp, Probe sequence
atggctacttggtaccttttgatac

SEQ ID NO: 144937 - DNA, 25 bp, Probe sequence
acgattgaatttaacccgagacgat

SEQ ID NO: 144938 - DNA, 25 bp, Probe sequence
accgcgcttctgatattggtcaggc

SEQ ID NO: 144939 - DNA, 25 bp, Probe sequence
acatctcttatgaagtggcacagca

SEQ ID NO: 144940 - DNA, 25 bp, Probe sequence
aacgtacacgttagatgacattgaa

SEQ ID NO: 144941 - DNA, 25 bp, Probe sequence
aacccgagacgatattgtcatatta

SEQ ID NO: 144942 - DNA, 25 bp, Probe sequence
aatacattgatttctttattacagc

SEQ ID NO: 144943 - DNA, 25 bp, Probe sequence
ctttctgcatcaactagcgaaggtt

SEQ ID NO: 144944 - DNA, 25 bp, Probe sequence
gcgatgattagtgcatctcgtttag

SEQ ID NO: 144945 - DNA, 25 bp, Probe sequence
gcttaccgtgctaaattattgagac

SEQ ID NO: 144946 - DNA, 25 bp, Probe sequence
gaatatgcacaagcttaccgtgcta

SEQ ID NO: 144947 - DNA, 25 bp, Probe sequence
gaagttatttggttgtatcagtatt

SEQ ID NO: 144948 - DNA, 25 bp, Probe sequence
gacattgaacgtgagcttggtcatg

SEQ ID NO: 144949 - DNA, 25 bp, Probe sequence
gagaacatacagacattaacgcaaa

SEQ ID NO: 144950 - DNA, 25 bp, Probe sequence
gagatggggaaaatggctacttggt

SEQ ID NO: 144951 - DNA, 25 bp, Probe sequence
gagaaacatattgattggcttgtca

SEQ ID NO: 144952 - DNA, 25 bp, Probe sequence
gagacagctctatatatgtgtttga

SEQ ID NO: 144953 - DNA, 25 bp, Probe sequence
gatattggtcaggctgttttgcagc

SEQ ID NO: 144954 - DNA, 25 bp, Probe sequence
gttggtgttgtgattcatgctgatc

SEQ ID NO: 144955 - DNA, 25 bp, Probe sequence
gtttgtcgacaatttgagcaatatc

SEQ ID NO: 144956 - DNA, 25 bp, Probe sequence
ggaagcggtaggctcaggactaggt

SEQ ID NO: 144957 - DNA, 25 bp, Probe sequence
gtaaaattattgatacacaccgcgc

SEQ ID NO: 144958 - DNA, 25 bp, Probe sequence
gtgtttgaagatgcggtgttgtata

SEQ ID NO: 144959 - DNA, 25 bp, Probe sequence
gtggatcgtgcagaatttgtaatta

SEQ ID NO: 144960 - DNA, 25 bp, Probe sequence
gtggcacagcaatttatgactcaag

SEQ ID NO: 144961 - DNA, 25 bp, Probe sequence
ggtaacccaacctttattcgagatg

SEQ ID NO: 144962 - DNA, 25 bp, Probe sequence
ggctgggcgagtagcggtgttgaat

SEQ ID NO: 144963 - DNA, 25 bp, Probe sequence
ggctaaacgacaagtgccagaatta

SEQ ID NO: 144964 - DNA, 25 bp, Probe sequence
tcgcaaaactagctcatgccattgt

SEQ ID NO: 144965 - DNA, 25 bp, Probe sequence
tctgagtattatgcaccagctgata

SEQ ID NO: 144966 - DNA, 25 bp, Probe sequence
taaactttggtataggctgggcgag

SEQ ID NO: 144967 - DNA, 25 bp, Probe sequence
ttgtcatattagaccgcgcttctga

SEQ ID NO: 144968 - DNA, 25 bp, Probe sequence
caaggggttaaagctcgtgaaatgg

SEQ ID NO: 144969 - DNA, 25 bp, Probe sequence
acgtggtcgttctggtagacaaggg

SEQ ID NO: 144970 - DNA, 25 bp, Probe sequence
attggttccatgactgttgcgacta

SEQ ID NO: 144971 - DNA, 25 bp, Probe sequence
atatacaactaatggacgtctcggt

SEQ ID NO: 144972 - DNA, 25 bp, Probe sequence
atgggcaacgtaacgctatttttga

SEQ ID NO: 144973 - DNA, 25 bp, Probe sequence
agacaggcaattacgtggtcgttct

SEQ ID NO: 144974 - DNA, 25 bp, Probe sequence
agaagttcagttaatcggagcgatt

SEQ ID NO: 144975 - DNA, 25 bp, Probe sequence
agcgagatcttgtatacgaggaacg

SEQ ID NO: 144976 - DNA, 25 bp, Probe sequence
acgaggaacgcaatcgagttttaga

SEQ ID NO: 144977 - DNA, 25 bp, Probe sequence
aaagcgcagcgtatctcggaagaac

SEQ ID NO: 144978 - DNA, 25 bp, Probe sequence
aagatgtggcttgtgttaattttaa

SEQ ID NO: 144979 - DNA, 25 bp, Probe sequence
aattaggcgaatcagagttctttga

SEQ ID NO: 144980 - DNA, 25 bp, Probe sequence
cattttcaggtatgacagctacagg

SEQ ID NO: 144981 - DNA, 25 bp, Probe sequence
cgggaactaagttgcaagctggact

SEQ ID NO: 144982 - DNA, 25 bp, Probe sequence
cgcgtgttgtcgagtatatttatca

SEQ ID NO: 144983 - DNA, 25 bp, Probe sequence
gctgaagcagggcaaattggttcca

SEQ ID NO: 144984 - DNA, 25 bp, Probe sequence
gcagtggcacgtgaagcgagctgga

SEQ ID NO: 144985 - DNA, 25 bp, Probe sequence
gaacttcatgaaacggggcgaccgg

SEQ ID NO: 144986 - DNA, 25 bp, Probe sequence
gaagcggcacaatcatactttaatg

SEQ ID NO: 144987 - DNA, 25 bp, Probe sequence
gaactgctgaagcggctgaatactt

SEQ ID NO: 144988 - DNA, 25 bp, Probe sequence
gactgttgcgactagtatggcaggt

SEQ ID NO: 144989 - DNA, 25 bp, Probe sequence
gttacctgaagcttatgcagtggca

SEQ ID NO: 144990 - DNA, 25 bp, Probe sequence
gttaggtttaactgcttcattaggt

SEQ ID NO: 144991 - DNA, 25 bp, Probe sequence
gtatggcaggtcgaggcacagatat

SEQ ID NO: 144992 - DNA, 25 bp, Probe sequence
ggtggattagctgttattattcatg

SEQ ID NO: 144993 - DNA, 25 bp, Probe sequence
ggtgctaacaaaatcgcgtgttgtc

SEQ ID NO: 144994 - DNA, 25 bp, Probe sequence
ggtatgccagttatacattttccat

SEQ ID NO: 144995 - DNA, 25 bp, Probe sequence
ggagcgattgtattgcatgaaggta

SEQ ID NO: 144996 - DNA, 25 bp, Probe sequence
ggatcatcttgtatatatatttcac

SEQ ID NO: 144997 - DNA, 25 bp, Probe sequence
ggcgaccggttttactcataacgag

SEQ ID NO: 144998 - DNA, 25 bp, Probe sequence
tggacgtctcggttttgattattta

SEQ ID NO: 144999 - DNA, 25 bp, Probe sequence
tacaggtcgtatgttaccgggaact

SEQ ID NO: 145000 - DNA, 25 bp, Probe sequence
taaagtgtttcgttcagttgatgag

SEQ ID NO: 145001 - DNA, 25 bp, Probe sequence
ttcctaataatttactcattgcgca

SEQ ID NO: 145002 - DNA, 25 bp, Probe sequence
attttgattttgatgcaacgcctgc

SEQ ID NO: 145003 - DNA, 25 bp, Probe sequence
atagtattacgattcaatatcctga

SEQ ID NO: 145004 - DNA, 25 bp, Probe sequence
atcctgatgaagcctatgcttataa

SEQ ID NO: 145005 - DNA, 25 bp, Probe sequence
atgtcacgtttaatgaatccagtac

SEQ ID NO: 145006 - DNA, 25 bp, Probe sequence
agattacttagatgtatcgaaactg

SEQ ID NO: 145007 - DNA, 25 bp, Probe sequence
accaattttgcgtagaggacagcat

SEQ ID NO: 145008 - DNA, 25 bp, Probe sequence
accgattcatgagtggttgatgtta

SEQ ID NO: 145009 - DNA, 25 bp, Probe sequence
acgcctgctggttcagtgtatttta

SEQ ID NO: 145010 - DNA, 25 bp, Probe sequence
aaaatggcacaaaactaagtactga

SEQ ID NO: 145011 - DNA, 25 bp, Probe sequence
aactaagtactgagattgtaaagtc

SEQ ID NO: 145012 - DNA, 25 bp, Probe sequence
aatgtcattattgcagaaccatctg

SEQ ID NO: 145013 - DNA, 25 bp, Probe sequence
caatatcctgatgaagcctatgctt

SEQ ID NO: 145014 - DNA, 25 bp, Probe sequence
caacgcctgctggttcagtgtattt

SEQ ID NO: 145015 - DNA, 25 bp, Probe sequence
cacaaactacatttatgtatggctc

SEQ ID NO: 145016 - DNA, 25 bp, Probe sequence
catctaaattatatgtcacgtttaa

SEQ ID NO: 145017 - DNA, 25 bp, Probe sequence
ctatccaactatttcgaatgatttt

SEQ ID NO: 145018 - DNA, 25 bp, Probe sequence
ccaagtttaccaattttgcgtagag

SEQ ID NO: 145019 - DNA, 25 bp, Probe sequence
gctggttcagtgtattttatcatca

SEQ ID NO: 145020 - DNA, 25 bp, Probe sequence
gaatccagtacgatttttagattac

SEQ ID NO: 145021 - DNA, 25 bp, Probe sequence
gaggacagcattataaattgcattt

SEQ ID NO: 145022 - DNA, 25 bp, Probe sequence
gattagttatgggtcaaagtcaaat

SEQ ID NO: 145023 - DNA, 25 bp, Probe sequence
gatttgcaaagtcaagataccctaa

SEQ ID NO: 145024 - DNA, 25 bp, Probe sequence
gattttgatgcaacgcctgctggtt

SEQ ID NO: 145025 - DNA, 25 bp, Probe sequence
gtttttgcaacttatgtcgctcagc

SEQ ID NO: 145026 - DNA, 25 bp, Probe sequence
gtatcgaaactgaatggtggggaag

SEQ ID NO: 145027 - DNA, 25 bp, Probe sequence
gggtcaaagtcaaatgtttttgcaa

SEQ ID NO: 145028 - DNA, 25 bp, Probe sequence
ggttcagtgtattttatcatcattt

SEQ ID NO: 145029 - DNA, 25 bp, Probe sequence
ggattaccgattcatgagtggttga

SEQ ID NO: 145030 - DNA, 25 bp, Probe sequence
ggaattatatttcacaaactacatt

SEQ ID NO: 145031 - DNA, 25 bp, Probe sequence
tgatgaatgcagcatcgacgagtct

SEQ ID NO: 145032 - DNA, 25 bp, Probe sequence
tgccctctggattaccgattcatga

SEQ ID NO: 145033 - DNA, 25 bp, Probe sequence
tatcgtacaagccatgaagatgatg

SEQ ID NO: 145034 - DNA, 25 bp, Probe sequence
ttttgatgcaacgcctgctggttca

SEQ ID NO: 145035 - DNA, 25 bp, Probe sequence
ttgcaacttatgtcgctcagcattt

SEQ ID NO: 145036 - DNA, 25 bp, Probe sequence
agttcggtacagcattagacgtcct

SEQ ID NO: 145037 - DNA, 25 bp, Probe sequence
atttaggacctatacacaaacgatg

SEQ ID NO: 145038 - DNA, 25 bp, Probe sequence
atgccacgtaaatttagagttttgc

SEQ ID NO: 145039 - DNA, 25 bp, Probe sequence
atcggcgatcctcgtgttgaaggtg

SEQ ID NO: 145040 - DNA, 25 bp, Probe sequence
atggtgctcagttaaatcctcaggc

SEQ ID NO: 145041 - DNA, 25 bp, Probe sequence
agtggttatcgaacagcggaaggtt

SEQ ID NO: 145042 - DNA, 25 bp, Probe sequence
agtttgggagagttcaacatgctga

SEQ ID NO: 145043 - DNA, 25 bp, Probe sequence
actggcgctgatggtgcattaattg

SEQ ID NO: 145044 - DNA, 25 bp, Probe sequence
aatcctcaggcaattattgttggta

SEQ ID NO: 145045 - DNA, 25 bp, Probe sequence
cgcagtattcctgggcgacataatg

SEQ ID NO: 145046 - DNA, 25 bp, Probe sequence
cctgtattgacagcacaccaagcaa

SEQ ID NO: 145047 - DNA, 25 bp, Probe sequence
gcgacataatgatgattcacctacc

SEQ ID NO: 145048 - DNA, 25 bp, Probe sequence
gcggtcgagttgcaatatacattta

SEQ ID NO: 145049 - DNA, 25 bp, Probe sequence
gcatcttggcaaaataatctcgttt

SEQ ID NO: 145050 - DNA, 25 bp, Probe sequence
gaatttaaacctatcgcatcttggc

SEQ ID NO: 145051 - DNA, 25 bp, Probe sequence
gaaggtgatacatctcaagcgtcga

SEQ ID NO: 145052 - DNA, 25 bp, Probe sequence
gaacatatgcgattacttagaccag

SEQ ID NO: 145053 - DNA, 25 bp, Probe sequence
gacgtcctggtgtctaatgaaggtg

SEQ ID NO: 145054 - DNA, 25 bp, Probe sequence
gaggagacgatttagaacctatttt

SEQ ID NO: 145055 - DNA, 25 bp, Probe sequence
gatgattcacctaccattgcaagtt

SEQ ID NO: 145056 - DNA, 25 bp, Probe sequence
gatattgatggtgcggtcgagttgc

SEQ ID NO: 145057 - DNA, 25 bp, Probe sequence
gattttatctatattcaagcaccat

SEQ ID NO: 145058 - DNA, 25 bp, Probe sequence
gttgttcaaccattacattaccgga

SEQ ID NO: 145059 - DNA, 25 bp, Probe sequence
gttggtaaaccacttgttaatattg

SEQ ID NO: 145060 - DNA, 25 bp, Probe sequence
gttagacagtcctttagagatacct

SEQ ID NO: 145061 - DNA, 25 bp, Probe sequence
gtcacaaactgtttttgccatagca

SEQ ID NO: 145062 - DNA, 25 bp, Probe sequence
gtgatgaatcgcagtattcctgggc

SEQ ID NO: 145063 - DNA, 25 bp, Probe sequence
ggtgtgagttgggattacttcgata

SEQ ID NO: 145064 - DNA, 25 bp, Probe sequence
ggaacgattgctgaacatatgcgat

SEQ ID NO: 145065 - DNA, 25 bp, Probe sequence
ggcagttagcttctcaggacagtat

SEQ ID NO: 145066 - DNA, 25 bp, Probe sequence
tggtgccttgtattatggtgctcag

SEQ ID NO: 145067 - DNA, 25 bp, Probe sequence
taatattatctggtttatctatggg

SEQ ID NO: 145068 - DNA, 25 bp, Probe sequence
ttatttattatttccaccctggtga

SEQ ID NO: 145069 - DNA, 25 bp, Probe sequence
ttcaagcaccatactcggagacatt

SEQ ID NO: 145070 - DNA, 25 bp, Probe sequence
ataccgatgtggcttcgtgaatgta

SEQ ID NO: 145071 - DNA, 25 bp, Probe sequence
atgatcatgtgattgtggcttcaga

SEQ ID NO: 145072 - DNA, 25 bp, Probe sequence
agtgcaattagcgctgggattccac

SEQ ID NO: 145073 - DNA, 25 bp, Probe sequence
aaattggaattatgcgtacgcctat

SEQ ID NO: 145074 - DNA, 25 bp, Probe sequence
aacggcgttatatttttgatgacag

SEQ ID NO: 145075 - DNA, 25 bp, Probe sequence
aagaatgcccatttaattgttgata

SEQ ID NO: 145076 - DNA, 25 bp, Probe sequence
aagagatcagttacaacggcgttat

SEQ ID NO: 145077 - DNA, 25 bp, Probe sequence
aatgtttcagcattaatgacacctg

SEQ ID NO: 145078 - DNA, 25 bp, Probe sequence
caatctatcgtaaagaatgcccatt

SEQ ID NO: 145079 - DNA, 25 bp, Probe sequence
caccatgcgccacaagcgattaatt

SEQ ID NO: 145080 - DNA, 25 bp, Probe sequence
gcggacgttgcgacttgtgatagat

SEQ ID NO: 145081 - DNA, 25 bp, Probe sequence
gcacaatcgacaaatagccaatcat

SEQ ID NO: 145082 - DNA, 25 bp, Probe sequence
gaagcattgcggacgttgcgacttg

SEQ ID NO: 145083 - DNA, 25 bp, Probe sequence
gaacatttttacatcgatatgactt

SEQ ID NO: 145084 - DNA, 25 bp, Probe sequence
gaaacgagacaatcacctaatataa

SEQ ID NO: 145085 - DNA, 25 bp, Probe sequence
gaaatactttattccagcttggtac

SEQ ID NO: 145086 - DNA, 25 bp, Probe sequence
gactgtgccgtattatcaactacaa

SEQ ID NO: 145087 - DNA, 25 bp, Probe sequence
gatgacatcattgctgttaagacga

SEQ ID NO: 145088 - DNA, 25 bp, Probe sequence
gatgcaacgacttgtggattatatc

SEQ ID NO: 145089 - DNA, 25 bp, Probe sequence
gattgttctcaatcatgcaccaaat

SEQ ID NO: 145090 - DNA, 25 bp, Probe sequence
gttaagacgatacatgctgaacatg

SEQ ID NO: 145091 - DNA, 25 bp, Probe sequence
gtgacgagtgaacagacctatacaa

SEQ ID NO: 145092 - DNA, 25 bp, Probe sequence
gtggcttcagatgctaggcacaatc

SEQ ID NO: 145093 - DNA, 25 bp, Probe sequence
ggtggcaagacacgactgtgccgta

SEQ ID NO: 145094 - DNA, 25 bp, Probe sequence
ggtacgatgaccaacgatggtggca

SEQ ID NO: 145095 - DNA, 25 bp, Probe sequence
ggcttcgtgaatgtattacgtcggt

SEQ ID NO: 145096 - DNA, 25 bp, Probe sequence
ggccggatgatgttgagtttgtgta

SEQ ID NO: 145097 - DNA, 25 bp, Probe sequence
tggagattgtgtacttcatgaagat

SEQ ID NO: 145098 - DNA, 25 bp, Probe sequence
tgatcagggagaggcttcttaccaa

SEQ ID NO: 145099 - DNA, 25 bp, Probe sequence
tctctgattatgacaatggccgtat

SEQ ID NO: 145100 - DNA, 25 bp, Probe sequence
tatgcgtacgcctattctttaaaat

SEQ ID NO: 145101 - DNA, 25 bp, Probe sequence
tatcaacatcactatcaacaaacag

SEQ ID NO: 145102 - DNA, 25 bp, Probe sequence
ttatcatcacttaaaatggccggat

SEQ ID NO: 145103 - DNA, 25 bp, Probe sequence
ttagcgctgggattccacaaattaa

SEQ ID NO: 145104 - DNA, 25 bp, Probe sequence
atcttggaaagttaaccctgcaggc

SEQ ID NO: 145105 - DNA, 25 bp, Probe sequence
atatcgatttaatgaacgtttccgc

SEQ ID NO: 145106 - DNA, 25 bp, Probe sequence
atgaacgtttccgcaacaaatatga

SEQ ID NO: 145107 - DNA, 25 bp, Probe sequence
atgattatcttgatgctgatttctt

SEQ ID NO: 145108 - DNA, 25 bp, Probe sequence
acctggtaaggatacagaacgttat

SEQ ID NO: 145109 - DNA, 25 bp, Probe sequence
accctgcaggcagtattactttaat

SEQ ID NO: 145110 - DNA, 25 bp, Probe sequence
acgatgttattagtttggttagctg

SEQ ID NO: 145111 - DNA, 25 bp, Probe sequence
acaaacatttccatcgtttcctata

SEQ ID NO: 145112 - DNA, 25 bp, Probe sequence
aatagctatttctaatatgggtgga

SEQ ID NO: 145113 - DNA, 25 bp, Probe sequence
caaacaagtcttgagaagcattata

SEQ ID NO: 145114 - DNA, 25 bp, Probe sequence
cacattgtttgtaccgcatttatct

SEQ ID NO: 145115 - DNA, 25 bp, Probe sequence
ctttatttcacattgtttgtaccgc

SEQ ID NO: 145116 - DNA, 25 bp, Probe sequence
ctgaaatttatttctcagtacaact

SEQ ID NO: 145117 - DNA, 25 bp, Probe sequence
gcaggaccaatgccgattgtaatgg

SEQ ID NO: 145118 - DNA, 25 bp, Probe sequence
gaagtgagaataccatatatcgatt

SEQ ID NO: 145119 - DNA, 25 bp, Probe sequence
gaacgtgttcatcaagacaatattt

SEQ ID NO: 145120 - DNA, 25 bp, Probe sequence
gaaacaattcgtacatatttatatt

SEQ ID NO: 145121 - DNA, 25 bp, Probe sequence
gagtggcaattatttttcaggagtt

SEQ ID NO: 145122 - DNA, 25 bp, Probe sequence
gatgctgatttcttatcggaatatg

SEQ ID NO: 145123 - DNA, 25 bp, Probe sequence
gattttggttactggaacgatgtta

SEQ ID NO: 145124 - DNA, 25 bp, Probe sequence
gtttcctataacgatatgcaagtaa

SEQ ID NO: 145125 - DNA, 25 bp, Probe sequence
gtttgtaccgcatttatctactgaa

SEQ ID NO: 145126 - DNA, 25 bp, Probe sequence
gtaccgcatttatctactgaaattt

SEQ ID NO: 145127 - DNA, 25 bp, Probe sequence
gtcatattgtgattgcgttgttaat

SEQ ID NO: 145128 - DNA, 25 bp, Probe sequence
gtgattcatgaatatgtttcgaaag

SEQ ID NO: 145129 - DNA, 25 bp, Probe sequence
ggaaagttaaccctgcaggcagtat

SEQ ID NO: 145130 - DNA, 25 bp, Probe sequence
tccgtggttaacatcaatgattatc

SEQ ID NO: 145131 - DNA, 25 bp, Probe sequence
ttaaacattttcactttaggattag

SEQ ID NO: 145132 - DNA, 25 bp, Probe sequence
taatcacattgtttatcttattatt

SEQ ID NO: 145133 - DNA, 25 bp, Probe sequence
tatgggtggagacgttaatacttta

SEQ ID NO: 145134 - DNA, 25 bp, Probe sequence
tatgtttcgaaagaacgtgttcatc

SEQ ID NO: 145135 - DNA, 25 bp, Probe sequence
tattgggttattttttatcgagatt

SEQ ID NO: 145136 - DNA, 25 bp, Probe sequence
ttacatcagtattaatattgcagaa

SEQ ID NO: 145137 - DNA, 25 bp, Probe sequence
ttcattttattttatctatgtttaa

SEQ ID NO: 145138 - DNA, 25 bp, Probe sequence
actacggcggttattggtggtgcat

SEQ ID NO: 145139 - DNA, 25 bp, Probe sequence
agcctatctgattctgtgagtgcat

SEQ ID NO: 145140 - DNA, 25 bp, Probe sequence
acgccatcttcggtcaacttaaaca

SEQ ID NO: 145141 - DNA, 25 bp, Probe sequence
acgacagcaccaacagtgacaccaa

SEQ ID NO: 145142 - DNA, 25 bp, Probe sequence
acggtgccgcagtaggtattggtgg

SEQ ID NO: 145143 - DNA, 25 bp, Probe sequence
acacgtccgtcgatagttcatatgc

SEQ ID NO: 145144 - DNA, 25 bp, Probe sequence
aaaggcgaatgctgacccatctaat

SEQ ID NO: 145145 - DNA, 25 bp, Probe sequence
aacttcgaactttcagtcgcttagc

SEQ ID NO: 145146 - DNA, 25 bp, Probe sequence
caagtgggtcattatctgcatcaga

SEQ ID NO: 145147 - DNA, 25 bp, Probe sequence
cacttcacaaagcacaacgccatct

SEQ ID NO: 145148 - DNA, 25 bp, Probe sequence
catcaacgtcgacaagtgcttcagt

SEQ ID NO: 145149 - DNA, 25 bp, Probe sequence
cagtcgcttagctatgtcaacattt

SEQ ID NO: 145150 - DNA, 25 bp, Probe sequence
cagggtcgtctagtacatcagcatc

SEQ ID NO: 145151 - DNA, 25 bp, Probe sequence
ctagcacaacgtcaactagcaccgc

SEQ ID NO: 145152 - DNA, 25 bp, Probe sequence
ctagcaccgcaccagtaaaacttcg

SEQ ID NO: 145153 - DNA, 25 bp, Probe sequence
gcgattcgacgagcacaagtggttc

SEQ ID NO: 145154 - DNA, 25 bp, Probe sequence
gcgtacatcaacatcactcagtgac

SEQ ID NO: 145155 - DNA, 25 bp, Probe sequence
gcatcaacatcaacagccgattcca

SEQ ID NO: 145156 - DNA, 25 bp, Probe sequence
gcacctcggactctatcagtatttc

SEQ ID NO: 145157 - DNA, 25 bp, Probe sequence
gagcacgtctcagtcaggtagtaca

SEQ ID NO: 145158 - DNA, 25 bp, Probe sequence
gatggtatcggttttgccttttcac

SEQ ID NO: 145159 - DNA, 25 bp, Probe sequence
gattgccatccggactaacatttga

SEQ ID NO: 145160 - DNA, 25 bp, Probe sequence
gtattcaccaatatccccgattaaa

SEQ ID NO: 145161 - DNA, 25 bp, Probe sequence
gtatctacatcagctagtacctcga

SEQ ID NO: 145162 - DNA, 25 bp, Probe sequence
gtagctggtggaggtgcgtttggtg

SEQ ID NO: 145163 - DNA, 25 bp, Probe sequence
gtgcttcagtacgtacttcggaatc

SEQ ID NO: 145164 - DNA, 25 bp, Probe sequence
gtggtacgaccaacttttcattatc

SEQ ID NO: 145165 - DNA, 25 bp, Probe sequence
ggttctgtttctggatcactaagca

SEQ ID NO: 145166 - DNA, 25 bp, Probe sequence
tgagcgagtcagctagcacctcgga

SEQ ID NO: 145167 - DNA, 25 bp, Probe sequence
tgacagcctcaacaggtggcgcgac

SEQ ID NO: 145168 - DNA, 25 bp, Probe sequence
tgaccagcaagcttttgcggcttct

SEQ ID NO: 145169 - DNA, 25 bp, Probe sequence
tgcggcttctgatgcaccattaact

SEQ ID NO: 145170 - DNA, 25 bp, Probe sequence
tagccaactctcaaagtgcgtcaac

SEQ ID NO: 145171 - DNA, 25 bp, Probe sequence
ttgcgtcagcagcgacgacaaccgc

SEQ ID NO: 145172 - DNA, 25 bp, Probe sequence
atcagattcagactcgacatcgaca

SEQ ID NO: 145173 - DNA, 25 bp, Probe sequence
agtacaagtgactccgactcattaa

SEQ ID NO: 145174 - DNA, 25 bp, Probe sequence
agcttcaactagtacttcgatgcgt

SEQ ID NO: 145175 - DNA, 25 bp, Probe sequence
acatccgattcgacaagcacatccg

SEQ ID NO: 145176 - DNA, 25 bp, Probe sequence
acagcacgagcacatctcgcttatc

SEQ ID NO: 145177 - DNA, 25 bp, Probe sequence
acaagcacgagcgaatccgattcac

SEQ ID NO: 145178 - DNA, 25 bp, Probe sequence
aaagcacatcggtgtcgacatcatt

SEQ ID NO: 145179 - DNA, 25 bp, Probe sequence
aacttcaaaccgcatgtcgaccatt

SEQ ID NO: 145180 - DNA, 25 bp, Probe sequence
caacgtcattgagcacatccgattc

SEQ ID NO: 145181 - DNA, 25 bp, Probe sequence
gcgattcgcagtcaagctcaacaag

SEQ ID NO: 145182 - DNA, 25 bp, Probe sequence
gcatctggttccttaagtacatcga

SEQ ID NO: 145183 - DNA, 25 bp, Probe sequence
gcacatctggttcggtaagtacttc

SEQ ID NO: 145184 - DNA, 25 bp, Probe sequence
gaatcaacgtcaacgagcgactcta

SEQ ID NO: 145185 - DNA, 25 bp, Probe sequence
gaatccgatttgtcgtcaacatctt

SEQ ID NO: 145186 - DNA, 25 bp, Probe sequence
gaatctggtagcacatcaacatcat

SEQ ID NO: 145187 - DNA, 25 bp, Probe sequence
gagtctacctcgctaagtgattcaa

SEQ ID NO: 145188 - DNA, 25 bp, Probe sequence
ggtagtacgtccatttcaacatcga

SEQ ID NO: 145189 - DNA, 25 bp, Probe sequence
gattccattagtacatccacatcat

SEQ ID NO: 145190 - DNA, 25 bp, Probe sequence
gtatgcatcatactcacagcacgag

SEQ ID NO: 145191 - DNA, 25 bp, Probe sequence
gtagactcaaactcagcaagccaaa

SEQ ID NO: 145192 - DNA, 25 bp, Probe sequence
gtacgtcaacatcgctcagtaactc

SEQ ID NO: 145193 - DNA, 25 bp, Probe sequence
gtacatcgtcatcacaaagcacatc

SEQ ID NO: 145194 - DNA, 25 bp, Probe sequence
gtacatcactttcaacatctgactc

SEQ ID NO: 145195 - DNA, 25 bp, Probe sequence
gtcagtgattctggctcattgagcg

SEQ ID NO: 145196 - DNA, 25 bp, Probe sequence
gtctggttcaggttcaacgagcgta

SEQ ID NO: 145197 - DNA, 25 bp, Probe sequence
gtcgaccattgcaagtttatctaca

SEQ ID NO: 145198 - DNA, 25 bp, Probe sequence
tgtccggctcaacaagtacatctga

SEQ ID NO: 145199 - DNA, 25 bp, Probe sequence
gtgcgtcaacatcactcagtgactc

SEQ ID NO: 145200 - DNA, 25 bp, Probe sequence
gtgactctcgtagtacatcagcttc

SEQ ID NO: 145201 - DNA, 25 bp, Probe sequence
gtgactcgagctcaacaagcacatc

SEQ ID NO: 145202 - DNA, 25 bp, Probe sequence
gtgattcaacatctgcgtcaatgca

SEQ ID NO: 145203 - DNA, 25 bp, Probe sequence
ggttccacaagtcttagcacttcgg

SEQ ID NO: 145204 - DNA, 25 bp, Probe sequence
ggttcggtaagcacatcagcgtcat

SEQ ID NO: 145205 - DNA, 25 bp, Probe sequence
taactcaatgcatccgtcagactca

SEQ ID NO: 145206 - DNA, 25 bp, Probe sequence
actacggcggttattggtggtgcat

SEQ ID NO: 145207 - DNA, 25 bp, Probe sequence
agcctatctgattctgtgagtgcat

SEQ ID NO: 145208 - DNA, 25 bp, Probe sequence
acgccatcttcggtcaacttaaaca

SEQ ID NO: 145209 - DNA, 25 bp, Probe sequence
acgacagcaccaacagtgacaccaa

SEQ ID NO: 145210 - DNA, 25 bp, Probe sequence
acggtgccgcagtaggtattggtgg

SEQ ID NO: 145211 - DNA, 25 bp, Probe sequence
acacgtccgtcgatagttcatatgc

SEQ ID NO: 145212 - DNA, 25 bp, Probe sequence
aaaggcgaatgctgacccatctaat

SEQ ID NO: 145213 - DNA, 25 bp, Probe sequence
aacttcgaactttcagtcgcttagc

SEQ ID NO: 145214 - DNA, 25 bp, Probe sequence
caagtgggtcattatctgcatcaga

SEQ ID NO: 145215 - DNA, 25 bp, Probe sequence
cacttcacaaagcacaacgccatct

SEQ ID NO: 145216 - DNA, 25 bp, Probe sequence
catcaacgtcgacaagtgcttcagt

SEQ ID NO: 145217 - DNA, 25 bp, Probe sequence
cagtcgcttagctatgtcaacattt

SEQ ID NO: 145218 - DNA, 25 bp, Probe sequence
cagggtcgtctagtacatcagcatc

SEQ ID NO: 145219 - DNA, 25 bp, Probe sequence
ctagcacaacgtcaactagcaccgc

SEQ ID NO: 145220 - DNA, 25 bp, Probe sequence
ctagcaccgcaccagtaaaacttcg

SEQ ID NO: 145221 - DNA, 25 bp, Probe sequence
gcgattcgacgagcacaagtggttc

SEQ ID NO: 145222 - DNA, 25 bp, Probe sequence
gcgtacatcaacatcactcagtgac

SEQ ID NO: 145223 - DNA, 25 bp, Probe sequence
gcatcaacatcaacagccgattcca

SEQ ID NO: 145224 - DNA, 25 bp, Probe sequence
gcacctcggactctatcagtatttc

SEQ ID NO: 145225 - DNA, 25 bp, Probe sequence
gagcacgtctcagtcaggtagtaca

SEQ ID NO: 145226 - DNA, 25 bp, Probe sequence
gatggtatcggttttgccttttcac

SEQ ID NO: 145227 - DNA, 25 bp, Probe sequence
gattgccatccggactaacatttga

SEQ ID NO: 145228 - DNA, 25 bp, Probe sequence
gtattcaccaatatccccgattaaa

SEQ ID NO: 145229 - DNA, 25 bp, Probe sequence
gtatctacatcagctagtacctcga

SEQ ID NO: 145230 - DNA, 25 bp, Probe sequence
gtgcttcagtacgtacttcggaatc

SEQ ID NO: 145231 - DNA, 25 bp, Probe sequence
gtggtacgaccaacttttcattatc

SEQ ID NO: 145232 - DNA, 25 bp, Probe sequence
ggttctgtttctggatcactaagca

SEQ ID NO: 145233 - DNA, 25 bp, Probe sequence
tgagcgagtcagctagcacctcgga

SEQ ID NO: 145234 - DNA, 25 bp, Probe sequence
tgacagcctcaacaggtggcgcgac

SEQ ID NO: 145235 - DNA, 25 bp, Probe sequence
tgaccagcaagcttttgcggcttct

SEQ ID NO: 145236 - DNA, 25 bp, Probe sequence
tgcttctacgagcacatctggttcg

SEQ ID NO: 145237 - DNA, 25 bp, Probe sequence
tgcggcttctgatgcaccattaact

SEQ ID NO: 145238 - DNA, 25 bp, Probe sequence
tagccaactctcaaagtgcgtcaac

SEQ ID NO: 145239 - DNA, 25 bp, Probe sequence
ttgcgtcagcagcgacgacaaccgc

SEQ ID NO: 145240 - DNA, 25 bp, Probe sequence
atcagattcagactcgacatcgaca

SEQ ID NO: 145241 - DNA, 25 bp, Probe sequence
agtacaagtgactccgactcattaa

SEQ ID NO: 145242 - DNA, 25 bp, Probe sequence
agcttcaactagtacttcgatgcgt

SEQ ID NO: 145243 - DNA, 25 bp, Probe sequence
acatccgattcgacaagcacatccg

SEQ ID NO: 145244 - DNA, 25 bp, Probe sequence
acagcacgagcacatctcgcttatc

SEQ ID NO: 145245 - DNA, 25 bp, Probe sequence
acaagcacgagcgaatccgattcac

SEQ ID NO: 145246 - DNA, 25 bp, Probe sequence
aaagcacatcggtgtcgacatcatt

SEQ ID NO: 145247 - DNA, 25 bp, Probe sequence
aacttcaaaccgcatgtcgaccatt

SEQ ID NO: 145248 - DNA, 25 bp, Probe sequence
aacgagcgtatctgactcaacatca

SEQ ID NO: 145249 - DNA, 25 bp, Probe sequence
caagccaaagtgcctcaaactcaac

SEQ ID NO: 145250 - DNA, 25 bp, Probe sequence
caacgtcattgagcacatccgattc

SEQ ID NO: 145251 - DNA, 25 bp, Probe sequence
gcgattcgcagtcaagctcaacaag

SEQ ID NO: 145252 - DNA, 25 bp, Probe sequence
gcatctggttccttaagtacatcga

SEQ ID NO: 145253 - DNA, 25 bp, Probe sequence
gaatctggtagcacatcaacatcat

SEQ ID NO: 145254 - DNA, 25 bp, Probe sequence
gaagcgtatcagtttcaacatcgac

SEQ ID NO: 145255 - DNA, 25 bp, Probe sequence
gacaagtacatcaacatcggctagt

SEQ ID NO: 145256 - DNA, 25 bp, Probe sequence
gagcacgagtgaatctcagtctaca

SEQ ID NO: 145257 - DNA, 25 bp, Probe sequence
gagtctacctcgctaagtgattcaa

SEQ ID NO: 145258 - DNA, 25 bp, Probe sequence
gattcaacttctatcagtgactcag

SEQ ID NO: 145259 - DNA, 25 bp, Probe sequence
gtatgcatcatactcacagcacgag

SEQ ID NO: 145260 - DNA, 25 bp, Probe sequence
gtagactcaaactcagcaagccaaa

SEQ ID NO: 145261 - DNA, 25 bp, Probe sequence
gtacgtcaacatcgctcagtaactc

SEQ ID NO: 145262 - DNA, 25 bp, Probe sequence
gtacatcgtcatcacaaagcacatc

SEQ ID NO: 145263 - DNA, 25 bp, Probe sequence
gtacatcactttcaacatctgactc

SEQ ID NO: 145264 - DNA, 25 bp, Probe sequence
gtcagtgattctggctcattgagcg

SEQ ID NO: 145265 - DNA, 25 bp, Probe sequence
gtctggttcaggttcaacgagcgta

SEQ ID NO: 145266 - DNA, 25 bp, Probe sequence
tgtccggctcaacaagtacatctga

SEQ ID NO: 145267 - DNA, 25 bp, Probe sequence
gtgcgtcaacatcactcagtgactc

SEQ ID NO: 145268 - DNA, 25 bp, Probe sequence
gtgaatccgactcaacatcatcaag

SEQ ID NO: 145269 - DNA, 25 bp, Probe sequence
gtgactctcgtagtacatcagcttc

SEQ ID NO: 145270 - DNA, 25 bp, Probe sequence
gtgactcgagctcaacaagcacatc

SEQ ID NO: 145271 - DNA, 25 bp, Probe sequence
gtgattcaacatctgcgtcaatgca

SEQ ID NO: 145272 - DNA, 25 bp, Probe sequence
ggttccacaagtcttagcacttcgg

SEQ ID NO: 145273 - DNA, 25 bp, Probe sequence
taactcaatgcatccgtcagactca

SEQ ID NO: 145274 - DNA, 25 bp, Probe sequence
attgctacgcaggacaacagtggaa

SEQ ID NO: 145275 - DNA, 25 bp, Probe sequence
attgccatctggactaacattcgat

SEQ ID NO: 145276 - DNA, 25 bp, Probe sequence
attcgccaatatcaccgattaaaat

SEQ ID NO: 145277 - DNA, 25 bp, Probe sequence
atcggggagcttgtctaagtcaaaa

SEQ ID NO: 145278 - DNA, 25 bp, Probe sequence
atgagtacatcggggagcttgtcta

SEQ ID NO: 145279 - DNA, 25 bp, Probe sequence
atgcaatcagcacatcagaatcatt

SEQ ID NO: 145280 - DNA, 25 bp, Probe sequence
agtgcaacctacgaacaacacgttc

SEQ ID NO: 145281 - DNA, 25 bp, Probe sequence
agcaaacaataaatcgacgacaact

SEQ ID NO: 145282 - DNA, 25 bp, Probe sequence
acatcggggagcttgtctaagtcaa

SEQ ID NO: 145283 - DNA, 25 bp, Probe sequence
aaaattgctacgcaggacaacagtg

SEQ ID NO: 145284 - DNA, 25 bp, Probe sequence
aacaagtacatcagaatcgtctagt

SEQ ID NO: 145285 - DNA, 25 bp, Probe sequence
aagtatgagtacatcggggagcttg

SEQ ID NO: 145286 - DNA, 25 bp, Probe sequence
catcgaatgcaatcagcacatcaga

SEQ ID NO: 145287 - DNA, 25 bp, Probe sequence
ctacgcaggacaacagtggaaatgc

SEQ ID NO: 145288 - DNA, 25 bp, Probe sequence
gctgcgaagttaaaagtgcaaccta

SEQ ID NO: 145289 - DNA, 25 bp, Probe sequence
gcacatcgaatgcaatcagcacatc

SEQ ID NO: 145290 - DNA, 25 bp, Probe sequence
gaagtgtattcgccaatatcaccga

SEQ ID NO: 145291 - DNA, 25 bp, Probe sequence
gacagcacatcgaatgcaatcagca

SEQ ID NO: 145292 - DNA, 25 bp, Probe sequence
gacgccaacgaaaattggtcaatca

SEQ ID NO: 145293 - DNA, 25 bp, Probe sequence
gtattcgccaatatcaccgattaaa

SEQ ID NO: 145294 - DNA, 25 bp, Probe sequence
gtacatcggggagcttgtctaagtc

SEQ ID NO: 145295 - DNA, 25 bp, Probe sequence
gtctaagtcaaaaagtctatcaaca

SEQ ID NO: 145296 - DNA, 25 bp, Probe sequence
gtgacagcacatcgaatgcaatcag

SEQ ID NO: 145297 - DNA, 25 bp, Probe sequence
gtgtattcgccaatatcaccgatta

SEQ ID NO: 145298 - DNA, 25 bp, Probe sequence
gggacgccaacgaaaattggtcaat

SEQ ID NO: 145299 - DNA, 25 bp, Probe sequence
gggagcttgtctaagtcaaaaagtc

SEQ ID NO: 145300 - DNA, 25 bp, Probe sequence
ggattgccatctggactaacattcg

SEQ ID NO: 145301 - DNA, 25 bp, Probe sequence
tgcaacctacgaacaacacgttcca

SEQ ID NO: 145302 - DNA, 25 bp, Probe sequence
tgccatctggactaacattcgatag

SEQ ID NO: 145303 - DNA, 25 bp, Probe sequence
tctggactaacattcgatagtacaa

SEQ ID NO: 145304 - DNA, 25 bp, Probe sequence
tactgaccaagcaaacaataaatcg

SEQ ID NO: 145305 - DNA, 25 bp, Probe sequence
tacatcagaatcgtctagtacatca

SEQ ID NO: 145306 - DNA, 25 bp, Probe sequence
ttaaaagtgcaacctacgaacaaca

SEQ ID NO: 145307 - DNA, 25 bp, Probe sequence
ttcaatcattgggacgccaacgaaa

SEQ ID NO: 145308 - DNA, 25 bp, Probe sequence
atgtccggttcaacgtacaactcga

SEQ ID NO: 145309 - DNA, 25 bp, Probe sequence
agtctagttcattgagtggctcaca

SEQ ID NO: 145310 - DNA, 25 bp, Probe sequence
agtgagtctagttcattgagtggct

SEQ ID NO: 145311 - DNA, 25 bp, Probe sequence
agtatgtccggttcaacgtacaact

SEQ ID NO: 145312 - DNA, 25 bp, Probe sequence
acgtacaactcgacttcagtgagcg

SEQ ID NO: 145313 - DNA, 25 bp, Probe sequence
actcgacttcagtgagcgactcaga

SEQ ID NO: 145314 - DNA, 25 bp, Probe sequence
acaactcgacttcagtgagcgactc

SEQ ID NO: 145315 - DNA, 25 bp, Probe sequence
aacaagcgtaagtgattctggctca

SEQ ID NO: 145316 - DNA, 25 bp, Probe sequence
aactcgacttcagtgagcgactcag

SEQ ID NO: 145317 - DNA, 25 bp, Probe sequence
aacgtacaactcgacttcagtgagc

SEQ ID NO: 145318 - DNA, 25 bp, Probe sequence
cacaaagtatgtccggttcaacgta

SEQ ID NO: 145319 - DNA, 25 bp, Probe sequence
aatgtcacaaagtatgtccggttca

SEQ ID NO: 145320 - DNA, 25 bp, Probe sequence
cggttcaacgtacaactcgacttca

SEQ ID NO: 145321 - DNA, 25 bp, Probe sequence
caaagtatgtccggttcaacgtaca

SEQ ID NO: 145322 - DNA, 25 bp, Probe sequence
tccggttcaacgtacaactcgactt

SEQ ID NO: 145323 - DNA, 25 bp, Probe sequence
gaaagtgtaagtgagtctagttcat

SEQ ID NO: 145324 - DNA, 25 bp, Probe sequence
gacttcagtgagcgactcagaatca

SEQ ID NO: 145325 - DNA, 25 bp, Probe sequence
gagtggttcaacaagcgtaagtgat

SEQ ID NO: 145326 - DNA, 25 bp, Probe sequence
gagtctagttcattgagtggctcac

SEQ ID NO: 145327 - DNA, 25 bp, Probe sequence
gatgagtggttcaacaagcgtaagt

SEQ ID NO: 145328 - DNA, 25 bp, Probe sequence
gttcaacgtacaactcgacttcagt

SEQ ID NO: 145329 - DNA, 25 bp, Probe sequence
gtttcaatgtcacaaagtatgtccg

SEQ ID NO: 145330 - DNA, 25 bp, Probe sequence
gtatgtccggttcaacgtacaactc

SEQ ID NO: 145331 - DNA, 25 bp, Probe sequence
gtacaactcgacttcagtgagcgac

SEQ ID NO: 145332 - DNA, 25 bp, Probe sequence
gtcacaaagtatgtccggttcaacg

SEQ ID NO: 145333 - DNA, 25 bp, Probe sequence
tgtccggttcaacgtacaactcgac

SEQ ID NO: 145334 - DNA, 25 bp, Probe sequence
gtgactcaaaatcgatgagtggttc

SEQ ID NO: 145335 - DNA, 25 bp, Probe sequence
gtgtaagtgagtctagttcattgag

SEQ ID NO: 145336 - DNA, 25 bp, Probe sequence
ggttcaacaagcgtaagtgattctg

SEQ ID NO: 145337 - DNA, 25 bp, Probe sequence
ggttcaacgtacaactcgacttcag

SEQ ID NO: 145338 - DNA, 25 bp, Probe sequence
tcgacttcagtgagcgactcagaat

SEQ ID NO: 145339 - DNA, 25 bp, Probe sequence
tcgatgagtggttcaacaagcgtaa

SEQ ID NO: 145340 - DNA, 25 bp, Probe sequence
tcaacgtacaactcgacttcagtga

SEQ ID NO: 145341 - DNA, 25 bp, Probe sequence
tatgtccggttcaacgtacaactcg

SEQ ID NO: 145342 - DNA, 25 bp, Probe sequence
attcggctagtacatcacaatcggt

SEQ ID NO: 145343 - DNA, 25 bp, Probe sequence
atggcgttgcgacaacgtacacatc

SEQ ID NO: 145344 - DNA, 25 bp, Probe sequence
agtacatcggattctgacagtaagt

SEQ ID NO: 145345 - DNA, 25 bp, Probe sequence
acaaccgattctactagcgtaacga

SEQ ID NO: 145346 - DNA, 25 bp, Probe sequence
acaacgccagcttcagccaatttaa

SEQ ID NO: 145347 - DNA, 25 bp, Probe sequence
aaatacagtcacaggattgccgtct

SEQ ID NO: 145348 - DNA, 25 bp, Probe sequence
aacgtacacatcaagttcagcagct

SEQ ID NO: 145349 - DNA, 25 bp, Probe sequence
aatcgctaagtatgtctggttcaga

SEQ ID NO: 145350 - DNA, 25 bp, Probe sequence
caagtagttcagtacgtacgtcgga

SEQ ID NO: 145351 - DNA, 25 bp, Probe sequence
caaaagcgaatgcagacccatctaa

SEQ ID NO: 145352 - DNA, 25 bp, Probe sequence
ctagtacaacgtcaaccagcacagc

SEQ ID NO: 145353 - DNA, 25 bp, Probe sequence
ctacatctgaatcaacatccccaaa

SEQ ID NO: 145354 - DNA, 25 bp, Probe sequence
gccttttcacctggtgtattgggag

SEQ ID NO: 145355 - DNA, 25 bp, Probe sequence
gctatgtcaacttttgcatcagctg

SEQ ID NO: 145356 - DNA, 25 bp, Probe sequence
gcatcaacatcaacaaccgattcta

SEQ ID NO: 145357 - DNA, 25 bp, Probe sequence
gcacagcacctatcaaacttcgaac

SEQ ID NO: 145358 - DNA, 25 bp, Probe sequence
gcaagtcaattcgattcaacaagca

SEQ ID NO: 145359 - DNA, 25 bp, Probe sequence
gaaaccgtaggcaatcaaaactcaa

SEQ ID NO: 145360 - DNA, 25 bp, Probe sequence
gacaagtgcagtaaccgctaatacg

SEQ ID NO: 145361 - DNA, 25 bp, Probe sequence
gactcaatgagcacgtctgaaatga

SEQ ID NO: 145362 - DNA, 25 bp, Probe sequence
gagtacaagtggatcattagctgca

SEQ ID NO: 145363 - DNA, 25 bp, Probe sequence
gattcaacatcaattagcgactcag

SEQ ID NO: 145364 - DNA, 25 bp, Probe sequence
gattcattgcgcacatcaacatcgt

SEQ ID NO: 145365 - DNA, 25 bp, Probe sequence
gattgccgtctggattaacattcga

SEQ ID NO: 145366 - DNA, 25 bp, Probe sequence
gtacatctggctcaacaagtggttc

SEQ ID NO: 145367 - DNA, 25 bp, Probe sequence
gtctaactcgacttcaatgagcaac

SEQ ID NO: 145368 - DNA, 25 bp, Probe sequence
gtgcggcagtaggtatcggtggttt

SEQ ID NO: 145369 - DNA, 25 bp, Probe sequence
ggtggtttgagtaatgcgtttggct

SEQ ID NO: 145370 - DNA, 25 bp, Probe sequence
ggttcaacatcaacaagcacatctg

SEQ ID NO: 145371 - DNA, 25 bp, Probe sequence
ggatataactacacatctgtcgata

SEQ ID NO: 145372 - DNA, 25 bp, Probe sequence
ggcttctgatgcacctttaacatct

SEQ ID NO: 145373 - DNA, 25 bp, Probe sequence
tgcatcagctgcaacgacaagtgca

SEQ ID NO: 145374 - DNA, 25 bp, Probe sequence
tctcaacaagctcatcagactcaat

SEQ ID NO: 145375 - DNA, 25 bp, Probe sequence
tcatcaagcatgtcaggttcagtta

SEQ ID NO: 145376 - DNA, 25 bp, Probe sequence
attttgaatgtgagtacgttcaaac

SEQ ID NO: 145377 - DNA, 25 bp, Probe sequence
atgtgagtacgttcaaacgattcgt

SEQ ID NO: 145378 - DNA, 25 bp, Probe sequence
atggttatgttcgcagcaaatcaat

SEQ ID NO: 145379 - DNA, 25 bp, Probe sequence
actgtatcgaaagatgggaaagata

SEQ ID NO: 145380 - DNA, 25 bp, Probe sequence
acattaagtcgattaaacctattgc

SEQ ID NO: 145381 - DNA, 25 bp, Probe sequence
aatgtgagtacgttcaaacgattcg

SEQ ID NO: 145382 - DNA, 25 bp, Probe sequence
cattttgaatgtgagtacgttcaaa

SEQ ID NO: 145383 - DNA, 25 bp, Probe sequence
cttatagtcagtatcaaaacttaac

SEQ ID NO: 145384 - DNA, 25 bp, Probe sequence
ctactgtatcgaaagatgggaaaga

SEQ ID NO: 145385 - DNA, 25 bp, Probe sequence
ctatggttatgttcgcagcaaatca

SEQ ID NO: 145386 - DNA, 25 bp, Probe sequence
cgaaagatgggaaagataatttagc

SEQ ID NO: 145387 - DNA, 25 bp, Probe sequence
cgcctatggttatgttcgcagcaaa

SEQ ID NO: 145388 - DNA, 25 bp, Probe sequence
cctatggttatgttcgcagcaaatc

SEQ ID NO: 145389 - DNA, 25 bp, Probe sequence
ccttatagtcagtatcaaaacttaa

SEQ ID NO: 145390 - DNA, 25 bp, Probe sequence
gcctatggttatgttcgcagcaaat

SEQ ID NO: 145391 - DNA, 25 bp, Probe sequence
gaatgtgagtacgttcaaacgattc

SEQ ID NO: 145392 - DNA, 25 bp, Probe sequence
gacattaagtcgattaaacctattg

SEQ ID NO: 145393 - DNA, 25 bp, Probe sequence
gagtacgttcaaacgattcgtattc

SEQ ID NO: 145394 - DNA, 25 bp, Probe sequence
gtgagtacgttcaaacgattcgtat

SEQ ID NO: 145395 - DNA, 25 bp, Probe sequence
tgtgagtacgttcaaacgattcgta

SEQ ID NO: 145396 - DNA, 25 bp, Probe sequence
tgggatccgcctatggttatgttcg

SEQ ID NO: 145397 - DNA, 25 bp, Probe sequence
tggttatgttcgcagcaaatcaatc

SEQ ID NO: 145398 - DNA, 25 bp, Probe sequence
tgagtacgttcaaacgattcgtatt

SEQ ID NO: 145399 - DNA, 25 bp, Probe sequence
tgaatgtgagtacgttcaaacgatt

SEQ ID NO: 145400 - DNA, 25 bp, Probe sequence
tccgcctatggttatgttcgcagca

SEQ ID NO: 145401 - DNA, 25 bp, Probe sequence
tctactgtatcgaaagatgggaaag

SEQ ID NO: 145402 - DNA, 25 bp, Probe sequence
tactgtatcgaaagatgggaaagat

SEQ ID NO: 145403 - DNA, 25 bp, Probe sequence
tatggttatgttcgcagcaaatcaa

SEQ ID NO: 145404 - DNA, 25 bp, Probe sequence
tttgaatgtgagtacgttcaaacga

SEQ ID NO: 145405 - DNA, 25 bp, Probe sequence
ttttgaatgtgagtacgttcaaacg

SEQ ID NO: 145406 - DNA, 25 bp, Probe sequence
ttgaatgtgagtacgttcaaacgat

SEQ ID NO: 145407 - DNA, 25 bp, Probe sequence
attatcacttttaacatctacaacg

SEQ ID NO: 145408 - DNA, 25 bp, Probe sequence
attttaaaatcaatccacacgcatt

SEQ ID NO: 145409 - DNA, 25 bp, Probe sequence
atacgtttgatgcacaatcattaac

SEQ ID NO: 145410 - DNA, 25 bp, Probe sequence
atccacacgcattacaggctgtttc

SEQ ID NO: 145411 - DNA, 25 bp, Probe sequence
agttcaacgtgcaggaggtaagaga

SEQ ID NO: 145412 - DNA, 25 bp, Probe sequence
acaggctgtttctcgtttagccgga

SEQ ID NO: 145413 - DNA, 25 bp, Probe sequence
actatcgcaaatgatattgcttgga

SEQ ID NO: 145414 - DNA, 25 bp, Probe sequence
acatctacaacgattaagacgccag

SEQ ID NO: 145415 - DNA, 25 bp, Probe sequence
acaacgattaagacgccaggaatta

SEQ ID NO: 145416 - DNA, 25 bp, Probe sequence
acaacattaaatcaagatgcatcag

SEQ ID NO: 145417 - DNA, 25 bp, Probe sequence
aaatcaatccacacgcattacaggc

SEQ ID NO: 145418 - DNA, 25 bp, Probe sequence
aattggttcaattattccacgacct

SEQ ID NO: 145419 - DNA, 25 bp, Probe sequence
cacgcattacaggctgtttctcgtt

SEQ ID NO: 145420 - DNA, 25 bp, Probe sequence
cttggagatgtattagatggggctg

SEQ ID NO: 145421 - DNA, 25 bp, Probe sequence
ctcgtttagccggaaatgattatgc

SEQ ID NO: 145422 - DNA, 25 bp, Probe sequence
gcgccgttagcatatggtgacagtg

SEQ ID NO: 145423 - DNA, 25 bp, Probe sequence
gctgtttctcgtttagccggaaatg

SEQ ID NO: 145424 - DNA, 25 bp, Probe sequence
gcagcgccgttagcatatggtgaca

SEQ ID NO: 145425 - DNA, 25 bp, Probe sequence
gaacggactggagactttgttgtgc

SEQ ID NO: 145426 - DNA, 25 bp, Probe sequence
gaaattgtaacttatcatattgatg

SEQ ID NO: 145427 - DNA, 25 bp, Probe sequence
gactgcagcgccgttagcatatggt

SEQ ID NO: 145428 - DNA, 25 bp, Probe sequence
gactttgttgtgcatattacagacg

SEQ ID NO: 145429 - DNA, 25 bp, Probe sequence
gactggagactttgttgtgcatatt

SEQ ID NO: 145430 - DNA, 25 bp, Probe sequence
gagattcgaatgtaaactatcgcaa

SEQ ID NO: 145431 - DNA, 25 bp, Probe sequence
gatgcatcagtaaatgcagcaccat

SEQ ID NO: 145432 - DNA, 25 bp, Probe sequence
gatgcacaatcattaactgctagag

SEQ ID NO: 145433 - DNA, 25 bp, Probe sequence
gatattaatgagactgcagcgccgt

SEQ ID NO: 145434 - DNA, 25 bp, Probe sequence
gttgtgcatattacagacgaagata

SEQ ID NO: 145435 - DNA, 25 bp, Probe sequence
gttcaattattccacgacctatagc

SEQ ID NO: 145436 - DNA, 25 bp, Probe sequence
tggtgacagtgagttgagtcgtaca

SEQ ID NO: 145437 - DNA, 25 bp, Probe sequence
tgagactgcagcgccgttagcatat

SEQ ID NO: 145438 - DNA, 25 bp, Probe sequence
tattgatgacagtatttatgagggt

SEQ ID NO: 145439 - DNA, 25 bp, Probe sequence
ttaatgagactgcagcgccgttagc

SEQ ID NO: 145440 - DNA, 25 bp, Probe sequence
ttgctattgcagttcaacgtgcagg

SEQ ID NO: 145441 - DNA, 25 bp, Probe sequence
attattgaacaccgtagacagtttt

SEQ ID NO: 145442 - DNA, 25 bp, Probe sequence
atccaactaatgatggtcacactaa

SEQ ID NO: 145443 - DNA, 25 bp, Probe sequence
agcacttaaactttacgatactaag

SEQ ID NO: 145444 - DNA, 25 bp, Probe sequence
aaagacctacccaaccatgatgagt

SEQ ID NO: 145445 - DNA, 25 bp, Probe sequence
aaaccttgttcattctagaagtatt

SEQ ID NO: 145446 - DNA, 25 bp, Probe sequence
aaacgatgttgttgtcagtctagca

SEQ ID NO: 145447 - DNA, 25 bp, Probe sequence
aaacttattatcaaaccttgttcat

SEQ ID NO: 145448 - DNA, 25 bp, Probe sequence
aactgacaaaggatatctacggtac

SEQ ID NO: 145449 - DNA, 25 bp, Probe sequence
aatggtatcgcacgtgaaattattt

SEQ ID NO: 145450 - DNA, 25 bp, Probe sequence
gaagtccctaaagaacctgcagatt

SEQ ID NO: 145451 - DNA, 25 bp, Probe sequence
caacgaagcacttaaactttacgat

SEQ ID NO: 145452 - DNA, 25 bp, Probe sequence
caaaagacctacccaaccatgatga

SEQ ID NO: 145453 - DNA, 25 bp, Probe sequence
gcacattatgaagccacaaccaatt

SEQ ID NO: 145454 - DNA, 25 bp, Probe sequence
gcaactgcacattatgaagccacaa

SEQ ID NO: 145455 - DNA, 25 bp, Probe sequence
gaacctgcagatttaacacaagata

SEQ ID NO: 145456 - DNA, 25 bp, Probe sequence
gaaattgattacattcatccaacta

SEQ ID NO: 145457 - DNA, 25 bp, Probe sequence
gacagtttttatacgaacatcaatt

SEQ ID NO: 145458 - DNA, 25 bp, Probe sequence
gacctacccaaccatgatgagttaa

SEQ ID NO: 145459 - DNA, 25 bp, Probe sequence
gatggaagtccctaaagaacctgca

SEQ ID NO: 145460 - DNA, 25 bp, Probe sequence
gatggtcacactaaaaaagtggact

SEQ ID NO: 145461 - DNA, 25 bp, Probe sequence
gatccacattacaacgaagcactta

SEQ ID NO: 145462 - DNA, 25 bp, Probe sequence
gataaacgtatcatcaaacgctcat

SEQ ID NO: 145463 - DNA, 25 bp, Probe sequence
gattatgtctttatcgtaggcttag

SEQ ID NO: 145464 - DNA, 25 bp, Probe sequence
gttgtcagtctagcaactgcacatt

SEQ ID NO: 145465 - DNA, 25 bp, Probe sequence
gttgttgtcagtctagcaactgcac

SEQ ID NO: 145466 - DNA, 25 bp, Probe sequence
gtatcatcaaacgctcattagaaaa

SEQ ID NO: 145467 - DNA, 25 bp, Probe sequence
tgtctttatcgtaggcttagaaaac

SEQ ID NO: 145468 - DNA, 25 bp, Probe sequence
ggtatcgcacgtgaaattatttatg

SEQ ID NO: 145469 - DNA, 25 bp, Probe sequence
ggatatctacggtacaagtgttaaa

SEQ ID NO: 145470 - DNA, 25 bp, Probe sequence
tgaacaccgtagacagtttttatac

SEQ ID NO: 145471 - DNA, 25 bp, Probe sequence
tcaaagatccacattacaacgaagc

SEQ ID NO: 145472 - DNA, 25 bp, Probe sequence
tcaaacgctcattagaaaacaacaa

SEQ ID NO: 145473 - DNA, 25 bp, Probe sequence
tacccaaccatgatgagttaatgac

SEQ ID NO: 145474 - DNA, 25 bp, Probe sequence
ttatcaaaccttgttcattctagaa

SEQ ID NO: 145475 - DNA, 25 bp, Probe sequence
attgaagcgcgtcagttcattgaac

SEQ ID NO: 145476 - DNA, 25 bp, Probe sequence
atagttgtgtagatgaccacttaat

SEQ ID NO: 145477 - DNA, 25 bp, Probe sequence
atgctgaatgtgtcaaacttcattt

SEQ ID NO: 145478 - DNA, 25 bp, Probe sequence
agtcttaccgctgtctaactacatt

SEQ ID NO: 145479 - DNA, 25 bp, Probe sequence
agcgcgtcagttcattgaacgacgt

SEQ ID NO: 145480 - DNA, 25 bp, Probe sequence
accgctgtctaactacattaaaagt

SEQ ID NO: 145481 - DNA, 25 bp, Probe sequence
acgggtttatatagttgtgtagatg

SEQ ID NO: 145482 - DNA, 25 bp, Probe sequence
acattaaaagtgctgaagaacatca

SEQ ID NO: 145483 - DNA, 25 bp, Probe sequence
aaattgcagtggaagtcttaccgct

SEQ ID NO: 145484 - DNA, 25 bp, Probe sequence
aacaatacctggaattatacataca

SEQ ID NO: 145485 - DNA, 25 bp, Probe sequence
aagtcttaccgctgtctaactacat

SEQ ID NO: 145486 - DNA, 25 bp, Probe sequence
cagtggaagtcttaccgctgtctaa

SEQ ID NO: 145487 - DNA, 25 bp, Probe sequence
cttaccgctgtctaactacattaaa

SEQ ID NO: 145488 - DNA, 25 bp, Probe sequence
ccacttaattgaagcgcgtcagttc

SEQ ID NO: 145489 - DNA, 25 bp, Probe sequence
gcgtcagttcattgaacgacgtaaa

SEQ ID NO: 145490 - DNA, 25 bp, Probe sequence
gcagtggaagtcttaccgctgtcta

SEQ ID NO: 145491 - DNA, 25 bp, Probe sequence
gaattatacatacagaagcaggaag

SEQ ID NO: 145492 - DNA, 25 bp, Probe sequence
gaagcaggaagagcaaatggaagaa

SEQ ID NO: 145493 - DNA, 25 bp, Probe sequence
gaagcgcgtcagttcattgaacgac

SEQ ID NO: 145494 - DNA, 25 bp, Probe sequence
gaccacttaattgaagcgcgtcagt

SEQ ID NO: 145495 - DNA, 25 bp, Probe sequence
gatgatcgtatgttaacaattacag

SEQ ID NO: 145496 - DNA, 25 bp, Probe sequence
gatgaccacttaattgaagcgcgtc

SEQ ID NO: 145497 - DNA, 25 bp, Probe sequence
gatcgtatgttaacaattacagaca

SEQ ID NO: 145498 - DNA, 25 bp, Probe sequence
gatatgcatatgtgtcatatttcaa

SEQ ID NO: 145499 - DNA, 25 bp, Probe sequence
gttcattgaacgacgtaaagacaga

SEQ ID NO: 145500 - DNA, 25 bp, Probe sequence
gtatcgaacgggtttatatagttgt

SEQ ID NO: 145501 - DNA, 25 bp, Probe sequence
gtatgatggttatgctgaatgtgtc

SEQ ID NO: 145502 - DNA, 25 bp, Probe sequence
gtagatgaccacttaattgaagcgc

SEQ ID NO: 145503 - DNA, 25 bp, Probe sequence
gtcttaccgctgtctaactacatta

SEQ ID NO: 145504 - DNA, 25 bp, Probe sequence
gtccgtatgatggttatgctgaatg

SEQ ID NO: 145505 - DNA, 25 bp, Probe sequence
ggttatgctgaatgtgtcaaacttc

SEQ ID NO: 145506 - DNA, 25 bp, Probe sequence
tgaagaacatcagcaacatttagaa

SEQ ID NO: 145507 - DNA, 25 bp, Probe sequence
taattgaagcgcgtcagttcattga

SEQ ID NO: 145508 - DNA, 25 bp, Probe sequence
ttgcagtggaagtcttaccgctgtc

SEQ ID NO: 145509 - DNA, 25 bp, Probe sequence
attgatgtcgaaagttttgtaagtg

SEQ ID NO: 145510 - DNA, 25 bp, Probe sequence
attagggtttttgcgaatatcaact

SEQ ID NO: 145511 - DNA, 25 bp, Probe sequence
atgcgttttttgattgatgtcgaaa

SEQ ID NO: 145512 - DNA, 25 bp, Probe sequence
atgtcgaaagttttgtaagtggatt

SEQ ID NO: 145513 - DNA, 25 bp, Probe sequence
aggattagggtttttgcgaatatca

SEQ ID NO: 145514 - DNA, 25 bp, Probe sequence
agggtttttgcgaatatcaactatt

SEQ ID NO: 145515 - DNA, 25 bp, Probe sequence
cgttttttgattgatgtcgaaagtt

SEQ ID NO: 145516 - DNA, 25 bp, Probe sequence
gcgttttttgattgatgtcgaaagt

SEQ ID NO: 145517 - DNA, 25 bp, Probe sequence
gaaagttttgtaagtggattaggat

SEQ ID NO: 145518 - DNA, 25 bp, Probe sequence
gtcgaaagttttgtaagtggattag

SEQ ID NO: 145519 - DNA, 25 bp, Probe sequence
gatgtcgaaagttttgtaagtggat

SEQ ID NO: 145520 - DNA, 25 bp, Probe sequence
gattaggattagggtttttgcgaat

SEQ ID NO: 145521 - DNA, 25 bp, Probe sequence
gattagggtttttgcgaatatcaac

SEQ ID NO: 145522 - DNA, 25 bp, Probe sequence
gattgatgtcgaaagttttgtaagt

SEQ ID NO: 145523 - DNA, 25 bp, Probe sequence
gtttttgcgaatatcaactattaaa

SEQ ID NO: 145524 - DNA, 25 bp, Probe sequence
gttttttgattgatgtcgaaagttt

SEQ ID NO: 145525 - DNA, 25 bp, Probe sequence
gtggattaggattagggtttttgcg

SEQ ID NO: 145526 - DNA, 25 bp, Probe sequence
gggtttttgcgaatatcaactatta

SEQ ID NO: 145527 - DNA, 25 bp, Probe sequence
ggtttttgcgaatatcaactattaa

SEQ ID NO: 145528 - DNA, 25 bp, Probe sequence
ggattagggtttttgcgaatatcaa

SEQ ID NO: 145529 - DNA, 25 bp, Probe sequence
tggattaggattagggtttttgcga

SEQ ID NO: 145530 - DNA, 25 bp, Probe sequence
tgatgtcgaaagttttgtaagtgga

SEQ ID NO: 145531 - DNA, 25 bp, Probe sequence
tgcgttttttgattgatgtcgaaag

SEQ ID NO: 145532 - DNA, 25 bp, Probe sequence
tagggtttttgcgaatatcaactat

SEQ ID NO: 145533 - DNA, 25 bp, Probe sequence
taggattagggtttttgcgaatatc

SEQ ID NO: 145534 - DNA, 25 bp, Probe sequence
tttgattgatgtcgaaagttttgta

SEQ ID NO: 145535 - DNA, 25 bp, Probe sequence
ttttttgattgatgtcgaaagtttt

SEQ ID NO: 145536 - DNA, 25 bp, Probe sequence
ttttgcgaatatcaactattaaata

SEQ ID NO: 145537 - DNA, 25 bp, Probe sequence
ttttgattgatgtcgaaagttttgt

SEQ ID NO: 145538 - DNA, 25 bp, Probe sequence
ttagggtttttgcgaatatcaacta

SEQ ID NO: 145539 - DNA, 25 bp, Probe sequence
ttaggattagggtttttgcgaatat

SEQ ID NO: 145540 - DNA, 25 bp, Probe sequence
ttgcgaatatcaactattaaatata

SEQ ID NO: 145541 - DNA, 25 bp, Probe sequence
ttgatgtcgaaagttttgtaagtgg

SEQ ID NO: 145542 - DNA, 25 bp, Probe sequence
ttgattgatgtcgaaagttttgtaa

SEQ ID NO: 145543 - DNA, 25 bp, Probe sequence
attgcaggtcgcttactaaactatt

SEQ ID NO: 145544 - DNA, 25 bp, Probe sequence
attgcacttgaaaatattggttttt

SEQ ID NO: 145545 - DNA, 25 bp, Probe sequence
atattagtgtgttaggtcttgttgt

SEQ ID NO: 145546 - DNA, 25 bp, Probe sequence
atggtgtaacgttaacatgtcgaga

SEQ ID NO: 145547 - DNA, 25 bp, Probe sequence
aggtcagggtattgcaggtcgctta

SEQ ID NO: 145548 - DNA, 25 bp, Probe sequence
agtaatcatgcaggacttagatcaa

SEQ ID NO: 145549 - DNA, 25 bp, Probe sequence
aagagcgttacattagcgatgattt

SEQ ID NO: 145550 - DNA, 25 bp, Probe sequence
caaggtcagggtattgcaggtcgct

SEQ ID NO: 145551 - DNA, 25 bp, Probe sequence
cagggtattgcaggtcgcttactaa

SEQ ID NO: 145552 - DNA, 25 bp, Probe sequence
caggtcgcttactaaactattttga

SEQ ID NO: 145553 - DNA, 25 bp, Probe sequence
catcgacatggtgtaacgttaacat

SEQ ID NO: 145554 - DNA, 25 bp, Probe sequence
catgcaggacttagatcaaattatt

SEQ ID NO: 145555 - DNA, 25 bp, Probe sequence
gaatcatgtcatggcggtattaaat

SEQ ID NO: 145556 - DNA, 25 bp, Probe sequence
gaaggtgtatcagaatcatgtcatg

SEQ ID NO: 145557 - DNA, 25 bp, Probe sequence
gttaggtcttgttgtagcaccaaat

SEQ ID NO: 145558 - DNA, 25 bp, Probe sequence
gttacattagcgatgatttatttaa

SEQ ID NO: 145559 - DNA, 25 bp, Probe sequence
gtattgcaggtcgcttactaaacta

SEQ ID NO: 145560 - DNA, 25 bp, Probe sequence
gtatcagaatcatgtcatggcggta

SEQ ID NO: 145561 - DNA, 25 bp, Probe sequence
gtagcaccaaattatcaaggtcagg

SEQ ID NO: 145562 - DNA, 25 bp, Probe sequence
gtaacgttaacatgtcgagaatcat

SEQ ID NO: 145563 - DNA, 25 bp, Probe sequence
gtcagggtattgcaggtcgcttact

SEQ ID NO: 145564 - DNA, 25 bp, Probe sequence
gtcataaaagagcgttacattagcg

SEQ ID NO: 145565 - DNA, 25 bp, Probe sequence
ggcggtattaaatggtataaccttg

SEQ ID NO: 145566 - DNA, 25 bp, Probe sequence
gtgttaggtcttgttgtagcaccaa

SEQ ID NO: 145567 - DNA, 25 bp, Probe sequence
gggtattgcaggtcgcttactaaac

SEQ ID NO: 145568 - DNA, 25 bp, Probe sequence
ggtcttgttgtagcaccaaattatc

SEQ ID NO: 145569 - DNA, 25 bp, Probe sequence
ggtgtatcagaatcatgtcatggcg

SEQ ID NO: 145570 - DNA, 25 bp, Probe sequence
ggtttttcaccggaagaagctgcaa

SEQ ID NO: 145571 - DNA, 25 bp, Probe sequence
tgcaggtcgcttactaaactatttt

SEQ ID NO: 145572 - DNA, 25 bp, Probe sequence
tcaagaaacttttattgtagctgaa

SEQ ID NO: 145573 - DNA, 25 bp, Probe sequence
taacatgtcgagaatcattaatttc

SEQ ID NO: 145574 - DNA, 25 bp, Probe sequence
tagtgtgttaggtcttgttgtagca

SEQ ID NO: 145575 - DNA, 25 bp, Probe sequence
tattggtttttcaccggaagaagct

SEQ ID NO: 145576 - DNA, 25 bp, Probe sequence
ttttcaccggaagaagctgcaacac

SEQ ID NO: 145577 - DNA, 25 bp, Probe sequence
gccaggaaaagtgaagtcgtttttg

SEQ ID NO: 145578 - DNA, 25 bp, Probe sequence
attgtagcgacacctcatcatttgc

SEQ ID NO: 145579 - DNA, 25 bp, Probe sequence
agtattcaaggtattaatcgttcga

SEQ ID NO: 145580 - DNA, 25 bp, Probe sequence
acataccaatcattgcacatcctga

SEQ ID NO: 145581 - DNA, 25 bp, Probe sequence
acacctcatcatttgcatccgagat

SEQ ID NO: 145582 - DNA, 25 bp, Probe sequence
acaagtattgtagcgacacctcatc

SEQ ID NO: 145583 - DNA, 25 bp, Probe sequence
aacattcaaaagttatcattacaat

SEQ ID NO: 145584 - DNA, 25 bp, Probe sequence
aacgcatccagaagttcaagcattg

SEQ ID NO: 145585 - DNA, 25 bp, Probe sequence
aagtgcttgtgaaattggcggagtt

SEQ ID NO: 145586 - DNA, 25 bp, Probe sequence
aaggcttagataatggtagtattca

SEQ ID NO: 145587 - DNA, 25 bp, Probe sequence
aatgccagttcagtaatcaatgata

SEQ ID NO: 145588 - DNA, 25 bp, Probe sequence
aatcattgcacatcctgaaagaaat

SEQ ID NO: 145589 - DNA, 25 bp, Probe sequence
cattacttcgaaatgccagttcagt

SEQ ID NO: 145590 - DNA, 25 bp, Probe sequence
cgagttctttagttggtggatttgg

SEQ ID NO: 145591 - DNA, 25 bp, Probe sequence
cctcatcatttgcatccgagatatg

SEQ ID NO: 145592 - DNA, 25 bp, Probe sequence
gcatccgagatatgataatacattt

SEQ ID NO: 145593 - DNA, 25 bp, Probe sequence
gcacattcatgtgaccaaagaccat

SEQ ID NO: 145594 - DNA, 25 bp, Probe sequence
gaaatagaagtatcgccaaaaatcc

SEQ ID NO: 145595 - DNA, 25 bp, Probe sequence
gaccaaagaccatttttgatgcaag

SEQ ID NO: 145596 - DNA, 25 bp, Probe sequence
gagtcaattaacatcgagttcttta

SEQ ID NO: 145597 - DNA, 25 bp, Probe sequence
gagtattgcactattaaagcaagct

SEQ ID NO: 145598 - DNA, 25 bp, Probe sequence
gatgcaagaattatttcacaatcat

SEQ ID NO: 145599 - DNA, 25 bp, Probe sequence
gatattaaattatttcccgggcaag

SEQ ID NO: 145600 - DNA, 25 bp, Probe sequence
gtagcttcagatgcacattcatgtg

SEQ ID NO: 145601 - DNA, 25 bp, Probe sequence
gtaatttggctcattttgtagcttc

SEQ ID NO: 145602 - DNA, 25 bp, Probe sequence
tggcggagttaagaacgcatccaga

SEQ ID NO: 145603 - DNA, 25 bp, Probe sequence
ggcgaagtaccacattatacaaaac

SEQ ID NO: 145604 - DNA, 25 bp, Probe sequence
ggctcattttgtagcttcagatgca

SEQ ID NO: 145605 - DNA, 25 bp, Probe sequence
tgaatttccaacgggcgaagtacca

SEQ ID NO: 145606 - DNA, 25 bp, Probe sequence
tccaacgggcgaagtaccacattat

SEQ ID NO: 145607 - DNA, 25 bp, Probe sequence
tcccgggcaagaaattagaattaca

SEQ ID NO: 145608 - DNA, 25 bp, Probe sequence
taatacatttcaacaagtgcttgtg

SEQ ID NO: 145609 - DNA, 25 bp, Probe sequence
tagacagaccgactaagccaggaaa

SEQ ID NO: 145610 - DNA, 25 bp, Probe sequence
tagttgatatagatgatggtcctaa

SEQ ID NO: 145611 - DNA, 25 bp, Probe sequence
gtagacggggatatgcgtaaaccta

SEQ ID NO: 145612 - DNA, 25 bp, Probe sequence
attggtcaacttatcaagacagtat

SEQ ID NO: 145613 - DNA, 25 bp, Probe sequence
attgcagcaaatttagcagttgcat

SEQ ID NO: 145614 - DNA, 25 bp, Probe sequence
attatcgatacgccaccagtgaaca

SEQ ID NO: 145615 - DNA, 25 bp, Probe sequence
attatgtttgcaaatcctgacagtg

SEQ ID NO: 145616 - DNA, 25 bp, Probe sequence
atttgtatgacacattattgatgaa

SEQ ID NO: 145617 - DNA, 25 bp, Probe sequence
atgcatattatgggactgatgaatc

SEQ ID NO: 145618 - DNA, 25 bp, Probe sequence
aggtaagtctacaattgcagcaaat

SEQ ID NO: 145619 - DNA, 25 bp, Probe sequence
agtttaccggcaatgttgtctacgt

SEQ ID NO: 145620 - DNA, 25 bp, Probe sequence
aaatcctgacagtgcagttcaaagc

SEQ ID NO: 145621 - DNA, 25 bp, Probe sequence
aaagtgctagttactatgcatatta

SEQ ID NO: 145622 - DNA, 25 bp, Probe sequence
aagtcacctattagcgagaaatttc

SEQ ID NO: 145623 - DNA, 25 bp, Probe sequence
caaccaaagtcacctattagcgaga

SEQ ID NO: 145624 - DNA, 25 bp, Probe sequence
cttcagaggcaccaggcgcaggtaa

SEQ ID NO: 145625 - DNA, 25 bp, Probe sequence
ccggcaatgttgtctacgtagttaa

SEQ ID NO: 145626 - DNA, 25 bp, Probe sequence
gcgcaattattttcaaagtttaccg

SEQ ID NO: 145627 - DNA, 25 bp, Probe sequence
gcattgtaatcacttcagaggcacc

SEQ ID NO: 145628 - DNA, 25 bp, Probe sequence
gaaggcctatcaagtttattgctaa

SEQ ID NO: 145629 - DNA, 25 bp, Probe sequence
gaacaaccaaagtcacctattagcg

SEQ ID NO: 145630 - DNA, 25 bp, Probe sequence
gacagtgcagttcaaagcattgtaa

SEQ ID NO: 145631 - DNA, 25 bp, Probe sequence
gacgaatacacgaagaagtacatca

SEQ ID NO: 145632 - DNA, 25 bp, Probe sequence
gagaaatttcgaggcataagatcaa

SEQ ID NO: 145633 - DNA, 25 bp, Probe sequence
gatacgccaccagtgaacacagtta

SEQ ID NO: 145634 - DNA, 25 bp, Probe sequence
gttacagatgcgcaattattttcaa

SEQ ID NO: 145635 - DNA, 25 bp, Probe sequence
gtttattgctaaattggtcaactta

SEQ ID NO: 145636 - DNA, 25 bp, Probe sequence
gtacatcaagtttaattgtccatga

SEQ ID NO: 145637 - DNA, 25 bp, Probe sequence
gtccatgaacaaccaaagtcaccta

SEQ ID NO: 145638 - DNA, 25 bp, Probe sequence
gtgaacacagttacagatgcgcaat

SEQ ID NO: 145639 - DNA, 25 bp, Probe sequence
gggatatgcgtaaacctacgcagca

SEQ ID NO: 145640 - DNA, 25 bp, Probe sequence
ggcaccaggcgcaggtaagtctaca

SEQ ID NO: 145641 - DNA, 25 bp, Probe sequence
ggcgcaggtaagtctacaattgcag

SEQ ID NO: 145642 - DNA, 25 bp, Probe sequence
tgttgtctacgtagttaattcggaa

SEQ ID NO: 145643 - DNA, 25 bp, Probe sequence
taatcacttcagaggcaccaggcgc

SEQ ID NO: 145644 - DNA, 25 bp, Probe sequence
ttatcaagacagtattatctcaact

SEQ ID NO: 145645 - DNA, 25 bp, Probe sequence
attgttggtattgttttagcaatat

SEQ ID NO: 145646 - DNA, 25 bp, Probe sequence
atactttcctcagcacatgataatg

SEQ ID NO: 145647 - DNA, 25 bp, Probe sequence
atgcctaaaattatgagtgttgata

SEQ ID NO: 145648 - DNA, 25 bp, Probe sequence
agtagtttgcagtctgttaatacat

SEQ ID NO: 145649 - DNA, 25 bp, Probe sequence
accggcaatatgtcttgtagtaagt

SEQ ID NO: 145650 - DNA, 25 bp, Probe sequence
actgggaataaatctgaatctgaca

SEQ ID NO: 145651 - DNA, 25 bp, Probe sequence
acatatacggaaattatcaaaagtc

SEQ ID NO: 145652 - DNA, 25 bp, Probe sequence
aaatctgaatctgacaaaattgtta

SEQ ID NO: 145653 - DNA, 25 bp, Probe sequence
aacatgaaaaagtcctcaagtgatt

SEQ ID NO: 145654 - DNA, 25 bp, Probe sequence
aagtcctcaagtgatttagctttcc

SEQ ID NO: 145655 - DNA, 25 bp, Probe sequence
aagtaaccaatcaaacaaactctca

SEQ ID NO: 145656 - DNA, 25 bp, Probe sequence
caaatatactgcttctactcaaata

SEQ ID NO: 145657 - DNA, 25 bp, Probe sequence
gcctgacaaatatactgcttctact

SEQ ID NO: 145658 - DNA, 25 bp, Probe sequence
gcttattttaccggcaatatgtctt

SEQ ID NO: 145659 - DNA, 25 bp, Probe sequence
gcaactaggattacctattttaggt

SEQ ID NO: 145660 - DNA, 25 bp, Probe sequence
gcagtctgttaatacatatacggaa

SEQ ID NO: 145661 - DNA, 25 bp, Probe sequence
gaatcgcaactaggattacctattt

SEQ ID NO: 145662 - DNA, 25 bp, Probe sequence
gaagatgttgaatcgcaactaggat

SEQ ID NO: 145663 - DNA, 25 bp, Probe sequence
gacaaatatactgcttctactcaaa

SEQ ID NO: 145664 - DNA, 25 bp, Probe sequence
gattacctattttaggttcaataca

SEQ ID NO: 145665 - DNA, 25 bp, Probe sequence
gttgaatcgcaactaggattaccta

SEQ ID NO: 145666 - DNA, 25 bp, Probe sequence
gttcaaagtagtttgcagtctgtta

SEQ ID NO: 145667 - DNA, 25 bp, Probe sequence
gttatgcctgacaaatatactgctt

SEQ ID NO: 145668 - DNA, 25 bp, Probe sequence
gtttgcagtctgttaatacatatac

SEQ ID NO: 145669 - DNA, 25 bp, Probe sequence
gtcctcaagtgatttagctttccaa

SEQ ID NO: 145670 - DNA, 25 bp, Probe sequence
gtgatttagctttccaaaatgttca

SEQ ID NO: 145671 - DNA, 25 bp, Probe sequence
tggtcagtattcaacagctgagttg

SEQ ID NO: 145672 - DNA, 25 bp, Probe sequence
taaaagtatctccaatagtatctgt

SEQ ID NO: 145673 - DNA, 25 bp, Probe sequence
taaattattgcttattttaccggca

SEQ ID NO: 145674 - DNA, 25 bp, Probe sequence
tactttcctcagcacatgataatgc

SEQ ID NO: 145675 - DNA, 25 bp, Probe sequence
tttgatggtcagtattcaacagctg

SEQ ID NO: 145676 - DNA, 25 bp, Probe sequence
ttttaccggcaatatgtcttgtagt

SEQ ID NO: 145677 - DNA, 25 bp, Probe sequence
ttagctttccaaaatgttcaaagta

SEQ ID NO: 145678 - DNA, 25 bp, Probe sequence
ttagcaatattgattattttcttaa

SEQ ID NO: 145679 - DNA, 25 bp, Probe sequence
attatctaatacgcctgaggaattt

SEQ ID NO: 145680 - DNA, 25 bp, Probe sequence
attgctgtttcttgaaagttggtat

SEQ ID NO: 145681 - DNA, 25 bp, Probe sequence
atttgagtttattttcgacatcgaa

SEQ ID NO: 145682 - DNA, 25 bp, Probe sequence
atttgaaagcatccttttcgcaaaa

SEQ ID NO: 145683 - DNA, 25 bp, Probe sequence
atacgcctgaggaattttctggaaa

SEQ ID NO: 145684 - DNA, 25 bp, Probe sequence
atgacggtacaacacttgatgatat

SEQ ID NO: 145685 - DNA, 25 bp, Probe sequence
agttggtatttgaaagcatcctttt

SEQ ID NO: 145686 - DNA, 25 bp, Probe sequence
acgcctgaggaattttctggaaata

SEQ ID NO: 145687 - DNA, 25 bp, Probe sequence
acgcaataaccttattttcagagaa

SEQ ID NO: 145688 - DNA, 25 bp, Probe sequence
acaacacttgatgatatagctaaaa

SEQ ID NO: 145689 - DNA, 25 bp, Probe sequence
aaatcgaactattcaattgatgctt

SEQ ID NO: 145690 - DNA, 25 bp, Probe sequence
aaagatgaagtgtattcgctactaa

SEQ ID NO: 145691 - DNA, 25 bp, Probe sequence
aaagcatccttttcgcaaaaatttg

SEQ ID NO: 145692 - DNA, 25 bp, Probe sequence
aaagcgagtttatattaccattttg

SEQ ID NO: 145693 - DNA, 25 bp, Probe sequence
cgcaaaaatttggagcagtggaaga

SEQ ID NO: 145694 - DNA, 25 bp, Probe sequence
cgaactattcaattgatgctttata

SEQ ID NO: 145695 - DNA, 25 bp, Probe sequence
gcatccttttcgcaaaaatttggag

SEQ ID NO: 145696 - DNA, 25 bp, Probe sequence
gaaggggtatgacggtacaacactt

SEQ ID NO: 145697 - DNA, 25 bp, Probe sequence
gaagtgtattcgctactaaatatat

SEQ ID NO: 145698 - DNA, 25 bp, Probe sequence
gaagactttcagaatttaatattgc

SEQ ID NO: 145699 - DNA, 25 bp, Probe sequence
gacatcgaagaaaggtatattagaa

SEQ ID NO: 145700 - DNA, 25 bp, Probe sequence
gatgctttatatcaattcttatttg

SEQ ID NO: 145701 - DNA, 25 bp, Probe sequence
gataacgcaataaccttattttcag

SEQ ID NO: 145702 - DNA, 25 bp, Probe sequence
gatagcaaaattctatgatgaatca

SEQ ID NO: 145703 - DNA, 25 bp, Probe sequence
gttcaattatctaatacgcctgagg

SEQ ID NO: 145704 - DNA, 25 bp, Probe sequence
gttttgattaccttaataatattat

SEQ ID NO: 145705 - DNA, 25 bp, Probe sequence
gtttatattaccattttgactcgaa

SEQ ID NO: 145706 - DNA, 25 bp, Probe sequence
gtattcgctactaaatatatttttg

SEQ ID NO: 145707 - DNA, 25 bp, Probe sequence
ggggtatgacggtacaacacttgat

SEQ ID NO: 145708 - DNA, 25 bp, Probe sequence
ggtatttgaaagcatccttttcgca

SEQ ID NO: 145709 - DNA, 25 bp, Probe sequence
tatattaccattttgactcgaaaaa

SEQ ID NO: 145710 - DNA, 25 bp, Probe sequence
tttctggaaatatttacggacaaat

SEQ ID NO: 145711 - DNA, 25 bp, Probe sequence
ttaatattgctgtttcttgaaagtt

SEQ ID NO: 145712 - DNA, 25 bp, Probe sequence
ttcttatttgagtttattttcgaca

SEQ ID NO: 145713 - DNA, 25 bp, Probe sequence
atggtgcagcacatgcagcaaaata

SEQ ID NO: 145714 - DNA, 25 bp, Probe sequence
agtggtggacaagcacaagcagctg

SEQ ID NO: 145715 - DNA, 25 bp, Probe sequence
agttctgatacagtgcgcacaagag

SEQ ID NO: 145716 - DNA, 25 bp, Probe sequence
agagtagacttcgggttggctcaat

SEQ ID NO: 145717 - DNA, 25 bp, Probe sequence
agcagacttaaatatgtttttccca

SEQ ID NO: 145718 - DNA, 25 bp, Probe sequence
acgcctacaaaacatgattgggatc

SEQ ID NO: 145719 - DNA, 25 bp, Probe sequence
aaatgaacattcgccaagatttaga

SEQ ID NO: 145720 - DNA, 25 bp, Probe sequence
aacgtcgttgaaccctaacattgtg

SEQ ID NO: 145721 - DNA, 25 bp, Probe sequence
aacgctaataacaatctaccttcac

SEQ ID NO: 145722 - DNA, 25 bp, Probe sequence
aagtggcgtcacagcaacagtcaaa

SEQ ID NO: 145723 - DNA, 25 bp, Probe sequence
catacactggtgaagcaacgcacaa

SEQ ID NO: 145724 - DNA, 25 bp, Probe sequence
gcggtcgtgtagattatggtgcagc

SEQ ID NO: 145725 - DNA, 25 bp, Probe sequence
gacgcgtgagggtgcaacagattta

SEQ ID NO: 145726 - DNA, 25 bp, Probe sequence
gaccgcgcagttgaactttattatt

SEQ ID NO: 145727 - DNA, 25 bp, Probe sequence
gatattaatccttcagtgttagctc

SEQ ID NO: 145728 - DNA, 25 bp, Probe sequence
gatttcatcaattactactttagga

SEQ ID NO: 145729 - DNA, 25 bp, Probe sequence
gatttttggcatcatttagcagacg

SEQ ID NO: 145730 - DNA, 25 bp, Probe sequence
gttacagcacaatctattggggatc

SEQ ID NO: 145731 - DNA, 25 bp, Probe sequence
gtttttcccatttgtgattactggt

SEQ ID NO: 145732 - DNA, 25 bp, Probe sequence
gtgcatggtttcaatgggtttacag

SEQ ID NO: 145733 - DNA, 25 bp, Probe sequence
gtgaaaacggtgttgacgaacagca

SEQ ID NO: 145734 - DNA, 25 bp, Probe sequence
gtgttagctcattattggggcggta

SEQ ID NO: 145735 - DNA, 25 bp, Probe sequence
gtgtaggtgcatcttccattttaat

SEQ ID NO: 145736 - DNA, 25 bp, Probe sequence
ggtcaaacgatacgtcaactagaag

SEQ ID NO: 145737 - DNA, 25 bp, Probe sequence
ggattttacgatctgacgcgtgagg

SEQ ID NO: 145738 - DNA, 25 bp, Probe sequence
ggacaaaggaacttactgcaaaagc

SEQ ID NO: 145739 - DNA, 25 bp, Probe sequence
ggaaaccaggacagaaggtacacct

SEQ ID NO: 145740 - DNA, 25 bp, Probe sequence
tggcgaaatttctccactattcaaa

SEQ ID NO: 145741 - DNA, 25 bp, Probe sequence
tcgggttggctcaatggggtctaaa

SEQ ID NO: 145742 - DNA, 25 bp, Probe sequence
tcacaggaggatacagttacagcac

SEQ ID NO: 145743 - DNA, 25 bp, Probe sequence
tttagtatccgttatttcttctcaa

SEQ ID NO: 145744 - DNA, 25 bp, Probe sequence
ttattatatcaaaggcggtcgtgta

SEQ ID NO: 145745 - DNA, 25 bp, Probe sequence
ttcttctcaacatccatttaatcaa

SEQ ID NO: 145746 - DNA, 25 bp, Probe sequence
ttggaagtaactatgaccgcgcagt

SEQ ID NO: 145747 - DNA, 25 bp, Probe sequence
attaatatcatagttgtctttacat

SEQ ID NO: 145748 - DNA, 25 bp, Probe sequence
atatcatagttgtctttacattctt

SEQ ID NO: 145749 - DNA, 25 bp, Probe sequence
atagttgtctttacattctttgtat

SEQ ID NO: 145750 - DNA, 25 bp, Probe sequence
atcatagttgtctttacattctttg

SEQ ID NO: 145751 - DNA, 25 bp, Probe sequence
atgtttgtcgttactacctattaat

SEQ ID NO: 145752 - DNA, 25 bp, Probe sequence
aggaatagatgtcactgttaaagat

SEQ ID NO: 145753 - DNA, 25 bp, Probe sequence
agttatgtttgtcgttactacctat

SEQ ID NO: 145754 - DNA, 25 bp, Probe sequence
agttgtctttacattctttgtattt

SEQ ID NO: 145755 - DNA, 25 bp, Probe sequence
actacctattaatatcatagttgtc

SEQ ID NO: 145756 - DNA, 25 bp, Probe sequence
aactcaggaatagatgtcactgtta

SEQ ID NO: 145757 - DNA, 25 bp, Probe sequence
aatatcatagttgtctttacattct

SEQ ID NO: 145758 - DNA, 25 bp, Probe sequence
catagttgtctttacattctttgta

SEQ ID NO: 145759 - DNA, 25 bp, Probe sequence
ctttacattctttgtatttatacta

SEQ ID NO: 145760 - DNA, 25 bp, Probe sequence
gcaactcaggaatagatgtcactgt

SEQ ID NO: 145761 - DNA, 25 bp, Probe sequence
gaatagatgtcactgttaaagatgt

SEQ ID NO: 145762 - DNA, 25 bp, Probe sequence
gagcaactcaggaatagatgtcact

SEQ ID NO: 145763 - DNA, 25 bp, Probe sequence
gttgtctttacattctttgtattta

SEQ ID NO: 145764 - DNA, 25 bp, Probe sequence
gttactacctattaatatcatagtt

SEQ ID NO: 145765 - DNA, 25 bp, Probe sequence
gttatgtttgtcgttactacctatt

SEQ ID NO: 145766 - DNA, 25 bp, Probe sequence
gtttgtcgttactacctattaatat

SEQ ID NO: 145767 - DNA, 25 bp, Probe sequence
gtctttacattctttgtatttatac

SEQ ID NO: 145768 - DNA, 25 bp, Probe sequence
gtcgttactacctattaatatcata

SEQ ID NO: 145769 - DNA, 25 bp, Probe sequence
tgtcgttactacctattaatatcat

SEQ ID NO: 145770 - DNA, 25 bp, Probe sequence
tgtttgtcgttactacctattaata

SEQ ID NO: 145771 - DNA, 25 bp, Probe sequence
tcatagttgtctttacattctttgt

SEQ ID NO: 145772 - DNA, 25 bp, Probe sequence
tacattctttgtatttatactataa

SEQ ID NO: 145773 - DNA, 25 bp, Probe sequence
tagttgtctttacattctttgtatt

SEQ ID NO: 145774 - DNA, 25 bp, Probe sequence
tatgtttgtcgttactacctattaa

SEQ ID NO: 145775 - DNA, 25 bp, Probe sequence
tatcatagttgtctttacattcttt

SEQ ID NO: 145776 - DNA, 25 bp, Probe sequence
tttgtcgttactacctattaatatc

SEQ ID NO: 145777 - DNA, 25 bp, Probe sequence
ttatgtttgtcgttactacctatta

SEQ ID NO: 145778 - DNA, 25 bp, Probe sequence
ttaatatcatagttgtctttacatt

SEQ ID NO: 145779 - DNA, 25 bp, Probe sequence
ttgtcgttactacctattaatatca

SEQ ID NO: 145780 - DNA, 25 bp, Probe sequence
ttgtctttacattctttgtatttat

SEQ ID NO: 145781 - DNA, 25 bp, Probe sequence
attactgtagtaaatgacactggcg

SEQ ID NO: 145782 - DNA, 25 bp, Probe sequence
atctcaacaagtggaacatttagtg

SEQ ID NO: 145783 - DNA, 25 bp, Probe sequence
atctcccttatctcaacaagtggaa

SEQ ID NO: 145784 - DNA, 25 bp, Probe sequence
atgacttacacgactctgaaatctc

SEQ ID NO: 145785 - DNA, 25 bp, Probe sequence
atggtgaacatgcagttttatcacg

SEQ ID NO: 145786 - DNA, 25 bp, Probe sequence
agcatctaaaggtcccaaagcttag

SEQ ID NO: 145787 - DNA, 25 bp, Probe sequence
acctaaatgacttacacgactctga

SEQ ID NO: 145788 - DNA, 25 bp, Probe sequence
acttacacgactctgaaatctccct

SEQ ID NO: 145789 - DNA, 25 bp, Probe sequence
acttagcgcctgatgaattagaaaa

SEQ ID NO: 145790 - DNA, 25 bp, Probe sequence
aaattacacctaaatgacttacacg

SEQ ID NO: 145791 - DNA, 25 bp, Probe sequence
aaatctcccttatctcaacaagtgg

SEQ ID NO: 145792 - DNA, 25 bp, Probe sequence
aaatgacttacacgactctgaaatc

SEQ ID NO: 145793 - DNA, 25 bp, Probe sequence
aactgttaacaggagaagatggtga

SEQ ID NO: 145794 - DNA, 25 bp, Probe sequence
aagatggtgaacatgcagttttatc

SEQ ID NO: 145795 - DNA, 25 bp, Probe sequence
caacttagcgcctgatgaattagaa

SEQ ID NO: 145796 - DNA, 25 bp, Probe sequence
ctgaaatctcccttatctcaacaag

SEQ ID NO: 145797 - DNA, 25 bp, Probe sequence
cccttatctcaacaagtggaacatt

SEQ ID NO: 145798 - DNA, 25 bp, Probe sequence
gctgaagcatctaaaggtcccaaag

SEQ ID NO: 145799 - DNA, 25 bp, Probe sequence
gaatcagagctaacaattattagta

SEQ ID NO: 145800 - DNA, 25 bp, Probe sequence
gaagcatctaaaggtcccaaagctt

SEQ ID NO: 145801 - DNA, 25 bp, Probe sequence
gaaatctcccttatctcaacaagtg

SEQ ID NO: 145802 - DNA, 25 bp, Probe sequence
gacactggcgaattatacaacgtaa

SEQ ID NO: 145803 - DNA, 25 bp, Probe sequence
gacttacacgactctgaaatctccc

SEQ ID NO: 145804 - DNA, 25 bp, Probe sequence
gtaaatgacactggcgaattataca

SEQ ID NO: 145805 - DNA, 25 bp, Probe sequence
ggcgaattatacaacgtaatcaatc

SEQ ID NO: 145806 - DNA, 25 bp, Probe sequence
tgaaggttatttagaatcagagcta

SEQ ID NO: 145807 - DNA, 25 bp, Probe sequence
tctgaaatctcccttatctcaacaa

SEQ ID NO: 145808 - DNA, 25 bp, Probe sequence
tctcccttatctcaacaagtggaac

SEQ ID NO: 145809 - DNA, 25 bp, Probe sequence
tacaacttagcgcctgatgaattag

SEQ ID NO: 145810 - DNA, 25 bp, Probe sequence
tacacctaaatgacttacacgactc

SEQ ID NO: 145811 - DNA, 25 bp, Probe sequence
tataaacaacttattttagacgata

SEQ ID NO: 145812 - DNA, 25 bp, Probe sequence
tatacaacgtaatcaatcaaaagaa

SEQ ID NO: 145813 - DNA, 25 bp, Probe sequence
tttgctgaagcatctaaaggtccca

SEQ ID NO: 145814 - DNA, 25 bp, Probe sequence
ttacacgactctgaaatctccctta

SEQ ID NO: 145815 - DNA, 25 bp, Probe sequence
atcgtattcatatcgtcgacttgat

SEQ ID NO: 145816 - DNA, 25 bp, Probe sequence
atgcccgagagtttgattatattaa

SEQ ID NO: 145817 - DNA, 25 bp, Probe sequence
atgattgaattatggccagcgattg

SEQ ID NO: 145818 - DNA, 25 bp, Probe sequence
agtcaatttgaatgtgtgaatcgta

SEQ ID NO: 145819 - DNA, 25 bp, Probe sequence
acgaagtcacaaatcatggactact

SEQ ID NO: 145820 - DNA, 25 bp, Probe sequence
acaagtgtgaggttaacagagggta

SEQ ID NO: 145821 - DNA, 25 bp, Probe sequence
aaatgttcacgctgctattatagga

SEQ ID NO: 145822 - DNA, 25 bp, Probe sequence
aactggtcaattagtaaaggcaacg

SEQ ID NO: 145823 - DNA, 25 bp, Probe sequence
aagatggcaaaatgtccggacctaa

SEQ ID NO: 145824 - DNA, 25 bp, Probe sequence
caaatcatggactactttgccgcag

SEQ ID NO: 145825 - DNA, 25 bp, Probe sequence
catatcgtcgacttgataggtgcta

SEQ ID NO: 145826 - DNA, 25 bp, Probe sequence
cgctaaatgttcacgctgctattat

SEQ ID NO: 145827 - DNA, 25 bp, Probe sequence
gcgtcgctaaatgttcacgctgcta

SEQ ID NO: 145828 - DNA, 25 bp, Probe sequence
gctattataggaaaggctgcacatc

SEQ ID NO: 145829 - DNA, 25 bp, Probe sequence
gcaaaatgtccggacctaactttga

SEQ ID NO: 145830 - DNA, 25 bp, Probe sequence
gaattatggccagcgattgatttga

SEQ ID NO: 145831 - DNA, 25 bp, Probe sequence
gaacggatgggaagaggacacagag

SEQ ID NO: 145832 - DNA, 25 bp, Probe sequence
gacatcagcaagatattcaacgatt

SEQ ID NO: 145833 - DNA, 25 bp, Probe sequence
gagatggcacatacatttccaggtc

SEQ ID NO: 145834 - DNA, 25 bp, Probe sequence
gaggagattaacaaccaaagatatt

SEQ ID NO: 145835 - DNA, 25 bp, Probe sequence
gatattgaagtaggtggtggcattc

SEQ ID NO: 145836 - DNA, 25 bp, Probe sequence
gatattcaacgattagcgtcgctaa

SEQ ID NO: 145837 - DNA, 25 bp, Probe sequence
gattgggtcaacaagtgtgaggtta

SEQ ID NO: 145838 - DNA, 25 bp, Probe sequence
gtattgcttactatagtcaatttga

SEQ ID NO: 145839 - DNA, 25 bp, Probe sequence
gtcgacttgataggtgctaaggcac

SEQ ID NO: 145840 - DNA, 25 bp, Probe sequence
gtgaatcgtattcatatcgtcgact

SEQ ID NO: 145841 - DNA, 25 bp, Probe sequence
ggtggtattagacatcagcaagata

SEQ ID NO: 145842 - DNA, 25 bp, Probe sequence
ggagaagatattaaagtgaacggat

SEQ ID NO: 145843 - DNA, 25 bp, Probe sequence
ggccagcgattgatttgattgggtc

SEQ ID NO: 145844 - DNA, 25 bp, Probe sequence
tccggacctaactttgaattaactg

SEQ ID NO: 145845 - DNA, 25 bp, Probe sequence
tcggctgaagaaagtattgcttact

SEQ ID NO: 145846 - DNA, 25 bp, Probe sequence
taattattgcatagttggaacgaaa

SEQ ID NO: 145847 - DNA, 25 bp, Probe sequence
taggaaaggctgcacatcaagcatc

SEQ ID NO: 145848 - DNA, 25 bp, Probe sequence
ttagtaaaggcaacgacgattcctg

SEQ ID NO: 145849 - DNA, 25 bp, Probe sequence
attggtattcaattccatcctgaaa

SEQ ID NO: 145850 - DNA, 25 bp, Probe sequence
attttaaagatgcgatgtcagagat

SEQ ID NO: 145851 - DNA, 25 bp, Probe sequence
atttgtttaggcatgcaattaatgt

SEQ ID NO: 145852 - DNA, 25 bp, Probe sequence
atctggattagggtttatcccagga

SEQ ID NO: 145853 - DNA, 25 bp, Probe sequence
atcccaggaaatatttcgcgtatcc

SEQ ID NO: 145854 - DNA, 25 bp, Probe sequence
atcgatcaagcagaaacaatcatat

SEQ ID NO: 145855 - DNA, 25 bp, Probe sequence
atgaaggcgatgcatctggattagg

SEQ ID NO: 145856 - DNA, 25 bp, Probe sequence
atgattgtcatcgttgattatggat

SEQ ID NO: 145857 - DNA, 25 bp, Probe sequence
atgggttacaaattttgcgtcaggc

SEQ ID NO: 145858 - DNA, 25 bp, Probe sequence
aggcgatgcatctggattagggttt

SEQ ID NO: 145859 - DNA, 25 bp, Probe sequence
aaataatcgatcaagcagaaacaat

SEQ ID NO: 145860 - DNA, 25 bp, Probe sequence
aaagcggtacatatgggttacaaat

SEQ ID NO: 145861 - DNA, 25 bp, Probe sequence
aatatttcgcgtatccaaacagaat

SEQ ID NO: 145862 - DNA, 25 bp, Probe sequence
caggaaatatttcgcgtatccaaac

SEQ ID NO: 145863 - DNA, 25 bp, Probe sequence
gcgatgcatctggattagggtttat

SEQ ID NO: 145864 - DNA, 25 bp, Probe sequence
gcaatattggctaagaatactgata

SEQ ID NO: 145865 - DNA, 25 bp, Probe sequence
gaaggcgatgcatctggattagggt

SEQ ID NO: 145866 - DNA, 25 bp, Probe sequence
gaaatatttcgcgtatccaaacaga

SEQ ID NO: 145867 - DNA, 25 bp, Probe sequence
gattagggtttatcccaggaaatat

SEQ ID NO: 145868 - DNA, 25 bp, Probe sequence
gtatccaaacagaatacccagtgcc

SEQ ID NO: 145869 - DNA, 25 bp, Probe sequence
gtatgagcatagtgatgaaggcgat

SEQ ID NO: 145870 - DNA, 25 bp, Probe sequence
gtcatcgttgattatggattaggga

SEQ ID NO: 145871 - DNA, 25 bp, Probe sequence
gtcaggcaatacaagggggatttat

SEQ ID NO: 145872 - DNA, 25 bp, Probe sequence
gggtatgaggtggttgtctcaaata

SEQ ID NO: 145873 - DNA, 25 bp, Probe sequence
gggttacaaattttgcgtcaggcaa

SEQ ID NO: 145874 - DNA, 25 bp, Probe sequence
ggtttatcccaggaaatatttcgcg

SEQ ID NO: 145875 - DNA, 25 bp, Probe sequence
ggtattcaattccatcctgaaaaaa

SEQ ID NO: 145876 - DNA, 25 bp, Probe sequence
tgcgtcaggcaatacaagggggatt

SEQ ID NO: 145877 - DNA, 25 bp, Probe sequence
tgcatctggattagggtttatccca

SEQ ID NO: 145878 - DNA, 25 bp, Probe sequence
tcaattccatcctgaaaaaagcggt

SEQ ID NO: 145879 - DNA, 25 bp, Probe sequence
taggcatgcaattaatgtatgagca

SEQ ID NO: 145880 - DNA, 25 bp, Probe sequence
tatattggtattcaattccatcctg

SEQ ID NO: 145881 - DNA, 25 bp, Probe sequence
ttcgcgtatccaaacagaataccca

SEQ ID NO: 145882 - DNA, 25 bp, Probe sequence
ttccatcctgaaaaaagcggtacat

SEQ ID NO: 145883 - DNA, 25 bp, Probe sequence
gttggtacgtttgatacggagttag

SEQ ID NO: 145884 - DNA, 25 bp, Probe sequence
attggccaattgttacttgaaatga

SEQ ID NO: 145885 - DNA, 25 bp, Probe sequence
attagcacgtgtcgttgtggatata

SEQ ID NO: 145886 - DNA, 25 bp, Probe sequence
atagcgctaactgcaactgatgatc

SEQ ID NO: 145887 - DNA, 25 bp, Probe sequence
atcgcatattaatacaggtgtgggc

SEQ ID NO: 145888 - DNA, 25 bp, Probe sequence
agtcaccatcgcatattaatacagg

SEQ ID NO: 145889 - DNA, 25 bp, Probe sequence
actgatgatcagcgtgtgccgtcat

SEQ ID NO: 145890 - DNA, 25 bp, Probe sequence
agcgtgtgccgtcatcgaaaggtgt

SEQ ID NO: 145891 - DNA, 25 bp, Probe sequence
acacaccatgaaattgaagctatat

SEQ ID NO: 145892 - DNA, 25 bp, Probe sequence
aacattagcacgtgtcgttgtggat

SEQ ID NO: 145893 - DNA, 25 bp, Probe sequence
cagcgtgtgccgtcatcgaaaggtg

SEQ ID NO: 145894 - DNA, 25 bp, Probe sequence
cgttcgttatggaacgatgtacatt

SEQ ID NO: 145895 - DNA, 25 bp, Probe sequence
cgcatattgatttaattcgtggagg

SEQ ID NO: 145896 - DNA, 25 bp, Probe sequence
gcgctaactgcaactgatgatcagc

SEQ ID NO: 145897 - DNA, 25 bp, Probe sequence
gccgtcatcgaaaggtgtgattgaa

SEQ ID NO: 145898 - DNA, 25 bp, Probe sequence
gcaagattaacaacgcatattgatt

SEQ ID NO: 145899 - DNA, 25 bp, Probe sequence
gaaacattagcacgtgtcgttgtgg

SEQ ID NO: 145900 - DNA, 25 bp, Probe sequence
gtgcattaggcatagcgctaactgc

SEQ ID NO: 145901 - DNA, 25 bp, Probe sequence
gtgtcgttgtggatataagtgggcg

SEQ ID NO: 145902 - DNA, 25 bp, Probe sequence
gtgtgggctttttaaatcatatgtt

SEQ ID NO: 145903 - DNA, 25 bp, Probe sequence
gtgtgccgtcatcgaaaggtgtgat

SEQ ID NO: 145904 - DNA, 25 bp, Probe sequence
ggtacgtttgatacggagttagtag

SEQ ID NO: 145905 - DNA, 25 bp, Probe sequence
ggatgaaacattagcacgtgtcgtt

SEQ ID NO: 145906 - DNA, 25 bp, Probe sequence
ggaggtaatacacaccatgaaattg

SEQ ID NO: 145907 - DNA, 25 bp, Probe sequence
ggcatagcgctaactgcaactgatg

SEQ ID NO: 145908 - DNA, 25 bp, Probe sequence
ggccaattgttacttgaaatgatta

SEQ ID NO: 145909 - DNA, 25 bp, Probe sequence
tgtggatataagtgggcgcccatac

SEQ ID NO: 145910 - DNA, 25 bp, Probe sequence
tgatgatcagcgtgtgccgtcatcg

SEQ ID NO: 145911 - DNA, 25 bp, Probe sequence
tacaggtgtgggctttttaaatcat

SEQ ID NO: 145912 - DNA, 25 bp, Probe sequence
taaaaagcatttcgttcgttatgga

SEQ ID NO: 145913 - DNA, 25 bp, Probe sequence
taggcatagcgctaactgcaactga

SEQ ID NO: 145914 - DNA, 25 bp, Probe sequence
ttttcccgtgcattaggcatagcgc

SEQ ID NO: 145915 - DNA, 25 bp, Probe sequence
ttcccgtgcattaggcatagcgcta

SEQ ID NO: 145916 - DNA, 25 bp, Probe sequence
ttcgtggaggtaatacacaccatga

SEQ ID NO: 145917 - DNA, 25 bp, Probe sequence
atatttgatacacatgttgcagata

SEQ ID NO: 145918 - DNA, 25 bp, Probe sequence
atatccattaaatgtatttacgcta

SEQ ID NO: 145919 - DNA, 25 bp, Probe sequence
ataacccttcaggcaagcaatttga

SEQ ID NO: 145920 - DNA, 25 bp, Probe sequence
atgcaacgacagttagctgagcagt

SEQ ID NO: 145921 - DNA, 25 bp, Probe sequence
atgtatcaagcatatgcggcacaag

SEQ ID NO: 145922 - DNA, 25 bp, Probe sequence
acggcatttttaacagctattgcag

SEQ ID NO: 145923 - DNA, 25 bp, Probe sequence
acaaccatcattttttattatgagt

SEQ ID NO: 145924 - DNA, 25 bp, Probe sequence
aaatgaaagtccagttacgccgttg

SEQ ID NO: 145925 - DNA, 25 bp, Probe sequence
aaatcgtgaaattgcatttgtagat

SEQ ID NO: 145926 - DNA, 25 bp, Probe sequence
aaaacaatgacgtctattattagtg

SEQ ID NO: 145927 - DNA, 25 bp, Probe sequence
aacgaaaatcgatgaagtacaacca

SEQ ID NO: 145928 - DNA, 25 bp, Probe sequence
aatagaacatccatatccattaaat

SEQ ID NO: 145929 - DNA, 25 bp, Probe sequence
aatttatatcctgatgcagcatatg

SEQ ID NO: 145930 - DNA, 25 bp, Probe sequence
caatgacgtctattattagtgcaac

SEQ ID NO: 145931 - DNA, 25 bp, Probe sequence
cctgatgcagcatatgaacaattca

SEQ ID NO: 145932 - DNA, 25 bp, Probe sequence
gcggcacaagtaaatcgtgaaattg

SEQ ID NO: 145933 - DNA, 25 bp, Probe sequence
gcttatgctaagttttacggattat

SEQ ID NO: 145934 - DNA, 25 bp, Probe sequence
gcatatgcggcacaagtaaatcgtg

SEQ ID NO: 145935 - DNA, 25 bp, Probe sequence
gcaacgccatataatttatatcctg

SEQ ID NO: 145936 - DNA, 25 bp, Probe sequence
gcaagcaatttgatacggcattttt

SEQ ID NO: 145937 - DNA, 25 bp, Probe sequence
gaagtacaaccatcattttttatta

SEQ ID NO: 145938 - DNA, 25 bp, Probe sequence
tgaaagtccagttacgccgttggat

SEQ ID NO: 145939 - DNA, 25 bp, Probe sequence
gaacaattcaaggaagcttatgcta

SEQ ID NO: 145940 - DNA, 25 bp, Probe sequence
gacagttagctgagcagttaaaaca

SEQ ID NO: 145941 - DNA, 25 bp, Probe sequence
gagtaatccacataacccttcaggc

SEQ ID NO: 145942 - DNA, 25 bp, Probe sequence
gatacggcatttttaacagctattg

SEQ ID NO: 145943 - DNA, 25 bp, Probe sequence
gtaatccacataacccttcaggcaa

SEQ ID NO: 145944 - DNA, 25 bp, Probe sequence
gtcattgatgaagcatatttagatt

SEQ ID NO: 145945 - DNA, 25 bp, Probe sequence
tccacataacccttcaggcaagcaa

SEQ ID NO: 145946 - DNA, 25 bp, Probe sequence
tcagatttaacgtttgatttggaaa

SEQ ID NO: 145947 - DNA, 25 bp, Probe sequence
tattgcgacttatatttttagacat

SEQ ID NO: 145948 - DNA, 25 bp, Probe sequence
ttagtgcaacgccatataatttata

SEQ ID NO: 145949 - DNA, 25 bp, Probe sequence
ttacgctaaatattgcgacttatat

SEQ ID NO: 145950 - DNA, 25 bp, Probe sequence
ttaacagctattgcagataagatga

SEQ ID NO: 145951 - DNA, 25 bp, Probe sequence
attcgcgatatttgtcaggaagtta

SEQ ID NO: 145952 - DNA, 25 bp, Probe sequence
atcgcgcctgaacatgcgtcgattc

SEQ ID NO: 145953 - DNA, 25 bp, Probe sequence
atccaattattcgcgatatttgtca

SEQ ID NO: 145954 - DNA, 25 bp, Probe sequence
atgttgaagcattatacaatcacca

SEQ ID NO: 145955 - DNA, 25 bp, Probe sequence
agaacagctagatttaccaatgggt

SEQ ID NO: 145956 - DNA, 25 bp, Probe sequence
agaacatgatgaattagcacgtaca

SEQ ID NO: 145957 - DNA, 25 bp, Probe sequence
aaagcattgcctaatgtggacagat

SEQ ID NO: 145958 - DNA, 25 bp, Probe sequence
aaacagtaaatcctcaaccatatat

SEQ ID NO: 145959 - DNA, 25 bp, Probe sequence
aacatgcgtcgattcaaacagtaaa

SEQ ID NO: 145960 - DNA, 25 bp, Probe sequence
aagttgataagattgtaggtccagg

SEQ ID NO: 145961 - DNA, 25 bp, Probe sequence
aagtatcgctaatcaacactacctt

SEQ ID NO: 145962 - DNA, 25 bp, Probe sequence
aatcaacactaccttatccatgcta

SEQ ID NO: 145963 - DNA, 25 bp, Probe sequence
cagtctattttaatacgtcagtctt

SEQ ID NO: 145964 - DNA, 25 bp, Probe sequence
ctaccttatccatgctagtaatttt

SEQ ID NO: 145965 - DNA, 25 bp, Probe sequence
gcattgtttattggacattattcgc

SEQ ID NO: 145966 - DNA, 25 bp, Probe sequence
gcagatttagatgccatcgtatatg

SEQ ID NO: 145967 - DNA, 25 bp, Probe sequence
gaagatgcgcaagtccttaaagatt

SEQ ID NO: 145968 - DNA, 25 bp, Probe sequence
gaagcaccattagatgagtcattgt

SEQ ID NO: 145969 - DNA, 25 bp, Probe sequence
gaaatataccatccactagaaagtg

SEQ ID NO: 145970 - DNA, 25 bp, Probe sequence
gacattgtttctaaaagtatcgcta

SEQ ID NO: 145971 - DNA, 25 bp, Probe sequence
gacattattcgccagaggtcatagg

SEQ ID NO: 145972 - DNA, 25 bp, Probe sequence
gagtcattgtatccaattattcgcg

SEQ ID NO: 145973 - DNA, 25 bp, Probe sequence
gatttcttaacacggaacacggtca

SEQ ID NO: 145974 - DNA, 25 bp, Probe sequence
gatttaccaatgggttatcggtcaa

SEQ ID NO: 145975 - DNA, 25 bp, Probe sequence
gattcagcacaacatattgctcatg

SEQ ID NO: 145976 - DNA, 25 bp, Probe sequence
gtattacctacaaatagaacagcta

SEQ ID NO: 145977 - DNA, 25 bp, Probe sequence
gtggacagatacgacattgtttcta

SEQ ID NO: 145978 - DNA, 25 bp, Probe sequence
gggttatcggtcaatgatttcttaa

SEQ ID NO: 145979 - DNA, 25 bp, Probe sequence
tgaatacaatcgcgcctgaacatgc

SEQ ID NO: 145980 - DNA, 25 bp, Probe sequence
taaagcagcatttgacacattagat

SEQ ID NO: 145981 - DNA, 25 bp, Probe sequence
tagaatcacgtattgctaaagcatt

SEQ ID NO: 145982 - DNA, 25 bp, Probe sequence
tataatctaacattcgatcatacga

SEQ ID NO: 145983 - DNA, 25 bp, Probe sequence
ttgccaatgcttaatgcacaacaat

SEQ ID NO: 145984 - DNA, 25 bp, Probe sequence
ttggtggtgctcaaagtattgctgc

SEQ ID NO: 145985 - DNA, 25 bp, Probe sequence
atcgttcaaacaggtactacgctaa

SEQ ID NO: 145986 - DNA, 25 bp, Probe sequence
atttattcgctctttggaggtgtct

SEQ ID NO: 145987 - DNA, 25 bp, Probe sequence
gtcattttgcggttgcagcgaaacc

SEQ ID NO: 145988 - DNA, 25 bp, Probe sequence
agtgacgtgccaatctatgtggaac

SEQ ID NO: 145989 - DNA, 25 bp, Probe sequence
agcaatttattcgctctttggaggt

SEQ ID NO: 145990 - DNA, 25 bp, Probe sequence
acgctaaaagcgaacggactggttg

SEQ ID NO: 145991 - DNA, 25 bp, Probe sequence
aaatcgcaacgagttatgttcatac

SEQ ID NO: 145992 - DNA, 25 bp, Probe sequence
caaacaggtactacgctaaaagcga

SEQ ID NO: 145993 - DNA, 25 bp, Probe sequence
cgaccaattatcgtaaaatcgcaac

SEQ ID NO: 145994 - DNA, 25 bp, Probe sequence
cgctctttggaggtgtctattgcca

SEQ ID NO: 145995 - DNA, 25 bp, Probe sequence
gccttttggagcatgtcattttgcg

SEQ ID NO: 145996 - DNA, 25 bp, Probe sequence
gcgaaacctgaaacgaccaattatc

SEQ ID NO: 145997 - DNA, 25 bp, Probe sequence
gcgaacggactggttgaaaagcaac

SEQ ID NO: 145998 - DNA, 25 bp, Probe sequence
gcatgtcattttgcggttgcagcga

SEQ ID NO: 145999 - DNA, 25 bp, Probe sequence
gcaacatattagtgatatcaatgca

SEQ ID NO: 146000 - DNA, 25 bp, Probe sequence
gcaacgagttatgttcatactgctg

SEQ ID NO: 146001 - DNA, 25 bp, Probe sequence
gaatatgccttttggagcatgtcat

SEQ ID NO: 146002 - DNA, 25 bp, Probe sequence
gacatcgttcaaacaggtactacgc

SEQ ID NO: 146003 - DNA, 25 bp, Probe sequence
gacggaattgtcgacatcgttcaaa

SEQ ID NO: 146004 - DNA, 25 bp, Probe sequence
gacgtgccaatctatgtggaacaag

SEQ ID NO: 146005 - DNA, 25 bp, Probe sequence
gagaacgccaattattattaagtgt

SEQ ID NO: 146006 - DNA, 25 bp, Probe sequence
gagttatgttcatactgctgaaaca

SEQ ID NO: 146007 - DNA, 25 bp, Probe sequence
gttgcagcgaaacctgaaacgacca

SEQ ID NO: 146008 - DNA, 25 bp, Probe sequence
gttcatactgctgaaacatatttta

SEQ ID NO: 146009 - DNA, 25 bp, Probe sequence
gttaataatttgttgaatatgcctt

SEQ ID NO: 146010 - DNA, 25 bp, Probe sequence
gtgccaatctatgtggaacaaggaa

SEQ ID NO: 146011 - DNA, 25 bp, Probe sequence
ggtagacggaattgtcgacatcgtt

SEQ ID NO: 146012 - DNA, 25 bp, Probe sequence
ggaggtgtctattgccaatgcttaa

SEQ ID NO: 146013 - DNA, 25 bp, Probe sequence
ggagcatgtcattttgcggttgcag

SEQ ID NO: 146014 - DNA, 25 bp, Probe sequence
ggaattgtcgacatcgttcaaacag

SEQ ID NO: 146015 - DNA, 25 bp, Probe sequence
tgtcgacatcgttcaaacaggtact

SEQ ID NO: 146016 - DNA, 25 bp, Probe sequence
tacgacattatcagaaacattaaaa

SEQ ID NO: 146017 - DNA, 25 bp, Probe sequence
tttgcggttgcagcgaaacctgaaa

SEQ ID NO: 146018 - DNA, 25 bp, Probe sequence
tattcgctctttggaggtgtctatt

SEQ ID NO: 146019 - DNA, 25 bp, Probe sequence
attgaaccatgaggatttgcagcag

SEQ ID NO: 146020 - DNA, 25 bp, Probe sequence
atttattcaatgtcattttgctgaa

SEQ ID NO: 146021 - DNA, 25 bp, Probe sequence
atcgttacaaacaccagacatacta

SEQ ID NO: 146022 - DNA, 25 bp, Probe sequence
agatcaattattgcgttattactca

SEQ ID NO: 146023 - DNA, 25 bp, Probe sequence
agccacctagatcctattacacagg

SEQ ID NO: 146024 - DNA, 25 bp, Probe sequence
actatgcaccatcattagcgaatgt

SEQ ID NO: 146025 - DNA, 25 bp, Probe sequence
acagcagttgagagacaacgtgcat

SEQ ID NO: 146026 - DNA, 25 bp, Probe sequence
acaaggttacaaagacatccattta

SEQ ID NO: 146027 - DNA, 25 bp, Probe sequence
aacactatattccaaatgaccatcc

SEQ ID NO: 146028 - DNA, 25 bp, Probe sequence
aacaccagacatactatcaatgatt

SEQ ID NO: 146029 - DNA, 25 bp, Probe sequence
aactgcagcaacaaaagtggcatac

SEQ ID NO: 146030 - DNA, 25 bp, Probe sequence
aacgtgcattttgttgtattgggac

SEQ ID NO: 146031 - DNA, 25 bp, Probe sequence
gaatctcgagttttaacaggtggtt

SEQ ID NO: 146032 - DNA, 25 bp, Probe sequence
gaacatccaatcgtgcaaatcttga

SEQ ID NO: 146033 - DNA, 25 bp, Probe sequence
gacatccatttagatattactgcgc

SEQ ID NO: 146034 - DNA, 25 bp, Probe sequence
gaccatccagcactcgttgaattaa

SEQ ID NO: 146035 - DNA, 25 bp, Probe sequence
gattgaggaacgtaatttatcggga

SEQ ID NO: 146036 - DNA, 25 bp, Probe sequence
gttggactggaaacaattgaaccat

SEQ ID NO: 146037 - DNA, 25 bp, Probe sequence
gtcgactgaacatccaatcgtgcaa

SEQ ID NO: 146038 - DNA, 25 bp, Probe sequence
gggtgagcgaaatttttggcaacat

SEQ ID NO: 146039 - DNA, 25 bp, Probe sequence
ggtggttattacaaaggaagcatcg

SEQ ID NO: 146040 - DNA, 25 bp, Probe sequence
ggtttggaaaactatgcaccatcat

SEQ ID NO: 146041 - DNA, 25 bp, Probe sequence
ggatttgcagcagatgggtgagcga

SEQ ID NO: 146042 - DNA, 25 bp, Probe sequence
ggaagcatcgaagggtttggattag

SEQ ID NO: 146043 - DNA, 25 bp, Probe sequence
ggcatacacaggtttaatcattcgg

SEQ ID NO: 146044 - DNA, 25 bp, Probe sequence
tggttacatatttgtcgactgaaca

SEQ ID NO: 146045 - DNA, 25 bp, Probe sequence
tgagcatcaaatttatgcacttcga

SEQ ID NO: 146046 - DNA, 25 bp, Probe sequence
tattccaaatgaccatccagcactc

SEQ ID NO: 146047 - DNA, 25 bp, Probe sequence
tattcagtttattcaacagcagttg

SEQ ID NO: 146048 - DNA, 25 bp, Probe sequence
ttttgctgaaaatgaatctcgagtt

SEQ ID NO: 146049 - DNA, 25 bp, Probe sequence
ttagatattactgcgcagccaccta

SEQ ID NO: 146050 - DNA, 25 bp, Probe sequence
ttatgcacttcgaaatgattttaca

SEQ ID NO: 146051 - DNA, 25 bp, Probe sequence
ttactcaatgtatccaactgcagca

SEQ ID NO: 146052 - DNA, 25 bp, Probe sequence
ttcggaataatgaagcggctgtaca

SEQ ID NO: 146053 - DNA, 25 bp, Probe sequence
attactatagttacatgagacacca

SEQ ID NO: 146054 - DNA, 25 bp, Probe sequence
atccacatgatgtatacgacttatc

SEQ ID NO: 146055 - DNA, 25 bp, Probe sequence
atgtttgtatttccacatggcgcac

SEQ ID NO: 146056 - DNA, 25 bp, Probe sequence
agttgttcgcgcaatgaaacgggat

SEQ ID NO: 146057 - DNA, 25 bp, Probe sequence
agagcatccagatttttctttaaat

SEQ ID NO: 146058 - DNA, 25 bp, Probe sequence
acggccaagtttatcatgtgtttta

SEQ ID NO: 146059 - DNA, 25 bp, Probe sequence
aacatatcacggccaagtttatcat

SEQ ID NO: 146060 - DNA, 25 bp, Probe sequence
aattacatcatcgttaatccacatg

SEQ ID NO: 146061 - DNA, 25 bp, Probe sequence
catgctacttattctgatgacaatg

SEQ ID NO: 146062 - DNA, 25 bp, Probe sequence
gcaacgaacgtttaccaagataggg

SEQ ID NO: 146063 - DNA, 25 bp, Probe sequence
gaaacgggatggatggtcatttgcg

SEQ ID NO: 146064 - DNA, 25 bp, Probe sequence
gcgagtcattcatatggtcacatta

SEQ ID NO: 146065 - DNA, 25 bp, Probe sequence
gcgattgatggtctaaacttatttg

SEQ ID NO: 146066 - DNA, 25 bp, Probe sequence
gcaggtgtcggtccaaacaatttta

SEQ ID NO: 146067 - DNA, 25 bp, Probe sequence
gcaacaatgattggatgattactgt

SEQ ID NO: 146068 - DNA, 25 bp, Probe sequence
gaacattgggaaacatatcacggcc

SEQ ID NO: 146069 - DNA, 25 bp, Probe sequence
gatgacaatgatatcgtgccaattt

SEQ ID NO: 146070 - DNA, 25 bp, Probe sequence
gatagggttgcgattgatggtctaa

SEQ ID NO: 146071 - DNA, 25 bp, Probe sequence
gatacacaccaagctaagggcaaca

SEQ ID NO: 146072 - DNA, 25 bp, Probe sequence
gttgcgtttacaggagatacacacc

SEQ ID NO: 146073 - DNA, 25 bp, Probe sequence
gtatacgacttatcatctcatcatg

SEQ ID NO: 146074 - DNA, 25 bp, Probe sequence
gtatttccacatggcgcacaggata

SEQ ID NO: 146075 - DNA, 25 bp, Probe sequence
gtcggtccaaacaattttacagata

SEQ ID NO: 146076 - DNA, 25 bp, Probe sequence
gtgttgttgctttaaccggttatga

SEQ ID NO: 146077 - DNA, 25 bp, Probe sequence
ggatggtcatttgcgagtcattcat

SEQ ID NO: 146078 - DNA, 25 bp, Probe sequence
ggcagctgaggaagttgttcgcgca

SEQ ID NO: 146079 - DNA, 25 bp, Probe sequence
ggcgcacaggatagacatacacaag

SEQ ID NO: 146080 - DNA, 25 bp, Probe sequence
tgagacaccatggttatgctgaccg

SEQ ID NO: 146081 - DNA, 25 bp, Probe sequence
tacagacccaaaagttgcgtttaca

SEQ ID NO: 146082 - DNA, 25 bp, Probe sequence
tacagatatatcagcaacgaacgtt

SEQ ID NO: 146083 - DNA, 25 bp, Probe sequence
tatcatctcatcatgtaaaagccaa

SEQ ID NO: 146084 - DNA, 25 bp, Probe sequence
tatatagctgttccaagcaaaatga

SEQ ID NO: 146085 - DNA, 25 bp, Probe sequence
tttattgctattttttctgttatta

SEQ ID NO: 146086 - DNA, 25 bp, Probe sequence
ttttctgttattatcagttgcattg

SEQ ID NO: 146087 - DNA, 25 bp, Probe sequence
attccaagttcctcgcatttaattg

SEQ ID NO: 146088 - DNA, 25 bp, Probe sequence
attccaaattagacacacaacggtg

SEQ ID NO: 146089 - DNA, 25 bp, Probe sequence
attagacacacaacggtggattgaa

SEQ ID NO: 146090 - DNA, 25 bp, Probe sequence
atttaatgattccaagttcctcgca

SEQ ID NO: 146091 - DNA, 25 bp, Probe sequence
atatttgtagtcatccacaagcaaa

SEQ ID NO: 146092 - DNA, 25 bp, Probe sequence
atatacactcccaaaggtttacata

SEQ ID NO: 146093 - DNA, 25 bp, Probe sequence
atcaatttggttactttgtattggt

SEQ ID NO: 146094 - DNA, 25 bp, Probe sequence
atggacgacattatcaatcaaggag

SEQ ID NO: 146095 - DNA, 25 bp, Probe sequence
aggacaagggtacgcatgtgaggct

SEQ ID NO: 146096 - DNA, 25 bp, Probe sequence
accaacgttcaataaatttagcaga

SEQ ID NO: 146097 - DNA, 25 bp, Probe sequence
acatccaagttttgaaggacaaggg

SEQ ID NO: 146098 - DNA, 25 bp, Probe sequence
aagggtacgcatgtgaggctattac

SEQ ID NO: 146099 - DNA, 25 bp, Probe sequence
aatgattccaagttcctcgcattta

SEQ ID NO: 146100 - DNA, 25 bp, Probe sequence
aatcaaggagatattgtgttttata

SEQ ID NO: 146101 - DNA, 25 bp, Probe sequence
aattttgtgaattatatcgatcaag

SEQ ID NO: 146102 - DNA, 25 bp, Probe sequence
ctttataatatttgtagtcatccac

SEQ ID NO: 146103 - DNA, 25 bp, Probe sequence
ccacaagcaaatatatacactccca

SEQ ID NO: 146104 - DNA, 25 bp, Probe sequence
gcaaatatatacactcccaaaggtt

SEQ ID NO: 146105 - DNA, 25 bp, Probe sequence
gcatgtgaggctattacagcaatca

SEQ ID NO: 146106 - DNA, 25 bp, Probe sequence
gaattatatcgatcaagaaacagta

SEQ ID NO: 146107 - DNA, 25 bp, Probe sequence
gaaacagtaaaagttatcaggacaa

SEQ ID NO: 146108 - DNA, 25 bp, Probe sequence
gacaaataagtgtaaccaacgttca

SEQ ID NO: 146109 - DNA, 25 bp, Probe sequence
gacacacaacggtggattgaaaaat

SEQ ID NO: 146110 - DNA, 25 bp, Probe sequence
gaggctattacagcaatcacaaatt

SEQ ID NO: 146111 - DNA, 25 bp, Probe sequence
gatatgaatatcgacaattaaagca

SEQ ID NO: 146112 - DNA, 25 bp, Probe sequence
gattgtagtgttattggtatttgtg

SEQ ID NO: 146113 - DNA, 25 bp, Probe sequence
gtagtcatccacaagcaaatatata

SEQ ID NO: 146114 - DNA, 25 bp, Probe sequence
gtgttattggtatttgtggatatga

SEQ ID NO: 146115 - DNA, 25 bp, Probe sequence
ggtacgcatgtgaggctattacagc

SEQ ID NO: 146116 - DNA, 25 bp, Probe sequence
ggcaacaatatcaatttggttactt

SEQ ID NO: 146117 - DNA, 25 bp, Probe sequence
ggctattacagcaatcacaaatttt

SEQ ID NO: 146118 - DNA, 25 bp, Probe sequence
tacactcccaaaggtttacataatt

SEQ ID NO: 146119 - DNA, 25 bp, Probe sequence
ttataaattacatccaagttttgaa

SEQ ID NO: 146120 - DNA, 25 bp, Probe sequence
ttccaagttcctcgcatttaattga

SEQ ID NO: 146121 - DNA, 25 bp, Probe sequence
ataacaacaaatgactggagcttta

SEQ ID NO: 146122 - DNA, 25 bp, Probe sequence
atcacggagactttgctatttacta

SEQ ID NO: 146123 - DNA, 25 bp, Probe sequence
atcctgtagaatctgctctaataat

SEQ ID NO: 146124 - DNA, 25 bp, Probe sequence
acactcgttcaataggcaacctaaa

SEQ ID NO: 146125 - DNA, 25 bp, Probe sequence
actgaaagattttataggtagcgat

SEQ ID NO: 146126 - DNA, 25 bp, Probe sequence
actcctaggctaattaatcatataa

SEQ ID NO: 146127 - DNA, 25 bp, Probe sequence
actatcctgtagaatctgctctaat

SEQ ID NO: 146128 - DNA, 25 bp, Probe sequence
acacactcgttcaataggcaaccta

SEQ ID NO: 146129 - DNA, 25 bp, Probe sequence
aaagggacgatacacactcgttcaa

SEQ ID NO: 146130 - DNA, 25 bp, Probe sequence
aacaagaagatcctaaacaatatga

SEQ ID NO: 146131 - DNA, 25 bp, Probe sequence
aatgactggagctttaatacacttg

SEQ ID NO: 146132 - DNA, 25 bp, Probe sequence
aatagaaacagatactcctaggcta

SEQ ID NO: 146133 - DNA, 25 bp, Probe sequence
aatttatcacggagactttgctatt

SEQ ID NO: 146134 - DNA, 25 bp, Probe sequence
catataaataacaacccagtccaaa

SEQ ID NO: 146135 - DNA, 25 bp, Probe sequence
ccgattacacaaaagggacgataca

SEQ ID NO: 146136 - DNA, 25 bp, Probe sequence
gaaacacaatttatcacggagactt

SEQ ID NO: 146137 - DNA, 25 bp, Probe sequence
gaaacagatactcctaggctaatta

SEQ ID NO: 146138 - DNA, 25 bp, Probe sequence
gactttgctatttactatcctgtag

SEQ ID NO: 146139 - DNA, 25 bp, Probe sequence
gactggagctttaatacacttgaat

SEQ ID NO: 146140 - DNA, 25 bp, Probe sequence
gagctttaaataattccgattacac

SEQ ID NO: 146141 - DNA, 25 bp, Probe sequence
gagactttgctatttactatcctgt

SEQ ID NO: 146142 - DNA, 25 bp, Probe sequence
gaggttaacctctatgaaagaaaca

SEQ ID NO: 146143 - DNA, 25 bp, Probe sequence
gataaacggatggctttagtaaagg

SEQ ID NO: 146144 - DNA, 25 bp, Probe sequence
gatacacactcgttcaataggcaac

SEQ ID NO: 146145 - DNA, 25 bp, Probe sequence
gatactcctaggctaattaatcata

SEQ ID NO: 146146 - DNA, 25 bp, Probe sequence
gtagacgaaactataatttatgatt

SEQ ID NO: 146147 - DNA, 25 bp, Probe sequence
gggacgatacacactcgttcaatag

SEQ ID NO: 146148 - DNA, 25 bp, Probe sequence
ggtagcgataaacggatggctttag

SEQ ID NO: 146149 - DNA, 25 bp, Probe sequence
ggagctttaatacacttgaattaga

SEQ ID NO: 146150 - DNA, 25 bp, Probe sequence
taacgagtataaattaacaactgtt

SEQ ID NO: 146151 - DNA, 25 bp, Probe sequence
taaacacggaaaattgccttattga

SEQ ID NO: 146152 - DNA, 25 bp, Probe sequence
taggcaacctaaaacaaatagtaga

SEQ ID NO: 146153 - DNA, 25 bp, Probe sequence
tttactatcctgtagaatctgctct

SEQ ID NO: 146154 - DNA, 25 bp, Probe sequence
ttgctatttactatcctgtagaatc

SEQ ID NO: 146155 - DNA, 25 bp, Probe sequence
attctgtttttcacaatattaaata

SEQ ID NO: 146156 - DNA, 25 bp, Probe sequence
atattagtacagttcctttagcgtt

SEQ ID NO: 146157 - DNA, 25 bp, Probe sequence
atatgctcatattgaatggaaacaa

SEQ ID NO: 146158 - DNA, 25 bp, Probe sequence
atgcgactgttaaacttttattctt

SEQ ID NO: 146159 - DNA, 25 bp, Probe sequence
agatttataatcagcgtacagagtt

SEQ ID NO: 146160 - DNA, 25 bp, Probe sequence
aacgcattgtgttacctttaatatt

SEQ ID NO: 146161 - DNA, 25 bp, Probe sequence
tataaaaggagaacctggtacgtca

SEQ ID NO: 146162 - DNA, 25 bp, Probe sequence
caatggtattggtcgatttacgcta

SEQ ID NO: 146163 - DNA, 25 bp, Probe sequence
cgagtcattttgctgcaagtttaaa

SEQ ID NO: 146164 - DNA, 25 bp, Probe sequence
gctaacatcacaggaattattctat

SEQ ID NO: 146165 - DNA, 25 bp, Probe sequence
gctatggagttaagacaattcggac

SEQ ID NO: 146166 - DNA, 25 bp, Probe sequence
gaattgacactattagtactgctat

SEQ ID NO: 146167 - DNA, 25 bp, Probe sequence
gacactattagtactgctatggagt

SEQ ID NO: 146168 - DNA, 25 bp, Probe sequence
gagttaagacaattcggacagtata

SEQ ID NO: 146169 - DNA, 25 bp, Probe sequence
gatgattatgttgttttgtgtttga

SEQ ID NO: 146170 - DNA, 25 bp, Probe sequence
gtattcatcaattaaatgcgactgt

SEQ ID NO: 146171 - DNA, 25 bp, Probe sequence
gtatcaaacgcattgtgttaccttt

SEQ ID NO: 146172 - DNA, 25 bp, Probe sequence
gtacagttcctttagcgttaatatt

SEQ ID NO: 146173 - DNA, 25 bp, Probe sequence
ggtgacttatgacacaagatattta

SEQ ID NO: 146174 - DNA, 25 bp, Probe sequence
ggtcgatttacgctaacatcacagg

SEQ ID NO: 146175 - DNA, 25 bp, Probe sequence
ggtatattccagatattcaagaaac

SEQ ID NO: 146176 - DNA, 25 bp, Probe sequence
tgttagtagttacattattcttttt

SEQ ID NO: 146177 - DNA, 25 bp, Probe sequence
tgcaagtttaaatcagctaggtgtg

SEQ ID NO: 146178 - DNA, 25 bp, Probe sequence
tctatttctgcaatggtgacttatg

SEQ ID NO: 146179 - DNA, 25 bp, Probe sequence
tcactagcattaaggtatattccag

SEQ ID NO: 146180 - DNA, 25 bp, Probe sequence
taatagtcgatatttcaacccgtgg

SEQ ID NO: 146181 - DNA, 25 bp, Probe sequence
tacctttaatattttctagtatcga

SEQ ID NO: 146182 - DNA, 25 bp, Probe sequence
tagcgttaatatttttattcacaac

SEQ ID NO: 146183 - DNA, 25 bp, Probe sequence
ttcacccgggaaatagtcgtattca

SEQ ID NO: 146184 - DNA, 25 bp, Probe sequence
tataatactataggttttcacccgg

SEQ ID NO: 146185 - DNA, 25 bp, Probe sequence
ttactagccgtgttaaaggtatcaa

SEQ ID NO: 146186 - DNA, 25 bp, Probe sequence
ttcttattagttgtttctatttctg

SEQ ID NO: 146187 - DNA, 25 bp, Probe sequence
ttgtgtttgacgttaatacttctga

SEQ ID NO: 146188 - DNA, 25 bp, Probe sequence
ttgacgttaatacttctgatgttag

SEQ ID NO: 146189 - DNA, 25 bp, Probe sequence
attggatgaaccgactgctggtcaa

SEQ ID NO: 146190 - DNA, 25 bp, Probe sequence
atactgtacagcgcttaaatatgca

SEQ ID NO: 146191 - DNA, 25 bp, Probe sequence
atacaacgcctagtgatttgctaaa

SEQ ID NO: 146192 - DNA, 25 bp, Probe sequence
atcaccgaccgcaagatttatctgg

SEQ ID NO: 146193 - DNA, 25 bp, Probe sequence
agtcaagcaacacctacattacaga

SEQ ID NO: 146194 - DNA, 25 bp, Probe sequence
agttggtcacaatggtgccggcaaa

SEQ ID NO: 146195 - DNA, 25 bp, Probe sequence
accaattatctcgttcaaagacttt

SEQ ID NO: 146196 - DNA, 25 bp, Probe sequence
acgtgaaccattatactgtacagcg

SEQ ID NO: 146197 - DNA, 25 bp, Probe sequence
acatcgctatttgaaatggccgaat

SEQ ID NO: 146198 - DNA, 25 bp, Probe sequence
acagcagctgaagatatggcctttt

SEQ ID NO: 146199 - DNA, 25 bp, Probe sequence
aacaacgcgtttcattaggtggtat

SEQ ID NO: 146200 - DNA, 25 bp, Probe sequence
aagactttagttttcaatatcatag

SEQ ID NO: 146201 - DNA, 25 bp, Probe sequence
aagtacaaatctgaaccgctattag

SEQ ID NO: 146202 - DNA, 25 bp, Probe sequence
aatcatcgctaatacaacgcctagt

SEQ ID NO: 146203 - DNA, 25 bp, Probe sequence
caattgtcaattagcgaacgatctg

SEQ ID NO: 146204 - DNA, 25 bp, Probe sequence
ctgcgacaggacatgaaacgctgag

SEQ ID NO: 146205 - DNA, 25 bp, Probe sequence
cgactgctggtcaagatttctatca

SEQ ID NO: 146206 - DNA, 25 bp, Probe sequence
gcggactttatgcatttcggaattg

SEQ ID NO: 146207 - DNA, 25 bp, Probe sequence
gcatcattgagacaaacatcgctat

SEQ ID NO: 146208 - DNA, 25 bp, Probe sequence
gcatctgttttagtcttaaatccgg

SEQ ID NO: 146209 - DNA, 25 bp, Probe sequence
gcatgatatgcatttattgtctgag

SEQ ID NO: 146210 - DNA, 25 bp, Probe sequence
gaatccattgataacttagcgaatt

SEQ ID NO: 146211 - DNA, 25 bp, Probe sequence
gaatgtgctcaaaatatgcggactt

SEQ ID NO: 146212 - DNA, 25 bp, Probe sequence
gaacatttaaatcaccgaccgcaag

SEQ ID NO: 146213 - DNA, 25 bp, Probe sequence
gaaatgcttagtatagttggtcaca

SEQ ID NO: 146214 - DNA, 25 bp, Probe sequence
gagggtcactatagcatctgtttta

SEQ ID NO: 146215 - DNA, 25 bp, Probe sequence
gtagcattagggttaagagcacgag

SEQ ID NO: 146216 - DNA, 25 bp, Probe sequence
gtaaatcgacttttgcaaattgcat

SEQ ID NO: 146217 - DNA, 25 bp, Probe sequence
ggtgccggcaaatcaacacttgcta

SEQ ID NO: 146218 - DNA, 25 bp, Probe sequence
ggacagttcataggcttaacagcag

SEQ ID NO: 146219 - DNA, 25 bp, Probe sequence
tggccaatttagatcctgcgacagg

SEQ ID NO: 146220 - DNA, 25 bp, Probe sequence
tgatacgtttgatagagttcttctt

SEQ ID NO: 146221 - DNA, 25 bp, Probe sequence
tagggattagcgagccacagaaatt

SEQ ID NO: 146222 - DNA, 25 bp, Probe sequence
taggtggtatattaatccatcgtac

SEQ ID NO: 146223 - DNA, 25 bp, Probe sequence
attgcgaatattatttgctgggcac

SEQ ID NO: 146224 - DNA, 25 bp, Probe sequence
attaaaagcatatgcttcatctcaa

SEQ ID NO: 146225 - DNA, 25 bp, Probe sequence
attatttgctgggcacttattgcac

SEQ ID NO: 146226 - DNA, 25 bp, Probe sequence
atttgctgggcacttattgcaccaa

SEQ ID NO: 146227 - DNA, 25 bp, Probe sequence
atattatttgctgggcacttattgc

SEQ ID NO: 146228 - DNA, 25 bp, Probe sequence
atacacaaggtgttatctctgcagt

SEQ ID NO: 146229 - DNA, 25 bp, Probe sequence
aggtgttatctctgcagtattaaat

SEQ ID NO: 146230 - DNA, 25 bp, Probe sequence
acacaaggtgttatctctgcagtat

SEQ ID NO: 146231 - DNA, 25 bp, Probe sequence
acaaggtgttatctctgcagtatta

SEQ ID NO: 146232 - DNA, 25 bp, Probe sequence
aaacaagatatttcagttaaaactg

SEQ ID NO: 146233 - DNA, 25 bp, Probe sequence
caaggtgttatctctgcagtattaa

SEQ ID NO: 146234 - DNA, 25 bp, Probe sequence
cacaaggtgttatctctgcagtatt

SEQ ID NO: 146235 - DNA, 25 bp, Probe sequence
ctgggcacttattgcaccaacatta

SEQ ID NO: 146236 - DNA, 25 bp, Probe sequence
cggtcaaattattgcgaatattatt

SEQ ID NO: 146237 - DNA, 25 bp, Probe sequence
ccttttgctggtttaatgactggat

SEQ ID NO: 146238 - DNA, 25 bp, Probe sequence
gctgggcacttattgcaccaacatt

SEQ ID NO: 146239 - DNA, 25 bp, Probe sequence
gctaacaaggtttatacacaaggtg

SEQ ID NO: 146240 - DNA, 25 bp, Probe sequence
gcatttttagcattaatatctgcaa

SEQ ID NO: 146241 - DNA, 25 bp, Probe sequence
gcaccaacattagatattttgattt

SEQ ID NO: 146242 - DNA, 25 bp, Probe sequence
gaatattatttgctgggcacttatt

SEQ ID NO: 146243 - DNA, 25 bp, Probe sequence
gttatctctgcagtattaaatatta

SEQ ID NO: 146244 - DNA, 25 bp, Probe sequence
gggcgttttgttgtaataccaacag

SEQ ID NO: 146245 - DNA, 25 bp, Probe sequence
gtgttatctctgcagtattaaatat

SEQ ID NO: 146246 - DNA, 25 bp, Probe sequence
gggcacttattgcaccaacattaga

SEQ ID NO: 146247 - DNA, 25 bp, Probe sequence
tgggcacttattgcaccaacattag

SEQ ID NO: 146248 - DNA, 25 bp, Probe sequence
tgctgggcacttattgcaccaacat

SEQ ID NO: 146249 - DNA, 25 bp, Probe sequence
tgcgaatattatttgctgggcactt

SEQ ID NO: 146250 - DNA, 25 bp, Probe sequence
tctgcagtattaaatattatttcag

SEQ ID NO: 146251 - DNA, 25 bp, Probe sequence
taaaagcatatgcttcatctcaaat

SEQ ID NO: 146252 - DNA, 25 bp, Probe sequence
tagcattaatatctgcaatatttgg

SEQ ID NO: 146253 - DNA, 25 bp, Probe sequence
tatttgctgggcacttattgcacca

SEQ ID NO: 146254 - DNA, 25 bp, Probe sequence
tttgctgggcacttattgcaccaac

SEQ ID NO: 146255 - DNA, 25 bp, Probe sequence
ttttgctggtttaatgactggatta

SEQ ID NO: 146256 - DNA, 25 bp, Probe sequence
ttgctgggcacttattgcaccaaca

SEQ ID NO: 146257 - DNA, 25 bp, Probe sequence
attggtactggaaatgattggacga

SEQ ID NO: 146258 - DNA, 25 bp, Probe sequence
atattattaaatttgcgcgatcgtt

SEQ ID NO: 146259 - DNA, 25 bp, Probe sequence
atatcagatttgggtcattatggac

SEQ ID NO: 146260 - DNA, 25 bp, Probe sequence
atcagtggtagacccgggtgtaggt

SEQ ID NO: 146261 - DNA, 25 bp, Probe sequence
agactcattttcagatttatatcat

SEQ ID NO: 146262 - DNA, 25 bp, Probe sequence
accaccgtatgacatttgggtagcg

SEQ ID NO: 146263 - DNA, 25 bp, Probe sequence
acctcttgtgtatgttaactcgcta

SEQ ID NO: 146264 - DNA, 25 bp, Probe sequence
actgtaaaatactggcctaaaggca

SEQ ID NO: 146265 - DNA, 25 bp, Probe sequence
aacgcatgatataccaccgtatgac

SEQ ID NO: 146266 - DNA, 25 bp, Probe sequence
aagtcatacttttcatggtagagat

SEQ ID NO: 146267 - DNA, 25 bp, Probe sequence
aagtgaaaagccgattgcctcattc

SEQ ID NO: 146268 - DNA, 25 bp, Probe sequence
cattggcattcttaaaatccttgga

SEQ ID NO: 146269 - DNA, 25 bp, Probe sequence
gcttgcttaacatattcaggtcatt

SEQ ID NO: 146270 - DNA, 25 bp, Probe sequence
gcagatgttaatgtgggtgaacctc

SEQ ID NO: 146271 - DNA, 25 bp, Probe sequence
gaacgtctcggtcaggcaattaatg

SEQ ID NO: 146272 - DNA, 25 bp, Probe sequence
gaaaacttaacgcatgatataccac

SEQ ID NO: 146273 - DNA, 25 bp, Probe sequence
gatggcgctgtaagtgcaatgtatg

SEQ ID NO: 146274 - DNA, 25 bp, Probe sequence
gattttggacttagtgatggcgctg

SEQ ID NO: 146275 - DNA, 25 bp, Probe sequence
gattgcctcattcggaagaaagtca

SEQ ID NO: 146276 - DNA, 25 bp, Probe sequence
gtttttgtatcagtggtagacccgg

SEQ ID NO: 146277 - DNA, 25 bp, Probe sequence
gtcaatcaagactcattttcagatt

SEQ ID NO: 146278 - DNA, 25 bp, Probe sequence
gtgggtgaacctcttgtgtatgtta

SEQ ID NO: 146279 - DNA, 25 bp, Probe sequence
gggtgtaggtagtgataggcggagc

SEQ ID NO: 146280 - DNA, 25 bp, Probe sequence
ggtcattacattattacacctgata

SEQ ID NO: 146281 - DNA, 25 bp, Probe sequence
ggtagagatgtttatgcatacaatg

SEQ ID NO: 146282 - DNA, 25 bp, Probe sequence
ggagttgcatatactgtaagtgatg

SEQ ID NO: 146283 - DNA, 25 bp, Probe sequence
ggacaaatattccattggcattctt

SEQ ID NO: 146284 - DNA, 25 bp, Probe sequence
ggcctaaaggcacagtttttgtatc

SEQ ID NO: 146285 - DNA, 25 bp, Probe sequence
tgattggacgattcatttatctaaa

SEQ ID NO: 146286 - DNA, 25 bp, Probe sequence
taactcgctagtaaatattggtgta

SEQ ID NO: 146287 - DNA, 25 bp, Probe sequence
tagcgtttgaacgtctcggtcaggc

SEQ ID NO: 146288 - DNA, 25 bp, Probe sequence
taggcggagcattgcttgcttaaca

SEQ ID NO: 146289 - DNA, 25 bp, Probe sequence
tttgcgcgatcgtttgcagatgtta

SEQ ID NO: 146290 - DNA, 25 bp, Probe sequence
ttgggtagcgtcatatcgtttatat

SEQ ID NO: 146291 - DNA, 25 bp, Probe sequence
attgatgacatggtatttgattcta

SEQ ID NO: 146292 - DNA, 25 bp, Probe sequence
attacaaacaattacagctgaacca

SEQ ID NO: 146293 - DNA, 25 bp, Probe sequence
attttacagattttagaggatactc

SEQ ID NO: 146294 - DNA, 25 bp, Probe sequence
ataccgtactattttacaggtcatg

SEQ ID NO: 146295 - DNA, 25 bp, Probe sequence
atgaagggcatatgttacgttctac

SEQ ID NO: 146296 - DNA, 25 bp, Probe sequence
atcgcattgcacttgaagatgatgg

SEQ ID NO: 146297 - DNA, 25 bp, Probe sequence
atgaaggaccagactcatgttgtat

SEQ ID NO: 146298 - DNA, 25 bp, Probe sequence
acaggtcatgaaggaccagactcat

SEQ ID NO: 146299 - DNA, 25 bp, Probe sequence
acaagatttacctacattattttat

SEQ ID NO: 146300 - DNA, 25 bp, Probe sequence
aaatacataaagatggccgattatt

SEQ ID NO: 146301 - DNA, 25 bp, Probe sequence
aaatcaactcatcatttgttccaat

SEQ ID NO: 146302 - DNA, 25 bp, Probe sequence
aactcatcatttgttccaatgatat

SEQ ID NO: 146303 - DNA, 25 bp, Probe sequence
aactctttttattggatgtattcga

SEQ ID NO: 146304 - DNA, 25 bp, Probe sequence
aatctacaggaggcatttttgcagc

SEQ ID NO: 146305 - DNA, 25 bp, Probe sequence
aatcctgcagcaatcaaaatacata

SEQ ID NO: 146306 - DNA, 25 bp, Probe sequence
aatagtgctgttccaattatatctg

SEQ ID NO: 146307 - DNA, 25 bp, Probe sequence
aattacagctgaaccatggcttgaa

SEQ ID NO: 146308 - DNA, 25 bp, Probe sequence
cgattacatcgcattgcacttgaag

SEQ ID NO: 146309 - DNA, 25 bp, Probe sequence
gccgagatgaagggcatatgttacg

SEQ ID NO: 146310 - DNA, 25 bp, Probe sequence
gctgaaccatggcttgaaatttcca

SEQ ID NO: 146311 - DNA, 25 bp, Probe sequence
gaaggattgaactttgatcggcagg

SEQ ID NO: 146312 - DNA, 25 bp, Probe sequence
gaactttgatcggcagggacaactc

SEQ ID NO: 146313 - DNA, 25 bp, Probe sequence
gaagatgatggtgtgacgatacaac

SEQ ID NO: 146314 - DNA, 25 bp, Probe sequence
gacatggtatttgattctaaaggtg

SEQ ID NO: 146315 - DNA, 25 bp, Probe sequence
gatcggcagggacaactctttttat

SEQ ID NO: 146316 - DNA, 25 bp, Probe sequence
gtcacaacaagatttacctacatta

SEQ ID NO: 146317 - DNA, 25 bp, Probe sequence
gtgctgttccaattatatctgaaag

SEQ ID NO: 146318 - DNA, 25 bp, Probe sequence
gtgtgacgatacaaccatttggagc

SEQ ID NO: 146319 - DNA, 25 bp, Probe sequence
gggacaactctttttattggatgta

SEQ ID NO: 146320 - DNA, 25 bp, Probe sequence
ggggttatccaataggacaaatatt

SEQ ID NO: 146321 - DNA, 25 bp, Probe sequence
ggcagggacaactctttttattgga

SEQ ID NO: 146322 - DNA, 25 bp, Probe sequence
tgacgatacaaccatttggagctac

SEQ ID NO: 146323 - DNA, 25 bp, Probe sequence
tagcgtagcaaatggtattgcttta

SEQ ID NO: 146324 - DNA, 25 bp, Probe sequence
ttacctacattattttatagcggga

SEQ ID NO: 146325 - DNA, 25 bp, Probe sequence
attacgtgttgaattgttatttaga

SEQ ID NO: 146326 - DNA, 25 bp, Probe sequence
atcacctgagataagtcttactacc

SEQ ID NO: 146327 - DNA, 25 bp, Probe sequence
atgcgctcatcgtgttggtaatttc

SEQ ID NO: 146328 - DNA, 25 bp, Probe sequence
agtaagtatactcatcattctaaat

SEQ ID NO: 146329 - DNA, 25 bp, Probe sequence
agagctcgaagatcatttaactatg

SEQ ID NO: 146330 - DNA, 25 bp, Probe sequence
actttatatagctagtatcgttatt

SEQ ID NO: 146331 - DNA, 25 bp, Probe sequence
acattagtccgatttggtgaccaaa

SEQ ID NO: 146332 - DNA, 25 bp, Probe sequence
acaaacagagtttcatcgttgggtt

SEQ ID NO: 146333 - DNA, 25 bp, Probe sequence
aaatatcctatctatagtttctttg

SEQ ID NO: 146334 - DNA, 25 bp, Probe sequence
aagttcaattattaatacaccgatt

SEQ ID NO: 146335 - DNA, 25 bp, Probe sequence
aatggctgatcaattatcacctgag

SEQ ID NO: 146336 - DNA, 25 bp, Probe sequence
gccaagtttgatagcaaggatagca

SEQ ID NO: 146337 - DNA, 25 bp, Probe sequence
gctagtatcgttattttaggtgttg

SEQ ID NO: 146338 - DNA, 25 bp, Probe sequence
gcagtcattataattcctaggtttt

SEQ ID NO: 146339 - DNA, 25 bp, Probe sequence
gaagatcatttaactatggctgaaa

SEQ ID NO: 146340 - DNA, 25 bp, Probe sequence
gaaaatttatgcgctcatcgtgttg

SEQ ID NO: 146341 - DNA, 25 bp, Probe sequence
gacaattgcatttttactttatata

SEQ ID NO: 146342 - DNA, 25 bp, Probe sequence
gagtttcatcgttgggttagtactt

SEQ ID NO: 146343 - DNA, 25 bp, Probe sequence
gataagtcttactaccggtttgtat

SEQ ID NO: 146344 - DNA, 25 bp, Probe sequence
gttattggaagagctcgaagatcat

SEQ ID NO: 146345 - DNA, 25 bp, Probe sequence
gtttttagatttgggtacatttgat

SEQ ID NO: 146346 - DNA, 25 bp, Probe sequence
gtataaatatattactttgtacttc

SEQ ID NO: 146347 - DNA, 25 bp, Probe sequence
gtacatttgatgtgacaattgcatt

SEQ ID NO: 146348 - DNA, 25 bp, Probe sequence
ggtaatttcattgccaagtttgata

SEQ ID NO: 146349 - DNA, 25 bp, Probe sequence
ggatagcagctatctttagtaaaga

SEQ ID NO: 146350 - DNA, 25 bp, Probe sequence
tcctatctatagtttctttgagtta

SEQ ID NO: 146351 - DNA, 25 bp, Probe sequence
tcatcgtgttggtaatttcattgcc

SEQ ID NO: 146352 - DNA, 25 bp, Probe sequence
taacgtatgttataaatgtgactta

SEQ ID NO: 146353 - DNA, 25 bp, Probe sequence
tacaccgattaagtcaatggctgat

SEQ ID NO: 146354 - DNA, 25 bp, Probe sequence
tagtaaagaaccagacacttttaat

SEQ ID NO: 146355 - DNA, 25 bp, Probe sequence
tagcatttattatttatacatttgt

SEQ ID NO: 146356 - DNA, 25 bp, Probe sequence
ttttaggtgttgtcattggtatgct

SEQ ID NO: 146357 - DNA, 25 bp, Probe sequence
ttgggttagtacttttaattgcgct

SEQ ID NO: 146358 - DNA, 25 bp, Probe sequence
ttgtcattggtatgctgattctacg

SEQ ID NO: 146359 - DNA, 25 bp, Probe sequence
ggcggcccgaggcggaaatactata

SEQ ID NO: 146360 - DNA, 25 bp, Probe sequence
cattgcccaaggcgaaacgtatgga

SEQ ID NO: 146361 - DNA, 25 bp, Probe sequence
aatctagtaatggcggcccgaggcg

SEQ ID NO: 146362 - DNA, 25 bp, Probe sequence
atattaggtctcattgcccaaggcg

SEQ ID NO: 146363 - DNA, 25 bp, Probe sequence
atgtcagtgtcagatcagattatga

SEQ ID NO: 146364 - DNA, 25 bp, Probe sequence
atggggcgatattaggtctcattgc

SEQ ID NO: 146365 - DNA, 25 bp, Probe sequence
aggcgaaacgtatggatatgaaatt

SEQ ID NO: 146366 - DNA, 25 bp, Probe sequence
agtaatggcggcccgaggcggaaat

SEQ ID NO: 146367 - DNA, 25 bp, Probe sequence
aggtctcattgcccaaggcgaaacg

SEQ ID NO: 146368 - DNA, 25 bp, Probe sequence
agatggggcgatattaggtctcatt

SEQ ID NO: 146369 - DNA, 25 bp, Probe sequence
agatcagattatgaaaggtctctta

SEQ ID NO: 146370 - DNA, 25 bp, Probe sequence
actatacgattaccgattcaggttt

SEQ ID NO: 146371 - DNA, 25 bp, Probe sequence
acttaagaatcaagagtttccagag

SEQ ID NO: 146372 - DNA, 25 bp, Probe sequence
aaaggatacgttgatacgacaataa

SEQ ID NO: 146373 - DNA, 25 bp, Probe sequence
aaaaatctagtaatggcggcccgag

SEQ ID NO: 146374 - DNA, 25 bp, Probe sequence
aatggcggcccgaggcggaaatact

SEQ ID NO: 146375 - DNA, 25 bp, Probe sequence
aatactatacgattaccgattcagg

SEQ ID NO: 146376 - DNA, 25 bp, Probe sequence
gcccaaggcgaaacgtatggatatg

SEQ ID NO: 146377 - DNA, 25 bp, Probe sequence
gcgatattaggtctcattgcccaag

SEQ ID NO: 146378 - DNA, 25 bp, Probe sequence
gaaaggtctcttagatggggcgata

SEQ ID NO: 146379 - DNA, 25 bp, Probe sequence
gaaattatgacgaaacttaagaatc

SEQ ID NO: 146380 - DNA, 25 bp, Probe sequence
gagtttccagagataagtgagggta

SEQ ID NO: 146381 - DNA, 25 bp, Probe sequence
gatattaggtctcattgcccaaggc

SEQ ID NO: 146382 - DNA, 25 bp, Probe sequence
gtatttatccagttttaatgcgttt

SEQ ID NO: 146383 - DNA, 25 bp, Probe sequence
gtctcattgcccaaggcgaaacgta

SEQ ID NO: 146384 - DNA, 25 bp, Probe sequence
gggatgattaacttgtttggagggg

SEQ ID NO: 146385 - DNA, 25 bp, Probe sequence
ggtctcttagatggggcgatattag

SEQ ID NO: 146386 - DNA, 25 bp, Probe sequence
ggcccgaggcggaaatactatacga

SEQ ID NO: 146387 - DNA, 25 bp, Probe sequence
tctagtaatggcggcccgaggcgga

SEQ ID NO: 146388 - DNA, 25 bp, Probe sequence
ggcggaaatactatacgattaccga

SEQ ID NO: 146389 - DNA, 25 bp, Probe sequence
tgagggtagtatttatccagtttta

SEQ ID NO: 146390 - DNA, 25 bp, Probe sequence
ttaggtctcattgcccaaggcgaaa

SEQ ID NO: 146391 - DNA, 25 bp, Probe sequence
tacgattaccgattcaggtttaaag

SEQ ID NO: 146392 - DNA, 25 bp, Probe sequence
tatccagttttaatgcgtttaaaca

SEQ ID NO: 146393 - DNA, 25 bp, Probe sequence
cagccggggcaaaacgtattccact

SEQ ID NO: 146394 - DNA, 25 bp, Probe sequence
atttgggctgtaacgaacggtcacg

SEQ ID NO: 146395 - DNA, 25 bp, Probe sequence
attttattcgcattcatcggtgtat

SEQ ID NO: 146396 - DNA, 25 bp, Probe sequence
atttatggcagcaacatcagatgtc

SEQ ID NO: 146397 - DNA, 25 bp, Probe sequence
atattagcgttatcctttggtacat

SEQ ID NO: 146398 - DNA, 25 bp, Probe sequence
atcctattctcagccggggcaaaac

SEQ ID NO: 146399 - DNA, 25 bp, Probe sequence
atagtctttctcaatacattaaatt

SEQ ID NO: 146400 - DNA, 25 bp, Probe sequence
atcggtgtattatatatgacgctca

SEQ ID NO: 146401 - DNA, 25 bp, Probe sequence
agtagtacatattgatgccatcagc

SEQ ID NO: 146402 - DNA, 25 bp, Probe sequence
acatcagatgtcatttggattgaac

SEQ ID NO: 146403 - DNA, 25 bp, Probe sequence
acaacgcaatgcatttcaacgagat

SEQ ID NO: 146404 - DNA, 25 bp, Probe sequence
aaatccacttgttagcattttgctc

SEQ ID NO: 146405 - DNA, 25 bp, Probe sequence
aattggggtacatttatttgggctg

SEQ ID NO: 146406 - DNA, 25 bp, Probe sequence
ctacctatatattggcagttcgttg

SEQ ID NO: 146407 - DNA, 25 bp, Probe sequence
gacgctcaagattggagaattccca

SEQ ID NO: 146408 - DNA, 25 bp, Probe sequence
gatgccatcagcagtattacgattg

SEQ ID NO: 146409 - DNA, 25 bp, Probe sequence
gatttattcaatacgttggaccaac

SEQ ID NO: 146410 - DNA, 25 bp, Probe sequence
gtttgtactcggcatatttgttttc

SEQ ID NO: 146411 - DNA, 25 bp, Probe sequence
ggtgctattacggcaataccactaa

SEQ ID NO: 146412 - DNA, 25 bp, Probe sequence
ggtattgtgttatatagtctttctc

SEQ ID NO: 146413 - DNA, 25 bp, Probe sequence
ggattgaacatgtcatcattttggt

SEQ ID NO: 146414 - DNA, 25 bp, Probe sequence
ggaccaacaataatgtttgtactcg

SEQ ID NO: 146415 - DNA, 25 bp, Probe sequence
ggcaataccactaatcctattctca

SEQ ID NO: 146416 - DNA, 25 bp, Probe sequence
ggcatatttgttttcaaagagcctt

SEQ ID NO: 146417 - DNA, 25 bp, Probe sequence
ggcgcatttgaaattttagcctttc

SEQ ID NO: 146418 - DNA, 25 bp, Probe sequence
tgaagaaacatccggtcgcaaaaac

SEQ ID NO: 146419 - DNA, 25 bp, Probe sequence
tacgtttatatttatttggacaggt

SEQ ID NO: 146420 - DNA, 25 bp, Probe sequence
tatacgttatttatttatggcagca

SEQ ID NO: 146421 - DNA, 25 bp, Probe sequence
ttttgctcgcacttatctttttaaa

SEQ ID NO: 146422 - DNA, 25 bp, Probe sequence
ttattttctggtgctattacggcaa

SEQ ID NO: 146423 - DNA, 25 bp, Probe sequence
ttagcctttcgtattatattttcag

SEQ ID NO: 146424 - DNA, 25 bp, Probe sequence
ttagcattttgctcgcacttatctt

SEQ ID NO: 146425 - DNA, 25 bp, Probe sequence
ttctgtggggaatactacctatata

SEQ ID NO: 146426 - DNA, 25 bp, Probe sequence
ttcatactcgcggttggacaaaaac

SEQ ID NO: 146427 - DNA, 25 bp, Probe sequence
attggattctgtttatggggattgt

SEQ ID NO: 146428 - DNA, 25 bp, Probe sequence
attgcatttgtattcgtaggtgtca

SEQ ID NO: 146429 - DNA, 25 bp, Probe sequence
attaatgggtatcgtctttatttcg

SEQ ID NO: 146430 - DNA, 25 bp, Probe sequence
attaggtattgttttcggtgtcatt

SEQ ID NO: 146431 - DNA, 25 bp, Probe sequence
atttatgttgtagatgcacttgctt

SEQ ID NO: 146432 - DNA, 25 bp, Probe sequence
atttgtattcgtaggtgtcatttat

SEQ ID NO: 146433 - DNA, 25 bp, Probe sequence
atccattaatgggtatcgtctttat

SEQ ID NO: 146434 - DNA, 25 bp, Probe sequence
accaaaattggattctgtttatggg

SEQ ID NO: 146435 - DNA, 25 bp, Probe sequence
ctaatttcagtgatttttaatttat

SEQ ID NO: 146436 - DNA, 25 bp, Probe sequence
gcatttgtattcgtaggtgtcattt

SEQ ID NO: 146437 - DNA, 25 bp, Probe sequence
gacgatgattgctattgcatttgta

SEQ ID NO: 146438 - DNA, 25 bp, Probe sequence
gatgattgctattgcatttgtattc

SEQ ID NO: 146439 - DNA, 25 bp, Probe sequence
gattgctattgcatttgtattcgta

SEQ ID NO: 146440 - DNA, 25 bp, Probe sequence
gtattcgtaggtgtcatttatgttg

SEQ ID NO: 146441 - DNA, 25 bp, Probe sequence
gtctttatttcgacgatgattgcta

SEQ ID NO: 146442 - DNA, 25 bp, Probe sequence
gtgtcattttattatttaatccatt

SEQ ID NO: 146443 - DNA, 25 bp, Probe sequence
gggtatcgtctttatttcgacgatg

SEQ ID NO: 146444 - DNA, 25 bp, Probe sequence
ggtggtaaccaaaattggattctgt

SEQ ID NO: 146445 - DNA, 25 bp, Probe sequence
ggtgtcatttatgttgtagatgcac

SEQ ID NO: 146446 - DNA, 25 bp, Probe sequence
ggtattgttttcggtgtcattttat

SEQ ID NO: 146447 - DNA, 25 bp, Probe sequence
tggattctgtttatggggattgtag

SEQ ID NO: 146448 - DNA, 25 bp, Probe sequence
tgtttatggggattgtagatattct

SEQ ID NO: 146449 - DNA, 25 bp, Probe sequence
tgttttcggtgtcattttattattt

SEQ ID NO: 146450 - DNA, 25 bp, Probe sequence
tgctattgcatttgtattcgtaggt

SEQ ID NO: 146451 - DNA, 25 bp, Probe sequence
tcgtaggtgtcatttatgttgtaga

SEQ ID NO: 146452 - DNA, 25 bp, Probe sequence
tcggtgtcattttattatttaatcc

SEQ ID NO: 146453 - DNA, 25 bp, Probe sequence
taatgggtatcgtctttatttcgac

SEQ ID NO: 146454 - DNA, 25 bp, Probe sequence
tagtggtagcttaaaactaatttca

SEQ ID NO: 146455 - DNA, 25 bp, Probe sequence
taggtattgttttcggtgtcatttt

SEQ ID NO: 146456 - DNA, 25 bp, Probe sequence
tatttcgacgatgattgctattgca

SEQ ID NO: 146457 - DNA, 25 bp, Probe sequence
tattgttttcggtgtcattttatta

SEQ ID NO: 146458 - DNA, 25 bp, Probe sequence
tttcgacgatgattgctattgcatt

SEQ ID NO: 146459 - DNA, 25 bp, Probe sequence
ttattaggtattgttttcggtgtca

SEQ ID NO: 146460 - DNA, 25 bp, Probe sequence
ttatgttgtagatgcacttgcttaa

SEQ ID NO: 146461 - DNA, 25 bp, Probe sequence
atggaaccacgtcttaatcggcgtg

SEQ ID NO: 146462 - DNA, 25 bp, Probe sequence
atagcatctatgattgtatgacggt

SEQ ID NO: 146463 - DNA, 25 bp, Probe sequence
atcggcgtggttcgttttgtagata

SEQ ID NO: 146464 - DNA, 25 bp, Probe sequence
ataacacgataattatacgttacta

SEQ ID NO: 146465 - DNA, 25 bp, Probe sequence
atctatgattgtatgacggtgaaag

SEQ ID NO: 146466 - DNA, 25 bp, Probe sequence
agcatctatgattgtatgacggtga

SEQ ID NO: 146467 - DNA, 25 bp, Probe sequence
accacgtcttaatcggcgtggttcg

SEQ ID NO: 146468 - DNA, 25 bp, Probe sequence
aaatttatcattttaagtatcggtg

SEQ ID NO: 146469 - DNA, 25 bp, Probe sequence
aatcggcgtggttcgttttgtagat

SEQ ID NO: 146470 - DNA, 25 bp, Probe sequence
cacgtcttaatcggcgtggttcgtt

SEQ ID NO: 146471 - DNA, 25 bp, Probe sequence
tcttaatcggcgtggttcgttttgt

SEQ ID NO: 146472 - DNA, 25 bp, Probe sequence
cggcgtggttcgttttgtagatata

SEQ ID NO: 146473 - DNA, 25 bp, Probe sequence
cgtggttcgttttgtagatatagca

SEQ ID NO: 146474 - DNA, 25 bp, Probe sequence
cgaagaaacattatataacacgata

SEQ ID NO: 146475 - DNA, 25 bp, Probe sequence
gcgtggttcgttttgtagatatagc

SEQ ID NO: 146476 - DNA, 25 bp, Probe sequence
gcatctatgattgtatgacggtgaa

SEQ ID NO: 146477 - DNA, 25 bp, Probe sequence
gaaccacgtcttaatcggcgtggtt

SEQ ID NO: 146478 - DNA, 25 bp, Probe sequence
gaaactattatcgaagaaacattat

SEQ ID NO: 146479 - DNA, 25 bp, Probe sequence
gtcttaatcggcgtggttcgttttg

SEQ ID NO: 146480 - DNA, 25 bp, Probe sequence
gttcattacaaacttggtattggta

SEQ ID NO: 146481 - DNA, 25 bp, Probe sequence
gtatgacggtgaaagttcattacaa

SEQ ID NO: 146482 - DNA, 25 bp, Probe sequence
gtatcggtgatttaattgaaataga

SEQ ID NO: 146483 - DNA, 25 bp, Probe sequence
gtggttcgttttgtagatatagcat

SEQ ID NO: 146484 - DNA, 25 bp, Probe sequence
ggttcgttttgtagatatagcatct

SEQ ID NO: 146485 - DNA, 25 bp, Probe sequence
ggaaccacgtcttaatcggcgtggt

SEQ ID NO: 146486 - DNA, 25 bp, Probe sequence
ggcgtggttcgttttgtagatatag

SEQ ID NO: 146487 - DNA, 25 bp, Probe sequence
tggaaccacgtcttaatcggcgtgg

SEQ ID NO: 146488 - DNA, 25 bp, Probe sequence
tggttcgttttgtagatatagcatc

SEQ ID NO: 146489 - DNA, 25 bp, Probe sequence
tgacggtgaaagttcattacaaact

SEQ ID NO: 146490 - DNA, 25 bp, Probe sequence
tcggcgtggttcgttttgtagatat

SEQ ID NO: 146491 - DNA, 25 bp, Probe sequence
tcattttaagtatcggtgatttaat

SEQ ID NO: 146492 - DNA, 25 bp, Probe sequence
taatcggcgtggttcgttttgtaga

SEQ ID NO: 146493 - DNA, 25 bp, Probe sequence
tatgattgtatgacggtgaaagttc

SEQ ID NO: 146494 - DNA, 25 bp, Probe sequence
ttaatcggcgtggttcgttttgtag

SEQ ID NO: 146495 - DNA, 25 bp, Probe sequence
attcaatgatcactgtgcttcgcca

SEQ ID NO: 146496 - DNA, 25 bp, Probe sequence
atattctacattagcaatgctgtta

SEQ ID NO: 146497 - DNA, 25 bp, Probe sequence
ataaccaatcaaagacgaaatgtac

SEQ ID NO: 146498 - DNA, 25 bp, Probe sequence
atcagtgtatccaaagatactcttg

SEQ ID NO: 146499 - DNA, 25 bp, Probe sequence
atgattattaaccttgaaacacaac

SEQ ID NO: 146500 - DNA, 25 bp, Probe sequence
agatatcatcagtgtatccaaagat

SEQ ID NO: 146501 - DNA, 25 bp, Probe sequence
agaacatgaaattccctattttcaa

SEQ ID NO: 146502 - DNA, 25 bp, Probe sequence
agcaatgctgttatagatatcatca

SEQ ID NO: 146503 - DNA, 25 bp, Probe sequence
acttatatcctgttaaatttagaga

SEQ ID NO: 146504 - DNA, 25 bp, Probe sequence
aaatatattctacattagcaatgct

SEQ ID NO: 146505 - DNA, 25 bp, Probe sequence
aaaggtttagtggagccatttattg

SEQ ID NO: 146506 - DNA, 25 bp, Probe sequence
aaagcaaatttctaatattattaat

SEQ ID NO: 146507 - DNA, 25 bp, Probe sequence
ccgatgagaagtatgttattgcaac

SEQ ID NO: 146508 - DNA, 25 bp, Probe sequence
gaattcaatgatcactgtgcttcgc

SEQ ID NO: 146509 - DNA, 25 bp, Probe sequence
gaatacttatatcctgttaaattta

SEQ ID NO: 146510 - DNA, 25 bp, Probe sequence
gaagtatgttattgcaactattaaa

SEQ ID NO: 146511 - DNA, 25 bp, Probe sequence
gaaacacaacaaatacattttgatt

SEQ ID NO: 146512 - DNA, 25 bp, Probe sequence
gaaatgtacatttttgtctgaatac

SEQ ID NO: 146513 - DNA, 25 bp, Probe sequence
gacttaattgattattctttatata

SEQ ID NO: 146514 - DNA, 25 bp, Probe sequence
gagccatttattgtattctataatc

SEQ ID NO: 146515 - DNA, 25 bp, Probe sequence
gagaaaaataggatacgcttagata

SEQ ID NO: 146516 - DNA, 25 bp, Probe sequence
gatgttctcaataaaaagcaaattt

SEQ ID NO: 146517 - DNA, 25 bp, Probe sequence
gatacgcttagatattgatgttctc

SEQ ID NO: 146518 - DNA, 25 bp, Probe sequence
gatttagaacatgaaattccctatt

SEQ ID NO: 146519 - DNA, 25 bp, Probe sequence
gtcagaattcaatgatcactgtgct

SEQ ID NO: 146520 - DNA, 25 bp, Probe sequence
gtctgaatacttatatcctgttaaa

SEQ ID NO: 146521 - DNA, 25 bp, Probe sequence
gtggagccatttattgtattctata

SEQ ID NO: 146522 - DNA, 25 bp, Probe sequence
tgtacatttttgtctgaatacttat

SEQ ID NO: 146523 - DNA, 25 bp, Probe sequence
tcaatgatcactgtgcttcgccata

SEQ ID NO: 146524 - DNA, 25 bp, Probe sequence
taactggtacgaagaaatccattct

SEQ ID NO: 146525 - DNA, 25 bp, Probe sequence
tacgcttagatattgatgttctcaa

SEQ ID NO: 146526 - DNA, 25 bp, Probe sequence
tttgtctgaatacttatatcctgtt

SEQ ID NO: 146527 - DNA, 25 bp, Probe sequence
tttaatattactaactggtacgaag

SEQ ID NO: 146528 - DNA, 25 bp, Probe sequence
ttagtggagccatttattgtattct

SEQ ID NO: 146529 - DNA, 25 bp, Probe sequence
atttgaagttaaacgaatcggtgct

SEQ ID NO: 146530 - DNA, 25 bp, Probe sequence
attgacattaaacttagcacagaag

SEQ ID NO: 146531 - DNA, 25 bp, Probe sequence
atatacatgcctcattggctagagt

SEQ ID NO: 146532 - DNA, 25 bp, Probe sequence
atatcagcaattacaacaataagca

SEQ ID NO: 146533 - DNA, 25 bp, Probe sequence
atgtctaaaaatatcaatcaagcaa

SEQ ID NO: 146534 - DNA, 25 bp, Probe sequence
aggtgtttattccaagcacaaaggg

SEQ ID NO: 146535 - DNA, 25 bp, Probe sequence
acatgcctcattggctagagtttta

SEQ ID NO: 146536 - DNA, 25 bp, Probe sequence
aaacgaatcggtgctaaatctaaca

SEQ ID NO: 146537 - DNA, 25 bp, Probe sequence
aacagattatcgatatcagtagtaa

SEQ ID NO: 146538 - DNA, 25 bp, Probe sequence
aagctaatgaactgtatagagtgat

SEQ ID NO: 146539 - DNA, 25 bp, Probe sequence
caatagttccactttcttccaaagg

SEQ ID NO: 146540 - DNA, 25 bp, Probe sequence
gcctcattggctagagttttattca

SEQ ID NO: 146541 - DNA, 25 bp, Probe sequence
gcacaaagggaaagatacatacgtt

SEQ ID NO: 146542 - DNA, 25 bp, Probe sequence
gaagataaaaagcttttgtctaact

SEQ ID NO: 146543 - DNA, 25 bp, Probe sequence
gaaacagttacaatagttccacttt

SEQ ID NO: 146544 - DNA, 25 bp, Probe sequence
gaaagttatatacatgcctcattgg

SEQ ID NO: 146545 - DNA, 25 bp, Probe sequence
gagttttctggtaatcatttttgtg

SEQ ID NO: 146546 - DNA, 25 bp, Probe sequence
gagtgataggtgtttattccaagca

SEQ ID NO: 146547 - DNA, 25 bp, Probe sequence
gatcctactggaacgataataattt

SEQ ID NO: 146548 - DNA, 25 bp, Probe sequence
gataggtgtttattccaagcacaaa

SEQ ID NO: 146549 - DNA, 25 bp, Probe sequence
gattctgatcctactggaacgataa

SEQ ID NO: 146550 - DNA, 25 bp, Probe sequence
gttacaatagttccactttcttcca

SEQ ID NO: 146551 - DNA, 25 bp, Probe sequence
gttttattcaattgctatacatagc

SEQ ID NO: 146552 - DNA, 25 bp, Probe sequence
gtagaggaacagtggtatatgtaaa

SEQ ID NO: 146553 - DNA, 25 bp, Probe sequence
gtggtatatgtaaaactagggagta

SEQ ID NO: 146554 - DNA, 25 bp, Probe sequence
gggagtaatattggaagtgagtttt

SEQ ID NO: 146555 - DNA, 25 bp, Probe sequence
ggaagtgagttttctggtaatcatt

SEQ ID NO: 146556 - DNA, 25 bp, Probe sequence
ggctagagttttattcaattgctat

SEQ ID NO: 146557 - DNA, 25 bp, Probe sequence
taaaacaagcttattcaaaatccga

SEQ ID NO: 146558 - DNA, 25 bp, Probe sequence
taaatgattctgatcctactggaac

SEQ ID NO: 146559 - DNA, 25 bp, Probe sequence
tacaatagttccactttcttccaaa

SEQ ID NO: 146560 - DNA, 25 bp, Probe sequence
tacatacgttaatatatcagcaatt

SEQ ID NO: 146561 - DNA, 25 bp, Probe sequence
tacatagcgatgttacaagcaataa

SEQ ID NO: 146562 - DNA, 25 bp, Probe sequence
ttctggtaatcatttttgtgtaata

SEQ ID NO: 146563 - DNA, 25 bp, Probe sequence
attggtatactcagcctcataattt

SEQ ID NO: 146564 - DNA, 25 bp, Probe sequence
atactcagcctcataattttcctta

SEQ ID NO: 146565 - DNA, 25 bp, Probe sequence
atgacaaatgcgctttctattatat

SEQ ID NO: 146566 - DNA, 25 bp, Probe sequence
agcctcataattttccttagtgtgt

SEQ ID NO: 146567 - DNA, 25 bp, Probe sequence
acgatgacaaatgcgctttctatta

SEQ ID NO: 146568 - DNA, 25 bp, Probe sequence
acggtggcaatcattttgggaatag

SEQ ID NO: 146569 - DNA, 25 bp, Probe sequence
actcagcctcataattttccttagt

SEQ ID NO: 146570 - DNA, 25 bp, Probe sequence
acaaatgcgctttctattatatcag

SEQ ID NO: 146571 - DNA, 25 bp, Probe sequence
aacggtggcaatcattttgggaata

SEQ ID NO: 146572 - DNA, 25 bp, Probe sequence
aattggtatactcagcctcataatt

SEQ ID NO: 146573 - DNA, 25 bp, Probe sequence
cagcctcataattttccttagtgtg

SEQ ID NO: 146574 - DNA, 25 bp, Probe sequence
ctaaagctagaaatacgatgacaaa

SEQ ID NO: 146575 - DNA, 25 bp, Probe sequence
ctcagcctcataattttccttagtg

SEQ ID NO: 146576 - DNA, 25 bp, Probe sequence
cggtggcaatcattttgggaatagg

SEQ ID NO: 146577 - DNA, 25 bp, Probe sequence
cgatgacaaatgcgctttctattat

SEQ ID NO: 146578 - DNA, 25 bp, Probe sequence
cctcataattttccttagtgtgtat

SEQ ID NO: 146579 - DNA, 25 bp, Probe sequence
gcctcataattttccttagtgtgta

SEQ ID NO: 146580 - DNA, 25 bp, Probe sequence
gcaatcattttgggaataggttttt

SEQ ID NO: 146581 - DNA, 25 bp, Probe sequence
gacaaatgcgctttctattatatca

SEQ ID NO: 146582 - DNA, 25 bp, Probe sequence
gatgacaaatgcgctttctattata

SEQ ID NO: 146583 - DNA, 25 bp, Probe sequence
gtatactcagcctcataattttcct

SEQ ID NO: 146584 - DNA, 25 bp, Probe sequence
gtggcaatcattttgggaataggtt

SEQ ID NO: 146585 - DNA, 25 bp, Probe sequence
ggtggcaatcattttgggaataggt

SEQ ID NO: 146586 - DNA, 25 bp, Probe sequence
ggtatactcagcctcataattttcc

SEQ ID NO: 146587 - DNA, 25 bp, Probe sequence
tggtatactcagcctcataattttc

SEQ ID NO: 146588 - DNA, 25 bp, Probe sequence
tgacaaatgcgctttctattatatc

SEQ ID NO: 146589 - DNA, 25 bp, Probe sequence
tcagcctcataattttccttagtgt

SEQ ID NO: 146590 - DNA, 25 bp, Probe sequence
taacggtggcaatcattttgggaat

SEQ ID NO: 146591 - DNA, 25 bp, Probe sequence
tactcagcctcataattttccttag

SEQ ID NO: 146592 - DNA, 25 bp, Probe sequence
tacgatgacaaatgcgctttctatt

SEQ ID NO: 146593 - DNA, 25 bp, Probe sequence
tatactcagcctcataattttcctt

SEQ ID NO: 146594 - DNA, 25 bp, Probe sequence
tttgggaataggtttttatgcatct

SEQ ID NO: 146595 - DNA, 25 bp, Probe sequence
ttgggaataggtttttatgcatcta

SEQ ID NO: 146596 - DNA, 25 bp, Probe sequence
ttggtatactcagcctcataatttt

SEQ ID NO: 146597 - DNA, 25 bp, Probe sequence
attgggcttggggtataacggtgat

SEQ ID NO: 146598 - DNA, 25 bp, Probe sequence
attcttatagctttgattagtatgc

SEQ ID NO: 146599 - DNA, 25 bp, Probe sequence
atttgcacctgatattaaagcgcaa

SEQ ID NO: 146600 - DNA, 25 bp, Probe sequence
aggtgtactttctttcatagcattt

SEQ ID NO: 146601 - DNA, 25 bp, Probe sequence
agtatgcatctggcaaataagtttt

SEQ ID NO: 146602 - DNA, 25 bp, Probe sequence
accattccatttgcacctgatatta

SEQ ID NO: 146603 - DNA, 25 bp, Probe sequence
aaaagggaccattccatttgcacct

SEQ ID NO: 146604 - DNA, 25 bp, Probe sequence
acaggtgtactttctttcatagcat

SEQ ID NO: 146605 - DNA, 25 bp, Probe sequence
aaacaggtgtactttctttcatagc

SEQ ID NO: 146606 - DNA, 25 bp, Probe sequence
aacggtgatagtcatttatggaata

SEQ ID NO: 146607 - DNA, 25 bp, Probe sequence
gaattgggcttggggtataacggtg

SEQ ID NO: 146608 - DNA, 25 bp, Probe sequence
catgacactagctgcaattttaaca

SEQ ID NO: 146609 - DNA, 25 bp, Probe sequence
ctttctttcatagcatttgttggtg

SEQ ID NO: 146610 - DNA, 25 bp, Probe sequence
ctagctgcaattttaacaggacctt

SEQ ID NO: 146611 - DNA, 25 bp, Probe sequence
ccatttgcacctgatattaaagcgc

SEQ ID NO: 146612 - DNA, 25 bp, Probe sequence
gctttgattagtatgcatctggcaa

SEQ ID NO: 146613 - DNA, 25 bp, Probe sequence
gacactagctgcaattttaacagga

SEQ ID NO: 146614 - DNA, 25 bp, Probe sequence
gatgtgtgatttgttcaatgtaact

SEQ ID NO: 146615 - DNA, 25 bp, Probe sequence
gattagtatgcatctggcaaataag

SEQ ID NO: 146616 - DNA, 25 bp, Probe sequence
gttggtgcaatcattcttatagctt

SEQ ID NO: 146617 - DNA, 25 bp, Probe sequence
gtactttctttcatagcatttgttg

SEQ ID NO: 146618 - DNA, 25 bp, Probe sequence
gtaaaagggaccattccatttgcac

SEQ ID NO: 146619 - DNA, 25 bp, Probe sequence
gtgtactttctttcatagcatttgt

SEQ ID NO: 146620 - DNA, 25 bp, Probe sequence
ggggtataacggtgatagtcattta

SEQ ID NO: 146621 - DNA, 25 bp, Probe sequence
ggtgcaatcattcttatagctttga

SEQ ID NO: 146622 - DNA, 25 bp, Probe sequence
ggcttggggtataacggtgatagtc

SEQ ID NO: 146623 - DNA, 25 bp, Probe sequence
tctttcatagcatttgttggtgcaa

SEQ ID NO: 146624 - DNA, 25 bp, Probe sequence
tcatagcatttgttggtgcaatcat

SEQ ID NO: 146625 - DNA, 25 bp, Probe sequence
taatgatgtgtgatttgttcaatgt

SEQ ID NO: 146626 - DNA, 25 bp, Probe sequence
taaaaagtatcgggaacgagatggt

SEQ ID NO: 146627 - DNA, 25 bp, Probe sequence
taaaaacaggtgtactttctttcat

SEQ ID NO: 146628 - DNA, 25 bp, Probe sequence
tagctttgattagtatgcatctggc

SEQ ID NO: 146629 - DNA, 25 bp, Probe sequence
ttggaattgggcttggggtataacg

SEQ ID NO: 146630 - DNA, 25 bp, Probe sequence
tatggaataggttattatgcatcta

SEQ ID NO: 146631 - DNA, 25 bp, Probe sequence
attgcatttccgactgaaatttttg

SEQ ID NO: 146632 - DNA, 25 bp, Probe sequence
atcaacgcacgctacaaataaaatt

SEQ ID NO: 146633 - DNA, 25 bp, Probe sequence
agttggttcactagcggtgttaaca

SEQ ID NO: 146634 - DNA, 25 bp, Probe sequence
aaattgcatttccgactgaaatttt

SEQ ID NO: 146635 - DNA, 25 bp, Probe sequence
aaatcaacgcacgctacaaataaaa

SEQ ID NO: 146636 - DNA, 25 bp, Probe sequence
aaaaaaatcaacgcacgctacaaat

SEQ ID NO: 146637 - DNA, 25 bp, Probe sequence
aaaaatcaacgcacgctacaaataa

SEQ ID NO: 146638 - DNA, 25 bp, Probe sequence
aaaaaatcaacgcacgctacaaata

SEQ ID NO: 146639 - DNA, 25 bp, Probe sequence
aaaatcaacgcacgctacaaataaa

SEQ ID NO: 146640 - DNA, 25 bp, Probe sequence
aatcaacgcacgctacaaataaaat

SEQ ID NO: 146641 - DNA, 25 bp, Probe sequence
aattgcatttccgactgaaattttt

SEQ ID NO: 146642 - DNA, 25 bp, Probe sequence
cactagcggtgttaacaattacgga

SEQ ID NO: 146643 - DNA, 25 bp, Probe sequence
cagttggttcactagcggtgttaac

SEQ ID NO: 146644 - DNA, 25 bp, Probe sequence
gcggtgttaacaattacggaaattg

SEQ ID NO: 146645 - DNA, 25 bp, Probe sequence
gcatttccgactgaaatttttgaaa

SEQ ID NO: 146646 - DNA, 25 bp, Probe sequence
gaaaaaaatcaacgcacgctacaaa

SEQ ID NO: 146647 - DNA, 25 bp, Probe sequence
gaaattgcatttccgactgaaattt

SEQ ID NO: 146648 - DNA, 25 bp, Probe sequence
gttggttcactagcggtgttaacaa

SEQ ID NO: 146649 - DNA, 25 bp, Probe sequence
gttcactagcggtgttaacaattac

SEQ ID NO: 146650 - DNA, 25 bp, Probe sequence
gtcagttggttcactagcggtgtta

SEQ ID NO: 146651 - DNA, 25 bp, Probe sequence
gtgttaacaattacggaaattgcat

SEQ ID NO: 146652 - DNA, 25 bp, Probe sequence
ggttcactagcggtgttaacaatta

SEQ ID NO: 146653 - DNA, 25 bp, Probe sequence
ggaaattgcatttccgactgaaatt

SEQ ID NO: 146654 - DNA, 25 bp, Probe sequence
tggttcactagcggtgttaacaatt

SEQ ID NO: 146655 - DNA, 25 bp, Probe sequence
tgtcagttggttcactagcggtgtt

SEQ ID NO: 146656 - DNA, 25 bp, Probe sequence
tgcatttccgactgaaatttttgaa

SEQ ID NO: 146657 - DNA, 25 bp, Probe sequence
tgaaaaaaatcaacgcacgctacaa

SEQ ID NO: 146658 - DNA, 25 bp, Probe sequence
tcactagcggtgttaacaattacgg

SEQ ID NO: 146659 - DNA, 25 bp, Probe sequence
tcagttggttcactagcggtgttaa

SEQ ID NO: 146660 - DNA, 25 bp, Probe sequence
tcaacgcacgctacaaataaaattt

SEQ ID NO: 146661 - DNA, 25 bp, Probe sequence
tagcggtgttaacaattacggaaat

SEQ ID NO: 146662 - DNA, 25 bp, Probe sequence
ttcactagcggtgttaacaattacg

SEQ ID NO: 146663 - DNA, 25 bp, Probe sequence
ttgcatttccgactgaaatttttga

SEQ ID NO: 146664 - DNA, 25 bp, Probe sequence
ttggttcactagcggtgttaacaat

SEQ ID NO: 146665 - DNA, 25 bp, Probe sequence
attacaggtatgcaatatggtgata

SEQ ID NO: 146666 - DNA, 25 bp, Probe sequence
atattgtatctgtaacactaccttg

SEQ ID NO: 146667 - DNA, 25 bp, Probe sequence
atgacaggggtattagtttgtattt

SEQ ID NO: 146668 - DNA, 25 bp, Probe sequence
agtcgtggcgcagtgtttggtatga

SEQ ID NO: 146669 - DNA, 25 bp, Probe sequence
aagctggttcatcagtgcagtatgt

SEQ ID NO: 146670 - DNA, 25 bp, Probe sequence
aagtcgctgtgcatgtaagtcgtgg

SEQ ID NO: 146671 - DNA, 25 bp, Probe sequence
aatatggtgataaagtcgctgtgca

SEQ ID NO: 146672 - DNA, 25 bp, Probe sequence
cactaccttggaaagaatttggcgg

SEQ ID NO: 146673 - DNA, 25 bp, Probe sequence
gcatagttggaaagctggaaaatcg

SEQ ID NO: 146674 - DNA, 25 bp, Probe sequence
ccggcagtatttttagtgtctatgt

SEQ ID NO: 146675 - DNA, 25 bp, Probe sequence
gctgtgcatgtaagtcgtggcgcag

SEQ ID NO: 146676 - DNA, 25 bp, Probe sequence
gcatgtaagtcgtggcgcagtgttt

SEQ ID NO: 146677 - DNA, 25 bp, Probe sequence
gcaacgtttccggcagtatttttag

SEQ ID NO: 146678 - DNA, 25 bp, Probe sequence
gaatttggcggtatatttgcaacgt

SEQ ID NO: 146679 - DNA, 25 bp, Probe sequence
gacgcacatgtggttgattagcatt

SEQ ID NO: 146680 - DNA, 25 bp, Probe sequence
gttggtttcctaagctggttcatca

SEQ ID NO: 146681 - DNA, 25 bp, Probe sequence
gtttccggcagtatttttagtgtct

SEQ ID NO: 146682 - DNA, 25 bp, Probe sequence
gttacatatgacgcacatgtggttg

SEQ ID NO: 146683 - DNA, 25 bp, Probe sequence
gtttcctaagctggttcatcagtgc

SEQ ID NO: 146684 - DNA, 25 bp, Probe sequence
gtttgtattttagttacatggatga

SEQ ID NO: 146685 - DNA, 25 bp, Probe sequence
gtatctgtaacactaccttggaaag

SEQ ID NO: 146686 - DNA, 25 bp, Probe sequence
gtaagtcgtggcgcagtgtttggta

SEQ ID NO: 146687 - DNA, 25 bp, Probe sequence
gtgtctatgtttattacaggtatgc

SEQ ID NO: 146688 - DNA, 25 bp, Probe sequence
gggggatttgcagtattattaagtt

SEQ ID NO: 146689 - DNA, 25 bp, Probe sequence
ggtatatttgcaacgtttccggcag

SEQ ID NO: 146690 - DNA, 25 bp, Probe sequence
ggttcatcagtgcagtatgtatttt

SEQ ID NO: 146691 - DNA, 25 bp, Probe sequence
ggatgatgttacatatgacgcacat

SEQ ID NO: 146692 - DNA, 25 bp, Probe sequence
ggcgcagtgtttggtatgacagggg

SEQ ID NO: 146693 - DNA, 25 bp, Probe sequence
tcctaagctggttcatcagtgcagt

SEQ ID NO: 146694 - DNA, 25 bp, Probe sequence
tcagtgcagtatgtatttttgaagc

SEQ ID NO: 146695 - DNA, 25 bp, Probe sequence
tatttgcaacgtttccggcagtatt

SEQ ID NO: 146696 - DNA, 25 bp, Probe sequence
tttttgtggggggatttgcagtatt

SEQ ID NO: 146697 - DNA, 25 bp, Probe sequence
ttggcggtatatttgcaacgtttcc

SEQ ID NO: 146698 - DNA, 25 bp, Probe sequence
ttgttggtttcctaagctggttcat

SEQ ID NO: 146699 - DNA, 25 bp, Probe sequence
attggtggtatcgctgttgcattag

SEQ ID NO: 146700 - DNA, 25 bp, Probe sequence
attgtcggtattctgtcttgtatat

SEQ ID NO: 146701 - DNA, 25 bp, Probe sequence
atagctactatgccggcagtctttc

SEQ ID NO: 146702 - DNA, 25 bp, Probe sequence
ggtattctgtcttgtatattaactg

SEQ ID NO: 146703 - DNA, 25 bp, Probe sequence
caattagtggagatgtcgatgaatc

SEQ ID NO: 146704 - DNA, 25 bp, Probe sequence
gcataaaggttatcggaaaggcgca

SEQ ID NO: 146705 - DNA, 25 bp, Probe sequence
cttcattttgtcattggtggtatcg

SEQ ID NO: 146706 - DNA, 25 bp, Probe sequence
gcattagcttcaattattgctgata

SEQ ID NO: 146707 - DNA, 25 bp, Probe sequence
gcagtctttcttgcggctattatcg

SEQ ID NO: 146708 - DNA, 25 bp, Probe sequence
gcaatattcagtattagacatttat

SEQ ID NO: 146709 - DNA, 25 bp, Probe sequence
gcaattgtcggtattctgtcttgta

SEQ ID NO: 146710 - DNA, 25 bp, Probe sequence
gaatcttagtactggagcaattgtc

SEQ ID NO: 146711 - DNA, 25 bp, Probe sequence
gaggtattatagctactatgccggc

SEQ ID NO: 146712 - DNA, 25 bp, Probe sequence
gttgcattagcttcaattattgctg

SEQ ID NO: 146713 - DNA, 25 bp, Probe sequence
gtatcgctgttgcattagcttcaat

SEQ ID NO: 146714 - DNA, 25 bp, Probe sequence
gtactggagcaattgtcggtattct

SEQ ID NO: 146715 - DNA, 25 bp, Probe sequence
gtcattggtggtatcgctgttgcat

SEQ ID NO: 146716 - DNA, 25 bp, Probe sequence
gtcgatgaatcttagtactggagca

SEQ ID NO: 146717 - DNA, 25 bp, Probe sequence
gtctttcttgcggctattatcgcat

SEQ ID NO: 146718 - DNA, 25 bp, Probe sequence
gtcggtattctgtcttgtatattaa

SEQ ID NO: 146719 - DNA, 25 bp, Probe sequence
gtggtatcgctgttgcattagcttc

SEQ ID NO: 146720 - DNA, 25 bp, Probe sequence
ggagcaattgtcggtattctgtctt

SEQ ID NO: 146721 - DNA, 25 bp, Probe sequence
ggaaaggcgcaatattcacagttgt

SEQ ID NO: 146722 - DNA, 25 bp, Probe sequence
ggcgcaatattcacagttgtttgtt

SEQ ID NO: 146723 - DNA, 25 bp, Probe sequence
tcgctgttgcattagcttcaattat

SEQ ID NO: 146724 - DNA, 25 bp, Probe sequence
taactgtatttttgacatctctcta

SEQ ID NO: 146725 - DNA, 25 bp, Probe sequence
taggtggtaagttaggaggtattat

SEQ ID NO: 146726 - DNA, 25 bp, Probe sequence
tatgccggcagtctttcttgcggct

SEQ ID NO: 146727 - DNA, 25 bp, Probe sequence
tattcacagttgtttgttggtttgt

SEQ ID NO: 146728 - DNA, 25 bp, Probe sequence
ttttgtcattggtggtatcgctgtt

SEQ ID NO: 146729 - DNA, 25 bp, Probe sequence
ttatagctactatgccggcagtctt

SEQ ID NO: 146730 - DNA, 25 bp, Probe sequence
ttgctgataaggtaggtggtaagtt

SEQ ID NO: 146731 - DNA, 25 bp, Probe sequence
ttctgtcttgtatattaactgtatt

SEQ ID NO: 146732 - DNA, 25 bp, Probe sequence
ttgcggctattatcgcattagcttt

SEQ ID NO: 146733 - DNA, 25 bp, Probe sequence
atcgcaatagtaatgttgaatccat

SEQ ID NO: 146734 - DNA, 25 bp, Probe sequence
actaaatttacctcaagcagacgtt

SEQ ID NO: 146735 - DNA, 25 bp, Probe sequence
acagactgaagatagagtacgccaa

SEQ ID NO: 146736 - DNA, 25 bp, Probe sequence
aaagagaaaatttgtctgttgttga

SEQ ID NO: 146737 - DNA, 25 bp, Probe sequence
aagcgttgattgagcaagtcattgc

SEQ ID NO: 146738 - DNA, 25 bp, Probe sequence
aagatgacatcattggacatattga

SEQ ID NO: 146739 - DNA, 25 bp, Probe sequence
aagtcaaagcacaaaaccttcgctt

SEQ ID NO: 146740 - DNA, 25 bp, Probe sequence
aagtcaaagctttattgcaaataag

SEQ ID NO: 146741 - DNA, 25 bp, Probe sequence
aattattgctggagagcgccgattt

SEQ ID NO: 146742 - DNA, 25 bp, Probe sequence
caagcacgagatgaggtaggcaaaa

SEQ ID NO: 146743 - DNA, 25 bp, Probe sequence
ctgttgttgaagaagcggaagccta

SEQ ID NO: 146744 - DNA, 25 bp, Probe sequence
cctattgttgtaagaccgattgaag

SEQ ID NO: 146745 - DNA, 25 bp, Probe sequence
ccaaccgttatcaaccaagacaggt

SEQ ID NO: 146746 - DNA, 25 bp, Probe sequence
gcgtttattgaagttggcgccgaaa

SEQ ID NO: 146747 - DNA, 25 bp, Probe sequence
gcgagagcggtattatcattgtctg

SEQ ID NO: 146748 - DNA, 25 bp, Probe sequence
gcaatacaatcactaaatttacctc

SEQ ID NO: 146749 - DNA, 25 bp, Probe sequence
gaatccattcaaattgaacgtatcg

SEQ ID NO: 146750 - DNA, 25 bp, Probe sequence
gaagcggaagcctataagaaattat

SEQ ID NO: 146751 - DNA, 25 bp, Probe sequence
gaacttgctgaatcaatacatgaac

SEQ ID NO: 146752 - DNA, 25 bp, Probe sequence
gaaagtactacttcgcttaagagaa

SEQ ID NO: 146753 - DNA, 25 bp, Probe sequence
gacgttattattcgtgatatggatg

SEQ ID NO: 146754 - DNA, 25 bp, Probe sequence
gagcgccgatttagagcaatacaat

SEQ ID NO: 146755 - DNA, 25 bp, Probe sequence
gatacaacgcaaagtgaattggcaa

SEQ ID NO: 146756 - DNA, 25 bp, Probe sequence
gatatgtttgaaattattgctggag

SEQ ID NO: 146757 - DNA, 25 bp, Probe sequence
gttggcgccgaaagtactacttcgc

SEQ ID NO: 146758 - DNA, 25 bp, Probe sequence
gtatccaagcgattcaacaaacagg

SEQ ID NO: 146759 - DNA, 25 bp, Probe sequence
ggtaggcaaaagtatccaagcgatt

SEQ ID NO: 146760 - DNA, 25 bp, Probe sequence
ggagagcgccgatttagagcaatac

SEQ ID NO: 146761 - DNA, 25 bp, Probe sequence
ggaaattggtgatacaacgcaaagt

SEQ ID NO: 146762 - DNA, 25 bp, Probe sequence
ggcgccgaaagtactacttcgctta

SEQ ID NO: 146763 - DNA, 25 bp, Probe sequence
tggatgatgaagagacggctgttgt

SEQ ID NO: 146764 - DNA, 25 bp, Probe sequence
tgaacgtatcgttcccaaccgttat

SEQ ID NO: 146765 - DNA, 25 bp, Probe sequence
ttcccaaccgttatcaaccaagaca

SEQ ID NO: 146766 - DNA, 25 bp, Probe sequence
ttacctcaagcagacgttattattc

SEQ ID NO: 146767 - DNA, 25 bp, Probe sequence
atttagcgtcagaattacaattaca

SEQ ID NO: 146768 - DNA, 25 bp, Probe sequence
atttgcaattagtgtgttaggtggt

SEQ ID NO: 146769 - DNA, 25 bp, Probe sequence
atcgtttacttgttgaatggaatga

SEQ ID NO: 146770 - DNA, 25 bp, Probe sequence
atgtttccgcagttaaaagtgacga

SEQ ID NO: 146771 - DNA, 25 bp, Probe sequence
atgtaggcgctggagctggttttcc

SEQ ID NO: 146772 - DNA, 25 bp, Probe sequence
agagcagtagctagattatccgtgt

SEQ ID NO: 146773 - DNA, 25 bp, Probe sequence
accagggacgcctaataagactcct

SEQ ID NO: 146774 - DNA, 25 bp, Probe sequence
acatttttatgattccattgcacct

SEQ ID NO: 146775 - DNA, 25 bp, Probe sequence
acatattatcgtttacttgttgaat

SEQ ID NO: 146776 - DNA, 25 bp, Probe sequence
acacgatagagcagaaacatttggt

SEQ ID NO: 146777 - DNA, 25 bp, Probe sequence
acaacagtttcaaacatattatcgt

SEQ ID NO: 146778 - DNA, 25 bp, Probe sequence
aaaggtggacagtttgttgcattaa

SEQ ID NO: 146779 - DNA, 25 bp, Probe sequence
aaagtgacgattgttgattcattaa

SEQ ID NO: 146780 - DNA, 25 bp, Probe sequence
caagtattacagatgaacacgatgt

SEQ ID NO: 146781 - DNA, 25 bp, Probe sequence
gcctaataagactcctttacttgaa

SEQ ID NO: 146782 - DNA, 25 bp, Probe sequence
gccagaagatgctggagagcgccag

SEQ ID NO: 146783 - DNA, 25 bp, Probe sequence
gacgcctaataagactcctttactt

SEQ ID NO: 146784 - DNA, 25 bp, Probe sequence
gaaacatttggtaagggtgtctaca

SEQ ID NO: 146785 - DNA, 25 bp, Probe sequence
gacagtttgttgcattaaaatcttc

SEQ ID NO: 146786 - DNA, 25 bp, Probe sequence
gactgtagaatggttagcagaacaa

SEQ ID NO: 146787 - DNA, 25 bp, Probe sequence
gagctggttttccaagtattccgtt

SEQ ID NO: 146788 - DNA, 25 bp, Probe sequence
gagcgccagatgttcattattgata

SEQ ID NO: 146789 - DNA, 25 bp, Probe sequence
gattttaatcagcctataagtatat

SEQ ID NO: 146790 - DNA, 25 bp, Probe sequence
gattccattgcacctagtttttatt

SEQ ID NO: 146791 - DNA, 25 bp, Probe sequence
gttgattcattaaataagcgtattc

SEQ ID NO: 146792 - DNA, 25 bp, Probe sequence
gtatatgtgatgtaggcgctggagc

SEQ ID NO: 146793 - DNA, 25 bp, Probe sequence
gggtgtctacagggagtcttatgat

SEQ ID NO: 146794 - DNA, 25 bp, Probe sequence
gggagtcttatgatgttgttactgc

SEQ ID NO: 146795 - DNA, 25 bp, Probe sequence
ggatgtcagctttatacacgataga

SEQ ID NO: 146796 - DNA, 25 bp, Probe sequence
tggagagcgccagatgttcattatt

SEQ ID NO: 146797 - DNA, 25 bp, Probe sequence
tacaattacaggatgtcagctttat

SEQ ID NO: 146798 - DNA, 25 bp, Probe sequence
taggcgctggagctggttttccaag

SEQ ID NO: 146799 - DNA, 25 bp, Probe sequence
tatgatgttgttactgcaagagcag

SEQ ID NO: 146800 - DNA, 25 bp, Probe sequence
ttgcacctagtttttattttgattt

SEQ ID NO: 146801 - DNA, 25 bp, Probe sequence
atgatgcgattgtgccaacgcagtt

SEQ ID NO: 146802 - DNA, 25 bp, Probe sequence
agtcttcctgaacatgtgcaacgtc

SEQ ID NO: 146803 - DNA, 25 bp, Probe sequence
agagcctgaaggtcgtaatacaaat

SEQ ID NO: 146804 - DNA, 25 bp, Probe sequence
agagcactaagagcgcaagcagata

SEQ ID NO: 146805 - DNA, 25 bp, Probe sequence
agcagatatgatgcgtgccggctac

SEQ ID NO: 146806 - DNA, 25 bp, Probe sequence
acgcagacctgaaatgacttacgat

SEQ ID NO: 146807 - DNA, 25 bp, Probe sequence
aacaggtacaccaccgcgtgtaaat

SEQ ID NO: 146808 - DNA, 25 bp, Probe sequence
aacaacatggtggttctcgcttaaa

SEQ ID NO: 146809 - DNA, 25 bp, Probe sequence
aaccaaacgaacatacgcaagcgat

SEQ ID NO: 146810 - DNA, 25 bp, Probe sequence
aacccatctgtaggtggaccagcta

SEQ ID NO: 146811 - DNA, 25 bp, Probe sequence
aaggacctgctgtaagagcactaag

SEQ ID NO: 146812 - DNA, 25 bp, Probe sequence
cgtgccggctacgcaattgaatatg

SEQ ID NO: 146813 - DNA, 25 bp, Probe sequence
ccaacgcagttatggcctacacttg

SEQ ID NO: 146814 - DNA, 25 bp, Probe sequence
ccacgttattgcccttcaattgaag

SEQ ID NO: 146815 - DNA, 25 bp, Probe sequence
gcgacatcaacttttcttagagcct

SEQ ID NO: 146816 - DNA, 25 bp, Probe sequence
gctatcgatttattacgcagacctg

SEQ ID NO: 146817 - DNA, 25 bp, Probe sequence
gcatttatgccatgtaacccatctg

SEQ ID NO: 146818 - DNA, 25 bp, Probe sequence
gaatatcgtttgttactacgtcatg

SEQ ID NO: 146819 - DNA, 25 bp, Probe sequence
gaaccttatcgtttactaacatcac

SEQ ID NO: 146820 - DNA, 25 bp, Probe sequence
gttggctaacgtatactaatgctga

SEQ ID NO: 146821 - DNA, 25 bp, Probe sequence
gatggcaggtattaacgctgcaggt

SEQ ID NO: 146822 - DNA, 25 bp, Probe sequence
gatgtaatcgttataggtgcgggac

SEQ ID NO: 146823 - DNA, 25 bp, Probe sequence
gatgattaaaggaaccgggccacgt

SEQ ID NO: 146824 - DNA, 25 bp, Probe sequence
gatagtttggcgactgaagcgcgag

SEQ ID NO: 146825 - DNA, 25 bp, Probe sequence
gataagccgcgacatcaacttttct

SEQ ID NO: 146826 - DNA, 25 bp, Probe sequence
gtttagcatctgcaagacgtggtgc

SEQ ID NO: 146827 - DNA, 25 bp, Probe sequence
gtttactaacatcacgtgcagaata

SEQ ID NO: 146828 - DNA, 25 bp, Probe sequence
ggggtaaatccagcagacatatcta

SEQ ID NO: 146829 - DNA, 25 bp, Probe sequence
ggtgcgggacatgcaggtgtagaag

SEQ ID NO: 146830 - DNA, 25 bp, Probe sequence
ggtcgtgcattcagctttgaaacaa

SEQ ID NO: 146831 - DNA, 25 bp, Probe sequence
ggattgtctacaagtcttcctgaac

SEQ ID NO: 146832 - DNA, 25 bp, Probe sequence
ggaccaaatcaccaattaccatcaa

SEQ ID NO: 146833 - DNA, 25 bp, Probe sequence
tattagatcaattgccatgttggct

SEQ ID NO: 146834 - DNA, 25 bp, Probe sequence
ttaccatcaatcacattatcagaca

SEQ ID NO: 146835 - DNA, 25 bp, Probe sequence
atcgtttattagataccggtgcgca

SEQ ID NO: 146836 - DNA, 25 bp, Probe sequence
attgtcatggtggtattttaacgat

SEQ ID NO: 146837 - DNA, 25 bp, Probe sequence
atgatgttccatcacatacgattaa

SEQ ID NO: 146838 - DNA, 25 bp, Probe sequence
acgagtatttcaacaccaatgggtg

SEQ ID NO: 146839 - DNA, 25 bp, Probe sequence
acggtcatattattgatccagagtc

SEQ ID NO: 146840 - DNA, 25 bp, Probe sequence
aaagcgattgtaactgaggtagcag

SEQ ID NO: 146841 - DNA, 25 bp, Probe sequence
aaacatttacacgcgaagatattat

SEQ ID NO: 146842 - DNA, 25 bp, Probe sequence
aacgctctagaaaggctcttagcca

SEQ ID NO: 146843 - DNA, 25 bp, Probe sequence
aagaagttatggtgtctgtgttaag

SEQ ID NO: 146844 - DNA, 25 bp, Probe sequence
aattcgagatttgttctttggtgga

SEQ ID NO: 146845 - DNA, 25 bp, Probe sequence
cagttatggactttattcgctcgaa

SEQ ID NO: 146846 - DNA, 25 bp, Probe sequence
ctcatcgatcagttattcagtcaat

SEQ ID NO: 146847 - DNA, 25 bp, Probe sequence
gcgactactgaatttcttttagagc

SEQ ID NO: 146848 - DNA, 25 bp, Probe sequence
gcattgactcaagaagattacacat

SEQ ID NO: 146849 - DNA, 25 bp, Probe sequence
gaagattggtgttgaacgctctaga

SEQ ID NO: 146850 - DNA, 25 bp, Probe sequence
gagatactcgctcaagtggaagtga

SEQ ID NO: 146851 - DNA, 25 bp, Probe sequence
gagactgcaagtgatgaactcatcg

SEQ ID NO: 146852 - DNA, 25 bp, Probe sequence
gagtgctggaacttactatgacata

SEQ ID NO: 146853 - DNA, 25 bp, Probe sequence
gatgatgttgaagatgcgactactg

SEQ ID NO: 146854 - DNA, 25 bp, Probe sequence
gatgcagcagaatctggtgtgccta

SEQ ID NO: 146855 - DNA, 25 bp, Probe sequence
gatagagcttctaaagttgcgatga

SEQ ID NO: 146856 - DNA, 25 bp, Probe sequence
gatacgccattaattcaaacttcaa

SEQ ID NO: 146857 - DNA, 25 bp, Probe sequence
gatatgacttatgtttctaattcaa

SEQ ID NO: 146858 - DNA, 25 bp, Probe sequence
gattagttgatactgctggtatacg

SEQ ID NO: 146859 - DNA, 25 bp, Probe sequence
gattatcctgaatacgatgatgttg

SEQ ID NO: 146860 - DNA, 25 bp, Probe sequence
gttattcagtcaattctgcttaggt

SEQ ID NO: 146861 - DNA, 25 bp, Probe sequence
ggtcgtattgatttatctcaagctg

SEQ ID NO: 146862 - DNA, 25 bp, Probe sequence
ggaattgttcgattgtctggaccgc

SEQ ID NO: 146863 - DNA, 25 bp, Probe sequence
tgacatatggcgctagaatggctga

SEQ ID NO: 146864 - DNA, 25 bp, Probe sequence
tgaaggtcgtctaagtgacttaatc

SEQ ID NO: 146865 - DNA, 25 bp, Probe sequence
tctggtgtgcctatggatatggtac

SEQ ID NO: 146866 - DNA, 25 bp, Probe sequence
tctggaccgcaagccgttgaaattg

SEQ ID NO: 146867 - DNA, 25 bp, Probe sequence
tacaagatgcgattgatgcagcaga

SEQ ID NO: 146868 - DNA, 25 bp, Probe sequence
tatgcgtgaaggtttatctacagtt

SEQ ID NO: 146869 - DNA, 25 bp, Probe sequence
atagtcttgagcacgtacttaaaat

SEQ ID NO: 146870 - DNA, 25 bp, Probe sequence
agcttaccgaattaaaaagaatgca

SEQ ID NO: 146871 - DNA, 25 bp, Probe sequence
acataagtcgcatatattggccaaa

SEQ ID NO: 146872 - DNA, 25 bp, Probe sequence
acagaatagtcttgagcacgtactt

SEQ ID NO: 146873 - DNA, 25 bp, Probe sequence
aaaaaaggtcattctgtagccaaca

SEQ ID NO: 146874 - DNA, 25 bp, Probe sequence
aaaactaggtaatgcagtgttaaga

SEQ ID NO: 146875 - DNA, 25 bp, Probe sequence
aagaaatagaccattttcgcttagg

SEQ ID NO: 146876 - DNA, 25 bp, Probe sequence
aaggtcattctgtagccaacagaca

SEQ ID NO: 146877 - DNA, 25 bp, Probe sequence
aatagaccattttcgcttaggtatt

SEQ ID NO: 146878 - DNA, 25 bp, Probe sequence
aatacagaatagtcttgagcacgta

SEQ ID NO: 146879 - DNA, 25 bp, Probe sequence
caatttgttgtatacacttgtaata

SEQ ID NO: 146880 - DNA, 25 bp, Probe sequence
caagacagccagctaaagatatgac

SEQ ID NO: 146881 - DNA, 25 bp, Probe sequence
cagacaatttgttgtatacacttgt

SEQ ID NO: 146882 - DNA, 25 bp, Probe sequence
ccattttcgcttaggtattagtgtt

SEQ ID NO: 146883 - DNA, 25 bp, Probe sequence
gcacgtacttaaaattgccaaagtt

SEQ ID NO: 146884 - DNA, 25 bp, Probe sequence
gaatagtcttgagcacgtacttaaa

SEQ ID NO: 146885 - DNA, 25 bp, Probe sequence
gaatgcagattttcagagaatatat

SEQ ID NO: 146886 - DNA, 25 bp, Probe sequence
gaaaatttcaaagtacataagtcgc

SEQ ID NO: 146887 - DNA, 25 bp, Probe sequence
gaaatagaccattttcgcttaggta

SEQ ID NO: 146888 - DNA, 25 bp, Probe sequence
gaccattttcgcttaggtattagtg

SEQ ID NO: 146889 - DNA, 25 bp, Probe sequence
gtagccaacagacaatttgttgtat

SEQ ID NO: 146890 - DNA, 25 bp, Probe sequence
gtacataagtcgcatatattggcca

SEQ ID NO: 146891 - DNA, 25 bp, Probe sequence
gtaatagcaagacagccagctaaag

SEQ ID NO: 146892 - DNA, 25 bp, Probe sequence
gtcttgagcacgtacttaaaattgc

SEQ ID NO: 146893 - DNA, 25 bp, Probe sequence
gtcgcatatattggccaaagatatt

SEQ ID NO: 146894 - DNA, 25 bp, Probe sequence
ggtcattctgtagccaacagacaat

SEQ ID NO: 146895 - DNA, 25 bp, Probe sequence
tgttattggaaaaagcttaccgaat

SEQ ID NO: 146896 - DNA, 25 bp, Probe sequence
tgagcacgtacttaaaattgccaaa

SEQ ID NO: 146897 - DNA, 25 bp, Probe sequence
tcgcttaggtattagtgtttctaaa

SEQ ID NO: 146898 - DNA, 25 bp, Probe sequence
taagtcgcatatattggccaaagat

SEQ ID NO: 146899 - DNA, 25 bp, Probe sequence
tagaccattttcgcttaggtattag

SEQ ID NO: 146900 - DNA, 25 bp, Probe sequence
tattggccaaagatattattgtaat

SEQ ID NO: 146901 - DNA, 25 bp, Probe sequence
ttattgtaatagcaagacagccagc

SEQ ID NO: 146902 - DNA, 25 bp, Probe sequence
ttttcgcttaggtattagtgtttct

SEQ ID NO: 146903 - DNA, 25 bp, Probe sequence
atagtaaagttcatggtttcagaaa

SEQ ID NO: 146904 - DNA, 25 bp, Probe sequence
atggccgtaaagttttagcgcgccg

SEQ ID NO: 146905 - DNA, 25 bp, Probe sequence
aggccgtaaagttttatctgcataa

SEQ ID NO: 146906 - DNA, 25 bp, Probe sequence
agttcatggtttcagaaaacgcatg

SEQ ID NO: 146907 - DNA, 25 bp, Probe sequence
acgtaaacatagtaaagttcatggt

SEQ ID NO: 146908 - DNA, 25 bp, Probe sequence
acatagtaaagttcatggtttcaga

SEQ ID NO: 146909 - DNA, 25 bp, Probe sequence
aaaggccgtaaagttttatctgcat

SEQ ID NO: 146910 - DNA, 25 bp, Probe sequence
aaagttcatggtttcagaaaacgca

SEQ ID NO: 146911 - DNA, 25 bp, Probe sequence
aaacgtaaacatagtaaagttcatg

SEQ ID NO: 146912 - DNA, 25 bp, Probe sequence
aaacatagtaaagttcatggtttca

SEQ ID NO: 146913 - DNA, 25 bp, Probe sequence
aacatagtaaagttcatggtttcag

SEQ ID NO: 146914 - DNA, 25 bp, Probe sequence
aacgtaaacatagtaaagttcatgg

SEQ ID NO: 146915 - DNA, 25 bp, Probe sequence
aagttcatggtttcagaaaacgcat

SEQ ID NO: 146916 - DNA, 25 bp, Probe sequence
aaggccgtaaagttttatctgcata

SEQ ID NO: 146917 - DNA, 25 bp, Probe sequence
catagtaaagttcatggtttcagaa

SEQ ID NO: 146918 - DNA, 25 bp, Probe sequence
cgtaaacatagtaaagttcatggtt

SEQ ID NO: 146919 - DNA, 25 bp, Probe sequence
gttcatggtttcagaaaacgcatga

SEQ ID NO: 146920 - DNA, 25 bp, Probe sequence
gtaaacatagtaaagttcatggttt

SEQ ID NO: 146921 - DNA, 25 bp, Probe sequence
gtaaagttcatggtttcagaaaacg

SEQ ID NO: 146922 - DNA, 25 bp, Probe sequence
tggccgtaaagttttagcgcgccgt

SEQ ID NO: 146923 - DNA, 25 bp, Probe sequence
taaagttcatggtttcagaaaacgc

SEQ ID NO: 146924 - DNA, 25 bp, Probe sequence
taaacgtaaacatagtaaagttcat

SEQ ID NO: 146925 - DNA, 25 bp, Probe sequence
taaaggccgtaaagttttatctgca

SEQ ID NO: 146926 - DNA, 25 bp, Probe sequence
taaacatagtaaagttcatggtttc

SEQ ID NO: 146927 - DNA, 25 bp, Probe sequence
tagtaaagttcatggtttcagaaaa

SEQ ID NO: 146928 - DNA, 25 bp, Probe sequence
ttcatggtttcagaaaacgcatgag

SEQ ID NO: 146929 - DNA, 25 bp, Probe sequence
atagcaatcaaggtttacaagccaa

SEQ ID NO: 146930 - DNA, 25 bp, Probe sequence
atacaattcactatttatcgcaaga

SEQ ID NO: 146931 - DNA, 25 bp, Probe sequence
atcaaggtttacaagccaatccaca

SEQ ID NO: 146932 - DNA, 25 bp, Probe sequence
aggtttacaagccaatccacaatat

SEQ ID NO: 146933 - DNA, 25 bp, Probe sequence
agcaatcaaggtttacaagccaatc

SEQ ID NO: 146934 - DNA, 25 bp, Probe sequence
agccaatccacaatatacaattcac

SEQ ID NO: 146935 - DNA, 25 bp, Probe sequence
acaagccaatccacaatatacaatt

SEQ ID NO: 146936 - DNA, 25 bp, Probe sequence
acaattcactatttatcgcaagaaa

SEQ ID NO: 146937 - DNA, 25 bp, Probe sequence
aagccaatccacaatatacaattca

SEQ ID NO: 146938 - DNA, 25 bp, Probe sequence
aagactaacacaagaaaatgcaatg

SEQ ID NO: 146939 - DNA, 25 bp, Probe sequence
aaggtttacaagccaatccacaata

SEQ ID NO: 146940 - DNA, 25 bp, Probe sequence
aatcaaggtttacaagccaatccac

SEQ ID NO: 146941 - DNA, 25 bp, Probe sequence
aatccacaatatacaattcactatt

SEQ ID NO: 146942 - DNA, 25 bp, Probe sequence
aattcactatttatcgcaagaaatc

SEQ ID NO: 146943 - DNA, 25 bp, Probe sequence
caatcaaggtttacaagccaatcca

SEQ ID NO: 146944 - DNA, 25 bp, Probe sequence
caatccacaatatacaattcactat

SEQ ID NO: 146945 - DNA, 25 bp, Probe sequence
caaggtttacaagccaatccacaat

SEQ ID NO: 146946 - DNA, 25 bp, Probe sequence
caagccaatccacaatatacaattc

SEQ ID NO: 146947 - DNA, 25 bp, Probe sequence
ccaatccacaatatacaattcacta

SEQ ID NO: 146948 - DNA, 25 bp, Probe sequence
gccaatccacaatatacaattcact

SEQ ID NO: 146949 - DNA, 25 bp, Probe sequence
gcaatcaaggtttacaagccaatcc

SEQ ID NO: 146950 - DNA, 25 bp, Probe sequence
gcaagaaatcacaagactaacacaa

SEQ ID NO: 146951 - DNA, 25 bp, Probe sequence
gaaatcacaagactaacacaagaaa

SEQ ID NO: 146952 - DNA, 25 bp, Probe sequence
gatagcaatcaaggtttacaagcca

SEQ ID NO: 146953 - DNA, 25 bp, Probe sequence
tccacaatatacaattcactattta

SEQ ID NO: 146954 - DNA, 25 bp, Probe sequence
tcgcaagaaatcacaagactaacac

SEQ ID NO: 146955 - DNA, 25 bp, Probe sequence
tcaaggtttacaagccaatccacaa

SEQ ID NO: 146956 - DNA, 25 bp, Probe sequence
tacaagccaatccacaatatacaat

SEQ ID NO: 146957 - DNA, 25 bp, Probe sequence
tacaattcactatttatcgcaagaa

SEQ ID NO: 146958 - DNA, 25 bp, Probe sequence
tatcgcaagaaatcacaagactaac

SEQ ID NO: 146959 - DNA, 25 bp, Probe sequence
tatacaattcactatttatcgcaag

SEQ ID NO: 146960 - DNA, 25 bp, Probe sequence
tttatcgcaagaaatcacaagacta

SEQ ID NO: 146961 - DNA, 25 bp, Probe sequence
ttacaagccaatccacaatatacaa

SEQ ID NO: 146962 - DNA, 25 bp, Probe sequence
ttcactatttatcgcaagaaatcac

SEQ ID NO: 146963 - DNA, 25 bp, Probe sequence
atactggacccttcaatcatcaaga

SEQ ID NO: 146964 - DNA, 25 bp, Probe sequence
atgatttaaaaccctcaattatctc

SEQ ID NO: 146965 - DNA, 25 bp, Probe sequence
acaccaaaatactggacccttcaat

SEQ ID NO: 146966 - DNA, 25 bp, Probe sequence
agtatgatttaaaaccctcaattat

SEQ ID NO: 146967 - DNA, 25 bp, Probe sequence
acccttcaatcatcaagataattta

SEQ ID NO: 146968 - DNA, 25 bp, Probe sequence
actggacccttcaatcatcaagata

SEQ ID NO: 146969 - DNA, 25 bp, Probe sequence
aaatggtaagcttaagaatgaaatt

SEQ ID NO: 146970 - DNA, 25 bp, Probe sequence
aaaccctcaattatctcaaattcga

SEQ ID NO: 146971 - DNA, 25 bp, Probe sequence
aaaaccctcaattatctcaaattcg

SEQ ID NO: 146972 - DNA, 25 bp, Probe sequence
aaaatactggacccttcaatcatca

SEQ ID NO: 146973 - DNA, 25 bp, Probe sequence
aaccctcaattatctcaaattcgat

SEQ ID NO: 146974 - DNA, 25 bp, Probe sequence
aatggaacatgatgttttaaagcaa

SEQ ID NO: 146975 - DNA, 25 bp, Probe sequence
aatactggacccttcaatcatcaag

SEQ ID NO: 146976 - DNA, 25 bp, Probe sequence
caaaatactggacccttcaatcatc

SEQ ID NO: 146977 - DNA, 25 bp, Probe sequence
caacaccaaaatactggacccttca

SEQ ID NO: 146978 - DNA, 25 bp, Probe sequence
caccaaaatactggacccttcaatc

SEQ ID NO: 146979 - DNA, 25 bp, Probe sequence
ctggacccttcaatcatcaagataa

SEQ ID NO: 146980 - DNA, 25 bp, Probe sequence
ccctcaattatctcaaattcgataa

SEQ ID NO: 146981 - DNA, 25 bp, Probe sequence
cccttcaatcatcaagataatttaa

SEQ ID NO: 146982 - DNA, 25 bp, Probe sequence
ccaaaatactggacccttcaatcat

SEQ ID NO: 146983 - DNA, 25 bp, Probe sequence
gaaagtatgatttaaaaccctcaat

SEQ ID NO: 146984 - DNA, 25 bp, Probe sequence
gacccttcaatcatcaagataattt

SEQ ID NO: 146985 - DNA, 25 bp, Probe sequence
gatttaaaaccctcaattatctcaa

SEQ ID NO: 146986 - DNA, 25 bp, Probe sequence
gtatgatttaaaaccctcaattatc

SEQ ID NO: 146987 - DNA, 25 bp, Probe sequence
accctcaattatctcaaattcgata

SEQ ID NO: 146988 - DNA, 25 bp, Probe sequence
ggacccttcaatcatcaagataatt

SEQ ID NO: 146989 - DNA, 25 bp, Probe sequence
tggacccttcaatcatcaagataat

SEQ ID NO: 146990 - DNA, 25 bp, Probe sequence
tgatttaaaaccctcaattatctca

SEQ ID NO: 146991 - DNA, 25 bp, Probe sequence
tctcaaattcgataaaacaacacca

SEQ ID NO: 146992 - DNA, 25 bp, Probe sequence
tcaaattcgataaaacaacaccaaa

SEQ ID NO: 146993 - DNA, 25 bp, Probe sequence
taaaaccctcaattatctcaaattc

SEQ ID NO: 146994 - DNA, 25 bp, Probe sequence
tactggacccttcaatcatcaagat

SEQ ID NO: 146995 - DNA, 25 bp, Probe sequence
tttaaaaccctcaattatctcaaat

SEQ ID NO: 146996 - DNA, 25 bp, Probe sequence
ttaaaaccctcaattatctcaaatt

SEQ ID NO: 146997 - DNA, 25 bp, Probe sequence
attgaaacaacgcgatgaaaaaacg

SEQ ID NO: 146998 - DNA, 25 bp, Probe sequence
attgatatgactaggagagaattag

SEQ ID NO: 146999 - DNA, 25 bp, Probe sequence
atgaaaaaacgcccaactccaatca

SEQ ID NO: 147000 - DNA, 25 bp, Probe sequence
atgactaggagagaattagaatacc

SEQ ID NO: 147001 - DNA, 25 bp, Probe sequence
aggaattgaaacaacgcgatgaaaa

SEQ ID NO: 147002 - DNA, 25 bp, Probe sequence
actaggagagaattagaatacctta

SEQ ID NO: 147003 - DNA, 25 bp, Probe sequence
acaattgatatgactaggagagaat

SEQ ID NO: 147004 - DNA, 25 bp, Probe sequence
aaaggaattgaaacaacgcgatgaa

SEQ ID NO: 147005 - DNA, 25 bp, Probe sequence
aaaaaggaattgaaacaacgcgatg

SEQ ID NO: 147006 - DNA, 25 bp, Probe sequence
aaacaattgatatgactaggagaga

SEQ ID NO: 147007 - DNA, 25 bp, Probe sequence
aaaaaacaattgatatgactaggag

SEQ ID NO: 147008 - DNA, 25 bp, Probe sequence
aaaaacaattgatatgactaggaga

SEQ ID NO: 147009 - DNA, 25 bp, Probe sequence
aaaacaattgatatgactaggagag

SEQ ID NO: 147010 - DNA, 25 bp, Probe sequence
aaaaggaattgaaacaacgcgatga

SEQ ID NO: 147011 - DNA, 25 bp, Probe sequence
aacaattgatatgactaggagagaa

SEQ ID NO: 147012 - DNA, 25 bp, Probe sequence
ctaggagagaattagaataccttaa

SEQ ID NO: 147013 - DNA, 25 bp, Probe sequence
aaggaattgaaacaacgcgatgaaa

SEQ ID NO: 147014 - DNA, 25 bp, Probe sequence
caattgatatgactaggagagaatt

SEQ ID NO: 147015 - DNA, 25 bp, Probe sequence
aattgatatgactaggagagaatta

SEQ ID NO: 147016 - DNA, 25 bp, Probe sequence
caacgcgatgaaaaaacgcccaact

SEQ ID NO: 147017 - DNA, 25 bp, Probe sequence
cgcgatgaaaaaacgcccaactcca

SEQ ID NO: 147018 - DNA, 25 bp, Probe sequence
cgatgaaaaaacgcccaactccaat

SEQ ID NO: 147019 - DNA, 25 bp, Probe sequence
gcgatgaaaaaacgcccaactccaa

SEQ ID NO: 147020 - DNA, 25 bp, Probe sequence
gaattgaaacaacgcgatgaaaaaa

SEQ ID NO: 147021 - DNA, 25 bp, Probe sequence
gactaggagagaattagaatacctt

SEQ ID NO: 147022 - DNA, 25 bp, Probe sequence
gagagaattagaataccttaaaaag

SEQ ID NO: 147023 - DNA, 25 bp, Probe sequence
gatatgactaggagagaattagaat

SEQ ID NO: 147024 - DNA, 25 bp, Probe sequence
gatgaaaaaacgcccaactccaatc

SEQ ID NO: 147025 - DNA, 25 bp, Probe sequence
ggaattgaaacaacgcgatgaaaaa

SEQ ID NO: 147026 - DNA, 25 bp, Probe sequence
tgaaacaacgcgatgaaaaaacgcc

SEQ ID NO: 147027 - DNA, 25 bp, Probe sequence
tgaaaaaacgcccaactccaatcac

SEQ ID NO: 147028 - DNA, 25 bp, Probe sequence
taggagagaattagaataccttaaa

SEQ ID NO: 147029 - DNA, 25 bp, Probe sequence
ttgaaacaacgcgatgaaaaaacgc

SEQ ID NO: 147030 - DNA, 25 bp, Probe sequence
ttgatatgactaggagagaattaga

SEQ ID NO: 147031 - DNA, 25 bp, Probe sequence
attaaatgtcctaccattggaatat

SEQ ID NO: 147032 - DNA, 25 bp, Probe sequence
atatatgggcgcatgtattttatac

SEQ ID NO: 147033 - DNA, 25 bp, Probe sequence
atccagaattaaatgtcctaccatt

SEQ ID NO: 147034 - DNA, 25 bp, Probe sequence
aggctatggcttgaaaattggatta

SEQ ID NO: 147035 - DNA, 25 bp, Probe sequence
atgtcctaccattggaatatatggg

SEQ ID NO: 147036 - DNA, 25 bp, Probe sequence
atggggaatttaggctatggcttga

SEQ ID NO: 147037 - DNA, 25 bp, Probe sequence
accattggaatatatgggcgcatgt

SEQ ID NO: 147038 - DNA, 25 bp, Probe sequence
aaatccagaattaaatgtcctacca

SEQ ID NO: 147039 - DNA, 25 bp, Probe sequence
aaatgtcctaccattggaatatatg

SEQ ID NO: 147040 - DNA, 25 bp, Probe sequence
aatccagaattaaatgtcctaccat

SEQ ID NO: 147041 - DNA, 25 bp, Probe sequence
aattaaatgtcctaccattggaata

SEQ ID NO: 147042 - DNA, 25 bp, Probe sequence
cagaattaaatgtcctaccattgga

SEQ ID NO: 147043 - DNA, 25 bp, Probe sequence
cattggaatatatgggcgcatgtat

SEQ ID NO: 147044 - DNA, 25 bp, Probe sequence
cctaccattggaatatatgggcgca

SEQ ID NO: 147045 - DNA, 25 bp, Probe sequence
ccagaattaaatgtcctaccattgg

SEQ ID NO: 147046 - DNA, 25 bp, Probe sequence
gctatggcttgaaaattggattaag

SEQ ID NO: 147047 - DNA, 25 bp, Probe sequence
gaattaaatgtcctaccattggaat

SEQ ID NO: 147048 - DNA, 25 bp, Probe sequence
gaatatatgggcgcatgtattttat

SEQ ID NO: 147049 - DNA, 25 bp, Probe sequence
gaaaatccagaattaaatgtcctac

SEQ ID NO: 147050 - DNA, 25 bp, Probe sequence
gaaaatagctgaaaatccagaatta

SEQ ID NO: 147051 - DNA, 25 bp, Probe sequence
gtcctaccattggaatatatgggcg

SEQ ID NO: 147052 - DNA, 25 bp, Probe sequence
gggaatttaggctatggcttgaaaa

SEQ ID NO: 147053 - DNA, 25 bp, Probe sequence
ggggaatttaggctatggcttgaaa

SEQ ID NO: 147054 - DNA, 25 bp, Probe sequence
ggaatttaggctatggcttgaaaat

SEQ ID NO: 147055 - DNA, 25 bp, Probe sequence
ggaatatatgggcgcatgtatttta

SEQ ID NO: 147056 - DNA, 25 bp, Probe sequence
ggctatggcttgaaaattggattaa

SEQ ID NO: 147057 - DNA, 25 bp, Probe sequence
tggggaatttaggctatggcttgaa

SEQ ID NO: 147058 - DNA, 25 bp, Probe sequence
tccagaattaaatgtcctaccattg

SEQ ID NO: 147059 - DNA, 25 bp, Probe sequence
taaatgtcctaccattggaatatat

SEQ ID NO: 147060 - DNA, 25 bp, Probe sequence
taggctatggcttgaaaattggatt

SEQ ID NO: 147061 - DNA, 25 bp, Probe sequence
ttaggctatggcttgaaaattggat

SEQ ID NO: 147062 - DNA, 25 bp, Probe sequence
ttaaatgtcctaccattggaatata

SEQ ID NO: 147063 - DNA, 25 bp, Probe sequence
ttggaatatatgggcgcatgtattt

SEQ ID NO: 147064 - DNA, 25 bp, Probe sequence
ttggattaagcaaattatcagataa

SEQ ID NO: 147065 - DNA, 25 bp, Probe sequence
atgcagcaaaattttaaagcatttt

SEQ ID NO: 147066 - DNA, 25 bp, Probe sequence
atgtttatatcgtatgcattacgga

SEQ ID NO: 147067 - DNA, 25 bp, Probe sequence
atgtaatgtttatatcgtatgcatt

SEQ ID NO: 147068 - DNA, 25 bp, Probe sequence
atggagcgtatcataatggaatgta

SEQ ID NO: 147069 - DNA, 25 bp, Probe sequence
atggaatgtaatgtttatatcgtat

SEQ ID NO: 147070 - DNA, 25 bp, Probe sequence
agcgtatcataatggaatgtaatgt

SEQ ID NO: 147071 - DNA, 25 bp, Probe sequence
acatattaaaatggagcgtatcata

SEQ ID NO: 147072 - DNA, 25 bp, Probe sequence
aaatggagcgtatcataatggaatg

SEQ ID NO: 147073 - DNA, 25 bp, Probe sequence
aaaatggagcgtatcataatggaat

SEQ ID NO: 147074 - DNA, 25 bp, Probe sequence
aacatattaaaatggagcgtatcat

SEQ ID NO: 147075 - DNA, 25 bp, Probe sequence
aatggaatgtaatgtttatatcgta

SEQ ID NO: 147076 - DNA, 25 bp, Probe sequence
aatggagcgtatcataatggaatgt

SEQ ID NO: 147077 - DNA, 25 bp, Probe sequence
aatgtttatatcgtatgcattacgg

SEQ ID NO: 147078 - DNA, 25 bp, Probe sequence
aatgtaatgtttatatcgtatgcat

SEQ ID NO: 147079 - DNA, 25 bp, Probe sequence
gcgtatcataatggaatgtaatgtt

SEQ ID NO: 147080 - DNA, 25 bp, Probe sequence
gcattttattttgaacatattaaaa

SEQ ID NO: 147081 - DNA, 25 bp, Probe sequence
gaatgtaatgtttatatcgtatgca

SEQ ID NO: 147082 - DNA, 25 bp, Probe sequence
gaacatattaaaatggagcgtatca

SEQ ID NO: 147083 - DNA, 25 bp, Probe sequence
gagcgtatcataatggaatgtaatg

SEQ ID NO: 147084 - DNA, 25 bp, Probe sequence
gtttatatcgtatgcattacggata

SEQ ID NO: 147085 - DNA, 25 bp, Probe sequence
gtatcataatggaatgtaatgttta

SEQ ID NO: 147086 - DNA, 25 bp, Probe sequence
ggagcgtatcataatggaatgtaat

SEQ ID NO: 147087 - DNA, 25 bp, Probe sequence
ggaatgtaatgtttatatcgtatgc

SEQ ID NO: 147088 - DNA, 25 bp, Probe sequence
tggaatgtaatgtttatatcgtatg

SEQ ID NO: 147089 - DNA, 25 bp, Probe sequence
tggagcgtatcataatggaatgtaa

SEQ ID NO: 147090 - DNA, 25 bp, Probe sequence
tgtaatgtttatatcgtatgcatta

SEQ ID NO: 147091 - DNA, 25 bp, Probe sequence
tgtttatatcgtatgcattacggat

SEQ ID NO: 147092 - DNA, 25 bp, Probe sequence
tgcagcaaaattttaaagcatttta

SEQ ID NO: 147093 - DNA, 25 bp, Probe sequence
taatgtttatatcgtatgcattacg

SEQ ID NO: 147094 - DNA, 25 bp, Probe sequence
taatggaatgtaatgtttatatcgt

SEQ ID NO: 147095 - DNA, 25 bp, Probe sequence
taaaatggagcgtatcataatggaa

SEQ ID NO: 147096 - DNA, 25 bp, Probe sequence
tttatatcgtatgcattacggataa

SEQ ID NO: 147097 - DNA, 25 bp, Probe sequence
ttatatcgtatgcattacggataaa

SEQ ID NO: 147098 - DNA, 25 bp, Probe sequence
ttaaaatggagcgtatcataatgga

SEQ ID NO: 147099 - DNA, 25 bp, Probe sequence
attacaggcatcgtcatgctcacgg

SEQ ID NO: 147100 - DNA, 25 bp, Probe sequence
attactttaattacaggcatcgtca

SEQ ID NO: 147101 - DNA, 25 bp, Probe sequence
atatttgcaggaatggcgattattt

SEQ ID NO: 147102 - DNA, 25 bp, Probe sequence
atcgtcatgctcacggcaatgtact

SEQ ID NO: 147103 - DNA, 25 bp, Probe sequence
atgctcacggcaatgtactttgtac

SEQ ID NO: 147104 - DNA, 25 bp, Probe sequence
atggcgattatttttacagtctatt

SEQ ID NO: 147105 - DNA, 25 bp, Probe sequence
catcgtcatgctcacggcaatgtac

SEQ ID NO: 147106 - DNA, 25 bp, Probe sequence
accaatatttgcaggaatggcgatt

SEQ ID NO: 147107 - DNA, 25 bp, Probe sequence
actttaattacaggcatcgtcatgc

SEQ ID NO: 147108 - DNA, 25 bp, Probe sequence
acattttgccattattactttaatt

SEQ ID NO: 147109 - DNA, 25 bp, Probe sequence
aaataccaatatttgcaggaatggc

SEQ ID NO: 147110 - DNA, 25 bp, Probe sequence
aattacaggcatcgtcatgctcacg

SEQ ID NO: 147111 - DNA, 25 bp, Probe sequence
catgctcacggcaatgtactttgta

SEQ ID NO: 147112 - DNA, 25 bp, Probe sequence
cgtcatgctcacggcaatgtacttt

SEQ ID NO: 147113 - DNA, 25 bp, Probe sequence
gccattattactttaattacaggca

SEQ ID NO: 147114 - DNA, 25 bp, Probe sequence
gcgattatttttacagtctatttta

SEQ ID NO: 147115 - DNA, 25 bp, Probe sequence
gcaggaatggcgattatttttacag

SEQ ID NO: 147116 - DNA, 25 bp, Probe sequence
gaatggcgattatttttacagtcta

SEQ ID NO: 147117 - DNA, 25 bp, Probe sequence
gatgaaacaaatatctttagtaaga

SEQ ID NO: 147118 - DNA, 25 bp, Probe sequence
gattatttttacagtctattttagt

SEQ ID NO: 147119 - DNA, 25 bp, Probe sequence
gtaccatttggatatcataaaatac

SEQ ID NO: 147120 - DNA, 25 bp, Probe sequence
gtcatgctcacggcaatgtactttg

SEQ ID NO: 147121 - DNA, 25 bp, Probe sequence
ggaatggcgattatttttacagtct

SEQ ID NO: 147122 - DNA, 25 bp, Probe sequence
ggcgattatttttacagtctatttt

SEQ ID NO: 147123 - DNA, 25 bp, Probe sequence
tggcgattatttttacagtctattt

SEQ ID NO: 147124 - DNA, 25 bp, Probe sequence
tcgtcatgctcacggcaatgtactt

SEQ ID NO: 147125 - DNA, 25 bp, Probe sequence
tcatgctcacggcaatgtactttgt

SEQ ID NO: 147126 - DNA, 25 bp, Probe sequence
taattacaggcatcgtcatgctcac

SEQ ID NO: 147127 - DNA, 25 bp, Probe sequence
taaacattttgccattattacttta

SEQ ID NO: 147128 - DNA, 25 bp, Probe sequence
tactttaattacaggcatcgtcatg

SEQ ID NO: 147129 - DNA, 25 bp, Probe sequence
tataaacattttgccattattactt

SEQ ID NO: 147130 - DNA, 25 bp, Probe sequence
tattactttaattacaggcatcgtc

SEQ ID NO: 147131 - DNA, 25 bp, Probe sequence
tatttttacagtctattttagtaat

SEQ ID NO: 147132 - DNA, 25 bp, Probe sequence
ttttgccattattactttaattaca

SEQ ID NO: 147133 - DNA, 25 bp, Probe sequence
attggatatcgagcatttttattaa

SEQ ID NO: 147134 - DNA, 25 bp, Probe sequence
atatcgagcatttttattaatgtag

SEQ ID NO: 147135 - DNA, 25 bp, Probe sequence
atagattggatatcgagcattttta

SEQ ID NO: 147136 - DNA, 25 bp, Probe sequence
atactttaactcagttatagattgg

SEQ ID NO: 147137 - DNA, 25 bp, Probe sequence
atgtcaagacatcataatgatataa

SEQ ID NO: 147138 - DNA, 25 bp, Probe sequence
agttatagattggatatcgagcatt

SEQ ID NO: 147139 - DNA, 25 bp, Probe sequence
agattggatatcgagcatttttatt

SEQ ID NO: 147140 - DNA, 25 bp, Probe sequence
actcagttatagattggatatcgag

SEQ ID NO: 147141 - DNA, 25 bp, Probe sequence
actttaactcagttatagattggat

SEQ ID NO: 147142 - DNA, 25 bp, Probe sequence
acatactttaactcagttatagatt

SEQ ID NO: 147143 - DNA, 25 bp, Probe sequence
aaacatactttaactcagttataga

SEQ ID NO: 147144 - DNA, 25 bp, Probe sequence
aaaacatactttaactcagttatag

SEQ ID NO: 147145 - DNA, 25 bp, Probe sequence
aacatactttaactcagttatagat

SEQ ID NO: 147146 - DNA, 25 bp, Probe sequence
aactcagttatagattggatatcga

SEQ ID NO: 147147 - DNA, 25 bp, Probe sequence
catactttaactcagttatagattg

SEQ ID NO: 147148 - DNA, 25 bp, Probe sequence
cagttatagattggatatcgagcat

SEQ ID NO: 147149 - DNA, 25 bp, Probe sequence
ctcagttatagattggatatcgagc

SEQ ID NO: 147150 - DNA, 25 bp, Probe sequence
gatatcgagcatttttattaatgta

SEQ ID NO: 147151 - DNA, 25 bp, Probe sequence
gattggatatcgagcatttttatta

SEQ ID NO: 147152 - DNA, 25 bp, Probe sequence
gtagaaaaagaaatgcggggattag

SEQ ID NO: 147153 - DNA, 25 bp, Probe sequence
gttatagattggatatcgagcattt

SEQ ID NO: 147154 - DNA, 25 bp, Probe sequence
ggatatcgagcatttttattaatgt

SEQ ID NO: 147155 - DNA, 25 bp, Probe sequence
tggatatcgagcatttttattaatg

SEQ ID NO: 147156 - DNA, 25 bp, Probe sequence
tcagttatagattggatatcgagca

SEQ ID NO: 147157 - DNA, 25 bp, Probe sequence
taactcagttatagattggatatcg

SEQ ID NO: 147158 - DNA, 25 bp, Probe sequence
taaaaacatactttaactcagttat

SEQ ID NO: 147159 - DNA, 25 bp, Probe sequence
tactttaactcagttatagattgga

SEQ ID NO: 147160 - DNA, 25 bp, Probe sequence
tagaaaaagaaatgcggggattaga

SEQ ID NO: 147161 - DNA, 25 bp, Probe sequence
tagattggatatcgagcatttttat

SEQ ID NO: 147162 - DNA, 25 bp, Probe sequence
tatagattggatatcgagcattttt

SEQ ID NO: 147163 - DNA, 25 bp, Probe sequence
tttaactcagttatagattggatat

SEQ ID NO: 147164 - DNA, 25 bp, Probe sequence
ttatagattggatatcgagcatttt

SEQ ID NO: 147165 - DNA, 25 bp, Probe sequence
ttaactcagttatagattggatatc

SEQ ID NO: 147166 - DNA, 25 bp, Probe sequence
ttggatatcgagcatttttattaat

SEQ ID NO: 147167 - DNA, 25 bp, Probe sequence
attatttagaatcactgccatcctc

SEQ ID NO: 147168 - DNA, 25 bp, Probe sequence
atttgtgaacatctcatcacacaac

SEQ ID NO: 147169 - DNA, 25 bp, Probe sequence
atcacacaacgtaaattaaattatc

SEQ ID NO: 147170 - DNA, 25 bp, Probe sequence
atctcatcacacaacgtaaattaaa

SEQ ID NO: 147171 - DNA, 25 bp, Probe sequence
agaacattatttagaatcactgcca

SEQ ID NO: 147172 - DNA, 25 bp, Probe sequence
actgccatcctcttttgggaataga

SEQ ID NO: 147173 - DNA, 25 bp, Probe sequence
acattatttagaatcactgccatcc

SEQ ID NO: 147174 - DNA, 25 bp, Probe sequence
acatctcatcacacaacgtaaatta

SEQ ID NO: 147175 - DNA, 25 bp, Probe sequence
aacatctcatcacacaacgtaaatt

SEQ ID NO: 147176 - DNA, 25 bp, Probe sequence
aacattatttagaatcactgccatc

SEQ ID NO: 147177 - DNA, 25 bp, Probe sequence
aaggatgatattaatcagattacga

SEQ ID NO: 147178 - DNA, 25 bp, Probe sequence
cactgccatcctcttttgggaatag

SEQ ID NO: 147179 - DNA, 25 bp, Probe sequence
catctcatcacacaacgtaaattaa

SEQ ID NO: 147180 - DNA, 25 bp, Probe sequence
cattatttagaatcactgccatcct

SEQ ID NO: 147181 - DNA, 25 bp, Probe sequence
ctgccatcctcttttgggaatagag

SEQ ID NO: 147182 - DNA, 25 bp, Probe sequence
ccatcctcttttgggaatagagaaa

SEQ ID NO: 147183 - DNA, 25 bp, Probe sequence
gccatcctcttttgggaatagagaa

SEQ ID NO: 147184 - DNA, 25 bp, Probe sequence
gaacatctcatcacacaacgtaaat

SEQ ID NO: 147185 - DNA, 25 bp, Probe sequence
gaacattatttagaatcactgccat

SEQ ID NO: 147186 - DNA, 25 bp, Probe sequence
gatagataatttaaatgcgattgga

SEQ ID NO: 147187 - DNA, 25 bp, Probe sequence
gatttgtgaacatctcatcacacaa

SEQ ID NO: 147188 - DNA, 25 bp, Probe sequence
gtgaacatctcatcacacaacgtaa

SEQ ID NO: 147189 - DNA, 25 bp, Probe sequence
tgtgaacatctcatcacacaacgta

SEQ ID NO: 147190 - DNA, 25 bp, Probe sequence
tgatttgtgaacatctcatcacaca

SEQ ID NO: 147191 - DNA, 25 bp, Probe sequence
tgaacatctcatcacacaacgtaaa

SEQ ID NO: 147192 - DNA, 25 bp, Probe sequence
tgccatcctcttttgggaatagaga

SEQ ID NO: 147193 - DNA, 25 bp, Probe sequence
tctcatcacacaacgtaaattaaat

SEQ ID NO: 147194 - DNA, 25 bp, Probe sequence
tcactgccatcctcttttgggaata

SEQ ID NO: 147195 - DNA, 25 bp, Probe sequence
tatttagaatcactgccatcctctt

SEQ ID NO: 147196 - DNA, 25 bp, Probe sequence
tattaatcagattacgatagataat

SEQ ID NO: 147197 - DNA, 25 bp, Probe sequence
tttgtgaacatctcatcacacaacg

SEQ ID NO: 147198 - DNA, 25 bp, Probe sequence
ttatttagaatcactgccatcctct

SEQ ID NO: 147199 - DNA, 25 bp, Probe sequence
ttgtgaacatctcatcacacaacgt

SEQ ID NO: 147200 - DNA, 25 bp, Probe sequence
ttgatttgtgaacatctcatcacac

SEQ ID NO: 147201 - DNA, 25 bp, Probe sequence
attatgtaccttgaaacgattgcta

SEQ ID NO: 147202 - DNA, 25 bp, Probe sequence
atataagcgtcgataaattgaaaga

SEQ ID NO: 147203 - DNA, 25 bp, Probe sequence
atattagtatctttttcaaacaagg

SEQ ID NO: 147204 - DNA, 25 bp, Probe sequence
atatcattggcgttgctatttatgg

SEQ ID NO: 147205 - DNA, 25 bp, Probe sequence
atcattggcgttgctatttatggtg

SEQ ID NO: 147206 - DNA, 25 bp, Probe sequence
atggtggcctttcaagcaatattag

SEQ ID NO: 147207 - DNA, 25 bp, Probe sequence
agacatttaatataagcgtcgataa

SEQ ID NO: 147208 - DNA, 25 bp, Probe sequence
accttgaaacgattgctacaacttc

SEQ ID NO: 147209 - DNA, 25 bp, Probe sequence
caattttaatcatatttgtggcatt

SEQ ID NO: 147210 - DNA, 25 bp, Probe sequence
cttgaaacgattgctacaacttcca

SEQ ID NO: 147211 - DNA, 25 bp, Probe sequence
cattggcgttgctatttatggtggc

SEQ ID NO: 147212 - DNA, 25 bp, Probe sequence
cgttgctatttatggtggcctttca

SEQ ID NO: 147213 - DNA, 25 bp, Probe sequence
gcgagacatttaatataagcgtcga

SEQ ID NO: 147214 - DNA, 25 bp, Probe sequence
gcgttgctatttatggtggcctttc

SEQ ID NO: 147215 - DNA, 25 bp, Probe sequence
gctatttatggtggcctttcaagca

SEQ ID NO: 147216 - DNA, 25 bp, Probe sequence
gctattttagtgtatatcattggcg

SEQ ID NO: 147217 - DNA, 25 bp, Probe sequence
gcaatattagtatctttttcaaaca

SEQ ID NO: 147218 - DNA, 25 bp, Probe sequence
gttgctatttatggtggcctttcaa

SEQ ID NO: 147219 - DNA, 25 bp, Probe sequence
gtatatcattggcgttgctatttat

SEQ ID NO: 147220 - DNA, 25 bp, Probe sequence
gtaccttgaaacgattgctacaact

SEQ ID NO: 147221 - DNA, 25 bp, Probe sequence
gtgtatatcattggcgttgctattt

SEQ ID NO: 147222 - DNA, 25 bp, Probe sequence
ggtggcctttcaagcaatattagta

SEQ ID NO: 147223 - DNA, 25 bp, Probe sequence
ggcctttcaagcaatattagtatct

SEQ ID NO: 147224 - DNA, 25 bp, Probe sequence
tggcctttcaagcaatattagtatc

SEQ ID NO: 147225 - DNA, 25 bp, Probe sequence
tctatattatgtaccttgaaacgat

SEQ ID NO: 147226 - DNA, 25 bp, Probe sequence
tagtgtatatcattggcgttgctat

SEQ ID NO: 147227 - DNA, 25 bp, Probe sequence
tatggtggcctttcaagcaatatta

SEQ ID NO: 147228 - DNA, 25 bp, Probe sequence
tatttatggtggcctttcaagcaat

SEQ ID NO: 147229 - DNA, 25 bp, Probe sequence
tttatggtggcctttcaagcaatat

SEQ ID NO: 147230 - DNA, 25 bp, Probe sequence
tttatcagcagtaatccaaaagaaa

SEQ ID NO: 147231 - DNA, 25 bp, Probe sequence
tttagtgtatatcattggcgttgct

SEQ ID NO: 147232 - DNA, 25 bp, Probe sequence
ttttaatcatatttgtggcattaga

SEQ ID NO: 147233 - DNA, 25 bp, Probe sequence
ttgctatttatggtggcctttcaag

SEQ ID NO: 147234 - DNA, 25 bp, Probe sequence
ttggcgttgctatttatggtggcct

SEQ ID NO: 147235 - DNA, 25 bp, Probe sequence
atgcctattattgccttagaaaaag

SEQ ID NO: 147236 - DNA, 25 bp, Probe sequence
aggtaaaatgcctattattgcctta

SEQ ID NO: 147237 - DNA, 25 bp, Probe sequence
agttcttacaatcactaccgaatgt

SEQ ID NO: 147238 - DNA, 25 bp, Probe sequence
agtattatatttagaagaggttcct

SEQ ID NO: 147239 - DNA, 25 bp, Probe sequence
agagcgactgaactactcagttcat

SEQ ID NO: 147240 - DNA, 25 bp, Probe sequence
agcgactgaactactcagttcatgt

SEQ ID NO: 147241 - DNA, 25 bp, Probe sequence
actactcagttcatgtgagtacagg

SEQ ID NO: 147242 - DNA, 25 bp, Probe sequence
acaggtaaaatgcctattattgcct

SEQ ID NO: 147243 - DNA, 25 bp, Probe sequence
aaatgcctattattgccttagaaaa

SEQ ID NO: 147244 - DNA, 25 bp, Probe sequence
aaagagcgactgaactactcagttc

SEQ ID NO: 147245 - DNA, 25 bp, Probe sequence
aaagttcttacaatcactaccgaat

SEQ ID NO: 147246 - DNA, 25 bp, Probe sequence
aaaatgcctattattgccttagaaa

SEQ ID NO: 147247 - DNA, 25 bp, Probe sequence
aagttcttacaatcactaccgaatg

SEQ ID NO: 147248 - DNA, 25 bp, Probe sequence
aatcttaaagagcgactgaactact

SEQ ID NO: 147249 - DNA, 25 bp, Probe sequence
aatgcctattattgccttagaaaaa

SEQ ID NO: 147250 - DNA, 25 bp, Probe sequence
caatcactaccgaatgtgaatgtaa

SEQ ID NO: 147251 - DNA, 25 bp, Probe sequence
cactaccgaatgtgaatgtaagaaa

SEQ ID NO: 147252 - DNA, 25 bp, Probe sequence
caggtaaaatgcctattattgcctt

SEQ ID NO: 147253 - DNA, 25 bp, Probe sequence
cttaaagagcgactgaactactcag

SEQ ID NO: 147254 - DNA, 25 bp, Probe sequence
gcctattattgccttagaaaaagaa

SEQ ID NO: 147255 - DNA, 25 bp, Probe sequence
gcgactgaactactcagttcatgtg

SEQ ID NO: 147256 - DNA, 25 bp, Probe sequence
gaactactcagttcatgtgagtaca

SEQ ID NO: 147257 - DNA, 25 bp, Probe sequence
gaaaaagttcttacaatcactaccg

SEQ ID NO: 147258 - DNA, 25 bp, Probe sequence
gactgaactactcagttcatgtgag

SEQ ID NO: 147259 - DNA, 25 bp, Probe sequence
gagcgactgaactactcagttcatg

SEQ ID NO: 147260 - DNA, 25 bp, Probe sequence
gttcttacaatcactaccgaatgtg

SEQ ID NO: 147261 - DNA, 25 bp, Probe sequence
gtttatttctaatcttaaagagcga

SEQ ID NO: 147262 - DNA, 25 bp, Probe sequence
gtaaaatgcctattattgccttaga

SEQ ID NO: 147263 - DNA, 25 bp, Probe sequence
ggtaaaatgcctattattgccttag

SEQ ID NO: 147264 - DNA, 25 bp, Probe sequence
tcttacaatcactaccgaatgtgaa

SEQ ID NO: 147265 - DNA, 25 bp, Probe sequence
tcagttcatgtgagtacaggtaaaa

SEQ ID NO: 147266 - DNA, 25 bp, Probe sequence
taaaatgcctattattgccttagaa

SEQ ID NO: 147267 - DNA, 25 bp, Probe sequence
tacaatcactaccgaatgtgaatgt

SEQ ID NO: 147268 - DNA, 25 bp, Probe sequence
tatatttagaagaggttcctaagtt

SEQ ID NO: 147269 - DNA, 25 bp, Probe sequence
attctgcatttagagcttatgtcct

SEQ ID NO: 147270 - DNA, 25 bp, Probe sequence
attaacctgtgtctattctgcattt

SEQ ID NO: 147271 - DNA, 25 bp, Probe sequence
atcaacagatgtcgcctaaaggtac

SEQ ID NO: 147272 - DNA, 25 bp, Probe sequence
atcgagtgatgttttatttaattta

SEQ ID NO: 147273 - DNA, 25 bp, Probe sequence
aggttatcaacagatgtcgcctaaa

SEQ ID NO: 147274 - DNA, 25 bp, Probe sequence
agcatgttgtatttaatcgttattt

SEQ ID NO: 147275 - DNA, 25 bp, Probe sequence
acctgtgtctattctgcatttagag

SEQ ID NO: 147276 - DNA, 25 bp, Probe sequence
acagatgtcgcctaaaggtacaacg

SEQ ID NO: 147277 - DNA, 25 bp, Probe sequence
acaaaaaccggtcatcaagcacagt

SEQ ID NO: 147278 - DNA, 25 bp, Probe sequence
aatataggcgtgttactactttctt

SEQ ID NO: 147279 - DNA, 25 bp, Probe sequence
ctgcatttagagcttatgtccttaa

SEQ ID NO: 147280 - DNA, 25 bp, Probe sequence
gcctaaaggtacaacgagaatcgag

SEQ ID NO: 147281 - DNA, 25 bp, Probe sequence
gaatgataatcaaatagtttcacta

SEQ ID NO: 147282 - DNA, 25 bp, Probe sequence
gaatcgagacaaaaaccggtcatca

SEQ ID NO: 147283 - DNA, 25 bp, Probe sequence
gagcttatgtccttaagcatgttgt

SEQ ID NO: 147284 - DNA, 25 bp, Probe sequence
gatgtcgcctaaaggtacaacgaga

SEQ ID NO: 147285 - DNA, 25 bp, Probe sequence
gattaacctgtgtctattctgcatt

SEQ ID NO: 147286 - DNA, 25 bp, Probe sequence
gtttcactaaatataggcgtgttac

SEQ ID NO: 147287 - DNA, 25 bp, Probe sequence
gtgacaatgaataaatcgagtgatg

SEQ ID NO: 147288 - DNA, 25 bp, Probe sequence
gtgtctattctgcatttagagctta

SEQ ID NO: 147289 - DNA, 25 bp, Probe sequence
tgaaaggttatcaacagatgtcgcc

SEQ ID NO: 147290 - DNA, 25 bp, Probe sequence
tcccgttttgtaatcatgaaagtga

SEQ ID NO: 147291 - DNA, 25 bp, Probe sequence
tcttactcccgttttgtaatcatga

SEQ ID NO: 147292 - DNA, 25 bp, Probe sequence
taatttatttacacaagcgtttgag

SEQ ID NO: 147293 - DNA, 25 bp, Probe sequence
taacctgtgtctattctgcatttag

SEQ ID NO: 147294 - DNA, 25 bp, Probe sequence
taaacttagattaacctgtgtctat

SEQ ID NO: 147295 - DNA, 25 bp, Probe sequence
tacacaagcgtttgagctaatgtga

SEQ ID NO: 147296 - DNA, 25 bp, Probe sequence
tactcccgttttgtaatcatgaaag

SEQ ID NO: 147297 - DNA, 25 bp, Probe sequence
taggcgtgttactactttcttactc

SEQ ID NO: 147298 - DNA, 25 bp, Probe sequence
tatgtccttaagcatgttgtattta

SEQ ID NO: 147299 - DNA, 25 bp, Probe sequence
tataggcgtgttactactttcttac

SEQ ID NO: 147300 - DNA, 25 bp, Probe sequence
tatttacacaagcgtttgagctaat

SEQ ID NO: 147301 - DNA, 25 bp, Probe sequence
tttcttactcccgttttgtaatcat

SEQ ID NO: 147302 - DNA, 25 bp, Probe sequence
ttaacctgtgtctattctgcattta

SEQ ID NO: 147303 - DNA, 25 bp, Probe sequence
attggattcccaatttctacagaca

SEQ ID NO: 147304 - DNA, 25 bp, Probe sequence
atgcaagttggggtgggacgacgaa

SEQ ID NO: 147305 - DNA, 25 bp, Probe sequence
atccacttcatatgtatggcgcata

SEQ ID NO: 147306 - DNA, 25 bp, Probe sequence
atgcagctatccacttcatatgtat

SEQ ID NO: 147307 - DNA, 25 bp, Probe sequence
agctatccacttcatatgtatggcg

SEQ ID NO: 147308 - DNA, 25 bp, Probe sequence
caatgcaagttggggtgggacgacg

SEQ ID NO: 147309 - DNA, 25 bp, Probe sequence
cagctatccacttcatatgtatggc

SEQ ID NO: 147310 - DNA, 25 bp, Probe sequence
ctatccacttcatatgtatggcgca

SEQ ID NO: 147311 - DNA, 25 bp, Probe sequence
ctatgcagctatccacttcatatgt

SEQ ID NO: 147312 - DNA, 25 bp, Probe sequence
cccaatttctacagacaatgcaagt

SEQ ID NO: 147313 - DNA, 25 bp, Probe sequence
cctatgcagctatccacttcatatg

SEQ ID NO: 147314 - DNA, 25 bp, Probe sequence
ccacttcatatgtatggcgcatact

SEQ ID NO: 147315 - DNA, 25 bp, Probe sequence
gcgaaaatatcatttctgtcccact

SEQ ID NO: 147316 - DNA, 25 bp, Probe sequence
gaggggccccaacaaagagaaattg

SEQ ID NO: 147317 - DNA, 25 bp, Probe sequence
gctatccacttcatatgtatggcgc

SEQ ID NO: 147318 - DNA, 25 bp, Probe sequence
gcagctatccacttcatatgtatgg

SEQ ID NO: 147319 - DNA, 25 bp, Probe sequence
gcaagttggggtgggacgacgaaat

SEQ ID NO: 147320 - DNA, 25 bp, Probe sequence
gaaaatatcatttctgtcccactcc

SEQ ID NO: 147321 - DNA, 25 bp, Probe sequence
gacaatgcaagttggggtgggacga

SEQ ID NO: 147322 - DNA, 25 bp, Probe sequence
gacgacgaaatatattttgcgaaaa

SEQ ID NO: 147323 - DNA, 25 bp, Probe sequence
gggacgacgaaatatattttgcgaa

SEQ ID NO: 147324 - DNA, 25 bp, Probe sequence
gattcccaatttctacagacaatgc

SEQ ID NO: 147325 - DNA, 25 bp, Probe sequence
gttggggtgggacgacgaaatatat

SEQ ID NO: 147326 - DNA, 25 bp, Probe sequence
gggccccaacaaagagaaattggat

SEQ ID NO: 147327 - DNA, 25 bp, Probe sequence
ggtgggacgacgaaatatattttgc

SEQ ID NO: 147328 - DNA, 25 bp, Probe sequence
ggattcccaatttctacagacaatg

SEQ ID NO: 147329 - DNA, 25 bp, Probe sequence
tgcaagttggggaggggccccaaca

SEQ ID NO: 147330 - DNA, 25 bp, Probe sequence
tggattcccaatttctacagacaat

SEQ ID NO: 147331 - DNA, 25 bp, Probe sequence
tgcagctatccacttcatatgtatg

SEQ ID NO: 147332 - DNA, 25 bp, Probe sequence
tccacttcatatgtatggcgcatac

SEQ ID NO: 147333 - DNA, 25 bp, Probe sequence
tctacagacaatgcaagttggggtg

SEQ ID NO: 147334 - DNA, 25 bp, Probe sequence
tatgcagctatccacttcatatgta

SEQ ID NO: 147335 - DNA, 25 bp, Probe sequence
tatccacttcatatgtatggcgcat

SEQ ID NO: 147336 - DNA, 25 bp, Probe sequence
ttcccaatttctacagacaatgcaa

SEQ ID NO: 147337 - DNA, 25 bp, Probe sequence
attttatctgaggcatcaggcacag

SEQ ID NO: 147338 - DNA, 25 bp, Probe sequence
atcaagccattgcaaatcacataga

SEQ ID NO: 147339 - DNA, 25 bp, Probe sequence
atcacatagatcattttcacattgg

SEQ ID NO: 147340 - DNA, 25 bp, Probe sequence
atcagcataataatccattccatat

SEQ ID NO: 147341 - DNA, 25 bp, Probe sequence
acgcaggagcaagaggactattaga

SEQ ID NO: 147342 - DNA, 25 bp, Probe sequence
acaattagtcaatgatcaaccacag

SEQ ID NO: 147343 - DNA, 25 bp, Probe sequence
aaaatccagatacttggggcaaacg

SEQ ID NO: 147344 - DNA, 25 bp, Probe sequence
caatgatcaaccacagacactgcaa

SEQ ID NO: 147345 - DNA, 25 bp, Probe sequence
ctgttcgacaattagattattttaa

SEQ ID NO: 147346 - DNA, 25 bp, Probe sequence
cccgtttcattagagacatttgcag

SEQ ID NO: 147347 - DNA, 25 bp, Probe sequence
ccacagacactgcaatcatttttac

SEQ ID NO: 147348 - DNA, 25 bp, Probe sequence
gctacaggtcatttaggcacacata

SEQ ID NO: 147349 - DNA, 25 bp, Probe sequence
gctagaggtgtcattgctattatta

SEQ ID NO: 147350 - DNA, 25 bp, Probe sequence
gcagatcagcataataatccattcc

SEQ ID NO: 147351 - DNA, 25 bp, Probe sequence
gcacacatattacaaatcaagccat

SEQ ID NO: 147352 - DNA, 25 bp, Probe sequence
gacactgcaatcatttttacaagaa

SEQ ID NO: 147353 - DNA, 25 bp, Probe sequence
gaggcatcaggcacagaaattaaat

SEQ ID NO: 147354 - DNA, 25 bp, Probe sequence
gatggtcgtattaattatattacta

SEQ ID NO: 147355 - DNA, 25 bp, Probe sequence
gatgaacctaaaggctttggtgcat

SEQ ID NO: 147356 - DNA, 25 bp, Probe sequence
gatcattttcacattggtgttagaa

SEQ ID NO: 147357 - DNA, 25 bp, Probe sequence
gatcaaccacagacactgcaatcat

SEQ ID NO: 147358 - DNA, 25 bp, Probe sequence
gatattgctagaggtgtcattgcta

SEQ ID NO: 147359 - DNA, 25 bp, Probe sequence
gttaacaggtgctacaggtcattta

SEQ ID NO: 147360 - DNA, 25 bp, Probe sequence
gtgtttattccaagtattatccatc

SEQ ID NO: 147361 - DNA, 25 bp, Probe sequence
gtgtcattgctattattaaaaatcc

SEQ ID NO: 147362 - DNA, 25 bp, Probe sequence
ggtcatttaggcacacatattacaa

SEQ ID NO: 147363 - DNA, 25 bp, Probe sequence
ggactattagaccaagaatccaatg

SEQ ID NO: 147364 - DNA, 25 bp, Probe sequence
ggctttggtgcattattggcatcaa

SEQ ID NO: 147365 - DNA, 25 bp, Probe sequence
ggcgttgctcatatcattttcatag

SEQ ID NO: 147366 - DNA, 25 bp, Probe sequence
tggtgcattattggcatcaatgtac

SEQ ID NO: 147367 - DNA, 25 bp, Probe sequence
tgcataaactgatttatccagctgg

SEQ ID NO: 147368 - DNA, 25 bp, Probe sequence
tgctcatatcattttcataggttat

SEQ ID NO: 147369 - DNA, 25 bp, Probe sequence
tcataggttattacgcagatcagca

SEQ ID NO: 147370 - DNA, 25 bp, Probe sequence
ttccaagtattatccatccatcatt

SEQ ID NO: 147371 - DNA, 25 bp, Probe sequence
attaatgttgacgtctttggtaaca

SEQ ID NO: 147372 - DNA, 25 bp, Probe sequence
atattaatgttgacgtctttggtaa

SEQ ID NO: 147373 - DNA, 25 bp, Probe sequence
atcatattaatgttgacgtctttgg

SEQ ID NO: 147374 - DNA, 25 bp, Probe sequence
atgaaatgatacacatggtagatat

SEQ ID NO: 147375 - DNA, 25 bp, Probe sequence
atgttgacgtctttggtaacaagcc

SEQ ID NO: 147376 - DNA, 25 bp, Probe sequence
atgggtattgtgataattcaaatca

SEQ ID NO: 147377 - DNA, 25 bp, Probe sequence
atggtagatatgtatttcaagctta

SEQ ID NO: 147378 - DNA, 25 bp, Probe sequence
agatatgtatttcaagcttattcaa

SEQ ID NO: 147379 - DNA, 25 bp, Probe sequence
acgtctttggtaacaagccatgaaa

SEQ ID NO: 147380 - DNA, 25 bp, Probe sequence
aaatcatattaatgttgacgtcttt

SEQ ID NO: 147381 - DNA, 25 bp, Probe sequence
aatgttgacgtctttggtaacaagc

SEQ ID NO: 147382 - DNA, 25 bp, Probe sequence
aatcatattaatgttgacgtctttg

SEQ ID NO: 147383 - DNA, 25 bp, Probe sequence
caaatcatattaatgttgacgtctt

SEQ ID NO: 147384 - DNA, 25 bp, Probe sequence
catattaatgttgacgtctttggta

SEQ ID NO: 147385 - DNA, 25 bp, Probe sequence
cgtctttggtaacaagccatgaaat

SEQ ID NO: 147386 - DNA, 25 bp, Probe sequence
gacgtctttggtaacaagccatgaa

SEQ ID NO: 147387 - DNA, 25 bp, Probe sequence
gttgacgtctttggtaacaagccat

SEQ ID NO: 147388 - DNA, 25 bp, Probe sequence
gtagatatgtatttcaagcttattc

SEQ ID NO: 147389 - DNA, 25 bp, Probe sequence
gtaacaagccatgaaatgatacaca

SEQ ID NO: 147390 - DNA, 25 bp, Probe sequence
gtctttggtaacaagccatgaaatg

SEQ ID NO: 147391 - DNA, 25 bp, Probe sequence
ggtaacaagccatgaaatgatacac

SEQ ID NO: 147392 - DNA, 25 bp, Probe sequence
ggtagatatgtatttcaagcttatt

SEQ ID NO: 147393 - DNA, 25 bp, Probe sequence
ggtattgtgataattcaaatcatat

SEQ ID NO: 147394 - DNA, 25 bp, Probe sequence
tggtagatatgtatttcaagcttat

SEQ ID NO: 147395 - DNA, 25 bp, Probe sequence
tgttgacgtctttggtaacaagcca

SEQ ID NO: 147396 - DNA, 25 bp, Probe sequence
tgacgtctttggtaacaagccatga

SEQ ID NO: 147397 - DNA, 25 bp, Probe sequence
tctttggtaacaagccatgaaatga

SEQ ID NO: 147398 - DNA, 25 bp, Probe sequence
tcatattaatgttgacgtctttggt

SEQ ID NO: 147399 - DNA, 25 bp, Probe sequence
taatgttgacgtctttggtaacaag

SEQ ID NO: 147400 - DNA, 25 bp, Probe sequence
taacaagccatgaaatgatacacat

SEQ ID NO: 147401 - DNA, 25 bp, Probe sequence
tagatatgtatttcaagcttattca

SEQ ID NO: 147402 - DNA, 25 bp, Probe sequence
ttaatgttgacgtctttggtaacaa

SEQ ID NO: 147403 - DNA, 25 bp, Probe sequence
tattaatgttgacgtctttggtaac

SEQ ID NO: 147404 - DNA, 25 bp, Probe sequence
ttgacgtctttggtaacaagccatg

SEQ ID NO: 147405 - DNA, 25 bp, Probe sequence
attaggagtcgttgcagtttagtta

SEQ ID NO: 147406 - DNA, 25 bp, Probe sequence
attttggtattaggagtcgttgcag

SEQ ID NO: 147407 - DNA, 25 bp, Probe sequence
atttttcaataagtatgcttggatt

SEQ ID NO: 147408 - DNA, 25 bp, Probe sequence
atagagggcaggattttggtattag

SEQ ID NO: 147409 - DNA, 25 bp, Probe sequence
atgattatcaagaaaacgttaacat

SEQ ID NO: 147410 - DNA, 25 bp, Probe sequence
aggattttggtattaggagtcgttg

SEQ ID NO: 147411 - DNA, 25 bp, Probe sequence
agggcaggattttggtattaggagt

SEQ ID NO: 147412 - DNA, 25 bp, Probe sequence
agagggcaggattttggtattagga

SEQ ID NO: 147413 - DNA, 25 bp, Probe sequence
acgttaacatttttcaataagtatg

SEQ ID NO: 147414 - DNA, 25 bp, Probe sequence
acatttttcaataagtatgcttgga

SEQ ID NO: 147415 - DNA, 25 bp, Probe sequence
aacatttttcaataagtatgcttgg

SEQ ID NO: 147416 - DNA, 25 bp, Probe sequence
aagtatgcttggattgataaaaata

SEQ ID NO: 147417 - DNA, 25 bp, Probe sequence
aataagtatgcttggattgataaaa

SEQ ID NO: 147418 - DNA, 25 bp, Probe sequence
caggattttggtattaggagtcgtt

SEQ ID NO: 147419 - DNA, 25 bp, Probe sequence
catttttcaataagtatgcttggat

SEQ ID NO: 147420 - DNA, 25 bp, Probe sequence
gcaggattttggtattaggagtcgt

SEQ ID NO: 147421 - DNA, 25 bp, Probe sequence
gagggcaggattttggtattaggag

SEQ ID NO: 147422 - DNA, 25 bp, Probe sequence
gattatcaagaaaacgttaacattt

SEQ ID NO: 147423 - DNA, 25 bp, Probe sequence
gattttggtattaggagtcgttgca

SEQ ID NO: 147424 - DNA, 25 bp, Probe sequence
gttaacatttttcaataagtatgct

SEQ ID NO: 147425 - DNA, 25 bp, Probe sequence
gtattaggagtcgttgcagtttagt

SEQ ID NO: 147426 - DNA, 25 bp, Probe sequence
gggcaggattttggtattaggagtc

SEQ ID NO: 147427 - DNA, 25 bp, Probe sequence
ggattttggtattaggagtcgttgc

SEQ ID NO: 147428 - DNA, 25 bp, Probe sequence
ggtattaggagtcgttgcagtttag

SEQ ID NO: 147429 - DNA, 25 bp, Probe sequence
ggcaggattttggtattaggagtcg

SEQ ID NO: 147430 - DNA, 25 bp, Probe sequence
tggtattaggagtcgttgcagttta

SEQ ID NO: 147431 - DNA, 25 bp, Probe sequence
taacatttttcaataagtatgcttg

SEQ ID NO: 147432 - DNA, 25 bp, Probe sequence
tagagggcaggattttggtattagg

SEQ ID NO: 147433 - DNA, 25 bp, Probe sequence
taggagtcgttgcagtttagttaag

SEQ ID NO: 147434 - DNA, 25 bp, Probe sequence
tttggtattaggagtcgttgcagtt

SEQ ID NO: 147435 - DNA, 25 bp, Probe sequence
tattaggagtcgttgcagtttagtt

SEQ ID NO: 147436 - DNA, 25 bp, Probe sequence
ttaggagtcgttgcagtttagttaa

SEQ ID NO: 147437 - DNA, 25 bp, Probe sequence
ttttggtattaggagtcgttgcagt

SEQ ID NO: 147438 - DNA, 25 bp, Probe sequence
ttggtattaggagtcgttgcagttt

SEQ ID NO: 147439 - DNA, 25 bp, Probe sequence
attgctgtgattgtcgtatatcact

SEQ ID NO: 147440 - DNA, 25 bp, Probe sequence
attattattgctgtgattgtcgtat

SEQ ID NO: 147441 - DNA, 25 bp, Probe sequence
attattgctgtgattgtcgtatatc

SEQ ID NO: 147442 - DNA, 25 bp, Probe sequence
atatcacttagatgtgcgtggttta

SEQ ID NO: 147443 - DNA, 25 bp, Probe sequence
atcacttagatgtgcgtggtttatt

SEQ ID NO: 147444 - DNA, 25 bp, Probe sequence
agttcggcacgactttctaaagcaa

SEQ ID NO: 147445 - DNA, 25 bp, Probe sequence
agacttgtaagttccagttcggcac

SEQ ID NO: 147446 - DNA, 25 bp, Probe sequence
acttgtaagttccagttcggcacga

SEQ ID NO: 147447 - DNA, 25 bp, Probe sequence
actagacttgtaagttccagttcgg

SEQ ID NO: 147448 - DNA, 25 bp, Probe sequence
aactagacttgtaagttccagttcg

SEQ ID NO: 147449 - DNA, 25 bp, Probe sequence
cagttcggcacgactttctaaagca

SEQ ID NO: 147450 - DNA, 25 bp, Probe sequence
cttgtaagttccagttcggcacgac

SEQ ID NO: 147451 - DNA, 25 bp, Probe sequence
cgactttctaaagcaattattattg

SEQ ID NO: 147452 - DNA, 25 bp, Probe sequence
ccagttcggcacgactttctaaagc

SEQ ID NO: 147453 - DNA, 25 bp, Probe sequence
gctgtgattgtcgtatatcacttag

SEQ ID NO: 147454 - DNA, 25 bp, Probe sequence
gacttgtaagttccagttcggcacg

SEQ ID NO: 147455 - DNA, 25 bp, Probe sequence
tccagttcggcacgactttctaaag

SEQ ID NO: 147456 - DNA, 25 bp, Probe sequence
gattgtcgtatatcacttagatgtg

SEQ ID NO: 147457 - DNA, 25 bp, Probe sequence
gttcggcacgactttctaaagcaat

SEQ ID NO: 147458 - DNA, 25 bp, Probe sequence
gtatatcacttagatgtgcgtggtt

SEQ ID NO: 147459 - DNA, 25 bp, Probe sequence
gtcgtatatcacttagatgtgcgtg

SEQ ID NO: 147460 - DNA, 25 bp, Probe sequence
gtgtgttcgaactagacttgtaagt

SEQ ID NO: 147461 - DNA, 25 bp, Probe sequence
gtgtgtgttcgaactagacttgtaa

SEQ ID NO: 147462 - DNA, 25 bp, Probe sequence
ggcacgactttctaaagcaattatt

SEQ ID NO: 147463 - DNA, 25 bp, Probe sequence
tgtaagttccagttcggcacgactt

SEQ ID NO: 147464 - DNA, 25 bp, Probe sequence
tcggcacgactttctaaagcaatta

SEQ ID NO: 147465 - DNA, 25 bp, Probe sequence
tcacttagatgtgcgtggtttattt

SEQ ID NO: 147466 - DNA, 25 bp, Probe sequence
ttccagttcggcacgactttctaaa

SEQ ID NO: 147467 - DNA, 25 bp, Probe sequence
tagacttgtaagttccagttcggca

SEQ ID NO: 147468 - DNA, 25 bp, Probe sequence
ttgtaagttccagttcggcacgact

SEQ ID NO: 147469 - DNA, 25 bp, Probe sequence
ttattgctgtgattgtcgtatatca

SEQ ID NO: 147470 - DNA, 25 bp, Probe sequence
ttattattgctgtgattgtcgtata

SEQ ID NO: 147471 - DNA, 25 bp, Probe sequence
ttcggcacgactttctaaagcaatt

SEQ ID NO: 147472 - DNA, 25 bp, Probe sequence
ttgtcgtatatcacttagatgtgcg

SEQ ID NO: 147473 - DNA, 25 bp, Probe sequence
atttatagggggtaagtgtacatgg

SEQ ID NO: 147474 - DNA, 25 bp, Probe sequence
attgcaaaactaaccttaatcatag

SEQ ID NO: 147475 - DNA, 25 bp, Probe sequence
atgaaagcgattgcaaaactaacct

SEQ ID NO: 147476 - DNA, 25 bp, Probe sequence
atgttatatcattaaatcaaagggt

SEQ ID NO: 147477 - DNA, 25 bp, Probe sequence
agcgattgcaaaactaaccttaatc

SEQ ID NO: 147478 - DNA, 25 bp, Probe sequence
actaaccttaatcatagtaaaatga

SEQ ID NO: 147479 - DNA, 25 bp, Probe sequence
aaatgaaagcgattgcaaaactaac

SEQ ID NO: 147480 - DNA, 25 bp, Probe sequence
aaatgagtttaaatgatgttatatc

SEQ ID NO: 147481 - DNA, 25 bp, Probe sequence
aaaaatgaaagcgattgcaaaacta

SEQ ID NO: 147482 - DNA, 25 bp, Probe sequence
aaaatgaaagcgattgcaaaactaa

SEQ ID NO: 147483 - DNA, 25 bp, Probe sequence
aactaaccttaatcatagtaaaatg

SEQ ID NO: 147484 - DNA, 25 bp, Probe sequence
aaccttaatcatagtaaaatgagtt

SEQ ID NO: 147485 - DNA, 25 bp, Probe sequence
aagcgattgcaaaactaaccttaat

SEQ ID NO: 147486 - DNA, 25 bp, Probe sequence
aatgaaagcgattgcaaaactaacc

SEQ ID NO: 147487 - DNA, 25 bp, Probe sequence
aatgagtttaaatgatgttatatca

SEQ ID NO: 147488 - DNA, 25 bp, Probe sequence
aatttatagggggtaagtgtacatg

SEQ ID NO: 147489 - DNA, 25 bp, Probe sequence
ctaaccttaatcatagtaaaatgag

SEQ ID NO: 147490 - DNA, 25 bp, Probe sequence
cgattgcaaaactaaccttaatcat

SEQ ID NO: 147491 - DNA, 25 bp, Probe sequence
gcgattgcaaaactaaccttaatca

SEQ ID NO: 147492 - DNA, 25 bp, Probe sequence
gcaaaactaaccttaatcatagtaa

SEQ ID NO: 147493 - DNA, 25 bp, Probe sequence
gaaagcgattgcaaaactaacctta

SEQ ID NO: 147494 - DNA, 25 bp, Probe sequence
gatgttatatcattaaatcaaaggg

SEQ ID NO: 147495 - DNA, 25 bp, Probe sequence
gattgcaaaactaaccttaatcata

SEQ ID NO: 147496 - DNA, 25 bp, Probe sequence
gttatatcattaaatcaaagggtta

SEQ ID NO: 147497 - DNA, 25 bp, Probe sequence
tgttatatcattaaatcaaagggtt

SEQ ID NO: 147498 - DNA, 25 bp, Probe sequence
tgaaagcgattgcaaaactaacctt

SEQ ID NO: 147499 - DNA, 25 bp, Probe sequence
tgcaaaactaaccttaatcatagta

SEQ ID NO: 147500 - DNA, 25 bp, Probe sequence
taaccttaatcatagtaaaatgagt

SEQ ID NO: 147501 - DNA, 25 bp, Probe sequence
tatatcattaaatcaaagggttaaa

SEQ ID NO: 147502 - DNA, 25 bp, Probe sequence
ttatatcattaaatcaaagggttaa

SEQ ID NO: 147503 - DNA, 25 bp, Probe sequence
ttgcaaaactaaccttaatcatagt

SEQ ID NO: 147504 - DNA, 25 bp, Probe sequence
attatcaaatagaaacccgagattt

SEQ ID NO: 147505 - DNA, 25 bp, Probe sequence
atcatactaaaatctcgggttattt

SEQ ID NO: 147506 - DNA, 25 bp, Probe sequence
atcaaatagaaacccgagattttag

SEQ ID NO: 147507 - DNA, 25 bp, Probe sequence
atctcgggttatttatataatcgta

SEQ ID NO: 147508 - DNA, 25 bp, Probe sequence
atgccatatcccattaaaaattatc

SEQ ID NO: 147509 - DNA, 25 bp, Probe sequence
atgaatcatactaaaatctcgggtt

SEQ ID NO: 147510 - DNA, 25 bp, Probe sequence
agaaacccgagattttagtgaaatg

SEQ ID NO: 147511 - DNA, 25 bp, Probe sequence
acccgagattttagtgaaatgaatc

SEQ ID NO: 147512 - DNA, 25 bp, Probe sequence
aaattatcaaatagaaacccgagat

SEQ ID NO: 147513 - DNA, 25 bp, Probe sequence
aaatctcgggttatttatataatcg

SEQ ID NO: 147514 - DNA, 25 bp, Probe sequence
aaatgaatcatactaaaatctcggg

SEQ ID NO: 147515 - DNA, 25 bp, Probe sequence
aacccgagattttagtgaaatgaat

SEQ ID NO: 147516 - DNA, 25 bp, Probe sequence
aatgaatcatactaaaatctcgggt

SEQ ID NO: 147517 - DNA, 25 bp, Probe sequence
aatctcgggttatttatataatcgt

SEQ ID NO: 147518 - DNA, 25 bp, Probe sequence
aatcatactaaaatctcgggttatt

SEQ ID NO: 147519 - DNA, 25 bp, Probe sequence
aattatcaaatagaaacccgagatt

SEQ ID NO: 147520 - DNA, 25 bp, Probe sequence
caaatagaaacccgagattttagtg

SEQ ID NO: 147521 - DNA, 25 bp, Probe sequence
catactaaaatctcgggttatttat

SEQ ID NO: 147522 - DNA, 25 bp, Probe sequence
cccgagattttagtgaaatgaatca

SEQ ID NO: 147523 - DNA, 25 bp, Probe sequence
ccatatcccattaaaaattatcaaa

SEQ ID NO: 147524 - DNA, 25 bp, Probe sequence
gccatatcccattaaaaattatcaa

SEQ ID NO: 147525 - DNA, 25 bp, Probe sequence
gaatcatactaaaatctcgggttat

SEQ ID NO: 147526 - DNA, 25 bp, Probe sequence
gaaacccgagattttagtgaaatga

SEQ ID NO: 147527 - DNA, 25 bp, Probe sequence
tcatactaaaatctcgggttattta

SEQ ID NO: 147528 - DNA, 25 bp, Probe sequence
tagaaacccgagattttagtgaaat

SEQ ID NO: 147529 - DNA, 25 bp, Probe sequence
tgaatcatactaaaatctcgggtta

SEQ ID NO: 147530 - DNA, 25 bp, Probe sequence
tgccatatcccattaaaaattatca

SEQ ID NO: 147531 - DNA, 25 bp, Probe sequence
tcgggttatttatataatcgtaaat

SEQ ID NO: 147532 - DNA, 25 bp, Probe sequence
tctcgggttatttatataatcgtaa

SEQ ID NO: 147533 - DNA, 25 bp, Probe sequence
tcaaatagaaacccgagattttagt

SEQ ID NO: 147534 - DNA, 25 bp, Probe sequence
taaaatctcgggttatttatataat

SEQ ID NO: 147535 - DNA, 25 bp, Probe sequence
tactaaaatctcgggttatttatat

SEQ ID NO: 147536 - DNA, 25 bp, Probe sequence
tatcaaatagaaacccgagatttta

SEQ ID NO: 147537 - DNA, 25 bp, Probe sequence
ttatcaaatagaaacccgagatttt

SEQ ID NO: 147538 - DNA, 25 bp, Probe sequence
atttcttgcacaacgcggatacgat

SEQ ID NO: 147539 - DNA, 25 bp, Probe sequence
agtaatctacagtgtccaggaccta

SEQ ID NO: 147540 - DNA, 25 bp, Probe sequence
atacagaacaagctaatcacaattt

SEQ ID NO: 147541 - DNA, 25 bp, Probe sequence
acttcatgcttccaaattcaccaat

SEQ ID NO: 147542 - DNA, 25 bp, Probe sequence
acagtgtccaggacctattgttaat

SEQ ID NO: 147543 - DNA, 25 bp, Probe sequence
aaagccagtcaatttcttgcacaac

SEQ ID NO: 147544 - DNA, 25 bp, Probe sequence
aaaactttttgacttcatgcttcca

SEQ ID NO: 147545 - DNA, 25 bp, Probe sequence
aaaacgctttattacattcagttga

SEQ ID NO: 147546 - DNA, 25 bp, Probe sequence
aacttatcgcttgtacaatgagtat

SEQ ID NO: 147547 - DNA, 25 bp, Probe sequence
aatgtcgatactttaccttctctta

SEQ ID NO: 147548 - DNA, 25 bp, Probe sequence
aattaattgacgttcgacatcctga

SEQ ID NO: 147549 - DNA, 25 bp, Probe sequence
cattttttgcacattttggggctta

SEQ ID NO: 147550 - DNA, 25 bp, Probe sequence
gcggcgagctagataaagcagttgc

SEQ ID NO: 147551 - DNA, 25 bp, Probe sequence
gctaatggtgctaaagctgcaggta

SEQ ID NO: 147552 - DNA, 25 bp, Probe sequence
gcacaacgcggatacgatgtagtga

SEQ ID NO: 147553 - DNA, 25 bp, Probe sequence
gaagttgttgtgactgatcacggat

SEQ ID NO: 147554 - DNA, 25 bp, Probe sequence
gaaatcaaaaacatcgctattggcg

SEQ ID NO: 147555 - DNA, 25 bp, Probe sequence
gacggaggttataccgcatacgaac

SEQ ID NO: 147556 - DNA, 25 bp, Probe sequence
gacgttcgacatcctgaagaatttg

SEQ ID NO: 147557 - DNA, 25 bp, Probe sequence
gagcaaggtgttaaacttatcgctt

SEQ ID NO: 147558 - DNA, 25 bp, Probe sequence
gagatgtaaccattttttgcacatt

SEQ ID NO: 147559 - DNA, 25 bp, Probe sequence
gagtatggatgtgatgggcattaca

SEQ ID NO: 147560 - DNA, 25 bp, Probe sequence
gatgtagtgaatttagacggaggtt

SEQ ID NO: 147561 - DNA, 25 bp, Probe sequence
gatgatgtagaatacggtggcgtag

SEQ ID NO: 147562 - DNA, 25 bp, Probe sequence
gatactttaccttctcttattgatc

SEQ ID NO: 147563 - DNA, 25 bp, Probe sequence
gttagactcaacgattttggcaatg

SEQ ID NO: 147564 - DNA, 25 bp, Probe sequence
gtggcgtaggtgcatatattggata

SEQ ID NO: 147565 - DNA, 25 bp, Probe sequence
gggtcaaacaaactggacatacgct

SEQ ID NO: 147566 - DNA, 25 bp, Probe sequence
ggacatacgcttgttagactcaacg

SEQ ID NO: 147567 - DNA, 25 bp, Probe sequence
ggcaatctaatgatgcgttatgtca

SEQ ID NO: 147568 - DNA, 25 bp, Probe sequence
ggcaatgaaattcgcgctattattc

SEQ ID NO: 147569 - DNA, 25 bp, Probe sequence
tcaccaattaacatgcctatttcta

SEQ ID NO: 147570 - DNA, 25 bp, Probe sequence
taccgcatacgaacaacaacatcat

SEQ ID NO: 147571 - DNA, 25 bp, Probe sequence
taccttctcttattgatcaagcagt

SEQ ID NO: 147572 - DNA, 25 bp, Probe sequence
attagataagaatgctgaccaagct

SEQ ID NO: 147573 - DNA, 25 bp, Probe sequence
atacttcgccgataaaggactacat

SEQ ID NO: 147574 - DNA, 25 bp, Probe sequence
atcaaagacattatcaacaaagcta

SEQ ID NO: 147575 - DNA, 25 bp, Probe sequence
aggttttagtagctacggcaatggt

SEQ ID NO: 147576 - DNA, 25 bp, Probe sequence
aggactacattcaatcaaagacatt

SEQ ID NO: 147577 - DNA, 25 bp, Probe sequence
acttaagatcatacttcgccgataa

SEQ ID NO: 147578 - DNA, 25 bp, Probe sequence
acttcgccgataaaggactacattc

SEQ ID NO: 147579 - DNA, 25 bp, Probe sequence
acattcaatcaaagacattatcaac

SEQ ID NO: 147580 - DNA, 25 bp, Probe sequence
acaacttaagatcatacttcgccga

SEQ ID NO: 147581 - DNA, 25 bp, Probe sequence
aaaggttttagtagctacggcaatg

SEQ ID NO: 147582 - DNA, 25 bp, Probe sequence
aaaggactacattcaatcaaagaca

SEQ ID NO: 147583 - DNA, 25 bp, Probe sequence
aacttaagatcatacttcgccgata

SEQ ID NO: 147584 - DNA, 25 bp, Probe sequence
aagatcatacttcgccgataaagga

SEQ ID NO: 147585 - DNA, 25 bp, Probe sequence
caagacggctttgatgtttcaaaat

SEQ ID NO: 147586 - DNA, 25 bp, Probe sequence
caacttaagatcatacttcgccgat

SEQ ID NO: 147587 - DNA, 25 bp, Probe sequence
gccgataaaggactacattcaatca

SEQ ID NO: 147588 - DNA, 25 bp, Probe sequence
gctgaccaagctacaaaagacaact

SEQ ID NO: 147589 - DNA, 25 bp, Probe sequence
gcaaacttcttagaacatgaattaa

SEQ ID NO: 147590 - DNA, 25 bp, Probe sequence
gaatgctgaccaagctacaaaagac

SEQ ID NO: 147591 - DNA, 25 bp, Probe sequence
gacaacttaagatcatacttcgccg

SEQ ID NO: 147592 - DNA, 25 bp, Probe sequence
gatcatacttcgccgataaaggact

SEQ ID NO: 147593 - DNA, 25 bp, Probe sequence
gacggctttgatgtttcaaaatatg

SEQ ID NO: 147594 - DNA, 25 bp, Probe sequence
gactacattcaatcaaagacattat

SEQ ID NO: 147595 - DNA, 25 bp, Probe sequence
gaccaagctacaaaagacaacttaa

SEQ ID NO: 147596 - DNA, 25 bp, Probe sequence
gatgtttcaaaatatgaacacgtaa

SEQ ID NO: 147597 - DNA, 25 bp, Probe sequence
gataagaatgctgaccaagctacaa

SEQ ID NO: 147598 - DNA, 25 bp, Probe sequence
ggttttagtagctacggcaatggta

SEQ ID NO: 147599 - DNA, 25 bp, Probe sequence
tgctgaccaagctacaaaagacaac

SEQ ID NO: 147600 - DNA, 25 bp, Probe sequence
tcgccgataaaggactacattcaat

SEQ ID NO: 147601 - DNA, 25 bp, Probe sequence
tcatacttcgccgataaaggactac

SEQ ID NO: 147602 - DNA, 25 bp, Probe sequence
taagaatgctgaccaagctacaaaa

SEQ ID NO: 147603 - DNA, 25 bp, Probe sequence
tagtagctacggcaatggtaggtgt

SEQ ID NO: 147604 - DNA, 25 bp, Probe sequence
ttaagatcatacttcgccgataaag

SEQ ID NO: 147605 - DNA, 25 bp, Probe sequence
ttcgccgataaaggactacattcaa

SEQ ID NO: 147606 - DNA, 25 bp, Probe sequence
attcaacttagtagcgatgcatttt

SEQ ID NO: 147607 - DNA, 25 bp, Probe sequence
atattcaacttagtagcgatgcatt

SEQ ID NO: 147608 - DNA, 25 bp, Probe sequence
atgcattttttcgctttataaatga

SEQ ID NO: 147609 - DNA, 25 bp, Probe sequence
agtagcgatgcattttttcgcttta

SEQ ID NO: 147610 - DNA, 25 bp, Probe sequence
agcgatgcattttttcgctttataa

SEQ ID NO: 147611 - DNA, 25 bp, Probe sequence
acttagtagcgatgcattttttcgc

SEQ ID NO: 147612 - DNA, 25 bp, Probe sequence
aaatattcaacttagtagcgatgca

SEQ ID NO: 147613 - DNA, 25 bp, Probe sequence
aacttagtagcgatgcattttttcg

SEQ ID NO: 147614 - DNA, 25 bp, Probe sequence
aatattcaacttagtagcgatgcat

SEQ ID NO: 147615 - DNA, 25 bp, Probe sequence
caacttagtagcgatgcattttttc

SEQ ID NO: 147616 - DNA, 25 bp, Probe sequence
cttagtagcgatgcattttttcgct

SEQ ID NO: 147617 - DNA, 25 bp, Probe sequence
cgatgcattttttcgctttataaat

SEQ ID NO: 147618 - DNA, 25 bp, Probe sequence
gcgatgcattttttcgctttataaa

SEQ ID NO: 147619 - DNA, 25 bp, Probe sequence
gcattttttcgctttataaatgaaa

SEQ ID NO: 147620 - DNA, 25 bp, Probe sequence
gatgcattttttcgctttataaatg

SEQ ID NO: 147621 - DNA, 25 bp, Probe sequence
gtagcgatgcattttttcgctttat

SEQ ID NO: 147622 - DNA, 25 bp, Probe sequence
tgcattttttcgctttataaatgaa

SEQ ID NO: 147623 - DNA, 25 bp, Probe sequence
tcaacttagtagcgatgcatttttt

SEQ ID NO: 147624 - DNA, 25 bp, Probe sequence
taaatattcaacttagtagcgatgc

SEQ ID NO: 147625 - DNA, 25 bp, Probe sequence
tagcgatgcattttttcgctttata

SEQ ID NO: 147626 - DNA, 25 bp, Probe sequence
tagtagcgatgcattttttcgcttt

SEQ ID NO: 147627 - DNA, 25 bp, Probe sequence
tattcaacttagtagcgatgcattt

SEQ ID NO: 147628 - DNA, 25 bp, Probe sequence
ttttttcgctttataaatgaaaatg

SEQ ID NO: 147629 - DNA, 25 bp, Probe sequence
ttagtagcgatgcattttttcgctt

SEQ ID NO: 147630 - DNA, 25 bp, Probe sequence
ttcaacttagtagcgatgcattttt

SEQ ID NO: 147631 - DNA, 25 bp, Probe sequence
atcaaaagtacacaggtgctaaagt

SEQ ID NO: 147632 - DNA, 25 bp, Probe sequence
atgaagactattttttattacaaga

SEQ ID NO: 147633 - DNA, 25 bp, Probe sequence
atgtgcttctaaaatgaagactatt

SEQ ID NO: 147634 - DNA, 25 bp, Probe sequence
aggtgctaaagtatgtgcttctaaa

SEQ ID NO: 147635 - DNA, 25 bp, Probe sequence
agtacacaggtgctaaagtatgtgc

SEQ ID NO: 147636 - DNA, 25 bp, Probe sequence
agtatgtgcttctaaaatgaagact

SEQ ID NO: 147637 - DNA, 25 bp, Probe sequence
acaggtgctaaagtatgtgcttcta

SEQ ID NO: 147638 - DNA, 25 bp, Probe sequence
acacaggtgctaaagtatgtgcttc

SEQ ID NO: 147639 - DNA, 25 bp, Probe sequence
aaagtacacaggtgctaaagtatgt

SEQ ID NO: 147640 - DNA, 25 bp, Probe sequence
aaaagtacacaggtgctaaagtatg

SEQ ID NO: 147641 - DNA, 25 bp, Probe sequence
aagtacacaggtgctaaagtatgtg

SEQ ID NO: 147642 - DNA, 25 bp, Probe sequence
aagtatgtgcttctaaaatgaagac

SEQ ID NO: 147643 - DNA, 25 bp, Probe sequence
aatgaagactattttttattacaag

SEQ ID NO: 147644 - DNA, 25 bp, Probe sequence
aatcaaaagtacacaggtgctaaag

SEQ ID NO: 147645 - DNA, 25 bp, Probe sequence
caaaagtacacaggtgctaaagtat

SEQ ID NO: 147646 - DNA, 25 bp, Probe sequence
cacaggtgctaaagtatgtgcttct

SEQ ID NO: 147647 - DNA, 25 bp, Probe sequence
caggtgctaaagtatgtgcttctaa

SEQ ID NO: 147648 - DNA, 25 bp, Probe sequence
ctaaagtatgtgcttctaaaatgaa

SEQ ID NO: 147649 - DNA, 25 bp, Probe sequence
gctaaagtatgtgcttctaaaatga

SEQ ID NO: 147650 - DNA, 25 bp, Probe sequence
gaatcaaaagtacacaggtgctaaa

SEQ ID NO: 147651 - DNA, 25 bp, Probe sequence
gaaaatgtatctagtaaacttaaag

SEQ ID NO: 147652 - DNA, 25 bp, Probe sequence
gactattttttattacaagaaaatg

SEQ ID NO: 147653 - DNA, 25 bp, Probe sequence
gtatgtgcttctaaaatgaagacta

SEQ ID NO: 147654 - DNA, 25 bp, Probe sequence
gtacacaggtgctaaagtatgtgct

SEQ ID NO: 147655 - DNA, 25 bp, Probe sequence
gtgcttctaaaatgaagactatttt

SEQ ID NO: 147656 - DNA, 25 bp, Probe sequence
gtgctaaagtatgtgcttctaaaat

SEQ ID NO: 147657 - DNA, 25 bp, Probe sequence
ggtgctaaagtatgtgcttctaaaa

SEQ ID NO: 147658 - DNA, 25 bp, Probe sequence
tgaagactattttttattacaagaa

SEQ ID NO: 147659 - DNA, 25 bp, Probe sequence
tgaatcaaaagtacacaggtgctaa

SEQ ID NO: 147660 - DNA, 25 bp, Probe sequence
tgctaaagtatgtgcttctaaaatg

SEQ ID NO: 147661 - DNA, 25 bp, Probe sequence
tcaaaagtacacaggtgctaaagta

SEQ ID NO: 147662 - DNA, 25 bp, Probe sequence
tacacaggtgctaaagtatgtgctt

SEQ ID NO: 147663 - DNA, 25 bp, Probe sequence
tatgtgcttctaaaatgaagactat

SEQ ID NO: 147664 - DNA, 25 bp, Probe sequence
ttgaatcaaaagtacacaggtgcta

SEQ ID NO: 147665 - DNA, 25 bp, Probe sequence
atttaaagatgactactgagagcgt

SEQ ID NO: 147666 - DNA, 25 bp, Probe sequence
atagaaaaatacgctctcaaaatga

SEQ ID NO: 147667 - DNA, 25 bp, Probe sequence
atacgctctcaaaatgaagtcatct

SEQ ID NO: 147668 - DNA, 25 bp, Probe sequence
atgaagtcatctctaaaagaaacga

SEQ ID NO: 147669 - DNA, 25 bp, Probe sequence
agaaacgatttaaagatgactactg

SEQ ID NO: 147670 - DNA, 25 bp, Probe sequence
acgctctcaaaatgaagtcatctct

SEQ ID NO: 147671 - DNA, 25 bp, Probe sequence
acgatttaaagatgactactgagag

SEQ ID NO: 147672 - DNA, 25 bp, Probe sequence
aaatacgctctcaaaatgaagtcat

SEQ ID NO: 147673 - DNA, 25 bp, Probe sequence
aaatagaaaaatacgctctcaaaat

SEQ ID NO: 147674 - DNA, 25 bp, Probe sequence
aaagatgactactgagagcgtagca

SEQ ID NO: 147675 - DNA, 25 bp, Probe sequence
aaacgatttaaagatgactactgag

SEQ ID NO: 147676 - DNA, 25 bp, Probe sequence
aaaaatacgctctcaaaatgaagtc

SEQ ID NO: 147677 - DNA, 25 bp, Probe sequence
aaaatacgctctcaaaatgaagtca

SEQ ID NO: 147678 - DNA, 25 bp, Probe sequence
aacgatttaaagatgactactgaga

SEQ ID NO: 147679 - DNA, 25 bp, Probe sequence
aagaaacgatttaaagatgactact

SEQ ID NO: 147680 - DNA, 25 bp, Probe sequence
aagtcatctctaaaagaaacgattt

SEQ ID NO: 147681 - DNA, 25 bp, Probe sequence
aatgaagtcatctctaaaagaaacg

SEQ ID NO: 147682 - DNA, 25 bp, Probe sequence
aatagaaaaatacgctctcaaaatg

SEQ ID NO: 147683 - DNA, 25 bp, Probe sequence
aatacgctctcaaaatgaagtcatc

SEQ ID NO: 147684 - DNA, 25 bp, Probe sequence
ctcaaaatgaagtcatctctaaaag

SEQ ID NO: 147685 - DNA, 25 bp, Probe sequence
ctctcaaaatgaagtcatctctaaa

SEQ ID NO: 147686 - DNA, 25 bp, Probe sequence
cgatttaaagatgactactgagagc

SEQ ID NO: 147687 - DNA, 25 bp, Probe sequence
cgctctcaaaatgaagtcatctcta

SEQ ID NO: 147688 - DNA, 25 bp, Probe sequence
gctctcaaaatgaagtcatctctaa

SEQ ID NO: 147689 - DNA, 25 bp, Probe sequence
gaagtcatctctaaaagaaacgatt

SEQ ID NO: 147690 - DNA, 25 bp, Probe sequence
gaaaaatacgctctcaaaatgaagt

SEQ ID NO: 147691 - DNA, 25 bp, Probe sequence
gaaacgatttaaagatgactactga

SEQ ID NO: 147692 - DNA, 25 bp, Probe sequence
gatttaaagatgactactgagagcg

SEQ ID NO: 147693 - DNA, 25 bp, Probe sequence
gtcatctctaaaagaaacgatttaa

SEQ ID NO: 147694 - DNA, 25 bp, Probe sequence
tgaagtcatctctaaaagaaacgat

SEQ ID NO: 147695 - DNA, 25 bp, Probe sequence
taaagatgactactgagagcgtagc

SEQ ID NO: 147696 - DNA, 25 bp, Probe sequence
tacgctctcaaaatgaagtcatctc

SEQ ID NO: 147697 - DNA, 25 bp, Probe sequence
tttaaagatgactactgagagcgta

SEQ ID NO: 147698 - DNA, 25 bp, Probe sequence
ttaaatagaaaaatacgctctcaaa

SEQ ID NO: 147699 - DNA, 25 bp, Probe sequence
atttaaatatgatcaactctagtga

SEQ ID NO: 147700 - DNA, 25 bp, Probe sequence
atatgatcaactctagtgatgaatt

SEQ ID NO: 147701 - DNA, 25 bp, Probe sequence
atagcagcaacgagaacaaggaaaa

SEQ ID NO: 147702 - DNA, 25 bp, Probe sequence
atgatcaactctagtgatgaattgt

SEQ ID NO: 147703 - DNA, 25 bp, Probe sequence
agcagcaacgagaacaaggaaaatt

SEQ ID NO: 147704 - DNA, 25 bp, Probe sequence
actctagtgatgaattgtataaaat

SEQ ID NO: 147705 - DNA, 25 bp, Probe sequence
aaatagcagcaacgagaacaaggaa

SEQ ID NO: 147706 - DNA, 25 bp, Probe sequence
aaatatgatcaactctagtgatgaa

SEQ ID NO: 147707 - DNA, 25 bp, Probe sequence
aaacaagaagaacaactatctaata

SEQ ID NO: 147708 - DNA, 25 bp, Probe sequence
aaaatagcagcaacgagaacaagga

SEQ ID NO: 147709 - DNA, 25 bp, Probe sequence
aacaaattgcacaactgaaagagca

SEQ ID NO: 147710 - DNA, 25 bp, Probe sequence
aacagatattacaaaattaagtcaa

SEQ ID NO: 147711 - DNA, 25 bp, Probe sequence
aactctagtgatgaattgtataaaa

SEQ ID NO: 147712 - DNA, 25 bp, Probe sequence
aatagcagcaacgagaacaaggaaa

SEQ ID NO: 147713 - DNA, 25 bp, Probe sequence
aatatgatcaactctagtgatgaat

SEQ ID NO: 147714 - DNA, 25 bp, Probe sequence
aattatggataaagtcattggagaa

SEQ ID NO: 147715 - DNA, 25 bp, Probe sequence
caactatctaataaaattggtggtt

SEQ ID NO: 147716 - DNA, 25 bp, Probe sequence
caaattgcacaactgaaagagcaaa

SEQ ID NO: 147717 - DNA, 25 bp, Probe sequence
cagcaacgagaacaaggaaaattta

SEQ ID NO: 147718 - DNA, 25 bp, Probe sequence
cgaacaaaatagcagcaacgagaac

SEQ ID NO: 147719 - DNA, 25 bp, Probe sequence
gcagcaacgagaacaaggaaaattt

SEQ ID NO: 147720 - DNA, 25 bp, Probe sequence
gcacaactgaaagagcaaaagaaaa

SEQ ID NO: 147721 - DNA, 25 bp, Probe sequence
gaacaaaatagcagcaacgagaaca

SEQ ID NO: 147722 - DNA, 25 bp, Probe sequence
gaacaactatctaataaaattggtg

SEQ ID NO: 147723 - DNA, 25 bp, Probe sequence
gatcaactctagtgatgaattgtat

SEQ ID NO: 147724 - DNA, 25 bp, Probe sequence
gatatcgaacaaaatagcagcaacg

SEQ ID NO: 147725 - DNA, 25 bp, Probe sequence
gatttaaatatgatcaactctagtg

SEQ ID NO: 147726 - DNA, 25 bp, Probe sequence
ggataaagtcattggagaatttaat

SEQ ID NO: 147727 - DNA, 25 bp, Probe sequence
tgatcaactctagtgatgaattgta

SEQ ID NO: 147728 - DNA, 25 bp, Probe sequence
tcaactctagtgatgaattgtataa

SEQ ID NO: 147729 - DNA, 25 bp, Probe sequence
taaatatgatcaactctagtgatga

SEQ ID NO: 147730 - DNA, 25 bp, Probe sequence
tagcagcaacgagaacaaggaaaat

SEQ ID NO: 147731 - DNA, 25 bp, Probe sequence
tatgatcaactctagtgatgaattg

SEQ ID NO: 147732 - DNA, 25 bp, Probe sequence
tatcgaacaaaatagcagcaacgag

SEQ ID NO: 147733 - DNA, 25 bp, Probe sequence
attgacgaaaaaactaacacatctg

SEQ ID NO: 147734 - DNA, 25 bp, Probe sequence
atagcagtaatggtgatggaacaat

SEQ ID NO: 147735 - DNA, 25 bp, Probe sequence
atccacaagccaaaaatagtgcaat

SEQ ID NO: 147736 - DNA, 25 bp, Probe sequence
atgcacgagtttggtatcagttaat

SEQ ID NO: 147737 - DNA, 25 bp, Probe sequence
atgagagctggtgggtctgtaacat

SEQ ID NO: 147738 - DNA, 25 bp, Probe sequence
accctacgacaataaaacagtagct

SEQ ID NO: 147739 - DNA, 25 bp, Probe sequence
acacatctgatagtgcggataattc

SEQ ID NO: 147740 - DNA, 25 bp, Probe sequence
aaatgtttatgttacagaaatacca

SEQ ID NO: 147741 - DNA, 25 bp, Probe sequence
aaaggctcaaaagtaaatccacaag

SEQ ID NO: 147742 - DNA, 25 bp, Probe sequence
aaagttgtgaaattagaagctccta

SEQ ID NO: 147743 - DNA, 25 bp, Probe sequence
aactaacacatctgatagtgcggat

SEQ ID NO: 147744 - DNA, 25 bp, Probe sequence
aacgattcagaacatcacaatgata

SEQ ID NO: 147745 - DNA, 25 bp, Probe sequence
aagtaaatccacaagccaaaaatag

SEQ ID NO: 147746 - DNA, 25 bp, Probe sequence
aatcattttacctatattaattgtt

SEQ ID NO: 147747 - DNA, 25 bp, Probe sequence
aattctagtgatactaacacctcag

SEQ ID NO: 147748 - DNA, 25 bp, Probe sequence
catcacaatgataataattctagtg

SEQ ID NO: 147749 - DNA, 25 bp, Probe sequence
ctcctatgagagctggtgggtctgt

SEQ ID NO: 147750 - DNA, 25 bp, Probe sequence
gaatatgcacgagtttggtatcagt

SEQ ID NO: 147751 - DNA, 25 bp, Probe sequence
gaaacagtctatattaaaccctacg

SEQ ID NO: 147752 - DNA, 25 bp, Probe sequence
gaaattgaatatgcacgagtttggt

SEQ ID NO: 147753 - DNA, 25 bp, Probe sequence
gagctggtgggtctgtaacatatag

SEQ ID NO: 147754 - DNA, 25 bp, Probe sequence
gatactaacacctcagaaaacaaag

SEQ ID NO: 147755 - DNA, 25 bp, Probe sequence
gatagtgcggataattcagaaagta

SEQ ID NO: 147756 - DNA, 25 bp, Probe sequence
gttacagaaataccaaaaggctcaa

SEQ ID NO: 147757 - DNA, 25 bp, Probe sequence
gtttatcggtaattttagtgagttg

SEQ ID NO: 147758 - DNA, 25 bp, Probe sequence
gtttggtatcagttaatatctacaa

SEQ ID NO: 147759 - DNA, 25 bp, Probe sequence
gtctatattaaaccctacgacaata

SEQ ID NO: 147760 - DNA, 25 bp, Probe sequence
gtgaaattagaagctcctatgagag

SEQ ID NO: 147761 - DNA, 25 bp, Probe sequence
gtgagttgtaataataacgattcag

SEQ ID NO: 147762 - DNA, 25 bp, Probe sequence
ggtgggtctgtaacatatagcagta

SEQ ID NO: 147763 - DNA, 25 bp, Probe sequence
tctagtgatactaacacctcagaaa

SEQ ID NO: 147764 - DNA, 25 bp, Probe sequence
taatgtatataataatatcccttat

SEQ ID NO: 147765 - DNA, 25 bp, Probe sequence
taagaagcaacaatctactgataaa

SEQ ID NO: 147766 - DNA, 25 bp, Probe sequence
tatattaattgttagtttatcggta

SEQ ID NO: 147767 - DNA, 25 bp, Probe sequence
ctttcggaggggtgatacctaattg

SEQ ID NO: 147768 - DNA, 25 bp, Probe sequence
attggctagctcattaacattcaca

SEQ ID NO: 147769 - DNA, 25 bp, Probe sequence
attcaggggaattaactcaaatcga

SEQ ID NO: 147770 - DNA, 25 bp, Probe sequence
atgactcaagaagaataccaagaat

SEQ ID NO: 147771 - DNA, 25 bp, Probe sequence
caggtttttcagcgacagccaatgc

SEQ ID NO: 147772 - DNA, 25 bp, Probe sequence
agcgcagatacaaatggagatggtt

SEQ ID NO: 147773 - DNA, 25 bp, Probe sequence
acacctcaaggtgtgttgacacctg

SEQ ID NO: 147774 - DNA, 25 bp, Probe sequence
acagccaatgctgaggatggtgcca

SEQ ID NO: 147775 - DNA, 25 bp, Probe sequence
aaatcaagattcaaactctcaagta

SEQ ID NO: 147776 - DNA, 25 bp, Probe sequence
aaaactattaatacacctcaaggtg

SEQ ID NO: 147777 - DNA, 25 bp, Probe sequence
aactctcaagtattaccagaaacag

SEQ ID NO: 147778 - DNA, 25 bp, Probe sequence
aacgatcattacttccaactttatt

SEQ ID NO: 147779 - DNA, 25 bp, Probe sequence
caactttattattggctagctcatt

SEQ ID NO: 147780 - DNA, 25 bp, Probe sequence
cctaaccctaatagtgtatccacag

SEQ ID NO: 147781 - DNA, 25 bp, Probe sequence
cctcccacaatctgcacaaaatcaa

SEQ ID NO: 147782 - DNA, 25 bp, Probe sequence
gctcattaacattcacaggtttttc

SEQ ID NO: 147783 - DNA, 25 bp, Probe sequence
gcaaccaaagtgatatattgtcaat

SEQ ID NO: 147784 - DNA, 25 bp, Probe sequence
gaacttaccaaatagcgcagataca

SEQ ID NO: 147785 - DNA, 25 bp, Probe sequence
gaaacaggagaaagcaaccaaagtg

SEQ ID NO: 147786 - DNA, 25 bp, Probe sequence
gagagaactcaacaaggtaaaagac

SEQ ID NO: 147787 - DNA, 25 bp, Probe sequence
gagaaagtttcaagtgtatttaatg

SEQ ID NO: 147788 - DNA, 25 bp, Probe sequence
gatcattacttccaactttattatt

SEQ ID NO: 147789 - DNA, 25 bp, Probe sequence
gattcaaactctcaagtattaccag

SEQ ID NO: 147790 - DNA, 25 bp, Probe sequence
gtatacggagagaacttaccaaata

SEQ ID NO: 147791 - DNA, 25 bp, Probe sequence
gtcatgttcctaaccctaatagtgt

SEQ ID NO: 147792 - DNA, 25 bp, Probe sequence
gtgtgttgacacctgtaactgaaaa

SEQ ID NO: 147793 - DNA, 25 bp, Probe sequence
gggtgatacctaattgtatgactca

SEQ ID NO: 147794 - DNA, 25 bp, Probe sequence
ggatggtgccaaaaccgtatacgga

SEQ ID NO: 147795 - DNA, 25 bp, Probe sequence
ggagatggttgggctaatgtagact

SEQ ID NO: 147796 - DNA, 25 bp, Probe sequence
tggcgcttctggactactaatatta

SEQ ID NO: 147797 - DNA, 25 bp, Probe sequence
tgtagacttcaatacttcatccctc

SEQ ID NO: 147798 - DNA, 25 bp, Probe sequence
tcaataattggcgcttctggactac

SEQ ID NO: 147799 - DNA, 25 bp, Probe sequence
taattggcgcttctggactactaat

SEQ ID NO: 147800 - DNA, 25 bp, Probe sequence
tagaaagtcatgttcctaaccctaa

SEQ ID NO: 147801 - DNA, 25 bp, Probe sequence
atttctctactaacggtatatggga

SEQ ID NO: 147802 - DNA, 25 bp, Probe sequence
atacctcaaaaagcaccattaatca

SEQ ID NO: 147803 - DNA, 25 bp, Probe sequence
agaaaattattctctcatttttcag

SEQ ID NO: 147804 - DNA, 25 bp, Probe sequence
acagcatctgaattgattaatctat

SEQ ID NO: 147805 - DNA, 25 bp, Probe sequence
aaagcaccattaatcagaaattttg

SEQ ID NO: 147806 - DNA, 25 bp, Probe sequence
aaacttatgatttcactccatttct

SEQ ID NO: 147807 - DNA, 25 bp, Probe sequence
aatgatgacggattaacaatacctc

SEQ ID NO: 147808 - DNA, 25 bp, Probe sequence
aatccatgattcagtcatttccaga

SEQ ID NO: 147809 - DNA, 25 bp, Probe sequence
aattatcgatatacatcttagtgat

SEQ ID NO: 147810 - DNA, 25 bp, Probe sequence
cactccatttctttttgatggtaat

SEQ ID NO: 147811 - DNA, 25 bp, Probe sequence
cagaaccacaccatttacgcttagg

SEQ ID NO: 147812 - DNA, 25 bp, Probe sequence
ctctcatttttcagaaccacaccat

SEQ ID NO: 147813 - DNA, 25 bp, Probe sequence
ccatttacgcttaggtttttctcag

SEQ ID NO: 147814 - DNA, 25 bp, Probe sequence
gaatgaagatattctttccattatc

SEQ ID NO: 147815 - DNA, 25 bp, Probe sequence
gaaatgaaatcgtttctttctaaag

SEQ ID NO: 147816 - DNA, 25 bp, Probe sequence
gacactcttcaatatatagacccaa

SEQ ID NO: 147817 - DNA, 25 bp, Probe sequence
gagcacaagagcaaattgatgtttt

SEQ ID NO: 147818 - DNA, 25 bp, Probe sequence
gatattctttccattatcttaaatg

SEQ ID NO: 147819 - DNA, 25 bp, Probe sequence
gatttcactccatttctttttgatg

SEQ ID NO: 147820 - DNA, 25 bp, Probe sequence
gatttttctgatacccaaaagcgta

SEQ ID NO: 147821 - DNA, 25 bp, Probe sequence
gttgcgactttggctcaaagagcac

SEQ ID NO: 147822 - DNA, 25 bp, Probe sequence
gttccaaaattattcactacttata

SEQ ID NO: 147823 - DNA, 25 bp, Probe sequence
gtaccaaattcaatcatgatgctaa

SEQ ID NO: 147824 - DNA, 25 bp, Probe sequence
gtgacactagtatgtaccaaattca

SEQ ID NO: 147825 - DNA, 25 bp, Probe sequence
gtgacatattattatttctctacta

SEQ ID NO: 147826 - DNA, 25 bp, Probe sequence
ggacatcgtatggataatatgacct

SEQ ID NO: 147827 - DNA, 25 bp, Probe sequence
ggaaaaggtactacagcatctgaat

SEQ ID NO: 147828 - DNA, 25 bp, Probe sequence
ggaaaagttgcgactttggctcaaa

SEQ ID NO: 147829 - DNA, 25 bp, Probe sequence
tcttagtgatttttctgatacccaa

SEQ ID NO: 147830 - DNA, 25 bp, Probe sequence
taaacacttcttcaaaatcacacaa

SEQ ID NO: 147831 - DNA, 25 bp, Probe sequence
tacgcttaggtttttctcagaaagg

SEQ ID NO: 147832 - DNA, 25 bp, Probe sequence
tatgacctatttctttttaaacact

SEQ ID NO: 147833 - DNA, 25 bp, Probe sequence
tatatagacccaaaccttattaaag

SEQ ID NO: 147834 - DNA, 25 bp, Probe sequence
ttcactacttataatcagacatcta

SEQ ID NO: 147835 - DNA, 25 bp, Probe sequence
atgatgagtgcattcgctgaacttg

SEQ ID NO: 147836 - DNA, 25 bp, Probe sequence
aggtggaagaccttcactaccagat

SEQ ID NO: 147837 - DNA, 25 bp, Probe sequence
agaccttcactaccagatcataaga

SEQ ID NO: 147838 - DNA, 25 bp, Probe sequence
agctaatttattaagtgaacgaact

SEQ ID NO: 147839 - DNA, 25 bp, Probe sequence
acaaacaggagtgagtcgttctact

SEQ ID NO: 147840 - DNA, 25 bp, Probe sequence
aaaggtggaagaccttcactaccag

SEQ ID NO: 147841 - DNA, 25 bp, Probe sequence
aaagctgtctggtgaagaaattgct

SEQ ID NO: 147842 - DNA, 25 bp, Probe sequence
aaaaggtttggaagctgcaagagca

SEQ ID NO: 147843 - DNA, 25 bp, Probe sequence
aacaggagtgagtcgttctactgta

SEQ ID NO: 147844 - DNA, 25 bp, Probe sequence
aagaccttcactaccagatcataag

SEQ ID NO: 147845 - DNA, 25 bp, Probe sequence
caggagtgagtcgttctactgtata

SEQ ID NO: 147846 - DNA, 25 bp, Probe sequence
ccttcactaccagatcataagaaaa

SEQ ID NO: 147847 - DNA, 25 bp, Probe sequence
gctgcaagagcaagagggagaaaag

SEQ ID NO: 147848 - DNA, 25 bp, Probe sequence
gcattcgctgaacttgaagctaatt

SEQ ID NO: 147849 - DNA, 25 bp, Probe sequence
gaagaccttcactaccagatcataa

SEQ ID NO: 147850 - DNA, 25 bp, Probe sequence
gaaattgctgaacaaacaggagtga

SEQ ID NO: 147851 - DNA, 25 bp, Probe sequence
gaccttcactaccagatcataagaa

SEQ ID NO: 147852 - DNA, 25 bp, Probe sequence
gagtcgttctactgtatataggatt

SEQ ID NO: 147853 - DNA, 25 bp, Probe sequence
gagagatcaaattcttatatgatga

SEQ ID NO: 147854 - DNA, 25 bp, Probe sequence
gagtgcattcgctgaacttgaagct

SEQ ID NO: 147855 - DNA, 25 bp, Probe sequence
gagtgagtcgttctactgtatatag

SEQ ID NO: 147856 - DNA, 25 bp, Probe sequence
gatgaacaaaagctgtctggtgaag

SEQ ID NO: 147857 - DNA, 25 bp, Probe sequence
gatgagtgcattcgctgaacttgaa

SEQ ID NO: 147858 - DNA, 25 bp, Probe sequence
gtcgttctactgtatataggattat

SEQ ID NO: 147859 - DNA, 25 bp, Probe sequence
gtgcattcgctgaacttgaagctaa

SEQ ID NO: 147860 - DNA, 25 bp, Probe sequence
gtgagtcgttctactgtatatagga

SEQ ID NO: 147861 - DNA, 25 bp, Probe sequence
gtggaagaccttcactaccagatca

SEQ ID NO: 147862 - DNA, 25 bp, Probe sequence
ggtggaagaccttcactaccagatc

SEQ ID NO: 147863 - DNA, 25 bp, Probe sequence
ggtttggaagctgcaagagcaagag

SEQ ID NO: 147864 - DNA, 25 bp, Probe sequence
ggagtgagtcgttctactgtatata

SEQ ID NO: 147865 - DNA, 25 bp, Probe sequence
ggaagctgcaagagcaagagggaga

SEQ ID NO: 147866 - DNA, 25 bp, Probe sequence
tggaagaccttcactaccagatcat

SEQ ID NO: 147867 - DNA, 25 bp, Probe sequence
tatgatgaacaaaagctgtctggtg

SEQ ID NO: 147868 - DNA, 25 bp, Probe sequence
ttcgctgaacttgaagctaatttat

SEQ ID NO: 147869 - DNA, 25 bp, Probe sequence
attagaattcaaacctacttaccag

SEQ ID NO: 147870 - DNA, 25 bp, Probe sequence
ataccgtgtatggctctataacaga

SEQ ID NO: 147871 - DNA, 25 bp, Probe sequence
agaacaatacaatgagcaaatacaa

SEQ ID NO: 147872 - DNA, 25 bp, Probe sequence
agaattcaaacctacttaccagcgt

SEQ ID NO: 147873 - DNA, 25 bp, Probe sequence
acctacttaccagcgtttatgtgaa

SEQ ID NO: 147874 - DNA, 25 bp, Probe sequence
accagcgtttatgtgaaagaattta

SEQ ID NO: 147875 - DNA, 25 bp, Probe sequence
accgtgtatggctctataacagatc

SEQ ID NO: 147876 - DNA, 25 bp, Probe sequence
aaatgatgctaaaaactttgtgtta

SEQ ID NO: 147877 - DNA, 25 bp, Probe sequence
aaacctacttaccagcgtttatgtg

SEQ ID NO: 147878 - DNA, 25 bp, Probe sequence
aacagatcaatacggaaataaccta

SEQ ID NO: 147879 - DNA, 25 bp, Probe sequence
aacctacttaccagcgtttatgtga

SEQ ID NO: 147880 - DNA, 25 bp, Probe sequence
aagacaataataccgtgtatggctc

SEQ ID NO: 147881 - DNA, 25 bp, Probe sequence
aataccgtgtatggctctataacag

SEQ ID NO: 147882 - DNA, 25 bp, Probe sequence
caataataccgtgtatggctctata

SEQ ID NO: 147883 - DNA, 25 bp, Probe sequence
caaacctacttaccagcgtttatgt

SEQ ID NO: 147884 - DNA, 25 bp, Probe sequence
ccgtgtatggctctataacagatca

SEQ ID NO: 147885 - DNA, 25 bp, Probe sequence
cctacttaccagcgtttatgtgaaa

SEQ ID NO: 147886 - DNA, 25 bp, Probe sequence
gaattcaaacctacttaccagcgtt

SEQ ID NO: 147887 - DNA, 25 bp, Probe sequence
gaaactttatctgaaaatgatgcta

SEQ ID NO: 147888 - DNA, 25 bp, Probe sequence
gacaataataccgtgtatggctcta

SEQ ID NO: 147889 - DNA, 25 bp, Probe sequence
gatgctaaaaactttgtgttatttg

SEQ ID NO: 147890 - DNA, 25 bp, Probe sequence
gtgtatggctctataacagatcaat

SEQ ID NO: 147891 - DNA, 25 bp, Probe sequence
ggctctataacagatcaatacggaa

SEQ ID NO: 147892 - DNA, 25 bp, Probe sequence
tgctaaaaactttgtgttatttgtt

SEQ ID NO: 147893 - DNA, 25 bp, Probe sequence
tcaaacctacttaccagcgtttatg

SEQ ID NO: 147894 - DNA, 25 bp, Probe sequence
tcaatacggaaataacctaataact

SEQ ID NO: 147895 - DNA, 25 bp, Probe sequence
taataccgtgtatggctctataaca

SEQ ID NO: 147896 - DNA, 25 bp, Probe sequence
taatgactacaatagtattgctaaa

SEQ ID NO: 147897 - DNA, 25 bp, Probe sequence
tacttaccagcgtttatgtgaaaga

SEQ ID NO: 147898 - DNA, 25 bp, Probe sequence
taccgtgtatggctctataacagat

SEQ ID NO: 147899 - DNA, 25 bp, Probe sequence
tagtattgctaaaaagttatctaat

SEQ ID NO: 147900 - DNA, 25 bp, Probe sequence
tatggctctataacagatcaatacg

SEQ ID NO: 147901 - DNA, 25 bp, Probe sequence
ttaccagcgtttatgtgaaagaatt

SEQ ID NO: 147902 - DNA, 25 bp, Probe sequence
ttcaaacctacttaccagcgtttat

SEQ ID NO: 147903 - DNA, 25 bp, Probe sequence
attgcttactatttaatcagtttga

SEQ ID NO: 147904 - DNA, 25 bp, Probe sequence
atatttggtatgttcttgctataac

SEQ ID NO: 147905 - DNA, 25 bp, Probe sequence
ataatatttggtatgttcttgctat

SEQ ID NO: 147906 - DNA, 25 bp, Probe sequence
atcagtttgaataatgctaaaggac

SEQ ID NO: 147907 - DNA, 25 bp, Probe sequence
atgttcttgctataacacttctaat

SEQ ID NO: 147908 - DNA, 25 bp, Probe sequence
agtacagcataatgactacaatagt

SEQ ID NO: 147909 - DNA, 25 bp, Probe sequence
agaacaatacaatgagcaaatacaa

SEQ ID NO: 147910 - DNA, 25 bp, Probe sequence
acttctaattgttggaattgcttac

SEQ ID NO: 147911 - DNA, 25 bp, Probe sequence
acacttctaattgttggaattgctt

SEQ ID NO: 147912 - DNA, 25 bp, Probe sequence
aaatgatgctaaaaactttgtgtta

SEQ ID NO: 147913 - DNA, 25 bp, Probe sequence
aatatttggtatgttcttgctataa

SEQ ID NO: 147914 - DNA, 25 bp, Probe sequence
aattagtacagcataatgactacaa

SEQ ID NO: 147915 - DNA, 25 bp, Probe sequence
aattgttggaattgcttactattta

SEQ ID NO: 147916 - DNA, 25 bp, Probe sequence
caggggtttaatatatggattacac

SEQ ID NO: 147917 - DNA, 25 bp, Probe sequence
cttgctataacacttctaattgttg

SEQ ID NO: 147918 - DNA, 25 bp, Probe sequence
gctataacacttctaattgttggaa

SEQ ID NO: 147919 - DNA, 25 bp, Probe sequence
gcataatgactacaatagtattgct

SEQ ID NO: 147920 - DNA, 25 bp, Probe sequence
gaattgcttactatttaatcagttt

SEQ ID NO: 147921 - DNA, 25 bp, Probe sequence
gaataatgctaaaggacaagttaaa

SEQ ID NO: 147922 - DNA, 25 bp, Probe sequence
gaaactttatctgaaaatgatgcta

SEQ ID NO: 147923 - DNA, 25 bp, Probe sequence
gatgctaaaaactttgtgttatttg

SEQ ID NO: 147924 - DNA, 25 bp, Probe sequence
gttggaattgcttactatttaatca

SEQ ID NO: 147925 - DNA, 25 bp, Probe sequence
gttcttgctataacacttctaattg

SEQ ID NO: 147926 - DNA, 25 bp, Probe sequence
gtatgttcttgctataacacttcta

SEQ ID NO: 147927 - DNA, 25 bp, Probe sequence
ggggtttaatatatggattacacaa

SEQ ID NO: 147928 - DNA, 25 bp, Probe sequence
ggtatgttcttgctataacacttct

SEQ ID NO: 147929 - DNA, 25 bp, Probe sequence
ggaattgcttactatttaatcagtt

SEQ ID NO: 147930 - DNA, 25 bp, Probe sequence
tggtatgttcttgctataacacttc

SEQ ID NO: 147931 - DNA, 25 bp, Probe sequence
tgctaaaaactttgtgttatttgtt

SEQ ID NO: 147932 - DNA, 25 bp, Probe sequence
tgcttactatttaatcagtttgaat

SEQ ID NO: 147933 - DNA, 25 bp, Probe sequence
tagtattgctaaaaagttatctaat

SEQ ID NO: 147934 - DNA, 25 bp, Probe sequence
tatgttcttgctataacacttctaa

SEQ ID NO: 147935 - DNA, 25 bp, Probe sequence
tttggtatgttcttgctataacact

SEQ ID NO: 147936 - DNA, 25 bp, Probe sequence
ttcttgctataacacttctaattgt

SEQ ID NO: 147937 - DNA, 25 bp, Probe sequence
attggttatgcacgtgtgtcaacac

SEQ ID NO: 147938 - DNA, 25 bp, Probe sequence
attagatcgtcttggacgtacaaca

SEQ ID NO: 147939 - DNA, 25 bp, Probe sequence
attatagatatgaatgtgtcaacga

SEQ ID NO: 147940 - DNA, 25 bp, Probe sequence
atcgtcttggacgtacaacaaaaca

SEQ ID NO: 147941 - DNA, 25 bp, Probe sequence
atgcacgtgtgtcaacacaagatca

SEQ ID NO: 147942 - DNA, 25 bp, Probe sequence
atggttgtgaacgtatctttagcga

SEQ ID NO: 147943 - DNA, 25 bp, Probe sequence
atggctaaaattggttatgcacgtg

SEQ ID NO: 147944 - DNA, 25 bp, Probe sequence
agatgttctttacggttctgttgca

SEQ ID NO: 147945 - DNA, 25 bp, Probe sequence
agcattgatttacatattatagata

SEQ ID NO: 147946 - DNA, 25 bp, Probe sequence
acttgaggaatatggttgtgaacgt

SEQ ID NO: 147947 - DNA, 25 bp, Probe sequence
aaagtcttgatggacagattgatac

SEQ ID NO: 147948 - DNA, 25 bp, Probe sequence
aaaacaattaattgagctatctcaa

SEQ ID NO: 147949 - DNA, 25 bp, Probe sequence
ctataaattagatcgtcttggacgt

SEQ ID NO: 147950 - DNA, 25 bp, Probe sequence
gcgatgggcaagatgttctttacgg

SEQ ID NO: 147951 - DNA, 25 bp, Probe sequence
gctatctcaatggttggatgaaaat

SEQ ID NO: 147952 - DNA, 25 bp, Probe sequence
gcaagatgttctttacggttctgtt

SEQ ID NO: 147953 - DNA, 25 bp, Probe sequence
gaacggaacttgataagtgtttaga

SEQ ID NO: 147954 - DNA, 25 bp, Probe sequence
gaacgtatctttagcgagaaagcga

SEQ ID NO: 147955 - DNA, 25 bp, Probe sequence
gagaaagcgagtggtcgtaaaacta

SEQ ID NO: 147956 - DNA, 25 bp, Probe sequence
gagatattctagttgtctataaatt

SEQ ID NO: 147957 - DNA, 25 bp, Probe sequence
gatggacagattgatacacttgagg

SEQ ID NO: 147958 - DNA, 25 bp, Probe sequence
gatgcgatgggcaagatgttcttta

SEQ ID NO: 147959 - DNA, 25 bp, Probe sequence
gtcttggacgtacaacaaaacaatt

SEQ ID NO: 147960 - DNA, 25 bp, Probe sequence
gtgaaggagatattctagttgtcta

SEQ ID NO: 147961 - DNA, 25 bp, Probe sequence
gtgtcaacgaaagatgcgatgggca

SEQ ID NO: 147962 - DNA, 25 bp, Probe sequence
gtgtgtcaacacaagatcaaagtct

SEQ ID NO: 147963 - DNA, 25 bp, Probe sequence
gggcaagatgttctttacggttctg

SEQ ID NO: 147964 - DNA, 25 bp, Probe sequence
ggttatgcacgtgtgtcaacacaag

SEQ ID NO: 147965 - DNA, 25 bp, Probe sequence
ggttgtgaacgtatctttagcgaga

SEQ ID NO: 147966 - DNA, 25 bp, Probe sequence
ggatgaaaatagcattgatttacat

SEQ ID NO: 147967 - DNA, 25 bp, Probe sequence
ggacagattgatacacttgaggaat

SEQ ID NO: 147968 - DNA, 25 bp, Probe sequence
tgagctatctcaatggttggatgaa

SEQ ID NO: 147969 - DNA, 25 bp, Probe sequence
taaaattggttatgcacgtgtgtca

SEQ ID NO: 147970 - DNA, 25 bp, Probe sequence
ttagcgagaaagcgagtggtcgtaa

SEQ ID NO: 147971 - DNA, 25 bp, Probe sequence
ataattcaaatagttctgagacatt

SEQ ID NO: 147972 - DNA, 25 bp, Probe sequence
atgacagtacagatgaattaacaaa

SEQ ID NO: 147973 - DNA, 25 bp, Probe sequence
agagaataagcatgacagtacagat

SEQ ID NO: 147974 - DNA, 25 bp, Probe sequence
agaatgtcaaccaaccgaagtaaat

SEQ ID NO: 147975 - DNA, 25 bp, Probe sequence
agaatattaatccacaagaagcaac

SEQ ID NO: 147976 - DNA, 25 bp, Probe sequence
aaatgattgctgatgaattaggtgt

SEQ ID NO: 147977 - DNA, 25 bp, Probe sequence
aaaacgaagaacgattccagtgata

SEQ ID NO: 147978 - DNA, 25 bp, Probe sequence
caaaaagaatgtcaaccaaccgaag

SEQ ID NO: 147979 - DNA, 25 bp, Probe sequence
aacgaagaacgattccagtgataat

SEQ ID NO: 147980 - DNA, 25 bp, Probe sequence
aatgtcaaccaaccgaagtaaatca

SEQ ID NO: 147981 - DNA, 25 bp, Probe sequence
aagagattttggagtcgtttatttg

SEQ ID NO: 147982 - DNA, 25 bp, Probe sequence
aatattcttttgatacaacgatgaa

SEQ ID NO: 147983 - DNA, 25 bp, Probe sequence
caaaatatcaaccaacaacaaaaag

SEQ ID NO: 147984 - DNA, 25 bp, Probe sequence
caaatagttctgagacattaaaaac

SEQ ID NO: 147985 - DNA, 25 bp, Probe sequence
gcttaaatattcttttgatacaacg

SEQ ID NO: 147986 - DNA, 25 bp, Probe sequence
gaatgtcaaccaaccgaagtaaatc

SEQ ID NO: 147987 - DNA, 25 bp, Probe sequence
gaatctcaaaatatcaaccaacaac

SEQ ID NO: 147988 - DNA, 25 bp, Probe sequence
gaagagaataagcatgacagtacag

SEQ ID NO: 147989 - DNA, 25 bp, Probe sequence
gaagaacgattccagtgataatagg

SEQ ID NO: 147990 - DNA, 25 bp, Probe sequence
gaagaatctcaaaatatcaaccaac

SEQ ID NO: 147991 - DNA, 25 bp, Probe sequence
gaacgattccagtgataatagggag

SEQ ID NO: 147992 - DNA, 25 bp, Probe sequence
gaaaaaacgaagaacgattccagtg

SEQ ID NO: 147993 - DNA, 25 bp, Probe sequence
gaaaacaactcataataaagaatca

SEQ ID NO: 147994 - DNA, 25 bp, Probe sequence
gacagcttaaatattcttttgatac

SEQ ID NO: 147995 - DNA, 25 bp, Probe sequence
gacagaatattaatccacaagaagc

SEQ ID NO: 147996 - DNA, 25 bp, Probe sequence
gagattttggagtcgtttatttggt

SEQ ID NO: 147997 - DNA, 25 bp, Probe sequence
gataatagggaggtagaaccaccta

SEQ ID NO: 147998 - DNA, 25 bp, Probe sequence
gatacaacgatgaataatagacaga

SEQ ID NO: 147999 - DNA, 25 bp, Probe sequence
gattgctgatgaattaggtgtaact

SEQ ID NO: 148000 - DNA, 25 bp, Probe sequence
tgtcaaccaaccgaagtaaatcata

SEQ ID NO: 148001 - DNA, 25 bp, Probe sequence
tcaaccaaccgaagtaaatcataaa

SEQ ID NO: 148002 - DNA, 25 bp, Probe sequence
taagcatgacagtacagatgaatta

SEQ ID NO: 148003 - DNA, 25 bp, Probe sequence
tagaaccacctaaaaagagattttg

SEQ ID NO: 148004 - DNA, 25 bp, Probe sequence
tagacagaatattaatccacaagaa

SEQ ID NO: 148005 - DNA, 25 bp, Probe sequence
attgattgcatcattttgttaaaca

SEQ ID NO: 148006 - DNA, 25 bp, Probe sequence
atttattgcaaacctgccatttcac

SEQ ID NO: 148007 - DNA, 25 bp, Probe sequence
atcccactcacatgatttttttgat

SEQ ID NO: 148008 - DNA, 25 bp, Probe sequence
acctgccatttcacactgaaaattt

SEQ ID NO: 148009 - DNA, 25 bp, Probe sequence
acataattacatgattgattgcatc

SEQ ID NO: 148010 - DNA, 25 bp, Probe sequence
acatgattgattgcatcattttgtt

SEQ ID NO: 148011 - DNA, 25 bp, Probe sequence
aaacctgccatttcacactgaaaat

SEQ ID NO: 148012 - DNA, 25 bp, Probe sequence
aacaatttattgcaaacctgccatt

SEQ ID NO: 148013 - DNA, 25 bp, Probe sequence
aacctgccatttcacactgaaaatt

SEQ ID NO: 148014 - DNA, 25 bp, Probe sequence
aataagtgacgatattttacaagtc

SEQ ID NO: 148015 - DNA, 25 bp, Probe sequence
caatttattgcaaacctgccatttc

SEQ ID NO: 148016 - DNA, 25 bp, Probe sequence
caaacctgccatttcacactgaaaa

SEQ ID NO: 148017 - DNA, 25 bp, Probe sequence
cacatgatttttttgatgaaacata

SEQ ID NO: 148018 - DNA, 25 bp, Probe sequence
cactcacatgatttttttgatgaaa

SEQ ID NO: 148019 - DNA, 25 bp, Probe sequence
ctgccatttcacactgaaaatttac

SEQ ID NO: 148020 - DNA, 25 bp, Probe sequence
cgttatcccactcacatgatttttt

SEQ ID NO: 148021 - DNA, 25 bp, Probe sequence
cccactcacatgatttttttgatga

SEQ ID NO: 148022 - DNA, 25 bp, Probe sequence
gacgatattttacaagtcatataca

SEQ ID NO: 148023 - DNA, 25 bp, Probe sequence
gatatgttcacaaactttatttcgt

SEQ ID NO: 148024 - DNA, 25 bp, Probe sequence
gatattttacaagtcatatacaaat

SEQ ID NO: 148025 - DNA, 25 bp, Probe sequence
gattgcatcattttgttaaacaatt

SEQ ID NO: 148026 - DNA, 25 bp, Probe sequence
gttatcccactcacatgattttttt

SEQ ID NO: 148027 - DNA, 25 bp, Probe sequence
tgttcacaaactttatttcgttatc

SEQ ID NO: 148028 - DNA, 25 bp, Probe sequence
tcccactcacatgatttttttgatg

SEQ ID NO: 148029 - DNA, 25 bp, Probe sequence
tcgttatcccactcacatgattttt

SEQ ID NO: 148030 - DNA, 25 bp, Probe sequence
tcacaaactttatttcgttatccca

SEQ ID NO: 148031 - DNA, 25 bp, Probe sequence
tatgttcacaaactttatttcgtta

SEQ ID NO: 148032 - DNA, 25 bp, Probe sequence
tatcccactcacatgatttttttga

SEQ ID NO: 148033 - DNA, 25 bp, Probe sequence
tattgcaaacctgccatttcacact

SEQ ID NO: 148034 - DNA, 25 bp, Probe sequence
tttcacactgaaaatttacataata

SEQ ID NO: 148035 - DNA, 25 bp, Probe sequence
tttattgcaaacctgccatttcaca

SEQ ID NO: 148036 - DNA, 25 bp, Probe sequence
ttattgcaaacctgccatttcacac

SEQ ID NO: 148037 - DNA, 25 bp, Probe sequence
ttatcccactcacatgatttttttg

SEQ ID NO: 148038 - DNA, 25 bp, Probe sequence
ttcgttatcccactcacatgatttt

SEQ ID NO: 148039 - DNA, 25 bp, Probe sequence
atatcttgggtgtgttaatactagt

SEQ ID NO: 148040 - DNA, 25 bp, Probe sequence
attttctaccaatacaatcccttct

SEQ ID NO: 148041 - DNA, 25 bp, Probe sequence
atacaatcccttctaagtgcactaa

SEQ ID NO: 148042 - DNA, 25 bp, Probe sequence
atcccttctaagtgcactaaaaaat

SEQ ID NO: 148043 - DNA, 25 bp, Probe sequence
atcttgggtgtgttaatactagtaa

SEQ ID NO: 148044 - DNA, 25 bp, Probe sequence
accaatacaatcccttctaagtgca

SEQ ID NO: 148045 - DNA, 25 bp, Probe sequence
actagtaatgctttcaactgatgca

SEQ ID NO: 148046 - DNA, 25 bp, Probe sequence
aagtgcactaaaaaatccttactgc

SEQ ID NO: 148047 - DNA, 25 bp, Probe sequence
aatacaatcccttctaagtgcacta

SEQ ID NO: 148048 - DNA, 25 bp, Probe sequence
aatactagtaatgctttcaactgat

SEQ ID NO: 148049 - DNA, 25 bp, Probe sequence
caatcccttctaagtgcactaaaaa

SEQ ID NO: 148050 - DNA, 25 bp, Probe sequence
caatacaatcccttctaagtgcact

SEQ ID NO: 148051 - DNA, 25 bp, Probe sequence
caactgatgcattagactgtgacat

SEQ ID NO: 148052 - DNA, 25 bp, Probe sequence
cttcgcttattaattttctaccaat

SEQ ID NO: 148053 - DNA, 25 bp, Probe sequence
ctaccaatacaatcccttctaagtg

SEQ ID NO: 148054 - DNA, 25 bp, Probe sequence
gctttcaactgatgcattagactgt

SEQ ID NO: 148055 - DNA, 25 bp, Probe sequence
gcattagactgtgacatcataactc

SEQ ID NO: 148056 - DNA, 25 bp, Probe sequence
gactgtgacatcataactcatttaa

SEQ ID NO: 148057 - DNA, 25 bp, Probe sequence
gttaatactagtaatgctttcaact

SEQ ID NO: 148058 - DNA, 25 bp, Probe sequence
gttttataatatcttgggtgtgtta

SEQ ID NO: 148059 - DNA, 25 bp, Probe sequence
gtgacatcataactcatttaagaac

SEQ ID NO: 148060 - DNA, 25 bp, Probe sequence
gtgatgttttataatatcttgggtg

SEQ ID NO: 148061 - DNA, 25 bp, Probe sequence
gggtgtgttaatactagtaatgctt

SEQ ID NO: 148062 - DNA, 25 bp, Probe sequence
tcgcttattaattttctaccaatac

SEQ ID NO: 148063 - DNA, 25 bp, Probe sequence
tctaccaatacaatcccttctaagt

SEQ ID NO: 148064 - DNA, 25 bp, Probe sequence
tcataactcatttaagaacttcgct

SEQ ID NO: 148065 - DNA, 25 bp, Probe sequence
taattttctaccaatacaatccctt

SEQ ID NO: 148066 - DNA, 25 bp, Probe sequence
taactcatttaagaacttcgcttat

SEQ ID NO: 148067 - DNA, 25 bp, Probe sequence
tacaatcccttctaagtgcactaaa

SEQ ID NO: 148068 - DNA, 25 bp, Probe sequence
taccaatacaatcccttctaagtgc

SEQ ID NO: 148069 - DNA, 25 bp, Probe sequence
tagactgtgacatcataactcattt

SEQ ID NO: 148070 - DNA, 25 bp, Probe sequence
tttctaccaatacaatcccttctaa

SEQ ID NO: 148071 - DNA, 25 bp, Probe sequence
ttcaactgatgcattagactgtgac

SEQ ID NO: 148072 - DNA, 25 bp, Probe sequence
ttctaccaatacaatcccttctaag

SEQ ID NO: 148073 - DNA, 25 bp, Probe sequence
attcggcatgttcgcagccatactc

SEQ ID NO: 148074 - DNA, 25 bp, Probe sequence
aggtaacttcacttcaatattcggc

SEQ ID NO: 148075 - DNA, 25 bp, Probe sequence
agcattaaaattattcttcagcatt

SEQ ID NO: 148076 - DNA, 25 bp, Probe sequence
actctttatgtactactacctactc

SEQ ID NO: 148077 - DNA, 25 bp, Probe sequence
acatttcattcatatcactaatttg

SEQ ID NO: 148078 - DNA, 25 bp, Probe sequence
aaaagtcccgaatacaatcaacgca

SEQ ID NO: 148079 - DNA, 25 bp, Probe sequence
aacgcaaacgatttaaacatttcat

SEQ ID NO: 148080 - DNA, 25 bp, Probe sequence
aataattgcttttagcaccttcgta

SEQ ID NO: 148081 - DNA, 25 bp, Probe sequence
aatattcggcatgttcgcagccata

SEQ ID NO: 148082 - DNA, 25 bp, Probe sequence
catgttcgcagccatactctttatg

SEQ ID NO: 148083 - DNA, 25 bp, Probe sequence
cttcaatattcggcatgttcgcagc

SEQ ID NO: 148084 - DNA, 25 bp, Probe sequence
cttcgtattagttcatttagcatta

SEQ ID NO: 148085 - DNA, 25 bp, Probe sequence
ctttatgtactactacctactctat

SEQ ID NO: 148086 - DNA, 25 bp, Probe sequence
gccatactctttatgtactactacc

SEQ ID NO: 148087 - DNA, 25 bp, Probe sequence
gcttttagcaccttcgtattagttc

SEQ ID NO: 148088 - DNA, 25 bp, Probe sequence
gcagccatactctttatgtactact

SEQ ID NO: 148089 - DNA, 25 bp, Probe sequence
gcaccttcgtattagttcatttagc

SEQ ID NO: 148090 - DNA, 25 bp, Probe sequence
gttcgcagccatactctttatgtac

SEQ ID NO: 148091 - DNA, 25 bp, Probe sequence
gtcactgtaggtaacttcacttcaa

SEQ ID NO: 148092 - DNA, 25 bp, Probe sequence
gtaacttcacttcaatattcggcat

SEQ ID NO: 148093 - DNA, 25 bp, Probe sequence
gtcccgaatacaatcaacgcaaacg

SEQ ID NO: 148094 - DNA, 25 bp, Probe sequence
ggtgttaattacctatcaaatcatt

SEQ ID NO: 148095 - DNA, 25 bp, Probe sequence
ggcagtcactgtaggtaacttcact

SEQ ID NO: 148096 - DNA, 25 bp, Probe sequence
tcattttattttttattattagtct

SEQ ID NO: 148097 - DNA, 25 bp, Probe sequence
taattacctatcaaatcattttatt

SEQ ID NO: 148098 - DNA, 25 bp, Probe sequence
taaatcattacatggcagtcactgt

SEQ ID NO: 148099 - DNA, 25 bp, Probe sequence
tactacctactctataaaagtcccg

SEQ ID NO: 148100 - DNA, 25 bp, Probe sequence
tacctactctataaaagtcccgaat

SEQ ID NO: 148101 - DNA, 25 bp, Probe sequence
tatgtactactacctactctataaa

SEQ ID NO: 148102 - DNA, 25 bp, Probe sequence
tttaactttaaatcattacatggca

SEQ ID NO: 148103 - DNA, 25 bp, Probe sequence
tttaaacatttcattcatatcacta

SEQ ID NO: 148104 - DNA, 25 bp, Probe sequence
ttagcaccttcgtattagttcattt

SEQ ID NO: 148105 - DNA, 25 bp, Probe sequence
ttcacttcaatattcggcatgttcg

SEQ ID NO: 148106 - DNA, 25 bp, Probe sequence
ttgcttttagcaccttcgtattagt

SEQ ID NO: 148107 - DNA, 25 bp, Probe sequence
atttctgctttatcaaaactatcac

SEQ ID NO: 148108 - DNA, 25 bp, Probe sequence
atacatgtcctagccctatggataa

SEQ ID NO: 148109 - DNA, 25 bp, Probe sequence
ataaaatgcaaatttctgctttatc

SEQ ID NO: 148110 - DNA, 25 bp, Probe sequence
atgcaaatttctgctttatcaaaac

SEQ ID NO: 148111 - DNA, 25 bp, Probe sequence
atgtcctagccctatggataaaatg

SEQ ID NO: 148112 - DNA, 25 bp, Probe sequence
atggataaaatgcaaatttctgctt

SEQ ID NO: 148113 - DNA, 25 bp, Probe sequence
acatgtcctagccctatggataaaa

SEQ ID NO: 148114 - DNA, 25 bp, Probe sequence
aaatttctgctttatcaaaactatc

SEQ ID NO: 148115 - DNA, 25 bp, Probe sequence
aaatgcaaatttctgctttatcaaa

SEQ ID NO: 148116 - DNA, 25 bp, Probe sequence
aaaatgcaaatttctgctttatcaa

SEQ ID NO: 148117 - DNA, 25 bp, Probe sequence
aatgcaaatttctgctttatcaaaa

SEQ ID NO: 148118 - DNA, 25 bp, Probe sequence
aatttctgctttatcaaaactatca

SEQ ID NO: 148119 - DNA, 25 bp, Probe sequence
caattaacagttggtacgatggttt

SEQ ID NO: 148120 - DNA, 25 bp, Probe sequence
caaatttctgctttatcaaaactat

SEQ ID NO: 148121 - DNA, 25 bp, Probe sequence
catgtcctagccctatggataaaat

SEQ ID NO: 148122 - DNA, 25 bp, Probe sequence
ctttatcaaaactatcacactttag

SEQ ID NO: 148123 - DNA, 25 bp, Probe sequence
ctgctttatcaaaactatcacactt

SEQ ID NO: 148124 - DNA, 25 bp, Probe sequence
gctttatcaaaactatcacacttta

SEQ ID NO: 148125 - DNA, 25 bp, Probe sequence
gcaaatttctgctttatcaaaacta

SEQ ID NO: 148126 - DNA, 25 bp, Probe sequence
gataaaatgcaaatttctgctttat

SEQ ID NO: 148127 - DNA, 25 bp, Probe sequence
gtcctagccctatggataaaatgca

SEQ ID NO: 148128 - DNA, 25 bp, Probe sequence
ggataaaatgcaaatttctgcttta

SEQ ID NO: 148129 - DNA, 25 bp, Probe sequence
tggataaaatgcaaatttctgcttt

SEQ ID NO: 148130 - DNA, 25 bp, Probe sequence
tgtcctagccctatggataaaatgc

SEQ ID NO: 148131 - DNA, 25 bp, Probe sequence
tgcaaatttctgctttatcaaaact

SEQ ID NO: 148132 - DNA, 25 bp, Probe sequence
tgctttatcaaaactatcacacttt

SEQ ID NO: 148133 - DNA, 25 bp, Probe sequence
tctgctttatcaaaactatcacact

SEQ ID NO: 148134 - DNA, 25 bp, Probe sequence
tcaattaacagttggtacgatggtt

SEQ ID NO: 148135 - DNA, 25 bp, Probe sequence
tacatgtcctagccctatggataaa

SEQ ID NO: 148136 - DNA, 25 bp, Probe sequence
taaaatgcaaatttctgctttatca

SEQ ID NO: 148137 - DNA, 25 bp, Probe sequence
tttctgctttatcaaaactatcaca

SEQ ID NO: 148138 - DNA, 25 bp, Probe sequence
tttatcaaaactatcacactttaga

SEQ ID NO: 148139 - DNA, 25 bp, Probe sequence
ttcaattaacagttggtacgatggt

SEQ ID NO: 148140 - DNA, 25 bp, Probe sequence
ttctgctttatcaaaactatcacac

SEQ ID NO: 148141 - DNA, 25 bp, Probe sequence
ataatactcctggatggcgcaaccc

SEQ ID NO: 148142 - DNA, 25 bp, Probe sequence
attcatgaacataatactcctggat

SEQ ID NO: 148143 - DNA, 25 bp, Probe sequence
attacttttttatcctatcttatct

SEQ ID NO: 148144 - DNA, 25 bp, Probe sequence
atttccaaaatttcctcatattaat

SEQ ID NO: 148145 - DNA, 25 bp, Probe sequence
atttcctcatattaatttattactt

SEQ ID NO: 148146 - DNA, 25 bp, Probe sequence
atcctatcttatctacattttcaaa

SEQ ID NO: 148147 - DNA, 25 bp, Probe sequence
acttttttatcctatcttatctaca

SEQ ID NO: 148148 - DNA, 25 bp, Probe sequence
acataatactcctggatggcgcaac

SEQ ID NO: 148149 - DNA, 25 bp, Probe sequence
aatacatattgaccattttcacgca

SEQ ID NO: 148150 - DNA, 25 bp, Probe sequence
cacagtcttttatattcatgaacat

SEQ ID NO: 148151 - DNA, 25 bp, Probe sequence
catgaacataatactcctggatggc

SEQ ID NO: 148152 - DNA, 25 bp, Probe sequence
catattgaccattttcacgcaaata

SEQ ID NO: 148153 - DNA, 25 bp, Probe sequence
cttttttatcctatcttatctacat

SEQ ID NO: 148154 - DNA, 25 bp, Probe sequence
gaacataatactcctggatggcgca

SEQ ID NO: 148155 - DNA, 25 bp, Probe sequence
gactacacagtcttttatattcatg

SEQ ID NO: 148156 - DNA, 25 bp, Probe sequence
gtcatcctttttttatttgtcaaat

SEQ ID NO: 148157 - DNA, 25 bp, Probe sequence
tcctatcttatctacattttcaaat

SEQ ID NO: 148158 - DNA, 25 bp, Probe sequence
tcatcctttttttatttgtcaaata

SEQ ID NO: 148159 - DNA, 25 bp, Probe sequence
tcaaatactcgcttttttatttcca

SEQ ID NO: 148160 - DNA, 25 bp, Probe sequence
tacacagtcttttatattcatgaac

SEQ ID NO: 148161 - DNA, 25 bp, Probe sequence
tacatattgaccattttcacgcaaa

SEQ ID NO: 148162 - DNA, 25 bp, Probe sequence
tacttttttatcctatcttatctac

SEQ ID NO: 148163 - DNA, 25 bp, Probe sequence
tatcctatcttatctacattttcaa

SEQ ID NO: 148164 - DNA, 25 bp, Probe sequence
tatcttatctacattttcaaatatt

SEQ ID NO: 148165 - DNA, 25 bp, Probe sequence
tatttgtcaaatactcgctttttta

SEQ ID NO: 148166 - DNA, 25 bp, Probe sequence
tattgaccattttcacgcaaataaa

SEQ ID NO: 148167 - DNA, 25 bp, Probe sequence
tttgtcaaatactcgcttttttatt

SEQ ID NO: 148168 - DNA, 25 bp, Probe sequence
tttatcctatcttatctacattttc

SEQ ID NO: 148169 - DNA, 25 bp, Probe sequence
tttttatcctatcttatctacattt

SEQ ID NO: 148170 - DNA, 25 bp, Probe sequence
ttttttatcctatcttatctacatt

SEQ ID NO: 148171 - DNA, 25 bp, Probe sequence
ttattacttttttatcctatcttat

SEQ ID NO: 148172 - DNA, 25 bp, Probe sequence
ttatttccaaaatttcctcatatta

SEQ ID NO: 148173 - DNA, 25 bp, Probe sequence
ttatcctatcttatctacattttca

SEQ ID NO: 148174 - DNA, 25 bp, Probe sequence
ttgaccattttcacgcaaataaaaa

SEQ ID NO: 148175 - DNA, 25 bp, Probe sequence
attcgtgatctttgtagtctgacgc

SEQ ID NO: 148176 - DNA, 25 bp, Probe sequence
atttttgtggcgtgttttatgtttg

SEQ ID NO: 148177 - DNA, 25 bp, Probe sequence
atattcgtgatctttgtagtctgac

SEQ ID NO: 148178 - DNA, 25 bp, Probe sequence
ataggatgttcttggtggtacgtaa

SEQ ID NO: 148179 - DNA, 25 bp, Probe sequence
atctttgtagtctgacgcgttatat

SEQ ID NO: 148180 - DNA, 25 bp, Probe sequence
aggaatattcgtgatctttgtagtc

SEQ ID NO: 148181 - DNA, 25 bp, Probe sequence
aatggtcttggtattttttgtatag

SEQ ID NO: 148182 - DNA, 25 bp, Probe sequence
gcgttatatttttgtggcgtgtttt

SEQ ID NO: 148183 - DNA, 25 bp, Probe sequence
gcgtgttttatgtttgatactcgaa

SEQ ID NO: 148184 - DNA, 25 bp, Probe sequence
ggatgttcttggtggtacgtaagga

SEQ ID NO: 148185 - DNA, 25 bp, Probe sequence
gaatattcgtgatctttgtagtctg

SEQ ID NO: 148186 - DNA, 25 bp, Probe sequence
gacgcgttatatttttgtggcgtgt

SEQ ID NO: 148187 - DNA, 25 bp, Probe sequence
gatctttgtagtctgacgcgttata

SEQ ID NO: 148188 - DNA, 25 bp, Probe sequence
gatactcgaagtctaagacattcat

SEQ ID NO: 148189 - DNA, 25 bp, Probe sequence
gttttatgtttgatactcgaagtct

SEQ ID NO: 148190 - DNA, 25 bp, Probe sequence
gtttgatactcgaagtctaagacat

SEQ ID NO: 148191 - DNA, 25 bp, Probe sequence
gtagtctgacgcgttatatttttgt

SEQ ID NO: 148192 - DNA, 25 bp, Probe sequence
gtacgtaaggaatattcgtgatctt

SEQ ID NO: 148193 - DNA, 25 bp, Probe sequence
gtctgacgcgttatatttttgtggc

SEQ ID NO: 148194 - DNA, 25 bp, Probe sequence
gtgatctttgtagtctgacgcgtta

SEQ ID NO: 148195 - DNA, 25 bp, Probe sequence
gtggcgtgttttatgtttgatactc

SEQ ID NO: 148196 - DNA, 25 bp, Probe sequence
ggtcttggtattttttgtataggat

SEQ ID NO: 148197 - DNA, 25 bp, Probe sequence
ggtattttttgtataggatgttctt

SEQ ID NO: 148198 - DNA, 25 bp, Probe sequence
ggcgtgttttatgtttgatactcga

SEQ ID NO: 148199 - DNA, 25 bp, Probe sequence
tgttcttggtggtacgtaaggaata

SEQ ID NO: 148200 - DNA, 25 bp, Probe sequence
tcgtgatctttgtagtctgacgcgt

SEQ ID NO: 148201 - DNA, 25 bp, Probe sequence
tactcgaagtctaagacattcatga

SEQ ID NO: 148202 - DNA, 25 bp, Probe sequence
tagtctgacgcgttatatttttgtg

SEQ ID NO: 148203 - DNA, 25 bp, Probe sequence
tataggatgttcttggtggtacgta

SEQ ID NO: 148204 - DNA, 25 bp, Probe sequence
tttgtggcgtgttttatgtttgata

SEQ ID NO: 148205 - DNA, 25 bp, Probe sequence
ttttgtataggatgttcttggtggt

SEQ ID NO: 148206 - DNA, 25 bp, Probe sequence
ttatgtttgatactcgaagtctaag

SEQ ID NO: 148207 - DNA, 25 bp, Probe sequence
ttgttgcaaataaatggtcttggta

SEQ ID NO: 148208 - DNA, 25 bp, Probe sequence
ttgtagtctgacgcgttatattttt

SEQ ID NO: 148209 - DNA, 25 bp, Probe sequence
attgcaacaatggtcattataccta

SEQ ID NO: 148210 - DNA, 25 bp, Probe sequence
attatactatgcgttatcggtttca

SEQ ID NO: 148211 - DNA, 25 bp, Probe sequence
atttttgtctatatagcgttaatca

SEQ ID NO: 148212 - DNA, 25 bp, Probe sequence
atttcactttaccgacaatatcaaa

SEQ ID NO: 148213 - DNA, 25 bp, Probe sequence
atttgtattatattttattcctatt

SEQ ID NO: 148214 - DNA, 25 bp, Probe sequence
atagcgttaatcattacattagtta

SEQ ID NO: 148215 - DNA, 25 bp, Probe sequence
atactttatcgattatatgcctacg

SEQ ID NO: 148216 - DNA, 25 bp, Probe sequence
ataacaatattttgctattttcaat

SEQ ID NO: 148217 - DNA, 25 bp, Probe sequence
atcgattatatgcctacgtcacaca

SEQ ID NO: 148218 - DNA, 25 bp, Probe sequence
atgcctacgtcacacatatactctt

SEQ ID NO: 148219 - DNA, 25 bp, Probe sequence
aggccgaaaaacttattgcaacaat

SEQ ID NO: 148220 - DNA, 25 bp, Probe sequence
acgtcacacatatactctttatgta

SEQ ID NO: 148221 - DNA, 25 bp, Probe sequence
actatgcgttatcggtttcaaggcc

SEQ ID NO: 148222 - DNA, 25 bp, Probe sequence
aacaatggtcattatacctaatttt

SEQ ID NO: 148223 - DNA, 25 bp, Probe sequence
aatgtgccacaaatttcactttacc

SEQ ID NO: 148224 - DNA, 25 bp, Probe sequence
caaatttcactttaccgacaatatc

SEQ ID NO: 148225 - DNA, 25 bp, Probe sequence
cactttaccgacaatatcaaaatta

SEQ ID NO: 148226 - DNA, 25 bp, Probe sequence
cgattatatgcctacgtcacacata

SEQ ID NO: 148227 - DNA, 25 bp, Probe sequence
cctacgtcacacatatactctttat

SEQ ID NO: 148228 - DNA, 25 bp, Probe sequence
gccacaaatttcactttaccgacaa

SEQ ID NO: 148229 - DNA, 25 bp, Probe sequence
gcctacgtcacacatatactcttta

SEQ ID NO: 148230 - DNA, 25 bp, Probe sequence
gtgccacaaatttcactttaccgac

SEQ ID NO: 148231 - DNA, 25 bp, Probe sequence
gttcatattgttatgtatattgcaa

SEQ ID NO: 148232 - DNA, 25 bp, Probe sequence
gttatccataatatcaatgtgccac

SEQ ID NO: 148233 - DNA, 25 bp, Probe sequence
gtctatatagcgttaatcattacat

SEQ ID NO: 148234 - DNA, 25 bp, Probe sequence
tgatttactggatatttgtattata

SEQ ID NO: 148235 - DNA, 25 bp, Probe sequence
tgcgttatcggtttcaaggccgaaa

SEQ ID NO: 148236 - DNA, 25 bp, Probe sequence
tcctattatactatgcgttatcggt

SEQ ID NO: 148237 - DNA, 25 bp, Probe sequence
tcattacattagttagattctttac

SEQ ID NO: 148238 - DNA, 25 bp, Probe sequence
tatactatgcgttatcggtttcaag

SEQ ID NO: 148239 - DNA, 25 bp, Probe sequence
tattcctattatactatgcgttatc

SEQ ID NO: 148240 - DNA, 25 bp, Probe sequence
tttgctattttcaatttagtacgat

SEQ ID NO: 148241 - DNA, 25 bp, Probe sequence
ttttcaaatttgatttactggatat

SEQ ID NO: 148242 - DNA, 25 bp, Probe sequence
ttatcgattatatgcctacgtcaca

SEQ ID NO: 148243 - DNA, 25 bp, Probe sequence
attagtatatctttcattaggttta

SEQ ID NO: 148244 - DNA, 25 bp, Probe sequence
atatctttcattaggtttaagcact

SEQ ID NO: 148245 - DNA, 25 bp, Probe sequence
atcacaacgtttatcaagtttacta

SEQ ID NO: 148246 - DNA, 25 bp, Probe sequence
atgtcgcaggtttcatagtcgacgg

SEQ ID NO: 148247 - DNA, 25 bp, Probe sequence
atggcaaaacgttccaaatcacaac

SEQ ID NO: 148248 - DNA, 25 bp, Probe sequence
aggtttcatagtcgacggctacaat

SEQ ID NO: 148249 - DNA, 25 bp, Probe sequence
acaatggctataaatatcatgctaa

SEQ ID NO: 148250 - DNA, 25 bp, Probe sequence
aaaaaagcagtggcagttgttactt

SEQ ID NO: 148251 - DNA, 25 bp, Probe sequence
aacaaacggtgctagattatttaca

SEQ ID NO: 148252 - DNA, 25 bp, Probe sequence
aagcagtggcagttgttactttaat

SEQ ID NO: 148253 - DNA, 25 bp, Probe sequence
caagtttactaaatgtcgcaggttt

SEQ ID NO: 148254 - DNA, 25 bp, Probe sequence
ctaaatgtcgcaggtttcatagtcg

SEQ ID NO: 148255 - DNA, 25 bp, Probe sequence
ctagattatttacaagcattcgcaa

SEQ ID NO: 148256 - DNA, 25 bp, Probe sequence
cgcaggtttcatagtcgacggctac

SEQ ID NO: 148257 - DNA, 25 bp, Probe sequence
ccgtgttagacttttacatttcaat

SEQ ID NO: 148258 - DNA, 25 bp, Probe sequence
gcactgtaggaaccgtgttagactt

SEQ ID NO: 148259 - DNA, 25 bp, Probe sequence
gcagtggcagttgttactttaataa

SEQ ID NO: 148260 - DNA, 25 bp, Probe sequence
gcaggtttcatagtcgacggctaca

SEQ ID NO: 148261 - DNA, 25 bp, Probe sequence
gacggctacaatggctataaatatc

SEQ ID NO: 148262 - DNA, 25 bp, Probe sequence
gattatttacaagcattcgcaaagt

SEQ ID NO: 148263 - DNA, 25 bp, Probe sequence
gtttaagcactgtaggaaccgtgtt

SEQ ID NO: 148264 - DNA, 25 bp, Probe sequence
gtttcatagtcgacggctacaatgg

SEQ ID NO: 148265 - DNA, 25 bp, Probe sequence
gtttactaaatgtcgcaggtttcat

SEQ ID NO: 148266 - DNA, 25 bp, Probe sequence
gtcgcaggtttcatagtcgacggct

SEQ ID NO: 148267 - DNA, 25 bp, Probe sequence
gtcgacggctacaatggctataaat

SEQ ID NO: 148268 - DNA, 25 bp, Probe sequence
ggcaaaacgttccaaatcacaacgt

SEQ ID NO: 148269 - DNA, 25 bp, Probe sequence
tgttagacttttacatttcaattaa

SEQ ID NO: 148270 - DNA, 25 bp, Probe sequence
tcatagtcgacggctacaatggcta

SEQ ID NO: 148271 - DNA, 25 bp, Probe sequence
taagcactgtaggaaccgtgttaga

SEQ ID NO: 148272 - DNA, 25 bp, Probe sequence
tactttaataacaaacggtgctaga

SEQ ID NO: 148273 - DNA, 25 bp, Probe sequence
taggaaccgtgttagacttttacat

SEQ ID NO: 148274 - DNA, 25 bp, Probe sequence
tagtcgacggctacaatggctataa

SEQ ID NO: 148275 - DNA, 25 bp, Probe sequence
tttacatttcaattaagtcaccacg

SEQ ID NO: 148276 - DNA, 25 bp, Probe sequence
ttcattaggtttaagcactgtagga

SEQ ID NO: 148277 - DNA, 25 bp, Probe sequence
attgactgcggggacccaacacaga

SEQ ID NO: 148278 - DNA, 25 bp, Probe sequence
ttatattgactgcggggacccaaca

SEQ ID NO: 148279 - DNA, 25 bp, Probe sequence
attctacaggcaatgcacgtttatg

SEQ ID NO: 148280 - DNA, 25 bp, Probe sequence
atattgactgcggggacccaacaca

SEQ ID NO: 148281 - DNA, 25 bp, Probe sequence
atgaattatactctacaatgttata

SEQ ID NO: 148282 - DNA, 25 bp, Probe sequence
atgttatattgactgcggggaccca

SEQ ID NO: 148283 - DNA, 25 bp, Probe sequence
agaaattctacaggcaatgcacgtt

SEQ ID NO: 148284 - DNA, 25 bp, Probe sequence
actgcggggacccaacacagagaat

SEQ ID NO: 148285 - DNA, 25 bp, Probe sequence
aaattctacaggcaatgcacgttta

SEQ ID NO: 148286 - DNA, 25 bp, Probe sequence
aaagaaattctacaggcaatgcacg

SEQ ID NO: 148287 - DNA, 25 bp, Probe sequence
aaaagaaattctacaggcaatgcac

SEQ ID NO: 148288 - DNA, 25 bp, Probe sequence
aagaaattctacaggcaatgcacgt

SEQ ID NO: 148289 - DNA, 25 bp, Probe sequence
aatgttatattgactgcggggaccc

SEQ ID NO: 148290 - DNA, 25 bp, Probe sequence
aattctacaggcaatgcacgtttat

SEQ ID NO: 148291 - DNA, 25 bp, Probe sequence
ctacaggcaatgcacgtttatgtta

SEQ ID NO: 148292 - DNA, 25 bp, Probe sequence
cggggacccaacacagagaatttct

SEQ ID NO: 148293 - DNA, 25 bp, Probe sequence
ctgcggggacccaacacagagaatt

SEQ ID NO: 148294 - DNA, 25 bp, Probe sequence
gcggggacccaacacagagaatttc

SEQ ID NO: 148295 - DNA, 25 bp, Probe sequence
gaattatactctacaatgttatatt

SEQ ID NO: 148296 - DNA, 25 bp, Probe sequence
gaaattctacaggcaatgcacgttt

SEQ ID NO: 148297 - DNA, 25 bp, Probe sequence
gactgcggggacccaacacagagaa

SEQ ID NO: 148298 - DNA, 25 bp, Probe sequence
gacccaacacagagaatttctaaaa

SEQ ID NO: 148299 - DNA, 25 bp, Probe sequence
gttatattgactgcggggacccaac

SEQ ID NO: 148300 - DNA, 25 bp, Probe sequence
gggacccaacacagagaatttctaa

SEQ ID NO: 148301 - DNA, 25 bp, Probe sequence
ggggacccaacacagagaatttcta

SEQ ID NO: 148302 - DNA, 25 bp, Probe sequence
ggacccaacacagagaatttctaaa

SEQ ID NO: 148303 - DNA, 25 bp, Probe sequence
tgactgcggggacccaacacagaga

SEQ ID NO: 148304 - DNA, 25 bp, Probe sequence
tgttatattgactgcggggacccaa

SEQ ID NO: 148305 - DNA, 25 bp, Probe sequence
tgcggggacccaacacagagaattt

SEQ ID NO: 148306 - DNA, 25 bp, Probe sequence
ttgactgcggggacccaacacagag

SEQ ID NO: 148307 - DNA, 25 bp, Probe sequence
tctacaggcaatgcacgtttatgtt

SEQ ID NO: 148308 - DNA, 25 bp, Probe sequence
tacaggcaatgcacgtttatgttag

SEQ ID NO: 148309 - DNA, 25 bp, Probe sequence
tatattgactgcggggacccaacac

SEQ ID NO: 148310 - DNA, 25 bp, Probe sequence
tattgactgcggggacccaacacag

SEQ ID NO: 148311 - DNA, 25 bp, Probe sequence
attgtctgtagaatttctttttgaa

SEQ ID NO: 148312 - DNA, 25 bp, Probe sequence
atttctttttgaatttctctatgtt

SEQ ID NO: 148313 - DNA, 25 bp, Probe sequence
agaatttctttttgaatttctctat

SEQ ID NO: 148314 - DNA, 25 bp, Probe sequence
acttgcattgtctgtagaatttctt

SEQ ID NO: 148315 - DNA, 25 bp, Probe sequence
aacttgcattgtctgtagaatttct

SEQ ID NO: 148316 - DNA, 25 bp, Probe sequence
aatttctttttgaatttctctatgt

SEQ ID NO: 148317 - DNA, 25 bp, Probe sequence
caacttgcattgtctgtagaatttc

SEQ ID NO: 148318 - DNA, 25 bp, Probe sequence
cttgcattgtctgtagaatttcttt

SEQ ID NO: 148319 - DNA, 25 bp, Probe sequence
cattgtctgtagaatttctttttga

SEQ ID NO: 148320 - DNA, 25 bp, Probe sequence
ctccccaacttgcattgtctgtaga

SEQ ID NO: 148321 - DNA, 25 bp, Probe sequence
cgccaacttgcattgtctgtagaat

SEQ ID NO: 148322 - DNA, 25 bp, Probe sequence
cccaacttgcattgtctgtagaatt

SEQ ID NO: 148323 - DNA, 25 bp, Probe sequence
ccccaacttgcattgtctgtagaat

SEQ ID NO: 148324 - DNA, 25 bp, Probe sequence
ccgccaacttgcattgtctgtagaa

SEQ ID NO: 148325 - DNA, 25 bp, Probe sequence
ccaacttgcattgtctgtagaattt

SEQ ID NO: 148326 - DNA, 25 bp, Probe sequence
gccaacttgcattgtctgtagaatt

SEQ ID NO: 148327 - DNA, 25 bp, Probe sequence
gcattgtctgtagaatttctttttg

SEQ ID NO: 148328 - DNA, 25 bp, Probe sequence
gaatttctttttgaatttctctatg

SEQ ID NO: 148329 - DNA, 25 bp, Probe sequence
gtagaatttctttttgaatttctct

SEQ ID NO: 148330 - DNA, 25 bp, Probe sequence
gtctgtagaatttctttttgaattt

SEQ ID NO: 148331 - DNA, 25 bp, Probe sequence
gtgacagaaatggtattttataaaa

SEQ ID NO: 148332 - DNA, 25 bp, Probe sequence
tgtagaatttctttttgaatttctc

SEQ ID NO: 148333 - DNA, 25 bp, Probe sequence
tgcattgtctgtagaatttcttttt

SEQ ID NO: 148334 - DNA, 25 bp, Probe sequence
tccccaacttgcattgtctgtagaa

SEQ ID NO: 148335 - DNA, 25 bp, Probe sequence
tttgaatttctctatgttggggccc

SEQ ID NO: 148336 - DNA, 25 bp, Probe sequence
tctttttgaatttctctatgttggg

SEQ ID NO: 148337 - DNA, 25 bp, Probe sequence
tagaatttctttttgaatttctcta

SEQ ID NO: 148338 - DNA, 25 bp, Probe sequence
tataaaatttatttcgttgtcactc

SEQ ID NO: 148339 - DNA, 25 bp, Probe sequence
ttttgaatttctctatgttggggcc

SEQ ID NO: 148340 - DNA, 25 bp, Probe sequence
tttctttttgaatttctctatgttg

SEQ ID NO: 148341 - DNA, 25 bp, Probe sequence
tttttgaatttctctatgttggggc

SEQ ID NO: 148342 - DNA, 25 bp, Probe sequence
ttctttttgaatttctctatgttgg

SEQ ID NO: 148343 - DNA, 25 bp, Probe sequence
ttgcattgtctgtagaatttctttt

SEQ ID NO: 148344 - DNA, 25 bp, Probe sequence
ttgtctgtagaatttctttttgaat

SEQ ID NO: 148345 - DNA, 25 bp, Probe sequence
attctttgtatgataccttaaatac

SEQ ID NO: 148346 - DNA, 25 bp, Probe sequence
attattctttgtatgataccttaaa

SEQ ID NO: 148347 - DNA, 25 bp, Probe sequence
atttaattattctttgtatgatacc

SEQ ID NO: 148348 - DNA, 25 bp, Probe sequence
ataccttattacatatcccatatga

SEQ ID NO: 148349 - DNA, 25 bp, Probe sequence
ataccttaaataccttattacatat

SEQ ID NO: 148350 - DNA, 25 bp, Probe sequence
atgataccttaaataccttattaca

SEQ ID NO: 148351 - DNA, 25 bp, Probe sequence
atgttatttaattattctttgtatg

SEQ ID NO: 148352 - DNA, 25 bp, Probe sequence
aaataccttattacatatcccatat

SEQ ID NO: 148353 - DNA, 25 bp, Probe sequence
aataccttattacatatcccatatg

SEQ ID NO: 148354 - DNA, 25 bp, Probe sequence
aattattctttgtatgataccttaa

SEQ ID NO: 148355 - DNA, 25 bp, Probe sequence
cttaaataccttattacatatccca

SEQ ID NO: 148356 - DNA, 25 bp, Probe sequence
ctttgtatgataccttaaatacctt

SEQ ID NO: 148357 - DNA, 25 bp, Probe sequence
gataccttaaataccttattacata

SEQ ID NO: 148358 - DNA, 25 bp, Probe sequence
gttatttaattattctttgtatgat

SEQ ID NO: 148359 - DNA, 25 bp, Probe sequence
gtatgataccttaaataccttatta

SEQ ID NO: 148360 - DNA, 25 bp, Probe sequence
tgtatgataccttaaataccttatt

SEQ ID NO: 148361 - DNA, 25 bp, Probe sequence
tgttatttaattattctttgtatga

SEQ ID NO: 148362 - DNA, 25 bp, Probe sequence
tgataccttaaataccttattacat

SEQ ID NO: 148363 - DNA, 25 bp, Probe sequence
tctttgtatgataccttaaatacct

SEQ ID NO: 148364 - DNA, 25 bp, Probe sequence
taattattctttgtatgatacctta

SEQ ID NO: 148365 - DNA, 25 bp, Probe sequence
taaataccttattacatatcccata

SEQ ID NO: 148366 - DNA, 25 bp, Probe sequence
taccttaaataccttattacatatc

SEQ ID NO: 148367 - DNA, 25 bp, Probe sequence
taccttattacatatcccatatgaa

SEQ ID NO: 148368 - DNA, 25 bp, Probe sequence
tatgataccttaaataccttattac

SEQ ID NO: 148369 - DNA, 25 bp, Probe sequence
tatttaattattctttgtatgatac

SEQ ID NO: 148370 - DNA, 25 bp, Probe sequence
tattctttgtatgataccttaaata

SEQ ID NO: 148371 - DNA, 25 bp, Probe sequence
tttgtatgataccttaaatacctta

SEQ ID NO: 148372 - DNA, 25 bp, Probe sequence
tttaattattctttgtatgatacct

SEQ ID NO: 148373 - DNA, 25 bp, Probe sequence
ttattctttgtatgataccttaaat

SEQ ID NO: 148374 - DNA, 25 bp, Probe sequence
ttatttaattattctttgtatgata

SEQ ID NO: 148375 - DNA, 25 bp, Probe sequence
ttaaataccttattacatatcccat

SEQ ID NO: 148376 - DNA, 25 bp, Probe sequence
ttaattattctttgtatgatacctt

SEQ ID NO: 148377 - DNA, 25 bp, Probe sequence
ttctttgtatgataccttaaatacc

SEQ ID NO: 148378 - DNA, 25 bp, Probe sequence
ttgtatgataccttaaataccttat

SEQ ID NO: 148379 - DNA, 25 bp, Probe sequence
attgctcctctttctgatgataatt

SEQ ID NO: 148380 - DNA, 25 bp, Probe sequence
attaccattagttcacccatttatg

SEQ ID NO: 148381 - DNA, 25 bp, Probe sequence
atcagtattccgattacggcttgga

SEQ ID NO: 148382 - DNA, 25 bp, Probe sequence
atctgcgaacacgatttaccttgcc

SEQ ID NO: 148383 - DNA, 25 bp, Probe sequence
atgtcgtcacattctttttctgcat

SEQ ID NO: 148384 - DNA, 25 bp, Probe sequence
acagcgcaaaaatgatgagtctatc

SEQ ID NO: 148385 - DNA, 25 bp, Probe sequence
aaaagaccatctcgacagcgcaaaa

SEQ ID NO: 148386 - DNA, 25 bp, Probe sequence
aacacaagctgcatttatcagcact

SEQ ID NO: 148387 - DNA, 25 bp, Probe sequence
caaggcttttcaaccgaacaacaag

SEQ ID NO: 148388 - DNA, 25 bp, Probe sequence
cttacgcaatacgaattattccaat

SEQ ID NO: 148389 - DNA, 25 bp, Probe sequence
ctgttattgcagctgtgatagattt

SEQ ID NO: 148390 - DNA, 25 bp, Probe sequence
ctggcatgcgtgttggtagagaaat

SEQ ID NO: 148391 - DNA, 25 bp, Probe sequence
gaatgctgtatttatattggcgtta

SEQ ID NO: 148392 - DNA, 25 bp, Probe sequence
gaaattttagcgacatctgcgaaca

SEQ ID NO: 148393 - DNA, 25 bp, Probe sequence
gttcacccatttatgaattgcatca

SEQ ID NO: 148394 - DNA, 25 bp, Probe sequence
gtcatctacaaggcttttcaaccga

SEQ ID NO: 148395 - DNA, 25 bp, Probe sequence
gtctacttcggtcatctacaaggct

SEQ ID NO: 148396 - DNA, 25 bp, Probe sequence
gtcacattctttttctgcattatta

SEQ ID NO: 148397 - DNA, 25 bp, Probe sequence
ggattcatctcttatttaaccctat

SEQ ID NO: 148398 - DNA, 25 bp, Probe sequence
ggcgtaccgatttatgtcgtcacat

SEQ ID NO: 148399 - DNA, 25 bp, Probe sequence
ggcgcttgtaatttattcgtactca

SEQ ID NO: 148400 - DNA, 25 bp, Probe sequence
tgttgattacactcatttatttatc

SEQ ID NO: 148401 - DNA, 25 bp, Probe sequence
tcatttggtcatattataaactcga

SEQ ID NO: 148402 - DNA, 25 bp, Probe sequence
tcactattattcttgctgttattgc

SEQ ID NO: 148403 - DNA, 25 bp, Probe sequence
taaactcgaaaatatttgcccaaga

SEQ ID NO: 148404 - DNA, 25 bp, Probe sequence
tacggcttggattacggcattttta

SEQ ID NO: 148405 - DNA, 25 bp, Probe sequence
tatggtgttcactattattcttgct

SEQ ID NO: 148406 - DNA, 25 bp, Probe sequence
ttatattggcgttattgctcctctt

SEQ ID NO: 148407 - DNA, 25 bp, Probe sequence
ttttaggcggtattgccgttgcaat

SEQ ID NO: 148408 - DNA, 25 bp, Probe sequence
ttattccaatctggcatgcgtgttg

SEQ ID NO: 148409 - DNA, 25 bp, Probe sequence
ttatcagcactatcgttacaacaat

SEQ ID NO: 148410 - DNA, 25 bp, Probe sequence
ttctgcattattattggcgcttgta

SEQ ID NO: 148411 - DNA, 25 bp, Probe sequence
ttgccgttgcaatcagtattccgat

SEQ ID NO: 148412 - DNA, 25 bp, Probe sequence
ttgattatttttggcgtaccgattt

SEQ ID NO: 148413 - DNA, 25 bp, Probe sequence
ataaaacgcatgattacgctatttt

SEQ ID NO: 148414 - DNA, 25 bp, Probe sequence
atcattttcaactactattatacat

SEQ ID NO: 148415 - DNA, 25 bp, Probe sequence
atccaacaagaacgaaacgttgtgg

SEQ ID NO: 148416 - DNA, 25 bp, Probe sequence
atgaccaatccaacaagaacgaaac

SEQ ID NO: 148417 - DNA, 25 bp, Probe sequence
atgttctatgtggtattgataatca

SEQ ID NO: 148418 - DNA, 25 bp, Probe sequence
acgttgtgggggggatgttctatgt

SEQ ID NO: 148419 - DNA, 25 bp, Probe sequence
acgcatgattacgctattttagaaa

SEQ ID NO: 148420 - DNA, 25 bp, Probe sequence
aaacgcatgattacgctattttaga

SEQ ID NO: 148421 - DNA, 25 bp, Probe sequence
aaaacgcatgattacgctattttag

SEQ ID NO: 148422 - DNA, 25 bp, Probe sequence
aacgttgtgggggggatgttctatg

SEQ ID NO: 148423 - DNA, 25 bp, Probe sequence
aacgcatgattacgctattttagaa

SEQ ID NO: 148424 - DNA, 25 bp, Probe sequence
aatcattgtcaattagaaactaaaa

SEQ ID NO: 148425 - DNA, 25 bp, Probe sequence
cattttcaactactattatacatta

SEQ ID NO: 148426 - DNA, 25 bp, Probe sequence
cgttgtgggggggatgttctatgtg

SEQ ID NO: 148427 - DNA, 25 bp, Probe sequence
gcatgattacgctattttagaaaat

SEQ ID NO: 148428 - DNA, 25 bp, Probe sequence
gaccaatccaacaagaacgaaacgt

SEQ ID NO: 148429 - DNA, 25 bp, Probe sequence
gataatcattttcaactactattat

SEQ ID NO: 148430 - DNA, 25 bp, Probe sequence
gttgtgggggggatgttctatgtgg

SEQ ID NO: 148431 - DNA, 25 bp, Probe sequence
gttctatgtggtattgataatcatt

SEQ ID NO: 148432 - DNA, 25 bp, Probe sequence
gtgggggggatgttctatgtggtat

SEQ ID NO: 148433 - DNA, 25 bp, Probe sequence
gggatgttctatgtggtattgataa

SEQ ID NO: 148434 - DNA, 25 bp, Probe sequence
gggggggatgttctatgtggtattg

SEQ ID NO: 148435 - DNA, 25 bp, Probe sequence
ggggggatgttctatgtggtattga

SEQ ID NO: 148436 - DNA, 25 bp, Probe sequence
gggggatgttctatgtggtattgat

SEQ ID NO: 148437 - DNA, 25 bp, Probe sequence
ggggatgttctatgtggtattgata

SEQ ID NO: 148438 - DNA, 25 bp, Probe sequence
ggatgttctatgtggtattgataat

SEQ ID NO: 148439 - DNA, 25 bp, Probe sequence
tgggggggatgttctatgtggtatt

SEQ ID NO: 148440 - DNA, 25 bp, Probe sequence
tgtgggggggatgttctatgtggta

SEQ ID NO: 148441 - DNA, 25 bp, Probe sequence
tcattttcaactactattatacatt

SEQ ID NO: 148442 - DNA, 25 bp, Probe sequence
tcaactactattatacattagtgag

SEQ ID NO: 148443 - DNA, 25 bp, Probe sequence
taaaaaaatttgtatttctcattag

SEQ ID NO: 148444 - DNA, 25 bp, Probe sequence
taaataaaacgcatgattacgctat

SEQ ID NO: 148445 - DNA, 25 bp, Probe sequence
tatacattagtgagaatcattgtca

SEQ ID NO: 148446 - DNA, 25 bp, Probe sequence
ttgtgggggggatgttctatgtggt

SEQ ID NO: 148447 - DNA, 25 bp, Probe sequence
attctgaggcatttcgcacacacga

SEQ ID NO: 148448 - DNA, 25 bp, Probe sequence
atatcttcctagcctcagtgttaat

SEQ ID NO: 148449 - DNA, 25 bp, Probe sequence
atcagtacgtcaaatcgcaagcaga

SEQ ID NO: 148450 - DNA, 25 bp, Probe sequence
atctgttcaacaatactcactttat

SEQ ID NO: 148451 - DNA, 25 bp, Probe sequence
atcgtacttacaattcctatcacaa

SEQ ID NO: 148452 - DNA, 25 bp, Probe sequence
atcgcaatttacattcatattcaac

SEQ ID NO: 148453 - DNA, 25 bp, Probe sequence
accaccgaaagatatcttcctagcc

SEQ ID NO: 148454 - DNA, 25 bp, Probe sequence
acgacgacgattaatcatcagtacg

SEQ ID NO: 148455 - DNA, 25 bp, Probe sequence
acggttatcatcactggtttgttct

SEQ ID NO: 148456 - DNA, 25 bp, Probe sequence
acactcattaccatagccagtacaa

SEQ ID NO: 148457 - DNA, 25 bp, Probe sequence
aagtcggactgcaatcgattttatc

SEQ ID NO: 148458 - DNA, 25 bp, Probe sequence
caatgaggagatgggcgcttgctgg

SEQ ID NO: 148459 - DNA, 25 bp, Probe sequence
caaacatgtttcttcgacacctaca

SEQ ID NO: 148460 - DNA, 25 bp, Probe sequence
gccagtacaattatcggaacttttt

SEQ ID NO: 148461 - DNA, 25 bp, Probe sequence
gcatcgcattcattggtgctatttt

SEQ ID NO: 148462 - DNA, 25 bp, Probe sequence
gaagcgtgataccttaacggttatc

SEQ ID NO: 148463 - DNA, 25 bp, Probe sequence
gactaacatcttattattctcatat

SEQ ID NO: 148464 - DNA, 25 bp, Probe sequence
gaccattgccatgatctgttcaaca

SEQ ID NO: 148465 - DNA, 25 bp, Probe sequence
gtgacttatactatttcgatgaatt

SEQ ID NO: 148466 - DNA, 25 bp, Probe sequence
ggtgcactacctatgtttttaatct

SEQ ID NO: 148467 - DNA, 25 bp, Probe sequence
ggtcaatttgctggagaaacgacga

SEQ ID NO: 148468 - DNA, 25 bp, Probe sequence
ggttcacttggcgctattatggatg

SEQ ID NO: 148469 - DNA, 25 bp, Probe sequence
ggttggtcgcaaagtcggactgcaa

SEQ ID NO: 148470 - DNA, 25 bp, Probe sequence
tggtcgttagaaattgcgcgcgcac

SEQ ID NO: 148471 - DNA, 25 bp, Probe sequence
tgctcgttacaggctggcatatgcg

SEQ ID NO: 148472 - DNA, 25 bp, Probe sequence
tgaactttttatcattaccaccgaa

SEQ ID NO: 148473 - DNA, 25 bp, Probe sequence
tgcatgaaattttacagcgtacgcc

SEQ ID NO: 148474 - DNA, 25 bp, Probe sequence
taatcttgaattctattgccatatt

SEQ ID NO: 148475 - DNA, 25 bp, Probe sequence
tacatatttctaacaagccgagtga

SEQ ID NO: 148476 - DNA, 25 bp, Probe sequence
tactcactttattgctcgttacagg

SEQ ID NO: 148477 - DNA, 25 bp, Probe sequence
tttaggtttgttctgcatcgcattc

SEQ ID NO: 148478 - DNA, 25 bp, Probe sequence
tttattcttactcatgaccattgcc

SEQ ID NO: 148479 - DNA, 25 bp, Probe sequence
ttctcatatttatccggtgcactac

SEQ ID NO: 148480 - DNA, 25 bp, Probe sequence
ttcgacacctacaaaagatgcacaa

SEQ ID NO: 148481 - DNA, 25 bp, Probe sequence
attgctcaatcagcgataagccgtc

SEQ ID NO: 148482 - DNA, 25 bp, Probe sequence
atatgctacctttattcgaagagca

SEQ ID NO: 148483 - DNA, 25 bp, Probe sequence
atcagcgataagccgtcaaattaca

SEQ ID NO: 148484 - DNA, 25 bp, Probe sequence
agaacatatctccgaaacagcactt

SEQ ID NO: 148485 - DNA, 25 bp, Probe sequence
aaaatatacatttaccagaatctaa

SEQ ID NO: 148486 - DNA, 25 bp, Probe sequence
aagatattttatcgaggtcgctaaa

SEQ ID NO: 148487 - DNA, 25 bp, Probe sequence
aatatagacattggtttcacggaac

SEQ ID NO: 148488 - DNA, 25 bp, Probe sequence
aattattatttaatgaagctctgcg

SEQ ID NO: 148489 - DNA, 25 bp, Probe sequence
aattcagtttgagcatagtcatatt

SEQ ID NO: 148490 - DNA, 25 bp, Probe sequence
cacaatcagtagccaaccacttgcg

SEQ ID NO: 148491 - DNA, 25 bp, Probe sequence
cacccaccattaattcagtttgagc

SEQ ID NO: 148492 - DNA, 25 bp, Probe sequence
caccagaaatacgtaaacacaaaca

SEQ ID NO: 148493 - DNA, 25 bp, Probe sequence
ctacctttattcgaagagcactatc

SEQ ID NO: 148494 - DNA, 25 bp, Probe sequence
cgaggtcgctaaaagagaacatatc

SEQ ID NO: 148495 - DNA, 25 bp, Probe sequence
cgcagtatctccttcgtcaaaaaga

SEQ ID NO: 148496 - DNA, 25 bp, Probe sequence
gaaggttacatcatttcatcacaaa

SEQ ID NO: 148497 - DNA, 25 bp, Probe sequence
gaactaaacattgctcaatcagcga

SEQ ID NO: 148498 - DNA, 25 bp, Probe sequence
gaacatttagatagcacgattgaac

SEQ ID NO: 148499 - DNA, 25 bp, Probe sequence
gaaacagcacttgaactaaacattg

SEQ ID NO: 148500 - DNA, 25 bp, Probe sequence
gacacacccaccattaattcagttt

SEQ ID NO: 148501 - DNA, 25 bp, Probe sequence
gactaaaacgtctacattccattaa

SEQ ID NO: 148502 - DNA, 25 bp, Probe sequence
gacattggtttcacggaacttacac

SEQ ID NO: 148503 - DNA, 25 bp, Probe sequence
gagcatagtcatatttattgcttgg

SEQ ID NO: 148504 - DNA, 25 bp, Probe sequence
gagcactatcatttatatgcgcctt

SEQ ID NO: 148505 - DNA, 25 bp, Probe sequence
gagagtgacgtatcccacatgttac

SEQ ID NO: 148506 - DNA, 25 bp, Probe sequence
gattactaaatcagatgtatacaca

SEQ ID NO: 148507 - DNA, 25 bp, Probe sequence
gtttcacggaacttacaccagaaat

SEQ ID NO: 148508 - DNA, 25 bp, Probe sequence
gtatacacaatcagtagccaaccac

SEQ ID NO: 148509 - DNA, 25 bp, Probe sequence
tgacgtatcccacatgttactacca

SEQ ID NO: 148510 - DNA, 25 bp, Probe sequence
taagccgtcaaattacattattaga

SEQ ID NO: 148511 - DNA, 25 bp, Probe sequence
taaaaagaacgatatgtgctattac

SEQ ID NO: 148512 - DNA, 25 bp, Probe sequence
tatctccgaaacagcacttgaacta

SEQ ID NO: 148513 - DNA, 25 bp, Probe sequence
tatcccacatgttactaccacttat

SEQ ID NO: 148514 - DNA, 25 bp, Probe sequence
tatatgcgccttcagacgatccaat

SEQ ID NO: 148515 - DNA, 25 bp, Probe sequence
ataacaggccgaatgatcaagctat

SEQ ID NO: 148516 - DNA, 25 bp, Probe sequence
aggccgaatgatcaagctattataa

SEQ ID NO: 148517 - DNA, 25 bp, Probe sequence
agaaacagggcacccacctgtatat

SEQ ID NO: 148518 - DNA, 25 bp, Probe sequence
agcgtacacgccttatatgaaggac

SEQ ID NO: 148519 - DNA, 25 bp, Probe sequence
acaggccgaatgatcaagctattat

SEQ ID NO: 148520 - DNA, 25 bp, Probe sequence
acagggcacccacctgtatataaca

SEQ ID NO: 148521 - DNA, 25 bp, Probe sequence
acacgccttatatgaaggacgtaca

SEQ ID NO: 148522 - DNA, 25 bp, Probe sequence
acaagaaacagggcacccacctgta

SEQ ID NO: 148523 - DNA, 25 bp, Probe sequence
aaacaagaaacagggcacccacctg

SEQ ID NO: 148524 - DNA, 25 bp, Probe sequence
aaacagggcacccacctgtatataa

SEQ ID NO: 148525 - DNA, 25 bp, Probe sequence
aacagggcacccacctgtatataac

SEQ ID NO: 148526 - DNA, 25 bp, Probe sequence
aacaggccgaatgatcaagctatta

SEQ ID NO: 148527 - DNA, 25 bp, Probe sequence
aagaaacagggcacccacctgtata

SEQ ID NO: 148528 - DNA, 25 bp, Probe sequence
caagaaacagggcacccacctgtat

SEQ ID NO: 148529 - DNA, 25 bp, Probe sequence
cacccacctgtatataacaggccga

SEQ ID NO: 148530 - DNA, 25 bp, Probe sequence
cagggcacccacctgtatataacag

SEQ ID NO: 148531 - DNA, 25 bp, Probe sequence
caggccgaatgatcaagctattata

SEQ ID NO: 148532 - DNA, 25 bp, Probe sequence
cttgcagcgtacacgccttatatga

SEQ ID NO: 148533 - DNA, 25 bp, Probe sequence
cttatatgaaggacgtacaaaacaa

SEQ ID NO: 148534 - DNA, 25 bp, Probe sequence
cccacctgtatataacaggccgaat

SEQ ID NO: 148535 - DNA, 25 bp, Probe sequence
gcgtacacgccttatatgaaggacg

SEQ ID NO: 148536 - DNA, 25 bp, Probe sequence
gcacccacctgtatataacaggccg

SEQ ID NO: 148537 - DNA, 25 bp, Probe sequence
gcagcgtacacgccttatatgaagg

SEQ ID NO: 148538 - DNA, 25 bp, Probe sequence
gaaacagggcacccacctgtatata

SEQ ID NO: 148539 - DNA, 25 bp, Probe sequence
gtatataacaggccgaatgatcaag

SEQ ID NO: 148540 - DNA, 25 bp, Probe sequence
gtacacgccttatatgaaggacgta

SEQ ID NO: 148541 - DNA, 25 bp, Probe sequence
gggcacccacctgtatataacaggc

SEQ ID NO: 148542 - DNA, 25 bp, Probe sequence
ggcacccacctgtatataacaggcc

SEQ ID NO: 148543 - DNA, 25 bp, Probe sequence
tcttgcagcgtacacgccttatatg

SEQ ID NO: 148544 - DNA, 25 bp, Probe sequence
tacaaaacaagaaacagggcaccca

SEQ ID NO: 148545 - DNA, 25 bp, Probe sequence
tttcttgcagcgtacacgccttata

SEQ ID NO: 148546 - DNA, 25 bp, Probe sequence
ttttcttgcagcgtacacgccttat

SEQ ID NO: 148547 - DNA, 25 bp, Probe sequence
ttcttgcagcgtacacgccttatat

SEQ ID NO: 148548 - DNA, 25 bp, Probe sequence
ttgcagcgtacacgccttatatgaa

SEQ ID NO: 148549 - DNA, 25 bp, Probe sequence
attaaaatatatcgttcgttatcat

SEQ ID NO: 148550 - DNA, 25 bp, Probe sequence
atatatcgttcgttatcatttagcg

SEQ ID NO: 148551 - DNA, 25 bp, Probe sequence
atatcgttcgttatcatttagcgtt

SEQ ID NO: 148552 - DNA, 25 bp, Probe sequence
atcgttcgttatcatttagcgtttg

SEQ ID NO: 148553 - DNA, 25 bp, Probe sequence
aaatatatcgttcgttatcatttag

SEQ ID NO: 148554 - DNA, 25 bp, Probe sequence
aaaatatatcgttcgttatcattta

SEQ ID NO: 148555 - DNA, 25 bp, Probe sequence
aatatatcgttcgttatcatttagc

SEQ ID NO: 148556 - DNA, 25 bp, Probe sequence
aattaaaatatatcgttcgttatca

SEQ ID NO: 148557 - DNA, 25 bp, Probe sequence
cgttcgttatcatttagcgtttgtt

SEQ ID NO: 148558 - DNA, 25 bp, Probe sequence
tcaagcttttcgctaaatttttcca

SEQ ID NO: 148559 - DNA, 25 bp, Probe sequence
gttcgttatcatttagcgtttgttt

SEQ ID NO: 148560 - DNA, 25 bp, Probe sequence
gttatcatttagcgtttgtttttat

SEQ ID NO: 148561 - DNA, 25 bp, Probe sequence
tcgttatcatttagcgtttgttttt

SEQ ID NO: 148562 - DNA, 25 bp, Probe sequence
tcgttcgttatcatttagcgtttgt

SEQ ID NO: 148563 - DNA, 25 bp, Probe sequence
tcatttagcgtttgtttttatttca

SEQ ID NO: 148564 - DNA, 25 bp, Probe sequence
taaaatatatcgttcgttatcattt

SEQ ID NO: 148565 - DNA, 25 bp, Probe sequence
tagcgtttgtttttatttcaagctt

SEQ ID NO: 148566 - DNA, 25 bp, Probe sequence
tatcgttcgttatcatttagcgttt

SEQ ID NO: 148567 - DNA, 25 bp, Probe sequence
tatcatttagcgtttgtttttattt

SEQ ID NO: 148568 - DNA, 25 bp, Probe sequence
tatatcgttcgttatcatttagcgt

SEQ ID NO: 148569 - DNA, 25 bp, Probe sequence
tatttcaagcttttcgctaaatttt

SEQ ID NO: 148570 - DNA, 25 bp, Probe sequence
tttatttcaagcttttcgctaaatt

SEQ ID NO: 148571 - DNA, 25 bp, Probe sequence
ttttatttcaagcttttcgctaaat

SEQ ID NO: 148572 - DNA, 25 bp, Probe sequence
ttatttcaagcttttcgctaaattt

SEQ ID NO: 148573 - DNA, 25 bp, Probe sequence
ttatcatttagcgtttgtttttatt

SEQ ID NO: 148574 - DNA, 25 bp, Probe sequence
ttagcgtttgtttttatttcaagct

SEQ ID NO: 148575 - DNA, 25 bp, Probe sequence
ttaaaatatatcgttcgttatcatt

SEQ ID NO: 148576 - DNA, 25 bp, Probe sequence
ttcgttatcatttagcgtttgtttt

SEQ ID NO: 148577 - DNA, 25 bp, Probe sequence
ttgtttttatttcaagcttttcgct

SEQ ID NO: 148578 - DNA, 25 bp, Probe sequence
attccataattcaatcatcttcaat

SEQ ID NO: 148579 - DNA, 25 bp, Probe sequence
atttacaaatcgcaactactctatc

SEQ ID NO: 148580 - DNA, 25 bp, Probe sequence
atcgcaactactctatccaaggcga

SEQ ID NO: 148581 - DNA, 25 bp, Probe sequence
atcgcaaaatctgatccccgaaata

SEQ ID NO: 148582 - DNA, 25 bp, Probe sequence
atccatattatcttaacaacgaaat

SEQ ID NO: 148583 - DNA, 25 bp, Probe sequence
atgcatcaacatgtcagtgaaacta

SEQ ID NO: 148584 - DNA, 25 bp, Probe sequence
actactctatccaaggcgaaatcgc

SEQ ID NO: 148585 - DNA, 25 bp, Probe sequence
acaacgaaattgaatcgaacctgaa

SEQ ID NO: 148586 - DNA, 25 bp, Probe sequence
acaaatcgcaactactctatccaag

SEQ ID NO: 148587 - DNA, 25 bp, Probe sequence
aaatcgcaactactctatccaaggc

SEQ ID NO: 148588 - DNA, 25 bp, Probe sequence
aaattccataattcaatcatcttca

SEQ ID NO: 148589 - DNA, 25 bp, Probe sequence
aaatctgatccccgaaataacatat

SEQ ID NO: 148590 - DNA, 25 bp, Probe sequence
aaacattttatactttatcagaaca

SEQ ID NO: 148591 - DNA, 25 bp, Probe sequence
aacatgtcagtgaaactaatccata

SEQ ID NO: 148592 - DNA, 25 bp, Probe sequence
aacatatctcgaaaaaaattccata

SEQ ID NO: 148593 - DNA, 25 bp, Probe sequence
aatcgcaaaatctgatccccgaaat

SEQ ID NO: 148594 - DNA, 25 bp, Probe sequence
caaatcgcaactactctatccaagg

SEQ ID NO: 148595 - DNA, 25 bp, Probe sequence
ctaatccatattatcttaacaacga

SEQ ID NO: 148596 - DNA, 25 bp, Probe sequence
tccccgaaataacatatctcgaaaa

SEQ ID NO: 148597 - DNA, 25 bp, Probe sequence
ccataattcaatcatcttcaataat

SEQ ID NO: 148598 - DNA, 25 bp, Probe sequence
gcgaaatcgcaaaatctgatccccg

SEQ ID NO: 148599 - DNA, 25 bp, Probe sequence
gcaaaatctgatccccgaaataaca

SEQ ID NO: 148600 - DNA, 25 bp, Probe sequence
gcaactactctatccaaggcgaaat

SEQ ID NO: 148601 - DNA, 25 bp, Probe sequence
gaacaaaaaagacatgcatcaacat

SEQ ID NO: 148602 - DNA, 25 bp, Probe sequence
gaaactaatccatattatcttaaca

SEQ ID NO: 148603 - DNA, 25 bp, Probe sequence
gaaatcgcaaaatctgatccccgaa

SEQ ID NO: 148604 - DNA, 25 bp, Probe sequence
gatccccgaaataacatatctcgaa

SEQ ID NO: 148605 - DNA, 25 bp, Probe sequence
gtcagtgaaactaatccatattatc

SEQ ID NO: 148606 - DNA, 25 bp, Probe sequence
ggcgaaatcgcaaaatctgatcccc

SEQ ID NO: 148607 - DNA, 25 bp, Probe sequence
tgaatcgaacctgaaaaacgtattt

SEQ ID NO: 148608 - DNA, 25 bp, Probe sequence
tctgatccccgaaataacatatctc

SEQ ID NO: 148609 - DNA, 25 bp, Probe sequence
tacaaatcgcaactactctatccaa

SEQ ID NO: 148610 - DNA, 25 bp, Probe sequence
tactctatccaaggcgaaatcgcaa

SEQ ID NO: 148611 - DNA, 25 bp, Probe sequence
ttacaaatcgcaactactctatcca

SEQ ID NO: 148612 - DNA, 25 bp, Probe sequence
attccagcaattcaaggtctatatt

SEQ ID NO: 148613 - DNA, 25 bp, Probe sequence
atatcagtacattttcaaagtctat

SEQ ID NO: 148614 - DNA, 25 bp, Probe sequence
atagtatatataacgccttcccatc

SEQ ID NO: 148615 - DNA, 25 bp, Probe sequence
atcacattgaaggcaacactgtacc

SEQ ID NO: 148616 - DNA, 25 bp, Probe sequence
atcttccggtggttttgaaaggcat

SEQ ID NO: 148617 - DNA, 25 bp, Probe sequence
agacctcgctctggatattttgtgt

SEQ ID NO: 148618 - DNA, 25 bp, Probe sequence
acctagttatccaccaatcaaaaat

SEQ ID NO: 148619 - DNA, 25 bp, Probe sequence
aaaatatcattctcaaaatcacatt

SEQ ID NO: 148620 - DNA, 25 bp, Probe sequence
aacatttccctatagaacttttcag

SEQ ID NO: 148621 - DNA, 25 bp, Probe sequence
aatagatacgaaacatttccctata

SEQ ID NO: 148622 - DNA, 25 bp, Probe sequence
aatttatattaggctttggcggtat

SEQ ID NO: 148623 - DNA, 25 bp, Probe sequence
caaagtctatttttcctagctgtcg

SEQ ID NO: 148624 - DNA, 25 bp, Probe sequence
gcaacgtttatatcttccggtggtt

SEQ ID NO: 148625 - DNA, 25 bp, Probe sequence
cttcccatcaatttccaactggata

SEQ ID NO: 148626 - DNA, 25 bp, Probe sequence
ctcgctctggatattttgtgtccga

SEQ ID NO: 148627 - DNA, 25 bp, Probe sequence
gcgagtgatgaagcttatgattatg

SEQ ID NO: 148628 - DNA, 25 bp, Probe sequence
gcatatatggtgttaccctattcta

SEQ ID NO: 148629 - DNA, 25 bp, Probe sequence
gcaaaaccttattgcaacgtttata

SEQ ID NO: 148630 - DNA, 25 bp, Probe sequence
gaactcaattaatacaatgggctca

SEQ ID NO: 148631 - DNA, 25 bp, Probe sequence
gaaaaacctagttatccaccaatca

SEQ ID NO: 148632 - DNA, 25 bp, Probe sequence
gaaaaacactttataccatcaactt

SEQ ID NO: 148633 - DNA, 25 bp, Probe sequence
gacgatgatgctttaaaaccgcatg

SEQ ID NO: 148634 - DNA, 25 bp, Probe sequence
gatgattatgattccgagtttagat

SEQ ID NO: 148635 - DNA, 25 bp, Probe sequence
gttacatttattcaagacctcgctc

SEQ ID NO: 148636 - DNA, 25 bp, Probe sequence
gtacctgttcatatgcaaaacctta

SEQ ID NO: 148637 - DNA, 25 bp, Probe sequence
ggattaacattacaagagtgtcttg

SEQ ID NO: 148638 - DNA, 25 bp, Probe sequence
ggcaacactgtacctgttcatatgc

SEQ ID NO: 148639 - DNA, 25 bp, Probe sequence
tggtgttaccctattctataatgaa

SEQ ID NO: 148640 - DNA, 25 bp, Probe sequence
tcaactggcattttatttatttact

SEQ ID NO: 148641 - DNA, 25 bp, Probe sequence
taaaaccgcatgtagacgctctaat

SEQ ID NO: 148642 - DNA, 25 bp, Probe sequence
tagtcgatttactttatacttcaac

SEQ ID NO: 148643 - DNA, 25 bp, Probe sequence
tatatataacgccttcccatcaatt

SEQ ID NO: 148644 - DNA, 25 bp, Probe sequence
ttgtgtccgaaattgaatctttaac

SEQ ID NO: 148645 - DNA, 25 bp, Probe sequence
ttggcggtatagacgatgatgcttt

SEQ ID NO: 148646 - DNA, 25 bp, Probe sequence
attacaatggctactgcaattattg

SEQ ID NO: 148647 - DNA, 25 bp, Probe sequence
attatatatttcagtttagtcatca

SEQ ID NO: 148648 - DNA, 25 bp, Probe sequence
atttcagtttagtcatcatttatgc

SEQ ID NO: 148649 - DNA, 25 bp, Probe sequence
atatttcagtttagtcatcatttat

SEQ ID NO: 148650 - DNA, 25 bp, Probe sequence
atatatttcagtttagtcatcattt

SEQ ID NO: 148651 - DNA, 25 bp, Probe sequence
ataattacaatggctactgcaatta

SEQ ID NO: 148652 - DNA, 25 bp, Probe sequence
atggctactgcaattattgttggaa

SEQ ID NO: 148653 - DNA, 25 bp, Probe sequence
agtttagtcatcatttatgctccct

SEQ ID NO: 148654 - DNA, 25 bp, Probe sequence
agaaataattacaatggctactgca

SEQ ID NO: 148655 - DNA, 25 bp, Probe sequence
actgcaattattgttggaattatat

SEQ ID NO: 148656 - DNA, 25 bp, Probe sequence
acaatggctactgcaattattgttg

SEQ ID NO: 148657 - DNA, 25 bp, Probe sequence
aaataattacaatggctactgcaat

SEQ ID NO: 148658 - DNA, 25 bp, Probe sequence
aatggctactgcaattattgttgga

SEQ ID NO: 148659 - DNA, 25 bp, Probe sequence
aataattacaatggctactgcaatt

SEQ ID NO: 148660 - DNA, 25 bp, Probe sequence
aattatatatttcagtttagtcatc

SEQ ID NO: 148661 - DNA, 25 bp, Probe sequence
aattacaatggctactgcaattatt

SEQ ID NO: 148662 - DNA, 25 bp, Probe sequence
caatggctactgcaattattgttgg

SEQ ID NO: 148663 - DNA, 25 bp, Probe sequence
cagtttagtcatcatttatgctccc

SEQ ID NO: 148664 - DNA, 25 bp, Probe sequence
ctactgcaattattgttggaattat

SEQ ID NO: 148665 - DNA, 25 bp, Probe sequence
gctactgcaattattgttggaatta

SEQ ID NO: 148666 - DNA, 25 bp, Probe sequence
gaaataattacaatggctactgcaa

SEQ ID NO: 148667 - DNA, 25 bp, Probe sequence
gtttagtcatcatttatgctccctt

SEQ ID NO: 148668 - DNA, 25 bp, Probe sequence
ggctactgcaattattgttggaatt

SEQ ID NO: 148669 - DNA, 25 bp, Probe sequence
tggctactgcaattattgttggaat

SEQ ID NO: 148670 - DNA, 25 bp, Probe sequence
tcagtttagtcatcatttatgctcc

SEQ ID NO: 148671 - DNA, 25 bp, Probe sequence
taattacaatggctactgcaattat

SEQ ID NO: 148672 - DNA, 25 bp, Probe sequence
tacaatggctactgcaattattgtt

SEQ ID NO: 148673 - DNA, 25 bp, Probe sequence
tatatttcagtttagtcatcattta

SEQ ID NO: 148674 - DNA, 25 bp, Probe sequence
tatatatttcagtttagtcatcatt

SEQ ID NO: 148675 - DNA, 25 bp, Probe sequence
tatttcagtttagtcatcatttatg

SEQ ID NO: 148676 - DNA, 25 bp, Probe sequence
tttcagtttagtcatcatttatgct

SEQ ID NO: 148677 - DNA, 25 bp, Probe sequence
ttatatatttcagtttagtcatcat

SEQ ID NO: 148678 - DNA, 25 bp, Probe sequence
ttacaatggctactgcaattattgt

SEQ ID NO: 148679 - DNA, 25 bp, Probe sequence
ttcagtttagtcatcatttatgctc

SEQ ID NO: 148680 - DNA, 25 bp, Probe sequence
atactgcaccaatattcaataatac

SEQ ID NO: 148681 - DNA, 25 bp, Probe sequence
atcgagtgcgaaacctattattaga

SEQ ID NO: 148682 - DNA, 25 bp, Probe sequence
agcactctaaagctttttcaagtaa

SEQ ID NO: 148683 - DNA, 25 bp, Probe sequence
agctgttttgcatagtactcatgtc

SEQ ID NO: 148684 - DNA, 25 bp, Probe sequence
acctccagttggctataattcgaag

SEQ ID NO: 148685 - DNA, 25 bp, Probe sequence
acattttaatgcaagtctatttcaa

SEQ ID NO: 148686 - DNA, 25 bp, Probe sequence
acaatacctgttttagctgttttgc

SEQ ID NO: 148687 - DNA, 25 bp, Probe sequence
aaatccctgttcatactataccagt

SEQ ID NO: 148688 - DNA, 25 bp, Probe sequence
aagcttatatgatgtgctacaagac

SEQ ID NO: 148689 - DNA, 25 bp, Probe sequence
aagcaactatagaatgtatgtccat

SEQ ID NO: 148690 - DNA, 25 bp, Probe sequence
aagtgctgagattcaagatgcttat

SEQ ID NO: 148691 - DNA, 25 bp, Probe sequence
aaggactggatcactcattggacta

SEQ ID NO: 148692 - DNA, 25 bp, Probe sequence
aatacaagcaactaatcactgaata

SEQ ID NO: 148693 - DNA, 25 bp, Probe sequence
aatacgtcgagatctatatgattca

SEQ ID NO: 148694 - DNA, 25 bp, Probe sequence
taattcgaagtatggtccttccgaa

SEQ ID NO: 148695 - DNA, 25 bp, Probe sequence
gcaacaattggatatatcagctcga

SEQ ID NO: 148696 - DNA, 25 bp, Probe sequence
gaaggcatacctccagttggctata

SEQ ID NO: 148697 - DNA, 25 bp, Probe sequence
gaaaattcacaatcacaacttatta

SEQ ID NO: 148698 - DNA, 25 bp, Probe sequence
gaaactataactgaaggcatacctc

SEQ ID NO: 148699 - DNA, 25 bp, Probe sequence
gacatggtatatgaatcggacatca

SEQ ID NO: 148700 - DNA, 25 bp, Probe sequence
gatgcttatatgtctctaattacta

SEQ ID NO: 148701 - DNA, 25 bp, Probe sequence
gatcaggaattactagcatttgcaa

SEQ ID NO: 148702 - DNA, 25 bp, Probe sequence
gttgcacgttattctcctgaaaaac

SEQ ID NO: 148703 - DNA, 25 bp, Probe sequence
gtttgtgaacattattacactcctg

SEQ ID NO: 148704 - DNA, 25 bp, Probe sequence
gtatcgactaaacagcaacaattgg

SEQ ID NO: 148705 - DNA, 25 bp, Probe sequence
gtatggtccttccgaattaatatta

SEQ ID NO: 148706 - DNA, 25 bp, Probe sequence
gtggtcacctcgtttacattttaat

SEQ ID NO: 148707 - DNA, 25 bp, Probe sequence
tggagatattttcctgagtgataaa

SEQ ID NO: 148708 - DNA, 25 bp, Probe sequence
tactctgggataattgtatcgacta

SEQ ID NO: 148709 - DNA, 25 bp, Probe sequence
tatttccgttgcacgttattctcct

SEQ ID NO: 148710 - DNA, 25 bp, Probe sequence
tattacactcctgaaggtactataa

SEQ ID NO: 148711 - DNA, 25 bp, Probe sequence
tttctcaagaatgtatcaagcactc

SEQ ID NO: 148712 - DNA, 25 bp, Probe sequence
ttatttataacaccgattctcaact

SEQ ID NO: 148713 - DNA, 25 bp, Probe sequence
ttgatttttgcatcgtggtcacctc

SEQ ID NO: 148714 - DNA, 25 bp, Probe sequence
attacctatcgtatttatttcagcg

SEQ ID NO: 148715 - DNA, 25 bp, Probe sequence
attttacttgcaattcagcttatct

SEQ ID NO: 148716 - DNA, 25 bp, Probe sequence
atatcgatcctaagcaaccaccatt

SEQ ID NO: 148717 - DNA, 25 bp, Probe sequence
atcatcgcttcaattattaaccctt

SEQ ID NO: 148718 - DNA, 25 bp, Probe sequence
atctgtattcttagtatcatttgct

SEQ ID NO: 148719 - DNA, 25 bp, Probe sequence
atgtcgactgtttctgcttcaatta

SEQ ID NO: 148720 - DNA, 25 bp, Probe sequence
agctgcaatcgctggattctttatt

SEQ ID NO: 148721 - DNA, 25 bp, Probe sequence
aaaggagatacagttgcccgctttg

SEQ ID NO: 148722 - DNA, 25 bp, Probe sequence
aagcaatatctttagtacagtttca

SEQ ID NO: 148723 - DNA, 25 bp, Probe sequence
caaccaccattcttcttcagtgtat

SEQ ID NO: 148724 - DNA, 25 bp, Probe sequence
caacgtttatacacattaacagctt

SEQ ID NO: 148725 - DNA, 25 bp, Probe sequence
cgcaaaaggtgttacatctgtattc

SEQ ID NO: 148726 - DNA, 25 bp, Probe sequence
gcttcaattatcggtgcatacttta

SEQ ID NO: 148727 - DNA, 25 bp, Probe sequence
gcatactttaccttaattgaaccta

SEQ ID NO: 148728 - DNA, 25 bp, Probe sequence
gcacttgcgtttctatttagctcag

SEQ ID NO: 148729 - DNA, 25 bp, Probe sequence
gatggtgttaactttgtattcggtg

SEQ ID NO: 148730 - DNA, 25 bp, Probe sequence
gatgcagttcaagccggttcagtta

SEQ ID NO: 148731 - DNA, 25 bp, Probe sequence
gtatctttcatttcagctgcaatcg

SEQ ID NO: 148732 - DNA, 25 bp, Probe sequence
gtaacggctgttgtcttaaacttat

SEQ ID NO: 148733 - DNA, 25 bp, Probe sequence
gtacagtttcaggtggcgctatttc

SEQ ID NO: 148734 - DNA, 25 bp, Probe sequence
gtctttgcaccatttgcattcttag

SEQ ID NO: 148735 - DNA, 25 bp, Probe sequence
gtgtgccatggcaagatgcagttca

SEQ ID NO: 148736 - DNA, 25 bp, Probe sequence
gggacgtttagaatcatacaatgca

SEQ ID NO: 148737 - DNA, 25 bp, Probe sequence
gggattatcggaattatcttctttt

SEQ ID NO: 148738 - DNA, 25 bp, Probe sequence
ggtggcgctatttcttgggatttcc

SEQ ID NO: 148739 - DNA, 25 bp, Probe sequence
tacagttgcccgctttggtttgaaa

SEQ ID NO: 148740 - DNA, 25 bp, Probe sequence
tcggtgcaacactagtatctttcat

SEQ ID NO: 148741 - DNA, 25 bp, Probe sequence
tcagcgattatcggtatccttcaat

SEQ ID NO: 148742 - DNA, 25 bp, Probe sequence
tcagcttatctttgcatttatcttg

SEQ ID NO: 148743 - DNA, 25 bp, Probe sequence
taattggttttgtctttgcaccatt

SEQ ID NO: 148744 - DNA, 25 bp, Probe sequence
taccatacatacctaagcaacgttt

SEQ ID NO: 148745 - DNA, 25 bp, Probe sequence
tagtgatttatctgaacacgcaaaa

SEQ ID NO: 148746 - DNA, 25 bp, Probe sequence
ttatcttctttttagcacttgcgtt

SEQ ID NO: 148747 - DNA, 25 bp, Probe sequence
ttaacagcttcagcaatgtcgactg

SEQ ID NO: 148748 - DNA, 25 bp, Probe sequence
atatcgtgacttagttgaagaaaaa

SEQ ID NO: 148749 - DNA, 25 bp, Probe sequence
atcgaagattgtgctcaaattagaa

SEQ ID NO: 148750 - DNA, 25 bp, Probe sequence
atgctcatctttttttagaactttt

SEQ ID NO: 148751 - DNA, 25 bp, Probe sequence
atgagacagtagatgctcatctttt

SEQ ID NO: 148752 - DNA, 25 bp, Probe sequence
agatgctcatctttttttagaactt

SEQ ID NO: 148753 - DNA, 25 bp, Probe sequence
agacagtagatgctcatcttttttt

SEQ ID NO: 148754 - DNA, 25 bp, Probe sequence
acagtagatgctcatctttttttag

SEQ ID NO: 148755 - DNA, 25 bp, Probe sequence
aacactatatcgtgacttagttgaa

SEQ ID NO: 148756 - DNA, 25 bp, Probe sequence
aaaacactatatcgtgacttagttg

SEQ ID NO: 148757 - DNA, 25 bp, Probe sequence
aacgagaattcaaaaacactatatc

SEQ ID NO: 148758 - DNA, 25 bp, Probe sequence
aagaagatggagatagcgatttaac

SEQ ID NO: 148759 - DNA, 25 bp, Probe sequence
aatcgaagattgtgctcaaattaga

SEQ ID NO: 148760 - DNA, 25 bp, Probe sequence
aattggtagtcatttagataaagaa

SEQ ID NO: 148761 - DNA, 25 bp, Probe sequence
cactatatcgtgacttagttgaaga

SEQ ID NO: 148762 - DNA, 25 bp, Probe sequence
cagtagatgctcatctttttttaga

SEQ ID NO: 148763 - DNA, 25 bp, Probe sequence
ctatatcgtgacttagttgaagaaa

SEQ ID NO: 148764 - DNA, 25 bp, Probe sequence
gctcaaattagaaaacagacccgta

SEQ ID NO: 148765 - DNA, 25 bp, Probe sequence
gaattcaaaaacactatatcgtgac

SEQ ID NO: 148766 - DNA, 25 bp, Probe sequence
gaagattgtgctcaaattagaaaac

SEQ ID NO: 148767 - DNA, 25 bp, Probe sequence
gaagatggagatagcgatttaacaa

SEQ ID NO: 148768 - DNA, 25 bp, Probe sequence
gaaatcgaagattgtgctcaaatta

SEQ ID NO: 148769 - DNA, 25 bp, Probe sequence
gaaatagatttaattggtagtcatt

SEQ ID NO: 148770 - DNA, 25 bp, Probe sequence
gacagtagatgctcatcttttttta

SEQ ID NO: 148771 - DNA, 25 bp, Probe sequence
gagaattcaaaaacactatatcgtg

SEQ ID NO: 148772 - DNA, 25 bp, Probe sequence
gagacagtagatgctcatctttttt

SEQ ID NO: 148773 - DNA, 25 bp, Probe sequence
gagatagcgatttaacaatagaaga

SEQ ID NO: 148774 - DNA, 25 bp, Probe sequence
gatggagatagcgatttaacaatag

SEQ ID NO: 148775 - DNA, 25 bp, Probe sequence
gatgctcatctttttttagaacttt

SEQ ID NO: 148776 - DNA, 25 bp, Probe sequence
gatttaattggtagtcatttagata

SEQ ID NO: 148777 - DNA, 25 bp, Probe sequence
gtagatgctcatctttttttagaac

SEQ ID NO: 148778 - DNA, 25 bp, Probe sequence
gtgctcaaattagaaaacagacccg

SEQ ID NO: 148779 - DNA, 25 bp, Probe sequence
tgctcatctttttttagaacttttt

SEQ ID NO: 148780 - DNA, 25 bp, Probe sequence
tcaaaaacactatatcgtgacttag

SEQ ID NO: 148781 - DNA, 25 bp, Probe sequence
tagatgctcatctttttttagaact

SEQ ID NO: 148782 - DNA, 25 bp, Probe sequence
atcatgtttaagtatataagctcta

SEQ ID NO: 148783 - DNA, 25 bp, Probe sequence
atgctttctttccagtcaaactgtg

SEQ ID NO: 148784 - DNA, 25 bp, Probe sequence
aggagtaaattcatcatgtttaagt

SEQ ID NO: 148785 - DNA, 25 bp, Probe sequence
aggttttgtctcgaatcttgttgta

SEQ ID NO: 148786 - DNA, 25 bp, Probe sequence
aaactgtgcttgatgatcaggtttt

SEQ ID NO: 148787 - DNA, 25 bp, Probe sequence
aagttaatgctttctttccagtcaa

SEQ ID NO: 148788 - DNA, 25 bp, Probe sequence
aatgctttctttccagtcaaactgt

SEQ ID NO: 148789 - DNA, 25 bp, Probe sequence
ctttccagtcaaactgtgcttgatg

SEQ ID NO: 148790 - DNA, 25 bp, Probe sequence
ctttaggcgacatctattgataaca

SEQ ID NO: 148791 - DNA, 25 bp, Probe sequence
ctcgaatcttgttgtatctttaggc

SEQ ID NO: 148792 - DNA, 25 bp, Probe sequence
gctttctttccagtcaaactgtgct

SEQ ID NO: 148793 - DNA, 25 bp, Probe sequence
gcttgatgatcaggttttgtctcga

SEQ ID NO: 148794 - DNA, 25 bp, Probe sequence
gaatcttgttgtatctttaggcgac

SEQ ID NO: 148795 - DNA, 25 bp, Probe sequence
gacatctattgataacatttcataa

SEQ ID NO: 148796 - DNA, 25 bp, Probe sequence
gatgatcaggttttgtctcgaatct

SEQ ID NO: 148797 - DNA, 25 bp, Probe sequence
gatcaggttttgtctcgaatcttgt

SEQ ID NO: 148798 - DNA, 25 bp, Probe sequence
gataacatttcataatataaggagt

SEQ ID NO: 148799 - DNA, 25 bp, Probe sequence
gttgtatctttaggcgacatctatt

SEQ ID NO: 148800 - DNA, 25 bp, Probe sequence
gttaatgctttctttccagtcaaac

SEQ ID NO: 148801 - DNA, 25 bp, Probe sequence
gttttgtctcgaatcttgttgtatc

SEQ ID NO: 148802 - DNA, 25 bp, Probe sequence
gtatctttaggcgacatctattgat

SEQ ID NO: 148803 - DNA, 25 bp, Probe sequence
gtcaaactgtgcttgatgatcaggt

SEQ ID NO: 148804 - DNA, 25 bp, Probe sequence
ggcgacatctattgataacatttca

SEQ ID NO: 148805 - DNA, 25 bp, Probe sequence
tgtctcgaatcttgttgtatcttta

SEQ ID NO: 148806 - DNA, 25 bp, Probe sequence
tccagtcaaactgtgcttgatgatc

SEQ ID NO: 148807 - DNA, 25 bp, Probe sequence
tcaggttttgtctcgaatcttgttg

SEQ ID NO: 148808 - DNA, 25 bp, Probe sequence
tcttgttgtatctttaggcgacatc

SEQ ID NO: 148809 - DNA, 25 bp, Probe sequence
taatgctttctttccagtcaaactg

SEQ ID NO: 148810 - DNA, 25 bp, Probe sequence
taagctctaaatgtataatatgcac

SEQ ID NO: 148811 - DNA, 25 bp, Probe sequence
taaatgtataatatgcacaggttaa

SEQ ID NO: 148812 - DNA, 25 bp, Probe sequence
tatctttcgttttaaagttaatgct

SEQ ID NO: 148813 - DNA, 25 bp, Probe sequence
tttgtctcgaatcttgttgtatctt

SEQ ID NO: 148814 - DNA, 25 bp, Probe sequence
ttctttccagtcaaactgtgcttga

SEQ ID NO: 148815 - DNA, 25 bp, Probe sequence
ttgatgatcaggttttgtctcgaat

SEQ ID NO: 148816 - DNA, 25 bp, Probe sequence
agtacgaccaggtgcattctttctg

SEQ ID NO: 148817 - DNA, 25 bp, Probe sequence
atggtcatacagcaattttacttac

SEQ ID NO: 148818 - DNA, 25 bp, Probe sequence
agagctgactttgatgcgttacctg

SEQ ID NO: 148819 - DNA, 25 bp, Probe sequence
accacagatagcgttattcctgatc

SEQ ID NO: 148820 - DNA, 25 bp, Probe sequence
acaccaatatcctgagttatctttt

SEQ ID NO: 148821 - DNA, 25 bp, Probe sequence
aaatgacttacatgtacgctttaat

SEQ ID NO: 148822 - DNA, 25 bp, Probe sequence
aaacaattcaactcagacgttattt

SEQ ID NO: 148823 - DNA, 25 bp, Probe sequence
aacaagctgtactttcatttggaat

SEQ ID NO: 148824 - DNA, 25 bp, Probe sequence
aaccaattaagccagttatcttgtg

SEQ ID NO: 148825 - DNA, 25 bp, Probe sequence
aacctcatgaaaccattgacccaat

SEQ ID NO: 148826 - DNA, 25 bp, Probe sequence
aatccaggatgtatgcatgcgtgtg

SEQ ID NO: 148827 - DNA, 25 bp, Probe sequence
caatcatggcctctccagatgaatt

SEQ ID NO: 148828 - DNA, 25 bp, Probe sequence
caggtgcattctttctgactggttg

SEQ ID NO: 148829 - DNA, 25 bp, Probe sequence
ctcctatcggccgcaatggtatcaa

SEQ ID NO: 148830 - DNA, 25 bp, Probe sequence
cgccacaccataatcccaaatttga

SEQ ID NO: 148831 - DNA, 25 bp, Probe sequence
gccgcaatggtatcaaagccacatt

SEQ ID NO: 148832 - DNA, 25 bp, Probe sequence
gcgttattcctgatcaagcattttg

SEQ ID NO: 148833 - DNA, 25 bp, Probe sequence
gaatttacggtacacatttatggag

SEQ ID NO: 148834 - DNA, 25 bp, Probe sequence
gaaatcatgccaggtggttctcaag

SEQ ID NO: 148835 - DNA, 25 bp, Probe sequence
gacgttatttacaccaatatcctga

SEQ ID NO: 148836 - DNA, 25 bp, Probe sequence
gatgcgttacctgtcgaggaattaa

SEQ ID NO: 148837 - DNA, 25 bp, Probe sequence
gatgctggatgtctggaaaatgtag

SEQ ID NO: 148838 - DNA, 25 bp, Probe sequence
gttgtattaatattccagtacggtg

SEQ ID NO: 148839 - DNA, 25 bp, Probe sequence
gttatcctactggaactattcattc

SEQ ID NO: 148840 - DNA, 25 bp, Probe sequence
gtaaaggtattacagcgccacacca

SEQ ID NO: 148841 - DNA, 25 bp, Probe sequence
ggtcatggtgccaaacctcatgaaa

SEQ ID NO: 148842 - DNA, 25 bp, Probe sequence
ggacctaccattgcattaagagctg

SEQ ID NO: 148843 - DNA, 25 bp, Probe sequence
ggcacaggacctaccattgcattaa

SEQ ID NO: 148844 - DNA, 25 bp, Probe sequence
ggcagagttcattttaagtgcacaa

SEQ ID NO: 148845 - DNA, 25 bp, Probe sequence
tgatattgaaactcctatcggccgc

SEQ ID NO: 148846 - DNA, 25 bp, Probe sequence
tgcgtgtgggcatgatggtcataca

SEQ ID NO: 148847 - DNA, 25 bp, Probe sequence
tatggagtggttatcctactggaac

SEQ ID NO: 148848 - DNA, 25 bp, Probe sequence
ttaaacgatgtgccttataagtcta

SEQ ID NO: 148849 - DNA, 25 bp, Probe sequence
ttgacccaatagtaatcatggcaga

SEQ ID NO: 148850 - DNA, 25 bp, Probe sequence
attacggtattccacaaaatgccat

SEQ ID NO: 148851 - DNA, 25 bp, Probe sequence
attcagacttatttaatgccatggt

SEQ ID NO: 148852 - DNA, 25 bp, Probe sequence
atgatatccataaggaccccgaatc

SEQ ID NO: 148853 - DNA, 25 bp, Probe sequence
atgatgaggtcattgatcgtattat

SEQ ID NO: 148854 - DNA, 25 bp, Probe sequence
atgtcgaacataatccatatttaga

SEQ ID NO: 148855 - DNA, 25 bp, Probe sequence
agaccctgaatactggaaaaagcta

SEQ ID NO: 148856 - DNA, 25 bp, Probe sequence
acaaaattgctcgaattattcaaac

SEQ ID NO: 148857 - DNA, 25 bp, Probe sequence
aaagctatttaaacgctatgacgat

SEQ ID NO: 148858 - DNA, 25 bp, Probe sequence
aaagcgtatgtttgaatatggtggt

SEQ ID NO: 148859 - DNA, 25 bp, Probe sequence
aaacgctatgacgattggattaata

SEQ ID NO: 148860 - DNA, 25 bp, Probe sequence
aacatatcgacaagtagatacacga

SEQ ID NO: 148861 - DNA, 25 bp, Probe sequence
aacgtcttttgaaaatgtcgaacat

SEQ ID NO: 148862 - DNA, 25 bp, Probe sequence
aatggaaattaatacagaccctgaa

SEQ ID NO: 148863 - DNA, 25 bp, Probe sequence
aatgccattataaccattgcaggta

SEQ ID NO: 148864 - DNA, 25 bp, Probe sequence
aatcaacactaacgcaagcacttgc

SEQ ID NO: 148865 - DNA, 25 bp, Probe sequence
ccattgcaggtacagttggtgttgg

SEQ ID NO: 148866 - DNA, 25 bp, Probe sequence
gccatggtcatgacaccttattttc

SEQ ID NO: 148867 - DNA, 25 bp, Probe sequence
gcaagcacttgcagataaattaaac

SEQ ID NO: 148868 - DNA, 25 bp, Probe sequence
gaatatggtggtggctttgtccaag

SEQ ID NO: 148869 - DNA, 25 bp, Probe sequence
gaattattcaaacatatcgacaagt

SEQ ID NO: 148870 - DNA, 25 bp, Probe sequence
gaagatgttgatatttttgcaaaaa

SEQ ID NO: 148871 - DNA, 25 bp, Probe sequence
gaagaagaaggcacaatgagtaaag

SEQ ID NO: 148872 - DNA, 25 bp, Probe sequence
gaccccgaatctttaaatcctatga

SEQ ID NO: 148873 - DNA, 25 bp, Probe sequence
gaggtcattgatcgtattattgaac

SEQ ID NO: 148874 - DNA, 25 bp, Probe sequence
gtccaagatcgatcaatttatgaag

SEQ ID NO: 148875 - DNA, 25 bp, Probe sequence
ggtggtggctttgtccaagatcgat

SEQ ID NO: 148876 - DNA, 25 bp, Probe sequence
ggtggctttgtccaagatcgatcaa

SEQ ID NO: 148877 - DNA, 25 bp, Probe sequence
ggtcatgacaccttattttcctaaa

SEQ ID NO: 148878 - DNA, 25 bp, Probe sequence
ggtattccacaaaatgccattataa

SEQ ID NO: 148879 - DNA, 25 bp, Probe sequence
ggattaatagctttaatgcatgtcc

SEQ ID NO: 148880 - DNA, 25 bp, Probe sequence
ggctttgtccaagatcgatcaattt

SEQ ID NO: 148881 - DNA, 25 bp, Probe sequence
tcatgacaccttattttcctaaacc

SEQ ID NO: 148882 - DNA, 25 bp, Probe sequence
taatgccatggtcatgacaccttat

SEQ ID NO: 148883 - DNA, 25 bp, Probe sequence
tatccataaggaccccgaatcttta

SEQ ID NO: 148884 - DNA, 25 bp, Probe sequence
atacttaatcgaattatcagttttc

SEQ ID NO: 148885 - DNA, 25 bp, Probe sequence
atcagttttcttttaattgttcaca

SEQ ID NO: 148886 - DNA, 25 bp, Probe sequence
atcgaattatcagttttcttttaat

SEQ ID NO: 148887 - DNA, 25 bp, Probe sequence
agtgcatacttaatcgaattatcag

SEQ ID NO: 148888 - DNA, 25 bp, Probe sequence
agttttcttttaattgttcacagca

SEQ ID NO: 148889 - DNA, 25 bp, Probe sequence
acttaatcgaattatcagttttctt

SEQ ID NO: 148890 - DNA, 25 bp, Probe sequence
aagtgcatacttaatcgaattatca

SEQ ID NO: 148891 - DNA, 25 bp, Probe sequence
cagttttcttttaattgttcacagc

SEQ ID NO: 148892 - DNA, 25 bp, Probe sequence
catacttaatcgaattatcagtttt

SEQ ID NO: 148893 - DNA, 25 bp, Probe sequence
cttttaattgttcacagcacgttcc

SEQ ID NO: 148894 - DNA, 25 bp, Probe sequence
cttaatcgaattatcagttttcttt

SEQ ID NO: 148895 - DNA, 25 bp, Probe sequence
cgaattatcagttttcttttaattg

SEQ ID NO: 148896 - DNA, 25 bp, Probe sequence
gcatacttaatcgaattatcagttt

SEQ ID NO: 148897 - DNA, 25 bp, Probe sequence
gaattatcagttttcttttaattgt

SEQ ID NO: 148898 - DNA, 25 bp, Probe sequence
gttttcttttaattgttcacagcac

SEQ ID NO: 148899 - DNA, 25 bp, Probe sequence
gtgcatacttaatcgaattatcagt

SEQ ID NO: 148900 - DNA, 25 bp, Probe sequence
tgcatacttaatcgaattatcagtt

SEQ ID NO: 148901 - DNA, 25 bp, Probe sequence
tcgaattatcagttttcttttaatt

SEQ ID NO: 148902 - DNA, 25 bp, Probe sequence
tcttttaattgttcacagcacgttc

SEQ ID NO: 148903 - DNA, 25 bp, Probe sequence
tcagttttcttttaattgttcacag

SEQ ID NO: 148904 - DNA, 25 bp, Probe sequence
tcacagcacgttcctttttattttt

SEQ ID NO: 148905 - DNA, 25 bp, Probe sequence
taatcgaattatcagttttctttta

SEQ ID NO: 148906 - DNA, 25 bp, Probe sequence
taagtgcatacttaatcgaattatc

SEQ ID NO: 148907 - DNA, 25 bp, Probe sequence
tacttaatcgaattatcagttttct

SEQ ID NO: 148908 - DNA, 25 bp, Probe sequence
tatcagttttcttttaattgttcac

SEQ ID NO: 148909 - DNA, 25 bp, Probe sequence
tttcttttaattgttcacagcacgt

SEQ ID NO: 148910 - DNA, 25 bp, Probe sequence
tttaattgttcacagcacgttcctt

SEQ ID NO: 148911 - DNA, 25 bp, Probe sequence
ttttaattgttcacagcacgttcct

SEQ ID NO: 148912 - DNA, 25 bp, Probe sequence
ttttcttttaattgttcacagcacg

SEQ ID NO: 148913 - DNA, 25 bp, Probe sequence
ttatcagttttcttttaattgttca

SEQ ID NO: 148914 - DNA, 25 bp, Probe sequence
ttaattgttcacagcacgttccttt

SEQ ID NO: 148915 - DNA, 25 bp, Probe sequence
ttaatcgaattatcagttttctttt

SEQ ID NO: 148916 - DNA, 25 bp, Probe sequence
ttcacagcacgttcctttttatttt

SEQ ID NO: 148917 - DNA, 25 bp, Probe sequence
ttcttttaattgttcacagcacgtt

SEQ ID NO: 148918 - DNA, 25 bp, Probe sequence
attttgagatttttaccaattcgat

SEQ ID NO: 148919 - DNA, 25 bp, Probe sequence
atcggattggtgaaaatcgaaattt

SEQ ID NO: 148920 - DNA, 25 bp, Probe sequence
aggctcttgaaaccttgttggcgta

SEQ ID NO: 148921 - DNA, 25 bp, Probe sequence
agccaacaaggctcttgaaaccttg

SEQ ID NO: 148922 - DNA, 25 bp, Probe sequence
acaaggctcttgaaaccttgttggc

SEQ ID NO: 148923 - DNA, 25 bp, Probe sequence
aaagccaacaaggctcttgaaacct

SEQ ID NO: 148924 - DNA, 25 bp, Probe sequence
aagccaacaaggctcttgaaacctt

SEQ ID NO: 148925 - DNA, 25 bp, Probe sequence
aaggctcttgaaaccttgttggcgt

SEQ ID NO: 148926 - DNA, 25 bp, Probe sequence
caaggctcttgaaaccttgttggcg

SEQ ID NO: 148927 - DNA, 25 bp, Probe sequence
caattcgatttttttcatagaaatt

SEQ ID NO: 148928 - DNA, 25 bp, Probe sequence
ctttattacagagtgaatcggattg

SEQ ID NO: 148929 - DNA, 25 bp, Probe sequence
ccaacaaggctcttgaaaccttgtt

SEQ ID NO: 148930 - DNA, 25 bp, Probe sequence
gccaacaaggctcttgaaaccttgt

SEQ ID NO: 148931 - DNA, 25 bp, Probe sequence
ccaattcgatttttttcatagaaat

SEQ ID NO: 148932 - DNA, 25 bp, Probe sequence
gaatcggattggtgaaaatcgaaat

SEQ ID NO: 148933 - DNA, 25 bp, Probe sequence
gagtgaatcggattggtgaaaatcg

SEQ ID NO: 148934 - DNA, 25 bp, Probe sequence
gtgaatcggattggtgaaaatcgaa

SEQ ID NO: 148935 - DNA, 25 bp, Probe sequence
ggctcttgaaaccttgttggcgtaa

SEQ ID NO: 148936 - DNA, 25 bp, Probe sequence
taaaaaagccaacaaggctcttgaa

SEQ ID NO: 148937 - DNA, 25 bp, Probe sequence
tgagatttttaccaattcgattttt

SEQ ID NO: 148938 - DNA, 25 bp, Probe sequence
tcgaaattttgagatttttaccaat

SEQ ID NO: 148939 - DNA, 25 bp, Probe sequence
tctttattacagagtgaatcggatt

SEQ ID NO: 148940 - DNA, 25 bp, Probe sequence
tacagagtgaatcggattggtgaaa

SEQ ID NO: 148941 - DNA, 25 bp, Probe sequence
taccaattcgatttttttcatagaa

SEQ ID NO: 148942 - DNA, 25 bp, Probe sequence
tattacagagtgaatcggattggtg

SEQ ID NO: 148943 - DNA, 25 bp, Probe sequence
tattctttattacagagtgaatcgg

SEQ ID NO: 148944 - DNA, 25 bp, Probe sequence
tttgagatttttaccaattcgattt

SEQ ID NO: 148945 - DNA, 25 bp, Probe sequence
tttaccaattcgatttttttcatag

SEQ ID NO: 148946 - DNA, 25 bp, Probe sequence
ttattacagagtgaatcggattggt

SEQ ID NO: 148947 - DNA, 25 bp, Probe sequence
ttttgagatttttaccaattcgatt

SEQ ID NO: 148948 - DNA, 25 bp, Probe sequence
ttaccaattcgatttttttcataga

SEQ ID NO: 148949 - DNA, 25 bp, Probe sequence
ttacagagtgaatcggattggtgaa

SEQ ID NO: 148950 - DNA, 25 bp, Probe sequence
ttctttattacagagtgaatcggat

SEQ ID NO: 148951 - DNA, 25 bp, Probe sequence
ttgagatttttaccaattcgatttt

SEQ ID NO: 148952 - DNA, 25 bp, Probe sequence
atctctaaatggagttttcaaactg

SEQ ID NO: 148953 - DNA, 25 bp, Probe sequence
atctagaattgctaaacgtaaccgt

SEQ ID NO: 148954 - DNA, 25 bp, Probe sequence
atggttcaaatgtagttttaatcga

SEQ ID NO: 148955 - DNA, 25 bp, Probe sequence
agatgtaacacaactaaatcaaggt

SEQ ID NO: 148956 - DNA, 25 bp, Probe sequence
agcaattgaaggtcctattggcgta

SEQ ID NO: 148957 - DNA, 25 bp, Probe sequence
agcaatttcaagatgtaacacaact

SEQ ID NO: 148958 - DNA, 25 bp, Probe sequence
acctatgataggagatattaccaat

SEQ ID NO: 148959 - DNA, 25 bp, Probe sequence
acgtaaccgtagttttgagcatcaa

SEQ ID NO: 148960 - DNA, 25 bp, Probe sequence
gtaggtaaatcttcacttgcacaca

SEQ ID NO: 148961 - DNA, 25 bp, Probe sequence
aaatccatttttatcagacttttat

SEQ ID NO: 148962 - DNA, 25 bp, Probe sequence
aaactgaaatgttctttttatgcaa

SEQ ID NO: 148963 - DNA, 25 bp, Probe sequence
aactgaagatatgattatgccgaat

SEQ ID NO: 148964 - DNA, 25 bp, Probe sequence
aatcttcacttgcacacaaattaag

SEQ ID NO: 148965 - DNA, 25 bp, Probe sequence
caaggtgtagttagtgattatcata

SEQ ID NO: 148966 - DNA, 25 bp, Probe sequence
cagacttttatgaagatatctctaa

SEQ ID NO: 148967 - DNA, 25 bp, Probe sequence
cttgcacacaaattaagtcaaactt

SEQ ID NO: 148968 - DNA, 25 bp, Probe sequence
gcagaccttgatgtgttaaaatcta

SEQ ID NO: 148969 - DNA, 25 bp, Probe sequence
gaacaaaccttttatagcaattgaa

SEQ ID NO: 148970 - DNA, 25 bp, Probe sequence
gaacaagattacgaagatatattac

SEQ ID NO: 148971 - DNA, 25 bp, Probe sequence
gaaatgttctttttatgcaatagat

SEQ ID NO: 148972 - DNA, 25 bp, Probe sequence
gaaatcatcacagaaaatccatttt

SEQ ID NO: 148973 - DNA, 25 bp, Probe sequence
gagtccttacaaagtaatggttcaa

SEQ ID NO: 148974 - DNA, 25 bp, Probe sequence
gattatcgtgagtattatgagtcct

SEQ ID NO: 148975 - DNA, 25 bp, Probe sequence
gttttaatcgatacaacttctattg

SEQ ID NO: 148976 - DNA, 25 bp, Probe sequence
ggtaaatcttcacttgcacacaaat

SEQ ID NO: 148977 - DNA, 25 bp, Probe sequence
ggcgtaggtaaatcttcacttgcac

SEQ ID NO: 148978 - DNA, 25 bp, Probe sequence
tcgatacaacttctattgattttct

SEQ ID NO: 148979 - DNA, 25 bp, Probe sequence
tcgtgagtattatgagtccttacaa

SEQ ID NO: 148980 - DNA, 25 bp, Probe sequence
taagtcaaactttagatttttatga

SEQ ID NO: 148981 - DNA, 25 bp, Probe sequence
tagatgcagaccttgatgtgttaaa

SEQ ID NO: 148982 - DNA, 25 bp, Probe sequence
tatctttttagatgcagaccttgat

SEQ ID NO: 148983 - DNA, 25 bp, Probe sequence
tattacatattatattacctatgat

SEQ ID NO: 148984 - DNA, 25 bp, Probe sequence
ttatgccgaatatgattatcttttt

SEQ ID NO: 148985 - DNA, 25 bp, Probe sequence
ttgaaggtcctattggcgtaggtaa

SEQ ID NO: 148986 - DNA, 25 bp, Probe sequence
attccaattttgactattttagcta

SEQ ID NO: 148987 - DNA, 25 bp, Probe sequence
attagtttggcttataatttagcaa

SEQ ID NO: 148988 - DNA, 25 bp, Probe sequence
atagggtcgctaattatattatgta

SEQ ID NO: 148989 - DNA, 25 bp, Probe sequence
atcttgattccaattttgactattt

SEQ ID NO: 148990 - DNA, 25 bp, Probe sequence
atgtaatcttgattccaattttgac

SEQ ID NO: 148991 - DNA, 25 bp, Probe sequence
agtttggcttataatttagcaatta

SEQ ID NO: 148992 - DNA, 25 bp, Probe sequence
aatgctattaaggtgggaattgaaa

SEQ ID NO: 148993 - DNA, 25 bp, Probe sequence
aatcttgattccaattttgactatt

SEQ ID NO: 148994 - DNA, 25 bp, Probe sequence
aatcaatgctattaaggtgggaatt

SEQ ID NO: 148995 - DNA, 25 bp, Probe sequence
aatagggtcgctaattatattatgt

SEQ ID NO: 148996 - DNA, 25 bp, Probe sequence
caattttgactattttagctagttt

SEQ ID NO: 148997 - DNA, 25 bp, Probe sequence
cttgattccaattttgactatttta

SEQ ID NO: 148998 - DNA, 25 bp, Probe sequence
gctattaaggtgggaattgaaatga

SEQ ID NO: 148999 - DNA, 25 bp, Probe sequence
gactattttagctagtttaatcaat

SEQ ID NO: 149000 - DNA, 25 bp, Probe sequence
gattccaattttgactattttagct

SEQ ID NO: 149001 - DNA, 25 bp, Probe sequence
gtatactaatatctagaggttatga

SEQ ID NO: 149002 - DNA, 25 bp, Probe sequence
gtaatcttgattccaattttgacta

SEQ ID NO: 149003 - DNA, 25 bp, Probe sequence
gtcgctaattatattatgtatacta

SEQ ID NO: 149004 - DNA, 25 bp, Probe sequence
gggtcgctaattatattatgtatac

SEQ ID NO: 149005 - DNA, 25 bp, Probe sequence
tgtaatcttgattccaattttgact

SEQ ID NO: 149006 - DNA, 25 bp, Probe sequence
tgattccaattttgactattttagc

SEQ ID NO: 149007 - DNA, 25 bp, Probe sequence
tgaaatataaaattagtttggctta

SEQ ID NO: 149008 - DNA, 25 bp, Probe sequence
tccaattttgactattttagctagt

SEQ ID NO: 149009 - DNA, 25 bp, Probe sequence
tcttgattccaattttgactatttt

SEQ ID NO: 149010 - DNA, 25 bp, Probe sequence
taatcttgattccaattttgactat

SEQ ID NO: 149011 - DNA, 25 bp, Probe sequence
tagcaattataatagggtcgctaat

SEQ ID NO: 149012 - DNA, 25 bp, Probe sequence
tagggtcgctaattatattatgtat

SEQ ID NO: 149013 - DNA, 25 bp, Probe sequence
tatgtaatcttgattccaattttga

SEQ ID NO: 149014 - DNA, 25 bp, Probe sequence
tattttagctagtttaatcaattta

SEQ ID NO: 149015 - DNA, 25 bp, Probe sequence
ttttgactattttagctagtttaat

SEQ ID NO: 149016 - DNA, 25 bp, Probe sequence
ttatgtatactaatatctagaggtt

SEQ ID NO: 149017 - DNA, 25 bp, Probe sequence
ttccaattttgactattttagctag

SEQ ID NO: 149018 - DNA, 25 bp, Probe sequence
ttgattccaattttgactattttag

SEQ ID NO: 149019 - DNA, 25 bp, Probe sequence
ttgactattttagctagtttaatca

SEQ ID NO: 149020 - DNA, 25 bp, Probe sequence
attatcgtttctactgagcagcaaa

SEQ ID NO: 149021 - DNA, 25 bp, Probe sequence
atcccagtagtagctgtgcttcaca

SEQ ID NO: 149022 - DNA, 25 bp, Probe sequence
atgcattagattcatcgccatttaa

SEQ ID NO: 149023 - DNA, 25 bp, Probe sequence
atgatgaagatgccctatttgataa

SEQ ID NO: 149024 - DNA, 25 bp, Probe sequence
atgtgattgatcatcctgaagtaca

SEQ ID NO: 149025 - DNA, 25 bp, Probe sequence
agagcgtttcttaatgtatgcccat

SEQ ID NO: 149026 - DNA, 25 bp, Probe sequence
acaccagtccaaacattagatcagc

SEQ ID NO: 149027 - DNA, 25 bp, Probe sequence
aacaatgggaccaatttgttcgtct

SEQ ID NO: 149028 - DNA, 25 bp, Probe sequence
aacatggggatttatttttcagtga

SEQ ID NO: 149029 - DNA, 25 bp, Probe sequence
aacggaattaggcgcatttttcatt

SEQ ID NO: 149030 - DNA, 25 bp, Probe sequence
aagaagcaacatatttagaacgcaa

SEQ ID NO: 149031 - DNA, 25 bp, Probe sequence
aatatgtatgatttcttccaagaag

SEQ ID NO: 149032 - DNA, 25 bp, Probe sequence
caatgtgtatttctgtcatggaata

SEQ ID NO: 149033 - DNA, 25 bp, Probe sequence
catatgtatggttttggttctgaaa

SEQ ID NO: 149034 - DNA, 25 bp, Probe sequence
cgttgctcgttattcacctgaaaaa

SEQ ID NO: 149035 - DNA, 25 bp, Probe sequence
cctgagtcaatcccagtagtagctg

SEQ ID NO: 149036 - DNA, 25 bp, Probe sequence
gcgatgtttgaaaatttatctcgat

SEQ ID NO: 149037 - DNA, 25 bp, Probe sequence
gctgtgcttcacagtacacacatta

SEQ ID NO: 149038 - DNA, 25 bp, Probe sequence
gaatctttagcacatggtgttccag

SEQ ID NO: 149039 - DNA, 25 bp, Probe sequence
gaatatatgatcaagagcgtttctt

SEQ ID NO: 149040 - DNA, 25 bp, Probe sequence
gaacgcaatgaaccatttgactggt

SEQ ID NO: 149041 - DNA, 25 bp, Probe sequence
gaaacaattgatacaccagtccaaa

SEQ ID NO: 149042 - DNA, 25 bp, Probe sequence
gaaatgcccaaaattatattactag

SEQ ID NO: 149043 - DNA, 25 bp, Probe sequence
gatgaatgtcattatactttaaaac

SEQ ID NO: 149044 - DNA, 25 bp, Probe sequence
gttgtagtaggattcttgttgataa

SEQ ID NO: 149045 - DNA, 25 bp, Probe sequence
gtatgcccattttcaagatcctaaa

SEQ ID NO: 149046 - DNA, 25 bp, Probe sequence
gtgcgtggctttttaagttgtagta

SEQ ID NO: 149047 - DNA, 25 bp, Probe sequence
gtgatttttatgatgtgcgtggctt

SEQ ID NO: 149048 - DNA, 25 bp, Probe sequence
ggcgcatttttcattaaacaactat

SEQ ID NO: 149049 - DNA, 25 bp, Probe sequence
tggtgttccagttattagttatgat

SEQ ID NO: 149050 - DNA, 25 bp, Probe sequence
taatattcctgtcggctatagtgaa

SEQ ID NO: 149051 - DNA, 25 bp, Probe sequence
tatgtgaatttttctataatccaga

SEQ ID NO: 149052 - DNA, 25 bp, Probe sequence
ttaatttccgttgctcgttattcac

SEQ ID NO: 149053 - DNA, 25 bp, Probe sequence
ttagcgctacttgaatctttagcac

SEQ ID NO: 149054 - DNA, 25 bp, Probe sequence
atggataacacgtaagattccggtt

SEQ ID NO: 149055 - DNA, 25 bp, Probe sequence
agataggggttcaattcccttcaag

SEQ ID NO: 149056 - DNA, 25 bp, Probe sequence
aatggataacacgtaagattccggt

SEQ ID NO: 149057 - DNA, 25 bp, Probe sequence
cacgtaagattccggttcttaagat

SEQ ID NO: 149058 - DNA, 25 bp, Probe sequence
cttgtggtgtaatggataacacgta

SEQ ID NO: 149059 - DNA, 25 bp, Probe sequence
ctccttgtggtgtaatggataacac

SEQ ID NO: 149060 - DNA, 25 bp, Probe sequence
cgtaagattccggttcttaagatag

SEQ ID NO: 149061 - DNA, 25 bp, Probe sequence
ccttgtggtgtaatggataacacgt

SEQ ID NO: 149062 - DNA, 25 bp, Probe sequence
gataacacgtaagattccggttctt

SEQ ID NO: 149063 - DNA, 25 bp, Probe sequence
gataggggttcaattcccttcaagg

SEQ ID NO: 149064 - DNA, 25 bp, Probe sequence
gtaatggataacacgtaagattccg

SEQ ID NO: 149065 - DNA, 25 bp, Probe sequence
gtaagattccggttcttaagatagg

SEQ ID NO: 149066 - DNA, 25 bp, Probe sequence
gtggtgtaatggataacacgtaaga

SEQ ID NO: 149067 - DNA, 25 bp, Probe sequence
gtgtaatggataacacgtaagattc

SEQ ID NO: 149068 - DNA, 25 bp, Probe sequence
ggtgtaatggataacacgtaagatt

SEQ ID NO: 149069 - DNA, 25 bp, Probe sequence
ggataacacgtaagattccggttct

SEQ ID NO: 149070 - DNA, 25 bp, Probe sequence
tggataacacgtaagattccggttc

SEQ ID NO: 149071 - DNA, 25 bp, Probe sequence
tggtgtaatggataacacgtaagat

SEQ ID NO: 149072 - DNA, 25 bp, Probe sequence
tgtggtgtaatggataacacgtaag

SEQ ID NO: 149073 - DNA, 25 bp, Probe sequence
tgtaatggataacacgtaagattcc

SEQ ID NO: 149074 - DNA, 25 bp, Probe sequence
tccttgtggtgtaatggataacacg

SEQ ID NO: 149075 - DNA, 25 bp, Probe sequence
taggggttcaattcccttcaaggag

SEQ ID NO: 149076 - DNA, 25 bp, Probe sequence
taatggataacacgtaagattccgg

SEQ ID NO: 149077 - DNA, 25 bp, Probe sequence
taagattccggttcttaagataggg

SEQ ID NO: 149078 - DNA, 25 bp, Probe sequence
taagataggggttcaattcccttca

SEQ ID NO: 149079 - DNA, 25 bp, Probe sequence
ttgtggtgtaatggataacacgtaa

SEQ ID NO: 149080 - DNA, 25 bp, Probe sequence
caagttggctgaagaggcgcccctg

SEQ ID NO: 149081 - DNA, 25 bp, Probe sequence
aggtcgcgaaagcggcgcgagggtt

SEQ ID NO: 149082 - DNA, 25 bp, Probe sequence
aggcgcccctgctaagggtgtaggt

SEQ ID NO: 149083 - DNA, 25 bp, Probe sequence
agggtgtaggtcgcgaaagcggcgc

SEQ ID NO: 149084 - DNA, 25 bp, Probe sequence
cgcgaaagcggcgcgagggttcgaa

SEQ ID NO: 149085 - DNA, 25 bp, Probe sequence
actcaagttggctgaagaggcgccc

SEQ ID NO: 149086 - DNA, 25 bp, Probe sequence
acgtactcaagttggctgaagaggc

SEQ ID NO: 149087 - DNA, 25 bp, Probe sequence
aagggtgtaggtcgcgaaagcggcg

SEQ ID NO: 149088 - DNA, 25 bp, Probe sequence
aaacgtactcaagttggctgaagag

SEQ ID NO: 149089 - DNA, 25 bp, Probe sequence
ctcaagttggctgaagaggcgcccc

SEQ ID NO: 149090 - DNA, 25 bp, Probe sequence
ctaagggtgtaggtcgcgaaagcgg

SEQ ID NO: 149091 - DNA, 25 bp, Probe sequence
ctgctaagggtgtaggtcgcgaaag

SEQ ID NO: 149092 - DNA, 25 bp, Probe sequence
cctgctaagggtgtaggtcgcgaaa

SEQ ID NO: 149093 - DNA, 25 bp, Probe sequence
cgaaagcggcgcgagggttcgaatc

SEQ ID NO: 149094 - DNA, 25 bp, Probe sequence
cgcccctgctaagggtgtaggtcgc

SEQ ID NO: 149095 - DNA, 25 bp, Probe sequence
ccctgctaagggtgtaggtcgcgaa

SEQ ID NO: 149096 - DNA, 25 bp, Probe sequence
gcccctgctaagggtgtaggtcgcg

SEQ ID NO: 149097 - DNA, 25 bp, Probe sequence
cccctgctaagggtgtaggtcgcga

SEQ ID NO: 149098 - DNA, 25 bp, Probe sequence
gcgaaagcggcgcgagggttcgaat

SEQ ID NO: 149099 - DNA, 25 bp, Probe sequence
gcgcccctgctaagggtgtaggtcg

SEQ ID NO: 149100 - DNA, 25 bp, Probe sequence
ggtgtaggtcgcgaaagcggcgcga

SEQ ID NO: 149101 - DNA, 25 bp, Probe sequence
gaaagcggcgcgagggttcgaatcc

SEQ ID NO: 149102 - DNA, 25 bp, Probe sequence
gaaacgtactcaagttggctgaaga

SEQ ID NO: 149103 - DNA, 25 bp, Probe sequence
ggtcgcgaaagcggcgcgagggttc

SEQ ID NO: 149104 - DNA, 25 bp, Probe sequence
gtcgcgaaagcggcgcgagggttcg

SEQ ID NO: 149105 - DNA, 25 bp, Probe sequence
gtgtaggtcgcgaaagcggcgcgag

SEQ ID NO: 149106 - DNA, 25 bp, Probe sequence
gtaggtcgcgaaagcggcgcgaggg

SEQ ID NO: 149107 - DNA, 25 bp, Probe sequence
gtactcaagttggctgaagaggcgc

SEQ ID NO: 149108 - DNA, 25 bp, Probe sequence
gggtgtaggtcgcgaaagcggcgcg

SEQ ID NO: 149109 - DNA, 25 bp, Probe sequence
ggcgcccctgctaagggtgtaggtc

SEQ ID NO: 149110 - DNA, 25 bp, Probe sequence
ggaaacgtactcaagttggctgaag

SEQ ID NO: 149111 - DNA, 25 bp, Probe sequence
tcaagttggctgaagaggcgcccct

SEQ ID NO: 149112 - DNA, 25 bp, Probe sequence
taagggtgtaggtcgcgaaagcggc

SEQ ID NO: 149113 - DNA, 25 bp, Probe sequence
taggtcgcgaaagcggcgcgagggt

SEQ ID NO: 149114 - DNA, 25 bp, Probe sequence
gctgttaaccgatcggtcgtaggtt

SEQ ID NO: 149115 - DNA, 25 bp, Probe sequence
gtcgtaggttcgagtcctacctgtg

SEQ ID NO: 149116 - DNA, 25 bp, Probe sequence
cgatcggtcgtaggttcgagtccta

SEQ ID NO: 149117 - DNA, 25 bp, Probe sequence
atcggctgttaaccgatcggtcgta

SEQ ID NO: 149118 - DNA, 25 bp, Probe sequence
tcggtcgtaggttcgagtcctacct

SEQ ID NO: 149119 - DNA, 25 bp, Probe sequence
cggtcgtaggttcgagtcctacctg

SEQ ID NO: 149120 - DNA, 25 bp, Probe sequence
agtggtagagctatcggctgttaac

SEQ ID NO: 149121 - DNA, 25 bp, Probe sequence
agagctatcggctgttaaccgatcg

SEQ ID NO: 149122 - DNA, 25 bp, Probe sequence
agctatcggctgttaaccgatcggt

SEQ ID NO: 149123 - DNA, 25 bp, Probe sequence
cagtggtagagctatcggctgttaa

SEQ ID NO: 149124 - DNA, 25 bp, Probe sequence
ctatcggctgttaaccgatcggtcg

SEQ ID NO: 149125 - DNA, 25 bp, Probe sequence
gctatcggctgttaaccgatcggtc

SEQ ID NO: 149126 - DNA, 25 bp, Probe sequence
ctcagtggtagagctatcggctgtt

SEQ ID NO: 149127 - DNA, 25 bp, Probe sequence
cgtaggttcgagtcctacctgtgga

SEQ ID NO: 149128 - DNA, 25 bp, Probe sequence
cggctgttaaccgatcggtcgtagg

SEQ ID NO: 149129 - DNA, 25 bp, Probe sequence
ccgatcggtcgtaggttcgagtcct

SEQ ID NO: 149130 - DNA, 25 bp, Probe sequence
gctcagtggtagagctatcggctgt

SEQ ID NO: 149131 - DNA, 25 bp, Probe sequence
ggctgttaaccgatcggtcgtaggt

SEQ ID NO: 149132 - DNA, 25 bp, Probe sequence
gatcggtcgtaggttcgagtcctac

SEQ ID NO: 149133 - DNA, 25 bp, Probe sequence
gagctatcggctgttaaccgatcgg

SEQ ID NO: 149134 - DNA, 25 bp, Probe sequence
gtaggttcgagtcctacctgtggag

SEQ ID NO: 149135 - DNA, 25 bp, Probe sequence
gtagagctatcggctgttaaccgat

SEQ ID NO: 149136 - DNA, 25 bp, Probe sequence
gtagctcagtggtagagctatcggc

SEQ ID NO: 149137 - DNA, 25 bp, Probe sequence
gtggtagagctatcggctgttaacc

SEQ ID NO: 149138 - DNA, 25 bp, Probe sequence
ggtcgtaggttcgagtcctacctgt

SEQ ID NO: 149139 - DNA, 25 bp, Probe sequence
tcgtaggttcgagtcctacctgtgg

SEQ ID NO: 149140 - DNA, 25 bp, Probe sequence
ggtagagctatcggctgttaaccga

SEQ ID NO: 149141 - DNA, 25 bp, Probe sequence
tgttaaccgatcggtcgtaggttcg

SEQ ID NO: 149142 - DNA, 25 bp, Probe sequence
tggtagagctatcggctgttaaccg

SEQ ID NO: 149143 - DNA, 25 bp, Probe sequence
tcggctgttaaccgatcggtcgtag

SEQ ID NO: 149144 - DNA, 25 bp, Probe sequence
tcagtggtagagctatcggctgtta

SEQ ID NO: 149145 - DNA, 25 bp, Probe sequence
taaccgatcggtcgtaggttcgagt

SEQ ID NO: 149146 - DNA, 25 bp, Probe sequence
tatcggctgttaaccgatcggtcgt

SEQ ID NO: 149147 - DNA, 25 bp, Probe sequence
ttaaccgatcggtcgtaggttcgag

SEQ ID NO: 149148 - DNA, 25 bp, Probe sequence
tctaagccatcggtcgggggttcga

SEQ ID NO: 149149 - DNA, 25 bp, Probe sequence
atagagcaatggccttctaagccat

SEQ ID NO: 149150 - DNA, 25 bp, Probe sequence
agagcaatggccttctaagccatcg

SEQ ID NO: 149151 - DNA, 25 bp, Probe sequence
agcaatggccttctaagccatcggt

SEQ ID NO: 149152 - DNA, 25 bp, Probe sequence
agctcagctggatagagcaatggcc

SEQ ID NO: 149153 - DNA, 25 bp, Probe sequence
agctggatagagcaatggccttcta

SEQ ID NO: 149154 - DNA, 25 bp, Probe sequence
aatggccttctaagccatcggtcgg

SEQ ID NO: 149155 - DNA, 25 bp, Probe sequence
caatggccttctaagccatcggtcg

SEQ ID NO: 149156 - DNA, 25 bp, Probe sequence
cagctggatagagcaatggccttct

SEQ ID NO: 149157 - DNA, 25 bp, Probe sequence
ctcagctggatagagcaatggcctt

SEQ ID NO: 149158 - DNA, 25 bp, Probe sequence
ctggatagagcaatggccttctaag

SEQ ID NO: 149159 - DNA, 25 bp, Probe sequence
ctggtagctcagctggatagagcaa

SEQ ID NO: 149160 - DNA, 25 bp, Probe sequence
cctggtagctcagctggatagagca

SEQ ID NO: 149161 - DNA, 25 bp, Probe sequence
gctggatagagcaatggccttctaa

SEQ ID NO: 149162 - DNA, 25 bp, Probe sequence
gctcagctggatagagcaatggcct

SEQ ID NO: 149163 - DNA, 25 bp, Probe sequence
gcaatggccttctaagccatcggtc

SEQ ID NO: 149164 - DNA, 25 bp, Probe sequence
gagcaatggccttctaagccatcgg

SEQ ID NO: 149165 - DNA, 25 bp, Probe sequence
gatagagcaatggccttctaagcca

SEQ ID NO: 149166 - DNA, 25 bp, Probe sequence
gtagctcagctggatagagcaatgg

SEQ ID NO: 149167 - DNA, 25 bp, Probe sequence
gtcctggtagctcagctggatagag

SEQ ID NO: 149168 - DNA, 25 bp, Probe sequence
ggtagctcagctggatagagcaatg

SEQ ID NO: 149169 - DNA, 25 bp, Probe sequence
taagccatcggtcgggggttcgaat

SEQ ID NO: 149170 - DNA, 25 bp, Probe sequence
ggatagagcaatggccttctaagcc

SEQ ID NO: 149171 - DNA, 25 bp, Probe sequence
tggtagctcagctggatagagcaat

SEQ ID NO: 149172 - DNA, 25 bp, Probe sequence
tggatagagcaatggccttctaagc

SEQ ID NO: 149173 - DNA, 25 bp, Probe sequence
tcctggtagctcagctggatagagc

SEQ ID NO: 149174 - DNA, 25 bp, Probe sequence
tcagctggatagagcaatggccttc

SEQ ID NO: 149175 - DNA, 25 bp, Probe sequence
tagagcaatggccttctaagccatc

SEQ ID NO: 149176 - DNA, 25 bp, Probe sequence
tagctcagctggatagagcaatggc

SEQ ID NO: 149177 - DNA, 25 bp, Probe sequence
attgccgcggacttagttgaatttg

SEQ ID NO: 149178 - DNA, 25 bp, Probe sequence
atgccgatgtcacttatggattagc

SEQ ID NO: 149179 - DNA, 25 bp, Probe sequence
atggattagcaattgacggtgataa

SEQ ID NO: 149180 - DNA, 25 bp, Probe sequence
agaacttactattgaagcaactgtc

SEQ ID NO: 149181 - DNA, 25 bp, Probe sequence
agcagttggtaatgccgatgtcact

SEQ ID NO: 149182 - DNA, 25 bp, Probe sequence
agcaactgtcacaacgctatgccct

SEQ ID NO: 149183 - DNA, 25 bp, Probe sequence
aaaatgcggcaggcgttgatgtttc

SEQ ID NO: 149184 - DNA, 25 bp, Probe sequence
aacttagtgtaccctgtacttgttg

SEQ ID NO: 149185 - DNA, 25 bp, Probe sequence
aaccaacgtggtgttgtcactgtta

SEQ ID NO: 149186 - DNA, 25 bp, Probe sequence
caacgctatgcccttgttcaaaaga

SEQ ID NO: 149187 - DNA, 25 bp, Probe sequence
gacttaattcgtttaattgccgcgg

SEQ ID NO: 149188 - DNA, 25 bp, Probe sequence
cgctatagtccaaccacaaatatta

SEQ ID NO: 149189 - DNA, 25 bp, Probe sequence
gcggcaggcgttgatgtttctggga

SEQ ID NO: 149190 - DNA, 25 bp, Probe sequence
gctggcacatttagtttttcaacaa

SEQ ID NO: 149191 - DNA, 25 bp, Probe sequence
gcaagttcaattctataccctattt

SEQ ID NO: 149192 - DNA, 25 bp, Probe sequence
gcaatggaagctaatgcaagttcaa

SEQ ID NO: 149193 - DNA, 25 bp, Probe sequence
gaagagtctatccatcaacatgatg

SEQ ID NO: 149194 - DNA, 25 bp, Probe sequence
gaacttgaatttaatacactttatc

SEQ ID NO: 149195 - DNA, 25 bp, Probe sequence
gaaaaacgtgtgacagagcgtgcat

SEQ ID NO: 149196 - DNA, 25 bp, Probe sequence
gaaacactttggttccgtagatcct

SEQ ID NO: 149197 - DNA, 25 bp, Probe sequence
gacagagcgtgcatatgaaaatcca

SEQ ID NO: 149198 - DNA, 25 bp, Probe sequence
gactgaatttgatttatcgacacga

SEQ ID NO: 149199 - DNA, 25 bp, Probe sequence
gagaaggtcgttggaaacactttgg

SEQ ID NO: 149200 - DNA, 25 bp, Probe sequence
gatgtttctgggaaatggttctttg

SEQ ID NO: 149201 - DNA, 25 bp, Probe sequence
gatcctattgaaggcacgaaaccta

SEQ ID NO: 149202 - DNA, 25 bp, Probe sequence
gtatcaaacagctggcacatttagt

SEQ ID NO: 149203 - DNA, 25 bp, Probe sequence
gtgtaccctgtacttgttgaccagt

SEQ ID NO: 149204 - DNA, 25 bp, Probe sequence
ggcacgaaacctactactaagaacg

SEQ ID NO: 149205 - DNA, 25 bp, Probe sequence
tggttccgtagatcctattgaaggc

SEQ ID NO: 149206 - DNA, 25 bp, Probe sequence
tgtacttgttgaccagtatcaaaca

SEQ ID NO: 149207 - DNA, 25 bp, Probe sequence
tcaacatgatgctttcgctaaatta

SEQ ID NO: 149208 - DNA, 25 bp, Probe sequence
taccctattttaaaacgtcctgatg

SEQ ID NO: 149209 - DNA, 25 bp, Probe sequence
tattcagcgcacaaccaacgtggtg

SEQ ID NO: 149210 - DNA, 25 bp, Probe sequence
ttcgtttaattgccgcggacttagt

SEQ ID NO: 149211 - DNA, 25 bp, Probe sequence
aggagcacgcctggaaagtgtgtag

SEQ ID NO: 149212 - DNA, 25 bp, Probe sequence
agagttgtccgagttggccgaagga

SEQ ID NO: 149213 - DNA, 25 bp, Probe sequence
agttgtccgagttggccgaaggagc

SEQ ID NO: 149214 - DNA, 25 bp, Probe sequence
gagttgtccgagttggccgaaggag

SEQ ID NO: 149215 - DNA, 25 bp, Probe sequence
cacgcctggaaagtgtgtaggcgcc

SEQ ID NO: 149216 - DNA, 25 bp, Probe sequence
acgcctggaaagtgtgtaggcgcca

SEQ ID NO: 149217 - DNA, 25 bp, Probe sequence
acaagcgtctcgagggttcgaatcc

SEQ ID NO: 149218 - DNA, 25 bp, Probe sequence
aaagtgtgtaggcgccacaagcgtc

SEQ ID NO: 149219 - DNA, 25 bp, Probe sequence
aaggagcacgcctggaaagtgtgta

SEQ ID NO: 149220 - DNA, 25 bp, Probe sequence
aagtgtgtaggcgccacaagcgtct

SEQ ID NO: 149221 - DNA, 25 bp, Probe sequence
cacaagcgtctcgagggttcgaatc

SEQ ID NO: 149222 - DNA, 25 bp, Probe sequence
cgagttggccgaaggagcacgcctg

SEQ ID NO: 149223 - DNA, 25 bp, Probe sequence
cgaaggagcacgcctggaaagtgtg

SEQ ID NO: 149224 - DNA, 25 bp, Probe sequence
ctggaaagtgtgtaggcgccacaag

SEQ ID NO: 149225 - DNA, 25 bp, Probe sequence
ccgaaggagcacgcctggaaagtgt

SEQ ID NO: 149226 - DNA, 25 bp, Probe sequence
ccgagttggccgaaggagcacgcct

SEQ ID NO: 149227 - DNA, 25 bp, Probe sequence
cctggaaagtgtgtaggcgccacaa

SEQ ID NO: 149228 - DNA, 25 bp, Probe sequence
gcctggaaagtgtgtaggcgccaca

SEQ ID NO: 149229 - DNA, 25 bp, Probe sequence
ccacaagcgtctcgagggttcgaat

SEQ ID NO: 149230 - DNA, 25 bp, Probe sequence
gccgaaggagcacgcctggaaagtg

SEQ ID NO: 149231 - DNA, 25 bp, Probe sequence
gcacgcctggaaagtgtgtaggcgc

SEQ ID NO: 149232 - DNA, 25 bp, Probe sequence
gaaggagcacgcctggaaagtgtgt

SEQ ID NO: 149233 - DNA, 25 bp, Probe sequence
gttgtccgagttggccgaaggagca

SEQ ID NO: 149234 - DNA, 25 bp, Probe sequence
gaaagtgtgtaggcgccacaagcgt

SEQ ID NO: 149235 - DNA, 25 bp, Probe sequence
gagcacgcctggaaagtgtgtaggc

SEQ ID NO: 149236 - DNA, 25 bp, Probe sequence
tgtccgagttggccgaaggagcacg

SEQ ID NO: 149237 - DNA, 25 bp, Probe sequence
gtccgagttggccgaaggagcacgc

SEQ ID NO: 149238 - DNA, 25 bp, Probe sequence
ggaaagtgtgtaggcgccacaagcg

SEQ ID NO: 149239 - DNA, 25 bp, Probe sequence
ggagcacgcctggaaagtgtgtagg

SEQ ID NO: 149240 - DNA, 25 bp, Probe sequence
tggccgaaggagcacgcctggaaag

SEQ ID NO: 149241 - DNA, 25 bp, Probe sequence
tggaaagtgtgtaggcgccacaagc

SEQ ID NO: 149242 - DNA, 25 bp, Probe sequence
tccgagttggccgaaggagcacgcc

SEQ ID NO: 149243 - DNA, 25 bp, Probe sequence
ttggccgaaggagcacgcctggaaa

SEQ ID NO: 149244 - DNA, 25 bp, Probe sequence
ttgtccgagttggccgaaggagcac

SEQ ID NO: 149245 - DNA, 25 bp, Probe sequence
atgttgtgggttcgattcccatcac

SEQ ID NO: 149246 - DNA, 25 bp, Probe sequence
agtttaatggcaaaacctcagcctt

SEQ ID NO: 149247 - DNA, 25 bp, Probe sequence
agctgatgttgtgggttcgattccc

SEQ ID NO: 149248 - DNA, 25 bp, Probe sequence
agccttccaagctgatgttgtgggt

SEQ ID NO: 149249 - DNA, 25 bp, Probe sequence
acctcagccttccaagctgatgttg

SEQ ID NO: 149250 - DNA, 25 bp, Probe sequence
aaacctcagccttccaagctgatgt

SEQ ID NO: 149251 - DNA, 25 bp, Probe sequence
aaaacctcagccttccaagctgatg

SEQ ID NO: 149252 - DNA, 25 bp, Probe sequence
aacctcagccttccaagctgatgtt

SEQ ID NO: 149253 - DNA, 25 bp, Probe sequence
aagctgatgttgtgggttcgattcc

SEQ ID NO: 149254 - DNA, 25 bp, Probe sequence
aatggcaaaacctcagccttccaag

SEQ ID NO: 149255 - DNA, 25 bp, Probe sequence
caagctgatgttgtgggttcgattc

SEQ ID NO: 149256 - DNA, 25 bp, Probe sequence
caaaacctcagccttccaagctgat

SEQ ID NO: 149257 - DNA, 25 bp, Probe sequence
cagccttccaagctgatgttgtggg

SEQ ID NO: 149258 - DNA, 25 bp, Probe sequence
cttccaagctgatgttgtgggttcg

SEQ ID NO: 149259 - DNA, 25 bp, Probe sequence
ctcagccttccaagctgatgttgtg

SEQ ID NO: 149260 - DNA, 25 bp, Probe sequence
ctgatgttgtgggttcgattcccat

SEQ ID NO: 149261 - DNA, 25 bp, Probe sequence
cctcagccttccaagctgatgttgt

SEQ ID NO: 149262 - DNA, 25 bp, Probe sequence
ccttccaagctgatgttgtgggttc

SEQ ID NO: 149263 - DNA, 25 bp, Probe sequence
ccaagctgatgttgtgggttcgatt

SEQ ID NO: 149264 - DNA, 25 bp, Probe sequence
gccttccaagctgatgttgtgggtt

SEQ ID NO: 149265 - DNA, 25 bp, Probe sequence
gctgatgttgtgggttcgattccca

SEQ ID NO: 149266 - DNA, 25 bp, Probe sequence
gatgttgtgggttcgattcccatca

SEQ ID NO: 149267 - DNA, 25 bp, Probe sequence
gtagtttaatggcaaaacctcagcc

SEQ ID NO: 149268 - DNA, 25 bp, Probe sequence
gtttaatggcaaaacctcagccttc

SEQ ID NO: 149269 - DNA, 25 bp, Probe sequence
ggtgtagtttaatggcaaaacctca

SEQ ID NO: 149270 - DNA, 25 bp, Probe sequence
tgatgttgtgggttcgattcccatc

SEQ ID NO: 149271 - DNA, 25 bp, Probe sequence
tgttgtgggttcgattcccatcacc

SEQ ID NO: 149272 - DNA, 25 bp, Probe sequence
tccaagctgatgttgtgggttcgat

SEQ ID NO: 149273 - DNA, 25 bp, Probe sequence
tagtttaatggcaaaacctcagcct

SEQ ID NO: 149274 - DNA, 25 bp, Probe sequence
tcagccttccaagctgatgttgtgg

SEQ ID NO: 149275 - DNA, 25 bp, Probe sequence
taatggcaaaacctcagccttccaa

SEQ ID NO: 149276 - DNA, 25 bp, Probe sequence
tttaatggcaaaacctcagccttcc

SEQ ID NO: 149277 - DNA, 25 bp, Probe sequence
ttccaagctgatgttgtgggttcga

SEQ ID NO: 149278 - DNA, 25 bp, Probe sequence
ttaatggcaaaacctcagccttcca

SEQ ID NO: 149279 - DNA, 25 bp, Probe sequence
gttccgacattcgagggttcgatcc

SEQ ID NO: 149280 - DNA, 25 bp, Probe sequence
attgtggttccgacattcgagggtt

SEQ ID NO: 149281 - DNA, 25 bp, Probe sequence
atcggattgtggttccgacattcga

SEQ ID NO: 149282 - DNA, 25 bp, Probe sequence
catcggattgtggttccgacattcg

SEQ ID NO: 149283 - DNA, 25 bp, Probe sequence
agtggttaacacatcggattgtggt

SEQ ID NO: 149284 - DNA, 25 bp, Probe sequence
acatcggattgtggttccgacattc

SEQ ID NO: 149285 - DNA, 25 bp, Probe sequence
acacatcggattgtggttccgacat

SEQ ID NO: 149286 - DNA, 25 bp, Probe sequence
aacacatcggattgtggttccgaca

SEQ ID NO: 149287 - DNA, 25 bp, Probe sequence
aagtggttaacacatcggattgtgg

SEQ ID NO: 149288 - DNA, 25 bp, Probe sequence
cacatcggattgtggttccgacatt

SEQ ID NO: 149289 - DNA, 25 bp, Probe sequence
cggattgtggttccgacattcgagg

SEQ ID NO: 149290 - DNA, 25 bp, Probe sequence
cgacattcgagggttcgatcccctt

SEQ ID NO: 149291 - DNA, 25 bp, Probe sequence
gaagtggttaacacatcggattgtg

SEQ ID NO: 149292 - DNA, 25 bp, Probe sequence
gattgtggttccgacattcgagggt

SEQ ID NO: 149293 - DNA, 25 bp, Probe sequence
gttaacacatcggattgtggttccg

SEQ ID NO: 149294 - DNA, 25 bp, Probe sequence
gtgaagtggttaacacatcggattg

SEQ ID NO: 149295 - DNA, 25 bp, Probe sequence
gtggtgaagtggttaacacatcgga

SEQ ID NO: 149296 - DNA, 25 bp, Probe sequence
gtggttaacacatcggattgtggtt

SEQ ID NO: 149297 - DNA, 25 bp, Probe sequence
ggtgaagtggttaacacatcggatt

SEQ ID NO: 149298 - DNA, 25 bp, Probe sequence
ggttccgacattcgagggttcgatc

SEQ ID NO: 149299 - DNA, 25 bp, Probe sequence
tggttccgacattcgagggttcgat

SEQ ID NO: 149300 - DNA, 25 bp, Probe sequence
ggttaacacatcggattgtggttcc

SEQ ID NO: 149301 - DNA, 25 bp, Probe sequence
ggattgtggttccgacattcgaggg

SEQ ID NO: 149302 - DNA, 25 bp, Probe sequence
ttgtggttccgacattcgagggttc

SEQ ID NO: 149303 - DNA, 25 bp, Probe sequence
tggttaacacatcggattgtggttc

SEQ ID NO: 149304 - DNA, 25 bp, Probe sequence
tgtggtgaagtggttaacacatcgg

SEQ ID NO: 149305 - DNA, 25 bp, Probe sequence
tggtgaagtggttaacacatcggat

SEQ ID NO: 149306 - DNA, 25 bp, Probe sequence
tgaagtggttaacacatcggattgt

SEQ ID NO: 149307 - DNA, 25 bp, Probe sequence
tcggattgtggttccgacattcgag

SEQ ID NO: 149308 - DNA, 25 bp, Probe sequence
ttccgacattcgagggttcgatccc

SEQ ID NO: 149309 - DNA, 25 bp, Probe sequence
taacacatcggattgtggttccgac

SEQ ID NO: 149310 - DNA, 25 bp, Probe sequence
ttaacacatcggattgtggttccga

SEQ ID NO: 149311 - DNA, 25 bp, Probe sequence
attgaagctccatgtgtcggcagtt

SEQ ID NO: 149312 - DNA, 25 bp, Probe sequence
atggattgaagctccatgtgtcggc

SEQ ID NO: 149313 - DNA, 25 bp, Probe sequence
agtagctcagttggtagagcaatgg

SEQ ID NO: 149314 - DNA, 25 bp, Probe sequence
agttggtagagcaatggattgaagc

SEQ ID NO: 149315 - DNA, 25 bp, Probe sequence
agagcaatggattgaagctccatgt

SEQ ID NO: 149316 - DNA, 25 bp, Probe sequence
agcaatggattgaagctccatgtgt

SEQ ID NO: 149317 - DNA, 25 bp, Probe sequence
agctccatgtgtcggcagttcgact

SEQ ID NO: 149318 - DNA, 25 bp, Probe sequence
agctcagttggtagagcaatggatt

SEQ ID NO: 149319 - DNA, 25 bp, Probe sequence
aagctccatgtgtcggcagttcgac

SEQ ID NO: 149320 - DNA, 25 bp, Probe sequence
aatggattgaagctccatgtgtcgg

SEQ ID NO: 149321 - DNA, 25 bp, Probe sequence
caatggattgaagctccatgtgtcg

SEQ ID NO: 149322 - DNA, 25 bp, Probe sequence
cagttggtagagcaatggattgaag

SEQ ID NO: 149323 - DNA, 25 bp, Probe sequence
catgtgtcggcagttcgactctgtc

SEQ ID NO: 149324 - DNA, 25 bp, Probe sequence
ctccatgtgtcggcagttcgactct

SEQ ID NO: 149325 - DNA, 25 bp, Probe sequence
gctccatgtgtcggcagttcgactc

SEQ ID NO: 149326 - DNA, 25 bp, Probe sequence
ctcagttggtagagcaatggattga

SEQ ID NO: 149327 - DNA, 25 bp, Probe sequence
ccatgtgtcggcagttcgactctgt

SEQ ID NO: 149328 - DNA, 25 bp, Probe sequence
gctcagttggtagagcaatggattg

SEQ ID NO: 149329 - DNA, 25 bp, Probe sequence
gcaatggattgaagctccatgtgtc

SEQ ID NO: 149330 - DNA, 25 bp, Probe sequence
gagcaatggattgaagctccatgtg

SEQ ID NO: 149331 - DNA, 25 bp, Probe sequence
tccatgtgtcggcagttcgactctg

SEQ ID NO: 149332 - DNA, 25 bp, Probe sequence
gattgaagctccatgtgtcggcagt

SEQ ID NO: 149333 - DNA, 25 bp, Probe sequence
gttggtagagcaatggattgaagct

SEQ ID NO: 149334 - DNA, 25 bp, Probe sequence
gtagagcaatggattgaagctccat

SEQ ID NO: 149335 - DNA, 25 bp, Probe sequence
gtagctcagttggtagagcaatgga

SEQ ID NO: 149336 - DNA, 25 bp, Probe sequence
ggtagagcaatggattgaagctcca

SEQ ID NO: 149337 - DNA, 25 bp, Probe sequence
ggattgaagctccatgtgtcggcag

SEQ ID NO: 149338 - DNA, 25 bp, Probe sequence
tggtagagcaatggattgaagctcc

SEQ ID NO: 149339 - DNA, 25 bp, Probe sequence
tggattgaagctccatgtgtcggca

SEQ ID NO: 149340 - DNA, 25 bp, Probe sequence
tcagttggtagagcaatggattgaa

SEQ ID NO: 149341 - DNA, 25 bp, Probe sequence
tagctcagttggtagagcaatggat

SEQ ID NO: 149342 - DNA, 25 bp, Probe sequence
tagagcaatggattgaagctccatg

SEQ ID NO: 149343 - DNA, 25 bp, Probe sequence
ttggtagagcaatggattgaagctc

SEQ ID NO: 149344 - DNA, 25 bp, Probe sequence
agccaagtggtaaggcagaggtctg

SEQ ID NO: 149345 - DNA, 25 bp, Probe sequence
atcaccggttcaaatccggttgccg

SEQ ID NO: 149346 - DNA, 25 bp, Probe sequence
atagccaagtggtaaggcagaggtc

SEQ ID NO: 149347 - DNA, 25 bp, Probe sequence
aggcagaggtctgcaaaacctttat

SEQ ID NO: 149348 - DNA, 25 bp, Probe sequence
aggtctgcaaaacctttatcaccgg

SEQ ID NO: 149349 - DNA, 25 bp, Probe sequence
agaggtctgcaaaacctttatcacc

SEQ ID NO: 149350 - DNA, 25 bp, Probe sequence
aaggcagaggtctgcaaaaccttta

SEQ ID NO: 149351 - DNA, 25 bp, Probe sequence
aagtggtaaggcagaggtctgcaaa

SEQ ID NO: 149352 - DNA, 25 bp, Probe sequence
caagtggtaaggcagaggtctgcaa

SEQ ID NO: 149353 - DNA, 25 bp, Probe sequence
cagaggtctgcaaaacctttatcac

SEQ ID NO: 149354 - DNA, 25 bp, Probe sequence
ctgcaaaacctttatcaccggttca

SEQ ID NO: 149355 - DNA, 25 bp, Probe sequence
cggcatagccaagtggtaaggcaga

SEQ ID NO: 149356 - DNA, 25 bp, Probe sequence
ccaagtggtaaggcagaggtctgca

SEQ ID NO: 149357 - DNA, 25 bp, Probe sequence
gccaagtggtaaggcagaggtctgc

SEQ ID NO: 149358 - DNA, 25 bp, Probe sequence
gcggcatagccaagtggtaaggcag

SEQ ID NO: 149359 - DNA, 25 bp, Probe sequence
gcatagccaagtggtaaggcagagg

SEQ ID NO: 149360 - DNA, 25 bp, Probe sequence
gcagaggtctgcaaaacctttatca

SEQ ID NO: 149361 - DNA, 25 bp, Probe sequence
gaggtctgcaaaacctttatcaccg

SEQ ID NO: 149362 - DNA, 25 bp, Probe sequence
gtaaggcagaggtctgcaaaacctt

SEQ ID NO: 149363 - DNA, 25 bp, Probe sequence
gtctgcaaaacctttatcaccggtt

SEQ ID NO: 149364 - DNA, 25 bp, Probe sequence
gtggtaaggcagaggtctgcaaaac

SEQ ID NO: 149365 - DNA, 25 bp, Probe sequence
ggtctgcaaaacctttatcaccggt

SEQ ID NO: 149366 - DNA, 25 bp, Probe sequence
ggtaaggcagaggtctgcaaaacct

SEQ ID NO: 149367 - DNA, 25 bp, Probe sequence
ggcatagccaagtggtaaggcagag

SEQ ID NO: 149368 - DNA, 25 bp, Probe sequence
ggcagaggtctgcaaaacctttatc

SEQ ID NO: 149369 - DNA, 25 bp, Probe sequence
ggcggcatagccaagtggtaaggca

SEQ ID NO: 149370 - DNA, 25 bp, Probe sequence
tgcaaaacctttatcaccggttcaa

SEQ ID NO: 149371 - DNA, 25 bp, Probe sequence
tcaccggttcaaatccggttgccgc

SEQ ID NO: 149372 - DNA, 25 bp, Probe sequence
tctgcaaaacctttatcaccggttc

SEQ ID NO: 149373 - DNA, 25 bp, Probe sequence
taaggcagaggtctgcaaaaccttt

SEQ ID NO: 149374 - DNA, 25 bp, Probe sequence
tatcaccggttcaaatccggttgcc

SEQ ID NO: 149375 - DNA, 25 bp, Probe sequence
tagccaagtggtaaggcagaggtct

SEQ ID NO: 149376 - DNA, 25 bp, Probe sequence
tttatcaccggttcaaatccggttg

SEQ ID NO: 149377 - DNA, 25 bp, Probe sequence
ttatcaccggttcaaatccggttgc

SEQ ID NO: 149378 - DNA, 25 bp, Probe sequence
ggtaaggcaacggactttgactccg

SEQ ID NO: 149379 - DNA, 25 bp, Probe sequence
caagcggtaaggcaacggactttga

SEQ ID NO: 149380 - DNA, 25 bp, Probe sequence
agccaagcggtaaggcaacggactt

SEQ ID NO: 149381 - DNA, 25 bp, Probe sequence
atagccaagcggtaaggcaacggac

SEQ ID NO: 149382 - DNA, 25 bp, Probe sequence
aggcaacggactttgactccgtcac

SEQ ID NO: 149383 - DNA, 25 bp, Probe sequence
agcggtaaggcaacggactttgact

SEQ ID NO: 149384 - DNA, 25 bp, Probe sequence
actcgttggttcgaatccagctagc

SEQ ID NO: 149385 - DNA, 25 bp, Probe sequence
aaggcaacggactttgactccgtca

SEQ ID NO: 149386 - DNA, 25 bp, Probe sequence
cactcgttggttcgaatccagctag

SEQ ID NO: 149387 - DNA, 25 bp, Probe sequence
ctatagccaagcggtaaggcaacgg

SEQ ID NO: 149388 - DNA, 25 bp, Probe sequence
ctcgttggttcgaatccagctagcc

SEQ ID NO: 149389 - DNA, 25 bp, Probe sequence
cgtcactcgttggttcgaatccagc

SEQ ID NO: 149390 - DNA, 25 bp, Probe sequence
ccaagcggtaaggcaacggactttg

SEQ ID NO: 149391 - DNA, 25 bp, Probe sequence
gccaagcggtaaggcaacggacttt

SEQ ID NO: 149392 - DNA, 25 bp, Probe sequence
gcggtaaggcaacggactttgactc

SEQ ID NO: 149393 - DNA, 25 bp, Probe sequence
gctatagccaagcggtaaggcaacg

SEQ ID NO: 149394 - DNA, 25 bp, Probe sequence
gtaaggcaacggactttgactccgt

SEQ ID NO: 149395 - DNA, 25 bp, Probe sequence
gtcactcgttggttcgaatccagct

SEQ ID NO: 149396 - DNA, 25 bp, Probe sequence
gggctatagccaagcggtaaggcaa

SEQ ID NO: 149397 - DNA, 25 bp, Probe sequence
ggcaacggactttgactccgtcact

SEQ ID NO: 149398 - DNA, 25 bp, Probe sequence
tgggctatagccaagcggtaaggca

SEQ ID NO: 149399 - DNA, 25 bp, Probe sequence
ggctatagccaagcggtaaggcaac

SEQ ID NO: 149400 - DNA, 25 bp, Probe sequence
tcgttggttcgaatccagctagccc

SEQ ID NO: 149401 - DNA, 25 bp, Probe sequence
tcactcgttggttcgaatccagcta

SEQ ID NO: 149402 - DNA, 25 bp, Probe sequence
taaggcaacggactttgactccgtc

SEQ ID NO: 149403 - DNA, 25 bp, Probe sequence
tagccaagcggtaaggcaacggact

SEQ ID NO: 149404 - DNA, 25 bp, Probe sequence
tatagccaagcggtaaggcaacgga

SEQ ID NO: 149405 - DNA, 25 bp, Probe sequence
acgcggcggactgtaaatccgctcc

SEQ ID NO: 149406 - DNA, 25 bp, Probe sequence
agtggctaaacgcggcggactgtaa

SEQ ID NO: 149407 - DNA, 25 bp, Probe sequence
aggggtagcgaagtggctaaacgcg

SEQ ID NO: 149408 - DNA, 25 bp, Probe sequence
agcgaagtggctaaacgcggcggac

SEQ ID NO: 149409 - DNA, 25 bp, Probe sequence
ctaaacgcggcggactgtaaatccg

SEQ ID NO: 149410 - DNA, 25 bp, Probe sequence
aaacgcggcggactgtaaatccgct

SEQ ID NO: 149411 - DNA, 25 bp, Probe sequence
aacgcggcggactgtaaatccgctc

SEQ ID NO: 149412 - DNA, 25 bp, Probe sequence
aagtggctaaacgcggcggactgta

SEQ ID NO: 149413 - DNA, 25 bp, Probe sequence
ccttcgggttcggcagttcgaatct

SEQ ID NO: 149414 - DNA, 25 bp, Probe sequence
cttcgggttcggcagttcgaatctg

SEQ ID NO: 149415 - DNA, 25 bp, Probe sequence
cggcggactgtaaatccgctccttc

SEQ ID NO: 149416 - DNA, 25 bp, Probe sequence
cgggttcggcagttcgaatctgccc

SEQ ID NO: 149417 - DNA, 25 bp, Probe sequence
cgcggcggactgtaaatccgctcct

SEQ ID NO: 149418 - DNA, 25 bp, Probe sequence
tccttcgggttcggcagttcgaatc

SEQ ID NO: 149419 - DNA, 25 bp, Probe sequence
gcggcggactgtaaatccgctcctt

SEQ ID NO: 149420 - DNA, 25 bp, Probe sequence
gctaaacgcggcggactgtaaatcc

SEQ ID NO: 149421 - DNA, 25 bp, Probe sequence
gaagtggctaaacgcggcggactgt

SEQ ID NO: 149422 - DNA, 25 bp, Probe sequence
gaggggtagcgaagtggctaaacgc

SEQ ID NO: 149423 - DNA, 25 bp, Probe sequence
gggttcggcagttcgaatctgcccc

SEQ ID NO: 149424 - DNA, 25 bp, Probe sequence
gggtagcgaagtggctaaacgcggc

SEQ ID NO: 149425 - DNA, 25 bp, Probe sequence
gtagcgaagtggctaaacgcggcgg

SEQ ID NO: 149426 - DNA, 25 bp, Probe sequence
gtggctaaacgcggcggactgtaaa

SEQ ID NO: 149427 - DNA, 25 bp, Probe sequence
ggggtagcgaagtggctaaacgcgg

SEQ ID NO: 149428 - DNA, 25 bp, Probe sequence
ggttcggcagttcgaatctgccccc

SEQ ID NO: 149429 - DNA, 25 bp, Probe sequence
ggaggggtagcgaagtggctaaacg

SEQ ID NO: 149430 - DNA, 25 bp, Probe sequence
ggtagcgaagtggctaaacgcggcg

SEQ ID NO: 149431 - DNA, 25 bp, Probe sequence
ggctaaacgcggcggactgtaaatc

SEQ ID NO: 149432 - DNA, 25 bp, Probe sequence
tggctaaacgcggcggactgtaaat

SEQ ID NO: 149433 - DNA, 25 bp, Probe sequence
tcgggttcggcagttcgaatctgcc

SEQ ID NO: 149434 - DNA, 25 bp, Probe sequence
taaacgcggcggactgtaaatccgc

SEQ ID NO: 149435 - DNA, 25 bp, Probe sequence
tagcgaagtggctaaacgcggcgga

SEQ ID NO: 149436 - DNA, 25 bp, Probe sequence
ttcgggttcggcagttcgaatctgc

SEQ ID NO: 149437 - DNA, 25 bp, Probe sequence
gctaacggctcataaccgttcggtc

SEQ ID NO: 149438 - DNA, 25 bp, Probe sequence
cataaccgttcggtcgcaggttcga

SEQ ID NO: 149439 - DNA, 25 bp, Probe sequence
ctcataaccgttcggtcgcaggttc

SEQ ID NO: 149440 - DNA, 25 bp, Probe sequence
agctaacggctcataaccgttcggt

SEQ ID NO: 149441 - DNA, 25 bp, Probe sequence
ctcagttggttagagctaacggctc

SEQ ID NO: 149442 - DNA, 25 bp, Probe sequence
cagttggttagagctaacggctcat

SEQ ID NO: 149443 - DNA, 25 bp, Probe sequence
agttggttagagctaacggctcata

SEQ ID NO: 149444 - DNA, 25 bp, Probe sequence
agagctaacggctcataaccgttcg

SEQ ID NO: 149445 - DNA, 25 bp, Probe sequence
acctttagctcagttggttagagct

SEQ ID NO: 149446 - DNA, 25 bp, Probe sequence
taacggctcataaccgttcggtcgc

SEQ ID NO: 149447 - DNA, 25 bp, Probe sequence
cggtcgcaggttcgagtcctgcaag

SEQ ID NO: 149448 - DNA, 25 bp, Probe sequence
ctaacggctcataaccgttcggtcg

SEQ ID NO: 149449 - DNA, 25 bp, Probe sequence
cgcaggttcgagtcctgcaaggtcc

SEQ ID NO: 149450 - DNA, 25 bp, Probe sequence
gctcagttggttagagctaacggct

SEQ ID NO: 149451 - DNA, 25 bp, Probe sequence
gctcataaccgttcggtcgcaggtt

SEQ ID NO: 149452 - DNA, 25 bp, Probe sequence
gcaggttcgagtcctgcaaggtcca

SEQ ID NO: 149453 - DNA, 25 bp, Probe sequence
gagctaacggctcataaccgttcgg

SEQ ID NO: 149454 - DNA, 25 bp, Probe sequence
gacctttagctcagttggttagagc

SEQ ID NO: 149455 - DNA, 25 bp, Probe sequence
gttggttagagctaacggctcataa

SEQ ID NO: 149456 - DNA, 25 bp, Probe sequence
gttcggtcgcaggttcgagtcctgc

SEQ ID NO: 149457 - DNA, 25 bp, Probe sequence
gttagagctaacggctcataaccgt

SEQ ID NO: 149458 - DNA, 25 bp, Probe sequence
gtcgcaggttcgagtcctgcaaggt

SEQ ID NO: 149459 - DNA, 25 bp, Probe sequence
ggtcgcaggttcgagtcctgcaagg

SEQ ID NO: 149460 - DNA, 25 bp, Probe sequence
ggttagagctaacggctcataaccg

SEQ ID NO: 149461 - DNA, 25 bp, Probe sequence
ggacctttagctcagttggttagag

SEQ ID NO: 149462 - DNA, 25 bp, Probe sequence
tggttagagctaacggctcataacc

SEQ ID NO: 149463 - DNA, 25 bp, Probe sequence
tcataaccgttcggtcgcaggttcg

SEQ ID NO: 149464 - DNA, 25 bp, Probe sequence
tcgcaggttcgagtcctgcaaggtc

SEQ ID NO: 149465 - DNA, 25 bp, Probe sequence
tcggtcgcaggttcgagtcctgcaa

SEQ ID NO: 149466 - DNA, 25 bp, Probe sequence
tcagttggttagagctaacggctca

SEQ ID NO: 149467 - DNA, 25 bp, Probe sequence
taaccgttcggtcgcaggttcgagt

SEQ ID NO: 149468 - DNA, 25 bp, Probe sequence
tagagctaacggctcataaccgttc

SEQ ID NO: 149469 - DNA, 25 bp, Probe sequence
ttcggtcgcaggttcgagtcctgca

SEQ ID NO: 149470 - DNA, 25 bp, Probe sequence
ttagagctaacggctcataaccgtt

SEQ ID NO: 149471 - DNA, 25 bp, Probe sequence
agcgtacggttcatacccgtgaggt

SEQ ID NO: 149472 - DNA, 25 bp, Probe sequence
agagcgtacggttcatacccgtgag

SEQ ID NO: 149473 - DNA, 25 bp, Probe sequence
agctcagctggctagagcgtacggt

SEQ ID NO: 149474 - DNA, 25 bp, Probe sequence
agctggctagagcgtacggttcata

SEQ ID NO: 149475 - DNA, 25 bp, Probe sequence
cagctggctagagcgtacggttcat

SEQ ID NO: 149476 - DNA, 25 bp, Probe sequence
ctagagcgtacggttcatacccgtg

SEQ ID NO: 149477 - DNA, 25 bp, Probe sequence
ctcagctggctagagcgtacggttc

SEQ ID NO: 149478 - DNA, 25 bp, Probe sequence
cgtacggttcatacccgtgaggtcg

SEQ ID NO: 149479 - DNA, 25 bp, Probe sequence
cggtgtagctcagctggctagagcg

SEQ ID NO: 149480 - DNA, 25 bp, Probe sequence
ctggctagagcgtacggttcatacc

SEQ ID NO: 149481 - DNA, 25 bp, Probe sequence
gcgtacggttcatacccgtgaggtc

SEQ ID NO: 149482 - DNA, 25 bp, Probe sequence
gcggtgtagctcagctggctagagc

SEQ ID NO: 149483 - DNA, 25 bp, Probe sequence
gctggctagagcgtacggttcatac

SEQ ID NO: 149484 - DNA, 25 bp, Probe sequence
gctcagctggctagagcgtacggtt

SEQ ID NO: 149485 - DNA, 25 bp, Probe sequence
gctagagcgtacggttcatacccgt

SEQ ID NO: 149486 - DNA, 25 bp, Probe sequence
gagcgtacggttcatacccgtgagg

SEQ ID NO: 149487 - DNA, 25 bp, Probe sequence
gtacggttcatacccgtgaggtcgg

SEQ ID NO: 149488 - DNA, 25 bp, Probe sequence
gtagctcagctggctagagcgtacg

SEQ ID NO: 149489 - DNA, 25 bp, Probe sequence
gtgtagctcagctggctagagcgta

SEQ ID NO: 149490 - DNA, 25 bp, Probe sequence
ggtgtagctcagctggctagagcgt

SEQ ID NO: 149491 - DNA, 25 bp, Probe sequence
tcatacccgtgaggtcgggggttcg

SEQ ID NO: 149492 - DNA, 25 bp, Probe sequence
ggctagagcgtacggttcatacccg

SEQ ID NO: 149493 - DNA, 25 bp, Probe sequence
tggctagagcgtacggttcataccc

SEQ ID NO: 149494 - DNA, 25 bp, Probe sequence
tgtagctcagctggctagagcgtac

SEQ ID NO: 149495 - DNA, 25 bp, Probe sequence
tcagctggctagagcgtacggttca

SEQ ID NO: 149496 - DNA, 25 bp, Probe sequence
tacggttcatacccgtgaggtcggg

SEQ ID NO: 149497 - DNA, 25 bp, Probe sequence
tagctcagctggctagagcgtacgg

SEQ ID NO: 149498 - DNA, 25 bp, Probe sequence
tagagcgtacggttcatacccgtga

SEQ ID NO: 149499 - DNA, 25 bp, Probe sequence
tagcgccttacggcgtgggggttcg

SEQ ID NO: 149500 - DNA, 25 bp, Probe sequence
attggcagacgcactagacttagga

SEQ ID NO: 149501 - DNA, 25 bp, Probe sequence
atctagcgccttacggcgtgggggt

SEQ ID NO: 149502 - DNA, 25 bp, Probe sequence
agacttaggatctagcgccttacgg

SEQ ID NO: 149503 - DNA, 25 bp, Probe sequence
agacgcactagacttaggatctagc

SEQ ID NO: 149504 - DNA, 25 bp, Probe sequence
acgcactagacttaggatctagcgc

SEQ ID NO: 149505 - DNA, 25 bp, Probe sequence
actagacttaggatctagcgcctta

SEQ ID NO: 149506 - DNA, 25 bp, Probe sequence
aattggcagacgcactagacttagg

SEQ ID NO: 149507 - DNA, 25 bp, Probe sequence
cagacgcactagacttaggatctag

SEQ ID NO: 149508 - DNA, 25 bp, Probe sequence
cactagacttaggatctagcgcctt

SEQ ID NO: 149509 - DNA, 25 bp, Probe sequence
ctagacttaggatctagcgccttac

SEQ ID NO: 149510 - DNA, 25 bp, Probe sequence
cgcactagacttaggatctagcgcc

SEQ ID NO: 149511 - DNA, 25 bp, Probe sequence
gcagacgcactagacttaggatcta

SEQ ID NO: 149512 - DNA, 25 bp, Probe sequence
gcactagacttaggatctagcgcct

SEQ ID NO: 149513 - DNA, 25 bp, Probe sequence
gaattggcagacgcactagacttag

SEQ ID NO: 149514 - DNA, 25 bp, Probe sequence
gacttaggatctagcgccttacggc

SEQ ID NO: 149515 - DNA, 25 bp, Probe sequence
gacgcactagacttaggatctagcg

SEQ ID NO: 149516 - DNA, 25 bp, Probe sequence
tctagcgccttacggcgtgggggtt

SEQ ID NO: 149517 - DNA, 25 bp, Probe sequence
ttaggatctagcgccttacggcgtg

SEQ ID NO: 149518 - DNA, 25 bp, Probe sequence
ggcagacgcactagacttaggatct

SEQ ID NO: 149519 - DNA, 25 bp, Probe sequence
ggaattggcagacgcactagactta

SEQ ID NO: 149520 - DNA, 25 bp, Probe sequence
tggcagacgcactagacttaggatc

SEQ ID NO: 149521 - DNA, 25 bp, Probe sequence
taggatctagcgccttacggcgtgg

SEQ ID NO: 149522 - DNA, 25 bp, Probe sequence
tagacttaggatctagcgccttacg

SEQ ID NO: 149523 - DNA, 25 bp, Probe sequence
ttggcagacgcactagacttaggat

SEQ ID NO: 149524 - DNA, 25 bp, Probe sequence
gggcctagtgggagaaatcccgtgg

SEQ ID NO: 149525 - DNA, 25 bp, Probe sequence
ggcctagtgggagaaatcccgtgga

SEQ ID NO: 149526 - DNA, 25 bp, Probe sequence
atcccgtggaggttcaagtcctctc

SEQ ID NO: 149527 - DNA, 25 bp, Probe sequence
aggttgagggcctagtgggagaaat

SEQ ID NO: 149528 - DNA, 25 bp, Probe sequence
agggcctagtgggagaaatcccgtg

SEQ ID NO: 149529 - DNA, 25 bp, Probe sequence
agacgcgctaggttgagggcctagt

SEQ ID NO: 149530 - DNA, 25 bp, Probe sequence
acgcgctaggttgagggcctagtgg

SEQ ID NO: 149531 - DNA, 25 bp, Probe sequence
tcccgtggaggttcaagtcctctcg

SEQ ID NO: 149532 - DNA, 25 bp, Probe sequence
aatcccgtggaggttcaagtcctct

SEQ ID NO: 149533 - DNA, 25 bp, Probe sequence
ctagtgggagaaatcccgtggaggt

SEQ ID NO: 149534 - DNA, 25 bp, Probe sequence
cagacgcgctaggttgagggcctag

SEQ ID NO: 149535 - DNA, 25 bp, Probe sequence
cgcgctaggttgagggcctagtggg

SEQ ID NO: 149536 - DNA, 25 bp, Probe sequence
cgctaggttgagggcctagtgggag

SEQ ID NO: 149537 - DNA, 25 bp, Probe sequence
cctagtgggagaaatcccgtggagg

SEQ ID NO: 149538 - DNA, 25 bp, Probe sequence
gcctagtgggagaaatcccgtggag

SEQ ID NO: 149539 - DNA, 25 bp, Probe sequence
cccgtggaggttcaagtcctctcgg

SEQ ID NO: 149540 - DNA, 25 bp, Probe sequence
ccgtggaggttcaagtcctctcggc

SEQ ID NO: 149541 - DNA, 25 bp, Probe sequence
gcgctaggttgagggcctagtggga

SEQ ID NO: 149542 - DNA, 25 bp, Probe sequence
gctaggttgagggcctagtgggaga

SEQ ID NO: 149543 - DNA, 25 bp, Probe sequence
gcagacgcgctaggttgagggccta

SEQ ID NO: 149544 - DNA, 25 bp, Probe sequence
gaaatcccgtggaggttcaagtcct

SEQ ID NO: 149545 - DNA, 25 bp, Probe sequence
gagggcctagtgggagaaatcccgt

SEQ ID NO: 149546 - DNA, 25 bp, Probe sequence
gagaaatcccgtggaggttcaagtc

SEQ ID NO: 149547 - DNA, 25 bp, Probe sequence
gacgcgctaggttgagggcctagtg

SEQ ID NO: 149548 - DNA, 25 bp, Probe sequence
gttgagggcctagtgggagaaatcc

SEQ ID NO: 149549 - DNA, 25 bp, Probe sequence
ggagaaatcccgtggaggttcaagt

SEQ ID NO: 149550 - DNA, 25 bp, Probe sequence
gggagaaatcccgtggaggttcaag

SEQ ID NO: 149551 - DNA, 25 bp, Probe sequence
gtgggagaaatcccgtggaggttca

SEQ ID NO: 149552 - DNA, 25 bp, Probe sequence
ggttgagggcctagtgggagaaatc

SEQ ID NO: 149553 - DNA, 25 bp, Probe sequence
tgggagaaatcccgtggaggttcaa

SEQ ID NO: 149554 - DNA, 25 bp, Probe sequence
tgagggcctagtgggagaaatcccg

SEQ ID NO: 149555 - DNA, 25 bp, Probe sequence
tagtgggagaaatcccgtggaggtt

SEQ ID NO: 149556 - DNA, 25 bp, Probe sequence
ttgagggcctagtgggagaaatccc

SEQ ID NO: 149557 - DNA, 25 bp, Probe sequence
taggttgagggcctagtgggagaaa

SEQ ID NO: 149558 - DNA, 25 bp, Probe sequence
atctttaatcgatgatacaaatcca

SEQ ID NO: 149559 - DNA, 25 bp, Probe sequence
atgggtttacgtgacaaaactgtcg

SEQ ID NO: 149560 - DNA, 25 bp, Probe sequence
atcctggatatgcagtacatcctga

SEQ ID NO: 149561 - DNA, 25 bp, Probe sequence
agtaatatttccacatcctgatgat

SEQ ID NO: 149562 - DNA, 25 bp, Probe sequence
agcacatgcttctcaaacaggtcca

SEQ ID NO: 149563 - DNA, 25 bp, Probe sequence
acatatgcatgtttaaccctaggac

SEQ ID NO: 149564 - DNA, 25 bp, Probe sequence
acagctttttaacagtcgaaccata

SEQ ID NO: 149565 - DNA, 25 bp, Probe sequence
acaattagcaagtcctgaaatcgat

SEQ ID NO: 149566 - DNA, 25 bp, Probe sequence
aacaacacagctttttaacagtcga

SEQ ID NO: 149567 - DNA, 25 bp, Probe sequence
aaccttctcatctgcaggcacatta

SEQ ID NO: 149568 - DNA, 25 bp, Probe sequence
cacgaagcaacagcagacgctgtaa

SEQ ID NO: 149569 - DNA, 25 bp, Probe sequence
ctcgtttaactttagttgcgttcag

SEQ ID NO: 149570 - DNA, 25 bp, Probe sequence
catcctgatgatgaaaccttctcat

SEQ ID NO: 149571 - DNA, 25 bp, Probe sequence
cattaccaagtattcgtgagcgtga

SEQ ID NO: 149572 - DNA, 25 bp, Probe sequence
cccatttgcaacacgcgaatcatta

SEQ ID NO: 149573 - DNA, 25 bp, Probe sequence
gctgtaattcgaacggttgaacgca

SEQ ID NO: 149574 - DNA, 25 bp, Probe sequence
gcttctcaaacaggtccatttttaa

SEQ ID NO: 149575 - DNA, 25 bp, Probe sequence
gcatgtttaaccctaggacaaatgg

SEQ ID NO: 149576 - DNA, 25 bp, Probe sequence
gcagacgctgtaattcgaacggttg

SEQ ID NO: 149577 - DNA, 25 bp, Probe sequence
gcaacacgcgaatcattaccaagta

SEQ ID NO: 149578 - DNA, 25 bp, Probe sequence
gacaaaactgtcgaatttgaaccct

SEQ ID NO: 149579 - DNA, 25 bp, Probe sequence
gactgacgaaagacatgtattagta

SEQ ID NO: 149580 - DNA, 25 bp, Probe sequence
gagcgtgaactagaagaagcttgta

SEQ ID NO: 149581 - DNA, 25 bp, Probe sequence
gatacaaatccatcattgattattt

SEQ ID NO: 149582 - DNA, 25 bp, Probe sequence
gattatttcattttatcctggatat

SEQ ID NO: 149583 - DNA, 25 bp, Probe sequence
gtattcgtgagcgtgaactagaaga

SEQ ID NO: 149584 - DNA, 25 bp, Probe sequence
gtattagtaatatttccacatcctg

SEQ ID NO: 149585 - DNA, 25 bp, Probe sequence
gtcgaaccatattggacatatcact

SEQ ID NO: 149586 - DNA, 25 bp, Probe sequence
ggcagaaatttaggtaatcccccat

SEQ ID NO: 149587 - DNA, 25 bp, Probe sequence
tgcgttcagtaatgatgcaaccgaa

SEQ ID NO: 149588 - DNA, 25 bp, Probe sequence
ttctcatctgcaggcacattagcaa

SEQ ID NO: 149589 - DNA, 25 bp, Probe sequence
ttaaccctaggacaaatgggcagaa

SEQ ID NO: 149590 - DNA, 25 bp, Probe sequence
ttaaggcatttgaagcacatgcttc

SEQ ID NO: 149591 - DNA, 25 bp, Probe sequence
ttggacatatcactttaaatcttaa

SEQ ID NO: 149592 - DNA, 25 bp, Probe sequence
agaaccttatcgcattggtcttaaa

SEQ ID NO: 149593 - DNA, 25 bp, Probe sequence
actatcaaatggtggttgggtttat

SEQ ID NO: 149594 - DNA, 25 bp, Probe sequence
atagatttacttgcttcttttgaac

SEQ ID NO: 149595 - DNA, 25 bp, Probe sequence
ataaacctgtgtatctgcatgttga

SEQ ID NO: 149596 - DNA, 25 bp, Probe sequence
atcaacgtgtttttaatgctggtac

SEQ ID NO: 149597 - DNA, 25 bp, Probe sequence
atcgcattggtcttaaactatcaaa

SEQ ID NO: 149598 - DNA, 25 bp, Probe sequence
atgtacaaggtctaacgcattttga

SEQ ID NO: 149599 - DNA, 25 bp, Probe sequence
aatggggcctatgcgaaccatttcg

SEQ ID NO: 149600 - DNA, 25 bp, Probe sequence
acgacaaatggggcctatgcgaacc

SEQ ID NO: 149601 - DNA, 25 bp, Probe sequence
acctgtgtatctgcatgttgaaacg

SEQ ID NO: 149602 - DNA, 25 bp, Probe sequence
accttatcgcattggtcttaaacta

SEQ ID NO: 149603 - DNA, 25 bp, Probe sequence
actcgctgcagcacttcaaattagt

SEQ ID NO: 149604 - DNA, 25 bp, Probe sequence
acttcaaattagtgagcgaccattt

SEQ ID NO: 149605 - DNA, 25 bp, Probe sequence
catgcacaactaaaaggtggtaata

SEQ ID NO: 149606 - DNA, 25 bp, Probe sequence
gcctatgcgaaccatttcgatcaac

SEQ ID NO: 149607 - DNA, 25 bp, Probe sequence
gcgaaccatttcgatcaacgtgttt

SEQ ID NO: 149608 - DNA, 25 bp, Probe sequence
gctgcagcacttcaaattagtgagc

SEQ ID NO: 149609 - DNA, 25 bp, Probe sequence
gaaacgacaaatggggcctatgcga

SEQ ID NO: 149610 - DNA, 25 bp, Probe sequence
gaaccatttcgatcaacgtgttttt

SEQ ID NO: 149611 - DNA, 25 bp, Probe sequence
gatgaatttttaattgcaggtttta

SEQ ID NO: 149612 - DNA, 25 bp, Probe sequence
gatttacttgcttcttttgaacata

SEQ ID NO: 149613 - DNA, 25 bp, Probe sequence
gtggttgggtttatgtacaaggtct

SEQ ID NO: 149614 - DNA, 25 bp, Probe sequence
gggcctatgcgaaccatttcgatca

SEQ ID NO: 149615 - DNA, 25 bp, Probe sequence
gtgtatctgcatgttgaaacgacaa

SEQ ID NO: 149616 - DNA, 25 bp, Probe sequence
gggtttatgtacaaggtctaacgca

SEQ ID NO: 149617 - DNA, 25 bp, Probe sequence
ggtggtaataaagaaccttatcgca

SEQ ID NO: 149618 - DNA, 25 bp, Probe sequence
tggtcttaaactatcaaatggtggt

SEQ ID NO: 149619 - DNA, 25 bp, Probe sequence
tgaacataaacctgtgtatctgcat

SEQ ID NO: 149620 - DNA, 25 bp, Probe sequence
tcaactcgctgcagcacttcaaatt

SEQ ID NO: 149621 - DNA, 25 bp, Probe sequence
tagtgagcgaccatttaatttatag

SEQ ID NO: 149622 - DNA, 25 bp, Probe sequence
agttatagatttacttgcttctttt

SEQ ID NO: 149623 - DNA, 25 bp, Probe sequence
ttacttgcttcttttgaacataaac

SEQ ID NO: 149624 - DNA, 25 bp, Probe sequence
ttacgaaggtcaactcgctgcagca

SEQ ID NO: 149625 - DNA, 25 bp, Probe sequence
ttgcaggttttaattacgaaggtca

SEQ ID NO: 149626 - DNA, 25 bp, Probe sequence
attgctctctttattacaagacgat

SEQ ID NO: 149627 - DNA, 25 bp, Probe sequence
attataaccaaaacgtttcagcatg

SEQ ID NO: 149628 - DNA, 25 bp, Probe sequence
attcaaattgctctctttattacaa

SEQ ID NO: 149629 - DNA, 25 bp, Probe sequence
atattcaaattgctctctttattac

SEQ ID NO: 149630 - DNA, 25 bp, Probe sequence
atgaaggcgcaccagtttatgaaat

SEQ ID NO: 149631 - DNA, 25 bp, Probe sequence
atgtgacgattcatttagtgatact

SEQ ID NO: 149632 - DNA, 25 bp, Probe sequence
aggcgcaccagtttatgaaattata

SEQ ID NO: 149633 - DNA, 25 bp, Probe sequence
acgtttcagcatgtttcaattaaat

SEQ ID NO: 149634 - DNA, 25 bp, Probe sequence
actgaaatattcaaattgctctctt

SEQ ID NO: 149635 - DNA, 25 bp, Probe sequence
aaatattcaaattgctctctttatt

SEQ ID NO: 149636 - DNA, 25 bp, Probe sequence
aaaacgtttcagcatgtttcaatta

SEQ ID NO: 149637 - DNA, 25 bp, Probe sequence
aacgtttcagcatgtttcaattaaa

SEQ ID NO: 149638 - DNA, 25 bp, Probe sequence
aaccaaaacgtttcagcatgtttca

SEQ ID NO: 149639 - DNA, 25 bp, Probe sequence
aaggcgcaccagtttatgaaattat

SEQ ID NO: 149640 - DNA, 25 bp, Probe sequence
aattgctctctttattacaagacga

SEQ ID NO: 149641 - DNA, 25 bp, Probe sequence
caaattgctctctttattacaagac

SEQ ID NO: 149642 - DNA, 25 bp, Probe sequence
catgaaggcgcaccagtttatgaaa

SEQ ID NO: 149643 - DNA, 25 bp, Probe sequence
ccaaaacgtttcagcatgtttcaat

SEQ ID NO: 149644 - DNA, 25 bp, Probe sequence
gctctctttattacaagacgatata

SEQ ID NO: 149645 - DNA, 25 bp, Probe sequence
gcatgtttcaattaaatgtgacgat

SEQ ID NO: 149646 - DNA, 25 bp, Probe sequence
gcaccagtttatgaaattataacca

SEQ ID NO: 149647 - DNA, 25 bp, Probe sequence
gaaggcgcaccagtttatgaaatta

SEQ ID NO: 149648 - DNA, 25 bp, Probe sequence
gaaatattcaaattgctctctttat

SEQ ID NO: 149649 - DNA, 25 bp, Probe sequence
gacgattcatttagtgatactgaaa

SEQ ID NO: 149650 - DNA, 25 bp, Probe sequence
gattcatttagtgatactgaaatat

SEQ ID NO: 149651 - DNA, 25 bp, Probe sequence
gtttcagcatgtttcaattaaatgt

SEQ ID NO: 149652 - DNA, 25 bp, Probe sequence
gtgacgattcatttagtgatactga

SEQ ID NO: 149653 - DNA, 25 bp, Probe sequence
tgtttcaattaaatgtgacgattca

SEQ ID NO: 149654 - DNA, 25 bp, Probe sequence
taaccaaaacgtttcagcatgtttc

SEQ ID NO: 149655 - DNA, 25 bp, Probe sequence
tacaagacgatatagatcatatgaa

SEQ ID NO: 149656 - DNA, 25 bp, Probe sequence
tataaccaaaacgtttcagcatgtt

SEQ ID NO: 149657 - DNA, 25 bp, Probe sequence
tattcaaattgctctctttattaca

SEQ ID NO: 149658 - DNA, 25 bp, Probe sequence
ttcaaattgctctctttattacaag

SEQ ID NO: 149659 - DNA, 25 bp, Probe sequence
ttgctctctttattacaagacgata

SEQ ID NO: 149660 - DNA, 25 bp, Probe sequence
attttgtagtagatcctgtcatggt

SEQ ID NO: 149661 - DNA, 25 bp, Probe sequence
atggtcaaacattttatcaactaac

SEQ ID NO: 149662 - DNA, 25 bp, Probe sequence
aggtggcaaagctttagatcaagat

SEQ ID NO: 149663 - DNA, 25 bp, Probe sequence
acaactgcatatttagctaacggta

SEQ ID NO: 149664 - DNA, 25 bp, Probe sequence
acaaccgtattgaacatatcgatgt

SEQ ID NO: 149665 - DNA, 25 bp, Probe sequence
aaaggcgcacagcatgtcatcatta

SEQ ID NO: 149666 - DNA, 25 bp, Probe sequence
aacgtgctggagaagtatatgaggc

SEQ ID NO: 149667 - DNA, 25 bp, Probe sequence
aaggctgcaacaattatctttgata

SEQ ID NO: 149668 - DNA, 25 bp, Probe sequence
caatcggacctgatgctattaaaac

SEQ ID NO: 149669 - DNA, 25 bp, Probe sequence
caacaaagttataaccatggtgctg

SEQ ID NO: 149670 - DNA, 25 bp, Probe sequence
ctttcgtcgcttctgctattaaaaa

SEQ ID NO: 149671 - DNA, 25 bp, Probe sequence
cctggaaatactgaggcgatgatta

SEQ ID NO: 149672 - DNA, 25 bp, Probe sequence
gctggcgcaggtatgcaagcagatt

SEQ ID NO: 149673 - DNA, 25 bp, Probe sequence
gcatgtcatcattaaaggtggcaaa

SEQ ID NO: 149674 - DNA, 25 bp, Probe sequence
gcatggtcgctttaactgccatcgt

SEQ ID NO: 149675 - DNA, 25 bp, Probe sequence
gcaagcagatttgaaaacgttccaa

SEQ ID NO: 149676 - DNA, 25 bp, Probe sequence
gaagcgggtcaattatcaggattag

SEQ ID NO: 149677 - DNA, 25 bp, Probe sequence
gaaacggctttatcaatcggacctg

SEQ ID NO: 149678 - DNA, 25 bp, Probe sequence
gaaagaagctgtgattagcgcgaaa

SEQ ID NO: 149679 - DNA, 25 bp, Probe sequence
gaggagataatcaaacgtgctggag

SEQ ID NO: 149680 - DNA, 25 bp, Probe sequence
gttttaacaattgccggttctgaca

SEQ ID NO: 149681 - DNA, 25 bp, Probe sequence
gtagatcctgtcatggtttgtaaag

SEQ ID NO: 149682 - DNA, 25 bp, Probe sequence
gtcgcttctgctattaaaaacggtt

SEQ ID NO: 149683 - DNA, 25 bp, Probe sequence
ggtcctgtggatcacggtgcataca

SEQ ID NO: 149684 - DNA, 25 bp, Probe sequence
ggtgctggttgtacatttgctgcgg

SEQ ID NO: 149685 - DNA, 25 bp, Probe sequence
ggttctgacacaagtgctggcgcag

SEQ ID NO: 149686 - DNA, 25 bp, Probe sequence
ggataaagatacatggtcacacgat

SEQ ID NO: 149687 - DNA, 25 bp, Probe sequence
ggatcacggtgcatacaaccgtatt

SEQ ID NO: 149688 - DNA, 25 bp, Probe sequence
ggcatctaatgcacaatattttgta

SEQ ID NO: 149689 - DNA, 25 bp, Probe sequence
tgaatgattttgttggtcctgtgga

SEQ ID NO: 149690 - DNA, 25 bp, Probe sequence
tagcgcgaaagctttcgtcgcttct

SEQ ID NO: 149691 - DNA, 25 bp, Probe sequence
tagatacgtatggcatggtcgcttt

SEQ ID NO: 149692 - DNA, 25 bp, Probe sequence
tttgctgcggcaacaactgcatatt

SEQ ID NO: 149693 - DNA, 25 bp, Probe sequence
ttaactgccatcgttactatggata

SEQ ID NO: 149694 - DNA, 25 bp, Probe sequence
attgtacctaaataaaccagattca

SEQ ID NO: 149695 - DNA, 25 bp, Probe sequence
atttaactggacgtcatactatgag

SEQ ID NO: 149696 - DNA, 25 bp, Probe sequence
atattaataattcgaacacttcttt

SEQ ID NO: 149697 - DNA, 25 bp, Probe sequence
atactatttttattgctaactgggc

SEQ ID NO: 149698 - DNA, 25 bp, Probe sequence
aggtacaattgaaggcttaggccct

SEQ ID NO: 149699 - DNA, 25 bp, Probe sequence
agcactctaaatcattgcatttgca

SEQ ID NO: 149700 - DNA, 25 bp, Probe sequence
acatagatgatacacacaacgcttc

SEQ ID NO: 149701 - DNA, 25 bp, Probe sequence
aaaacggtccaaagcgcgatgaata

SEQ ID NO: 149702 - DNA, 25 bp, Probe sequence
aacagagaacattcaggtacaattg

SEQ ID NO: 149703 - DNA, 25 bp, Probe sequence
aacatggtattctaatagacatcta

SEQ ID NO: 149704 - DNA, 25 bp, Probe sequence
aactctattaaaatcatcagcaggt

SEQ ID NO: 149705 - DNA, 25 bp, Probe sequence
aatgtcattgaatctcataacagag

SEQ ID NO: 149706 - DNA, 25 bp, Probe sequence
aattcacctatgtatacaccttctt

SEQ ID NO: 149707 - DNA, 25 bp, Probe sequence
caacgcttcattaccagcaatgatt

SEQ ID NO: 149708 - DNA, 25 bp, Probe sequence
catcagcaggtggtacagaatttcc

SEQ ID NO: 149709 - DNA, 25 bp, Probe sequence
gcgattgggcaaattagtgacttag

SEQ ID NO: 149710 - DNA, 25 bp, Probe sequence
gctaactgggcaacaaataacaaac

SEQ ID NO: 149711 - DNA, 25 bp, Probe sequence
gcttaggccctatctttaattattt

SEQ ID NO: 149712 - DNA, 25 bp, Probe sequence
gcatttgcaattagttgatgttcta

SEQ ID NO: 149713 - DNA, 25 bp, Probe sequence
gaacgacaaaacttcactgttgacg

SEQ ID NO: 149714 - DNA, 25 bp, Probe sequence
gaacggtcgcagttatatgattatt

SEQ ID NO: 149715 - DNA, 25 bp, Probe sequence
gaacacttctttatttgatggtcaa

SEQ ID NO: 149716 - DNA, 25 bp, Probe sequence
gaaagccatgcttaattcacctatg

SEQ ID NO: 149717 - DNA, 25 bp, Probe sequence
gaaacgacaacttacgaattgatga

SEQ ID NO: 149718 - DNA, 25 bp, Probe sequence
gatggtcaatccttgaacggtcgca

SEQ ID NO: 149719 - DNA, 25 bp, Probe sequence
gatgctttaaagagtgtcgttacag

SEQ ID NO: 149720 - DNA, 25 bp, Probe sequence
gtatacaccttcttatgaattatct

SEQ ID NO: 149721 - DNA, 25 bp, Probe sequence
gtcaatccttgaacggtcgcagtta

SEQ ID NO: 149722 - DNA, 25 bp, Probe sequence
gtgacttaggtaagcactctaaatc

SEQ ID NO: 149723 - DNA, 25 bp, Probe sequence
taagtctttcaaattctgtagcaat

SEQ ID NO: 149724 - DNA, 25 bp, Probe sequence
taaaccagattcattaactctatta

SEQ ID NO: 149725 - DNA, 25 bp, Probe sequence
tacacacaacgcttcattaccagca

SEQ ID NO: 149726 - DNA, 25 bp, Probe sequence
tattctatgtatggatgatgcttta

SEQ ID NO: 149727 - DNA, 25 bp, Probe sequence
ttcactgttgacgacttatttaaaa

SEQ ID NO: 149728 - DNA, 25 bp, Probe sequence
atatggctgatacacaaacgttaat

SEQ ID NO: 149729 - DNA, 25 bp, Probe sequence
atcaggttctggagcgaatgccaac

SEQ ID NO: 149730 - DNA, 25 bp, Probe sequence
atgagtgcttactatccaaaacaag

SEQ ID NO: 149731 - DNA, 25 bp, Probe sequence
atgggcgtttgcagtatgtgatacc

SEQ ID NO: 149732 - DNA, 25 bp, Probe sequence
agtgcaacacaagctgttacagctg

SEQ ID NO: 149733 - DNA, 25 bp, Probe sequence
aagtggaacttatccaggtggcgtt

SEQ ID NO: 149734 - DNA, 25 bp, Probe sequence
actcagacggcaacggtggcggtat

SEQ ID NO: 149735 - DNA, 25 bp, Probe sequence
acgatcaatcacaaacggcagactt

SEQ ID NO: 149736 - DNA, 25 bp, Probe sequence
acggcagacttgagcaacagtggac

SEQ ID NO: 149737 - DNA, 25 bp, Probe sequence
actgcgacgcaaactagtgcaacac

SEQ ID NO: 149738 - DNA, 25 bp, Probe sequence
aacaagctatttaacttcacacctt

SEQ ID NO: 149739 - DNA, 25 bp, Probe sequence
aacagacccttatctataagttctg

SEQ ID NO: 149740 - DNA, 25 bp, Probe sequence
aactgctggtaattactatgcaaca

SEQ ID NO: 149741 - DNA, 25 bp, Probe sequence
aagatactatcgaagctgtcggtaa

SEQ ID NO: 149742 - DNA, 25 bp, Probe sequence
caatcaatctaactgaaccgtacac

SEQ ID NO: 149743 - DNA, 25 bp, Probe sequence
caacggtattgttcgacggtggcgc

SEQ ID NO: 149744 - DNA, 25 bp, Probe sequence
caacgagctggcaacaacataagat

SEQ ID NO: 149745 - DNA, 25 bp, Probe sequence
cgacggtggcgcaaatggtgtaggt

SEQ ID NO: 149746 - DNA, 25 bp, Probe sequence
ccgcattacctaacgcgattcaatt

SEQ ID NO: 149747 - DNA, 25 bp, Probe sequence
gctatacaagctattactgcgacgc

SEQ ID NO: 149748 - DNA, 25 bp, Probe sequence
gcaacagatgcgccagaaaagacgg

SEQ ID NO: 149749 - DNA, 25 bp, Probe sequence
gcaattgaatcgtatgagcagtcca

SEQ ID NO: 149750 - DNA, 25 bp, Probe sequence
gaaccgtacacaaactattctattt

SEQ ID NO: 149751 - DNA, 25 bp, Probe sequence
gagcaacagtggacagttcctaatg

SEQ ID NO: 149752 - DNA, 25 bp, Probe sequence
gagtgccggatttaccaggtagcgt

SEQ ID NO: 149753 - DNA, 25 bp, Probe sequence
gaggcgcttatatttcagacgaatt

SEQ ID NO: 149754 - DNA, 25 bp, Probe sequence
gtggcggtatttatgagtgcttact

SEQ ID NO: 149755 - DNA, 25 bp, Probe sequence
ggtggcgttattgagggattcggac

SEQ ID NO: 149756 - DNA, 25 bp, Probe sequence
gggattcggactaaccgcattacct

SEQ ID NO: 149757 - DNA, 25 bp, Probe sequence
ggcgatttgggatatttaactgctg

SEQ ID NO: 149758 - DNA, 25 bp, Probe sequence
tgagggttatttatcggtattcgtt

SEQ ID NO: 149759 - DNA, 25 bp, Probe sequence
tgctcaggcattctttacacaaaac

SEQ ID NO: 149760 - DNA, 25 bp, Probe sequence
tttaacttcacaccttataactcta

SEQ ID NO: 149761 - DNA, 25 bp, Probe sequence
ttcaggcaaggtgcatgctcaggca

SEQ ID NO: 149762 - DNA, 25 bp, Probe sequence
attcacgcaattagcaccactgttt

SEQ ID NO: 149763 - DNA, 25 bp, Probe sequence
atctactgcgttacaagcggcatgg

SEQ ID NO: 149764 - DNA, 25 bp, Probe sequence
atggacagctatttggacgttctta

SEQ ID NO: 149765 - DNA, 25 bp, Probe sequence
atggcactttacaagctagctcagc

SEQ ID NO: 149766 - DNA, 25 bp, Probe sequence
atggctcctatagctagtgcagtat

SEQ ID NO: 149767 - DNA, 25 bp, Probe sequence
agagcgctaggtattcactcacctt

SEQ ID NO: 149768 - DNA, 25 bp, Probe sequence
agctaacttgtttgaggcgcatcca

SEQ ID NO: 149769 - DNA, 25 bp, Probe sequence
agcgtttggcgcaatggctatcagc

SEQ ID NO: 149770 - DNA, 25 bp, Probe sequence
aacgcacctgacatttctagtatta

SEQ ID NO: 149771 - DNA, 25 bp, Probe sequence
caaaatcaatccgctatcttcacaa

SEQ ID NO: 149772 - DNA, 25 bp, Probe sequence
ccgtgtgttcggtactgtaggttct

SEQ ID NO: 149773 - DNA, 25 bp, Probe sequence
gcgcatccagctacagcacaattag

SEQ ID NO: 149774 - DNA, 25 bp, Probe sequence
gcattcagcggatcatcaactggca

SEQ ID NO: 149775 - DNA, 25 bp, Probe sequence
gctatcttcacaactcttgcaaatg

SEQ ID NO: 149776 - DNA, 25 bp, Probe sequence
gcattcgcaacagcaatggctccta

SEQ ID NO: 149777 - DNA, 25 bp, Probe sequence
gcagtattacgcgttgcagttgcaa

SEQ ID NO: 149778 - DNA, 25 bp, Probe sequence
gcaccactgtttcaatggtcggctg

SEQ ID NO: 149779 - DNA, 25 bp, Probe sequence
gcaatgcagagcttacaaccgtttt

SEQ ID NO: 149780 - DNA, 25 bp, Probe sequence
gcaagtacaacacacacattctatt

SEQ ID NO: 149781 - DNA, 25 bp, Probe sequence
gaacgctatcactacagctatatct

SEQ ID NO: 149782 - DNA, 25 bp, Probe sequence
gatacagggctttctataccaacta

SEQ ID NO: 149783 - DNA, 25 bp, Probe sequence
gtagtacctgtagtatttgcgctat

SEQ ID NO: 149784 - DNA, 25 bp, Probe sequence
gtctcaagcttggaacttcattgtc

SEQ ID NO: 149785 - DNA, 25 bp, Probe sequence
gtgctgcaggtggttttggtgacgg

SEQ ID NO: 149786 - DNA, 25 bp, Probe sequence
gtgtacttgctttaggtggtgccgt

SEQ ID NO: 149787 - DNA, 25 bp, Probe sequence
gggagcaggatttgtagcgtttggc

SEQ ID NO: 149788 - DNA, 25 bp, Probe sequence
ggtgctgatatgatccgtggtttga

SEQ ID NO: 149789 - DNA, 25 bp, Probe sequence
ggatgactttgtatcagcaggtgct

SEQ ID NO: 149790 - DNA, 25 bp, Probe sequence
tcactcaccttcacgtgaattcatg

SEQ ID NO: 149791 - DNA, 25 bp, Probe sequence
tcaactggcatattccaatctcttg

SEQ ID NO: 149792 - DNA, 25 bp, Probe sequence
tcaatctttctctaactgggctaat

SEQ ID NO: 149793 - DNA, 25 bp, Probe sequence
taccgattattcttgctgtatctaa

SEQ ID NO: 149794 - DNA, 25 bp, Probe sequence
tttcaacctacattaaacgcacctg

SEQ ID NO: 149795 - DNA, 25 bp, Probe sequence
ttagctaatatgttccgtgtgttcg

SEQ ID NO: 149796 - DNA, 25 bp, Probe sequence
atcggtgctggcgttggtagcgtat

SEQ ID NO: 149797 - DNA, 25 bp, Probe sequence
atcgccgttattggacatacactta

SEQ ID NO: 149798 - DNA, 25 bp, Probe sequence
atgttgatgttcacaacgaaatcat

SEQ ID NO: 149799 - DNA, 25 bp, Probe sequence
aggtagtctaggatacctagtcact

SEQ ID NO: 149800 - DNA, 25 bp, Probe sequence
agtcatgcctattgttcctggtgta

SEQ ID NO: 149801 - DNA, 25 bp, Probe sequence
agctttgttacaaacactgtcatcc

SEQ ID NO: 149802 - DNA, 25 bp, Probe sequence
aaggtggtagattgattgatgtttt

SEQ ID NO: 149803 - DNA, 25 bp, Probe sequence
caagctaataaaatttcgcgtcaaa

SEQ ID NO: 149804 - DNA, 25 bp, Probe sequence
caaacactgtcatccagtttacgtt

SEQ ID NO: 149805 - DNA, 25 bp, Probe sequence
gcgatattagcaggtagtctaggat

SEQ ID NO: 149806 - DNA, 25 bp, Probe sequence
gctcgcatactattagaatctggtg

SEQ ID NO: 149807 - DNA, 25 bp, Probe sequence
gcacagtttatcccagaattcattg

SEQ ID NO: 149808 - DNA, 25 bp, Probe sequence
gcaatgattgcaatgagtttcttat

SEQ ID NO: 149809 - DNA, 25 bp, Probe sequence
gaatatttagaattacctctcgaga

SEQ ID NO: 149810 - DNA, 25 bp, Probe sequence
gaagataccatgacacgtattgcaa

SEQ ID NO: 149811 - DNA, 25 bp, Probe sequence
gaagcattggttactgcgtttggca

SEQ ID NO: 149812 - DNA, 25 bp, Probe sequence
gagtttcttatatttacaaggtggt

SEQ ID NO: 149813 - DNA, 25 bp, Probe sequence
gattgatgttttaactgcgatatta

SEQ ID NO: 149814 - DNA, 25 bp, Probe sequence
gttacattcggaatcgtttcctaga

SEQ ID NO: 149815 - DNA, 25 bp, Probe sequence
gtacgcgtgtagaagataccatgac

SEQ ID NO: 149816 - DNA, 25 bp, Probe sequence
gtcatccagtttacgttacattcgg

SEQ ID NO: 149817 - DNA, 25 bp, Probe sequence
gggattatcgccgttattggacata

SEQ ID NO: 149818 - DNA, 25 bp, Probe sequence
ggttcattagttattgggattatcg

SEQ ID NO: 149819 - DNA, 25 bp, Probe sequence
ggttttgctgcagcaatgattgcaa

SEQ ID NO: 149820 - DNA, 25 bp, Probe sequence
ggaatcgtttcctagaatatttaga

SEQ ID NO: 149821 - DNA, 25 bp, Probe sequence
ggcgttggtagcgtattaattttag

SEQ ID NO: 149822 - DNA, 25 bp, Probe sequence
tggttactgcgtttggcatcggtgc

SEQ ID NO: 149823 - DNA, 25 bp, Probe sequence
tgacagcagtcttccctttaaaggt

SEQ ID NO: 149824 - DNA, 25 bp, Probe sequence
tgcttgctgctcgcatactattaga

SEQ ID NO: 149825 - DNA, 25 bp, Probe sequence
tcccagaattcattggttcattagt

SEQ ID NO: 149826 - DNA, 25 bp, Probe sequence
tccctttaaaggttttgctgcagca

SEQ ID NO: 149827 - DNA, 25 bp, Probe sequence
tgcctattgttcctggtgtattaat

SEQ ID NO: 149828 - DNA, 25 bp, Probe sequence
tctggtgcagaaggtacgcgtgtag

SEQ ID NO: 149829 - DNA, 25 bp, Probe sequence
tacctctcgagatacaaacttaata

SEQ ID NO: 149830 - DNA, 25 bp, Probe sequence
atacttgaacgtcgtgtagcccacg

SEQ ID NO: 149831 - DNA, 25 bp, Probe sequence
ataactttcacgccagagcaacaaa

SEQ ID NO: 149832 - DNA, 25 bp, Probe sequence
atcagatgatccggacgaaccaggc

SEQ ID NO: 149833 - DNA, 25 bp, Probe sequence
cagatgatccggacgaaccaggcgg

SEQ ID NO: 149834 - DNA, 25 bp, Probe sequence
actttcacgccagagcaacaaaaga

SEQ ID NO: 149835 - DNA, 25 bp, Probe sequence
acttgaacgtcgtgtagcccacgaa

SEQ ID NO: 149836 - DNA, 25 bp, Probe sequence
aaaagctgatgagtatgcaaaagaa

SEQ ID NO: 149837 - DNA, 25 bp, Probe sequence
aagaagctgctaaattagcgaaaat

SEQ ID NO: 149838 - DNA, 25 bp, Probe sequence
ccggacgaaccaggcggagatggta

SEQ ID NO: 149839 - DNA, 25 bp, Probe sequence
aatacttgaacgtcgtgtagcccac

SEQ ID NO: 149840 - DNA, 25 bp, Probe sequence
aataactttcacgccagagcaacaa

SEQ ID NO: 149841 - DNA, 25 bp, Probe sequence
gcccacgaaaagaaaaaagctgatg

SEQ ID NO: 149842 - DNA, 25 bp, Probe sequence
ccaatcagatgatccggacgaacca

SEQ ID NO: 149843 - DNA, 25 bp, Probe sequence
gcagaccaatcagatgatccggacg

SEQ ID NO: 149844 - DNA, 25 bp, Probe sequence
gcaattttttgcagaccaatcagat

SEQ ID NO: 149845 - DNA, 25 bp, Probe sequence
gaacgtcgtgtagcccacgaaaaga

SEQ ID NO: 149846 - DNA, 25 bp, Probe sequence
gaaagaaaatgacgaaggtactgaa

SEQ ID NO: 149847 - DNA, 25 bp, Probe sequence
gaaatacttgaacgtcgtgtagccc

SEQ ID NO: 149848 - DNA, 25 bp, Probe sequence
gaaataactttcacgccagagcaac

SEQ ID NO: 149849 - DNA, 25 bp, Probe sequence
gacgaaccaggcggagatggtaaaa

SEQ ID NO: 149850 - DNA, 25 bp, Probe sequence
gatccggacgaaccaggcggagatg

SEQ ID NO: 149851 - DNA, 25 bp, Probe sequence
gaccaatcagatgatccggacgaac

SEQ ID NO: 149852 - DNA, 25 bp, Probe sequence
gatgatccggacgaaccaggcggag

SEQ ID NO: 149853 - DNA, 25 bp, Probe sequence
gatgaaatacttgaacgtcgtgtag

SEQ ID NO: 149854 - DNA, 25 bp, Probe sequence
gttgtcaatttagttgtaacagata

SEQ ID NO: 149855 - DNA, 25 bp, Probe sequence
gtaacagatactgctgaacaaacta

SEQ ID NO: 149856 - DNA, 25 bp, Probe sequence
ggtactgaaataactttcacgccag

SEQ ID NO: 149857 - DNA, 25 bp, Probe sequence
tcacgccagagcaacaaaagaaagt

SEQ ID NO: 149858 - DNA, 25 bp, Probe sequence
tcagatgatccggacgaaccaggcg

SEQ ID NO: 149859 - DNA, 25 bp, Probe sequence
taactttcacgccagagcaacaaaa

SEQ ID NO: 149860 - DNA, 25 bp, Probe sequence
taaattgaatgttgaagctttttct

SEQ ID NO: 149861 - DNA, 25 bp, Probe sequence
tagttgtaacagatactgctgaaca

SEQ ID NO: 149862 - DNA, 25 bp, Probe sequence
ttgaacgtcgtgtagcccacgaaaa

SEQ ID NO: 149863 - DNA, 25 bp, Probe sequence
ttttgcagaccaatcagatgatccg

SEQ ID NO: 149864 - DNA, 25 bp, Probe sequence
attcggtagtttctttgtaggacat

SEQ ID NO: 149865 - DNA, 25 bp, Probe sequence
atgcgctttgatgaaacaacagcac

SEQ ID NO: 149866 - DNA, 25 bp, Probe sequence
atgagtcaagcagccgaaacattag

SEQ ID NO: 149867 - DNA, 25 bp, Probe sequence
agattatacccagaattaccacatt

SEQ ID NO: 149868 - DNA, 25 bp, Probe sequence
acagcaactgtaagatcatcaaaat

SEQ ID NO: 149869 - DNA, 25 bp, Probe sequence
aacaatttattactggttctgtagg

SEQ ID NO: 149870 - DNA, 25 bp, Probe sequence
aacgtcgtaatgaaacttataactg

SEQ ID NO: 149871 - DNA, 25 bp, Probe sequence
aactggtacatgttaactatggaag

SEQ ID NO: 149872 - DNA, 25 bp, Probe sequence
aacgcgatgcacttgtcactgaatt

SEQ ID NO: 149873 - DNA, 25 bp, Probe sequence
aatggggcgtaacattgttctcaga

SEQ ID NO: 149874 - DNA, 25 bp, Probe sequence
aatctggtgatcaagctatttataa

SEQ ID NO: 149875 - DNA, 25 bp, Probe sequence
aatatgctggcaaaatcaaacaatt

SEQ ID NO: 149876 - DNA, 25 bp, Probe sequence
aattaccacattctgattatatttg

SEQ ID NO: 149877 - DNA, 25 bp, Probe sequence
aattgtatacgaaatgcgctttgat

SEQ ID NO: 149878 - DNA, 25 bp, Probe sequence
catattcatatgtatcagtcattga

SEQ ID NO: 149879 - DNA, 25 bp, Probe sequence
gcagccgaaacattagatggttggt

SEQ ID NO: 149880 - DNA, 25 bp, Probe sequence
gcacgatacggtgaattcggtagtt

SEQ ID NO: 149881 - DNA, 25 bp, Probe sequence
gaattgagcaattatttagctggta

SEQ ID NO: 149882 - DNA, 25 bp, Probe sequence
gaacgccaaaaattaatgtatgacc

SEQ ID NO: 149883 - DNA, 25 bp, Probe sequence
gagaaccctcatatcaaagcaagat

SEQ ID NO: 149884 - DNA, 25 bp, Probe sequence
gatggttggtatagtctacatttat

SEQ ID NO: 149885 - DNA, 25 bp, Probe sequence
gatgaaacaacagcacgatacggtg

SEQ ID NO: 149886 - DNA, 25 bp, Probe sequence
gatgaagatccttatgagaaccctc

SEQ ID NO: 149887 - DNA, 25 bp, Probe sequence
gatttgttattatggttcttacgtc

SEQ ID NO: 149888 - DNA, 25 bp, Probe sequence
gattatatttgtttctatccaatga

SEQ ID NO: 149889 - DNA, 25 bp, Probe sequence
gttattatggttcttacgtcctgaa

SEQ ID NO: 149890 - DNA, 25 bp, Probe sequence
gtatgaccatggtatgattggtaga

SEQ ID NO: 149891 - DNA, 25 bp, Probe sequence
gtctacatttattttatgcagttga

SEQ ID NO: 149892 - DNA, 25 bp, Probe sequence
tgcacttgtcactgaatttcaatca

SEQ ID NO: 149893 - DNA, 25 bp, Probe sequence
tgcagttgattgggcatcattacgt

SEQ ID NO: 149894 - DNA, 25 bp, Probe sequence
tccaaaggacgaacgcgatgcactt

SEQ ID NO: 149895 - DNA, 25 bp, Probe sequence
tctatccaatgaacaaacgtcgtaa

SEQ ID NO: 149896 - DNA, 25 bp, Probe sequence
ttacgtcctgaaatgaagtctttaa

SEQ ID NO: 149897 - DNA, 25 bp, Probe sequence
ttgatgatttcgaatggggcgtaac

SEQ ID NO: 149898 - DNA, 25 bp, Probe sequence
cgataaattaacatggggtgtttag

SEQ ID NO: 149899 - DNA, 25 bp, Probe sequence
atatgaatatgacagtgagttaatg

SEQ ID NO: 149900 - DNA, 25 bp, Probe sequence
atgtcagctgatgaagatggcgata

SEQ ID NO: 149901 - DNA, 25 bp, Probe sequence
agtgagttaatgtcagctgatgaag

SEQ ID NO: 149902 - DNA, 25 bp, Probe sequence
agtagtagctagtaatgaaatatca

SEQ ID NO: 149903 - DNA, 25 bp, Probe sequence
agctgatgaagatggcgataataga

SEQ ID NO: 149904 - DNA, 25 bp, Probe sequence
acggtaacgattgatgtagatgaaa

SEQ ID NO: 149905 - DNA, 25 bp, Probe sequence
acagtgagttaatgtcagctgatga

SEQ ID NO: 149906 - DNA, 25 bp, Probe sequence
aaaacaagctatacaaattatcgat

SEQ ID NO: 149907 - DNA, 25 bp, Probe sequence
aacaagctatacaaattatcgataa

SEQ ID NO: 149908 - DNA, 25 bp, Probe sequence
aacttattagtagtagctagtaatg

SEQ ID NO: 149909 - DNA, 25 bp, Probe sequence
aacgattgatgtagatgaaaactta

SEQ ID NO: 149910 - DNA, 25 bp, Probe sequence
aacggtaacgattgatgtagatgaa

SEQ ID NO: 149911 - DNA, 25 bp, Probe sequence
aatgtcagctgatgaagatggcgat

SEQ ID NO: 149912 - DNA, 25 bp, Probe sequence
caagctatacaaattatcgataaat

SEQ ID NO: 149913 - DNA, 25 bp, Probe sequence
cagctgatgaagatggcgataatag

SEQ ID NO: 149914 - DNA, 25 bp, Probe sequence
cagtgagttaatgtcagctgatgaa

SEQ ID NO: 149915 - DNA, 25 bp, Probe sequence
gctgatgaagatggcgataatagag

SEQ ID NO: 149916 - DNA, 25 bp, Probe sequence
gaaaacttattagtagtagctagta

SEQ ID NO: 149917 - DNA, 25 bp, Probe sequence
gaaatatcagaactattatatgaat

SEQ ID NO: 149918 - DNA, 25 bp, Probe sequence
gacagtgagttaatgtcagctgatg

SEQ ID NO: 149919 - DNA, 25 bp, Probe sequence
gacgcattaaaacaagctatacaaa

SEQ ID NO: 149920 - DNA, 25 bp, Probe sequence
gagttaatgtcagctgatgaagatg

SEQ ID NO: 149921 - DNA, 25 bp, Probe sequence
gatgaagatggcgataatagagata

SEQ ID NO: 149922 - DNA, 25 bp, Probe sequence
gattgatgtagatgaaaacttatta

SEQ ID NO: 149923 - DNA, 25 bp, Probe sequence
gttaatgtcagctgatgaagatggc

SEQ ID NO: 149924 - DNA, 25 bp, Probe sequence
gtagctagtaatgaaatatcagaac

SEQ ID NO: 149925 - DNA, 25 bp, Probe sequence
gtcagctgatgaagatggcgataat

SEQ ID NO: 149926 - DNA, 25 bp, Probe sequence
gtgagttaatgtcagctgatgaaga

SEQ ID NO: 149927 - DNA, 25 bp, Probe sequence
ggtaacgattgatgtagatgaaaac

SEQ ID NO: 149928 - DNA, 25 bp, Probe sequence
tgtcagctgatgaagatggcgataa

SEQ ID NO: 149929 - DNA, 25 bp, Probe sequence
tcagctgatgaagatggcgataata

SEQ ID NO: 149930 - DNA, 25 bp, Probe sequence
taatgtcagctgatgaagatggcga

SEQ ID NO: 149931 - DNA, 25 bp, Probe sequence
ttatcgataaattaacatggggtgt

SEQ ID NO: 149932 - DNA, 25 bp, Probe sequence
agcaatcttagacaaacctattatc

SEQ ID NO: 149933 - DNA, 25 bp, Probe sequence
actttcatttattgccctaacgttg

SEQ ID NO: 149934 - DNA, 25 bp, Probe sequence
acaccattcaaaacagcttgtatgt

SEQ ID NO: 149935 - DNA, 25 bp, Probe sequence
aaagtggatttatatggtgtttatt

SEQ ID NO: 149936 - DNA, 25 bp, Probe sequence
aacaacatttatactactttcattt

SEQ ID NO: 149937 - DNA, 25 bp, Probe sequence
aagtccatttgtaaattgtagcgag

SEQ ID NO: 149938 - DNA, 25 bp, Probe sequence
aatgatttattagtagaccttggtt

SEQ ID NO: 149939 - DNA, 25 bp, Probe sequence
aatttatataacacagatgcattta

SEQ ID NO: 149940 - DNA, 25 bp, Probe sequence
ctcaaggacaatatccagatacaca

SEQ ID NO: 149941 - DNA, 25 bp, Probe sequence
cccttcttctggtgattcggttggt

SEQ ID NO: 149942 - DNA, 25 bp, Probe sequence
cctaacgttgataacaagtccattt

SEQ ID NO: 149943 - DNA, 25 bp, Probe sequence
gaattgcagggaactgctttaagca

SEQ ID NO: 149944 - DNA, 25 bp, Probe sequence
gaccttggttcaaaagacaccgcca

SEQ ID NO: 149945 - DNA, 25 bp, Probe sequence
gacaccgccaatatatacaaaggga

SEQ ID NO: 149946 - DNA, 25 bp, Probe sequence
gaccttcagtcaagacattatttac

SEQ ID NO: 149947 - DNA, 25 bp, Probe sequence
gatcaatttttaaagaacactatat

SEQ ID NO: 149948 - DNA, 25 bp, Probe sequence
gatttttttacaggtcatcaatggt

SEQ ID NO: 149949 - DNA, 25 bp, Probe sequence
gttcaggagctagaccttcagtcaa

SEQ ID NO: 149950 - DNA, 25 bp, Probe sequence
gtttcacccttcttctggtgattcg

SEQ ID NO: 149951 - DNA, 25 bp, Probe sequence
gtaccgattaacttatggatagatg

SEQ ID NO: 149952 - DNA, 25 bp, Probe sequence
gtaactgttcaggagctagaccttc

SEQ ID NO: 149953 - DNA, 25 bp, Probe sequence
gggggtacaccattcaaaacagctt

SEQ ID NO: 149954 - DNA, 25 bp, Probe sequence
ggattaattgagtttcacccttctt

SEQ ID NO: 149955 - DNA, 25 bp, Probe sequence
ggttggttatgatttatttggtgct

SEQ ID NO: 149956 - DNA, 25 bp, Probe sequence
ggagctagaccttcagtcaagacat

SEQ ID NO: 149957 - DNA, 25 bp, Probe sequence
tgagtttcacccttcttctggtgat

SEQ ID NO: 149958 - DNA, 25 bp, Probe sequence
tccagatacacagttgaggatatat

SEQ ID NO: 149959 - DNA, 25 bp, Probe sequence
tcttctggtgattcggttggttatg

SEQ ID NO: 149960 - DNA, 25 bp, Probe sequence
tcaaaagacaccgccaatatataca

SEQ ID NO: 149961 - DNA, 25 bp, Probe sequence
tactactttcatttattgccctaac

SEQ ID NO: 149962 - DNA, 25 bp, Probe sequence
tagacaaacctattatcataatgga

SEQ ID NO: 149963 - DNA, 25 bp, Probe sequence
tatggttatcaatgtactgggggta

SEQ ID NO: 149964 - DNA, 25 bp, Probe sequence
tatatggtgtttattatggttatca

SEQ ID NO: 149965 - DNA, 25 bp, Probe sequence
ttaattgagtttcacccttcttctg

SEQ ID NO: 149966 - DNA, 25 bp, Probe sequence
atatctatctagagcaccgttgaaa

SEQ ID NO: 149967 - DNA, 25 bp, Probe sequence
atctagagcaccgttgaaaaacgga

SEQ ID NO: 149968 - DNA, 25 bp, Probe sequence
atctatctagagcaccgttgaaaaa

SEQ ID NO: 149969 - DNA, 25 bp, Probe sequence
agagcaccgttgaaaaacggacacg

SEQ ID NO: 149970 - DNA, 25 bp, Probe sequence
agcaccgttgaaaaacggacacgag

SEQ ID NO: 149971 - DNA, 25 bp, Probe sequence
aaatatctatctagagcaccgttga

SEQ ID NO: 149972 - DNA, 25 bp, Probe sequence
aaacggacacgaggatttagcaaag

SEQ ID NO: 149973 - DNA, 25 bp, Probe sequence
aatgcaatcaaatatctatctagag

SEQ ID NO: 149974 - DNA, 25 bp, Probe sequence
aatatctatctagagcaccgttgaa

SEQ ID NO: 149975 - DNA, 25 bp, Probe sequence
caatcaaatatctatctagagcacc

SEQ ID NO: 149976 - DNA, 25 bp, Probe sequence
caaatatctatctagagcaccgttg

SEQ ID NO: 149977 - DNA, 25 bp, Probe sequence
ctatctagagcaccgttgaaaaacg

SEQ ID NO: 149978 - DNA, 25 bp, Probe sequence
ctagagcaccgttgaaaaacggaca

SEQ ID NO: 149979 - DNA, 25 bp, Probe sequence
tctatctagagcaccgttgaaaaac

SEQ ID NO: 149980 - DNA, 25 bp, Probe sequence
gcaccgttgaaaaacggacacgagg

SEQ ID NO: 149981 - DNA, 25 bp, Probe sequence
gaaaaacggacacgaggatttagca

SEQ ID NO: 149982 - DNA, 25 bp, Probe sequence
gcaatcaaatatctatctagagcac

SEQ ID NO: 149983 - DNA, 25 bp, Probe sequence
gagcaccgttgaaaaacggacacga

SEQ ID NO: 149984 - DNA, 25 bp, Probe sequence
tctagagcaccgttgaaaaacggac

SEQ ID NO: 149985 - DNA, 25 bp, Probe sequence
tagagcaccgttgaaaaacggacac

SEQ ID NO: 149986 - DNA, 25 bp, Probe sequence
tgaaaaacggacacgaggatttagc

SEQ ID NO: 149987 - DNA, 25 bp, Probe sequence
ttgaaaaacggacacgaggatttag

SEQ ID NO: 149988 - DNA, 25 bp, Probe sequence
tcaaatatctatctagagcaccgtt

SEQ ID NO: 149989 - DNA, 25 bp, Probe sequence
taatgcaatcaaatatctatctaga

SEQ ID NO: 149990 - DNA, 25 bp, Probe sequence
tatctagagcaccgttgaaaaacgg

SEQ ID NO: 149991 - DNA, 25 bp, Probe sequence
tatctatctagagcaccgttgaaaa

SEQ ID NO: 149992 - DNA, 25 bp, Probe sequence
atgtatggcgataaggttcaattcc

SEQ ID NO: 149993 - DNA, 25 bp, Probe sequence
aaacattatcggtgcatatgcaaca

SEQ ID NO: 149994 - DNA, 25 bp, Probe sequence
aacagcacggatgacgctagtcttt

SEQ ID NO: 149995 - DNA, 25 bp, Probe sequence
aacgtgtagcaggcgcagaagaaat

SEQ ID NO: 149996 - DNA, 25 bp, Probe sequence
aacgccttaatggacatggttgtac

SEQ ID NO: 149997 - DNA, 25 bp, Probe sequence
aaccagcgctggaatttgcaacttc

SEQ ID NO: 149998 - DNA, 25 bp, Probe sequence
aagacattagaagcacaaggagatt

SEQ ID NO: 149999 - DNA, 25 bp, Probe sequence
aagactgtaataaaccgtgcatgta

SEQ ID NO: 150000 - DNA, 25 bp, Probe sequence
aagatggttataaaccagcgctgga

SEQ ID NO: 150001 - DNA, 25 bp, Probe sequence
aatgggcgacaacgttctatctaga

SEQ ID NO: 150002 - DNA, 25 bp, Probe sequence
aatcctgctaagaatcaaggctatt

SEQ ID NO: 150003 - DNA, 25 bp, Probe sequence
caaggagatttacagtttcctgcaa

SEQ ID NO: 150004 - DNA, 25 bp, Probe sequence
caaggctatttcattatgtatggcg

SEQ ID NO: 150005 - DNA, 25 bp, Probe sequence
cagtcttttggtaacagaaacacac

SEQ ID NO: 150006 - DNA, 25 bp, Probe sequence
gcaatcacaaatggtttataacggt

SEQ ID NO: 150007 - DNA, 25 bp, Probe sequence
gaagattccctcaagaaatggctaa

SEQ ID NO: 150008 - DNA, 25 bp, Probe sequence
gaagtcagcaatgttacaactgcaa

SEQ ID NO: 150009 - DNA, 25 bp, Probe sequence
gaagttaccacggaacaatggcagt

SEQ ID NO: 150010 - DNA, 25 bp, Probe sequence
gaagtattggatgcagaagttgaag

SEQ ID NO: 150011 - DNA, 25 bp, Probe sequence
gaagaagcgtggaagcaatcacaaa

SEQ ID NO: 150012 - DNA, 25 bp, Probe sequence
gaaccaccagtttttgaagaagcac

SEQ ID NO: 150013 - DNA, 25 bp, Probe sequence
gaacttgaacatacacagtcttttg

SEQ ID NO: 150014 - DNA, 25 bp, Probe sequence
gaacaattggattttgaaccaccag

SEQ ID NO: 150015 - DNA, 25 bp, Probe sequence
gaaattacactgaaatcatgacatt

SEQ ID NO: 150016 - DNA, 25 bp, Probe sequence
gacggtacacacagaagattccctc

SEQ ID NO: 150017 - DNA, 25 bp, Probe sequence
gacgctagtcttttatcaaatcaaa

SEQ ID NO: 150018 - DNA, 25 bp, Probe sequence
gttcaattccaaagaagttaccacg

SEQ ID NO: 150019 - DNA, 25 bp, Probe sequence
gggcgacaacgttctatctagagtt

SEQ ID NO: 150020 - DNA, 25 bp, Probe sequence
ggttgtacaaggtttaaatcctgct

SEQ ID NO: 150021 - DNA, 25 bp, Probe sequence
ggaatttgcaacttcaaccagcata

SEQ ID NO: 150022 - DNA, 25 bp, Probe sequence
ggcagtaactaaacgtgtagcaggc

SEQ ID NO: 150023 - DNA, 25 bp, Probe sequence
tcaaccagcatagcaaacgccttaa

SEQ ID NO: 150024 - DNA, 25 bp, Probe sequence
tttcctgcaaactattcgcctgaga

SEQ ID NO: 150025 - DNA, 25 bp, Probe sequence
ttcgcctgagaatgcaatgaagtca

SEQ ID NO: 150026 - DNA, 25 bp, Probe sequence
atataattaaacttgcgattgatca

SEQ ID NO: 150027 - DNA, 25 bp, Probe sequence
atagtattactgcacctcatatcat

SEQ ID NO: 150028 - DNA, 25 bp, Probe sequence
agtcacgtacgactgacaatagagg

SEQ ID NO: 150029 - DNA, 25 bp, Probe sequence
accattatcacgtgttggattaact

SEQ ID NO: 150030 - DNA, 25 bp, Probe sequence
acaggtcaacacgtcgcagttatcg

SEQ ID NO: 150031 - DNA, 25 bp, Probe sequence
acacgtcgcagttatcgaacaatct

SEQ ID NO: 150032 - DNA, 25 bp, Probe sequence
aaacgatgttgtcaatgcgctaaac

SEQ ID NO: 150033 - DNA, 25 bp, Probe sequence
aacaatgatccaagaggtttattta

SEQ ID NO: 150034 - DNA, 25 bp, Probe sequence
aactttgaggctgatgcagtacttt

SEQ ID NO: 150035 - DNA, 25 bp, Probe sequence
aagacacttgtacatgatggattag

SEQ ID NO: 150036 - DNA, 25 bp, Probe sequence
aaggcggacttcaatttacgtatat

SEQ ID NO: 150037 - DNA, 25 bp, Probe sequence
catcctacgatggccgaatcattta

SEQ ID NO: 150038 - DNA, 25 bp, Probe sequence
catatttatgctgcaggtgatgtta

SEQ ID NO: 150039 - DNA, 25 bp, Probe sequence
ctcgttattgtaggtggcggttata

SEQ ID NO: 150040 - DNA, 25 bp, Probe sequence
ctgcatcaacaggtcaacacgtcgc

SEQ ID NO: 150041 - DNA, 25 bp, Probe sequence
gccttagaatttgcttcaatgtttg

SEQ ID NO: 150042 - DNA, 25 bp, Probe sequence
gccgctcaacattatgattacactg

SEQ ID NO: 150043 - DNA, 25 bp, Probe sequence
gcgtgccttatacagtatttataga

SEQ ID NO: 150044 - DNA, 25 bp, Probe sequence
gctgatgcagtacttttggctatcg

SEQ ID NO: 150045 - DNA, 25 bp, Probe sequence
gcttcaatgtttgcgaatttaggta

SEQ ID NO: 150046 - DNA, 25 bp, Probe sequence
gcaggtgatgttaaaggcggacttc

SEQ ID NO: 150047 - DNA, 25 bp, Probe sequence
gaagctgccgctcaacattatgatt

SEQ ID NO: 150048 - DNA, 25 bp, Probe sequence
gacttcaatttacgtatatatcttt

SEQ ID NO: 150049 - DNA, 25 bp, Probe sequence
gaggcgaaattaaagtcaatgctca

SEQ ID NO: 150050 - DNA, 25 bp, Probe sequence
gattttaggtgctacattatatggt

SEQ ID NO: 150051 - DNA, 25 bp, Probe sequence
gattgatcaaaacattccatatacc

SEQ ID NO: 150052 - DNA, 25 bp, Probe sequence
tgaaacgactgaattgtcatctgac

SEQ ID NO: 150053 - DNA, 25 bp, Probe sequence
taaagcgcagtttaaatctaatact

SEQ ID NO: 150054 - DNA, 25 bp, Probe sequence
tacagtatttatagatccaccatta

SEQ ID NO: 150055 - DNA, 25 bp, Probe sequence
tacgatggccgaatcatttaatgat

SEQ ID NO: 150056 - DNA, 25 bp, Probe sequence
tactgcacctcatatcattattaat

SEQ ID NO: 150057 - DNA, 25 bp, Probe sequence
tagatccaccattatcacgtgttgg

SEQ ID NO: 150058 - DNA, 25 bp, Probe sequence
tatatggtaatcagtcacgtacgac

SEQ ID NO: 150059 - DNA, 25 bp, Probe sequence
ttttagtaagtgctatacctcgtca

SEQ ID NO: 150060 - DNA, 25 bp, Probe sequence
atatcagcattacgatgatgtggat

SEQ ID NO: 150061 - DNA, 25 bp, Probe sequence
agatacgctggcaaagcgcttagat

SEQ ID NO: 150062 - DNA, 25 bp, Probe sequence
agaagttgaatatcagcattacgat

SEQ ID NO: 150063 - DNA, 25 bp, Probe sequence
agcgcttagatgacaatccggacga

SEQ ID NO: 150064 - DNA, 25 bp, Probe sequence
acgattgatataagaatacctacag

SEQ ID NO: 150065 - DNA, 25 bp, Probe sequence
acaagcatatataaacgcaacgatt

SEQ ID NO: 150066 - DNA, 25 bp, Probe sequence
aaagatacgctggcaaagcgcttag

SEQ ID NO: 150067 - DNA, 25 bp, Probe sequence
aaagaaaaagatacgctggcaaagc

SEQ ID NO: 150068 - DNA, 25 bp, Probe sequence
aaagcgcttagatgacaatccggac

SEQ ID NO: 150069 - DNA, 25 bp, Probe sequence
aaaaagatacgctggcaaagcgctt

SEQ ID NO: 150070 - DNA, 25 bp, Probe sequence
aagcgcttagatgacaatccggacg

SEQ ID NO: 150071 - DNA, 25 bp, Probe sequence
aagacatgcatatatagaggtggaa

SEQ ID NO: 150072 - DNA, 25 bp, Probe sequence
aagatacgctggcaaagcgcttaga

SEQ ID NO: 150073 - DNA, 25 bp, Probe sequence
aagttgaatatcagcattacgatga

SEQ ID NO: 150074 - DNA, 25 bp, Probe sequence
aatccggacgaattactaaagtatg

SEQ ID NO: 150075 - DNA, 25 bp, Probe sequence
gcgcttagatgacaatccggacgaa

SEQ ID NO: 150076 - DNA, 25 bp, Probe sequence
gctggcaaagcgcttagatgacaat

SEQ ID NO: 150077 - DNA, 25 bp, Probe sequence
gcttagatgacaatccggacgaatt

SEQ ID NO: 150078 - DNA, 25 bp, Probe sequence
gcattacgatgatgtggataaagaa

SEQ ID NO: 150079 - DNA, 25 bp, Probe sequence
gcatatataaacgcaacgattgata

SEQ ID NO: 150080 - DNA, 25 bp, Probe sequence
gcaaagcgcttagatgacaatccgg

SEQ ID NO: 150081 - DNA, 25 bp, Probe sequence
gcaacaacaagcatatataaacgca

SEQ ID NO: 150082 - DNA, 25 bp, Probe sequence
gaatacctacagaagttgaatatca

SEQ ID NO: 150083 - DNA, 25 bp, Probe sequence
gaatatcagcattacgatgatgtgg

SEQ ID NO: 150084 - DNA, 25 bp, Probe sequence
gacaatccggacgaattactaaagt

SEQ ID NO: 150085 - DNA, 25 bp, Probe sequence
gacaacataacaataagacatgcat

SEQ ID NO: 150086 - DNA, 25 bp, Probe sequence
gatgacaatccggacgaattactaa

SEQ ID NO: 150087 - DNA, 25 bp, Probe sequence
gatacgctggcaaagcgcttagatg

SEQ ID NO: 150088 - DNA, 25 bp, Probe sequence
ggacgaattactaaagtatgacaac

SEQ ID NO: 150089 - DNA, 25 bp, Probe sequence
ggcaaagcgcttagatgacaatccg

SEQ ID NO: 150090 - DNA, 25 bp, Probe sequence
tcagcattacgatgatgtggataaa

SEQ ID NO: 150091 - DNA, 25 bp, Probe sequence
tacgctggcaaagcgcttagatgac

SEQ ID NO: 150092 - DNA, 25 bp, Probe sequence
tacctacagaagttgaatatcagca

SEQ ID NO: 150093 - DNA, 25 bp, Probe sequence
tagatgacaatccggacgaattact

SEQ ID NO: 150094 - DNA, 25 bp, Probe sequence
ataaacattttgtcttagagaaaga

SEQ ID NO: 150095 - DNA, 25 bp, Probe sequence
agtcactgtcaaattgctcgtaata

SEQ ID NO: 150096 - DNA, 25 bp, Probe sequence
actgtcaaattgctcgtaatattgc

SEQ ID NO: 150097 - DNA, 25 bp, Probe sequence
aaattgctcgtaatattgcaactac

SEQ ID NO: 150098 - DNA, 25 bp, Probe sequence
aaagatgtcattgaagacattcaaa

SEQ ID NO: 150099 - DNA, 25 bp, Probe sequence
aaaaattcaatagtagttcattagc

SEQ ID NO: 150100 - DNA, 25 bp, Probe sequence
aacaatcaaagatgtcattgaagac

SEQ ID NO: 150101 - DNA, 25 bp, Probe sequence
aactaagcatcattcagaaaaattc

SEQ ID NO: 150102 - DNA, 25 bp, Probe sequence
aaggaggatttatgtcatgaaaaca

SEQ ID NO: 150103 - DNA, 25 bp, Probe sequence
caaaaggaggatttatgtcatgaaa

SEQ ID NO: 150104 - DNA, 25 bp, Probe sequence
cactgtcaaattgctcgtaatattg

SEQ ID NO: 150105 - DNA, 25 bp, Probe sequence
cattatataaacattttgtcttaga

SEQ ID NO: 150106 - DNA, 25 bp, Probe sequence
cttgtttaaatcctgttcaattacg

SEQ ID NO: 150107 - DNA, 25 bp, Probe sequence
cttttttaactaagcatcattcaga

SEQ ID NO: 150108 - DNA, 25 bp, Probe sequence
ctcaacttgtcgatttaaaaatgat

SEQ ID NO: 150109 - DNA, 25 bp, Probe sequence
ctgtcaaattgctcgtaatattgca

SEQ ID NO: 150110 - DNA, 25 bp, Probe sequence
cgtgacgactcaacttgtcgattta

SEQ ID NO: 150111 - DNA, 25 bp, Probe sequence
cgcgtgacgactcaacttgtcgatt

SEQ ID NO: 150112 - DNA, 25 bp, Probe sequence
gcgtgacgactcaacttgtcgattt

SEQ ID NO: 150113 - DNA, 25 bp, Probe sequence
gaagacattcaaaaggaggatttat

SEQ ID NO: 150114 - DNA, 25 bp, Probe sequence
gactcaacttgtcgatttaaaaatg

SEQ ID NO: 150115 - DNA, 25 bp, Probe sequence
gacgactcaacttgtcgatttaaaa

SEQ ID NO: 150116 - DNA, 25 bp, Probe sequence
gtcaaattgctcgtaatattgcaac

SEQ ID NO: 150117 - DNA, 25 bp, Probe sequence
gtcactgtcaaattgctcgtaatat

SEQ ID NO: 150118 - DNA, 25 bp, Probe sequence
gtgacgactcaacttgtcgatttaa

SEQ ID NO: 150119 - DNA, 25 bp, Probe sequence
tgacgactcaacttgtcgatttaaa

SEQ ID NO: 150120 - DNA, 25 bp, Probe sequence
tcactgtcaaattgctcgtaatatt

SEQ ID NO: 150121 - DNA, 25 bp, Probe sequence
taagcatcattcagaaaaattcaat

SEQ ID NO: 150122 - DNA, 25 bp, Probe sequence
taacttgtttaaatcctgttcaatt

SEQ ID NO: 150123 - DNA, 25 bp, Probe sequence
tatataaacattttgtcttagagaa

SEQ ID NO: 150124 - DNA, 25 bp, Probe sequence
tttaactaagcatcattcagaaaaa

SEQ ID NO: 150125 - DNA, 25 bp, Probe sequence
tttttaactaagcatcattcagaaa

SEQ ID NO: 150126 - DNA, 25 bp, Probe sequence
ttttttaactaagcatcattcagaa

SEQ ID NO: 150127 - DNA, 25 bp, Probe sequence
ttaacttgtttaaatcctgttcaat

SEQ ID NO: 150128 - DNA, 25 bp, Probe sequence
attgggctacaatcaaccgcaactg

SEQ ID NO: 150129 - DNA, 25 bp, Probe sequence
atcagtctgcgcgactgttctatga

SEQ ID NO: 150130 - DNA, 25 bp, Probe sequence
agtctgcgcgactgttctatgaaag

SEQ ID NO: 150131 - DNA, 25 bp, Probe sequence
acggatatccactaaaagcagaagt

SEQ ID NO: 150132 - DNA, 25 bp, Probe sequence
acattgacttactagaaaacggata

SEQ ID NO: 150133 - DNA, 25 bp, Probe sequence
acaacgcaaaaaaatattcgcaatg

SEQ ID NO: 150134 - DNA, 25 bp, Probe sequence
aaatcagtctgcgcgactgttctat

SEQ ID NO: 150135 - DNA, 25 bp, Probe sequence
aaacggatatccactaaaagcagaa

SEQ ID NO: 150136 - DNA, 25 bp, Probe sequence
aaactatctatagaacaacgcaaaa

SEQ ID NO: 150137 - DNA, 25 bp, Probe sequence
aaaatattcgcaatgtgtagagata

SEQ ID NO: 150138 - DNA, 25 bp, Probe sequence
aagaaatcagtctgcgcgactgttc

SEQ ID NO: 150139 - DNA, 25 bp, Probe sequence
ctgcgcgactgttctatgaaagttg

SEQ ID NO: 150140 - DNA, 25 bp, Probe sequence
gcgcgactgttctatgaaagttgca

SEQ ID NO: 150141 - DNA, 25 bp, Probe sequence
gcgactgttctatgaaagttgcaag

SEQ ID NO: 150142 - DNA, 25 bp, Probe sequence
gcgtttatgtttcatcatcaaatac

SEQ ID NO: 150143 - DNA, 25 bp, Probe sequence
gaattggaaattatgaaaggttatg

SEQ ID NO: 150144 - DNA, 25 bp, Probe sequence
gaactgattatagcgtttatgtttc

SEQ ID NO: 150145 - DNA, 25 bp, Probe sequence
gaaagttgcaagggagttaatagaa

SEQ ID NO: 150146 - DNA, 25 bp, Probe sequence
gaaatcagtctgcgcgactgttcta

SEQ ID NO: 150147 - DNA, 25 bp, Probe sequence
gacttactagaaaacggatatccac

SEQ ID NO: 150148 - DNA, 25 bp, Probe sequence
gactgttctatgaaagttgcaaggg

SEQ ID NO: 150149 - DNA, 25 bp, Probe sequence
gattatagcgtttatgtttcatcat

SEQ ID NO: 150150 - DNA, 25 bp, Probe sequence
gttctatgaaagttgcaagggagtt

SEQ ID NO: 150151 - DNA, 25 bp, Probe sequence
gtagagatatagaacttcactgggg

SEQ ID NO: 150152 - DNA, 25 bp, Probe sequence
gtctgcgcgactgttctatgaaagt

SEQ ID NO: 150153 - DNA, 25 bp, Probe sequence
ggttatgaagaaatcagtctgcgcg

SEQ ID NO: 150154 - DNA, 25 bp, Probe sequence
ggctacaatcaaccgcaactgtgta

SEQ ID NO: 150155 - DNA, 25 bp, Probe sequence
tgtttcatcatcaaatacctatgag

SEQ ID NO: 150156 - DNA, 25 bp, Probe sequence
ttgggctacaatcaaccgcaactgt

SEQ ID NO: 150157 - DNA, 25 bp, Probe sequence
taaaagcagaagtagaggttccgga

SEQ ID NO: 150158 - DNA, 25 bp, Probe sequence
tagcgtttatgtttcatcatcaaat

SEQ ID NO: 150159 - DNA, 25 bp, Probe sequence
tatgaagaaatcagtctgcgcgact

SEQ ID NO: 150160 - DNA, 25 bp, Probe sequence
tatagcgtttatgtttcatcatcaa

SEQ ID NO: 150161 - DNA, 25 bp, Probe sequence
ttatgtttcatcatcaaatacctat

SEQ ID NO: 150162 - DNA, 25 bp, Probe sequence
atttaatgattggggcgagtgtgct

SEQ ID NO: 150163 - DNA, 25 bp, Probe sequence
atcaatccaacaatcacgatagagg

SEQ ID NO: 150164 - DNA, 25 bp, Probe sequence
atgattggggcgagtgtgctacacg

SEQ ID NO: 150165 - DNA, 25 bp, Probe sequence
agaacatgagcaagacggcgaaaaa

SEQ ID NO: 150166 - DNA, 25 bp, Probe sequence
agaagaacatgagcaagacggcgaa

SEQ ID NO: 150167 - DNA, 25 bp, Probe sequence
acgtgatatcactatggacgacatc

SEQ ID NO: 150168 - DNA, 25 bp, Probe sequence
acacgcattgtaagtatttatcgtt

SEQ ID NO: 150169 - DNA, 25 bp, Probe sequence
acaacaaacgtttcattaatccaag

SEQ ID NO: 150170 - DNA, 25 bp, Probe sequence
aacagaagatggggcagttgtgcag

SEQ ID NO: 150171 - DNA, 25 bp, Probe sequence
aacaagttttataaatttgcgatat

SEQ ID NO: 150172 - DNA, 25 bp, Probe sequence
aatgaggacggaacaacggtaacag

SEQ ID NO: 150173 - DNA, 25 bp, Probe sequence
aatttgcgatatacggcaagttcgg

SEQ ID NO: 150174 - DNA, 25 bp, Probe sequence
aatccaacaatcacgatagaggcac

SEQ ID NO: 150175 - DNA, 25 bp, Probe sequence
caacaatcacgatagaggcacaaga

SEQ ID NO: 150176 - DNA, 25 bp, Probe sequence
caaacgtttcattaatccaagtatt

SEQ ID NO: 150177 - DNA, 25 bp, Probe sequence
gccttagtactagatataaatgagg

SEQ ID NO: 150178 - DNA, 25 bp, Probe sequence
gaagatggggcagttgtgcagatta

SEQ ID NO: 150179 - DNA, 25 bp, Probe sequence
gaacaacggtaacagaagatggggc

SEQ ID NO: 150180 - DNA, 25 bp, Probe sequence
gaggacggaacaacggtaacagaag

SEQ ID NO: 150181 - DNA, 25 bp, Probe sequence
gagtgtgctacacgcattgtaagta

SEQ ID NO: 150182 - DNA, 25 bp, Probe sequence
gatggggcagttgtgcagattaaga

SEQ ID NO: 150183 - DNA, 25 bp, Probe sequence
gatatcactatggacgacatcatgg

SEQ ID NO: 150184 - DNA, 25 bp, Probe sequence
gattggggcgagtgtgctacacgca

SEQ ID NO: 150185 - DNA, 25 bp, Probe sequence
gtttcattaatccaagtattaacga

SEQ ID NO: 150186 - DNA, 25 bp, Probe sequence
gtaagtatttatcgttatatttcta

SEQ ID NO: 150187 - DNA, 25 bp, Probe sequence
gtgctacacgcattgtaagtattta

SEQ ID NO: 150188 - DNA, 25 bp, Probe sequence
gggcagttgtgcagattaagaatta

SEQ ID NO: 150189 - DNA, 25 bp, Probe sequence
ggtgtaaaagacatcagcaaacaaa

SEQ ID NO: 150190 - DNA, 25 bp, Probe sequence
ggcgagtgtgctacacgcattgtaa

SEQ ID NO: 150191 - DNA, 25 bp, Probe sequence
tcactatggacgacatcatggacgg

SEQ ID NO: 150192 - DNA, 25 bp, Probe sequence
taacgcaactaggtgtaaaagacat

SEQ ID NO: 150193 - DNA, 25 bp, Probe sequence
ttatcgttatatttctaaattacaa

SEQ ID NO: 150194 - DNA, 25 bp, Probe sequence
ttcgagacaaagataagacactcaa

SEQ ID NO: 150195 - DNA, 25 bp, Probe sequence
ttggggcgagtgtgctacacgcatt

SEQ ID NO: 150196 - DNA, 25 bp, Probe sequence
attcaagttgaatacaccttacgga

SEQ ID NO: 150197 - DNA, 25 bp, Probe sequence
accttacggaaaagtgacagccaga

SEQ ID NO: 150198 - DNA, 25 bp, Probe sequence
acgtcatacacggtaaaggtgggag

SEQ ID NO: 150199 - DNA, 25 bp, Probe sequence
acaacttgagcaacgaggttttgac

SEQ ID NO: 150200 - DNA, 25 bp, Probe sequence
aaaaaacttagccaatcagacatta

SEQ ID NO: 150201 - DNA, 25 bp, Probe sequence
aagaaactggatgcaatcacaacta

SEQ ID NO: 150202 - DNA, 25 bp, Probe sequence
caagacgaccgattcaaagtaactg

SEQ ID NO: 150203 - DNA, 25 bp, Probe sequence
cattcgaacaagacgaccgattcaa

SEQ ID NO: 150204 - DNA, 25 bp, Probe sequence
ctggatgcaatcacaactaaagaga

SEQ ID NO: 150205 - DNA, 25 bp, Probe sequence
gaaaccaacgtcatacacggtaaag

SEQ ID NO: 150206 - DNA, 25 bp, Probe sequence
gaaacattcgaacaagacgaccgat

SEQ ID NO: 150207 - DNA, 25 bp, Probe sequence
gaagtcattaaacaacttgagcaac

SEQ ID NO: 150208 - DNA, 25 bp, Probe sequence
gaacaagatagcaaattcaagttga

SEQ ID NO: 150209 - DNA, 25 bp, Probe sequence
gaaaacggcacattgattgacgcaa

SEQ ID NO: 150210 - DNA, 25 bp, Probe sequence
gaaattgaacgcataaacgaatgga

SEQ ID NO: 150211 - DNA, 25 bp, Probe sequence
gacagtgctaactgggtttttaaga

SEQ ID NO: 150212 - DNA, 25 bp, Probe sequence
gacgaccgattcaaagtaactgatc

SEQ ID NO: 150213 - DNA, 25 bp, Probe sequence
gagcaacgaggttttgacaactatg

SEQ ID NO: 150214 - DNA, 25 bp, Probe sequence
gaggttttgacaactatgtaaaagt

SEQ ID NO: 150215 - DNA, 25 bp, Probe sequence
gatctagacagtgctaactgggttt

SEQ ID NO: 150216 - DNA, 25 bp, Probe sequence
gattgacgcaaacggcgaagtttta

SEQ ID NO: 150217 - DNA, 25 bp, Probe sequence
gtaactgaaaacggcacattgattg

SEQ ID NO: 150218 - DNA, 25 bp, Probe sequence
gtaactgatctagacagtgctaact

SEQ ID NO: 150219 - DNA, 25 bp, Probe sequence
gtgacagccagaaaaggttcaaaag

SEQ ID NO: 150220 - DNA, 25 bp, Probe sequence
gggtgctagcattgtggagaaacca

SEQ ID NO: 150221 - DNA, 25 bp, Probe sequence
ggttcaaaagtcattcaagttagca

SEQ ID NO: 150222 - DNA, 25 bp, Probe sequence
ggagaaaccaacgtcatacacggta

SEQ ID NO: 150223 - DNA, 25 bp, Probe sequence
ggcaaagaatatttacaaagccttg

SEQ ID NO: 150224 - DNA, 25 bp, Probe sequence
ggcacattgattgacgcaaacggcg

SEQ ID NO: 150225 - DNA, 25 bp, Probe sequence
ggcgaagttttagagggtgctagca

SEQ ID NO: 150226 - DNA, 25 bp, Probe sequence
tcaagttagcaatgagcaagaagtc

SEQ ID NO: 150227 - DNA, 25 bp, Probe sequence
tacaaagccttgtaattgaatatta

SEQ ID NO: 150228 - DNA, 25 bp, Probe sequence
tagagggtgctagcattgtggagaa

SEQ ID NO: 150229 - DNA, 25 bp, Probe sequence
ttagccaatcagacattaagaaaga

SEQ ID NO: 150230 - DNA, 25 bp, Probe sequence
cttaaggcattttccgacttcacta

SEQ ID NO: 150231 - DNA, 25 bp, Probe sequence
atgattttagggtgccttatgtact

SEQ ID NO: 150232 - DNA, 25 bp, Probe sequence
acgagaaagcctgtaatcaatagaa

SEQ ID NO: 150233 - DNA, 25 bp, Probe sequence
aacctacactaggagaagtttatag

SEQ ID NO: 150234 - DNA, 25 bp, Probe sequence
aacgattgagcgacacagtgatcct

SEQ ID NO: 150235 - DNA, 25 bp, Probe sequence
aacccagagaatcaacagttatttt

SEQ ID NO: 150236 - DNA, 25 bp, Probe sequence
aagaaatctatgaacaacctatata

SEQ ID NO: 150237 - DNA, 25 bp, Probe sequence
caatggcagttgtgacgtggaaggt

SEQ ID NO: 150238 - DNA, 25 bp, Probe sequence
ctacttaaggcattttccgacttca

SEQ ID NO: 150239 - DNA, 25 bp, Probe sequence
ccgacttcactaaacaagctgaaaa

SEQ ID NO: 150240 - DNA, 25 bp, Probe sequence
cctcctcaccacaatggcagttgtg

SEQ ID NO: 150241 - DNA, 25 bp, Probe sequence
gcgacacagtgatcctgattcagga

SEQ ID NO: 150242 - DNA, 25 bp, Probe sequence
gctgaaaagcaaaaacctacactag

SEQ ID NO: 150243 - DNA, 25 bp, Probe sequence
gcattttccgacttcactaaacaag

SEQ ID NO: 150244 - DNA, 25 bp, Probe sequence
gaagcagataacccagagaatcaac

SEQ ID NO: 150245 - DNA, 25 bp, Probe sequence
gaacgcactatacaaaacaaccctc

SEQ ID NO: 150246 - DNA, 25 bp, Probe sequence
gaacaacctatataaggtcagtttg

SEQ ID NO: 150247 - DNA, 25 bp, Probe sequence
gataattacgaagcagataacccag

SEQ ID NO: 150248 - DNA, 25 bp, Probe sequence
gacgtggaaggtttggaagattgaa

SEQ ID NO: 150249 - DNA, 25 bp, Probe sequence
gagcgacacagtgatcctgattcag

SEQ ID NO: 150250 - DNA, 25 bp, Probe sequence
gattcaggaataaaactacttaagg

SEQ ID NO: 150251 - DNA, 25 bp, Probe sequence
gagtctacagcagaaacgattgagc

SEQ ID NO: 150252 - DNA, 25 bp, Probe sequence
gattttagtaaagagtctacagcag

SEQ ID NO: 150253 - DNA, 25 bp, Probe sequence
gattgaacgaaatacgagaaagcct

SEQ ID NO: 150254 - DNA, 25 bp, Probe sequence
gattgagcgacacagtgatcctgat

SEQ ID NO: 150255 - DNA, 25 bp, Probe sequence
ggcagttgtgacgtggaaggtttgg

SEQ ID NO: 150256 - DNA, 25 bp, Probe sequence
tcagtttggactttttcgctaaaag

SEQ ID NO: 150257 - DNA, 25 bp, Probe sequence
tagacggaacaaacctgaattacca

SEQ ID NO: 150258 - DNA, 25 bp, Probe sequence
taaggtcagtttggactttttcgct

SEQ ID NO: 150259 - DNA, 25 bp, Probe sequence
taaggcattttccgacttcactaaa

SEQ ID NO: 150260 - DNA, 25 bp, Probe sequence
tatgtacttgaggaaggggttaacg

SEQ ID NO: 150261 - DNA, 25 bp, Probe sequence
tagggtgccttatgtacttgaggaa

SEQ ID NO: 150262 - DNA, 25 bp, Probe sequence
tttccgacttcactaaacaagctga

SEQ ID NO: 150263 - DNA, 25 bp, Probe sequence
ttttcgctaaaagtattattgcaga

SEQ ID NO: 150264 - DNA, 25 bp, Probe sequence
attcgctgtattgacatacatcagc

SEQ ID NO: 150265 - DNA, 25 bp, Probe sequence
atcatttaaactacaaacaaccaca

SEQ ID NO: 150266 - DNA, 25 bp, Probe sequence
atgagcatgatgaaagaactgtatt

SEQ ID NO: 150267 - DNA, 25 bp, Probe sequence
acttcgataaaaaacgtaatgagca

SEQ ID NO: 150268 - DNA, 25 bp, Probe sequence
aaatcaatgattgctttgagttgtt

SEQ ID NO: 150269 - DNA, 25 bp, Probe sequence
aaatcgaatcattattgagtcgagt

SEQ ID NO: 150270 - DNA, 25 bp, Probe sequence
aagcagttaaaattttatctcaaga

SEQ ID NO: 150271 - DNA, 25 bp, Probe sequence
aaggaattttcaattagctttgaag

SEQ ID NO: 150272 - DNA, 25 bp, Probe sequence
aattcttgttaatgcacaacaacgt

SEQ ID NO: 150273 - DNA, 25 bp, Probe sequence
caattagctttgaagaattcgctgt

SEQ ID NO: 150274 - DNA, 25 bp, Probe sequence
caaccacaagttgttaaagcagtta

SEQ ID NO: 150275 - DNA, 25 bp, Probe sequence
caatggtcacttatgctgacaaatt

SEQ ID NO: 150276 - DNA, 25 bp, Probe sequence
caatgattgctttgagttgttatca

SEQ ID NO: 150277 - DNA, 25 bp, Probe sequence
catttaaactacaaacaaccacaag

SEQ ID NO: 150278 - DNA, 25 bp, Probe sequence
cgaatcattattgagtcgagtaaat

SEQ ID NO: 150279 - DNA, 25 bp, Probe sequence
gctgtattgacatacatcagcgaaa

SEQ ID NO: 150280 - DNA, 25 bp, Probe sequence
gctttgagttgttatcaatggtcac

SEQ ID NO: 150281 - DNA, 25 bp, Probe sequence
gctttgaagaattcgctgtattgac

SEQ ID NO: 150282 - DNA, 25 bp, Probe sequence
gaattcgctgtattgacatacatca

SEQ ID NO: 150283 - DNA, 25 bp, Probe sequence
gaatcactgaagcaaacaacgaaat

SEQ ID NO: 150284 - DNA, 25 bp, Probe sequence
gaagcaaacaacgaaattgaactat

SEQ ID NO: 150285 - DNA, 25 bp, Probe sequence
gaactgtattaattcttgttaatgc

SEQ ID NO: 150286 - DNA, 25 bp, Probe sequence
gacatacatcagcgaaaacaaagag

SEQ ID NO: 150287 - DNA, 25 bp, Probe sequence
gattgctttgagttgttatcaatgg

SEQ ID NO: 150288 - DNA, 25 bp, Probe sequence
gttgttatcaatggtcacttatgct

SEQ ID NO: 150289 - DNA, 25 bp, Probe sequence
gtattaattcttgttaatgcacaac

SEQ ID NO: 150290 - DNA, 25 bp, Probe sequence
gtattgacatacatcagcgaaaaca

SEQ ID NO: 150291 - DNA, 25 bp, Probe sequence
tggtcacttatgctgacaaattaaa

SEQ ID NO: 150292 - DNA, 25 bp, Probe sequence
tgttatcaatggtcacttatgctga

SEQ ID NO: 150293 - DNA, 25 bp, Probe sequence
tgagttgttatcaatggtcacttat

SEQ ID NO: 150294 - DNA, 25 bp, Probe sequence
tgaagaattcgctgtattgacatac

SEQ ID NO: 150295 - DNA, 25 bp, Probe sequence
tcttgttaatgcacaacaacgtaaa

SEQ ID NO: 150296 - DNA, 25 bp, Probe sequence
tatcaatggtcacttatgctgacaa

SEQ ID NO: 150297 - DNA, 25 bp, Probe sequence
ttatctcaagaagattacttcgata

SEQ ID NO: 150298 - DNA, 25 bp, Probe sequence
atacaatcactgtgtctaatgaata

SEQ ID NO: 150299 - DNA, 25 bp, Probe sequence
atgctgatatttttgactaaaccaa

SEQ ID NO: 150300 - DNA, 25 bp, Probe sequence
atgctaacccagaaatacaatcact

SEQ ID NO: 150301 - DNA, 25 bp, Probe sequence
agaaatacaatcactgtgtctaatg

SEQ ID NO: 150302 - DNA, 25 bp, Probe sequence
accaaatgctaacccagaaatacaa

SEQ ID NO: 150303 - DNA, 25 bp, Probe sequence
acccagaaatacaatcactgtgtct

SEQ ID NO: 150304 - DNA, 25 bp, Probe sequence
acaatcactgtgtctaatgaataat

SEQ ID NO: 150305 - DNA, 25 bp, Probe sequence
aaatgctaacccagaaatacaatca

SEQ ID NO: 150306 - DNA, 25 bp, Probe sequence
aacccagaaatacaatcactgtgtc

SEQ ID NO: 150307 - DNA, 25 bp, Probe sequence
aaccaaatgctaacccagaaataca

SEQ ID NO: 150308 - DNA, 25 bp, Probe sequence
aatgctaacccagaaatacaatcac

SEQ ID NO: 150309 - DNA, 25 bp, Probe sequence
aatcactgtgtctaatgaataattt

SEQ ID NO: 150310 - DNA, 25 bp, Probe sequence
aatacaatcactgtgtctaatgaat

SEQ ID NO: 150311 - DNA, 25 bp, Probe sequence
caaatgctaacccagaaatacaatc

SEQ ID NO: 150312 - DNA, 25 bp, Probe sequence
cactgtgtctaatgaataatttgtt

SEQ ID NO: 150313 - DNA, 25 bp, Probe sequence
cttctcatttttaattagttataat

SEQ ID NO: 150314 - DNA, 25 bp, Probe sequence
ctaacccagaaatacaatcactgtg

SEQ ID NO: 150315 - DNA, 25 bp, Probe sequence
ctaaaccaaatgctaacccagaaat

SEQ ID NO: 150316 - DNA, 25 bp, Probe sequence
cccagaaatacaatcactgtgtcta

SEQ ID NO: 150317 - DNA, 25 bp, Probe sequence
ccagaaatacaatcactgtgtctaa

SEQ ID NO: 150318 - DNA, 25 bp, Probe sequence
ccaaatgctaacccagaaatacaat

SEQ ID NO: 150319 - DNA, 25 bp, Probe sequence
gctgatatttttgactaaaccaaat

SEQ ID NO: 150320 - DNA, 25 bp, Probe sequence
gctaacccagaaatacaatcactgt

SEQ ID NO: 150321 - DNA, 25 bp, Probe sequence
gaaatacaatcactgtgtctaatga

SEQ ID NO: 150322 - DNA, 25 bp, Probe sequence
gactaaaccaaatgctaacccagaa

SEQ ID NO: 150323 - DNA, 25 bp, Probe sequence
gatatttttgactaaaccaaatgct

SEQ ID NO: 150324 - DNA, 25 bp, Probe sequence
tgtgtctaatgaataatttgtttta

SEQ ID NO: 150325 - DNA, 25 bp, Probe sequence
tgtttacttctcatttttaattagt

SEQ ID NO: 150326 - DNA, 25 bp, Probe sequence
tgactaaaccaaatgctaacccaga

SEQ ID NO: 150327 - DNA, 25 bp, Probe sequence
taaaccaaatgctaacccagaaata

SEQ ID NO: 150328 - DNA, 25 bp, Probe sequence
tacttctcatttttaattagttata

SEQ ID NO: 150329 - DNA, 25 bp, Probe sequence
ttgactaaaccaaatgctaacccag

SEQ ID NO: 150330 - DNA, 25 bp, Probe sequence
ttacttctcatttttaattagttat

SEQ ID NO: 150331 - DNA, 25 bp, Probe sequence
ttgtttacttctcatttttaattag

SEQ ID NO: 150332 - DNA, 25 bp, Probe sequence
atcgtcataatgaatcaatttaaca

SEQ ID NO: 150333 - DNA, 25 bp, Probe sequence
atgggtgtcattattgatacatttg

SEQ ID NO: 150334 - DNA, 25 bp, Probe sequence
agtatcatttacaattgggtcaata

SEQ ID NO: 150335 - DNA, 25 bp, Probe sequence
agcaattggagtattgttactcatt

SEQ ID NO: 150336 - DNA, 25 bp, Probe sequence
agcctttgcatcattagtatcattt

SEQ ID NO: 150337 - DNA, 25 bp, Probe sequence
actgtaattgcaacagttgcgggtc

SEQ ID NO: 150338 - DNA, 25 bp, Probe sequence
acatctgtcaattcaagactatcac

SEQ ID NO: 150339 - DNA, 25 bp, Probe sequence
aattcaagactatcactgtatacta

SEQ ID NO: 150340 - DNA, 25 bp, Probe sequence
caagactatcactgtatactaaatc

SEQ ID NO: 150341 - DNA, 25 bp, Probe sequence
caccagcctttgcatcattagtatc

SEQ ID NO: 150342 - DNA, 25 bp, Probe sequence
cattcaccagcctttgcatcattag

SEQ ID NO: 150343 - DNA, 25 bp, Probe sequence
ctttccacctattcaaacgacaatt

SEQ ID NO: 150344 - DNA, 25 bp, Probe sequence
ctatccaaacatctgtcaattcaag

SEQ ID NO: 150345 - DNA, 25 bp, Probe sequence
cgctattgattttaaccgctatttt

SEQ ID NO: 150346 - DNA, 25 bp, Probe sequence
cctatctattttactggcggtatac

SEQ ID NO: 150347 - DNA, 25 bp, Probe sequence
cctttgcatcattagtatcatttac

SEQ ID NO: 150348 - DNA, 25 bp, Probe sequence
ccagcctttgcatcattagtatcat

SEQ ID NO: 150349 - DNA, 25 bp, Probe sequence
gccaaaattaggtgcaacattaact

SEQ ID NO: 150350 - DNA, 25 bp, Probe sequence
gctattgattttaaccgctattttt

SEQ ID NO: 150351 - DNA, 25 bp, Probe sequence
gcttattcctatccaaacatctgtc

SEQ ID NO: 150352 - DNA, 25 bp, Probe sequence
gcatcattagtatcatttacaattg

SEQ ID NO: 150353 - DNA, 25 bp, Probe sequence
gcaacagttgcgggtcaaattatta

SEQ ID NO: 150354 - DNA, 25 bp, Probe sequence
gaataatttattactaactgatcaa

SEQ ID NO: 150355 - DNA, 25 bp, Probe sequence
ggtgcagcattaacaacacttattg

SEQ ID NO: 150356 - DNA, 25 bp, Probe sequence
tgcttattcctatccaaacatctgt

SEQ ID NO: 150357 - DNA, 25 bp, Probe sequence
tgcgggtcaaattattatgggtgtc

SEQ ID NO: 150358 - DNA, 25 bp, Probe sequence
tcattcaccagcctttgcatcatta

SEQ ID NO: 150359 - DNA, 25 bp, Probe sequence
tattcctatccaaacatctgtcaat

SEQ ID NO: 150360 - DNA, 25 bp, Probe sequence
tttctttccacctattcaaacgaca

SEQ ID NO: 150361 - DNA, 25 bp, Probe sequence
tattgttattgccaaaattaggtgc

SEQ ID NO: 150362 - DNA, 25 bp, Probe sequence
ttaggtgcaacattaactgtaattg

SEQ ID NO: 150363 - DNA, 25 bp, Probe sequence
ttaactggcaatttattgttattgc

SEQ ID NO: 150364 - DNA, 25 bp, Probe sequence
ttcaccagcctttgcatcattagta

SEQ ID NO: 150365 - DNA, 25 bp, Probe sequence
ttcctatccaaacatctgtcaattc

SEQ ID NO: 150366 - DNA, 25 bp, Probe sequence
attactgaaacctatgttcctgaca

SEQ ID NO: 150367 - DNA, 25 bp, Probe sequence
attttgctgttttagaagtatcatt

SEQ ID NO: 150368 - DNA, 25 bp, Probe sequence
atttgtcctaaatctattcaatata

SEQ ID NO: 150369 - DNA, 25 bp, Probe sequence
atagtacacatgactctagcgcaac

SEQ ID NO: 150370 - DNA, 25 bp, Probe sequence
atcgcatttagatataccactagaa

SEQ ID NO: 150371 - DNA, 25 bp, Probe sequence
atggagacgttttggtagagatgca

SEQ ID NO: 150372 - DNA, 25 bp, Probe sequence
aggtgctgctcatatgtctacattt

SEQ ID NO: 150373 - DNA, 25 bp, Probe sequence
agagccttagagaacttaagtacat

SEQ ID NO: 150374 - DNA, 25 bp, Probe sequence
agcctacatatcgcccaataagcat

SEQ ID NO: 150375 - DNA, 25 bp, Probe sequence
acatatcgcccaataagcatacatg

SEQ ID NO: 150376 - DNA, 25 bp, Probe sequence
aaaactcctcaattagttatcaatg

SEQ ID NO: 150377 - DNA, 25 bp, Probe sequence
aacctatgttcctgacatgaagttt

SEQ ID NO: 150378 - DNA, 25 bp, Probe sequence
aagatccgcagtatatttattatta

SEQ ID NO: 150379 - DNA, 25 bp, Probe sequence
gccacatttgctacattatcgcatt

SEQ ID NO: 150380 - DNA, 25 bp, Probe sequence
gactctagcgcaacaatttgtccta

SEQ ID NO: 150381 - DNA, 25 bp, Probe sequence
gagaattggttcccctttattcata

SEQ ID NO: 150382 - DNA, 25 bp, Probe sequence
gagactacagtataaacaccctgtt

SEQ ID NO: 150383 - DNA, 25 bp, Probe sequence
gatataccactagaaagagccttag

SEQ ID NO: 150384 - DNA, 25 bp, Probe sequence
gatatattaatcgaacgcgccaaac

SEQ ID NO: 150385 - DNA, 25 bp, Probe sequence
gattattatcctcttcaaaatagat

SEQ ID NO: 150386 - DNA, 25 bp, Probe sequence
gattctgcaaacacactaactaaat

SEQ ID NO: 150387 - DNA, 25 bp, Probe sequence
gtgacggtatggttgaaaactctct

SEQ ID NO: 150388 - DNA, 25 bp, Probe sequence
ggaggtaatctccttgatgctgaag

SEQ ID NO: 150389 - DNA, 25 bp, Probe sequence
tgcagttggtaattcatcatattta

SEQ ID NO: 150390 - DNA, 25 bp, Probe sequence
tcgaacgcgccaaacaaaatacaag

SEQ ID NO: 150391 - DNA, 25 bp, Probe sequence
taagcatacatggagacgttttggt

SEQ ID NO: 150392 - DNA, 25 bp, Probe sequence
taaaagcacagcctacatatcgccc

SEQ ID NO: 150393 - DNA, 25 bp, Probe sequence
taaacaccctgttgttgctataaca

SEQ ID NO: 150394 - DNA, 25 bp, Probe sequence
tagaatgctgataagtgctggtctt

SEQ ID NO: 150395 - DNA, 25 bp, Probe sequence
tagacaaccaaattttgctgtttta

SEQ ID NO: 150396 - DNA, 25 bp, Probe sequence
tagttactggtataggtgctgctca

SEQ ID NO: 150397 - DNA, 25 bp, Probe sequence
tttgatggtttaactcctgagggag

SEQ ID NO: 150398 - DNA, 25 bp, Probe sequence
ttatcaatgattctgcaaacacact

SEQ ID NO: 150399 - DNA, 25 bp, Probe sequence
ttgaaaactctctagccacatttgc

SEQ ID NO: 150400 - DNA, 25 bp, Probe sequence
attagctactggaagtttaaacact

SEQ ID NO: 150401 - DNA, 25 bp, Probe sequence
acttgcgggaactttagcaatcgtt

SEQ ID NO: 150402 - DNA, 25 bp, Probe sequence
acaagcttgccaacatcgaatgaat

SEQ ID NO: 150403 - DNA, 25 bp, Probe sequence
aaatgaggcacaagctagcacaagc

SEQ ID NO: 150404 - DNA, 25 bp, Probe sequence
aaatgtcagaagcaaaatatcaact

SEQ ID NO: 150405 - DNA, 25 bp, Probe sequence
aaacacttattataagcgaactata

SEQ ID NO: 150406 - DNA, 25 bp, Probe sequence
aaaagcaatgtatgctcttaagtca

SEQ ID NO: 150407 - DNA, 25 bp, Probe sequence
aatcgttttagcatcaccactagta

SEQ ID NO: 150408 - DNA, 25 bp, Probe sequence
aatctatacttgcgggaactttagc

SEQ ID NO: 150409 - DNA, 25 bp, Probe sequence
ctttagcaatcgttttagcatcacc

SEQ ID NO: 150410 - DNA, 25 bp, Probe sequence
gcgggaactttagcaatcgttttag

SEQ ID NO: 150411 - DNA, 25 bp, Probe sequence
gctactggaagtttaaacacttatt

SEQ ID NO: 150412 - DNA, 25 bp, Probe sequence
gctagcacaagcttgccaacatcga

SEQ ID NO: 150413 - DNA, 25 bp, Probe sequence
gcttgccaacatcgaatgaatatca

SEQ ID NO: 150414 - DNA, 25 bp, Probe sequence
gcatcaccactagtaactaatctag

SEQ ID NO: 150415 - DNA, 25 bp, Probe sequence
gcacaagcttgccaacatcgaatga

SEQ ID NO: 150416 - DNA, 25 bp, Probe sequence
gcaaaatatcaacttcaaaagattt

SEQ ID NO: 150417 - DNA, 25 bp, Probe sequence
gcaatcgttttagcatcaccactag

SEQ ID NO: 150418 - DNA, 25 bp, Probe sequence
gcaatgtatgctcttaagtcaaaag

SEQ ID NO: 150419 - DNA, 25 bp, Probe sequence
gaactttagcaatcgttttagcatc

SEQ ID NO: 150420 - DNA, 25 bp, Probe sequence
gaaaatctatacttgcgggaacttt

SEQ ID NO: 150421 - DNA, 25 bp, Probe sequence
gaaattgacgaagcactaaaaagta

SEQ ID NO: 150422 - DNA, 25 bp, Probe sequence
gttaatgaattagctactggaagtt

SEQ ID NO: 150423 - DNA, 25 bp, Probe sequence
gttttagcatcaccactagtaacta

SEQ ID NO: 150424 - DNA, 25 bp, Probe sequence
ggcacaagctagcacaagcttgcca

SEQ ID NO: 150425 - DNA, 25 bp, Probe sequence
tgtatgctcttaagtcaaaagactt

SEQ ID NO: 150426 - DNA, 25 bp, Probe sequence
tcgttttagcatcaccactagtaac

SEQ ID NO: 150427 - DNA, 25 bp, Probe sequence
tcaccactagtaactaatctagata

SEQ ID NO: 150428 - DNA, 25 bp, Probe sequence
taagcgaactataaaaatttcaggt

SEQ ID NO: 150429 - DNA, 25 bp, Probe sequence
tagcacaagcttgccaacatcgaat

SEQ ID NO: 150430 - DNA, 25 bp, Probe sequence
tagcaatcgttttagcatcaccact

SEQ ID NO: 150431 - DNA, 25 bp, Probe sequence
tagcatcaccactagtaactaatct

SEQ ID NO: 150432 - DNA, 25 bp, Probe sequence
ttagaaaatctatacttgcgggaac

SEQ ID NO: 150433 - DNA, 25 bp, Probe sequence
ttaaaatcgttattagatgaactaa

SEQ ID NO: 150434 - DNA, 25 bp, Probe sequence
attggaagtgtgtatcaggtatcag

SEQ ID NO: 150435 - DNA, 25 bp, Probe sequence
attacacagttgccaatgttaaagg

SEQ ID NO: 150436 - DNA, 25 bp, Probe sequence
atatatctcaacaacatagaaatat

SEQ ID NO: 150437 - DNA, 25 bp, Probe sequence
atcaaatatgacggcgcatattgca

SEQ ID NO: 150438 - DNA, 25 bp, Probe sequence
atcagtaatgttaaaacaccagcta

SEQ ID NO: 150439 - DNA, 25 bp, Probe sequence
atgtaccgtataaaaaagagactgg

SEQ ID NO: 150440 - DNA, 25 bp, Probe sequence
atgttaaaacaccagctaaaaatga

SEQ ID NO: 150441 - DNA, 25 bp, Probe sequence
aaggtaataacgtgagggatggcta

SEQ ID NO: 150442 - DNA, 25 bp, Probe sequence
agaaatattacagtcgctacaccgc

SEQ ID NO: 150443 - DNA, 25 bp, Probe sequence
agcaggttatacactcgataaaaac

SEQ ID NO: 150444 - DNA, 25 bp, Probe sequence
accgcatcttaaatggtgtggttat

SEQ ID NO: 150445 - DNA, 25 bp, Probe sequence
aagaattacaggtgtattacccaat

SEQ ID NO: 150446 - DNA, 25 bp, Probe sequence
aacgtgagggatggctattcaacta

SEQ ID NO: 150447 - DNA, 25 bp, Probe sequence
aatattacagtcgctacaccgcatc

SEQ ID NO: 150448 - DNA, 25 bp, Probe sequence
cacagttgccaatgttaaaggtaat

SEQ ID NO: 150449 - DNA, 25 bp, Probe sequence
cactcgataaaaacaatgtaccgta

SEQ ID NO: 150450 - DNA, 25 bp, Probe sequence
caggtgtattacccaataacgcaac

SEQ ID NO: 150451 - DNA, 25 bp, Probe sequence
ctggttattacacagttgccaatgt

SEQ ID NO: 150452 - DNA, 25 bp, Probe sequence
gctacaccgcatcttaaatggtgtg

SEQ ID NO: 150453 - DNA, 25 bp, Probe sequence
gcattaatggctatagatggattac

SEQ ID NO: 150454 - DNA, 25 bp, Probe sequence
gaagtgtgtatcaggtatcagtaat

SEQ ID NO: 150455 - DNA, 25 bp, Probe sequence
gaaaagaattcaccagtgccagcag

SEQ ID NO: 150456 - DNA, 25 bp, Probe sequence
gacaggagaggtagacaaggcaggt

SEQ ID NO: 150457 - DNA, 25 bp, Probe sequence
gacggcgcatattgcattaatggct

SEQ ID NO: 150458 - DNA, 25 bp, Probe sequence
gagactggttattacacagttgcca

SEQ ID NO: 150459 - DNA, 25 bp, Probe sequence
gagggatggctattcaactaattca

SEQ ID NO: 150460 - DNA, 25 bp, Probe sequence
gttattacacagttgccaatgttaa

SEQ ID NO: 150461 - DNA, 25 bp, Probe sequence
gtcgctacaccgcatcttaaatggt

SEQ ID NO: 150462 - DNA, 25 bp, Probe sequence
gtgtatcaggtatcagtaatgttaa

SEQ ID NO: 150463 - DNA, 25 bp, Probe sequence
ggtgtggttatttttattggaagtg

SEQ ID NO: 150464 - DNA, 25 bp, Probe sequence
ggtagacaaggcaggtaatagaata

SEQ ID NO: 150465 - DNA, 25 bp, Probe sequence
ggagaggtagacaaggcaggtaata

SEQ ID NO: 150466 - DNA, 25 bp, Probe sequence
ggcgcatattgcattaatggctata

SEQ ID NO: 150467 - DNA, 25 bp, Probe sequence
tacaggtgtattacccaataacgca

SEQ ID NO: 150468 - DNA, 25 bp, Probe sequence
ttttgaaccaacaggcccgtatttg

SEQ ID NO: 150469 - DNA, 25 bp, Probe sequence
attctcattttcttcaattactaat

SEQ ID NO: 150470 - DNA, 25 bp, Probe sequence
attattctcattttcttcaattact

SEQ ID NO: 150471 - DNA, 25 bp, Probe sequence
attttcttcaattactaatgaggta

SEQ ID NO: 150472 - DNA, 25 bp, Probe sequence
atccaagcgcaaagatcgaagtcac

SEQ ID NO: 150473 - DNA, 25 bp, Probe sequence
atgcgacagcatataaagagtttag

SEQ ID NO: 150474 - DNA, 25 bp, Probe sequence
aggttttgttgtcccagatttatca

SEQ ID NO: 150475 - DNA, 25 bp, Probe sequence
agcgcaaagatcgaagtcacttatt

SEQ ID NO: 150476 - DNA, 25 bp, Probe sequence
actgttttattgttattattctcat

SEQ ID NO: 150477 - DNA, 25 bp, Probe sequence
aacaggcccgtatttgatggtaaat

SEQ ID NO: 150478 - DNA, 25 bp, Probe sequence
aattgaatactatgtcgaatgggca

SEQ ID NO: 150479 - DNA, 25 bp, Probe sequence
ccctggattcaacttaattacaaag

SEQ ID NO: 150480 - DNA, 25 bp, Probe sequence
gaatactatgtcgaatgggcattag

SEQ ID NO: 150481 - DNA, 25 bp, Probe sequence
gaatgggcattagatgcgacagcat

SEQ ID NO: 150482 - DNA, 25 bp, Probe sequence
gaaccaacaggcccgtatttgatgg

SEQ ID NO: 150483 - DNA, 25 bp, Probe sequence
gaaacgaagtctttccctataacag

SEQ ID NO: 150484 - DNA, 25 bp, Probe sequence
gacgcgagttattttgaaccaacag

SEQ ID NO: 150485 - DNA, 25 bp, Probe sequence
gagcatattaaaaaccctggattca

SEQ ID NO: 150486 - DNA, 25 bp, Probe sequence
gagttattttgaaccaacaggcccg

SEQ ID NO: 150487 - DNA, 25 bp, Probe sequence
gagtagttgaattagatccaagcgc

SEQ ID NO: 150488 - DNA, 25 bp, Probe sequence
gaggtaagtgcatcaagttcattcg

SEQ ID NO: 150489 - DNA, 25 bp, Probe sequence
gatcgaagtcacttattatgataag

SEQ ID NO: 150490 - DNA, 25 bp, Probe sequence
gttgtcccagatttatcagagcata

SEQ ID NO: 150491 - DNA, 25 bp, Probe sequence
gttttgttgtcccagatttatcaga

SEQ ID NO: 150492 - DNA, 25 bp, Probe sequence
gttattattctcattttcttcaatt

SEQ ID NO: 150493 - DNA, 25 bp, Probe sequence
gtaagtgcatcaagttcattcgaca

SEQ ID NO: 150494 - DNA, 25 bp, Probe sequence
gtcccagatttatcagagcatatta

SEQ ID NO: 150495 - DNA, 25 bp, Probe sequence
gtgcatcaagttcattcgacaaagg

SEQ ID NO: 150496 - DNA, 25 bp, Probe sequence
ggcgatgacgcgagttattttgaac

SEQ ID NO: 150497 - DNA, 25 bp, Probe sequence
tgatggtaaatgtgactggagttga

SEQ ID NO: 150498 - DNA, 25 bp, Probe sequence
tgtcgagtttcctattaaacctggg

SEQ ID NO: 150499 - DNA, 25 bp, Probe sequence
tattaaacctgggactacacttaca

SEQ ID NO: 150500 - DNA, 25 bp, Probe sequence
tattgttattattctcattttcttc

SEQ ID NO: 150501 - DNA, 25 bp, Probe sequence
ttatgtcgagtttcctattaaacct

SEQ ID NO: 150502 - DNA, 25 bp, Probe sequence
attacggctgtactcactttattag

SEQ ID NO: 150503 - DNA, 25 bp, Probe sequence
atacggtcatattggtttagtgttt

SEQ ID NO: 150504 - DNA, 25 bp, Probe sequence
atgcgaaaatcgacggcttaggtgc

SEQ ID NO: 150505 - DNA, 25 bp, Probe sequence
aggttacgttggtatcaaggtagat

SEQ ID NO: 150506 - DNA, 25 bp, Probe sequence
agcagttgattacatttattggttg

SEQ ID NO: 150507 - DNA, 25 bp, Probe sequence
acgttgggataattattacggctgt

SEQ ID NO: 150508 - DNA, 25 bp, Probe sequence
acggtgataatcgtactaactatag

SEQ ID NO: 150509 - DNA, 25 bp, Probe sequence
actatagattcgatgttggacaggc

SEQ ID NO: 150510 - DNA, 25 bp, Probe sequence
acttcagccactagatacggtgata

SEQ ID NO: 150511 - DNA, 25 bp, Probe sequence
acacaccatcgtttgttccacaaat

SEQ ID NO: 150512 - DNA, 25 bp, Probe sequence
aaagcagtcggtaaatctgcaagta

SEQ ID NO: 150513 - DNA, 25 bp, Probe sequence
aatcgacggcttaggtgctacttca

SEQ ID NO: 150514 - DNA, 25 bp, Probe sequence
cttaggtgctacttcagccactaga

SEQ ID NO: 150515 - DNA, 25 bp, Probe sequence
ccacctgctcaaaaagcagtcggta

SEQ ID NO: 150516 - DNA, 25 bp, Probe sequence
gctgtatacgcgcctggaacattaa

SEQ ID NO: 150517 - DNA, 25 bp, Probe sequence
gcagatttagcagttgattacattt

SEQ ID NO: 150518 - DNA, 25 bp, Probe sequence
gcaagagcaaggttacgttggtatc

SEQ ID NO: 150519 - DNA, 25 bp, Probe sequence
gaaaacatacagtgaagcaagagca

SEQ ID NO: 150520 - DNA, 25 bp, Probe sequence
gaaaacacaccatcgtttgttccac

SEQ ID NO: 150521 - DNA, 25 bp, Probe sequence
gaaattatagatggttggtgtcgca

SEQ ID NO: 150522 - DNA, 25 bp, Probe sequence
gacggtaacgcaaatacgcctgcaa

SEQ ID NO: 150523 - DNA, 25 bp, Probe sequence
gatggttggtgtcgcatttattgga

SEQ ID NO: 150524 - DNA, 25 bp, Probe sequence
gatatattgattttgacggttggta

SEQ ID NO: 150525 - DNA, 25 bp, Probe sequence
gtatggttaccaatgtgcagattta

SEQ ID NO: 150526 - DNA, 25 bp, Probe sequence
gtcaaaaggtgcttattttaatgcg

SEQ ID NO: 150527 - DNA, 25 bp, Probe sequence
ggtgatgtggctgtatttaccaaag

SEQ ID NO: 150528 - DNA, 25 bp, Probe sequence
ggctgtactcactttattagaccta

SEQ ID NO: 150529 - DNA, 25 bp, Probe sequence
ggcaacagtatatgaaaacacacca

SEQ ID NO: 150530 - DNA, 25 bp, Probe sequence
tggtttagtgtttaatggtggtaat

SEQ ID NO: 150531 - DNA, 25 bp, Probe sequence
tgttggacaggctgtatacgcgcct

SEQ ID NO: 150532 - DNA, 25 bp, Probe sequence
tgattttgacggttggtatggttac

SEQ ID NO: 150533 - DNA, 25 bp, Probe sequence
tgctacttcagccactagatacggt

SEQ ID NO: 150534 - DNA, 25 bp, Probe sequence
tacgcctgcaaagttacgttgggat

SEQ ID NO: 150535 - DNA, 25 bp, Probe sequence
tacgcgcctggaacattaatatatg

SEQ ID NO: 150536 - DNA, 25 bp, Probe sequence
atattgtcagctatctttttatttg

SEQ ID NO: 150537 - DNA, 25 bp, Probe sequence
atacagagcaattaacagacggttt

SEQ ID NO: 150538 - DNA, 25 bp, Probe sequence
agtattaactggtgtgattcaagac

SEQ ID NO: 150539 - DNA, 25 bp, Probe sequence
agcgatattgtcagctatcttttta

SEQ ID NO: 150540 - DNA, 25 bp, Probe sequence
actggtgtgattcaagacccgacta

SEQ ID NO: 150541 - DNA, 25 bp, Probe sequence
aactggtgtgattcaagacccgact

SEQ ID NO: 150542 - DNA, 25 bp, Probe sequence
aatcattttgggtagcgatattgtc

SEQ ID NO: 150543 - DNA, 25 bp, Probe sequence
caagacccgactactaaaggtatag

SEQ ID NO: 150544 - DNA, 25 bp, Probe sequence
caagtttatacagagcaattaacag

SEQ ID NO: 150545 - DNA, 25 bp, Probe sequence
cagctatctttttatttgctcaaaa

SEQ ID NO: 150546 - DNA, 25 bp, Probe sequence
cattttgggtagcgatattgtcagc

SEQ ID NO: 150547 - DNA, 25 bp, Probe sequence
ctggtgtgattcaagacccgactac

SEQ ID NO: 150548 - DNA, 25 bp, Probe sequence
cccgactactaaaggtataggtgat

SEQ ID NO: 150549 - DNA, 25 bp, Probe sequence
gcgatattgtcagctatctttttat

SEQ ID NO: 150550 - DNA, 25 bp, Probe sequence
gctatctttttatttgctcaaaaca

SEQ ID NO: 150551 - DNA, 25 bp, Probe sequence
gcaattaacagacggtttaaacgct

SEQ ID NO: 150552 - DNA, 25 bp, Probe sequence
gacccgactactaaaggtataggtg

SEQ ID NO: 150553 - DNA, 25 bp, Probe sequence
gattcaagacccgactactaaaggt

SEQ ID NO: 150554 - DNA, 25 bp, Probe sequence
gtagcgatattgtcagctatctttt

SEQ ID NO: 150555 - DNA, 25 bp, Probe sequence
gtcagctatctttttatttgctcaa

SEQ ID NO: 150556 - DNA, 25 bp, Probe sequence
gtgtgattcaagacccgactactaa

SEQ ID NO: 150557 - DNA, 25 bp, Probe sequence
gtgattcaagacccgactactaaag

SEQ ID NO: 150558 - DNA, 25 bp, Probe sequence
gggtagcgatattgtcagctatctt

SEQ ID NO: 150559 - DNA, 25 bp, Probe sequence
ggtgtgattcaagacccgactacta

SEQ ID NO: 150560 - DNA, 25 bp, Probe sequence
tggtgtgattcaagacccgactact

SEQ ID NO: 150561 - DNA, 25 bp, Probe sequence
tgtgattcaagacccgactactaaa

SEQ ID NO: 150562 - DNA, 25 bp, Probe sequence
tgattcaagacccgactactaaagg

SEQ ID NO: 150563 - DNA, 25 bp, Probe sequence
ttcaagacccgactactaaaggtat

SEQ ID NO: 150564 - DNA, 25 bp, Probe sequence
tctttttatttgctcaaaacatcgc

SEQ ID NO: 150565 - DNA, 25 bp, Probe sequence
taactggtgtgattcaagacccgac

SEQ ID NO: 150566 - DNA, 25 bp, Probe sequence
taacagacggtttaaacgctatatt

SEQ ID NO: 150567 - DNA, 25 bp, Probe sequence
tattgtcagctatctttttatttgc

SEQ ID NO: 150568 - DNA, 25 bp, Probe sequence
ttgtcagctatctttttatttgctc

SEQ ID NO: 150569 - DNA, 25 bp, Probe sequence
ttgggtagcgatattgtcagctatc

SEQ ID NO: 150570 - DNA, 25 bp, Probe sequence
attcattatttatcacaggaaatta

SEQ ID NO: 150571 - DNA, 25 bp, Probe sequence
attacaagctaatcctgaatataca

SEQ ID NO: 150572 - DNA, 25 bp, Probe sequence
atacaattcattatttatcacagga

SEQ ID NO: 150573 - DNA, 25 bp, Probe sequence
atgaggttaacacaagaaaacgcga

SEQ ID NO: 150574 - DNA, 25 bp, Probe sequence
atgcaggataacaaacaaggattac

SEQ ID NO: 150575 - DNA, 25 bp, Probe sequence
aggttaacacaagaaaacgcgatgt

SEQ ID NO: 150576 - DNA, 25 bp, Probe sequence
agaaaatcaacaatgtgctgaggaa

SEQ ID NO: 150577 - DNA, 25 bp, Probe sequence
agctaatcctgaatatacaattcat

SEQ ID NO: 150578 - DNA, 25 bp, Probe sequence
acacaagaaaacgcgatgttaaaag

SEQ ID NO: 150579 - DNA, 25 bp, Probe sequence
acaagctaatcctgaatatacaatt

SEQ ID NO: 150580 - DNA, 25 bp, Probe sequence
acaattcattatttatcacaggaaa

SEQ ID NO: 150581 - DNA, 25 bp, Probe sequence
aaatcaacaatgtgctgaggaagag

SEQ ID NO: 150582 - DNA, 25 bp, Probe sequence
aaaatcaacaatgtgctgaggaaga

SEQ ID NO: 150583 - DNA, 25 bp, Probe sequence
aagaaaatcaacaatgtgctgagga

SEQ ID NO: 150584 - DNA, 25 bp, Probe sequence
aatcaacaatgtgctgaggaagagt

SEQ ID NO: 150585 - DNA, 25 bp, Probe sequence
aattcattatttatcacaggaaatt

SEQ ID NO: 150586 - DNA, 25 bp, Probe sequence
caattcattatttatcacaggaaat

SEQ ID NO: 150587 - DNA, 25 bp, Probe sequence
caagctaatcctgaatatacaattc

SEQ ID NO: 150588 - DNA, 25 bp, Probe sequence
cacaggaaattatgaggttaacaca

SEQ ID NO: 150589 - DNA, 25 bp, Probe sequence
caggaaattatgaggttaacacaag

SEQ ID NO: 150590 - DNA, 25 bp, Probe sequence
cgcgatgttaaaagcgtatatacaa

SEQ ID NO: 150591 - DNA, 25 bp, Probe sequence
gcgatgttaaaagcgtatatacaag

SEQ ID NO: 150592 - DNA, 25 bp, Probe sequence
gctaatcctgaatatacaattcatt

SEQ ID NO: 150593 - DNA, 25 bp, Probe sequence
gcaggataacaaacaaggattacaa

SEQ ID NO: 150594 - DNA, 25 bp, Probe sequence
gaaaatcaacaatgtgctgaggaag

SEQ ID NO: 150595 - DNA, 25 bp, Probe sequence
gaaaacgcgatgttaaaagcgtata

SEQ ID NO: 150596 - DNA, 25 bp, Probe sequence
gaggttaacacaagaaaacgcgatg

SEQ ID NO: 150597 - DNA, 25 bp, Probe sequence
ggttaacacaagaaaacgcgatgtt

SEQ ID NO: 150598 - DNA, 25 bp, Probe sequence
ggaaattatgaggttaacacaagaa

SEQ ID NO: 150599 - DNA, 25 bp, Probe sequence
taatcctgaatatacaattcattat

SEQ ID NO: 150600 - DNA, 25 bp, Probe sequence
tacaagctaatcctgaatatacaat

SEQ ID NO: 150601 - DNA, 25 bp, Probe sequence
tacaattcattatttatcacaggaa

SEQ ID NO: 150602 - DNA, 25 bp, Probe sequence
tatacaattcattatttatcacagg

SEQ ID NO: 150603 - DNA, 25 bp, Probe sequence
ttacaagctaatcctgaatatacaa

SEQ ID NO: 150604 - DNA, 25 bp, Probe sequence
agtacttctcaaaacaatacggtat

SEQ ID NO: 150605 - DNA, 25 bp, Probe sequence
agataaacaagatccacacgcatgg

SEQ ID NO: 150606 - DNA, 25 bp, Probe sequence
aaagacaaatttaatgacattccaa

SEQ ID NO: 150607 - DNA, 25 bp, Probe sequence
aaaagttaactgacgctgacgttat

SEQ ID NO: 150608 - DNA, 25 bp, Probe sequence
aacaattcaacaaacatttatcgat

SEQ ID NO: 150609 - DNA, 25 bp, Probe sequence
aagttatcgcagtatcaaaagatgt

SEQ ID NO: 150610 - DNA, 25 bp, Probe sequence
aaggtgccttcaagtacttctcaaa

SEQ ID NO: 150611 - DNA, 25 bp, Probe sequence
aatacggtattacaccaggttatat

SEQ ID NO: 150612 - DNA, 25 bp, Probe sequence
gccatgattacaagtgaaggtgcct

SEQ ID NO: 150613 - DNA, 25 bp, Probe sequence
gaaggcactaaaggtgactcttact

SEQ ID NO: 150614 - DNA, 25 bp, Probe sequence
gaagtgtacacagattcaatcggta

SEQ ID NO: 150615 - DNA, 25 bp, Probe sequence
gaacaacgtgccatgattacaagtg

SEQ ID NO: 150616 - DNA, 25 bp, Probe sequence
gaaagcaatggaaagtttatctgaa

SEQ ID NO: 150617 - DNA, 25 bp, Probe sequence
gaaactgtacacggaagcatgaaat

SEQ ID NO: 150618 - DNA, 25 bp, Probe sequence
gacattccaaaagaacaacgtgcca

SEQ ID NO: 150619 - DNA, 25 bp, Probe sequence
gagacaagctattgagtttgttaaa

SEQ ID NO: 150620 - DNA, 25 bp, Probe sequence
gatgttaaacctatctatttaaacg

SEQ ID NO: 150621 - DNA, 25 bp, Probe sequence
gatccacacgcatggttaagtttag

SEQ ID NO: 150622 - DNA, 25 bp, Probe sequence
gatatctttggtgaagtgtacacag

SEQ ID NO: 150623 - DNA, 25 bp, Probe sequence
gatattcatagtattgtacctgttg

SEQ ID NO: 150624 - DNA, 25 bp, Probe sequence
gattcaatcggtaaagaaggcacta

SEQ ID NO: 150625 - DNA, 25 bp, Probe sequence
gttggtcaagatcctcatgaatatg

SEQ ID NO: 150626 - DNA, 25 bp, Probe sequence
gttgctgcatgtggtactggtggta

SEQ ID NO: 150627 - DNA, 25 bp, Probe sequence
gtagtaacgacgaattcaattttat

SEQ ID NO: 150628 - DNA, 25 bp, Probe sequence
gtacctgttggtcaagatcctcatg

SEQ ID NO: 150629 - DNA, 25 bp, Probe sequence
gtggtactggtggtaaacaaagcag

SEQ ID NO: 150630 - DNA, 25 bp, Probe sequence
ggtggagacaacgtcgatattcata

SEQ ID NO: 150631 - DNA, 25 bp, Probe sequence
ggtgactcttactacaaaatgatga

SEQ ID NO: 150632 - DNA, 25 bp, Probe sequence
ggtaacaaatacattgctcaattgg

SEQ ID NO: 150633 - DNA, 25 bp, Probe sequence
tgatatggctaaaaatgttggtgga

SEQ ID NO: 150634 - DNA, 25 bp, Probe sequence
tgacgctgacgttattttatacaac

SEQ ID NO: 150635 - DNA, 25 bp, Probe sequence
tagaacaggctggtaaatcattaaa

SEQ ID NO: 150636 - DNA, 25 bp, Probe sequence
tagagactggtaacggttggtttga

SEQ ID NO: 150637 - DNA, 25 bp, Probe sequence
tagtacctttattattagccttatt

SEQ ID NO: 150638 - DNA, 25 bp, Probe sequence
attcggccgcagctaatttgcatat

SEQ ID NO: 150639 - DNA, 25 bp, Probe sequence
atcggaagacacctataaacttgat

SEQ ID NO: 150640 - DNA, 25 bp, Probe sequence
atccaaacacagacaaagtgcctgg

SEQ ID NO: 150641 - DNA, 25 bp, Probe sequence
aggttcagatgatgcaggagatagg

SEQ ID NO: 150642 - DNA, 25 bp, Probe sequence
acagacctactgtctgtaggttcag

SEQ ID NO: 150643 - DNA, 25 bp, Probe sequence
acaacaatcgaagcagggtatggca

SEQ ID NO: 150644 - DNA, 25 bp, Probe sequence
aaaagcaaacaggcaccggtgtatt

SEQ ID NO: 150645 - DNA, 25 bp, Probe sequence
aaccgatttgcattcacgctgtcta

SEQ ID NO: 150646 - DNA, 25 bp, Probe sequence
aagctattcttaacttacctattag

SEQ ID NO: 150647 - DNA, 25 bp, Probe sequence
aagtgcctggattaaaccgatttgc

SEQ ID NO: 150648 - DNA, 25 bp, Probe sequence
aatggacgatatgcaacaggtggag

SEQ ID NO: 150649 - DNA, 25 bp, Probe sequence
aatcgggttgttctggagtcttacg

SEQ ID NO: 150650 - DNA, 25 bp, Probe sequence
aatcaattcctatggtggtgtcgtt

SEQ ID NO: 150651 - DNA, 25 bp, Probe sequence
aattgggcgttcgacatcagcgcgt

SEQ ID NO: 150652 - DNA, 25 bp, Probe sequence
cattcacgctgtctaatgcagataa

SEQ ID NO: 150653 - DNA, 25 bp, Probe sequence
gctgagtctgaaattttagctagag

SEQ ID NO: 150654 - DNA, 25 bp, Probe sequence
gaacgtggtttgataaagctgagtc

SEQ ID NO: 150655 - DNA, 25 bp, Probe sequence
gaaacgacgtgatggtaataggtat

SEQ ID NO: 150656 - DNA, 25 bp, Probe sequence
gatacgtaggtttgattgctgaaga

SEQ ID NO: 150657 - DNA, 25 bp, Probe sequence
gataggatagcttctaactcaattt

SEQ ID NO: 150658 - DNA, 25 bp, Probe sequence
gattcatcttatccctgttatcaaa

SEQ ID NO: 150659 - DNA, 25 bp, Probe sequence
gttcgacatcagcgcgtaaatacaa

SEQ ID NO: 150660 - DNA, 25 bp, Probe sequence
gtggtgtcgttgcactaacgtcaga

SEQ ID NO: 150661 - DNA, 25 bp, Probe sequence
ggtgcgggtatcaggttttctaaag

SEQ ID NO: 150662 - DNA, 25 bp, Probe sequence
ggttatattatgtttggttctgatg

SEQ ID NO: 150663 - DNA, 25 bp, Probe sequence
ggagtcttacgcttcatcgaatatc

SEQ ID NO: 150664 - DNA, 25 bp, Probe sequence
ggcaccggtgtatttatatccaaac

SEQ ID NO: 150665 - DNA, 25 bp, Probe sequence
tgatcgtctatggattcatcttatc

SEQ ID NO: 150666 - DNA, 25 bp, Probe sequence
tgagaactatgattacggtgcgggt

SEQ ID NO: 150667 - DNA, 25 bp, Probe sequence
tgaaggtatagcgtatgatcgtcta

SEQ ID NO: 150668 - DNA, 25 bp, Probe sequence
tgctggcacaattgggcgttcgaca

SEQ ID NO: 150669 - DNA, 25 bp, Probe sequence
tatacagagtacagacctactgtct

SEQ ID NO: 150670 - DNA, 25 bp, Probe sequence
tttgcatattacttctgctggcaca

SEQ ID NO: 150671 - DNA, 25 bp, Probe sequence
ttatagacgtacttattcggccgca

SEQ ID NO: 150672 - DNA, 25 bp, Probe sequence
attgtgcaacgtacttggagaggga

SEQ ID NO: 150673 - DNA, 25 bp, Probe sequence
atttggggaatatacgaacctcaat

SEQ ID NO: 150674 - DNA, 25 bp, Probe sequence
atacgaacctcaatcagatgatcaa

SEQ ID NO: 150675 - DNA, 25 bp, Probe sequence
atgaatgaaacacggttgcgttctt

SEQ ID NO: 150676 - DNA, 25 bp, Probe sequence
agcgtttagagttagttgtgactga

SEQ ID NO: 150677 - DNA, 25 bp, Probe sequence
acgaagcacaaagtcaattcaactt

SEQ ID NO: 150678 - DNA, 25 bp, Probe sequence
acttggagagggaaacgttcaacag

SEQ ID NO: 150679 - DNA, 25 bp, Probe sequence
acagacgatatttttacgcgactga

SEQ ID NO: 150680 - DNA, 25 bp, Probe sequence
aaacgagattgttcaaaatgttaca

SEQ ID NO: 150681 - DNA, 25 bp, Probe sequence
aatgaaacacggttgcgttctttag

SEQ ID NO: 150682 - DNA, 25 bp, Probe sequence
tcaacttacctacccgttatatttg

SEQ ID NO: 150683 - DNA, 25 bp, Probe sequence
caacagacgatatttttacgcgact

SEQ ID NO: 150684 - DNA, 25 bp, Probe sequence
cgcgactgaaagacggtcacctaag

SEQ ID NO: 150685 - DNA, 25 bp, Probe sequence
gaatatacgaacctcaatcagatga

SEQ ID NO: 150686 - DNA, 25 bp, Probe sequence
gaaagacggtcacctaagatttaga

SEQ ID NO: 150687 - DNA, 25 bp, Probe sequence
gactgaaagacggtcacctaagatt

SEQ ID NO: 150688 - DNA, 25 bp, Probe sequence
gacggtcacctaagatttagaaata

SEQ ID NO: 150689 - DNA, 25 bp, Probe sequence
gacgatatttttacgcgactgaaag

SEQ ID NO: 150690 - DNA, 25 bp, Probe sequence
gacccgaaaatgacaaaggaaagcg

SEQ ID NO: 150691 - DNA, 25 bp, Probe sequence
gagagggaaacgttcaacagacgat

SEQ ID NO: 150692 - DNA, 25 bp, Probe sequence
gatatttttacgcgactgaaagacg

SEQ ID NO: 150693 - DNA, 25 bp, Probe sequence
gattgttcaaaatgttacagatgga

SEQ ID NO: 150694 - DNA, 25 bp, Probe sequence
gttcaacagacgatatttttacgcg

SEQ ID NO: 150695 - DNA, 25 bp, Probe sequence
gttagttgtgactgatgacgaagca

SEQ ID NO: 150696 - DNA, 25 bp, Probe sequence
gtgcaacgtacttggagagggaaac

SEQ ID NO: 150697 - DNA, 25 bp, Probe sequence
gggaaacgttcaacagacgatattt

SEQ ID NO: 150698 - DNA, 25 bp, Probe sequence
ggggaatatacgaacctcaatcaga

SEQ ID NO: 150699 - DNA, 25 bp, Probe sequence
tggtattgtgcaacgtacttggaga

SEQ ID NO: 150700 - DNA, 25 bp, Probe sequence
tgaaacacggttgcgttctttagcc

SEQ ID NO: 150701 - DNA, 25 bp, Probe sequence
tcaattcaacttacctacccgttat

SEQ ID NO: 150702 - DNA, 25 bp, Probe sequence
tacgcgactgaaagacggtcaccta

SEQ ID NO: 150703 - DNA, 25 bp, Probe sequence
tagagttagttgtgactgatgacga

SEQ ID NO: 150704 - DNA, 25 bp, Probe sequence
tagttgtgactgatgacgaagcaca

SEQ ID NO: 150705 - DNA, 25 bp, Probe sequence
tttacgcgactgaaagacggtcacc

SEQ ID NO: 150706 - DNA, 25 bp, Probe sequence
atcgtacaacgaacttggaaaggca

SEQ ID NO: 150707 - DNA, 25 bp, Probe sequence
atatgaaccacaatcagatgatcaa

SEQ ID NO: 150708 - DNA, 25 bp, Probe sequence
atagagaatttaatgtagtcgcaaa

SEQ ID NO: 150709 - DNA, 25 bp, Probe sequence
atactattgataaagatggcgtgaa

SEQ ID NO: 150710 - DNA, 25 bp, Probe sequence
atgacattgttaatagcctaaactt

SEQ ID NO: 150711 - DNA, 25 bp, Probe sequence
acctatgcgctatatttgggggata

SEQ ID NO: 150712 - DNA, 25 bp, Probe sequence
agcgtttagagctagttgtgacaga

SEQ ID NO: 150713 - DNA, 25 bp, Probe sequence
agcgcaaagtcaattcaacctacct

SEQ ID NO: 150714 - DNA, 25 bp, Probe sequence
acactatcaagattgttagcagaca

SEQ ID NO: 150715 - DNA, 25 bp, Probe sequence
aacctacctatgcgctatatttggg

SEQ ID NO: 150716 - DNA, 25 bp, Probe sequence
aaccgatgatatattcacacgtctt

SEQ ID NO: 150717 - DNA, 25 bp, Probe sequence
aatgattttattgaacttggcggaa

SEQ ID NO: 150718 - DNA, 25 bp, Probe sequence
aagtcaattcaacctacctatgcgc

SEQ ID NO: 150719 - DNA, 25 bp, Probe sequence
aagggaagcgtttagagctagttgt

SEQ ID NO: 150720 - DNA, 25 bp, Probe sequence
aattcaacctacctatgcgctatat

SEQ ID NO: 150721 - DNA, 25 bp, Probe sequence
caagcgattaaacctaatacaccaa

SEQ ID NO: 150722 - DNA, 25 bp, Probe sequence
gaattggtattaaaggcggaaatgc

SEQ ID NO: 150723 - DNA, 25 bp, Probe sequence
gaaggtcttgacatcaatgtgaata

SEQ ID NO: 150724 - DNA, 25 bp, Probe sequence
gaacttggcggaatcgtacaacgaa

SEQ ID NO: 150725 - DNA, 25 bp, Probe sequence
gaaaggcatctatttaaggtatgac

SEQ ID NO: 150726 - DNA, 25 bp, Probe sequence
gacgaaaatggggcgattacttcac

SEQ ID NO: 150727 - DNA, 25 bp, Probe sequence
gatggcgtgaaaattagtggcgata

SEQ ID NO: 150728 - DNA, 25 bp, Probe sequence
gatatattcacacgtcttaaagatg

SEQ ID NO: 150729 - DNA, 25 bp, Probe sequence
gttaatagcctaaacttatcaaatg

SEQ ID NO: 150730 - DNA, 25 bp, Probe sequence
gtggcgataaagttgatataacagc

SEQ ID NO: 150731 - DNA, 25 bp, Probe sequence
gggggatatatgaaccacaatcaga

SEQ ID NO: 150732 - DNA, 25 bp, Probe sequence
ggggcgattacttcacatactattg

SEQ ID NO: 150733 - DNA, 25 bp, Probe sequence
ggaaaggcaaacgatcaaccgatga

SEQ ID NO: 150734 - DNA, 25 bp, Probe sequence
ggcggaaatgctaaccgttatgtac

SEQ ID NO: 150735 - DNA, 25 bp, Probe sequence
tgttagcagacatcactgtaaatgc

SEQ ID NO: 150736 - DNA, 25 bp, Probe sequence
tgaaacacgattaagttctttagcc

SEQ ID NO: 150737 - DNA, 25 bp, Probe sequence
tgctaaccgttatgtacaagttcaa

SEQ ID NO: 150738 - DNA, 25 bp, Probe sequence
taatgcttctaaaagaacactatca

SEQ ID NO: 150739 - DNA, 25 bp, Probe sequence
tagttgtgacagatgacgaagcgca

SEQ ID NO: 150740 - DNA, 25 bp, Probe sequence
atagtgggactgctgacactccttt

SEQ ID NO: 150741 - DNA, 25 bp, Probe sequence
aaccgaaaggcgcaagggatgtcat

SEQ ID NO: 150742 - DNA, 25 bp, Probe sequence
aggacatattgttgttacgttgtat

SEQ ID NO: 150743 - DNA, 25 bp, Probe sequence
agttacttgcttctattggttatga

SEQ ID NO: 150744 - DNA, 25 bp, Probe sequence
actcctttaattgttgaagcccgag

SEQ ID NO: 150745 - DNA, 25 bp, Probe sequence
acatgcctcctgtttatcatagtga

SEQ ID NO: 150746 - DNA, 25 bp, Probe sequence
aaagcaactaattttcctgatgcaa

SEQ ID NO: 150747 - DNA, 25 bp, Probe sequence
aagagtggatagatggcggtaagtt

SEQ ID NO: 150748 - DNA, 25 bp, Probe sequence
aaggttgggttggtgctggcacgaa

SEQ ID NO: 150749 - DNA, 25 bp, Probe sequence
aatttgatcacattaaagacccaga

SEQ ID NO: 150750 - DNA, 25 bp, Probe sequence
catacaacctgaaaacgtctttgat

SEQ ID NO: 150751 - DNA, 25 bp, Probe sequence
cgagggctccctaaagcgatgacag

SEQ ID NO: 150752 - DNA, 25 bp, Probe sequence
gccggaagaacagcacaacatattt

SEQ ID NO: 150753 - DNA, 25 bp, Probe sequence
gcgatgacagattttcaaattacct

SEQ ID NO: 150754 - DNA, 25 bp, Probe sequence
gcgatttcagaccaagtttcagttg

SEQ ID NO: 150755 - DNA, 25 bp, Probe sequence
gcgtccagcttctatcatagctatc

SEQ ID NO: 150756 - DNA, 25 bp, Probe sequence
gaagattattttatggttggtgatg

SEQ ID NO: 150757 - DNA, 25 bp, Probe sequence
gaaccaatgttgagcgagaaatcgt

SEQ ID NO: 150758 - DNA, 25 bp, Probe sequence
gactgctgacactcctttaattgtt

SEQ ID NO: 150759 - DNA, 25 bp, Probe sequence
gacgtaaacctattgatatggatga

SEQ ID NO: 150760 - DNA, 25 bp, Probe sequence
gttaaggattacatgcctcctgttt

SEQ ID NO: 150761 - DNA, 25 bp, Probe sequence
gtttatatgcggctcagaagagtag

SEQ ID NO: 150762 - DNA, 25 bp, Probe sequence
gttttatcagcgtccagcttctatc

SEQ ID NO: 150763 - DNA, 25 bp, Probe sequence
gtctttgatacgacggttaaatggc

SEQ ID NO: 150764 - DNA, 25 bp, Probe sequence
gtgagtttcgtgatttcaaaggttg

SEQ ID NO: 150765 - DNA, 25 bp, Probe sequence
gtgatatccaatcttggcgaaggat

SEQ ID NO: 150766 - DNA, 25 bp, Probe sequence
gtgatggtaagttacttgcttctat

SEQ ID NO: 150767 - DNA, 25 bp, Probe sequence
gtgttgtcatcaatgaggaaccaat

SEQ ID NO: 150768 - DNA, 25 bp, Probe sequence
ggttcattcaatacggagattctac

SEQ ID NO: 150769 - DNA, 25 bp, Probe sequence
ggagaccccaaaaagatatacgact

SEQ ID NO: 150770 - DNA, 25 bp, Probe sequence
ggcggtaagttttatcagcgtccag

SEQ ID NO: 150771 - DNA, 25 bp, Probe sequence
tggtgctggcacgaaacgagggctc

SEQ ID NO: 150772 - DNA, 25 bp, Probe sequence
taaagacccagatagacgtaaacct

SEQ ID NO: 150773 - DNA, 25 bp, Probe sequence
ttcaatgttgattctgggtacagtg

SEQ ID NO: 150774 - DNA, 25 bp, Probe sequence
atagttttgatatacctttggtggt

SEQ ID NO: 150775 - DNA, 25 bp, Probe sequence
atctaaagattggtactggaacgct

SEQ ID NO: 150776 - DNA, 25 bp, Probe sequence
agggcgtaggcttgaatcttatagt

SEQ ID NO: 150777 - DNA, 25 bp, Probe sequence
acctttggtggtacgtaatgactat

SEQ ID NO: 150778 - DNA, 25 bp, Probe sequence
acctgttaagttcactatcaaagta

SEQ ID NO: 150779 - DNA, 25 bp, Probe sequence
actaacagacccttacaaatattca

SEQ ID NO: 150780 - DNA, 25 bp, Probe sequence
aaacaattccttggttgtatgtcga

SEQ ID NO: 150781 - DNA, 25 bp, Probe sequence
aacacatgatgacgtcttgaatgaa

SEQ ID NO: 150782 - DNA, 25 bp, Probe sequence
aacagacccttacaaatattcagta

SEQ ID NO: 150783 - DNA, 25 bp, Probe sequence
aagattggtactggaacgcttattt

SEQ ID NO: 150784 - DNA, 25 bp, Probe sequence
aattccttggttgtatgtcgaaaga

SEQ ID NO: 150785 - DNA, 25 bp, Probe sequence
caatacctgttaagttcactatcaa

SEQ ID NO: 150786 - DNA, 25 bp, Probe sequence
gtagtactaacagacccttacaaat

SEQ ID NO: 150787 - DNA, 25 bp, Probe sequence
gatggacgttcggggtctatatata

SEQ ID NO: 150788 - DNA, 25 bp, Probe sequence
gaaggaccaataaagctgcacaaag

SEQ ID NO: 150789 - DNA, 25 bp, Probe sequence
gaaaatgtagatggacgttcggggt

SEQ ID NO: 150790 - DNA, 25 bp, Probe sequence
gacccttacaaatattcagtaacag

SEQ ID NO: 150791 - DNA, 25 bp, Probe sequence
gaccaataaagctgcacaaagaatt

SEQ ID NO: 150792 - DNA, 25 bp, Probe sequence
gatgacgtcttgaatgaattagtaa

SEQ ID NO: 150793 - DNA, 25 bp, Probe sequence
gtatgtcgaaagagggtttgaaata

SEQ ID NO: 150794 - DNA, 25 bp, Probe sequence
gtagatggacgttcggggtctatat

SEQ ID NO: 150795 - DNA, 25 bp, Probe sequence
gtaggcttgaatcttatagttttga

SEQ ID NO: 150796 - DNA, 25 bp, Probe sequence
gtacgtaatgactatttatctcaca

SEQ ID NO: 150797 - DNA, 25 bp, Probe sequence
gtgaacaacaaaacaattccttggt

SEQ ID NO: 150798 - DNA, 25 bp, Probe sequence
gtaatgactatttatctcacaacgg

SEQ ID NO: 150799 - DNA, 25 bp, Probe sequence
gtggtacgtaatgactatttatctc

SEQ ID NO: 150800 - DNA, 25 bp, Probe sequence
ggacgttcggggtctatatataaag

SEQ ID NO: 150801 - DNA, 25 bp, Probe sequence
ggttgtatgtcgaaagagggtttga

SEQ ID NO: 150802 - DNA, 25 bp, Probe sequence
ggcgtaggcttgaatcttatagttt

SEQ ID NO: 150803 - DNA, 25 bp, Probe sequence
tcggggtctatatataaagggcgta

SEQ ID NO: 150804 - DNA, 25 bp, Probe sequence
tcaaagtagtactaacagaccctta

SEQ ID NO: 150805 - DNA, 25 bp, Probe sequence
taaaaatactgcgatttcagaccaa

SEQ ID NO: 150806 - DNA, 25 bp, Probe sequence
taaagggcgtaggcttgaatcttat

SEQ ID NO: 150807 - DNA, 25 bp, Probe sequence
ttaaaacacatgatgacgtcttgaa

SEQ ID NO: 150808 - DNA, 25 bp, Probe sequence
atcaccacctagtggcacgatggta

SEQ ID NO: 150809 - DNA, 25 bp, Probe sequence
ataccggatttagtacaggaccaca

SEQ ID NO: 150810 - DNA, 25 bp, Probe sequence
atcaatcgctttattctctcaatgg

SEQ ID NO: 150811 - DNA, 25 bp, Probe sequence
atcattatggacgtaccgcagctta

SEQ ID NO: 150812 - DNA, 25 bp, Probe sequence
aggtgaagacggtcatccagaatgg

SEQ ID NO: 150813 - DNA, 25 bp, Probe sequence
acacaaggttaggtttcactggcaa

SEQ ID NO: 150814 - DNA, 25 bp, Probe sequence
aaactttagcaaatcaccacctagt

SEQ ID NO: 150815 - DNA, 25 bp, Probe sequence
aagttggcgatgttttagattttat

SEQ ID NO: 150816 - DNA, 25 bp, Probe sequence
aagattctgaaagtggctccgaaag

SEQ ID NO: 150817 - DNA, 25 bp, Probe sequence
aaggtgtcgattttccatttgtata

SEQ ID NO: 150818 - DNA, 25 bp, Probe sequence
cattttgaccctgaaccatatttaa

SEQ ID NO: 150819 - DNA, 25 bp, Probe sequence
cccaagcaacaggagcaaccggcgg

SEQ ID NO: 150820 - DNA, 25 bp, Probe sequence
ccggatatagctagcgcaacaagtt

SEQ ID NO: 150821 - DNA, 25 bp, Probe sequence
gcgaaagcagcacaggctagcggta

SEQ ID NO: 150822 - DNA, 25 bp, Probe sequence
gctatgggcggtggcgatttagtcg

SEQ ID NO: 150823 - DNA, 25 bp, Probe sequence
gcattactaaatacggtgctccaat

SEQ ID NO: 150824 - DNA, 25 bp, Probe sequence
gcatttggtgcaaaagcaggtcctg

SEQ ID NO: 150825 - DNA, 25 bp, Probe sequence
gcaggtcctgatttagcagatgcta

SEQ ID NO: 150826 - DNA, 25 bp, Probe sequence
gcacctgttttaggtattgcagcag

SEQ ID NO: 150827 - DNA, 25 bp, Probe sequence
gcaaccggcggagagcttaagaagt

SEQ ID NO: 150828 - DNA, 25 bp, Probe sequence
gaagaccatttcatgaaggtgtcga

SEQ ID NO: 150829 - DNA, 25 bp, Probe sequence
gagactgtaggcggtgttttagggg

SEQ ID NO: 150830 - DNA, 25 bp, Probe sequence
gagagtgccacagagtcattcttga

SEQ ID NO: 150831 - DNA, 25 bp, Probe sequence
gagggctatgggctttgagatgaaa

SEQ ID NO: 150832 - DNA, 25 bp, Probe sequence
gattatcagccgattattgacgaat

SEQ ID NO: 150833 - DNA, 25 bp, Probe sequence
gtttagatacagttacccaagcaac

SEQ ID NO: 150834 - DNA, 25 bp, Probe sequence
gtaccgcagcttataccgctgcaac

SEQ ID NO: 150835 - DNA, 25 bp, Probe sequence
gtgttgatacattagctgatagcat

SEQ ID NO: 150836 - DNA, 25 bp, Probe sequence
gtggcgttatcgatatgctatttgc

SEQ ID NO: 150837 - DNA, 25 bp, Probe sequence
ggtgctccaatgagggctatgggct

SEQ ID NO: 150838 - DNA, 25 bp, Probe sequence
ggcgtacaagccgttcaattaatta

SEQ ID NO: 150839 - DNA, 25 bp, Probe sequence
tgctgctgcaattggtcctgtagtt

SEQ ID NO: 150840 - DNA, 25 bp, Probe sequence
ttaattacgcgtgcaatgggtgatg

SEQ ID NO: 150841 - DNA, 25 bp, Probe sequence
tattccaacagatccagctcgtaga

SEQ ID NO: 150842 - DNA, 25 bp, Probe sequence
attcatctaccggcgcatctaaaag

SEQ ID NO: 150843 - DNA, 25 bp, Probe sequence
agtacaggacctcacttacattatg

SEQ ID NO: 150844 - DNA, 25 bp, Probe sequence
atatccggtatctggggtgttatca

SEQ ID NO: 150845 - DNA, 25 bp, Probe sequence
atgtcgctcctgtagcaggtgcgtt

SEQ ID NO: 150846 - DNA, 25 bp, Probe sequence
atggcacttgctggttgggattcta

SEQ ID NO: 150847 - DNA, 25 bp, Probe sequence
aggctcgcgaaatgggtgcaacaac

SEQ ID NO: 150848 - DNA, 25 bp, Probe sequence
agatccttcatttagagcgtacgca

SEQ ID NO: 150849 - DNA, 25 bp, Probe sequence
agcggcagcatctggcgaagaactg

SEQ ID NO: 150850 - DNA, 25 bp, Probe sequence
aatgttcaccaatctttcaagtcca

SEQ ID NO: 150851 - DNA, 25 bp, Probe sequence
cggcaaggctcattcgttatttacg

SEQ ID NO: 150852 - DNA, 25 bp, Probe sequence
gccggcggttaaagctttgattgtc

SEQ ID NO: 150853 - DNA, 25 bp, Probe sequence
gcgaccaaacaacttaccaaatcca

SEQ ID NO: 150854 - DNA, 25 bp, Probe sequence
gcaaagacacaagctgcggctgcta

SEQ ID NO: 150855 - DNA, 25 bp, Probe sequence
gcaacgcaagagctggtataccttc

SEQ ID NO: 150856 - DNA, 25 bp, Probe sequence
gaacctgttccatcaaccattaatg

SEQ ID NO: 150857 - DNA, 25 bp, Probe sequence
gactatgtatgtaactgcgccggtg

SEQ ID NO: 150858 - DNA, 25 bp, Probe sequence
gacgcccattccatgaaggtctgga

SEQ ID NO: 150859 - DNA, 25 bp, Probe sequence
gagagctgcgttcaaacgcgctggt

SEQ ID NO: 150860 - DNA, 25 bp, Probe sequence
gatgatgcgtgttgcgagtcgtgaa

SEQ ID NO: 150861 - DNA, 25 bp, Probe sequence
gatgctttcgcagagtcgggtgatg

SEQ ID NO: 150862 - DNA, 25 bp, Probe sequence
gatatttccacccgaaactgtagca

SEQ ID NO: 150863 - DNA, 25 bp, Probe sequence
gttggtattggcatagctttctatc

SEQ ID NO: 150864 - DNA, 25 bp, Probe sequence
gttgatgcaatcgttggtttcgcca

SEQ ID NO: 150865 - DNA, 25 bp, Probe sequence
gttacttatacggtcacactgctgc

SEQ ID NO: 150866 - DNA, 25 bp, Probe sequence
gtcgggttacaataatcctctcaac

SEQ ID NO: 150867 - DNA, 25 bp, Probe sequence
gtcacactgctgcttatacacgaga

SEQ ID NO: 150868 - DNA, 25 bp, Probe sequence
ggtggttgctgggtttgctgtagca

SEQ ID NO: 150869 - DNA, 25 bp, Probe sequence
ggaagacatagagacccgttaccgt

SEQ ID NO: 150870 - DNA, 25 bp, Probe sequence
ggcaatctctggtgtagcaaacgca

SEQ ID NO: 150871 - DNA, 25 bp, Probe sequence
ggcgcggttaccctagagaagatat

SEQ ID NO: 150872 - DNA, 25 bp, Probe sequence
tctcaacccaactcatcaagctata

SEQ ID NO: 150873 - DNA, 25 bp, Probe sequence
tatacacgagaaaccggacgcccat

SEQ ID NO: 150874 - DNA, 25 bp, Probe sequence
taggcgctcaattagcctctttctg

SEQ ID NO: 150875 - DNA, 25 bp, Probe sequence
tttcgcgtgagctttcggctaattt

SEQ ID NO: 150876 - DNA, 25 bp, Probe sequence
atacacttctttttagacattgtcg

SEQ ID NO: 150877 - DNA, 25 bp, Probe sequence
atgccgatacacttctttttagaca

SEQ ID NO: 150878 - DNA, 25 bp, Probe sequence
atggatgcagaaaaagtggctaaca

SEQ ID NO: 150879 - DNA, 25 bp, Probe sequence
agtggctaacatgccgatacacttc

SEQ ID NO: 150880 - DNA, 25 bp, Probe sequence
acttctttttagacattgtcgaatc

SEQ ID NO: 150881 - DNA, 25 bp, Probe sequence
acatgccgatacacttctttttaga

SEQ ID NO: 150882 - DNA, 25 bp, Probe sequence
acacttctttttagacattgtcgaa

SEQ ID NO: 150883 - DNA, 25 bp, Probe sequence
aaagtggctaacatgccgatacact

SEQ ID NO: 150884 - DNA, 25 bp, Probe sequence
aaaaagtggctaacatgccgataca

SEQ ID NO: 150885 - DNA, 25 bp, Probe sequence
aaaagtggctaacatgccgatacac

SEQ ID NO: 150886 - DNA, 25 bp, Probe sequence
aacatgccgatacacttctttttag

SEQ ID NO: 150887 - DNA, 25 bp, Probe sequence
aagtggctaacatgccgatacactt

SEQ ID NO: 150888 - DNA, 25 bp, Probe sequence
cacttctttttagacattgtcgaat

SEQ ID NO: 150889 - DNA, 25 bp, Probe sequence
catgccgatacacttctttttagac

SEQ ID NO: 150890 - DNA, 25 bp, Probe sequence
ctttttagacattgtcgaatcgaag

SEQ ID NO: 150891 - DNA, 25 bp, Probe sequence
ctaacatgccgatacacttcttttt

SEQ ID NO: 150892 - DNA, 25 bp, Probe sequence
cgatacacttctttttagacattgt

SEQ ID NO: 150893 - DNA, 25 bp, Probe sequence
ccgatacacttctttttagacattg

SEQ ID NO: 150894 - DNA, 25 bp, Probe sequence
gcgaactgcgaaaagttttaaagat

SEQ ID NO: 150895 - DNA, 25 bp, Probe sequence
gccgatacacttctttttagacatt

SEQ ID NO: 150896 - DNA, 25 bp, Probe sequence
gctaacatgccgatacacttctttt

SEQ ID NO: 150897 - DNA, 25 bp, Probe sequence
gaaaaagtggctaacatgccgatac

SEQ ID NO: 150898 - DNA, 25 bp, Probe sequence
gacattgtcgaatcgaagattgaaa

SEQ ID NO: 150899 - DNA, 25 bp, Probe sequence
gatacacttctttttagacattgtc

SEQ ID NO: 150900 - DNA, 25 bp, Probe sequence
gtggctaacatgccgatacacttct

SEQ ID NO: 150901 - DNA, 25 bp, Probe sequence
ggcatggatgcagaaaaagtggcta

SEQ ID NO: 150902 - DNA, 25 bp, Probe sequence
tggctaacatgccgatacacttctt

SEQ ID NO: 150903 - DNA, 25 bp, Probe sequence
tgccgatacacttctttttagacat

SEQ ID NO: 150904 - DNA, 25 bp, Probe sequence
tcgaagattgaaacaaagcgaactg

SEQ ID NO: 150905 - DNA, 25 bp, Probe sequence
taacatgccgatacacttcttttta

SEQ ID NO: 150906 - DNA, 25 bp, Probe sequence
tacacttctttttagacattgtcga

SEQ ID NO: 150907 - DNA, 25 bp, Probe sequence
tagacattgtcgaatcgaagattga

SEQ ID NO: 150908 - DNA, 25 bp, Probe sequence
ttgatagaaaaaggcatggatgcag

SEQ ID NO: 150909 - DNA, 25 bp, Probe sequence
ttctttttagacattgtcgaatcga

SEQ ID NO: 150910 - DNA, 25 bp, Probe sequence
tggacgaattacaggtggggaacct

SEQ ID NO: 150911 - DNA, 25 bp, Probe sequence
ataacttaagtgtgacagaacagga

SEQ ID NO: 150912 - DNA, 25 bp, Probe sequence
atggaacgtacatcaattgaattaa

SEQ ID NO: 150913 - DNA, 25 bp, Probe sequence
agttcgtgacagagaatcagaaata

SEQ ID NO: 150914 - DNA, 25 bp, Probe sequence
acaggaaagccgcaatatcaaaagt

SEQ ID NO: 150915 - DNA, 25 bp, Probe sequence
aaaacaggaaagccgcaatatcaaa

SEQ ID NO: 150916 - DNA, 25 bp, Probe sequence
aaaagttcgtgacagagaatcagaa

SEQ ID NO: 150917 - DNA, 25 bp, Probe sequence
caggtggggaacctagcgatacaaa

SEQ ID NO: 150918 - DNA, 25 bp, Probe sequence
cgattattactttgtttgaaacaat

SEQ ID NO: 150919 - DNA, 25 bp, Probe sequence
gccgcaatatcaaaagtatttagcg

SEQ ID NO: 150920 - DNA, 25 bp, Probe sequence
gaattacaggtggggaacctagcga

SEQ ID NO: 150921 - DNA, 25 bp, Probe sequence
gaaggtattgaaaagattggacagt

SEQ ID NO: 150922 - DNA, 25 bp, Probe sequence
gaagttttggatttcatcgttgaag

SEQ ID NO: 150923 - DNA, 25 bp, Probe sequence
gaagaagttttggatttcatcgttg

SEQ ID NO: 150924 - DNA, 25 bp, Probe sequence
gaacaggaagaatacaaaaacaagc

SEQ ID NO: 150925 - DNA, 25 bp, Probe sequence
gaaacaattcaaggttcaaaattag

SEQ ID NO: 150926 - DNA, 25 bp, Probe sequence
gatacaaaaaagttcgtgacagaga

SEQ ID NO: 150927 - DNA, 25 bp, Probe sequence
gatttacaaaaacaggaaagccgca

SEQ ID NO: 150928 - DNA, 25 bp, Probe sequence
gattggacagttaattggacgaatt

SEQ ID NO: 150929 - DNA, 25 bp, Probe sequence
gttttggatttcatcgttgaagctt

SEQ ID NO: 150930 - DNA, 25 bp, Probe sequence
tggggaacctagcgatacaaaaaag

SEQ ID NO: 150931 - DNA, 25 bp, Probe sequence
gggctgattttaaagatctaacaga

SEQ ID NO: 150932 - DNA, 25 bp, Probe sequence
gggggctgattttaaagatctaaca

SEQ ID NO: 150933 - DNA, 25 bp, Probe sequence
ggatttcatcgttgaagcttttgat

SEQ ID NO: 150934 - DNA, 25 bp, Probe sequence
ggaaagccgcaatatcaaaagtatt

SEQ ID NO: 150935 - DNA, 25 bp, Probe sequence
ggaagtattagaagaagttttggat

SEQ ID NO: 150936 - DNA, 25 bp, Probe sequence
ggaacgtacatcaattgaattaatt

SEQ ID NO: 150937 - DNA, 25 bp, Probe sequence
tcatcgttgaagcttttgataatca

SEQ ID NO: 150938 - DNA, 25 bp, Probe sequence
taagggggctgattttaaagatcta

SEQ ID NO: 150939 - DNA, 25 bp, Probe sequence
taacaaagcctttaagggggctgat

SEQ ID NO: 150940 - DNA, 25 bp, Probe sequence
tacaggtggggaacctagcgataca

SEQ ID NO: 150941 - DNA, 25 bp, Probe sequence
tttgataatcaatttaccagtatag

SEQ ID NO: 150942 - DNA, 25 bp, Probe sequence
tttcatcgttgaagcttttgataat

SEQ ID NO: 150943 - DNA, 25 bp, Probe sequence
ttgaattaattacaggatttacaaa

SEQ ID NO: 150944 - DNA, 25 bp, Probe sequence
atcaaacttttattatgcacctatt

SEQ ID NO: 150945 - DNA, 25 bp, Probe sequence
aggagtttcgggtatcgcaattggg

SEQ ID NO: 150946 - DNA, 25 bp, Probe sequence
atggagctaaggatatcccgccaga

SEQ ID NO: 150947 - DNA, 25 bp, Probe sequence
aggtaaattcactcgttcaagcatc

SEQ ID NO: 150948 - DNA, 25 bp, Probe sequence
acattttgcagatacaggagtttcg

SEQ ID NO: 150949 - DNA, 25 bp, Probe sequence
aagaaattgaagtagaccgtccaca

SEQ ID NO: 150950 - DNA, 25 bp, Probe sequence
aaggaagcactacagggcgcgatta

SEQ ID NO: 150951 - DNA, 25 bp, Probe sequence
cagggcgcgattatgtattcatgga

SEQ ID NO: 150952 - DNA, 25 bp, Probe sequence
tcaactggcctcgttaaaggtttgg

SEQ ID NO: 150953 - DNA, 25 bp, Probe sequence
ccacaaccgaaccatctggacagaa

SEQ ID NO: 150954 - DNA, 25 bp, Probe sequence
gctggcacacgtattcgtttcttaa

SEQ ID NO: 150955 - DNA, 25 bp, Probe sequence
gaagtcacttctgtaaacgtcactg

SEQ ID NO: 150956 - DNA, 25 bp, Probe sequence
gaatgggttggcttgttcaaaggta

SEQ ID NO: 150957 - DNA, 25 bp, Probe sequence
gaatgggaaactggagctggcacac

SEQ ID NO: 150958 - DNA, 25 bp, Probe sequence
gaaagtaacttatgcagtgactgag

SEQ ID NO: 150959 - DNA, 25 bp, Probe sequence
gacaacatttgttactgttcctgct

SEQ ID NO: 150960 - DNA, 25 bp, Probe sequence
gacgacgtagaaggcaattttattg

SEQ ID NO: 150961 - DNA, 25 bp, Probe sequence
gagagctcgcatgttactggctatg

SEQ ID NO: 150962 - DNA, 25 bp, Probe sequence
gagtcttcagaatgggttggcttgt

SEQ ID NO: 150963 - DNA, 25 bp, Probe sequence
gatcgtttgtttgatgagagctcgc

SEQ ID NO: 150964 - DNA, 25 bp, Probe sequence
gatgaattcatgtctagtcgaggag

SEQ ID NO: 150965 - DNA, 25 bp, Probe sequence
gatatcccgccagatgtagcgattg

SEQ ID NO: 150966 - DNA, 25 bp, Probe sequence
gttcctgctgacgataaggcgttct

SEQ ID NO: 150967 - DNA, 25 bp, Probe sequence
gggatgatatggtcgcagcaactgc

SEQ ID NO: 150968 - DNA, 25 bp, Probe sequence
ggtcgcagcaactgctgtatctaat

SEQ ID NO: 150969 - DNA, 25 bp, Probe sequence
ggtttggcggaaggtaatgcgaccg

SEQ ID NO: 150970 - DNA, 25 bp, Probe sequence
tagaccgtccacaagataccgagga

SEQ ID NO: 150971 - DNA, 25 bp, Probe sequence
tgctagcgtaacatcaactggcctc

SEQ ID NO: 150972 - DNA, 25 bp, Probe sequence
tcgggtatcgcaattggggtatcaa

SEQ ID NO: 150973 - DNA, 25 bp, Probe sequence
tcactcgttcaagcatcaaagggca

SEQ ID NO: 150974 - DNA, 25 bp, Probe sequence
taatgcgaccgttacagcgactgca

SEQ ID NO: 150975 - DNA, 25 bp, Probe sequence
taaggcgttcttgaatggcgctaaa

SEQ ID NO: 150976 - DNA, 25 bp, Probe sequence
taaacaactatcagccacaaccgaa

SEQ ID NO: 150977 - DNA, 25 bp, Probe sequence
tttgttactgttcctgctgacgata

SEQ ID NO: 150978 - DNA, 25 bp, Probe sequence
gtttggtggtctcaagatgaaccga

SEQ ID NO: 150979 - DNA, 25 bp, Probe sequence
agagcaaaaggctcgattttatcaa

SEQ ID NO: 150980 - DNA, 25 bp, Probe sequence
acgctgatgataacgagatttcaag

SEQ ID NO: 150981 - DNA, 25 bp, Probe sequence
acgagagtgacgtcatgtcattcag

SEQ ID NO: 150982 - DNA, 25 bp, Probe sequence
acactatagatgaccattttcacga

SEQ ID NO: 150983 - DNA, 25 bp, Probe sequence
aaaaaactgacaagcctattattcg

SEQ ID NO: 150984 - DNA, 25 bp, Probe sequence
aactacactatagatgaccattttc

SEQ ID NO: 150985 - DNA, 25 bp, Probe sequence
aagagaataccattaccaaattgat

SEQ ID NO: 150986 - DNA, 25 bp, Probe sequence
caaattgatgtttggtggtctcaag

SEQ ID NO: 150987 - DNA, 25 bp, Probe sequence
catacgctgatgataacgagatttc

SEQ ID NO: 150988 - DNA, 25 bp, Probe sequence
gcaaaaggctcgattttatcaatga

SEQ ID NO: 150989 - DNA, 25 bp, Probe sequence
gaataccattaccaaattgatgttt

SEQ ID NO: 150990 - DNA, 25 bp, Probe sequence
gaaccgttatacgagagtgacgtca

SEQ ID NO: 150991 - DNA, 25 bp, Probe sequence
gacgtcatgtcattcagacatatta

SEQ ID NO: 150992 - DNA, 25 bp, Probe sequence
gagatttcaagagaataccattacc

SEQ ID NO: 150993 - DNA, 25 bp, Probe sequence
gagagtgacgtcatgtcattcagac

SEQ ID NO: 150994 - DNA, 25 bp, Probe sequence
gagttactcaaagtgataaattttc

SEQ ID NO: 150995 - DNA, 25 bp, Probe sequence
gagtgacgtcatgtcattcagacat

SEQ ID NO: 150996 - DNA, 25 bp, Probe sequence
gatgaccattttcacgaaaaaactg

SEQ ID NO: 150997 - DNA, 25 bp, Probe sequence
gatgtttggtggtctcaagatgaac

SEQ ID NO: 150998 - DNA, 25 bp, Probe sequence
gatgaagtgaatgtgtttaactaca

SEQ ID NO: 150999 - DNA, 25 bp, Probe sequence
gttatacgagagtgacgtcatgtca

SEQ ID NO: 151000 - DNA, 25 bp, Probe sequence
gtttaactacactatagatgaccat

SEQ ID NO: 151001 - DNA, 25 bp, Probe sequence
gtctcaagatgaaccgaacgagcaa

SEQ ID NO: 151002 - DNA, 25 bp, Probe sequence
gtcattcagacatattataagagca

SEQ ID NO: 151003 - DNA, 25 bp, Probe sequence
gtgataaattttcaatgttattaca

SEQ ID NO: 151004 - DNA, 25 bp, Probe sequence
ggtggtctcaagatgaaccgaacga

SEQ ID NO: 151005 - DNA, 25 bp, Probe sequence
ggctcgattttatcaatgaaattgg

SEQ ID NO: 151006 - DNA, 25 bp, Probe sequence
tgttattacagagaaccgttatacg

SEQ ID NO: 151007 - DNA, 25 bp, Probe sequence
tgacacatacgctgatgataacgag

SEQ ID NO: 151008 - DNA, 25 bp, Probe sequence
tagaaacgctattattgcaaataac

SEQ ID NO: 151009 - DNA, 25 bp, Probe sequence
tatagatgaccattttcacgaaaaa

SEQ ID NO: 151010 - DNA, 25 bp, Probe sequence
ttattgcaaataacattacagatga

SEQ ID NO: 151011 - DNA, 25 bp, Probe sequence
ttaccaaattaattagaaacgctat

SEQ ID NO: 151012 - DNA, 25 bp, Probe sequence
atgcttgatactgctaagaggttgc

SEQ ID NO: 151013 - DNA, 25 bp, Probe sequence
atgctcgcgatcacatagctgtttc

SEQ ID NO: 151014 - DNA, 25 bp, Probe sequence
agcatgctcgcgatcacatagctgt

SEQ ID NO: 151015 - DNA, 25 bp, Probe sequence
acgctaaaggcgtctcacatcgtat

SEQ ID NO: 151016 - DNA, 25 bp, Probe sequence
acatagctgtttctaatgtgaaaac

SEQ ID NO: 151017 - DNA, 25 bp, Probe sequence
acatcgtattcatgcaacagaattt

SEQ ID NO: 151018 - DNA, 25 bp, Probe sequence
aaagctggggctatgtcattagtcc

SEQ ID NO: 151019 - DNA, 25 bp, Probe sequence
aaaacaatgcttgatactgctaaga

SEQ ID NO: 151020 - DNA, 25 bp, Probe sequence
aaaagcatgctcgcgatcacatagc

SEQ ID NO: 151021 - DNA, 25 bp, Probe sequence
aagtaatacaccttttgcgaatact

SEQ ID NO: 151022 - DNA, 25 bp, Probe sequence
aattgtcaaagctggggctatgtca

SEQ ID NO: 151023 - DNA, 25 bp, Probe sequence
ctatgtcattagtcccgcttttaaa

SEQ ID NO: 151024 - DNA, 25 bp, Probe sequence
ctcacatcgtattcatgcaacagaa

SEQ ID NO: 151025 - DNA, 25 bp, Probe sequence
cgcgatcacatagctgtttctaatg

SEQ ID NO: 151026 - DNA, 25 bp, Probe sequence
gctggggctatgtcattagtcccgc

SEQ ID NO: 151027 - DNA, 25 bp, Probe sequence
gcgtctcacatcgtattcatgcaac

SEQ ID NO: 151028 - DNA, 25 bp, Probe sequence
gctcgcgatcacatagctgtttcta

SEQ ID NO: 151029 - DNA, 25 bp, Probe sequence
gctaaaggcgtctcacatcgtattc

SEQ ID NO: 151030 - DNA, 25 bp, Probe sequence
gcaacagaatttggaacaatgtacc

SEQ ID NO: 151031 - DNA, 25 bp, Probe sequence
gaatactaaaaagcatgctcgcgat

SEQ ID NO: 151032 - DNA, 25 bp, Probe sequence
gaacaaggtttgaaaaatgcagttt

SEQ ID NO: 151033 - DNA, 25 bp, Probe sequence
gaaaacagacagacacacaagtgag

SEQ ID NO: 151034 - DNA, 25 bp, Probe sequence
gatactgctaagaggttgcaaaaat

SEQ ID NO: 151035 - DNA, 25 bp, Probe sequence
gttacaattggttacgctaaaggcg

SEQ ID NO: 151036 - DNA, 25 bp, Probe sequence
gtaatgtaattgtcaaagctggggc

SEQ ID NO: 151037 - DNA, 25 bp, Probe sequence
gtaataacatcgaacaaggtttgaa

SEQ ID NO: 151038 - DNA, 25 bp, Probe sequence
gtctcacatcgtattcatgcaacag

SEQ ID NO: 151039 - DNA, 25 bp, Probe sequence
ggttacgctaaaggcgtctcacatc

SEQ ID NO: 151040 - DNA, 25 bp, Probe sequence
ggaacaatgtaccaaaaaccacaat

SEQ ID NO: 151041 - DNA, 25 bp, Probe sequence
tggggctatgtcattagtcccgctt

SEQ ID NO: 151042 - DNA, 25 bp, Probe sequence
tgtaccaaaaaccacaattgtttat

SEQ ID NO: 151043 - DNA, 25 bp, Probe sequence
tgtcattagtcccgcttttaaaaag

SEQ ID NO: 151044 - DNA, 25 bp, Probe sequence
taatacaccttttgcgaatactaaa

SEQ ID NO: 151045 - DNA, 25 bp, Probe sequence
taaaggcgtctcacatcgtattcat

SEQ ID NO: 151046 - DNA, 25 bp, Probe sequence
attcattaaaactattattatcaga

SEQ ID NO: 151047 - DNA, 25 bp, Probe sequence
attatactcttgtttcgcttgcatt

SEQ ID NO: 151048 - DNA, 25 bp, Probe sequence
atttgcgtatctatggcgaggtggt

SEQ ID NO: 151049 - DNA, 25 bp, Probe sequence
atatgtaaagccagattatcaagat

SEQ ID NO: 151050 - DNA, 25 bp, Probe sequence
ataaatcttatttgcgtatctatgg

SEQ ID NO: 151051 - DNA, 25 bp, Probe sequence
atcttatttgcgtatctatggcgag

SEQ ID NO: 151052 - DNA, 25 bp, Probe sequence
atccgatgaaaccgaagacgaaaat

SEQ ID NO: 151053 - DNA, 25 bp, Probe sequence
atccgacactcaaacgaatctcaat

SEQ ID NO: 151054 - DNA, 25 bp, Probe sequence
agacgaaaatattatactcttgttt

SEQ ID NO: 151055 - DNA, 25 bp, Probe sequence
agcgagagagtgaacggaaatccga

SEQ ID NO: 151056 - DNA, 25 bp, Probe sequence
acatcaaatatgtaaagccagatta

SEQ ID NO: 151057 - DNA, 25 bp, Probe sequence
aaaccaacaaataagcattacgtct

SEQ ID NO: 151058 - DNA, 25 bp, Probe sequence
aaacgaatctcaatacaggtagcaa

SEQ ID NO: 151059 - DNA, 25 bp, Probe sequence
aagcattacgtcttgcatgaagggc

SEQ ID NO: 151060 - DNA, 25 bp, Probe sequence
aatattatactcttgtttcgcttgc

SEQ ID NO: 151061 - DNA, 25 bp, Probe sequence
cttgtttcgcttgcattcaagaatc

SEQ ID NO: 151062 - DNA, 25 bp, Probe sequence
ccgacactcaaacgaatctcaatac

SEQ ID NO: 151063 - DNA, 25 bp, Probe sequence
gcgtatctatggcgaggtggtcatt

SEQ ID NO: 151064 - DNA, 25 bp, Probe sequence
gaatctaaagaatccgacactcaaa

SEQ ID NO: 151065 - DNA, 25 bp, Probe sequence
gaatccgacactcaaacgaatctca

SEQ ID NO: 151066 - DNA, 25 bp, Probe sequence
gaagggcaaagatttaacatcaaat

SEQ ID NO: 151067 - DNA, 25 bp, Probe sequence
gaacgtatagatttttgtgaagatg

SEQ ID NO: 151068 - DNA, 25 bp, Probe sequence
gacactcaaacgaatctcaatacag

SEQ ID NO: 151069 - DNA, 25 bp, Probe sequence
gatttttgtgaagatgtaagcgaga

SEQ ID NO: 151070 - DNA, 25 bp, Probe sequence
gtttcgcttgcattcaagaatctaa

SEQ ID NO: 151071 - DNA, 25 bp, Probe sequence
gtgaagatgtaagcgagagagtgaa

SEQ ID NO: 151072 - DNA, 25 bp, Probe sequence
ggaaatccgatgaaaccgaagacga

SEQ ID NO: 151073 - DNA, 25 bp, Probe sequence
tacacgaggtgattataaaccaaca

SEQ ID NO: 151074 - DNA, 25 bp, Probe sequence
tacaggtagcaaattcattaaaact

SEQ ID NO: 151075 - DNA, 25 bp, Probe sequence
tactcttgtttcgcttgcattcaag

SEQ ID NO: 151076 - DNA, 25 bp, Probe sequence
tatctatggcgaggtggtcatttaa

SEQ ID NO: 151077 - DNA, 25 bp, Probe sequence
tattatcagagatacacgaggtgat

SEQ ID NO: 151078 - DNA, 25 bp, Probe sequence
ttacgtcttgcatgaagggcaaaga

SEQ ID NO: 151079 - DNA, 25 bp, Probe sequence
ttgcgtatctatggcgaggtggtca

SEQ ID NO: 151080 - DNA, 25 bp, Probe sequence
atttatcgcttgcgccacatatggt

SEQ ID NO: 151081 - DNA, 25 bp, Probe sequence
atttgagcaatttttggagagtgaa

SEQ ID NO: 151082 - DNA, 25 bp, Probe sequence
atagggatttatcgcttgcgccaca

SEQ ID NO: 151083 - DNA, 25 bp, Probe sequence
atagatcacaattcagaggacgact

SEQ ID NO: 151084 - DNA, 25 bp, Probe sequence
atcgcttgcgccacatatggtttta

SEQ ID NO: 151085 - DNA, 25 bp, Probe sequence
atgcaattaacagctgaggaactta

SEQ ID NO: 151086 - DNA, 25 bp, Probe sequence
acggtgcataaattgagaggttcat

SEQ ID NO: 151087 - DNA, 25 bp, Probe sequence
acatatggttttaagtacggtgcat

SEQ ID NO: 151088 - DNA, 25 bp, Probe sequence
acaattcagaggacgacttattaga

SEQ ID NO: 151089 - DNA, 25 bp, Probe sequence
aaaaagcattgcaaaatagatcaca

SEQ ID NO: 151090 - DNA, 25 bp, Probe sequence
aacagctgaggaacttaagttatta

SEQ ID NO: 151091 - DNA, 25 bp, Probe sequence
aaccgtattgcttatttggataggg

SEQ ID NO: 151092 - DNA, 25 bp, Probe sequence
ctattttgaaaaccgtattgcttat

SEQ ID NO: 151093 - DNA, 25 bp, Probe sequence
cgccacatatggttttaagtacggt

SEQ ID NO: 151094 - DNA, 25 bp, Probe sequence
ccgtattgcttatttggatagggat

SEQ ID NO: 151095 - DNA, 25 bp, Probe sequence
gcttgcgccacatatggttttaagt

SEQ ID NO: 151096 - DNA, 25 bp, Probe sequence
gaaaaccgtattgcttatttggata

SEQ ID NO: 151097 - DNA, 25 bp, Probe sequence
gaaatatattactcttgggcattcc

SEQ ID NO: 151098 - DNA, 25 bp, Probe sequence
gagaggttcatttgagcaatttttg

SEQ ID NO: 151099 - DNA, 25 bp, Probe sequence
gatcacaattcagaggacgacttat

SEQ ID NO: 151100 - DNA, 25 bp, Probe sequence
gatttatcgcttgcgccacatatgg

SEQ ID NO: 151101 - DNA, 25 bp, Probe sequence
gattggtttaaaagtcatcctctat

SEQ ID NO: 151102 - DNA, 25 bp, Probe sequence
gtacggtgcataaattgagaggttc

SEQ ID NO: 151103 - DNA, 25 bp, Probe sequence
ggatagggatttatcgcttgcgcca

SEQ ID NO: 151104 - DNA, 25 bp, Probe sequence
ggtttaaaagtcatcctctatttgc

SEQ ID NO: 151105 - DNA, 25 bp, Probe sequence
ggttcatttgagcaatttttggaga

SEQ ID NO: 151106 - DNA, 25 bp, Probe sequence
ggatttatcgcttgcgccacatatg

SEQ ID NO: 151107 - DNA, 25 bp, Probe sequence
tcgcttgcgccacatatggttttaa

SEQ ID NO: 151108 - DNA, 25 bp, Probe sequence
tcagaggacgacttattagaaatat

SEQ ID NO: 151109 - DNA, 25 bp, Probe sequence
taaaagtcatcctctatttgctcgt

SEQ ID NO: 151110 - DNA, 25 bp, Probe sequence
tagcaagttactattttgaaaaccg

SEQ ID NO: 151111 - DNA, 25 bp, Probe sequence
taccctttagcaagttactattttg

SEQ ID NO: 151112 - DNA, 25 bp, Probe sequence
tagggatttatcgcttgcgccacat

SEQ ID NO: 151113 - DNA, 25 bp, Probe sequence
ttatcgcttgcgccacatatggttt

SEQ ID NO: 151114 - DNA, 25 bp, Probe sequence
atacgacgttattacattactttgt

SEQ ID NO: 151115 - DNA, 25 bp, Probe sequence
actttgtgatgttgttactctcatt

SEQ ID NO: 151116 - DNA, 25 bp, Probe sequence
aacactacgacagatttgtaccata

SEQ ID NO: 151117 - DNA, 25 bp, Probe sequence
aagtgtcataagttcaattgtcgga

SEQ ID NO: 151118 - DNA, 25 bp, Probe sequence
aattgtattacgtggtctttcatta

SEQ ID NO: 151119 - DNA, 25 bp, Probe sequence
aattgtcggactttattacagctat

SEQ ID NO: 151120 - DNA, 25 bp, Probe sequence
cattattaattacacctgcatctac

SEQ ID NO: 151121 - DNA, 25 bp, Probe sequence
ctaatcattattttctatcgtccat

SEQ ID NO: 151122 - DNA, 25 bp, Probe sequence
cggtaggtattattcttgtagttgc

SEQ ID NO: 151123 - DNA, 25 bp, Probe sequence
cgctttcttagcttcggggattatt

SEQ ID NO: 151124 - DNA, 25 bp, Probe sequence
gtaaaacgaaacctgacgccgctat

SEQ ID NO: 151125 - DNA, 25 bp, Probe sequence
gaatgagtggtctaaatacgacgtt

SEQ ID NO: 151126 - DNA, 25 bp, Probe sequence
gaaacctgacgccgctattggaatt

SEQ ID NO: 151127 - DNA, 25 bp, Probe sequence
gagtcacgcagtattacctggtgtt

SEQ ID NO: 151128 - DNA, 25 bp, Probe sequence
gagtttgtcgaacatttatttacat

SEQ ID NO: 151129 - DNA, 25 bp, Probe sequence
gatcgcaagtatttttatcggttat

SEQ ID NO: 151130 - DNA, 25 bp, Probe sequence
gatagtttgtggtacagttggtagt

SEQ ID NO: 151131 - DNA, 25 bp, Probe sequence
gattggttcaatcgtccttattcta

SEQ ID NO: 151132 - DNA, 25 bp, Probe sequence
gttgccctatcattcttatttggta

SEQ ID NO: 151133 - DNA, 25 bp, Probe sequence
gtaggcgcacttataactggtatga

SEQ ID NO: 151134 - DNA, 25 bp, Probe sequence
gtagcaagtattcaaacggtaggta

SEQ ID NO: 151135 - DNA, 25 bp, Probe sequence
gtacgtttgtaatttatatcatcac

SEQ ID NO: 151136 - DNA, 25 bp, Probe sequence
ggtattccaatgtttgtaggcgcac

SEQ ID NO: 151137 - DNA, 25 bp, Probe sequence
tgggagatgcaatgagtcacgcagt

SEQ ID NO: 151138 - DNA, 25 bp, Probe sequence
tctatcgtccattaatgatttctac

SEQ ID NO: 151139 - DNA, 25 bp, Probe sequence
tcaatcgtccttattctaatcatta

SEQ ID NO: 151140 - DNA, 25 bp, Probe sequence
taatgatttctacattcgatccaac

SEQ ID NO: 151141 - DNA, 25 bp, Probe sequence
tacacctgcatctacagcattttta

SEQ ID NO: 151142 - DNA, 25 bp, Probe sequence
tacagctatatttacaacattccta

SEQ ID NO: 151143 - DNA, 25 bp, Probe sequence
tagttttaccgctttcttagcttcg

SEQ ID NO: 151144 - DNA, 25 bp, Probe sequence
tatcggttatatcacatctagtagt

SEQ ID NO: 151145 - DNA, 25 bp, Probe sequence
tatcatcacattatttttcacaaaa

SEQ ID NO: 151146 - DNA, 25 bp, Probe sequence
tattacctggtgttgccctatcatt

SEQ ID NO: 151147 - DNA, 25 bp, Probe sequence
ttggtaatttactggcaatcacaaa

SEQ ID NO: 151148 - DNA, 25 bp, Probe sequence
atggcaatgtatgaagtgaagaaat

SEQ ID NO: 151149 - DNA, 25 bp, Probe sequence
agtaaaacgtgctgaatatgttaac

SEQ ID NO: 151150 - DNA, 25 bp, Probe sequence
agaaatcttatactgacttggaaaa

SEQ ID NO: 151151 - DNA, 25 bp, Probe sequence
agctgaaagagcatggagtaatact

SEQ ID NO: 151152 - DNA, 25 bp, Probe sequence
acgtgctgaatatgttaacaaaaag

SEQ ID NO: 151153 - DNA, 25 bp, Probe sequence
aaatcttatactgacttggaaaaag

SEQ ID NO: 151154 - DNA, 25 bp, Probe sequence
aaagtcaggtaaacgtgttgaaatg

SEQ ID NO: 151155 - DNA, 25 bp, Probe sequence
aaacgtgctgaatatgttaacaaaa

SEQ ID NO: 151156 - DNA, 25 bp, Probe sequence
aaaacgtgctgaatatgttaacaaa

SEQ ID NO: 151157 - DNA, 25 bp, Probe sequence
aacgtgttgaaatgacagtaaaacg

SEQ ID NO: 151158 - DNA, 25 bp, Probe sequence
aagaaatcttatactgacttggaaa

SEQ ID NO: 151159 - DNA, 25 bp, Probe sequence
aagtcaggtaaacgtgttgaaatga

SEQ ID NO: 151160 - DNA, 25 bp, Probe sequence
aatgacagtaaaacgtgctgaatat

SEQ ID NO: 151161 - DNA, 25 bp, Probe sequence
caggtaaacgtgttgaaatgacagt

SEQ ID NO: 151162 - DNA, 25 bp, Probe sequence
ctgacttggaaaaaggccagtattt

SEQ ID NO: 151163 - DNA, 25 bp, Probe sequence
gccagtatttaaagtcaggtaaacg

SEQ ID NO: 151164 - DNA, 25 bp, Probe sequence
gaagaaatcttatactgacttggaa

SEQ ID NO: 151165 - DNA, 25 bp, Probe sequence
gaaaaaggccagtatttaaagtcag

SEQ ID NO: 151166 - DNA, 25 bp, Probe sequence
gaaagagcatggagtaatacttgaa

SEQ ID NO: 151167 - DNA, 25 bp, Probe sequence
gaaatcttatactgacttggaaaaa

SEQ ID NO: 151168 - DNA, 25 bp, Probe sequence
gaaatgacagtaaaacgtgctgaat

SEQ ID NO: 151169 - DNA, 25 bp, Probe sequence
gacagtaaaacgtgctgaatatgtt

SEQ ID NO: 151170 - DNA, 25 bp, Probe sequence
gagcatggagtaatacttgaaagag

SEQ ID NO: 151171 - DNA, 25 bp, Probe sequence
gtaaacgtgttgaaatgacagtaaa

SEQ ID NO: 151172 - DNA, 25 bp, Probe sequence
gtaaaacgtgctgaatatgttaaca

SEQ ID NO: 151173 - DNA, 25 bp, Probe sequence
gtgaagaaatcttatactgacttgg

SEQ ID NO: 151174 - DNA, 25 bp, Probe sequence
ggtaaacgtgttgaaatgacagtaa

SEQ ID NO: 151175 - DNA, 25 bp, Probe sequence
tgacttggaaaaaggccagtattta

SEQ ID NO: 151176 - DNA, 25 bp, Probe sequence
tgaagaaatcttatactgacttgga

SEQ ID NO: 151177 - DNA, 25 bp, Probe sequence
tcttatactgacttggaaaaaggcc

SEQ ID NO: 151178 - DNA, 25 bp, Probe sequence
taaaacgtgctgaatatgttaacaa

SEQ ID NO: 151179 - DNA, 25 bp, Probe sequence
taaagtcaggtaaacgtgttgaaat

SEQ ID NO: 151180 - DNA, 25 bp, Probe sequence
tatgttaacaaaaagctgaaagagc

SEQ ID NO: 151181 - DNA, 25 bp, Probe sequence
ttatactgacttggaaaaaggccag

SEQ ID NO: 151182 - DNA, 25 bp, Probe sequence
ataccaagcatcatggactgactac

SEQ ID NO: 151183 - DNA, 25 bp, Probe sequence
atggttctggtaaatatccggtagt

SEQ ID NO: 151184 - DNA, 25 bp, Probe sequence
accattcttccaattagcatatgac

SEQ ID NO: 151185 - DNA, 25 bp, Probe sequence
acgcaacagcgtttattaggagcta

SEQ ID NO: 151186 - DNA, 25 bp, Probe sequence
aatatccggtagtacgacaatcaga

SEQ ID NO: 151187 - DNA, 25 bp, Probe sequence
caatgatattcaaggtggttcgtta

SEQ ID NO: 151188 - DNA, 25 bp, Probe sequence
cgattgttttatttgaccgctctca

SEQ ID NO: 151189 - DNA, 25 bp, Probe sequence
gcgattgtttcgcaaactatgtttg

SEQ ID NO: 151190 - DNA, 25 bp, Probe sequence
gcatatgacattaatacacaccgtg

SEQ ID NO: 151191 - DNA, 25 bp, Probe sequence
gcagcaacacgaaacaaagcaatta

SEQ ID NO: 151192 - DNA, 25 bp, Probe sequence
gcaacgagagcacttaataacgatg

SEQ ID NO: 151193 - DNA, 25 bp, Probe sequence
gaatgtttaatgattgctgtacgtc

SEQ ID NO: 151194 - DNA, 25 bp, Probe sequence
gaaggcgatcttggcttagaagcat

SEQ ID NO: 151195 - DNA, 25 bp, Probe sequence
gaacgcggtgaaggcgatcttggct

SEQ ID NO: 151196 - DNA, 25 bp, Probe sequence
gaacataatgttgcgattgtttcgc

SEQ ID NO: 151197 - DNA, 25 bp, Probe sequence
gaaactatttaatccagccagatgt

SEQ ID NO: 151198 - DNA, 25 bp, Probe sequence
gaaactatggatggcgcgaactatt

SEQ ID NO: 151199 - DNA, 25 bp, Probe sequence
gacaatcagaagttgcagcccttga

SEQ ID NO: 151200 - DNA, 25 bp, Probe sequence
gaaattactgatttacgttctcaaa

SEQ ID NO: 151201 - DNA, 25 bp, Probe sequence
gactcaggatttgtagttattccag

SEQ ID NO: 151202 - DNA, 25 bp, Probe sequence
gattgctgtacgtcaagactgtaga

SEQ ID NO: 151203 - DNA, 25 bp, Probe sequence
gtggttcgttaaaaacagactcagg

SEQ ID NO: 151204 - DNA, 25 bp, Probe sequence
ggatcaacgggttctacaagttcag

SEQ ID NO: 151205 - DNA, 25 bp, Probe sequence
ggactgactacatgcatttcggaga

SEQ ID NO: 151206 - DNA, 25 bp, Probe sequence
tggcgcgaactattgcagcaacacg

SEQ ID NO: 151207 - DNA, 25 bp, Probe sequence
tggttacttccgaatttcacgtgaa

SEQ ID NO: 151208 - DNA, 25 bp, Probe sequence
tgaccgctctcaataccaagcatca

SEQ ID NO: 151209 - DNA, 25 bp, Probe sequence
tacacaccgtggttacttccgaatt

SEQ ID NO: 151210 - DNA, 25 bp, Probe sequence
taacactttgattatcggtaactta

SEQ ID NO: 151211 - DNA, 25 bp, Probe sequence
taaagatgctattaacctgaatgtt

SEQ ID NO: 151212 - DNA, 25 bp, Probe sequence
tagcagttaaaccattcttccaatt

SEQ ID NO: 151213 - DNA, 25 bp, Probe sequence
tatgtgacggtcaaacgtgttacaa

SEQ ID NO: 151214 - DNA, 25 bp, Probe sequence
tttactgaatatcttgaaacacgca

SEQ ID NO: 151215 - DNA, 25 bp, Probe sequence
ttaggtatttcgattcaaaacacaa

SEQ ID NO: 151216 - DNA, 25 bp, Probe sequence
gggtactttggagctcgaaactgat

SEQ ID NO: 151217 - DNA, 25 bp, Probe sequence
attcgtgaacttacagatgtttctg

SEQ ID NO: 151218 - DNA, 25 bp, Probe sequence
atatcgttgtaagttaccaaacaca

SEQ ID NO: 151219 - DNA, 25 bp, Probe sequence
atcccatcgcaaataattggtagga

SEQ ID NO: 151220 - DNA, 25 bp, Probe sequence
atgttcgtttggttttatgcttgac

SEQ ID NO: 151221 - DNA, 25 bp, Probe sequence
agatcatatcccatcgcaaataatt

SEQ ID NO: 151222 - DNA, 25 bp, Probe sequence
acaaacgtactttaacagcaattcg

SEQ ID NO: 151223 - DNA, 25 bp, Probe sequence
acaacatttgcacgtgatttatatg

SEQ ID NO: 151224 - DNA, 25 bp, Probe sequence
aagactaaagaaacactctatatta

SEQ ID NO: 151225 - DNA, 25 bp, Probe sequence
aagacactgatgttaaaccagcatt

SEQ ID NO: 151226 - DNA, 25 bp, Probe sequence
aaggcgatgaagtgcgttttgatga

SEQ ID NO: 151227 - DNA, 25 bp, Probe sequence
gcattacgtagtattgaaaccgtta

SEQ ID NO: 151228 - DNA, 25 bp, Probe sequence
gacaaaatcgggtactttggagctc

SEQ ID NO: 151229 - DNA, 25 bp, Probe sequence
gaaatggtcatagaggggtatgcgt

SEQ ID NO: 151230 - DNA, 25 bp, Probe sequence
gagctcgaaactgatgatgttggac

SEQ ID NO: 151231 - DNA, 25 bp, Probe sequence
gaggtacgctcaaatgataacaacg

SEQ ID NO: 151232 - DNA, 25 bp, Probe sequence
gatgtttctgtagtgacttatccgg

SEQ ID NO: 151233 - DNA, 25 bp, Probe sequence
gatgttggacttaaatatcgttgta

SEQ ID NO: 151234 - DNA, 25 bp, Probe sequence
gattcaaagaaacgatttcacgtcg

SEQ ID NO: 151235 - DNA, 25 bp, Probe sequence
gttaaaccagcattacgtagtattg

SEQ ID NO: 151236 - DNA, 25 bp, Probe sequence
gttaccaaacacaacatttgcacgt

SEQ ID NO: 151237 - DNA, 25 bp, Probe sequence
gtttagtagatcatatcccatcgca

SEQ ID NO: 151238 - DNA, 25 bp, Probe sequence
gtactttaacagcaattcgtgaact

SEQ ID NO: 151239 - DNA, 25 bp, Probe sequence
gtaaggaaacgagagttggcaacat

SEQ ID NO: 151240 - DNA, 25 bp, Probe sequence
gtgacttatccggcttacaaagaca

SEQ ID NO: 151241 - DNA, 25 bp, Probe sequence
ggggtatgcgttaaagtttgacact

SEQ ID NO: 151242 - DNA, 25 bp, Probe sequence
ggtctgaaaatcttggtggattcaa

SEQ ID NO: 151243 - DNA, 25 bp, Probe sequence
tggcaacattattgaggtacgctca

SEQ ID NO: 151244 - DNA, 25 bp, Probe sequence
tgacacttggtctgaaaatcttggt

SEQ ID NO: 151245 - DNA, 25 bp, Probe sequence
tagaaaacactgatttatctgatgt

SEQ ID NO: 151246 - DNA, 25 bp, Probe sequence
tatgagaacatgcgtgtaggcaaca

SEQ ID NO: 151247 - DNA, 25 bp, Probe sequence
tatgcttgacgataaaggcgatgaa

SEQ ID NO: 151248 - DNA, 25 bp, Probe sequence
tatccggcttacaaagacactgatg

SEQ ID NO: 151249 - DNA, 25 bp, Probe sequence
ttctgtagtgacttatccggcttac

SEQ ID NO: 151250 - DNA, 25 bp, Probe sequence
attagtagtgtttgttagtgcctta

SEQ ID NO: 151251 - DNA, 25 bp, Probe sequence
atttcttgcgaaatggcacacatgc

SEQ ID NO: 151252 - DNA, 25 bp, Probe sequence
agtgccttactaacatcgcacggct

SEQ ID NO: 151253 - DNA, 25 bp, Probe sequence
agctgggaaagttgtcgtactcgat

SEQ ID NO: 151254 - DNA, 25 bp, Probe sequence
agatttccttaataatttcttgcga

SEQ ID NO: 151255 - DNA, 25 bp, Probe sequence
acaggagaacctatgaatttaacgt

SEQ ID NO: 151256 - DNA, 25 bp, Probe sequence
aaacgagacttgcaatacaacgaag

SEQ ID NO: 151257 - DNA, 25 bp, Probe sequence
aacatcgcacggctatattgaaatt

SEQ ID NO: 151258 - DNA, 25 bp, Probe sequence
aaccttatattacatgcgtttgtgc

SEQ ID NO: 151259 - DNA, 25 bp, Probe sequence
caagagaccgtgccagagaagaatt

SEQ ID NO: 151260 - DNA, 25 bp, Probe sequence
caggcggtaatggtagcattcacag

SEQ ID NO: 151261 - DNA, 25 bp, Probe sequence
cgcatgccaattagggtgacagtga

SEQ ID NO: 151262 - DNA, 25 bp, Probe sequence
gcattcacagagtcgatttaaacca

SEQ ID NO: 151263 - DNA, 25 bp, Probe sequence
gcaattaggcatagcgacatcttta

SEQ ID NO: 151264 - DNA, 25 bp, Probe sequence
gaaacagcgaacatgagtatcacgg

SEQ ID NO: 151265 - DNA, 25 bp, Probe sequence
gaaatcagacgcaagaggtcgactg

SEQ ID NO: 151266 - DNA, 25 bp, Probe sequence
gacaacgtgatggattagcgccaat

SEQ ID NO: 151267 - DNA, 25 bp, Probe sequence
gagtatcacggatgctaatttagat

SEQ ID NO: 151268 - DNA, 25 bp, Probe sequence
gaggtcgactgtattattttcatca

SEQ ID NO: 151269 - DNA, 25 bp, Probe sequence
gaggatatgctagacatcaaatttt

SEQ ID NO: 151270 - DNA, 25 bp, Probe sequence
gatggttcaaactttgccaggtttt

SEQ ID NO: 151271 - DNA, 25 bp, Probe sequence
gataccactgaaatacgagttgttg

SEQ ID NO: 151272 - DNA, 25 bp, Probe sequence
gattagcgccaataccaggcggtaa

SEQ ID NO: 151273 - DNA, 25 bp, Probe sequence
gttagacacattaagtcgcacgata

SEQ ID NO: 151274 - DNA, 25 bp, Probe sequence
gttatgatgattgcttctgatttgg

SEQ ID NO: 151275 - DNA, 25 bp, Probe sequence
gtataaatggtttgtcactgttaga

SEQ ID NO: 151276 - DNA, 25 bp, Probe sequence
gtactcgatgaatcaatgacgtttg

SEQ ID NO: 151277 - DNA, 25 bp, Probe sequence
gtcctaacccaatgtataacggcta

SEQ ID NO: 151278 - DNA, 25 bp, Probe sequence
gggtgacagtgaacggccaaattaa

SEQ ID NO: 151279 - DNA, 25 bp, Probe sequence
ggcacacatgctggtggtattttga

SEQ ID NO: 151280 - DNA, 25 bp, Probe sequence
tggtattccattgcataagttcggc

SEQ ID NO: 151281 - DNA, 25 bp, Probe sequence
taacgttcagaaagacatccgaaat

SEQ ID NO: 151282 - DNA, 25 bp, Probe sequence
tagcaggtgtatttggtattccatt

SEQ ID NO: 151283 - DNA, 25 bp, Probe sequence
ttaaatacacgtcctaacccaatgt

SEQ ID NO: 151284 - DNA, 25 bp, Probe sequence
aacccgccgaatggttgccattggg

SEQ ID NO: 151285 - DNA, 25 bp, Probe sequence
atttcgattatcacagctttcactg

SEQ ID NO: 151286 - DNA, 25 bp, Probe sequence
agcaatgccgcttttagaatcaaaa

SEQ ID NO: 151287 - DNA, 25 bp, Probe sequence
acaacaatcgaatcaatggctttag

SEQ ID NO: 151288 - DNA, 25 bp, Probe sequence
aaagatcctacagttgctattttgg

SEQ ID NO: 151289 - DNA, 25 bp, Probe sequence
aaaacttcaatttatggcaagcgca

SEQ ID NO: 151290 - DNA, 25 bp, Probe sequence
aacgacgcatgacctgaatgtacag

SEQ ID NO: 151291 - DNA, 25 bp, Probe sequence
aacgcctatgcctaatatcaatggt

SEQ ID NO: 151292 - DNA, 25 bp, Probe sequence
ctacttgtttcaacggccggagaca

SEQ ID NO: 151293 - DNA, 25 bp, Probe sequence
cacctctttccaataacccagatgc

SEQ ID NO: 151294 - DNA, 25 bp, Probe sequence
cttcatctacttataagcaagcgca

SEQ ID NO: 151295 - DNA, 25 bp, Probe sequence
ctttcactgaagctagaatgcacga

SEQ ID NO: 151296 - DNA, 25 bp, Probe sequence
ccagcccatgcctcttatggagttt

SEQ ID NO: 151297 - DNA, 25 bp, Probe sequence
gctatgacccttggaatgcgcaaag

SEQ ID NO: 151298 - DNA, 25 bp, Probe sequence
gctttagattggccactcattgaag

SEQ ID NO: 151299 - DNA, 25 bp, Probe sequence
gaactgttgtttggacaatacccta

SEQ ID NO: 151300 - DNA, 25 bp, Probe sequence
gaaatgcttccagaccctaaaacaa

SEQ ID NO: 151301 - DNA, 25 bp, Probe sequence
gagactacacaatcagatagcggca

SEQ ID NO: 151302 - DNA, 25 bp, Probe sequence
gggaatgtccgttaacgaactgttg

SEQ ID NO: 151303 - DNA, 25 bp, Probe sequence
gttgggagcttatacggctggcgta

SEQ ID NO: 151304 - DNA, 25 bp, Probe sequence
gatggcaagccaacaagtaaaccta

SEQ ID NO: 151305 - DNA, 25 bp, Probe sequence
gatagcttgctagatatttcagatt

SEQ ID NO: 151306 - DNA, 25 bp, Probe sequence
gttgccattgggataatcatttgtc

SEQ ID NO: 151307 - DNA, 25 bp, Probe sequence
gttttaaggcgttatcacaatctat

SEQ ID NO: 151308 - DNA, 25 bp, Probe sequence
gtagttcagtgtttgcacctctttc

SEQ ID NO: 151309 - DNA, 25 bp, Probe sequence
gtacaggctgtttgctatgaccctt

SEQ ID NO: 151310 - DNA, 25 bp, Probe sequence
gtgtatataggtgtcgacttatcga

SEQ ID NO: 151311 - DNA, 25 bp, Probe sequence
gtgtttttacatagtcattctttca

SEQ ID NO: 151312 - DNA, 25 bp, Probe sequence
ggtaagtctctaatcgtatcgggaa

SEQ ID NO: 151313 - DNA, 25 bp, Probe sequence
ggaacaagtaataacgcctatgcct

SEQ ID NO: 151314 - DNA, 25 bp, Probe sequence
ggcaagtatgcctgatgatgagatg

SEQ ID NO: 151315 - DNA, 25 bp, Probe sequence
tatcttttatggagaacccgccgaa

SEQ ID NO: 151316 - DNA, 25 bp, Probe sequence
taataatgccgttttgattcgtgac

SEQ ID NO: 151317 - DNA, 25 bp, Probe sequence
tacggctggcgtagaggtcaataca

SEQ ID NO: 151318 - DNA, 25 bp, Probe sequence
attgtagtttttatagtgactttgt

SEQ ID NO: 151319 - DNA, 25 bp, Probe sequence
attaccgcacatgcaagaattgcca

SEQ ID NO: 151320 - DNA, 25 bp, Probe sequence
agaattgccaatttccaacttagat

SEQ ID NO: 151321 - DNA, 25 bp, Probe sequence
agcgggtattcgattgcaacaaaca

SEQ ID NO: 151322 - DNA, 25 bp, Probe sequence
acagctaatactttaggattaacta

SEQ ID NO: 151323 - DNA, 25 bp, Probe sequence
aaatcgatactgaaccaccgcactt

SEQ ID NO: 151324 - DNA, 25 bp, Probe sequence
aactattgatagccgattgcgtatt

SEQ ID NO: 151325 - DNA, 25 bp, Probe sequence
aagaagatgatgatccatatatgga

SEQ ID NO: 151326 - DNA, 25 bp, Probe sequence
aagacttgattttagaagacgacaa

SEQ ID NO: 151327 - DNA, 25 bp, Probe sequence
caccgcactttttagatgaaatagc

SEQ ID NO: 151328 - DNA, 25 bp, Probe sequence
ctgaaccaccgcactttttagatga

SEQ ID NO: 151329 - DNA, 25 bp, Probe sequence
cgattgcgtattatggttcctgatg

SEQ ID NO: 151330 - DNA, 25 bp, Probe sequence
gccgattgcgtattatggttcctga

SEQ ID NO: 151331 - DNA, 25 bp, Probe sequence
gcgtcaagaagctcaattaaataaa

SEQ ID NO: 151332 - DNA, 25 bp, Probe sequence
gcaagtttgattttagagcgcgaag

SEQ ID NO: 151333 - DNA, 25 bp, Probe sequence
gaagcttttgtcaaattcgaacaag

SEQ ID NO: 151334 - DNA, 25 bp, Probe sequence
gaaccaccgcactttttagatgaaa

SEQ ID NO: 151335 - DNA, 25 bp, Probe sequence
gaaaaagcgggtattcgattgcaac

SEQ ID NO: 151336 - DNA, 25 bp, Probe sequence
gaaatagcgaaacaagaatacttaa

SEQ ID NO: 151337 - DNA, 25 bp, Probe sequence
gacctaagaagcttttgtcaaattc

SEQ ID NO: 151338 - DNA, 25 bp, Probe sequence
gagcgcgaagacttgattttagaag

SEQ ID NO: 151339 - DNA, 25 bp, Probe sequence
gataaagcacaattagcacaatatt

SEQ ID NO: 151340 - DNA, 25 bp, Probe sequence
gattttagagcgcgaagacttgatt

SEQ ID NO: 151341 - DNA, 25 bp, Probe sequence
gattgcaacaaacagctaatacttt

SEQ ID NO: 151342 - DNA, 25 bp, Probe sequence
gtgactttgttaaagcaagtttgat

SEQ ID NO: 151343 - DNA, 25 bp, Probe sequence
ggtattcgattgcaacaaacagcta

SEQ ID NO: 151344 - DNA, 25 bp, Probe sequence
ggttaatccggcgttcaacataaag

SEQ ID NO: 151345 - DNA, 25 bp, Probe sequence
ggcgggtagacctaagaagcttttg

SEQ ID NO: 151346 - DNA, 25 bp, Probe sequence
tgcgtattatggttcctgatgaaaa

SEQ ID NO: 151347 - DNA, 25 bp, Probe sequence
tgccaatttccaacttagataaagc

SEQ ID NO: 151348 - DNA, 25 bp, Probe sequence
tccatatatggaatttgtgagtgat

SEQ ID NO: 151349 - DNA, 25 bp, Probe sequence
taatccggcgttcaacataaaggaa

SEQ ID NO: 151350 - DNA, 25 bp, Probe sequence
tagccgattgcgtattatggttcct

SEQ ID NO: 151351 - DNA, 25 bp, Probe sequence
ttaagaatattaccgcacatgcaag

SEQ ID NO: 151352 - DNA, 25 bp, Probe sequence
acgtggcaaaacatgcgtcgaattg

SEQ ID NO: 151353 - DNA, 25 bp, Probe sequence
acgtcgaaacgatccagagtattta

SEQ ID NO: 151354 - DNA, 25 bp, Probe sequence
acagcctttgtgtgatgcttgccat

SEQ ID NO: 151355 - DNA, 25 bp, Probe sequence
acatgcgtcgaattgtattgttaga

SEQ ID NO: 151356 - DNA, 25 bp, Probe sequence
aacgatccagagtatttaagatttt

SEQ ID NO: 151357 - DNA, 25 bp, Probe sequence
aagtaatttacagcctttgtgtgat

SEQ ID NO: 151358 - DNA, 25 bp, Probe sequence
aatcaagcgactatggttgaccata

SEQ ID NO: 151359 - DNA, 25 bp, Probe sequence
aattgattgggcaagaagattagac

SEQ ID NO: 151360 - DNA, 25 bp, Probe sequence
catgattttatttgtgtttcttgtg

SEQ ID NO: 151361 - DNA, 25 bp, Probe sequence
gcctttgtgtgatgcttgccataac

SEQ ID NO: 151362 - DNA, 25 bp, Probe sequence
gcgatgtggtcatccaacatgtaat

SEQ ID NO: 151363 - DNA, 25 bp, Probe sequence
gcgtcgaattgtattgttagaacat

SEQ ID NO: 151364 - DNA, 25 bp, Probe sequence
gaagcgatgtggtcatccaacatgt

SEQ ID NO: 151365 - DNA, 25 bp, Probe sequence
gaaaacgtggcaaaacatgcgtcga

SEQ ID NO: 151366 - DNA, 25 bp, Probe sequence
gagacgtcgaaacgatccagagtat

SEQ ID NO: 151367 - DNA, 25 bp, Probe sequence
gatgcttgccataaccaaaagacaa

SEQ ID NO: 151368 - DNA, 25 bp, Probe sequence
gatttgagacgtcgaaacgatccag

SEQ ID NO: 151369 - DNA, 25 bp, Probe sequence
gattttatttgtgtttcttgtggca

SEQ ID NO: 151370 - DNA, 25 bp, Probe sequence
gtaatttacagcctttgtgtgatgc

SEQ ID NO: 151371 - DNA, 25 bp, Probe sequence
gtgtttcttgtggcaatcaagcgac

SEQ ID NO: 151372 - DNA, 25 bp, Probe sequence
gtgataaacacaagcaatatgcaaa

SEQ ID NO: 151373 - DNA, 25 bp, Probe sequence
gtgtgatgcttgccataaccaaaag

SEQ ID NO: 151374 - DNA, 25 bp, Probe sequence
ggtcatccaacatgtaatgtattga

SEQ ID NO: 151375 - DNA, 25 bp, Probe sequence
ggttgaccatattgtaccaacaaaa

SEQ ID NO: 151376 - DNA, 25 bp, Probe sequence
ggcaatcaagcgactatggttgacc

SEQ ID NO: 151377 - DNA, 25 bp, Probe sequence
ggcaaaacatgcgtcgaattgtatt

SEQ ID NO: 151378 - DNA, 25 bp, Probe sequence
tgtggcaatcaagcgactatggttg

SEQ ID NO: 151379 - DNA, 25 bp, Probe sequence
tgtggtcatccaacatgtaatgtat

SEQ ID NO: 151380 - DNA, 25 bp, Probe sequence
tacaatgatttgagacgtcgaaacg

SEQ ID NO: 151381 - DNA, 25 bp, Probe sequence
tatggttgaccatattgtaccaaca

SEQ ID NO: 151382 - DNA, 25 bp, Probe sequence
tatttgtgtttcttgtggcaatcaa

SEQ ID NO: 151383 - DNA, 25 bp, Probe sequence
tttgtgtgatgcttgccataaccaa

SEQ ID NO: 151384 - DNA, 25 bp, Probe sequence
ttacagcctttgtgtgatgcttgcc

SEQ ID NO: 151385 - DNA, 25 bp, Probe sequence
ttgtctattatgaagcgatgtggtc

SEQ ID NO: 151386 - DNA, 25 bp, Probe sequence
attgtggaatatagctaatcttact

SEQ ID NO: 151387 - DNA, 25 bp, Probe sequence
attaacttggatgagatagctggtc

SEQ ID NO: 151388 - DNA, 25 bp, Probe sequence
ataaacctaatcagactatcaattt

SEQ ID NO: 151389 - DNA, 25 bp, Probe sequence
atcttgttgatggatcgataggaaa

SEQ ID NO: 151390 - DNA, 25 bp, Probe sequence
atgttttgtaatgtaccgatagata

SEQ ID NO: 151391 - DNA, 25 bp, Probe sequence
agtgttaacactatcttgatgaata

SEQ ID NO: 151392 - DNA, 25 bp, Probe sequence
agctaatcttactaacgtgttaggt

SEQ ID NO: 151393 - DNA, 25 bp, Probe sequence
accaagagatagctacacgtacaca

SEQ ID NO: 151394 - DNA, 25 bp, Probe sequence
acagcatatgttttgtaatgtaccg

SEQ ID NO: 151395 - DNA, 25 bp, Probe sequence
aacactatcttgatgaataaaccta

SEQ ID NO: 151396 - DNA, 25 bp, Probe sequence
aactcaatctacaggcaatgttaca

SEQ ID NO: 151397 - DNA, 25 bp, Probe sequence
aagaggtggagaatggagatatcaa

SEQ ID NO: 151398 - DNA, 25 bp, Probe sequence
aagtaccaagagatagctacacgta

SEQ ID NO: 151399 - DNA, 25 bp, Probe sequence
ctacacgtacacacaatgatgaatt

SEQ ID NO: 151400 - DNA, 25 bp, Probe sequence
gaattatgataaatgaacttagcga

SEQ ID NO: 151401 - DNA, 25 bp, Probe sequence
gaatggagatatcaaagtaccaaga

SEQ ID NO: 151402 - DNA, 25 bp, Probe sequence
gacaaagtattgtttcaaggtagta

SEQ ID NO: 151403 - DNA, 25 bp, Probe sequence
gactatcaatttagacaatggtata

SEQ ID NO: 151404 - DNA, 25 bp, Probe sequence
gagatagctacacgtacacacaatg

SEQ ID NO: 151405 - DNA, 25 bp, Probe sequence
gatggatcgataggaaacttattgt

SEQ ID NO: 151406 - DNA, 25 bp, Probe sequence
gatgatagacaagtaactgtgcaag

SEQ ID NO: 151407 - DNA, 25 bp, Probe sequence
gatgaataaacctaatcagactatc

SEQ ID NO: 151408 - DNA, 25 bp, Probe sequence
gatagctggtcatagtgttaacact

SEQ ID NO: 151409 - DNA, 25 bp, Probe sequence
ggtttaactcaatctacaggcaatg

SEQ ID NO: 151410 - DNA, 25 bp, Probe sequence
ggcttaggtttaactcaatctacag

SEQ ID NO: 151411 - DNA, 25 bp, Probe sequence
ggaaacttattgttaattagcaatg

SEQ ID NO: 151412 - DNA, 25 bp, Probe sequence
tgtgcaagatgttaagaaagtcgac

SEQ ID NO: 151413 - DNA, 25 bp, Probe sequence
ttacggcttaggtttaactcaatct

SEQ ID NO: 151414 - DNA, 25 bp, Probe sequence
tctacaggcaatgttacagatctaa

SEQ ID NO: 151415 - DNA, 25 bp, Probe sequence
taacgtgttaggtattaacttggat

SEQ ID NO: 151416 - DNA, 25 bp, Probe sequence
tacagatctaattaaacagcatatg

SEQ ID NO: 151417 - DNA, 25 bp, Probe sequence
tagctacacgtacacacaatgatga

SEQ ID NO: 151418 - DNA, 25 bp, Probe sequence
tagacaagtaactgtgcaagatgtt

SEQ ID NO: 151419 - DNA, 25 bp, Probe sequence
tatagctaatcttactaacgtgtta

SEQ ID NO: 151420 - DNA, 25 bp, Probe sequence
attcttgatataggcagagacaatt

SEQ ID NO: 151421 - DNA, 25 bp, Probe sequence
atataggcagagacaatttttattc

SEQ ID NO: 151422 - DNA, 25 bp, Probe sequence
atacgtgaaatgatagataactaca

SEQ ID NO: 151423 - DNA, 25 bp, Probe sequence
ataacgaaagtacatcaattgcaca

SEQ ID NO: 151424 - DNA, 25 bp, Probe sequence
atcaatctgcgatgccaaaagctaa

SEQ ID NO: 151425 - DNA, 25 bp, Probe sequence
atgatagataactacaagtggatga

SEQ ID NO: 151426 - DNA, 25 bp, Probe sequence
acgaaagtacatcaattgcacaata

SEQ ID NO: 151427 - DNA, 25 bp, Probe sequence
aaagctaaaggcacgactagcaata

SEQ ID NO: 151428 - DNA, 25 bp, Probe sequence
aaagcgcttagaaagtacgattact

SEQ ID NO: 151429 - DNA, 25 bp, Probe sequence
aaacaacgagaaagccataatagga

SEQ ID NO: 151430 - DNA, 25 bp, Probe sequence
aacaaagcgcttagaaagtacgatt

SEQ ID NO: 151431 - DNA, 25 bp, Probe sequence
aacgaaagtacatcaattgcacaat

SEQ ID NO: 151432 - DNA, 25 bp, Probe sequence
aagtctacgataacgaaagtacatc

SEQ ID NO: 151433 - DNA, 25 bp, Probe sequence
aaggcacgactagcaataaagtgtt

SEQ ID NO: 151434 - DNA, 25 bp, Probe sequence
aatctgcgatgccaaaagctaaagg

SEQ ID NO: 151435 - DNA, 25 bp, Probe sequence
aatatactttataacttgcaacaag

SEQ ID NO: 151436 - DNA, 25 bp, Probe sequence
caatctgcgatgccaaaagctaaag

SEQ ID NO: 151437 - DNA, 25 bp, Probe sequence
ctaaaggcacgactagcaataaagt

SEQ ID NO: 151438 - DNA, 25 bp, Probe sequence
gccaaaagctaaaggcacgactagc

SEQ ID NO: 151439 - DNA, 25 bp, Probe sequence
gcgcttagaaagtacgattacttga

SEQ ID NO: 151440 - DNA, 25 bp, Probe sequence
gcgatgccaaaagctaaaggcacga

SEQ ID NO: 151441 - DNA, 25 bp, Probe sequence
gaagaatacatcacgaatgaaaaag

SEQ ID NO: 151442 - DNA, 25 bp, Probe sequence
gacagtaaagtctacgataacgaaa

SEQ ID NO: 151443 - DNA, 25 bp, Probe sequence
gagacaatttttattctagagtaaa

SEQ ID NO: 151444 - DNA, 25 bp, Probe sequence
gattatcatattttacaaatgttaa

SEQ ID NO: 151445 - DNA, 25 bp, Probe sequence
gtaaatatactttataacttgcaac

SEQ ID NO: 151446 - DNA, 25 bp, Probe sequence
ggcacgactagcaataaagtgttag

SEQ ID NO: 151447 - DNA, 25 bp, Probe sequence
ggcagagacaatttttattctagag

SEQ ID NO: 151448 - DNA, 25 bp, Probe sequence
tcaatctgcgatgccaaaagctaaa

SEQ ID NO: 151449 - DNA, 25 bp, Probe sequence
taggcagagacaatttttattctag

SEQ ID NO: 151450 - DNA, 25 bp, Probe sequence
tataacttgcaacaagaaaccgaca

SEQ ID NO: 151451 - DNA, 25 bp, Probe sequence
tatcaatctgcgatgccaaaagcta

SEQ ID NO: 151452 - DNA, 25 bp, Probe sequence
tataaacaaaaacaaagcgcttaga

SEQ ID NO: 151453 - DNA, 25 bp, Probe sequence
tatactttataacttgcaacaagaa

SEQ ID NO: 151454 - DNA, 25 bp, Probe sequence
attgtatttgctatattgctattag

SEQ ID NO: 151455 - DNA, 25 bp, Probe sequence
attgctattagtttgtatcagtatt

SEQ ID NO: 151456 - DNA, 25 bp, Probe sequence
attactatgactattgtatttgcta

SEQ ID NO: 151457 - DNA, 25 bp, Probe sequence
atttgctatattgctattagtttgt

SEQ ID NO: 151458 - DNA, 25 bp, Probe sequence
atgactattgtatttgctatattgc

SEQ ID NO: 151459 - DNA, 25 bp, Probe sequence
atgattatctacttgatgaagtagt

SEQ ID NO: 151460 - DNA, 25 bp, Probe sequence
atgtggattactatgactattgtat

SEQ ID NO: 151461 - DNA, 25 bp, Probe sequence
actatgactattgtatttgctatat

SEQ ID NO: 151462 - DNA, 25 bp, Probe sequence
actattgtatttgctatattgctat

SEQ ID NO: 151463 - DNA, 25 bp, Probe sequence
ctattgtatttgctatattgctatt

SEQ ID NO: 151464 - DNA, 25 bp, Probe sequence
ctatattgctattagtttgtatcag

SEQ ID NO: 151465 - DNA, 25 bp, Probe sequence
ctatgactattgtatttgctatatt

SEQ ID NO: 151466 - DNA, 25 bp, Probe sequence
gctatattgctattagtttgtatca

SEQ ID NO: 151467 - DNA, 25 bp, Probe sequence
gactattgtatttgctatattgcta

SEQ ID NO: 151468 - DNA, 25 bp, Probe sequence
gatgtggattactatgactattgta

SEQ ID NO: 151469 - DNA, 25 bp, Probe sequence
gattactatgactattgtatttgct

SEQ ID NO: 151470 - DNA, 25 bp, Probe sequence
gtttgtatcagtattaatagtgatc

SEQ ID NO: 151471 - DNA, 25 bp, Probe sequence
gtatttgctatattgctattagttt

SEQ ID NO: 151472 - DNA, 25 bp, Probe sequence
gtggattactatgactattgtattt

SEQ ID NO: 151473 - DNA, 25 bp, Probe sequence
ggattactatgactattgtatttgc

SEQ ID NO: 151474 - DNA, 25 bp, Probe sequence
tgtggattactatgactattgtatt

SEQ ID NO: 151475 - DNA, 25 bp, Probe sequence
tgtatttgctatattgctattagtt

SEQ ID NO: 151476 - DNA, 25 bp, Probe sequence
tgatgtggattactatgactattgt

SEQ ID NO: 151477 - DNA, 25 bp, Probe sequence
tgactattgtatttgctatattgct

SEQ ID NO: 151478 - DNA, 25 bp, Probe sequence
tgctatattgctattagtttgtatc

SEQ ID NO: 151479 - DNA, 25 bp, Probe sequence
tgctattagtttgtatcagtattaa

SEQ ID NO: 151480 - DNA, 25 bp, Probe sequence
tactatgactattgtatttgctata

SEQ ID NO: 151481 - DNA, 25 bp, Probe sequence
tattgctattagtttgtatcagtat

SEQ ID NO: 151482 - DNA, 25 bp, Probe sequence
tattgtatttgctatattgctatta

SEQ ID NO: 151483 - DNA, 25 bp, Probe sequence
tttgctatattgctattagtttgta

SEQ ID NO: 151484 - DNA, 25 bp, Probe sequence
ttagtttgtatcagtattaatagtg

SEQ ID NO: 151485 - DNA, 25 bp, Probe sequence
ttactatgactattgtatttgctat

SEQ ID NO: 151486 - DNA, 25 bp, Probe sequence
ttgctattagtttgtatcagtatta

SEQ ID NO: 151487 - DNA, 25 bp, Probe sequence
ttgtatttgctatattgctattagt

SEQ ID NO: 151488 - DNA, 25 bp, Probe sequence
attttctagatgagccgtttgtcgg

SEQ ID NO: 151489 - DNA, 25 bp, Probe sequence
agtgtggaacaagtgattttatcag

SEQ ID NO: 151490 - DNA, 25 bp, Probe sequence
agagcattgatgtccgaaagtgaag

SEQ ID NO: 151491 - DNA, 25 bp, Probe sequence
agcactgactgtagtgaccctagtc

SEQ ID NO: 151492 - DNA, 25 bp, Probe sequence
acaaacctatacaacaacaactgca

SEQ ID NO: 151493 - DNA, 25 bp, Probe sequence
aaacattacgatactttggtgatag

SEQ ID NO: 151494 - DNA, 25 bp, Probe sequence
aaaacatttccttatcgataccagt

SEQ ID NO: 151495 - DNA, 25 bp, Probe sequence
aacttattcttatcatccaccatga

SEQ ID NO: 151496 - DNA, 25 bp, Probe sequence
aatcttcccttatcaagtctttaat

SEQ ID NO: 151497 - DNA, 25 bp, Probe sequence
aattggtatcatgggcccgaatggt

SEQ ID NO: 151498 - DNA, 25 bp, Probe sequence
caacaactgcaacatattacatata

SEQ ID NO: 151499 - DNA, 25 bp, Probe sequence
catgggcccgaatggtgctggtaaa

SEQ ID NO: 151500 - DNA, 25 bp, Probe sequence
gccgtttgtcggaattgattttagt

SEQ ID NO: 151501 - DNA, 25 bp, Probe sequence
gaattagaatctttacgtcatcgac

SEQ ID NO: 151502 - DNA, 25 bp, Probe sequence
gaagaggctatgagtgtcactcgct

SEQ ID NO: 151503 - DNA, 25 bp, Probe sequence
gaaaacttattcttatcatccacca

SEQ ID NO: 151504 - DNA, 25 bp, Probe sequence
gaaacatttatgagtagcactgact

SEQ ID NO: 151505 - DNA, 25 bp, Probe sequence
gacaattacaacgtgtgctagtagc

SEQ ID NO: 151506 - DNA, 25 bp, Probe sequence
gaaattggatggtttagacgaccta

SEQ ID NO: 151507 - DNA, 25 bp, Probe sequence
gagtgtcactcgcttaaacgaaaca

SEQ ID NO: 151508 - DNA, 25 bp, Probe sequence
gatttagattttcctataagtgtgg

SEQ ID NO: 151509 - DNA, 25 bp, Probe sequence
gtacgcggcgaaataattggtatca

SEQ ID NO: 151510 - DNA, 25 bp, Probe sequence
gtgaatttaatgctaccggtactaa

SEQ ID NO: 151511 - DNA, 25 bp, Probe sequence
gtgaccctagtcaaaggagcaatat

SEQ ID NO: 151512 - DNA, 25 bp, Probe sequence
gtgattttatcaggttgctacaaag

SEQ ID NO: 151513 - DNA, 25 bp, Probe sequence
gtggtggacaattacaacgtgtgct

SEQ ID NO: 151514 - DNA, 25 bp, Probe sequence
tgctggtaaatcttcccttatcaag

SEQ ID NO: 151515 - DNA, 25 bp, Probe sequence
tccttatcgataccagtacgcggcg

SEQ ID NO: 151516 - DNA, 25 bp, Probe sequence
tcagcaagggataaactcaaacagt

SEQ ID NO: 151517 - DNA, 25 bp, Probe sequence
taatgctaccggtactaaattgtta

SEQ ID NO: 151518 - DNA, 25 bp, Probe sequence
tacatatattccacaaaaagcacat

SEQ ID NO: 151519 - DNA, 25 bp, Probe sequence
tactttgatcgcattattctattaa

SEQ ID NO: 151520 - DNA, 25 bp, Probe sequence
tacgtcatcgacaaatttcagaatt

SEQ ID NO: 151521 - DNA, 25 bp, Probe sequence
ttagacgacctaataaatcagcaag

SEQ ID NO: 151522 - DNA, 25 bp, Probe sequence
attgaagaggctatcgaggctgaaa

SEQ ID NO: 151523 - DNA, 25 bp, Probe sequence
atttgaggctcatgatattgcgaga

SEQ ID NO: 151524 - DNA, 25 bp, Probe sequence
atacaggcatgattgaagaggctat

SEQ ID NO: 151525 - DNA, 25 bp, Probe sequence
atgattgaagaggctatcgaggctg

SEQ ID NO: 151526 - DNA, 25 bp, Probe sequence
atggaagtgccatttgattgtgatg

SEQ ID NO: 151527 - DNA, 25 bp, Probe sequence
aggcatgattgaagaggctatcgag

SEQ ID NO: 151528 - DNA, 25 bp, Probe sequence
agtgccatttgattgtgatgaattt

SEQ ID NO: 151529 - DNA, 25 bp, Probe sequence
agaagcagaatttgaggctcatgat

SEQ ID NO: 151530 - DNA, 25 bp, Probe sequence
acaggcatgattgaagaggctatcg

SEQ ID NO: 151531 - DNA, 25 bp, Probe sequence
gccatttgattgtgatgaatttgaa

SEQ ID NO: 151532 - DNA, 25 bp, Probe sequence
gcatgattgaagaggctatcgaggc

SEQ ID NO: 151533 - DNA, 25 bp, Probe sequence
gcagaatttgaggctcatgatattg

SEQ ID NO: 151534 - DNA, 25 bp, Probe sequence
gaatttgaggctcatgatattgcga

SEQ ID NO: 151535 - DNA, 25 bp, Probe sequence
gaagtgccatttgattgtgatgaat

SEQ ID NO: 151536 - DNA, 25 bp, Probe sequence
gaagaagcagaatttgaggctcatg

SEQ ID NO: 151537 - DNA, 25 bp, Probe sequence
gaagcagaatttgaggctcatgata

SEQ ID NO: 151538 - DNA, 25 bp, Probe sequence
gaaaaaatttaatgttcaaatcaca

SEQ ID NO: 151539 - DNA, 25 bp, Probe sequence
gaaattaatgtagaggtggaacagg

SEQ ID NO: 151540 - DNA, 25 bp, Probe sequence
gaggctcatgatattgcgagaatgg

SEQ ID NO: 151541 - DNA, 25 bp, Probe sequence
gaggctgaaagtttagaagaagcag

SEQ ID NO: 151542 - DNA, 25 bp, Probe sequence
gatattgcgagaatggaagtgccat

SEQ ID NO: 151543 - DNA, 25 bp, Probe sequence
gattgaagaggctatcgaggctgaa

SEQ ID NO: 151544 - DNA, 25 bp, Probe sequence
gttcaaatcacatatacaggcatga

SEQ ID NO: 151545 - DNA, 25 bp, Probe sequence
gtgccatttgattgtgatgaatttg

SEQ ID NO: 151546 - DNA, 25 bp, Probe sequence
ggaagtgccatttgattgtgatgaa

SEQ ID NO: 151547 - DNA, 25 bp, Probe sequence
ggctcatgatattgcgagaatggaa

SEQ ID NO: 151548 - DNA, 25 bp, Probe sequence
tggaagtgccatttgattgtgatga

SEQ ID NO: 151549 - DNA, 25 bp, Probe sequence
tgttcaaatcacatatacaggcatg

SEQ ID NO: 151550 - DNA, 25 bp, Probe sequence
tgatattgcgagaatggaagtgcca

SEQ ID NO: 151551 - DNA, 25 bp, Probe sequence
tgaagaggctatcgaggctgaaagt

SEQ ID NO: 151552 - DNA, 25 bp, Probe sequence
tcacatatacaggcatgattgaaga

SEQ ID NO: 151553 - DNA, 25 bp, Probe sequence
tttgaggctcatgatattgcgagaa

SEQ ID NO: 151554 - DNA, 25 bp, Probe sequence
ttgaggctcatgatattgcgagaat

SEQ ID NO: 151555 - DNA, 25 bp, Probe sequence
ttgaagaggctatcgaggctgaaag

SEQ ID NO: 151556 - DNA, 25 bp, Probe sequence
attatcgttattgttgcagcttgtt

SEQ ID NO: 151557 - DNA, 25 bp, Probe sequence
attatcttcaatctttatgcagtga

SEQ ID NO: 151558 - DNA, 25 bp, Probe sequence
atttctatcatgttgtattttatat

SEQ ID NO: 151559 - DNA, 25 bp, Probe sequence
atatccctgttttaacacatgaatt

SEQ ID NO: 151560 - DNA, 25 bp, Probe sequence
atgtcattttaaactatatccctgt

SEQ ID NO: 151561 - DNA, 25 bp, Probe sequence
agtccacagtgggatggtagtgcac

SEQ ID NO: 151562 - DNA, 25 bp, Probe sequence
agcgtccgagtccacagtgggatgg

SEQ ID NO: 151563 - DNA, 25 bp, Probe sequence
agcgtcgagccattatcagatacct

SEQ ID NO: 151564 - DNA, 25 bp, Probe sequence
actcgctggtggccgtgcaaaagat

SEQ ID NO: 151565 - DNA, 25 bp, Probe sequence
aaggctcacccattgttgttataac

SEQ ID NO: 151566 - DNA, 25 bp, Probe sequence
cagacattacaacaaggattcgcaa

SEQ ID NO: 151567 - DNA, 25 bp, Probe sequence
ccacgagagcgacaacagacattac

SEQ ID NO: 151568 - DNA, 25 bp, Probe sequence
gcaggccaatggcttacaacgattg

SEQ ID NO: 151569 - DNA, 25 bp, Probe sequence
gcagcttgttatattgctattcatc

SEQ ID NO: 151570 - DNA, 25 bp, Probe sequence
gaatttggtcatgtactgtttaata

SEQ ID NO: 151571 - DNA, 25 bp, Probe sequence
gaactcagtcatgtacctatcttca

SEQ ID NO: 151572 - DNA, 25 bp, Probe sequence
gaaattcaactacttgtcacaatga

SEQ ID NO: 151573 - DNA, 25 bp, Probe sequence
gacgattgctaaattgactttccag

SEQ ID NO: 151574 - DNA, 25 bp, Probe sequence
gttgttataactttaatttctatca

SEQ ID NO: 151575 - DNA, 25 bp, Probe sequence
gtacctatcttcatttatagtacaa

SEQ ID NO: 151576 - DNA, 25 bp, Probe sequence
gtacaatctggattatcttcaatct

SEQ ID NO: 151577 - DNA, 25 bp, Probe sequence
gtggccgtgcaaaagatttagtcat

SEQ ID NO: 151578 - DNA, 25 bp, Probe sequence
ggtagtgcacttaaagaactcagtc

SEQ ID NO: 151579 - DNA, 25 bp, Probe sequence
ggcttacaacgattggtggttattt

SEQ ID NO: 151580 - DNA, 25 bp, Probe sequence
ggcgaagttctacaatctagttgga

SEQ ID NO: 151581 - DNA, 25 bp, Probe sequence
ttaataaactcgctggtggccgtgc

SEQ ID NO: 151582 - DNA, 25 bp, Probe sequence
tctagacatctagcaggccaatggc

SEQ ID NO: 151583 - DNA, 25 bp, Probe sequence
tcagatacctagtttctttatattt

SEQ ID NO: 151584 - DNA, 25 bp, Probe sequence
taacatctagaaaaggctcacccat

SEQ ID NO: 151585 - DNA, 25 bp, Probe sequence
taaattgactttccagcgtccgagt

SEQ ID NO: 151586 - DNA, 25 bp, Probe sequence
tagacataagcctgttttgaactat

SEQ ID NO: 151587 - DNA, 25 bp, Probe sequence
tttactcaaatatactcacttgata

SEQ ID NO: 151588 - DNA, 25 bp, Probe sequence
ttaggtgtattattaggcgaagttc

SEQ ID NO: 151589 - DNA, 25 bp, Probe sequence
ttcgcaattacacaatctagacatc

SEQ ID NO: 151590 - DNA, 25 bp, Probe sequence
attgatttacttgtactagatgata

SEQ ID NO: 151591 - DNA, 25 bp, Probe sequence
ataccaatgttgatggatcgtatca

SEQ ID NO: 151592 - DNA, 25 bp, Probe sequence
ataaacaacatattcaatcaatcaa

SEQ ID NO: 151593 - DNA, 25 bp, Probe sequence
atcaatcaaacgttaatccgtcttt

SEQ ID NO: 151594 - DNA, 25 bp, Probe sequence
atcaaaatatgaactggcaacgtat

SEQ ID NO: 151595 - DNA, 25 bp, Probe sequence
atcggagacgatttcagggagcgag

SEQ ID NO: 151596 - DNA, 25 bp, Probe sequence
atccgtctttaagagatgcaacagt

SEQ ID NO: 151597 - DNA, 25 bp, Probe sequence
aggattgaaatgtgagagatgtgga

SEQ ID NO: 151598 - DNA, 25 bp, Probe sequence
actacaagccacaaaatgaaaaaca

SEQ ID NO: 151599 - DNA, 25 bp, Probe sequence
acaacatctttacaactaactttag

SEQ ID NO: 151600 - DNA, 25 bp, Probe sequence
acagagtaggtaaaaacaacatctt

SEQ ID NO: 151601 - DNA, 25 bp, Probe sequence
acaagcaacggaagataaacaacat

SEQ ID NO: 151602 - DNA, 25 bp, Probe sequence
aaatatcaacctactcatgtcgaaa

SEQ ID NO: 151603 - DNA, 25 bp, Probe sequence
aaaagccacctagcatacgctatcg

SEQ ID NO: 151604 - DNA, 25 bp, Probe sequence
aaaatgcagtagagactacagacga

SEQ ID NO: 151605 - DNA, 25 bp, Probe sequence
aacatctttacaactaactttagtg

SEQ ID NO: 151606 - DNA, 25 bp, Probe sequence
aacttttcagcattgttgataacag

SEQ ID NO: 151607 - DNA, 25 bp, Probe sequence
aacctactcatgtcgaaaaaggatt

SEQ ID NO: 151608 - DNA, 25 bp, Probe sequence
ctctacaaaagaaccaaaatcatta

SEQ ID NO: 151609 - DNA, 25 bp, Probe sequence
gccacctagcatacgctatcgcaaa

SEQ ID NO: 151610 - DNA, 25 bp, Probe sequence
gaatataagcgaaacaagcaacgga

SEQ ID NO: 151611 - DNA, 25 bp, Probe sequence
gaaaagtaagagtaatcggagacga

SEQ ID NO: 151612 - DNA, 25 bp, Probe sequence
gaaaaaatatcaacctactcatgtc

SEQ ID NO: 151613 - DNA, 25 bp, Probe sequence
gacggttgcaaatgtgaaatctatg

SEQ ID NO: 151614 - DNA, 25 bp, Probe sequence
gatggatcgtatcaaagcgacatac

SEQ ID NO: 151615 - DNA, 25 bp, Probe sequence
gatgtggaagtgaatacgacttata

SEQ ID NO: 151616 - DNA, 25 bp, Probe sequence
ggtaaaagccacctagcatacgcta

SEQ ID NO: 151617 - DNA, 25 bp, Probe sequence
ggttacgagtataaagacggttgca

SEQ ID NO: 151618 - DNA, 25 bp, Probe sequence
ggaactggtaaaagccacctagcat

SEQ ID NO: 151619 - DNA, 25 bp, Probe sequence
tgaaaaacaagtacacgctaaacaa

SEQ ID NO: 151620 - DNA, 25 bp, Probe sequence
tcaaacgttaatccgtctttaagag

SEQ ID NO: 151621 - DNA, 25 bp, Probe sequence
tacttgtactagatgatatgggtgt

SEQ ID NO: 151622 - DNA, 25 bp, Probe sequence
tagcatacgctatcgcaaaagcagt

SEQ ID NO: 151623 - DNA, 25 bp, Probe sequence
tatcaacctactcatgtcgaaaaag

SEQ ID NO: 151624 - DNA, 25 bp, Probe sequence
tgtcgggcaacccgacggtgtcttc

SEQ ID NO: 151625 - DNA, 25 bp, Probe sequence
aggtgattgatatcaaaacagctga

SEQ ID NO: 151626 - DNA, 25 bp, Probe sequence
agtatatgagcaaccgcaccacatt

SEQ ID NO: 151627 - DNA, 25 bp, Probe sequence
agagcaacattcaactgatggactt

SEQ ID NO: 151628 - DNA, 25 bp, Probe sequence
acccccaatctaacgcagtagcgat

SEQ ID NO: 151629 - DNA, 25 bp, Probe sequence
aaatcgcatactactaataataata

SEQ ID NO: 151630 - DNA, 25 bp, Probe sequence
aaagcaggaaagcattttaaacata

SEQ ID NO: 151631 - DNA, 25 bp, Probe sequence
aacagctgaatggttaaacacggat

SEQ ID NO: 151632 - DNA, 25 bp, Probe sequence
aaccgttaatggtaaatcgcatact

SEQ ID NO: 151633 - DNA, 25 bp, Probe sequence
aagattttatacatgattctaatat

SEQ ID NO: 151634 - DNA, 25 bp, Probe sequence
aagtcgacctgataactggcaaatt

SEQ ID NO: 151635 - DNA, 25 bp, Probe sequence
aaggagataacgaaatggcaacatt

SEQ ID NO: 151636 - DNA, 25 bp, Probe sequence
aatggcaacatttagagtttacaaa

SEQ ID NO: 151637 - DNA, 25 bp, Probe sequence
cttagaccagaaacactttttggca

SEQ ID NO: 151638 - DNA, 25 bp, Probe sequence
ccacattcgattttccaacgttgga

SEQ ID NO: 151639 - DNA, 25 bp, Probe sequence
gcaccacattcgattttccaacgtt

SEQ ID NO: 151640 - DNA, 25 bp, Probe sequence
gaagtacgacgaaagttattgggat

SEQ ID NO: 151641 - DNA, 25 bp, Probe sequence
gaatggttaaacacggatagcgata

SEQ ID NO: 151642 - DNA, 25 bp, Probe sequence
gacctgataactggcaaatttacga

SEQ ID NO: 151643 - DNA, 25 bp, Probe sequence
gagtacttagtatatgagcaaccgc

SEQ ID NO: 151644 - DNA, 25 bp, Probe sequence
gatagcgataaataccttagaccag

SEQ ID NO: 151645 - DNA, 25 bp, Probe sequence
gttggaaggctaaaggtattctact

SEQ ID NO: 151646 - DNA, 25 bp, Probe sequence
gtcacagtacacaaagattttatac

SEQ ID NO: 151647 - DNA, 25 bp, Probe sequence
ggtgtcttccattccctataaagaa

SEQ ID NO: 151648 - DNA, 25 bp, Probe sequence
ggttaaatggttatgagtacttagt

SEQ ID NO: 151649 - DNA, 25 bp, Probe sequence
ggaagtatattgtcgggcaacccga

SEQ ID NO: 151650 - DNA, 25 bp, Probe sequence
ggaatcaagattttaggttggagga

SEQ ID NO: 151651 - DNA, 25 bp, Probe sequence
tctactttatttgttaagtcgacct

SEQ ID NO: 151652 - DNA, 25 bp, Probe sequence
tcaactgatggacttagcggtttaa

SEQ ID NO: 151653 - DNA, 25 bp, Probe sequence
taacatataaggtttttccatattt

SEQ ID NO: 151654 - DNA, 25 bp, Probe sequence
tacaaccaactggcacggatcaatt

SEQ ID NO: 151655 - DNA, 25 bp, Probe sequence
tacctcaatcaaaaaatacaaccaa

SEQ ID NO: 151656 - DNA, 25 bp, Probe sequence
tttacgaaacagaactagagcaaca

SEQ ID NO: 151657 - DNA, 25 bp, Probe sequence
ttagcggtttaaagagtggaatcaa

SEQ ID NO: 151658 - DNA, 25 bp, Probe sequence
attggtaagttttgtcacttggtat

SEQ ID NO: 151659 - DNA, 25 bp, Probe sequence
atagatatttcacaatcgtatttga

SEQ ID NO: 151660 - DNA, 25 bp, Probe sequence
atcaatttgtaccgccgtataaata

SEQ ID NO: 151661 - DNA, 25 bp, Probe sequence
atcacaggacaagcgcaatttacta

SEQ ID NO: 151662 - DNA, 25 bp, Probe sequence
atgaaaatcacaggacaagcgcaat

SEQ ID NO: 151663 - DNA, 25 bp, Probe sequence
agttttgtcacttggtattgaaatg

SEQ ID NO: 151664 - DNA, 25 bp, Probe sequence
agcttagattttgataccaatgatc

SEQ ID NO: 151665 - DNA, 25 bp, Probe sequence
acaggacaagcgcaatttactaaag

SEQ ID NO: 151666 - DNA, 25 bp, Probe sequence
aacataatcaatttgtaccgccgta

SEQ ID NO: 151667 - DNA, 25 bp, Probe sequence
caatttgtaccgccgtataaatatg

SEQ ID NO: 151668 - DNA, 25 bp, Probe sequence
aattgattgaattagttactcgatt

SEQ ID NO: 151669 - DNA, 25 bp, Probe sequence
caagctggagaattcacagtgaaag

SEQ ID NO: 151670 - DNA, 25 bp, Probe sequence
cagggtttcaagctggagaattcac

SEQ ID NO: 151671 - DNA, 25 bp, Probe sequence
cataatcaatttgtaccgccgtata

SEQ ID NO: 151672 - DNA, 25 bp, Probe sequence
ccgccgtataaatatgatttccaag

SEQ ID NO: 151673 - DNA, 25 bp, Probe sequence
cctagcttagattttgataccaatg

SEQ ID NO: 151674 - DNA, 25 bp, Probe sequence
gaattagttactcgattaggtatta

SEQ ID NO: 151675 - DNA, 25 bp, Probe sequence
gaaggcaaacaatataaacataatc

SEQ ID NO: 151676 - DNA, 25 bp, Probe sequence
gatcttattggtaagttttgtcact

SEQ ID NO: 151677 - DNA, 25 bp, Probe sequence
gatatttcacaatcgtatttgaaaa

SEQ ID NO: 151678 - DNA, 25 bp, Probe sequence
gattttgataccaatgatcttattg

SEQ ID NO: 151679 - DNA, 25 bp, Probe sequence
gattgaattagttactcgattaggt

SEQ ID NO: 151680 - DNA, 25 bp, Probe sequence
gtttcaagctggagaattcacagtg

SEQ ID NO: 151681 - DNA, 25 bp, Probe sequence
gtaccgccgtataaatatgatttcc

SEQ ID NO: 151682 - DNA, 25 bp, Probe sequence
ggtaagttttgtcacttggtattga

SEQ ID NO: 151683 - DNA, 25 bp, Probe sequence
ggtattaagttaaatcttcctagct

SEQ ID NO: 151684 - DNA, 25 bp, Probe sequence
ggacaagcgcaatttactaaagaaa

SEQ ID NO: 151685 - DNA, 25 bp, Probe sequence
tcttcctagcttagattttgatacc

SEQ ID NO: 151686 - DNA, 25 bp, Probe sequence
tcaagaaaagttttataacggctca

SEQ ID NO: 151687 - DNA, 25 bp, Probe sequence
taatcaatttgtaccgccgtataaa

SEQ ID NO: 151688 - DNA, 25 bp, Probe sequence
taagttaaatcttcctagcttagat

SEQ ID NO: 151689 - DNA, 25 bp, Probe sequence
ttagttactcgattaggtattaagt

SEQ ID NO: 151690 - DNA, 25 bp, Probe sequence
ttgtcacttggtattgaaatggaaa

SEQ ID NO: 151691 - DNA, 25 bp, Probe sequence
ttcctagcttagattttgataccaa

SEQ ID NO: 151692 - DNA, 25 bp, Probe sequence
attactaaagcatgctagttactgt

SEQ ID NO: 151693 - DNA, 25 bp, Probe sequence
atgctagttactgtttagaaagaag

SEQ ID NO: 151694 - DNA, 25 bp, Probe sequence
agttgcagagttgttaaagaaggtt

SEQ ID NO: 151695 - DNA, 25 bp, Probe sequence
agaaagaagtaacaaccctgaattg

SEQ ID NO: 151696 - DNA, 25 bp, Probe sequence
agaagtaacaaccctgaattgttgc

SEQ ID NO: 151697 - DNA, 25 bp, Probe sequence
agcatgctagttactgtttagaaag

SEQ ID NO: 151698 - DNA, 25 bp, Probe sequence
actcaaattactaaagcatgctagt

SEQ ID NO: 151699 - DNA, 25 bp, Probe sequence
actaaagcatgctagttactgttta

SEQ ID NO: 151700 - DNA, 25 bp, Probe sequence
aaattactaaagcatgctagttact

SEQ ID NO: 151701 - DNA, 25 bp, Probe sequence
aaagcatgctagttactgtttagaa

SEQ ID NO: 151702 - DNA, 25 bp, Probe sequence
aaactcaaattactaaagcatgcta

SEQ ID NO: 151703 - DNA, 25 bp, Probe sequence
aaaactcaaattactaaagcatgct

SEQ ID NO: 151704 - DNA, 25 bp, Probe sequence
aactcaaattactaaagcatgctag

SEQ ID NO: 151705 - DNA, 25 bp, Probe sequence
aagaagtaacaaccctgaattgttg

SEQ ID NO: 151706 - DNA, 25 bp, Probe sequence
aagcatgctagttactgtttagaaa

SEQ ID NO: 151707 - DNA, 25 bp, Probe sequence
aattactaaagcatgctagttactg

SEQ ID NO: 151708 - DNA, 25 bp, Probe sequence
caaattactaaagcatgctagttac

SEQ ID NO: 151709 - DNA, 25 bp, Probe sequence
cagttgcagagttgttaaagaaggt

SEQ ID NO: 151710 - DNA, 25 bp, Probe sequence
catgctagttactgtttagaaagaa

SEQ ID NO: 151711 - DNA, 25 bp, Probe sequence
ctaaagcatgctagttactgtttag

SEQ ID NO: 151712 - DNA, 25 bp, Probe sequence
ctcaaattactaaagcatgctagtt

SEQ ID NO: 151713 - DNA, 25 bp, Probe sequence
gcatgctagttactgtttagaaaga

SEQ ID NO: 151714 - DNA, 25 bp, Probe sequence
gcagttgcagagttgttaaagaagg

SEQ ID NO: 151715 - DNA, 25 bp, Probe sequence
gaagtaacaaccctgaattgttgcg

SEQ ID NO: 151716 - DNA, 25 bp, Probe sequence
gaaagaagtaacaaccctgaattgt

SEQ ID NO: 151717 - DNA, 25 bp, Probe sequence
gttgcagagttgttaaagaaggtta

SEQ ID NO: 151718 - DNA, 25 bp, Probe sequence
tgctagttactgtttagaaagaagt

SEQ ID NO: 151719 - DNA, 25 bp, Probe sequence
tcaaattactaaagcatgctagtta

SEQ ID NO: 151720 - DNA, 25 bp, Probe sequence
taaagcatgctagttactgtttaga

SEQ ID NO: 151721 - DNA, 25 bp, Probe sequence
tactaaagcatgctagttactgttt

SEQ ID NO: 151722 - DNA, 25 bp, Probe sequence
tagaaagaagtaacaaccctgaatt

SEQ ID NO: 151723 - DNA, 25 bp, Probe sequence
ttagaaagaagtaacaaccctgaat

SEQ ID NO: 151724 - DNA, 25 bp, Probe sequence
ttactaaagcatgctagttactgtt

SEQ ID NO: 151725 - DNA, 25 bp, Probe sequence
ttgcagagttgttaaagaaggttaa

SEQ ID NO: 151726 - DNA, 25 bp, Probe sequence
atacaacgatggctacgacttaatg

SEQ ID NO: 151727 - DNA, 25 bp, Probe sequence
attcaatacaacgatggctacgact

SEQ ID NO: 151728 - DNA, 25 bp, Probe sequence
ataacttttatggattaatagatgg

SEQ ID NO: 151729 - DNA, 25 bp, Probe sequence
atgacgcttgaaagacatccgcatt

SEQ ID NO: 151730 - DNA, 25 bp, Probe sequence
agacgacccgttaatattcaataca

SEQ ID NO: 151731 - DNA, 25 bp, Probe sequence
acgatggctacgacttaatgataga

SEQ ID NO: 151732 - DNA, 25 bp, Probe sequence
acgcttgaaagacatccgcatttaa

SEQ ID NO: 151733 - DNA, 25 bp, Probe sequence
acaacgatggctacgacttaatgat

SEQ ID NO: 151734 - DNA, 25 bp, Probe sequence
aaatgacgcttgaaagacatccgca

SEQ ID NO: 151735 - DNA, 25 bp, Probe sequence
aacgatggctacgacttaatgatag

SEQ ID NO: 151736 - DNA, 25 bp, Probe sequence
aatgacgcttgaaagacatccgcat

SEQ ID NO: 151737 - DNA, 25 bp, Probe sequence
aatagacgacccgttaatattcaat

SEQ ID NO: 151738 - DNA, 25 bp, Probe sequence
aatacaacgatggctacgacttaat

SEQ ID NO: 151739 - DNA, 25 bp, Probe sequence
caatacaacgatggctacgacttaa

SEQ ID NO: 151740 - DNA, 25 bp, Probe sequence
aatattcaatacaacgatggctacg

SEQ ID NO: 151741 - DNA, 25 bp, Probe sequence
caacgatggctacgacttaatgata

SEQ ID NO: 151742 - DNA, 25 bp, Probe sequence
cttgaaagacatccgcatttaaaaa

SEQ ID NO: 151743 - DNA, 25 bp, Probe sequence
cgttttattgaaatgacgcttgaaa

SEQ ID NO: 151744 - DNA, 25 bp, Probe sequence
cgcttgaaagacatccgcatttaaa

SEQ ID NO: 151745 - DNA, 25 bp, Probe sequence
gcttgaaagacatccgcatttaaaa

SEQ ID NO: 151746 - DNA, 25 bp, Probe sequence
gaaagacatccgcatttaaaaaata

SEQ ID NO: 151747 - DNA, 25 bp, Probe sequence
gaaatgacgcttgaaagacatccgc

SEQ ID NO: 151748 - DNA, 25 bp, Probe sequence
gacatccgcatttaaaaaataactt

SEQ ID NO: 151749 - DNA, 25 bp, Probe sequence
gacgacccgttaatattcaatacaa

SEQ ID NO: 151750 - DNA, 25 bp, Probe sequence
gacgcttgaaagacatccgcattta

SEQ ID NO: 151751 - DNA, 25 bp, Probe sequence
gacccgttaatattcaatacaacga

SEQ ID NO: 151752 - DNA, 25 bp, Probe sequence
gatggctacgacttaatgatagacc

SEQ ID NO: 151753 - DNA, 25 bp, Probe sequence
gtaatagacgacccgttaatattca

SEQ ID NO: 151754 - DNA, 25 bp, Probe sequence
tgacgcttgaaagacatccgcattt

SEQ ID NO: 151755 - DNA, 25 bp, Probe sequence
tcaatacaacgatggctacgactta

SEQ ID NO: 151756 - DNA, 25 bp, Probe sequence
tacaacgatggctacgacttaatga

SEQ ID NO: 151757 - DNA, 25 bp, Probe sequence
tagacgacccgttaatattcaatac

SEQ ID NO: 151758 - DNA, 25 bp, Probe sequence
tattcaatacaacgatggctacgac

SEQ ID NO: 151759 - DNA, 25 bp, Probe sequence
ttcaatacaacgatggctacgactt

SEQ ID NO: 151760 - DNA, 25 bp, Probe sequence
caactaggtacgataagtggttcga

SEQ ID NO: 151761 - DNA, 25 bp, Probe sequence
atgacggaatatggttttgaaaacg

SEQ ID NO: 151762 - DNA, 25 bp, Probe sequence
agggcgcgtacttatgaacaagtta

SEQ ID NO: 151763 - DNA, 25 bp, Probe sequence
agttaatcatattctcactctcgac

SEQ ID NO: 151764 - DNA, 25 bp, Probe sequence
acgggatagattttatttcgcaagt

SEQ ID NO: 151765 - DNA, 25 bp, Probe sequence
acaagttaatcatattctcactctc

SEQ ID NO: 151766 - DNA, 25 bp, Probe sequence
aaagggcgcgtacttatgaacaagt

SEQ ID NO: 151767 - DNA, 25 bp, Probe sequence
aaaagggcgcgtacttatgaacaag

SEQ ID NO: 151768 - DNA, 25 bp, Probe sequence
aacaagttaatcatattctcactct

SEQ ID NO: 151769 - DNA, 25 bp, Probe sequence
aacgggatagattttatttcgcaag

SEQ ID NO: 151770 - DNA, 25 bp, Probe sequence
aagaatgacggaatatggttttgaa

SEQ ID NO: 151771 - DNA, 25 bp, Probe sequence
aagttaatcatattctcactctcga

SEQ ID NO: 151772 - DNA, 25 bp, Probe sequence
aagggcgcgtacttatgaacaagtt

SEQ ID NO: 151773 - DNA, 25 bp, Probe sequence
aagtggttcgaaagaatgacggaat

SEQ ID NO: 151774 - DNA, 25 bp, Probe sequence
caagttaatcatattctcactctcg

SEQ ID NO: 151775 - DNA, 25 bp, Probe sequence
caagcattagaagtttcaactaggt

SEQ ID NO: 151776 - DNA, 25 bp, Probe sequence
gcattagaagtttcaactaggtacg

SEQ ID NO: 151777 - DNA, 25 bp, Probe sequence
ctaggtacgataagtggttcgaaag

SEQ ID NO: 151778 - DNA, 25 bp, Probe sequence
gcgcgtacttatgaacaagttaatc

SEQ ID NO: 151779 - DNA, 25 bp, Probe sequence
gaagtttcaactaggtacgataagt

SEQ ID NO: 151780 - DNA, 25 bp, Probe sequence
gcaagttgaaaaagtacacggtcaa

SEQ ID NO: 151781 - DNA, 25 bp, Probe sequence
gaacaagttaatcatattctcactc

SEQ ID NO: 151782 - DNA, 25 bp, Probe sequence
gatagattttatttcgcaagttgaa

SEQ ID NO: 151783 - DNA, 25 bp, Probe sequence
gtttcaactaggtacgataagtggt

SEQ ID NO: 151784 - DNA, 25 bp, Probe sequence
gttaatcatattctcactctcgaca

SEQ ID NO: 151785 - DNA, 25 bp, Probe sequence
gtcaaaaaagggcgcgtacttatga

SEQ ID NO: 151786 - DNA, 25 bp, Probe sequence
gggcgcgtacttatgaacaagttaa

SEQ ID NO: 151787 - DNA, 25 bp, Probe sequence
gggatagattttatttcgcaagttg

SEQ ID NO: 151788 - DNA, 25 bp, Probe sequence
ggtcaaaaaagggcgcgtacttatg

SEQ ID NO: 151789 - DNA, 25 bp, Probe sequence
ggatagattttatttcgcaagttga

SEQ ID NO: 151790 - DNA, 25 bp, Probe sequence
tcgcaagttgaaaaagtacacggtc

SEQ ID NO: 151791 - DNA, 25 bp, Probe sequence
tctcactctcgacactgcaaaagag

SEQ ID NO: 151792 - DNA, 25 bp, Probe sequence
ttaatcatattctcactctcgacac

SEQ ID NO: 151793 - DNA, 25 bp, Probe sequence
ttctcactctcgacactgcaaaaga

SEQ ID NO: 151794 - DNA, 25 bp, Probe sequence
attttagagagtatttcatccaagt

SEQ ID NO: 151795 - DNA, 25 bp, Probe sequence
ataacggagctgtaagacaactaga

SEQ ID NO: 151796 - DNA, 25 bp, Probe sequence
atcgcaataagtgcaagagagttat

SEQ ID NO: 151797 - DNA, 25 bp, Probe sequence
atgctttaacacttgatgtagctaa

SEQ ID NO: 151798 - DNA, 25 bp, Probe sequence
agattatgctttaacacttgatgta

SEQ ID NO: 151799 - DNA, 25 bp, Probe sequence
agaagattatgctttaacacttgat

SEQ ID NO: 151800 - DNA, 25 bp, Probe sequence
aaaagcgttttagcgcttgggcaga

SEQ ID NO: 151801 - DNA, 25 bp, Probe sequence
aacacttgatgtagctaaacatgtt

SEQ ID NO: 151802 - DNA, 25 bp, Probe sequence
aacatgttgcgatgatgtcaggtac

SEQ ID NO: 151803 - DNA, 25 bp, Probe sequence
aacggagctgtaagacaactagaag

SEQ ID NO: 151804 - DNA, 25 bp, Probe sequence
caagtgtacttacaagtacggttgt

SEQ ID NO: 151805 - DNA, 25 bp, Probe sequence
catgttgcgatgatgtcaggtacag

SEQ ID NO: 151806 - DNA, 25 bp, Probe sequence
gcgcttgggcagaaattaacttgaa

SEQ ID NO: 151807 - DNA, 25 bp, Probe sequence
gcgttttagcgcttgggcagaaatt

SEQ ID NO: 151808 - DNA, 25 bp, Probe sequence
gctaaacatgttgcgatgatgtcag

SEQ ID NO: 151809 - DNA, 25 bp, Probe sequence
gctttaacacttgatgtagctaaac

SEQ ID NO: 151810 - DNA, 25 bp, Probe sequence
gaaattaacttgaagcatttcaaag

SEQ ID NO: 151811 - DNA, 25 bp, Probe sequence
gacaactagaagattatgctttaac

SEQ ID NO: 151812 - DNA, 25 bp, Probe sequence
gatgtcaggtacagaaaaaggtttt

SEQ ID NO: 151813 - DNA, 25 bp, Probe sequence
gagagttatataaagctttggaagt

SEQ ID NO: 151814 - DNA, 25 bp, Probe sequence
gatgtagctaaacatgttgcgatga

SEQ ID NO: 151815 - DNA, 25 bp, Probe sequence
gttgcgatgatgtcaggtacagaaa

SEQ ID NO: 151816 - DNA, 25 bp, Probe sequence
gttaataacggagctgtaagacaac

SEQ ID NO: 151817 - DNA, 25 bp, Probe sequence
gttttagcgcttgggcagaaattaa

SEQ ID NO: 151818 - DNA, 25 bp, Probe sequence
gtacggttgttaataacggagctgt

SEQ ID NO: 151819 - DNA, 25 bp, Probe sequence
gggattttacaagtgtacttacaag

SEQ ID NO: 151820 - DNA, 25 bp, Probe sequence
ggttgttaataacggagctgtaaga

SEQ ID NO: 151821 - DNA, 25 bp, Probe sequence
ggagctgtaagacaactagaagatt

SEQ ID NO: 151822 - DNA, 25 bp, Probe sequence
ggagaaatcgcaataagtgcaagag

SEQ ID NO: 151823 - DNA, 25 bp, Probe sequence
tgggcagaaattaacttgaagcatt

SEQ ID NO: 151824 - DNA, 25 bp, Probe sequence
tgtagctaaacatgttgcgatgatg

SEQ ID NO: 151825 - DNA, 25 bp, Probe sequence
tagcgcttgggcagaaattaacttg

SEQ ID NO: 151826 - DNA, 25 bp, Probe sequence
tagagagtatttcatccaagtagag

SEQ ID NO: 151827 - DNA, 25 bp, Probe sequence
tttagcgcttgggcagaaattaact

SEQ ID NO: 151828 - DNA, 25 bp, Probe sequence
aacccactaggaggtcgtcagaatc

SEQ ID NO: 151829 - DNA, 25 bp, Probe sequence
ataacccactaggaggtcgtcagaa

SEQ ID NO: 151830 - DNA, 25 bp, Probe sequence
atttttgtccataacccactaggag

SEQ ID NO: 151831 - DNA, 25 bp, Probe sequence
atagtcacggacatttttgtccata

SEQ ID NO: 151832 - DNA, 25 bp, Probe sequence
acatttttgtccataacccactagg

SEQ ID NO: 151833 - DNA, 25 bp, Probe sequence
aggttaagactccatacaaaaaatg

SEQ ID NO: 151834 - DNA, 25 bp, Probe sequence
actaggaggtcgtcagaatcaaact

SEQ ID NO: 151835 - DNA, 25 bp, Probe sequence
caagcattagaggttaagactccat

SEQ ID NO: 151836 - DNA, 25 bp, Probe sequence
cacggacatttttgtccataaccca

SEQ ID NO: 151837 - DNA, 25 bp, Probe sequence
ctaggaggtcgtcagaatcaaactg

SEQ ID NO: 151838 - DNA, 25 bp, Probe sequence
cataacccactaggaggtcgtcaga

SEQ ID NO: 151839 - DNA, 25 bp, Probe sequence
catttttgtccataacccactagga

SEQ ID NO: 151840 - DNA, 25 bp, Probe sequence
cccactaggaggtcgtcagaatcaa

SEQ ID NO: 151841 - DNA, 25 bp, Probe sequence
ccactaggaggtcgtcagaatcaaa

SEQ ID NO: 151842 - DNA, 25 bp, Probe sequence
ccataacccactaggaggtcgtcag

SEQ ID NO: 151843 - DNA, 25 bp, Probe sequence
tccataacccactaggaggtcgtca

SEQ ID NO: 151844 - DNA, 25 bp, Probe sequence
tttgtccataacccactaggaggtc

SEQ ID NO: 151845 - DNA, 25 bp, Probe sequence
gcattagaggttaagactccataca

SEQ ID NO: 151846 - DNA, 25 bp, Probe sequence
gaatgagtgattacggatttgaaga

SEQ ID NO: 151847 - DNA, 25 bp, Probe sequence
gaaagaatgagtgattacggatttg

SEQ ID NO: 151848 - DNA, 25 bp, Probe sequence
gacatttttgtccataacccactag

SEQ ID NO: 151849 - DNA, 25 bp, Probe sequence
gtcacggacatttttgtccataacc

SEQ ID NO: 151850 - DNA, 25 bp, Probe sequence
gtcgtcagaatcaaactgaccacgc

SEQ ID NO: 151851 - DNA, 25 bp, Probe sequence
gtccataacccactaggaggtcgtc

SEQ ID NO: 151852 - DNA, 25 bp, Probe sequence
ggaggtcgtcagaatcaaactgacc

SEQ ID NO: 151853 - DNA, 25 bp, Probe sequence
tgtccataacccactaggaggtcgt

SEQ ID NO: 151854 - DNA, 25 bp, Probe sequence
tcagaatcaaactgaccacgcactc

SEQ ID NO: 151855 - DNA, 25 bp, Probe sequence
taacccactaggaggtcgtcagaat

SEQ ID NO: 151856 - DNA, 25 bp, Probe sequence
tatcgattatatagtcacggacatt

SEQ ID NO: 151857 - DNA, 25 bp, Probe sequence
ttttgtccataacccactaggaggt

SEQ ID NO: 151858 - DNA, 25 bp, Probe sequence
tttttgtccataacccactaggagg

SEQ ID NO: 151859 - DNA, 25 bp, Probe sequence
ttgtccataacccactaggaggtcg

SEQ ID NO: 151860 - DNA, 25 bp, Probe sequence
ttatatagtcacggacatttttgtc

SEQ ID NO: 151861 - DNA, 25 bp, Probe sequence
ttagaggttaagactccatacaaaa

SEQ ID NO: 151862 - DNA, 25 bp, Probe sequence
gtagtgaacccggtaaacgtgcaag

SEQ ID NO: 151863 - DNA, 25 bp, Probe sequence
atatgactcactatattgaccacgc

SEQ ID NO: 151864 - DNA, 25 bp, Probe sequence
atcaattacacattcagacggtcac

SEQ ID NO: 151865 - DNA, 25 bp, Probe sequence
atcgagcatcggagaaatgttcaat

SEQ ID NO: 151866 - DNA, 25 bp, Probe sequence
atgactcactatattgaccacgcac

SEQ ID NO: 151867 - DNA, 25 bp, Probe sequence
acatcaattacacattcagacggtc

SEQ ID NO: 151868 - DNA, 25 bp, Probe sequence
acagctcaaggcaatatgactcact

SEQ ID NO: 151869 - DNA, 25 bp, Probe sequence
aaaagaaatcgcaatgattcaacgt

SEQ ID NO: 151870 - DNA, 25 bp, Probe sequence
aatacagattacacagctatcgctc

SEQ ID NO: 151871 - DNA, 25 bp, Probe sequence
caattacacattcagacggtcacac

SEQ ID NO: 151872 - DNA, 25 bp, Probe sequence
caagcattagaagttaagacggcat

SEQ ID NO: 151873 - DNA, 25 bp, Probe sequence
cagattacacagctatcgctcaaaa

SEQ ID NO: 151874 - DNA, 25 bp, Probe sequence
cggcatataaagattggtttccaag

SEQ ID NO: 151875 - DNA, 25 bp, Probe sequence
ccaagaatgcttaaatacggatttg

SEQ ID NO: 151876 - DNA, 25 bp, Probe sequence
gctcaaggcaatatgactcactata

SEQ ID NO: 151877 - DNA, 25 bp, Probe sequence
gctatcgctcaaaaaagagcaacag

SEQ ID NO: 151878 - DNA, 25 bp, Probe sequence
gcattagaagttaagacggcatata

SEQ ID NO: 151879 - DNA, 25 bp, Probe sequence
gcatcggagaaatgttcaatattca

SEQ ID NO: 151880 - DNA, 25 bp, Probe sequence
gcaacagctcaaggcaatatgactc

SEQ ID NO: 151881 - DNA, 25 bp, Probe sequence
gaatgcttaaatacggatttgaaga

SEQ ID NO: 151882 - DNA, 25 bp, Probe sequence
gaaacatcaattacacattcagacg

SEQ ID NO: 151883 - DNA, 25 bp, Probe sequence
gacactgcaaaagaaatcgcaatga

SEQ ID NO: 151884 - DNA, 25 bp, Probe sequence
gacggcatataaagattggtttcca

SEQ ID NO: 151885 - DNA, 25 bp, Probe sequence
gagcaacagctcaaggcaatatgac

SEQ ID NO: 151886 - DNA, 25 bp, Probe sequence
gattacacagctatcgctcaaaaaa

SEQ ID NO: 151887 - DNA, 25 bp, Probe sequence
gattggtttccaagaatgcttaaat

SEQ ID NO: 151888 - DNA, 25 bp, Probe sequence
gtgaacccggtaaacgtgcaagaca

SEQ ID NO: 151889 - DNA, 25 bp, Probe sequence
ggtttccaagaatgcttaaatacgg

SEQ ID NO: 151890 - DNA, 25 bp, Probe sequence
ggagaaatgttcaatattcaagaaa

SEQ ID NO: 151891 - DNA, 25 bp, Probe sequence
tgaacccggtaaacgtgcaagacaa

SEQ ID NO: 151892 - DNA, 25 bp, Probe sequence
tgactcactatattgaccacgcact

SEQ ID NO: 151893 - DNA, 25 bp, Probe sequence
tacaaacaaaatcgagcatcggaga

SEQ ID NO: 151894 - DNA, 25 bp, Probe sequence
tacacagctatcgctcaaaaaagag

SEQ ID NO: 151895 - DNA, 25 bp, Probe sequence
tacagattacacagctatcgctcaa

SEQ ID NO: 151896 - DNA, 25 bp, Probe sequence
atcaacgccactccaattaaagagt

SEQ ID NO: 151897 - DNA, 25 bp, Probe sequence
atctcattttaaaaccgaacatgct

SEQ ID NO: 151898 - DNA, 25 bp, Probe sequence
accacatacggtgatgcaagaaata

SEQ ID NO: 151899 - DNA, 25 bp, Probe sequence
acgaaaaaatcaacgccactccaat

SEQ ID NO: 151900 - DNA, 25 bp, Probe sequence
accgaacatgcttcagttatttaca

SEQ ID NO: 151901 - DNA, 25 bp, Probe sequence
acttttagattatcgagttcaacaa

SEQ ID NO: 151902 - DNA, 25 bp, Probe sequence
acatgcttcagttatttacaaatta

SEQ ID NO: 151903 - DNA, 25 bp, Probe sequence
aaattattgctgaatctcattttaa

SEQ ID NO: 151904 - DNA, 25 bp, Probe sequence
aaatcaacgccactccaattaaaga

SEQ ID NO: 151905 - DNA, 25 bp, Probe sequence
aaaccgaacatgcttcagttattta

SEQ ID NO: 151906 - DNA, 25 bp, Probe sequence
aaaatcaacgccactccaattaaag

SEQ ID NO: 151907 - DNA, 25 bp, Probe sequence
aagtaccacatacggtgatgcaaga

SEQ ID NO: 151908 - DNA, 25 bp, Probe sequence
caacgccactccaattaaagagtga

SEQ ID NO: 151909 - DNA, 25 bp, Probe sequence
gctgaatctcattttaaaaccgaac

SEQ ID NO: 151910 - DNA, 25 bp, Probe sequence
gcttcagttatttacaaattagcat

SEQ ID NO: 151911 - DNA, 25 bp, Probe sequence
gaaggtgttctatcagaaagtacca

SEQ ID NO: 151912 - DNA, 25 bp, Probe sequence
gaagagtgtgtcgaacaatgcatca

SEQ ID NO: 151913 - DNA, 25 bp, Probe sequence
gaacatgcttcagttatttacaaat

SEQ ID NO: 151914 - DNA, 25 bp, Probe sequence
gaacaatgcatcaataaagacttaa

SEQ ID NO: 151915 - DNA, 25 bp, Probe sequence
gaaaaaatcaacgccactccaatta

SEQ ID NO: 151916 - DNA, 25 bp, Probe sequence
gaaagtaccacatacggtgatgcaa

SEQ ID NO: 151917 - DNA, 25 bp, Probe sequence
gacgaaaaaatcaacgccactccaa

SEQ ID NO: 151918 - DNA, 25 bp, Probe sequence
gagttcaacaaattttagaaggtgt

SEQ ID NO: 151919 - DNA, 25 bp, Probe sequence
gagtgtgtcgaacaatgcatcaata

SEQ ID NO: 151920 - DNA, 25 bp, Probe sequence
gattatcgagttcaacaaattttag

SEQ ID NO: 151921 - DNA, 25 bp, Probe sequence
gttctatcagaaagtaccacatacg

SEQ ID NO: 151922 - DNA, 25 bp, Probe sequence
gtaccacatacggtgatgcaagaaa

SEQ ID NO: 151923 - DNA, 25 bp, Probe sequence
gtgtcgaacaatgcatcaataaaga

SEQ ID NO: 151924 - DNA, 25 bp, Probe sequence
gtgtgtcgaacaatgcatcaataaa

SEQ ID NO: 151925 - DNA, 25 bp, Probe sequence
ggtgttctatcagaaagtaccacat

SEQ ID NO: 151926 - DNA, 25 bp, Probe sequence
tgaatctcattttaaaaccgaacat

SEQ ID NO: 151927 - DNA, 25 bp, Probe sequence
taaaaccgaacatgcttcagttatt

SEQ ID NO: 151928 - DNA, 25 bp, Probe sequence
tagacgaaaaaatcaacgccactcc

SEQ ID NO: 151929 - DNA, 25 bp, Probe sequence
ttgctgaatctcattttaaaaccga

SEQ ID NO: 151930 - DNA, 25 bp, Probe sequence
atactcctgtattattgattttttc

SEQ ID NO: 151931 - DNA, 25 bp, Probe sequence
ataattcagctggtagcgatttcga

SEQ ID NO: 151932 - DNA, 25 bp, Probe sequence
aggttacataccatataaatatcta

SEQ ID NO: 151933 - DNA, 25 bp, Probe sequence
accgtcaaacgatgaattgtatatt

SEQ ID NO: 151934 - DNA, 25 bp, Probe sequence
actcctgtattattgattttttcta

SEQ ID NO: 151935 - DNA, 25 bp, Probe sequence
acaatgataggtttagttagtgaaa

SEQ ID NO: 151936 - DNA, 25 bp, Probe sequence
aaaacctataattcagctggtagcg

SEQ ID NO: 151937 - DNA, 25 bp, Probe sequence
aacttaaaacctataattcagctgg

SEQ ID NO: 151938 - DNA, 25 bp, Probe sequence
aacctataattcagctggtagcgat

SEQ ID NO: 151939 - DNA, 25 bp, Probe sequence
aagactttgaaaacagaatcattga

SEQ ID NO: 151940 - DNA, 25 bp, Probe sequence
aattcagctggtagcgatttcgatt

SEQ ID NO: 151941 - DNA, 25 bp, Probe sequence
cagctggtagcgatttcgatttact

SEQ ID NO: 151942 - DNA, 25 bp, Probe sequence
cataccatataaatatctaacaatg

SEQ ID NO: 151943 - DNA, 25 bp, Probe sequence
cttacaggtctaaaagcaaatattt

SEQ ID NO: 151944 - DNA, 25 bp, Probe sequence
cgcttcttcttacaggagttttagg

SEQ ID NO: 151945 - DNA, 25 bp, Probe sequence
gcttcttcttacaggagttttaggt

SEQ ID NO: 151946 - DNA, 25 bp, Probe sequence
gcgcttcttcttacaggagttttag

SEQ ID NO: 151947 - DNA, 25 bp, Probe sequence
gctggtagcgatttcgatttactag

SEQ ID NO: 151948 - DNA, 25 bp, Probe sequence
gaatcattgaagagggtgaacttaa

SEQ ID NO: 151949 - DNA, 25 bp, Probe sequence
gaaacatgtttgatatggttttata

SEQ ID NO: 151950 - DNA, 25 bp, Probe sequence
gatttaccgtcaaacgatgaattgt

SEQ ID NO: 151951 - DNA, 25 bp, Probe sequence
gattttttctattgaaacatgtttg

SEQ ID NO: 151952 - DNA, 25 bp, Probe sequence
gttgagcgacaagatttcaaagtat

SEQ ID NO: 151953 - DNA, 25 bp, Probe sequence
gttttaggttacataccatataaat

SEQ ID NO: 151954 - DNA, 25 bp, Probe sequence
ggagttttaggttacataccatata

SEQ ID NO: 151955 - DNA, 25 bp, Probe sequence
tgtattattgattttttctattgaa

SEQ ID NO: 151956 - DNA, 25 bp, Probe sequence
tgactcaatttctaggggcgcttct

SEQ ID NO: 151957 - DNA, 25 bp, Probe sequence
tgaagagggtgaacttaaaacctat

SEQ ID NO: 151958 - DNA, 25 bp, Probe sequence
tcctgtattattgattttttctatt

SEQ ID NO: 151959 - DNA, 25 bp, Probe sequence
tacaggagttttaggttacatacca

SEQ ID NO: 151960 - DNA, 25 bp, Probe sequence
ttcagttgcttacaggtctaaaagc

SEQ ID NO: 151961 - DNA, 25 bp, Probe sequence
ttcttacaggagttttaggttacat

SEQ ID NO: 151962 - DNA, 25 bp, Probe sequence
ttcagctggtagcgatttcgattta

SEQ ID NO: 151963 - DNA, 25 bp, Probe sequence
ttggattgtataagcttattagaca

SEQ ID NO: 151964 - DNA, 25 bp, Probe sequence
atttcgtcaatccaacgggtgctga

SEQ ID NO: 151965 - DNA, 25 bp, Probe sequence
atcaatatggttatgcaggtttgtc

SEQ ID NO: 151966 - DNA, 25 bp, Probe sequence
atccaacgggtgctgaaaattcaag

SEQ ID NO: 151967 - DNA, 25 bp, Probe sequence
atctaattctagtaatgccgcggca

SEQ ID NO: 151968 - DNA, 25 bp, Probe sequence
atcgcagacctattacaaattacag

SEQ ID NO: 151969 - DNA, 25 bp, Probe sequence
atgccgcggcattaattttagctaa

SEQ ID NO: 151970 - DNA, 25 bp, Probe sequence
atgtctacactacctgagttgagta

SEQ ID NO: 151971 - DNA, 25 bp, Probe sequence
acgaaccgacgagtgctgttaatgt

SEQ ID NO: 151972 - DNA, 25 bp, Probe sequence
acaaagcagttagcaccaacaacgc

SEQ ID NO: 151973 - DNA, 25 bp, Probe sequence
aaacaccagcgatttcgttgattta

SEQ ID NO: 151974 - DNA, 25 bp, Probe sequence
aaaatacacatttcgtcaatccaac

SEQ ID NO: 151975 - DNA, 25 bp, Probe sequence
aaccttggtggcgagaagcaacgta

SEQ ID NO: 151976 - DNA, 25 bp, Probe sequence
aagtatggacaatcgcagacctatt

SEQ ID NO: 151977 - DNA, 25 bp, Probe sequence
ctaacagtgacgtaacccctgtaca

SEQ ID NO: 151978 - DNA, 25 bp, Probe sequence
ctaagtggaatccagcgtctatgac

SEQ ID NO: 151979 - DNA, 25 bp, Probe sequence
cgcggactatccaagagaatttatt

SEQ ID NO: 151980 - DNA, 25 bp, Probe sequence
gccattttagatttacacgtgatta

SEQ ID NO: 151981 - DNA, 25 bp, Probe sequence
gctgcatacgaaccgacgagtgctg

SEQ ID NO: 151982 - DNA, 25 bp, Probe sequence
gaattaatcaagttatcatgggtgc

SEQ ID NO: 151983 - DNA, 25 bp, Probe sequence
gaatatattatgtctacactacctg

SEQ ID NO: 151984 - DNA, 25 bp, Probe sequence
gaacatccattattcactatcattg

SEQ ID NO: 151985 - DNA, 25 bp, Probe sequence
gacctccaactgtagaagttcatca

SEQ ID NO: 151986 - DNA, 25 bp, Probe sequence
gatctttacgatgttttaccaagtg

SEQ ID NO: 151987 - DNA, 25 bp, Probe sequence
gatacagcaaattacaaccatacga

SEQ ID NO: 151988 - DNA, 25 bp, Probe sequence
gtattatgacaccatatgcacaagc

SEQ ID NO: 151989 - DNA, 25 bp, Probe sequence
gtaacccctgtacaagcagcaaatc

SEQ ID NO: 151990 - DNA, 25 bp, Probe sequence
gtaatacgaaactatatcctggaca

SEQ ID NO: 151991 - DNA, 25 bp, Probe sequence
gtcaaactggacaattactgtatca

SEQ ID NO: 151992 - DNA, 25 bp, Probe sequence
ggtaaagtacacgcggactatccaa

SEQ ID NO: 151993 - DNA, 25 bp, Probe sequence
ggagactataaaaaccttggtggcg

SEQ ID NO: 151994 - DNA, 25 bp, Probe sequence
taatatctattatcatcattttatg

SEQ ID NO: 151995 - DNA, 25 bp, Probe sequence
taaggggcagctttcacttgatgac

SEQ ID NO: 151996 - DNA, 25 bp, Probe sequence
tacgtattacacattcaacttttca

SEQ ID NO: 151997 - DNA, 25 bp, Probe sequence
ttcaacttttcattggaaggtgcaa

SEQ ID NO: 151998 - DNA, 25 bp, Probe sequence
attaccaactaatttgcagcgttat

SEQ ID NO: 151999 - DNA, 25 bp, Probe sequence
atagcagatgattggattttagatt

SEQ ID NO: 152000 - DNA, 25 bp, Probe sequence
atgcctagtcgtatctagacactat

SEQ ID NO: 152001 - DNA, 25 bp, Probe sequence
agtcgtatctagacactataagaaa

SEQ ID NO: 152002 - DNA, 25 bp, Probe sequence
agatgattggattttagattattaa

SEQ ID NO: 152003 - DNA, 25 bp, Probe sequence
agcgttatcaatgcctagtcgtatc

SEQ ID NO: 152004 - DNA, 25 bp, Probe sequence
agcgcagacgatttaatagcagatg

SEQ ID NO: 152005 - DNA, 25 bp, Probe sequence
agcctagcgcagacgatttaatagc

SEQ ID NO: 152006 - DNA, 25 bp, Probe sequence
caatgcctagtcgtatctagacact

SEQ ID NO: 152007 - DNA, 25 bp, Probe sequence
cagcgttatcaatgcctagtcgtat

SEQ ID NO: 152008 - DNA, 25 bp, Probe sequence
cattcaagaagcaacgaagctagcg

SEQ ID NO: 152009 - DNA, 25 bp, Probe sequence
cgttatcaatgcctagtcgtatcta

SEQ ID NO: 152010 - DNA, 25 bp, Probe sequence
ccaactaatttgcagcgttatcaat

SEQ ID NO: 152011 - DNA, 25 bp, Probe sequence
gcctagtcgtatctagacactataa

SEQ ID NO: 152012 - DNA, 25 bp, Probe sequence
gcctagcgcagacgatttaatagca

SEQ ID NO: 152013 - DNA, 25 bp, Probe sequence
gcgttatcaatgcctagtcgtatct

SEQ ID NO: 152014 - DNA, 25 bp, Probe sequence
gcagcgttatcaatgcctagtcgta

SEQ ID NO: 152015 - DNA, 25 bp, Probe sequence
gcagacgatttaatagcagatgatt

SEQ ID NO: 152016 - DNA, 25 bp, Probe sequence
gcagcctagcgcagacgatttaata

SEQ ID NO: 152017 - DNA, 25 bp, Probe sequence
gcaacgaagctagcgatggagaaag

SEQ ID NO: 152018 - DNA, 25 bp, Probe sequence
gaagcaacgaagctagcgatggaga

SEQ ID NO: 152019 - DNA, 25 bp, Probe sequence
gaagctagcgatggagaaaggaata

SEQ ID NO: 152020 - DNA, 25 bp, Probe sequence
gatgtgtatgggatattaccaacta

SEQ ID NO: 152021 - DNA, 25 bp, Probe sequence
gatattaccaactaatttgcagcgt

SEQ ID NO: 152022 - DNA, 25 bp, Probe sequence
gtgtatgggatattaccaactaatt

SEQ ID NO: 152023 - DNA, 25 bp, Probe sequence
gggatattaccaactaatttgcagc

SEQ ID NO: 152024 - DNA, 25 bp, Probe sequence
ggagagagaatcaagatgtgtatgg

SEQ ID NO: 152025 - DNA, 25 bp, Probe sequence
ggcagcctagcgcagacgatttaat

SEQ ID NO: 152026 - DNA, 25 bp, Probe sequence
tggcagcctagcgcagacgatttaa

SEQ ID NO: 152027 - DNA, 25 bp, Probe sequence
tgcagcgttatcaatgcctagtcgt

SEQ ID NO: 152028 - DNA, 25 bp, Probe sequence
taatttgcagcgttatcaatgccta

SEQ ID NO: 152029 - DNA, 25 bp, Probe sequence
taccaactaatttgcagcgttatca

SEQ ID NO: 152030 - DNA, 25 bp, Probe sequence
tttgcagcgttatcaatgcctagtc

SEQ ID NO: 152031 - DNA, 25 bp, Probe sequence
tatcaatgcctagtcgtatctagac

SEQ ID NO: 152032 - DNA, 25 bp, Probe sequence
atgtaccactcaataaccaacctgc

SEQ ID NO: 152033 - DNA, 25 bp, Probe sequence
attatggcttggtgtttaaacaatc

SEQ ID NO: 152034 - DNA, 25 bp, Probe sequence
atatgttctacacaccaggagaata

SEQ ID NO: 152035 - DNA, 25 bp, Probe sequence
atgccattatggcttggtgtttaaa

SEQ ID NO: 152036 - DNA, 25 bp, Probe sequence
atggcccatattatacgtagagtta

SEQ ID NO: 152037 - DNA, 25 bp, Probe sequence
agcacttcttgatgccattatggct

SEQ ID NO: 152038 - DNA, 25 bp, Probe sequence
acgacaccatttcaacgcattaaac

SEQ ID NO: 152039 - DNA, 25 bp, Probe sequence
acgacgaatctccgtatatgttcta

SEQ ID NO: 152040 - DNA, 25 bp, Probe sequence
acgtagagttagtatcaaagatgta

SEQ ID NO: 152041 - DNA, 25 bp, Probe sequence
aaatacaccgaattgaagcaaatgt

SEQ ID NO: 152042 - DNA, 25 bp, Probe sequence
aaagaaattatatcaacatcgtgga

SEQ ID NO: 152043 - DNA, 25 bp, Probe sequence
aacatcgtggaattggccaagcact

SEQ ID NO: 152044 - DNA, 25 bp, Probe sequence
aacgcattaaacatgttgctaaaat

SEQ ID NO: 152045 - DNA, 25 bp, Probe sequence
aatacgacaccatttcaacgcatta

SEQ ID NO: 152046 - DNA, 25 bp, Probe sequence
aattggccaagcacttcttgatgcc

SEQ ID NO: 152047 - DNA, 25 bp, Probe sequence
caccatttcaacgcattaaacatgt

SEQ ID NO: 152048 - DNA, 25 bp, Probe sequence
caggagaatatgatcctagcgtcac

SEQ ID NO: 152049 - DNA, 25 bp, Probe sequence
cgtggaattggccaagcacttcttg

SEQ ID NO: 152050 - DNA, 25 bp, Probe sequence
ccgtatatgttctacacaccaggag

SEQ ID NO: 152051 - DNA, 25 bp, Probe sequence
gcctttgttaatacgacaccatttc

SEQ ID NO: 152052 - DNA, 25 bp, Probe sequence
gcaaatgtaccactcaataaccaac

SEQ ID NO: 152053 - DNA, 25 bp, Probe sequence
gaatctccgtatatgttctacacac

SEQ ID NO: 152054 - DNA, 25 bp, Probe sequence
gaagcaaatgtaccactcaataacc

SEQ ID NO: 152055 - DNA, 25 bp, Probe sequence
gaaaatttcatttcaatgttagcga

SEQ ID NO: 152056 - DNA, 25 bp, Probe sequence
gacgaatctccgtatatgttctaca

SEQ ID NO: 152057 - DNA, 25 bp, Probe sequence
gatgactatatgatggctaaaattc

SEQ ID NO: 152058 - DNA, 25 bp, Probe sequence
gttaatacgacaccatttcaacgca

SEQ ID NO: 152059 - DNA, 25 bp, Probe sequence
gtttaaacaatcaaatacaccgaat

SEQ ID NO: 152060 - DNA, 25 bp, Probe sequence
gtgccgattttcaaatcgaaggcgt

SEQ ID NO: 152061 - DNA, 25 bp, Probe sequence
ggctttgcctttgttaatacgacac

SEQ ID NO: 152062 - DNA, 25 bp, Probe sequence
ggccaagcacttcttgatgccatta

SEQ ID NO: 152063 - DNA, 25 bp, Probe sequence
tctccgtatatgttctacacaccag

SEQ ID NO: 152064 - DNA, 25 bp, Probe sequence
tatgatggctaaaattcttaattaa

SEQ ID NO: 152065 - DNA, 25 bp, Probe sequence
tttgcctttgttaatacgacaccat

SEQ ID NO: 152066 - DNA, 25 bp, Probe sequence
attaaggacgcgctatcaaacattt

SEQ ID NO: 152067 - DNA, 25 bp, Probe sequence
atatgattaaggacgcgctatcaaa

SEQ ID NO: 152068 - DNA, 25 bp, Probe sequence
ataacgataatgtcgaaattactat

SEQ ID NO: 152069 - DNA, 25 bp, Probe sequence
ataatgtcgaaattactatgatgaa

SEQ ID NO: 152070 - DNA, 25 bp, Probe sequence
atgattaaggacgcgctatcaaaca

SEQ ID NO: 152071 - DNA, 25 bp, Probe sequence
atgtcgaaattactatgatgaaaaa

SEQ ID NO: 152072 - DNA, 25 bp, Probe sequence
aggacgcgctatcaaacattttaaa

SEQ ID NO: 152073 - DNA, 25 bp, Probe sequence
acgcgctatcaaacattttaaatag

SEQ ID NO: 152074 - DNA, 25 bp, Probe sequence
acgataatgtcgaaattactatgat

SEQ ID NO: 152075 - DNA, 25 bp, Probe sequence
aaataacgataatgtcgaaattact

SEQ ID NO: 152076 - DNA, 25 bp, Probe sequence
aacgataatgtcgaaattactatga

SEQ ID NO: 152077 - DNA, 25 bp, Probe sequence
aaggacgcgctatcaaacattttaa

SEQ ID NO: 152078 - DNA, 25 bp, Probe sequence
aatgtcgaaattactatgatgaaaa

SEQ ID NO: 152079 - DNA, 25 bp, Probe sequence
aataacgataatgtcgaaattacta

SEQ ID NO: 152080 - DNA, 25 bp, Probe sequence
aatatgattaaggacgcgctatcaa

SEQ ID NO: 152081 - DNA, 25 bp, Probe sequence
cgataatgtcgaaattactatgatg

SEQ ID NO: 152082 - DNA, 25 bp, Probe sequence
cgcgctatcaaacattttaaataga

SEQ ID NO: 152083 - DNA, 25 bp, Probe sequence
gcgctatcaaacattttaaatagaa

SEQ ID NO: 152084 - DNA, 25 bp, Probe sequence
gaaataacgataatgtcgaaattac

SEQ ID NO: 152085 - DNA, 25 bp, Probe sequence
gacgcgctatcaaacattttaaata

SEQ ID NO: 152086 - DNA, 25 bp, Probe sequence
gataatgtcgaaattactatgatga

SEQ ID NO: 152087 - DNA, 25 bp, Probe sequence
gattaaggacgcgctatcaaacatt

SEQ ID NO: 152088 - DNA, 25 bp, Probe sequence
gattttgacaaaatacattataata

SEQ ID NO: 152089 - DNA, 25 bp, Probe sequence
gttaatatgattaaggacgcgctat

SEQ ID NO: 152090 - DNA, 25 bp, Probe sequence
ggacgcgctatcaaacattttaaat

SEQ ID NO: 152091 - DNA, 25 bp, Probe sequence
tgtcgaaattactatgatgaaaaaa

SEQ ID NO: 152092 - DNA, 25 bp, Probe sequence
tgattaaggacgcgctatcaaacat

SEQ ID NO: 152093 - DNA, 25 bp, Probe sequence
taatatgattaaggacgcgctatca

SEQ ID NO: 152094 - DNA, 25 bp, Probe sequence
taaggacgcgctatcaaacatttta

SEQ ID NO: 152095 - DNA, 25 bp, Probe sequence
taatgtcgaaattactatgatgaaa

SEQ ID NO: 152096 - DNA, 25 bp, Probe sequence
taacgataatgtcgaaattactatg

SEQ ID NO: 152097 - DNA, 25 bp, Probe sequence
tatgattaaggacgcgctatcaaac

SEQ ID NO: 152098 - DNA, 25 bp, Probe sequence
ttaaggacgcgctatcaaacatttt

SEQ ID NO: 152099 - DNA, 25 bp, Probe sequence
ttaatatgattaaggacgcgctatc

SEQ ID NO: 152100 - DNA, 25 bp, Probe sequence
attccagcttcagaagtttctagct

SEQ ID NO: 152101 - DNA, 25 bp, Probe sequence
atgaattacacatatggtccataca

SEQ ID NO: 152102 - DNA, 25 bp, Probe sequence
atggcagccaataacttacgtggtt

SEQ ID NO: 152103 - DNA, 25 bp, Probe sequence
agcacatattggtcagacgctaagt

SEQ ID NO: 152104 - DNA, 25 bp, Probe sequence
agcaacatctggtgcagctgcattt

SEQ ID NO: 152105 - DNA, 25 bp, Probe sequence
acgcagctaatgatggttaccaagt

SEQ ID NO: 152106 - DNA, 25 bp, Probe sequence
acaacacaccatcagttggttcaat

SEQ ID NO: 152107 - DNA, 25 bp, Probe sequence
aacacttctccacaagctggttcag

SEQ ID NO: 152108 - DNA, 25 bp, Probe sequence
cagtacaatctggtgaatcattatg

SEQ ID NO: 152109 - DNA, 25 bp, Probe sequence
catctcatactgtacaagctggtga

SEQ ID NO: 152110 - DNA, 25 bp, Probe sequence
cgtcgtgctcaagctggtagtccaa

SEQ ID NO: 152111 - DNA, 25 bp, Probe sequence
gcctaaccaaacattacaaattcct

SEQ ID NO: 152112 - DNA, 25 bp, Probe sequence
gctggtagtccaattagcacatatt

SEQ ID NO: 152113 - DNA, 25 bp, Probe sequence
gctggttcagcatcatctcatactg

SEQ ID NO: 152114 - DNA, 25 bp, Probe sequence
gcagctgcatttttaacgcatcatg

SEQ ID NO: 152115 - DNA, 25 bp, Probe sequence
gcaatgcatcatcttttaatcacca

SEQ ID NO: 152116 - DNA, 25 bp, Probe sequence
gacgctaagtattgggctggtaacg

SEQ ID NO: 152117 - DNA, 25 bp, Probe sequence
gaactaccgtacaattccagcttca

SEQ ID NO: 152118 - DNA, 25 bp, Probe sequence
gataacaacttggtattccctggtc

SEQ ID NO: 152119 - DNA, 25 bp, Probe sequence
gttaccaagtaaacaacacaccatc

SEQ ID NO: 152120 - DNA, 25 bp, Probe sequence
gtttctagctatgcattcatccatt

SEQ ID NO: 152121 - DNA, 25 bp, Probe sequence
gtgatggtagtatcttgatttctga

SEQ ID NO: 152122 - DNA, 25 bp, Probe sequence
ggtcaagttatctcagtaggtggaa

SEQ ID NO: 152123 - DNA, 25 bp, Probe sequence
ggtcatgttgcttatgttgaacgtg

SEQ ID NO: 152124 - DNA, 25 bp, Probe sequence
ggtagcaatggcaatgcatcatctt

SEQ ID NO: 152125 - DNA, 25 bp, Probe sequence
ggtacaacaccaacagctacaacag

SEQ ID NO: 152126 - DNA, 25 bp, Probe sequence
tggtacgtatttgaccgtcgtgctc

SEQ ID NO: 152127 - DNA, 25 bp, Probe sequence
tggtccatacaatatgaactaccgt

SEQ ID NO: 152128 - DNA, 25 bp, Probe sequence
tgctggtcaatgtacatggtacgta

SEQ ID NO: 152129 - DNA, 25 bp, Probe sequence
tcagttgatcaattaatggcagcca

SEQ ID NO: 152130 - DNA, 25 bp, Probe sequence
taatcaccaaaatttatacactgct

SEQ ID NO: 152131 - DNA, 25 bp, Probe sequence
taatggtggatcaggtggtacaaca

SEQ ID NO: 152132 - DNA, 25 bp, Probe sequence
caagcttctacacaacatacagtac

SEQ ID NO: 152133 - DNA, 25 bp, Probe sequence
ggtattccctggtcaagttatctca

SEQ ID NO: 152134 - DNA, 25 bp, Probe sequence
attccaaagttgataatatgataaa

SEQ ID NO: 152135 - DNA, 25 bp, Probe sequence
ataaagtcgtcaaaaacgacgcagt

SEQ ID NO: 152136 - DNA, 25 bp, Probe sequence
ataatatgataaagtcgtcaaaaac

SEQ ID NO: 152137 - DNA, 25 bp, Probe sequence
agtcgtcaaaaacgacgcagttgtt

SEQ ID NO: 152138 - DNA, 25 bp, Probe sequence
agttgataatatgataaagtcgtca

SEQ ID NO: 152139 - DNA, 25 bp, Probe sequence
agaagcgggttgtgaacacaaaaag

SEQ ID NO: 152140 - DNA, 25 bp, Probe sequence
agcaataaacgcgttgaaaaagaag

SEQ ID NO: 152141 - DNA, 25 bp, Probe sequence
aagtcgtcaaaaacgacgcagttgt

SEQ ID NO: 152142 - DNA, 25 bp, Probe sequence
aaagtcgtcaaaaacgacgcagttg

SEQ ID NO: 152143 - DNA, 25 bp, Probe sequence
aagttgataatatgataaagtcgtc

SEQ ID NO: 152144 - DNA, 25 bp, Probe sequence
aatatgataaagtcgtcaaaaacga

SEQ ID NO: 152145 - DNA, 25 bp, Probe sequence
aattccaaagttgataatatgataa

SEQ ID NO: 152146 - DNA, 25 bp, Probe sequence
gcgttgaaaaagaagcgggttgtga

SEQ ID NO: 152147 - DNA, 25 bp, Probe sequence
gcaataaacgcgttgaaaaagaagc

SEQ ID NO: 152148 - DNA, 25 bp, Probe sequence
gaagcgggttgtgaacacaaaaagt

SEQ ID NO: 152149 - DNA, 25 bp, Probe sequence
gataaagtcgtcaaaaacgacgcag

SEQ ID NO: 152150 - DNA, 25 bp, Probe sequence
gataatatgataaagtcgtcaaaaa

SEQ ID NO: 152151 - DNA, 25 bp, Probe sequence
gttgataatatgataaagtcgtcaa

SEQ ID NO: 152152 - DNA, 25 bp, Probe sequence
gtcgtcaaaaacgacgcagttgttt

SEQ ID NO: 152153 - DNA, 25 bp, Probe sequence
gtgttaagcaataaacgcgttgaaa

SEQ ID NO: 152154 - DNA, 25 bp, Probe sequence
tgtaaaacttaccattgaaataact

SEQ ID NO: 152155 - DNA, 25 bp, Probe sequence
tgttaagcaataaacgcgttgaaaa

SEQ ID NO: 152156 - DNA, 25 bp, Probe sequence
tgataatatgataaagtcgtcaaaa

SEQ ID NO: 152157 - DNA, 25 bp, Probe sequence
tcgtcaaaaacgacgcagttgtttt

SEQ ID NO: 152158 - DNA, 25 bp, Probe sequence
tcaaaagtgtaaaacttaccattga

SEQ ID NO: 152159 - DNA, 25 bp, Probe sequence
taatatgataaagtcgtcaaaaacg

SEQ ID NO: 152160 - DNA, 25 bp, Probe sequence
taagcaataaacgcgttgaaaaaga

SEQ ID NO: 152161 - DNA, 25 bp, Probe sequence
taaagtcgtcaaaaacgacgcagtt

SEQ ID NO: 152162 - DNA, 25 bp, Probe sequence
taaaacttaccattgaaataactat

SEQ ID NO: 152163 - DNA, 25 bp, Probe sequence
taccattgaaataactataaaaaca

SEQ ID NO: 152164 - DNA, 25 bp, Probe sequence
tattgactttaaattccaaagttga

SEQ ID NO: 152165 - DNA, 25 bp, Probe sequence
ttattgactttaaattccaaagttg

SEQ ID NO: 152166 - DNA, 25 bp, Probe sequence
ttcaaaagtgtaaaacttaccattg

SEQ ID NO: 152167 - DNA, 25 bp, Probe sequence
ttaagcaataaacgcgttgaaaaag

SEQ ID NO: 152168 - DNA, 25 bp, Probe sequence
attgggtatctttgtaggctttatc

SEQ ID NO: 152169 - DNA, 25 bp, Probe sequence
attttattgggtatctttgtaggct

SEQ ID NO: 152170 - DNA, 25 bp, Probe sequence
atcattggtattttcctacaaatat

SEQ ID NO: 152171 - DNA, 25 bp, Probe sequence
atctattttattgggtatctttgta

SEQ ID NO: 152172 - DNA, 25 bp, Probe sequence
agtgacggcagtactatctatttta

SEQ ID NO: 152173 - DNA, 25 bp, Probe sequence
agtactatctattttattgggtatc

SEQ ID NO: 152174 - DNA, 25 bp, Probe sequence
acggcagtactatctattttattgg

SEQ ID NO: 152175 - DNA, 25 bp, Probe sequence
actatctattttattgggtatcttt

SEQ ID NO: 152176 - DNA, 25 bp, Probe sequence
aatacagtcacattaattgcagtaa

SEQ ID NO: 152177 - DNA, 25 bp, Probe sequence
aatagtgacggcagtactatctatt

SEQ ID NO: 152178 - DNA, 25 bp, Probe sequence
aattaccattaatagtgacggcagt

SEQ ID NO: 152179 - DNA, 25 bp, Probe sequence
aattatcattggtattttcctacaa

SEQ ID NO: 152180 - DNA, 25 bp, Probe sequence
cattggtattttcctacaaatattt

SEQ ID NO: 152181 - DNA, 25 bp, Probe sequence
ctatctattttattgggtatctttg

SEQ ID NO: 152182 - DNA, 25 bp, Probe sequence
cggcagtactatctattttattggg

SEQ ID NO: 152183 - DNA, 25 bp, Probe sequence
gcaattatcattggtattttcctac

SEQ ID NO: 152184 - DNA, 25 bp, Probe sequence
gaaaatacagtcacattaattgcag

SEQ ID NO: 152185 - DNA, 25 bp, Probe sequence
gacggcagtactatctattttattg

SEQ ID NO: 152186 - DNA, 25 bp, Probe sequence
gtatctttgtaggctttatcgttta

SEQ ID NO: 152187 - DNA, 25 bp, Probe sequence
gtgacggcagtactatctattttat

SEQ ID NO: 152188 - DNA, 25 bp, Probe sequence
gggtatctttgtaggctttatcgtt

SEQ ID NO: 152189 - DNA, 25 bp, Probe sequence
ggtatctttgtaggctttatcgttt

SEQ ID NO: 152190 - DNA, 25 bp, Probe sequence
ggcagtactatctattttattgggt

SEQ ID NO: 152191 - DNA, 25 bp, Probe sequence
tgggtatctttgtaggctttatcgt

SEQ ID NO: 152192 - DNA, 25 bp, Probe sequence
tgacggcagtactatctattttatt

SEQ ID NO: 152193 - DNA, 25 bp, Probe sequence
tacagtcacattaattgcagtaatt

SEQ ID NO: 152194 - DNA, 25 bp, Probe sequence
taccattaatagtgacggcagtact

SEQ ID NO: 152195 - DNA, 25 bp, Probe sequence
tatctttgtaggctttatcgtttac

SEQ ID NO: 152196 - DNA, 25 bp, Probe sequence
tattgggtatctttgtaggctttat

SEQ ID NO: 152197 - DNA, 25 bp, Probe sequence
ttattgggtatctttgtaggcttta

SEQ ID NO: 152198 - DNA, 25 bp, Probe sequence
tttattgggtatctttgtaggcttt

SEQ ID NO: 152199 - DNA, 25 bp, Probe sequence
ttatcattggtattttcctacaaat

SEQ ID NO: 152200 - DNA, 25 bp, Probe sequence
ttgcagtaattatcgcaattatcat

SEQ ID NO: 152201 - DNA, 25 bp, Probe sequence
ttgggtatctttgtaggctttatcg

SEQ ID NO: 152202 - DNA, 25 bp, Probe sequence
attccacaatcattacttgcctttg

SEQ ID NO: 152203 - DNA, 25 bp, Probe sequence
atattttcatttatagttatgccta

SEQ ID NO: 152204 - DNA, 25 bp, Probe sequence
atagttatgcctattggattacgca

SEQ ID NO: 152205 - DNA, 25 bp, Probe sequence
atcacgacccaaaagcacatgcaat

SEQ ID NO: 152206 - DNA, 25 bp, Probe sequence
atgacttatatgcgctctgactttc

SEQ ID NO: 152207 - DNA, 25 bp, Probe sequence
atgtattctttattccacaatcatt

SEQ ID NO: 152208 - DNA, 25 bp, Probe sequence
aaagaactaaaagcgatgcctaatg

SEQ ID NO: 152209 - DNA, 25 bp, Probe sequence
aaagcgatgcctaatgaaacattta

SEQ ID NO: 152210 - DNA, 25 bp, Probe sequence
aaaacattctcatacatttttataa

SEQ ID NO: 152211 - DNA, 25 bp, Probe sequence
aacaattattaagcgcagaacaaca

SEQ ID NO: 152212 - DNA, 25 bp, Probe sequence
aatcttcgagaattatatgacttat

SEQ ID NO: 152213 - DNA, 25 bp, Probe sequence
caatcattacttgcctttggaccat

SEQ ID NO: 152214 - DNA, 25 bp, Probe sequence
caactgcagtgttttaacaattcaa

SEQ ID NO: 152215 - DNA, 25 bp, Probe sequence
caaaggatttttaggatttttcatg

SEQ ID NO: 152216 - DNA, 25 bp, Probe sequence
cacctatttagcaatcattctacta

SEQ ID NO: 152217 - DNA, 25 bp, Probe sequence
catggtttattagccttagattttt

SEQ ID NO: 152218 - DNA, 25 bp, Probe sequence
cattcccgttttcagtagtcgttgg

SEQ ID NO: 152219 - DNA, 25 bp, Probe sequence
cattacttgcctttggaccatatat

SEQ ID NO: 152220 - DNA, 25 bp, Probe sequence
gcctattggattacgcattgaaaga

SEQ ID NO: 152221 - DNA, 25 bp, Probe sequence
gcaatcattctactaattgtaggat

SEQ ID NO: 152222 - DNA, 25 bp, Probe sequence
gcaatactgatagagaaatcttcga

SEQ ID NO: 152223 - DNA, 25 bp, Probe sequence
gaacaacatggtttattagccttag

SEQ ID NO: 152224 - DNA, 25 bp, Probe sequence
gaaaagtactgcgcaattaacaaaa

SEQ ID NO: 152225 - DNA, 25 bp, Probe sequence
gttggattctttattgtctttttat

SEQ ID NO: 152226 - DNA, 25 bp, Probe sequence
gtagtcgttggattctttattgtct

SEQ ID NO: 152227 - DNA, 25 bp, Probe sequence
ggatttttctatgtattctttattc

SEQ ID NO: 152228 - DNA, 25 bp, Probe sequence
ggatatggatattcacctatttagc

SEQ ID NO: 152229 - DNA, 25 bp, Probe sequence
tgcctttggaccatatattcaggta

SEQ ID NO: 152230 - DNA, 25 bp, Probe sequence
taatttatattttgtttcattcccg

SEQ ID NO: 152231 - DNA, 25 bp, Probe sequence
tattcaggtaagcaattgggtattt

SEQ ID NO: 152232 - DNA, 25 bp, Probe sequence
tattgtctttttatttatatggttt

SEQ ID NO: 152233 - DNA, 25 bp, Probe sequence
tttcattcccgttttcagtagtcgt

SEQ ID NO: 152234 - DNA, 25 bp, Probe sequence
ttatatgcgctctgactttcgcgtc

SEQ ID NO: 152235 - DNA, 25 bp, Probe sequence
ttagattttttcaatcacgacccaa

SEQ ID NO: 152236 - DNA, 25 bp, Probe sequence
attaatggctttttcaatccactac

SEQ ID NO: 152237 - DNA, 25 bp, Probe sequence
cttgcaccgttatgcgacactaagg

SEQ ID NO: 152238 - DNA, 25 bp, Probe sequence
atccactacaaacaatgattgacca

SEQ ID NO: 152239 - DNA, 25 bp, Probe sequence
atgaattagtatttggtgcagggtc

SEQ ID NO: 152240 - DNA, 25 bp, Probe sequence
aggtcatgacccttcatatgtacaa

SEQ ID NO: 152241 - DNA, 25 bp, Probe sequence
agttgggctcaaataggtatccatg

SEQ ID NO: 152242 - DNA, 25 bp, Probe sequence
aagcctattgccatttataatatta

SEQ ID NO: 152243 - DNA, 25 bp, Probe sequence
aatattttgctgaacaaggttatga

SEQ ID NO: 152244 - DNA, 25 bp, Probe sequence
cacaagccaacgtttaactgaatta

SEQ ID NO: 152245 - DNA, 25 bp, Probe sequence
cagatgcatttgtcatggctcctgg

SEQ ID NO: 152246 - DNA, 25 bp, Probe sequence
ctcctggtggcgcaggttcactaga

SEQ ID NO: 152247 - DNA, 25 bp, Probe sequence
gctattggcgtcatgcctaaaatgt

SEQ ID NO: 152248 - DNA, 25 bp, Probe sequence
gcaggttcactagaagaatttttcg

SEQ ID NO: 152249 - DNA, 25 bp, Probe sequence
gcaccgttatgcgacactaaggaat

SEQ ID NO: 152250 - DNA, 25 bp, Probe sequence
gaatcgcagtttattgtggtgcaag

SEQ ID NO: 152251 - DNA, 25 bp, Probe sequence
gaaatcacaagccaacgtttaactg

SEQ ID NO: 152252 - DNA, 25 bp, Probe sequence
gacccttcatatgtacaaaaagcat

SEQ ID NO: 152253 - DNA, 25 bp, Probe sequence
gatgaacatgaaatcacaagccaac

SEQ ID NO: 152254 - DNA, 25 bp, Probe sequence
gttttattgatcctaagtatcgtgc

SEQ ID NO: 152255 - DNA, 25 bp, Probe sequence
gttatgcgacactaaggaatcatta

SEQ ID NO: 152256 - DNA, 25 bp, Probe sequence
gtggtgcaagcaaaggtcatgaccc

SEQ ID NO: 152257 - DNA, 25 bp, Probe sequence
ggtggcgcaggttcactagaagaat

SEQ ID NO: 152258 - DNA, 25 bp, Probe sequence
ggtatccatgaaaagcctattgcca

SEQ ID NO: 152259 - DNA, 25 bp, Probe sequence
ggcaaagctattggcgtcatgccta

SEQ ID NO: 152260 - DNA, 25 bp, Probe sequence
ggcagaacttgcagatgcatttgtc

SEQ ID NO: 152261 - DNA, 25 bp, Probe sequence
ggcgtcatgcctaaaatgttagatg

SEQ ID NO: 152262 - DNA, 25 bp, Probe sequence
tggctttttcaatccactacaaaca

SEQ ID NO: 152263 - DNA, 25 bp, Probe sequence
tgattgaccatatgattgaggaagg

SEQ ID NO: 152264 - DNA, 25 bp, Probe sequence
tgaaaagcctattgccatttataat

SEQ ID NO: 152265 - DNA, 25 bp, Probe sequence
tgcagatgcatttgtcatggctcct

SEQ ID NO: 152266 - DNA, 25 bp, Probe sequence
tagtatttggtgcagggtcaattgg

SEQ ID NO: 152267 - DNA, 25 bp, Probe sequence
tagttgattctatgcatgaacgtaa

SEQ ID NO: 152268 - DNA, 25 bp, Probe sequence
tatgggtgccattcaagatggtgta

SEQ ID NO: 152269 - DNA, 25 bp, Probe sequence
tttttcgaaatgtatagttgggctc

SEQ ID NO: 152270 - DNA, 25 bp, Probe sequence
attcagttagtctacaagcttatca

SEQ ID NO: 152271 - DNA, 25 bp, Probe sequence
atttatcgagacgctgattttgaca

SEQ ID NO: 152272 - DNA, 25 bp, Probe sequence
atcgagacgctgattttgacattca

SEQ ID NO: 152273 - DNA, 25 bp, Probe sequence
agtctacaagcttatcaacttaaaa

SEQ ID NO: 152274 - DNA, 25 bp, Probe sequence
agacgctgattttgacattcagtta

SEQ ID NO: 152275 - DNA, 25 bp, Probe sequence
agcttgatttatcgagacgctgatt

SEQ ID NO: 152276 - DNA, 25 bp, Probe sequence
acattcagttagtctacaagcttat

SEQ ID NO: 152277 - DNA, 25 bp, Probe sequence
aaagcttgatttatcgagacgctga

SEQ ID NO: 152278 - DNA, 25 bp, Probe sequence
aagcttgatttatcgagacgctgat

SEQ ID NO: 152279 - DNA, 25 bp, Probe sequence
caaagcttgatttatcgagacgctg

SEQ ID NO: 152280 - DNA, 25 bp, Probe sequence
cagttagtctacaagcttatcaact

SEQ ID NO: 152281 - DNA, 25 bp, Probe sequence
cattcagttagtctacaagcttatc

SEQ ID NO: 152282 - DNA, 25 bp, Probe sequence
cgagacgctgattttgacattcagt

SEQ ID NO: 152283 - DNA, 25 bp, Probe sequence
gctgattttgacattcagttagtct

SEQ ID NO: 152284 - DNA, 25 bp, Probe sequence
gcttgatttatcgagacgctgattt

SEQ ID NO: 152285 - DNA, 25 bp, Probe sequence
gacattcagttagtctacaagctta

SEQ ID NO: 152286 - DNA, 25 bp, Probe sequence
gacgctgattttgacattcagttag

SEQ ID NO: 152287 - DNA, 25 bp, Probe sequence
gagacgctgattttgacattcagtt

SEQ ID NO: 152288 - DNA, 25 bp, Probe sequence
gatttatcgagacgctgattttgac

SEQ ID NO: 152289 - DNA, 25 bp, Probe sequence
gattttgacattcagttagtctaca

SEQ ID NO: 152290 - DNA, 25 bp, Probe sequence
gttagtctacaagcttatcaactta

SEQ ID NO: 152291 - DNA, 25 bp, Probe sequence
tgattttgatggtgaatcattattt

SEQ ID NO: 152292 - DNA, 25 bp, Probe sequence
tcgagacgctgattttgacattcag

SEQ ID NO: 152293 - DNA, 25 bp, Probe sequence
tcagttagtctacaagcttatcaac

SEQ ID NO: 152294 - DNA, 25 bp, Probe sequence
tagtctacaagcttatcaacttaaa

SEQ ID NO: 152295 - DNA, 25 bp, Probe sequence
tatcgagacgctgattttgacattc

SEQ ID NO: 152296 - DNA, 25 bp, Probe sequence
tttgacattcagttagtctacaagc

SEQ ID NO: 152297 - DNA, 25 bp, Probe sequence
tttatcgagacgctgattttgacat

SEQ ID NO: 152298 - DNA, 25 bp, Probe sequence
ttatcgagacgctgattttgacatt

SEQ ID NO: 152299 - DNA, 25 bp, Probe sequence
ttagtctacaagcttatcaacttaa

SEQ ID NO: 152300 - DNA, 25 bp, Probe sequence
ttcagttagtctacaagcttatcaa

SEQ ID NO: 152301 - DNA, 25 bp, Probe sequence
ttgacattcagttagtctacaagct

SEQ ID NO: 152302 - DNA, 25 bp, Probe sequence
ttgaaacatgattttgatggtgaat

SEQ ID NO: 152303 - DNA, 25 bp, Probe sequence
ttgatttatcgagacgctgattttg

SEQ ID NO: 152304 - DNA, 25 bp, Probe sequence
attgtcatgcatcataatgggaaga

SEQ ID NO: 152305 - DNA, 25 bp, Probe sequence
attgatggagatgcttgtcctgttg

SEQ ID NO: 152306 - DNA, 25 bp, Probe sequence
attagaaaacaaggtggtcgccaca

SEQ ID NO: 152307 - DNA, 25 bp, Probe sequence
atagatttaacaactgagacaggca

SEQ ID NO: 152308 - DNA, 25 bp, Probe sequence
agcttcagccatttttcgaaccaat

SEQ ID NO: 152309 - DNA, 25 bp, Probe sequence
acaattattcggagcttcagccatt

SEQ ID NO: 152310 - DNA, 25 bp, Probe sequence
acaattccaaaaatattcaacaact

SEQ ID NO: 152311 - DNA, 25 bp, Probe sequence
aaagtcttaattgtcatgcatcata

SEQ ID NO: 152312 - DNA, 25 bp, Probe sequence
caagtttattagtcgacaaagtctt

SEQ ID NO: 152313 - DNA, 25 bp, Probe sequence
caactgagacaggcatttttgtgac

SEQ ID NO: 152314 - DNA, 25 bp, Probe sequence
ccccaccttttacaaagcaagatca

SEQ ID NO: 152315 - DNA, 25 bp, Probe sequence
gccatttttcgaaccaattatatcc

SEQ ID NO: 152316 - DNA, 25 bp, Probe sequence
gcttgtcctgttgttgattctatta

SEQ ID NO: 152317 - DNA, 25 bp, Probe sequence
gaaaacaaggtggtcgccacaaagg

SEQ ID NO: 152318 - DNA, 25 bp, Probe sequence
gagacaggcatttttgtgacaatta

SEQ ID NO: 152319 - DNA, 25 bp, Probe sequence
gagatgcttgtcctgttgttgattc

SEQ ID NO: 152320 - DNA, 25 bp, Probe sequence
gatggagatgcttgtcctgttgttg

SEQ ID NO: 152321 - DNA, 25 bp, Probe sequence
gatggaccagatgcagttgattaca

SEQ ID NO: 152322 - DNA, 25 bp, Probe sequence
gatgatggaccagatgcagttgatt

SEQ ID NO: 152323 - DNA, 25 bp, Probe sequence
gatgcttgtcctgttgttgattcta

SEQ ID NO: 152324 - DNA, 25 bp, Probe sequence
gatgcagttgattacaaaattgttc

SEQ ID NO: 152325 - DNA, 25 bp, Probe sequence
gattatggactcgcaagtttattag

SEQ ID NO: 152326 - DNA, 25 bp, Probe sequence
gtcctgttgttgattctattataga

SEQ ID NO: 152327 - DNA, 25 bp, Probe sequence
gtgacaattattcggagcttcagcc

SEQ ID NO: 152328 - DNA, 25 bp, Probe sequence
gtgacacatattattattgatggag

SEQ ID NO: 152329 - DNA, 25 bp, Probe sequence
ggactcgcaagtttattagtcgaca

SEQ ID NO: 152330 - DNA, 25 bp, Probe sequence
ggaccagatgcagttgattacaaaa

SEQ ID NO: 152331 - DNA, 25 bp, Probe sequence
tcccccaccttttacaaagcaagat

SEQ ID NO: 152332 - DNA, 25 bp, Probe sequence
tcggagcttcagccatttttcgaac

SEQ ID NO: 152333 - DNA, 25 bp, Probe sequence
tcactcaagattatggactcgcaag

SEQ ID NO: 152334 - DNA, 25 bp, Probe sequence
tcattcatcgaattaaggagctgga

SEQ ID NO: 152335 - DNA, 25 bp, Probe sequence
tcagccatttttcgaaccaattata

SEQ ID NO: 152336 - DNA, 25 bp, Probe sequence
tatatgttgatgatggaccagatgc

SEQ ID NO: 152337 - DNA, 25 bp, Probe sequence
tattcggagcttcagccatttttcg

SEQ ID NO: 152338 - DNA, 25 bp, Probe sequence
aaagcaggcttaacacctaataaat

SEQ ID NO: 152339 - DNA, 25 bp, Probe sequence
atgatcctgcctatattgagaaaaa

SEQ ID NO: 152340 - DNA, 25 bp, Probe sequence
agagaacatgatcctgcctatattg

SEQ ID NO: 152341 - DNA, 25 bp, Probe sequence
agaagagcaaaaagcccgcgaaaag

SEQ ID NO: 152342 - DNA, 25 bp, Probe sequence
agcacgcatcaagtcatttaaaaaa

SEQ ID NO: 152343 - DNA, 25 bp, Probe sequence
acaaaaagttacagatgctacaagt

SEQ ID NO: 152344 - DNA, 25 bp, Probe sequence
aaatcgcaaagaaatcgctaaaatg

SEQ ID NO: 152345 - DNA, 25 bp, Probe sequence
aaactagctgaaaaaaatcgcaaag

SEQ ID NO: 152346 - DNA, 25 bp, Probe sequence
aaaagcgcctctcaacaaaataaag

SEQ ID NO: 152347 - DNA, 25 bp, Probe sequence
aaaatatcgaaaagcgtcataaaga

SEQ ID NO: 152348 - DNA, 25 bp, Probe sequence
aacaaaatcgtaaagacgctgataa

SEQ ID NO: 152349 - DNA, 25 bp, Probe sequence
aacatctgcagcaatcagtaacaca

SEQ ID NO: 152350 - DNA, 25 bp, Probe sequence
aacgccaacaagaagctgataaagc

SEQ ID NO: 152351 - DNA, 25 bp, Probe sequence
aagcccgcgaaaagaatgaaataca

SEQ ID NO: 152352 - DNA, 25 bp, Probe sequence
aagttgcttcaaaaacatctgcagc

SEQ ID NO: 152353 - DNA, 25 bp, Probe sequence
aatcagtaacacagcgagtgatgtt

SEQ ID NO: 152354 - DNA, 25 bp, Probe sequence
catccggacgtacaaaaagttacag

SEQ ID NO: 152355 - DNA, 25 bp, Probe sequence
gcaggcttaacacctaataaattag

SEQ ID NO: 152356 - DNA, 25 bp, Probe sequence
gcagcaatcagtaacacagcgagtg

SEQ ID NO: 152357 - DNA, 25 bp, Probe sequence
gaaaaaaggcgataaactagctgaa

SEQ ID NO: 152358 - DNA, 25 bp, Probe sequence
gaagaacaaaaacgccaacaagaag

SEQ ID NO: 152359 - DNA, 25 bp, Probe sequence
gaagctgataaagcacgcatcaagt

SEQ ID NO: 152360 - DNA, 25 bp, Probe sequence
gaacatgatcctgcctatattgaga

SEQ ID NO: 152361 - DNA, 25 bp, Probe sequence
gatgctacaagtaaagttgcttcaa

SEQ ID NO: 152362 - DNA, 25 bp, Probe sequence
gataaagcacgcatcaagtcattta

SEQ ID NO: 152363 - DNA, 25 bp, Probe sequence
gattatgttgccaaaagcgcctctc

SEQ ID NO: 152364 - DNA, 25 bp, Probe sequence
gattaatgtattaccaattgtattg

SEQ ID NO: 152365 - DNA, 25 bp, Probe sequence
gtaaacgtatcaaacaacatccgga

SEQ ID NO: 152366 - DNA, 25 bp, Probe sequence
gtgatgttaaagaatatgtcggcga

SEQ ID NO: 152367 - DNA, 25 bp, Probe sequence
tgttgccaaaagcgcctctcaacaa

SEQ ID NO: 152368 - DNA, 25 bp, Probe sequence
tgtattggtaccgttaattgttgaa

SEQ ID NO: 152369 - DNA, 25 bp, Probe sequence
tatcaaacaacatccggacgtacaa

SEQ ID NO: 152370 - DNA, 25 bp, Probe sequence
tttgctagagaacatgatcctgcct

SEQ ID NO: 152371 - DNA, 25 bp, Probe sequence
ttatgttgccaaaagcgcctctcaa

SEQ ID NO: 152372 - DNA, 25 bp, Probe sequence
attggcttattcgtaggtgctatct

SEQ ID NO: 152373 - DNA, 25 bp, Probe sequence
attgcaatcaaaacattcttgcatc

SEQ ID NO: 152374 - DNA, 25 bp, Probe sequence
atattttaggctttttagctgcatt

SEQ ID NO: 152375 - DNA, 25 bp, Probe sequence
atcgtcatccaattaggatccgtct

SEQ ID NO: 152376 - DNA, 25 bp, Probe sequence
aggctttttagctgcatttactgtt

SEQ ID NO: 152377 - DNA, 25 bp, Probe sequence
agacgtttaaatttattacatgtat

SEQ ID NO: 152378 - DNA, 25 bp, Probe sequence
agctgcatttactgttggactaatt

SEQ ID NO: 152379 - DNA, 25 bp, Probe sequence
actttacttcggatttggcattggt

SEQ ID NO: 152380 - DNA, 25 bp, Probe sequence
acatttattatggctgttccaatta

SEQ ID NO: 152381 - DNA, 25 bp, Probe sequence
aactgttatgattggcttattcgta

SEQ ID NO: 152382 - DNA, 25 bp, Probe sequence
aatcatctgaatttttaggttctca

SEQ ID NO: 152383 - DNA, 25 bp, Probe sequence
caattaggatccgtctttgcagcag

SEQ ID NO: 152384 - DNA, 25 bp, Probe sequence
caacaaagacgttcaaagccaagac

SEQ ID NO: 152385 - DNA, 25 bp, Probe sequence
cagcaggtattttaggcttactatt

SEQ ID NO: 152386 - DNA, 25 bp, Probe sequence
cctgtttcctctactggacatatga

SEQ ID NO: 152387 - DNA, 25 bp, Probe sequence
gcttcttagagattttacatattgg

SEQ ID NO: 152388 - DNA, 25 bp, Probe sequence
gcatttacatttaaaatcgtcatcc

SEQ ID NO: 152389 - DNA, 25 bp, Probe sequence
gaattgtattagtaatctttattgc

SEQ ID NO: 152390 - DNA, 25 bp, Probe sequence
gaacatttatttagtgtgccaactg

SEQ ID NO: 152391 - DNA, 25 bp, Probe sequence
gatgatttcatcgaagaacatttat

SEQ ID NO: 152392 - DNA, 25 bp, Probe sequence
gatatgtggttaaaatcatctgaat

SEQ ID NO: 152393 - DNA, 25 bp, Probe sequence
gatatacctttttatattttaggct

SEQ ID NO: 152394 - DNA, 25 bp, Probe sequence
ggtgctatctatatgattattgctg

SEQ ID NO: 152395 - DNA, 25 bp, Probe sequence
ggatttggcattggtaaaggtattt

SEQ ID NO: 152396 - DNA, 25 bp, Probe sequence
ggcttattcgtaggtgctatctata

SEQ ID NO: 152397 - DNA, 25 bp, Probe sequence
tgctatactttacttcggatttggc

SEQ ID NO: 152398 - DNA, 25 bp, Probe sequence
tccatttgccatttacagaattgta

SEQ ID NO: 152399 - DNA, 25 bp, Probe sequence
tctttattgctatactttacttcgg

SEQ ID NO: 152400 - DNA, 25 bp, Probe sequence
taattccatttgccatttacagaat

SEQ ID NO: 152401 - DNA, 25 bp, Probe sequence
tttagtgtgccaactgttatgattg

SEQ ID NO: 152402 - DNA, 25 bp, Probe sequence
ttaggcttactatttgatgatttca

SEQ ID NO: 152403 - DNA, 25 bp, Probe sequence
ttatggctgttccaattatgttagc

SEQ ID NO: 152404 - DNA, 25 bp, Probe sequence
ttactgttggactaattgcaatcaa

SEQ ID NO: 152405 - DNA, 25 bp, Probe sequence
ttccgcgaacgcttcttagagattt

SEQ ID NO: 152406 - DNA, 25 bp, Probe sequence
attagcactcgatactggtacagta

SEQ ID NO: 152407 - DNA, 25 bp, Probe sequence
atactggtacagtatcaccattatt

SEQ ID NO: 152408 - DNA, 25 bp, Probe sequence
agaagtacaatctaacatacccaca

SEQ ID NO: 152409 - DNA, 25 bp, Probe sequence
acaatctaacatacccacaatttct

SEQ ID NO: 152410 - DNA, 25 bp, Probe sequence
aaagtgaaactattagaccagaatt

SEQ ID NO: 152411 - DNA, 25 bp, Probe sequence
aactgaattagcactcgatactggt

SEQ ID NO: 152412 - DNA, 25 bp, Probe sequence
aacgaatggaacaagtagacttaat

SEQ ID NO: 152413 - DNA, 25 bp, Probe sequence
aagcgtgaacgttccgaagtcgatc

SEQ ID NO: 152414 - DNA, 25 bp, Probe sequence
aatcgcttattaggtaaagtcattc

SEQ ID NO: 152415 - DNA, 25 bp, Probe sequence
aatgctcaaagacaagttaatcgct

SEQ ID NO: 152416 - DNA, 25 bp, Probe sequence
gacttaattaagcgtgaacgttccg

SEQ ID NO: 152417 - DNA, 25 bp, Probe sequence
catacccacaatttcttgtcttaac

SEQ ID NO: 152418 - DNA, 25 bp, Probe sequence
gctatgctttagtttgtacaatgct

SEQ ID NO: 152419 - DNA, 25 bp, Probe sequence
gctttagtttgtacaatgctcaaag

SEQ ID NO: 152420 - DNA, 25 bp, Probe sequence
gaattagcactcgatactggtacag

SEQ ID NO: 152421 - DNA, 25 bp, Probe sequence
gaatctcctgtaaacgtcaagaaag

SEQ ID NO: 152422 - DNA, 25 bp, Probe sequence
gaacagctatgctttagtttgtaca

SEQ ID NO: 152423 - DNA, 25 bp, Probe sequence
gaaagtcgtaactgaattagcactc

SEQ ID NO: 152424 - DNA, 25 bp, Probe sequence
gacaagttaatcgctactactctaa

SEQ ID NO: 152425 - DNA, 25 bp, Probe sequence
gacaaagtcgcttcagcttcttctt

SEQ ID NO: 152426 - DNA, 25 bp, Probe sequence
gttccgaagtcgatcaacgtgaagt

SEQ ID NO: 152427 - DNA, 25 bp, Probe sequence
gttaatcgctactactctaacaaag

SEQ ID NO: 152428 - DNA, 25 bp, Probe sequence
gtatttattcacttgactgacaaaa

SEQ ID NO: 152429 - DNA, 25 bp, Probe sequence
gtacagtatcaccattattaaaacg

SEQ ID NO: 152430 - DNA, 25 bp, Probe sequence
gtaatgcatctgacaaagtcgcttc

SEQ ID NO: 152431 - DNA, 25 bp, Probe sequence
gtcgatcaacgtgaagtatttattc

SEQ ID NO: 152432 - DNA, 25 bp, Probe sequence
gtgaacgttccgaagtcgatcaacg

SEQ ID NO: 152433 - DNA, 25 bp, Probe sequence
gggatgaatctcctgtaaacgtcaa

SEQ ID NO: 152434 - DNA, 25 bp, Probe sequence
ggtaaagtcattcatgcatttgatg

SEQ ID NO: 152435 - DNA, 25 bp, Probe sequence
tcgctactactctaacaaagttttt

SEQ ID NO: 152436 - DNA, 25 bp, Probe sequence
tctaacatacccacaatttcttgtc

SEQ ID NO: 152437 - DNA, 25 bp, Probe sequence
taaagaacttaatcgcttattaggt

SEQ ID NO: 152438 - DNA, 25 bp, Probe sequence
tagaccagaattaagtaatgcatct

SEQ ID NO: 152439 - DNA, 25 bp, Probe sequence
ttttatgggatgaatctcctgtaaa

SEQ ID NO: 152440 - DNA, 25 bp, Probe sequence
attgtagtgttcgtgcttgatgaaa

SEQ ID NO: 152441 - DNA, 25 bp, Probe sequence
atatcctaagtctttcgatatggat

SEQ ID NO: 152442 - DNA, 25 bp, Probe sequence
atcaaggcattaatttgacggcaat

SEQ ID NO: 152443 - DNA, 25 bp, Probe sequence
atgctcacacagtctgagatgattg

SEQ ID NO: 152444 - DNA, 25 bp, Probe sequence
atgaaatatcctaagtctttcgata

SEQ ID NO: 152445 - DNA, 25 bp, Probe sequence
atgattgtagtgttcgtgcttgatg

SEQ ID NO: 152446 - DNA, 25 bp, Probe sequence
agatgattgtagtgttcgtgcttga

SEQ ID NO: 152447 - DNA, 25 bp, Probe sequence
acggcaatgaaatatcctaagtctt

SEQ ID NO: 152448 - DNA, 25 bp, Probe sequence
aaatatcctaagtctttcgatatgg

SEQ ID NO: 152449 - DNA, 25 bp, Probe sequence
aaatcaaggcattaatttgacggca

SEQ ID NO: 152450 - DNA, 25 bp, Probe sequence
aaggcattaatttgacggcaatgaa

SEQ ID NO: 152451 - DNA, 25 bp, Probe sequence
cacacagtctgagatgattgtagtg

SEQ ID NO: 152452 - DNA, 25 bp, Probe sequence
cagtctgagatgattgtagtgttcg

SEQ ID NO: 152453 - DNA, 25 bp, Probe sequence
ctgagatgattgtagtgttcgtgct

SEQ ID NO: 152454 - DNA, 25 bp, Probe sequence
cggcaatgaaatatcctaagtcttt

SEQ ID NO: 152455 - DNA, 25 bp, Probe sequence
gctcacacagtctgagatgattgta

SEQ ID NO: 152456 - DNA, 25 bp, Probe sequence
gcaatgaaatatcctaagtctttcg

SEQ ID NO: 152457 - DNA, 25 bp, Probe sequence
gaaacaataaatcaaggcattaatt

SEQ ID NO: 152458 - DNA, 25 bp, Probe sequence
gaaatatcctaagtctttcgatatg

SEQ ID NO: 152459 - DNA, 25 bp, Probe sequence
gagatgattgtagtgttcgtgcttg

SEQ ID NO: 152460 - DNA, 25 bp, Probe sequence
gatgattgtagtgttcgtgcttgat

SEQ ID NO: 152461 - DNA, 25 bp, Probe sequence
gattgtagtgttcgtgcttgatgaa

SEQ ID NO: 152462 - DNA, 25 bp, Probe sequence
gttcgtgcttgatgaaacaataaat

SEQ ID NO: 152463 - DNA, 25 bp, Probe sequence
gtagtgttcgtgcttgatgaaacaa

SEQ ID NO: 152464 - DNA, 25 bp, Probe sequence
gtctgagatgattgtagtgttcgtg

SEQ ID NO: 152465 - DNA, 25 bp, Probe sequence
gtctttcgatatggatagagtaatt

SEQ ID NO: 152466 - DNA, 25 bp, Probe sequence
gtgttcgtgcttgatgaaacaataa

SEQ ID NO: 152467 - DNA, 25 bp, Probe sequence
tgattgtagtgttcgtgcttgatga

SEQ ID NO: 152468 - DNA, 25 bp, Probe sequence
tgagatgattgtagtgttcgtgctt

SEQ ID NO: 152469 - DNA, 25 bp, Probe sequence
tcctaagtctttcgatatggataga

SEQ ID NO: 152470 - DNA, 25 bp, Probe sequence
taagtctttcgatatggatagagta

SEQ ID NO: 152471 - DNA, 25 bp, Probe sequence
tagtgttcgtgcttgatgaaacaat

SEQ ID NO: 152472 - DNA, 25 bp, Probe sequence
tttgacggcaatgaaatatcctaag

SEQ ID NO: 152473 - DNA, 25 bp, Probe sequence
ttgtagtgttcgtgcttgatgaaac

SEQ ID NO: 152474 - DNA, 25 bp, Probe sequence
attggtcgtttcttacgcttacatt

SEQ ID NO: 152475 - DNA, 25 bp, Probe sequence
attattacgattattcaaaccgaat

SEQ ID NO: 152476 - DNA, 25 bp, Probe sequence
atactaacattgacttctcaccgtt

SEQ ID NO: 152477 - DNA, 25 bp, Probe sequence
atcacattctagaaagtctaacgct

SEQ ID NO: 152478 - DNA, 25 bp, Probe sequence
atgcaatctcgatacatcgctagaa

SEQ ID NO: 152479 - DNA, 25 bp, Probe sequence
actgcttggtgtcttcttagcggtt

SEQ ID NO: 152480 - DNA, 25 bp, Probe sequence
actgatttaatccatttgaaccaat

SEQ ID NO: 152481 - DNA, 25 bp, Probe sequence
actgctatgtttgtatgttttatgg

SEQ ID NO: 152482 - DNA, 25 bp, Probe sequence
aagtatgaatggccactctttatca

SEQ ID NO: 152483 - DNA, 25 bp, Probe sequence
aatactttacctatttactgcttgg

SEQ ID NO: 152484 - DNA, 25 bp, Probe sequence
aatttgtttttagcatatatacctt

SEQ ID NO: 152485 - DNA, 25 bp, Probe sequence
cttagcggtttatgtgatgatttta

SEQ ID NO: 152486 - DNA, 25 bp, Probe sequence
ctcaccgttggcttaatagattaat

SEQ ID NO: 152487 - DNA, 25 bp, Probe sequence
cccttacatgttctaaatcacattc

SEQ ID NO: 152488 - DNA, 25 bp, Probe sequence
cctatttactgcttggtgtcttctt

SEQ ID NO: 152489 - DNA, 25 bp, Probe sequence
ccaatttcaattcaacttttacgca

SEQ ID NO: 152490 - DNA, 25 bp, Probe sequence
gcatatataccttttgagcttagtc

SEQ ID NO: 152491 - DNA, 25 bp, Probe sequence
gcaagcagcaattctattatttgga

SEQ ID NO: 152492 - DNA, 25 bp, Probe sequence
gaatggccactctttatcatatata

SEQ ID NO: 152493 - DNA, 25 bp, Probe sequence
gagcttagtctattattacgattat

SEQ ID NO: 152494 - DNA, 25 bp, Probe sequence
gatacatcgctagaatttacttttt

SEQ ID NO: 152495 - DNA, 25 bp, Probe sequence
gtctaacgcttaaaactgctatgtt

SEQ ID NO: 152496 - DNA, 25 bp, Probe sequence
ggtgtcttcttagcggtttatgtga

SEQ ID NO: 152497 - DNA, 25 bp, Probe sequence
ggattcggaatttatattggtcgtt

SEQ ID NO: 152498 - DNA, 25 bp, Probe sequence
ggaaaaggagtgcgtttgaacaagt

SEQ ID NO: 152499 - DNA, 25 bp, Probe sequence
ggccactctttatcatatatagttt

SEQ ID NO: 152500 - DNA, 25 bp, Probe sequence
tcgtttcttacgcttacattccgtt

SEQ ID NO: 152501 - DNA, 25 bp, Probe sequence
tcaattcaacttttacgcaggacta

SEQ ID NO: 152502 - DNA, 25 bp, Probe sequence
tacattccgtttatttctttaatga

SEQ ID NO: 152503 - DNA, 25 bp, Probe sequence
tacgcttacattccgtttatttctt

SEQ ID NO: 152504 - DNA, 25 bp, Probe sequence
tatcgtctccctttttgagactaaa

SEQ ID NO: 152505 - DNA, 25 bp, Probe sequence
ttatttatcgtctccctttttgaga

SEQ ID NO: 152506 - DNA, 25 bp, Probe sequence
ttgacttctcaccgttggcttaata

SEQ ID NO: 152507 - DNA, 25 bp, Probe sequence
ttgtgttacttttaccaaatacatt

SEQ ID NO: 152508 - DNA, 25 bp, Probe sequence
atatgaaacttttagcggacatctc

SEQ ID NO: 152509 - DNA, 25 bp, Probe sequence
atctgtcagcggcattggtgcatgt

SEQ ID NO: 152510 - DNA, 25 bp, Probe sequence
atgctactttcggtactcaatcata

SEQ ID NO: 152511 - DNA, 25 bp, Probe sequence
acatttgcatgctactttcggtact

SEQ ID NO: 152512 - DNA, 25 bp, Probe sequence
aaaggagaagatatcgttgaatgta

SEQ ID NO: 152513 - DNA, 25 bp, Probe sequence
aaagcaattgtttctgcaactgctg

SEQ ID NO: 152514 - DNA, 25 bp, Probe sequence
aacatttacatctgtcagcggcatt

SEQ ID NO: 152515 - DNA, 25 bp, Probe sequence
aagaaaaacatattactgagccact

SEQ ID NO: 152516 - DNA, 25 bp, Probe sequence
cattttgcacatttgcatgctactt

SEQ ID NO: 152517 - DNA, 25 bp, Probe sequence
ctttgcagatgaccaagacttaaca

SEQ ID NO: 152518 - DNA, 25 bp, Probe sequence
ctactttcggtactcaatcatatga

SEQ ID NO: 152519 - DNA, 25 bp, Probe sequence
gcggcattggtgcatgtgatgacgt

SEQ ID NO: 152520 - DNA, 25 bp, Probe sequence
gcggacatctcgctaaagcaattgt

SEQ ID NO: 152521 - DNA, 25 bp, Probe sequence
gctgaaatcattcttactgtaactg

SEQ ID NO: 152522 - DNA, 25 bp, Probe sequence
gcatgctactttcggtactcaatca

SEQ ID NO: 152523 - DNA, 25 bp, Probe sequence
gcagtcggtttaaatttacttgatc

SEQ ID NO: 152524 - DNA, 25 bp, Probe sequence
gcaactgctgaaatcattcttactg

SEQ ID NO: 152525 - DNA, 25 bp, Probe sequence
gcaattgtttctgcaactgctgaaa

SEQ ID NO: 152526 - DNA, 25 bp, Probe sequence
gaattgacgagcttattaggtaata

SEQ ID NO: 152527 - DNA, 25 bp, Probe sequence
gaaacttttagcggacatctcgcta

SEQ ID NO: 152528 - DNA, 25 bp, Probe sequence
gaaatcattcttactgtaactgatt

SEQ ID NO: 152529 - DNA, 25 bp, Probe sequence
gacatctcgctaaagcaattgtttc

SEQ ID NO: 152530 - DNA, 25 bp, Probe sequence
gacttaacatttacatctgtcagcg

SEQ ID NO: 152531 - DNA, 25 bp, Probe sequence
gaccaagacttaacatttacatctg

SEQ ID NO: 152532 - DNA, 25 bp, Probe sequence
gatgcagtcggtttaaatttacttg

SEQ ID NO: 152533 - DNA, 25 bp, Probe sequence
gtttctgcaactgctgaaatcattc

SEQ ID NO: 152534 - DNA, 25 bp, Probe sequence
gtaatcatactatactactagtgtt

SEQ ID NO: 152535 - DNA, 25 bp, Probe sequence
gtcagcggcattggtgcatgtgatg

SEQ ID NO: 152536 - DNA, 25 bp, Probe sequence
tgcacatttgcatgctactttcggt

SEQ ID NO: 152537 - DNA, 25 bp, Probe sequence
tctcgctaaagcaattgtttctgca

SEQ ID NO: 152538 - DNA, 25 bp, Probe sequence
tacatctgtcagcggcattggtgca

SEQ ID NO: 152539 - DNA, 25 bp, Probe sequence
tattaggtaatatttctcgtctaga

SEQ ID NO: 152540 - DNA, 25 bp, Probe sequence
tttgcatgctactttcggtactcaa

SEQ ID NO: 152541 - DNA, 25 bp, Probe sequence
ttcggtactcaatcatatgaaactt

SEQ ID NO: 152542 - DNA, 25 bp, Probe sequence
atacaggtaaaacatatcccccaga

SEQ ID NO: 152543 - DNA, 25 bp, Probe sequence
attaacttcaactattttagcaatt

SEQ ID NO: 152544 - DNA, 25 bp, Probe sequence
atattctgaaggactacgtgatggt

SEQ ID NO: 152545 - DNA, 25 bp, Probe sequence
atatcccccagaattaatacaacta

SEQ ID NO: 152546 - DNA, 25 bp, Probe sequence
atatgactcatattatcactttaaa

SEQ ID NO: 152547 - DNA, 25 bp, Probe sequence
atcaaacatgaaaaccgcacattag

SEQ ID NO: 152548 - DNA, 25 bp, Probe sequence
atcgaacgccacttgagcgtatttt

SEQ ID NO: 152549 - DNA, 25 bp, Probe sequence
agaactgattcaaaacttagcccat

SEQ ID NO: 152550 - DNA, 25 bp, Probe sequence
acgggtggttctggattaggcttat

SEQ ID NO: 152551 - DNA, 25 bp, Probe sequence
acaaacttacttgataatgcgctaa

SEQ ID NO: 152552 - DNA, 25 bp, Probe sequence
aaacacctttagcaagcattatttc

SEQ ID NO: 152553 - DNA, 25 bp, Probe sequence
aatggcttctgaaattacgcaacaa

SEQ ID NO: 152554 - DNA, 25 bp, Probe sequence
ctaacggaaattacgcaagcaatga

SEQ ID NO: 152555 - DNA, 25 bp, Probe sequence
gcattttatcaatatcgaacgccac

SEQ ID NO: 152556 - DNA, 25 bp, Probe sequence
gacactaactttgaccttaacgaca

SEQ ID NO: 152557 - DNA, 25 bp, Probe sequence
gaatcaaattaaatccgaacaacaa

SEQ ID NO: 152558 - DNA, 25 bp, Probe sequence
gaagtcaaatcattattggcgtcgt

SEQ ID NO: 152559 - DNA, 25 bp, Probe sequence
gaactcgcgcaacaaaataacgcaa

SEQ ID NO: 152560 - DNA, 25 bp, Probe sequence
gaccttaacgacaataattacaagc

SEQ ID NO: 152561 - DNA, 25 bp, Probe sequence
gagcgtattttaacaaacttacttg

SEQ ID NO: 152562 - DNA, 25 bp, Probe sequence
gagtagaaaactctcgtaatacaaa

SEQ ID NO: 152563 - DNA, 25 bp, Probe sequence
gagtcatacgacatattaattaaac

SEQ ID NO: 152564 - DNA, 25 bp, Probe sequence
gatactatcgacattgctattagcg

SEQ ID NO: 152565 - DNA, 25 bp, Probe sequence
gtatattcgaacgtacattcagagt

SEQ ID NO: 152566 - DNA, 25 bp, Probe sequence
ggcattataccagaactacaagaac

SEQ ID NO: 152567 - DNA, 25 bp, Probe sequence
ggccatatgacactaactttgacct

SEQ ID NO: 152568 - DNA, 25 bp, Probe sequence
tgttggtagtcgcattgatattaat

SEQ ID NO: 152569 - DNA, 25 bp, Probe sequence
taatacaactagaccaattacttgt

SEQ ID NO: 152570 - DNA, 25 bp, Probe sequence
taatgtggtttaacggccatatgac

SEQ ID NO: 152571 - DNA, 25 bp, Probe sequence
taatgcgctaaaattttcaaatgtt

SEQ ID NO: 152572 - DNA, 25 bp, Probe sequence
tagcccatgatttaaaaacaccttt

SEQ ID NO: 152573 - DNA, 25 bp, Probe sequence
tagcaagcattatttcatattctga

SEQ ID NO: 152574 - DNA, 25 bp, Probe sequence
tatagctaatgaactcgcgcaacaa

SEQ ID NO: 152575 - DNA, 25 bp, Probe sequence
ttacaagctgtttaaccttattaat

SEQ ID NO: 152576 - DNA, 25 bp, Probe sequence
atatcccctttatctatttaactgc

SEQ ID NO: 152577 - DNA, 25 bp, Probe sequence
ataccatcacaactgtatggggatt

SEQ ID NO: 152578 - DNA, 25 bp, Probe sequence
atgtccatatacaccgtattagaga

SEQ ID NO: 152579 - DNA, 25 bp, Probe sequence
atggttacgacattgtcaaagaaat

SEQ ID NO: 152580 - DNA, 25 bp, Probe sequence
agaacatgataccatttacgcctta

SEQ ID NO: 152581 - DNA, 25 bp, Probe sequence
actgatcgtggatgatgaacaagac

SEQ ID NO: 152582 - DNA, 25 bp, Probe sequence
aactgccaaaacacaagaacatgat

SEQ ID NO: 152583 - DNA, 25 bp, Probe sequence
ccatcatcaaccagttgaacaactg

SEQ ID NO: 152584 - DNA, 25 bp, Probe sequence
gccttaactttaggtgcagatgact

SEQ ID NO: 152585 - DNA, 25 bp, Probe sequence
gctttacaacatataccatcacaac

SEQ ID NO: 152586 - DNA, 25 bp, Probe sequence
gaagatgctaataccgtgaatgtcc

SEQ ID NO: 152587 - DNA, 25 bp, Probe sequence
gaagaaataccatcatcaaccagtt

SEQ ID NO: 152588 - DNA, 25 bp, Probe sequence
gaagcaatttctttactatcaaatg

SEQ ID NO: 152589 - DNA, 25 bp, Probe sequence
gaacaagacattgtagacatttgtc

SEQ ID NO: 152590 - DNA, 25 bp, Probe sequence
gaaataccatcatcaaccagttgaa

SEQ ID NO: 152591 - DNA, 25 bp, Probe sequence
gacaactagcggtaaagaagcaatt

SEQ ID NO: 152592 - DNA, 25 bp, Probe sequence
gagagctttacaacatataccatca

SEQ ID NO: 152593 - DNA, 25 bp, Probe sequence
gatgaattaacacttattaacttaa

SEQ ID NO: 152594 - DNA, 25 bp, Probe sequence
gatgccagaagttaatggttacgac

SEQ ID NO: 152595 - DNA, 25 bp, Probe sequence
gataccatttacgccttaactttag

SEQ ID NO: 152596 - DNA, 25 bp, Probe sequence
gtttggggatatgactattacgaag

SEQ ID NO: 152597 - DNA, 25 bp, Probe sequence
gtagacatttgtcaaacctattttg

SEQ ID NO: 152598 - DNA, 25 bp, Probe sequence
gtaacaacgacaactagcggtaaag

SEQ ID NO: 152599 - DNA, 25 bp, Probe sequence
gtgaatgtccatatacaccgtatta

SEQ ID NO: 152600 - DNA, 25 bp, Probe sequence
ggtacttgatatcatgatgccagaa

SEQ ID NO: 152601 - DNA, 25 bp, Probe sequence
ggatatgactattacgaagatgcta

SEQ ID NO: 152602 - DNA, 25 bp, Probe sequence
ggcaaaaattagatatcccctttat

SEQ ID NO: 152603 - DNA, 25 bp, Probe sequence
tgtcaaaaaaccatttagtccaagg

SEQ ID NO: 152604 - DNA, 25 bp, Probe sequence
tgatattgatatcatggtacttgat

SEQ ID NO: 152605 - DNA, 25 bp, Probe sequence
tcccctttatctatttaactgccaa

SEQ ID NO: 152606 - DNA, 25 bp, Probe sequence
tcacaactgtatggggattaggata

SEQ ID NO: 152607 - DNA, 25 bp, Probe sequence
taccgtgaatgtccatatacaccgt

SEQ ID NO: 152608 - DNA, 25 bp, Probe sequence
tatctatttaactgccaaaacacaa

SEQ ID NO: 152609 - DNA, 25 bp, Probe sequence
tttacgccttaactttaggtgcaga

SEQ ID NO: 152610 - DNA, 25 bp, Probe sequence
attcatcttcgtacacgtaaagaaa

SEQ ID NO: 152611 - DNA, 25 bp, Probe sequence
atttacgtgacgaaattgcaccaaa

SEQ ID NO: 152612 - DNA, 25 bp, Probe sequence
atctattcatcttcgtacacgtaaa

SEQ ID NO: 152613 - DNA, 25 bp, Probe sequence
agctagaccggatgtgtttttcact

SEQ ID NO: 152614 - DNA, 25 bp, Probe sequence
agatatcgtctttcgacacgttgta

SEQ ID NO: 152615 - DNA, 25 bp, Probe sequence
agcttttgccaccctgaaggcatac

SEQ ID NO: 152616 - DNA, 25 bp, Probe sequence
acgttacagatatcgtctttcgaca

SEQ ID NO: 152617 - DNA, 25 bp, Probe sequence
acgttgtaagtgaagcagctagacc

SEQ ID NO: 152618 - DNA, 25 bp, Probe sequence
acagttccgtgaaacgagtattcaa

SEQ ID NO: 152619 - DNA, 25 bp, Probe sequence
aatttatctattcatcttcgtacac

SEQ ID NO: 152620 - DNA, 25 bp, Probe sequence
catagtgtgcgcggacgcttaactt

SEQ ID NO: 152621 - DNA, 25 bp, Probe sequence
gccagaacagttccgtgaaacgagt

SEQ ID NO: 152622 - DNA, 25 bp, Probe sequence
gccaccctgaaggcatacatagtgt

SEQ ID NO: 152623 - DNA, 25 bp, Probe sequence
gcatacatagtgtgcgcggacgctt

SEQ ID NO: 152624 - DNA, 25 bp, Probe sequence
gcagctagaccggatgtgtttttca

SEQ ID NO: 152625 - DNA, 25 bp, Probe sequence
gcacattgggaattaatcgaagcta

SEQ ID NO: 152626 - DNA, 25 bp, Probe sequence
gcaaatgttgctaaaaagggtaagg

SEQ ID NO: 152627 - DNA, 25 bp, Probe sequence
gaaggcatacatagtgtgcgcggac

SEQ ID NO: 152628 - DNA, 25 bp, Probe sequence
gaagctattaaaaatttacgtgacg

SEQ ID NO: 152629 - DNA, 25 bp, Probe sequence
gaagcagctagaccggatgtgtttt

SEQ ID NO: 152630 - DNA, 25 bp, Probe sequence
gacttaaatatgggatgtcctgtag

SEQ ID NO: 152631 - DNA, 25 bp, Probe sequence
gaccggatgtgtttttcactgaatt

SEQ ID NO: 152632 - DNA, 25 bp, Probe sequence
gatgaatggaaagattggttgaagc

SEQ ID NO: 152633 - DNA, 25 bp, Probe sequence
gagtaaagtagatgcacattgggaa

SEQ ID NO: 152634 - DNA, 25 bp, Probe sequence
gatgtgtttttcactgaatttacaa

SEQ ID NO: 152635 - DNA, 25 bp, Probe sequence
gtgtgcgcggacgcttaacttttag

SEQ ID NO: 152636 - DNA, 25 bp, Probe sequence
gtgaagcagctagaccggatgtgtt

SEQ ID NO: 152637 - DNA, 25 bp, Probe sequence
ggagataagccagaacagttccgtg

SEQ ID NO: 152638 - DNA, 25 bp, Probe sequence
tgggatgtcctgtagcaaatgttgc

SEQ ID NO: 152639 - DNA, 25 bp, Probe sequence
tagctaaaatgggctttaaaggcat

SEQ ID NO: 152640 - DNA, 25 bp, Probe sequence
tcgtctttcgacacgttgtaagtga

SEQ ID NO: 152641 - DNA, 25 bp, Probe sequence
tacagatatcgtctttcgacacgtt

SEQ ID NO: 152642 - DNA, 25 bp, Probe sequence
tatcgtctttcgacacgttgtaagt

SEQ ID NO: 152643 - DNA, 25 bp, Probe sequence
ttatctattcatcttcgtacacgta

SEQ ID NO: 152644 - DNA, 25 bp, Probe sequence
atatttacgtatcctcttcaattaa

SEQ ID NO: 152645 - DNA, 25 bp, Probe sequence
atatagttgcacatacgacgtcatt

SEQ ID NO: 152646 - DNA, 25 bp, Probe sequence
atgagtcactcattgttaaaacaga

SEQ ID NO: 152647 - DNA, 25 bp, Probe sequence
acgacgtcattatttgatattgttg

SEQ ID NO: 152648 - DNA, 25 bp, Probe sequence
acaatactgattcaccagagtggta

SEQ ID NO: 152649 - DNA, 25 bp, Probe sequence
aagtggtttttcgcaaatatagttg

SEQ ID NO: 152650 - DNA, 25 bp, Probe sequence
aatcattaattactttagaggtcgt

SEQ ID NO: 152651 - DNA, 25 bp, Probe sequence
catttatcattcgtgtgggttcagg

SEQ ID NO: 152652 - DNA, 25 bp, Probe sequence
cattcgtgtgggttcaggtattgtt

SEQ ID NO: 152653 - DNA, 25 bp, Probe sequence
gctgctagtttctttggagcctttg

SEQ ID NO: 152654 - DNA, 25 bp, Probe sequence
gctactcgttacatttatcattcgt

SEQ ID NO: 152655 - DNA, 25 bp, Probe sequence
gcatatgctgctagtttctttggag

SEQ ID NO: 152656 - DNA, 25 bp, Probe sequence
gaataaattattgctactcgttaca

SEQ ID NO: 152657 - DNA, 25 bp, Probe sequence
gaaaaaatagatgacccacttactg

SEQ ID NO: 152658 - DNA, 25 bp, Probe sequence
gaaaggtttagtaccagtcatcgct

SEQ ID NO: 152659 - DNA, 25 bp, Probe sequence
gagtggtataagtggtttttcgcaa

SEQ ID NO: 152660 - DNA, 25 bp, Probe sequence
gagagattgcaattggattaggttt

SEQ ID NO: 152661 - DNA, 25 bp, Probe sequence
gatatgatatttacgtatcctcttc

SEQ ID NO: 152662 - DNA, 25 bp, Probe sequence
gttgcacatacgacgtcattatttg

SEQ ID NO: 152663 - DNA, 25 bp, Probe sequence
gttcaggtattgttatgttaatgca

SEQ ID NO: 152664 - DNA, 25 bp, Probe sequence
gtttctttggagcctttgttatgat

SEQ ID NO: 152665 - DNA, 25 bp, Probe sequence
gtatcctcttcaattaactttcttt

SEQ ID NO: 152666 - DNA, 25 bp, Probe sequence
gtcatcgctaacaatactgattcac

SEQ ID NO: 152667 - DNA, 25 bp, Probe sequence
gtgtgggttcaggtattgttatgtt

SEQ ID NO: 152668 - DNA, 25 bp, Probe sequence
ggcggatttacgctgaaaggtttag

SEQ ID NO: 152669 - DNA, 25 bp, Probe sequence
ggtttagtaccagtcatcgctaaca

SEQ ID NO: 152670 - DNA, 25 bp, Probe sequence
tcttcaattaactttctttatcctt

SEQ ID NO: 152671 - DNA, 25 bp, Probe sequence
tacgtatcctcttcaattaactttc

SEQ ID NO: 152672 - DNA, 25 bp, Probe sequence
tagaggtcgtaagaacagaggtgaa

SEQ ID NO: 152673 - DNA, 25 bp, Probe sequence
tagtaccagtcatcgctaacaatac

SEQ ID NO: 152674 - DNA, 25 bp, Probe sequence
tattgctactcgttacatttatcat

SEQ ID NO: 152675 - DNA, 25 bp, Probe sequence
tttttggagtttttgcatatgctgc

SEQ ID NO: 152676 - DNA, 25 bp, Probe sequence
ttaacgggcggatttacgctgaaag

SEQ ID NO: 152677 - DNA, 25 bp, Probe sequence
ttggagcctttgttatgataaatta

SEQ ID NO: 152678 - DNA, 25 bp, Probe sequence
catcttcggcggcgctaaattaaaa

SEQ ID NO: 152679 - DNA, 25 bp, Probe sequence
agaagatagcaatgttaaaactgat

SEQ ID NO: 152680 - DNA, 25 bp, Probe sequence
acctaacaggtacattcagttctaa

SEQ ID NO: 152681 - DNA, 25 bp, Probe sequence
actacaaatcatcaaaaggtccaga

SEQ ID NO: 152682 - DNA, 25 bp, Probe sequence
acaggtacattcagttctaaaaacg

SEQ ID NO: 152683 - DNA, 25 bp, Probe sequence
acacctaacaggtacattcagttct

SEQ ID NO: 152684 - DNA, 25 bp, Probe sequence
aactgttgaaggtaaagctgagatt

SEQ ID NO: 152685 - DNA, 25 bp, Probe sequence
aagaaatcgcaatggttgactacga

SEQ ID NO: 152686 - DNA, 25 bp, Probe sequence
aaggtccagatttatacgtctacct

SEQ ID NO: 152687 - DNA, 25 bp, Probe sequence
aagtcagaagatagcaatgttaaaa

SEQ ID NO: 152688 - DNA, 25 bp, Probe sequence
aatctattgtaaaaaagctcacgtc

SEQ ID NO: 152689 - DNA, 25 bp, Probe sequence
aattaatgcttactaactacaaatc

SEQ ID NO: 152690 - DNA, 25 bp, Probe sequence
cagatttatacgtctacctaacaaa

SEQ ID NO: 152691 - DNA, 25 bp, Probe sequence
ctaattcacaagatcaaggtaacaa

SEQ ID NO: 152692 - DNA, 25 bp, Probe sequence
cgtcatcttcggcggcgctaaatta

SEQ ID NO: 152693 - DNA, 25 bp, Probe sequence
cgcaatggttgactacgataaagaa

SEQ ID NO: 152694 - DNA, 25 bp, Probe sequence
ccagatttatacgtctacctaacaa

SEQ ID NO: 152695 - DNA, 25 bp, Probe sequence
gaaatcgcaatggttgactacgata

SEQ ID NO: 152696 - DNA, 25 bp, Probe sequence
gatcaaggtaacaaaactgaacaaa

SEQ ID NO: 152697 - DNA, 25 bp, Probe sequence
gtaaaaaagctcacgtcatcttcgg

SEQ ID NO: 152698 - DNA, 25 bp, Probe sequence
gtacattcagttctaaaaacggtga

SEQ ID NO: 152699 - DNA, 25 bp, Probe sequence
tcttcggcggcgctaaattaaaata

SEQ ID NO: 152700 - DNA, 25 bp, Probe sequence
gtcatcttcggcggcgctaaattaa

SEQ ID NO: 152701 - DNA, 25 bp, Probe sequence
gtccagatttatacgtctacctaac

SEQ ID NO: 152702 - DNA, 25 bp, Probe sequence
gtggtaattctaattcacaagatca

SEQ ID NO: 152703 - DNA, 25 bp, Probe sequence
ggtccagatttatacgtctacctaa

SEQ ID NO: 152704 - DNA, 25 bp, Probe sequence
ggtaaagaaatcgcaatggttgact

SEQ ID NO: 152705 - DNA, 25 bp, Probe sequence
tgataaaacaaaacacctaacaggt

SEQ ID NO: 152706 - DNA, 25 bp, Probe sequence
tgcttactaactacaaatcatcaaa

SEQ ID NO: 152707 - DNA, 25 bp, Probe sequence
tctacctaacaaaaaatggcgacat

SEQ ID NO: 152708 - DNA, 25 bp, Probe sequence
tctaaaaacggtgaaactgttgaag

SEQ ID NO: 152709 - DNA, 25 bp, Probe sequence
taaaaaagctcacgtcatcttcggc

SEQ ID NO: 152710 - DNA, 25 bp, Probe sequence
tatgatgaagtaacaatctattgta

SEQ ID NO: 152711 - DNA, 25 bp, Probe sequence
ttatacgtctacctaacaaaaaatg

SEQ ID NO: 152712 - DNA, 25 bp, Probe sequence
attgctatcatattaacgattgttg

SEQ ID NO: 152713 - DNA, 25 bp, Probe sequence
attttcatcattggtggtattatgt

SEQ ID NO: 152714 - DNA, 25 bp, Probe sequence
atttcaacatttaatagcttagatg

SEQ ID NO: 152715 - DNA, 25 bp, Probe sequence
atattgctatcgtcgtacttataac

SEQ ID NO: 152716 - DNA, 25 bp, Probe sequence
ataggcatcaaatgcaacatttatc

SEQ ID NO: 152717 - DNA, 25 bp, Probe sequence
atcgtctatcttattttcttgttgt

SEQ ID NO: 152718 - DNA, 25 bp, Probe sequence
acagaccaaaaatttattgctatca

SEQ ID NO: 152719 - DNA, 25 bp, Probe sequence
aaaacctgtatacattacagaccaa

SEQ ID NO: 152720 - DNA, 25 bp, Probe sequence
aactggattcaatttatataggcat

SEQ ID NO: 152721 - DNA, 25 bp, Probe sequence
aaggacttatcattattaacatttc

SEQ ID NO: 152722 - DNA, 25 bp, Probe sequence
aattaatattgctatcgtcgtactt

SEQ ID NO: 152723 - DNA, 25 bp, Probe sequence
caatcaatatatatgtctattccat

SEQ ID NO: 152724 - DNA, 25 bp, Probe sequence
cgcaacgtgttaccgacttttcaag

SEQ ID NO: 152725 - DNA, 25 bp, Probe sequence
cgatactacagttttacattgataa

SEQ ID NO: 152726 - DNA, 25 bp, Probe sequence
gcaacatttatcattaagtgcaatg

SEQ ID NO: 152727 - DNA, 25 bp, Probe sequence
gacttttcaagtacacaatcaatat

SEQ ID NO: 152728 - DNA, 25 bp, Probe sequence
gttttaacaccatattggtacttgt

SEQ ID NO: 152729 - DNA, 25 bp, Probe sequence
gttaccgacttttcaagtacacaat

SEQ ID NO: 152730 - DNA, 25 bp, Probe sequence
gtcagtttaacgcaacgtgttaccg

SEQ ID NO: 152731 - DNA, 25 bp, Probe sequence
gtctatcttattttcttgttgtttt

SEQ ID NO: 152732 - DNA, 25 bp, Probe sequence
ggtacttgtatttaatcgtctatct

SEQ ID NO: 152733 - DNA, 25 bp, Probe sequence
tgctatcgtcgtacttataactgga

SEQ ID NO: 152734 - DNA, 25 bp, Probe sequence
tcgtcgtacttataactggattcaa

SEQ ID NO: 152735 - DNA, 25 bp, Probe sequence
tcatttggacgatactacagtttta

SEQ ID NO: 152736 - DNA, 25 bp, Probe sequence
taagtgcaatgttgttatctattac

SEQ ID NO: 152737 - DNA, 25 bp, Probe sequence
taacgatgtttatcatttggacgat

SEQ ID NO: 152738 - DNA, 25 bp, Probe sequence
taacgattgttgtcagtttaacgca

SEQ ID NO: 152739 - DNA, 25 bp, Probe sequence
taaacgcctttataaatacattcat

SEQ ID NO: 152740 - DNA, 25 bp, Probe sequence
tactctgtgtactataacgatgttt

SEQ ID NO: 152741 - DNA, 25 bp, Probe sequence
tatgtctattccatttttagcccct

SEQ ID NO: 152742 - DNA, 25 bp, Probe sequence
tataactttattactctgtgtacta

SEQ ID NO: 152743 - DNA, 25 bp, Probe sequence
ttttcttgttgtttttattgtggca

SEQ ID NO: 152744 - DNA, 25 bp, Probe sequence
ttatcgttatgatggttttaacacc

SEQ ID NO: 152745 - DNA, 25 bp, Probe sequence
ttaacatttcatttatcgttatgat

SEQ ID NO: 152746 - DNA, 25 bp, Probe sequence
atacaccaccgttatccagatattc

SEQ ID NO: 152747 - DNA, 25 bp, Probe sequence
atcgctgtagctggtgtgattctgc

SEQ ID NO: 152748 - DNA, 25 bp, Probe sequence
atggctaaaattcctgtactcgaaa

SEQ ID NO: 152749 - DNA, 25 bp, Probe sequence
agttggtaacccatatttatcagac

SEQ ID NO: 152750 - DNA, 25 bp, Probe sequence
aaaggcgatataaaactcatgaccg

SEQ ID NO: 152751 - DNA, 25 bp, Probe sequence
aaagtagttgtattcgacgataaag

SEQ ID NO: 152752 - DNA, 25 bp, Probe sequence
aaactcatgaccgctgaagaaattt

SEQ ID NO: 152753 - DNA, 25 bp, Probe sequence
aacgatgtttgtgagaacagctgga

SEQ ID NO: 152754 - DNA, 25 bp, Probe sequence
aacccatatttatcagacagcgtag

SEQ ID NO: 152755 - DNA, 25 bp, Probe sequence
aagttgttagaacgctacgagcagt

SEQ ID NO: 152756 - DNA, 25 bp, Probe sequence
cgttatccagatattcccttctatt

SEQ ID NO: 152757 - DNA, 25 bp, Probe sequence
gctggtgtgattctgcatttacttg

SEQ ID NO: 152758 - DNA, 25 bp, Probe sequence
gaatcacgtttatgtgttaccacaa

SEQ ID NO: 152759 - DNA, 25 bp, Probe sequence
gacacaaggcagtaaattccaacct

SEQ ID NO: 152760 - DNA, 25 bp, Probe sequence
gacagcgtagataatcataccgaaa

SEQ ID NO: 152761 - DNA, 25 bp, Probe sequence
gagaacagctggatgtgattatcgc

SEQ ID NO: 152762 - DNA, 25 bp, Probe sequence
gataaaggtattttcagcgcactgg

SEQ ID NO: 152763 - DNA, 25 bp, Probe sequence
gattctgcatttacttgggatggta

SEQ ID NO: 152764 - DNA, 25 bp, Probe sequence
gttaccacaacttcatacattactt

SEQ ID NO: 152765 - DNA, 25 bp, Probe sequence
gtactcgaaatattcggtccaacca

SEQ ID NO: 152766 - DNA, 25 bp, Probe sequence
gtccaaaaccaccaagttcaactat

SEQ ID NO: 152767 - DNA, 25 bp, Probe sequence
gggatggtagtgctaaaggcgatat

SEQ ID NO: 152768 - DNA, 25 bp, Probe sequence
ggtggtaacccagcattaattaaag

SEQ ID NO: 152769 - DNA, 25 bp, Probe sequence
ggtatccaagagttagttgacttat

SEQ ID NO: 152770 - DNA, 25 bp, Probe sequence
ggatgtgattatcgctgtagctggt

SEQ ID NO: 152771 - DNA, 25 bp, Probe sequence
taacgattagtccaaaaccaccaag

SEQ ID NO: 152772 - DNA, 25 bp, Probe sequence
taaaacgaattggtggcgatttatt

SEQ ID NO: 152773 - DNA, 25 bp, Probe sequence
tacaatttctggtggtaacccagca

SEQ ID NO: 152774 - DNA, 25 bp, Probe sequence
tattcccttctatttacaagttggt

SEQ ID NO: 152775 - DNA, 25 bp, Probe sequence
tattcggtccaaccattcagggtga

SEQ ID NO: 152776 - DNA, 25 bp, Probe sequence
ttcagggtgaaggtcgagtaatcgg

SEQ ID NO: 152777 - DNA, 25 bp, Probe sequence
tttgccaaaatgatacaccaccgtt

SEQ ID NO: 152778 - DNA, 25 bp, Probe sequence
ttcagcgcactggagacacaaggca

SEQ ID NO: 152779 - DNA, 25 bp, Probe sequence
ttccaaccttggatgacacaaattg

SEQ ID NO: 152780 - DNA, 25 bp, Probe sequence
atcgtagcggaaacaatttatcaaa

SEQ ID NO: 152781 - DNA, 25 bp, Probe sequence
catcgctcgaacaccaaccaaaatg

SEQ ID NO: 152782 - DNA, 25 bp, Probe sequence
acaaaatcccttcaactgaaatcgt

SEQ ID NO: 152783 - DNA, 25 bp, Probe sequence
acaacgcatccatatcaattcgaat

SEQ ID NO: 152784 - DNA, 25 bp, Probe sequence
aaatgtccatggtcatacttacttt

SEQ ID NO: 152785 - DNA, 25 bp, Probe sequence
aacaattgtcggtgataaactagat

SEQ ID NO: 152786 - DNA, 25 bp, Probe sequence
aacgcatccatatcaattcgaatta

SEQ ID NO: 152787 - DNA, 25 bp, Probe sequence
aatttggcatcgctcgaacaccaac

SEQ ID NO: 152788 - DNA, 25 bp, Probe sequence
aatcccttcaactgaaatcgtagcg

SEQ ID NO: 152789 - DNA, 25 bp, Probe sequence
aatctatcctagtacaacgcatcca

SEQ ID NO: 152790 - DNA, 25 bp, Probe sequence
caactgttaaataacttacctgctt

SEQ ID NO: 152791 - DNA, 25 bp, Probe sequence
caccaaccaaaatgtattcaagtat

SEQ ID NO: 152792 - DNA, 25 bp, Probe sequence
cgcatccatatcaattcgaattaaa

SEQ ID NO: 152793 - DNA, 25 bp, Probe sequence
cccttcaactgaaatcgtagcggaa

SEQ ID NO: 152794 - DNA, 25 bp, Probe sequence
ccatggtcatacttactttgttaat

SEQ ID NO: 152795 - DNA, 25 bp, Probe sequence
gctcgaacaccaaccaaaatgtatt

SEQ ID NO: 152796 - DNA, 25 bp, Probe sequence
gaagaagcaggtatttgtcaaaatg

SEQ ID NO: 152797 - DNA, 25 bp, Probe sequence
gaaaatttggcatcgctcgaacacc

SEQ ID NO: 152798 - DNA, 25 bp, Probe sequence
gatacacggtaaatttgaccatcaa

SEQ ID NO: 152799 - DNA, 25 bp, Probe sequence
gttaaagaaaatttggcatcgctcg

SEQ ID NO: 152800 - DNA, 25 bp, Probe sequence
gttaatttaacaattgtcggtgata

SEQ ID NO: 152801 - DNA, 25 bp, Probe sequence
gtatttagaccaaaggaacaggtgt

SEQ ID NO: 152802 - DNA, 25 bp, Probe sequence
gtaagagaaacaccaacaagttatg

SEQ ID NO: 152803 - DNA, 25 bp, Probe sequence
gtccatggtcatacttactttgtta

SEQ ID NO: 152804 - DNA, 25 bp, Probe sequence
gtgataaactagatgacactggctt

SEQ ID NO: 152805 - DNA, 25 bp, Probe sequence
ggtaaatttgaccatcaactgttaa

SEQ ID NO: 152806 - DNA, 25 bp, Probe sequence
ggtatttgtcaaaatgtccatggtc

SEQ ID NO: 152807 - DNA, 25 bp, Probe sequence
tggtcatacttactttgttaattta

SEQ ID NO: 152808 - DNA, 25 bp, Probe sequence
tcctagtacaacgcatccatatcaa

SEQ ID NO: 152809 - DNA, 25 bp, Probe sequence
tctatcctagtacaacgcatccata

SEQ ID NO: 152810 - DNA, 25 bp, Probe sequence
tacaacaaatctatcctagtacaac

SEQ ID NO: 152811 - DNA, 25 bp, Probe sequence
tagtacaacgcatccatatcaattc

SEQ ID NO: 152812 - DNA, 25 bp, Probe sequence
tatcctagtacaacgcatccatatc

SEQ ID NO: 152813 - DNA, 25 bp, Probe sequence
ttagtgaactttagccatttgaaaa

SEQ ID NO: 152814 - DNA, 25 bp, Probe sequence
attacaggagcaactggaattagaa

SEQ ID NO: 152815 - DNA, 25 bp, Probe sequence
ataaagaagttagcaatgtgattga

SEQ ID NO: 152816 - DNA, 25 bp, Probe sequence
atgtcattacaggagcaactggaat

SEQ ID NO: 152817 - DNA, 25 bp, Probe sequence
aggagcaactggaattagaagactg

SEQ ID NO: 152818 - DNA, 25 bp, Probe sequence
agcaactggaattagaagactgcga

SEQ ID NO: 152819 - DNA, 25 bp, Probe sequence
acgaacaagttaaagcaatgagtca

SEQ ID NO: 152820 - DNA, 25 bp, Probe sequence
actggaattagaagactgcgaaaaa

SEQ ID NO: 152821 - DNA, 25 bp, Probe sequence
acaagttaaagcaatgagtcataaa

SEQ ID NO: 152822 - DNA, 25 bp, Probe sequence
aaatatacagacgaacaagttaaag

SEQ ID NO: 152823 - DNA, 25 bp, Probe sequence
aactggaattagaagactgcgaaaa

SEQ ID NO: 152824 - DNA, 25 bp, Probe sequence
aagactgcgaaaaatatacagacga

SEQ ID NO: 152825 - DNA, 25 bp, Probe sequence
aatgagtcataaagaagttagcaat

SEQ ID NO: 152826 - DNA, 25 bp, Probe sequence
caactggaattagaagactgcgaaa

SEQ ID NO: 152827 - DNA, 25 bp, Probe sequence
cagacgaacaagttaaagcaatgag

SEQ ID NO: 152828 - DNA, 25 bp, Probe sequence
caggagcaactggaattagaagact

SEQ ID NO: 152829 - DNA, 25 bp, Probe sequence
cattacaggagcaactggaattaga

SEQ ID NO: 152830 - DNA, 25 bp, Probe sequence
ctggaattagaagactgcgaaaaat

SEQ ID NO: 152831 - DNA, 25 bp, Probe sequence
cgaacaagttaaagcaatgagtcat

SEQ ID NO: 152832 - DNA, 25 bp, Probe sequence
ggagcaactggaattagaagactgc

SEQ ID NO: 152833 - DNA, 25 bp, Probe sequence
gcaactggaattagaagactgcgaa

SEQ ID NO: 152834 - DNA, 25 bp, Probe sequence
gcaatgagtcataaagaagttagca

SEQ ID NO: 152835 - DNA, 25 bp, Probe sequence
gaagactgcgaaaaatatacagacg

SEQ ID NO: 152836 - DNA, 25 bp, Probe sequence
gaacaagttaaagcaatgagtcata

SEQ ID NO: 152837 - DNA, 25 bp, Probe sequence
gaaaaatatacagacgaacaagtta

SEQ ID NO: 152838 - DNA, 25 bp, Probe sequence
gactgcgaaaaatatacagacgaac

SEQ ID NO: 152839 - DNA, 25 bp, Probe sequence
gagcaactggaattagaagactgcg

SEQ ID NO: 152840 - DNA, 25 bp, Probe sequence
gagtcataaagaagttagcaatgtg

SEQ ID NO: 152841 - DNA, 25 bp, Probe sequence
gtcattacaggagcaactggaatta

SEQ ID NO: 152842 - DNA, 25 bp, Probe sequence
ggaattagaagactgcgaaaaatat

SEQ ID NO: 152843 - DNA, 25 bp, Probe sequence
tgtcattacaggagcaactggaatt

SEQ ID NO: 152844 - DNA, 25 bp, Probe sequence
tcattacaggagcaactggaattag

SEQ ID NO: 152845 - DNA, 25 bp, Probe sequence
tacagacgaacaagttaaagcaatg

SEQ ID NO: 152846 - DNA, 25 bp, Probe sequence
tatacagacgaacaagttaaagcaa

SEQ ID NO: 152847 - DNA, 25 bp, Probe sequence
ttacaggagcaactggaattagaag

SEQ ID NO: 152848 - DNA, 25 bp, Probe sequence
atacatgtctagagcaccgttaaag

SEQ ID NO: 152849 - DNA, 25 bp, Probe sequence
atgttaagcaaccagcgcactacac

SEQ ID NO: 152850 - DNA, 25 bp, Probe sequence
atggtcatgaggatttagcaaaggc

SEQ ID NO: 152851 - DNA, 25 bp, Probe sequence
agagcttttgacttgtgggagggtt

SEQ ID NO: 152852 - DNA, 25 bp, Probe sequence
agcgcactacacatacggcgacatt

SEQ ID NO: 152853 - DNA, 25 bp, Probe sequence
acgtccaaagagcttttgacttgtg

SEQ ID NO: 152854 - DNA, 25 bp, Probe sequence
acggcgacattgaaattatagattt

SEQ ID NO: 152855 - DNA, 25 bp, Probe sequence
acacatacggcgacattgaaattat

SEQ ID NO: 152856 - DNA, 25 bp, Probe sequence
aaagtagatatgaacgaagcgcaag

SEQ ID NO: 152857 - DNA, 25 bp, Probe sequence
caggttacggcacagtatccacctc

SEQ ID NO: 152858 - DNA, 25 bp, Probe sequence
caaccagcgcactacacatacggcg

SEQ ID NO: 152859 - DNA, 25 bp, Probe sequence
caaatacatgtctagagcaccgtta

SEQ ID NO: 152860 - DNA, 25 bp, Probe sequence
catgtctagagcaccgttaaagaat

SEQ ID NO: 152861 - DNA, 25 bp, Probe sequence
cattcgcaataggtaatgcaatcaa

SEQ ID NO: 152862 - DNA, 25 bp, Probe sequence
ccagcgcactacacatacggcgaca

SEQ ID NO: 152863 - DNA, 25 bp, Probe sequence
cctcaactagcattcgcaataggta

SEQ ID NO: 152864 - DNA, 25 bp, Probe sequence
ccacctcaactagcattcgcaatag

SEQ ID NO: 152865 - DNA, 25 bp, Probe sequence
gcactacacatacggcgacattgaa

SEQ ID NO: 152866 - DNA, 25 bp, Probe sequence
gcaatcaaatacatgtctagagcac

SEQ ID NO: 152867 - DNA, 25 bp, Probe sequence
gaacgaagcgcaagacaatgttaag

SEQ ID NO: 152868 - DNA, 25 bp, Probe sequence
gaacaggttacggcacagtatccac

SEQ ID NO: 152869 - DNA, 25 bp, Probe sequence
gacaatgttaagcaaccagcgcact

SEQ ID NO: 152870 - DNA, 25 bp, Probe sequence
gagcttttgacttgtgggagggtta

SEQ ID NO: 152871 - DNA, 25 bp, Probe sequence
gagcgtaatcagtaacagaaaagta

SEQ ID NO: 152872 - DNA, 25 bp, Probe sequence
gagcaccgttaaagaatggtcatga

SEQ ID NO: 152873 - DNA, 25 bp, Probe sequence
gatatgaacgaagcgcaagacaatg

SEQ ID NO: 152874 - DNA, 25 bp, Probe sequence
gattttatcgaacaggttacggcac

SEQ ID NO: 152875 - DNA, 25 bp, Probe sequence
gttaagcaaccagcgcactacacat

SEQ ID NO: 152876 - DNA, 25 bp, Probe sequence
ggcgaagttttacgtccaaagagct

SEQ ID NO: 152877 - DNA, 25 bp, Probe sequence
tagcaaaggcgaagttttacgtcca

SEQ ID NO: 152878 - DNA, 25 bp, Probe sequence
tccacctcaactagcattcgcaata

SEQ ID NO: 152879 - DNA, 25 bp, Probe sequence
tttacgtccaaagagcttttgactt

SEQ ID NO: 152880 - DNA, 25 bp, Probe sequence
ttatcgaacaggttacggcacagta

SEQ ID NO: 152881 - DNA, 25 bp, Probe sequence
ttaagcaaccagcgcactacacata

SEQ ID NO: 152882 - DNA, 25 bp, Probe sequence
attgcatttaagtgtagtcgaacgt

SEQ ID NO: 152883 - DNA, 25 bp, Probe sequence
attgaatcgcaattgcatttaagtg

SEQ ID NO: 152884 - DNA, 25 bp, Probe sequence
atactatcacattttgcaacatatg

SEQ ID NO: 152885 - DNA, 25 bp, Probe sequence
atcacattttgcaacatatgacaat

SEQ ID NO: 152886 - DNA, 25 bp, Probe sequence
atcgcaattgcatttaagtgtagtc

SEQ ID NO: 152887 - DNA, 25 bp, Probe sequence
atgattcgtctagctaaccaatttt

SEQ ID NO: 152888 - DNA, 25 bp, Probe sequence
atgaccttacaacaaaaaatactat

SEQ ID NO: 152889 - DNA, 25 bp, Probe sequence
agttaatgattcgtctagctaacca

SEQ ID NO: 152890 - DNA, 25 bp, Probe sequence
actatcacattttgcaacatatgac

SEQ ID NO: 152891 - DNA, 25 bp, Probe sequence
acattttgcaacatatgacaatttc

SEQ ID NO: 152892 - DNA, 25 bp, Probe sequence
acatatgacaatttcaattctgatg

SEQ ID NO: 152893 - DNA, 25 bp, Probe sequence
aatgattcgtctagctaaccaattt

SEQ ID NO: 152894 - DNA, 25 bp, Probe sequence
aatactatcacattttgcaacatat

SEQ ID NO: 152895 - DNA, 25 bp, Probe sequence
aatttcaattctgatgatgttgttg

SEQ ID NO: 152896 - DNA, 25 bp, Probe sequence
aattctgatgatgttgttgaaactt

SEQ ID NO: 152897 - DNA, 25 bp, Probe sequence
cgcaattgcatttaagtgtagtcga

SEQ ID NO: 152898 - DNA, 25 bp, Probe sequence
gcaacatatgacaatttcaattctg

SEQ ID NO: 152899 - DNA, 25 bp, Probe sequence
gcaattgcatttaagtgtagtcgaa

SEQ ID NO: 152900 - DNA, 25 bp, Probe sequence
gaattgttagcaagattaaatgaac

SEQ ID NO: 152901 - DNA, 25 bp, Probe sequence
gaacgtatcaagttaatgattcgtc

SEQ ID NO: 152902 - DNA, 25 bp, Probe sequence
gacaatttcaattctgatgatgttg

SEQ ID NO: 152903 - DNA, 25 bp, Probe sequence
gaccttacaacaaaaaatactatca

SEQ ID NO: 152904 - DNA, 25 bp, Probe sequence
gatgttgttgaaacttttgggatat

SEQ ID NO: 152905 - DNA, 25 bp, Probe sequence
gatgatgttgttgaaacttttggga

SEQ ID NO: 152906 - DNA, 25 bp, Probe sequence
gattcgtctagctaaccaattttaa

SEQ ID NO: 152907 - DNA, 25 bp, Probe sequence
gttgttgaaacttttgggatatcta

SEQ ID NO: 152908 - DNA, 25 bp, Probe sequence
tgggatatctaaaacacatgcaaaa

SEQ ID NO: 152909 - DNA, 25 bp, Probe sequence
tgattcgtctagctaaccaatttta

SEQ ID NO: 152910 - DNA, 25 bp, Probe sequence
tgttgaaacttttgggatatctaaa

SEQ ID NO: 152911 - DNA, 25 bp, Probe sequence
tgcatttaagtgtagtcgaacgtaa

SEQ ID NO: 152912 - DNA, 25 bp, Probe sequence
tcaagttaatgattcgtctagctaa

SEQ ID NO: 152913 - DNA, 25 bp, Probe sequence
taatgattcgtctagctaaccaatt

SEQ ID NO: 152914 - DNA, 25 bp, Probe sequence
tatctaaaacacatgcaaaatccac

SEQ ID NO: 152915 - DNA, 25 bp, Probe sequence
ttaatgattcgtctagctaaccaat

SEQ ID NO: 152916 - DNA, 25 bp, Probe sequence
attcatactcctttaatgtggttaa

SEQ ID NO: 152917 - DNA, 25 bp, Probe sequence
atttacttttcttgtcgtttgcagg

SEQ ID NO: 152918 - DNA, 25 bp, Probe sequence
atcacaacttactccaaacgcatta

SEQ ID NO: 152919 - DNA, 25 bp, Probe sequence
atgtccagcttgtcatttacgtcaa

SEQ ID NO: 152920 - DNA, 25 bp, Probe sequence
agtggtggtcaagacagtacaacat

SEQ ID NO: 152921 - DNA, 25 bp, Probe sequence
acctaatacatttgttccagctaga

SEQ ID NO: 152922 - DNA, 25 bp, Probe sequence
acagtacaacatgtctcttttatgc

SEQ ID NO: 152923 - DNA, 25 bp, Probe sequence
acaacatgtctcttttatgcaaaaa

SEQ ID NO: 152924 - DNA, 25 bp, Probe sequence
aacattaacatgctataacggtatc

SEQ ID NO: 152925 - DNA, 25 bp, Probe sequence
aacggtatcattggggatggctgtg

SEQ ID NO: 152926 - DNA, 25 bp, Probe sequence
aagcctagctatggacaaagatttt

SEQ ID NO: 152927 - DNA, 25 bp, Probe sequence
aattaagtgatgaactcgaagtttt

SEQ ID NO: 152928 - DNA, 25 bp, Probe sequence
cagcttgtcatttacgtcaacgtgg

SEQ ID NO: 152929 - DNA, 25 bp, Probe sequence
catcacgttttagatatgtcattat

SEQ ID NO: 152930 - DNA, 25 bp, Probe sequence
ctgtggtgaatgtccagcttgtcat

SEQ ID NO: 152931 - DNA, 25 bp, Probe sequence
cccagactgtcgcgatagttttata

SEQ ID NO: 152932 - DNA, 25 bp, Probe sequence
gccatcgttgtctttagtggtggtc

SEQ ID NO: 152933 - DNA, 25 bp, Probe sequence
gctctagcttatcaaattggggcta

SEQ ID NO: 152934 - DNA, 25 bp, Probe sequence
gctacccagactgtcgcgatagttt

SEQ ID NO: 152935 - DNA, 25 bp, Probe sequence
gaagttttagattatattcgtacaa

SEQ ID NO: 152936 - DNA, 25 bp, Probe sequence
gaaaaagccatcgttgtctttagtg

SEQ ID NO: 152937 - DNA, 25 bp, Probe sequence
gatcaaggaatgaaacatcacgttt

SEQ ID NO: 152938 - DNA, 25 bp, Probe sequence
gatactgaaattgaagtcgcaaaac

SEQ ID NO: 152939 - DNA, 25 bp, Probe sequence
gttgaactcgtaacgtttaattatg

SEQ ID NO: 152940 - DNA, 25 bp, Probe sequence
gtatacctaatacatttgttccagc

SEQ ID NO: 152941 - DNA, 25 bp, Probe sequence
gtcaacgtggactaaatcaatatct

SEQ ID NO: 152942 - DNA, 25 bp, Probe sequence
gtcattattatcacaacttactcca

SEQ ID NO: 152943 - DNA, 25 bp, Probe sequence
ggggatggctgtggtgaatgtccag

SEQ ID NO: 152944 - DNA, 25 bp, Probe sequence
ggggctaagcatattattacaggcg

SEQ ID NO: 152945 - DNA, 25 bp, Probe sequence
tgaaacagacttttcaggctaccca

SEQ ID NO: 152946 - DNA, 25 bp, Probe sequence
tgaacgtaacattaagcctagctat

SEQ ID NO: 152947 - DNA, 25 bp, Probe sequence
tacaggcgtatgtgaaacagacttt

SEQ ID NO: 152948 - DNA, 25 bp, Probe sequence
tactccaaacgcattaacacaacat

SEQ ID NO: 152949 - DNA, 25 bp, Probe sequence
ttgttccagctagaaatttactttt

SEQ ID NO: 152950 - DNA, 25 bp, Probe sequence
atcagaaggattgcgtataggcgtc

SEQ ID NO: 152951 - DNA, 25 bp, Probe sequence
atgcttcttcatcctatttaacgga

SEQ ID NO: 152952 - DNA, 25 bp, Probe sequence
agaaggattgcgtataggcgtccca

SEQ ID NO: 152953 - DNA, 25 bp, Probe sequence
agcaaagctgatgcttcttcatcct

SEQ ID NO: 152954 - DNA, 25 bp, Probe sequence
agctgatgcttcttcatcctattta

SEQ ID NO: 152955 - DNA, 25 bp, Probe sequence
aaagctgatgcttcttcatcctatt

SEQ ID NO: 152956 - DNA, 25 bp, Probe sequence
aagctgatgcttcttcatcctattt

SEQ ID NO: 152957 - DNA, 25 bp, Probe sequence
aagtttctagcaaagctgatgcttc

SEQ ID NO: 152958 - DNA, 25 bp, Probe sequence
cagaaggattgcgtataggcgtccc

SEQ ID NO: 152959 - DNA, 25 bp, Probe sequence
cacaagtttctagcaaagctgatgc

SEQ ID NO: 152960 - DNA, 25 bp, Probe sequence
gaaggattgcgtataggcgtcccac

SEQ ID NO: 152961 - DNA, 25 bp, Probe sequence
ctagcaaagctgatgcttcttcatc

SEQ ID NO: 152962 - DNA, 25 bp, Probe sequence
ctgatgcttcttcatcctatttaac

SEQ ID NO: 152963 - DNA, 25 bp, Probe sequence
cgtcccacaagtttctagcaaagct

SEQ ID NO: 152964 - DNA, 25 bp, Probe sequence
cccacaagtttctagcaaagctgat

SEQ ID NO: 152965 - DNA, 25 bp, Probe sequence
gctgatgcttcttcatcctatttaa

SEQ ID NO: 152966 - DNA, 25 bp, Probe sequence
gcttcttcatcctatttaacggaaa

SEQ ID NO: 152967 - DNA, 25 bp, Probe sequence
gcaaagctgatgcttcttcatccta

SEQ ID NO: 152968 - DNA, 25 bp, Probe sequence
gaacgtaacttaggagcggaaatat

SEQ ID NO: 152969 - DNA, 25 bp, Probe sequence
gaacacaagatcagaaggattgcgt

SEQ ID NO: 152970 - DNA, 25 bp, Probe sequence
gatgcttcttcatcctatttaacgg

SEQ ID NO: 152971 - DNA, 25 bp, Probe sequence
gatcagaaggattgcgtataggcgt

SEQ ID NO: 152972 - DNA, 25 bp, Probe sequence
gtttctagcaaagctgatgcttctt

SEQ ID NO: 152973 - DNA, 25 bp, Probe sequence
gtcccacaagtttctagcaaagctg

SEQ ID NO: 152974 - DNA, 25 bp, Probe sequence
gtaacttaggagcggaaatattaga

SEQ ID NO: 152975 - DNA, 25 bp, Probe sequence
tgatgcttcttcatcctatttaacg

SEQ ID NO: 152976 - DNA, 25 bp, Probe sequence
tgcttcttcatcctatttaacggaa

SEQ ID NO: 152977 - DNA, 25 bp, Probe sequence
tcccacaagtttctagcaaagctga

SEQ ID NO: 152978 - DNA, 25 bp, Probe sequence
tctagcaaagctgatgcttcttcat

SEQ ID NO: 152979 - DNA, 25 bp, Probe sequence
tcttcatcctatttaacggaaaagg

SEQ ID NO: 152980 - DNA, 25 bp, Probe sequence
caaagctgatgcttcttcatcctat

SEQ ID NO: 152981 - DNA, 25 bp, Probe sequence
tagcaaagctgatgcttcttcatcc

SEQ ID NO: 152982 - DNA, 25 bp, Probe sequence
ttctagcaaagctgatgcttcttca

SEQ ID NO: 152983 - DNA, 25 bp, Probe sequence
ttcttcatcctatttaacggaaaag

SEQ ID NO: 152984 - DNA, 25 bp, Probe sequence
atttatttaaggtctcatcacgtac

SEQ ID NO: 152985 - DNA, 25 bp, Probe sequence
atttaaggtctcatcacgtacaatt

SEQ ID NO: 152986 - DNA, 25 bp, Probe sequence
atatggaaaaagactctacaaacat

SEQ ID NO: 152987 - DNA, 25 bp, Probe sequence
aggactgattacggattgactcaaa

SEQ ID NO: 152988 - DNA, 25 bp, Probe sequence
aggtctcatcacgtacaattcaaaa

SEQ ID NO: 152989 - DNA, 25 bp, Probe sequence
agtatatgagtgcttttaatgttaa

SEQ ID NO: 152990 - DNA, 25 bp, Probe sequence
agatttatttaaggtctcatcacgt

SEQ ID NO: 152991 - DNA, 25 bp, Probe sequence
actttctaagtatatgagtgctttt

SEQ ID NO: 152992 - DNA, 25 bp, Probe sequence
aagagttgaggactgattacggatt

SEQ ID NO: 152993 - DNA, 25 bp, Probe sequence
aaggtctcatcacgtacaattcaaa

SEQ ID NO: 152994 - DNA, 25 bp, Probe sequence
catcacgtacaattcaaaatatgga

SEQ ID NO: 152995 - DNA, 25 bp, Probe sequence
gttgaggactgattacggattgact

SEQ ID NO: 152996 - DNA, 25 bp, Probe sequence
gaaaaagactctacaaacattaaag

SEQ ID NO: 152997 - DNA, 25 bp, Probe sequence
gaaatcaattattttagcatttaaa

SEQ ID NO: 152998 - DNA, 25 bp, Probe sequence
gactctacaaacattaaagatagtt

SEQ ID NO: 152999 - DNA, 25 bp, Probe sequence
gactgattacggattgactcaaaaa

SEQ ID NO: 153000 - DNA, 25 bp, Probe sequence
gagttgaggactgattacggattga

SEQ ID NO: 153001 - DNA, 25 bp, Probe sequence
gagttaggagatttatttaaggtct

SEQ ID NO: 153002 - DNA, 25 bp, Probe sequence
gagtgcttttaatgttaaatatgat

SEQ ID NO: 153003 - DNA, 25 bp, Probe sequence
gaggactgattacggattgactcaa

SEQ ID NO: 153004 - DNA, 25 bp, Probe sequence
gatatttttttaggtaatgaatacg

SEQ ID NO: 153005 - DNA, 25 bp, Probe sequence
gattacggattgactcaaaaagagt

SEQ ID NO: 153006 - DNA, 25 bp, Probe sequence
gtctcatcacgtacaattcaaaata

SEQ ID NO: 153007 - DNA, 25 bp, Probe sequence
ggtctcatcacgtacaattcaaaat

SEQ ID NO: 153008 - DNA, 25 bp, Probe sequence
ggactgattacggattgactcaaaa

SEQ ID NO: 153009 - DNA, 25 bp, Probe sequence
tctcatcacgtacaattcaaaatat

SEQ ID NO: 153010 - DNA, 25 bp, Probe sequence
taaggtctcatcacgtacaattcaa

SEQ ID NO: 153011 - DNA, 25 bp, Probe sequence
tttaaggtctcatcacgtacaattc

SEQ ID NO: 153012 - DNA, 25 bp, Probe sequence
taaagatagtttactttctaagtat

SEQ ID NO: 153013 - DNA, 25 bp, Probe sequence
tatatgagtgcttttaatgttaaat

SEQ ID NO: 153014 - DNA, 25 bp, Probe sequence
tatttaaggtctcatcacgtacaat

SEQ ID NO: 153015 - DNA, 25 bp, Probe sequence
tttatttaaggtctcatcacgtaca

SEQ ID NO: 153016 - DNA, 25 bp, Probe sequence
ttatttaaggtctcatcacgtacaa

SEQ ID NO: 153017 - DNA, 25 bp, Probe sequence
ttaaggtctcatcacgtacaattca

SEQ ID NO: 153018 - DNA, 25 bp, Probe sequence
ataccattgactgatttgtctcctc

SEQ ID NO: 153019 - DNA, 25 bp, Probe sequence
atgaaagttgatattgatggcgaaa

SEQ ID NO: 153020 - DNA, 25 bp, Probe sequence
atggtccattcattggtggtagtcg

SEQ ID NO: 153021 - DNA, 25 bp, Probe sequence
agttcaatttgtaagcatctttcta

SEQ ID NO: 153022 - DNA, 25 bp, Probe sequence
agcatctttctattcaattgagtga

SEQ ID NO: 153023 - DNA, 25 bp, Probe sequence
actccctattggcattttaccaggc

SEQ ID NO: 153024 - DNA, 25 bp, Probe sequence
acgctgaaaacgtacaagatggttc

SEQ ID NO: 153025 - DNA, 25 bp, Probe sequence
aaataatcaatatgcactcaacttt

SEQ ID NO: 153026 - DNA, 25 bp, Probe sequence
aaagatttcacttacaacagatcca

SEQ ID NO: 153027 - DNA, 25 bp, Probe sequence
aaacactgctaaatccaacacaatt

SEQ ID NO: 153028 - DNA, 25 bp, Probe sequence
aacgctaaatatagcacctaatcat

SEQ ID NO: 153029 - DNA, 25 bp, Probe sequence
caaatgatttctgcacaagttggta

SEQ ID NO: 153030 - DNA, 25 bp, Probe sequence
ccttcaactccctattggcatttta

SEQ ID NO: 153031 - DNA, 25 bp, Probe sequence
tattcttggcggtgatggcacggtt

SEQ ID NO: 153032 - DNA, 25 bp, Probe sequence
gctagtgaacaaatgatttctgcac

SEQ ID NO: 153033 - DNA, 25 bp, Probe sequence
gcactcaactttgttggcttaggtc

SEQ ID NO: 153034 - DNA, 25 bp, Probe sequence
gcaaatggtccattcattggtggta

SEQ ID NO: 153035 - DNA, 25 bp, Probe sequence
gaaacacctattgatattgaggtta

SEQ ID NO: 153036 - DNA, 25 bp, Probe sequence
gactgatttgtctcctcaagatggt

SEQ ID NO: 153037 - DNA, 25 bp, Probe sequence
gatggcacggttaacgaacttataa

SEQ ID NO: 153038 - DNA, 25 bp, Probe sequence
gatatattatttattcttggcggtg

SEQ ID NO: 153039 - DNA, 25 bp, Probe sequence
gtattgagcatatacctggtaaaaa

SEQ ID NO: 153040 - DNA, 25 bp, Probe sequence
gtcctcttttaccatgaacacagtg

SEQ ID NO: 153041 - DNA, 25 bp, Probe sequence
ggtgaactgaacactttcattttta

SEQ ID NO: 153042 - DNA, 25 bp, Probe sequence
ggcggtgatggcacggttaacgaac

SEQ ID NO: 153043 - DNA, 25 bp, Probe sequence
ggatcaactgtcaaaacactgctaa

SEQ ID NO: 153044 - DNA, 25 bp, Probe sequence
ggcgaaatttcattagaaacaccta

SEQ ID NO: 153045 - DNA, 25 bp, Probe sequence
tggtgtcctcttttaccatgaacac

SEQ ID NO: 153046 - DNA, 25 bp, Probe sequence
taagacatattctggcgaaacgacc

SEQ ID NO: 153047 - DNA, 25 bp, Probe sequence
taccaggcggtacttttaatgattt

SEQ ID NO: 153048 - DNA, 25 bp, Probe sequence
tatacacatggtgtcctcttttacc

SEQ ID NO: 153049 - DNA, 25 bp, Probe sequence
ttctggcgaaacgaccatgatacta

SEQ ID NO: 153050 - DNA, 25 bp, Probe sequence
ttgtctcctcaagatggtgaactga

SEQ ID NO: 153051 - DNA, 25 bp, Probe sequence
ttggcattttaccaggcggtacttt

SEQ ID NO: 153052 - DNA, 25 bp, Probe sequence
ataccaggcggatggattgctgaca

SEQ ID NO: 153053 - DNA, 25 bp, Probe sequence
atcacctattattttgcaacacttt

SEQ ID NO: 153054 - DNA, 25 bp, Probe sequence
aggtgcagtctttattattatcgga

SEQ ID NO: 153055 - DNA, 25 bp, Probe sequence
accaacgggtaatagtgctgctgtt

SEQ ID NO: 153056 - DNA, 25 bp, Probe sequence
agcatttattccattatttattctt

SEQ ID NO: 153057 - DNA, 25 bp, Probe sequence
acaggatttttcgggcatcctcgag

SEQ ID NO: 153058 - DNA, 25 bp, Probe sequence
aatcggcttattcacatcaatgttc

SEQ ID NO: 153059 - DNA, 25 bp, Probe sequence
aatttgcaattggtacgttcttagc

SEQ ID NO: 153060 - DNA, 25 bp, Probe sequence
aattgtattagcattctcaccttta

SEQ ID NO: 153061 - DNA, 25 bp, Probe sequence
gttggtatgaaacctactaacccat

SEQ ID NO: 153062 - DNA, 25 bp, Probe sequence
gcttaccatttgcattaatcggctt

SEQ ID NO: 153063 - DNA, 25 bp, Probe sequence
gcattaccaatcatttacttcactt

SEQ ID NO: 153064 - DNA, 25 bp, Probe sequence
gcaggtgcgtcatacatactaattg

SEQ ID NO: 153065 - DNA, 25 bp, Probe sequence
gaacgttctcgtgttaaagcattta

SEQ ID NO: 153066 - DNA, 25 bp, Probe sequence
gacacaacaaaactcccatggaaat

SEQ ID NO: 153067 - DNA, 25 bp, Probe sequence
gaggcgctactttattaggtgcagt

SEQ ID NO: 153068 - DNA, 25 bp, Probe sequence
gatgtcactgatactgaacgttctc

SEQ ID NO: 153069 - DNA, 25 bp, Probe sequence
gtatggtatgtacttttcaaccgca

SEQ ID NO: 153070 - DNA, 25 bp, Probe sequence
gtaggttatgcatcaggttcatcaa

SEQ ID NO: 153071 - DNA, 25 bp, Probe sequence
ggtgcattaactaactcattatcat

SEQ ID NO: 153072 - DNA, 25 bp, Probe sequence
ggtacgttcttagcaggtgcgtcat

SEQ ID NO: 153073 - DNA, 25 bp, Probe sequence
ggatgcaggttttgttattttctat

SEQ ID NO: 153074 - DNA, 25 bp, Probe sequence
ggacatatttgtttaagcttaccat

SEQ ID NO: 153075 - DNA, 25 bp, Probe sequence
ggaatggtgttctgggctattcaag

SEQ ID NO: 153076 - DNA, 25 bp, Probe sequence
ggcgtactcttctttgtagagttct

SEQ ID NO: 153077 - DNA, 25 bp, Probe sequence
tggaactaaacaacctagcctgcca

SEQ ID NO: 153078 - DNA, 25 bp, Probe sequence
tggtacttaactaacgcttctgcac

SEQ ID NO: 153079 - DNA, 25 bp, Probe sequence
tgttcttcatcattattggttcagg

SEQ ID NO: 153080 - DNA, 25 bp, Probe sequence
tgccctactcattttctacatgtac

SEQ ID NO: 153081 - DNA, 25 bp, Probe sequence
tctacatgtactttgccgtaacaga

SEQ ID NO: 153082 - DNA, 25 bp, Probe sequence
tactaacccattgacaccagctgaa

SEQ ID NO: 153083 - DNA, 25 bp, Probe sequence
tattatggcatgcgtgccctactca

SEQ ID NO: 153084 - DNA, 25 bp, Probe sequence
tagctccaattatttcacttttatg

SEQ ID NO: 153085 - DNA, 25 bp, Probe sequence
tatcgttggccgtttatatcctgaa

SEQ ID NO: 153086 - DNA, 25 bp, Probe sequence
atttttaacagattttgattcaagt

SEQ ID NO: 153087 - DNA, 25 bp, Probe sequence
atttatatagttatgtctacgttaa

SEQ ID NO: 153088 - DNA, 25 bp, Probe sequence
atatagttatgtctacgttaaagtt

SEQ ID NO: 153089 - DNA, 25 bp, Probe sequence
atagttatgtctacgttaaagttag

SEQ ID NO: 153090 - DNA, 25 bp, Probe sequence
atgtttaatgtgatacttattaatg

SEQ ID NO: 153091 - DNA, 25 bp, Probe sequence
agacgaatttttaacagattttgat

SEQ ID NO: 153092 - DNA, 25 bp, Probe sequence
agcaaagacgaatttttaacagatt

SEQ ID NO: 153093 - DNA, 25 bp, Probe sequence
actagcaaagacgaatttttaacag

SEQ ID NO: 153094 - DNA, 25 bp, Probe sequence
aaatttatatagttatgtctacgtt

SEQ ID NO: 153095 - DNA, 25 bp, Probe sequence
aaaatttatatagttatgtctacgt

SEQ ID NO: 153096 - DNA, 25 bp, Probe sequence
aacagattttgattcaagtataaat

SEQ ID NO: 153097 - DNA, 25 bp, Probe sequence
aatttatatagttatgtctacgtta

SEQ ID NO: 153098 - DNA, 25 bp, Probe sequence
aatttttaacagattttgattcaag

SEQ ID NO: 153099 - DNA, 25 bp, Probe sequence
ctagcaaagacgaatttttaacaga

SEQ ID NO: 153100 - DNA, 25 bp, Probe sequence
cgaatttttaacagattttgattca

SEQ ID NO: 153101 - DNA, 25 bp, Probe sequence
gcaaagacgaatttttaacagattt

SEQ ID NO: 153102 - DNA, 25 bp, Probe sequence
gaatttttaacagattttgattcaa

SEQ ID NO: 153103 - DNA, 25 bp, Probe sequence
gaaaaattaactagcaaagacgaat

SEQ ID NO: 153104 - DNA, 25 bp, Probe sequence
gacgaatttttaacagattttgatt

SEQ ID NO: 153105 - DNA, 25 bp, Probe sequence
gtttaatgtgatacttattaatgat

SEQ ID NO: 153106 - DNA, 25 bp, Probe sequence
tgtttaatgtgatacttattaatga

SEQ ID NO: 153107 - DNA, 25 bp, Probe sequence
taacagattttgattcaagtataaa

SEQ ID NO: 153108 - DNA, 25 bp, Probe sequence
tagcaaagacgaatttttaacagat

SEQ ID NO: 153109 - DNA, 25 bp, Probe sequence
tagttatgtctacgttaaagttaga

SEQ ID NO: 153110 - DNA, 25 bp, Probe sequence
tatagttatgtctacgttaaagtta

SEQ ID NO: 153111 - DNA, 25 bp, Probe sequence
tatatagttatgtctacgttaaagt

SEQ ID NO: 153112 - DNA, 25 bp, Probe sequence
tttaatgtgatacttattaatgata

SEQ ID NO: 153113 - DNA, 25 bp, Probe sequence
tttatatagttatgtctacgttaaa

SEQ ID NO: 153114 - DNA, 25 bp, Probe sequence
tttaacagattttgattcaagtata

SEQ ID NO: 153115 - DNA, 25 bp, Probe sequence
tttttaacagattttgattcaagta

SEQ ID NO: 153116 - DNA, 25 bp, Probe sequence
ttttaacagattttgattcaagtat

SEQ ID NO: 153117 - DNA, 25 bp, Probe sequence
ttatatagttatgtctacgttaaag

SEQ ID NO: 153118 - DNA, 25 bp, Probe sequence
ttaacagattttgattcaagtataa

SEQ ID NO: 153119 - DNA, 25 bp, Probe sequence
ttaatgtgatacttattaatgataa

SEQ ID NO: 153120 - DNA, 25 bp, Probe sequence
attactgggcaaccagattttgcaa

SEQ ID NO: 153121 - DNA, 25 bp, Probe sequence
attttgactatcgtcctgatgtatt

SEQ ID NO: 153122 - DNA, 25 bp, Probe sequence
atttcgtaaaattcaactgtccaga

SEQ ID NO: 153123 - DNA, 25 bp, Probe sequence
atattccaaatgttaaaatggttga

SEQ ID NO: 153124 - DNA, 25 bp, Probe sequence
atcgtcctgatgtattagaatcgtt

SEQ ID NO: 153125 - DNA, 25 bp, Probe sequence
atgaatcatgatttatatcccgaaa

SEQ ID NO: 153126 - DNA, 25 bp, Probe sequence
atggcacatggccgtcaacaagatg

SEQ ID NO: 153127 - DNA, 25 bp, Probe sequence
atggccgtcaacaagatgaattaca

SEQ ID NO: 153128 - DNA, 25 bp, Probe sequence
actgggcaaccagattttgcaacta

SEQ ID NO: 153129 - DNA, 25 bp, Probe sequence
aactttattaggaaatcaagacaat

SEQ ID NO: 153130 - DNA, 25 bp, Probe sequence
aagcatcaaggtcgtgactatttcg

SEQ ID NO: 153131 - DNA, 25 bp, Probe sequence
aataagcatcaaggtcgtgactatt

SEQ ID NO: 153132 - DNA, 25 bp, Probe sequence
caattttgactatcgtcctgatgta

SEQ ID NO: 153133 - DNA, 25 bp, Probe sequence
caaggtcgtgactatttcgtaaaat

SEQ ID NO: 153134 - DNA, 25 bp, Probe sequence
caaccagattttgcaactatctata

SEQ ID NO: 153135 - DNA, 25 bp, Probe sequence
cacatggccgtcaacaagatgaatt

SEQ ID NO: 153136 - DNA, 25 bp, Probe sequence
caccacgtggtggaatttctattga

SEQ ID NO: 153137 - DNA, 25 bp, Probe sequence
cagattttgcaactatctatatttc

SEQ ID NO: 153138 - DNA, 25 bp, Probe sequence
gcatcaaggtcgtgactatttcgta

SEQ ID NO: 153139 - DNA, 25 bp, Probe sequence
gaattacaagatataactttattag

SEQ ID NO: 153140 - DNA, 25 bp, Probe sequence
gaatcatgatttatatcccgaaaaa

SEQ ID NO: 153141 - DNA, 25 bp, Probe sequence
gactatcgtcctgatgtattagaat

SEQ ID NO: 153142 - DNA, 25 bp, Probe sequence
gttcacaccacgtggtggaatttct

SEQ ID NO: 153143 - DNA, 25 bp, Probe sequence
gtcctgatgtattagaatcgtttga

SEQ ID NO: 153144 - DNA, 25 bp, Probe sequence
gggcaaccagattttgcaactatct

SEQ ID NO: 153145 - DNA, 25 bp, Probe sequence
ggtcgtgactatttcgtaaaattca

SEQ ID NO: 153146 - DNA, 25 bp, Probe sequence
ggcaagttcacaccacgtggtggaa

SEQ ID NO: 153147 - DNA, 25 bp, Probe sequence
ggcacatggccgtcaacaagatgaa

SEQ ID NO: 153148 - DNA, 25 bp, Probe sequence
ggccgtcaacaagatgaattacaag

SEQ ID NO: 153149 - DNA, 25 bp, Probe sequence
tacaattttgactatcgtcctgatg

SEQ ID NO: 153150 - DNA, 25 bp, Probe sequence
tttagtttcagaaatcacggtgatt

SEQ ID NO: 153151 - DNA, 25 bp, Probe sequence
ttagaatcgtttgataataagcatc

SEQ ID NO: 153152 - DNA, 25 bp, Probe sequence
ttcgtaaaattcaactgtccagaat

SEQ ID NO: 153153 - DNA, 25 bp, Probe sequence
ttgactatcgtcctgatgtattaga

SEQ ID NO: 153154 - DNA, 25 bp, Probe sequence
attgaaactgactataactataaga

SEQ ID NO: 153155 - DNA, 25 bp, Probe sequence
atattgaaactgactataactataa

SEQ ID NO: 153156 - DNA, 25 bp, Probe sequence
ataatattgaaactgactataacta

SEQ ID NO: 153157 - DNA, 25 bp, Probe sequence
atgctaacagcaatttatttttcca

SEQ ID NO: 153158 - DNA, 25 bp, Probe sequence
agattgttttgttattgaaagaagg

SEQ ID NO: 153159 - DNA, 25 bp, Probe sequence
agcaatttatttttccattttcact

SEQ ID NO: 153160 - DNA, 25 bp, Probe sequence
actgactataactataagattgttt

SEQ ID NO: 153161 - DNA, 25 bp, Probe sequence
actataagattgttttgttattgaa

SEQ ID NO: 153162 - DNA, 25 bp, Probe sequence
actataactataagattgttttgtt

SEQ ID NO: 153163 - DNA, 25 bp, Probe sequence
actttttatatcagtcaatatagtt

SEQ ID NO: 153164 - DNA, 25 bp, Probe sequence
acagcaatttatttttccattttca

SEQ ID NO: 153165 - DNA, 25 bp, Probe sequence
aaactgactataactataagattgt

SEQ ID NO: 153166 - DNA, 25 bp, Probe sequence
aactataagattgttttgttattga

SEQ ID NO: 153167 - DNA, 25 bp, Probe sequence
aactgactataactataagattgtt

SEQ ID NO: 153168 - DNA, 25 bp, Probe sequence
aagattgttttgttattgaaagaag

SEQ ID NO: 153169 - DNA, 25 bp, Probe sequence
aatattgaaactgactataactata

SEQ ID NO: 153170 - DNA, 25 bp, Probe sequence
cactttttatatcagtcaatatagt

SEQ ID NO: 153171 - DNA, 25 bp, Probe sequence
cagcaatttatttttccattttcac

SEQ ID NO: 153172 - DNA, 25 bp, Probe sequence
ctaacagcaatttatttttccattt

SEQ ID NO: 153173 - DNA, 25 bp, Probe sequence
gctaacagcaatttatttttccatt

SEQ ID NO: 153174 - DNA, 25 bp, Probe sequence
gcaatttatttttccattttcactt

SEQ ID NO: 153175 - DNA, 25 bp, Probe sequence
gaaactgactataactataagattg

SEQ ID NO: 153176 - DNA, 25 bp, Probe sequence
gactataactataagattgttttgt

SEQ ID NO: 153177 - DNA, 25 bp, Probe sequence
gatgctaacagcaatttatttttcc

SEQ ID NO: 153178 - DNA, 25 bp, Probe sequence
gattgttttgttattgaaagaaggg

SEQ ID NO: 153179 - DNA, 25 bp, Probe sequence
tgaaactgactataactataagatt

SEQ ID NO: 153180 - DNA, 25 bp, Probe sequence
tgctaacagcaatttatttttccat

SEQ ID NO: 153181 - DNA, 25 bp, Probe sequence
tcactttttatatcagtcaatatag

SEQ ID NO: 153182 - DNA, 25 bp, Probe sequence
taatattgaaactgactataactat

SEQ ID NO: 153183 - DNA, 25 bp, Probe sequence
taagattgttttgttattgaaagaa

SEQ ID NO: 153184 - DNA, 25 bp, Probe sequence
taacagcaatttatttttccatttt

SEQ ID NO: 153185 - DNA, 25 bp, Probe sequence
taactataagattgttttgttattg

SEQ ID NO: 153186 - DNA, 25 bp, Probe sequence
tatcagtcaatatagtttaaaatta

SEQ ID NO: 153187 - DNA, 25 bp, Probe sequence
tattgaaactgactataactataag

SEQ ID NO: 153188 - DNA, 25 bp, Probe sequence
atttaacgccactgatgaccgaatt

SEQ ID NO: 153189 - DNA, 25 bp, Probe sequence
atataaatttatcaactataactaa

SEQ ID NO: 153190 - DNA, 25 bp, Probe sequence
atatccatatatgcttataaatata

SEQ ID NO: 153191 - DNA, 25 bp, Probe sequence
ataaaagatttaacgccactgatga

SEQ ID NO: 153192 - DNA, 25 bp, Probe sequence
atgataaaagatttaacgccactga

SEQ ID NO: 153193 - DNA, 25 bp, Probe sequence
atgaaatatccatatatgcttataa

SEQ ID NO: 153194 - DNA, 25 bp, Probe sequence
agatttaacgccactgatgaccgaa

SEQ ID NO: 153195 - DNA, 25 bp, Probe sequence
acgccactgatgaccgaattaatat

SEQ ID NO: 153196 - DNA, 25 bp, Probe sequence
aaatatccatatatgcttataaata

SEQ ID NO: 153197 - DNA, 25 bp, Probe sequence
aaagatttaacgccactgatgaccg

SEQ ID NO: 153198 - DNA, 25 bp, Probe sequence
aaaagatttaacgccactgatgacc

SEQ ID NO: 153199 - DNA, 25 bp, Probe sequence
aacgccactgatgaccgaattaata

SEQ ID NO: 153200 - DNA, 25 bp, Probe sequence
aagatttaacgccactgatgaccga

SEQ ID NO: 153201 - DNA, 25 bp, Probe sequence
aatataaatttatcaactataacta

SEQ ID NO: 153202 - DNA, 25 bp, Probe sequence
aatatccatatatgcttataaatat

SEQ ID NO: 153203 - DNA, 25 bp, Probe sequence
aatttatcaactataactaaaaatg

SEQ ID NO: 153204 - DNA, 25 bp, Probe sequence
cactgatgaccgaattaatattatt

SEQ ID NO: 153205 - DNA, 25 bp, Probe sequence
cgccactgatgaccgaattaatatt

SEQ ID NO: 153206 - DNA, 25 bp, Probe sequence
ccactgatgaccgaattaatattat

SEQ ID NO: 153207 - DNA, 25 bp, Probe sequence
gccactgatgaccgaattaatatta

SEQ ID NO: 153208 - DNA, 25 bp, Probe sequence
gaaatatccatatatgcttataaat

SEQ ID NO: 153209 - DNA, 25 bp, Probe sequence
gatgaaatatccatatatgcttata

SEQ ID NO: 153210 - DNA, 25 bp, Probe sequence
gataaaagatttaacgccactgatg

SEQ ID NO: 153211 - DNA, 25 bp, Probe sequence
gatttaacgccactgatgaccgaat

SEQ ID NO: 153212 - DNA, 25 bp, Probe sequence
tgataaaagatttaacgccactgat

SEQ ID NO: 153213 - DNA, 25 bp, Probe sequence
tgatgaaatatccatatatgcttat

SEQ ID NO: 153214 - DNA, 25 bp, Probe sequence
tgaaatatccatatatgcttataaa

SEQ ID NO: 153215 - DNA, 25 bp, Probe sequence
taacgccactgatgaccgaattaat

SEQ ID NO: 153216 - DNA, 25 bp, Probe sequence
taaaagatttaacgccactgatgac

SEQ ID NO: 153217 - DNA, 25 bp, Probe sequence
tatccatatatgcttataaatataa

SEQ ID NO: 153218 - DNA, 25 bp, Probe sequence
tataaatttatcaactataactaaa

SEQ ID NO: 153219 - DNA, 25 bp, Probe sequence
tttaacgccactgatgaccgaatta

SEQ ID NO: 153220 - DNA, 25 bp, Probe sequence
ttaacgccactgatgaccgaattaa

SEQ ID NO: 153221 - DNA, 25 bp, Probe sequence
ttgatgaaatatccatatatgctta

SEQ ID NO: 153222 - DNA, 25 bp, Probe sequence
attaagcgttggtctgagccttcat

SEQ ID NO: 153223 - DNA, 25 bp, Probe sequence
attttaccgaagaagatattattgc

SEQ ID NO: 153224 - DNA, 25 bp, Probe sequence
atcgatactgaaacacgctgtcgcc

SEQ ID NO: 153225 - DNA, 25 bp, Probe sequence
atgagtttgaaaagcacgccattaa

SEQ ID NO: 153226 - DNA, 25 bp, Probe sequence
agcacgccattaagcgttggtctga

SEQ ID NO: 153227 - DNA, 25 bp, Probe sequence
acgctgtcgccattattttaccgaa

SEQ ID NO: 153228 - DNA, 25 bp, Probe sequence
aaatactatccatgctataagtgcc

SEQ ID NO: 153229 - DNA, 25 bp, Probe sequence
aaagcacgccattaagcgttggtct

SEQ ID NO: 153230 - DNA, 25 bp, Probe sequence
aagcaatcttatgcggtgtatgcaa

SEQ ID NO: 153231 - DNA, 25 bp, Probe sequence
caatcttatgcggtgtatgcaaaca

SEQ ID NO: 153232 - DNA, 25 bp, Probe sequence
cacgctgtcgccattattttaccga

SEQ ID NO: 153233 - DNA, 25 bp, Probe sequence
cattaagcgttggtctgagccttca

SEQ ID NO: 153234 - DNA, 25 bp, Probe sequence
ctatccatgctataagtgccataat

SEQ ID NO: 153235 - DNA, 25 bp, Probe sequence
cgatactgaaacacgctgtcgccat

SEQ ID NO: 153236 - DNA, 25 bp, Probe sequence
cgctgtcgccattattttaccgaag

SEQ ID NO: 153237 - DNA, 25 bp, Probe sequence
ccatgctataagtgccataatgagt

SEQ ID NO: 153238 - DNA, 25 bp, Probe sequence
gccattaagcgttggtctgagcctt

SEQ ID NO: 153239 - DNA, 25 bp, Probe sequence
gccattattttaccgaagaagatat

SEQ ID NO: 153240 - DNA, 25 bp, Probe sequence
gctgtcgccattattttaccgaaga

SEQ ID NO: 153241 - DNA, 25 bp, Probe sequence
gctataagtgccataatgagtttga

SEQ ID NO: 153242 - DNA, 25 bp, Probe sequence
gcacgccattaagcgttggtctgag

SEQ ID NO: 153243 - DNA, 25 bp, Probe sequence
gaaaaagcaatcttatgcggtgtat

SEQ ID NO: 153244 - DNA, 25 bp, Probe sequence
gagccttcatttaacgaaaaagcaa

SEQ ID NO: 153245 - DNA, 25 bp, Probe sequence
gagtttgaaaagcacgccattaagc

SEQ ID NO: 153246 - DNA, 25 bp, Probe sequence
gttggtctgagccttcatttaacga

SEQ ID NO: 153247 - DNA, 25 bp, Probe sequence
gttgtaataaatactatccatgcta

SEQ ID NO: 153248 - DNA, 25 bp, Probe sequence
gtctgagccttcatttaacgaaaaa

SEQ ID NO: 153249 - DNA, 25 bp, Probe sequence
gtcgccattattttaccgaagaaga

SEQ ID NO: 153250 - DNA, 25 bp, Probe sequence
tggtctgagccttcatttaacgaaa

SEQ ID NO: 153251 - DNA, 25 bp, Probe sequence
tgaaacacgctgtcgccattatttt

SEQ ID NO: 153252 - DNA, 25 bp, Probe sequence
tactatccatgctataagtgccata

SEQ ID NO: 153253 - DNA, 25 bp, Probe sequence
tatggttcattaatcgatactgaaa

SEQ ID NO: 153254 - DNA, 25 bp, Probe sequence
ttaatcgatactgaaacacgctgtc

SEQ ID NO: 153255 - DNA, 25 bp, Probe sequence
ttaagcgttggtctgagccttcatt

SEQ ID NO: 153256 - DNA, 25 bp, Probe sequence
attggattgattacattactattga

SEQ ID NO: 153257 - DNA, 25 bp, Probe sequence
attgattacattactattgatacca

SEQ ID NO: 153258 - DNA, 25 bp, Probe sequence
attcttaatagatagtatggctgga

SEQ ID NO: 153259 - DNA, 25 bp, Probe sequence
attacattactattgataccaatga

SEQ ID NO: 153260 - DNA, 25 bp, Probe sequence
atcaaatgcaagcgagtataaacca

SEQ ID NO: 153261 - DNA, 25 bp, Probe sequence
atgcttctaaagtaattttgacgac

SEQ ID NO: 153262 - DNA, 25 bp, Probe sequence
atgcaagcgagtataaaccataaac

SEQ ID NO: 153263 - DNA, 25 bp, Probe sequence
atgatgaatcaaatgcaagcgagta

SEQ ID NO: 153264 - DNA, 25 bp, Probe sequence
agtaattttgacgactgtatctaaa

SEQ ID NO: 153265 - DNA, 25 bp, Probe sequence
agcgagtataaaccataaactacaa

SEQ ID NO: 153266 - DNA, 25 bp, Probe sequence
acattactattgataccaatgatga

SEQ ID NO: 153267 - DNA, 25 bp, Probe sequence
aaatgcaagcgagtataaaccataa

SEQ ID NO: 153268 - DNA, 25 bp, Probe sequence
aaagtaattttgacgactgtatcta

SEQ ID NO: 153269 - DNA, 25 bp, Probe sequence
aagcgagtataaaccataaactaca

SEQ ID NO: 153270 - DNA, 25 bp, Probe sequence
aagtaattttgacgactgtatctaa

SEQ ID NO: 153271 - DNA, 25 bp, Probe sequence
aatgatgaatcaaatgcaagcgagt

SEQ ID NO: 153272 - DNA, 25 bp, Probe sequence
aatagatagtatggctggatttttg

SEQ ID NO: 153273 - DNA, 25 bp, Probe sequence
caattgatgcttctaaagtaatttt

SEQ ID NO: 153274 - DNA, 25 bp, Probe sequence
gcttctaaagtaattttgacgactg

SEQ ID NO: 153275 - DNA, 25 bp, Probe sequence
gcaagcgagtataaaccataaacta

SEQ ID NO: 153276 - DNA, 25 bp, Probe sequence
gaatcaaatgcaagcgagtataaac

SEQ ID NO: 153277 - DNA, 25 bp, Probe sequence
gacgactgtatctaaaattaataaa

SEQ ID NO: 153278 - DNA, 25 bp, Probe sequence
gatgaatcaaatgcaagcgagtata

SEQ ID NO: 153279 - DNA, 25 bp, Probe sequence
gatgcttctaaagtaattttgacga

SEQ ID NO: 153280 - DNA, 25 bp, Probe sequence
gattgattacattactattgatacc

SEQ ID NO: 153281 - DNA, 25 bp, Probe sequence
gtaattttgacgactgtatctaaaa

SEQ ID NO: 153282 - DNA, 25 bp, Probe sequence
ggattgattacattactattgatac

SEQ ID NO: 153283 - DNA, 25 bp, Probe sequence
tgattacattactattgataccaat

SEQ ID NO: 153284 - DNA, 25 bp, Probe sequence
tagatagtatggctggatttttgct

SEQ ID NO: 153285 - DNA, 25 bp, Probe sequence
ttttgacgactgtatctaaaattaa

SEQ ID NO: 153286 - DNA, 25 bp, Probe sequence
ttactattgataccaatgatgaatc

SEQ ID NO: 153287 - DNA, 25 bp, Probe sequence
ttgacgactgtatctaaaattaata

SEQ ID NO: 153288 - DNA, 25 bp, Probe sequence
ttgatgcttctaaagtaattttgac

SEQ ID NO: 153289 - DNA, 25 bp, Probe sequence
ttggattgattacattactattgat

SEQ ID NO: 153290 - DNA, 25 bp, Probe sequence
attattgatgtctcacgtgttgctc

SEQ ID NO: 153291 - DNA, 25 bp, Probe sequence
atagccggtagcggcgctgcaatta

SEQ ID NO: 153292 - DNA, 25 bp, Probe sequence
atcgtgaagttcgcattattggtga

SEQ ID NO: 153293 - DNA, 25 bp, Probe sequence
atgcctatcaaaatgagattcctgt

SEQ ID NO: 153294 - DNA, 25 bp, Probe sequence
atgagattcctgttacatatttagg

SEQ ID NO: 153295 - DNA, 25 bp, Probe sequence
agaccgcctggtcattttgcaggta

SEQ ID NO: 153296 - DNA, 25 bp, Probe sequence
agattctaatttgcaaggtcaccgt

SEQ ID NO: 153297 - DNA, 25 bp, Probe sequence
agcagttgttaaatatgcctatcaa

SEQ ID NO: 153298 - DNA, 25 bp, Probe sequence
actggccttgaatttgcatgtggta

SEQ ID NO: 153299 - DNA, 25 bp, Probe sequence
aacacgctggttttatggtaaatgt

SEQ ID NO: 153300 - DNA, 25 bp, Probe sequence
gcaaggtcaccgtattggcggcgtt

SEQ ID NO: 153301 - DNA, 25 bp, Probe sequence
aatggctcaaatattattatccgtg

SEQ ID NO: 153302 - DNA, 25 bp, Probe sequence
cattatgtacaaaagaccgtcaaag

SEQ ID NO: 153303 - DNA, 25 bp, Probe sequence
gcgctttgcgtaaacgaacaaggct

SEQ ID NO: 153304 - DNA, 25 bp, Probe sequence
gcggcgctgcaattattgatgtctc

SEQ ID NO: 153305 - DNA, 25 bp, Probe sequence
gctgcatttactttagctcctggta

SEQ ID NO: 153306 - DNA, 25 bp, Probe sequence
gctttacaacaacttatcccaaatg

SEQ ID NO: 153307 - DNA, 25 bp, Probe sequence
gaatgctggcgcttatggtggcgaa

SEQ ID NO: 153308 - DNA, 25 bp, Probe sequence
gaacgtagagaatctaaacaacctt

SEQ ID NO: 153309 - DNA, 25 bp, Probe sequence
gaactgctacagattatgaaaacct

SEQ ID NO: 153310 - DNA, 25 bp, Probe sequence
gaaaaccttattcattatgtacaaa

SEQ ID NO: 153311 - DNA, 25 bp, Probe sequence
gacatctatcaagctttacaacaac

SEQ ID NO: 153312 - DNA, 25 bp, Probe sequence
gatgaacctttaaaacgatacactt

SEQ ID NO: 153313 - DNA, 25 bp, Probe sequence
gtttattatcactagatcatatcga

SEQ ID NO: 153314 - DNA, 25 bp, Probe sequence
gtcaccgtattggcggcgttgaagt

SEQ ID NO: 153315 - DNA, 25 bp, Probe sequence
gtgtatatgaatgctggcgcttatg

SEQ ID NO: 153316 - DNA, 25 bp, Probe sequence
ggcgcttatggtggcgaagttaaag

SEQ ID NO: 153317 - DNA, 25 bp, Probe sequence
tggtgaacatccaaaggaatcgtaa

SEQ ID NO: 153318 - DNA, 25 bp, Probe sequence
tgattacgcacttactggccttgaa

SEQ ID NO: 153319 - DNA, 25 bp, Probe sequence
ttattatccgtgaaggtggtattcg

SEQ ID NO: 153320 - DNA, 25 bp, Probe sequence
ttagttgtattagaagctgcattta

SEQ ID NO: 153321 - DNA, 25 bp, Probe sequence
ttgcatgtggtattccaggttcaat

SEQ ID NO: 153322 - DNA, 25 bp, Probe sequence
ttagctcctggtaaaatgactgaaa

SEQ ID NO: 153323 - DNA, 25 bp, Probe sequence
ttgtatagactatgcgctttgcgta

SEQ ID NO: 153324 - DNA, 25 bp, Probe sequence
atttgaatcttatcttgcacttgat

SEQ ID NO: 153325 - DNA, 25 bp, Probe sequence
atattcaacagagccaattttagat

SEQ ID NO: 153326 - DNA, 25 bp, Probe sequence
atatacaaaacatattggcggtacg

SEQ ID NO: 153327 - DNA, 25 bp, Probe sequence
atcattttaaatattcaacagagcc

SEQ ID NO: 153328 - DNA, 25 bp, Probe sequence
atgaatacccaaacatttgaatctt

SEQ ID NO: 153329 - DNA, 25 bp, Probe sequence
aggtgcgtctacatatcattcaaat

SEQ ID NO: 153330 - DNA, 25 bp, Probe sequence
agtgatttaactaattgttttcaat

SEQ ID NO: 153331 - DNA, 25 bp, Probe sequence
agacaatatgagatgcaaaagcaac

SEQ ID NO: 153332 - DNA, 25 bp, Probe sequence
acatccttagatgaaaaacgcttaa

SEQ ID NO: 153333 - DNA, 25 bp, Probe sequence
acatttgaatcttatcttgcacttg

SEQ ID NO: 153334 - DNA, 25 bp, Probe sequence
acaggtgcgtctacatatcattcaa

SEQ ID NO: 153335 - DNA, 25 bp, Probe sequence
acaacaggtgcgtctacatatcatt

SEQ ID NO: 153336 - DNA, 25 bp, Probe sequence
aaatttgcatgatattacatcctta

SEQ ID NO: 153337 - DNA, 25 bp, Probe sequence
aaaacaacaggtgcgtctacatatc

SEQ ID NO: 153338 - DNA, 25 bp, Probe sequence
aacctcttagacagcccagtaaaat

SEQ ID NO: 153339 - DNA, 25 bp, Probe sequence
aatcattattattcaacctcttaga

SEQ ID NO: 153340 - DNA, 25 bp, Probe sequence
caaatattgcaacatagcttaacaa

SEQ ID NO: 153341 - DNA, 25 bp, Probe sequence
cagagccaattttagatattttagt

SEQ ID NO: 153342 - DNA, 25 bp, Probe sequence
gcgaagtttaacaattttcatgaac

SEQ ID NO: 153343 - DNA, 25 bp, Probe sequence
gcttaaattatgtagggttttatcg

SEQ ID NO: 153344 - DNA, 25 bp, Probe sequence
gcaacaatactttgaaaaactatgt

SEQ ID NO: 153345 - DNA, 25 bp, Probe sequence
gcaacatagcttaacaattagacaa

SEQ ID NO: 153346 - DNA, 25 bp, Probe sequence
gaactaaaacaacaggtgcgtctac

SEQ ID NO: 153347 - DNA, 25 bp, Probe sequence
gacagcccagtaaaatatacaaaac

SEQ ID NO: 153348 - DNA, 25 bp, Probe sequence
gatggcgaagtttaacaattttcat

SEQ ID NO: 153349 - DNA, 25 bp, Probe sequence
gttcaaccattcattaatagtgatt

SEQ ID NO: 153350 - DNA, 25 bp, Probe sequence
gtattcaaatgttcaaccattcatt

SEQ ID NO: 153351 - DNA, 25 bp, Probe sequence
gtgcgtctacatatcattcaaatga

SEQ ID NO: 153352 - DNA, 25 bp, Probe sequence
tgcatgatattacatccttagatga

SEQ ID NO: 153353 - DNA, 25 bp, Probe sequence
tttagatattttagtaggtgtagaa

SEQ ID NO: 153354 - DNA, 25 bp, Probe sequence
ttattcaacctcttagacagcccag

SEQ ID NO: 153355 - DNA, 25 bp, Probe sequence
ttattattcaacctcttagacagcc

SEQ ID NO: 153356 - DNA, 25 bp, Probe sequence
ttcaacctcttagacagcccagtaa

SEQ ID NO: 153357 - DNA, 25 bp, Probe sequence
ttgttttcaatcacaatacactgaa

SEQ ID NO: 153358 - DNA, 25 bp, Probe sequence
atttgatgttgaccgcttcaatgct

SEQ ID NO: 153359 - DNA, 25 bp, Probe sequence
atggctacttatttgctacattaga

SEQ ID NO: 153360 - DNA, 25 bp, Probe sequence
agatatacgacaattgatacgcaat

SEQ ID NO: 153361 - DNA, 25 bp, Probe sequence
acgtgacgatatcaatgcccatttt

SEQ ID NO: 153362 - DNA, 25 bp, Probe sequence
acttccacggcccatatgaatatgc

SEQ ID NO: 153363 - DNA, 25 bp, Probe sequence
acaattcgatagtttgctacctgat

SEQ ID NO: 153364 - DNA, 25 bp, Probe sequence
aaatctacaacaacaccttcaactg

SEQ ID NO: 153365 - DNA, 25 bp, Probe sequence
aacatggtaccattcgcattggatt

SEQ ID NO: 153366 - DNA, 25 bp, Probe sequence
aacagtttagttggtcatacattaa

SEQ ID NO: 153367 - DNA, 25 bp, Probe sequence
aagctttaacgctgctgaagcggtt

SEQ ID NO: 153368 - DNA, 25 bp, Probe sequence
aatgttcatcctggttcagctaaaa

SEQ ID NO: 153369 - DNA, 25 bp, Probe sequence
aatactaaacgtgtcttagatccta

SEQ ID NO: 153370 - DNA, 25 bp, Probe sequence
caatgcttcaaatgttaaaccgcaa

SEQ ID NO: 153371 - DNA, 25 bp, Probe sequence
gctacctgatagtgaagttccggag

SEQ ID NO: 153372 - DNA, 25 bp, Probe sequence
gctgattttgcttatactatggatg

SEQ ID NO: 153373 - DNA, 25 bp, Probe sequence
gcaactttgcaatacattattcgtg

SEQ ID NO: 153374 - DNA, 25 bp, Probe sequence
gaagaaatcggtcgtggtccacata

SEQ ID NO: 153375 - DNA, 25 bp, Probe sequence
gaagcggttattacatgccacggtg

SEQ ID NO: 153376 - DNA, 25 bp, Probe sequence
gaccgcttcaatgctgattttgctt

SEQ ID NO: 153377 - DNA, 25 bp, Probe sequence
gatggtacatcgttactaggtgcag

SEQ ID NO: 153378 - DNA, 25 bp, Probe sequence
gatacgcaatctgatccaaaatcta

SEQ ID NO: 153379 - DNA, 25 bp, Probe sequence
gatattccagcaaacactgaaccta

SEQ ID NO: 153380 - DNA, 25 bp, Probe sequence
ggtgcagacgataaagcgggtattg

SEQ ID NO: 153381 - DNA, 25 bp, Probe sequence
ggtcgtggtccacataaatttgatg

SEQ ID NO: 153382 - DNA, 25 bp, Probe sequence
ggtacagatggttcacaattgtcat

SEQ ID NO: 153383 - DNA, 25 bp, Probe sequence
tacatcacctgatttcaatgcttca

SEQ ID NO: 153384 - DNA, 25 bp, Probe sequence
taccaactccaaacatctttacagg

SEQ ID NO: 153385 - DNA, 25 bp, Probe sequence
taggattgccaactgatttagatga

SEQ ID NO: 153386 - DNA, 25 bp, Probe sequence
tattaccattgcctcatattattga

SEQ ID NO: 153387 - DNA, 25 bp, Probe sequence
ttagatcctaaagtatttccagaac

SEQ ID NO: 153388 - DNA, 25 bp, Probe sequence
ttatggaagctatttgttatttaca

SEQ ID NO: 153389 - DNA, 25 bp, Probe sequence
ttacaggttgcggtaacttccacgg

SEQ ID NO: 153390 - DNA, 25 bp, Probe sequence
ttcgcattggatttacaccagacga

SEQ ID NO: 153391 - DNA, 25 bp, Probe sequence
ttgatatacctaaacgtgtctttgc

SEQ ID NO: 153392 - DNA, 25 bp, Probe sequence
atttatttcattttacaatcagctt

SEQ ID NO: 153393 - DNA, 25 bp, Probe sequence
atacaagtgctgtaaatacattttt

SEQ ID NO: 153394 - DNA, 25 bp, Probe sequence
atcaagcgactcgttttttagtatc

SEQ ID NO: 153395 - DNA, 25 bp, Probe sequence
actgatttcaggtgcgattgctttc

SEQ ID NO: 153396 - DNA, 25 bp, Probe sequence
acagtacttttctctatcattttca

SEQ ID NO: 153397 - DNA, 25 bp, Probe sequence
acacacgtatcaaacaactgtatgg

SEQ ID NO: 153398 - DNA, 25 bp, Probe sequence
acaactgtatggtaaaatcaaaggt

SEQ ID NO: 153399 - DNA, 25 bp, Probe sequence
aacgaccggtaattatattcatagt

SEQ ID NO: 153400 - DNA, 25 bp, Probe sequence
aagttggcgcttcatttttgggaag

SEQ ID NO: 153401 - DNA, 25 bp, Probe sequence
aatcagctttatatcaacagtactt

SEQ ID NO: 153402 - DNA, 25 bp, Probe sequence
aatacatttttagaagttacactga

SEQ ID NO: 153403 - DNA, 25 bp, Probe sequence
cagcttatcaagcgactcgtttttt

SEQ ID NO: 153404 - DNA, 25 bp, Probe sequence
ctatcattttcaatgcacccaaacg

SEQ ID NO: 153405 - DNA, 25 bp, Probe sequence
ccattagtacctggtggtgcagctt

SEQ ID NO: 153406 - DNA, 25 bp, Probe sequence
gcatggacgatttaccaattaacgg

SEQ ID NO: 153407 - DNA, 25 bp, Probe sequence
gaagttacactgatttcaggtgcga

SEQ ID NO: 153408 - DNA, 25 bp, Probe sequence
gaagcttaattttaggcttaatgag

SEQ ID NO: 153409 - DNA, 25 bp, Probe sequence
gaaaagttggcgcttcatttttggg

SEQ ID NO: 153410 - DNA, 25 bp, Probe sequence
gagtttggaaaagttggcgcttcat

SEQ ID NO: 153411 - DNA, 25 bp, Probe sequence
gtacctggtggtgcagcttatcaag

SEQ ID NO: 153412 - DNA, 25 bp, Probe sequence
gtacttttctctatcattttcaatg

SEQ ID NO: 153413 - DNA, 25 bp, Probe sequence
ggtggtgcagcttatcaagcgactc

SEQ ID NO: 153414 - DNA, 25 bp, Probe sequence
ggtgcagcttatcaagcgactcgtt

SEQ ID NO: 153415 - DNA, 25 bp, Probe sequence
ggtgcgattgctttcggtatattag

SEQ ID NO: 153416 - DNA, 25 bp, Probe sequence
ggtgccattgcatggacgatttacc

SEQ ID NO: 153417 - DNA, 25 bp, Probe sequence
ggcattataccattagtacctggtg

SEQ ID NO: 153418 - DNA, 25 bp, Probe sequence
ggcgcttcatttttgggaagcttaa

SEQ ID NO: 153419 - DNA, 25 bp, Probe sequence
tcattttacaatcagctttatatca

SEQ ID NO: 153420 - DNA, 25 bp, Probe sequence
tcaacagtacttttctctatcattt

SEQ ID NO: 153421 - DNA, 25 bp, Probe sequence
tagtttctgaaattctatattacct

SEQ ID NO: 153422 - DNA, 25 bp, Probe sequence
taggcttaatgagtcatactatgag

SEQ ID NO: 153423 - DNA, 25 bp, Probe sequence
ttcaggtgcgattgctttcggtata

SEQ ID NO: 153424 - DNA, 25 bp, Probe sequence
ttctctatcattttcaatgcaccca

SEQ ID NO: 153425 - DNA, 25 bp, Probe sequence
ttgctttcggtatattagtttctga

SEQ ID NO: 153426 - DNA, 25 bp, Probe sequence
atattaattaccaatgccattcgag

SEQ ID NO: 153427 - DNA, 25 bp, Probe sequence
atcgcacatagttatggtcttcata

SEQ ID NO: 153428 - DNA, 25 bp, Probe sequence
atgccacttgtccctggtatattaa

SEQ ID NO: 153429 - DNA, 25 bp, Probe sequence
agcatgcatcattacaatattcttt

SEQ ID NO: 153430 - DNA, 25 bp, Probe sequence
aacattcagctttgtgcaacgctat

SEQ ID NO: 153431 - DNA, 25 bp, Probe sequence
aagaactcacaattgatgaagctaa

SEQ ID NO: 153432 - DNA, 25 bp, Probe sequence
aagagcgtacaacagatttagagaa

SEQ ID NO: 153433 - DNA, 25 bp, Probe sequence
aatcggtgctggtgtcgcaatcgtt

SEQ ID NO: 153434 - DNA, 25 bp, Probe sequence
aatttttctcagagtttgttgcagc

SEQ ID NO: 153435 - DNA, 25 bp, Probe sequence
aatttattcatttacagcatgcatc

SEQ ID NO: 153436 - DNA, 25 bp, Probe sequence
cagattgttggattgcagtcattgc

SEQ ID NO: 153437 - DNA, 25 bp, Probe sequence
caggtgctgaaacatatcgagttga

SEQ ID NO: 153438 - DNA, 25 bp, Probe sequence
catatagttttgtcagttcaactgc

SEQ ID NO: 153439 - DNA, 25 bp, Probe sequence
gccattcgagatttattagcgggtg

SEQ ID NO: 153440 - DNA, 25 bp, Probe sequence
gctgtggtcatatccattgcagcca

SEQ ID NO: 153441 - DNA, 25 bp, Probe sequence
gcattcgcaatcggtgctggtgtcg

SEQ ID NO: 153442 - DNA, 25 bp, Probe sequence
gcagctgccattgcatgtggcttct

SEQ ID NO: 153443 - DNA, 25 bp, Probe sequence
gaattttacttgaatcaggtgctga

SEQ ID NO: 153444 - DNA, 25 bp, Probe sequence
gaatagtctttcacgtaaaatatca

SEQ ID NO: 153445 - DNA, 25 bp, Probe sequence
gaagctgcattaacagcattcgcaa

SEQ ID NO: 153446 - DNA, 25 bp, Probe sequence
gatgttgtattaattgcaggtagaa

SEQ ID NO: 153447 - DNA, 25 bp, Probe sequence
gatccgcatttttaacattcagctt

SEQ ID NO: 153448 - DNA, 25 bp, Probe sequence
gttcaactgcaattattttttcatt

SEQ ID NO: 153449 - DNA, 25 bp, Probe sequence
gtttggtggtgtcgcatcagattgt

SEQ ID NO: 153450 - DNA, 25 bp, Probe sequence
gtgaattacttgcaggtatgtctcg

SEQ ID NO: 153451 - DNA, 25 bp, Probe sequence
ggtgtcgcaatcgttttattaatca

SEQ ID NO: 153452 - DNA, 25 bp, Probe sequence
tcgctttaacgaatagtctttcacg

SEQ ID NO: 153453 - DNA, 25 bp, Probe sequence
tcagctttgtgcaacgctatataca

SEQ ID NO: 153454 - DNA, 25 bp, Probe sequence
tcaagatatcattactatagccagt

SEQ ID NO: 153455 - DNA, 25 bp, Probe sequence
taacgaatttctttgcagctgccat

SEQ ID NO: 153456 - DNA, 25 bp, Probe sequence
tacaatgaaccgtatcgcacatagt

SEQ ID NO: 153457 - DNA, 25 bp, Probe sequence
tatccattgcagccacatttactaa

SEQ ID NO: 153458 - DNA, 25 bp, Probe sequence
tatagccagtgtcatgccacttgtc

SEQ ID NO: 153459 - DNA, 25 bp, Probe sequence
ttagcgggtgaattacttgcaggta

SEQ ID NO: 153460 - DNA, 25 bp, Probe sequence
atatctgttatagtcgctggaatct

SEQ ID NO: 153461 - DNA, 25 bp, Probe sequence
atatgattacttaacaggcttaggt

SEQ ID NO: 153462 - DNA, 25 bp, Probe sequence
atcatcattccatttaccaaacaaa

SEQ ID NO: 153463 - DNA, 25 bp, Probe sequence
acggtgttacgttgattgttattgc

SEQ ID NO: 153464 - DNA, 25 bp, Probe sequence
acactatcggaagttatcattttaa

SEQ ID NO: 153465 - DNA, 25 bp, Probe sequence
acaactcgattatgtacggtgttac

SEQ ID NO: 153466 - DNA, 25 bp, Probe sequence
aaaactatgtgccgaatcaatttaa

SEQ ID NO: 153467 - DNA, 25 bp, Probe sequence
aacatttgtcgatatttggcatttc

SEQ ID NO: 153468 - DNA, 25 bp, Probe sequence
aagagttctcagttgtcattcacaa

SEQ ID NO: 153469 - DNA, 25 bp, Probe sequence
aagtgtttaaagatgcagacgatat

SEQ ID NO: 153470 - DNA, 25 bp, Probe sequence
aatctatttattccatcgcttacag

SEQ ID NO: 153471 - DNA, 25 bp, Probe sequence
aattgtcagtgtctatcggtgttgg

SEQ ID NO: 153472 - DNA, 25 bp, Probe sequence
caaatgtctcaattacttaaaaact

SEQ ID NO: 153473 - DNA, 25 bp, Probe sequence
cacttaacattcgttcctttattgt

SEQ ID NO: 153474 - DNA, 25 bp, Probe sequence
ctaccctatcccttatcgtgaagat

SEQ ID NO: 153475 - DNA, 25 bp, Probe sequence
cgatatttggcatttcttctcactc

SEQ ID NO: 153476 - DNA, 25 bp, Probe sequence
gctgaaaatattcgttcgggtgttg

SEQ ID NO: 153477 - DNA, 25 bp, Probe sequence
gcagacgatatggtgcatgtagcca

SEQ ID NO: 153478 - DNA, 25 bp, Probe sequence
gaaatggtggcgaagagttctcagt

SEQ ID NO: 153479 - DNA, 25 bp, Probe sequence
gacaatcgtatcattattattatct

SEQ ID NO: 153480 - DNA, 25 bp, Probe sequence
gatgtcaatgatacctactcacaca

SEQ ID NO: 153481 - DNA, 25 bp, Probe sequence
gatgacgatccaaaatcacagcgta

SEQ ID NO: 153482 - DNA, 25 bp, Probe sequence
gatacctactcacacaaatcaggtg

SEQ ID NO: 153483 - DNA, 25 bp, Probe sequence
gttatcattttaataccaatttcat

SEQ ID NO: 153484 - DNA, 25 bp, Probe sequence
gtaacaagtgctattggaccatttt

SEQ ID NO: 153485 - DNA, 25 bp, Probe sequence
gggtgttgaaaaatcatcattccat

SEQ ID NO: 153486 - DNA, 25 bp, Probe sequence
ggtctatacattatctgccacagta

SEQ ID NO: 153487 - DNA, 25 bp, Probe sequence
taattcacttaacattcgttccttt

SEQ ID NO: 153488 - DNA, 25 bp, Probe sequence
tatctgccacagtaattgtagcaat

SEQ ID NO: 153489 - DNA, 25 bp, Probe sequence
tttcttctcactcgtaaatcgttat

SEQ ID NO: 153490 - DNA, 25 bp, Probe sequence
tttagcttcagcgataacatttgtc

SEQ ID NO: 153491 - DNA, 25 bp, Probe sequence
ttattccatcgcttacagtattcag

SEQ ID NO: 153492 - DNA, 25 bp, Probe sequence
ttattattatctgtctaccctatcc

SEQ ID NO: 153493 - DNA, 25 bp, Probe sequence
ttaattatcactttagcttcagcga

SEQ ID NO: 153494 - DNA, 25 bp, Probe sequence
atatactattggacctgaaatgaat

SEQ ID NO: 153495 - DNA, 25 bp, Probe sequence
atcgatgtcgttaaaagtgactatg

SEQ ID NO: 153496 - DNA, 25 bp, Probe sequence
agtaacactgaattatgatcaaact

SEQ ID NO: 153497 - DNA, 25 bp, Probe sequence
agcagttacctttcgatataccaac

SEQ ID NO: 153498 - DNA, 25 bp, Probe sequence
aaagtgactatgaagcgtttattaa

SEQ ID NO: 153499 - DNA, 25 bp, Probe sequence
aaagctcgatgttcataatgcgtgt

SEQ ID NO: 153500 - DNA, 25 bp, Probe sequence
aaagaacataaagatgccactcata

SEQ ID NO: 153501 - DNA, 25 bp, Probe sequence
aactgccggtgtcccaatgttagac

SEQ ID NO: 153502 - DNA, 25 bp, Probe sequence
aagatgccactcataattgttctgc

SEQ ID NO: 153503 - DNA, 25 bp, Probe sequence
aatgcgtgtgtcgtagtaacaagat

SEQ ID NO: 153504 - DNA, 25 bp, Probe sequence
cattgctcatatcaaacctgttcaa

SEQ ID NO: 153505 - DNA, 25 bp, Probe sequence
gccggtgtcccaatgttagacatat

SEQ ID NO: 153506 - DNA, 25 bp, Probe sequence
gccactcataattgttctgcatata

SEQ ID NO: 153507 - DNA, 25 bp, Probe sequence
gcggtttaattcgcgcctatagcgg

SEQ ID NO: 153508 - DNA, 25 bp, Probe sequence
gctcatatcaaacctgttcaaaatg

SEQ ID NO: 153509 - DNA, 25 bp, Probe sequence
gctaaagcatttattgctgcaataa

SEQ ID NO: 153510 - DNA, 25 bp, Probe sequence
gaaccgacaggaactgccggtgtcc

SEQ ID NO: 153511 - DNA, 25 bp, Probe sequence
gaagcagtaccatgtatagtaacac

SEQ ID NO: 153512 - DNA, 25 bp, Probe sequence
gaaaccaaacttacactgataaggt

SEQ ID NO: 153513 - DNA, 25 bp, Probe sequence
gaaactccaaagcagttacctttcg

SEQ ID NO: 153514 - DNA, 25 bp, Probe sequence
gacacaaaatatcattactgttaaa

SEQ ID NO: 153515 - DNA, 25 bp, Probe sequence
gatgttcataatgcgtgtgtcgtag

SEQ ID NO: 153516 - DNA, 25 bp, Probe sequence
gattcattgctcatatcaaacctgt

SEQ ID NO: 153517 - DNA, 25 bp, Probe sequence
gttctgcatatactattggacctga

SEQ ID NO: 153518 - DNA, 25 bp, Probe sequence
gttacctttcgatataccaactgaa

SEQ ID NO: 153519 - DNA, 25 bp, Probe sequence
gtaaatcaagattcattgctcatat

SEQ ID NO: 153520 - DNA, 25 bp, Probe sequence
gtaacaagatattttggtggtatta

SEQ ID NO: 153521 - DNA, 25 bp, Probe sequence
gtgtcgaactacgagaagcagtacc

SEQ ID NO: 153522 - DNA, 25 bp, Probe sequence
ggtggtggcggtttaattcgcgcct

SEQ ID NO: 153523 - DNA, 25 bp, Probe sequence
ggtggtattaaattaggtggtggcg

SEQ ID NO: 153524 - DNA, 25 bp, Probe sequence
ggtaagctactatatcgatgtcgtt

SEQ ID NO: 153525 - DNA, 25 bp, Probe sequence
tcaactcattttatgttaagaaacc

SEQ ID NO: 153526 - DNA, 25 bp, Probe sequence
taattcgcgcctatagcggtgctgt

SEQ ID NO: 153527 - DNA, 25 bp, Probe sequence
ttcgatttgactgaagaaactccaa

SEQ ID NO: 153528 - DNA, 25 bp, Probe sequence
aaataacgagtcagctagtggtccg

SEQ ID NO: 153529 - DNA, 25 bp, Probe sequence
atcacgatattaacgcgacacgacc

SEQ ID NO: 153530 - DNA, 25 bp, Probe sequence
agttcctcaaaatatcgatgtggtc

SEQ ID NO: 153531 - DNA, 25 bp, Probe sequence
agaattcaatctacgcaagctttat

SEQ ID NO: 153532 - DNA, 25 bp, Probe sequence
accaagtcttgcaatgcgtctcata

SEQ ID NO: 153533 - DNA, 25 bp, Probe sequence
aaatcagattcacatatcacgatat

SEQ ID NO: 153534 - DNA, 25 bp, Probe sequence
aacgcgacacgaccaaatttcaaat

SEQ ID NO: 153535 - DNA, 25 bp, Probe sequence
caatacttaattactggtgggactg

SEQ ID NO: 153536 - DNA, 25 bp, Probe sequence
caaaatttatttggctacactttag

SEQ ID NO: 153537 - DNA, 25 bp, Probe sequence
gcaatgcgtctcatacttggtcaaa

SEQ ID NO: 153538 - DNA, 25 bp, Probe sequence
gaataaacgatggacaccggaatat

SEQ ID NO: 153539 - DNA, 25 bp, Probe sequence
gaaggcggtgcgttacaaacaatga

SEQ ID NO: 153540 - DNA, 25 bp, Probe sequence
gaacgtttcgcacaacaatttgaac

SEQ ID NO: 153541 - DNA, 25 bp, Probe sequence
gaaaatttcatatgtcaactgggct

SEQ ID NO: 153542 - DNA, 25 bp, Probe sequence
gacaccggaatataaacaaacgcta

SEQ ID NO: 153543 - DNA, 25 bp, Probe sequence
gagtcagctagtggtccgtttaatt

SEQ ID NO: 153544 - DNA, 25 bp, Probe sequence
gatttaattcaagctattttatttt

SEQ ID NO: 153545 - DNA, 25 bp, Probe sequence
gtcaactgggctaaatctgggtggg

SEQ ID NO: 153546 - DNA, 25 bp, Probe sequence
gtctcatacttggtcaaatgtcaac

SEQ ID NO: 153547 - DNA, 25 bp, Probe sequence
gtggtcatcaacttagcaggtgcta

SEQ ID NO: 153548 - DNA, 25 bp, Probe sequence
ggtgggactggtatggttggatctc

SEQ ID NO: 153549 - DNA, 25 bp, Probe sequence
ggtatggttggatctcaattagtta

SEQ ID NO: 153550 - DNA, 25 bp, Probe sequence
ggttctggtcaacaatggtattcat

SEQ ID NO: 153551 - DNA, 25 bp, Probe sequence
ggctacactttagcaagagctatgc

SEQ ID NO: 153552 - DNA, 25 bp, Probe sequence
tggtccgtttaatttaactgcacct

SEQ ID NO: 153553 - DNA, 25 bp, Probe sequence
tggtattcatggattcatatcaatg

SEQ ID NO: 153554 - DNA, 25 bp, Probe sequence
tggttactatcctcctgatttattt

SEQ ID NO: 153555 - DNA, 25 bp, Probe sequence
tgggtgggaacacaaagttcctcaa

SEQ ID NO: 153556 - DNA, 25 bp, Probe sequence
tgtgtatcaatgggaacgtttcgca

SEQ ID NO: 153557 - DNA, 25 bp, Probe sequence
tcctgatttatttatgagttacaca

SEQ ID NO: 153558 - DNA, 25 bp, Probe sequence
taaaattcaagcattgggattccaa

SEQ ID NO: 153559 - DNA, 25 bp, Probe sequence
taaatcacgtaataaagcacctaaa

SEQ ID NO: 153560 - DNA, 25 bp, Probe sequence
tttatcgaatgaaggcggtgcgtta

SEQ ID NO: 153561 - DNA, 25 bp, Probe sequence
ttaatttaactgcacctatacctga

SEQ ID NO: 153562 - DNA, 25 bp, Probe sequence
attgctttacttgcattaacattaa

SEQ ID NO: 153563 - DNA, 25 bp, Probe sequence
attcctatattattggttttattca

SEQ ID NO: 153564 - DNA, 25 bp, Probe sequence
attagttctttatatgggtggcggc

SEQ ID NO: 153565 - DNA, 25 bp, Probe sequence
attagttatcattggccttttcatt

SEQ ID NO: 153566 - DNA, 25 bp, Probe sequence
attatttatccagctattttattat

SEQ ID NO: 153567 - DNA, 25 bp, Probe sequence
atatcattattgctttacttgcatt

SEQ ID NO: 153568 - DNA, 25 bp, Probe sequence
atagttatcatgttactcattgggg

SEQ ID NO: 153569 - DNA, 25 bp, Probe sequence
atcagtattttaatcgtttttgcta

SEQ ID NO: 153570 - DNA, 25 bp, Probe sequence
atcattggccttttcattggtatta

SEQ ID NO: 153571 - DNA, 25 bp, Probe sequence
aggtcttacttctagccaagtcttt

SEQ ID NO: 153572 - DNA, 25 bp, Probe sequence
agtaggtgcaggtggtgccttcatt

SEQ ID NO: 153573 - DNA, 25 bp, Probe sequence
agtaggcgtaggtggtgctatcatt

SEQ ID NO: 153574 - DNA, 25 bp, Probe sequence
agcccctgcatatagcgcatatatc

SEQ ID NO: 153575 - DNA, 25 bp, Probe sequence
ctcattggggtattcggtgggttca

SEQ ID NO: 153576 - DNA, 25 bp, Probe sequence
cgcatatatcgcatcaggtcttact

SEQ ID NO: 153577 - DNA, 25 bp, Probe sequence
cctttatatgacgccttattcctta

SEQ ID NO: 153578 - DNA, 25 bp, Probe sequence
gcttttatatcttcaattggtgctt

SEQ ID NO: 153579 - DNA, 25 bp, Probe sequence
gacgccttattccttataataggga

SEQ ID NO: 153580 - DNA, 25 bp, Probe sequence
gttcatatctggtctagtaggcgta

SEQ ID NO: 153581 - DNA, 25 bp, Probe sequence
gggagtattatatttgctccaatag

SEQ ID NO: 153582 - DNA, 25 bp, Probe sequence
gggtggcggcatgattatagggagt

SEQ ID NO: 153583 - DNA, 25 bp, Probe sequence
ggtgcttttgtcatcaaacttattc

SEQ ID NO: 153584 - DNA, 25 bp, Probe sequence
ggtgctatcattatttatccagcta

SEQ ID NO: 153585 - DNA, 25 bp, Probe sequence
ggtgcatttctagcaaatttatttg

SEQ ID NO: 153586 - DNA, 25 bp, Probe sequence
ggtgccttcattattattcctatat

SEQ ID NO: 153587 - DNA, 25 bp, Probe sequence
ggttatatccctttatatgacgcct

SEQ ID NO: 153588 - DNA, 25 bp, Probe sequence
ggagtatgttaggtgcatttctagc

SEQ ID NO: 153589 - DNA, 25 bp, Probe sequence
tcgcatcaggtcttacttctagcca

SEQ ID NO: 153590 - DNA, 25 bp, Probe sequence
tcggtgggttcatatctggtctagt

SEQ ID NO: 153591 - DNA, 25 bp, Probe sequence
taagtggctcattaaaagctcgaaa

SEQ ID NO: 153592 - DNA, 25 bp, Probe sequence
taccaatgaatactgtagtcgctaa

SEQ ID NO: 153593 - DNA, 25 bp, Probe sequence
tagccaagtctttttcagtacatta

SEQ ID NO: 153594 - DNA, 25 bp, Probe sequence
tagttccgaaaagtcttcatttaat

SEQ ID NO: 153595 - DNA, 25 bp, Probe sequence
ttttcagtacattaagtggctcatt

SEQ ID NO: 153596 - DNA, 25 bp, Probe sequence
attcttacttgttccaattggctac

SEQ ID NO: 153597 - DNA, 25 bp, Probe sequence
attacaagaagaactagcgcctaac

SEQ ID NO: 153598 - DNA, 25 bp, Probe sequence
atatgctagattcttacttgttcca

SEQ ID NO: 153599 - DNA, 25 bp, Probe sequence
atgctagattcttacttgttccaat

SEQ ID NO: 153600 - DNA, 25 bp, Probe sequence
agattcttacttgttccaattggct

SEQ ID NO: 153601 - DNA, 25 bp, Probe sequence
acttgttccaattggctacaaataa

SEQ ID NO: 153602 - DNA, 25 bp, Probe sequence
acaagaagaactagcgcctaactta

SEQ ID NO: 153603 - DNA, 25 bp, Probe sequence
aatatgctagattcttacttgttcc

SEQ ID NO: 153604 - DNA, 25 bp, Probe sequence
aatagtgagttatatgttgagttga

SEQ ID NO: 153605 - DNA, 25 bp, Probe sequence
caagaagaactagcgcctaacttaa

SEQ ID NO: 153606 - DNA, 25 bp, Probe sequence
cttacttgttccaattggctacaaa

SEQ ID NO: 153607 - DNA, 25 bp, Probe sequence
ctagattcttacttgttccaattgg

SEQ ID NO: 153608 - DNA, 25 bp, Probe sequence
gcgcctaacttaaaaactagagatt

SEQ ID NO: 153609 - DNA, 25 bp, Probe sequence
gctagattcttacttgttccaattg

SEQ ID NO: 153610 - DNA, 25 bp, Probe sequence
gaagtaccagaaatacctattagac

SEQ ID NO: 153611 - DNA, 25 bp, Probe sequence
gaaatacctattagacaagttaatg

SEQ ID NO: 153612 - DNA, 25 bp, Probe sequence
gaaattaatatgctagattcttact

SEQ ID NO: 153613 - DNA, 25 bp, Probe sequence
gagaagtaccagaaatacctattag

SEQ ID NO: 153614 - DNA, 25 bp, Probe sequence
gagatttagtgttattaagatatat

SEQ ID NO: 153615 - DNA, 25 bp, Probe sequence
gagttgataaatagcatcctaaaat

SEQ ID NO: 153616 - DNA, 25 bp, Probe sequence
gattcttacttgttccaattggcta

SEQ ID NO: 153617 - DNA, 25 bp, Probe sequence
gttgagttgataaatagcatcctaa

SEQ ID NO: 153618 - DNA, 25 bp, Probe sequence
gttccaattggctacaaataaagag

SEQ ID NO: 153619 - DNA, 25 bp, Probe sequence
gtaccagaaatacctattagacaag

SEQ ID NO: 153620 - DNA, 25 bp, Probe sequence
gtgttattaagatatatgtattcat

SEQ ID NO: 153621 - DNA, 25 bp, Probe sequence
ggaaaacattagagaagtaccagaa

SEQ ID NO: 153622 - DNA, 25 bp, Probe sequence
tgctagattcttacttgttccaatt

SEQ ID NO: 153623 - DNA, 25 bp, Probe sequence
tcttacttgttccaattggctacaa

SEQ ID NO: 153624 - DNA, 25 bp, Probe sequence
tacttgttccaattggctacaaata

SEQ ID NO: 153625 - DNA, 25 bp, Probe sequence
tagcgcctaacttaaaaactagaga

SEQ ID NO: 153626 - DNA, 25 bp, Probe sequence
tagattcttacttgttccaattggc

SEQ ID NO: 153627 - DNA, 25 bp, Probe sequence
tatgctagattcttacttgttccaa

SEQ ID NO: 153628 - DNA, 25 bp, Probe sequence
ttacaagaagaactagcgcctaact

SEQ ID NO: 153629 - DNA, 25 bp, Probe sequence
ttcttacttgttccaattggctaca

SEQ ID NO: 153630 - DNA, 25 bp, Probe sequence
acaaaaggcccagaacttattcgca

SEQ ID NO: 153631 - DNA, 25 bp, Probe sequence
attcgcacgttggagacaacttcag

SEQ ID NO: 153632 - DNA, 25 bp, Probe sequence
atggcagaacaatcaaaacagaaac

SEQ ID NO: 153633 - DNA, 25 bp, Probe sequence
agaacttattcgcacgttggagaca

SEQ ID NO: 153634 - DNA, 25 bp, Probe sequence
acttattcgcacgttggagacaact

SEQ ID NO: 153635 - DNA, 25 bp, Probe sequence
aaaaggcccagaacttattcgcacg

SEQ ID NO: 153636 - DNA, 25 bp, Probe sequence
aaaggcccagaacttattcgcacgt

SEQ ID NO: 153637 - DNA, 25 bp, Probe sequence
aacagaaacaagctaatgaacaaca

SEQ ID NO: 153638 - DNA, 25 bp, Probe sequence
aacagtgaatcctcgaacgatacaa

SEQ ID NO: 153639 - DNA, 25 bp, Probe sequence
aacttattcgcacgttggagacaac

SEQ ID NO: 153640 - DNA, 25 bp, Probe sequence
aaggcccagaacttattcgcacgtt

SEQ ID NO: 153641 - DNA, 25 bp, Probe sequence
aatgaacaacaaaaggcccagaact

SEQ ID NO: 153642 - DNA, 25 bp, Probe sequence
caaaaggcccagaacttattcgcac

SEQ ID NO: 153643 - DNA, 25 bp, Probe sequence
cagaacttattcgcacgttggagac

SEQ ID NO: 153644 - DNA, 25 bp, Probe sequence
cagtgaatcctcgaacgatacaaac

SEQ ID NO: 153645 - DNA, 25 bp, Probe sequence
cgcacgttggagacaacttcagaat

SEQ ID NO: 153646 - DNA, 25 bp, Probe sequence
cgaacagtgaatcctcgaacgatac

SEQ ID NO: 153647 - DNA, 25 bp, Probe sequence
cccagaacttattcgcacgttggag

SEQ ID NO: 153648 - DNA, 25 bp, Probe sequence
ccagaacttattcgcacgttggaga

SEQ ID NO: 153649 - DNA, 25 bp, Probe sequence
gcccagaacttattcgcacgttgga

SEQ ID NO: 153650 - DNA, 25 bp, Probe sequence
gctaatgaacaacaaaaggcccaga

SEQ ID NO: 153651 - DNA, 25 bp, Probe sequence
gaattcgaacagtgaatcctcgaac

SEQ ID NO: 153652 - DNA, 25 bp, Probe sequence
gaacttattcgcacgttggagacaa

SEQ ID NO: 153653 - DNA, 25 bp, Probe sequence
gaacagtgaatcctcgaacgataca

SEQ ID NO: 153654 - DNA, 25 bp, Probe sequence
gaacaacaaaaggcccagaacttat

SEQ ID NO: 153655 - DNA, 25 bp, Probe sequence
gacaacttcagaattcgaacagtga

SEQ ID NO: 153656 - DNA, 25 bp, Probe sequence
gagacaacttcagaattcgaacagt

SEQ ID NO: 153657 - DNA, 25 bp, Probe sequence
gttggagacaacttcagaattcgaa

SEQ ID NO: 153658 - DNA, 25 bp, Probe sequence
gtgaatcctcgaacgatacaaacaa

SEQ ID NO: 153659 - DNA, 25 bp, Probe sequence
tggagacaacttcagaattcgaaca

SEQ ID NO: 153660 - DNA, 25 bp, Probe sequence
tgaatcctcgaacgatacaaacaaa

SEQ ID NO: 153661 - DNA, 25 bp, Probe sequence
tcagaattcgaacagtgaatcctcg

SEQ ID NO: 153662 - DNA, 25 bp, Probe sequence
ttattcgcacgttggagacaacttc

SEQ ID NO: 153663 - DNA, 25 bp, Probe sequence
ttcgcacgttggagacaacttcaga

SEQ ID NO: 153664 - DNA, 25 bp, Probe sequence
atgtacaaggtcaagtttcacaagc

SEQ ID NO: 153665 - DNA, 25 bp, Probe sequence
aggtcaagtttcacaagcattgatg

SEQ ID NO: 153666 - DNA, 25 bp, Probe sequence
actgcaagaagcatagggttttggg

SEQ ID NO: 153667 - DNA, 25 bp, Probe sequence
acaaggtcaagtttcacaagcattg

SEQ ID NO: 153668 - DNA, 25 bp, Probe sequence
aaatgtacaaggtcaagtttcacaa

SEQ ID NO: 153669 - DNA, 25 bp, Probe sequence
aaacaagaagaggctacatggggaa

SEQ ID NO: 153670 - DNA, 25 bp, Probe sequence
aagcattgatgggaactggtattaa

SEQ ID NO: 153671 - DNA, 25 bp, Probe sequence
aagtttcacaagcattgatgggaac

SEQ ID NO: 153672 - DNA, 25 bp, Probe sequence
aaggtcaagtttcacaagcattgat

SEQ ID NO: 153673 - DNA, 25 bp, Probe sequence
aatgcattaaaacaagaagaggcta

SEQ ID NO: 153674 - DNA, 25 bp, Probe sequence
caagcattgatgggaactggtatta

SEQ ID NO: 153675 - DNA, 25 bp, Probe sequence
caagaagaggctacatggggaaatg

SEQ ID NO: 153676 - DNA, 25 bp, Probe sequence
catggggaaatgtacaaggtcaagt

SEQ ID NO: 153677 - DNA, 25 bp, Probe sequence
gcattgatgggaactggtattaaag

SEQ ID NO: 153678 - DNA, 25 bp, Probe sequence
gcaagaagcatagggttttgggttt

SEQ ID NO: 153679 - DNA, 25 bp, Probe sequence
gaagaggctacatggggaaatgtac

SEQ ID NO: 153680 - DNA, 25 bp, Probe sequence
gaactggtattaaagattctactgc

SEQ ID NO: 153681 - DNA, 25 bp, Probe sequence
gattctactgcaagaagcatagggt

SEQ ID NO: 153682 - DNA, 25 bp, Probe sequence
gtttcacaagcattgatgggaactg

SEQ ID NO: 153683 - DNA, 25 bp, Probe sequence
gtttcccaagttggtcaagcattaa

SEQ ID NO: 153684 - DNA, 25 bp, Probe sequence
gtacaaggtcaagtttcacaagcat

SEQ ID NO: 153685 - DNA, 25 bp, Probe sequence
gtcaagtttcacaagcattgatggg

SEQ ID NO: 153686 - DNA, 25 bp, Probe sequence
gggaactggtattaaagattctact

SEQ ID NO: 153687 - DNA, 25 bp, Probe sequence
gggtttcccaagttggtcaagcatt

SEQ ID NO: 153688 - DNA, 25 bp, Probe sequence
ggtttcccaagttggtcaagcatta

SEQ ID NO: 153689 - DNA, 25 bp, Probe sequence
ggaaatgtacaaggtcaagtttcac

SEQ ID NO: 153690 - DNA, 25 bp, Probe sequence
tggtattaaagattctactgcaaga

SEQ ID NO: 153691 - DNA, 25 bp, Probe sequence
tggggaaatgtacaaggtcaagttt

SEQ ID NO: 153692 - DNA, 25 bp, Probe sequence
tgggtttcccaagttggtcaagcat

SEQ ID NO: 153693 - DNA, 25 bp, Probe sequence
taaagattctactgcaagaagcata

SEQ ID NO: 153694 - DNA, 25 bp, Probe sequence
tacaaggtcaagtttcacaagcatt

SEQ ID NO: 153695 - DNA, 25 bp, Probe sequence
ttcacaagcattgatgggaactggt

SEQ ID NO: 153696 - DNA, 25 bp, Probe sequence
ttcccaagttggtcaagcattaata

SEQ ID NO: 153697 - DNA, 25 bp, Probe sequence
ttgggtttcccaagttggtcaagca

SEQ ID NO: 153698 - DNA, 25 bp, Probe sequence
atcttctatttctcatgactatatt

SEQ ID NO: 153699 - DNA, 25 bp, Probe sequence
atccatcttctatttctcatgacta

SEQ ID NO: 153700 - DNA, 25 bp, Probe sequence
actgcacaagccatgtttatctatg

SEQ ID NO: 153701 - DNA, 25 bp, Probe sequence
acttatcttaggtgcttgtggacat

SEQ ID NO: 153702 - DNA, 25 bp, Probe sequence
aaatccatcttctatttctcatgac

SEQ ID NO: 153703 - DNA, 25 bp, Probe sequence
aaagcaaaaagatgacgaccacagt

SEQ ID NO: 153704 - DNA, 25 bp, Probe sequence
aaaactgcacaagccatgtttatct

SEQ ID NO: 153705 - DNA, 25 bp, Probe sequence
aaaagaaccgtttatcatcaatgaa

SEQ ID NO: 153706 - DNA, 25 bp, Probe sequence
aacagttgattctaaatcattcaaa

SEQ ID NO: 153707 - DNA, 25 bp, Probe sequence
aagccatgtttatctatgagttaag

SEQ ID NO: 153708 - DNA, 25 bp, Probe sequence
aagagatggttatcttttaagtgat

SEQ ID NO: 153709 - DNA, 25 bp, Probe sequence
aaggcaaaactgcacaagccatgtt

SEQ ID NO: 153710 - DNA, 25 bp, Probe sequence
aaggcgatactattgttagtgacaa

SEQ ID NO: 153711 - DNA, 25 bp, Probe sequence
aatgtccataaatactcagaagata

SEQ ID NO: 153712 - DNA, 25 bp, Probe sequence
aattaaaggcgatactattgttagt

SEQ ID NO: 153713 - DNA, 25 bp, Probe sequence
cttaggtgcttgtggacatcatcaa

SEQ ID NO: 153714 - DNA, 25 bp, Probe sequence
ctcatgactatattaatatcactca

SEQ ID NO: 153715 - DNA, 25 bp, Probe sequence
ccatcttctatttctcatgactata

SEQ ID NO: 153716 - DNA, 25 bp, Probe sequence
gcacaagccatgtttatctatgagt

SEQ ID NO: 153717 - DNA, 25 bp, Probe sequence
gcaagtacacttatcttaggtgctt

SEQ ID NO: 153718 - DNA, 25 bp, Probe sequence
gaaccgtttatcatcaatgaaaaag

SEQ ID NO: 153719 - DNA, 25 bp, Probe sequence
gaaatatatcgcttttaaaatggaa

SEQ ID NO: 153720 - DNA, 25 bp, Probe sequence
gacagaacataaccaagatcaaatt

SEQ ID NO: 153721 - DNA, 25 bp, Probe sequence
gactatattaatatcactcaagatg

SEQ ID NO: 153722 - DNA, 25 bp, Probe sequence
gatttttctcatagagcggaaacaa

SEQ ID NO: 153723 - DNA, 25 bp, Probe sequence
gtttatctatgagttaagaggtgat

SEQ ID NO: 153724 - DNA, 25 bp, Probe sequence
gtacacttatcttaggtgcttgtgg

SEQ ID NO: 153725 - DNA, 25 bp, Probe sequence
gtggacatcatcaagatagtgcaaa

SEQ ID NO: 153726 - DNA, 25 bp, Probe sequence
ggggatattattagcaagtacactt

SEQ ID NO: 153727 - DNA, 25 bp, Probe sequence
ggtgcttgtggacatcatcaagata

SEQ ID NO: 153728 - DNA, 25 bp, Probe sequence
ggaaattactgctaaaaaagacgat

SEQ ID NO: 153729 - DNA, 25 bp, Probe sequence
tatcttaggtgcttgtggacatcat

SEQ ID NO: 153730 - DNA, 25 bp, Probe sequence
ttaaatccatcttctatttctcatg

SEQ ID NO: 153731 - DNA, 25 bp, Probe sequence
ttctatttctcatgactatattaat

SEQ ID NO: 153732 - DNA, 25 bp, Probe sequence
attatttaatatcatcttagaatct

SEQ ID NO: 153733 - DNA, 25 bp, Probe sequence
atttaatatcatcttagaatctcac

SEQ ID NO: 153734 - DNA, 25 bp, Probe sequence
atatcaactttgtttaattactcaa

SEQ ID NO: 153735 - DNA, 25 bp, Probe sequence
atatcatcttagaatctcacaaaat

SEQ ID NO: 153736 - DNA, 25 bp, Probe sequence
ataggatcattattacaagaattat

SEQ ID NO: 153737 - DNA, 25 bp, Probe sequence
atacataggatcattattacaagaa

SEQ ID NO: 153738 - DNA, 25 bp, Probe sequence
atcatcttagaatctcacaaaatat

SEQ ID NO: 153739 - DNA, 25 bp, Probe sequence
atcttagaatctcacaaaatatcaa

SEQ ID NO: 153740 - DNA, 25 bp, Probe sequence
atctcacaaaatatcaactttgttt

SEQ ID NO: 153741 - DNA, 25 bp, Probe sequence
agaatctcacaaaatatcaactttg

SEQ ID NO: 153742 - DNA, 25 bp, Probe sequence
acataggatcattattacaagaatt

SEQ ID NO: 153743 - DNA, 25 bp, Probe sequence
aacaatacataggatcattattaca

SEQ ID NO: 153744 - DNA, 25 bp, Probe sequence
aatatcaactttgtttaattactca

SEQ ID NO: 153745 - DNA, 25 bp, Probe sequence
aatatcatcttagaatctcacaaaa

SEQ ID NO: 153746 - DNA, 25 bp, Probe sequence
aattatttaatatcatcttagaatc

SEQ ID NO: 153747 - DNA, 25 bp, Probe sequence
caatacataggatcattattacaag

SEQ ID NO: 153748 - DNA, 25 bp, Probe sequence
catcttagaatctcacaaaatatca

SEQ ID NO: 153749 - DNA, 25 bp, Probe sequence
cttagaatctcacaaaatatcaact

SEQ ID NO: 153750 - DNA, 25 bp, Probe sequence
gcaacaatacataggatcattatta

SEQ ID NO: 153751 - DNA, 25 bp, Probe sequence
gaattatttaatatcatcttagaat

SEQ ID NO: 153752 - DNA, 25 bp, Probe sequence
gaatctcacaaaatatcaactttgt

SEQ ID NO: 153753 - DNA, 25 bp, Probe sequence
ggatcattattacaagaattattta

SEQ ID NO: 153754 - DNA, 25 bp, Probe sequence
tcttagaatctcacaaaatatcaac

SEQ ID NO: 153755 - DNA, 25 bp, Probe sequence
tcatcttagaatctcacaaaatatc

SEQ ID NO: 153756 - DNA, 25 bp, Probe sequence
taatatcatcttagaatctcacaaa

SEQ ID NO: 153757 - DNA, 25 bp, Probe sequence
tagaatctcacaaaatatcaacttt

SEQ ID NO: 153758 - DNA, 25 bp, Probe sequence
tatcatcttagaatctcacaaaata

SEQ ID NO: 153759 - DNA, 25 bp, Probe sequence
tatcaactttgtttaattactcaaa

SEQ ID NO: 153760 - DNA, 25 bp, Probe sequence
tatttaatatcatcttagaatctca

SEQ ID NO: 153761 - DNA, 25 bp, Probe sequence
tttaatatcatcttagaatctcaca

SEQ ID NO: 153762 - DNA, 25 bp, Probe sequence
ttatttaatatcatcttagaatctc

SEQ ID NO: 153763 - DNA, 25 bp, Probe sequence
ttagaatctcacaaaatatcaactt

SEQ ID NO: 153764 - DNA, 25 bp, Probe sequence
ttaatatcatcttagaatctcacaa

SEQ ID NO: 153765 - DNA, 25 bp, Probe sequence
ttgcaacaatacataggatcattat

SEQ ID NO: 153766 - DNA, 25 bp, Probe sequence
atggtagcttccaaatactcacaga

SEQ ID NO: 153767 - DNA, 25 bp, Probe sequence
atggcatattaataatcaatctaca

SEQ ID NO: 153768 - DNA, 25 bp, Probe sequence
agtagaccccaaagcattagaaata

SEQ ID NO: 153769 - DNA, 25 bp, Probe sequence
agaccccaaagcattagaaataagt

SEQ ID NO: 153770 - DNA, 25 bp, Probe sequence
agcggaaaagcaattgtctattgtt

SEQ ID NO: 153771 - DNA, 25 bp, Probe sequence
accccaaagcattagaaataagtat

SEQ ID NO: 153772 - DNA, 25 bp, Probe sequence
aagcggaaaagcaattgtctattgt

SEQ ID NO: 153773 - DNA, 25 bp, Probe sequence
aagtatatttgacgctgtaaattaa

SEQ ID NO: 153774 - DNA, 25 bp, Probe sequence
aatggtagcttccaaatactcacag

SEQ ID NO: 153775 - DNA, 25 bp, Probe sequence
aataagtatatttgacgctgtaaat

SEQ ID NO: 153776 - DNA, 25 bp, Probe sequence
caagcggaaaagcaattgtctattg

SEQ ID NO: 153777 - DNA, 25 bp, Probe sequence
cagtagaccccaaagcattagaaat

SEQ ID NO: 153778 - DNA, 25 bp, Probe sequence
ctaatggtagcttccaaatactcac

SEQ ID NO: 153779 - DNA, 25 bp, Probe sequence
cctaatggtagcttccaaatactca

SEQ ID NO: 153780 - DNA, 25 bp, Probe sequence
gcctaatggtagcttccaaatactc

SEQ ID NO: 153781 - DNA, 25 bp, Probe sequence
gcggaaaagcaattgtctattgtta

SEQ ID NO: 153782 - DNA, 25 bp, Probe sequence
gaatggcatattaataatcaatcta

SEQ ID NO: 153783 - DNA, 25 bp, Probe sequence
gaaaagcaattgtctattgttaaac

SEQ ID NO: 153784 - DNA, 25 bp, Probe sequence
gaccccaaagcattagaaataagta

SEQ ID NO: 153785 - DNA, 25 bp, Probe sequence
gagtgaatggcatattaataatcaa

SEQ ID NO: 153786 - DNA, 25 bp, Probe sequence
gtagaccccaaagcattagaaataa

SEQ ID NO: 153787 - DNA, 25 bp, Probe sequence
gtagcttccaaatactcacagaaat

SEQ ID NO: 153788 - DNA, 25 bp, Probe sequence
ggtagcttccaaatactcacagaaa

SEQ ID NO: 153789 - DNA, 25 bp, Probe sequence
ggcatattaataatcaatctacaaa

SEQ ID NO: 153790 - DNA, 25 bp, Probe sequence
tggtagcttccaaatactcacagaa

SEQ ID NO: 153791 - DNA, 25 bp, Probe sequence
tgcctaatggtagcttccaaatact

SEQ ID NO: 153792 - DNA, 25 bp, Probe sequence
tcagtagaccccaaagcattagaaa

SEQ ID NO: 153793 - DNA, 25 bp, Probe sequence
taagtatatttgacgctgtaaatta

SEQ ID NO: 153794 - DNA, 25 bp, Probe sequence
taatggtagcttccaaatactcaca

SEQ ID NO: 153795 - DNA, 25 bp, Probe sequence
tagcttccaaatactcacagaaata

SEQ ID NO: 153796 - DNA, 25 bp, Probe sequence
tagaccccaaagcattagaaataag

SEQ ID NO: 153797 - DNA, 25 bp, Probe sequence
tttaatacaacaagcggaaaagcaa

SEQ ID NO: 153798 - DNA, 25 bp, Probe sequence
ttcagtagaccccaaagcattagaa

SEQ ID NO: 153799 - DNA, 25 bp, Probe sequence
ttgcctaatggtagcttccaaatac

SEQ ID NO: 153800 - DNA, 25 bp, Probe sequence
attcaaaacaaatacttaactggtg

SEQ ID NO: 153801 - DNA, 25 bp, Probe sequence
atatttctattttaaacaagacatt

SEQ ID NO: 153802 - DNA, 25 bp, Probe sequence
atcaagacttcttaactaactgcca

SEQ ID NO: 153803 - DNA, 25 bp, Probe sequence
atcgtgattatcaagacttcttaac

SEQ ID NO: 153804 - DNA, 25 bp, Probe sequence
agacttcttaactaactgccaaatt

SEQ ID NO: 153805 - DNA, 25 bp, Probe sequence
agtcgctaacttttttggcgatgct

SEQ ID NO: 153806 - DNA, 25 bp, Probe sequence
acttttttggcgatgctaaagatgc

SEQ ID NO: 153807 - DNA, 25 bp, Probe sequence
acagaaacagtcgctaacttttttg

SEQ ID NO: 153808 - DNA, 25 bp, Probe sequence
acagtcgctaacttttttggcgatg

SEQ ID NO: 153809 - DNA, 25 bp, Probe sequence
aacagtcgctaacttttttggcgat

SEQ ID NO: 153810 - DNA, 25 bp, Probe sequence
aagacttcttaactaactgccaaat

SEQ ID NO: 153811 - DNA, 25 bp, Probe sequence
aagatgcacgtgaaaactatttttg

SEQ ID NO: 153812 - DNA, 25 bp, Probe sequence
caagacttcttaactaactgccaaa

SEQ ID NO: 153813 - DNA, 25 bp, Probe sequence
caaattatatattgaacgttcgaat

SEQ ID NO: 153814 - DNA, 25 bp, Probe sequence
cagtcgctaacttttttggcgatgc

SEQ ID NO: 153815 - DNA, 25 bp, Probe sequence
cagaaacagtcgctaacttttttgg

SEQ ID NO: 153816 - DNA, 25 bp, Probe sequence
cgtgattatcaagacttcttaacta

SEQ ID NO: 153817 - DNA, 25 bp, Probe sequence
cgctaacttttttggcgatgctaaa

SEQ ID NO: 153818 - DNA, 25 bp, Probe sequence
gctaaagatgcacgtgaaaactatt

SEQ ID NO: 153819 - DNA, 25 bp, Probe sequence
gctaacttttttggcgatgctaaag

SEQ ID NO: 153820 - DNA, 25 bp, Probe sequence
gaatgaactaactaaagaacaaaag

SEQ ID NO: 153821 - DNA, 25 bp, Probe sequence
gaaacagtcgctaacttttttggcg

SEQ ID NO: 153822 - DNA, 25 bp, Probe sequence
gacttcttaactaactgccaaattt

SEQ ID NO: 153823 - DNA, 25 bp, Probe sequence
gatcgtgattatcaagacttcttaa

SEQ ID NO: 153824 - DNA, 25 bp, Probe sequence
gataacatttacaatatttctattt

SEQ ID NO: 153825 - DNA, 25 bp, Probe sequence
gattatcaagacttcttaactaact

SEQ ID NO: 153826 - DNA, 25 bp, Probe sequence
gtatacaatagctaaattttacaaa

SEQ ID NO: 153827 - DNA, 25 bp, Probe sequence
gtcgctaacttttttggcgatgcta

SEQ ID NO: 153828 - DNA, 25 bp, Probe sequence
ggacgataacatttacaatatttct

SEQ ID NO: 153829 - DNA, 25 bp, Probe sequence
ggcgatgctaaagatgcacgtgaaa

SEQ ID NO: 153830 - DNA, 25 bp, Probe sequence
tcaagacttcttaactaactgccaa

SEQ ID NO: 153831 - DNA, 25 bp, Probe sequence
taactaactgccaaattttaattca

SEQ ID NO: 153832 - DNA, 25 bp, Probe sequence
ttttggcgatgctaaagatgcacgt

SEQ ID NO: 153833 - DNA, 25 bp, Probe sequence
ttggcgatgctaaagatgcacgtga

SEQ ID NO: 153834 - DNA, 25 bp, Probe sequence
attttacttatattattcgttgtcg

SEQ ID NO: 153835 - DNA, 25 bp, Probe sequence
atttcaccctatgcaattaaagata

SEQ ID NO: 153836 - DNA, 25 bp, Probe sequence
atattatttcaccctatgcaattaa

SEQ ID NO: 153837 - DNA, 25 bp, Probe sequence
atcgttatctagttacattaaattt

SEQ ID NO: 153838 - DNA, 25 bp, Probe sequence
accaactacacaatccttcgaatct

SEQ ID NO: 153839 - DNA, 25 bp, Probe sequence
actacacaatccttcgaatctttta

SEQ ID NO: 153840 - DNA, 25 bp, Probe sequence
aaatcatcgttatctagttacatta

SEQ ID NO: 153841 - DNA, 25 bp, Probe sequence
aaaggccctgtcatgtggggatttt

SEQ ID NO: 153842 - DNA, 25 bp, Probe sequence
aaactcaccaaaaacaattgcagat

SEQ ID NO: 153843 - DNA, 25 bp, Probe sequence
aagtattcagaaattcaagatgaca

SEQ ID NO: 153844 - DNA, 25 bp, Probe sequence
aattgaggggcctggcgacaaacca

SEQ ID NO: 153845 - DNA, 25 bp, Probe sequence
caatccttcgaatcttttaaatata

SEQ ID NO: 153846 - DNA, 25 bp, Probe sequence
caactacacaatccttcgaatcttt

SEQ ID NO: 153847 - DNA, 25 bp, Probe sequence
ctgtcatgtggggattttttggtca

SEQ ID NO: 153848 - DNA, 25 bp, Probe sequence
ctggtgcaggtaaaaaagcggctga

SEQ ID NO: 153849 - DNA, 25 bp, Probe sequence
gcctggcgacaaaccaactacacaa

SEQ ID NO: 153850 - DNA, 25 bp, Probe sequence
gcaagtggcaaaaatgattggatga

SEQ ID NO: 153851 - DNA, 25 bp, Probe sequence
gacaaattccaattacaacctggtg

SEQ ID NO: 153852 - DNA, 25 bp, Probe sequence
gttgcagctatcctggtgcaggtaa

SEQ ID NO: 153853 - DNA, 25 bp, Probe sequence
gtagtatcgcgattgatgataaaac

SEQ ID NO: 153854 - DNA, 25 bp, Probe sequence
gtggggattttttggtcattgtagt

SEQ ID NO: 153855 - DNA, 25 bp, Probe sequence
ggtcattgtagtatcgcgattgatg

SEQ ID NO: 153856 - DNA, 25 bp, Probe sequence
tggcgacaaaccaactacacaatcc

SEQ ID NO: 153857 - DNA, 25 bp, Probe sequence
ggccctgtcatgtggggattttttg

SEQ ID NO: 153858 - DNA, 25 bp, Probe sequence
tgaggggcctggcgacaaaccaact

SEQ ID NO: 153859 - DNA, 25 bp, Probe sequence
tcgttgcagctatcctggtgcaggt

SEQ ID NO: 153860 - DNA, 25 bp, Probe sequence
tacaaaaggccctgtcatgtgggga

SEQ ID NO: 153861 - DNA, 25 bp, Probe sequence
tacaaatcatcgttatctagttaca

SEQ ID NO: 153862 - DNA, 25 bp, Probe sequence
tacacaatccttcgaatcttttaaa

SEQ ID NO: 153863 - DNA, 25 bp, Probe sequence
tacatattatttcaccctatgcaat

SEQ ID NO: 153864 - DNA, 25 bp, Probe sequence
tttggtcattgtagtatcgcgattg

SEQ ID NO: 153865 - DNA, 25 bp, Probe sequence
tttacgtattgtactaaaattatct

SEQ ID NO: 153866 - DNA, 25 bp, Probe sequence
ttatattattcgttgtcgtatcccc

SEQ ID NO: 153867 - DNA, 25 bp, Probe sequence
ttcaagatgacaaattccaattaca

SEQ ID NO: 153868 - DNA, 25 bp, Probe sequence
attcttcttcaattgcttttactaa

SEQ ID NO: 153869 - DNA, 25 bp, Probe sequence
attcagttttttctgctgcagcgtc

SEQ ID NO: 153870 - DNA, 25 bp, Probe sequence
agttttttctgctgcagcgtcagcg

SEQ ID NO: 153871 - DNA, 25 bp, Probe sequence
agcatcttttaatcctaaaccagtt

SEQ ID NO: 153872 - DNA, 25 bp, Probe sequence
acaccaaattcttcttcaattgctt

SEQ ID NO: 153873 - DNA, 25 bp, Probe sequence
acagctttaacaactttgattttag

SEQ ID NO: 153874 - DNA, 25 bp, Probe sequence
aaaccagttgcttctttaacagctt

SEQ ID NO: 153875 - DNA, 25 bp, Probe sequence
aattattttaattctacagtagctc

SEQ ID NO: 153876 - DNA, 25 bp, Probe sequence
aattctacagtagctccaacttctt

SEQ ID NO: 153877 - DNA, 25 bp, Probe sequence
caacttcttctaattgttctttaag

SEQ ID NO: 153878 - DNA, 25 bp, Probe sequence
cagttgcttctttaacagctttaac

SEQ ID NO: 153879 - DNA, 25 bp, Probe sequence
ctttgattactttaggagctccgtc

SEQ ID NO: 153880 - DNA, 25 bp, Probe sequence
gctactgctactggagcagctgcag

SEQ ID NO: 153881 - DNA, 25 bp, Probe sequence
gctccaacttcttctaattgttctt

SEQ ID NO: 153882 - DNA, 25 bp, Probe sequence
gcttcttctttaggtaaagcttctt

SEQ ID NO: 153883 - DNA, 25 bp, Probe sequence
gcacctgctactgctactggagcag

SEQ ID NO: 153884 - DNA, 25 bp, Probe sequence
gcagttacaccaaattcttcttcaa

SEQ ID NO: 153885 - DNA, 25 bp, Probe sequence
gaagttaactcaacgtcaaattcag

SEQ ID NO: 153886 - DNA, 25 bp, Probe sequence
gaaccagctgaagttaactcaacgt

SEQ ID NO: 153887 - DNA, 25 bp, Probe sequence
gagctccgtctactaattctttagc

SEQ ID NO: 153888 - DNA, 25 bp, Probe sequence
gagcagctgcagttacaccaaattc

SEQ ID NO: 153889 - DNA, 25 bp, Probe sequence
gattactttaggagctccgtctact

SEQ ID NO: 153890 - DNA, 25 bp, Probe sequence
gtagctccaacttcttctaattgtt

SEQ ID NO: 153891 - DNA, 25 bp, Probe sequence
gtcaaattcagttttttctgctgca

SEQ ID NO: 153892 - DNA, 25 bp, Probe sequence
gtcgtttaattctaatactgacatt

SEQ ID NO: 153893 - DNA, 25 bp, Probe sequence
tgttctttaagtttttcagcttctt

SEQ ID NO: 153894 - DNA, 25 bp, Probe sequence
tctaatactgacatttctttaatcg

SEQ ID NO: 153895 - DNA, 25 bp, Probe sequence
tctttaagtttttcagcttcttctt

SEQ ID NO: 153896 - DNA, 25 bp, Probe sequence
tcaattgcttttactaagtcgttta

SEQ ID NO: 153897 - DNA, 25 bp, Probe sequence
taatcctaaaccagttgcttcttta

SEQ ID NO: 153898 - DNA, 25 bp, Probe sequence
taattctttagcatcttttaatcct

SEQ ID NO: 153899 - DNA, 25 bp, Probe sequence
tacagtagctccaacttcttctaat

SEQ ID NO: 153900 - DNA, 25 bp, Probe sequence
taggtaaagcttctttgattacttt

SEQ ID NO: 153901 - DNA, 25 bp, Probe sequence
ttaggagctccgtctactaattctt

SEQ ID NO: 153902 - DNA, 25 bp, Probe sequence
atatcgtactcgttctctattacat

SEQ ID NO: 153903 - DNA, 25 bp, Probe sequence
atactcatcgtatcctttaccattg

SEQ ID NO: 153904 - DNA, 25 bp, Probe sequence
ataacattttgttaaatgctatcaa

SEQ ID NO: 153905 - DNA, 25 bp, Probe sequence
atcgtactcgttctctattacattt

SEQ ID NO: 153906 - DNA, 25 bp, Probe sequence
atcctttaccattgcaatgataact

SEQ ID NO: 153907 - DNA, 25 bp, Probe sequence
atgatttatgttggctcctgcctgg

SEQ ID NO: 153908 - DNA, 25 bp, Probe sequence
accattgcaatgataactaaaaact

SEQ ID NO: 153909 - DNA, 25 bp, Probe sequence
actcatcgtatcctttaccattgca

SEQ ID NO: 153910 - DNA, 25 bp, Probe sequence
actcgttctctattacatttatcct

SEQ ID NO: 153911 - DNA, 25 bp, Probe sequence
aaatatcgtactcgttctctattac

SEQ ID NO: 153912 - DNA, 25 bp, Probe sequence
catcgtatcctttaccattgcaatg

SEQ ID NO: 153913 - DNA, 25 bp, Probe sequence
ctattacatttatcctattttttat

SEQ ID NO: 153914 - DNA, 25 bp, Probe sequence
ctcatcgtatcctttaccattgcaa

SEQ ID NO: 153915 - DNA, 25 bp, Probe sequence
cgttctctattacatttatcctatt

SEQ ID NO: 153916 - DNA, 25 bp, Probe sequence
cctgcctggtattatcatttgtggt

SEQ ID NO: 153917 - DNA, 25 bp, Probe sequence
gcctggtattatcatttgtggtgtg

SEQ ID NO: 153918 - DNA, 25 bp, Probe sequence
gctcctgcctggtattatcatttgt

SEQ ID NO: 153919 - DNA, 25 bp, Probe sequence
gctatcaatatagttattactacca

SEQ ID NO: 153920 - DNA, 25 bp, Probe sequence
gttattactaccacttttgttatct

SEQ ID NO: 153921 - DNA, 25 bp, Probe sequence
gttatctttaatattttaatcacat

SEQ ID NO: 153922 - DNA, 25 bp, Probe sequence
gtactcgttctctattacatttatc

SEQ ID NO: 153923 - DNA, 25 bp, Probe sequence
gtgtgatactcatcgtatcctttac

SEQ ID NO: 153924 - DNA, 25 bp, Probe sequence
gtggtgtgatactcatcgtatcctt

SEQ ID NO: 153925 - DNA, 25 bp, Probe sequence
tgttggctcctgcctggtattatca

SEQ ID NO: 153926 - DNA, 25 bp, Probe sequence
tcgtatcctttaccattgcaatgat

SEQ ID NO: 153927 - DNA, 25 bp, Probe sequence
tctctattacatttatcctattttt

SEQ ID NO: 153928 - DNA, 25 bp, Probe sequence
tcatttgtggtgtgatactcatcgt

SEQ ID NO: 153929 - DNA, 25 bp, Probe sequence
tactaccacttttgttatctttaat

SEQ ID NO: 153930 - DNA, 25 bp, Probe sequence
taccacttttgttatctttaatatt

SEQ ID NO: 153931 - DNA, 25 bp, Probe sequence
tagatgatttatgttggctcctgcc

SEQ ID NO: 153932 - DNA, 25 bp, Probe sequence
tatcctattttttatagttttatag

SEQ ID NO: 153933 - DNA, 25 bp, Probe sequence
tataaatatcgtactcgttctctat

SEQ ID NO: 153934 - DNA, 25 bp, Probe sequence
tattactaccacttttgttatcttt

SEQ ID NO: 153935 - DNA, 25 bp, Probe sequence
ttatgttggctcctgcctggtatta

SEQ ID NO: 153936 - DNA, 25 bp, Probe sequence
ataatttcaaacatgacgtataaat

SEQ ID NO: 153937 - DNA, 25 bp, Probe sequence
atcacgccaacacttaaaaataata

SEQ ID NO: 153938 - DNA, 25 bp, Probe sequence
atctgatgttagaaaagagcctatc

SEQ ID NO: 153939 - DNA, 25 bp, Probe sequence
atgacgctagtaacataatttcaaa

SEQ ID NO: 153940 - DNA, 25 bp, Probe sequence
atgagtacaaatgacgctagtaaca

SEQ ID NO: 153941 - DNA, 25 bp, Probe sequence
atgttagaaaagagcctatcacgcc

SEQ ID NO: 153942 - DNA, 25 bp, Probe sequence
agtacaaatgacgctagtaacataa

SEQ ID NO: 153943 - DNA, 25 bp, Probe sequence
agtaacataatttcaaacatgacgt

SEQ ID NO: 153944 - DNA, 25 bp, Probe sequence
agaaaagagcctatcacgccaacac

SEQ ID NO: 153945 - DNA, 25 bp, Probe sequence
acgctagtaacataatttcaaacat

SEQ ID NO: 153946 - DNA, 25 bp, Probe sequence
acataatttcaaacatgacgtataa

SEQ ID NO: 153947 - DNA, 25 bp, Probe sequence
aaatgacgctagtaacataatttca

SEQ ID NO: 153948 - DNA, 25 bp, Probe sequence
aacataatttcaaacatgacgtata

SEQ ID NO: 153949 - DNA, 25 bp, Probe sequence
aatgacgctagtaacataatttcaa

SEQ ID NO: 153950 - DNA, 25 bp, Probe sequence
caaatgacgctagtaacataatttc

SEQ ID NO: 153951 - DNA, 25 bp, Probe sequence
ctatcacgccaacacttaaaaataa

SEQ ID NO: 153952 - DNA, 25 bp, Probe sequence
cgctagtaacataatttcaaacatg

SEQ ID NO: 153953 - DNA, 25 bp, Probe sequence
cctatcacgccaacacttaaaaata

SEQ ID NO: 153954 - DNA, 25 bp, Probe sequence
gctagtaacataatttcaaacatga

SEQ ID NO: 153955 - DNA, 25 bp, Probe sequence
gacgctagtaacataatttcaaaca

SEQ ID NO: 153956 - DNA, 25 bp, Probe sequence
gagtacaaatgacgctagtaacata

SEQ ID NO: 153957 - DNA, 25 bp, Probe sequence
gatgttagaaaagagcctatcacgc

SEQ ID NO: 153958 - DNA, 25 bp, Probe sequence
gttagaaaagagcctatcacgccaa

SEQ ID NO: 153959 - DNA, 25 bp, Probe sequence
gtacaaatgacgctagtaacataat

SEQ ID NO: 153960 - DNA, 25 bp, Probe sequence
gtaacataatttcaaacatgacgta

SEQ ID NO: 153961 - DNA, 25 bp, Probe sequence
tgttagaaaagagcctatcacgcca

SEQ ID NO: 153962 - DNA, 25 bp, Probe sequence
tgagtacaaatgacgctagtaacat

SEQ ID NO: 153963 - DNA, 25 bp, Probe sequence
tgacgctagtaacataatttcaaac

SEQ ID NO: 153964 - DNA, 25 bp, Probe sequence
taaaaataatatgaacgatggcaag

SEQ ID NO: 153965 - DNA, 25 bp, Probe sequence
tacaaatgacgctagtaacataatt

SEQ ID NO: 153966 - DNA, 25 bp, Probe sequence
tagaaaagagcctatcacgccaaca

SEQ ID NO: 153967 - DNA, 25 bp, Probe sequence
tatcacgccaacacttaaaaataat

SEQ ID NO: 153968 - DNA, 25 bp, Probe sequence
ttagaaaagagcctatcacgccaac

SEQ ID NO: 153969 - DNA, 25 bp, Probe sequence
ttcaaacatgacgtataaattaaat

SEQ ID NO: 153970 - DNA, 25 bp, Probe sequence
attgtttgtatcatcgcgacacctc

SEQ ID NO: 153971 - DNA, 25 bp, Probe sequence
atctaagaaagaaacggtgcccata

SEQ ID NO: 153972 - DNA, 25 bp, Probe sequence
atctgctgttgtaggtcccttgatt

SEQ ID NO: 153973 - DNA, 25 bp, Probe sequence
atggcaatgagcatgattgaatcta

SEQ ID NO: 153974 - DNA, 25 bp, Probe sequence
agcacttgttgtatcaaatgtaacg

SEQ ID NO: 153975 - DNA, 25 bp, Probe sequence
acgacacgatctgctgttgtaggtc

SEQ ID NO: 153976 - DNA, 25 bp, Probe sequence
acacctccaatattaagtcttcata

SEQ ID NO: 153977 - DNA, 25 bp, Probe sequence
acacacccacaattgacattacgac

SEQ ID NO: 153978 - DNA, 25 bp, Probe sequence
aaatgtaacgacacgatctgctgtt

SEQ ID NO: 153979 - DNA, 25 bp, Probe sequence
aacagatgattaatgcaattccaaa

SEQ ID NO: 153980 - DNA, 25 bp, Probe sequence
cacaattgacattacgacagcactt

SEQ ID NO: 153981 - DNA, 25 bp, Probe sequence
cacttaacacacccacaattgacat

SEQ ID NO: 153982 - DNA, 25 bp, Probe sequence
cacccacaattgacattacgacagc

SEQ ID NO: 153983 - DNA, 25 bp, Probe sequence
catcgcgacacctccaatattaagt

SEQ ID NO: 153984 - DNA, 25 bp, Probe sequence
cggtgcccataagtacacttaacac

SEQ ID NO: 153985 - DNA, 25 bp, Probe sequence
ccccccaccaataaagcgtgatatt

SEQ ID NO: 153986 - DNA, 25 bp, Probe sequence
gcgacacctccaatattaagtcttc

SEQ ID NO: 153987 - DNA, 25 bp, Probe sequence
gctgttgtaggtcccttgattaatc

SEQ ID NO: 153988 - DNA, 25 bp, Probe sequence
gcgtgatattgaaacagaacttaca

SEQ ID NO: 153989 - DNA, 25 bp, Probe sequence
gaaacggtgcccataagtacactta

SEQ ID NO: 153990 - DNA, 25 bp, Probe sequence
gacacgatctgctgttgtaggtccc

SEQ ID NO: 153991 - DNA, 25 bp, Probe sequence
gacagcacttgttgtatcaaatgta

SEQ ID NO: 153992 - DNA, 25 bp, Probe sequence
gacattacgacagcacttgttgtat

SEQ ID NO: 153993 - DNA, 25 bp, Probe sequence
gttgtaggtcccttgattaatctaa

SEQ ID NO: 153994 - DNA, 25 bp, Probe sequence
gtaggtcccttgattaatctaaata

SEQ ID NO: 153995 - DNA, 25 bp, Probe sequence
gtaacgacacgatctgctgttgtag

SEQ ID NO: 153996 - DNA, 25 bp, Probe sequence
gtgttattgtttgtatcatcgcgac

SEQ ID NO: 153997 - DNA, 25 bp, Probe sequence
tgccccccaccaataaagcgtgata

SEQ ID NO: 153998 - DNA, 25 bp, Probe sequence
tccaatattaagtcttcataatgct

SEQ ID NO: 153999 - DNA, 25 bp, Probe sequence
taagtacacttaacacacccacaat

SEQ ID NO: 154000 - DNA, 25 bp, Probe sequence
tacacttaacacacccacaattgac

SEQ ID NO: 154001 - DNA, 25 bp, Probe sequence
ttatttccattaaacacatgccccc

SEQ ID NO: 154002 - DNA, 25 bp, Probe sequence
ttacgacagcacttgttgtatcaaa

SEQ ID NO: 154003 - DNA, 25 bp, Probe sequence
ttaacacacccacaattgacattac

SEQ ID NO: 154004 - DNA, 25 bp, Probe sequence
attattacaccattttcgataagaa

SEQ ID NO: 154005 - DNA, 25 bp, Probe sequence
atttgggatgcactaatacatcata

SEQ ID NO: 154006 - DNA, 25 bp, Probe sequence
atccacaaaatgtttcacttgactg

SEQ ID NO: 154007 - DNA, 25 bp, Probe sequence
atgtttcacttgactgggaatgttt

SEQ ID NO: 154008 - DNA, 25 bp, Probe sequence
agatatttgggatgcactaatacat

SEQ ID NO: 154009 - DNA, 25 bp, Probe sequence
agacattattacaccattttcgata

SEQ ID NO: 154010 - DNA, 25 bp, Probe sequence
acattattacaccattttcgataag

SEQ ID NO: 154011 - DNA, 25 bp, Probe sequence
aaatgtttcacttgactgggaatgt

SEQ ID NO: 154012 - DNA, 25 bp, Probe sequence
aacacttggttagataaagacatta

SEQ ID NO: 154013 - DNA, 25 bp, Probe sequence
aatccacaaaatgtttcacttgact

SEQ ID NO: 154014 - DNA, 25 bp, Probe sequence
aagacattattacaccattttcgat

SEQ ID NO: 154015 - DNA, 25 bp, Probe sequence
aatgtttcacttgactgggaatgtt

SEQ ID NO: 154016 - DNA, 25 bp, Probe sequence
aatgttgttagatggtgtaccaaat

SEQ ID NO: 154017 - DNA, 25 bp, Probe sequence
aatacatcataattggtactactca

SEQ ID NO: 154018 - DNA, 25 bp, Probe sequence
caaaatgtttcacttgactgggaat

SEQ ID NO: 154019 - DNA, 25 bp, Probe sequence
cacaaaatgtttcacttgactggga

SEQ ID NO: 154020 - DNA, 25 bp, Probe sequence
cacttgactgggaatgttttataat

SEQ ID NO: 154021 - DNA, 25 bp, Probe sequence
catcataattggtactactcaaatt

SEQ ID NO: 154022 - DNA, 25 bp, Probe sequence
ccacaaaatgtttcacttgactggg

SEQ ID NO: 154023 - DNA, 25 bp, Probe sequence
gcactaatacatcataattggtact

SEQ ID NO: 154024 - DNA, 25 bp, Probe sequence
gaatccacaaaatgtttcacttgac

SEQ ID NO: 154025 - DNA, 25 bp, Probe sequence
gaaatgttgttagatggtgtaccaa

SEQ ID NO: 154026 - DNA, 25 bp, Probe sequence
gacattattacaccattttcgataa

SEQ ID NO: 154027 - DNA, 25 bp, Probe sequence
gactgggaatgttttataattagta

SEQ ID NO: 154028 - DNA, 25 bp, Probe sequence
gtttcacttgactgggaatgtttta

SEQ ID NO: 154029 - DNA, 25 bp, Probe sequence
gtgaaatgttgttagatggtgtacc

SEQ ID NO: 154030 - DNA, 25 bp, Probe sequence
gggatgcactaatacatcataattg

SEQ ID NO: 154031 - DNA, 25 bp, Probe sequence
tccacaaaatgtttcacttgactgg

SEQ ID NO: 154032 - DNA, 25 bp, Probe sequence
tcataattggtactactcaaattaa

SEQ ID NO: 154033 - DNA, 25 bp, Probe sequence
tcaatgtaattatgtgaatccacaa

SEQ ID NO: 154034 - DNA, 25 bp, Probe sequence
tacatcataattggtactactcaaa

SEQ ID NO: 154035 - DNA, 25 bp, Probe sequence
tagatggtgtaccaaatgaacttat

SEQ ID NO: 154036 - DNA, 25 bp, Probe sequence
tattacaccattttcgataagaaat

SEQ ID NO: 154037 - DNA, 25 bp, Probe sequence
ttcacttgactgggaatgttttata

SEQ ID NO: 154038 - DNA, 25 bp, Probe sequence
atcaaagagttcactccaacgcttg

SEQ ID NO: 154039 - DNA, 25 bp, Probe sequence
agttcactccaacgcttgatgggta

SEQ ID NO: 154040 - DNA, 25 bp, Probe sequence
agctcccaagagttaattaatgaag

SEQ ID NO: 154041 - DNA, 25 bp, Probe sequence
actccaacgcttgatgggtatcatt

SEQ ID NO: 154042 - DNA, 25 bp, Probe sequence
acgcttgatgggtatcattattagt

SEQ ID NO: 154043 - DNA, 25 bp, Probe sequence
aaagagttcactccaacgcttgatg

SEQ ID NO: 154044 - DNA, 25 bp, Probe sequence
aagagttcactccaacgcttgatgg

SEQ ID NO: 154045 - DNA, 25 bp, Probe sequence
aagactgtaaagatgtcattacaca

SEQ ID NO: 154046 - DNA, 25 bp, Probe sequence
aagtgcatcaaagagttcactccaa

SEQ ID NO: 154047 - DNA, 25 bp, Probe sequence
aatgaagctgtaaacttattggtga

SEQ ID NO: 154048 - DNA, 25 bp, Probe sequence
caagggcaactaaatggaattatta

SEQ ID NO: 154049 - DNA, 25 bp, Probe sequence
caaagagttcactccaacgcttgat

SEQ ID NO: 154050 - DNA, 25 bp, Probe sequence
cactccaacgcttgatgggtatcat

SEQ ID NO: 154051 - DNA, 25 bp, Probe sequence
ctccaacgcttgatgggtatcatta

SEQ ID NO: 154052 - DNA, 25 bp, Probe sequence
ccaacgcttgatgggtatcattatt

SEQ ID NO: 154053 - DNA, 25 bp, Probe sequence
gcggatgatgaagaaagctcccaag

SEQ ID NO: 154054 - DNA, 25 bp, Probe sequence
gctgcggatgatgaagaaagctccc

SEQ ID NO: 154055 - DNA, 25 bp, Probe sequence
gcatcaaagagttcactccaacgct

SEQ ID NO: 154056 - DNA, 25 bp, Probe sequence
gaatacaagggcaactaaatggaat

SEQ ID NO: 154057 - DNA, 25 bp, Probe sequence
gaagaaagctcccaagagttaatta

SEQ ID NO: 154058 - DNA, 25 bp, Probe sequence
gaagctgtaaacttattggtgaaaa

SEQ ID NO: 154059 - DNA, 25 bp, Probe sequence
gaaagctcccaagagttaattaatg

SEQ ID NO: 154060 - DNA, 25 bp, Probe sequence
gatggaggaaggaaaagactgtaaa

SEQ ID NO: 154061 - DNA, 25 bp, Probe sequence
gatgtcattacacaaataagtgcat

SEQ ID NO: 154062 - DNA, 25 bp, Probe sequence
gatgggtatcattattagtgagaat

SEQ ID NO: 154063 - DNA, 25 bp, Probe sequence
gatgatgaagaaagctcccaagagt

SEQ ID NO: 154064 - DNA, 25 bp, Probe sequence
gatgaagaaagctcccaagagttaa

SEQ ID NO: 154065 - DNA, 25 bp, Probe sequence
gttcactccaacgcttgatgggtat

SEQ ID NO: 154066 - DNA, 25 bp, Probe sequence
gtcattacacaaataagtgcatcaa

SEQ ID NO: 154067 - DNA, 25 bp, Probe sequence
gtgcatcaaagagttcactccaacg

SEQ ID NO: 154068 - DNA, 25 bp, Probe sequence
ggtatcattattagtgagaatttaa

SEQ ID NO: 154069 - DNA, 25 bp, Probe sequence
tcactccaacgcttgatgggtatca

SEQ ID NO: 154070 - DNA, 25 bp, Probe sequence
tcaaagagttcactccaacgcttga

SEQ ID NO: 154071 - DNA, 25 bp, Probe sequence
ttcactccaacgcttgatgggtatc

SEQ ID NO: 154072 - DNA, 25 bp, Probe sequence
atttggcatgataaaccctcaacag

SEQ ID NO: 154073 - DNA, 25 bp, Probe sequence
atatagatatgtattgcctgcaata

SEQ ID NO: 154074 - DNA, 25 bp, Probe sequence
atatggcttggaccatttggcatga

SEQ ID NO: 154075 - DNA, 25 bp, Probe sequence
atagttggtttaattttcttgatgt

SEQ ID NO: 154076 - DNA, 25 bp, Probe sequence
atcagtttcattactcaatccacat

SEQ ID NO: 154077 - DNA, 25 bp, Probe sequence
atccacatgctattttagatacaat

SEQ ID NO: 154078 - DNA, 25 bp, Probe sequence
agcgtttcatggttatggttctttt

SEQ ID NO: 154079 - DNA, 25 bp, Probe sequence
aacaagtaagttttgctttatcagt

SEQ ID NO: 154080 - DNA, 25 bp, Probe sequence
aaaattgcgtttacaatcgcttgta

SEQ ID NO: 154081 - DNA, 25 bp, Probe sequence
aaccgcaattattcatggatttatc

SEQ ID NO: 154082 - DNA, 25 bp, Probe sequence
caaggagctaatcaaccaaaatata

SEQ ID NO: 154083 - DNA, 25 bp, Probe sequence
catggttatggttctttttactcgc

SEQ ID NO: 154084 - DNA, 25 bp, Probe sequence
gcgtttacaatcgcttgtattagcg

SEQ ID NO: 154085 - DNA, 25 bp, Probe sequence
gcttgtattagcgtttcatggttat

SEQ ID NO: 154086 - DNA, 25 bp, Probe sequence
gatattacaaaaacttattcaatta

SEQ ID NO: 154087 - DNA, 25 bp, Probe sequence
gttatggttctttttactcgcaatt

SEQ ID NO: 154088 - DNA, 25 bp, Probe sequence
gttttgctttatcagtttcattact

SEQ ID NO: 154089 - DNA, 25 bp, Probe sequence
gtttcattactcaatccacatgcta

SEQ ID NO: 154090 - DNA, 25 bp, Probe sequence
gtagtagtgctgcattatatagtgg

SEQ ID NO: 154091 - DNA, 25 bp, Probe sequence
gtaattggtagtagtgctgcattat

SEQ ID NO: 154092 - DNA, 25 bp, Probe sequence
ggaccatttggcatgataaaccctc

SEQ ID NO: 154093 - DNA, 25 bp, Probe sequence
ggcatgataaaccctcaacagatgg

SEQ ID NO: 154094 - DNA, 25 bp, Probe sequence
tggatttatcttagcgattggtcta

SEQ ID NO: 154095 - DNA, 25 bp, Probe sequence
tggtctaattttacctttaggtgca

SEQ ID NO: 154096 - DNA, 25 bp, Probe sequence
tggtaaccgcaattattcatggatt

SEQ ID NO: 154097 - DNA, 25 bp, Probe sequence
tggttctttttactcgcaattttag

SEQ ID NO: 154098 - DNA, 25 bp, Probe sequence
tgtatttatttttaaccaaggagct

SEQ ID NO: 154099 - DNA, 25 bp, Probe sequence
tgataaaccctcaacagatggagaa

SEQ ID NO: 154100 - DNA, 25 bp, Probe sequence
tacttcaagcaattatttatatagt

SEQ ID NO: 154101 - DNA, 25 bp, Probe sequence
tactcaatccacatgctattttaga

SEQ ID NO: 154102 - DNA, 25 bp, Probe sequence
tagcgattggtctaattttaccttt

SEQ ID NO: 154103 - DNA, 25 bp, Probe sequence
tttacctttaggtgcacaaaatgta

SEQ ID NO: 154104 - DNA, 25 bp, Probe sequence
ttaaccaaggagctaatcaaccaaa

SEQ ID NO: 154105 - DNA, 25 bp, Probe sequence
ttcttgatgtatatggcttggacca

SEQ ID NO: 154106 - DNA, 25 bp, Probe sequence
attgattattggacacatatggcat

SEQ ID NO: 154107 - DNA, 25 bp, Probe sequence
atagtatctatcattgtctttcaat

SEQ ID NO: 154108 - DNA, 25 bp, Probe sequence
atacctcactttatttacggacata

SEQ ID NO: 154109 - DNA, 25 bp, Probe sequence
atacaacaagtgtcgtattacgaac

SEQ ID NO: 154110 - DNA, 25 bp, Probe sequence
ataatcgttttaatagtatctatca

SEQ ID NO: 154111 - DNA, 25 bp, Probe sequence
atgtcgtactatacctcactttatt

SEQ ID NO: 154112 - DNA, 25 bp, Probe sequence
atggcaagtgcctcaaaacataaaa

SEQ ID NO: 154113 - DNA, 25 bp, Probe sequence
acctcactttatttacggacatact

SEQ ID NO: 154114 - DNA, 25 bp, Probe sequence
actttatttacggacatactaagat

SEQ ID NO: 154115 - DNA, 25 bp, Probe sequence
caatatcctaaatggcaagtgcctc

SEQ ID NO: 154116 - DNA, 25 bp, Probe sequence
ctatacctcactttatttacggaca

SEQ ID NO: 154117 - DNA, 25 bp, Probe sequence
ctcactttatttacggacatactaa

SEQ ID NO: 154118 - DNA, 25 bp, Probe sequence
ccatttggactaggtgtatttatac

SEQ ID NO: 154119 - DNA, 25 bp, Probe sequence
gcatgatattggtttaagttattta

SEQ ID NO: 154120 - DNA, 25 bp, Probe sequence
gcaagtgcctcaaaacataaaagtt

SEQ ID NO: 154121 - DNA, 25 bp, Probe sequence
gaacgacaatatcctaaatggcaag

SEQ ID NO: 154122 - DNA, 25 bp, Probe sequence
gagtatgtcgtactatacctcactt

SEQ ID NO: 154123 - DNA, 25 bp, Probe sequence
gattattggacacatatggcatgat

SEQ ID NO: 154124 - DNA, 25 bp, Probe sequence
gtatctatcattgtctttcaattga

SEQ ID NO: 154125 - DNA, 25 bp, Probe sequence
gtatgtcgtactatacctcacttta

SEQ ID NO: 154126 - DNA, 25 bp, Probe sequence
gtactatacctcactttatttacgg

SEQ ID NO: 154127 - DNA, 25 bp, Probe sequence
gtcgtactatacctcactttattta

SEQ ID NO: 154128 - DNA, 25 bp, Probe sequence
gtgtatttatacaacaagtgtcgta

SEQ ID NO: 154129 - DNA, 25 bp, Probe sequence
ggacacatatggcatgatattggtt

SEQ ID NO: 154130 - DNA, 25 bp, Probe sequence
tcgtattacgaacgacaatatccta

SEQ ID NO: 154131 - DNA, 25 bp, Probe sequence
tctatcattgtctttcaattgatta

SEQ ID NO: 154132 - DNA, 25 bp, Probe sequence
taatagtatctatcattgtctttca

SEQ ID NO: 154133 - DNA, 25 bp, Probe sequence
taagaagtatcttactcatgatgct

SEQ ID NO: 154134 - DNA, 25 bp, Probe sequence
tactatacctcactttatttacgga

SEQ ID NO: 154135 - DNA, 25 bp, Probe sequence
tatcctaaatggcaagtgcctcaaa

SEQ ID NO: 154136 - DNA, 25 bp, Probe sequence
tacgaacgacaatatcctaaatggc

SEQ ID NO: 154137 - DNA, 25 bp, Probe sequence
tagagtatgtcgtactatacctcac

SEQ ID NO: 154138 - DNA, 25 bp, Probe sequence
tatggcatgatattggtttaagtta

SEQ ID NO: 154139 - DNA, 25 bp, Probe sequence
tatgtcgtactatacctcactttat

SEQ ID NO: 154140 - DNA, 25 bp, Probe sequence
atacctatttcgatgaacattggct

SEQ ID NO: 154141 - DNA, 25 bp, Probe sequence
atacaactttgttactaataacgat

SEQ ID NO: 154142 - DNA, 25 bp, Probe sequence
atgtattgtatttggctgttatgaa

SEQ ID NO: 154143 - DNA, 25 bp, Probe sequence
aggattcgacattcttggttttgag

SEQ ID NO: 154144 - DNA, 25 bp, Probe sequence
agtgcactaggattcgacattcttg

SEQ ID NO: 154145 - DNA, 25 bp, Probe sequence
acacttatcgcaacagctgccttag

SEQ ID NO: 154146 - DNA, 25 bp, Probe sequence
aaatcgattaatagcgagctcatta

SEQ ID NO: 154147 - DNA, 25 bp, Probe sequence
aattcactcaagattcacattatag

SEQ ID NO: 154148 - DNA, 25 bp, Probe sequence
caagattcacattatagtcaaacaa

SEQ ID NO: 154149 - DNA, 25 bp, Probe sequence
caaacaatgactgacaccttaatac

SEQ ID NO: 154150 - DNA, 25 bp, Probe sequence
gctgccttagaacaaattcgatacg

SEQ ID NO: 154151 - DNA, 25 bp, Probe sequence
gctaaagttttctatagtgcactag

SEQ ID NO: 154152 - DNA, 25 bp, Probe sequence
gcactaggattcgacattcttggtt

SEQ ID NO: 154153 - DNA, 25 bp, Probe sequence
gcaacagctgccttagaacaaattc

SEQ ID NO: 154154 - DNA, 25 bp, Probe sequence
gcaattaaaatcggaaatacctatt

SEQ ID NO: 154155 - DNA, 25 bp, Probe sequence
gaacattggcttttttatgatttga

SEQ ID NO: 154156 - DNA, 25 bp, Probe sequence
gaacaaattcgatacgttggaaaag

SEQ ID NO: 154157 - DNA, 25 bp, Probe sequence
gaaacacttatcgcaacagctgcct

SEQ ID NO: 154158 - DNA, 25 bp, Probe sequence
gacattttaaatcaaggttcaccga

SEQ ID NO: 154159 - DNA, 25 bp, Probe sequence
gacaccttaatacatgacattttaa

SEQ ID NO: 154160 - DNA, 25 bp, Probe sequence
gacagtcaatgaagaattcactcaa

SEQ ID NO: 154161 - DNA, 25 bp, Probe sequence
gactgacaccttaatacatgacatt

SEQ ID NO: 154162 - DNA, 25 bp, Probe sequence
gagacttgtttcgacagtcaatgaa

SEQ ID NO: 154163 - DNA, 25 bp, Probe sequence
gagtataagagacttgtttcgacag

SEQ ID NO: 154164 - DNA, 25 bp, Probe sequence
gtatttggctgttatgaaaacgaaa

SEQ ID NO: 154165 - DNA, 25 bp, Probe sequence
tcaaggttcaccgaaatgtattgta

SEQ ID NO: 154166 - DNA, 25 bp, Probe sequence
tatgcacggcagaacaattacgaat

SEQ ID NO: 154167 - DNA, 25 bp, Probe sequence
tagcgagctcattaatttcattatt

SEQ ID NO: 154168 - DNA, 25 bp, Probe sequence
taggtgctaaagttttctatagtgc

SEQ ID NO: 154169 - DNA, 25 bp, Probe sequence
tttcattattaattatgcacggcag

SEQ ID NO: 154170 - DNA, 25 bp, Probe sequence
tttacttacatcaattgtgtcaaac

SEQ ID NO: 154171 - DNA, 25 bp, Probe sequence
ttatcgcaacagctgccttagaaca

SEQ ID NO: 154172 - DNA, 25 bp, Probe sequence
ttggcttttttatgatttgattaat

SEQ ID NO: 154173 - DNA, 25 bp, Probe sequence
ttgtgtcaaacaacataggtgctaa

SEQ ID NO: 154174 - DNA, 25 bp, Probe sequence
attctattttcagatagcaatcgat

SEQ ID NO: 154175 - DNA, 25 bp, Probe sequence
attcactaatcgataatttacgtat

SEQ ID NO: 154176 - DNA, 25 bp, Probe sequence
attaacaacagcacaatataaacaa

SEQ ID NO: 154177 - DNA, 25 bp, Probe sequence
attttcagatagcaatcgattcact

SEQ ID NO: 154178 - DNA, 25 bp, Probe sequence
atcaaacgaacaacatatattctat

SEQ ID NO: 154179 - DNA, 25 bp, Probe sequence
atcgataatttacgtatacaagaat

SEQ ID NO: 154180 - DNA, 25 bp, Probe sequence
acgaacaacatatattctattttca

SEQ ID NO: 154181 - DNA, 25 bp, Probe sequence
actaatcgataatttacgtatacaa

SEQ ID NO: 154182 - DNA, 25 bp, Probe sequence
acaacatatattctattttcagata

SEQ ID NO: 154183 - DNA, 25 bp, Probe sequence
acaagaattaacaacagcacaatat

SEQ ID NO: 154184 - DNA, 25 bp, Probe sequence
aacaacatatattctattttcagat

SEQ ID NO: 154185 - DNA, 25 bp, Probe sequence
aacatatattctattttcagatagc

SEQ ID NO: 154186 - DNA, 25 bp, Probe sequence
aacgaacaacatatattctattttc

SEQ ID NO: 154187 - DNA, 25 bp, Probe sequence
caaacgaacaacatatattctattt

SEQ ID NO: 154188 - DNA, 25 bp, Probe sequence
cactaatcgataatttacgtataca

SEQ ID NO: 154189 - DNA, 25 bp, Probe sequence
cagatagcaatcgattcactaatcg

SEQ ID NO: 154190 - DNA, 25 bp, Probe sequence
catatattctattttcagatagcaa

SEQ ID NO: 154191 - DNA, 25 bp, Probe sequence
cgaacaacatatattctattttcag

SEQ ID NO: 154192 - DNA, 25 bp, Probe sequence
gaattaacaacagcacaatataaac

SEQ ID NO: 154193 - DNA, 25 bp, Probe sequence
gaacaacatatattctattttcaga

SEQ ID NO: 154194 - DNA, 25 bp, Probe sequence
gatagcaatcgattcactaatcgat

SEQ ID NO: 154195 - DNA, 25 bp, Probe sequence
gattcactaatcgataatttacgta

SEQ ID NO: 154196 - DNA, 25 bp, Probe sequence
tctattttcagatagcaatcgattc

SEQ ID NO: 154197 - DNA, 25 bp, Probe sequence
tcactaatcgataatttacgtatac

SEQ ID NO: 154198 - DNA, 25 bp, Probe sequence
tcagatagcaatcgattcactaatc

SEQ ID NO: 154199 - DNA, 25 bp, Probe sequence
taatcgataatttacgtatacaaga

SEQ ID NO: 154200 - DNA, 25 bp, Probe sequence
tatacaagaattaacaacagcacaa

SEQ ID NO: 154201 - DNA, 25 bp, Probe sequence
tatattctattttcagatagcaatc

SEQ ID NO: 154202 - DNA, 25 bp, Probe sequence
tattttcagatagcaatcgattcac

SEQ ID NO: 154203 - DNA, 25 bp, Probe sequence
tattctattttcagatagcaatcga

SEQ ID NO: 154204 - DNA, 25 bp, Probe sequence
tttcagatagcaatcgattcactaa

SEQ ID NO: 154205 - DNA, 25 bp, Probe sequence
ttttcagatagcaatcgattcacta

SEQ ID NO: 154206 - DNA, 25 bp, Probe sequence
ttcactaatcgataatttacgtata

SEQ ID NO: 154207 - DNA, 25 bp, Probe sequence
ttcagatagcaatcgattcactaat

SEQ ID NO: 154208 - DNA, 25 bp, Probe sequence
atgctcatccagaagtaacactaac

SEQ ID NO: 154209 - DNA, 25 bp, Probe sequence
atgttatatctcaagaagaagctga

SEQ ID NO: 154210 - DNA, 25 bp, Probe sequence
aggttatgcatcttgcttcaacggt

SEQ ID NO: 154211 - DNA, 25 bp, Probe sequence
aaaacaaagtgcgtgatgctcatcc

SEQ ID NO: 154212 - DNA, 25 bp, Probe sequence
aacaaagtgcgtgatgctcatccag

SEQ ID NO: 154213 - DNA, 25 bp, Probe sequence
aacactaacagtgagactagaagat

SEQ ID NO: 154214 - DNA, 25 bp, Probe sequence
aaccccgaacaattatttgcagcag

SEQ ID NO: 154215 - DNA, 25 bp, Probe sequence
aagcgactcaaggaaatattaatgt

SEQ ID NO: 154216 - DNA, 25 bp, Probe sequence
aagcgacgaatgttggcggacgtaa

SEQ ID NO: 154217 - DNA, 25 bp, Probe sequence
aagtgcgtgatgctcatccagaagt

SEQ ID NO: 154218 - DNA, 25 bp, Probe sequence
aatacattatgaaactaaagcgacg

SEQ ID NO: 154219 - DNA, 25 bp, Probe sequence
caaatggctcatgaattttgtccat

SEQ ID NO: 154220 - DNA, 25 bp, Probe sequence
catccagaagtaacactaacagtga

SEQ ID NO: 154221 - DNA, 25 bp, Probe sequence
ctaaagcgacgaatgttggcggacg

SEQ ID NO: 154222 - DNA, 25 bp, Probe sequence
gcgacgaatgttggcggacgtaaag

SEQ ID NO: 154223 - DNA, 25 bp, Probe sequence
cccgaacaattatttgcagcaggtt

SEQ ID NO: 154224 - DNA, 25 bp, Probe sequence
gcctgctcaagcagatggtaaagct

SEQ ID NO: 154225 - DNA, 25 bp, Probe sequence
gcgacaattaaaaatgttatatctc

SEQ ID NO: 154226 - DNA, 25 bp, Probe sequence
gcagatggtaaagctactaaccccg

SEQ ID NO: 154227 - DNA, 25 bp, Probe sequence
gctactaaccccgaacaattatttg

SEQ ID NO: 154228 - DNA, 25 bp, Probe sequence
gcaggttatgcatcttgcttcaacg

SEQ ID NO: 154229 - DNA, 25 bp, Probe sequence
gcagcaggttatgcatcttgcttca

SEQ ID NO: 154230 - DNA, 25 bp, Probe sequence
gacatgtttatactgatgatcgagc

SEQ ID NO: 154231 - DNA, 25 bp, Probe sequence
gactcagaaagtcctaaattaagtg

SEQ ID NO: 154232 - DNA, 25 bp, Probe sequence
gttggcggacgtaaaggacatgttt

SEQ ID NO: 154233 - DNA, 25 bp, Probe sequence
gttatgcatcttgcttcaacggtgc

SEQ ID NO: 154234 - DNA, 25 bp, Probe sequence
gtccatattcaaaagcgactcaagg

SEQ ID NO: 154235 - DNA, 25 bp, Probe sequence
gtgcgtgatgctcatccagaagtaa

SEQ ID NO: 154236 - DNA, 25 bp, Probe sequence
ggcggacgtaaaggacatgtttata

SEQ ID NO: 154237 - DNA, 25 bp, Probe sequence
tggctcatgaattttgtccatattc

SEQ ID NO: 154238 - DNA, 25 bp, Probe sequence
tgatgctcatccagaagtaacacta

SEQ ID NO: 154239 - DNA, 25 bp, Probe sequence
tactaaccccgaacaattatttgca

SEQ ID NO: 154240 - DNA, 25 bp, Probe sequence
ttaagtgtttcaattgatgcgacaa

SEQ ID NO: 154241 - DNA, 25 bp, Probe sequence
ttgtccatattcaaaagcgactcaa

SEQ ID NO: 154242 - DNA, 25 bp, Probe sequence
attgcacaccttcattcagcaaatg

SEQ ID NO: 154243 - DNA, 25 bp, Probe sequence
attcagcaaatgctaagtcacctga

SEQ ID NO: 154244 - DNA, 25 bp, Probe sequence
atttgaggcaggatggtgcccagac

SEQ ID NO: 154245 - DNA, 25 bp, Probe sequence
atggatttatggattgacccaatcg

SEQ ID NO: 154246 - DNA, 25 bp, Probe sequence
accaatggtatactgttaatcgtga

SEQ ID NO: 154247 - DNA, 25 bp, Probe sequence
accttcattcagcaaatgctaagtc

SEQ ID NO: 154248 - DNA, 25 bp, Probe sequence
actgtcgtgctatggatttatggat

SEQ ID NO: 154249 - DNA, 25 bp, Probe sequence
aagttatgggtatccctagcttgct

SEQ ID NO: 154250 - DNA, 25 bp, Probe sequence
acaccttcattcagcaaatgctaag

SEQ ID NO: 154251 - DNA, 25 bp, Probe sequence
aaaattgcacaccttcattcagcaa

SEQ ID NO: 154252 - DNA, 25 bp, Probe sequence
aatggtatactgttaatcgtgatga

SEQ ID NO: 154253 - DNA, 25 bp, Probe sequence
aattgcacaccttcattcagcaaat

SEQ ID NO: 154254 - DNA, 25 bp, Probe sequence
cagactgtcgtgctatggatttatg

SEQ ID NO: 154255 - DNA, 25 bp, Probe sequence
gcccagactgtcgtgctatggattt

SEQ ID NO: 154256 - DNA, 25 bp, Probe sequence
gcttgctagtatttaaaaacggcga

SEQ ID NO: 154257 - DNA, 25 bp, Probe sequence
gcacaccttcattcagcaaatgcta

SEQ ID NO: 154258 - DNA, 25 bp, Probe sequence
gaattagaagatgtagttgttgaaa

SEQ ID NO: 154259 - DNA, 25 bp, Probe sequence
gaagttatgggtatccctagcttgc

SEQ ID NO: 154260 - DNA, 25 bp, Probe sequence
gaaaatgaagttatgggtatcccta

SEQ ID NO: 154261 - DNA, 25 bp, Probe sequence
gactgtcgtgctatggatttatgga

SEQ ID NO: 154262 - DNA, 25 bp, Probe sequence
gaggcaggatggtgcccagactgtc

SEQ ID NO: 154263 - DNA, 25 bp, Probe sequence
gttatgggtatccctagcttgctag

SEQ ID NO: 154264 - DNA, 25 bp, Probe sequence
gtatccctagcttgctagtatttaa

SEQ ID NO: 154265 - DNA, 25 bp, Probe sequence
gtcgtgctatggatttatggattga

SEQ ID NO: 154266 - DNA, 25 bp, Probe sequence
gtgctatggatttatggattgaccc

SEQ ID NO: 154267 - DNA, 25 bp, Probe sequence
gggtatccctagcttgctagtattt

SEQ ID NO: 154268 - DNA, 25 bp, Probe sequence
ggtatactgttaatcgtgatgaatt

SEQ ID NO: 154269 - DNA, 25 bp, Probe sequence
ggattgacccaatcgtagaacaata

SEQ ID NO: 154270 - DNA, 25 bp, Probe sequence
tgcacaccttcattcagcaaatgct

SEQ ID NO: 154271 - DNA, 25 bp, Probe sequence
tgcccagactgtcgtgctatggatt

SEQ ID NO: 154272 - DNA, 25 bp, Probe sequence
tcatttttagcagaaacttttaaat

SEQ ID NO: 154273 - DNA, 25 bp, Probe sequence
tatgggtatccctagcttgctagta

SEQ ID NO: 154274 - DNA, 25 bp, Probe sequence
ttaccaatggtatactgttaatcgt

SEQ ID NO: 154275 - DNA, 25 bp, Probe sequence
ttgacccaatcgtagaacaatataa

SEQ ID NO: 154276 - DNA, 25 bp, Probe sequence
attagtcttataccaatatcgacag

SEQ ID NO: 154277 - DNA, 25 bp, Probe sequence
atatcgacagtctatatctattaca

SEQ ID NO: 154278 - DNA, 25 bp, Probe sequence
ataccaatatcgacagtctatatct

SEQ ID NO: 154279 - DNA, 25 bp, Probe sequence
atactgacgttgtattagtcttata

SEQ ID NO: 154280 - DNA, 25 bp, Probe sequence
atcgacagtctatatctattacaaa

SEQ ID NO: 154281 - DNA, 25 bp, Probe sequence
atcctaatcatttaaatactgacgt

SEQ ID NO: 154282 - DNA, 25 bp, Probe sequence
agtcttataccaatatcgacagtct

SEQ ID NO: 154283 - DNA, 25 bp, Probe sequence
accaatatcgacagtctatatctat

SEQ ID NO: 154284 - DNA, 25 bp, Probe sequence
acgttgtattagtcttataccaata

SEQ ID NO: 154285 - DNA, 25 bp, Probe sequence
actgacgttgtattagtcttatacc

SEQ ID NO: 154286 - DNA, 25 bp, Probe sequence
acttcattcacgacctttcttaaat

SEQ ID NO: 154287 - DNA, 25 bp, Probe sequence
aatatcgacagtctatatctattac

SEQ ID NO: 154288 - DNA, 25 bp, Probe sequence
cagtctatatctattacaaactttt

SEQ ID NO: 154289 - DNA, 25 bp, Probe sequence
cttcattcacgacctttcttaaata

SEQ ID NO: 154290 - DNA, 25 bp, Probe sequence
cttataccaatatcgacagtctata

SEQ ID NO: 154291 - DNA, 25 bp, Probe sequence
ctgacgttgtattagtcttatacca

SEQ ID NO: 154292 - DNA, 25 bp, Probe sequence
ccaatatcgacagtctatatctatt

SEQ ID NO: 154293 - DNA, 25 bp, Probe sequence
gacagtctatatctattacaaactt

SEQ ID NO: 154294 - DNA, 25 bp, Probe sequence
gacgttgtattagtcttataccaat

SEQ ID NO: 154295 - DNA, 25 bp, Probe sequence
gttgtattagtcttataccaatatc

SEQ ID NO: 154296 - DNA, 25 bp, Probe sequence
gtattagtcttataccaatatcgac

SEQ ID NO: 154297 - DNA, 25 bp, Probe sequence
gtcttataccaatatcgacagtcta

SEQ ID NO: 154298 - DNA, 25 bp, Probe sequence
gtctatatctattacaaacttttat

SEQ ID NO: 154299 - DNA, 25 bp, Probe sequence
tcgacagtctatatctattacaaac

SEQ ID NO: 154300 - DNA, 25 bp, Probe sequence
tcttataccaatatcgacagtctat

SEQ ID NO: 154301 - DNA, 25 bp, Probe sequence
tcattcacgacctttcttaaataaa

SEQ ID NO: 154302 - DNA, 25 bp, Probe sequence
taatcatttaaatactgacgttgta

SEQ ID NO: 154303 - DNA, 25 bp, Probe sequence
taccaatatcgacagtctatatcta

SEQ ID NO: 154304 - DNA, 25 bp, Probe sequence
tagtcttataccaatatcgacagtc

SEQ ID NO: 154305 - DNA, 25 bp, Probe sequence
tatctattacaaacttttattttca

SEQ ID NO: 154306 - DNA, 25 bp, Probe sequence
tatcgacagtctatatctattacaa

SEQ ID NO: 154307 - DNA, 25 bp, Probe sequence
tataccaatatcgacagtctatatc

SEQ ID NO: 154308 - DNA, 25 bp, Probe sequence
tttcttaaataaaaatcctaatcat

SEQ ID NO: 154309 - DNA, 25 bp, Probe sequence
ttcattcacgacctttcttaaataa

SEQ ID NO: 154310 - DNA, 25 bp, Probe sequence
atatgcgcaacaagttttcgatgaa

SEQ ID NO: 154311 - DNA, 25 bp, Probe sequence
ataagacacctactacacttaagtc

SEQ ID NO: 154312 - DNA, 25 bp, Probe sequence
atgagcgtatagaagcaaaactgaa

SEQ ID NO: 154313 - DNA, 25 bp, Probe sequence
atggatcgtgtaggccattccgacc

SEQ ID NO: 154314 - DNA, 25 bp, Probe sequence
aggatatgatgaacaaacttgaaca

SEQ ID NO: 154315 - DNA, 25 bp, Probe sequence
agcagaagttgcgagatattaaaga

SEQ ID NO: 154316 - DNA, 25 bp, Probe sequence
aacggaacaatccattggtttcacg

SEQ ID NO: 154317 - DNA, 25 bp, Probe sequence
aacccaatgcagactgaaagattca

SEQ ID NO: 154318 - DNA, 25 bp, Probe sequence
aagccttaaatggtatgcgtattgg

SEQ ID NO: 154319 - DNA, 25 bp, Probe sequence
aagaagtttcttcacatatattaag

SEQ ID NO: 154320 - DNA, 25 bp, Probe sequence
aaggcgtgtcacttaaagctattat

SEQ ID NO: 154321 - DNA, 25 bp, Probe sequence
aatctggtggattcggtgtaaaaga

SEQ ID NO: 154322 - DNA, 25 bp, Probe sequence
aataaaatccttagggaagcagcta

SEQ ID NO: 154323 - DNA, 25 bp, Probe sequence
aataacactttcatatgcgcaacaa

SEQ ID NO: 154324 - DNA, 25 bp, Probe sequence
aattggattgagtagcagaagttgc

SEQ ID NO: 154325 - DNA, 25 bp, Probe sequence
aattgagtaagctaaacactttgaa

SEQ ID NO: 154326 - DNA, 25 bp, Probe sequence
caatccattggtttcacgatgaatc

SEQ ID NO: 154327 - DNA, 25 bp, Probe sequence
cattactctctcaacaaggcgtgtc

SEQ ID NO: 154328 - DNA, 25 bp, Probe sequence
ctttccatttattctcacgttactg

SEQ ID NO: 154329 - DNA, 25 bp, Probe sequence
ctctctcaacaaggcgtgtcactta

SEQ ID NO: 154330 - DNA, 25 bp, Probe sequence
ctgaatgataagacacctactacac

SEQ ID NO: 154331 - DNA, 25 bp, Probe sequence
gaagcagctaaagatgttggtattg

SEQ ID NO: 154332 - DNA, 25 bp, Probe sequence
gaaattttgtatttactaatcataa

SEQ ID NO: 154333 - DNA, 25 bp, Probe sequence
gacatagccacatatcattactctc

SEQ ID NO: 154334 - DNA, 25 bp, Probe sequence
gataccactaaaacagagtctagtt

SEQ ID NO: 154335 - DNA, 25 bp, Probe sequence
gtattggtgaaatgttagccattca

SEQ ID NO: 154336 - DNA, 25 bp, Probe sequence
gtcacttaaagctattatggatcgt

SEQ ID NO: 154337 - DNA, 25 bp, Probe sequence
ggtttcacgatgaatctggtggatt

SEQ ID NO: 154338 - DNA, 25 bp, Probe sequence
ggttttatttattcgttgcactcat

SEQ ID NO: 154339 - DNA, 25 bp, Probe sequence
ggattcggtgtaaaagataccacta

SEQ ID NO: 154340 - DNA, 25 bp, Probe sequence
tagccacatatcattactctctcaa

SEQ ID NO: 154341 - DNA, 25 bp, Probe sequence
tatatcaaaacgtctgggtcaaaaa

SEQ ID NO: 154342 - DNA, 25 bp, Probe sequence
tattctcacgttactgaacagatgg

SEQ ID NO: 154343 - DNA, 25 bp, Probe sequence
tttatttattcgttgcactcatgac

SEQ ID NO: 154344 - DNA, 25 bp, Probe sequence
attggacatgatggtgttggcggga

SEQ ID NO: 154345 - DNA, 25 bp, Probe sequence
attgcggtcgattatttatattgca

SEQ ID NO: 154346 - DNA, 25 bp, Probe sequence
atattggacatgatggtgttggcgg

SEQ ID NO: 154347 - DNA, 25 bp, Probe sequence
atttgattgattatattggacatga

SEQ ID NO: 154348 - DNA, 25 bp, Probe sequence
atgatggtgttggcgggatgcgttg

SEQ ID NO: 154349 - DNA, 25 bp, Probe sequence
acatgatggtgttggcgggatgcgt

SEQ ID NO: 154350 - DNA, 25 bp, Probe sequence
catgatggtgttggcgggatgcgtt

SEQ ID NO: 154351 - DNA, 25 bp, Probe sequence
cttgtgcttttgtggattgcggtcg

SEQ ID NO: 154352 - DNA, 25 bp, Probe sequence
cttttgtggattgcggtcgattatt

SEQ ID NO: 154353 - DNA, 25 bp, Probe sequence
gcggtcgattatttatattgcatga

SEQ ID NO: 154354 - DNA, 25 bp, Probe sequence
gcttttgtggattgcggtcgattat

SEQ ID NO: 154355 - DNA, 25 bp, Probe sequence
gcttgtgcttttgtggattgcggtc

SEQ ID NO: 154356 - DNA, 25 bp, Probe sequence
gcatgatttgattaatttgattgat

SEQ ID NO: 154357 - DNA, 25 bp, Probe sequence
gacatgatggtgttggcgggatgcg

SEQ ID NO: 154358 - DNA, 25 bp, Probe sequence
gattatttatattgcatgatttgat

SEQ ID NO: 154359 - DNA, 25 bp, Probe sequence
gattgcggtcgattatttatattgc

SEQ ID NO: 154360 - DNA, 25 bp, Probe sequence
gtgcttgtgcttttgtggattgcgg

SEQ ID NO: 154361 - DNA, 25 bp, Probe sequence
gtgcttttgtggattgcggtcgatt

SEQ ID NO: 154362 - DNA, 25 bp, Probe sequence
gtggattgcggtcgattatttatat

SEQ ID NO: 154363 - DNA, 25 bp, Probe sequence
ggtcgattatttatattgcatgatt

SEQ ID NO: 154364 - DNA, 25 bp, Probe sequence
ggattgcggtcgattatttatattg

SEQ ID NO: 154365 - DNA, 25 bp, Probe sequence
ggacatgatggtgttggcgggatgc

SEQ ID NO: 154366 - DNA, 25 bp, Probe sequence
tggacatgatggtgttggcgggatg

SEQ ID NO: 154367 - DNA, 25 bp, Probe sequence
tgtgcttttgtggattgcggtcgat

SEQ ID NO: 154368 - DNA, 25 bp, Probe sequence
tgtggattgcggtcgattatttata

SEQ ID NO: 154369 - DNA, 25 bp, Probe sequence
tgatggtgttggcgggatgcgttgt

SEQ ID NO: 154370 - DNA, 25 bp, Probe sequence
tgcttgtgcttttgtggattgcggt

SEQ ID NO: 154371 - DNA, 25 bp, Probe sequence
tgcttttgtggattgcggtcgatta

SEQ ID NO: 154372 - DNA, 25 bp, Probe sequence
tattgcatgatttgattaatttgat

SEQ ID NO: 154373 - DNA, 25 bp, Probe sequence
tttgtggattgcggtcgattattta

SEQ ID NO: 154374 - DNA, 25 bp, Probe sequence
ttttgtggattgcggtcgattattt

SEQ ID NO: 154375 - DNA, 25 bp, Probe sequence
ttggacatgatggtgttggcgggat

SEQ ID NO: 154376 - DNA, 25 bp, Probe sequence
ttgtgcttttgtggattgcggtcga

SEQ ID NO: 154377 - DNA, 25 bp, Probe sequence
ttgtggattgcggtcgattatttat

SEQ ID NO: 154378 - DNA, 25 bp, Probe sequence
gttaattttaggcgcttgtggtagc

SEQ ID NO: 154379 - DNA, 25 bp, Probe sequence
cacgtgaagactttgggcttgctcc

SEQ ID NO: 154380 - DNA, 25 bp, Probe sequence
actacaaatgatatcgttaaaggtt

SEQ ID NO: 154381 - DNA, 25 bp, Probe sequence
aaatgtttgttgttcaagatgataa

SEQ ID NO: 154382 - DNA, 25 bp, Probe sequence
aaagtgcagctttctattcacatac

SEQ ID NO: 154383 - DNA, 25 bp, Probe sequence
aagcaagagctatactacaaatgat

SEQ ID NO: 154384 - DNA, 25 bp, Probe sequence
aatacaaatgaacggtgatatcgat

SEQ ID NO: 154385 - DNA, 25 bp, Probe sequence
aattattaggtttagcattagcaag

SEQ ID NO: 154386 - DNA, 25 bp, Probe sequence
cacatacccattctaaaggtaagtt

SEQ ID NO: 154387 - DNA, 25 bp, Probe sequence
ctttctattcacatacccattctaa

SEQ ID NO: 154388 - DNA, 25 bp, Probe sequence
ctattcacatacccattctaaaggt

SEQ ID NO: 154389 - DNA, 25 bp, Probe sequence
gcgcttgtggtagcaacgacggaga

SEQ ID NO: 154390 - DNA, 25 bp, Probe sequence
gcttgctccaatgaagacggacgaa

SEQ ID NO: 154391 - DNA, 25 bp, Probe sequence
gctccaatgaagacggacgaagcta

SEQ ID NO: 154392 - DNA, 25 bp, Probe sequence
gcttgtggtagcaacgacggagata

SEQ ID NO: 154393 - DNA, 25 bp, Probe sequence
gcaagtacgttaattttaggcgctt

SEQ ID NO: 154394 - DNA, 25 bp, Probe sequence
gaagactttgggcttgctccaatga

SEQ ID NO: 154395 - DNA, 25 bp, Probe sequence
gaagctaaaatgtttgttgttcaag

SEQ ID NO: 154396 - DNA, 25 bp, Probe sequence
gaaatgacacgtgaagactttgggc

SEQ ID NO: 154397 - DNA, 25 bp, Probe sequence
gacacgtgaagactttgggcttgct

SEQ ID NO: 154398 - DNA, 25 bp, Probe sequence
gactttgggcttgctccaatgaaga

SEQ ID NO: 154399 - DNA, 25 bp, Probe sequence
gagctatactacaaatgatatcgtt

SEQ ID NO: 154400 - DNA, 25 bp, Probe sequence
gatgctactttcaataaatacaaga

SEQ ID NO: 154401 - DNA, 25 bp, Probe sequence
gtacgttaattttaggcgcttgtgg

SEQ ID NO: 154402 - DNA, 25 bp, Probe sequence
gtgaagactttgggcttgctccaat

SEQ ID NO: 154403 - DNA, 25 bp, Probe sequence
gtgcagctttctattcacataccca

SEQ ID NO: 154404 - DNA, 25 bp, Probe sequence
gtgatatcgatgatgctactttcaa

SEQ ID NO: 154405 - DNA, 25 bp, Probe sequence
gggcttgctccaatgaagacggacg

SEQ ID NO: 154406 - DNA, 25 bp, Probe sequence
gtggtagcaacgacggagataagaa

SEQ ID NO: 154407 - DNA, 25 bp, Probe sequence
ggtttagcattagcaagtacgttaa

SEQ ID NO: 154408 - DNA, 25 bp, Probe sequence
tttaggcgcttgtggtagcaacgac

SEQ ID NO: 154409 - DNA, 25 bp, Probe sequence
taggcgcttgtggtagcaacgacgg

SEQ ID NO: 154410 - DNA, 25 bp, Probe sequence
tatcgatgatgctactttcaataaa

SEQ ID NO: 154411 - DNA, 25 bp, Probe sequence
ttctattcacatacccattctaaag

SEQ ID NO: 154412 - DNA, 25 bp, Probe sequence
ttatccgaaaggcgtaaagccgaag

SEQ ID NO: 154413 - DNA, 25 bp, Probe sequence
attttgagggtctctatgacaatgg

SEQ ID NO: 154414 - DNA, 25 bp, Probe sequence
atgacaatggagttattttaattaa

SEQ ID NO: 154415 - DNA, 25 bp, Probe sequence
agcagtcccgttacgtgaaattgta

SEQ ID NO: 154416 - DNA, 25 bp, Probe sequence
aaattacgcacgtagacacggcttt

SEQ ID NO: 154417 - DNA, 25 bp, Probe sequence
aaacaaagagataccaattgatgat

SEQ ID NO: 154418 - DNA, 25 bp, Probe sequence
aagccgaagtgttatacgaagaact

SEQ ID NO: 154419 - DNA, 25 bp, Probe sequence
cagcagtcccgttacgtgaaattgt

SEQ ID NO: 154420 - DNA, 25 bp, Probe sequence
aattgatgatgggaagtctttaggt

SEQ ID NO: 154421 - DNA, 25 bp, Probe sequence
caagttcgaaaattacgcacgtaga

SEQ ID NO: 154422 - DNA, 25 bp, Probe sequence
gcagtcccgttacgtgaaattgtag

SEQ ID NO: 154423 - DNA, 25 bp, Probe sequence
cattttagaccaatcgaagttcaac

SEQ ID NO: 154424 - DNA, 25 bp, Probe sequence
ctcagcagtcccgttacgtgaaatt

SEQ ID NO: 154425 - DNA, 25 bp, Probe sequence
cccgttacgtgaaattgtagaagct

SEQ ID NO: 154426 - DNA, 25 bp, Probe sequence
gccgaagtgttatacgaagaacttg

SEQ ID NO: 154427 - DNA, 25 bp, Probe sequence
gtaaagccgaagtgttatacgaaga

SEQ ID NO: 154428 - DNA, 25 bp, Probe sequence
gcaagttcgaaaattacgcacgtag

SEQ ID NO: 154429 - DNA, 25 bp, Probe sequence
gaaaggcgtaaagccgaagtgttat

SEQ ID NO: 154430 - DNA, 25 bp, Probe sequence
gagggtctctatgacaatggagtta

SEQ ID NO: 154431 - DNA, 25 bp, Probe sequence
gatgatgggaagtctttaggtaatt

SEQ ID NO: 154432 - DNA, 25 bp, Probe sequence
gtatttatacgaaaagatggttatt

SEQ ID NO: 154433 - DNA, 25 bp, Probe sequence
gtcccgttacgtgaaattgtagaag

SEQ ID NO: 154434 - DNA, 25 bp, Probe sequence
gggtctctatgacaatggagttatt

SEQ ID NO: 154435 - DNA, 25 bp, Probe sequence
ggtaattttgagggtctctatgaca

SEQ ID NO: 154436 - DNA, 25 bp, Probe sequence
ggcgtaaagccgaagtgttatacga

SEQ ID NO: 154437 - DNA, 25 bp, Probe sequence
tgggaagtctttaggtaattttgag

SEQ ID NO: 154438 - DNA, 25 bp, Probe sequence
tcagcagtcccgttacgtgaaattg

SEQ ID NO: 154439 - DNA, 25 bp, Probe sequence
tctttaggtaattttgagggtctct

SEQ ID NO: 154440 - DNA, 25 bp, Probe sequence
tctcagcagtcccgttacgtgaaat

SEQ ID NO: 154441 - DNA, 25 bp, Probe sequence
tacgcacgtagacacggctttatct

SEQ ID NO: 154442 - DNA, 25 bp, Probe sequence
tagaccaatcgaagttcaacaatcg

SEQ ID NO: 154443 - DNA, 25 bp, Probe sequence
ttttagaccaatcgaagttcaacaa

SEQ ID NO: 154444 - DNA, 25 bp, Probe sequence
ttacgcacgtagacacggctttatc

SEQ ID NO: 154445 - DNA, 25 bp, Probe sequence
ttgagggtctctatgacaatggagt

SEQ ID NO: 154446 - DNA, 25 bp, Probe sequence
attgaatcgcgctgaagattttgcg

SEQ ID NO: 154447 - DNA, 25 bp, Probe sequence
atttattaggatttgctgaacgcga

SEQ ID NO: 154448 - DNA, 25 bp, Probe sequence
atttgctgaacgcgaagaatctaca

SEQ ID NO: 154449 - DNA, 25 bp, Probe sequence
agttcccattgaatcgcgctgaaga

SEQ ID NO: 154450 - DNA, 25 bp, Probe sequence
agatactatcgccgcgcacttagat

SEQ ID NO: 154451 - DNA, 25 bp, Probe sequence
aaatttaactagagagttcccattg

SEQ ID NO: 154452 - DNA, 25 bp, Probe sequence
aaaacaagatactatcgccgcgcac

SEQ ID NO: 154453 - DNA, 25 bp, Probe sequence
ctcgtcgtgtaggtgtagcaaaatc

SEQ ID NO: 154454 - DNA, 25 bp, Probe sequence
gccgcgcacttagatggagatttta

SEQ ID NO: 154455 - DNA, 25 bp, Probe sequence
gcgcacttagatggagattttacag

SEQ ID NO: 154456 - DNA, 25 bp, Probe sequence
gctgaagattttgcgaaagtacttg

SEQ ID NO: 154457 - DNA, 25 bp, Probe sequence
gcaaaatcagcagtatcaagatatt

SEQ ID NO: 154458 - DNA, 25 bp, Probe sequence
gaattagctcgtcgtgtaggtgtag

SEQ ID NO: 154459 - DNA, 25 bp, Probe sequence
gaatcgcgctgaagattttgcgaaa

SEQ ID NO: 154460 - DNA, 25 bp, Probe sequence
gaacgcgaagaatctacaaaacaag

SEQ ID NO: 154461 - DNA, 25 bp, Probe sequence
gaacaaaatatgtcactaagtgaat

SEQ ID NO: 154462 - DNA, 25 bp, Probe sequence
gaaagtatgcggagttagttagaaa

SEQ ID NO: 154463 - DNA, 25 bp, Probe sequence
gaaattagaaagtatgcggagttag

SEQ ID NO: 154464 - DNA, 25 bp, Probe sequence
gatggagattttacagaggaagaat

SEQ ID NO: 154465 - DNA, 25 bp, Probe sequence
gatactatcgccgcgcacttagatg

SEQ ID NO: 154466 - DNA, 25 bp, Probe sequence
gattttgcgaaagtacttggaataa

SEQ ID NO: 154467 - DNA, 25 bp, Probe sequence
gttcccattgaatcgcgctgaagat

SEQ ID NO: 154468 - DNA, 25 bp, Probe sequence
gtcgtgtaggtgtagcaaaatcagc

SEQ ID NO: 154469 - DNA, 25 bp, Probe sequence
gtgaattagctcgtcgtgtaggtgt

SEQ ID NO: 154470 - DNA, 25 bp, Probe sequence
ggtgtagcaaaatcagcagtatcaa

SEQ ID NO: 154471 - DNA, 25 bp, Probe sequence
ggagttagttagaaaagcacatcga

SEQ ID NO: 154472 - DNA, 25 bp, Probe sequence
tcgccgcgcacttagatggagattt

SEQ ID NO: 154473 - DNA, 25 bp, Probe sequence
taagtgaattagctcgtcgtgtagg

SEQ ID NO: 154474 - DNA, 25 bp, Probe sequence
tagagagttcccattgaatcgcgct

SEQ ID NO: 154475 - DNA, 25 bp, Probe sequence
tactatcgccgcgcacttagatgga

SEQ ID NO: 154476 - DNA, 25 bp, Probe sequence
tagaaaagcacatcgaaatcagtaa

SEQ ID NO: 154477 - DNA, 25 bp, Probe sequence
tatcgccgcgcacttagatggagat

SEQ ID NO: 154478 - DNA, 25 bp, Probe sequence
ttaggatttgctgaacgcgaagaat

SEQ ID NO: 154479 - DNA, 25 bp, Probe sequence
ttagctcgtcgtgtaggtgtagcaa

SEQ ID NO: 154480 - DNA, 25 bp, Probe sequence
atttatcgatatatactccaatacg

SEQ ID NO: 154481 - DNA, 25 bp, Probe sequence
atatatactccaatacgattttact

SEQ ID NO: 154482 - DNA, 25 bp, Probe sequence
atatactccaatacgattttactag

SEQ ID NO: 154483 - DNA, 25 bp, Probe sequence
atactccaatacgattttactaggg

SEQ ID NO: 154484 - DNA, 25 bp, Probe sequence
atcgttattaagttacattatagag

SEQ ID NO: 154485 - DNA, 25 bp, Probe sequence
atcgatatatactccaatacgattt

SEQ ID NO: 154486 - DNA, 25 bp, Probe sequence
atgaacgacatgatgaacctagtta

SEQ ID NO: 154487 - DNA, 25 bp, Probe sequence
atgaatttatcgatatatactccaa

SEQ ID NO: 154488 - DNA, 25 bp, Probe sequence
atgatgaacctagttattaaccaaa

SEQ ID NO: 154489 - DNA, 25 bp, Probe sequence
acgacatgatgaacctagttattaa

SEQ ID NO: 154490 - DNA, 25 bp, Probe sequence
acatgatgaacctagttattaacca

SEQ ID NO: 154491 - DNA, 25 bp, Probe sequence
aaatcgttattaagttacattatag

SEQ ID NO: 154492 - DNA, 25 bp, Probe sequence
aacgacatgatgaacctagttatta

SEQ ID NO: 154493 - DNA, 25 bp, Probe sequence
aatgaatttatcgatatatactcca

SEQ ID NO: 154494 - DNA, 25 bp, Probe sequence
aatttatcgatatatactccaatac

SEQ ID NO: 154495 - DNA, 25 bp, Probe sequence
catgatgaacctagttattaaccaa

SEQ ID NO: 154496 - DNA, 25 bp, Probe sequence
cgatatatactccaatacgatttta

SEQ ID NO: 154497 - DNA, 25 bp, Probe sequence
ccaaatcgttattaagttacattat

SEQ ID NO: 154498 - DNA, 25 bp, Probe sequence
gaatttatcgatatatactccaata

SEQ ID NO: 154499 - DNA, 25 bp, Probe sequence
gaatgaatttatcgatatatactcc

SEQ ID NO: 154500 - DNA, 25 bp, Probe sequence
gaacgacatgatgaacctagttatt

SEQ ID NO: 154501 - DNA, 25 bp, Probe sequence
gacatgatgaacctagttattaacc

SEQ ID NO: 154502 - DNA, 25 bp, Probe sequence
gagatgattggaatgaatttatcga

SEQ ID NO: 154503 - DNA, 25 bp, Probe sequence
gatgaacctagttattaaccaaatc

SEQ ID NO: 154504 - DNA, 25 bp, Probe sequence
gatatatactccaatacgattttac

SEQ ID NO: 154505 - DNA, 25 bp, Probe sequence
gttacattatagagatgattggaat

SEQ ID NO: 154506 - DNA, 25 bp, Probe sequence
tgaacgacatgatgaacctagttat

SEQ ID NO: 154507 - DNA, 25 bp, Probe sequence
tgaacctagttattaaccaaatcgt

SEQ ID NO: 154508 - DNA, 25 bp, Probe sequence
tgaatttatcgatatatactccaat

SEQ ID NO: 154509 - DNA, 25 bp, Probe sequence
tactccaatacgattttactagggt

SEQ ID NO: 154510 - DNA, 25 bp, Probe sequence
tatactccaatacgattttactagg

SEQ ID NO: 154511 - DNA, 25 bp, Probe sequence
tatatactccaatacgattttacta

SEQ ID NO: 154512 - DNA, 25 bp, Probe sequence
tttatcgatatatactccaatacga

SEQ ID NO: 154513 - DNA, 25 bp, Probe sequence
ttatcgatatatactccaatacgat

SEQ ID NO: 154514 - DNA, 25 bp, Probe sequence
ataaagtcgctaaacgtgctcaaat

SEQ ID NO: 154515 - DNA, 25 bp, Probe sequence
atgtcagtcataaagtcgctaaacg

SEQ ID NO: 154516 - DNA, 25 bp, Probe sequence
agtcataaagtcgctaaacgtgctc

SEQ ID NO: 154517 - DNA, 25 bp, Probe sequence
agtcgctaaacgtgctcaaatacca

SEQ ID NO: 154518 - DNA, 25 bp, Probe sequence
agtacacgtggtttgaatatctggc

SEQ ID NO: 154519 - DNA, 25 bp, Probe sequence
acgtggtttgaatatctggcaagaa

SEQ ID NO: 154520 - DNA, 25 bp, Probe sequence
acacgtggtttgaatatctggcaag

SEQ ID NO: 154521 - DNA, 25 bp, Probe sequence
aaagtcgctaaacgtgctcaaatac

SEQ ID NO: 154522 - DNA, 25 bp, Probe sequence
aaacgtgctcaaataccattaatta

SEQ ID NO: 154523 - DNA, 25 bp, Probe sequence
aagtcgctaaacgtgctcaaatacc

SEQ ID NO: 154524 - DNA, 25 bp, Probe sequence
aatgtcagtcataaagtcgctaaac

SEQ ID NO: 154525 - DNA, 25 bp, Probe sequence
cacgtggtttgaatatctggcaaga

SEQ ID NO: 154526 - DNA, 25 bp, Probe sequence
cataaagtcgctaaacgtgctcaaa

SEQ ID NO: 154527 - DNA, 25 bp, Probe sequence
ctaaacgtgctcaaataccattaat

SEQ ID NO: 154528 - DNA, 25 bp, Probe sequence
cgctaaacgtgctcaaataccatta

SEQ ID NO: 154529 - DNA, 25 bp, Probe sequence
gctaaacgtgctcaaataccattaa

SEQ ID NO: 154530 - DNA, 25 bp, Probe sequence
gaatatctggcaagaaatggaaatt

SEQ ID NO: 154531 - DNA, 25 bp, Probe sequence
gaaatggaaattggtaatgtcagtc

SEQ ID NO: 154532 - DNA, 25 bp, Probe sequence
gagtacacgtggtttgaatatctgg

SEQ ID NO: 154533 - DNA, 25 bp, Probe sequence
gtacacgtggtttgaatatctggca

SEQ ID NO: 154534 - DNA, 25 bp, Probe sequence
gtcataaagtcgctaaacgtgctca

SEQ ID NO: 154535 - DNA, 25 bp, Probe sequence
gtaatgtcagtcataaagtcgctaa

SEQ ID NO: 154536 - DNA, 25 bp, Probe sequence
gtcagtcataaagtcgctaaacgtg

SEQ ID NO: 154537 - DNA, 25 bp, Probe sequence
gtcgctaaacgtgctcaaataccat

SEQ ID NO: 154538 - DNA, 25 bp, Probe sequence
gtggtttgaatatctggcaagaaat

SEQ ID NO: 154539 - DNA, 25 bp, Probe sequence
ggtaatgtcagtcataaagtcgcta

SEQ ID NO: 154540 - DNA, 25 bp, Probe sequence
ggaaattggtaatgtcagtcataaa

SEQ ID NO: 154541 - DNA, 25 bp, Probe sequence
tcgctaaacgtgctcaaataccatt

SEQ ID NO: 154542 - DNA, 25 bp, Probe sequence
tcataaagtcgctaaacgtgctcaa

SEQ ID NO: 154543 - DNA, 25 bp, Probe sequence
tcagtcataaagtcgctaaacgtgc

SEQ ID NO: 154544 - DNA, 25 bp, Probe sequence
taaacgtgctcaaataccattaatt

SEQ ID NO: 154545 - DNA, 25 bp, Probe sequence
taaagtcgctaaacgtgctcaaata

SEQ ID NO: 154546 - DNA, 25 bp, Probe sequence
tacacgtggtttgaatatctggcaa

SEQ ID NO: 154547 - DNA, 25 bp, Probe sequence
ttgagtacacgtggtttgaatatct

SEQ ID NO: 154548 - DNA, 25 bp, Probe sequence
cccccaatttcagctaaagttggtg

SEQ ID NO: 154549 - DNA, 25 bp, Probe sequence
attacgggtacagctgatttagatg

SEQ ID NO: 154550 - DNA, 25 bp, Probe sequence
ataccgatagtgttaaaagaattga

SEQ ID NO: 154551 - DNA, 25 bp, Probe sequence
atgatcccccaatttcagctaaagt

SEQ ID NO: 154552 - DNA, 25 bp, Probe sequence
acggcgacacagtaactatccatag

SEQ ID NO: 154553 - DNA, 25 bp, Probe sequence
acgggtacagctgatttagatgaac

SEQ ID NO: 154554 - DNA, 25 bp, Probe sequence
aaacagcaaatgagacagttggtgt

SEQ ID NO: 154555 - DNA, 25 bp, Probe sequence
aaaaatgatcccccaatttcagcta

SEQ ID NO: 154556 - DNA, 25 bp, Probe sequence
aaaacggcgacacagtaactatcca

SEQ ID NO: 154557 - DNA, 25 bp, Probe sequence
aatggaaataggtttgacgcaaatg

SEQ ID NO: 154558 - DNA, 25 bp, Probe sequence
aatggtggcgaaagtagtattacgg

SEQ ID NO: 154559 - DNA, 25 bp, Probe sequence
aataacaagccgattaataccgata

SEQ ID NO: 154560 - DNA, 25 bp, Probe sequence
caaatcgttaaaaacggcgacacag

SEQ ID NO: 154561 - DNA, 25 bp, Probe sequence
caagccgattaataccgatagtgtt

SEQ ID NO: 154562 - DNA, 25 bp, Probe sequence
gcgaaagtagtattacgggtacagc

SEQ ID NO: 154563 - DNA, 25 bp, Probe sequence
cgtacaatttaaataatggtggcga

SEQ ID NO: 154564 - DNA, 25 bp, Probe sequence
gaaagaagcaaatattatcgataaa

SEQ ID NO: 154565 - DNA, 25 bp, Probe sequence
gacacagtaactatccatagtaaag

SEQ ID NO: 154566 - DNA, 25 bp, Probe sequence
gacagttggtgttacgtacaattta

SEQ ID NO: 154567 - DNA, 25 bp, Probe sequence
gagacagttggtgttacgtacaatt

SEQ ID NO: 154568 - DNA, 25 bp, Probe sequence
gatcccccaatttcagctaaagttg

SEQ ID NO: 154569 - DNA, 25 bp, Probe sequence
gatgaacttagtaattttaataaca

SEQ ID NO: 154570 - DNA, 25 bp, Probe sequence
gataaaaatgatcccccaatttcag

SEQ ID NO: 154571 - DNA, 25 bp, Probe sequence
gttgcaaaggcttctgaaataacag

SEQ ID NO: 154572 - DNA, 25 bp, Probe sequence
gtagtattacgggtacagctgattt

SEQ ID NO: 154573 - DNA, 25 bp, Probe sequence
ggggttaatgctaaatcagagagat

SEQ ID NO: 154574 - DNA, 25 bp, Probe sequence
ggtgaaaactataatggcaacaagg

SEQ ID NO: 154575 - DNA, 25 bp, Probe sequence
ggtacagctgatttagatgaactta

SEQ ID NO: 154576 - DNA, 25 bp, Probe sequence
ggtttgacgcaaatgatgcatggaa

SEQ ID NO: 154577 - DNA, 25 bp, Probe sequence
ggcaacaaggggttaatgctaaatc

SEQ ID NO: 154578 - DNA, 25 bp, Probe sequence
ggcgacacagtaactatccatagta

SEQ ID NO: 154579 - DNA, 25 bp, Probe sequence
tgtcaagaataaatccaaatggaaa

SEQ ID NO: 154580 - DNA, 25 bp, Probe sequence
taataacgttgcaaaggcttctgaa

SEQ ID NO: 154581 - DNA, 25 bp, Probe sequence
taacgttgcaaaggcttctgaaata

SEQ ID NO: 154582 - DNA, 25 bp, Probe sequence
attggtatcgttccatatttattga

SEQ ID NO: 154583 - DNA, 25 bp, Probe sequence
agtagtatttatcatcggttttatt

SEQ ID NO: 154584 - DNA, 25 bp, Probe sequence
acgtcatttacaactaaacattaca

SEQ ID NO: 154585 - DNA, 25 bp, Probe sequence
acatgatggttatagctggtatcgc

SEQ ID NO: 154586 - DNA, 25 bp, Probe sequence
acaccatattccaactatgtttttc

SEQ ID NO: 154587 - DNA, 25 bp, Probe sequence
aaggttttgctatgggaacgagtga

SEQ ID NO: 154588 - DNA, 25 bp, Probe sequence
aatatcgtgatgtggttcgtttcat

SEQ ID NO: 154589 - DNA, 25 bp, Probe sequence
catcggttttattgtaagtttgact

SEQ ID NO: 154590 - DNA, 25 bp, Probe sequence
ctatgtttttctttggtggattaat

SEQ ID NO: 154591 - DNA, 25 bp, Probe sequence
ctccctctttgcagtatttccaggt

SEQ ID NO: 154592 - DNA, 25 bp, Probe sequence
ctggattcattatttcaagcaaaat

SEQ ID NO: 154593 - DNA, 25 bp, Probe sequence
ccaggtttaccaactaatatcgtga

SEQ ID NO: 154594 - DNA, 25 bp, Probe sequence
gctggtatcgctatcttaattgtta

SEQ ID NO: 154595 - DNA, 25 bp, Probe sequence
gactttaggtcgaattaccgctgaa

SEQ ID NO: 154596 - DNA, 25 bp, Probe sequence
gctatgttactcccaggtatttcag

SEQ ID NO: 154597 - DNA, 25 bp, Probe sequence
gaatgttactggcaatgggatcact

SEQ ID NO: 154598 - DNA, 25 bp, Probe sequence
gaacgagtgacttggtacctggtgt

SEQ ID NO: 154599 - DNA, 25 bp, Probe sequence
gacttttgcattaatcattggtttt

SEQ ID NO: 154600 - DNA, 25 bp, Probe sequence
gtatttcctaacacatcataaacta

SEQ ID NO: 154601 - DNA, 25 bp, Probe sequence
gtcatgctagcaatatctgaagttg

SEQ ID NO: 154602 - DNA, 25 bp, Probe sequence
gtggttcgtttcattagtagtattt

SEQ ID NO: 154603 - DNA, 25 bp, Probe sequence
gtggattaatcattggtatcgttcc

SEQ ID NO: 154604 - DNA, 25 bp, Probe sequence
gggatcactaagtaatctttttaat

SEQ ID NO: 154605 - DNA, 25 bp, Probe sequence
ggtcgaattaccgctgaaaatgaat

SEQ ID NO: 154606 - DNA, 25 bp, Probe sequence
ggtacctggtgttagcggtgggact

SEQ ID NO: 154607 - DNA, 25 bp, Probe sequence
ggcatattctcacgacgtttttggc

SEQ ID NO: 154608 - DNA, 25 bp, Probe sequence
tgcagtatttccaggtttaccaact

SEQ ID NO: 154609 - DNA, 25 bp, Probe sequence
tctcacgacgtttttggccaagttt

SEQ ID NO: 154610 - DNA, 25 bp, Probe sequence
tctatggtacggtcatgctagcaat

SEQ ID NO: 154611 - DNA, 25 bp, Probe sequence
tcattggttttgttgttggctccct

SEQ ID NO: 154612 - DNA, 25 bp, Probe sequence
tacaatcaatttatcgcttcaatta

SEQ ID NO: 154613 - DNA, 25 bp, Probe sequence
tatccagtatttcctaacacatcat

SEQ ID NO: 154614 - DNA, 25 bp, Probe sequence
ttattgcaggtatgtgtgcatctag

SEQ ID NO: 154615 - DNA, 25 bp, Probe sequence
ttaagccaacaccatattccaacta

SEQ ID NO: 154616 - DNA, 25 bp, Probe sequence
attagcaacatctgtagtgaactta

SEQ ID NO: 154617 - DNA, 25 bp, Probe sequence
attagctattttttctttagtcatt

SEQ ID NO: 154618 - DNA, 25 bp, Probe sequence
attatgcacttagtcgaagcttacc

SEQ ID NO: 154619 - DNA, 25 bp, Probe sequence
atttttagatgcgattgttggttat

SEQ ID NO: 154620 - DNA, 25 bp, Probe sequence
atttttgataactatatccattgca

SEQ ID NO: 154621 - DNA, 25 bp, Probe sequence
attttttctttagtcattcatagtg

SEQ ID NO: 154622 - DNA, 25 bp, Probe sequence
atgcacttagtcgaagcttaccttt

SEQ ID NO: 154623 - DNA, 25 bp, Probe sequence
agatgcgattgttggttataaaagt

SEQ ID NO: 154624 - DNA, 25 bp, Probe sequence
agctattttttctttagtcattcat

SEQ ID NO: 154625 - DNA, 25 bp, Probe sequence
cacttagtcgaagcttacctttatt

SEQ ID NO: 154626 - DNA, 25 bp, Probe sequence
catattatgcacttagtcgaagctt

SEQ ID NO: 154627 - DNA, 25 bp, Probe sequence
ccattagcaacatctgtagtgaact

SEQ ID NO: 154628 - DNA, 25 bp, Probe sequence
gctattttttctttagtcattcata

SEQ ID NO: 154629 - DNA, 25 bp, Probe sequence
gcatattatgcacttagtcgaagct

SEQ ID NO: 154630 - DNA, 25 bp, Probe sequence
gcacttagtcgaagcttacctttat

SEQ ID NO: 154631 - DNA, 25 bp, Probe sequence
gtccattagcaacatctgtagtgaa

SEQ ID NO: 154632 - DNA, 25 bp, Probe sequence
ggtccattagcaacatctgtagtga

SEQ ID NO: 154633 - DNA, 25 bp, Probe sequence
tgataactatatccattgcaatgat

SEQ ID NO: 154634 - DNA, 25 bp, Probe sequence
tgcacttagtcgaagcttaccttta

SEQ ID NO: 154635 - DNA, 25 bp, Probe sequence
tccattagcaacatctgtagtgaac

SEQ ID NO: 154636 - DNA, 25 bp, Probe sequence
tcattcatagtgctatatttttgat

SEQ ID NO: 154637 - DNA, 25 bp, Probe sequence
tagctattttttctttagtcattca

SEQ ID NO: 154638 - DNA, 25 bp, Probe sequence
tagcaacatctgtagtgaacttaat

SEQ ID NO: 154639 - DNA, 25 bp, Probe sequence
tatgcacttagtcgaagcttacctt

SEQ ID NO: 154640 - DNA, 25 bp, Probe sequence
tattttttctttagtcattcatagt

SEQ ID NO: 154641 - DNA, 25 bp, Probe sequence
tattatgcacttagtcgaagcttac

SEQ ID NO: 154642 - DNA, 25 bp, Probe sequence
tattagctattttttctttagtcat

SEQ ID NO: 154643 - DNA, 25 bp, Probe sequence
tttttagatgcgattgttggttata

SEQ ID NO: 154644 - DNA, 25 bp, Probe sequence
ttttttctttagtcattcatagtgc

SEQ ID NO: 154645 - DNA, 25 bp, Probe sequence
tttttctttagtcattcatagtgct

SEQ ID NO: 154646 - DNA, 25 bp, Probe sequence
ttattagctattttttctttagtca

SEQ ID NO: 154647 - DNA, 25 bp, Probe sequence
ttatgcacttagtcgaagcttacct

SEQ ID NO: 154648 - DNA, 25 bp, Probe sequence
ttagctattttttctttagtcattc

SEQ ID NO: 154649 - DNA, 25 bp, Probe sequence
ttcatagtgctatatttttgataac

SEQ ID NO: 154650 - DNA, 25 bp, Probe sequence
atccgcggtcgtggcggaatggcag

SEQ ID NO: 154651 - DNA, 25 bp, Probe sequence
atatccgcggtcgtggcggaatggc

SEQ ID NO: 154652 - DNA, 25 bp, Probe sequence
ataacgttctgaaaaacgaagatgt

SEQ ID NO: 154653 - DNA, 25 bp, Probe sequence
atgttttaaatgcctatatccgcgg

SEQ ID NO: 154654 - DNA, 25 bp, Probe sequence
agatgttttaaatgcctatatccgc

SEQ ID NO: 154655 - DNA, 25 bp, Probe sequence
acgaagatgttttaaatgcctatat

SEQ ID NO: 154656 - DNA, 25 bp, Probe sequence
aacgaagatgttttaaatgcctata

SEQ ID NO: 154657 - DNA, 25 bp, Probe sequence
aagatgttttaaatgcctatatccg

SEQ ID NO: 154658 - DNA, 25 bp, Probe sequence
cggtcgtggcggaatggcagacgcg

SEQ ID NO: 154659 - DNA, 25 bp, Probe sequence
ctatatccgcggtcgtggcggaatg

SEQ ID NO: 154660 - DNA, 25 bp, Probe sequence
cgcggtcgtggcggaatggcagacg

SEQ ID NO: 154661 - DNA, 25 bp, Probe sequence
cgtggcggaatggcagacgcgctag

SEQ ID NO: 154662 - DNA, 25 bp, Probe sequence
ccgcggtcgtggcggaatggcagac

SEQ ID NO: 154663 - DNA, 25 bp, Probe sequence
cgaagatgttttaaatgcctatatc

SEQ ID NO: 154664 - DNA, 25 bp, Probe sequence
cctatatccgcggtcgtggcggaat

SEQ ID NO: 154665 - DNA, 25 bp, Probe sequence
gcctatatccgcggtcgtggcggaa

SEQ ID NO: 154666 - DNA, 25 bp, Probe sequence
gcggtcgtggcggaatggcagacgc

SEQ ID NO: 154667 - DNA, 25 bp, Probe sequence
gaagatgttttaaatgcctatatcc

SEQ ID NO: 154668 - DNA, 25 bp, Probe sequence
gtcgtggcggaatggcagacgcgct

SEQ ID NO: 154669 - DNA, 25 bp, Probe sequence
gatgttttaaatgcctatatccgcg

SEQ ID NO: 154670 - DNA, 25 bp, Probe sequence
gttttaaatgcctatatccgcggtc

SEQ ID NO: 154671 - DNA, 25 bp, Probe sequence
gtggcggaatggcagacgcgctagg

SEQ ID NO: 154672 - DNA, 25 bp, Probe sequence
ggtcgtggcggaatggcagacgcgc

SEQ ID NO: 154673 - DNA, 25 bp, Probe sequence
tgcctatatccgcggtcgtggcgga

SEQ ID NO: 154674 - DNA, 25 bp, Probe sequence
tttaaatgcctatatccgcggtcgt

SEQ ID NO: 154675 - DNA, 25 bp, Probe sequence
tggcggaatggcagacgcgctaggt

SEQ ID NO: 154676 - DNA, 25 bp, Probe sequence
tgttttaaatgcctatatccgcggt

SEQ ID NO: 154677 - DNA, 25 bp, Probe sequence
tccgcggtcgtggcggaatggcaga

SEQ ID NO: 154678 - DNA, 25 bp, Probe sequence
tcgtggcggaatggcagacgcgcta

SEQ ID NO: 154679 - DNA, 25 bp, Probe sequence
taatataataaataacgttctgaaa

SEQ ID NO: 154680 - DNA, 25 bp, Probe sequence
taacgttctgaaaaacgaagatgtt

SEQ ID NO: 154681 - DNA, 25 bp, Probe sequence
tatatccgcggtcgtggcggaatgg

SEQ ID NO: 154682 - DNA, 25 bp, Probe sequence
tatccgcggtcgtggcggaatggca

SEQ ID NO: 154683 - DNA, 25 bp, Probe sequence
ttttaaatgcctatatccgcggtcg

SEQ ID NO: 154684 - DNA, 25 bp, Probe sequence
atatgcaaacaaataaattcggtat

SEQ ID NO: 154685 - DNA, 25 bp, Probe sequence
atgctgaagaaggcgatgaaattac

SEQ ID NO: 154686 - DNA, 25 bp, Probe sequence
aggtgtaaatgctgaagaaggcgat

SEQ ID NO: 154687 - DNA, 25 bp, Probe sequence
agtttgttggttttgttggcgagca

SEQ ID NO: 154688 - DNA, 25 bp, Probe sequence
agacactcgtacttaatatgcaaac

SEQ ID NO: 154689 - DNA, 25 bp, Probe sequence
actcgtacttaatatgcaaacaaat

SEQ ID NO: 154690 - DNA, 25 bp, Probe sequence
acattatggtaagacactcgtactt

SEQ ID NO: 154691 - DNA, 25 bp, Probe sequence
acactcgtacttaatatgcaaacaa

SEQ ID NO: 154692 - DNA, 25 bp, Probe sequence
aattcggtattatcggtactgatga

SEQ ID NO: 154693 - DNA, 25 bp, Probe sequence
cagtttgttggttttgttggcgagc

SEQ ID NO: 154694 - DNA, 25 bp, Probe sequence
gctcatattttaggtgtaaatgctg

SEQ ID NO: 154695 - DNA, 25 bp, Probe sequence
gaagagagtcaagttcagtttgttg

SEQ ID NO: 154696 - DNA, 25 bp, Probe sequence
gacaacgaagagagtcaagttcagt

SEQ ID NO: 154697 - DNA, 25 bp, Probe sequence
gagagtcaagttcagtttgttggtt

SEQ ID NO: 154698 - DNA, 25 bp, Probe sequence
gagtcaagttcagtttgttggtttt

SEQ ID NO: 154699 - DNA, 25 bp, Probe sequence
gttggttttgttggcgagcatagtc

SEQ ID NO: 154700 - DNA, 25 bp, Probe sequence
gttcagtttgttggttttgttggcg

SEQ ID NO: 154701 - DNA, 25 bp, Probe sequence
gttttgttggcgagcatagtcgata

SEQ ID NO: 154702 - DNA, 25 bp, Probe sequence
gtttgttggttttgttggcgagcat

SEQ ID NO: 154703 - DNA, 25 bp, Probe sequence
gtattatcggtactgatgatttaaa

SEQ ID NO: 154704 - DNA, 25 bp, Probe sequence
gtatttatatgatgacaacgaagag

SEQ ID NO: 154705 - DNA, 25 bp, Probe sequence
gtcaagttcagtttgttggttttgt

SEQ ID NO: 154706 - DNA, 25 bp, Probe sequence
ggtaagacactcgtacttaatatgc

SEQ ID NO: 154707 - DNA, 25 bp, Probe sequence
ggttttgttggcgagcatagtcgat

SEQ ID NO: 154708 - DNA, 25 bp, Probe sequence
tgttggcgagcatagtcgatatgat

SEQ ID NO: 154709 - DNA, 25 bp, Probe sequence
tcggtattatcggtactgatgattt

SEQ ID NO: 154710 - DNA, 25 bp, Probe sequence
taaattcggtattatcggtactgat

SEQ ID NO: 154711 - DNA, 25 bp, Probe sequence
tagacattatggtaagacactcgta

SEQ ID NO: 154712 - DNA, 25 bp, Probe sequence
tttgttggcgagcatagtcgatatg

SEQ ID NO: 154713 - DNA, 25 bp, Probe sequence
ttatggtaagacactcgtacttaat

SEQ ID NO: 154714 - DNA, 25 bp, Probe sequence
ttcagtttgttggttttgttggcga

SEQ ID NO: 154715 - DNA, 25 bp, Probe sequence
ttggttttgttggcgagcatagtcg

SEQ ID NO: 154716 - DNA, 25 bp, Probe sequence
ttgttggttttgttggcgagcatag

SEQ ID NO: 154717 - DNA, 25 bp, Probe sequence
ttggcgagcatagtcgatatgattt

SEQ ID NO: 154718 - DNA, 25 bp, Probe sequence
atcactcttaaagctggtattgagc

SEQ ID NO: 154719 - DNA, 25 bp, Probe sequence
atgcccaagttctacaatcactctt

SEQ ID NO: 154720 - DNA, 25 bp, Probe sequence
atgcctactgaagatacaacgatgt

SEQ ID NO: 154721 - DNA, 25 bp, Probe sequence
atgtggtacatgcccaagttctaca

SEQ ID NO: 154722 - DNA, 25 bp, Probe sequence
atggtggcgactgctcattgattga

SEQ ID NO: 154723 - DNA, 25 bp, Probe sequence
agtagcagaagttattgaacgtctt

SEQ ID NO: 154724 - DNA, 25 bp, Probe sequence
acgaagaagtgcctggtgtaataga

SEQ ID NO: 154725 - DNA, 25 bp, Probe sequence
acatgcccaagttctacaatcactc

SEQ ID NO: 154726 - DNA, 25 bp, Probe sequence
acatggtgcatgtggtacatgccca

SEQ ID NO: 154727 - DNA, 25 bp, Probe sequence
aacgatgtttgatcaagtagcagaa

SEQ ID NO: 154728 - DNA, 25 bp, Probe sequence
aagctggtattgagcgtgcattaca

SEQ ID NO: 154729 - DNA, 25 bp, Probe sequence
caagttctacaatcactcttaaagc

SEQ ID NO: 154730 - DNA, 25 bp, Probe sequence
catgtggtacatgcccaagttctac

SEQ ID NO: 154731 - DNA, 25 bp, Probe sequence
cgtgcattacacgaagaagtgcctg

SEQ ID NO: 154732 - DNA, 25 bp, Probe sequence
gcccaagttctacaatcactcttaa

SEQ ID NO: 154733 - DNA, 25 bp, Probe sequence
gcattacacgaagaagtgcctggtg

SEQ ID NO: 154734 - DNA, 25 bp, Probe sequence
gctggtattgagcgtgcattacacg

SEQ ID NO: 154735 - DNA, 25 bp, Probe sequence
gaagtgcctggtgtaatagaagtag

SEQ ID NO: 154736 - DNA, 25 bp, Probe sequence
gaagatacaacgatgtttgatcaag

SEQ ID NO: 154737 - DNA, 25 bp, Probe sequence
gaagacggtattgttaaattacaat

SEQ ID NO: 154738 - DNA, 25 bp, Probe sequence
gttctacaatcactcttaaagctgg

SEQ ID NO: 154739 - DNA, 25 bp, Probe sequence
gtacatgcccaagttctacaatcac

SEQ ID NO: 154740 - DNA, 25 bp, Probe sequence
gtgcctggtgtaatagaagtagaac

SEQ ID NO: 154741 - DNA, 25 bp, Probe sequence
gtggtacatgcccaagttctacaat

SEQ ID NO: 154742 - DNA, 25 bp, Probe sequence
gtggcgactgctcattgattgacgt

SEQ ID NO: 154743 - DNA, 25 bp, Probe sequence
ggtacatgcccaagttctacaatca

SEQ ID NO: 154744 - DNA, 25 bp, Probe sequence
ggtattgagcgtgcattacacgaag

SEQ ID NO: 154745 - DNA, 25 bp, Probe sequence
tgatggtggcgactgctcattgatt

SEQ ID NO: 154746 - DNA, 25 bp, Probe sequence
taaattacaattacatggtgcatgt

SEQ ID NO: 154747 - DNA, 25 bp, Probe sequence
tacaatcactcttaaagctggtatt

SEQ ID NO: 154748 - DNA, 25 bp, Probe sequence
tacgtgatggtggcgactgctcatt

SEQ ID NO: 154749 - DNA, 25 bp, Probe sequence
tagcagaagttattgaacgtcttcg

SEQ ID NO: 154750 - DNA, 25 bp, Probe sequence
tattacgtgatggtggcgactgctc

SEQ ID NO: 154751 - DNA, 25 bp, Probe sequence
ttacgtgatggtggcgactgctcat

SEQ ID NO: 154752 - DNA, 25 bp, Probe sequence
attacctgacaaaatgccggaacta

SEQ ID NO: 154753 - DNA, 25 bp, Probe sequence
atcataacgttccaggagccgaaga

SEQ ID NO: 154754 - DNA, 25 bp, Probe sequence
agtaccaacatatcgtaacgtctat

SEQ ID NO: 154755 - DNA, 25 bp, Probe sequence
agttgatcgtatgccatttcatgga

SEQ ID NO: 154756 - DNA, 25 bp, Probe sequence
agatgctcaaattgtctcagtcggt

SEQ ID NO: 154757 - DNA, 25 bp, Probe sequence
acgtctatgtagttggtgattgtgc

SEQ ID NO: 154758 - DNA, 25 bp, Probe sequence
aaatatatctttatgaccgtgggcc

SEQ ID NO: 154759 - DNA, 25 bp, Probe sequence
aacactctcaaaggctcgggatact

SEQ ID NO: 154760 - DNA, 25 bp, Probe sequence
aaggtatcgttgggtcattaggaga

SEQ ID NO: 154761 - DNA, 25 bp, Probe sequence
aaggctcgggatactttccatagta

SEQ ID NO: 154762 - DNA, 25 bp, Probe sequence
cacatgcgccaagtgctcagttagc

SEQ ID NO: 154763 - DNA, 25 bp, Probe sequence
cactgtaacaggacgactcgcttct

SEQ ID NO: 154764 - DNA, 25 bp, Probe sequence
cttagttttgttaggcggcggatat

SEQ ID NO: 154765 - DNA, 25 bp, Probe sequence
gcatagaacttgccagcgaattaag

SEQ ID NO: 154766 - DNA, 25 bp, Probe sequence
gttgttcgtaacttgccgattgata

SEQ ID NO: 154767 - DNA, 25 bp, Probe sequence
gtatcatgtcacgcattttaactac

SEQ ID NO: 154768 - DNA, 25 bp, Probe sequence
gtatgttgcgaaatggttcgccaaa

SEQ ID NO: 154769 - DNA, 25 bp, Probe sequence
gtgaactaccagaaggtgctaaagt

SEQ ID NO: 154770 - DNA, 25 bp, Probe sequence
ggtgatcaaattgccgatgtgctta

SEQ ID NO: 154771 - DNA, 25 bp, Probe sequence
aggagccgaagaatatacacatagt

SEQ ID NO: 154772 - DNA, 25 bp, Probe sequence
ggacagcaggaattcaacctgttga

SEQ ID NO: 154773 - DNA, 25 bp, Probe sequence
ggcggcggatatggtaatatgcgta

SEQ ID NO: 154774 - DNA, 25 bp, Probe sequence
tggctaaatgaaccattacctgaca

SEQ ID NO: 154775 - DNA, 25 bp, Probe sequence
tgaaattccctaatcatccacaagt

SEQ ID NO: 154776 - DNA, 25 bp, Probe sequence
tccggcgtactttggttatataaat

SEQ ID NO: 154777 - DNA, 25 bp, Probe sequence
tcaacctgttgaagttgttcgtaac

SEQ ID NO: 154778 - DNA, 25 bp, Probe sequence
taatgttaccgttgttccaaattca

SEQ ID NO: 154779 - DNA, 25 bp, Probe sequence
taaccagtatcatcaagtaccaaca

SEQ ID NO: 154780 - DNA, 25 bp, Probe sequence
taacaggacgactcgcttctatttt

SEQ ID NO: 154781 - DNA, 25 bp, Probe sequence
tacacatagtattcaaacactctca

SEQ ID NO: 154782 - DNA, 25 bp, Probe sequence
tatgctttagctgcgggcacgaaat

SEQ ID NO: 154783 - DNA, 25 bp, Probe sequence
tatacagtcacattagttgatcgta

SEQ ID NO: 154784 - DNA, 25 bp, Probe sequence
ttgtctcagtcggtaattctaaaat

SEQ ID NO: 154785 - DNA, 25 bp, Probe sequence
ttgtgctgatttaccacatgcgcca

SEQ ID NO: 154786 - DNA, 25 bp, Probe sequence
attagaggattgcttggttcaaggt

SEQ ID NO: 154787 - DNA, 25 bp, Probe sequence
atcactacagattgcgtcgttattg

SEQ ID NO: 154788 - DNA, 25 bp, Probe sequence
atcggcggtggcatacagggaactg

SEQ ID NO: 154789 - DNA, 25 bp, Probe sequence
atccacaaccgttccatctaaaaca

SEQ ID NO: 154790 - DNA, 25 bp, Probe sequence
atgggtggccgtaaagctgccgaac

SEQ ID NO: 154791 - DNA, 25 bp, Probe sequence
atgcctgaaagaaatgccattgtac

SEQ ID NO: 154792 - DNA, 25 bp, Probe sequence
atgtgcataaaacacctatcactca

SEQ ID NO: 154793 - DNA, 25 bp, Probe sequence
agggaactgcaatcgcacaaaaact

SEQ ID NO: 154794 - DNA, 25 bp, Probe sequence
agtacaaatattccgtttatgcctg

SEQ ID NO: 154795 - DNA, 25 bp, Probe sequence
agatcaccgattgtacatcacgtac

SEQ ID NO: 154796 - DNA, 25 bp, Probe sequence
acatgactttgatgctgatcctggt

SEQ ID NO: 154797 - DNA, 25 bp, Probe sequence
acaagattttatgtcacaaccactt

SEQ ID NO: 154798 - DNA, 25 bp, Probe sequence
caaatgctttttatggtccttatca

SEQ ID NO: 154799 - DNA, 25 bp, Probe sequence
cagattatggttgcaactggttttg

SEQ ID NO: 154800 - DNA, 25 bp, Probe sequence
ctcacgaactgtacttacgccttaa

SEQ ID NO: 154801 - DNA, 25 bp, Probe sequence
gctgatcctggttggttaggtccga

SEQ ID NO: 154802 - DNA, 25 bp, Probe sequence
gctgcacatcttgcacttaaattgt

SEQ ID NO: 154803 - DNA, 25 bp, Probe sequence
gctgccgaacgcattgaacaagcat

SEQ ID NO: 154804 - DNA, 25 bp, Probe sequence
gcattggacaattatcggcggtggc

SEQ ID NO: 154805 - DNA, 25 bp, Probe sequence
gaatgtaattaccctgttatttccg

SEQ ID NO: 154806 - DNA, 25 bp, Probe sequence
gcagacttagaattaggaccatttg

SEQ ID NO: 154807 - DNA, 25 bp, Probe sequence
gaagatggacaaattatcactacag

SEQ ID NO: 154808 - DNA, 25 bp, Probe sequence
gaaatgccttatttaagatcaccga

SEQ ID NO: 154809 - DNA, 25 bp, Probe sequence
gatgcacctatcaacgaatgtaatt

SEQ ID NO: 154810 - DNA, 25 bp, Probe sequence
gatcaatgcctcacgaactgtactt

SEQ ID NO: 154811 - DNA, 25 bp, Probe sequence
gataagaccgatcatatcgttggta

SEQ ID NO: 154812 - DNA, 25 bp, Probe sequence
gtcgcaggatgctttgcagacttag

SEQ ID NO: 154813 - DNA, 25 bp, Probe sequence
ggtagaaatgttatgggtggccgta

SEQ ID NO: 154814 - DNA, 25 bp, Probe sequence
tgtacatcacgtacatccacaaccg

SEQ ID NO: 154815 - DNA, 25 bp, Probe sequence
tgcacatgcttctaaacaatatcaa

SEQ ID NO: 154816 - DNA, 25 bp, Probe sequence
tcgctaaacagcaccaatatacaaa

SEQ ID NO: 154817 - DNA, 25 bp, Probe sequence
tatgtcacaaccacttattaagcaa

SEQ ID NO: 154818 - DNA, 25 bp, Probe sequence
tattccgtttatgcctgacatttta

SEQ ID NO: 154819 - DNA, 25 bp, Probe sequence
ttccatctaaaacaattcgctaaac

SEQ ID NO: 154820 - DNA, 25 bp, Probe sequence
attacaggtcctctttcaagtcata

SEQ ID NO: 154821 - DNA, 25 bp, Probe sequence
aggattattgagacttgaagatgta

SEQ ID NO: 154822 - DNA, 25 bp, Probe sequence
aggtcctctttcaagtcatatgatt

SEQ ID NO: 154823 - DNA, 25 bp, Probe sequence
acttatctttgttatcatcggtgct

SEQ ID NO: 154824 - DNA, 25 bp, Probe sequence
acaggtcctctttcaagtcatatga

SEQ ID NO: 154825 - DNA, 25 bp, Probe sequence
aaatatgcaattaatcgttgcgatt

SEQ ID NO: 154826 - DNA, 25 bp, Probe sequence
aagcatcaacattaggtgcaatgtc

SEQ ID NO: 154827 - DNA, 25 bp, Probe sequence
aatcgttgcgattatctttgtatta

SEQ ID NO: 154828 - DNA, 25 bp, Probe sequence
aatcatactgattagtcttgcactt

SEQ ID NO: 154829 - DNA, 25 bp, Probe sequence
cacgtgcacatgctgccggaaaagc

SEQ ID NO: 154830 - DNA, 25 bp, Probe sequence
cagcatataatattaaaacgcctta

SEQ ID NO: 154831 - DNA, 25 bp, Probe sequence
cttgcacttatctttgttatcatcg

SEQ ID NO: 154832 - DNA, 25 bp, Probe sequence
gccggaaaagcatcaacattaggtg

SEQ ID NO: 154833 - DNA, 25 bp, Probe sequence
gctactcaaggttttgtaaatatgc

SEQ ID NO: 154834 - DNA, 25 bp, Probe sequence
gaagatgtatattcacgtgcacatg

SEQ ID NO: 154835 - DNA, 25 bp, Probe sequence
gattagtcttgcacttatctttgtt

SEQ ID NO: 154836 - DNA, 25 bp, Probe sequence
gttgcgattatctttgtattaatta

SEQ ID NO: 154837 - DNA, 25 bp, Probe sequence
gtattaattacaggtcctctttcaa

SEQ ID NO: 154838 - DNA, 25 bp, Probe sequence
gtcttgcacttatctttgttatcat

SEQ ID NO: 154839 - DNA, 25 bp, Probe sequence
gtgcacatgctgccggaaaagcatc

SEQ ID NO: 154840 - DNA, 25 bp, Probe sequence
gtgcaatgtcattactatttggtac

SEQ ID NO: 154841 - DNA, 25 bp, Probe sequence
tgtatattcacgtgcacatgctgcc

SEQ ID NO: 154842 - DNA, 25 bp, Probe sequence
tgcacttatctttgttatcatcggt

SEQ ID NO: 154843 - DNA, 25 bp, Probe sequence
tcctctttcaagtcatatgattatg

SEQ ID NO: 154844 - DNA, 25 bp, Probe sequence
tcatcggtgctttaattagcgccct

SEQ ID NO: 154845 - DNA, 25 bp, Probe sequence
tctttgttatcatcggtgctttaat

SEQ ID NO: 154846 - DNA, 25 bp, Probe sequence
tactgattagtcttgcacttatctt

SEQ ID NO: 154847 - DNA, 25 bp, Probe sequence
tagtcttgcacttatctttgttatc

SEQ ID NO: 154848 - DNA, 25 bp, Probe sequence
tattcacgtgcacatgctgccggaa

SEQ ID NO: 154849 - DNA, 25 bp, Probe sequence
tatctttgttatcatcggtgcttta

SEQ ID NO: 154850 - DNA, 25 bp, Probe sequence
tatattcacgtgcacatgctgccgg

SEQ ID NO: 154851 - DNA, 25 bp, Probe sequence
ttttattgctactcaaggttttgta

SEQ ID NO: 154852 - DNA, 25 bp, Probe sequence
tttttatattttattgctactcaag

SEQ ID NO: 154853 - DNA, 25 bp, Probe sequence
ttcacgtgcacatgctgccggaaaa

SEQ ID NO: 154854 - DNA, 25 bp, Probe sequence
attagatgcgattggtcttcaatta

SEQ ID NO: 154855 - DNA, 25 bp, Probe sequence
atttctatgttagctatgctcattc

SEQ ID NO: 154856 - DNA, 25 bp, Probe sequence
atagcattattcagtattttattaa

SEQ ID NO: 154857 - DNA, 25 bp, Probe sequence
atgttagctatgctcattcgcgttg

SEQ ID NO: 154858 - DNA, 25 bp, Probe sequence
actgcagtattctctaaatttatgg

SEQ ID NO: 154859 - DNA, 25 bp, Probe sequence
aaaggtaaggtgattgaacatgatc

SEQ ID NO: 154860 - DNA, 25 bp, Probe sequence
aatacatgattgtcgttattatgat

SEQ ID NO: 154861 - DNA, 25 bp, Probe sequence
cttgccgatcgtgttgtcgcattag

SEQ ID NO: 154862 - DNA, 25 bp, Probe sequence
ctatgttagctatgctcattcgcgt

SEQ ID NO: 154863 - DNA, 25 bp, Probe sequence
cgatcgtgttgtcgcattagatgcg

SEQ ID NO: 154864 - DNA, 25 bp, Probe sequence
cgcattagatgcgattggtcttcaa

SEQ ID NO: 154865 - DNA, 25 bp, Probe sequence
gccgatcgtgttgtcgcattagatg

SEQ ID NO: 154866 - DNA, 25 bp, Probe sequence
gcagtattctctaaatttatggaca

SEQ ID NO: 154867 - DNA, 25 bp, Probe sequence
gaatcataatgttattatcgttatt

SEQ ID NO: 154868 - DNA, 25 bp, Probe sequence
gattgtcgttattatgatgattggt

SEQ ID NO: 154869 - DNA, 25 bp, Probe sequence
gttgtcatttctatgttagctatgc

SEQ ID NO: 154870 - DNA, 25 bp, Probe sequence
gttattgcattaatcatagttgtca

SEQ ID NO: 154871 - DNA, 25 bp, Probe sequence
gtattctctaaatttatggacaaag

SEQ ID NO: 154872 - DNA, 25 bp, Probe sequence
gtcttcaattaatggcagttatagc

SEQ ID NO: 154873 - DNA, 25 bp, Probe sequence
gtcatttctatgttagctatgctca

SEQ ID NO: 154874 - DNA, 25 bp, Probe sequence
gtcgttattatgatgattggtatat

SEQ ID NO: 154875 - DNA, 25 bp, Probe sequence
ggtactgcagtattctctaaattta

SEQ ID NO: 154876 - DNA, 25 bp, Probe sequence
tgttagctatgctcattcgcgttgt

SEQ ID NO: 154877 - DNA, 25 bp, Probe sequence
tgcattaatcatagttgtcatttct

SEQ ID NO: 154878 - DNA, 25 bp, Probe sequence
tgccgatcgtgttgtcgcattagat

SEQ ID NO: 154879 - DNA, 25 bp, Probe sequence
taatggcagttatagcattattcag

SEQ ID NO: 154880 - DNA, 25 bp, Probe sequence
tagctatgctcattcgcgttgtgct

SEQ ID NO: 154881 - DNA, 25 bp, Probe sequence
tagttgtcatttctatgttagctat

SEQ ID NO: 154882 - DNA, 25 bp, Probe sequence
tatgctcattcgcgttgtgctaggc

SEQ ID NO: 154883 - DNA, 25 bp, Probe sequence
tatcgttattgcattaatcatagtt

SEQ ID NO: 154884 - DNA, 25 bp, Probe sequence
tttttaggtactgcagtattctcta

SEQ ID NO: 154885 - DNA, 25 bp, Probe sequence
ttaggtactgcagtattctctaaat

SEQ ID NO: 154886 - DNA, 25 bp, Probe sequence
ttctatgttagctatgctcattcgc

SEQ ID NO: 154887 - DNA, 25 bp, Probe sequence
ttggtcttcaattaatggcagttat

SEQ ID NO: 154888 - DNA, 25 bp, Probe sequence
attaacacctggtactgtagtgctt

SEQ ID NO: 154889 - DNA, 25 bp, Probe sequence
attattttcttaatcgaactgatta

SEQ ID NO: 154890 - DNA, 25 bp, Probe sequence
attttatgtcatcacgctatatcgt

SEQ ID NO: 154891 - DNA, 25 bp, Probe sequence
aggtttcatctttggcctagttctt

SEQ ID NO: 154892 - DNA, 25 bp, Probe sequence
acctcttacacagagtgttaccagg

SEQ ID NO: 154893 - DNA, 25 bp, Probe sequence
acctggtactgtagtgcttggtgta

SEQ ID NO: 154894 - DNA, 25 bp, Probe sequence
aacacctggtactgtagtgcttggt

SEQ ID NO: 154895 - DNA, 25 bp, Probe sequence
aatgaaccaggattctttgtttatc

SEQ ID NO: 154896 - DNA, 25 bp, Probe sequence
ctttgtgttaggtttcatctttggc

SEQ ID NO: 154897 - DNA, 25 bp, Probe sequence
ctagttcttgtttacctcttacaca

SEQ ID NO: 154898 - DNA, 25 bp, Probe sequence
ccaggattctttgtttatcacacag

SEQ ID NO: 154899 - DNA, 25 bp, Probe sequence
gccatagatttttcaactaaagagc

SEQ ID NO: 154900 - DNA, 25 bp, Probe sequence
gaaccaggattctttgtttatcaca

SEQ ID NO: 154901 - DNA, 25 bp, Probe sequence
gattaaagctaattttgatgttttg

SEQ ID NO: 154902 - DNA, 25 bp, Probe sequence
gttcttgtttacctcttacacagag

SEQ ID NO: 154903 - DNA, 25 bp, Probe sequence
gtttacctcttacacagagtgttac

SEQ ID NO: 154904 - DNA, 25 bp, Probe sequence
gtactgtagtgcttggtgtaagtga

SEQ ID NO: 154905 - DNA, 25 bp, Probe sequence
gtacaaaaatttatattcatgccat

SEQ ID NO: 154906 - DNA, 25 bp, Probe sequence
gtcatcacgctatatcgtattatta

SEQ ID NO: 154907 - DNA, 25 bp, Probe sequence
gtgttaggtttcatctttggcctag

SEQ ID NO: 154908 - DNA, 25 bp, Probe sequence
ggtagattttatgtcatcacgctat

SEQ ID NO: 154909 - DNA, 25 bp, Probe sequence
ggattctttgtttatcacacagatt

SEQ ID NO: 154910 - DNA, 25 bp, Probe sequence
tgttaccaggtagattttatgtcat

SEQ ID NO: 154911 - DNA, 25 bp, Probe sequence
tgaaaattattattaaaccttcgat

SEQ ID NO: 154912 - DNA, 25 bp, Probe sequence
tctttggcctagttcttgtttacct

SEQ ID NO: 154913 - DNA, 25 bp, Probe sequence
tcatctttggcctagttcttgttta

SEQ ID NO: 154914 - DNA, 25 bp, Probe sequence
taattacattaacacctggtactgt

SEQ ID NO: 154915 - DNA, 25 bp, Probe sequence
taactttgtgttaggtttcatcttt

SEQ ID NO: 154916 - DNA, 25 bp, Probe sequence
tacacagagtgttaccaggtagatt

SEQ ID NO: 154917 - DNA, 25 bp, Probe sequence
tatgtcatcacgctatatcgtatta

SEQ ID NO: 154918 - DNA, 25 bp, Probe sequence
tattcatgccatagatttttcaact

SEQ ID NO: 154919 - DNA, 25 bp, Probe sequence
tttcatctttggcctagttcttgtt

SEQ ID NO: 154920 - DNA, 25 bp, Probe sequence
ttgtaagagaggtgggcgaaatata

SEQ ID NO: 154921 - DNA, 25 bp, Probe sequence
ttctttgtttatcacacagatttaa

SEQ ID NO: 154922 - DNA, 25 bp, Probe sequence
attcccccactcagtggcttttatg

SEQ ID NO: 154923 - DNA, 25 bp, Probe sequence
attaagtttagctggcattccccca

SEQ ID NO: 154924 - DNA, 25 bp, Probe sequence
attagctaacctttcagcgcatgac

SEQ ID NO: 154925 - DNA, 25 bp, Probe sequence
atcattggtgcattcacaactggtg

SEQ ID NO: 154926 - DNA, 25 bp, Probe sequence
atcattgcattctttggtgctttgt

SEQ ID NO: 154927 - DNA, 25 bp, Probe sequence
acagccatattacttgtctttattg

SEQ ID NO: 154928 - DNA, 25 bp, Probe sequence
aaagctggcgtattcccaatgtttg

SEQ ID NO: 154929 - DNA, 25 bp, Probe sequence
aacttgcattattcttgcttatcgg

SEQ ID NO: 154930 - DNA, 25 bp, Probe sequence
aaccttggtcgcggcaattatcaat

SEQ ID NO: 154931 - DNA, 25 bp, Probe sequence
caggcactgctgatttaagacaatt

SEQ ID NO: 154932 - DNA, 25 bp, Probe sequence
gcgttatgtcgcactaggcggtaca

SEQ ID NO: 154933 - DNA, 25 bp, Probe sequence
gctatttactatacattgcacgaca

SEQ ID NO: 154934 - DNA, 25 bp, Probe sequence
gcaccaccaattccaatcattgcat

SEQ ID NO: 154935 - DNA, 25 bp, Probe sequence
gacattttcaacctattcgtatttt

SEQ ID NO: 154936 - DNA, 25 bp, Probe sequence
gatcatctttggttgtgtcggtgct

SEQ ID NO: 154937 - DNA, 25 bp, Probe sequence
gatatcctgtacttggttggtcatt

SEQ ID NO: 154938 - DNA, 25 bp, Probe sequence
gttaacgttgtatcgtcatccttct

SEQ ID NO: 154939 - DNA, 25 bp, Probe sequence
gtttgtttggttacctagtgcatac

SEQ ID NO: 154940 - DNA, 25 bp, Probe sequence
gtcattcgcatattcctacaaggct

SEQ ID NO: 154941 - DNA, 25 bp, Probe sequence
gtcatccttcttcgtaatgggtgta

SEQ ID NO: 154942 - DNA, 25 bp, Probe sequence
gtcgtattatattctgtcattcgca

SEQ ID NO: 154943 - DNA, 25 bp, Probe sequence
gtgtcggtgctgttgcatatgccaa

SEQ ID NO: 154944 - DNA, 25 bp, Probe sequence
gtggcttagtcaatatcgttttcat

SEQ ID NO: 154945 - DNA, 25 bp, Probe sequence
ggcggtacattattaaccttggtcg

SEQ ID NO: 154946 - DNA, 25 bp, Probe sequence
tgcatactatgcaccaccaattcca

SEQ ID NO: 154947 - DNA, 25 bp, Probe sequence
tcggcgttgcaatgatgacagagtc

SEQ ID NO: 154948 - DNA, 25 bp, Probe sequence
tctacaatccatcaacctacgttaa

SEQ ID NO: 154949 - DNA, 25 bp, Probe sequence
tactatttatctttgtttttgctac

SEQ ID NO: 154950 - DNA, 25 bp, Probe sequence
taggtgtgatcttagtcggcgttgc

SEQ ID NO: 154951 - DNA, 25 bp, Probe sequence
tattcctacaaggctttttcggtca

SEQ ID NO: 154952 - DNA, 25 bp, Probe sequence
tatgtcattttattcttagcactat

SEQ ID NO: 154953 - DNA, 25 bp, Probe sequence
ttcagcgcatgacagtggcttagtc

SEQ ID NO: 154954 - DNA, 25 bp, Probe sequence
ttagcactattaacgatcatctttg

SEQ ID NO: 154955 - DNA, 25 bp, Probe sequence
ttggtcattctttatcgcagcatta

SEQ ID NO: 154956 - DNA, 25 bp, Probe sequence
attgattagtactcaagaccataaa

SEQ ID NO: 154957 - DNA, 25 bp, Probe sequence
attggtttagtattgattagtactc

SEQ ID NO: 154958 - DNA, 25 bp, Probe sequence
attaacaatcattggtttagtattg

SEQ ID NO: 154959 - DNA, 25 bp, Probe sequence
aggactagcatgtctgattttgaaa

SEQ ID NO: 154960 - DNA, 25 bp, Probe sequence
agtattgattagtactcaagaccat

SEQ ID NO: 154961 - DNA, 25 bp, Probe sequence
agaaaggactagcatgtctgatttt

SEQ ID NO: 154962 - DNA, 25 bp, Probe sequence
actagcatgtctgattttgaaatgc

SEQ ID NO: 154963 - DNA, 25 bp, Probe sequence
actcctagaaaggactagcatgtct

SEQ ID NO: 154964 - DNA, 25 bp, Probe sequence
aaaggactagcatgtctgattttga

SEQ ID NO: 154965 - DNA, 25 bp, Probe sequence
aaggactagcatgtctgattttgaa

SEQ ID NO: 154966 - DNA, 25 bp, Probe sequence
ctagcatgtctgattttgaaatgct

SEQ ID NO: 154967 - DNA, 25 bp, Probe sequence
ctcctagaaaggactagcatgtctg

SEQ ID NO: 154968 - DNA, 25 bp, Probe sequence
cctagaaaggactagcatgtctgat

SEQ ID NO: 154969 - DNA, 25 bp, Probe sequence
gaaaggactagcatgtctgattttg

SEQ ID NO: 154970 - DNA, 25 bp, Probe sequence
gactagcatgtctgattttgaaatg

SEQ ID NO: 154971 - DNA, 25 bp, Probe sequence
gattagtactcaagaccataaaaaa

SEQ ID NO: 154972 - DNA, 25 bp, Probe sequence
gttactcctagaaaggactagcatg

SEQ ID NO: 154973 - DNA, 25 bp, Probe sequence
gtttagtattgattagtactcaaga

SEQ ID NO: 154974 - DNA, 25 bp, Probe sequence
gtattgattagtactcaagaccata

SEQ ID NO: 154975 - DNA, 25 bp, Probe sequence
gtattaacaatcattggtttagtat

SEQ ID NO: 154976 - DNA, 25 bp, Probe sequence
ggtttagtattgattagtactcaag

SEQ ID NO: 154977 - DNA, 25 bp, Probe sequence
ggactagcatgtctgattttgaaat

SEQ ID NO: 154978 - DNA, 25 bp, Probe sequence
tgttactcctagaaaggactagcat

SEQ ID NO: 154979 - DNA, 25 bp, Probe sequence
tgattagtactcaagaccataaaaa

SEQ ID NO: 154980 - DNA, 25 bp, Probe sequence
tcctagaaaggactagcatgtctga

SEQ ID NO: 154981 - DNA, 25 bp, Probe sequence
tcattggtttagtattgattagtac

SEQ ID NO: 154982 - DNA, 25 bp, Probe sequence
taacaatcattggtttagtattgat

SEQ ID NO: 154983 - DNA, 25 bp, Probe sequence
tactcctagaaaggactagcatgtc

SEQ ID NO: 154984 - DNA, 25 bp, Probe sequence
tagaaaggactagcatgtctgattt

SEQ ID NO: 154985 - DNA, 25 bp, Probe sequence
tagtattgattagtactcaagacca

SEQ ID NO: 154986 - DNA, 25 bp, Probe sequence
tattgattagtactcaagaccataa

SEQ ID NO: 154987 - DNA, 25 bp, Probe sequence
ttgttactcctagaaaggactagca

SEQ ID NO: 154988 - DNA, 25 bp, Probe sequence
ttactcctagaaaggactagcatgt

SEQ ID NO: 154989 - DNA, 25 bp, Probe sequence
ttgtattaacaatcattggtttagt

SEQ ID NO: 154990 - DNA, 25 bp, Probe sequence
agtgtctatctcgttttgtctaaaa

SEQ ID NO: 154991 - DNA, 25 bp, Probe sequence
acgttgagagtatgaaaggagttcc

SEQ ID NO: 154992 - DNA, 25 bp, Probe sequence
aacagcctttttcttagtattagca

SEQ ID NO: 154993 - DNA, 25 bp, Probe sequence
aaaagctatgttgatcctatcccgc

SEQ ID NO: 154994 - DNA, 25 bp, Probe sequence
aacagcaatcgttatcgcctttgcg

SEQ ID NO: 154995 - DNA, 25 bp, Probe sequence
aattagtgtctatctcgttttgtct

SEQ ID NO: 154996 - DNA, 25 bp, Probe sequence
caatcgttatcgcctttgcgacaac

SEQ ID NO: 154997 - DNA, 25 bp, Probe sequence
cacagcaattagtgtctatctcgtt

SEQ ID NO: 154998 - DNA, 25 bp, Probe sequence
cagcaatcgttatcgcctttgcgac

SEQ ID NO: 154999 - DNA, 25 bp, Probe sequence
ctttgcgacaacagcctttttctta

SEQ ID NO: 155000 - DNA, 25 bp, Probe sequence
ctatcccgcaagcacttattttaac

SEQ ID NO: 155001 - DNA, 25 bp, Probe sequence
cgttatcgcctttgcgacaacagcc

SEQ ID NO: 155002 - DNA, 25 bp, Probe sequence
gcgacaacagcctttttcttagtat

SEQ ID NO: 155003 - DNA, 25 bp, Probe sequence
gcaagcacttattttaacagcaatc

SEQ ID NO: 155004 - DNA, 25 bp, Probe sequence
gaattaggcacagataacgttgaga

SEQ ID NO: 155005 - DNA, 25 bp, Probe sequence
gaagcgaacgtaaaaagctatgttg

SEQ ID NO: 155006 - DNA, 25 bp, Probe sequence
gaaaggagttccagaagatgattga

SEQ ID NO: 155007 - DNA, 25 bp, Probe sequence
gacaacagcctttttcttagtatta

SEQ ID NO: 155008 - DNA, 25 bp, Probe sequence
gacttaaacatggtactgttccaat

SEQ ID NO: 155009 - DNA, 25 bp, Probe sequence
gttttgtctaaaagtctgatacgaa

SEQ ID NO: 155010 - DNA, 25 bp, Probe sequence
gtctgatacgaattgttatgggaac

SEQ ID NO: 155011 - DNA, 25 bp, Probe sequence
gtctatctcgttttgtctaaaagtc

SEQ ID NO: 155012 - DNA, 25 bp, Probe sequence
ggtactgttccaatttatgaagcga

SEQ ID NO: 155013 - DNA, 25 bp, Probe sequence
ggtattctcacagcaattagtgtct

SEQ ID NO: 155014 - DNA, 25 bp, Probe sequence
ggcacagataacgttgagagtatga

SEQ ID NO: 155015 - DNA, 25 bp, Probe sequence
tgggcggacttaaacatggtactgt

SEQ ID NO: 155016 - DNA, 25 bp, Probe sequence
tcctatcccgcaagcacttatttta

SEQ ID NO: 155017 - DNA, 25 bp, Probe sequence
tcccgcaagcacttattttaacagc

SEQ ID NO: 155018 - DNA, 25 bp, Probe sequence
tatgatttttgttagtggtattctc

SEQ ID NO: 155019 - DNA, 25 bp, Probe sequence
tatcgcctttgcgacaacagccttt

SEQ ID NO: 155020 - DNA, 25 bp, Probe sequence
tatttttaataactatgggcggact

SEQ ID NO: 155021 - DNA, 25 bp, Probe sequence
ttagtattagcatttagaacatata

SEQ ID NO: 155022 - DNA, 25 bp, Probe sequence
ttgcgacaacagcctttttcttagt

SEQ ID NO: 155023 - DNA, 25 bp, Probe sequence
ttgttagtggtattctcacagcaat

SEQ ID NO: 155024 - DNA, 25 bp, Probe sequence
aggcaaaaatttctttacgcatgtc

SEQ ID NO: 155025 - DNA, 25 bp, Probe sequence
atgatctaattttgcaatttgctgc

SEQ ID NO: 155026 - DNA, 25 bp, Probe sequence
agcagtattctttgatttcggtgtt

SEQ ID NO: 155027 - DNA, 25 bp, Probe sequence
acttgttatcattacgattgcattt

SEQ ID NO: 155028 - DNA, 25 bp, Probe sequence
aatttctttacgcatgtcacatttg

SEQ ID NO: 155029 - DNA, 25 bp, Probe sequence
cattacgattgcatttgatatagaa

SEQ ID NO: 155030 - DNA, 25 bp, Probe sequence
ctgtcatgacaattattatttcgat

SEQ ID NO: 155031 - DNA, 25 bp, Probe sequence
cgcatgtcacatttgatataccgtt

SEQ ID NO: 155032 - DNA, 25 bp, Probe sequence
gcggtttcgtcggcggattattatt

SEQ ID NO: 155033 - DNA, 25 bp, Probe sequence
gcaggacattatacacctggtggcg

SEQ ID NO: 155034 - DNA, 25 bp, Probe sequence
gcaagttcacttgttatcattacga

SEQ ID NO: 155035 - DNA, 25 bp, Probe sequence
gaacctgttcatatgacaacagcag

SEQ ID NO: 155036 - DNA, 25 bp, Probe sequence
gacaacagcagtattctttgatttc

SEQ ID NO: 155037 - DNA, 25 bp, Probe sequence
gatttcggtgttttatgtgcagtag

SEQ ID NO: 155038 - DNA, 25 bp, Probe sequence
gattttaaaatcttgataggtatcg

SEQ ID NO: 155039 - DNA, 25 bp, Probe sequence
gattagttttttgtattgcgacgcc

SEQ ID NO: 155040 - DNA, 25 bp, Probe sequence
gttcacttgttatcattacgattgc

SEQ ID NO: 155041 - DNA, 25 bp, Probe sequence
gtttttcacttttcttagcaggaca

SEQ ID NO: 155042 - DNA, 25 bp, Probe sequence
gtattctttgatttcggtgttttat

SEQ ID NO: 155043 - DNA, 25 bp, Probe sequence
gtcacatttgatataccgttattta

SEQ ID NO: 155044 - DNA, 25 bp, Probe sequence
gtgcagtagttggtactgtcatgac

SEQ ID NO: 155045 - DNA, 25 bp, Probe sequence
gtgttttatgtgcagtagttggtac

SEQ ID NO: 155046 - DNA, 25 bp, Probe sequence
ggtttcgtcggcggattattattcg

SEQ ID NO: 155047 - DNA, 25 bp, Probe sequence
ggattattattcgcaagttcacttg

SEQ ID NO: 155048 - DNA, 25 bp, Probe sequence
tggtaatggtctttggtttttcact

SEQ ID NO: 155049 - DNA, 25 bp, Probe sequence
tcgtcggcggattattattcgcaag

SEQ ID NO: 155050 - DNA, 25 bp, Probe sequence
taccgttatttatattagaacctgt

SEQ ID NO: 155051 - DNA, 25 bp, Probe sequence
tagttttttgtattgcgacgcctat

SEQ ID NO: 155052 - DNA, 25 bp, Probe sequence
taggtatcggattagttttttgtat

SEQ ID NO: 155053 - DNA, 25 bp, Probe sequence
tttggtttttcacttttcttagcag

SEQ ID NO: 155054 - DNA, 25 bp, Probe sequence
tttgctgcagttattatctttttca

SEQ ID NO: 155055 - DNA, 25 bp, Probe sequence
ttatacacctggtggcggtttcgtc

SEQ ID NO: 155056 - DNA, 25 bp, Probe sequence
ttatctttttcatggtaatggtctt

SEQ ID NO: 155057 - DNA, 25 bp, Probe sequence
ttcacttttcttagcaggacattat

SEQ ID NO: 155058 - DNA, 25 bp, Probe sequence
attctgggcttcgctaaacgcaaca

SEQ ID NO: 155059 - DNA, 25 bp, Probe sequence
attcgagtcatctgtgcttggtatc

SEQ ID NO: 155060 - DNA, 25 bp, Probe sequence
attccctggcattttaactaattcg

SEQ ID NO: 155061 - DNA, 25 bp, Probe sequence
atattcgcactcattattcctatcc

SEQ ID NO: 155062 - DNA, 25 bp, Probe sequence
atagcccattcttcatttttgcgat

SEQ ID NO: 155063 - DNA, 25 bp, Probe sequence
atagctatgttaccgattattcacg

SEQ ID NO: 155064 - DNA, 25 bp, Probe sequence
aggctacctattcccaatcattggt

SEQ ID NO: 155065 - DNA, 25 bp, Probe sequence
accagtcagtgcttatcttcattca

SEQ ID NO: 155066 - DNA, 25 bp, Probe sequence
acggctgcaatattccatttaatca

SEQ ID NO: 155067 - DNA, 25 bp, Probe sequence
aaagcacccgacttagcattgacac

SEQ ID NO: 155068 - DNA, 25 bp, Probe sequence
aacgcctgcctttttatcaacatta

SEQ ID NO: 155069 - DNA, 25 bp, Probe sequence
aatggaagcacctacaccagtcagt

SEQ ID NO: 155070 - DNA, 25 bp, Probe sequence
caatcttcgcagcatcgcaaggttg

SEQ ID NO: 155071 - DNA, 25 bp, Probe sequence
aatctgctcagtttccattttatat

SEQ ID NO: 155072 - DNA, 25 bp, Probe sequence
ctgtccctatcgtcatatttattta

SEQ ID NO: 155073 - DNA, 25 bp, Probe sequence
ctggcgcgaacgacaagcatctata

SEQ ID NO: 155074 - DNA, 25 bp, Probe sequence
ctggcattttcaacagtatcccaat

SEQ ID NO: 155075 - DNA, 25 bp, Probe sequence
gcaatgttaggtgtcgtactttcag

SEQ ID NO: 155076 - DNA, 25 bp, Probe sequence
gaaccagctacatcttcgattaatc

SEQ ID NO: 155077 - DNA, 25 bp, Probe sequence
gaaaagcgctcattccagcttacta

SEQ ID NO: 155078 - DNA, 25 bp, Probe sequence
gatggcttaggtttactctttagtt

SEQ ID NO: 155079 - DNA, 25 bp, Probe sequence
gtatggctggtgtaccaccgttcaa

SEQ ID NO: 155080 - DNA, 25 bp, Probe sequence
gtgctgcctttttaattcttttcgc

SEQ ID NO: 155081 - DNA, 25 bp, Probe sequence
gtgggcagtgtcttcacatttgtat

SEQ ID NO: 155082 - DNA, 25 bp, Probe sequence
gtggatcattctactggtacacgtg

SEQ ID NO: 155083 - DNA, 25 bp, Probe sequence
ggtgttggtttgtccgtcattatta

SEQ ID NO: 155084 - DNA, 25 bp, Probe sequence
ggcgatgcttggaatcggtgccatt

SEQ ID NO: 155085 - DNA, 25 bp, Probe sequence
ggatatgctgtgtctgtattgttta

SEQ ID NO: 155086 - DNA, 25 bp, Probe sequence
taatcgctcgaatgacaccaatctt

SEQ ID NO: 155087 - DNA, 25 bp, Probe sequence
taatgcttttatcaccagctatttt

SEQ ID NO: 155088 - DNA, 25 bp, Probe sequence
tatgttccatggattaacgcctgcc

SEQ ID NO: 155089 - DNA, 25 bp, Probe sequence
taggtggtatcatcttactcgctat

SEQ ID NO: 155090 - DNA, 25 bp, Probe sequence
ttctgggagctaacgtcattttcta

SEQ ID NO: 155091 - DNA, 25 bp, Probe sequence
ttttacttatttcattctggcgcga

SEQ ID NO: 155092 - DNA, 25 bp, Probe sequence
caaggtgatttacataaccctactg

SEQ ID NO: 155093 - DNA, 25 bp, Probe sequence
atcaaacacccgaaacaaggtgatt

SEQ ID NO: 155094 - DNA, 25 bp, Probe sequence
atgttgatgtattgcgctatgaaga

SEQ ID NO: 155095 - DNA, 25 bp, Probe sequence
atggagacgatgtccttgttaaagt

SEQ ID NO: 155096 - DNA, 25 bp, Probe sequence
agattcacttcaacaagcaattaca

SEQ ID NO: 155097 - DNA, 25 bp, Probe sequence
acgttcacaattacgcgacttcaat

SEQ ID NO: 155098 - DNA, 25 bp, Probe sequence
acaagcaattacagatttagaaact

SEQ ID NO: 155099 - DNA, 25 bp, Probe sequence
aaacgctatacgaaacgttcacaat

SEQ ID NO: 155100 - DNA, 25 bp, Probe sequence
aaactgaaggtgtatttttccatga

SEQ ID NO: 155101 - DNA, 25 bp, Probe sequence
aacaggtagctatggtgtcacgatt

SEQ ID NO: 155102 - DNA, 25 bp, Probe sequence
aacatgctgaaatgtctttagctag

SEQ ID NO: 155103 - DNA, 25 bp, Probe sequence
aagattattcacttcaatacaaaga

SEQ ID NO: 155104 - DNA, 25 bp, Probe sequence
aattacgcgacttcaatgttgatgt

SEQ ID NO: 155105 - DNA, 25 bp, Probe sequence
caagttatcaaacacccgaaacaag

SEQ ID NO: 155106 - DNA, 25 bp, Probe sequence
gttgaacaagttatcaaacacccga

SEQ ID NO: 155107 - DNA, 25 bp, Probe sequence
gcgacttcaatgttgatgtattgcg

SEQ ID NO: 155108 - DNA, 25 bp, Probe sequence
gctgaaatgtctttagctagtttag

SEQ ID NO: 155109 - DNA, 25 bp, Probe sequence
gcacgcttaaaagaagattattcac

SEQ ID NO: 155110 - DNA, 25 bp, Probe sequence
gaagctatatcgattttcacacaaa

SEQ ID NO: 155111 - DNA, 25 bp, Probe sequence
gaaaatggagacgatgtccttgtta

SEQ ID NO: 155112 - DNA, 25 bp, Probe sequence
gaaacgttcacaattacgcgacttc

SEQ ID NO: 155113 - DNA, 25 bp, Probe sequence
gacgatgtccttgttaaagttgaac

SEQ ID NO: 155114 - DNA, 25 bp, Probe sequence
gatgtattgcgctatgaagattcac

SEQ ID NO: 155115 - DNA, 25 bp, Probe sequence
gatttacataaccctactgaaactg

SEQ ID NO: 155116 - DNA, 25 bp, Probe sequence
gtattgcgctatgaagattcacttc

SEQ ID NO: 155117 - DNA, 25 bp, Probe sequence
gtagctatggtgtcacgattgttga

SEQ ID NO: 155118 - DNA, 25 bp, Probe sequence
gtctttagctagtttagcacgctta

SEQ ID NO: 155119 - DNA, 25 bp, Probe sequence
ggtgatttacataaccctactgaaa

SEQ ID NO: 155120 - DNA, 25 bp, Probe sequence
tcgattttcacacaaaacaggtagc

SEQ ID NO: 155121 - DNA, 25 bp, Probe sequence
tcacaattacgcgacttcaatgttg

SEQ ID NO: 155122 - DNA, 25 bp, Probe sequence
taaccctactgaaactgaaggtgta

SEQ ID NO: 155123 - DNA, 25 bp, Probe sequence
tagctagtttagcacgcttaaaaga

SEQ ID NO: 155124 - DNA, 25 bp, Probe sequence
tatggtgtcacgattgttgaagaaa

SEQ ID NO: 155125 - DNA, 25 bp, Probe sequence
ttacataaccctactgaaactgaag

SEQ ID NO: 155126 - DNA, 25 bp, Probe sequence
atcgtggcgcaagtggctatgcacc

SEQ ID NO: 155127 - DNA, 25 bp, Probe sequence
attgcaaataaacctcaggctattc

SEQ ID NO: 155128 - DNA, 25 bp, Probe sequence
atagtacatccttatacagtgaatg

SEQ ID NO: 155129 - DNA, 25 bp, Probe sequence
atacccatcatttaaaagacttagg

SEQ ID NO: 155130 - DNA, 25 bp, Probe sequence
atcgcacatcgtggcgcaagtggct

SEQ ID NO: 155131 - DNA, 25 bp, Probe sequence
atcgtcaaaataagcatgtgccatt

SEQ ID NO: 155132 - DNA, 25 bp, Probe sequence
atgggatttttatcagtacctactg

SEQ ID NO: 155133 - DNA, 25 bp, Probe sequence
atgattcaatcattttctgacgaaa

SEQ ID NO: 155134 - DNA, 25 bp, Probe sequence
acctcaggctattcaatggcataca

SEQ ID NO: 155135 - DNA, 25 bp, Probe sequence
acagttagatgcaggaagttggttt

SEQ ID NO: 155136 - DNA, 25 bp, Probe sequence
aacaaagtcacctgatgtataccca

SEQ ID NO: 155137 - DNA, 25 bp, Probe sequence
aacgaatgagcgattcactactatc

SEQ ID NO: 155138 - DNA, 25 bp, Probe sequence
aatggacacggtaaagttgaggatt

SEQ ID NO: 155139 - DNA, 25 bp, Probe sequence
ctacaacaatttaacgaccaacgct

SEQ ID NO: 155140 - DNA, 25 bp, Probe sequence
gctcttatgcgattggattaggtcc

SEQ ID NO: 155141 - DNA, 25 bp, Probe sequence
gcttctgctgtttttactatgggat

SEQ ID NO: 155142 - DNA, 25 bp, Probe sequence
gcttcactaaatttatggctgcttc

SEQ ID NO: 155143 - DNA, 25 bp, Probe sequence
gcttcattgaaaaagcatcaccttt

SEQ ID NO: 155144 - DNA, 25 bp, Probe sequence
gaaaaagctgatatgttacgattaa

SEQ ID NO: 155145 - DNA, 25 bp, Probe sequence
gaaattgatttacaacgtaccaaag

SEQ ID NO: 155146 - DNA, 25 bp, Probe sequence
gactaactcttcgaaaagcttcact

SEQ ID NO: 155147 - DNA, 25 bp, Probe sequence
gaccaacgcttaaaagagatacgct

SEQ ID NO: 155148 - DNA, 25 bp, Probe sequence
gagcatacgtttcaagcatatgata

SEQ ID NO: 155149 - DNA, 25 bp, Probe sequence
gagatacgctcttatgcgattggat

SEQ ID NO: 155150 - DNA, 25 bp, Probe sequence
gattcactactatcgcacatcgtgg

SEQ ID NO: 155151 - DNA, 25 bp, Probe sequence
gttaaccgtacaacaaatggacacg

SEQ ID NO: 155152 - DNA, 25 bp, Probe sequence
gtacccactttagatgaaattttag

SEQ ID NO: 155153 - DNA, 25 bp, Probe sequence
ggtgtctttacaaatttcgctgata

SEQ ID NO: 155154 - DNA, 25 bp, Probe sequence
ggattaggtcctgattatacagatt

SEQ ID NO: 155155 - DNA, 25 bp, Probe sequence
ggcgttgatggtgtctttacaaatt

SEQ ID NO: 155156 - DNA, 25 bp, Probe sequence
tatcagtacctactgctggcgctga

SEQ ID NO: 155157 - DNA, 25 bp, Probe sequence
ttatggctgcttctgctgtttttac

SEQ ID NO: 155158 - DNA, 25 bp, Probe sequence
ttaactgaacaaaatacccatcatt

SEQ ID NO: 155159 - DNA, 25 bp, Probe sequence
ttgaggattatacccttgatgaatt

SEQ ID NO: 155160 - DNA, 25 bp, Probe sequence
ataccgatattacagttactaacat

SEQ ID NO: 155161 - DNA, 25 bp, Probe sequence
attgtgaatggcaagcctgctattg

SEQ ID NO: 155162 - DNA, 25 bp, Probe sequence
atcagtacaacgtaagcatcgacaa

SEQ ID NO: 155163 - DNA, 25 bp, Probe sequence
atctgcttttatcagttattactgt

SEQ ID NO: 155164 - DNA, 25 bp, Probe sequence
atggcaagcctgctattgaatggat

SEQ ID NO: 155165 - DNA, 25 bp, Probe sequence
agatcagtacaacgtaagcatcgac

SEQ ID NO: 155166 - DNA, 25 bp, Probe sequence
acattttaaatctgcttttatcagt

SEQ ID NO: 155167 - DNA, 25 bp, Probe sequence
acagttactaacattccaaataaag

SEQ ID NO: 155168 - DNA, 25 bp, Probe sequence
aaatctggaatattagatgatccta

SEQ ID NO: 155169 - DNA, 25 bp, Probe sequence
aaaagggcgtgttggatacagtaat

SEQ ID NO: 155170 - DNA, 25 bp, Probe sequence
aacgtaagcatcgacaagaaatctg

SEQ ID NO: 155171 - DNA, 25 bp, Probe sequence
aagtatgaaaactcttggattaata

SEQ ID NO: 155172 - DNA, 25 bp, Probe sequence
aattaccagattttgaagtattaga

SEQ ID NO: 155173 - DNA, 25 bp, Probe sequence
caataccgatattacagttactaac

SEQ ID NO: 155174 - DNA, 25 bp, Probe sequence
caagcctgctattgaatggattata

SEQ ID NO: 155175 - DNA, 25 bp, Probe sequence
gcttttatcagttattactgtaagt

SEQ ID NO: 155176 - DNA, 25 bp, Probe sequence
gcatcgacaagaaatctggaatatt

SEQ ID NO: 155177 - DNA, 25 bp, Probe sequence
gaattacattttaaatctgctttta

SEQ ID NO: 155178 - DNA, 25 bp, Probe sequence
gaagcaccctaaaaagggcgtgttg

SEQ ID NO: 155179 - DNA, 25 bp, Probe sequence
gaatggattatagatcagtacaacg

SEQ ID NO: 155180 - DNA, 25 bp, Probe sequence
gaatggcaagcctgctattgaatgg

SEQ ID NO: 155181 - DNA, 25 bp, Probe sequence
gatgatcctaatgaatttagtgaag

SEQ ID NO: 155182 - DNA, 25 bp, Probe sequence
gatccgaattacattttaaatctgc

SEQ ID NO: 155183 - DNA, 25 bp, Probe sequence
gatattacagttactaacattccaa

SEQ ID NO: 155184 - DNA, 25 bp, Probe sequence
gtacaacgtaagcatcgacaagaaa

SEQ ID NO: 155185 - DNA, 25 bp, Probe sequence
gtaagcatcgacaagaaatctggaa

SEQ ID NO: 155186 - DNA, 25 bp, Probe sequence
gtgaatggcaagcctgctattgaat

SEQ ID NO: 155187 - DNA, 25 bp, Probe sequence
gggcgtgttggatacagtaatatac

SEQ ID NO: 155188 - DNA, 25 bp, Probe sequence
ggatacagtaatatacaataccgat

SEQ ID NO: 155189 - DNA, 25 bp, Probe sequence
ggcaagcctgctattgaatggatta

SEQ ID NO: 155190 - DNA, 25 bp, Probe sequence
taaatctgcttttatcagttattac

SEQ ID NO: 155191 - DNA, 25 bp, Probe sequence
tactgtaagtatgaaaactcttgga

SEQ ID NO: 155192 - DNA, 25 bp, Probe sequence
tagtgaagatccgaattacatttta

SEQ ID NO: 155193 - DNA, 25 bp, Probe sequence
ttatattgtgaatggcaagcctgct

SEQ ID NO: 155194 - DNA, 25 bp, Probe sequence
atattccatttagaactgcacatga

SEQ ID NO: 155195 - DNA, 25 bp, Probe sequence
atcatcgcattaattaagtcgttac

SEQ ID NO: 155196 - DNA, 25 bp, Probe sequence
agaacgactcaatcaaactgttaaa

SEQ ID NO: 155197 - DNA, 25 bp, Probe sequence
actggacgcagtagaaacgatcaag

SEQ ID NO: 155198 - DNA, 25 bp, Probe sequence
aaggattacctctagcatataacaa

SEQ ID NO: 155199 - DNA, 25 bp, Probe sequence
aatgagcatgcttatgactttaaaa

SEQ ID NO: 155200 - DNA, 25 bp, Probe sequence
aatagcctagatgctgttagtgaca

SEQ ID NO: 155201 - DNA, 25 bp, Probe sequence
caatcatcggtcaaacaacaacttg

SEQ ID NO: 155202 - DNA, 25 bp, Probe sequence
caacatatcaacaacatcattctag

SEQ ID NO: 155203 - DNA, 25 bp, Probe sequence
cagcgtgcacagccaatttcatttg

SEQ ID NO: 155204 - DNA, 25 bp, Probe sequence
catcgcttccaataatgttgataca

SEQ ID NO: 155205 - DNA, 25 bp, Probe sequence
ctttaacgatggttcacttatcacg

SEQ ID NO: 155206 - DNA, 25 bp, Probe sequence
cgatagacacgagacaacagcattg

SEQ ID NO: 155207 - DNA, 25 bp, Probe sequence
gccaatttcatttgcacatcatatt

SEQ ID NO: 155208 - DNA, 25 bp, Probe sequence
gcgaatcaaggcattattagtcaac

SEQ ID NO: 155209 - DNA, 25 bp, Probe sequence
gctgtccatacaattaaaggttctt

SEQ ID NO: 155210 - DNA, 25 bp, Probe sequence
gcagcagccttaagtggtaccacat

SEQ ID NO: 155211 - DNA, 25 bp, Probe sequence
gaaggtttattcgatgctgtccata

SEQ ID NO: 155212 - DNA, 25 bp, Probe sequence
gactttaacgcatccattacttttg

SEQ ID NO: 155213 - DNA, 25 bp, Probe sequence
gagcaataaagcttggggcggtaga

SEQ ID NO: 155214 - DNA, 25 bp, Probe sequence
gaggaaattattttctggtccacag

SEQ ID NO: 155215 - DNA, 25 bp, Probe sequence
gatacaattatgcctggttatactc

SEQ ID NO: 155216 - DNA, 25 bp, Probe sequence
gttacaacgagaccaacaacgattt

SEQ ID NO: 155217 - DNA, 25 bp, Probe sequence
gtgggttgacgactttaacgcatcc

SEQ ID NO: 155218 - DNA, 25 bp, Probe sequence
gtgtaattgtagacatcgcttccaa

SEQ ID NO: 155219 - DNA, 25 bp, Probe sequence
gggcggtagatttgaagtacaacct

SEQ ID NO: 155220 - DNA, 25 bp, Probe sequence
ggtggtaagttgcatactggacgca

SEQ ID NO: 155221 - DNA, 25 bp, Probe sequence
ggtccacagacgaagctaaattcat

SEQ ID NO: 155222 - DNA, 25 bp, Probe sequence
ggtaccacataccctatcgatagac

SEQ ID NO: 155223 - DNA, 25 bp, Probe sequence
ggttatactcatttacagcgtgcac

SEQ ID NO: 155224 - DNA, 25 bp, Probe sequence
ggctcatctattatgccacaaaaga

SEQ ID NO: 155225 - DNA, 25 bp, Probe sequence
taatcctttaggtgcagcagcctta

SEQ ID NO: 155226 - DNA, 25 bp, Probe sequence
tatttacgattatttgcagcctgaa

SEQ ID NO: 155227 - DNA, 25 bp, Probe sequence
ttggtcgaacgactggtcatttaat

SEQ ID NO: 155228 - DNA, 25 bp, Probe sequence
cattcgcacctgtacgtgagtgggc

SEQ ID NO: 155229 - DNA, 25 bp, Probe sequence
agcttgttgcctagatgttggtgaa

SEQ ID NO: 155230 - DNA, 25 bp, Probe sequence
acccatcattgaaagcattcgcacc

SEQ ID NO: 155231 - DNA, 25 bp, Probe sequence
aaattcagtaggtattgcacatggt

SEQ ID NO: 155232 - DNA, 25 bp, Probe sequence
aacgtttgataaaggcatcccagtt

SEQ ID NO: 155233 - DNA, 25 bp, Probe sequence
aaccatgattcaccttattctatcg

SEQ ID NO: 155234 - DNA, 25 bp, Probe sequence
ccaccagaggatgcgttcgatctaa

SEQ ID NO: 155235 - DNA, 25 bp, Probe sequence
gctttatcaagaccattaatcgcta

SEQ ID NO: 155236 - DNA, 25 bp, Probe sequence
gcaatacgtaagtggtgatgtcaga

SEQ ID NO: 155237 - DNA, 25 bp, Probe sequence
gaagcaatttgctgaacaactatac

SEQ ID NO: 155238 - DNA, 25 bp, Probe sequence
gggaatgaccaagtacgtttcgaag

SEQ ID NO: 155239 - DNA, 25 bp, Probe sequence
gatgcgttcgatctaacaaatgctt

SEQ ID NO: 155240 - DNA, 25 bp, Probe sequence
gatgcatttaatcaagacgctgctg

SEQ ID NO: 155241 - DNA, 25 bp, Probe sequence
gatacgacgttgtagcttgttgcct

SEQ ID NO: 155242 - DNA, 25 bp, Probe sequence
gatagtactcagcaatacgtaagtg

SEQ ID NO: 155243 - DNA, 25 bp, Probe sequence
gattcaccttattctatcgatcaaa

SEQ ID NO: 155244 - DNA, 25 bp, Probe sequence
gtattttagaagatccttatgctgc

SEQ ID NO: 155245 - DNA, 25 bp, Probe sequence
gtatcggaagaattgaccatgtaga

SEQ ID NO: 155246 - DNA, 25 bp, Probe sequence
gtagaaaatcaccttacacattata

SEQ ID NO: 155247 - DNA, 25 bp, Probe sequence
gtacgtttcgaagttgccattaaag

SEQ ID NO: 155248 - DNA, 25 bp, Probe sequence
gtgagtgggcatggagtcgtgaaga

SEQ ID NO: 155249 - DNA, 25 bp, Probe sequence
gtggccgttcaatggcttatcgaca

SEQ ID NO: 155250 - DNA, 25 bp, Probe sequence
ggggcagagcgaatgaatgtggtat

SEQ ID NO: 155251 - DNA, 25 bp, Probe sequence
ggtattgcacatggttgtactggta

SEQ ID NO: 155252 - DNA, 25 bp, Probe sequence
ggttctcacctttaactgatagctt

SEQ ID NO: 155253 - DNA, 25 bp, Probe sequence
ggcatcccagttcaaattgatggca

SEQ ID NO: 155254 - DNA, 25 bp, Probe sequence
ggctttatcgatatctatggtttac

SEQ ID NO: 155255 - DNA, 25 bp, Probe sequence
ggcttatcgacaaaggatacgacgt

SEQ ID NO: 155256 - DNA, 25 bp, Probe sequence
tacaatggactttggttctcacctt

SEQ ID NO: 155257 - DNA, 25 bp, Probe sequence
tagctggtaagcatggtatcggaag

SEQ ID NO: 155258 - DNA, 25 bp, Probe sequence
tatctatggtttacctactcaagta

SEQ ID NO: 155259 - DNA, 25 bp, Probe sequence
tttaacgttgaatgcattagctggt

SEQ ID NO: 155260 - DNA, 25 bp, Probe sequence
ttaaagcattaaacccatcattgaa

SEQ ID NO: 155261 - DNA, 25 bp, Probe sequence
ttaaacataatatccctgtatcaat

SEQ ID NO: 155262 - DNA, 25 bp, Probe sequence
atttactcattgtcatagcactcgt

SEQ ID NO: 155263 - DNA, 25 bp, Probe sequence
ataggtggactagccgataaatata

SEQ ID NO: 155264 - DNA, 25 bp, Probe sequence
atgtattatccggtttcttagcttc

SEQ ID NO: 155265 - DNA, 25 bp, Probe sequence
agcgatgactataatgatgtttcta

SEQ ID NO: 155266 - DNA, 25 bp, Probe sequence
actaggctactcaatttcatcaatc

SEQ ID NO: 155267 - DNA, 25 bp, Probe sequence
aaattcggtttctatattatactca

SEQ ID NO: 155268 - DNA, 25 bp, Probe sequence
aaatatgtcggtcgctcatttacga

SEQ ID NO: 155269 - DNA, 25 bp, Probe sequence
aacaggtatgtttattgcaggtgga

SEQ ID NO: 155270 - DNA, 25 bp, Probe sequence
aacttcagattgttctttttagcag

SEQ ID NO: 155271 - DNA, 25 bp, Probe sequence
aactcagcattttacttattcatag

SEQ ID NO: 155272 - DNA, 25 bp, Probe sequence
aataatttcagcattcggagttgga

SEQ ID NO: 155273 - DNA, 25 bp, Probe sequence
aattcagcactatttatttggataa

SEQ ID NO: 155274 - DNA, 25 bp, Probe sequence
gacaaaactaacgactcccaactat

SEQ ID NO: 155275 - DNA, 25 bp, Probe sequence
gagttggaattagtacagttggggc

SEQ ID NO: 155276 - DNA, 25 bp, Probe sequence
gacctatttagtgattggatttgcg

SEQ ID NO: 155277 - DNA, 25 bp, Probe sequence
gatgtttctaatcagcatttttatg

SEQ ID NO: 155278 - DNA, 25 bp, Probe sequence
gatctttaacatatcattaccagga

SEQ ID NO: 155279 - DNA, 25 bp, Probe sequence
gattcactctaattatagcgatgac

SEQ ID NO: 155280 - DNA, 25 bp, Probe sequence
gtcgctcatttacgatatggacgtc

SEQ ID NO: 155281 - DNA, 25 bp, Probe sequence
ggggctaattggtatttaatcgaca

SEQ ID NO: 155282 - DNA, 25 bp, Probe sequence
ggtttaatttcagctattctttcga

SEQ ID NO: 155283 - DNA, 25 bp, Probe sequence
ggtttcttagcttctcctataatag

SEQ ID NO: 155284 - DNA, 25 bp, Probe sequence
ggatcatttatactaggctactcaa

SEQ ID NO: 155285 - DNA, 25 bp, Probe sequence
ggagttatttcaatcataccaatgg

SEQ ID NO: 155286 - DNA, 25 bp, Probe sequence
ggactacgtatatggcaacatctag

SEQ ID NO: 155287 - DNA, 25 bp, Probe sequence
ggacgtcaatttcattgttactgca

SEQ ID NO: 155288 - DNA, 25 bp, Probe sequence
tgtagataaaccaactcattcagag

SEQ ID NO: 155289 - DNA, 25 bp, Probe sequence
taacgactcccaactattaggtatt

SEQ ID NO: 155290 - DNA, 25 bp, Probe sequence
taaaactttcgtctgtacaatttgg

SEQ ID NO: 155291 - DNA, 25 bp, Probe sequence
tacagatgcaaattctctattagag

SEQ ID NO: 155292 - DNA, 25 bp, Probe sequence
tatattatactcattttatccttac

SEQ ID NO: 155293 - DNA, 25 bp, Probe sequence
tatttgttacactgctgcttgttaa

SEQ ID NO: 155294 - DNA, 25 bp, Probe sequence
ttatccttactcatatttgttacac

SEQ ID NO: 155295 - DNA, 25 bp, Probe sequence
ttattttaatcacctatcttcttca

SEQ ID NO: 155296 - DNA, 25 bp, Probe sequence
atatgctttagcgtatacacctgaa

SEQ ID NO: 155297 - DNA, 25 bp, Probe sequence
agatcgtgatatgagctttgctaat

SEQ ID NO: 155298 - DNA, 25 bp, Probe sequence
acatgtcgatctaccggctagtgtt

SEQ ID NO: 155299 - DNA, 25 bp, Probe sequence
acaccctactttaattcatcgatct

SEQ ID NO: 155300 - DNA, 25 bp, Probe sequence
aaaccgtcagattttaagagcagct

SEQ ID NO: 155301 - DNA, 25 bp, Probe sequence
aacgtattgatgtactatcgatggc

SEQ ID NO: 155302 - DNA, 25 bp, Probe sequence
aataggcgatattgcaacatcacat

SEQ ID NO: 155303 - DNA, 25 bp, Probe sequence
cattgccttatgtcattggcgaagt

SEQ ID NO: 155304 - DNA, 25 bp, Probe sequence
ctttgctaattgtgcattgccttat

SEQ ID NO: 155305 - DNA, 25 bp, Probe sequence
ccaccatatagccaccctaaagatt

SEQ ID NO: 155306 - DNA, 25 bp, Probe sequence
gcgctcaccgtgcagcaagtattgt

SEQ ID NO: 155307 - DNA, 25 bp, Probe sequence
gcacacgcgaattattacccaggaa

SEQ ID NO: 155308 - DNA, 25 bp, Probe sequence
gcaacatgtgccagccaaattcgac

SEQ ID NO: 155309 - DNA, 25 bp, Probe sequence
gcaacatcacattatcgacatgtcg

SEQ ID NO: 155310 - DNA, 25 bp, Probe sequence
gcaagtgcaaatagccttggctttg

SEQ ID NO: 155311 - DNA, 25 bp, Probe sequence
gaattcaaaggcttcttaggcaaca

SEQ ID NO: 155312 - DNA, 25 bp, Probe sequence
gaagtcactcaaggtgcacacgcga

SEQ ID NO: 155313 - DNA, 25 bp, Probe sequence
gaagttctttgattatacatttgcg

SEQ ID NO: 155314 - DNA, 25 bp, Probe sequence
gacactgatgctatcgatcaattca

SEQ ID NO: 155315 - DNA, 25 bp, Probe sequence
gtatattatgacacttcaaaccgtc

SEQ ID NO: 155316 - DNA, 25 bp, Probe sequence
gtgccagccaaattcgacgtttaga

SEQ ID NO: 155317 - DNA, 25 bp, Probe sequence
ggcaatgatgaaccagctaactgta

SEQ ID NO: 155318 - DNA, 25 bp, Probe sequence
ggctagtgttcctttagcttggggc

SEQ ID NO: 155319 - DNA, 25 bp, Probe sequence
tggtttacaccctactttaattcat

SEQ ID NO: 155320 - DNA, 25 bp, Probe sequence
tgatcgaaaaggtttcataccggta

SEQ ID NO: 155321 - DNA, 25 bp, Probe sequence
tgttgccgaacaaattgctggaaat

SEQ ID NO: 155322 - DNA, 25 bp, Probe sequence
tgaagtggcttatgcaccaccatat

SEQ ID NO: 155323 - DNA, 25 bp, Probe sequence
tcggtactcaccccaattcaaaatt

SEQ ID NO: 155324 - DNA, 25 bp, Probe sequence
taagcgggagattccataccgttta

SEQ ID NO: 155325 - DNA, 25 bp, Probe sequence
taaactcattttaagccctggtgca

SEQ ID NO: 155326 - DNA, 25 bp, Probe sequence
tagtcgtagtcggagcagtcgctgg

SEQ ID NO: 155327 - DNA, 25 bp, Probe sequence
ttgaaggtgtcggtactcaccccaa

SEQ ID NO: 155328 - DNA, 25 bp, Probe sequence
ttgcgagtgtcggcgttaaaccaaa

SEQ ID NO: 155329 - DNA, 25 bp, Probe sequence
ttttaagccctggtgcaagtgcaaa

SEQ ID NO: 155330 - DNA, 25 bp, Probe sequence
atcaggaacatgacgcatttgttaa

SEQ ID NO: 155331 - DNA, 25 bp, Probe sequence
atggtgcgtcttctaatgaatttag

SEQ ID NO: 155332 - DNA, 25 bp, Probe sequence
agaatcgctgtaggtcgtgacggtg

SEQ ID NO: 155333 - DNA, 25 bp, Probe sequence
acgatttcggtggtacagataatga

SEQ ID NO: 155334 - DNA, 25 bp, Probe sequence
acgtgaacatggtgcaacaacttac

SEQ ID NO: 155335 - DNA, 25 bp, Probe sequence
aaattaactggatggtacgcgcgaa

SEQ ID NO: 155336 - DNA, 25 bp, Probe sequence
aacgcgtgatattagttactttgaa

SEQ ID NO: 155337 - DNA, 25 bp, Probe sequence
aatcactggggaacgcgatggcttc

SEQ ID NO: 155338 - DNA, 25 bp, Probe sequence
aatcgttcaaaagtgcgcttggctt

SEQ ID NO: 155339 - DNA, 25 bp, Probe sequence
aatcgatcctgatgttgaagttgat

SEQ ID NO: 155340 - DNA, 25 bp, Probe sequence
cgtggttttgttgttgattatagta

SEQ ID NO: 155341 - DNA, 25 bp, Probe sequence
cgatggcttcttaacgcgtgatatt

SEQ ID NO: 155342 - DNA, 25 bp, Probe sequence
cgatgatgaagtatgcacgtgaaca

SEQ ID NO: 155343 - DNA, 25 bp, Probe sequence
gcgttaaatgcattgttagacagtg

SEQ ID NO: 155344 - DNA, 25 bp, Probe sequence
gaatcagccattgtaccaattaatt

SEQ ID NO: 155345 - DNA, 25 bp, Probe sequence
gaaggtttatcaaaagactacatcc

SEQ ID NO: 155346 - DNA, 25 bp, Probe sequence
gactacatccaaccacgtatgacta

SEQ ID NO: 155347 - DNA, 25 bp, Probe sequence
gatggagatgctgaactatttttag

SEQ ID NO: 155348 - DNA, 25 bp, Probe sequence
gatggtacgcgcgaagaatcgctgt

SEQ ID NO: 155349 - DNA, 25 bp, Probe sequence
gatgcatatcactaatcaggaacat

SEQ ID NO: 155350 - DNA, 25 bp, Probe sequence
gatgcgttgcatgaagatggagatg

SEQ ID NO: 155351 - DNA, 25 bp, Probe sequence
gatttaaaacgagacctagaagctt

SEQ ID NO: 155352 - DNA, 25 bp, Probe sequence
gtgtggggaacatacttaagtgaaa

SEQ ID NO: 155353 - DNA, 25 bp, Probe sequence
gtatgcaattaaaatcgatcctgat

SEQ ID NO: 155354 - DNA, 25 bp, Probe sequence
gtatgactatgattacaccaattga

SEQ ID NO: 155355 - DNA, 25 bp, Probe sequence
gtgcactattaatgtttgctggctc

SEQ ID NO: 155356 - DNA, 25 bp, Probe sequence
ggtgcaacaacttacgatttcggtg

SEQ ID NO: 155357 - DNA, 25 bp, Probe sequence
ggtacagatgctttgcaaaatttga

SEQ ID NO: 155358 - DNA, 25 bp, Probe sequence
ggtatttatctttctggtgcactat

SEQ ID NO: 155359 - DNA, 25 bp, Probe sequence
ggaacatcctgaaggtatttatctt

SEQ ID NO: 155360 - DNA, 25 bp, Probe sequence
taattgagcaagttaaaccgcgttt

SEQ ID NO: 155361 - DNA, 25 bp, Probe sequence
tattacttatatggtgcgtcttcta

SEQ ID NO: 155362 - DNA, 25 bp, Probe sequence
ttgaaagcgcttggttttaaacata

SEQ ID NO: 155363 - DNA, 25 bp, Probe sequence
ttgctggctcaaaatcatattactt

SEQ ID NO: 155364 - DNA, 25 bp, Probe sequence
atattgagcatcgacgctggggcgc

SEQ ID NO: 155365 - DNA, 25 bp, Probe sequence
attttagatttaggcatcgcacaaa

SEQ ID NO: 155366 - DNA, 25 bp, Probe sequence
atatgcttactcatttttatgccga

SEQ ID NO: 155367 - DNA, 25 bp, Probe sequence
atcatgatccaagattatttgaagg

SEQ ID NO: 155368 - DNA, 25 bp, Probe sequence
atcgtgcaagtcaaatgtattatca

SEQ ID NO: 155369 - DNA, 25 bp, Probe sequence
atgggtaatccaagaattcaaactg

SEQ ID NO: 155370 - DNA, 25 bp, Probe sequence
aaacttgccatgaaattttagattt

SEQ ID NO: 155371 - DNA, 25 bp, Probe sequence
aactggtaatttacttgtccacttg

SEQ ID NO: 155372 - DNA, 25 bp, Probe sequence
aataatattattgcattcggtgatg

SEQ ID NO: 155373 - DNA, 25 bp, Probe sequence
cattccctgtcattgaaattgtaaa

SEQ ID NO: 155374 - DNA, 25 bp, Probe sequence
cgcttacgtacatcaccctaaagat

SEQ ID NO: 155375 - DNA, 25 bp, Probe sequence
gctatggaaaatggtttgcaagaac

SEQ ID NO: 155376 - DNA, 25 bp, Probe sequence
gcttactcatttttatgccgatcat

SEQ ID NO: 155377 - DNA, 25 bp, Probe sequence
gcaccattccctgtcattgaaattg

SEQ ID NO: 155378 - DNA, 25 bp, Probe sequence
gcagaccttatcgtgcaagtcaaat

SEQ ID NO: 155379 - DNA, 25 bp, Probe sequence
gaattaaatttaacgacaccaattg

SEQ ID NO: 155380 - DNA, 25 bp, Probe sequence
gcaagaacttaaagatgtagcgaac

SEQ ID NO: 155381 - DNA, 25 bp, Probe sequence
gcaaccacatttaatatgtctagac

SEQ ID NO: 155382 - DNA, 25 bp, Probe sequence
gaattacaacaacgtggacaccaaa

SEQ ID NO: 155383 - DNA, 25 bp, Probe sequence
gaagccgaagaaagtaaaatacctg

SEQ ID NO: 155384 - DNA, 25 bp, Probe sequence
gacaccaattgttaattttaatggc

SEQ ID NO: 155385 - DNA, 25 bp, Probe sequence
gaaatttcatcatatactaaacaag

SEQ ID NO: 155386 - DNA, 25 bp, Probe sequence
gactggcagaccttatcgtgcaagt

SEQ ID NO: 155387 - DNA, 25 bp, Probe sequence
gattgcgactggcagaccttatcgt

SEQ ID NO: 155388 - DNA, 25 bp, Probe sequence
gataaaaacttcaaaacttgccatg

SEQ ID NO: 155389 - DNA, 25 bp, Probe sequence
gtagcgaacaatattacattcaaca

SEQ ID NO: 155390 - DNA, 25 bp, Probe sequence
ggacaccaaattatgattgcgactg

SEQ ID NO: 155391 - DNA, 25 bp, Probe sequence
tgtccacttgaaagaatcccctacc

SEQ ID NO: 155392 - DNA, 25 bp, Probe sequence
tgaaggtttttcaatgggtaatcca

SEQ ID NO: 155393 - DNA, 25 bp, Probe sequence
tgccgatcatattgagcatcgacgc

SEQ ID NO: 155394 - DNA, 25 bp, Probe sequence
tcccctacctcaattttaattgaag

SEQ ID NO: 155395 - DNA, 25 bp, Probe sequence
tctagacttagacggaacattatta

SEQ ID NO: 155396 - DNA, 25 bp, Probe sequence
ttgaaagaatcccctacctcaattt

SEQ ID NO: 155397 - DNA, 25 bp, Probe sequence
ttaatggcgcttacgtacatcaccc

SEQ ID NO: 155398 - DNA, 25 bp, Probe sequence
attgattgctcccaataaagagaat

SEQ ID NO: 155399 - DNA, 25 bp, Probe sequence
atttcatttacatatatatacagca

SEQ ID NO: 155400 - DNA, 25 bp, Probe sequence
atatcgcgacattcattatgcccaa

SEQ ID NO: 155401 - DNA, 25 bp, Probe sequence
atcgggattagcagaaatcaaccta

SEQ ID NO: 155402 - DNA, 25 bp, Probe sequence
atctatcaatgatgtgcatacttca

SEQ ID NO: 155403 - DNA, 25 bp, Probe sequence
agtggcatcaaacatatccaactta

SEQ ID NO: 155404 - DNA, 25 bp, Probe sequence
acatttcttccaattgcgcaaagtt

SEQ ID NO: 155405 - DNA, 25 bp, Probe sequence
acatttgtcattttagcgaagacgt

SEQ ID NO: 155406 - DNA, 25 bp, Probe sequence
aaattaatctcactataccttctat

SEQ ID NO: 155407 - DNA, 25 bp, Probe sequence
aaaagcacaatttctatctatcaat

SEQ ID NO: 155408 - DNA, 25 bp, Probe sequence
aatctcactataccttctatacata

SEQ ID NO: 155409 - DNA, 25 bp, Probe sequence
aatcatcttctaactgaggcatctt

SEQ ID NO: 155410 - DNA, 25 bp, Probe sequence
aattgcgcaaagttttattgaacaa

SEQ ID NO: 155411 - DNA, 25 bp, Probe sequence
cattatgcccaaatttttaaaatct

SEQ ID NO: 155412 - DNA, 25 bp, Probe sequence
ctaactgaggcatctttatttgaaa

SEQ ID NO: 155413 - DNA, 25 bp, Probe sequence
ccagaatattggtcatcacttaaaa

SEQ ID NO: 155414 - DNA, 25 bp, Probe sequence
gcgacattcattatgcccaaatttt

SEQ ID NO: 155415 - DNA, 25 bp, Probe sequence
gcagaaatcaacctaaactaagaga

SEQ ID NO: 155416 - DNA, 25 bp, Probe sequence
gaatcaaggtatatcattcctgcct

SEQ ID NO: 155417 - DNA, 25 bp, Probe sequence
gaagacgttaaactatcgattagct

SEQ ID NO: 155418 - DNA, 25 bp, Probe sequence
gaacagcatctcaatgtgaaactat

SEQ ID NO: 155419 - DNA, 25 bp, Probe sequence
gaaattaaatgttgtcgtgtcttca

SEQ ID NO: 155420 - DNA, 25 bp, Probe sequence
gactgaagatggtcatacatttctt

SEQ ID NO: 155421 - DNA, 25 bp, Probe sequence
gatgtgcatacttcaattaaattaa

SEQ ID NO: 155422 - DNA, 25 bp, Probe sequence
gattggtactatacatttgtcattt

SEQ ID NO: 155423 - DNA, 25 bp, Probe sequence
gtcgtgtcttcatatatcgcgacat

SEQ ID NO: 155424 - DNA, 25 bp, Probe sequence
ggtcatacatttcttccaattgcgc

SEQ ID NO: 155425 - DNA, 25 bp, Probe sequence
ggtaaaattgtattgattgctccca

SEQ ID NO: 155426 - DNA, 25 bp, Probe sequence
tgttgtcgtgtcttcatatatcgcg

SEQ ID NO: 155427 - DNA, 25 bp, Probe sequence
tcatacgtatgacatcgggattagc

SEQ ID NO: 155428 - DNA, 25 bp, Probe sequence
taagtgataaccatccagaatattg

SEQ ID NO: 155429 - DNA, 25 bp, Probe sequence
taaaatctttctttaacgagcatcc

SEQ ID NO: 155430 - DNA, 25 bp, Probe sequence
tacaatatttcggttattaacacga

SEQ ID NO: 155431 - DNA, 25 bp, Probe sequence
tataccttctatacataagcaaatt

SEQ ID NO: 155432 - DNA, 25 bp, Probe sequence
attgttcacgattttcacagcaatt

SEQ ID NO: 155433 - DNA, 25 bp, Probe sequence
attatcatggcagtattgttcacga

SEQ ID NO: 155434 - DNA, 25 bp, Probe sequence
atagcctagtaggtggagacagctt

SEQ ID NO: 155435 - DNA, 25 bp, Probe sequence
acctcgtaacattcttttgggcatt

SEQ ID NO: 155436 - DNA, 25 bp, Probe sequence
atcatggcagtattgttcacgattt

SEQ ID NO: 155437 - DNA, 25 bp, Probe sequence
atgaaacacctcgtaacattctttt

SEQ ID NO: 155438 - DNA, 25 bp, Probe sequence
acacctcgtaacattcttttgggca

SEQ ID NO: 155439 - DNA, 25 bp, Probe sequence
accgccgaaagattcatcacaataa

SEQ ID NO: 155440 - DNA, 25 bp, Probe sequence
aaaccgccgaaagattcatcacaat

SEQ ID NO: 155441 - DNA, 25 bp, Probe sequence
aacattcttttgggcattattatta

SEQ ID NO: 155442 - DNA, 25 bp, Probe sequence
aatgcaaatggttaactttgtactt

SEQ ID NO: 155443 - DNA, 25 bp, Probe sequence
cacctcgtaacattcttttgggcat

SEQ ID NO: 155444 - DNA, 25 bp, Probe sequence
cagtattgttcacgattttcacagc

SEQ ID NO: 155445 - DNA, 25 bp, Probe sequence
catggcagtattgttcacgattttc

SEQ ID NO: 155446 - DNA, 25 bp, Probe sequence
cattcttttgggcattattattaat

SEQ ID NO: 155447 - DNA, 25 bp, Probe sequence
ctttgtacttaatagcctagtaggt

SEQ ID NO: 155448 - DNA, 25 bp, Probe sequence
cctcgtaacattcttttgggcatta

SEQ ID NO: 155449 - DNA, 25 bp, Probe sequence
gcctagtaggtggagacagcttaaa

SEQ ID NO: 155450 - DNA, 25 bp, Probe sequence
gctgcagtaattaaaccgccgaaag

SEQ ID NO: 155451 - DNA, 25 bp, Probe sequence
gaaacacctcgtaacattcttttgg

SEQ ID NO: 155452 - DNA, 25 bp, Probe sequence
gacagcttaaatgtagtgaatccaa

SEQ ID NO: 155453 - DNA, 25 bp, Probe sequence
gtattgttcacgattttcacagcaa

SEQ ID NO: 155454 - DNA, 25 bp, Probe sequence
gtaattaaaccgccgaaagattcat

SEQ ID NO: 155455 - DNA, 25 bp, Probe sequence
gtaacattcttttgggcattattat

SEQ ID NO: 155456 - DNA, 25 bp, Probe sequence
ggtggagacagcttaaatgtagtga

SEQ ID NO: 155457 - DNA, 25 bp, Probe sequence
ggcagtattgttcacgattttcaca

SEQ ID NO: 155458 - DNA, 25 bp, Probe sequence
tggttaactttgtacttaatagcct

SEQ ID NO: 155459 - DNA, 25 bp, Probe sequence
tggcagtattgttcacgattttcac

SEQ ID NO: 155460 - DNA, 25 bp, Probe sequence
tgttcacgattttcacagcaatttt

SEQ ID NO: 155461 - DNA, 25 bp, Probe sequence
tgcagtaattaaaccgccgaaagat

SEQ ID NO: 155462 - DNA, 25 bp, Probe sequence
tcgtaacattcttttgggcattatt

SEQ ID NO: 155463 - DNA, 25 bp, Probe sequence
taaatgtagtgaatccaattatcat

SEQ ID NO: 155464 - DNA, 25 bp, Probe sequence
ttaaaccgccgaaagattcatcaca

SEQ ID NO: 155465 - DNA, 25 bp, Probe sequence
ttaactttgtacttaatagcctagt

SEQ ID NO: 155466 - DNA, 25 bp, Probe sequence
attatgacgattgtgctgtcgctca

SEQ ID NO: 155467 - DNA, 25 bp, Probe sequence
atattttattatgacgattgtgctg

SEQ ID NO: 155468 - DNA, 25 bp, Probe sequence
atagccatactatcattacatattt

SEQ ID NO: 155469 - DNA, 25 bp, Probe sequence
atgatccatttttcaacccacaaga

SEQ ID NO: 155470 - DNA, 25 bp, Probe sequence
agaagaagtctatctctgatgatcc

SEQ ID NO: 155471 - DNA, 25 bp, Probe sequence
aagaagtctatctctgatgatccat

SEQ ID NO: 155472 - DNA, 25 bp, Probe sequence
aagagcattactttgtttctacatg

SEQ ID NO: 155473 - DNA, 25 bp, Probe sequence
aagtctatctctgatgatccatttt

SEQ ID NO: 155474 - DNA, 25 bp, Probe sequence
aatggcttggaatggcactaataac

SEQ ID NO: 155475 - DNA, 25 bp, Probe sequence
cattactttgtttctacatggataa

SEQ ID NO: 155476 - DNA, 25 bp, Probe sequence
ctatctctgatgatccatttttcaa

SEQ ID NO: 155477 - DNA, 25 bp, Probe sequence
gccatactatcattacatatttaaa

SEQ ID NO: 155478 - DNA, 25 bp, Probe sequence
gcatttttgatgcgacaagttatgg

SEQ ID NO: 155479 - DNA, 25 bp, Probe sequence
gaaggcatttttgatgcgacaagtt

SEQ ID NO: 155480 - DNA, 25 bp, Probe sequence
gaagtctatctctgatgatccattt

SEQ ID NO: 155481 - DNA, 25 bp, Probe sequence
gaaaaaatggcttggaatggcacta

SEQ ID NO: 155482 - DNA, 25 bp, Probe sequence
gacaagttatggttttagaagatta

SEQ ID NO: 155483 - DNA, 25 bp, Probe sequence
gatccatttttcaacccacaagagg

SEQ ID NO: 155484 - DNA, 25 bp, Probe sequence
gagcattactttgtttctacatgga

SEQ ID NO: 155485 - DNA, 25 bp, Probe sequence
gatgcgacaagttatggttttagaa

SEQ ID NO: 155486 - DNA, 25 bp, Probe sequence
gtatcaaatgtcatcttcgaaaaag

SEQ ID NO: 155487 - DNA, 25 bp, Probe sequence
gtctatctctgatgatccatttttc

SEQ ID NO: 155488 - DNA, 25 bp, Probe sequence
tgtgctgtcgctcatcttagtataa

SEQ ID NO: 155489 - DNA, 25 bp, Probe sequence
tgatgatccatttttcaacccacaa

SEQ ID NO: 155490 - DNA, 25 bp, Probe sequence
tccatttttcaacccacaagaggta

SEQ ID NO: 155491 - DNA, 25 bp, Probe sequence
tctgatgatccatttttcaacccac

SEQ ID NO: 155492 - DNA, 25 bp, Probe sequence
tctctgatgatccatttttcaaccc

SEQ ID NO: 155493 - DNA, 25 bp, Probe sequence
taaagtatcaaatgtcatcttcgaa

SEQ ID NO: 155494 - DNA, 25 bp, Probe sequence
tacttgtacaagaaggcatttttga

SEQ ID NO: 155495 - DNA, 25 bp, Probe sequence
tatgacgattgtgctgtcgctcatc

SEQ ID NO: 155496 - DNA, 25 bp, Probe sequence
tatattgttttatgtttcattaatt

SEQ ID NO: 155497 - DNA, 25 bp, Probe sequence
tttttgattttacttgtacaagaag

SEQ ID NO: 155498 - DNA, 25 bp, Probe sequence
ttttaatagccatactatcattaca

SEQ ID NO: 155499 - DNA, 25 bp, Probe sequence
ttatgtttcattaattatttttatt

SEQ ID NO: 155500 - DNA, 25 bp, Probe sequence
atttaatttcaatatacgctggatt

SEQ ID NO: 155501 - DNA, 25 bp, Probe sequence
atttctgtatcgtagatcaacatgc

SEQ ID NO: 155502 - DNA, 25 bp, Probe sequence
atatccacctttaatggcagctgat

SEQ ID NO: 155503 - DNA, 25 bp, Probe sequence
atcaacatgcaattacaatgccaca

SEQ ID NO: 155504 - DNA, 25 bp, Probe sequence
atggcagctgatattgttctttaca

SEQ ID NO: 155505 - DNA, 25 bp, Probe sequence
agagcgtatgacgcaatacaaagat

SEQ ID NO: 155506 - DNA, 25 bp, Probe sequence
agcagcgatttatttagcttctggt

SEQ ID NO: 155507 - DNA, 25 bp, Probe sequence
acctagtggaattcctactattgga

SEQ ID NO: 155508 - DNA, 25 bp, Probe sequence
acaatactaatatcgttccagttgg

SEQ ID NO: 155509 - DNA, 25 bp, Probe sequence
aaagctcagaaagcagttgaaggta

SEQ ID NO: 155510 - DNA, 25 bp, Probe sequence
aacatatccacctttaatggcagct

SEQ ID NO: 155511 - DNA, 25 bp, Probe sequence
aacctgaaattcgtatgcctaaagt

SEQ ID NO: 155512 - DNA, 25 bp, Probe sequence
aagcatttttagtagaattccaaga

SEQ ID NO: 155513 - DNA, 25 bp, Probe sequence
aagtccctgcacacgtacaagcagg

SEQ ID NO: 155514 - DNA, 25 bp, Probe sequence
aatacgaaagtttctataactcaga

SEQ ID NO: 155515 - DNA, 25 bp, Probe sequence
caacctagtggaattcctactattg

SEQ ID NO: 155516 - DNA, 25 bp, Probe sequence
gcgatttatttagcttctggtatag

SEQ ID NO: 155517 - DNA, 25 bp, Probe sequence
gctggtctattaacatatccacctt

SEQ ID NO: 155518 - DNA, 25 bp, Probe sequence
gcacacgtacaagcaggatggatgt

SEQ ID NO: 155519 - DNA, 25 bp, Probe sequence
gacaattagcagcgatttatttagc

SEQ ID NO: 155520 - DNA, 25 bp, Probe sequence
gacaaagcaacattgttcatacaat

SEQ ID NO: 155521 - DNA, 25 bp, Probe sequence
gactatgattgttatttctgtatcg

SEQ ID NO: 155522 - DNA, 25 bp, Probe sequence
gaccttgctgaaatagttaaagcat

SEQ ID NO: 155523 - DNA, 25 bp, Probe sequence
gattgttatttctgtatcgtagatc

SEQ ID NO: 155524 - DNA, 25 bp, Probe sequence
gttctttacaatactaatatcgttc

SEQ ID NO: 155525 - DNA, 25 bp, Probe sequence
gtatcgtagatcaacatgcaattac

SEQ ID NO: 155526 - DNA, 25 bp, Probe sequence
gtgaaacctgaaattcgtatgccta

SEQ ID NO: 155527 - DNA, 25 bp, Probe sequence
ggtatagatccagacaaagcaacat

SEQ ID NO: 155528 - DNA, 25 bp, Probe sequence
tggtctattaacatatccaccttta

SEQ ID NO: 155529 - DNA, 25 bp, Probe sequence
tctataactcagataaacttgatga

SEQ ID NO: 155530 - DNA, 25 bp, Probe sequence
tcatacaatctgaagtccctgcaca

SEQ ID NO: 155531 - DNA, 25 bp, Probe sequence
tacaagcaggatggatgttaactac

SEQ ID NO: 155532 - DNA, 25 bp, Probe sequence
tactattggaaattatattggcgca

SEQ ID NO: 155533 - DNA, 25 bp, Probe sequence
ttatttagcttctggtatagatcca

SEQ ID NO: 155534 - DNA, 25 bp, Probe sequence
atttttttatatttagctatagaat

SEQ ID NO: 155535 - DNA, 25 bp, Probe sequence
ataaaattgatgagagtgacacaca

SEQ ID NO: 155536 - DNA, 25 bp, Probe sequence
atgaaagcgtgttactcttattttt

SEQ ID NO: 155537 - DNA, 25 bp, Probe sequence
atgagagtgacacacatttatcata

SEQ ID NO: 155538 - DNA, 25 bp, Probe sequence
atgatgatgaaagcgtgttactctt

SEQ ID NO: 155539 - DNA, 25 bp, Probe sequence
atgatgaaagcgtgttactcttatt

SEQ ID NO: 155540 - DNA, 25 bp, Probe sequence
agtgacacacatttatcatataaaa

SEQ ID NO: 155541 - DNA, 25 bp, Probe sequence
agagtgacacacatttatcatataa

SEQ ID NO: 155542 - DNA, 25 bp, Probe sequence
aaatgggaatgtgaagtaagaagaa

SEQ ID NO: 155543 - DNA, 25 bp, Probe sequence
aaattgatgagagtgacacacattt

SEQ ID NO: 155544 - DNA, 25 bp, Probe sequence
aaatgatgatgaaagcgtgttactc

SEQ ID NO: 155545 - DNA, 25 bp, Probe sequence
aaaatgatgatgaaagcgtgttact

SEQ ID NO: 155546 - DNA, 25 bp, Probe sequence
aaaattgatgagagtgacacacatt

SEQ ID NO: 155547 - DNA, 25 bp, Probe sequence
aagtgtacaatatgaatgtgaaaac

SEQ ID NO: 155548 - DNA, 25 bp, Probe sequence
aatgatgatgaaagcgtgttactct

SEQ ID NO: 155549 - DNA, 25 bp, Probe sequence
aatatgaatgtgaaaacgaactttt

SEQ ID NO: 155550 - DNA, 25 bp, Probe sequence
aattgatgagagtgacacacattta

SEQ ID NO: 155551 - DNA, 25 bp, Probe sequence
cttatttttttatatttagctatag

SEQ ID NO: 155552 - DNA, 25 bp, Probe sequence
ctcttatttttttatatttagctat

SEQ ID NO: 155553 - DNA, 25 bp, Probe sequence
gcgtgttactcttatttttttatat

SEQ ID NO: 155554 - DNA, 25 bp, Probe sequence
gagagtgacacacatttatcatata

SEQ ID NO: 155555 - DNA, 25 bp, Probe sequence
gagtgacacacatttatcatataaa

SEQ ID NO: 155556 - DNA, 25 bp, Probe sequence
gatgatgaaagcgtgttactcttat

SEQ ID NO: 155557 - DNA, 25 bp, Probe sequence
gatgagagtgacacacatttatcat

SEQ ID NO: 155558 - DNA, 25 bp, Probe sequence
gatgaaagcgtgttactcttatttt

SEQ ID NO: 155559 - DNA, 25 bp, Probe sequence
gtgacacacatttatcatataaaat

SEQ ID NO: 155560 - DNA, 25 bp, Probe sequence
tgatgatgaaagcgtgttactctta

SEQ ID NO: 155561 - DNA, 25 bp, Probe sequence
tgatgagagtgacacacatttatca

SEQ ID NO: 155562 - DNA, 25 bp, Probe sequence
tgatgaaagcgtgttactcttattt

SEQ ID NO: 155563 - DNA, 25 bp, Probe sequence
tgagagtgacacacatttatcatat

SEQ ID NO: 155564 - DNA, 25 bp, Probe sequence
tgaaagcgtgttactcttatttttt

SEQ ID NO: 155565 - DNA, 25 bp, Probe sequence
tactcttatttttttatatttagct

SEQ ID NO: 155566 - DNA, 25 bp, Probe sequence
tatgaatgtgaaaacgaacttttta

SEQ ID NO: 155567 - DNA, 25 bp, Probe sequence
ttgatgagagtgacacacatttatc

SEQ ID NO: 155568 - DNA, 25 bp, Probe sequence
atcgccctagcttataaagcagctg

SEQ ID NO: 155569 - DNA, 25 bp, Probe sequence
atgcaggtattgatttagaagtatt

SEQ ID NO: 155570 - DNA, 25 bp, Probe sequence
aggattatacccatatcacatctat

SEQ ID NO: 155571 - DNA, 25 bp, Probe sequence
agtcgaaggattatacccatatcac

SEQ ID NO: 155572 - DNA, 25 bp, Probe sequence
aatggaaatcgaacaagccccttct

SEQ ID NO: 155573 - DNA, 25 bp, Probe sequence
agctccgattgcttcaaattatcag

SEQ ID NO: 155574 - DNA, 25 bp, Probe sequence
accgaaagcttgaaaattgatttgc

SEQ ID NO: 155575 - DNA, 25 bp, Probe sequence
acatccaactttgataacatcgccc

SEQ ID NO: 155576 - DNA, 25 bp, Probe sequence
aaattatcagcaatcttatccaaat

SEQ ID NO: 155577 - DNA, 25 bp, Probe sequence
aactttgataacatcgccctagctt

SEQ ID NO: 155578 - DNA, 25 bp, Probe sequence
aacgatggaagaattacttactatt

SEQ ID NO: 155579 - DNA, 25 bp, Probe sequence
aatctatcacctgtaagtaaaatcg

SEQ ID NO: 155580 - DNA, 25 bp, Probe sequence
aatcaatatatacgtatcagacata

SEQ ID NO: 155581 - DNA, 25 bp, Probe sequence
aatttattcatttttcgatccattt

SEQ ID NO: 155582 - DNA, 25 bp, Probe sequence
cagacatatattaaatccttcgtta

SEQ ID NO: 155583 - DNA, 25 bp, Probe sequence
cctatcgaaaagaatcttcctccta

SEQ ID NO: 155584 - DNA, 25 bp, Probe sequence
ccttctctcgttttctttagtgaag

SEQ ID NO: 155585 - DNA, 25 bp, Probe sequence
gcaacaacaacttgtaacgatggaa

SEQ ID NO: 155586 - DNA, 25 bp, Probe sequence
gaattgatgggtaaacctatcgaaa

SEQ ID NO: 155587 - DNA, 25 bp, Probe sequence
gaatcttcctcctaaattagaaact

SEQ ID NO: 155588 - DNA, 25 bp, Probe sequence
gaaaagaatcttcctcctaaattag

SEQ ID NO: 155589 - DNA, 25 bp, Probe sequence
gaaacttatatacagcaacaacaac

SEQ ID NO: 155590 - DNA, 25 bp, Probe sequence
gatttctggaaatctaaaatgccta

SEQ ID NO: 155591 - DNA, 25 bp, Probe sequence
gatccatttagctccgattgcttca

SEQ ID NO: 155592 - DNA, 25 bp, Probe sequence
gtattaacgaaatgccaagctcaaa

SEQ ID NO: 155593 - DNA, 25 bp, Probe sequence
gtgactgtattcaaaatgcaggtat

SEQ ID NO: 155594 - DNA, 25 bp, Probe sequence
tgccaagctcaaagtacatccaact

SEQ ID NO: 155595 - DNA, 25 bp, Probe sequence
taacatcgccctagcttataaagca

SEQ ID NO: 155596 - DNA, 25 bp, Probe sequence
taaagcagctgagttacaaggtcgt

SEQ ID NO: 155597 - DNA, 25 bp, Probe sequence
tacttactatttatgaatggccaga

SEQ ID NO: 155598 - DNA, 25 bp, Probe sequence
tacccatatcacatctatacttata

SEQ ID NO: 155599 - DNA, 25 bp, Probe sequence
tatgaatggccagaaaaacttttaa

SEQ ID NO: 155600 - DNA, 25 bp, Probe sequence
tttcgatccatttagctccgattgc

SEQ ID NO: 155601 - DNA, 25 bp, Probe sequence
ttcatttttcgatccatttagctcc

SEQ ID NO: 155602 - DNA, 25 bp, Probe sequence
ataccgaagaacacggacatcctat

SEQ ID NO: 155603 - DNA, 25 bp, Probe sequence
atgattgattatttttacacccttg

SEQ ID NO: 155604 - DNA, 25 bp, Probe sequence
atggttagaaaatatgcagacagca

SEQ ID NO: 155605 - DNA, 25 bp, Probe sequence
agaacacggacatcctatgctaaga

SEQ ID NO: 155606 - DNA, 25 bp, Probe sequence
acctgtttccaggagattttgcaga

SEQ ID NO: 155607 - DNA, 25 bp, Probe sequence
acgacttaatcacctgtttccagga

SEQ ID NO: 155608 - DNA, 25 bp, Probe sequence
acacggacatcctatgctaagaaaa

SEQ ID NO: 155609 - DNA, 25 bp, Probe sequence
aactgctaatcatatggtgaattcc

SEQ ID NO: 155610 - DNA, 25 bp, Probe sequence
aattaatcgcgctgcgtttccacaa

SEQ ID NO: 155611 - DNA, 25 bp, Probe sequence
cacagtttttgggcggtccaaacat

SEQ ID NO: 155612 - DNA, 25 bp, Probe sequence
cgctgcgtttccacaaggtgttgga

SEQ ID NO: 155613 - DNA, 25 bp, Probe sequence
gcgtttccacaaggtgttggagatt

SEQ ID NO: 155614 - DNA, 25 bp, Probe sequence
gcagacagcaattaatcgcgctgcg

SEQ ID NO: 155615 - DNA, 25 bp, Probe sequence
gcaattaatcgcgctgcgtttccac

SEQ ID NO: 155616 - DNA, 25 bp, Probe sequence
gaatttgaaagagatgcatggttag

SEQ ID NO: 155617 - DNA, 25 bp, Probe sequence
gaagaacacggacatcctatgctaa

SEQ ID NO: 155618 - DNA, 25 bp, Probe sequence
gaacgacttaatcacctgtttccag

SEQ ID NO: 155619 - DNA, 25 bp, Probe sequence
gacagcaattaatcgcgctgcgttt

SEQ ID NO: 155620 - DNA, 25 bp, Probe sequence
gacttaatcacctgtttccaggaga

SEQ ID NO: 155621 - DNA, 25 bp, Probe sequence
gatgaacgacttaatcacctgtttc

SEQ ID NO: 155622 - DNA, 25 bp, Probe sequence
gattatttatttgagcgcttaagat

SEQ ID NO: 155623 - DNA, 25 bp, Probe sequence
gattttgcagaaacaagtcgtaaac

SEQ ID NO: 155624 - DNA, 25 bp, Probe sequence
gattgattatttttacacccttgta

SEQ ID NO: 155625 - DNA, 25 bp, Probe sequence
gtccaaacatttataccgaagaaca

SEQ ID NO: 155626 - DNA, 25 bp, Probe sequence
ggtgttggagattatttatttgagc

SEQ ID NO: 155627 - DNA, 25 bp, Probe sequence
ggagattttgcagaaacaagtcgta

SEQ ID NO: 155628 - DNA, 25 bp, Probe sequence
ggacatcctatgctaagaaaaagac

SEQ ID NO: 155629 - DNA, 25 bp, Probe sequence
tgggcggtccaaacatttataccga

SEQ ID NO: 155630 - DNA, 25 bp, Probe sequence
tggagattatttatttgagcgctta

SEQ ID NO: 155631 - DNA, 25 bp, Probe sequence
tgattatttttacacccttgtagaa

SEQ ID NO: 155632 - DNA, 25 bp, Probe sequence
tgagcgcttaagattaactgctaat

SEQ ID NO: 155633 - DNA, 25 bp, Probe sequence
tgctaatcatatggtgaattcctaa

SEQ ID NO: 155634 - DNA, 25 bp, Probe sequence
taatcacctgtttccaggagatttt

SEQ ID NO: 155635 - DNA, 25 bp, Probe sequence
tatgcagacagcaattaatcgcgct

SEQ ID NO: 155636 - DNA, 25 bp, Probe sequence
ctaaacctcgaacatcatcaacctt

SEQ ID NO: 155637 - DNA, 25 bp, Probe sequence
atttcaaacgacaatcttccagatg

SEQ ID NO: 155638 - DNA, 25 bp, Probe sequence
atcgtcgacattaaaccagagatga

SEQ ID NO: 155639 - DNA, 25 bp, Probe sequence
agaatacaactatatcgtcgacatt

SEQ ID NO: 155640 - DNA, 25 bp, Probe sequence
acctcgaacatcatcaacctttaaa

SEQ ID NO: 155641 - DNA, 25 bp, Probe sequence
acgacatatcgccaagaaactaaat

SEQ ID NO: 155642 - DNA, 25 bp, Probe sequence
acaaatgataactgcatcaatctat

SEQ ID NO: 155643 - DNA, 25 bp, Probe sequence
aaacctcgaacatcatcaaccttta

SEQ ID NO: 155644 - DNA, 25 bp, Probe sequence
aaaccagagatgaacttgattattt

SEQ ID NO: 155645 - DNA, 25 bp, Probe sequence
aagacaccagcaaaggttggtctat

SEQ ID NO: 155646 - DNA, 25 bp, Probe sequence
aattaaaggaacatcgctctgcact

SEQ ID NO: 155647 - DNA, 25 bp, Probe sequence
aattatagttgaacagtttggtgta

SEQ ID NO: 155648 - DNA, 25 bp, Probe sequence
aattactatattgatacacccgatt

SEQ ID NO: 155649 - DNA, 25 bp, Probe sequence
caatcttccagatgacattcgtcaa

SEQ ID NO: 155650 - DNA, 25 bp, Probe sequence
cagcaaaggttggtctattagaata

SEQ ID NO: 155651 - DNA, 25 bp, Probe sequence
catcgctctgcactacgcataagag

SEQ ID NO: 155652 - DNA, 25 bp, Probe sequence
cttccagatgacattcgtcaaatta

SEQ ID NO: 155653 - DNA, 25 bp, Probe sequence
ctatatcgtcgacattaaaccagag

SEQ ID NO: 155654 - DNA, 25 bp, Probe sequence
cggattatgagttagagttcgaagt

SEQ ID NO: 155655 - DNA, 25 bp, Probe sequence
cgctctgcactacgcataagagtta

SEQ ID NO: 155656 - DNA, 25 bp, Probe sequence
cgaacatcatcaacctttaaataaa

SEQ ID NO: 155657 - DNA, 25 bp, Probe sequence
gcattaacgacatatcgccaagaaa

SEQ ID NO: 155658 - DNA, 25 bp, Probe sequence
gcactacgcataagagttaaagaca

SEQ ID NO: 155659 - DNA, 25 bp, Probe sequence
gaactaaacctcgaacatcatcaac

SEQ ID NO: 155660 - DNA, 25 bp, Probe sequence
gaaacactttcaaacaatataaatt

SEQ ID NO: 155661 - DNA, 25 bp, Probe sequence
gaaatgactttaaagacaccagcaa

SEQ ID NO: 155662 - DNA, 25 bp, Probe sequence
gacaatcttccagatgacattcgtc

SEQ ID NO: 155663 - DNA, 25 bp, Probe sequence
gagttcgaagttaaagactataatc

SEQ ID NO: 155664 - DNA, 25 bp, Probe sequence
gatgaacttgattatttcaaacgac

SEQ ID NO: 155665 - DNA, 25 bp, Probe sequence
gataactgcatcaatctataataaa

SEQ ID NO: 155666 - DNA, 25 bp, Probe sequence
gatacacccgatttcaaattaaagg

SEQ ID NO: 155667 - DNA, 25 bp, Probe sequence
taaaggaacatcgctctgcactacg

SEQ ID NO: 155668 - DNA, 25 bp, Probe sequence
tactatattgatacacccgatttca

SEQ ID NO: 155669 - DNA, 25 bp, Probe sequence
ttaaagacagtgtgctttttaagca

SEQ ID NO: 155670 - DNA, 25 bp, Probe sequence
attgacttaccatatattcctttat

SEQ ID NO: 155671 - DNA, 25 bp, Probe sequence
atcccagctgttgctaaatttttca

SEQ ID NO: 155672 - DNA, 25 bp, Probe sequence
atcgctctgattatgctgttcattc

SEQ ID NO: 155673 - DNA, 25 bp, Probe sequence
atggttccattcttcttaatttata

SEQ ID NO: 155674 - DNA, 25 bp, Probe sequence
aggtttggttccgaactggcatcgc

SEQ ID NO: 155675 - DNA, 25 bp, Probe sequence
acatcattaatttcaaccatcttct

SEQ ID NO: 155676 - DNA, 25 bp, Probe sequence
aaattcgcactagctcaaatggata

SEQ ID NO: 155677 - DNA, 25 bp, Probe sequence
aaataccgccaacgcattattgata

SEQ ID NO: 155678 - DNA, 25 bp, Probe sequence
aagtcggttttccaagatgggctag

SEQ ID NO: 155679 - DNA, 25 bp, Probe sequence
aatcatcggttctgtatttcttcca

SEQ ID NO: 155680 - DNA, 25 bp, Probe sequence
catggttatcatttgcacctgcagc

SEQ ID NO: 155681 - DNA, 25 bp, Probe sequence
gctggtgtcgcaaacttaattcctt

SEQ ID NO: 155682 - DNA, 25 bp, Probe sequence
gctttgtttgctattatcggcttaa

SEQ ID NO: 155683 - DNA, 25 bp, Probe sequence
gcaggagatttaggtggctttacat

SEQ ID NO: 155684 - DNA, 25 bp, Probe sequence
gcagtgccattatatgctgtactta

SEQ ID NO: 155685 - DNA, 25 bp, Probe sequence
gcacctgcagcaatactcggtatta

SEQ ID NO: 155686 - DNA, 25 bp, Probe sequence
gatagtcctactacatttatatggg

SEQ ID NO: 155687 - DNA, 25 bp, Probe sequence
gttctgtatttcttccatttttaat

SEQ ID NO: 155688 - DNA, 25 bp, Probe sequence
gtttgttgcaccaatcatcatttca

SEQ ID NO: 155689 - DNA, 25 bp, Probe sequence
gtggttttttattttatatctgtct

SEQ ID NO: 155690 - DNA, 25 bp, Probe sequence
gtggctttacattagttctgattgc

SEQ ID NO: 155691 - DNA, 25 bp, Probe sequence
gggtgatggcgttactaatatttta

SEQ ID NO: 155692 - DNA, 25 bp, Probe sequence
gggtaaatctttaagtatccatcct

SEQ ID NO: 155693 - DNA, 25 bp, Probe sequence
ggaagtgcacgaagtatttactcca

SEQ ID NO: 155694 - DNA, 25 bp, Probe sequence
tgaaaaatttatcccagctgttgct

SEQ ID NO: 155695 - DNA, 25 bp, Probe sequence
tcggcttaattgttgcgtttgttgc

SEQ ID NO: 155696 - DNA, 25 bp, Probe sequence
tcttcttattgattatggttccatt

SEQ ID NO: 155697 - DNA, 25 bp, Probe sequence
tcaaggtcaagtaactgtcagtgtt

SEQ ID NO: 155698 - DNA, 25 bp, Probe sequence
taattcctttcttaggttcatggtt

SEQ ID NO: 155699 - DNA, 25 bp, Probe sequence
tactccaatagctacaatcatcggt

SEQ ID NO: 155700 - DNA, 25 bp, Probe sequence
tatcgttgttattttagcagcagga

SEQ ID NO: 155701 - DNA, 25 bp, Probe sequence
tatgctgttcattctcatcaaacta

SEQ ID NO: 155702 - DNA, 25 bp, Probe sequence
tatatctgtctaccttttcaaaact

SEQ ID NO: 155703 - DNA, 25 bp, Probe sequence
ttccgaactggcatcgctctgatta

SEQ ID NO: 155704 - DNA, 25 bp, Probe sequence
attatatattttcacaacactacta

SEQ ID NO: 155705 - DNA, 25 bp, Probe sequence
attttacgtactgcaattggttaca

SEQ ID NO: 155706 - DNA, 25 bp, Probe sequence
attttcacaacactactatcttcta

SEQ ID NO: 155707 - DNA, 25 bp, Probe sequence
atattttcacaacactactatcttc

SEQ ID NO: 155708 - DNA, 25 bp, Probe sequence
atatattttcacaacactactatct

SEQ ID NO: 155709 - DNA, 25 bp, Probe sequence
atcttctatttcagtaacgtcaaaa

SEQ ID NO: 155710 - DNA, 25 bp, Probe sequence
atggtagaacgttatatcaaagttt

SEQ ID NO: 155711 - DNA, 25 bp, Probe sequence
aggtttattttacgtactgcaattg

SEQ ID NO: 155712 - DNA, 25 bp, Probe sequence
acgtcaaaatgtgtacctaataaag

SEQ ID NO: 155713 - DNA, 25 bp, Probe sequence
actactatcttctatttcagtaacg

SEQ ID NO: 155714 - DNA, 25 bp, Probe sequence
actatcttctatttcagtaacgtca

SEQ ID NO: 155715 - DNA, 25 bp, Probe sequence
acactactatcttctatttcagtaa

SEQ ID NO: 155716 - DNA, 25 bp, Probe sequence
acaacactactatcttctatttcag

SEQ ID NO: 155717 - DNA, 25 bp, Probe sequence
aacactactatcttctatttcagta

SEQ ID NO: 155718 - DNA, 25 bp, Probe sequence
aatgtgtacctaataaagttataag

SEQ ID NO: 155719 - DNA, 25 bp, Probe sequence
caacactactatcttctatttcagt

SEQ ID NO: 155720 - DNA, 25 bp, Probe sequence
cacaacactactatcttctatttca

SEQ ID NO: 155721 - DNA, 25 bp, Probe sequence
cttctatttcagtaacgtcaaaatg

SEQ ID NO: 155722 - DNA, 25 bp, Probe sequence
ctatcttctatttcagtaacgtcaa

SEQ ID NO: 155723 - DNA, 25 bp, Probe sequence
gaacgttatatcaaagttttaatat

SEQ ID NO: 155724 - DNA, 25 bp, Probe sequence
gtttattttacgtactgcaattggt

SEQ ID NO: 155725 - DNA, 25 bp, Probe sequence
gtaacgtcaaaatgtgtacctaata

SEQ ID NO: 155726 - DNA, 25 bp, Probe sequence
tcagtaacgtcaaaatgtgtaccta

SEQ ID NO: 155727 - DNA, 25 bp, Probe sequence
tcacaacactactatcttctatttc

SEQ ID NO: 155728 - DNA, 25 bp, Probe sequence
taaggtttattttacgtactgcaat

SEQ ID NO: 155729 - DNA, 25 bp, Probe sequence
tataaggtttattttacgtactgca

SEQ ID NO: 155730 - DNA, 25 bp, Probe sequence
tatcttctatttcagtaacgtcaaa

SEQ ID NO: 155731 - DNA, 25 bp, Probe sequence
tattttcacaacactactatcttct

SEQ ID NO: 155732 - DNA, 25 bp, Probe sequence
tattatatattttcacaacactact

SEQ ID NO: 155733 - DNA, 25 bp, Probe sequence
tttacgtactgcaattggttacagt

SEQ ID NO: 155734 - DNA, 25 bp, Probe sequence
tttcacaacactactatcttctatt

SEQ ID NO: 155735 - DNA, 25 bp, Probe sequence
ttattttacgtactgcaattggtta

SEQ ID NO: 155736 - DNA, 25 bp, Probe sequence
ttttcacaacactactatcttctat

SEQ ID NO: 155737 - DNA, 25 bp, Probe sequence
ttcacaacactactatcttctattt

SEQ ID NO: 155738 - DNA, 25 bp, Probe sequence
attggtactccatgagtgcgtcttt

SEQ ID NO: 155739 - DNA, 25 bp, Probe sequence
attattttttcaacaccactctatt

SEQ ID NO: 155740 - DNA, 25 bp, Probe sequence
ataggtggcgacaatccgcatacca

SEQ ID NO: 155741 - DNA, 25 bp, Probe sequence
aggtgccaactttcataatgatgat

SEQ ID NO: 155742 - DNA, 25 bp, Probe sequence
agcacaacctttagtcaaccaattc

SEQ ID NO: 155743 - DNA, 25 bp, Probe sequence
accactctattggtactccatgagt

SEQ ID NO: 155744 - DNA, 25 bp, Probe sequence
aaaggttacagataatcgtcatagc

SEQ ID NO: 155745 - DNA, 25 bp, Probe sequence
aacaccactctattggtactccatg

SEQ ID NO: 155746 - DNA, 25 bp, Probe sequence
aactcttcattgatagatggaccga

SEQ ID NO: 155747 - DNA, 25 bp, Probe sequence
aacttcaaagaaatcatgtcacaaa

SEQ ID NO: 155748 - DNA, 25 bp, Probe sequence
aactatagatttttgatcggcgaag

SEQ ID NO: 155749 - DNA, 25 bp, Probe sequence
aatccgcataccaaagcacaacctt

SEQ ID NO: 155750 - DNA, 25 bp, Probe sequence
caacctttagtcaaccaattcaaat

SEQ ID NO: 155751 - DNA, 25 bp, Probe sequence
ctcaatttatagaagagctcgcaaa

SEQ ID NO: 155752 - DNA, 25 bp, Probe sequence
gcgacaatccgcataccaaagcaca

SEQ ID NO: 155753 - DNA, 25 bp, Probe sequence
gcgagatacgcaaatagacaacttc

SEQ ID NO: 155754 - DNA, 25 bp, Probe sequence
gaaggcaataaaccattcgatattt

SEQ ID NO: 155755 - DNA, 25 bp, Probe sequence
gagctcgcaaatataaatcttgcat

SEQ ID NO: 155756 - DNA, 25 bp, Probe sequence
gatcggcgaaggcaataaaccattc

SEQ ID NO: 155757 - DNA, 25 bp, Probe sequence
tcaacaccactctattggtactcca

SEQ ID NO: 155758 - DNA, 25 bp, Probe sequence
gatagatggaccgagtcattgcgag

SEQ ID NO: 155759 - DNA, 25 bp, Probe sequence
gataatcgtcatagcaaaggtgcca

SEQ ID NO: 155760 - DNA, 25 bp, Probe sequence
gatacgcaaatagacaacttcaaag

SEQ ID NO: 155761 - DNA, 25 bp, Probe sequence
gatattattattttttcaacaccac

SEQ ID NO: 155762 - DNA, 25 bp, Probe sequence
gtttatgaatattactaactataga

SEQ ID NO: 155763 - DNA, 25 bp, Probe sequence
gtcatagcaaaggtgccaactttca

SEQ ID NO: 155764 - DNA, 25 bp, Probe sequence
gtgcgtctttaaaactcttcattga

SEQ ID NO: 155765 - DNA, 25 bp, Probe sequence
gtgaatttatatcaaagcaacattg

SEQ ID NO: 155766 - DNA, 25 bp, Probe sequence
ggtggcgacaatccgcataccaaag

SEQ ID NO: 155767 - DNA, 25 bp, Probe sequence
tggaccgagtcattgcgagatacgc

SEQ ID NO: 155768 - DNA, 25 bp, Probe sequence
tgattttaatcataggtggcgacaa

SEQ ID NO: 155769 - DNA, 25 bp, Probe sequence
tactccatgagtgcgtctttaaaac

SEQ ID NO: 155770 - DNA, 25 bp, Probe sequence
tttaaacgactctcaatttatagaa

SEQ ID NO: 155771 - DNA, 25 bp, Probe sequence
ttcgatattttaaacgactctcaat

SEQ ID NO: 155772 - DNA, 25 bp, Probe sequence
attgctgatgcatctacaaactttg

SEQ ID NO: 155773 - DNA, 25 bp, Probe sequence
atgggctatgtttatttttcatggt

SEQ ID NO: 155774 - DNA, 25 bp, Probe sequence
agttatttggtttccagcatcacct

SEQ ID NO: 155775 - DNA, 25 bp, Probe sequence
agttcctatattaccaacatatgct

SEQ ID NO: 155776 - DNA, 25 bp, Probe sequence
agctatcggtctaatgtatggcatc

SEQ ID NO: 155777 - DNA, 25 bp, Probe sequence
tcaaagtgcacccaacacgctttgc

SEQ ID NO: 155778 - DNA, 25 bp, Probe sequence
aaagcgccatttattgttgttccct

SEQ ID NO: 155779 - DNA, 25 bp, Probe sequence
aacgtctctagcattttcaatacat

SEQ ID NO: 155780 - DNA, 25 bp, Probe sequence
aatacattttatttctcggcattaa

SEQ ID NO: 155781 - DNA, 25 bp, Probe sequence
cagttagtcctatttgggtcattat

SEQ ID NO: 155782 - DNA, 25 bp, Probe sequence
cgctttgccttcatgatgtctttag

SEQ ID NO: 155783 - DNA, 25 bp, Probe sequence
gcgagaggcatgtatatcctaagct

SEQ ID NO: 155784 - DNA, 25 bp, Probe sequence
gctcggtattgcagttagtcctatt

SEQ ID NO: 155785 - DNA, 25 bp, Probe sequence
gaatacctttatggcacgatttatc

SEQ ID NO: 155786 - DNA, 25 bp, Probe sequence
gaatctacttatcaaagtgcaccca

SEQ ID NO: 155787 - DNA, 25 bp, Probe sequence
gtttccagcatcaccttttgtaatc

SEQ ID NO: 155788 - DNA, 25 bp, Probe sequence
gtatccaaggattcggctcaatgat

SEQ ID NO: 155789 - DNA, 25 bp, Probe sequence
gtatggcatcttattaccagcatgg

SEQ ID NO: 155790 - DNA, 25 bp, Probe sequence
gtatggtgttattctaagcggattt

SEQ ID NO: 155791 - DNA, 25 bp, Probe sequence
gggccattatttggcggattaatta

SEQ ID NO: 155792 - DNA, 25 bp, Probe sequence
gggtcattatgttatccagtgttga

SEQ ID NO: 155793 - DNA, 25 bp, Probe sequence
ggattatcgctttagctatcggtct

SEQ ID NO: 155794 - DNA, 25 bp, Probe sequence
ggctgtgcagtttcgatgctatttt

SEQ ID NO: 155795 - DNA, 25 bp, Probe sequence
tgttgttccctggtattcttttaca

SEQ ID NO: 155796 - DNA, 25 bp, Probe sequence
tgatgtctttagtcgttttaattgc

SEQ ID NO: 155797 - DNA, 25 bp, Probe sequence
tctcggcattaatctttttagtctt

SEQ ID NO: 155798 - DNA, 25 bp, Probe sequence
taaccgcagcagaaactttatgtat

SEQ ID NO: 155799 - DNA, 25 bp, Probe sequence
tactcgtccagttaaagctcaattg

SEQ ID NO: 155800 - DNA, 25 bp, Probe sequence
tattggtggtatcggctgtgcagtt

SEQ ID NO: 155801 - DNA, 25 bp, Probe sequence
ttttacaaggtgccgcaattgctgc

SEQ ID NO: 155802 - DNA, 25 bp, Probe sequence
ttttcatggttgttaggcctattgg

SEQ ID NO: 155803 - DNA, 25 bp, Probe sequence
ttagtgctatgatgctcggtattgc

SEQ ID NO: 155804 - DNA, 25 bp, Probe sequence
ttagtcttagctgtattttatggaa

SEQ ID NO: 155805 - DNA, 25 bp, Probe sequence
ttgctgtagcaataacgtctctagc

SEQ ID NO: 155806 - DNA, 25 bp, Probe sequence
agggttttattacagccgcccagat

SEQ ID NO: 155807 - DNA, 25 bp, Probe sequence
attccagttgctacagtgatgacag

SEQ ID NO: 155808 - DNA, 25 bp, Probe sequence
atagacaacaacttagatccagata

SEQ ID NO: 155809 - DNA, 25 bp, Probe sequence
atgattttcctaaatcctgcacctg

SEQ ID NO: 155810 - DNA, 25 bp, Probe sequence
acggtcatatgcaagttacacagag

SEQ ID NO: 155811 - DNA, 25 bp, Probe sequence
acattaatattccagttgctacagt

SEQ ID NO: 155812 - DNA, 25 bp, Probe sequence
aaaagatattgattattactggctc

SEQ ID NO: 155813 - DNA, 25 bp, Probe sequence
aagcgtcattgagcacgatttattt

SEQ ID NO: 155814 - DNA, 25 bp, Probe sequence
aagtatgctacacagacaatatgtc

SEQ ID NO: 155815 - DNA, 25 bp, Probe sequence
aatggatggcatcaagtcaacttat

SEQ ID NO: 155816 - DNA, 25 bp, Probe sequence
aatcctgcacctggtcaagagcttg

SEQ ID NO: 155817 - DNA, 25 bp, Probe sequence
aatcgctgatactccagaagaagca

SEQ ID NO: 155818 - DNA, 25 bp, Probe sequence
gcccgttgtattccaatgattttcc

SEQ ID NO: 155819 - DNA, 25 bp, Probe sequence
gcaaactattttaatgtcagctggt

SEQ ID NO: 155820 - DNA, 25 bp, Probe sequence
gaatctagaccatttaagcgtcatt

SEQ ID NO: 155821 - DNA, 25 bp, Probe sequence
gaaacctggtggtatcacaataact

SEQ ID NO: 155822 - DNA, 25 bp, Probe sequence
gatccttcaacagttaaagtgacag

SEQ ID NO: 155823 - DNA, 25 bp, Probe sequence
gttttggtaaaatcgctgatactcc

SEQ ID NO: 155824 - DNA, 25 bp, Probe sequence
gatttaatcggtcattcatcacaac

SEQ ID NO: 155825 - DNA, 25 bp, Probe sequence
gattacgccgtattcaacaagatat

SEQ ID NO: 155826 - DNA, 25 bp, Probe sequence
gattctaggttataccaaacacatg

SEQ ID NO: 155827 - DNA, 25 bp, Probe sequence
gttacacagagtatcgttaatcaac

SEQ ID NO: 155828 - DNA, 25 bp, Probe sequence
gtcaacttatgattacgaaacctgg

SEQ ID NO: 155829 - DNA, 25 bp, Probe sequence
gtcagctggtgcatttggtgtatct

SEQ ID NO: 155830 - DNA, 25 bp, Probe sequence
gtcattcatcacaaccacaagagat

SEQ ID NO: 155831 - DNA, 25 bp, Probe sequence
gtgcaaatgcacaagtagttatgat

SEQ ID NO: 155832 - DNA, 25 bp, Probe sequence
gtgacaggtattcctattgataaca

SEQ ID NO: 155833 - DNA, 25 bp, Probe sequence
gtgatgacagactatcgcttacata

SEQ ID NO: 155834 - DNA, 25 bp, Probe sequence
tattattaacgtttcctacaccagt

SEQ ID NO: 155835 - DNA, 25 bp, Probe sequence
taactgaaggtttcgcccgttgtat

SEQ ID NO: 155836 - DNA, 25 bp, Probe sequence
taaaaactggattacgccgtattca

SEQ ID NO: 155837 - DNA, 25 bp, Probe sequence
tagacgtaggtattgatccttcaac

SEQ ID NO: 155838 - DNA, 25 bp, Probe sequence
ttattacagccgcccagataaacta

SEQ ID NO: 155839 - DNA, 25 bp, Probe sequence
ttcctacaccagttatgtcggtact

SEQ ID NO: 155840 - DNA, 25 bp, Probe sequence
attttttcccaacacattctgacag

SEQ ID NO: 155841 - DNA, 25 bp, Probe sequence
atcattcttcatgtttcataccaca

SEQ ID NO: 155842 - DNA, 25 bp, Probe sequence
atcccgaccaaccaatagattataa

SEQ ID NO: 155843 - DNA, 25 bp, Probe sequence
atgtttcataccacagtttatggca

SEQ ID NO: 155844 - DNA, 25 bp, Probe sequence
acttattttttcccaacacattctg

SEQ ID NO: 155845 - DNA, 25 bp, Probe sequence
aaatcattgaacgctcttgcaaatt

SEQ ID NO: 155846 - DNA, 25 bp, Probe sequence
aaaccgcattactggcatttctagt

SEQ ID NO: 155847 - DNA, 25 bp, Probe sequence
aagtccagaaaatcattgaacgctc

SEQ ID NO: 155848 - DNA, 25 bp, Probe sequence
ctggcatttctagtaaaccacctat

SEQ ID NO: 155849 - DNA, 25 bp, Probe sequence
cgaccagcatttgatgatgacgatc

SEQ ID NO: 155850 - DNA, 25 bp, Probe sequence
ccacctattttactaacaccattat

SEQ ID NO: 155851 - DNA, 25 bp, Probe sequence
gcatttctagtaaaccacctatttt

SEQ ID NO: 155852 - DNA, 25 bp, Probe sequence
gcattgacacgctattctttatttg

SEQ ID NO: 155853 - DNA, 25 bp, Probe sequence
gaatgtgtttgaagcattgacacgc

SEQ ID NO: 155854 - DNA, 25 bp, Probe sequence
gaacgctcttgcaaattttatggta

SEQ ID NO: 155855 - DNA, 25 bp, Probe sequence
gaaagcagagacaaaccgcattact

SEQ ID NO: 155856 - DNA, 25 bp, Probe sequence
gacaaaacgcgtattcaaaatcctt

SEQ ID NO: 155857 - DNA, 25 bp, Probe sequence
gacaaaccgcattactggcatttct

SEQ ID NO: 155858 - DNA, 25 bp, Probe sequence
gacacgctattctttatttgaagat

SEQ ID NO: 155859 - DNA, 25 bp, Probe sequence
gatatcaaaaaatcccgaccaacca

SEQ ID NO: 155860 - DNA, 25 bp, Probe sequence
ggtagataaacaatctcgcatgata

SEQ ID NO: 155861 - DNA, 25 bp, Probe sequence
ggtagtgaaataattcggtttgaca

SEQ ID NO: 155862 - DNA, 25 bp, Probe sequence
ggttattcgaccagcatttgatgat

SEQ ID NO: 155863 - DNA, 25 bp, Probe sequence
tcttcatgtttcataccacagttta

SEQ ID NO: 155864 - DNA, 25 bp, Probe sequence
tcaaaaaatcccgaccaaccaatag

SEQ ID NO: 155865 - DNA, 25 bp, Probe sequence
taacaccattatttccaacttattt

SEQ ID NO: 155866 - DNA, 25 bp, Probe sequence
taaacaatctcgcatgatatcaaaa

SEQ ID NO: 155867 - DNA, 25 bp, Probe sequence
tatggtaatacttatcttggcaaga

SEQ ID NO: 155868 - DNA, 25 bp, Probe sequence
tataacaattccattttttactatt

SEQ ID NO: 155869 - DNA, 25 bp, Probe sequence
tattcaaaatccttttaaagtccag

SEQ ID NO: 155870 - DNA, 25 bp, Probe sequence
ttttcccaacacattctgacagaca

SEQ ID NO: 155871 - DNA, 25 bp, Probe sequence
ttactaacaccattatttccaactt

SEQ ID NO: 155872 - DNA, 25 bp, Probe sequence
ttcccaacacattctgacagacaaa

SEQ ID NO: 155873 - DNA, 25 bp, Probe sequence
ttcggtttgacaaaacgcgtattca

SEQ ID NO: 155874 - DNA, 25 bp, Probe sequence
ctaatttaatttctattggtagcca

SEQ ID NO: 155875 - DNA, 25 bp, Probe sequence
attggtagccaagtcagtacaaaag

SEQ ID NO: 155876 - DNA, 25 bp, Probe sequence
attattgctaccgagaatgagatat

SEQ ID NO: 155877 - DNA, 25 bp, Probe sequence
atttaatttctattggtagccaagt

SEQ ID NO: 155878 - DNA, 25 bp, Probe sequence
agtgctaatttaatttctattggta

SEQ ID NO: 155879 - DNA, 25 bp, Probe sequence
agaccaattattgctaccgagaatg

SEQ ID NO: 155880 - DNA, 25 bp, Probe sequence
agcaatccgttttgatctacgcaaa

SEQ ID NO: 155881 - DNA, 25 bp, Probe sequence
accaattattgctaccgagaatgag

SEQ ID NO: 155882 - DNA, 25 bp, Probe sequence
acagcaatccgttttgatctacgca

SEQ ID NO: 155883 - DNA, 25 bp, Probe sequence
acaaaagaccaattattgctaccga

SEQ ID NO: 155884 - DNA, 25 bp, Probe sequence
aaagaccaattattgctaccgagaa

SEQ ID NO: 155885 - DNA, 25 bp, Probe sequence
aaaagaccaattattgctaccgaga

SEQ ID NO: 155886 - DNA, 25 bp, Probe sequence
aatccgttttgatctacgcaaaaga

SEQ ID NO: 155887 - DNA, 25 bp, Probe sequence
aatttctattggtagccaagtcagt

SEQ ID NO: 155888 - DNA, 25 bp, Probe sequence
caatccgttttgatctacgcaaaag

SEQ ID NO: 155889 - DNA, 25 bp, Probe sequence
caattattgctaccgagaatgagat

SEQ ID NO: 155890 - DNA, 25 bp, Probe sequence
cagcaatccgttttgatctacgcaa

SEQ ID NO: 155891 - DNA, 25 bp, Probe sequence
ccgagaatgagatatggtaatgcat

SEQ ID NO: 155892 - DNA, 25 bp, Probe sequence
gccaagtcagtacaaaagaccaatt

SEQ ID NO: 155893 - DNA, 25 bp, Probe sequence
gcaatccgttttgatctacgcaaaa

SEQ ID NO: 155894 - DNA, 25 bp, Probe sequence
gcaattaatgttgtgattagtgcta

SEQ ID NO: 155895 - DNA, 25 bp, Probe sequence
gaataatgcaattaatgttgtgatt

SEQ ID NO: 155896 - DNA, 25 bp, Probe sequence
gaccaattattgctaccgagaatga

SEQ ID NO: 155897 - DNA, 25 bp, Probe sequence
gattagtgctaatttaatttctatt

SEQ ID NO: 155898 - DNA, 25 bp, Probe sequence
gtagccaagtcagtacaaaagacca

SEQ ID NO: 155899 - DNA, 25 bp, Probe sequence
ggtagccaagtcagtacaaaagacc

SEQ ID NO: 155900 - DNA, 25 bp, Probe sequence
ggtaatgcatataatatgagcgcta

SEQ ID NO: 155901 - DNA, 25 bp, Probe sequence
tccgttttgatctacgcaaaagaat

SEQ ID NO: 155902 - DNA, 25 bp, Probe sequence
tacagcaatccgttttgatctacgc

SEQ ID NO: 155903 - DNA, 25 bp, Probe sequence
tattgctaccgagaatgagatatgg

SEQ ID NO: 155904 - DNA, 25 bp, Probe sequence
tttctattggtagccaagtcagtac

SEQ ID NO: 155905 - DNA, 25 bp, Probe sequence
tattggtagccaagtcagtacaaaa

SEQ ID NO: 155906 - DNA, 25 bp, Probe sequence
ttaatgttgtgattagtgctaattt

SEQ ID NO: 155907 - DNA, 25 bp, Probe sequence
ttctattggtagccaagtcagtaca

SEQ ID NO: 155908 - DNA, 25 bp, Probe sequence
atttcggtgacatagatagacatga

SEQ ID NO: 155909 - DNA, 25 bp, Probe sequence
atattacagatccaactttaaactt

SEQ ID NO: 155910 - DNA, 25 bp, Probe sequence
atagaccatctatcattgttggaaa

SEQ ID NO: 155911 - DNA, 25 bp, Probe sequence
atgcactaaaagttaatccagctaa

SEQ ID NO: 155912 - DNA, 25 bp, Probe sequence
agatccaactttaaacttagcaatg

SEQ ID NO: 155913 - DNA, 25 bp, Probe sequence
agaagaatttctggtggtggcgctg

SEQ ID NO: 155914 - DNA, 25 bp, Probe sequence
caagttggacaagcgaaaatctcag

SEQ ID NO: 155915 - DNA, 25 bp, Probe sequence
aaatcatcttgaaaactatctttgg

SEQ ID NO: 155916 - DNA, 25 bp, Probe sequence
aaactatctttggagaaactgaagt

SEQ ID NO: 155917 - DNA, 25 bp, Probe sequence
aatgctgaattaactggtcgtaacg

SEQ ID NO: 155918 - DNA, 25 bp, Probe sequence
aattcactgaaccaattgttcaagc

SEQ ID NO: 155919 - DNA, 25 bp, Probe sequence
ccctaaatataactttgaacgcgag

SEQ ID NO: 155920 - DNA, 25 bp, Probe sequence
gttggctgtctacacgactttgagc

SEQ ID NO: 155921 - DNA, 25 bp, Probe sequence
gcattagttggctgtctacacgact

SEQ ID NO: 155922 - DNA, 25 bp, Probe sequence
gaatgtttagtcatggtacgttgat

SEQ ID NO: 155923 - DNA, 25 bp, Probe sequence
gaaaatgcattagttggctgtctac

SEQ ID NO: 155924 - DNA, 25 bp, Probe sequence
gagcacatagaagaagcactatcag

SEQ ID NO: 155925 - DNA, 25 bp, Probe sequence
gagatgtcactgatcttgaaaatgc

SEQ ID NO: 155926 - DNA, 25 bp, Probe sequence
gaggtaaaatcgaacatgcaaaaat

SEQ ID NO: 155927 - DNA, 25 bp, Probe sequence
gatactggcaatttaaactttagtt

SEQ ID NO: 155928 - DNA, 25 bp, Probe sequence
gttcaagcattacaatctttaggcg

SEQ ID NO: 155929 - DNA, 25 bp, Probe sequence
ggtggtggcgctgtttatcatgata

SEQ ID NO: 155930 - DNA, 25 bp, Probe sequence
ggtggcgctgtttatcatgatactg

SEQ ID NO: 155931 - DNA, 25 bp, Probe sequence
ggtgtcggagatgtcactgatcttg

SEQ ID NO: 155932 - DNA, 25 bp, Probe sequence
ggtcgtaacgatattcaagttggac

SEQ ID NO: 155933 - DNA, 25 bp, Probe sequence
ggtacgttgatgttaaatagtgatt

SEQ ID NO: 155934 - DNA, 25 bp, Probe sequence
ggctgtctacacgactttgagcaca

SEQ ID NO: 155935 - DNA, 25 bp, Probe sequence
ggcgctgtttatcatgatactggca

SEQ ID NO: 155936 - DNA, 25 bp, Probe sequence
tgtctacacgactttgagcacatag

SEQ ID NO: 155937 - DNA, 25 bp, Probe sequence
tccacaatttccaaaaattcactga

SEQ ID NO: 155938 - DNA, 25 bp, Probe sequence
taaatgaccctttagaaattgaaga

SEQ ID NO: 155939 - DNA, 25 bp, Probe sequence
taccagcagaagaaagttacttttt

SEQ ID NO: 155940 - DNA, 25 bp, Probe sequence
tagacgaagttcagaatgcactaaa

SEQ ID NO: 155941 - DNA, 25 bp, Probe sequence
ttcggtgatttctttggtgtcggag

SEQ ID NO: 155942 - DNA, 25 bp, Probe sequence
atcgtaatgaacttagcttgtatta

SEQ ID NO: 155943 - DNA, 25 bp, Probe sequence
atcctctctttttttgtatatatca

SEQ ID NO: 155944 - DNA, 25 bp, Probe sequence
agaggactatcctctctttttttgt

SEQ ID NO: 155945 - DNA, 25 bp, Probe sequence
agcttgtattagtagttacagctgg

SEQ ID NO: 155946 - DNA, 25 bp, Probe sequence
accatcgcagtattgatgtcaattg

SEQ ID NO: 155947 - DNA, 25 bp, Probe sequence
cacctaccatcgcagtattgatgtc

SEQ ID NO: 155948 - DNA, 25 bp, Probe sequence
cttcacacttaaacttacaagagga

SEQ ID NO: 155949 - DNA, 25 bp, Probe sequence
cgtggttttgagaggactatcctct

SEQ ID NO: 155950 - DNA, 25 bp, Probe sequence
cgccttatgttaatgttttttatat

SEQ ID NO: 155951 - DNA, 25 bp, Probe sequence
gcgtaaaaatcctaggttctcatga

SEQ ID NO: 155952 - DNA, 25 bp, Probe sequence
gcacttattatcggctttttaacgc

SEQ ID NO: 155953 - DNA, 25 bp, Probe sequence
gactatcctctctttttttgtatat

SEQ ID NO: 155954 - DNA, 25 bp, Probe sequence
gaggatatgtaagtggttatgaatt

SEQ ID NO: 155955 - DNA, 25 bp, Probe sequence
gttgttggaggtttagcacttatta

SEQ ID NO: 155956 - DNA, 25 bp, Probe sequence
gttatgttaggctcaatcttcacac

SEQ ID NO: 155957 - DNA, 25 bp, Probe sequence
gttacagctggaagaaatggctaca

SEQ ID NO: 155958 - DNA, 25 bp, Probe sequence
ggtttagcacttattatcggctttt

SEQ ID NO: 155959 - DNA, 25 bp, Probe sequence
ggaagaaatggctacaattttatta

SEQ ID NO: 155960 - DNA, 25 bp, Probe sequence
ggctttttaacgccttatgttaatg

SEQ ID NO: 155961 - DNA, 25 bp, Probe sequence
ggctcaatcttcacacttaaactta

SEQ ID NO: 155962 - DNA, 25 bp, Probe sequence
tggaggtttagcacttattatcggc

SEQ ID NO: 155963 - DNA, 25 bp, Probe sequence
tctttaggtttaccacctaccatcg

SEQ ID NO: 155964 - DNA, 25 bp, Probe sequence
tttaggtttaccacctaccatcgca

SEQ ID NO: 155965 - DNA, 25 bp, Probe sequence
tgtgttatgttaggctcaatcttca

SEQ ID NO: 155966 - DNA, 25 bp, Probe sequence
tgttaggctcaatcttcacacttaa

SEQ ID NO: 155967 - DNA, 25 bp, Probe sequence
tctttttttgtatatatcatgcgta

SEQ ID NO: 155968 - DNA, 25 bp, Probe sequence
tcatgcgtaaaaatcctaggttctc

SEQ ID NO: 155969 - DNA, 25 bp, Probe sequence
tcaatcttcacacttaaacttacaa

SEQ ID NO: 155970 - DNA, 25 bp, Probe sequence
taccacctaccatcgcagtattgat

SEQ ID NO: 155971 - DNA, 25 bp, Probe sequence
tagatggaacaattcacttcttagg

SEQ ID NO: 155972 - DNA, 25 bp, Probe sequence
taggctcaatcttcacacttaaact

SEQ ID NO: 155973 - DNA, 25 bp, Probe sequence
tatcggctttttaacgccttatgtt

SEQ ID NO: 155974 - DNA, 25 bp, Probe sequence
tattatcggctttttaacgccttat

SEQ ID NO: 155975 - DNA, 25 bp, Probe sequence
ttatatttgtgttatgttaggctca

SEQ ID NO: 155976 - DNA, 25 bp, Probe sequence
ataaactttcaggtaaatcatcaca

SEQ ID NO: 155977 - DNA, 25 bp, Probe sequence
atcacatccgacagataataaacat

SEQ ID NO: 155978 - DNA, 25 bp, Probe sequence
atcatcacatccgacagataataaa

SEQ ID NO: 155979 - DNA, 25 bp, Probe sequence
atccttgtcggttatgtaattaaat

SEQ ID NO: 155980 - DNA, 25 bp, Probe sequence
aggtaaatcatcacatccgacagat

SEQ ID NO: 155981 - DNA, 25 bp, Probe sequence
actttcaggtaaatcatcacatccg

SEQ ID NO: 155982 - DNA, 25 bp, Probe sequence
acaatccttgtcggttatgtaatta

SEQ ID NO: 155983 - DNA, 25 bp, Probe sequence
aaatcatcacatccgacagataata

SEQ ID NO: 155984 - DNA, 25 bp, Probe sequence
aaactttcaggtaaatcatcacatc

SEQ ID NO: 155985 - DNA, 25 bp, Probe sequence
aaacaatccttgtcggttatgtaat

SEQ ID NO: 155986 - DNA, 25 bp, Probe sequence
aacaatccttgtcggttatgtaatt

SEQ ID NO: 155987 - DNA, 25 bp, Probe sequence
aactttcaggtaaatcatcacatcc

SEQ ID NO: 155988 - DNA, 25 bp, Probe sequence
aatcatcacatccgacagataataa

SEQ ID NO: 155989 - DNA, 25 bp, Probe sequence
aataaactttcaggtaaatcatcac

SEQ ID NO: 155990 - DNA, 25 bp, Probe sequence
caatccttgtcggttatgtaattaa

SEQ ID NO: 155991 - DNA, 25 bp, Probe sequence
cacatccgacagataataaacataa

SEQ ID NO: 155992 - DNA, 25 bp, Probe sequence
caggtaaatcatcacatccgacaga

SEQ ID NO: 155993 - DNA, 25 bp, Probe sequence
catcacatccgacagataataaaca

SEQ ID NO: 155994 - DNA, 25 bp, Probe sequence
ctttcaggtaaatcatcacatccga

SEQ ID NO: 155995 - DNA, 25 bp, Probe sequence
gaaataaactttcaggtaaatcatc

SEQ ID NO: 155996 - DNA, 25 bp, Probe sequence
gttaaaacaatccttgtcggttatg

SEQ ID NO: 155997 - DNA, 25 bp, Probe sequence
gtaaatcatcacatccgacagataa

SEQ ID NO: 155998 - DNA, 25 bp, Probe sequence
ggtaaatcatcacatccgacagata

SEQ ID NO: 155999 - DNA, 25 bp, Probe sequence
tgttaaaacaatccttgtcggttat

SEQ ID NO: 156000 - DNA, 25 bp, Probe sequence
tccttgtcggttatgtaattaaatt

SEQ ID NO: 156001 - DNA, 25 bp, Probe sequence
tcaggtaaatcatcacatccgacag

SEQ ID NO: 156002 - DNA, 25 bp, Probe sequence
tcatcacatccgacagataataaac

SEQ ID NO: 156003 - DNA, 25 bp, Probe sequence
tcacatccgacagataataaacata

SEQ ID NO: 156004 - DNA, 25 bp, Probe sequence
taaaacaatccttgtcggttatgta

SEQ ID NO: 156005 - DNA, 25 bp, Probe sequence
taaactttcaggtaaatcatcacat

SEQ ID NO: 156006 - DNA, 25 bp, Probe sequence
taaatcatcacatccgacagataat

SEQ ID NO: 156007 - DNA, 25 bp, Probe sequence
tttcaggtaaatcatcacatccgac

SEQ ID NO: 156008 - DNA, 25 bp, Probe sequence
ttaaaacaatccttgtcggttatgt

SEQ ID NO: 156009 - DNA, 25 bp, Probe sequence
ttcaggtaaatcatcacatccgaca

SEQ ID NO: 156010 - DNA, 25 bp, Probe sequence
attgttgcattatttcttggaggtt

SEQ ID NO: 156011 - DNA, 25 bp, Probe sequence
attatttttctggacaggtatccct

SEQ ID NO: 156012 - DNA, 25 bp, Probe sequence
atttcttggaggtttaggtattcat

SEQ ID NO: 156013 - DNA, 25 bp, Probe sequence
acttattatttttctggacaggtat

SEQ ID NO: 156014 - DNA, 25 bp, Probe sequence
aagccatttatgttattgttgcatt

SEQ ID NO: 156015 - DNA, 25 bp, Probe sequence
gccatttatgttattgttgcattat

SEQ ID NO: 156016 - DNA, 25 bp, Probe sequence
gcattatttcttggaggtttaggta

SEQ ID NO: 156017 - DNA, 25 bp, Probe sequence
gaaagtcaataaagccatttatgtt

SEQ ID NO: 156018 - DNA, 25 bp, Probe sequence
gacaaggtctttttcacttattatt

SEQ ID NO: 156019 - DNA, 25 bp, Probe sequence
gttgcattatttcttggaggtttag

SEQ ID NO: 156020 - DNA, 25 bp, Probe sequence
gttattgttgcattatttcttggag

SEQ ID NO: 156021 - DNA, 25 bp, Probe sequence
gtctttttcacttattatttttctg

SEQ ID NO: 156022 - DNA, 25 bp, Probe sequence
ggacaaggtctttttcacttattat

SEQ ID NO: 156023 - DNA, 25 bp, Probe sequence
tggttttcacaacgaatttaagtag

SEQ ID NO: 156024 - DNA, 25 bp, Probe sequence
tggaggtttaggtattcataaattt

SEQ ID NO: 156025 - DNA, 25 bp, Probe sequence
tggacaaggtctttttcacttatta

SEQ ID NO: 156026 - DNA, 25 bp, Probe sequence
tgttattgttgcattatttcttgga

SEQ ID NO: 156027 - DNA, 25 bp, Probe sequence
tgttgcattatttcttggaggttta

SEQ ID NO: 156028 - DNA, 25 bp, Probe sequence
tctttttcacttattatttttctgg

SEQ ID NO: 156029 - DNA, 25 bp, Probe sequence
tcacttattatttttctggacaggt

SEQ ID NO: 156030 - DNA, 25 bp, Probe sequence
taaagccatttatgttattgttgca

SEQ ID NO: 156031 - DNA, 25 bp, Probe sequence
tatgctgataaatttggacaaggtc

SEQ ID NO: 156032 - DNA, 25 bp, Probe sequence
tatttttctggacaggtatccctac

SEQ ID NO: 156033 - DNA, 25 bp, Probe sequence
tttctggacaggtatccctaccatc

SEQ ID NO: 156034 - DNA, 25 bp, Probe sequence
tattgttgcattatttcttggaggt

SEQ ID NO: 156035 - DNA, 25 bp, Probe sequence
ttttctggacaggtatccctaccat

SEQ ID NO: 156036 - DNA, 25 bp, Probe sequence
tttttctggacaggtatccctacca

SEQ ID NO: 156037 - DNA, 25 bp, Probe sequence
tttcacttattatttttctggacag

SEQ ID NO: 156038 - DNA, 25 bp, Probe sequence
ttttcacttattatttttctggaca

SEQ ID NO: 156039 - DNA, 25 bp, Probe sequence
ttctggacaggtatccctaccatca

SEQ ID NO: 156040 - DNA, 25 bp, Probe sequence
ttcacttattatttttctggacagg

SEQ ID NO: 156041 - DNA, 25 bp, Probe sequence
ttcttggaggtttaggtattcataa

SEQ ID NO: 156042 - DNA, 25 bp, Probe sequence
ttgcattatttcttggaggtttagg

SEQ ID NO: 156043 - DNA, 25 bp, Probe sequence
ttggacaaggtctttttcacttatt

SEQ ID NO: 156044 - DNA, 25 bp, Probe sequence
atatcagcaatattctacagttaag

SEQ ID NO: 156045 - DNA, 25 bp, Probe sequence
atgatgccagcaatggctgctgctg

SEQ ID NO: 156046 - DNA, 25 bp, Probe sequence
atgtatggctgttggttacctatat

SEQ ID NO: 156047 - DNA, 25 bp, Probe sequence
atgggtatgtttattatcgttattg

SEQ ID NO: 156048 - DNA, 25 bp, Probe sequence
atggctgctgctggtaaaacaaata

SEQ ID NO: 156049 - DNA, 25 bp, Probe sequence
aaatcagcctattcattgccatgtt

SEQ ID NO: 156050 - DNA, 25 bp, Probe sequence
aaacctggtggctcattattttact

SEQ ID NO: 156051 - DNA, 25 bp, Probe sequence
aacaatattcgcgaccgtgtcaaag

SEQ ID NO: 156052 - DNA, 25 bp, Probe sequence
catgaatctgtaggcattggtggtg

SEQ ID NO: 156053 - DNA, 25 bp, Probe sequence
cttacttgcgttgttatcattccca

SEQ ID NO: 156054 - DNA, 25 bp, Probe sequence
cttacttattcaagcagcaactaat

SEQ ID NO: 156055 - DNA, 25 bp, Probe sequence
cgtcctcatacattaactgcttccg

SEQ ID NO: 156056 - DNA, 25 bp, Probe sequence
ccgttttagttggtacagcagcatc

SEQ ID NO: 156057 - DNA, 25 bp, Probe sequence
gcctgttaaagttatcagacgtttc

SEQ ID NO: 156058 - DNA, 25 bp, Probe sequence
gctacgattagccattgcattttac

SEQ ID NO: 156059 - DNA, 25 bp, Probe sequence
gcttctttaacatttatggcaatca

SEQ ID NO: 156060 - DNA, 25 bp, Probe sequence
gcaacggtatgagcccagagcttgt

SEQ ID NO: 156061 - DNA, 25 bp, Probe sequence
gaagaatgatacaccgcctacaatg

SEQ ID NO: 156062 - DNA, 25 bp, Probe sequence
gacgcctttcggtgaattattctca

SEQ ID NO: 156063 - DNA, 25 bp, Probe sequence
gagcccagagcttgtgctacgatta

SEQ ID NO: 156064 - DNA, 25 bp, Probe sequence
gttatcattcccaatgcctgttaaa

SEQ ID NO: 156065 - DNA, 25 bp, Probe sequence
gtacttacgatcattattaaacctg

SEQ ID NO: 156066 - DNA, 25 bp, Probe sequence
tggcatttaatgcgtcctcatacat

SEQ ID NO: 156067 - DNA, 25 bp, Probe sequence
ggcaatcatgtactttatcgcttat

SEQ ID NO: 156068 - DNA, 25 bp, Probe sequence
ggctcattattttacttacttgcgt

SEQ ID NO: 156069 - DNA, 25 bp, Probe sequence
tgcattctttattcaaactggcaat

SEQ ID NO: 156070 - DNA, 25 bp, Probe sequence
tacattaactgcttccgtagtaccc

SEQ ID NO: 156071 - DNA, 25 bp, Probe sequence
tacaccgcctacaatgatgccagca

SEQ ID NO: 156072 - DNA, 25 bp, Probe sequence
tagccattgcattttacatcttagc

SEQ ID NO: 156073 - DNA, 25 bp, Probe sequence
taggtttgtttttagctgctaactc

SEQ ID NO: 156074 - DNA, 25 bp, Probe sequence
tatttcatggacgcctttcggtgaa

SEQ ID NO: 156075 - DNA, 25 bp, Probe sequence
tattctcaggcgtatttatgggtat

SEQ ID NO: 156076 - DNA, 25 bp, Probe sequence
ttagctgctaactcttcattttggt

SEQ ID NO: 156077 - DNA, 25 bp, Probe sequence
ttgccatgttactagcatgcttact

SEQ ID NO: 156078 - DNA, 25 bp, Probe sequence
atttattcattggtaattggagtaa

SEQ ID NO: 156079 - DNA, 25 bp, Probe sequence
atagatacggcacatcaacgcatta

SEQ ID NO: 156080 - DNA, 25 bp, Probe sequence
atcatattctttttatagatacggc

SEQ ID NO: 156081 - DNA, 25 bp, Probe sequence
acggcacatcaacgcattaaatttt

SEQ ID NO: 156082 - DNA, 25 bp, Probe sequence
acatcaacgcattaaattttcatct

SEQ ID NO: 156083 - DNA, 25 bp, Probe sequence
acacaaccaaactcacacatctaga

SEQ ID NO: 156084 - DNA, 25 bp, Probe sequence
acaaccaaactcacacatctagaac

SEQ ID NO: 156085 - DNA, 25 bp, Probe sequence
aacaaaccaatatcaatttattcat

SEQ ID NO: 156086 - DNA, 25 bp, Probe sequence
aactcacacatctagaacaaaccaa

SEQ ID NO: 156087 - DNA, 25 bp, Probe sequence
aaccaaactcacacatctagaacaa

SEQ ID NO: 156088 - DNA, 25 bp, Probe sequence
aatcaatttgtatacgtcatggcga

SEQ ID NO: 156089 - DNA, 25 bp, Probe sequence
caatttgtatacgtcatggcgatga

SEQ ID NO: 156090 - DNA, 25 bp, Probe sequence
caagtcacaatcaatatcatattct

SEQ ID NO: 156091 - DNA, 25 bp, Probe sequence
caaactcacacatctagaacaaacc

SEQ ID NO: 156092 - DNA, 25 bp, Probe sequence
catgcaaacgtcatccaaacaaggt

SEQ ID NO: 156093 - DNA, 25 bp, Probe sequence
cacagcatatcctcatgcaaacgtc

SEQ ID NO: 156094 - DNA, 25 bp, Probe sequence
cacacatctagaacaaaccaatatc

SEQ ID NO: 156095 - DNA, 25 bp, Probe sequence
catatcctcatgcaaacgtcatcca

SEQ ID NO: 156096 - DNA, 25 bp, Probe sequence
ccaaacaaggtattggcacttcgcg

SEQ ID NO: 156097 - DNA, 25 bp, Probe sequence
gcaaacgtcatccaaacaaggtatt

SEQ ID NO: 156098 - DNA, 25 bp, Probe sequence
gatgatacacagcatatcctcatgc

SEQ ID NO: 156099 - DNA, 25 bp, Probe sequence
gatacggcacatcaacgcattaaat

SEQ ID NO: 156100 - DNA, 25 bp, Probe sequence
gatacacagcatatcctcatgcaaa

SEQ ID NO: 156101 - DNA, 25 bp, Probe sequence
gtatacgtcatggcgatgatacaag

SEQ ID NO: 156102 - DNA, 25 bp, Probe sequence
gtcatggcgatgatacaagtcacaa

SEQ ID NO: 156103 - DNA, 25 bp, Probe sequence
ggcacatcaacgcattaaattttca

SEQ ID NO: 156104 - DNA, 25 bp, Probe sequence
ggcgatgatacaagtcacaatcaat

SEQ ID NO: 156105 - DNA, 25 bp, Probe sequence
tgtatcaactacaatttataaattt

SEQ ID NO: 156106 - DNA, 25 bp, Probe sequence
tcctcatgcaaacgtcatccaaaca

SEQ ID NO: 156107 - DNA, 25 bp, Probe sequence
tcattggtaattggagtaatcatca

SEQ ID NO: 156108 - DNA, 25 bp, Probe sequence
tatcctcatgcaaacgtcatccaaa

SEQ ID NO: 156109 - DNA, 25 bp, Probe sequence
tatattcttgattatgatgatacac

SEQ ID NO: 156110 - DNA, 25 bp, Probe sequence
tttacgacacaaccaaactcacaca

SEQ ID NO: 156111 - DNA, 25 bp, Probe sequence
ttacgacacaaccaaactcacacat

SEQ ID NO: 156112 - DNA, 25 bp, Probe sequence
attcaatgaacataaccgattctgt

SEQ ID NO: 156113 - DNA, 25 bp, Probe sequence
atacttattcaccattatatttatg

SEQ ID NO: 156114 - DNA, 25 bp, Probe sequence
ataatcctgataagtggaagtttgt

SEQ ID NO: 156115 - DNA, 25 bp, Probe sequence
atcttccaaagagtctcaatccaaa

SEQ ID NO: 156116 - DNA, 25 bp, Probe sequence
atgcatgcaatgcaatatcatgtta

SEQ ID NO: 156117 - DNA, 25 bp, Probe sequence
atgttatttcttcttttggatggca

SEQ ID NO: 156118 - DNA, 25 bp, Probe sequence
atggagaagttcagaggggatgact

SEQ ID NO: 156119 - DNA, 25 bp, Probe sequence
agtggaagtttgtgaaatattcatt

SEQ ID NO: 156120 - DNA, 25 bp, Probe sequence
agaggggatgactgaatttatattc

SEQ ID NO: 156121 - DNA, 25 bp, Probe sequence
agaatcttcgataatgcagttgcag

SEQ ID NO: 156122 - DNA, 25 bp, Probe sequence
aaagagtctcaatccaaatataaaa

SEQ ID NO: 156123 - DNA, 25 bp, Probe sequence
aaccgattctgttaaacatagtctt

SEQ ID NO: 156124 - DNA, 25 bp, Probe sequence
aatggttataagactgatggattta

SEQ ID NO: 156125 - DNA, 25 bp, Probe sequence
aatgcagttgcagaaattataattt

SEQ ID NO: 156126 - DNA, 25 bp, Probe sequence
aatatatcgacattttccctacttt

SEQ ID NO: 156127 - DNA, 25 bp, Probe sequence
caatatcatgttaagttgcctagtg

SEQ ID NO: 156128 - DNA, 25 bp, Probe sequence
caaaaaattgtttagaatcttcgat

SEQ ID NO: 156129 - DNA, 25 bp, Probe sequence
catgttaagttgcctagtgattaca

SEQ ID NO: 156130 - DNA, 25 bp, Probe sequence
catagtctttatgcgcttgaagaat

SEQ ID NO: 156131 - DNA, 25 bp, Probe sequence
gcattacaaatacttattcaccatt

SEQ ID NO: 156132 - DNA, 25 bp, Probe sequence
gaatttatattcaatggattttatg

SEQ ID NO: 156133 - DNA, 25 bp, Probe sequence
gaacataaccgattctgttaaacat

SEQ ID NO: 156134 - DNA, 25 bp, Probe sequence
gaaaatcttccaaagagtctcaatc

SEQ ID NO: 156135 - DNA, 25 bp, Probe sequence
gataatgttatttcttcttttggat

SEQ ID NO: 156136 - DNA, 25 bp, Probe sequence
gatagagttcgattaaatggttata

SEQ ID NO: 156137 - DNA, 25 bp, Probe sequence
gttgcctagtgattacaatatggaa

SEQ ID NO: 156138 - DNA, 25 bp, Probe sequence
gttatttcttcttttggatggcaaa

SEQ ID NO: 156139 - DNA, 25 bp, Probe sequence
gtcaaacaactactaattgcattac

SEQ ID NO: 156140 - DNA, 25 bp, Probe sequence
tgatgtactatatatctcacaatga

SEQ ID NO: 156141 - DNA, 25 bp, Probe sequence
tgcgcttgaagaatatatcgacatt

SEQ ID NO: 156142 - DNA, 25 bp, Probe sequence
tccctactttatctctaaaagaaat

SEQ ID NO: 156143 - DNA, 25 bp, Probe sequence
taaacatagtctttatgcgcttgaa

SEQ ID NO: 156144 - DNA, 25 bp, Probe sequence
tatatcgacattttccctactttat

SEQ ID NO: 156145 - DNA, 25 bp, Probe sequence
ttggtgtgatatattcaatgaacat

SEQ ID NO: 156146 - DNA, 25 bp, Probe sequence
atatcactgttcttactgatgaaaa

SEQ ID NO: 156147 - DNA, 25 bp, Probe sequence
atgcacatgatattatgcgtacatt

SEQ ID NO: 156148 - DNA, 25 bp, Probe sequence
agagtgacaaagtacctcaaaaagt

SEQ ID NO: 156149 - DNA, 25 bp, Probe sequence
acttatttactggaatccttgggat

SEQ ID NO: 156150 - DNA, 25 bp, Probe sequence
aaagccgattcacactctaaacagc

SEQ ID NO: 156151 - DNA, 25 bp, Probe sequence
aagatgcagattcaagcctattaca

SEQ ID NO: 156152 - DNA, 25 bp, Probe sequence
aatgcaactaaaaatacagacactt

SEQ ID NO: 156153 - DNA, 25 bp, Probe sequence
aatttgctggttatgctaaagcatt

SEQ ID NO: 156154 - DNA, 25 bp, Probe sequence
aattcaaatatcactgttcttactg

SEQ ID NO: 156155 - DNA, 25 bp, Probe sequence
caatcgtgattataactggtatggt

SEQ ID NO: 156156 - DNA, 25 bp, Probe sequence
caatgcttattttatcactaggcgc

SEQ ID NO: 156157 - DNA, 25 bp, Probe sequence
caagcctattacatttatcattcaa

SEQ ID NO: 156158 - DNA, 25 bp, Probe sequence
caaacttcatcgctaaagatttaga

SEQ ID NO: 156159 - DNA, 25 bp, Probe sequence
caacattccctaatcaaatgattga

SEQ ID NO: 156160 - DNA, 25 bp, Probe sequence
cagaattatcaatccaagatgcaga

SEQ ID NO: 156161 - DNA, 25 bp, Probe sequence
gccgattcacactctaaacagctag

SEQ ID NO: 156162 - DNA, 25 bp, Probe sequence
gcatcataatggtttcaatgcttat

SEQ ID NO: 156163 - DNA, 25 bp, Probe sequence
gcacaacaacaatttgctggttatg

SEQ ID NO: 156164 - DNA, 25 bp, Probe sequence
gaatccttgggatacagaattatca

SEQ ID NO: 156165 - DNA, 25 bp, Probe sequence
gaagatggcaaagttagattagtaa

SEQ ID NO: 156166 - DNA, 25 bp, Probe sequence
gaagcgatacaagaagatcaagttc

SEQ ID NO: 156167 - DNA, 25 bp, Probe sequence
gaacaacaattcgataactcatggt

SEQ ID NO: 156168 - DNA, 25 bp, Probe sequence
gagtattcaatattataagcatcat

SEQ ID NO: 156169 - DNA, 25 bp, Probe sequence
gtaagtgagcaagaccttcctaatt

SEQ ID NO: 156170 - DNA, 25 bp, Probe sequence
gtaaaagatctagcacaacaacaat

SEQ ID NO: 156171 - DNA, 25 bp, Probe sequence
ggtatggttcaatgataggttacta

SEQ ID NO: 156172 - DNA, 25 bp, Probe sequence
tcgataactcatggtgtgcaggatt

SEQ ID NO: 156173 - DNA, 25 bp, Probe sequence
tcactaggcgcatttgctaataaca

SEQ ID NO: 156174 - DNA, 25 bp, Probe sequence
taaagccaaagccgattcacactct

SEQ ID NO: 156175 - DNA, 25 bp, Probe sequence
tacagacacttataatgcacatgat

SEQ ID NO: 156176 - DNA, 25 bp, Probe sequence
tatgcgtacattataccctgaagta

SEQ ID NO: 156177 - DNA, 25 bp, Probe sequence
tattttatcactaggcgcatttgct

SEQ ID NO: 156178 - DNA, 25 bp, Probe sequence
ttatcaagaaggcgtaccatcatat

SEQ ID NO: 156179 - DNA, 25 bp, Probe sequence
ttaaaatttcaaacttcatcgctaa

SEQ ID NO: 156180 - DNA, 25 bp, Probe sequence
attgggatgattttaactgcagtta

SEQ ID NO: 156181 - DNA, 25 bp, Probe sequence
atatgaaaggtggcagttggatcaa

SEQ ID NO: 156182 - DNA, 25 bp, Probe sequence
atgcatttggcacagctaaagcact

SEQ ID NO: 156183 - DNA, 25 bp, Probe sequence
atgtctctatcatttttgcaagtgt

SEQ ID NO: 156184 - DNA, 25 bp, Probe sequence
agcatttggctattctaaagacgtc

SEQ ID NO: 156185 - DNA, 25 bp, Probe sequence
acagatacgatgaccgtacttttta

SEQ ID NO: 156186 - DNA, 25 bp, Probe sequence
aaacgcaacggtcgtatgtttagcg

SEQ ID NO: 156187 - DNA, 25 bp, Probe sequence
aagatttgaatcttctatcgccaaa

SEQ ID NO: 156188 - DNA, 25 bp, Probe sequence
aatttcatgttagtgttcttaacac

SEQ ID NO: 156189 - DNA, 25 bp, Probe sequence
caagtgtattaactggcgtcatgct

SEQ ID NO: 156190 - DNA, 25 bp, Probe sequence
cagcattaattgcatctttaggaat

SEQ ID NO: 156191 - DNA, 25 bp, Probe sequence
ctctatcatttttgcaagtgtatta

SEQ ID NO: 156192 - DNA, 25 bp, Probe sequence
gcaacggtcgtatgtttagcgtacc

SEQ ID NO: 156193 - DNA, 25 bp, Probe sequence
gcgtcacatgcatttggcacagcta

SEQ ID NO: 156194 - DNA, 25 bp, Probe sequence
gctattctaaagacgtcattgtaac

SEQ ID NO: 156195 - DNA, 25 bp, Probe sequence
gcatctttaggaattatttttgtct

SEQ ID NO: 156196 - DNA, 25 bp, Probe sequence
gaattatttttgtcttacttatctt

SEQ ID NO: 156197 - DNA, 25 bp, Probe sequence
gaatccagcattaattgcatcttta

SEQ ID NO: 156198 - DNA, 25 bp, Probe sequence
gaccgtactttttattatcacaacg

SEQ ID NO: 156199 - DNA, 25 bp, Probe sequence
gatgaccgtactttttattatcaca

SEQ ID NO: 156200 - DNA, 25 bp, Probe sequence
gatcaaccatattttaaacgcaacg

SEQ ID NO: 156201 - DNA, 25 bp, Probe sequence
gatttgaatcttctatcgccaaagg

SEQ ID NO: 156202 - DNA, 25 bp, Probe sequence
gttcttaacacttaaagcatttggc

SEQ ID NO: 156203 - DNA, 25 bp, Probe sequence
gtatgtttagcgtacccactttata

SEQ ID NO: 156204 - DNA, 25 bp, Probe sequence
ggtgcatttagttcaattgggatga

SEQ ID NO: 156205 - DNA, 25 bp, Probe sequence
ggtagtattttaggttcgatgttat

SEQ ID NO: 156206 - DNA, 25 bp, Probe sequence
ggaatgcgtcacatgcatttggcac

SEQ ID NO: 156207 - DNA, 25 bp, Probe sequence
taacgtatgggaatgcgtcacatgc

SEQ ID NO: 156208 - DNA, 25 bp, Probe sequence
tatcacaacgggtttaatcggtagt

SEQ ID NO: 156209 - DNA, 25 bp, Probe sequence
taacgggtatatgaaaggtggcagt

SEQ ID NO: 156210 - DNA, 25 bp, Probe sequence
tagcgtacccactttataaaaatag

SEQ ID NO: 156211 - DNA, 25 bp, Probe sequence
tatctttggaattagttataacggg

SEQ ID NO: 156212 - DNA, 25 bp, Probe sequence
ttttgtcttacttatctttggaatt

SEQ ID NO: 156213 - DNA, 25 bp, Probe sequence
ttggatcaaccatattttaaacgca

SEQ ID NO: 156214 - DNA, 25 bp, Probe sequence
atcattgtacatttgtgaattggtt

SEQ ID NO: 156215 - DNA, 25 bp, Probe sequence
atgacaatatttcactatggctctt

SEQ ID NO: 156216 - DNA, 25 bp, Probe sequence
aggtactgagatgctttcaggacat

SEQ ID NO: 156217 - DNA, 25 bp, Probe sequence
acaggtactgagatgctttcaggac

SEQ ID NO: 156218 - DNA, 25 bp, Probe sequence
acaatatttcactatggctcttcac

SEQ ID NO: 156219 - DNA, 25 bp, Probe sequence
aactgatagtgcccgtttaattaca

SEQ ID NO: 156220 - DNA, 25 bp, Probe sequence
aatatttcactatggctcttcactt

SEQ ID NO: 156221 - DNA, 25 bp, Probe sequence
aattacaggtactgagatgctttca

SEQ ID NO: 156222 - DNA, 25 bp, Probe sequence
caatatttcactatggctcttcact

SEQ ID NO: 156223 - DNA, 25 bp, Probe sequence
cacttctctagggaaattgctatct

SEQ ID NO: 156224 - DNA, 25 bp, Probe sequence
ctcttcacttctctagggaaattgc

SEQ ID NO: 156225 - DNA, 25 bp, Probe sequence
gctcttcacttctctagggaaattg

SEQ ID NO: 156226 - DNA, 25 bp, Probe sequence
gcccgtttaattacaggtactgaga

SEQ ID NO: 156227 - DNA, 25 bp, Probe sequence
gctttcaggacatggatttgttcga

SEQ ID NO: 156228 - DNA, 25 bp, Probe sequence
gaaaactgatagtgcccgtttaatt

SEQ ID NO: 156229 - DNA, 25 bp, Probe sequence
gacaatatttcactatggctcttca

SEQ ID NO: 156230 - DNA, 25 bp, Probe sequence
gagatgctttcaggacatggatttg

SEQ ID NO: 156231 - DNA, 25 bp, Probe sequence
gatgctttcaggacatggatttgtt

SEQ ID NO: 156232 - DNA, 25 bp, Probe sequence
gatagtgcccgtttaattacaggta

SEQ ID NO: 156233 - DNA, 25 bp, Probe sequence
gttgaaaactgatagtgcccgttta

SEQ ID NO: 156234 - DNA, 25 bp, Probe sequence
gtatcattgtacatttgtgaattgg

SEQ ID NO: 156235 - DNA, 25 bp, Probe sequence
gtactgagatgctttcaggacatgg

SEQ ID NO: 156236 - DNA, 25 bp, Probe sequence
gtacatttgtgaattggttgaaaac

SEQ ID NO: 156237 - DNA, 25 bp, Probe sequence
gtgcccgtttaattacaggtactga

SEQ ID NO: 156238 - DNA, 25 bp, Probe sequence
ggatttgttcgaaaatatgacaata

SEQ ID NO: 156239 - DNA, 25 bp, Probe sequence
ggacatggatttgttcgaaaatatg

SEQ ID NO: 156240 - DNA, 25 bp, Probe sequence
ggctcttcacttctctagggaaatt

SEQ ID NO: 156241 - DNA, 25 bp, Probe sequence
tggttgaaaactgatagtgcccgtt

SEQ ID NO: 156242 - DNA, 25 bp, Probe sequence
tgatagtgcccgtttaattacaggt

SEQ ID NO: 156243 - DNA, 25 bp, Probe sequence
tgacaatatttcactatggctcttc

SEQ ID NO: 156244 - DNA, 25 bp, Probe sequence
tcttcacttctctagggaaattgct

SEQ ID NO: 156245 - DNA, 25 bp, Probe sequence
tagtgcccgtttaattacaggtact

SEQ ID NO: 156246 - DNA, 25 bp, Probe sequence
ttcaggacatggatttgttcgaaaa

SEQ ID NO: 156247 - DNA, 25 bp, Probe sequence
ttcacttctctagggaaattgctat

SEQ ID NO: 156248 - DNA, 25 bp, Probe sequence
attgcttccggtgtagttgtaggta

SEQ ID NO: 156249 - DNA, 25 bp, Probe sequence
attcccttctgcaattaaccaagac

SEQ ID NO: 156250 - DNA, 25 bp, Probe sequence
atattaccaaataacgatcgtcacc

SEQ ID NO: 156251 - DNA, 25 bp, Probe sequence
atccaaatggtggtttcactgctga

SEQ ID NO: 156252 - DNA, 25 bp, Probe sequence
atgaaaatgtacgcaacttcttaaa

SEQ ID NO: 156253 - DNA, 25 bp, Probe sequence
aaatcacttacctcaaaggcgaagc

SEQ ID NO: 156254 - DNA, 25 bp, Probe sequence
aacgatgaccaacctaataacccag

SEQ ID NO: 156255 - DNA, 25 bp, Probe sequence
aacgaatggtcattatgcacccgta

SEQ ID NO: 156256 - DNA, 25 bp, Probe sequence
aacccagataatcctgataacccta

SEQ ID NO: 156257 - DNA, 25 bp, Probe sequence
aacgcgttatcttcaaaggctatgg

SEQ ID NO: 156258 - DNA, 25 bp, Probe sequence
aaccctgataatccagacaatggcg

SEQ ID NO: 156259 - DNA, 25 bp, Probe sequence
aaccattagaacaacgtgaacacgc

SEQ ID NO: 156260 - DNA, 25 bp, Probe sequence
aaggcgaagctatgcaatatgattt

SEQ ID NO: 156261 - DNA, 25 bp, Probe sequence
aattctcccctaatgagcaaaacaa

SEQ ID NO: 156262 - DNA, 25 bp, Probe sequence
caaccctaacaaccctgataatcca

SEQ ID NO: 156263 - DNA, 25 bp, Probe sequence
cgatcgtcaccaaatcacagataca

SEQ ID NO: 156264 - DNA, 25 bp, Probe sequence
gcacggtgatcctcatgctttaaaa

SEQ ID NO: 156265 - DNA, 25 bp, Probe sequence
gcaaacagcaaacacctaagattca

SEQ ID NO: 156266 - DNA, 25 bp, Probe sequence
gcaactttgacaacagcgacacttg

SEQ ID NO: 156267 - DNA, 25 bp, Probe sequence
gcaatagttaaattctcccctaatg

SEQ ID NO: 156268 - DNA, 25 bp, Probe sequence
gacacttgtgagttctccagcagca

SEQ ID NO: 156269 - DNA, 25 bp, Probe sequence
gatcggaattcattggggcggtgta

SEQ ID NO: 156270 - DNA, 25 bp, Probe sequence
gataaacctgtagcaacaatgtggg

SEQ ID NO: 156271 - DNA, 25 bp, Probe sequence
gatatccattttgccaacgatgacc

SEQ ID NO: 156272 - DNA, 25 bp, Probe sequence
gttctttattcgttgcaactttgac

SEQ ID NO: 156273 - DNA, 25 bp, Probe sequence
gtagatgctacgcacggtgatcctc

SEQ ID NO: 156274 - DNA, 25 bp, Probe sequence
gggcggtgtaccaaatgaatttaat

SEQ ID NO: 156275 - DNA, 25 bp, Probe sequence
gtggtttcactgctgaacaaatcac

SEQ ID NO: 156276 - DNA, 25 bp, Probe sequence
ttcaagttgaagcacctactggtac

SEQ ID NO: 156277 - DNA, 25 bp, Probe sequence
tgctttaaaagcattcccttctgca

SEQ ID NO: 156278 - DNA, 25 bp, Probe sequence
taaccctaacaatcctgataaccct

SEQ ID NO: 156279 - DNA, 25 bp, Probe sequence
tactggtacatttattgcttccggt

SEQ ID NO: 156280 - DNA, 25 bp, Probe sequence
tatgcacccgtaacttatattcaag

SEQ ID NO: 156281 - DNA, 25 bp, Probe sequence
ttctccagcagcaaacgcgttatct

SEQ ID NO: 156282 - DNA, 25 bp, Probe sequence
attgcttccggtgtagttgtaggta

SEQ ID NO: 156283 - DNA, 25 bp, Probe sequence
attcccttctgcaattaaccaagac

SEQ ID NO: 156284 - DNA, 25 bp, Probe sequence
attaccgaataacgatcgtcaccaa

SEQ ID NO: 156285 - DNA, 25 bp, Probe sequence
atcacttacctcaaaggcgaagcta

SEQ ID NO: 156286 - DNA, 25 bp, Probe sequence
aaatggtggtttcactgctgaacaa

SEQ ID NO: 156287 - DNA, 25 bp, Probe sequence
aacgatgaccaacctaataacccag

SEQ ID NO: 156288 - DNA, 25 bp, Probe sequence
aacgaatggtcattatgcacccgta

SEQ ID NO: 156289 - DNA, 25 bp, Probe sequence
aacccagataatcctgataacccta

SEQ ID NO: 156290 - DNA, 25 bp, Probe sequence
aaccattagaacaacgtgaacacgc

SEQ ID NO: 156291 - DNA, 25 bp, Probe sequence
caaccctaacaaccctgataatcca

SEQ ID NO: 156292 - DNA, 25 bp, Probe sequence
gcagtcaagcaaacagcaaacacct

SEQ ID NO: 156293 - DNA, 25 bp, Probe sequence
gcacggtgatcctcatgctttaaaa

SEQ ID NO: 156294 - DNA, 25 bp, Probe sequence
gcaaacgcgttatcatcaaaagcta

SEQ ID NO: 156295 - DNA, 25 bp, Probe sequence
gcaactttgacaacagcgacacttg

SEQ ID NO: 156296 - DNA, 25 bp, Probe sequence
gcaatagttaaattctcccctaatg

SEQ ID NO: 156297 - DNA, 25 bp, Probe sequence
gacaatcatccacaacaaacgcagt

SEQ ID NO: 156298 - DNA, 25 bp, Probe sequence
gacacttgtgagttctccagcagca

SEQ ID NO: 156299 - DNA, 25 bp, Probe sequence
gatcggaattcattggggcggtgta

SEQ ID NO: 156300 - DNA, 25 bp, Probe sequence
gatcgtcaccaaatcacagatacaa

SEQ ID NO: 156301 - DNA, 25 bp, Probe sequence
gataaccctaacaatcctgataacc

SEQ ID NO: 156302 - DNA, 25 bp, Probe sequence
gataaccctaacaacccagatgaac

SEQ ID NO: 156303 - DNA, 25 bp, Probe sequence
gatatcctggtgataaacctgtagc

SEQ ID NO: 156304 - DNA, 25 bp, Probe sequence
gatatccattttgccaacgatgacc

SEQ ID NO: 156305 - DNA, 25 bp, Probe sequence
gttctttattcgttgcaactttgac

SEQ ID NO: 156306 - DNA, 25 bp, Probe sequence
gtagatgctacgcacggtgatcctc

SEQ ID NO: 156307 - DNA, 25 bp, Probe sequence
tggtggtaactcaggttcacctgta

SEQ ID NO: 156308 - DNA, 25 bp, Probe sequence
tgaaccaaataaccctgacaaccct

SEQ ID NO: 156309 - DNA, 25 bp, Probe sequence
ttcaagttgaagcacctactggtac

SEQ ID NO: 156310 - DNA, 25 bp, Probe sequence
tgctttaaaagcattcccttctgca

SEQ ID NO: 156311 - DNA, 25 bp, Probe sequence
taaccctaacaatcctgataaccct

SEQ ID NO: 156312 - DNA, 25 bp, Probe sequence
tactggtacatttattgcttccggt

SEQ ID NO: 156313 - DNA, 25 bp, Probe sequence
tatgcacccgtaacttatattcaag

SEQ ID NO: 156314 - DNA, 25 bp, Probe sequence
ttcagacaaccctgacgctgcataa

SEQ ID NO: 156315 - DNA, 25 bp, Probe sequence
ttctccagcagcaaacgcgttatca

SEQ ID NO: 156316 - DNA, 25 bp, Probe sequence
attatgcacctgttacttatattca

SEQ ID NO: 156317 - DNA, 25 bp, Probe sequence
atcaatttaacggtgcagtatttat

SEQ ID NO: 156318 - DNA, 25 bp, Probe sequence
atccggacaatcctaacaaccctga

SEQ ID NO: 156319 - DNA, 25 bp, Probe sequence
agaacaacgtgaacgcgctaatgtt

SEQ ID NO: 156320 - DNA, 25 bp, Probe sequence
acaacgtgaacgcgctaatgttata

SEQ ID NO: 156321 - DNA, 25 bp, Probe sequence
aagtcattggcattcattggggtgg

SEQ ID NO: 156322 - DNA, 25 bp, Probe sequence
aaggtgaagcaatgcaatatgattt

SEQ ID NO: 156323 - DNA, 25 bp, Probe sequence
aatttcgcaaatgatgaccacccta

SEQ ID NO: 156324 - DNA, 25 bp, Probe sequence
caaataacccggacaatggcgataa

SEQ ID NO: 156325 - DNA, 25 bp, Probe sequence
caaatgcgttatcttcaaaagctat

SEQ ID NO: 156326 - DNA, 25 bp, Probe sequence
cagcaaatgcgttatcttcaaaagc

SEQ ID NO: 156327 - DNA, 25 bp, Probe sequence
cggacaatccaaataaccctgacca

SEQ ID NO: 156328 - DNA, 25 bp, Probe sequence
cccaaataacccggacaatggcgat

SEQ ID NO: 156329 - DNA, 25 bp, Probe sequence
cgcagacagacaaacagcaaacacc

SEQ ID NO: 156330 - DNA, 25 bp, Probe sequence
ccagacaatccaaataatccggaca

SEQ ID NO: 156331 - DNA, 25 bp, Probe sequence
ccacaacaaacgcagacagacaaac

SEQ ID NO: 156332 - DNA, 25 bp, Probe sequence
gcaaatgatgaccaccctaacaacc

SEQ ID NO: 156333 - DNA, 25 bp, Probe sequence
gacaatccaaataaccctgaccaac

SEQ ID NO: 156334 - DNA, 25 bp, Probe sequence
gacaatcctaataatcctgataacc

SEQ ID NO: 156335 - DNA, 25 bp, Probe sequence
gtggcgttccaaatcaatttaacgg

SEQ ID NO: 156336 - DNA, 25 bp, Probe sequence
ggtcattatgcacctgttacttata

SEQ ID NO: 156337 - DNA, 25 bp, Probe sequence
ggcattcattggggtggcgttccaa

SEQ ID NO: 156338 - DNA, 25 bp, Probe sequence
tggggtggcgttccaaatcaattta

SEQ ID NO: 156339 - DNA, 25 bp, Probe sequence
tgaacgcgctaatgttatattacca

SEQ ID NO: 156340 - DNA, 25 bp, Probe sequence
tgcacctgttacttatattcaagtt

SEQ ID NO: 156341 - DNA, 25 bp, Probe sequence
tccaaatcaatttaacggtgcagta

SEQ ID NO: 156342 - DNA, 25 bp, Probe sequence
tcattggcattcattggggtggcgt

SEQ ID NO: 156343 - DNA, 25 bp, Probe sequence
taatccggacaatcctaacaaccct

SEQ ID NO: 156344 - DNA, 25 bp, Probe sequence
taacgtacttaaaaggtgaagcaat

SEQ ID NO: 156345 - DNA, 25 bp, Probe sequence
taacggtgcagtatttattaatgaa

SEQ ID NO: 156346 - DNA, 25 bp, Probe sequence
ttcattggggtggcgttccaaatca

SEQ ID NO: 156347 - DNA, 25 bp, Probe sequence
ttggcattcattggggtggcgttcc

SEQ ID NO: 156348 - DNA, 25 bp, Probe sequence
ttcgcaaatgatgaccaccctaaca

SEQ ID NO: 156349 - DNA, 25 bp, Probe sequence
ttgaagatatcaatttcgcaaatga

SEQ ID NO: 156350 - DNA, 25 bp, Probe sequence
atttaaacaggtctcaaaaactcag

SEQ ID NO: 156351 - DNA, 25 bp, Probe sequence
atattaaagcaattaaaccgagtga

SEQ ID NO: 156352 - DNA, 25 bp, Probe sequence
ataaaggttttgagtcatcaattta

SEQ ID NO: 156353 - DNA, 25 bp, Probe sequence
aggggataaaggttttgagtcatca

SEQ ID NO: 156354 - DNA, 25 bp, Probe sequence
aggttttgagtcatcaatttaaaca

SEQ ID NO: 156355 - DNA, 25 bp, Probe sequence
agtcatcaatttaaacaggtctcaa

SEQ ID NO: 156356 - DNA, 25 bp, Probe sequence
acaggtctcaaaaactcagttaaat

SEQ ID NO: 156357 - DNA, 25 bp, Probe sequence
aatattaaagcaattaaaccgagtg

SEQ ID NO: 156358 - DNA, 25 bp, Probe sequence
caggtctcaaaaactcagttaaatt

SEQ ID NO: 156359 - DNA, 25 bp, Probe sequence
catcaatttaaacaggtctcaaaaa

SEQ ID NO: 156360 - DNA, 25 bp, Probe sequence
gagtcatcaatttaaacaggtctca

SEQ ID NO: 156361 - DNA, 25 bp, Probe sequence
gataaaggttttgagtcatcaattt

SEQ ID NO: 156362 - DNA, 25 bp, Probe sequence
gttttgagtcatcaatttaaacagg

SEQ ID NO: 156363 - DNA, 25 bp, Probe sequence
gtcatcaatttaaacaggtctcaaa

SEQ ID NO: 156364 - DNA, 25 bp, Probe sequence
gtctcaaaaactcagttaaattatt

SEQ ID NO: 156365 - DNA, 25 bp, Probe sequence
gggataaaggttttgagtcatcaat

SEQ ID NO: 156366 - DNA, 25 bp, Probe sequence
ggggataaaggttttgagtcatcaa

SEQ ID NO: 156367 - DNA, 25 bp, Probe sequence
ggtctcaaaaactcagttaaattat

SEQ ID NO: 156368 - DNA, 25 bp, Probe sequence
ggttttgagtcatcaatttaaacag

SEQ ID NO: 156369 - DNA, 25 bp, Probe sequence
ggataaaggttttgagtcatcaatt

SEQ ID NO: 156370 - DNA, 25 bp, Probe sequence
tgagtcatcaatttaaacaggtctc

SEQ ID NO: 156371 - DNA, 25 bp, Probe sequence
tctcaaaaactcagttaaattattt

SEQ ID NO: 156372 - DNA, 25 bp, Probe sequence
tcatcaatttaaacaggtctcaaaa

SEQ ID NO: 156373 - DNA, 25 bp, Probe sequence
tcaatttaaacaggtctcaaaaact

SEQ ID NO: 156374 - DNA, 25 bp, Probe sequence
taaacaggtctcaaaaactcagtta

SEQ ID NO: 156375 - DNA, 25 bp, Probe sequence
taaagcaattaaaccgagtgaaaag

SEQ ID NO: 156376 - DNA, 25 bp, Probe sequence
taaaggttttgagtcatcaatttaa

SEQ ID NO: 156377 - DNA, 25 bp, Probe sequence
tattaaagcaattaaaccgagtgaa

SEQ ID NO: 156378 - DNA, 25 bp, Probe sequence
tttaaacaggtctcaaaaactcagt

SEQ ID NO: 156379 - DNA, 25 bp, Probe sequence
tttgagtcatcaatttaaacaggtc

SEQ ID NO: 156380 - DNA, 25 bp, Probe sequence
ttttgagtcatcaatttaaacaggt

SEQ ID NO: 156381 - DNA, 25 bp, Probe sequence
ttaaacaggtctcaaaaactcagtt

SEQ ID NO: 156382 - DNA, 25 bp, Probe sequence
ttgagtcatcaatttaaacaggtct

SEQ ID NO: 156383 - DNA, 25 bp, Probe sequence
atatcaccgatgacgatttcgaatt

SEQ ID NO: 156384 - DNA, 25 bp, Probe sequence
ataccgggaccaatttatgcaggct

SEQ ID NO: 156385 - DNA, 25 bp, Probe sequence
acataccactcatcgaagtactagg

SEQ ID NO: 156386 - DNA, 25 bp, Probe sequence
aggttttgagattaccgctcaacct

SEQ ID NO: 156387 - DNA, 25 bp, Probe sequence
acaacgttacgttctatcatagagc

SEQ ID NO: 156388 - DNA, 25 bp, Probe sequence
aaattaacatttatgcacgcctata

SEQ ID NO: 156389 - DNA, 25 bp, Probe sequence
aaagctgtcttgttaaattatccga

SEQ ID NO: 156390 - DNA, 25 bp, Probe sequence
aacatgtatccttcgctgaatttga

SEQ ID NO: 156391 - DNA, 25 bp, Probe sequence
aagagcaccaagtattcgccaattt

SEQ ID NO: 156392 - DNA, 25 bp, Probe sequence
gactaatccaactggcgtagtttta

SEQ ID NO: 156393 - DNA, 25 bp, Probe sequence
gccaatgttccagctcaaatagcat

SEQ ID NO: 156394 - DNA, 25 bp, Probe sequence
gcatgtataacagcacttaacgaag

SEQ ID NO: 156395 - DNA, 25 bp, Probe sequence
gaattttgtgtcgatttacttgaat

SEQ ID NO: 156396 - DNA, 25 bp, Probe sequence
gaatcaacacatttagcaatcgttc

SEQ ID NO: 156397 - DNA, 25 bp, Probe sequence
gaagcaatagacacaacgttacgtt

SEQ ID NO: 156398 - DNA, 25 bp, Probe sequence
gaagacattcgtgatcaattaatat

SEQ ID NO: 156399 - DNA, 25 bp, Probe sequence
gaaagtcatatttctccaaagacaa

SEQ ID NO: 156400 - DNA, 25 bp, Probe sequence
gagatgaaattataataccgggacc

SEQ ID NO: 156401 - DNA, 25 bp, Probe sequence
gttctatcatagagcctggagatga

SEQ ID NO: 156402 - DNA, 25 bp, Probe sequence
gttccaggctcatcctttacagaat

SEQ ID NO: 156403 - DNA, 25 bp, Probe sequence
gttatcatttttcctatgatcctga

SEQ ID NO: 156404 - DNA, 25 bp, Probe sequence
gtttaagtaaatcacactcagcaac

SEQ ID NO: 156405 - DNA, 25 bp, Probe sequence
gtattcgccaattttcaaatcgtat

SEQ ID NO: 156406 - DNA, 25 bp, Probe sequence
gtcaatacttcaaaaatcgttatca

SEQ ID NO: 156407 - DNA, 25 bp, Probe sequence
gtggtaaacatgtatccttcgctga

SEQ ID NO: 156408 - DNA, 25 bp, Probe sequence
ggatttcctatgcttatgaaatgga

SEQ ID NO: 156409 - DNA, 25 bp, Probe sequence
ggctcatcctttacagaattcggta

SEQ ID NO: 156410 - DNA, 25 bp, Probe sequence
tgaaggcgcgttttatattttccca

SEQ ID NO: 156411 - DNA, 25 bp, Probe sequence
taactattggccaaccagacttccc

SEQ ID NO: 156412 - DNA, 25 bp, Probe sequence
tatgcaggctacataccactcatcg

SEQ ID NO: 156413 - DNA, 25 bp, Probe sequence
tttagcaatcgttccaggctcatcc

SEQ ID NO: 156414 - DNA, 25 bp, Probe sequence
tttatgcacgcctataattgtattt

SEQ ID NO: 156415 - DNA, 25 bp, Probe sequence
ttatccgactaatccaactggcgta

SEQ ID NO: 156416 - DNA, 25 bp, Probe sequence
ttaccgctcaacctgaaggcgcgtt

SEQ ID NO: 156417 - DNA, 25 bp, Probe sequence
gttacaaccctacactagtggcgat

SEQ ID NO: 156418 - DNA, 25 bp, Probe sequence
atttacaaagaccatcacagtttaa

SEQ ID NO: 156419 - DNA, 25 bp, Probe sequence
atatctattggagcaggtttttcag

SEQ ID NO: 156420 - DNA, 25 bp, Probe sequence
ataagtatatctgtaatcatcgtat

SEQ ID NO: 156421 - DNA, 25 bp, Probe sequence
atgatattttttgcattcttttcaa

SEQ ID NO: 156422 - DNA, 25 bp, Probe sequence
atggtacccattcgataatcctata

SEQ ID NO: 156423 - DNA, 25 bp, Probe sequence
aggacaatcgtatttttcccaatat

SEQ ID NO: 156424 - DNA, 25 bp, Probe sequence
agtcgtacgctatacgtatatttat

SEQ ID NO: 156425 - DNA, 25 bp, Probe sequence
agtatttgcgttatggtttttgatc

SEQ ID NO: 156426 - DNA, 25 bp, Probe sequence
acaacgcaagagcaattttaatatt

SEQ ID NO: 156427 - DNA, 25 bp, Probe sequence
aactaataccagtatctatcattac

SEQ ID NO: 156428 - DNA, 25 bp, Probe sequence
aagttcaccatatacttcacttgaa

SEQ ID NO: 156429 - DNA, 25 bp, Probe sequence
aagtgctatcagtttcaattattat

SEQ ID NO: 156430 - DNA, 25 bp, Probe sequence
aatcatcgtatatgtattatctaca

SEQ ID NO: 156431 - DNA, 25 bp, Probe sequence
gctatttttctttcatgtcatttta

SEQ ID NO: 156432 - DNA, 25 bp, Probe sequence
gcaatgactgcgtttctaaatttaa

SEQ ID NO: 156433 - DNA, 25 bp, Probe sequence
gaattatattaatcgcaatgactgc

SEQ ID NO: 156434 - DNA, 25 bp, Probe sequence
gagagattatttttttgacaacgca

SEQ ID NO: 156435 - DNA, 25 bp, Probe sequence
gatccttttaacccagtatttgcgt

SEQ ID NO: 156436 - DNA, 25 bp, Probe sequence
gatcacgctatttttctttcatgtc

SEQ ID NO: 156437 - DNA, 25 bp, Probe sequence
gattcatcctatcaatgcagattgg

SEQ ID NO: 156438 - DNA, 25 bp, Probe sequence
gttagaggatttgaatggtacccat

SEQ ID NO: 156439 - DNA, 25 bp, Probe sequence
gttatggtttttgatcacgctattt

SEQ ID NO: 156440 - DNA, 25 bp, Probe sequence
gttatttatagtttccatatgccaa

SEQ ID NO: 156441 - DNA, 25 bp, Probe sequence
gtttatatctggttatttcgcgaaa

SEQ ID NO: 156442 - DNA, 25 bp, Probe sequence
gtttccatatgccaacatttttgtt

SEQ ID NO: 156443 - DNA, 25 bp, Probe sequence
gtgacgaattacaacttgatccttt

SEQ ID NO: 156444 - DNA, 25 bp, Probe sequence
ggtttttcagataacatcgatagct

SEQ ID NO: 156445 - DNA, 25 bp, Probe sequence
ggacatatgttacaaccctacacta

SEQ ID NO: 156446 - DNA, 25 bp, Probe sequence
ttcaccaaaaaacatacggctattt

SEQ ID NO: 156447 - DNA, 25 bp, Probe sequence
tattcagtccttttaaacgacttat

SEQ ID NO: 156448 - DNA, 25 bp, Probe sequence
tttacgtgattcatcctatcaatgc

SEQ ID NO: 156449 - DNA, 25 bp, Probe sequence
ttatcagcattatacctagttattt

SEQ ID NO: 156450 - DNA, 25 bp, Probe sequence
ttacaacttgatccttttaacccag

SEQ ID NO: 156451 - DNA, 25 bp, Probe sequence
atgagatggaatcctgcacatccag

SEQ ID NO: 156452 - DNA, 25 bp, Probe sequence
agtcggtaaccctagattcatcaat

SEQ ID NO: 156453 - DNA, 25 bp, Probe sequence
agattatacatcttacttccctaaa

SEQ ID NO: 156454 - DNA, 25 bp, Probe sequence
agcagtcactgcacatcaagttcaa

SEQ ID NO: 156455 - DNA, 25 bp, Probe sequence
acaccgtcgaaaccatcaactggta

SEQ ID NO: 156456 - DNA, 25 bp, Probe sequence
acagcaccaacggattacttatctt

SEQ ID NO: 156457 - DNA, 25 bp, Probe sequence
acaacactggtattcgtgcttctgt

SEQ ID NO: 156458 - DNA, 25 bp, Probe sequence
acaatggcttattcactacagttta

SEQ ID NO: 156459 - DNA, 25 bp, Probe sequence
aaagtggcgccatggggtacgcaat

SEQ ID NO: 156460 - DNA, 25 bp, Probe sequence
aaaccaactacatcagctgccaaag

SEQ ID NO: 156461 - DNA, 25 bp, Probe sequence
aacggcttatcaatggttccttggg

SEQ ID NO: 156462 - DNA, 25 bp, Probe sequence
aacgcaaaacatttctggcactcaa

SEQ ID NO: 156463 - DNA, 25 bp, Probe sequence
aacgcttgtaggttcagcagtcact

SEQ ID NO: 156464 - DNA, 25 bp, Probe sequence
aattcttacgcttagaccaaccaca

SEQ ID NO: 156465 - DNA, 25 bp, Probe sequence
caagcagctgagacgacacaagatc

SEQ ID NO: 156466 - DNA, 25 bp, Probe sequence
caaatacttcgacatcccacaatat

SEQ ID NO: 156467 - DNA, 25 bp, Probe sequence
caggtaacggtacttctcaattagc

SEQ ID NO: 156468 - DNA, 25 bp, Probe sequence
ctaagccatcaacacctacaacaaa

SEQ ID NO: 156469 - DNA, 25 bp, Probe sequence
gcacatccaggaacacaccaatatg

SEQ ID NO: 156470 - DNA, 25 bp, Probe sequence
gaagcgtttagctcaagatccagca

SEQ ID NO: 156471 - DNA, 25 bp, Probe sequence
gactatgcagctacacaattacaat

SEQ ID NO: 156472 - DNA, 25 bp, Probe sequence
gaccatgccgatccacatggatatt

SEQ ID NO: 156473 - DNA, 25 bp, Probe sequence
gatacagctaatgatcgttcgacga

SEQ ID NO: 156474 - DNA, 25 bp, Probe sequence
gtggtgctaaattcatcggcaactc

SEQ ID NO: 156475 - DNA, 25 bp, Probe sequence
ggtgctgcatttaacaaagctgctc

SEQ ID NO: 156476 - DNA, 25 bp, Probe sequence
ggtacagtatggactcactacgctg

SEQ ID NO: 156477 - DNA, 25 bp, Probe sequence
ggcactcaagtatatcaagaccctg

SEQ ID NO: 156478 - DNA, 25 bp, Probe sequence
tgatactgctaaacctacgcctaca

SEQ ID NO: 156479 - DNA, 25 bp, Probe sequence
tacttatcttggggtgtcggtgcag

SEQ ID NO: 156480 - DNA, 25 bp, Probe sequence
tagctgtacctgctgcacctaaaaa

SEQ ID NO: 156481 - DNA, 25 bp, Probe sequence
tatgcttcatttgcacgttcaatga

SEQ ID NO: 156482 - DNA, 25 bp, Probe sequence
tatcaagaccctgctattgtccaac

SEQ ID NO: 156483 - DNA, 25 bp, Probe sequence
ttatcttatctcacatgccctatta

SEQ ID NO: 156484 - DNA, 25 bp, Probe sequence
ttacttccctaaatacgcataccgt

SEQ ID NO: 156485 - DNA, 25 bp, Probe sequence
atatgcagaccgtacgttctatgta

SEQ ID NO: 156486 - DNA, 25 bp, Probe sequence
agtcggtaaccctagattcatcaat

SEQ ID NO: 156487 - DNA, 25 bp, Probe sequence
agcagtcactgcacatcaagttcaa

SEQ ID NO: 156488 - DNA, 25 bp, Probe sequence
acaacaccgtcgaaaccatcaactg

SEQ ID NO: 156489 - DNA, 25 bp, Probe sequence
acaacactggtattcgtgcttctgt

SEQ ID NO: 156490 - DNA, 25 bp, Probe sequence
aaaccaactacatcagctgccaaag

SEQ ID NO: 156491 - DNA, 25 bp, Probe sequence
aacggcttatcaatggttccttggg

SEQ ID NO: 156492 - DNA, 25 bp, Probe sequence
aagtggcgccatggggtacgcaatt

SEQ ID NO: 156493 - DNA, 25 bp, Probe sequence
aacgcaaaacatttctggcactcaa

SEQ ID NO: 156494 - DNA, 25 bp, Probe sequence
aacgcttgtaggttcagcagtcact

SEQ ID NO: 156495 - DNA, 25 bp, Probe sequence
aagccatcaacacctacaacaaata

SEQ ID NO: 156496 - DNA, 25 bp, Probe sequence
aattcttacgcttagaccaaccaca

SEQ ID NO: 156497 - DNA, 25 bp, Probe sequence
caaatacttcgacatcccacaatat

SEQ ID NO: 156498 - DNA, 25 bp, Probe sequence
taacggcgtaggtcgtcctgaaggt

SEQ ID NO: 156499 - DNA, 25 bp, Probe sequence
ctactacaccatcaaaaccaacaac

SEQ ID NO: 156500 - DNA, 25 bp, Probe sequence
cctacaccaatacctaagccatcaa

SEQ ID NO: 156501 - DNA, 25 bp, Probe sequence
gctaaacctgcagctcttgaaacgc

SEQ ID NO: 156502 - DNA, 25 bp, Probe sequence
gaagctggtgcagtttctggtacag

SEQ ID NO: 156503 - DNA, 25 bp, Probe sequence
gtaactacttttagcgcttcagcac

SEQ ID NO: 156504 - DNA, 25 bp, Probe sequence
gtcaacaagcactacagcacctaaa

SEQ ID NO: 156505 - DNA, 25 bp, Probe sequence
gtgacactcgtgctaatcaatcagc

SEQ ID NO: 156506 - DNA, 25 bp, Probe sequence
ggtacagtatggactcactacgctg

SEQ ID NO: 156507 - DNA, 25 bp, Probe sequence
ggtaacggtacttctcaattagcga

SEQ ID NO: 156508 - DNA, 25 bp, Probe sequence
ggattacttatcttggggtgtcggt

SEQ ID NO: 156509 - DNA, 25 bp, Probe sequence
tgatactgctaaacctacgcctaca

SEQ ID NO: 156510 - DNA, 25 bp, Probe sequence
tacaagccataacatcccattaggt

SEQ ID NO: 156511 - DNA, 25 bp, Probe sequence
tacacacacacgactatgcttcatt

SEQ ID NO: 156512 - DNA, 25 bp, Probe sequence
tagctgtacctgctgcacctaaaaa

SEQ ID NO: 156513 - DNA, 25 bp, Probe sequence
tagcgtgtctggctctggaaaccaa

SEQ ID NO: 156514 - DNA, 25 bp, Probe sequence
ttaggtggtacggaccatgccgatc

SEQ ID NO: 156515 - DNA, 25 bp, Probe sequence
tatcaagaccctgctattgtccaac

SEQ ID NO: 156516 - DNA, 25 bp, Probe sequence
tattcagtaccttggggcacttata

SEQ ID NO: 156517 - DNA, 25 bp, Probe sequence
ttatcttatctcacatgccctatta

SEQ ID NO: 156518 - DNA, 25 bp, Probe sequence
ttacttccctaaatacgcataccgt

SEQ ID NO: 156519 - DNA, 25 bp, Probe sequence
atatgcagaccgtacgttctatgta

SEQ ID NO: 156520 - DNA, 25 bp, Probe sequence
agtggcgccatggggtacgcaatct

SEQ ID NO: 156521 - DNA, 25 bp, Probe sequence
agtcggtaaccctagattcatcaat

SEQ ID NO: 156522 - DNA, 25 bp, Probe sequence
agttgctggtagtgtgtctggctct

SEQ ID NO: 156523 - DNA, 25 bp, Probe sequence
agcacctaaagctgcaactacatca

SEQ ID NO: 156524 - DNA, 25 bp, Probe sequence
agcagtcactgcacatcaagttcaa

SEQ ID NO: 156525 - DNA, 25 bp, Probe sequence
acaacactggtattcgtgcttctgt

SEQ ID NO: 156526 - DNA, 25 bp, Probe sequence
aaaccaactacatcagctgccaaag

SEQ ID NO: 156527 - DNA, 25 bp, Probe sequence
aacggcttatcaatggttccttggg

SEQ ID NO: 156528 - DNA, 25 bp, Probe sequence
aactgcaccaactgctgttaaacca

SEQ ID NO: 156529 - DNA, 25 bp, Probe sequence
aacgcaaaacatttctggcactcaa

SEQ ID NO: 156530 - DNA, 25 bp, Probe sequence
aacgcttgtaggttcagcagtcact

SEQ ID NO: 156531 - DNA, 25 bp, Probe sequence
aattcttacgcttagaccaaccaca

SEQ ID NO: 156532 - DNA, 25 bp, Probe sequence
caaatacttcgacatcccacaatat

SEQ ID NO: 156533 - DNA, 25 bp, Probe sequence
taacggcgtaggtcgtcctgaaggt

SEQ ID NO: 156534 - DNA, 25 bp, Probe sequence
ctgcaactacatcagcacctaaagc

SEQ ID NO: 156535 - DNA, 25 bp, Probe sequence
cctactacaccgtcgaaaccatcaa

SEQ ID NO: 156536 - DNA, 25 bp, Probe sequence
gctaaacctgcagctcttgaaacgc

SEQ ID NO: 156537 - DNA, 25 bp, Probe sequence
gaagctggtgcagtttctggtacag

SEQ ID NO: 156538 - DNA, 25 bp, Probe sequence
gtaactacttttagcgcttcagcac

SEQ ID NO: 156539 - DNA, 25 bp, Probe sequence
gtcaacaagcactacagcacctaaa

SEQ ID NO: 156540 - DNA, 25 bp, Probe sequence
gtgacactcgtgctaatcaatcagc

SEQ ID NO: 156541 - DNA, 25 bp, Probe sequence
ggtacagtatggactcactacgctg

SEQ ID NO: 156542 - DNA, 25 bp, Probe sequence
ggtaacggtacttctcaattagcga

SEQ ID NO: 156543 - DNA, 25 bp, Probe sequence
ggattacttatcttggggtgtcggt

SEQ ID NO: 156544 - DNA, 25 bp, Probe sequence
tgatactgctaaacctacgcctaca

SEQ ID NO: 156545 - DNA, 25 bp, Probe sequence
tacaagccataacatcccattaggt

SEQ ID NO: 156546 - DNA, 25 bp, Probe sequence
tacacacacacgactatgcttcatt

SEQ ID NO: 156547 - DNA, 25 bp, Probe sequence
tagctgtacctgctgcacctaaaaa

SEQ ID NO: 156548 - DNA, 25 bp, Probe sequence
taggtggtactgaccatgccgatcc

SEQ ID NO: 156549 - DNA, 25 bp, Probe sequence
tatcaagaccctgctattgtccaac

SEQ ID NO: 156550 - DNA, 25 bp, Probe sequence
tattcagtaccttggggcacttata

SEQ ID NO: 156551 - DNA, 25 bp, Probe sequence
ttatcttatctcacatgccctatta

SEQ ID NO: 156552 - DNA, 25 bp, Probe sequence
ttacttccctaaatacgcataccgt

SEQ ID NO: 156553 - DNA, 25 bp, Probe sequence
atttcttgaggaaggcatcgagcat

SEQ ID NO: 156554 - DNA, 25 bp, Probe sequence
atatttcttgaggaaggcatcgagc

SEQ ID NO: 156555 - DNA, 25 bp, Probe sequence
atctattcacctcattggatatgat

SEQ ID NO: 156556 - DNA, 25 bp, Probe sequence
atctgaatctattcacctcattgga

SEQ ID NO: 156557 - DNA, 25 bp, Probe sequence
atgaatctgaatctattcacctcat

SEQ ID NO: 156558 - DNA, 25 bp, Probe sequence
atgataatggacagccagttgccac

SEQ ID NO: 156559 - DNA, 25 bp, Probe sequence
aggaaggcatcgagcatattgaaat

SEQ ID NO: 156560 - DNA, 25 bp, Probe sequence
aaggcatcgagcatattgaaatgac

SEQ ID NO: 156561 - DNA, 25 bp, Probe sequence
aatctattcacctcattggatatga

SEQ ID NO: 156562 - DNA, 25 bp, Probe sequence
aatctgaatctattcacctcattgg

SEQ ID NO: 156563 - DNA, 25 bp, Probe sequence
cttgaggaaggcatcgagcatattg

SEQ ID NO: 156564 - DNA, 25 bp, Probe sequence
ctgaatctattcacctcattggata

SEQ ID NO: 156565 - DNA, 25 bp, Probe sequence
gcttatgcaagctgtagaatcatta

SEQ ID NO: 156566 - DNA, 25 bp, Probe sequence
gcatcgagcatattgaaatgacaaa

SEQ ID NO: 156567 - DNA, 25 bp, Probe sequence
gaatctattcacctcattggatatg

SEQ ID NO: 156568 - DNA, 25 bp, Probe sequence
gaatctgaatctattcacctcattg

SEQ ID NO: 156569 - DNA, 25 bp, Probe sequence
gaaacaactgtcaaaatagaacgag

SEQ ID NO: 156570 - DNA, 25 bp, Probe sequence
gaggaaggcatcgagcatattgaaa

SEQ ID NO: 156571 - DNA, 25 bp, Probe sequence
ggaaggcatcgagcatattgaaatg

SEQ ID NO: 156572 - DNA, 25 bp, Probe sequence
ggcatcgagcatattgaaatgacaa

SEQ ID NO: 156573 - DNA, 25 bp, Probe sequence
tgtttgtagaagaacaaggcgtccc

SEQ ID NO: 156574 - DNA, 25 bp, Probe sequence
tgagaggtaatatatttcttgagga

SEQ ID NO: 156575 - DNA, 25 bp, Probe sequence
tgaatctgaatctattcacctcatt

SEQ ID NO: 156576 - DNA, 25 bp, Probe sequence
tgaatctattcacctcattggatat

SEQ ID NO: 156577 - DNA, 25 bp, Probe sequence
tgcttatgcaagctgtagaatcatt

SEQ ID NO: 156578 - DNA, 25 bp, Probe sequence
tctgaatctattcacctcattggat

SEQ ID NO: 156579 - DNA, 25 bp, Probe sequence
tctattcacctcattggatatgata

SEQ ID NO: 156580 - DNA, 25 bp, Probe sequence
taaagatgaaggtttttacgtagct

SEQ ID NO: 156581 - DNA, 25 bp, Probe sequence
tatgaatctgaatctattcacctca

SEQ ID NO: 156582 - DNA, 25 bp, Probe sequence
tatgcaagctgtagaatcattagct

SEQ ID NO: 156583 - DNA, 25 bp, Probe sequence
tattcacctcattggatatgataat

SEQ ID NO: 156584 - DNA, 25 bp, Probe sequence
ttcttgaggaaggcatcgagcatat

SEQ ID NO: 156585 - DNA, 25 bp, Probe sequence
ttcacctcattggatatgataatgg

SEQ ID NO: 156586 - DNA, 25 bp, Probe sequence
ttgaggaaggcatcgagcatattga

SEQ ID NO: 156587 - DNA, 25 bp, Probe sequence
tttagccctacctgaaattttcaat

SEQ ID NO: 156588 - DNA, 25 bp, Probe sequence
attgctcaaatgcgaatcttttggc

SEQ ID NO: 156589 - DNA, 25 bp, Probe sequence
attcatagccaagatatggctcatt

SEQ ID NO: 156590 - DNA, 25 bp, Probe sequence
ataattggaatattgctcaaatgcg

SEQ ID NO: 156591 - DNA, 25 bp, Probe sequence
atgttatattttagccctacctgaa

SEQ ID NO: 156592 - DNA, 25 bp, Probe sequence
atggtgcatgttatattttagccct

SEQ ID NO: 156593 - DNA, 25 bp, Probe sequence
agtgaatttttttacgtcaatcatg

SEQ ID NO: 156594 - DNA, 25 bp, Probe sequence
agaaaactatgaagcactcctaatt

SEQ ID NO: 156595 - DNA, 25 bp, Probe sequence
gaaaaacatacgaaaagattgcaaa

SEQ ID NO: 156596 - DNA, 25 bp, Probe sequence
aactatgaagcactcctaatttatt

SEQ ID NO: 156597 - DNA, 25 bp, Probe sequence
aatcctattgtagatggtgcatgtt

SEQ ID NO: 156598 - DNA, 25 bp, Probe sequence
aatcttttggcaatatacagcaatt

SEQ ID NO: 156599 - DNA, 25 bp, Probe sequence
aatattgctcaaatgcgaatctttt

SEQ ID NO: 156600 - DNA, 25 bp, Probe sequence
gccctacctgaaattttcaatagtg

SEQ ID NO: 156601 - DNA, 25 bp, Probe sequence
gcgaatcttttggcaatatacagca

SEQ ID NO: 156602 - DNA, 25 bp, Probe sequence
gctcaaatgcgaatcttttggcaat

SEQ ID NO: 156603 - DNA, 25 bp, Probe sequence
gcatgttatattttagccctacctg

SEQ ID NO: 156604 - DNA, 25 bp, Probe sequence
gaatttttttacgtcaatcatgagc

SEQ ID NO: 156605 - DNA, 25 bp, Probe sequence
gaatcagagttaccattttcatggg

SEQ ID NO: 156606 - DNA, 25 bp, Probe sequence
gaagcactcctaatttattacaaaa

SEQ ID NO: 156607 - DNA, 25 bp, Probe sequence
gagttaccattttcatgggtatatg

SEQ ID NO: 156608 - DNA, 25 bp, Probe sequence
gatgttttcgaatcagagttaccat

SEQ ID NO: 156609 - DNA, 25 bp, Probe sequence
gatatggctcattttagaagtgaat

SEQ ID NO: 156610 - DNA, 25 bp, Probe sequence
gttatattttagccctacctgaaat

SEQ ID NO: 156611 - DNA, 25 bp, Probe sequence
gtcaatcatgagcatcgagaaaact

SEQ ID NO: 156612 - DNA, 25 bp, Probe sequence
gtgcatgttatattttagccctacc

SEQ ID NO: 156613 - DNA, 25 bp, Probe sequence
tggctcattttagaagtgaattttt

SEQ ID NO: 156614 - DNA, 25 bp, Probe sequence
tcaatagtgttgatgttttcgaatc

SEQ ID NO: 156615 - DNA, 25 bp, Probe sequence
tatgaagcactcctaatttattaca

SEQ ID NO: 156616 - DNA, 25 bp, Probe sequence
tatattttagccctacctgaaattt

SEQ ID NO: 156617 - DNA, 25 bp, Probe sequence
tttttacgtcaatcatgagcatcga

SEQ ID NO: 156618 - DNA, 25 bp, Probe sequence
ttacgtcaatcatgagcatcgagaa

SEQ ID NO: 156619 - DNA, 25 bp, Probe sequence
ttcgaatcagagttaccattttcat

SEQ ID NO: 156620 - DNA, 25 bp, Probe sequence
ttggcaatatacagcaattattaga

SEQ ID NO: 156621 - DNA, 25 bp, Probe sequence
atcaaggtggcacacaacaagcgcc

SEQ ID NO: 156622 - DNA, 25 bp, Probe sequence
agtattccacgtgatactatcagct

SEQ ID NO: 156623 - DNA, 25 bp, Probe sequence
agaagctaccatgaatgtacctgtt

SEQ ID NO: 156624 - DNA, 25 bp, Probe sequence
acctgttgattattatgtgagagtc

SEQ ID NO: 156625 - DNA, 25 bp, Probe sequence
acatcaaattagaatgcttagtatt

SEQ ID NO: 156626 - DNA, 25 bp, Probe sequence
acacaacaagcgccacaagcttcaa

SEQ ID NO: 156627 - DNA, 25 bp, Probe sequence
aaatgaacctaacacagatgatact

SEQ ID NO: 156628 - DNA, 25 bp, Probe sequence
aaacgtcccaagatgcattcgaatc

SEQ ID NO: 156629 - DNA, 25 bp, Probe sequence
aaaaggacaggatgctgaacactct

SEQ ID NO: 156630 - DNA, 25 bp, Probe sequence
aatcgtcaatccaacttaagagata

SEQ ID NO: 156631 - DNA, 25 bp, Probe sequence
caattgccgcaatggattcggtaga

SEQ ID NO: 156632 - DNA, 25 bp, Probe sequence
ctcattgttgttccaatagtcttcg

SEQ ID NO: 156633 - DNA, 25 bp, Probe sequence
cgcaatggattcggtagaagctacc

SEQ ID NO: 156634 - DNA, 25 bp, Probe sequence
gctaccatgaatgtacctgttgatt

SEQ ID NO: 156635 - DNA, 25 bp, Probe sequence
gcattcgaatcttctcaagacagca

SEQ ID NO: 156636 - DNA, 25 bp, Probe sequence
gcacacaacaagcgccacaagcttc

SEQ ID NO: 156637 - DNA, 25 bp, Probe sequence
gaatcttctcaagacagcaaaaatg

SEQ ID NO: 156638 - DNA, 25 bp, Probe sequence
gaatgtacctgttgattattatgtg

SEQ ID NO: 156639 - DNA, 25 bp, Probe sequence
gaaagcatttgtcgaggctgtaaat

SEQ ID NO: 156640 - DNA, 25 bp, Probe sequence
gaggctgtaaatgagcttggtggca

SEQ ID NO: 156641 - DNA, 25 bp, Probe sequence
gagtcaatatgaaagcatttgtcga

SEQ ID NO: 156642 - DNA, 25 bp, Probe sequence
gataataaagtcaatcccgaagaac

SEQ ID NO: 156643 - DNA, 25 bp, Probe sequence
gatacgacagataaagataagacat

SEQ ID NO: 156644 - DNA, 25 bp, Probe sequence
gtcccaagatgcattcgaatcttct

SEQ ID NO: 156645 - DNA, 25 bp, Probe sequence
gtgccatacgacttaaatgaaccta

SEQ ID NO: 156646 - DNA, 25 bp, Probe sequence
gtgattccagcaatcaacaacaacc

SEQ ID NO: 156647 - DNA, 25 bp, Probe sequence
ggtccaattgccgcaatggattcgg

SEQ ID NO: 156648 - DNA, 25 bp, Probe sequence
ggttctcattgttgttccaatagtc

SEQ ID NO: 156649 - DNA, 25 bp, Probe sequence
tgctaatcgtcaatccaacttaaga

SEQ ID NO: 156650 - DNA, 25 bp, Probe sequence
tcaactaataacagtgattccagca

SEQ ID NO: 156651 - DNA, 25 bp, Probe sequence
taaaacgtcccaagatgcattcgaa

SEQ ID NO: 156652 - DNA, 25 bp, Probe sequence
tacttttaatcaatcaaaacatcaa

SEQ ID NO: 156653 - DNA, 25 bp, Probe sequence
tatactatgatgtgccatacgactt

SEQ ID NO: 156654 - DNA, 25 bp, Probe sequence
ttccacgtgatactatcagctacat

SEQ ID NO: 156655 - DNA, 25 bp, Probe sequence
atgcatttgaatcttctcaagatag

SEQ ID NO: 156656 - DNA, 25 bp, Probe sequence
agaacaaaacgataccactgataaa

SEQ ID NO: 156657 - DNA, 25 bp, Probe sequence
aaatgagccaaacacagatgatact

SEQ ID NO: 156658 - DNA, 25 bp, Probe sequence
aaacgtctcaagatgcatttgaatc

SEQ ID NO: 156659 - DNA, 25 bp, Probe sequence
aaaaggccaagatgctgaacactct

SEQ ID NO: 156660 - DNA, 25 bp, Probe sequence
aatcttcgaataatactgatgacag

SEQ ID NO: 156661 - DNA, 25 bp, Probe sequence
aatcattatggttctctcatacctt

SEQ ID NO: 156662 - DNA, 25 bp, Probe sequence
aatcaaggtggcactcaacaaacgc

SEQ ID NO: 156663 - DNA, 25 bp, Probe sequence
cactcaacaaacgccacaagcttca

SEQ ID NO: 156664 - DNA, 25 bp, Probe sequence
catacctttaacacctttagatagt

SEQ ID NO: 156665 - DNA, 25 bp, Probe sequence
cttattgttgttccaattgtcttcg

SEQ ID NO: 156666 - DNA, 25 bp, Probe sequence
cctgttgattactatgtacgcgtta

SEQ ID NO: 156667 - DNA, 25 bp, Probe sequence
gctaatcgtcaatcaaatttacgag

SEQ ID NO: 156668 - DNA, 25 bp, Probe sequence
gcaatggactctgttgaagcaacga

SEQ ID NO: 156669 - DNA, 25 bp, Probe sequence
gaaggcctttgtagaagctgtaaat

SEQ ID NO: 156670 - DNA, 25 bp, Probe sequence
gaagctgtaaatgaacttggtggca

SEQ ID NO: 156671 - DNA, 25 bp, Probe sequence
gacaataaagtcaatcctgaagaac

SEQ ID NO: 156672 - DNA, 25 bp, Probe sequence
gtacgcgttaatatgaaggcctttg

SEQ ID NO: 156673 - DNA, 25 bp, Probe sequence
gtaccatatgatttaaatgagccaa

SEQ ID NO: 156674 - DNA, 25 bp, Probe sequence
ggtccaattgcagcaatggactctg

SEQ ID NO: 156675 - DNA, 25 bp, Probe sequence
ggtatcgatgataatgacggaagaa

SEQ ID NO: 156676 - DNA, 25 bp, Probe sequence
ggttcttattgttgttccaattgtc

SEQ ID NO: 156677 - DNA, 25 bp, Probe sequence
tgttcctgttgattactatgtacgc

SEQ ID NO: 156678 - DNA, 25 bp, Probe sequence
tgaagcaacgatgaatgttcctgtt

SEQ ID NO: 156679 - DNA, 25 bp, Probe sequence
tctctcatacctttaacacctttag

SEQ ID NO: 156680 - DNA, 25 bp, Probe sequence
taaacaccaaattcgaatgcttagt

SEQ ID NO: 156681 - DNA, 25 bp, Probe sequence
tacttttaatcaatctaaacaccaa

SEQ ID NO: 156682 - DNA, 25 bp, Probe sequence
tagcgtcaataatcaacaacaacct

SEQ ID NO: 156683 - DNA, 25 bp, Probe sequence
tagtaataacaacaatagcgtcaat

SEQ ID NO: 156684 - DNA, 25 bp, Probe sequence
tagtattcctcgtgatacaatcagc

SEQ ID NO: 156685 - DNA, 25 bp, Probe sequence
tatggttctctcatacctttaacac

SEQ ID NO: 156686 - DNA, 25 bp, Probe sequence
tatactatgatgtaccatatgattt

SEQ ID NO: 156687 - DNA, 25 bp, Probe sequence
ttcctcgtgatacaatcagctacat

SEQ ID NO: 156688 - DNA, 25 bp, Probe sequence
ttgcagcaatggactctgttgaagc

SEQ ID NO: 156689 - DNA, 25 bp, Probe sequence
attgggttatgcaaggcggtcactc

SEQ ID NO: 156690 - DNA, 25 bp, Probe sequence
attccacgcgaagttgacaattatc

SEQ ID NO: 156691 - DNA, 25 bp, Probe sequence
attaacattccacgcgaagttgaca

SEQ ID NO: 156692 - DNA, 25 bp, Probe sequence
atacacgtcattaacattccacgcg

SEQ ID NO: 156693 - DNA, 25 bp, Probe sequence
atctatcgtattaacgcttttagca

SEQ ID NO: 156694 - DNA, 25 bp, Probe sequence
atcgcatctatcgtattaacgcttt

SEQ ID NO: 156695 - DNA, 25 bp, Probe sequence
actgtaggatttatcgcatctatcg

SEQ ID NO: 156696 - DNA, 25 bp, Probe sequence
acgtcattaacattccacgcgaagt

SEQ ID NO: 156697 - DNA, 25 bp, Probe sequence
actttgtttcgttgtcggaacatat

SEQ ID NO: 156698 - DNA, 25 bp, Probe sequence
actatacacgtcattaacattccac

SEQ ID NO: 156699 - DNA, 25 bp, Probe sequence
acactttgtttcgttgtcggaacat

SEQ ID NO: 156700 - DNA, 25 bp, Probe sequence
acacgtcattaacattccacgcgaa

SEQ ID NO: 156701 - DNA, 25 bp, Probe sequence
aacactatacacgtcattaacattc

SEQ ID NO: 156702 - DNA, 25 bp, Probe sequence
aacattccacgcgaagttgacaatt

SEQ ID NO: 156703 - DNA, 25 bp, Probe sequence
aacattcaaagttatctttgctctt

SEQ ID NO: 156704 - DNA, 25 bp, Probe sequence
aagatggacgtttacaaacattcaa

SEQ ID NO: 156705 - DNA, 25 bp, Probe sequence
aatgttcatgcatttaactgaaggt

SEQ ID NO: 156706 - DNA, 25 bp, Probe sequence
catactgtaggatttatcgcatcta

SEQ ID NO: 156707 - DNA, 25 bp, Probe sequence
cgtaacactatacacgtcattaaca

SEQ ID NO: 156708 - DNA, 25 bp, Probe sequence
cgcttttagcagtttacgtaacact

SEQ ID NO: 156709 - DNA, 25 bp, Probe sequence
gcgaagttgacaattatctttggct

SEQ ID NO: 156710 - DNA, 25 bp, Probe sequence
gcatctatcgtattaacgcttttag

SEQ ID NO: 156711 - DNA, 25 bp, Probe sequence
gaaacatactgtaggatttatcgca

SEQ ID NO: 156712 - DNA, 25 bp, Probe sequence
gtttcgttgtcggaacatattgggt

SEQ ID NO: 156713 - DNA, 25 bp, Probe sequence
gttgacaattatctttggctttgca

SEQ ID NO: 156714 - DNA, 25 bp, Probe sequence
gtaggatttatcgcatctatcgtat

SEQ ID NO: 156715 - DNA, 25 bp, Probe sequence
gtcattaacattccacgcgaagttg

SEQ ID NO: 156716 - DNA, 25 bp, Probe sequence
ggatttatcgcatctatcgtattaa

SEQ ID NO: 156717 - DNA, 25 bp, Probe sequence
ggacttcaattattaatgttcatgc

SEQ ID NO: 156718 - DNA, 25 bp, Probe sequence
tcgttgtcggaacatattgggttat

SEQ ID NO: 156719 - DNA, 25 bp, Probe sequence
tcaaagttatctttgctcttgtaat

SEQ ID NO: 156720 - DNA, 25 bp, Probe sequence
tagcagtttacgtaacactatacac

SEQ ID NO: 156721 - DNA, 25 bp, Probe sequence
ttatcgcatctatcgtattaacgct

SEQ ID NO: 156722 - DNA, 25 bp, Probe sequence
ttgggttatgcaaggcggtcactct

SEQ ID NO: 156723 - DNA, 25 bp, Probe sequence
attattcagttcttacacatgtggt

SEQ ID NO: 156724 - DNA, 25 bp, Probe sequence
atgatcattacgttacttttaggtt

SEQ ID NO: 156725 - DNA, 25 bp, Probe sequence
aggcgaattaaataagcttggcttt

SEQ ID NO: 156726 - DNA, 25 bp, Probe sequence
agttatttgaattgcctcttgtttt

SEQ ID NO: 156727 - DNA, 25 bp, Probe sequence
actggtctagtttctttatcctatt

SEQ ID NO: 156728 - DNA, 25 bp, Probe sequence
aaatttatgaattcgcacactatgc

SEQ ID NO: 156729 - DNA, 25 bp, Probe sequence
aacaattggttcttactggtctagt

SEQ ID NO: 156730 - DNA, 25 bp, Probe sequence
aacactattgattcacgcacacatg

SEQ ID NO: 156731 - DNA, 25 bp, Probe sequence
cagaaggcgttaacccaacaattgg

SEQ ID NO: 156732 - DNA, 25 bp, Probe sequence
ccaacgacgcggattagacaaatat

SEQ ID NO: 156733 - DNA, 25 bp, Probe sequence
gcgacactattaactttgcaacatg

SEQ ID NO: 156734 - DNA, 25 bp, Probe sequence
gctaggtatcgtttgggccatttgt

SEQ ID NO: 156735 - DNA, 25 bp, Probe sequence
gcttggcttttggattttcattaca

SEQ ID NO: 156736 - DNA, 25 bp, Probe sequence
gcacttcttagatgttgtttgggtt

SEQ ID NO: 156737 - DNA, 25 bp, Probe sequence
gcacactatgcatcagaaggcgtta

SEQ ID NO: 156738 - DNA, 25 bp, Probe sequence
gcaacatggtggcgattatgcaggt

SEQ ID NO: 156739 - DNA, 25 bp, Probe sequence
gacgtttgcattattattcagttct

SEQ ID NO: 156740 - DNA, 25 bp, Probe sequence
gatagggatggtgtatagcggatga

SEQ ID NO: 156741 - DNA, 25 bp, Probe sequence
gattcacgcacacatgaaggcgaat

SEQ ID NO: 156742 - DNA, 25 bp, Probe sequence
gtttatactggcacttcttagatgt

SEQ ID NO: 156743 - DNA, 25 bp, Probe sequence
ggtaccctatttgcgacactattaa

SEQ ID NO: 156744 - DNA, 25 bp, Probe sequence
ggttgtcacgtatcgctaggtatcg

SEQ ID NO: 156745 - DNA, 25 bp, Probe sequence
ggttttcatctttactgccgtatat

SEQ ID NO: 156746 - DNA, 25 bp, Probe sequence
ggaacgcatggttgtcacgtatcgc

SEQ ID NO: 156747 - DNA, 25 bp, Probe sequence
tgtttgggttttcatctttactgcc

SEQ ID NO: 156748 - DNA, 25 bp, Probe sequence
tgctatttactacatgcgccaagaa

SEQ ID NO: 156749 - DNA, 25 bp, Probe sequence
tcattacagccgaatttgcgttatt

SEQ ID NO: 156750 - DNA, 25 bp, Probe sequence
tacacatgtggtattgctatttact

SEQ ID NO: 156751 - DNA, 25 bp, Probe sequence
tactgccgtatatatgatagggatg

SEQ ID NO: 156752 - DNA, 25 bp, Probe sequence
taggtttagtctttgttggattcga

SEQ ID NO: 156753 - DNA, 25 bp, Probe sequence
tattaatccaaatccaacgacgcgg

SEQ ID NO: 156754 - DNA, 25 bp, Probe sequence
tttgggccatttgtttattaatcca

SEQ ID NO: 156755 - DNA, 25 bp, Probe sequence
ttgcctcttgttttaataatgacgt

SEQ ID NO: 156756 - DNA, 25 bp, Probe sequence
ttgcgttattcggtaccctatttgc

SEQ ID NO: 156757 - DNA, 25 bp, Probe sequence
aggtgttattgcaggtatcgttgta

SEQ ID NO: 156758 - DNA, 25 bp, Probe sequence
agctatcttagctagtttagccggc

SEQ ID NO: 156759 - DNA, 25 bp, Probe sequence
aaacgtgcggcgcttgtacacgtca

SEQ ID NO: 156760 - DNA, 25 bp, Probe sequence
aaacgcagcaatccctgtgttacta

SEQ ID NO: 156761 - DNA, 25 bp, Probe sequence
aagatgcacaacgcggtatggataa

SEQ ID NO: 156762 - DNA, 25 bp, Probe sequence
aagatcttgtttatcacgcacctgg

SEQ ID NO: 156763 - DNA, 25 bp, Probe sequence
gaagtcattttctcctttttaggtg

SEQ ID NO: 156764 - DNA, 25 bp, Probe sequence
aatcgctgcaaaacgtgcggcgctt

SEQ ID NO: 156765 - DNA, 25 bp, Probe sequence
aataacattggccgcatactattcg

SEQ ID NO: 156766 - DNA, 25 bp, Probe sequence
cacgcacctggtgttgcattacaag

SEQ ID NO: 156767 - DNA, 25 bp, Probe sequence
ctagttcaaagttcaagtgcgacga

SEQ ID NO: 156768 - DNA, 25 bp, Probe sequence
cggtctagaatttatgggtgatgcc

SEQ ID NO: 156769 - DNA, 25 bp, Probe sequence
cgatatgattggtgttcttgaacgt

SEQ ID NO: 156770 - DNA, 25 bp, Probe sequence
ccagcgatgacgattgcagtatcac

SEQ ID NO: 156771 - DNA, 25 bp, Probe sequence
gccgcatactattcggtttcggttc

SEQ ID NO: 156772 - DNA, 25 bp, Probe sequence
gcatcagcaggagacaggctacgag

SEQ ID NO: 156773 - DNA, 25 bp, Probe sequence
gcagtatcacatggtatcttcaaca

SEQ ID NO: 156774 - DNA, 25 bp, Probe sequence
gaacgtatcggttatcattcacgaa

SEQ ID NO: 156775 - DNA, 25 bp, Probe sequence
gaaatgtttctgaagcacttgttgg

SEQ ID NO: 156776 - DNA, 25 bp, Probe sequence
gacgttgagcgtttagcagttatgt

SEQ ID NO: 156777 - DNA, 25 bp, Probe sequence
gatgtcaatcgctctattttaaaag

SEQ ID NO: 156778 - DNA, 25 bp, Probe sequence
gatgactataaacctcagcacttaa

SEQ ID NO: 156779 - DNA, 25 bp, Probe sequence
gttacaaagcttgtcccaggtaaag

SEQ ID NO: 156780 - DNA, 25 bp, Probe sequence
gtcgctcaattaaaacgccaacatg

SEQ ID NO: 156781 - DNA, 25 bp, Probe sequence
gtgcgacgattggtattttacaaga

SEQ ID NO: 156782 - DNA, 25 bp, Probe sequence
gggtgatgccgttaaacctttagca

SEQ ID NO: 156783 - DNA, 25 bp, Probe sequence
ggtcatattaaacgccttaatcgtg

SEQ ID NO: 156784 - DNA, 25 bp, Probe sequence
ggcacttaaaaccagcgatgacgat

SEQ ID NO: 156785 - DNA, 25 bp, Probe sequence
tgtcggcgcagggttaacagcacta

SEQ ID NO: 156786 - DNA, 25 bp, Probe sequence
tatcacaatcggactggtaacagct

SEQ ID NO: 156787 - DNA, 25 bp, Probe sequence
tttagccggctcaatcgctgcaaaa

SEQ ID NO: 156788 - DNA, 25 bp, Probe sequence
ttatcttcacaattttcttgccagt

SEQ ID NO: 156789 - DNA, 25 bp, Probe sequence
ttcaaccatgttgctgagtcatttg

SEQ ID NO: 156790 - DNA, 25 bp, Probe sequence
ttcttgccagttgtgattcatttga

SEQ ID NO: 156791 - DNA, 25 bp, Probe sequence
gtgccgtattaatgttcgtccgtgg

SEQ ID NO: 156792 - DNA, 25 bp, Probe sequence
attaattgttattcttgctttccct

SEQ ID NO: 156793 - DNA, 25 bp, Probe sequence
atatcatatccctgctgctgaagtt

SEQ ID NO: 156794 - DNA, 25 bp, Probe sequence
atatcgttatccttccagcatttgg

SEQ ID NO: 156795 - DNA, 25 bp, Probe sequence
atacagtcacttcaaatctccacgt

SEQ ID NO: 156796 - DNA, 25 bp, Probe sequence
atacaactttgccattacaccagat

SEQ ID NO: 156797 - DNA, 25 bp, Probe sequence
atgccacgtcgtttatacacttata

SEQ ID NO: 156798 - DNA, 25 bp, Probe sequence
atgactatcggcggtttcttcttaa

SEQ ID NO: 156799 - DNA, 25 bp, Probe sequence
agctcacttccactatacattggtt

SEQ ID NO: 156800 - DNA, 25 bp, Probe sequence
acgtacttcttagtagctcacttcc

SEQ ID NO: 156801 - DNA, 25 bp, Probe sequence
actggtgttgtatttgcctgcttag

SEQ ID NO: 156802 - DNA, 25 bp, Probe sequence
acaatactcctgttggattctggat

SEQ ID NO: 156803 - DNA, 25 bp, Probe sequence
aacaaatggtgcttctggttcttca

SEQ ID NO: 156804 - DNA, 25 bp, Probe sequence
aagtttctggctattctttgcaggt

SEQ ID NO: 156805 - DNA, 25 bp, Probe sequence
aattggtgccccattcttagttatt

SEQ ID NO: 156806 - DNA, 25 bp, Probe sequence
cagggcttggtaccttagctacagg

SEQ ID NO: 156807 - DNA, 25 bp, Probe sequence
gccaatgctttgggctaacttcttc

SEQ ID NO: 156808 - DNA, 25 bp, Probe sequence
gcctgcttagctggtttaatcttct

SEQ ID NO: 156809 - DNA, 25 bp, Probe sequence
gcgttaatcaactcattcttctcaa

SEQ ID NO: 156810 - DNA, 25 bp, Probe sequence
gctcgtaagcgtttattcggacatc

SEQ ID NO: 156811 - DNA, 25 bp, Probe sequence
gacaaactatgcgccactagcaggt

SEQ ID NO: 156812 - DNA, 25 bp, Probe sequence
gacacagcattcttcacagttgcac

SEQ ID NO: 156813 - DNA, 25 bp, Probe sequence
gactactgcatcagcaattccacct

SEQ ID NO: 156814 - DNA, 25 bp, Probe sequence
gagcacgtgatgttgcattcccagt

SEQ ID NO: 156815 - DNA, 25 bp, Probe sequence
gtttgggttcaccatttcttcacaa

SEQ ID NO: 156816 - DNA, 25 bp, Probe sequence
gtttcttaccacaattcattcttgg

SEQ ID NO: 156817 - DNA, 25 bp, Probe sequence
ggggcaccctgaagtttatatcgtt

SEQ ID NO: 156818 - DNA, 25 bp, Probe sequence
taacttcttctgggtatgggggcac

SEQ ID NO: 156819 - DNA, 25 bp, Probe sequence
ggcaatcggattcttattccttgtt

SEQ ID NO: 156820 - DNA, 25 bp, Probe sequence
tggtatgggcaactgccggtatcgc

SEQ ID NO: 156821 - DNA, 25 bp, Probe sequence
tgctttccctcctttaacagtagcg

SEQ ID NO: 156822 - DNA, 25 bp, Probe sequence
tgaattcagtcctggtccgggtgtt

SEQ ID NO: 156823 - DNA, 25 bp, Probe sequence
tcgcagtttccaaatcgatcacgga

SEQ ID NO: 156824 - DNA, 25 bp, Probe sequence
tattgatgcgttacttattcgtgcg

SEQ ID NO: 156825 - DNA, 25 bp, Probe sequence
atacctatcataatcgttgctgctt

SEQ ID NO: 156826 - DNA, 25 bp, Probe sequence
atggttctttgcttatccagatgaa

SEQ ID NO: 156827 - DNA, 25 bp, Probe sequence
agtctttgcttctattatttggcac

SEQ ID NO: 156828 - DNA, 25 bp, Probe sequence
agcagccgatccagaatacatcttc

SEQ ID NO: 156829 - DNA, 25 bp, Probe sequence
agcttcaagctatggatacaatgac

SEQ ID NO: 156830 - DNA, 25 bp, Probe sequence
acatcttctatgcatataaacgttt

SEQ ID NO: 156831 - DNA, 25 bp, Probe sequence
aaacaattattaccaagcacaccta

SEQ ID NO: 156832 - DNA, 25 bp, Probe sequence
aagatccaatggttgtatatgcagt

SEQ ID NO: 156833 - DNA, 25 bp, Probe sequence
aagtgcaggatacaaatggttcttt

SEQ ID NO: 156834 - DNA, 25 bp, Probe sequence
aatggtacacatatggcgtttgttg

SEQ ID NO: 156835 - DNA, 25 bp, Probe sequence
aatgccgaatctggtaagatgcacc

SEQ ID NO: 156836 - DNA, 25 bp, Probe sequence
aatacctgctcgtaaagctcaaatt

SEQ ID NO: 156837 - DNA, 25 bp, Probe sequence
caatgacaagtttctggattccaca

SEQ ID NO: 156838 - DNA, 25 bp, Probe sequence
cgtcttcatgcttgttatttgtttc

SEQ ID NO: 156839 - DNA, 25 bp, Probe sequence
gctgctttagctattcctacagtta

SEQ ID NO: 156840 - DNA, 25 bp, Probe sequence
gcttgttatttgtttcgttgtactt

SEQ ID NO: 156841 - DNA, 25 bp, Probe sequence
gattacgaaaaaccaccgaagagtg

SEQ ID NO: 156842 - DNA, 25 bp, Probe sequence
gaattggacgttagaagcatctcaa

SEQ ID NO: 156843 - DNA, 25 bp, Probe sequence
gaagcatctcaaactggtacgttca

SEQ ID NO: 156844 - DNA, 25 bp, Probe sequence
gaaagatccaaacttcactagtgaa

SEQ ID NO: 156845 - DNA, 25 bp, Probe sequence
gacaaaccattaatacctgctcgta

SEQ ID NO: 156846 - DNA, 25 bp, Probe sequence
gatgcaccataatgccatcattgaa

SEQ ID NO: 156847 - DNA, 25 bp, Probe sequence
gtcagaagttcttgattctttattc

SEQ ID NO: 156848 - DNA, 25 bp, Probe sequence
gggccagtagcaagtagtcagaagt

SEQ ID NO: 156849 - DNA, 25 bp, Probe sequence
ggcatgttcgccatttttatttaca

SEQ ID NO: 156850 - DNA, 25 bp, Probe sequence
tggcgtttgttgatccagcagccga

SEQ ID NO: 156851 - DNA, 25 bp, Probe sequence
tcaaactggtacgttcagaggtcgt

SEQ ID NO: 156852 - DNA, 25 bp, Probe sequence
tgcgaactataaacgacatggtatg

SEQ ID NO: 156853 - DNA, 25 bp, Probe sequence
tgccatgactggcatgacaatgaat

SEQ ID NO: 156854 - DNA, 25 bp, Probe sequence
taacaatccctaaagatcgtcctgt

SEQ ID NO: 156855 - DNA, 25 bp, Probe sequence
tttcgttgtacttggcatgttcgcc

SEQ ID NO: 156856 - DNA, 25 bp, Probe sequence
tttcaacgcaaaagggccagtagca

SEQ ID NO: 156857 - DNA, 25 bp, Probe sequence
ttatttggcacactaattttactta

SEQ ID NO: 156858 - DNA, 25 bp, Probe sequence
ttctttattcaatcgtcttcatgct

SEQ ID NO: 156859 - DNA, 25 bp, Probe sequence
atcatgtcactgattcagatggtgc

SEQ ID NO: 156860 - DNA, 25 bp, Probe sequence
agattataaccttctaaacggcata

SEQ ID NO: 156861 - DNA, 25 bp, Probe sequence
acgacgaatactacaccacaaatta

SEQ ID NO: 156862 - DNA, 25 bp, Probe sequence
actacaccacaaattaaaggcgcta

SEQ ID NO: 156863 - DNA, 25 bp, Probe sequence
acatctaaatctggtaaatatcaaa

SEQ ID NO: 156864 - DNA, 25 bp, Probe sequence
aaatttccactaggtatattgaggt

SEQ ID NO: 156865 - DNA, 25 bp, Probe sequence
aaacggcataagtgcatttgataaa

SEQ ID NO: 156866 - DNA, 25 bp, Probe sequence
aactattacagtcattatcagccct

SEQ ID NO: 156867 - DNA, 25 bp, Probe sequence
aaccttctaaacggcataagtgcat

SEQ ID NO: 156868 - DNA, 25 bp, Probe sequence
aatgcagatgcaacgacgaatacta

SEQ ID NO: 156869 - DNA, 25 bp, Probe sequence
caacgacgaatactacaccacaaat

SEQ ID NO: 156870 - DNA, 25 bp, Probe sequence
cctcggtgtttctgctacactagta

SEQ ID NO: 156871 - DNA, 25 bp, Probe sequence
ctattacagtcattatcagccctcg

SEQ ID NO: 156872 - DNA, 25 bp, Probe sequence
cggtgtttctgctacactagtaaca

SEQ ID NO: 156873 - DNA, 25 bp, Probe sequence
gctacactagtaacaccaaatttaa

SEQ ID NO: 156874 - DNA, 25 bp, Probe sequence
gatggagatttaaccgataaaatta

SEQ ID NO: 156875 - DNA, 25 bp, Probe sequence
gatggtgcaattaaaatttccacta

SEQ ID NO: 156876 - DNA, 25 bp, Probe sequence
gatgcaacgacgaatactacaccac

SEQ ID NO: 156877 - DNA, 25 bp, Probe sequence
gataaaattaaagtcgatggccaaa

SEQ ID NO: 156878 - DNA, 25 bp, Probe sequence
gatatcgttattaagaaaggtcaag

SEQ ID NO: 156879 - DNA, 25 bp, Probe sequence
gtttctgctacactagtaacaccaa

SEQ ID NO: 156880 - DNA, 25 bp, Probe sequence
gtaacaccaaatttaaatgcagatg

SEQ ID NO: 156881 - DNA, 25 bp, Probe sequence
gtcactgattcagatggtgcaatta

SEQ ID NO: 156882 - DNA, 25 bp, Probe sequence
gtcgatggccaaattgatacatcta

SEQ ID NO: 156883 - DNA, 25 bp, Probe sequence
ggtgcaattaaaatttccactaggt

SEQ ID NO: 156884 - DNA, 25 bp, Probe sequence
ggtcaagattataaccttctaaacg

SEQ ID NO: 156885 - DNA, 25 bp, Probe sequence
ggcgctaatgatatcgttattaaga

SEQ ID NO: 156886 - DNA, 25 bp, Probe sequence
ggccaaattgatacatctaaatctg

SEQ ID NO: 156887 - DNA, 25 bp, Probe sequence
tgcaacgacgaatactacaccacaa

SEQ ID NO: 156888 - DNA, 25 bp, Probe sequence
taaagtcgatggccaaattgataca

SEQ ID NO: 156889 - DNA, 25 bp, Probe sequence
taaaggcgctaatgatatcgttatt

SEQ ID NO: 156890 - DNA, 25 bp, Probe sequence
tatcaaattaaatatcatgtcactg

SEQ ID NO: 156891 - DNA, 25 bp, Probe sequence
ttctgctacactagtaacaccaaat

SEQ ID NO: 156892 - DNA, 25 bp, Probe sequence
ttccactaggtatattgaggttaaa

SEQ ID NO: 156893 - DNA, 25 bp, Probe sequence
attgtcggacaaccagtttctaagt

SEQ ID NO: 156894 - DNA, 25 bp, Probe sequence
attaaataatactttgcttgcagaa

SEQ ID NO: 156895 - DNA, 25 bp, Probe sequence
attatccgttatattagttggtaat

SEQ ID NO: 156896 - DNA, 25 bp, Probe sequence
atcaagttgaagcgctaaaagaaaa

SEQ ID NO: 156897 - DNA, 25 bp, Probe sequence
agttggtaatgatggcgctagtcaa

SEQ ID NO: 156898 - DNA, 25 bp, Probe sequence
agaaattgctggagctattacacca

SEQ ID NO: 156899 - DNA, 25 bp, Probe sequence
accgctcggcatcatggaaatatta

SEQ ID NO: 156900 - DNA, 25 bp, Probe sequence
acatttggaagaaacagctactgaa

SEQ ID NO: 156901 - DNA, 25 bp, Probe sequence
acaccgctcggcatcatggaaatat

SEQ ID NO: 156902 - DNA, 25 bp, Probe sequence
acaaattgccaaagactacagacag

SEQ ID NO: 156903 - DNA, 25 bp, Probe sequence
aaaaaatgcatcagtaacaatctta

SEQ ID NO: 156904 - DNA, 25 bp, Probe sequence
caccagttcctggtggcgttggtcc

SEQ ID NO: 156905 - DNA, 25 bp, Probe sequence
aagatgctgatgtcattgtcagtgc

SEQ ID NO: 156906 - DNA, 25 bp, Probe sequence
aatgcgtcgaggtattgattcgtaa

SEQ ID NO: 156907 - DNA, 25 bp, Probe sequence
cattgtcagtgcagttggtaagcct

SEQ ID NO: 156908 - DNA, 25 bp, Probe sequence
gccaaagactacagacaggggttac

SEQ ID NO: 156909 - DNA, 25 bp, Probe sequence
gaacaaacttttgtaccttgcacac

SEQ ID NO: 156910 - DNA, 25 bp, Probe sequence
gaaagcagctgaaaaaattggtatg

SEQ ID NO: 156911 - DNA, 25 bp, Probe sequence
gacaaccagtttctaagttactact

SEQ ID NO: 156912 - DNA, 25 bp, Probe sequence
gacgaagtcatattgtcggacaacc

SEQ ID NO: 156913 - DNA, 25 bp, Probe sequence
gatggcgctagtcaaagttatgtta

SEQ ID NO: 156914 - DNA, 25 bp, Probe sequence
gatgtcattgtcagtgcagttggta

SEQ ID NO: 156915 - DNA, 25 bp, Probe sequence
gatgttggcaatacgccagatgaaa

SEQ ID NO: 156916 - DNA, 25 bp, Probe sequence
gatgattctgtaagtggtattttgg

SEQ ID NO: 156917 - DNA, 25 bp, Probe sequence
gatgcggttaaagaaattgctggag

SEQ ID NO: 156918 - DNA, 25 bp, Probe sequence
gatttcagaaatcgtacatttggaa

SEQ ID NO: 156919 - DNA, 25 bp, Probe sequence
gttactacttcaaaaaaatgcatca

SEQ ID NO: 156920 - DNA, 25 bp, Probe sequence
gtaacaatcttacattctcgttcaa

SEQ ID NO: 156921 - DNA, 25 bp, Probe sequence
gtggcgttggtccattaacaattac

SEQ ID NO: 156922 - DNA, 25 bp, Probe sequence
ggtgacgttgattatgatgcggtta

SEQ ID NO: 156923 - DNA, 25 bp, Probe sequence
tggagctattacaccagttcctggt

SEQ ID NO: 156924 - DNA, 25 bp, Probe sequence
tacacctaaattatccgttatatta

SEQ ID NO: 156925 - DNA, 25 bp, Probe sequence
taccaaaacaagttagcgaacagaa

SEQ ID NO: 156926 - DNA, 25 bp, Probe sequence
ttcctggtggcgttggtccattaac

SEQ ID NO: 156927 - DNA, 25 bp, Probe sequence
attgatgtttaatggtactcagttt

SEQ ID NO: 156928 - DNA, 25 bp, Probe sequence
attgctatttcatttttcggtatct

SEQ ID NO: 156929 - DNA, 25 bp, Probe sequence
attacaacgtacctttctcatataa

SEQ ID NO: 156930 - DNA, 25 bp, Probe sequence
attacagcaatttttataactataa

SEQ ID NO: 156931 - DNA, 25 bp, Probe sequence
atatttgtgcataatttcgatttta

SEQ ID NO: 156932 - DNA, 25 bp, Probe sequence
atgttagttttcttattgatgttta

SEQ ID NO: 156933 - DNA, 25 bp, Probe sequence
aggcacatcaattatcagttgcgat

SEQ ID NO: 156934 - DNA, 25 bp, Probe sequence
agtattggctttgcattactctctt

SEQ ID NO: 156935 - DNA, 25 bp, Probe sequence
aatacagcttcgcagatctttaaaa

SEQ ID NO: 156936 - DNA, 25 bp, Probe sequence
catggctgccattcgtatgatacct

SEQ ID NO: 156937 - DNA, 25 bp, Probe sequence
catttttcggtatcttaatcgcact

SEQ ID NO: 156938 - DNA, 25 bp, Probe sequence
gctttatatcactatcttaatgtta

SEQ ID NO: 156939 - DNA, 25 bp, Probe sequence
gcagatctttaaaaatgcgctatca

SEQ ID NO: 156940 - DNA, 25 bp, Probe sequence
gaatggtagccatacaattttgaaa

SEQ ID NO: 156941 - DNA, 25 bp, Probe sequence
gaaactatttcttggaattatacta

SEQ ID NO: 156942 - DNA, 25 bp, Probe sequence
gaaagtttagttcgtggtttacatg

SEQ ID NO: 156943 - DNA, 25 bp, Probe sequence
gagatggtcctcgtacttactatta

SEQ ID NO: 156944 - DNA, 25 bp, Probe sequence
gatgatgttcgtcttggtcgtgtag

SEQ ID NO: 156945 - DNA, 25 bp, Probe sequence
gatacctttaatgattagttcttta

SEQ ID NO: 156946 - DNA, 25 bp, Probe sequence
gattttatacgggaatggtagccat

SEQ ID NO: 156947 - DNA, 25 bp, Probe sequence
gattttatgctttatatcactatct

SEQ ID NO: 156948 - DNA, 25 bp, Probe sequence
gttcgtggtttacatgtatcattaa

SEQ ID NO: 156949 - DNA, 25 bp, Probe sequence
gttgcttatgcattcatggctgcca

SEQ ID NO: 156950 - DNA, 25 bp, Probe sequence
gtcctcgtacttactattacaacgt

SEQ ID NO: 156951 - DNA, 25 bp, Probe sequence
ggtactcagtttaaaattacagcaa

SEQ ID NO: 156952 - DNA, 25 bp, Probe sequence
ggatttagagatggtcctcgtactt

SEQ ID NO: 156953 - DNA, 25 bp, Probe sequence
ggctgccattcgtatgataccttta

SEQ ID NO: 156954 - DNA, 25 bp, Probe sequence
tgttcgtcttggtcgtgtaggttaa

SEQ ID NO: 156955 - DNA, 25 bp, Probe sequence
tgatgtcaacattataacgaaacta

SEQ ID NO: 156956 - DNA, 25 bp, Probe sequence
tcggatttatccatattacaacaga

SEQ ID NO: 156957 - DNA, 25 bp, Probe sequence
tctcttccctgttcatgattttata

SEQ ID NO: 156958 - DNA, 25 bp, Probe sequence
ttattgttcaatcaccttacccatc

SEQ ID NO: 156959 - DNA, 25 bp, Probe sequence
ttagttctttaatacagcttcgcag

SEQ ID NO: 156960 - DNA, 25 bp, Probe sequence
ttggaattatactatttttctttat

SEQ ID NO: 156961 - DNA, 25 bp, Probe sequence
attgttgctttaggttgtatttttg

SEQ ID NO: 156962 - DNA, 25 bp, Probe sequence
attgtattgatttattccataaaac

SEQ ID NO: 156963 - DNA, 25 bp, Probe sequence
attccataaaacgatacctggtatg

SEQ ID NO: 156964 - DNA, 25 bp, Probe sequence
atttattccataaaacgatacctgg

SEQ ID NO: 156965 - DNA, 25 bp, Probe sequence
ataaaacgatacctggtatggttgc

SEQ ID NO: 156966 - DNA, 25 bp, Probe sequence
ataattactgtaataagtgcactaa

SEQ ID NO: 156967 - DNA, 25 bp, Probe sequence
agattgtattgatttattccataaa

SEQ ID NO: 156968 - DNA, 25 bp, Probe sequence
accaggcactagatataaagctaaa

SEQ ID NO: 156969 - DNA, 25 bp, Probe sequence
aaagattgtattgatttattccata

SEQ ID NO: 156970 - DNA, 25 bp, Probe sequence
aaaccaggcactagatataaagcta

SEQ ID NO: 156971 - DNA, 25 bp, Probe sequence
aaacgatacctggtatggttgcaaa

SEQ ID NO: 156972 - DNA, 25 bp, Probe sequence
aaaacgatacctggtatggttgcaa

SEQ ID NO: 156973 - DNA, 25 bp, Probe sequence
aaccaggcactagatataaagctaa

SEQ ID NO: 156974 - DNA, 25 bp, Probe sequence
aagattgtattgatttattccataa

SEQ ID NO: 156975 - DNA, 25 bp, Probe sequence
cgaaagattgtattgatttattcca

SEQ ID NO: 156976 - DNA, 25 bp, Probe sequence
cccgaaagattgtattgatttattc

SEQ ID NO: 156977 - DNA, 25 bp, Probe sequence
ccgaaagattgtattgatttattcc

SEQ ID NO: 156978 - DNA, 25 bp, Probe sequence
ccataaaacgatacctggtatggtt

SEQ ID NO: 156979 - DNA, 25 bp, Probe sequence
gaaagattgtattgatttattccat

SEQ ID NO: 156980 - DNA, 25 bp, Probe sequence
gatttattccataaaacgatacctg

SEQ ID NO: 156981 - DNA, 25 bp, Probe sequence
gattgtattgatttattccataaaa

SEQ ID NO: 156982 - DNA, 25 bp, Probe sequence
gtattgatttattccataaaacgat

SEQ ID NO: 156983 - DNA, 25 bp, Probe sequence
tgtattgatttattccataaaacga

SEQ ID NO: 156984 - DNA, 25 bp, Probe sequence
tgttgctttaggttgtatttttgaa

SEQ ID NO: 156985 - DNA, 25 bp, Probe sequence
tccataaaacgatacctggtatggt

SEQ ID NO: 156986 - DNA, 25 bp, Probe sequence
ttccataaaacgatacctggtatgg

SEQ ID NO: 156987 - DNA, 25 bp, Probe sequence
taaaacgatacctggtatggttgca

SEQ ID NO: 156988 - DNA, 25 bp, Probe sequence
taggttgtatttttgaaaacacata

SEQ ID NO: 156989 - DNA, 25 bp, Probe sequence
tattccataaaacgatacctggtat

SEQ ID NO: 156990 - DNA, 25 bp, Probe sequence
tattacctaaaacagttgttataat

SEQ ID NO: 156991 - DNA, 25 bp, Probe sequence
tttattccataaaacgatacctggt

SEQ ID NO: 156992 - DNA, 25 bp, Probe sequence
ttattccataaaacgatacctggta

SEQ ID NO: 156993 - DNA, 25 bp, Probe sequence
ttaggttgtatttttgaaaacacat

SEQ ID NO: 156994 - DNA, 25 bp, Probe sequence
ttgttgctttaggttgtatttttga

SEQ ID NO: 156995 - DNA, 25 bp, Probe sequence
attccagttgatcaaacttttccaa

SEQ ID NO: 156996 - DNA, 25 bp, Probe sequence
attttccaagaccctgatagccagt

SEQ ID NO: 156997 - DNA, 25 bp, Probe sequence
atcgttgacccattaagtggcgtta

SEQ ID NO: 156998 - DNA, 25 bp, Probe sequence
atgatgaactaatcgttgacccatt

SEQ ID NO: 156999 - DNA, 25 bp, Probe sequence
atgttacccctgaaacgtatatcaa

SEQ ID NO: 157000 - DNA, 25 bp, Probe sequence
atggacgtattattcgcggtaaatc

SEQ ID NO: 157001 - DNA, 25 bp, Probe sequence
agtggcgttattttccaagaccctg

SEQ ID NO: 157002 - DNA, 25 bp, Probe sequence
acatctggaatcatgtcgaccgcgt

SEQ ID NO: 157003 - DNA, 25 bp, Probe sequence
aaacgacgccttagcgtagctaccg

SEQ ID NO: 157004 - DNA, 25 bp, Probe sequence
aacattcattttaatcacctttcta

SEQ ID NO: 157005 - DNA, 25 bp, Probe sequence
caacaaactcacacttattacaatt

SEQ ID NO: 157006 - DNA, 25 bp, Probe sequence
catccttatgagttgtctattggtc

SEQ ID NO: 157007 - DNA, 25 bp, Probe sequence
ccctgatagccagttttgtatgcca

SEQ ID NO: 157008 - DNA, 25 bp, Probe sequence
gaaccgacatttggacttgatagcc

SEQ ID NO: 157009 - DNA, 25 bp, Probe sequence
gaagtatgttcatttactcagtgaa

SEQ ID NO: 157010 - DNA, 25 bp, Probe sequence
gaagaacttgcattcgttttagaaa

SEQ ID NO: 157011 - DNA, 25 bp, Probe sequence
gaaaccattcttcaacaatcaaaaa

SEQ ID NO: 157012 - DNA, 25 bp, Probe sequence
gactttccaacaacaaactcacact

SEQ ID NO: 157013 - DNA, 25 bp, Probe sequence
gatggtgcgttactagattgtgatg

SEQ ID NO: 157014 - DNA, 25 bp, Probe sequence
gatgaaccgacagcaatgttagatg

SEQ ID NO: 157015 - DNA, 25 bp, Probe sequence
gatagccataatacattccagttga

SEQ ID NO: 157016 - DNA, 25 bp, Probe sequence
gtagctaccgcactaagttctaaag

SEQ ID NO: 157017 - DNA, 25 bp, Probe sequence
gtcgaccgcgtcattttgatggatt

SEQ ID NO: 157018 - DNA, 25 bp, Probe sequence
gtgaatatggtgtgtggcatccacg

SEQ ID NO: 157019 - DNA, 25 bp, Probe sequence
ggtaaaacaaccttgcttgaatcaa

SEQ ID NO: 157020 - DNA, 25 bp, Probe sequence
ggcatccacgtgcatgggaattcgc

SEQ ID NO: 157021 - DNA, 25 bp, Probe sequence
ggatgcgttaattatcaatgcttta

SEQ ID NO: 157022 - DNA, 25 bp, Probe sequence
ggaattcgcaccaagtcgtgttgac

SEQ ID NO: 157023 - DNA, 25 bp, Probe sequence
tggttgcggtaaaagtacacttctg

SEQ ID NO: 157024 - DNA, 25 bp, Probe sequence
tggtcaatttaaatgttacccctga

SEQ ID NO: 157025 - DNA, 25 bp, Probe sequence
taagtggtattgttcctaatttaat

SEQ ID NO: 157026 - DNA, 25 bp, Probe sequence
tatcattgccgatgaatgtcctgaa

SEQ ID NO: 157027 - DNA, 25 bp, Probe sequence
ttgctctcattctcagatttagaaa

SEQ ID NO: 157028 - DNA, 25 bp, Probe sequence
ttggcaattgttgaaaccattcttc

SEQ ID NO: 157029 - DNA, 25 bp, Probe sequence
atacaaagttgcataatactaaagc

SEQ ID NO: 157030 - DNA, 25 bp, Probe sequence
atgccaatacgatgacaggtacgat

SEQ ID NO: 157031 - DNA, 25 bp, Probe sequence
atcctttctttaaataagtcagatg

SEQ ID NO: 157032 - DNA, 25 bp, Probe sequence
atggctgaaacaaaccagagtattg

SEQ ID NO: 157033 - DNA, 25 bp, Probe sequence
agtcagatgccaatacgatgacagg

SEQ ID NO: 157034 - DNA, 25 bp, Probe sequence
agatgccaatacgatgacaggtacg

SEQ ID NO: 157035 - DNA, 25 bp, Probe sequence
acaaaccagagtattgcagatacaa

SEQ ID NO: 157036 - DNA, 25 bp, Probe sequence
aaataagtcagatgccaatacgatg

SEQ ID NO: 157037 - DNA, 25 bp, Probe sequence
aaacaaaccagagtattgcagatac

SEQ ID NO: 157038 - DNA, 25 bp, Probe sequence
aaccagagtattgcagatacaaagt

SEQ ID NO: 157039 - DNA, 25 bp, Probe sequence
aagtcagatgccaatacgatgacag

SEQ ID NO: 157040 - DNA, 25 bp, Probe sequence
aatcctttctttaaataagtcagat

SEQ ID NO: 157041 - DNA, 25 bp, Probe sequence
aataagtcagatgccaatacgatga

SEQ ID NO: 157042 - DNA, 25 bp, Probe sequence
aatacgatgacaggtacgattgaaa

SEQ ID NO: 157043 - DNA, 25 bp, Probe sequence
cagatgccaatacgatgacaggtac

SEQ ID NO: 157044 - DNA, 25 bp, Probe sequence
ctgaaacaaaccagagtattgcaga

SEQ ID NO: 157045 - DNA, 25 bp, Probe sequence
cctttctttaaataagtcagatgcc

SEQ ID NO: 157046 - DNA, 25 bp, Probe sequence
gccaatacgatgacaggtacgattg

SEQ ID NO: 157047 - DNA, 25 bp, Probe sequence
gcagatacaaagttgcataatacta

SEQ ID NO: 157048 - DNA, 25 bp, Probe sequence
gaaacaaaccagagtattgcagata

SEQ ID NO: 157049 - DNA, 25 bp, Probe sequence
gaaatcctttctttaaataagtcag

SEQ ID NO: 157050 - DNA, 25 bp, Probe sequence
gacaggtacgattgaaagtataatt

SEQ ID NO: 157051 - DNA, 25 bp, Probe sequence
gagtattgcagatacaaagttgcat

SEQ ID NO: 157052 - DNA, 25 bp, Probe sequence
gatgacaggtacgattgaaagtata

SEQ ID NO: 157053 - DNA, 25 bp, Probe sequence
gatgccaatacgatgacaggtacga

SEQ ID NO: 157054 - DNA, 25 bp, Probe sequence
gtcagatgccaatacgatgacaggt

SEQ ID NO: 157055 - DNA, 25 bp, Probe sequence
ggtacgattgaaagtataattacaa

SEQ ID NO: 157056 - DNA, 25 bp, Probe sequence
ggctgaaacaaaccagagtattgca

SEQ ID NO: 157057 - DNA, 25 bp, Probe sequence
tgaaatcctttctttaaataagtca

SEQ ID NO: 157058 - DNA, 25 bp, Probe sequence
tgccaatacgatgacaggtacgatt

SEQ ID NO: 157059 - DNA, 25 bp, Probe sequence
tcagatgccaatacgatgacaggta

SEQ ID NO: 157060 - DNA, 25 bp, Probe sequence
taagtcagatgccaatacgatgaca

SEQ ID NO: 157061 - DNA, 25 bp, Probe sequence
tacgatgacaggtacgattgaaagt

SEQ ID NO: 157062 - DNA, 25 bp, Probe sequence
tagaaattattgccgatataactat

SEQ ID NO: 157063 - DNA, 25 bp, Probe sequence
attatgggtcgtttcgatattccga

SEQ ID NO: 157064 - DNA, 25 bp, Probe sequence
atttcagtagtattcgcagttattt

SEQ ID NO: 157065 - DNA, 25 bp, Probe sequence
atttgctgcaggtgccggcgaaact

SEQ ID NO: 157066 - DNA, 25 bp, Probe sequence
atattccgacaatcgtttacgcttt

SEQ ID NO: 157067 - DNA, 25 bp, Probe sequence
atgtcaaaaggtttaaagctatctg

SEQ ID NO: 157068 - DNA, 25 bp, Probe sequence
agacaggcgtaacaaaattatttag

SEQ ID NO: 157069 - DNA, 25 bp, Probe sequence
aaacggggtttggttcatggcagcg

SEQ ID NO: 157070 - DNA, 25 bp, Probe sequence
aacttaacattattcatcgtattta

SEQ ID NO: 157071 - DNA, 25 bp, Probe sequence
aagctttagataagacaggcgtaac

SEQ ID NO: 157072 - DNA, 25 bp, Probe sequence
aaggtttagcgtgtgaacttgtctt

SEQ ID NO: 157073 - DNA, 25 bp, Probe sequence
aatggtgtgcaagctacaggccttc

SEQ ID NO: 157074 - DNA, 25 bp, Probe sequence
aattagtggtgcagtagtcgccggc

SEQ ID NO: 157075 - DNA, 25 bp, Probe sequence
catggcagcgattgtctgctatcta

SEQ ID NO: 157076 - DNA, 25 bp, Probe sequence
ctagtaaccgtacttatttcagtag

SEQ ID NO: 157077 - DNA, 25 bp, Probe sequence
ctatgttagcaggtttttgtacagc

SEQ ID NO: 157078 - DNA, 25 bp, Probe sequence
gccggcgaaactatcattatgggtc

SEQ ID NO: 157079 - DNA, 25 bp, Probe sequence
ccagctgctaaagaagattacgaca

SEQ ID NO: 157080 - DNA, 25 bp, Probe sequence
gcaggtgccggcgaaactatcatta

SEQ ID NO: 157081 - DNA, 25 bp, Probe sequence
gattgtctgctatctaattattcca

SEQ ID NO: 157082 - DNA, 25 bp, Probe sequence
gttgcaggttggaacttaacattat

SEQ ID NO: 157083 - DNA, 25 bp, Probe sequence
gttcagttatggtagctatgttagc

SEQ ID NO: 157084 - DNA, 25 bp, Probe sequence
gtattcgcagttatttacaatttat

SEQ ID NO: 157085 - DNA, 25 bp, Probe sequence
gtctgctatctaattattccaaaac

SEQ ID NO: 157086 - DNA, 25 bp, Probe sequence
gtgaacttgtctttgcaatttttaa

SEQ ID NO: 157087 - DNA, 25 bp, Probe sequence
ggtgtgcaagctacaggccttcacc

SEQ ID NO: 157088 - DNA, 25 bp, Probe sequence
gggtcgtttcgatattccgacaatc

SEQ ID NO: 157089 - DNA, 25 bp, Probe sequence
ggtggtttgtttacaatggtgtgca

SEQ ID NO: 157090 - DNA, 25 bp, Probe sequence
ggtttggttcatggcagcgattgtc

SEQ ID NO: 157091 - DNA, 25 bp, Probe sequence
ggctgaatttgctgcaggtgccggc

SEQ ID NO: 157092 - DNA, 25 bp, Probe sequence
ggccttcacctcgaacaattaacaa

SEQ ID NO: 157093 - DNA, 25 bp, Probe sequence
tcacctcgaacaattaacaaacggg

SEQ ID NO: 157094 - DNA, 25 bp, Probe sequence
tattccaaaaccaggtattgcttta

SEQ ID NO: 157095 - DNA, 25 bp, Probe sequence
tacaggccttcacctcgaacaatta

SEQ ID NO: 157096 - DNA, 25 bp, Probe sequence
ttagcgtgtgaacttgtctttgcaa

SEQ ID NO: 157097 - DNA, 25 bp, Probe sequence
attttgatgctttttcaactccgtt

SEQ ID NO: 157098 - DNA, 25 bp, Probe sequence
atagattttgatgctttttcaactc

SEQ ID NO: 157099 - DNA, 25 bp, Probe sequence
atccaatgtaccatgttgatcttga

SEQ ID NO: 157100 - DNA, 25 bp, Probe sequence
atgatagattttgatgctttttcaa

SEQ ID NO: 157101 - DNA, 25 bp, Probe sequence
atgtaccatgttgatcttgatgaaa

SEQ ID NO: 157102 - DNA, 25 bp, Probe sequence
agattttgatgctttttcaactccg

SEQ ID NO: 157103 - DNA, 25 bp, Probe sequence
accatgttgatcttgatgaaatcaa

SEQ ID NO: 157104 - DNA, 25 bp, Probe sequence
acgaaatgatagattttgatgcttt

SEQ ID NO: 157105 - DNA, 25 bp, Probe sequence
aaatgatagattttgatgctttttc

SEQ ID NO: 157106 - DNA, 25 bp, Probe sequence
aacaaagtattaaatatccaagatt

SEQ ID NO: 157107 - DNA, 25 bp, Probe sequence
aacgaaatgatagattttgatgctt

SEQ ID NO: 157108 - DNA, 25 bp, Probe sequence
aatgtaccatgttgatcttgatgaa

SEQ ID NO: 157109 - DNA, 25 bp, Probe sequence
aatgatagattttgatgctttttca

SEQ ID NO: 157110 - DNA, 25 bp, Probe sequence
aatccaatgtaccatgttgatcttg

SEQ ID NO: 157111 - DNA, 25 bp, Probe sequence
aatcaacaatatcgaaacgaaatga

SEQ ID NO: 157112 - DNA, 25 bp, Probe sequence
caatgtaccatgttgatcttgatga

SEQ ID NO: 157113 - DNA, 25 bp, Probe sequence
cgaaatgatagattttgatgctttt

SEQ ID NO: 157114 - DNA, 25 bp, Probe sequence
ccaatgtaccatgttgatcttgatg

SEQ ID NO: 157115 - DNA, 25 bp, Probe sequence
gaaatgatagattttgatgcttttt

SEQ ID NO: 157116 - DNA, 25 bp, Probe sequence
gaaatcaacaaagtattaaatatcc

SEQ ID NO: 157117 - DNA, 25 bp, Probe sequence
gatgctttttcaactccgtttattt

SEQ ID NO: 157118 - DNA, 25 bp, Probe sequence
gatagattttgatgctttttcaact

SEQ ID NO: 157119 - DNA, 25 bp, Probe sequence
gattttgatgctttttcaactccgt

SEQ ID NO: 157120 - DNA, 25 bp, Probe sequence
gtaccatgttgatcttgatgaaatc

SEQ ID NO: 157121 - DNA, 25 bp, Probe sequence
tgctttttcaactccgtttattttg

SEQ ID NO: 157122 - DNA, 25 bp, Probe sequence
tgtaccatgttgatcttgatgaaat

SEQ ID NO: 157123 - DNA, 25 bp, Probe sequence
tgatagattttgatgctttttcaac

SEQ ID NO: 157124 - DNA, 25 bp, Probe sequence
tgatgctttttcaactccgtttatt

SEQ ID NO: 157125 - DNA, 25 bp, Probe sequence
tccaatgtaccatgttgatcttgat

SEQ ID NO: 157126 - DNA, 25 bp, Probe sequence
taccatgttgatcttgatgaaatca

SEQ ID NO: 157127 - DNA, 25 bp, Probe sequence
tagattttgatgctttttcaactcc

SEQ ID NO: 157128 - DNA, 25 bp, Probe sequence
tttgatgctttttcaactccgttta

SEQ ID NO: 157129 - DNA, 25 bp, Probe sequence
ttttgatgctttttcaactccgttt

SEQ ID NO: 157130 - DNA, 25 bp, Probe sequence
ttgatgctttttcaactccgtttat

SEQ ID NO: 157131 - DNA, 25 bp, Probe sequence
ataccggctggtacgaagagtaagc

SEQ ID NO: 157132 - DNA, 25 bp, Probe sequence
attattttcgatacaaagagtacta

SEQ ID NO: 157133 - DNA, 25 bp, Probe sequence
atgacacctaaagagttaacaactg

SEQ ID NO: 157134 - DNA, 25 bp, Probe sequence
atgattcaattattttcgatacaaa

SEQ ID NO: 157135 - DNA, 25 bp, Probe sequence
actgagataccggctggtacgaaga

SEQ ID NO: 157136 - DNA, 25 bp, Probe sequence
actaaaccgattactgatgcaggca

SEQ ID NO: 157137 - DNA, 25 bp, Probe sequence
acaactgagataccggctggtacga

SEQ ID NO: 157138 - DNA, 25 bp, Probe sequence
aaaaatggtgcttggctaatgacac

SEQ ID NO: 157139 - DNA, 25 bp, Probe sequence
aacagcaccagtacataataataca

SEQ ID NO: 157140 - DNA, 25 bp, Probe sequence
aacttaacagcaccagtacataata

SEQ ID NO: 157141 - DNA, 25 bp, Probe sequence
aaccgattactgatgcaggcatagg

SEQ ID NO: 157142 - DNA, 25 bp, Probe sequence
aatggtgcttggctaatgacaccta

SEQ ID NO: 157143 - DNA, 25 bp, Probe sequence
aatactaaaccgattactgatgcag

SEQ ID NO: 157144 - DNA, 25 bp, Probe sequence
caatgttatttgttagtgtcgttcc

SEQ ID NO: 157145 - DNA, 25 bp, Probe sequence
cttcgcctaacttaacagcaccagt

SEQ ID NO: 157146 - DNA, 25 bp, Probe sequence
gcctaacttaacagcaccagtacat

SEQ ID NO: 157147 - DNA, 25 bp, Probe sequence
gcttggctaatgacacctaaagagt

SEQ ID NO: 157148 - DNA, 25 bp, Probe sequence
gcaggcataggaattggcataaatg

SEQ ID NO: 157149 - DNA, 25 bp, Probe sequence
gagataccggctggtacgaagagta

SEQ ID NO: 157150 - DNA, 25 bp, Probe sequence
gagttaacaactgagataccggctg

SEQ ID NO: 157151 - DNA, 25 bp, Probe sequence
gagtaagccaatgttatttgttagt

SEQ ID NO: 157152 - DNA, 25 bp, Probe sequence
gttaacaactgagataccggctggt

SEQ ID NO: 157153 - DNA, 25 bp, Probe sequence
gttatttgttagtgtcgttcctact

SEQ ID NO: 157154 - DNA, 25 bp, Probe sequence
gtacgaagagtaagccaatgttatt

SEQ ID NO: 157155 - DNA, 25 bp, Probe sequence
gtgcttggctaatgacacctaaaga

SEQ ID NO: 157156 - DNA, 25 bp, Probe sequence
ggctaatgacacctaaagagttaac

SEQ ID NO: 157157 - DNA, 25 bp, Probe sequence
tgtcgttcctactttttcgacttcg

SEQ ID NO: 157158 - DNA, 25 bp, Probe sequence
tcgcctaacttaacagcaccagtac

SEQ ID NO: 157159 - DNA, 25 bp, Probe sequence
taacaactgagataccggctggtac

SEQ ID NO: 157160 - DNA, 25 bp, Probe sequence
taaagcaattacaatgacttggtga

SEQ ID NO: 157161 - DNA, 25 bp, Probe sequence
tagtgtcgttcctactttttcgact

SEQ ID NO: 157162 - DNA, 25 bp, Probe sequence
tatttgttagtgtcgttcctacttt

SEQ ID NO: 157163 - DNA, 25 bp, Probe sequence
tttcgacttcgcctaacttaacagc

SEQ ID NO: 157164 - DNA, 25 bp, Probe sequence
ttttcgacttcgcctaacttaacag

SEQ ID NO: 157165 - DNA, 25 bp, Probe sequence
cggcgacagacctttagtcgtcccg

SEQ ID NO: 157166 - DNA, 25 bp, Probe sequence
attatgaagcatttgcgcgccctaa

SEQ ID NO: 157167 - DNA, 25 bp, Probe sequence
atggagaaccactttgaatgtttgt

SEQ ID NO: 157168 - DNA, 25 bp, Probe sequence
atggaagctgtttatcaattactaa

SEQ ID NO: 157169 - DNA, 25 bp, Probe sequence
agaatattcggttcgtactgccatg

SEQ ID NO: 157170 - DNA, 25 bp, Probe sequence
acgatgtttgcatttgaaccgtggc

SEQ ID NO: 157171 - DNA, 25 bp, Probe sequence
acgacaagtcaaaaaattgcccgag

SEQ ID NO: 157172 - DNA, 25 bp, Probe sequence
acaatcaatgattctgcatggcaaa

SEQ ID NO: 157173 - DNA, 25 bp, Probe sequence
aactcgcattagcaggattccttaa

SEQ ID NO: 157174 - DNA, 25 bp, Probe sequence
aagaagaccctaactattctcgctg

SEQ ID NO: 157175 - DNA, 25 bp, Probe sequence
aagtcctgaatttggtaatcctgat

SEQ ID NO: 157176 - DNA, 25 bp, Probe sequence
aatcgcatggggttcaatttgaata

SEQ ID NO: 157177 - DNA, 25 bp, Probe sequence
catgacgcgtgctatcggcgacaga

SEQ ID NO: 157178 - DNA, 25 bp, Probe sequence
gacttttcagctttaaaattcacta

SEQ ID NO: 157179 - DNA, 25 bp, Probe sequence
gtactgccatggaagctgtttatca

SEQ ID NO: 157180 - DNA, 25 bp, Probe sequence
gtcttgatggtgaaaatatgccttt

SEQ ID NO: 157181 - DNA, 25 bp, Probe sequence
ggtaactttgcagaaacagagcgag

SEQ ID NO: 157182 - DNA, 25 bp, Probe sequence
ggtaatcctgataagttttgccaaa

SEQ ID NO: 157183 - DNA, 25 bp, Probe sequence
ggatttactggaaaacgatgtttgc

SEQ ID NO: 157184 - DNA, 25 bp, Probe sequence
ggatttatgccttatattcagatgt

SEQ ID NO: 157185 - DNA, 25 bp, Probe sequence
tggtctcgcagacttttcagcttta

SEQ ID NO: 157186 - DNA, 25 bp, Probe sequence
tgatcttcgcgtcttaatggatgcc

SEQ ID NO: 157187 - DNA, 25 bp, Probe sequence
tcggttcgtactgccatggaagctg

SEQ ID NO: 157188 - DNA, 25 bp, Probe sequence
tgcgcgccctaaaaaacctgaaaat

SEQ ID NO: 157189 - DNA, 25 bp, Probe sequence
tgcctttaaaaggctatgttgtccg

SEQ ID NO: 157190 - DNA, 25 bp, Probe sequence
tcttatttcatgacgcgtgctatcg

SEQ ID NO: 157191 - DNA, 25 bp, Probe sequence
tcagcaacagtttaaagaccaacct

SEQ ID NO: 157192 - DNA, 25 bp, Probe sequence
taaatatagatcgtggtattccaga

SEQ ID NO: 157193 - DNA, 25 bp, Probe sequence
tacgattcctgtttatatgccatat

SEQ ID NO: 157194 - DNA, 25 bp, Probe sequence
tatctaatgcgattcgttcatcata

SEQ ID NO: 157195 - DNA, 25 bp, Probe sequence
tattcagatgtaaacggcgattata

SEQ ID NO: 157196 - DNA, 25 bp, Probe sequence
ttttacaatcaatcgtcagcaacag

SEQ ID NO: 157197 - DNA, 25 bp, Probe sequence
ttaggtggtagttggacactatgga

SEQ ID NO: 157198 - DNA, 25 bp, Probe sequence
ttgcatttgaaccgtggcattctgc

SEQ ID NO: 157199 - DNA, 25 bp, Probe sequence
attgttacgttcggtcgttcgatgg

SEQ ID NO: 157200 - DNA, 25 bp, Probe sequence
atggcgtcatcgtagatacacctga

SEQ ID NO: 157201 - DNA, 25 bp, Probe sequence
aggtgatcaacaattaatgcttcga

SEQ ID NO: 157202 - DNA, 25 bp, Probe sequence
agaccatataggcggtgtgcccttc

SEQ ID NO: 157203 - DNA, 25 bp, Probe sequence
agcacgtaaagctggtcgcattcca

SEQ ID NO: 157204 - DNA, 25 bp, Probe sequence
agcactttacgatttctttctactt

SEQ ID NO: 157205 - DNA, 25 bp, Probe sequence
acacctgtaggcaaaccagcaaaca

SEQ ID NO: 157206 - DNA, 25 bp, Probe sequence
aaagcaccacctgaaacatttattg

SEQ ID NO: 157207 - DNA, 25 bp, Probe sequence
caaataaattactttctggtccaga

SEQ ID NO: 157208 - DNA, 25 bp, Probe sequence
cagggcatggttctcaaggtgatca

SEQ ID NO: 157209 - DNA, 25 bp, Probe sequence
gccgaaatatttcttacctattcat

SEQ ID NO: 157210 - DNA, 25 bp, Probe sequence
gcttctaatatttaccgagttcaac

SEQ ID NO: 157211 - DNA, 25 bp, Probe sequence
gctttaacacacgattcagcacgta

SEQ ID NO: 157212 - DNA, 25 bp, Probe sequence
gaaggcgttctatgtttactttcag

SEQ ID NO: 157213 - DNA, 25 bp, Probe sequence
gaagaaggtttagttatcgttgttg

SEQ ID NO: 157214 - DNA, 25 bp, Probe sequence
gaacatcatttattacgtactgcta

SEQ ID NO: 157215 - DNA, 25 bp, Probe sequence
gactcaacaaattcacttgtgcctg

SEQ ID NO: 157216 - DNA, 25 bp, Probe sequence
gagactggtgttgaatgcggcgttg

SEQ ID NO: 157217 - DNA, 25 bp, Probe sequence
gagaccgtaagctattatctgaaga

SEQ ID NO: 157218 - DNA, 25 bp, Probe sequence
gttcatcacctatcccaggtaatac

SEQ ID NO: 157219 - DNA, 25 bp, Probe sequence
gtattcctgaaacttatggcgtcat

SEQ ID NO: 157220 - DNA, 25 bp, Probe sequence
gtagttcataccggtgactttaaat

SEQ ID NO: 157221 - DNA, 25 bp, Probe sequence
gtgcctgattttactttaagcgaac

SEQ ID NO: 157222 - DNA, 25 bp, Probe sequence
gtgtatatgcacttggaggtctagg

SEQ ID NO: 157223 - DNA, 25 bp, Probe sequence
gtgtgcccttcctattaaaacaact

SEQ ID NO: 157224 - DNA, 25 bp, Probe sequence
ggtgaaccaatggcagcattatcta

SEQ ID NO: 157225 - DNA, 25 bp, Probe sequence
ggtcgcattccatctggtaatgtac

SEQ ID NO: 157226 - DNA, 25 bp, Probe sequence
ggtatcggtgatatcggtaatgttg

SEQ ID NO: 157227 - DNA, 25 bp, Probe sequence
ggagatgtcttagctttaacacacg

SEQ ID NO: 157228 - DNA, 25 bp, Probe sequence
ggcctatttataacacatggtcacg

SEQ ID NO: 157229 - DNA, 25 bp, Probe sequence
tgttatacctgactacacatatcta

SEQ ID NO: 157230 - DNA, 25 bp, Probe sequence
tacctatttatggtggtcctttagc

SEQ ID NO: 157231 - DNA, 25 bp, Probe sequence
taccgttgtatttagttcatcacct

SEQ ID NO: 157232 - DNA, 25 bp, Probe sequence
ttctaacatccatacttcagggcat

SEQ ID NO: 157233 - DNA, 25 bp, Probe sequence
attagagggcgcacatttagattac

SEQ ID NO: 157234 - DNA, 25 bp, Probe sequence
attttaatatcgaatttatcactaa

SEQ ID NO: 157235 - DNA, 25 bp, Probe sequence
atacacaatcactttatgttgaagc

SEQ ID NO: 157236 - DNA, 25 bp, Probe sequence
atcactaaattagagggcgcacatt

SEQ ID NO: 157237 - DNA, 25 bp, Probe sequence
agagggcgcacatttagattacgaa

SEQ ID NO: 157238 - DNA, 25 bp, Probe sequence
agggcgcacatttagattacgaaaa

SEQ ID NO: 157239 - DNA, 25 bp, Probe sequence
agtacgtcgttacttgaaagatcgt

SEQ ID NO: 157240 - DNA, 25 bp, Probe sequence
acgtcgttacttgaaagatcgtaat

SEQ ID NO: 157241 - DNA, 25 bp, Probe sequence
acgaggtaattgtgcgtgaaaatac

SEQ ID NO: 157242 - DNA, 25 bp, Probe sequence
acagagacgaggtaattgtgcgtga

SEQ ID NO: 157243 - DNA, 25 bp, Probe sequence
acagaagaacaagtacgtcgttact

SEQ ID NO: 157244 - DNA, 25 bp, Probe sequence
acactttaatgtggagattgctaaa

SEQ ID NO: 157245 - DNA, 25 bp, Probe sequence
acacaatcactttatgttgaagctc

SEQ ID NO: 157246 - DNA, 25 bp, Probe sequence
acaatcactttatgttgaagctcaa

SEQ ID NO: 157247 - DNA, 25 bp, Probe sequence
aaatacacaatcactttatgttgaa

SEQ ID NO: 157248 - DNA, 25 bp, Probe sequence
aactcagaacactttaatgtggaga

SEQ ID NO: 157249 - DNA, 25 bp, Probe sequence
aagaaaactcagaacactttaatgt

SEQ ID NO: 157250 - DNA, 25 bp, Probe sequence
aagatcgtaattttaatatcgaatt

SEQ ID NO: 157251 - DNA, 25 bp, Probe sequence
aatcactttatgttgaagctcaaac

SEQ ID NO: 157252 - DNA, 25 bp, Probe sequence
cactttatgttgaagctcaaacaga

SEQ ID NO: 157253 - DNA, 25 bp, Probe sequence
gcgcacatttagattacgaaaaaga

SEQ ID NO: 157254 - DNA, 25 bp, Probe sequence
gaagaacaagtacgtcgttacttga

SEQ ID NO: 157255 - DNA, 25 bp, Probe sequence
gaaaatacacaatcactttatgttg

SEQ ID NO: 157256 - DNA, 25 bp, Probe sequence
gaaaactcagaacactttaatgtgg

SEQ ID NO: 157257 - DNA, 25 bp, Probe sequence
gagacgaggtaattgtgcgtgaaaa

SEQ ID NO: 157258 - DNA, 25 bp, Probe sequence
gagggcgcacatttagattacgaaa

SEQ ID NO: 157259 - DNA, 25 bp, Probe sequence
gtacgtcgttacttgaaagatcgta

SEQ ID NO: 157260 - DNA, 25 bp, Probe sequence
gtgcgtgaaaatacacaatcacttt

SEQ ID NO: 157261 - DNA, 25 bp, Probe sequence
gtggagattgctaaataatgaaaca

SEQ ID NO: 157262 - DNA, 25 bp, Probe sequence
gggcgcacatttagattacgaaaaa

SEQ ID NO: 157263 - DNA, 25 bp, Probe sequence
taaagttttttatcaacataacaga

SEQ ID NO: 157264 - DNA, 25 bp, Probe sequence
tagagggcgcacatttagattacga

SEQ ID NO: 157265 - DNA, 25 bp, Probe sequence
ttatcaacataacagagacgaggta

SEQ ID NO: 157266 - DNA, 25 bp, Probe sequence
ttatgttgaagctcaaacagaagaa

SEQ ID NO: 157267 - DNA, 25 bp, Probe sequence
attacaattaaagccaaagacatcg

SEQ ID NO: 157268 - DNA, 25 bp, Probe sequence
atatttctaaacgtatgattgctgt

SEQ ID NO: 157269 - DNA, 25 bp, Probe sequence
atggtcatccaactttgcgtcaaaa

SEQ ID NO: 157270 - DNA, 25 bp, Probe sequence
agttcaccgtcataatagaattaca

SEQ ID NO: 157271 - DNA, 25 bp, Probe sequence
aaaattgtaagtcatagcgttcaag

SEQ ID NO: 157272 - DNA, 25 bp, Probe sequence
aactttgcgtcaaaaagcagctgag

SEQ ID NO: 157273 - DNA, 25 bp, Probe sequence
aagccaaagacatcgaaggtaatga

SEQ ID NO: 157274 - DNA, 25 bp, Probe sequence
aagaagcttatttaccaactggtga

SEQ ID NO: 157275 - DNA, 25 bp, Probe sequence
aagacatcattagagatggtcatcc

SEQ ID NO: 157276 - DNA, 25 bp, Probe sequence
aagtcatagcgttcaagaagcttat

SEQ ID NO: 157277 - DNA, 25 bp, Probe sequence
aatgttgctggtctagttcaccgtc

SEQ ID NO: 157278 - DNA, 25 bp, Probe sequence
aatggtgtaatgttctatgatcaca

SEQ ID NO: 157279 - DNA, 25 bp, Probe sequence
aatgttctatgatcacattgacaaa

SEQ ID NO: 157280 - DNA, 25 bp, Probe sequence
aatcgccatgagagagtttttagta

SEQ ID NO: 157281 - DNA, 25 bp, Probe sequence
cacccattacaaccacatacagatg

SEQ ID NO: 157282 - DNA, 25 bp, Probe sequence
cttatgactatatgcttgtgaaccc

SEQ ID NO: 157283 - DNA, 25 bp, Probe sequence
ctggtctagttcaccgtcataatag

SEQ ID NO: 157284 - DNA, 25 bp, Probe sequence
gaaggttgccttagtgtcgatgata

SEQ ID NO: 157285 - DNA, 25 bp, Probe sequence
gaaacattaatcgccatgagagagt

SEQ ID NO: 157286 - DNA, 25 bp, Probe sequence
gagatggtcatccaactttgcgtca

SEQ ID NO: 157287 - DNA, 25 bp, Probe sequence
gatggcagtggcaaatcttatgact

SEQ ID NO: 157288 - DNA, 25 bp, Probe sequence
gtcaagatgaggaaatcgcgaaacg

SEQ ID NO: 157289 - DNA, 25 bp, Probe sequence
gtcatccaactttgcgtcaaaaagc

SEQ ID NO: 157290 - DNA, 25 bp, Probe sequence
gtgtcgatgataatgttgctggtct

SEQ ID NO: 157291 - DNA, 25 bp, Probe sequence
ggatatccagcaattgttttccaac

SEQ ID NO: 157292 - DNA, 25 bp, Probe sequence
ggttgccttagtgtcgatgataatg

SEQ ID NO: 157293 - DNA, 25 bp, Probe sequence
ggcagtggcaaatcttatgactata

SEQ ID NO: 157294 - DNA, 25 bp, Probe sequence
tccagcaattgttttccaacatgaa

SEQ ID NO: 157295 - DNA, 25 bp, Probe sequence
taccagatgatggcagtggcaaatc

SEQ ID NO: 157296 - DNA, 25 bp, Probe sequence
taccaactggtgaaggttgccttag

SEQ ID NO: 157297 - DNA, 25 bp, Probe sequence
tacgttcaggcgttggtttggctgc

SEQ ID NO: 157298 - DNA, 25 bp, Probe sequence
ttgctggtctagttcaccgtcataa

SEQ ID NO: 157299 - DNA, 25 bp, Probe sequence
ttgctgttttaataccagatgatgg

SEQ ID NO: 157300 - DNA, 25 bp, Probe sequence
ttggtttggctgcacctcaaattaa

SEQ ID NO: 157301 - DNA, 25 bp, Probe sequence
attgagcaactacttgtattctctc

SEQ ID NO: 157302 - DNA, 25 bp, Probe sequence
attcgatcatcgcagttcaaataaa

SEQ ID NO: 157303 - DNA, 25 bp, Probe sequence
attcaacgattactggtactttagc

SEQ ID NO: 157304 - DNA, 25 bp, Probe sequence
atttaatcgttcaaacattccaaga

SEQ ID NO: 157305 - DNA, 25 bp, Probe sequence
ataacggcattctctatattgcatt

SEQ ID NO: 157306 - DNA, 25 bp, Probe sequence
atcacgccttaaaaactgaacctgt

SEQ ID NO: 157307 - DNA, 25 bp, Probe sequence
atctcctatttaacatacctttaat

SEQ ID NO: 157308 - DNA, 25 bp, Probe sequence
acctgtactaggtgcaacaatgggt

SEQ ID NO: 157309 - DNA, 25 bp, Probe sequence
aggttattggtagtgctattgctct

SEQ ID NO: 157310 - DNA, 25 bp, Probe sequence
acaatgggtgcaatcatgagtacat

SEQ ID NO: 157311 - DNA, 25 bp, Probe sequence
aagacttgatgggacctttctataa

SEQ ID NO: 157312 - DNA, 25 bp, Probe sequence
aagtctatatttcatcaccacagtt

SEQ ID NO: 157313 - DNA, 25 bp, Probe sequence
aatcgcatttgtagtcaattgctta

SEQ ID NO: 157314 - DNA, 25 bp, Probe sequence
ctgtacttgatgtatttttactact

SEQ ID NO: 157315 - DNA, 25 bp, Probe sequence
gctctgccattctgtttaataccat

SEQ ID NO: 157316 - DNA, 25 bp, Probe sequence
gctgacgatttaggtggtttctatg

SEQ ID NO: 157317 - DNA, 25 bp, Probe sequence
gcagttgcattattagcgtcaggtc

SEQ ID NO: 157318 - DNA, 25 bp, Probe sequence
gcaacaggtatggacttagctcaaa

SEQ ID NO: 157319 - DNA, 25 bp, Probe sequence
gaacattcagttatcaatcgcattt

SEQ ID NO: 157320 - DNA, 25 bp, Probe sequence
gacacgacattatttatcaagacct

SEQ ID NO: 157321 - DNA, 25 bp, Probe sequence
gacctattgctataatcttttggat

SEQ ID NO: 157322 - DNA, 25 bp, Probe sequence
gtttctatgatttatatcacgcctt

SEQ ID NO: 157323 - DNA, 25 bp, Probe sequence
gtattctctcaagtatttttaagta

SEQ ID NO: 157324 - DNA, 25 bp, Probe sequence
gtacttacattcatcaattgtacaa

SEQ ID NO: 157325 - DNA, 25 bp, Probe sequence
gtacaatctagaacatactcaagac

SEQ ID NO: 157326 - DNA, 25 bp, Probe sequence
gggttaatatcatttcatggacact

SEQ ID NO: 157327 - DNA, 25 bp, Probe sequence
ggacttagctcaaatgacacgacat

SEQ ID NO: 157328 - DNA, 25 bp, Probe sequence
tgagtacattatttgcagttgcatt

SEQ ID NO: 157329 - DNA, 25 bp, Probe sequence
taagtattgctctgccattctgttt

SEQ ID NO: 157330 - DNA, 25 bp, Probe sequence
ttttcacagtgttattcatctttat

SEQ ID NO: 157331 - DNA, 25 bp, Probe sequence
ttatcagcaatgttacttcaaagca

SEQ ID NO: 157332 - DNA, 25 bp, Probe sequence
ttatgcctcataatttgtacttaca

SEQ ID NO: 157333 - DNA, 25 bp, Probe sequence
ttcatggacacttattattattcta

SEQ ID NO: 157334 - DNA, 25 bp, Probe sequence
ttgctgtcattcctgttatcgtatg

SEQ ID NO: 157335 - DNA, 25 bp, Probe sequence
attctttatagcgcgtgcaatcaca

SEQ ID NO: 157336 - DNA, 25 bp, Probe sequence
atatgaaacctgataaaccatttat

SEQ ID NO: 157337 - DNA, 25 bp, Probe sequence
aggcttagacgcacgaatggaagct

SEQ ID NO: 157338 - DNA, 25 bp, Probe sequence
aggtgaattctttatagcgcgtgca

SEQ ID NO: 157339 - DNA, 25 bp, Probe sequence
agttcttaccattttattctgcata

SEQ ID NO: 157340 - DNA, 25 bp, Probe sequence
accttcgatcagttcttaccatttt

SEQ ID NO: 157341 - DNA, 25 bp, Probe sequence
acttctttacaagtcaaactggtga

SEQ ID NO: 157342 - DNA, 25 bp, Probe sequence
aaattggtatgtttgaagatcaact

SEQ ID NO: 157343 - DNA, 25 bp, Probe sequence
aacaattacctgatgattatcgtgt

SEQ ID NO: 157344 - DNA, 25 bp, Probe sequence
aacgaatacatacgaccacaactcc

SEQ ID NO: 157345 - DNA, 25 bp, Probe sequence
aagcaacacgtgcaaaagtttttga

SEQ ID NO: 157346 - DNA, 25 bp, Probe sequence
aatgttacctcatttccaaattggt

SEQ ID NO: 157347 - DNA, 25 bp, Probe sequence
cttcgatcagttcttaccattttat

SEQ ID NO: 157348 - DNA, 25 bp, Probe sequence
cgatcagttcttaccattttattct

SEQ ID NO: 157349 - DNA, 25 bp, Probe sequence
gctattcaacaattacctgatgatt

SEQ ID NO: 157350 - DNA, 25 bp, Probe sequence
gaaaccttcgatcagttcttaccat

SEQ ID NO: 157351 - DNA, 25 bp, Probe sequence
gaattctttatagcgcgtgcaatca

SEQ ID NO: 157352 - DNA, 25 bp, Probe sequence
gaatattttagtgacttctttacaa

SEQ ID NO: 157353 - DNA, 25 bp, Probe sequence
gaaggcttagacgcacgaatggaag

SEQ ID NO: 157354 - DNA, 25 bp, Probe sequence
gaagatcaactgtttgttatgtttg

SEQ ID NO: 157355 - DNA, 25 bp, Probe sequence
gaagcgatacaaagagccatcaatg

SEQ ID NO: 157356 - DNA, 25 bp, Probe sequence
gtagaaggcttagacgcacgaatgg

SEQ ID NO: 157357 - DNA, 25 bp, Probe sequence
gatacaaagagccatcaatgtgaaa

SEQ ID NO: 157358 - DNA, 25 bp, Probe sequence
gttcttaccattttattctgcataa

SEQ ID NO: 157359 - DNA, 25 bp, Probe sequence
gttacctcatttccaaattggtatg

SEQ ID NO: 157360 - DNA, 25 bp, Probe sequence
gtttgttatgtttggaatcatgcat

SEQ ID NO: 157361 - DNA, 25 bp, Probe sequence
gtgacaaagcatttattgcattttt

SEQ ID NO: 157362 - DNA, 25 bp, Probe sequence
ggctataaaatgttacctcatttcc

SEQ ID NO: 157363 - DNA, 25 bp, Probe sequence
tgcttagatcatatgaaacctgata

SEQ ID NO: 157364 - DNA, 25 bp, Probe sequence
tcaacgtagaaggcttagacgcacg

SEQ ID NO: 157365 - DNA, 25 bp, Probe sequence
tatacatttaaacctaaagatttca

SEQ ID NO: 157366 - DNA, 25 bp, Probe sequence
tatagcgcgtgcaatcacaccacaa

SEQ ID NO: 157367 - DNA, 25 bp, Probe sequence
tttatagcgcgtgcaatcacaccac

SEQ ID NO: 157368 - DNA, 25 bp, Probe sequence
ttatgtttggaatcatgcatgaagc

SEQ ID NO: 157369 - DNA, 25 bp, Probe sequence
attactcgttgcaacctttggaatt

SEQ ID NO: 157370 - DNA, 25 bp, Probe sequence
atattactcgttgcaacctttggaa

SEQ ID NO: 157371 - DNA, 25 bp, Probe sequence
agtattatttagttttgctgttggt

SEQ ID NO: 157372 - DNA, 25 bp, Probe sequence
actcgttgcaacctttggaattgga

SEQ ID NO: 157373 - DNA, 25 bp, Probe sequence
aaatgtaccaatgatgattttaaca

SEQ ID NO: 157374 - DNA, 25 bp, Probe sequence
aatatcgagaaaacgattggctata

SEQ ID NO: 157375 - DNA, 25 bp, Probe sequence
aatatcttttgggtattttctatat

SEQ ID NO: 157376 - DNA, 25 bp, Probe sequence
ctcgttgcaacctttggaattggat

SEQ ID NO: 157377 - DNA, 25 bp, Probe sequence
cttagtattatttagttttgctgtt

SEQ ID NO: 157378 - DNA, 25 bp, Probe sequence
cgttgcaacctttggaattggattt

SEQ ID NO: 157379 - DNA, 25 bp, Probe sequence
gctgttggtgcatcaaatgtaccaa

SEQ ID NO: 157380 - DNA, 25 bp, Probe sequence
gcaacctttggaattggatttacta

SEQ ID NO: 157381 - DNA, 25 bp, Probe sequence
gttggtgcatcaaatgtaccaatga

SEQ ID NO: 157382 - DNA, 25 bp, Probe sequence
gttgcaacctttggaattggattta

SEQ ID NO: 157383 - DNA, 25 bp, Probe sequence
gtattatttagttttgctgttggtg

SEQ ID NO: 157384 - DNA, 25 bp, Probe sequence
ggtgcatcaaatgtaccaatgatga

SEQ ID NO: 157385 - DNA, 25 bp, Probe sequence
tgattttaacatttatattactcgt

SEQ ID NO: 157386 - DNA, 25 bp, Probe sequence
tgcaacctttggaattggatttact

SEQ ID NO: 157387 - DNA, 25 bp, Probe sequence
tgctgttggtgcatcaaatgtacca

SEQ ID NO: 157388 - DNA, 25 bp, Probe sequence
tcgttgcaacctttggaattggatt

SEQ ID NO: 157389 - DNA, 25 bp, Probe sequence
tattactcgttgcaacctttggaat

SEQ ID NO: 157390 - DNA, 25 bp, Probe sequence
tcttttgggtattttctatattagc

SEQ ID NO: 157391 - DNA, 25 bp, Probe sequence
tactcgttgcaacctttggaattgg

SEQ ID NO: 157392 - DNA, 25 bp, Probe sequence
tagtattatttagttttgctgttgg

SEQ ID NO: 157393 - DNA, 25 bp, Probe sequence
tatcttttgggtattttctatatta

SEQ ID NO: 157394 - DNA, 25 bp, Probe sequence
tatattactcgttgcaacctttgga

SEQ ID NO: 157395 - DNA, 25 bp, Probe sequence
tattatttagttttgctgttggtgc

SEQ ID NO: 157396 - DNA, 25 bp, Probe sequence
ttactcgttgcaacctttggaattg

SEQ ID NO: 157397 - DNA, 25 bp, Probe sequence
tttatattactcgttgcaacctttg

SEQ ID NO: 157398 - DNA, 25 bp, Probe sequence
ttatattactcgttgcaacctttgg

SEQ ID NO: 157399 - DNA, 25 bp, Probe sequence
ttttgggtattttctatattagctg

SEQ ID NO: 157400 - DNA, 25 bp, Probe sequence
ttcttagtattatttagttttgctg

SEQ ID NO: 157401 - DNA, 25 bp, Probe sequence
ttgctgttggtgcatcaaatgtacc

SEQ ID NO: 157402 - DNA, 25 bp, Probe sequence
ttgggtattttctatattagctgtt

SEQ ID NO: 157403 - DNA, 25 bp, Probe sequence
attatctgtgatgcaaaagtattta

SEQ ID NO: 157404 - DNA, 25 bp, Probe sequence
atttatagatgagcgcacaactgag

SEQ ID NO: 157405 - DNA, 25 bp, Probe sequence
atagatgagcgcacaactgagtcta

SEQ ID NO: 157406 - DNA, 25 bp, Probe sequence
atgagcgcacaactgagtctaaacg

SEQ ID NO: 157407 - DNA, 25 bp, Probe sequence
agatgagcgcacaactgagtctaaa

SEQ ID NO: 157408 - DNA, 25 bp, Probe sequence
agcgcacaactgagtctaaacgact

SEQ ID NO: 157409 - DNA, 25 bp, Probe sequence
acaatcctattcgaacatttatgtg

SEQ ID NO: 157410 - DNA, 25 bp, Probe sequence
aaagtatttatagatgagcgcacaa

SEQ ID NO: 157411 - DNA, 25 bp, Probe sequence
aaacaacgtgcgcaacactatccgc

SEQ ID NO: 157412 - DNA, 25 bp, Probe sequence
aaacaatcctattcgaacatttatg

SEQ ID NO: 157413 - DNA, 25 bp, Probe sequence
aaaacaatcctattcgaacatttat

SEQ ID NO: 157414 - DNA, 25 bp, Probe sequence
aacaatcctattcgaacatttatgt

SEQ ID NO: 157415 - DNA, 25 bp, Probe sequence
aacaacgtgcgcaacactatccgct

SEQ ID NO: 157416 - DNA, 25 bp, Probe sequence
aagtatttatagatgagcgcacaac

SEQ ID NO: 157417 - DNA, 25 bp, Probe sequence
cacaactgagtctaaacgacttaaa

SEQ ID NO: 157418 - DNA, 25 bp, Probe sequence
ctaaacaacgtgcgcaacactatcc

SEQ ID NO: 157419 - DNA, 25 bp, Probe sequence
cttaaaaacaatcctattcgaacat

SEQ ID NO: 157420 - DNA, 25 bp, Probe sequence
cgcacaactgagtctaaacgactta

SEQ ID NO: 157421 - DNA, 25 bp, Probe sequence
cctaaacaacgtgcgcaacactatc

SEQ ID NO: 157422 - DNA, 25 bp, Probe sequence
gcgcacaactgagtctaaacgactt

SEQ ID NO: 157423 - DNA, 25 bp, Probe sequence
gcacaactgagtctaaacgacttaa

SEQ ID NO: 157424 - DNA, 25 bp, Probe sequence
gcaatgcattatctgtgatgcaaaa

SEQ ID NO: 157425 - DNA, 25 bp, Probe sequence
gagcgcacaactgagtctaaacgac

SEQ ID NO: 157426 - DNA, 25 bp, Probe sequence
gatgagcgcacaactgagtctaaac

SEQ ID NO: 157427 - DNA, 25 bp, Probe sequence
gtatttatagatgagcgcacaactg

SEQ ID NO: 157428 - DNA, 25 bp, Probe sequence
tgagcgcacaactgagtctaaacga

SEQ ID NO: 157429 - DNA, 25 bp, Probe sequence
tgcaatgcattatctgtgatgcaaa

SEQ ID NO: 157430 - DNA, 25 bp, Probe sequence
taaaaacaatcctattcgaacattt

SEQ ID NO: 157431 - DNA, 25 bp, Probe sequence
taaacaacgtgcgcaacactatccg

SEQ ID NO: 157432 - DNA, 25 bp, Probe sequence
tagatgagcgcacaactgagtctaa

SEQ ID NO: 157433 - DNA, 25 bp, Probe sequence
tatagatgagcgcacaactgagtct

SEQ ID NO: 157434 - DNA, 25 bp, Probe sequence
tatttatagatgagcgcacaactga

SEQ ID NO: 157435 - DNA, 25 bp, Probe sequence
tttatagatgagcgcacaactgagt

SEQ ID NO: 157436 - DNA, 25 bp, Probe sequence
ttatagatgagcgcacaactgagtc

SEQ ID NO: 157437 - DNA, 25 bp, Probe sequence
aaacgactttacagcgataatggtg

SEQ ID NO: 157438 - DNA, 25 bp, Probe sequence
atatcgaatcaaccatgtaactcat

SEQ ID NO: 157439 - DNA, 25 bp, Probe sequence
atccgcctactttaaattcagaaat

SEQ ID NO: 157440 - DNA, 25 bp, Probe sequence
atgactctgcaactactattcgatt

SEQ ID NO: 157441 - DNA, 25 bp, Probe sequence
aggtgtatttgatggttcaaaacca

SEQ ID NO: 157442 - DNA, 25 bp, Probe sequence
agaaggttcatttgtcattaatatg

SEQ ID NO: 157443 - DNA, 25 bp, Probe sequence
actctgcaactactattcgattatc

SEQ ID NO: 157444 - DNA, 25 bp, Probe sequence
actaatccgcctactttaaattcag

SEQ ID NO: 157445 - DNA, 25 bp, Probe sequence
actattcgattatcaaatgagcatg

SEQ ID NO: 157446 - DNA, 25 bp, Probe sequence
aaacgtgccatgttagaaggttcat

SEQ ID NO: 157447 - DNA, 25 bp, Probe sequence
aaacattccgaaccacatgactctg

SEQ ID NO: 157448 - DNA, 25 bp, Probe sequence
aaccaatcgactttgaagataatca

SEQ ID NO: 157449 - DNA, 25 bp, Probe sequence
aaccacatgactctgcaactactat

SEQ ID NO: 157450 - DNA, 25 bp, Probe sequence
cacatgactctgcaactactattcg

SEQ ID NO: 157451 - DNA, 25 bp, Probe sequence
ctgcaactactattcgattatcaaa

SEQ ID NO: 157452 - DNA, 25 bp, Probe sequence
tccaatttgcaaaagacggtaaacg

SEQ ID NO: 157453 - DNA, 25 bp, Probe sequence
gccatgttagaaggttcatttgtca

SEQ ID NO: 157454 - DNA, 25 bp, Probe sequence
gaaggacaaactaatccgcctactt

SEQ ID NO: 157455 - DNA, 25 bp, Probe sequence
gaatggaatcgtgctatcctagaag

SEQ ID NO: 157456 - DNA, 25 bp, Probe sequence
gaagatggttattcatatcgaatca

SEQ ID NO: 157457 - DNA, 25 bp, Probe sequence
gaaaagttagcatcgaagatttaga

SEQ ID NO: 157458 - DNA, 25 bp, Probe sequence
gacggtaaacgactttacagcgata

SEQ ID NO: 157459 - DNA, 25 bp, Probe sequence
gagcatgatcatttagatataccga

SEQ ID NO: 157460 - DNA, 25 bp, Probe sequence
gatggttcaaaaccaatcgactttg

SEQ ID NO: 157461 - DNA, 25 bp, Probe sequence
gatagtacgacttggattttcgatg

SEQ ID NO: 157462 - DNA, 25 bp, Probe sequence
gtagatagttttatttacaatcaag

SEQ ID NO: 157463 - DNA, 25 bp, Probe sequence
gtacgacttggattttcgatgatag

SEQ ID NO: 157464 - DNA, 25 bp, Probe sequence
gtaaagtttcctataacattagata

SEQ ID NO: 157465 - DNA, 25 bp, Probe sequence
ggaatcgtgctatcctagaaggaca

SEQ ID NO: 157466 - DNA, 25 bp, Probe sequence
tgatcatttagatataccgatagat

SEQ ID NO: 157467 - DNA, 25 bp, Probe sequence
tcaaccatgtaactcatattgaggt

SEQ ID NO: 157468 - DNA, 25 bp, Probe sequence
taatcatgaatggaatcgtgctatc

SEQ ID NO: 157469 - DNA, 25 bp, Probe sequence
tatttatttttccaatttgcaaaag

SEQ ID NO: 157470 - DNA, 25 bp, Probe sequence
tttttcaaacattccgaaccacatg

SEQ ID NO: 157471 - DNA, 25 bp, Probe sequence
atacagctgcatttatacttgttat

SEQ ID NO: 157472 - DNA, 25 bp, Probe sequence
atcatggcttttatagtgtttacga

SEQ ID NO: 157473 - DNA, 25 bp, Probe sequence
atgtcgtccacatacaatacttgta

SEQ ID NO: 157474 - DNA, 25 bp, Probe sequence
atggtggttggccattgccattcca

SEQ ID NO: 157475 - DNA, 25 bp, Probe sequence
agtttctcatctgtatttttaataa

SEQ ID NO: 157476 - DNA, 25 bp, Probe sequence
agttaccaaaaccggatcagctgat

SEQ ID NO: 157477 - DNA, 25 bp, Probe sequence
acgattacgttttagcattgcactt

SEQ ID NO: 157478 - DNA, 25 bp, Probe sequence
aaacctttatcaatcattagtgttg

SEQ ID NO: 157479 - DNA, 25 bp, Probe sequence
aacattgattattttctctatagat

SEQ ID NO: 157480 - DNA, 25 bp, Probe sequence
aatggttaggtgtcgtagcaacgtt

SEQ ID NO: 157481 - DNA, 25 bp, Probe sequence
caacttggtggagccttagttacca

SEQ ID NO: 157482 - DNA, 25 bp, Probe sequence
caactcacgcatcgtatcatggctt

SEQ ID NO: 157483 - DNA, 25 bp, Probe sequence
gccgtttcagctttgtctttattaa

SEQ ID NO: 157484 - DNA, 25 bp, Probe sequence
gaattctttcctattgatacgatta

SEQ ID NO: 157485 - DNA, 25 bp, Probe sequence
gacaacatactttatcatgctaatg

SEQ ID NO: 157486 - DNA, 25 bp, Probe sequence
gacatgcggatgcaagtttagcata

SEQ ID NO: 157487 - DNA, 25 bp, Probe sequence
gacatttgtacaacttggtggagcc

SEQ ID NO: 157488 - DNA, 25 bp, Probe sequence
gatcagctgatggttgtggttcttc

SEQ ID NO: 157489 - DNA, 25 bp, Probe sequence
gattacttatattcacgctgttaaa

SEQ ID NO: 157490 - DNA, 25 bp, Probe sequence
gttgtggttcttcttggccactatg

SEQ ID NO: 157491 - DNA, 25 bp, Probe sequence
gtatatcattaatcagtttctcatc

SEQ ID NO: 157492 - DNA, 25 bp, Probe sequence
gtcatagagccgtttcagctttgtc

SEQ ID NO: 157493 - DNA, 25 bp, Probe sequence
gtgcgttgattccagaattctttcc

SEQ ID NO: 157494 - DNA, 25 bp, Probe sequence
gtgatgcgtttttttatgatggggt

SEQ ID NO: 157495 - DNA, 25 bp, Probe sequence
gtgttggattcttattattgcaagc

SEQ ID NO: 157496 - DNA, 25 bp, Probe sequence
ggcaatcatcatttattgtggtgtt

SEQ ID NO: 157497 - DNA, 25 bp, Probe sequence
ggccactatgtcatggtgcgttgat

SEQ ID NO: 157498 - DNA, 25 bp, Probe sequence
tggtcttatggttagttatcactgc

SEQ ID NO: 157499 - DNA, 25 bp, Probe sequence
tgttcattatggttatacagctgca

SEQ ID NO: 157500 - DNA, 25 bp, Probe sequence
tccacgatcttgtaccacattcaga

SEQ ID NO: 157501 - DNA, 25 bp, Probe sequence
tccatgcattatttatcacttattt

SEQ ID NO: 157502 - DNA, 25 bp, Probe sequence
tagcattgcactttggtatatcatt

SEQ ID NO: 157503 - DNA, 25 bp, Probe sequence
tattacaagttatcacaggtgcatt

SEQ ID NO: 157504 - DNA, 25 bp, Probe sequence
tattgcaagcattaatcggagctgc

SEQ ID NO: 157505 - DNA, 25 bp, Probe sequence
atttgcgcatcgcggtggtatggct

SEQ ID NO: 157506 - DNA, 25 bp, Probe sequence
atttgacttcatctcgttttatcaa

SEQ ID NO: 157507 - DNA, 25 bp, Probe sequence
atactaaccttcgatgagttgctga

SEQ ID NO: 157508 - DNA, 25 bp, Probe sequence
atggctttaagaccagagcaaacgc

SEQ ID NO: 157509 - DNA, 25 bp, Probe sequence
agcttatcgtttttcatgacgcaac

SEQ ID NO: 157510 - DNA, 25 bp, Probe sequence
accatatcgtggtcatgcacacaca

SEQ ID NO: 157511 - DNA, 25 bp, Probe sequence
accatccctgcttttttcaaaggca

SEQ ID NO: 157512 - DNA, 25 bp, Probe sequence
actaccaaccattagcacaaacgtt

SEQ ID NO: 157513 - DNA, 25 bp, Probe sequence
acttcatctcgttttatcaaatggt

SEQ ID NO: 157514 - DNA, 25 bp, Probe sequence
acaaacgttccaaatgcctactcat

SEQ ID NO: 157515 - DNA, 25 bp, Probe sequence
aaatgcggtactagtcggtgctgga

SEQ ID NO: 157516 - DNA, 25 bp, Probe sequence
aagcaaaccatccctgcttttttca

SEQ ID NO: 157517 - DNA, 25 bp, Probe sequence
aatggactaacaccatatcgtggtc

SEQ ID NO: 157518 - DNA, 25 bp, Probe sequence
caccatatatatttgcgcatcgcgg

SEQ ID NO: 157519 - DNA, 25 bp, Probe sequence
gcttttttcaaaggcaatgcaccat

SEQ ID NO: 157520 - DNA, 25 bp, Probe sequence
gcatcgcggtggtatggctttaaga

SEQ ID NO: 157521 - DNA, 25 bp, Probe sequence
gcaattggtgctagccaacaggaag

SEQ ID NO: 157522 - DNA, 25 bp, Probe sequence
gaacgacgaacggctctggaaaagt

SEQ ID NO: 157523 - DNA, 25 bp, Probe sequence
gaccagatttagcacaacaattcaa

SEQ ID NO: 157524 - DNA, 25 bp, Probe sequence
gagcaaacgcaacttgcatttgact

SEQ ID NO: 157525 - DNA, 25 bp, Probe sequence
gagactcacaaaagatcaacagctt

SEQ ID NO: 157526 - DNA, 25 bp, Probe sequence
gatgctcctgaatcctatgaaggct

SEQ ID NO: 157527 - DNA, 25 bp, Probe sequence
gatagaacgacgaacggctctggaa

SEQ ID NO: 157528 - DNA, 25 bp, Probe sequence
gttgctgaagcaatatcctgatatg

SEQ ID NO: 157529 - DNA, 25 bp, Probe sequence
gttccaaatgcctactcattttaaa

SEQ ID NO: 157530 - DNA, 25 bp, Probe sequence
gtgacagatcgaccagatttagcac

SEQ ID NO: 157531 - DNA, 25 bp, Probe sequence
ggtgctagccaacaggaagttacag

SEQ ID NO: 157532 - DNA, 25 bp, Probe sequence
ggtgcacacacgattgtgacagatc

SEQ ID NO: 157533 - DNA, 25 bp, Probe sequence
ggctcaatcgcaccacaaattatgt

SEQ ID NO: 157534 - DNA, 25 bp, Probe sequence
tcattccaggctattatggcgtaaa

SEQ ID NO: 157535 - DNA, 25 bp, Probe sequence
tcacttcaaagatatcaatggacta

SEQ ID NO: 157536 - DNA, 25 bp, Probe sequence
tcaacagcttatcgtttttcatgac

SEQ ID NO: 157537 - DNA, 25 bp, Probe sequence
tatgaaggctcaatcgcaccacaaa

SEQ ID NO: 157538 - DNA, 25 bp, Probe sequence
tataccaaaaaggtgcacacacgat

SEQ ID NO: 157539 - DNA, 25 bp, Probe sequence
attaacccagtacagatcctttcaa

SEQ ID NO: 157540 - DNA, 25 bp, Probe sequence
attagcacttgtaagcacaccttca

SEQ ID NO: 157541 - DNA, 25 bp, Probe sequence
ataccaagtgattatccattttata

SEQ ID NO: 157542 - DNA, 25 bp, Probe sequence
atcagataacattttctttgctaga

SEQ ID NO: 157543 - DNA, 25 bp, Probe sequence
agctgattcaggttacggacaaggt

SEQ ID NO: 157544 - DNA, 25 bp, Probe sequence
acagaaagtcgtaactatcctctag

SEQ ID NO: 157545 - DNA, 25 bp, Probe sequence
acaacttcaccaggttcaactcaaa

SEQ ID NO: 157546 - DNA, 25 bp, Probe sequence
aaagcgacttcacatctattaggtt

SEQ ID NO: 157547 - DNA, 25 bp, Probe sequence
aactacggtaacattgatcgcaacg

SEQ ID NO: 157548 - DNA, 25 bp, Probe sequence
aacgcacctcacttattaaaagaca

SEQ ID NO: 157549 - DNA, 25 bp, Probe sequence
aagctccaacatgaagatggctatc

SEQ ID NO: 157550 - DNA, 25 bp, Probe sequence
aagatgataccttcgttccacttaa

SEQ ID NO: 157551 - DNA, 25 bp, Probe sequence
aatggcaatattaacgcacctcact

SEQ ID NO: 157552 - DNA, 25 bp, Probe sequence
aatagcaatacaatcgcacatacat

SEQ ID NO: 157553 - DNA, 25 bp, Probe sequence
caaatccggtactgcagaactcaaa

SEQ ID NO: 157554 - DNA, 25 bp, Probe sequence
gctagctacaatgccaaaatctcag

SEQ ID NO: 157555 - DNA, 25 bp, Probe sequence
gcatatgagataggcatcgttccaa

SEQ ID NO: 157556 - DNA, 25 bp, Probe sequence
gcacaccttcatatgacgtctatcc

SEQ ID NO: 157557 - DNA, 25 bp, Probe sequence
gaacctctgctcaacaagttccaga

SEQ ID NO: 157558 - DNA, 25 bp, Probe sequence
gacgtctatccatttatgtatggca

SEQ ID NO: 157559 - DNA, 25 bp, Probe sequence
gagtagcactcgaattaggcagtaa

SEQ ID NO: 157560 - DNA, 25 bp, Probe sequence
gatggctatcgtgtcacaatcgttg

SEQ ID NO: 157561 - DNA, 25 bp, Probe sequence
gatcctttcaatctatagcgcatta

SEQ ID NO: 157562 - DNA, 25 bp, Probe sequence
gttccagattacaacttcaccaggt

SEQ ID NO: 157563 - DNA, 25 bp, Probe sequence
gtagaaatgactgaacgtccgataa

SEQ ID NO: 157564 - DNA, 25 bp, Probe sequence
gggatcatagcgtcattattccagg

SEQ ID NO: 157565 - DNA, 25 bp, Probe sequence
ggttatgttggtcccattaactctg

SEQ ID NO: 157566 - DNA, 25 bp, Probe sequence
ggaattggccaatacaggaacagca

SEQ ID NO: 157567 - DNA, 25 bp, Probe sequence
ggcatcgttccaaagaatgtatcta

SEQ ID NO: 157568 - DNA, 25 bp, Probe sequence
tggggtggttacaacgttacaagat

SEQ ID NO: 157569 - DNA, 25 bp, Probe sequence
tgatcgcaacgttcaatttaatttt

SEQ ID NO: 157570 - DNA, 25 bp, Probe sequence
tgctatccaccctcaaacaggtgaa

SEQ ID NO: 157571 - DNA, 25 bp, Probe sequence
tagttgtagttgtcgggtttggtat

SEQ ID NO: 157572 - DNA, 25 bp, Probe sequence
tatggctcaggtactgctatccacc

SEQ ID NO: 157573 - DNA, 25 bp, Probe sequence
attccatacgttttgcttgcttata

SEQ ID NO: 157574 - DNA, 25 bp, Probe sequence
attctcttgccgttcgtaattataa

SEQ ID NO: 157575 - DNA, 25 bp, Probe sequence
attagacgagctaccaacaaccctt

SEQ ID NO: 157576 - DNA, 25 bp, Probe sequence
atattccctactataattccatacg

SEQ ID NO: 157577 - DNA, 25 bp, Probe sequence
atgtctctttatttaacacctatcg

SEQ ID NO: 157578 - DNA, 25 bp, Probe sequence
acggcgccacttttacatcaatagt

SEQ ID NO: 157579 - DNA, 25 bp, Probe sequence
aacaacccttgctattataggcgga

SEQ ID NO: 157580 - DNA, 25 bp, Probe sequence
aattctagtctctacaacgcctatt

SEQ ID NO: 157581 - DNA, 25 bp, Probe sequence
caacgcctattttttctagtgcttt

SEQ ID NO: 157582 - DNA, 25 bp, Probe sequence
caacaataattctcttgccgttcgt

SEQ ID NO: 157583 - DNA, 25 bp, Probe sequence
cttcatcgctttcacactatataca

SEQ ID NO: 157584 - DNA, 25 bp, Probe sequence
gcctacccctgaactaagagatatc

SEQ ID NO: 157585 - DNA, 25 bp, Probe sequence
gcggaattatcactctactaggcgt

SEQ ID NO: 157586 - DNA, 25 bp, Probe sequence
gaataaacttcgagacactactttt

SEQ ID NO: 157587 - DNA, 25 bp, Probe sequence
gaagtcagttggtgtctctgatgca

SEQ ID NO: 157588 - DNA, 25 bp, Probe sequence
gaaaaatacggcttcatcgctttca

SEQ ID NO: 157589 - DNA, 25 bp, Probe sequence
gacactacttttctatcatatttat

SEQ ID NO: 157590 - DNA, 25 bp, Probe sequence
gagatatccctgttatttttatttt

SEQ ID NO: 157591 - DNA, 25 bp, Probe sequence
gatatatcacacagctttaaatttt

SEQ ID NO: 157592 - DNA, 25 bp, Probe sequence
gtttctttattattatcttatctgt

SEQ ID NO: 157593 - DNA, 25 bp, Probe sequence
gtatcggtactttatttagctatat

SEQ ID NO: 157594 - DNA, 25 bp, Probe sequence
gtcggcatttcgtttaattttagca

SEQ ID NO: 157595 - DNA, 25 bp, Probe sequence
gtctctgatgcaacaatgtctcttt

SEQ ID NO: 157596 - DNA, 25 bp, Probe sequence
gtgcagaatcattgtcggcatttcg

SEQ ID NO: 157597 - DNA, 25 bp, Probe sequence
gtgtttttattattttacttgcatc

SEQ ID NO: 157598 - DNA, 25 bp, Probe sequence
ggtatatctggaattctagtctcta

SEQ ID NO: 157599 - DNA, 25 bp, Probe sequence
ggaattggttaagttcactcgtcgc

SEQ ID NO: 157600 - DNA, 25 bp, Probe sequence
ggcaagctcaccatttatgcttatt

SEQ ID NO: 157601 - DNA, 25 bp, Probe sequence
tcatcaacgatatacacggcgccac

SEQ ID NO: 157602 - DNA, 25 bp, Probe sequence
taaagaaattgcctacccctgaact

SEQ ID NO: 157603 - DNA, 25 bp, Probe sequence
taagttcactcgtcgcatttatagg

SEQ ID NO: 157604 - DNA, 25 bp, Probe sequence
ttgtggggatctgcatttccaatga

SEQ ID NO: 157605 - DNA, 25 bp, Probe sequence
tatgcttatttttattcctgaaatc

SEQ ID NO: 157606 - DNA, 25 bp, Probe sequence
ttaacacctatcgtttctttattat

SEQ ID NO: 157607 - DNA, 25 bp, Probe sequence
attacacttggtgaaggtctaacag

SEQ ID NO: 157608 - DNA, 25 bp, Probe sequence
attatgaaccctacaactggcaatc

SEQ ID NO: 157609 - DNA, 25 bp, Probe sequence
atttccaagcattttatatcatgat

SEQ ID NO: 157610 - DNA, 25 bp, Probe sequence
atcatttccaagcattttatatcat

SEQ ID NO: 157611 - DNA, 25 bp, Probe sequence
atcattatgaaccctacaactggca

SEQ ID NO: 157612 - DNA, 25 bp, Probe sequence
agtgtgttaaggctccaaaaatgga

SEQ ID NO: 157613 - DNA, 25 bp, Probe sequence
accctacaactggcaatcatttcca

SEQ ID NO: 157614 - DNA, 25 bp, Probe sequence
actggcaatcatttccaagcatttt

SEQ ID NO: 157615 - DNA, 25 bp, Probe sequence
aaattatctattttcattcaccaca

SEQ ID NO: 157616 - DNA, 25 bp, Probe sequence
aaatatccatatccagattcaaata

SEQ ID NO: 157617 - DNA, 25 bp, Probe sequence
aaaagtcatctgtagcaatcattat

SEQ ID NO: 157618 - DNA, 25 bp, Probe sequence
aaaatggataccagaacttcaataa

SEQ ID NO: 157619 - DNA, 25 bp, Probe sequence
aacagatttgttcgaattcatgacg

SEQ ID NO: 157620 - DNA, 25 bp, Probe sequence
aacgctattaaatatccatatccag

SEQ ID NO: 157621 - DNA, 25 bp, Probe sequence
aaggctccaaaaatggataccagaa

SEQ ID NO: 157622 - DNA, 25 bp, Probe sequence
caattttaggtatcgatgtacagcc

SEQ ID NO: 157623 - DNA, 25 bp, Probe sequence
cacttggtgaaggtctaacagattt

SEQ ID NO: 157624 - DNA, 25 bp, Probe sequence
cctcaagcatttcatgatttatcgt

SEQ ID NO: 157625 - DNA, 25 bp, Probe sequence
gctgaaaaattcgacataccaattt

SEQ ID NO: 157626 - DNA, 25 bp, Probe sequence
gcatttcatgatttatcgttatatt

SEQ ID NO: 157627 - DNA, 25 bp, Probe sequence
gcaatcattatgaaccctacaactg

SEQ ID NO: 157628 - DNA, 25 bp, Probe sequence
gaaggtctaacagatttgttcgaat

SEQ ID NO: 157629 - DNA, 25 bp, Probe sequence
gaaccctacaactggcaatcatttc

SEQ ID NO: 157630 - DNA, 25 bp, Probe sequence
gaaacaaacatttattacacttggt

SEQ ID NO: 157631 - DNA, 25 bp, Probe sequence
gatttgttcgaattcatgacgatga

SEQ ID NO: 157632 - DNA, 25 bp, Probe sequence
gattgaatataaccatcaacgtatt

SEQ ID NO: 157633 - DNA, 25 bp, Probe sequence
gttcgaattcatgacgatgattgaa

SEQ ID NO: 157634 - DNA, 25 bp, Probe sequence
ggcaatcatttccaagcattttata

SEQ ID NO: 157635 - DNA, 25 bp, Probe sequence
tcgacataccaattttaggtatcga

SEQ ID NO: 157636 - DNA, 25 bp, Probe sequence
tctattttcattcaccacaagctga

SEQ ID NO: 157637 - DNA, 25 bp, Probe sequence
taattagtgtgttaaggctccaaaa

SEQ ID NO: 157638 - DNA, 25 bp, Probe sequence
tacaactggcaatcatttccaagca

SEQ ID NO: 157639 - DNA, 25 bp, Probe sequence
tatctattttcattcaccacaagct

SEQ ID NO: 157640 - DNA, 25 bp, Probe sequence
ttcattcaccacaagctgaaaataa

SEQ ID NO: 157641 - DNA, 25 bp, Probe sequence
atatacgcatatccaaagactgtta

SEQ ID NO: 157642 - DNA, 25 bp, Probe sequence
ataagtttactcgtgcaaaaatggc

SEQ ID NO: 157643 - DNA, 25 bp, Probe sequence
atcacagaatataatccctttcata

SEQ ID NO: 157644 - DNA, 25 bp, Probe sequence
atcatctggcgatcattttgccgaa

SEQ ID NO: 157645 - DNA, 25 bp, Probe sequence
agtcctaacaacatacttggtatta

SEQ ID NO: 157646 - DNA, 25 bp, Probe sequence
agatttcaacacgcctgtcatacag

SEQ ID NO: 157647 - DNA, 25 bp, Probe sequence
acattcacgcagttaaagtattagc

SEQ ID NO: 157648 - DNA, 25 bp, Probe sequence
aaagtcgcagattatatgagtgtcg

SEQ ID NO: 157649 - DNA, 25 bp, Probe sequence
aaatgctgacgttactattgcaata

SEQ ID NO: 157650 - DNA, 25 bp, Probe sequence
aaaagcaatgcacattacttcacaa

SEQ ID NO: 157651 - DNA, 25 bp, Probe sequence
aagcgggcaacaacaaacagatttc

SEQ ID NO: 157652 - DNA, 25 bp, Probe sequence
aagcgttggcttaatcacagaatat

SEQ ID NO: 157653 - DNA, 25 bp, Probe sequence
aatccctttcataatgggcatcaat

SEQ ID NO: 157654 - DNA, 25 bp, Probe sequence
cacgcctgtcatacagcaatatcgt

SEQ ID NO: 157655 - DNA, 25 bp, Probe sequence
gcgatcattttgccgaactagcagt

SEQ ID NO: 157656 - DNA, 25 bp, Probe sequence
gctaccctcgtatcattagcgaatt

SEQ ID NO: 157657 - DNA, 25 bp, Probe sequence
gcaactgccagtttatcatctggcg

SEQ ID NO: 157658 - DNA, 25 bp, Probe sequence
gaagcaactgattttcatcattttg

SEQ ID NO: 157659 - DNA, 25 bp, Probe sequence
gaagcactagcaagtcctaacaaca

SEQ ID NO: 157660 - DNA, 25 bp, Probe sequence
gaacgaccgtggcagacaatattta

SEQ ID NO: 157661 - DNA, 25 bp, Probe sequence
gaaaatgctcaacatcatgattcat

SEQ ID NO: 157662 - DNA, 25 bp, Probe sequence
gaaatcaaagcaacacacatataca

SEQ ID NO: 157663 - DNA, 25 bp, Probe sequence
gagcatcatgaagcactagcaagtc

SEQ ID NO: 157664 - DNA, 25 bp, Probe sequence
gatcattggcatcatgtggtaccta

SEQ ID NO: 157665 - DNA, 25 bp, Probe sequence
gagtggtaactttgtcatgcgtggc

SEQ ID NO: 157666 - DNA, 25 bp, Probe sequence
gagtgtcgatacaattgcatttggt

SEQ ID NO: 157667 - DNA, 25 bp, Probe sequence
gtttgcaagtggtacatctattaga

SEQ ID NO: 157668 - DNA, 25 bp, Probe sequence
gtacgtaacacctcatataacatta

SEQ ID NO: 157669 - DNA, 25 bp, Probe sequence
gtcatgcgtggcgaaccagcaatct

SEQ ID NO: 157670 - DNA, 25 bp, Probe sequence
gtggcgaaccagcaatctataataa

SEQ ID NO: 157671 - DNA, 25 bp, Probe sequence
ggtaaaagctaccctcgtatcatta

SEQ ID NO: 157672 - DNA, 25 bp, Probe sequence
tcaacagctgatttagttatcgaac

SEQ ID NO: 157673 - DNA, 25 bp, Probe sequence
tatcgaactaccagcaactgccagt

SEQ ID NO: 157674 - DNA, 25 bp, Probe sequence
ttatactgttactgaaggttttgaa

SEQ ID NO: 157675 - DNA, 25 bp, Probe sequence
atcgttgcattcgtattacctagaa

SEQ ID NO: 157676 - DNA, 25 bp, Probe sequence
atgttgcaaaaccaacaactgcttc

SEQ ID NO: 157677 - DNA, 25 bp, Probe sequence
agaatcaagtagtacaactccaact

SEQ ID NO: 157678 - DNA, 25 bp, Probe sequence
acacattaatggaattcgcacaacc

SEQ ID NO: 157679 - DNA, 25 bp, Probe sequence
acaataccatgtcagaatcgttgat

SEQ ID NO: 157680 - DNA, 25 bp, Probe sequence
acaaccaatttataacagtgcagat

SEQ ID NO: 157681 - DNA, 25 bp, Probe sequence
aaagatcatagcgcaccaaactctc

SEQ ID NO: 157682 - DNA, 25 bp, Probe sequence
aaagtcatcactaggcgttgcatct

SEQ ID NO: 157683 - DNA, 25 bp, Probe sequence
aaacctgctagagttattttcactg

SEQ ID NO: 157684 - DNA, 25 bp, Probe sequence
aaaagatagtgctccattacaaaaa

SEQ ID NO: 157685 - DNA, 25 bp, Probe sequence
aactccaactaaggtagtatctacg

SEQ ID NO: 157686 - DNA, 25 bp, Probe sequence
aactctcgtccaattgattttgaaa

SEQ ID NO: 157687 - DNA, 25 bp, Probe sequence
aaccagtagctaatgctgtctcagt

SEQ ID NO: 157688 - DNA, 25 bp, Probe sequence
aagatgttgttcaaacttcagcagg

SEQ ID NO: 157689 - DNA, 25 bp, Probe sequence
aatggcgaagcacaagcagcagctg

SEQ ID NO: 157690 - DNA, 25 bp, Probe sequence
aatgacgcatctagtgagtcaggta

SEQ ID NO: 157691 - DNA, 25 bp, Probe sequence
aatgatggacacactcaaagccaaa

SEQ ID NO: 157692 - DNA, 25 bp, Probe sequence
aatacatatcctattttgaatcagg

SEQ ID NO: 157693 - DNA, 25 bp, Probe sequence
caccaaactctcgtccaattgattt

SEQ ID NO: 157694 - DNA, 25 bp, Probe sequence
catcactaggcgttgcatctgtagc

SEQ ID NO: 157695 - DNA, 25 bp, Probe sequence
gctaatgctgtctcagtatctaata

SEQ ID NO: 157696 - DNA, 25 bp, Probe sequence
gaatcacaaaaacaagacagccaaa

SEQ ID NO: 157697 - DNA, 25 bp, Probe sequence
gaagcacaaccaaaaactgaagcag

SEQ ID NO: 157698 - DNA, 25 bp, Probe sequence
gaagcagttgcaagtccaacaacaa

SEQ ID NO: 157699 - DNA, 25 bp, Probe sequence
gaaaaagctccagaaactaaaccag

SEQ ID NO: 157700 - DNA, 25 bp, Probe sequence
gagaagcgattaaaaaccctgcaat

SEQ ID NO: 157701 - DNA, 25 bp, Probe sequence
gatgctatcgttaaagttcacgtaa

SEQ ID NO: 157702 - DNA, 25 bp, Probe sequence
gttcaaacttcagcaggttctagcg

SEQ ID NO: 157703 - DNA, 25 bp, Probe sequence
gttattttcactgattcaaaaccag

SEQ ID NO: 157704 - DNA, 25 bp, Probe sequence
gtatctacgactcaaaatgttgcaa

SEQ ID NO: 157705 - DNA, 25 bp, Probe sequence
gtaaaactctatatgatgctatcgt

SEQ ID NO: 157706 - DNA, 25 bp, Probe sequence
ggaaactactaatgacgattactgg

SEQ ID NO: 157707 - DNA, 25 bp, Probe sequence
ggaattcgcacaaccaatttataac

SEQ ID NO: 157708 - DNA, 25 bp, Probe sequence
ttcagcaggttctagcgaagcaaaa

SEQ ID NO: 157709 - DNA, 25 bp, Probe sequence
atcaatgttgcagttgaacctggat

SEQ ID NO: 157710 - DNA, 25 bp, Probe sequence
agacaatcactctactaaagttgta

SEQ ID NO: 157711 - DNA, 25 bp, Probe sequence
acctactgtaactacaacaagcaaa

SEQ ID NO: 157712 - DNA, 25 bp, Probe sequence
accgtgttaaacaatgcatcattct

SEQ ID NO: 157713 - DNA, 25 bp, Probe sequence
actgctcatacagttaaaacagcac

SEQ ID NO: 157714 - DNA, 25 bp, Probe sequence
acataacgaaacgcctaaacaagca

SEQ ID NO: 157715 - DNA, 25 bp, Probe sequence
actaaaacacaaactgctcatacag

SEQ ID NO: 157716 - DNA, 25 bp, Probe sequence
aaagttgaagacaatcactctacta

SEQ ID NO: 157717 - DNA, 25 bp, Probe sequence
aaactaaaacacaaactgctcatac

SEQ ID NO: 157718 - DNA, 25 bp, Probe sequence
aaaacagcacaaactgctcaagaac

SEQ ID NO: 157719 - DNA, 25 bp, Probe sequence
aaaagcggatactagaacaatcaat

SEQ ID NO: 157720 - DNA, 25 bp, Probe sequence
aacacaaactgctcatacagttaaa

SEQ ID NO: 157721 - DNA, 25 bp, Probe sequence
aacgaaacgcctaaacaagcatcta

SEQ ID NO: 157722 - DNA, 25 bp, Probe sequence
aacgcctaaacaagcatctaaagct

SEQ ID NO: 157723 - DNA, 25 bp, Probe sequence
aatgttgcagttgaacctggatata

SEQ ID NO: 157724 - DNA, 25 bp, Probe sequence
caatcactctactaaagttgtaagt

SEQ ID NO: 157725 - DNA, 25 bp, Probe sequence
cactctactaaagttgtaagtactg

SEQ ID NO: 157726 - DNA, 25 bp, Probe sequence
gcctaaacaagcatctaaagctaaa

SEQ ID NO: 157727 - DNA, 25 bp, Probe sequence
gcacaaactgctcaagaacaaaata

SEQ ID NO: 157728 - DNA, 25 bp, Probe sequence
gcaaagttgaagacaatcactctac

SEQ ID NO: 157729 - DNA, 25 bp, Probe sequence
gaagacaatcactctactaaagttg

SEQ ID NO: 157730 - DNA, 25 bp, Probe sequence
gaaacgcctaaacaagcatctaaag

SEQ ID NO: 157731 - DNA, 25 bp, Probe sequence
gatcaaactaaaacacaaactgctc

SEQ ID NO: 157732 - DNA, 25 bp, Probe sequence
gttgaagacaatcactctactaaag

SEQ ID NO: 157733 - DNA, 25 bp, Probe sequence
gttgaacctggatataagagcttaa

SEQ ID NO: 157734 - DNA, 25 bp, Probe sequence
gttgcagttgaacctggatataaga

SEQ ID NO: 157735 - DNA, 25 bp, Probe sequence
gttaaacaatgcatcattctggaaa

SEQ ID NO: 157736 - DNA, 25 bp, Probe sequence
gtactgacacaacaaaagatcaaac

SEQ ID NO: 157737 - DNA, 25 bp, Probe sequence
gtaagtactgacacaacaaaagatc

SEQ ID NO: 157738 - DNA, 25 bp, Probe sequence
tgaacctggatataagagcttaact

SEQ ID NO: 157739 - DNA, 25 bp, Probe sequence
tccaaaccgtgttaaacaatgcatc

SEQ ID NO: 157740 - DNA, 25 bp, Probe sequence
taagagcttaactactaaagtacat

SEQ ID NO: 157741 - DNA, 25 bp, Probe sequence
taaacctactgtaactacaacaagc

SEQ ID NO: 157742 - DNA, 25 bp, Probe sequence
tatttccaaaccgtgttaaacaatg

SEQ ID NO: 157743 - DNA, 25 bp, Probe sequence
attgaacaacgcatcattctggaaa

SEQ ID NO: 157744 - DNA, 25 bp, Probe sequence
atattatttccaagctgtattgaac

SEQ ID NO: 157745 - DNA, 25 bp, Probe sequence
atcaatgttgctgttgaacctgggt

SEQ ID NO: 157746 - DNA, 25 bp, Probe sequence
atcaaagcacacaagtttctcaagc

SEQ ID NO: 157747 - DNA, 25 bp, Probe sequence
atcagaacaacgttcatcagctatg

SEQ ID NO: 157748 - DNA, 25 bp, Probe sequence
atcattttaggttcccttgtataca

SEQ ID NO: 157749 - DNA, 25 bp, Probe sequence
atgttgctgttgaacctgggtataa

SEQ ID NO: 157750 - DNA, 25 bp, Probe sequence
acataggcgcagacagccaacaagt

SEQ ID NO: 157751 - DNA, 25 bp, Probe sequence
acaaccaattaatttccaagtgcaa

SEQ ID NO: 157752 - DNA, 25 bp, Probe sequence
aaaacaacacaaacagctcaagatc

SEQ ID NO: 157753 - DNA, 25 bp, Probe sequence
aaaagctgacactagaacaatcaat

SEQ ID NO: 157754 - DNA, 25 bp, Probe sequence
aacacaaacagctcaagatcaaaat

SEQ ID NO: 157755 - DNA, 25 bp, Probe sequence
aacctgctgtaactgcaccaagcaa

SEQ ID NO: 157756 - DNA, 25 bp, Probe sequence
aagtcaaacacaaagtgctcgtaca

SEQ ID NO: 157757 - DNA, 25 bp, Probe sequence
aagtgctcgtacagtgaaaacaaca

SEQ ID NO: 157758 - DNA, 25 bp, Probe sequence
aatgcggcaacagaagctacgaacg

SEQ ID NO: 157759 - DNA, 25 bp, Probe sequence
gctgtaactgcaccaagcaaaaatg

SEQ ID NO: 157760 - DNA, 25 bp, Probe sequence
gctgtattgaacaacgcatcattct

SEQ ID NO: 157761 - DNA, 25 bp, Probe sequence
gcatctatcattttaggttcccttg

SEQ ID NO: 157762 - DNA, 25 bp, Probe sequence
gcacacaagtttctcaagcaacatc

SEQ ID NO: 157763 - DNA, 25 bp, Probe sequence
gcaacatcacaaccaattaatttcc

SEQ ID NO: 157764 - DNA, 25 bp, Probe sequence
gaagttcataaacaaggaccttcaa

SEQ ID NO: 157765 - DNA, 25 bp, Probe sequence
gaagctacaaaagatcaaagtcaaa

SEQ ID NO: 157766 - DNA, 25 bp, Probe sequence
gatggctcttcagagaagtcacaca

SEQ ID NO: 157767 - DNA, 25 bp, Probe sequence
gattacaatgggtacagcatctatc

SEQ ID NO: 157768 - DNA, 25 bp, Probe sequence
gttaaacctgctgtaactgcaccaa

SEQ ID NO: 157769 - DNA, 25 bp, Probe sequence
gtaagtatcaatcagaacaacgttc

SEQ ID NO: 157770 - DNA, 25 bp, Probe sequence
gggtacagcatctatcattttaggt

SEQ ID NO: 157771 - DNA, 25 bp, Probe sequence
ggttcccttgtatacataggcgcag

SEQ ID NO: 157772 - DNA, 25 bp, Probe sequence
ggaccttcaaaagattctaaagcta

SEQ ID NO: 157773 - DNA, 25 bp, Probe sequence
tgaacctgggtataagagtttaact

SEQ ID NO: 157774 - DNA, 25 bp, Probe sequence
tccaagtgcaaaaagatggctcttc

SEQ ID NO: 157775 - DNA, 25 bp, Probe sequence
tcttcagagaagtcacacatggatg

SEQ ID NO: 157776 - DNA, 25 bp, Probe sequence
tttctcaagcaacatcacaaccaat

SEQ ID NO: 157777 - DNA, 25 bp, Probe sequence
aggagaatcgaagtcattagccatt

SEQ ID NO: 157778 - DNA, 25 bp, Probe sequence
ctggaagtggcgattactttggtcc

SEQ ID NO: 157779 - DNA, 25 bp, Probe sequence
accaatcaggtaaagtcatgtttca

SEQ ID NO: 157780 - DNA, 25 bp, Probe sequence
acctcaaggtatgaaagcacgtgca

SEQ ID NO: 157781 - DNA, 25 bp, Probe sequence
accgcagcattctcaattgaatact

SEQ ID NO: 157782 - DNA, 25 bp, Probe sequence
aaaaactttgggtgtagatgattca

SEQ ID NO: 157783 - DNA, 25 bp, Probe sequence
acaactgtaaatatttaccaatcag

SEQ ID NO: 157784 - DNA, 25 bp, Probe sequence
aaatataatattcagcaagcaaaag

SEQ ID NO: 157785 - DNA, 25 bp, Probe sequence
aagcaaaaggctggactcaagtaaa

SEQ ID NO: 157786 - DNA, 25 bp, Probe sequence
aaggctggactcaagtaaaaatgaa

SEQ ID NO: 157787 - DNA, 25 bp, Probe sequence
aatgtatgatcaatttaactgtatt

SEQ ID NO: 157788 - DNA, 25 bp, Probe sequence
aatgaagccatcaaaaatgtacttg

SEQ ID NO: 157789 - DNA, 25 bp, Probe sequence
aatttaactgtattggtagtgatga

SEQ ID NO: 157790 - DNA, 25 bp, Probe sequence
cataacgacattaatgtcacgcatt

SEQ ID NO: 157791 - DNA, 25 bp, Probe sequence
cttctaccgcagcattctcaattga

SEQ ID NO: 157792 - DNA, 25 bp, Probe sequence
gcagcattctcaattgaatactaat

SEQ ID NO: 157793 - DNA, 25 bp, Probe sequence
gaatatcgtttttaaattgtcggat

SEQ ID NO: 157794 - DNA, 25 bp, Probe sequence
gaatcgaagtcattagccattgcag

SEQ ID NO: 157795 - DNA, 25 bp, Probe sequence
gaaagcacgtgcaaagtatcaaaat

SEQ ID NO: 157796 - DNA, 25 bp, Probe sequence
gatcagttcgcaaaacgcgaagtgt

SEQ ID NO: 157797 - DNA, 25 bp, Probe sequence
gatactgagaatttacctcaaggta

SEQ ID NO: 157798 - DNA, 25 bp, Probe sequence
gatataccacttccaaagaaaacaa

SEQ ID NO: 157799 - DNA, 25 bp, Probe sequence
gtttcaaggtaatcatgcagaagct

SEQ ID NO: 157800 - DNA, 25 bp, Probe sequence
gtcattagccattgcagtggcaagc

SEQ ID NO: 157801 - DNA, 25 bp, Probe sequence
gtacttgaaaaaattgattcgtctc

SEQ ID NO: 157802 - DNA, 25 bp, Probe sequence
gtcattgatcagttcgcaaaacgcg

SEQ ID NO: 157803 - DNA, 25 bp, Probe sequence
ggtaaagtcatgtttcaaggtaatc

SEQ ID NO: 157804 - DNA, 25 bp, Probe sequence
ggcgaatatcgtttttaaattgtcg

SEQ ID NO: 157805 - DNA, 25 bp, Probe sequence
tcgaagtcattagccattgcagtgg

SEQ ID NO: 157806 - DNA, 25 bp, Probe sequence
tcggataaagacataacgacattaa

SEQ ID NO: 157807 - DNA, 25 bp, Probe sequence
tctaccgcagcattctcaattgaat

SEQ ID NO: 157808 - DNA, 25 bp, Probe sequence
tagccattgcagtggcaagcataat

SEQ ID NO: 157809 - DNA, 25 bp, Probe sequence
tatatcgtcattgatcagttcgcaa

SEQ ID NO: 157810 - DNA, 25 bp, Probe sequence
ttaatatgacgattcctaaaggtgc

SEQ ID NO: 157811 - DNA, 25 bp, Probe sequence
atttattaatcccaccattctcaag

SEQ ID NO: 157812 - DNA, 25 bp, Probe sequence
atagatttattaatcccaccattct

SEQ ID NO: 157813 - DNA, 25 bp, Probe sequence
atcatttaacgttcatagatttatt

SEQ ID NO: 157814 - DNA, 25 bp, Probe sequence
atgctagattatcatttaacgttca

SEQ ID NO: 157815 - DNA, 25 bp, Probe sequence
atgacttatcattcaactttttata

SEQ ID NO: 157816 - DNA, 25 bp, Probe sequence
agatttattaatcccaccattctca

SEQ ID NO: 157817 - DNA, 25 bp, Probe sequence
accattctcaagtcgtaaacaatat

SEQ ID NO: 157818 - DNA, 25 bp, Probe sequence
aacgttcatagatttattaatccca

SEQ ID NO: 157819 - DNA, 25 bp, Probe sequence
aatatgatgacttatcattcaactt

SEQ ID NO: 157820 - DNA, 25 bp, Probe sequence
caccattctcaagtcgtaaacaata

SEQ ID NO: 157821 - DNA, 25 bp, Probe sequence
catagatttattaatcccaccattc

SEQ ID NO: 157822 - DNA, 25 bp, Probe sequence
cattctcaagtcgtaaacaatatga

SEQ ID NO: 157823 - DNA, 25 bp, Probe sequence
ctagattatcatttaacgttcatag

SEQ ID NO: 157824 - DNA, 25 bp, Probe sequence
cgttcatagatttattaatcccacc

SEQ ID NO: 157825 - DNA, 25 bp, Probe sequence
cccaccattctcaagtcgtaaacaa

SEQ ID NO: 157826 - DNA, 25 bp, Probe sequence
ccattctcaagtcgtaaacaatatg

SEQ ID NO: 157827 - DNA, 25 bp, Probe sequence
ccaccattctcaagtcgtaaacaat

SEQ ID NO: 157828 - DNA, 25 bp, Probe sequence
gctagattatcatttaacgttcata

SEQ ID NO: 157829 - DNA, 25 bp, Probe sequence
gatgacttatcattcaactttttat

SEQ ID NO: 157830 - DNA, 25 bp, Probe sequence
gattatcatttaacgttcatagatt

SEQ ID NO: 157831 - DNA, 25 bp, Probe sequence
gttcatagatttattaatcccacca

SEQ ID NO: 157832 - DNA, 25 bp, Probe sequence
tgatgacttatcattcaacttttta

SEQ ID NO: 157833 - DNA, 25 bp, Probe sequence
tgacttatcattcaactttttatat

SEQ ID NO: 157834 - DNA, 25 bp, Probe sequence
tgctagattatcatttaacgttcat

SEQ ID NO: 157835 - DNA, 25 bp, Probe sequence
tcccaccattctcaagtcgtaaaca

SEQ ID NO: 157836 - DNA, 25 bp, Probe sequence
tctcaagtcgtaaacaatatgatga

SEQ ID NO: 157837 - DNA, 25 bp, Probe sequence
tcatttaacgttcatagatttatta

SEQ ID NO: 157838 - DNA, 25 bp, Probe sequence
tcatagatttattaatcccaccatt

SEQ ID NO: 157839 - DNA, 25 bp, Probe sequence
tagattatcatttaacgttcataga

SEQ ID NO: 157840 - DNA, 25 bp, Probe sequence
tagatttattaatcccaccattctc

SEQ ID NO: 157841 - DNA, 25 bp, Probe sequence
tatgatgacttatcattcaactttt

SEQ ID NO: 157842 - DNA, 25 bp, Probe sequence
tttattaatcccaccattctcaagt

SEQ ID NO: 157843 - DNA, 25 bp, Probe sequence
ttatcatttaacgttcatagattta

SEQ ID NO: 157844 - DNA, 25 bp, Probe sequence
ttcatagatttattaatcccaccat

SEQ ID NO: 157845 - DNA, 25 bp, Probe sequence
attaagccaaggtgatgtgaagaaa

SEQ ID NO: 157846 - DNA, 25 bp, Probe sequence
attatcgcatctacagtaatcgctg

SEQ ID NO: 157847 - DNA, 25 bp, Probe sequence
atctacagtaatcgctgcaggtctt

SEQ ID NO: 157848 - DNA, 25 bp, Probe sequence
atctaactccttacaaagctgaaac

SEQ ID NO: 157849 - DNA, 25 bp, Probe sequence
atcgcatctacagtaatcgctgcag

SEQ ID NO: 157850 - DNA, 25 bp, Probe sequence
atcgctgcaggtcttttaactcaaa

SEQ ID NO: 157851 - DNA, 25 bp, Probe sequence
aggacgatgaacgtattgataagtt

SEQ ID NO: 157852 - DNA, 25 bp, Probe sequence
aggtgatgtgaagaaagcagttgtc

SEQ ID NO: 157853 - DNA, 25 bp, Probe sequence
acaaaaactattatcgcatctacag

SEQ ID NO: 157854 - DNA, 25 bp, Probe sequence
aaaaatctaactccttacaaagctg

SEQ ID NO: 157855 - DNA, 25 bp, Probe sequence
aaaactattatcgcatctacagtaa

SEQ ID NO: 157856 - DNA, 25 bp, Probe sequence
aactccttacaaagctgaaactgtt

SEQ ID NO: 157857 - DNA, 25 bp, Probe sequence
aactgttaatgatctgtaccttatt

SEQ ID NO: 157858 - DNA, 25 bp, Probe sequence
aagatggtggtcctagagattacta

SEQ ID NO: 157859 - DNA, 25 bp, Probe sequence
aatgatctgtaccttattgttaaaa

SEQ ID NO: 157860 - DNA, 25 bp, Probe sequence
aatcgctgcaggtcttttaactcaa

SEQ ID NO: 157861 - DNA, 25 bp, Probe sequence
cagtaatcgctgcaggtcttttaac

SEQ ID NO: 157862 - DNA, 25 bp, Probe sequence
ctagagattactatacttttgactt

SEQ ID NO: 157863 - DNA, 25 bp, Probe sequence
cgctgcaggtcttttaactcaaact

SEQ ID NO: 157864 - DNA, 25 bp, Probe sequence
gctgaaactgttaatgatctgtacc

SEQ ID NO: 157865 - DNA, 25 bp, Probe sequence
gcatctacagtaatcgctgcaggtc

SEQ ID NO: 157866 - DNA, 25 bp, Probe sequence
gaagaaagcagttgtcagaattaaa

SEQ ID NO: 157867 - DNA, 25 bp, Probe sequence
gaaactgttaatgatctgtacctta

SEQ ID NO: 157868 - DNA, 25 bp, Probe sequence
gatctgtaccttattgttaaaaaat

SEQ ID NO: 157869 - DNA, 25 bp, Probe sequence
gataagttaatgaaagagtctgata

SEQ ID NO: 157870 - DNA, 25 bp, Probe sequence
gttaatgatctgtaccttattgtta

SEQ ID NO: 157871 - DNA, 25 bp, Probe sequence
gtaatcgctgcaggtcttttaactc

SEQ ID NO: 157872 - DNA, 25 bp, Probe sequence
gtcagaattaaagatggtggtccta

SEQ ID NO: 157873 - DNA, 25 bp, Probe sequence
gtctgataaaaatctaactccttac

SEQ ID NO: 157874 - DNA, 25 bp, Probe sequence
ggtggtcctagagattactatactt

SEQ ID NO: 157875 - DNA, 25 bp, Probe sequence
ggtcctagagattactatacttttg

SEQ ID NO: 157876 - DNA, 25 bp, Probe sequence
tgctaaagctttctttagttatgaa

SEQ ID NO: 157877 - DNA, 25 bp, Probe sequence
tcgtcctttagaagagaacagaaaa

SEQ ID NO: 157878 - DNA, 25 bp, Probe sequence
tacagtaatcgctgcaggtctttta

SEQ ID NO: 157879 - DNA, 25 bp, Probe sequence
attgaatattcaaaatccaaatgtt

SEQ ID NO: 157880 - DNA, 25 bp, Probe sequence
atgtcaactatggttctgattttac

SEQ ID NO: 157881 - DNA, 25 bp, Probe sequence
atggttctgattttacaattgacgt

SEQ ID NO: 157882 - DNA, 25 bp, Probe sequence
agctcatgtcaactatggttctgat

SEQ ID NO: 157883 - DNA, 25 bp, Probe sequence
acgatgttgcaatcgcaatctatta

SEQ ID NO: 157884 - DNA, 25 bp, Probe sequence
aaagagtttatttgtcattgacgaa

SEQ ID NO: 157885 - DNA, 25 bp, Probe sequence
aaaagtagctcatgtcaactatggt

SEQ ID NO: 157886 - DNA, 25 bp, Probe sequence
aactatggttctgattttacaattg

SEQ ID NO: 157887 - DNA, 25 bp, Probe sequence
aacgttgtatactcaggagagcatg

SEQ ID NO: 157888 - DNA, 25 bp, Probe sequence
aagtagctcatgtcaactatggttc

SEQ ID NO: 157889 - DNA, 25 bp, Probe sequence
aatcgcaatctattatttagatgga

SEQ ID NO: 157890 - DNA, 25 bp, Probe sequence
caggagagcatgaggttgtaacaaa

SEQ ID NO: 157891 - DNA, 25 bp, Probe sequence
gctcatgtcaactatggttctgatt

SEQ ID NO: 157892 - DNA, 25 bp, Probe sequence
gaattttacgatgttgcaatcgcaa

SEQ ID NO: 157893 - DNA, 25 bp, Probe sequence
gaaaagagtttatttgtcattgacg

SEQ ID NO: 157894 - DNA, 25 bp, Probe sequence
gaaattaacgttgtatactcaggag

SEQ ID NO: 157895 - DNA, 25 bp, Probe sequence
gacgtagctaataaagtttttgaat

SEQ ID NO: 157896 - DNA, 25 bp, Probe sequence
gatgttgcaatcgcaatctattatt

SEQ ID NO: 157897 - DNA, 25 bp, Probe sequence
gattttacaattgacgtagctaata

SEQ ID NO: 157898 - DNA, 25 bp, Probe sequence
gttctgattttacaattgacgtagc

SEQ ID NO: 157899 - DNA, 25 bp, Probe sequence
gtatactcaggagagcatgaggttg

SEQ ID NO: 157900 - DNA, 25 bp, Probe sequence
gtagctcatgtcaactatggttctg

SEQ ID NO: 157901 - DNA, 25 bp, Probe sequence
gtcaactatggttctgattttacaa

SEQ ID NO: 157902 - DNA, 25 bp, Probe sequence
gtcattgacgaattttacgatgttg

SEQ ID NO: 157903 - DNA, 25 bp, Probe sequence
gggaaattaacgttgtatactcagg

SEQ ID NO: 157904 - DNA, 25 bp, Probe sequence
ggaaaattaaaagtagctcatgtca

SEQ ID NO: 157905 - DNA, 25 bp, Probe sequence
tgattgggaaattaacgttgtatac

SEQ ID NO: 157906 - DNA, 25 bp, Probe sequence
tgacgaattttacgatgttgcaatc

SEQ ID NO: 157907 - DNA, 25 bp, Probe sequence
tcatgtcaactatggttctgatttt

SEQ ID NO: 157908 - DNA, 25 bp, Probe sequence
tcaaaatccaaatgttgatgagcat

SEQ ID NO: 157909 - DNA, 25 bp, Probe sequence
tagctcatgtcaactatggttctga

SEQ ID NO: 157910 - DNA, 25 bp, Probe sequence
tttgtcattgacgaattttacgatg

SEQ ID NO: 157911 - DNA, 25 bp, Probe sequence
tttacgatgttgcaatcgcaatcta

SEQ ID NO: 157912 - DNA, 25 bp, Probe sequence
ttaacgttgtatactcaggagagca

SEQ ID NO: 157913 - DNA, 25 bp, Probe sequence
attcatggtcagcacatatatcttt

SEQ ID NO: 157914 - DNA, 25 bp, Probe sequence
atttccgtgcacgagaagcgttaat

SEQ ID NO: 157915 - DNA, 25 bp, Probe sequence
ataactacactattgatttaagcaa

SEQ ID NO: 157916 - DNA, 25 bp, Probe sequence
atcgatttccgtgcacgagaagcgt

SEQ ID NO: 157917 - DNA, 25 bp, Probe sequence
atggggcgctgaaagttggggaaat

SEQ ID NO: 157918 - DNA, 25 bp, Probe sequence
actattaggtactgtattacctcaa

SEQ ID NO: 157919 - DNA, 25 bp, Probe sequence
actacaaacgattattggtgcgcat

SEQ ID NO: 157920 - DNA, 25 bp, Probe sequence
caccggtggcggtaataactacact

SEQ ID NO: 157921 - DNA, 25 bp, Probe sequence
aaatataccaaggcaataaaccagt

SEQ ID NO: 157922 - DNA, 25 bp, Probe sequence
aaaataactgttgacgtcctctttg

SEQ ID NO: 157923 - DNA, 25 bp, Probe sequence
aacttataatctttttgtgcaatac

SEQ ID NO: 157924 - DNA, 25 bp, Probe sequence
aagaaatcgatttccgtgcacgaga

SEQ ID NO: 157925 - DNA, 25 bp, Probe sequence
aatattacacacagcctcatttttc

SEQ ID NO: 157926 - DNA, 25 bp, Probe sequence
cacagcctcatttttcattttcaaa

SEQ ID NO: 157927 - DNA, 25 bp, Probe sequence
caccagccgcaaaaccttctgataa

SEQ ID NO: 157928 - DNA, 25 bp, Probe sequence
ctaaagcttatagcattggtcaaga

SEQ ID NO: 157929 - DNA, 25 bp, Probe sequence
gccgcaaaaccttctgataaaactt

SEQ ID NO: 157930 - DNA, 25 bp, Probe sequence
gcattggtcaagatgaaactaacat

SEQ ID NO: 157931 - DNA, 25 bp, Probe sequence
gcacatatatctttatggggcgctg

SEQ ID NO: 157932 - DNA, 25 bp, Probe sequence
gcaaaagattacattcagatctagc

SEQ ID NO: 157933 - DNA, 25 bp, Probe sequence
gagagacatttacaggtggcgttac

SEQ ID NO: 157934 - DNA, 25 bp, Probe sequence
gtaagcttaagatcaccggtggcgg

SEQ ID NO: 157935 - DNA, 25 bp, Probe sequence
gatcagttatggtggtcttatagag

SEQ ID NO: 157936 - DNA, 25 bp, Probe sequence
gatactgatcagttatggtggtctt

SEQ ID NO: 157937 - DNA, 25 bp, Probe sequence
gtattacctcaaaatcaaaaaccag

SEQ ID NO: 157938 - DNA, 25 bp, Probe sequence
gtttttactctgaagctaaagctta

SEQ ID NO: 157939 - DNA, 25 bp, Probe sequence
gtatttagtttttactctgaagcta

SEQ ID NO: 157940 - DNA, 25 bp, Probe sequence
ggtgcgcataaaatataccaaggca

SEQ ID NO: 157941 - DNA, 25 bp, Probe sequence
taacgacaacattattactattagg

SEQ ID NO: 157942 - DNA, 25 bp, Probe sequence
taactgttgacgtcctctttgatta

SEQ ID NO: 157943 - DNA, 25 bp, Probe sequence
tacaggtggcgttacaccagccgca

SEQ ID NO: 157944 - DNA, 25 bp, Probe sequence
tacacacagcctcatttttcatttt

SEQ ID NO: 157945 - DNA, 25 bp, Probe sequence
ttaagagatattcatggtcagcaca

SEQ ID NO: 157946 - DNA, 25 bp, Probe sequence
ttcagatctagcaaatgtttatgtt

SEQ ID NO: 157947 - DNA, 25 bp, Probe sequence
atctcaagaaacgtttactggtggt

SEQ ID NO: 157948 - DNA, 25 bp, Probe sequence
atggcaaaaagataacggtacgatt

SEQ ID NO: 157949 - DNA, 25 bp, Probe sequence
agcagaaacgtttactggcggattt

SEQ ID NO: 157950 - DNA, 25 bp, Probe sequence
actcctgcagcaacatctaacgata

SEQ ID NO: 157951 - DNA, 25 bp, Probe sequence
acattgttactattaggtacagcat

SEQ ID NO: 157952 - DNA, 25 bp, Probe sequence
aaattattttatcaacaacattgtt

SEQ ID NO: 157953 - DNA, 25 bp, Probe sequence
aaaggttgccatcaactgatgcaaa

SEQ ID NO: 157954 - DNA, 25 bp, Probe sequence
aaagcgttgatatttttggcataaa

SEQ ID NO: 157955 - DNA, 25 bp, Probe sequence
aacgataaacactataaactgaatg

SEQ ID NO: 157956 - DNA, 25 bp, Probe sequence
aagaaaccattgattcttttgcatt

SEQ ID NO: 157957 - DNA, 25 bp, Probe sequence
aatacacctatcaattcttcatctg

SEQ ID NO: 157958 - DNA, 25 bp, Probe sequence
caagtttatggacctgaaagttggg

SEQ ID NO: 157959 - DNA, 25 bp, Probe sequence
cacctatcaattcttcatctgaagc

SEQ ID NO: 157960 - DNA, 25 bp, Probe sequence
cttctctaacagtacgttatggcaa

SEQ ID NO: 157961 - DNA, 25 bp, Probe sequence
gcagcaacatctaacgataaacact

SEQ ID NO: 157962 - DNA, 25 bp, Probe sequence
gcaaaaattgaagttatcctcgaaa

SEQ ID NO: 157963 - DNA, 25 bp, Probe sequence
gaaggcaataagcctgttttaactt

SEQ ID NO: 157964 - DNA, 25 bp, Probe sequence
gaagttatcctcgaaaaatcaaact

SEQ ID NO: 157965 - DNA, 25 bp, Probe sequence
gaaacgtttactggcggatttccag

SEQ ID NO: 157966 - DNA, 25 bp, Probe sequence
gaaagttggggcaatatcaaccaat

SEQ ID NO: 157967 - DNA, 25 bp, Probe sequence
gagttaactaaatattactcgcaaa

SEQ ID NO: 157968 - DNA, 25 bp, Probe sequence
gataacggtacgattcatgcaacgt

SEQ ID NO: 157969 - DNA, 25 bp, Probe sequence
gttacagttttcttggtatagtcat

SEQ ID NO: 157970 - DNA, 25 bp, Probe sequence
gtaaaaggttgccatcaactgatgc

SEQ ID NO: 157971 - DNA, 25 bp, Probe sequence
gtcatattcaagtttatggacctga

SEQ ID NO: 157972 - DNA, 25 bp, Probe sequence
gtgttactcctgcagcaacatctaa

SEQ ID NO: 157973 - DNA, 25 bp, Probe sequence
ggggcaatatcaaccaattaagaaa

SEQ ID NO: 157974 - DNA, 25 bp, Probe sequence
ggcggatttccagtttatgaaggca

SEQ ID NO: 157975 - DNA, 25 bp, Probe sequence
tatttaaccttctctaacagtacgt

SEQ ID NO: 157976 - DNA, 25 bp, Probe sequence
tactcgcaaaaatatttaaccttct

SEQ ID NO: 157977 - DNA, 25 bp, Probe sequence
taaccttctctaacagtacgttatg

SEQ ID NO: 157978 - DNA, 25 bp, Probe sequence
tactggtggtgttactcctgcagca

SEQ ID NO: 157979 - DNA, 25 bp, Probe sequence
ttcttcatctgaagcgaaagcttat

SEQ ID NO: 157980 - DNA, 25 bp, Probe sequence
ttgcattatctcaagaaacgtttac

SEQ ID NO: 157981 - DNA, 25 bp, Probe sequence
atttcttcgtaatgcgtctcagtaa

SEQ ID NO: 157982 - DNA, 25 bp, Probe sequence
atcattatacaattgcctaaattac

SEQ ID NO: 157983 - DNA, 25 bp, Probe sequence
atcgaagtgttattagccactgtaa

SEQ ID NO: 157984 - DNA, 25 bp, Probe sequence
atgtctggctttttaggtactactt

SEQ ID NO: 157985 - DNA, 25 bp, Probe sequence
atgagacttcaaaaagcacctctag

SEQ ID NO: 157986 - DNA, 25 bp, Probe sequence
agacttatctcttactttaaacgct

SEQ ID NO: 157987 - DNA, 25 bp, Probe sequence
agcatttccattgcagacgtcaatc

SEQ ID NO: 157988 - DNA, 25 bp, Probe sequence
agctttcacattccctttagtaatc

SEQ ID NO: 157989 - DNA, 25 bp, Probe sequence
aacgcctatttggattttatgcctt

SEQ ID NO: 157990 - DNA, 25 bp, Probe sequence
aagcacctctagtaacgtcaggact

SEQ ID NO: 157991 - DNA, 25 bp, Probe sequence
catttttcatgtctggctttttagg

SEQ ID NO: 157992 - DNA, 25 bp, Probe sequence
cattttctttagtcgctgcagcata

SEQ ID NO: 157993 - DNA, 25 bp, Probe sequence
ctttagtcgctgcagcatatgttat

SEQ ID NO: 157994 - DNA, 25 bp, Probe sequence
ctgctttaaagaacagtttgcctgt

SEQ ID NO: 157995 - DNA, 25 bp, Probe sequence
gccactgtaatagtacttagagtct

SEQ ID NO: 157996 - DNA, 25 bp, Probe sequence
gctttcttgatttggattcaccttt

SEQ ID NO: 157997 - DNA, 25 bp, Probe sequence
gaacacatcgacaatttgtgcacca

SEQ ID NO: 157998 - DNA, 25 bp, Probe sequence
gacaatttgtgcaccattttcttta

SEQ ID NO: 157999 - DNA, 25 bp, Probe sequence
gacgtcaatcaaaccgaacacatcg

SEQ ID NO: 158000 - DNA, 25 bp, Probe sequence
gataaatttcttcgtaatgcgtctc

SEQ ID NO: 158001 - DNA, 25 bp, Probe sequence
gtcttaggattattaggcctgggta

SEQ ID NO: 158002 - DNA, 25 bp, Probe sequence
gtaacgtcaggactagtcttaggat

SEQ ID NO: 158003 - DNA, 25 bp, Probe sequence
gtaatatatggctttgtagctactt

SEQ ID NO: 158004 - DNA, 25 bp, Probe sequence
gtgcaccattttctttagtcgctgc

SEQ ID NO: 158005 - DNA, 25 bp, Probe sequence
gtgttcacaacatttttcatgtctg

SEQ ID NO: 158006 - DNA, 25 bp, Probe sequence
ggattttatgccttgtgggaattat

SEQ ID NO: 158007 - DNA, 25 bp, Probe sequence
ggactgtactttttattggtattgc

SEQ ID NO: 158008 - DNA, 25 bp, Probe sequence
tgctatcgcaggattgacggcaccc

SEQ ID NO: 158009 - DNA, 25 bp, Probe sequence
tcaagcgattaaaagcatttccatt

SEQ ID NO: 158010 - DNA, 25 bp, Probe sequence
tattaggcctgggtaatctattaaa

SEQ ID NO: 158011 - DNA, 25 bp, Probe sequence
tttgcggaatctttgctttcttgat

SEQ ID NO: 158012 - DNA, 25 bp, Probe sequence
tttttattggtattgctatcgcagg

SEQ ID NO: 158013 - DNA, 25 bp, Probe sequence
ttttttcataggtcaattaacagta

SEQ ID NO: 158014 - DNA, 25 bp, Probe sequence
ttggattcaccttttatgtactatg

SEQ ID NO: 158015 - DNA, 25 bp, Probe sequence
attacaaaactgacgaattattcga

SEQ ID NO: 158016 - DNA, 25 bp, Probe sequence
atcaaaacagagggtacgcttcaga

SEQ ID NO: 158017 - DNA, 25 bp, Probe sequence
atctacttcccagattttgaagatt

SEQ ID NO: 158018 - DNA, 25 bp, Probe sequence
atgagtgaaatcaaacgtcttgaaa

SEQ ID NO: 158019 - DNA, 25 bp, Probe sequence
atggatttacagatgtggaagctaa

SEQ ID NO: 158020 - DNA, 25 bp, Probe sequence
aggatttctttttacatcatggatt

SEQ ID NO: 158021 - DNA, 25 bp, Probe sequence
agttcagattcaccattttatggca

SEQ ID NO: 158022 - DNA, 25 bp, Probe sequence
acgcttcagaattgattgattttgc

SEQ ID NO: 158023 - DNA, 25 bp, Probe sequence
aacagagggtacgcttcagaattga

SEQ ID NO: 158024 - DNA, 25 bp, Probe sequence
aagacttatacatggtcaatgagtt

SEQ ID NO: 158025 - DNA, 25 bp, Probe sequence
aattaggagctagaatggcattact

SEQ ID NO: 158026 - DNA, 25 bp, Probe sequence
gccattggcagaaatgattctaagg

SEQ ID NO: 158027 - DNA, 25 bp, Probe sequence
gcaagttcagattcaccattttatg

SEQ ID NO: 158028 - DNA, 25 bp, Probe sequence
gaattattcgaaaactttagagcgt

SEQ ID NO: 158029 - DNA, 25 bp, Probe sequence
gaagaaatctacttcccagattttg

SEQ ID NO: 158030 - DNA, 25 bp, Probe sequence
gaaaactttagagcgtttggcaaca

SEQ ID NO: 158031 - DNA, 25 bp, Probe sequence
gacatgatgtcttattgtggaaacc

SEQ ID NO: 158032 - DNA, 25 bp, Probe sequence
gagcgtttggcaacaaagacttata

SEQ ID NO: 158033 - DNA, 25 bp, Probe sequence
gagtttcaatatgccaattaaagcc

SEQ ID NO: 158034 - DNA, 25 bp, Probe sequence
gagggtacgcttcagaattgattga

SEQ ID NO: 158035 - DNA, 25 bp, Probe sequence
gatgtcgaagaaatctacttcccag

SEQ ID NO: 158036 - DNA, 25 bp, Probe sequence
gattcaccattttatggcatatttg

SEQ ID NO: 158037 - DNA, 25 bp, Probe sequence
gattctaaggatttctttttacatc

SEQ ID NO: 158038 - DNA, 25 bp, Probe sequence
gtcggagatcaattaggagctagaa

SEQ ID NO: 158039 - DNA, 25 bp, Probe sequence
gtcgaagaaatctacttcccagatt

SEQ ID NO: 158040 - DNA, 25 bp, Probe sequence
gggacatgatgtcttattgtggaaa

SEQ ID NO: 158041 - DNA, 25 bp, Probe sequence
ggtcaatgagttaaacggtcaaatg

SEQ ID NO: 158042 - DNA, 25 bp, Probe sequence
ggcatatttgtcggagatcaattag

SEQ ID NO: 158043 - DNA, 25 bp, Probe sequence
tcccagattttgaagattatatatt

SEQ ID NO: 158044 - DNA, 25 bp, Probe sequence
tcaaacgtcttgaaattaattacaa

SEQ ID NO: 158045 - DNA, 25 bp, Probe sequence
tttctttttacatcatggatttaca

SEQ ID NO: 158046 - DNA, 25 bp, Probe sequence
tttatggcatatttgtcggagatca

SEQ ID NO: 158047 - DNA, 25 bp, Probe sequence
ttcaatatgccaattaaagccattg

SEQ ID NO: 158048 - DNA, 25 bp, Probe sequence
ttgattgattttgcaaagagtttca

SEQ ID NO: 158049 - DNA, 25 bp, Probe sequence
atatatcgattttaacgcaggtaat

SEQ ID NO: 158050 - DNA, 25 bp, Probe sequence
atcaacctgataatgacacgatact

SEQ ID NO: 158051 - DNA, 25 bp, Probe sequence
atgtatcaactgatggcgacgatat

SEQ ID NO: 158052 - DNA, 25 bp, Probe sequence
agttgtcattcctttaaatcctaca

SEQ ID NO: 158053 - DNA, 25 bp, Probe sequence
agcaaattggtaatgatcgtcgcat

SEQ ID NO: 158054 - DNA, 25 bp, Probe sequence
accgcactgtcatccttgagattat

SEQ ID NO: 158055 - DNA, 25 bp, Probe sequence
acccatgtttgcgcgtgtttttaga

SEQ ID NO: 158056 - DNA, 25 bp, Probe sequence
aaaccatcaggtgcaaagcctgggt

SEQ ID NO: 158057 - DNA, 25 bp, Probe sequence
aaagcgcagattcaattacaacatt

SEQ ID NO: 158058 - DNA, 25 bp, Probe sequence
aaaactcacacatggttacacacaa

SEQ ID NO: 158059 - DNA, 25 bp, Probe sequence
aaccatcaattgttattgtcaatcc

SEQ ID NO: 158060 - DNA, 25 bp, Probe sequence
aagcctgggtttgtaacatatgaca

SEQ ID NO: 158061 - DNA, 25 bp, Probe sequence
aattatgaagcaccacctactcagc

SEQ ID NO: 158062 - DNA, 25 bp, Probe sequence
aattctggacaaatacctgttgatt

SEQ ID NO: 158063 - DNA, 25 bp, Probe sequence
caattacatcatatttctgtccatg

SEQ ID NO: 158064 - DNA, 25 bp, Probe sequence
gaacgcgttaaacaacgtgcgaatg

SEQ ID NO: 158065 - DNA, 25 bp, Probe sequence
cacttaacaccaaatacgaatcact

SEQ ID NO: 158066 - DNA, 25 bp, Probe sequence
gcagaaaccaagttaccacctactc

SEQ ID NO: 158067 - DNA, 25 bp, Probe sequence
gaaattggcgatactatttaccgca

SEQ ID NO: 158068 - DNA, 25 bp, Probe sequence
gacacgatactaatggttgtacgtc

SEQ ID NO: 158069 - DNA, 25 bp, Probe sequence
gagtctctacaatttttaacaacag

SEQ ID NO: 158070 - DNA, 25 bp, Probe sequence
gatgcaccaagtgatacgacaatca

SEQ ID NO: 158071 - DNA, 25 bp, Probe sequence
gatactatttaccgcactgtcatcc

SEQ ID NO: 158072 - DNA, 25 bp, Probe sequence
gatattcctggttcacatgtcgtta

SEQ ID NO: 158073 - DNA, 25 bp, Probe sequence
gttcgatttgttcaacagcagttgc

SEQ ID NO: 158074 - DNA, 25 bp, Probe sequence
gtcgttatatttaatgatgcaccaa

SEQ ID NO: 158075 - DNA, 25 bp, Probe sequence
ggctatgttagcaggatacttttca

SEQ ID NO: 158076 - DNA, 25 bp, Probe sequence
tgtcaatccatccaaacttttcaag

SEQ ID NO: 158077 - DNA, 25 bp, Probe sequence
tcgtcgtcaatttatgacttcatca

SEQ ID NO: 158078 - DNA, 25 bp, Probe sequence
taatccatttaatccacccatgttt

SEQ ID NO: 158079 - DNA, 25 bp, Probe sequence
tacgacaatcaaggaagcggctatg

SEQ ID NO: 158080 - DNA, 25 bp, Probe sequence
ttagccctttaattacgaatgaaat

SEQ ID NO: 158081 - DNA, 25 bp, Probe sequence
ttcaaaagctggtaattctggacaa

SEQ ID NO: 158082 - DNA, 25 bp, Probe sequence
ttgtatgctacacctgattatgaac

SEQ ID NO: 158083 - DNA, 25 bp, Probe sequence
attagcattgttcttaggtagtttt

SEQ ID NO: 158084 - DNA, 25 bp, Probe sequence
attataagcaattcaactggaggga

SEQ ID NO: 158085 - DNA, 25 bp, Probe sequence
attttattagcattgttcttaggta

SEQ ID NO: 158086 - DNA, 25 bp, Probe sequence
atatgcaaggtattctacacttaat

SEQ ID NO: 158087 - DNA, 25 bp, Probe sequence
atcccacacattttagcaattatta

SEQ ID NO: 158088 - DNA, 25 bp, Probe sequence
aggtatcccacacattttagcaatt

SEQ ID NO: 158089 - DNA, 25 bp, Probe sequence
agcattgttcttaggtagttttggt

SEQ ID NO: 158090 - DNA, 25 bp, Probe sequence
aattttatgccggcaagaatatgca

SEQ ID NO: 158091 - DNA, 25 bp, Probe sequence
caggtatcccacacattttagcaat

SEQ ID NO: 158092 - DNA, 25 bp, Probe sequence
ctgttggacaggtatcccacacatt

SEQ ID NO: 158093 - DNA, 25 bp, Probe sequence
cccacacattttagcaattattagt

SEQ ID NO: 158094 - DNA, 25 bp, Probe sequence
gcagtgattactgttttcaaacctg

SEQ ID NO: 158095 - DNA, 25 bp, Probe sequence
gcaaggtattctacacttaatattc

SEQ ID NO: 158096 - DNA, 25 bp, Probe sequence
actgttttcaaacctgctgatgaac

SEQ ID NO: 158097 - DNA, 25 bp, Probe sequence
gatgaacaaggtaatgtcactttat

SEQ ID NO: 158098 - DNA, 25 bp, Probe sequence
gattactgttttcaaacctgctgat

SEQ ID NO: 158099 - DNA, 25 bp, Probe sequence
gttggacaggtatcccacacatttt

SEQ ID NO: 158100 - DNA, 25 bp, Probe sequence
gttcttaggtagttttggtattcat

SEQ ID NO: 158101 - DNA, 25 bp, Probe sequence
gttttcaaacctgctgatgaacaag

SEQ ID NO: 158102 - DNA, 25 bp, Probe sequence
gtatcccacacattttagcaattat

SEQ ID NO: 158103 - DNA, 25 bp, Probe sequence
gtgattactgttttcaaacctgctg

SEQ ID NO: 158104 - DNA, 25 bp, Probe sequence
ggtattctacacttaatattctgtt

SEQ ID NO: 158105 - DNA, 25 bp, Probe sequence
ggagggaaagaaatgcaagtaaaca

SEQ ID NO: 158106 - DNA, 25 bp, Probe sequence
tggacaggtatcccacacattttag

SEQ ID NO: 158107 - DNA, 25 bp, Probe sequence
tgaacaaggtaatgtcactttataa

SEQ ID NO: 158108 - DNA, 25 bp, Probe sequence
tcataaattttatgccggcaagaat

SEQ ID NO: 158109 - DNA, 25 bp, Probe sequence
taagcaattcaactggagggaaaga

SEQ ID NO: 158110 - DNA, 25 bp, Probe sequence
tacacttaatattctgttggacagg

SEQ ID NO: 158111 - DNA, 25 bp, Probe sequence
tagcaattattagtgcagtgattac

SEQ ID NO: 158112 - DNA, 25 bp, Probe sequence
taggtagttttggtattcataaatt

SEQ ID NO: 158113 - DNA, 25 bp, Probe sequence
tatgccggcaagaatatgcaaggta

SEQ ID NO: 158114 - DNA, 25 bp, Probe sequence
ttactgttttcaaacctgctgatga

SEQ ID NO: 158115 - DNA, 25 bp, Probe sequence
ttctgttggacaggtatcccacaca

SEQ ID NO: 158116 - DNA, 25 bp, Probe sequence
ttctacacttaatattctgttggac

SEQ ID NO: 158117 - DNA, 25 bp, Probe sequence
atgtttcgtaacaggtcgtaaagct

SEQ ID NO: 158118 - DNA, 25 bp, Probe sequence
agacgttcacacgctttaaactcta

SEQ ID NO: 158119 - DNA, 25 bp, Probe sequence
acgttcacacgctttaaactctact

SEQ ID NO: 158120 - DNA, 25 bp, Probe sequence
acaggtcgtaaagcttcgactggta

SEQ ID NO: 158121 - DNA, 25 bp, Probe sequence
acagacgttcacacgctttaaactc

SEQ ID NO: 158122 - DNA, 25 bp, Probe sequence
aaagtttgggtttctgcacgtgctt

SEQ ID NO: 158123 - DNA, 25 bp, Probe sequence
aaaagtttgggtttctgcacgtgct

SEQ ID NO: 158124 - DNA, 25 bp, Probe sequence
aacgtagatggaacgctaaccttca

SEQ ID NO: 158125 - DNA, 25 bp, Probe sequence
aagcttcgactggtaacagacgttc

SEQ ID NO: 158126 - DNA, 25 bp, Probe sequence
caaaaagttagaatcctagttgacg

SEQ ID NO: 158127 - DNA, 25 bp, Probe sequence
cacacgctttaaactctactaaacg

SEQ ID NO: 158128 - DNA, 25 bp, Probe sequence
cagacgttcacacgctttaaactct

SEQ ID NO: 158129 - DNA, 25 bp, Probe sequence
ctggtaacagacgttcacacgcttt

SEQ ID NO: 158130 - DNA, 25 bp, Probe sequence
cgtaaagcttcgactggtaacagac

SEQ ID NO: 158131 - DNA, 25 bp, Probe sequence
gcttcgactggtaacagacgttcac

SEQ ID NO: 158132 - DNA, 25 bp, Probe sequence
gctttaaactctactaaacgtagat

SEQ ID NO: 158133 - DNA, 25 bp, Probe sequence
gactggtaacagacgttcacacgct

SEQ ID NO: 158134 - DNA, 25 bp, Probe sequence
gacgttcacacgctttaaactctac

SEQ ID NO: 158135 - DNA, 25 bp, Probe sequence
gtagatggaacgctaaccttcaaaa

SEQ ID NO: 158136 - DNA, 25 bp, Probe sequence
gatggaacgctaaccttcaaaaagt

SEQ ID NO: 158137 - DNA, 25 bp, Probe sequence
gttcacacgctttaaactctactaa

SEQ ID NO: 158138 - DNA, 25 bp, Probe sequence
gtttctgcacgtgctttaaaatctg

SEQ ID NO: 158139 - DNA, 25 bp, Probe sequence
gtaaacaatgtttcgtaacaggtcg

SEQ ID NO: 158140 - DNA, 25 bp, Probe sequence
gtaacaggtcgtaaagcttcgactg

SEQ ID NO: 158141 - DNA, 25 bp, Probe sequence
gggtttctgcacgtgctttaaaatc

SEQ ID NO: 158142 - DNA, 25 bp, Probe sequence
ggtaacagacgttcacacgctttaa

SEQ ID NO: 158143 - DNA, 25 bp, Probe sequence
tgcacgtgctttaaaatctggtaaa

SEQ ID NO: 158144 - DNA, 25 bp, Probe sequence
tcgactggtaacagacgttcacacg

SEQ ID NO: 158145 - DNA, 25 bp, Probe sequence
tctgcacgtgctttaaaatctggta

SEQ ID NO: 158146 - DNA, 25 bp, Probe sequence
taacagacgttcacacgctttaaac

SEQ ID NO: 158147 - DNA, 25 bp, Probe sequence
tagaatcctagttgacggtaaacct

SEQ ID NO: 158148 - DNA, 25 bp, Probe sequence
tttgggtttctgcacgtgctttaaa

SEQ ID NO: 158149 - DNA, 25 bp, Probe sequence
tttcgtaacaggtcgtaaagcttcg

SEQ ID NO: 158150 - DNA, 25 bp, Probe sequence
ttgggtttctgcacgtgctttaaaa

SEQ ID NO: 158151 - DNA, 25 bp, Probe sequence
ataccctcaaactgttagagctctc

SEQ ID NO: 158152 - DNA, 25 bp, Probe sequence
atcacttctcaaaataaaaacatcg

SEQ ID NO: 158153 - DNA, 25 bp, Probe sequence
atcagcaagaaaacacacttccatt

SEQ ID NO: 158154 - DNA, 25 bp, Probe sequence
atcatttacatcttgtttttgaata

SEQ ID NO: 158155 - DNA, 25 bp, Probe sequence
atccaccataaataccctcaaactg

SEQ ID NO: 158156 - DNA, 25 bp, Probe sequence
atgacgcgcagcaagaccatgctga

SEQ ID NO: 158157 - DNA, 25 bp, Probe sequence
aacaatcggatttagtacagcatat

SEQ ID NO: 158158 - DNA, 25 bp, Probe sequence
aacacacttccatttaagaagattg

SEQ ID NO: 158159 - DNA, 25 bp, Probe sequence
aactgttagagctctcaataattta

SEQ ID NO: 158160 - DNA, 25 bp, Probe sequence
aagaatttatattactgacttattt

SEQ ID NO: 158161 - DNA, 25 bp, Probe sequence
aagaacgctcaactgaagatgaaag

SEQ ID NO: 158162 - DNA, 25 bp, Probe sequence
aaggctatctaataaaagaacgctc

SEQ ID NO: 158163 - DNA, 25 bp, Probe sequence
cttgcagatcaaagtgaatcacaga

SEQ ID NO: 158164 - DNA, 25 bp, Probe sequence
cgtgttacattgtttgatcaaatca

SEQ ID NO: 158165 - DNA, 25 bp, Probe sequence
gcagaacgtgttacattgtttgatc

SEQ ID NO: 158166 - DNA, 25 bp, Probe sequence
gcaagaccatgctgaacaattatta

SEQ ID NO: 158167 - DNA, 25 bp, Probe sequence
gcaagaaaacacacttccatttaag

SEQ ID NO: 158168 - DNA, 25 bp, Probe sequence
gaattcacaattctagctattatca

SEQ ID NO: 158169 - DNA, 25 bp, Probe sequence
gaatttctaaacttgatgatgtata

SEQ ID NO: 158170 - DNA, 25 bp, Probe sequence
gaagattgtttcagatttatgttat

SEQ ID NO: 158171 - DNA, 25 bp, Probe sequence
gaagcatatatgtttcgttttaaga

SEQ ID NO: 158172 - DNA, 25 bp, Probe sequence
gaacaattattagctcaagtgaatc

SEQ ID NO: 158173 - DNA, 25 bp, Probe sequence
gaaaaaagtcaagcctgaagtcgat

SEQ ID NO: 158174 - DNA, 25 bp, Probe sequence
gaaacaatccaccataaataccctc

SEQ ID NO: 158175 - DNA, 25 bp, Probe sequence
gagaaaattgcagaacgtgttacat

SEQ ID NO: 158176 - DNA, 25 bp, Probe sequence
gatgagcgtaatacttacatttcaa

SEQ ID NO: 158177 - DNA, 25 bp, Probe sequence
gttcgaagtaaaattgatgagcgta

SEQ ID NO: 158178 - DNA, 25 bp, Probe sequence
gtaatacttacatttcaatatctga

SEQ ID NO: 158179 - DNA, 25 bp, Probe sequence
gtcaagcctgaagtcgatatgacta

SEQ ID NO: 158180 - DNA, 25 bp, Probe sequence
tgacttatttatttcatcagcaaga

SEQ ID NO: 158181 - DNA, 25 bp, Probe sequence
taacattaagttttgtagaattcac

SEQ ID NO: 158182 - DNA, 25 bp, Probe sequence
taaaagtacttgtgaaacattcata

SEQ ID NO: 158183 - DNA, 25 bp, Probe sequence
taaaaacatcgttcttcttaaagat

SEQ ID NO: 158184 - DNA, 25 bp, Probe sequence
ttctagctattatcacttctcaaaa

SEQ ID NO: 158185 - DNA, 25 bp, Probe sequence
atttgcgtcatatctgctacagttt

SEQ ID NO: 158186 - DNA, 25 bp, Probe sequence
atattattattcgctgtcaccttta

SEQ ID NO: 158187 - DNA, 25 bp, Probe sequence
atatcgactcattttcacttacaaa

SEQ ID NO: 158188 - DNA, 25 bp, Probe sequence
atacggcatgtcaactgtcgttata

SEQ ID NO: 158189 - DNA, 25 bp, Probe sequence
ataatggtggtctaactgtacagtt

SEQ ID NO: 158190 - DNA, 25 bp, Probe sequence
atggcatttcattatattctagtat

SEQ ID NO: 158191 - DNA, 25 bp, Probe sequence
aggttgctactatttatatcgactc

SEQ ID NO: 158192 - DNA, 25 bp, Probe sequence
agcctggcaatctcctacaaaacat

SEQ ID NO: 158193 - DNA, 25 bp, Probe sequence
actatcgttgcattattgtcattca

SEQ ID NO: 158194 - DNA, 25 bp, Probe sequence
aacgcttattttattttctactcat

SEQ ID NO: 158195 - DNA, 25 bp, Probe sequence
cagttgccaaaatcagtttctaatc

SEQ ID NO: 158196 - DNA, 25 bp, Probe sequence
ccccaccatactattatttacttat

SEQ ID NO: 158197 - DNA, 25 bp, Probe sequence
gcgatagccttaacactatttagca

SEQ ID NO: 158198 - DNA, 25 bp, Probe sequence
gctctttgcggattgtttattcaac

SEQ ID NO: 158199 - DNA, 25 bp, Probe sequence
gagatggattccgtcaaatgatgcc

SEQ ID NO: 158200 - DNA, 25 bp, Probe sequence
gacagtgcttttaatggtttttcat

SEQ ID NO: 158201 - DNA, 25 bp, Probe sequence
gagctatcataacatttgtcgtgac

SEQ ID NO: 158202 - DNA, 25 bp, Probe sequence
gatgcatcgtttggattaggtggcg

SEQ ID NO: 158203 - DNA, 25 bp, Probe sequence
gatcgctacgattttatacggcatg

SEQ ID NO: 158204 - DNA, 25 bp, Probe sequence
gatataccgtttttgacaccacttg

SEQ ID NO: 158205 - DNA, 25 bp, Probe sequence
gtatttggtttattcactggcattt

SEQ ID NO: 158206 - DNA, 25 bp, Probe sequence
gggtatattgttttgccaacagcat

SEQ ID NO: 158207 - DNA, 25 bp, Probe sequence
gggtgtatatcttagcactatcatc

SEQ ID NO: 158208 - DNA, 25 bp, Probe sequence
ggtattttcattgttgcgatagcct

SEQ ID NO: 158209 - DNA, 25 bp, Probe sequence
ggatttagaattactttcgccggat

SEQ ID NO: 158210 - DNA, 25 bp, Probe sequence
ggcaatcaaaccttatcaacaatca

SEQ ID NO: 158211 - DNA, 25 bp, Probe sequence
tcactggcatttctgcgtttttgga

SEQ ID NO: 158212 - DNA, 25 bp, Probe sequence
taaagttcgttggattcattctaaa

SEQ ID NO: 158213 - DNA, 25 bp, Probe sequence
taccatccattatccaagtgcacat

SEQ ID NO: 158214 - DNA, 25 bp, Probe sequence
tatgaccggcattaaagcacctaaa

SEQ ID NO: 158215 - DNA, 25 bp, Probe sequence
tatgtattactatcaccgacacacc

SEQ ID NO: 158216 - DNA, 25 bp, Probe sequence
tataccacgcttaaagacgcttcaa

SEQ ID NO: 158217 - DNA, 25 bp, Probe sequence
ttcgccggataaagctcatgatgtt

SEQ ID NO: 158218 - DNA, 25 bp, Probe sequence
ttgtcgtgaccttctacttatttaa

SEQ ID NO: 158219 - DNA, 25 bp, Probe sequence
attaatgcatatcgtttagcagaga

SEQ ID NO: 158220 - DNA, 25 bp, Probe sequence
attagtggttatgtctaacccatca

SEQ ID NO: 158221 - DNA, 25 bp, Probe sequence
atcgtttagcagagagatattcaac

SEQ ID NO: 158222 - DNA, 25 bp, Probe sequence
atgtctaacccatcaaaattcgaag

SEQ ID NO: 158223 - DNA, 25 bp, Probe sequence
atgtctattaatattgatccagaaa

SEQ ID NO: 158224 - DNA, 25 bp, Probe sequence
agtggttatgtctaacccatcaaaa

SEQ ID NO: 158225 - DNA, 25 bp, Probe sequence
agtttaaagctttacattaatgcat

SEQ ID NO: 158226 - DNA, 25 bp, Probe sequence
acattaatgcatatcgtttagcaga

SEQ ID NO: 158227 - DNA, 25 bp, Probe sequence
aaattgttatgatactgcagaagtt

SEQ ID NO: 158228 - DNA, 25 bp, Probe sequence
aaagctttacattaatgcatatcgt

SEQ ID NO: 158229 - DNA, 25 bp, Probe sequence
aacaaattgttatgatactgcagaa

SEQ ID NO: 158230 - DNA, 25 bp, Probe sequence
aacccatcaaaattcgaagatgcag

SEQ ID NO: 158231 - DNA, 25 bp, Probe sequence
aagctttacattaatgcatatcgtt

SEQ ID NO: 158232 - DNA, 25 bp, Probe sequence
aatgcatatcgtttagcagagagat

SEQ ID NO: 158233 - DNA, 25 bp, Probe sequence
aatttgcagaattagtggttatgtc

SEQ ID NO: 158234 - DNA, 25 bp, Probe sequence
caaaattcgaagatgcagaggatat

SEQ ID NO: 158235 - DNA, 25 bp, Probe sequence
gctttacattaatgcatatcgttta

SEQ ID NO: 158236 - DNA, 25 bp, Probe sequence
gcaacaaattgttatgatactgcag

SEQ ID NO: 158237 - DNA, 25 bp, Probe sequence
gaattagtggttatgtctaacccat

SEQ ID NO: 158238 - DNA, 25 bp, Probe sequence
gaagatgcagaggatatagctaaag

SEQ ID NO: 158239 - DNA, 25 bp, Probe sequence
gagagatattcaacaattgcaacaa

SEQ ID NO: 158240 - DNA, 25 bp, Probe sequence
gagatattcaacaattgcaacaaat

SEQ ID NO: 158241 - DNA, 25 bp, Probe sequence
gatgcagaggatatagctaaagaaa

SEQ ID NO: 158242 - DNA, 25 bp, Probe sequence
gttatgtctaacccatcaaaattcg

SEQ ID NO: 158243 - DNA, 25 bp, Probe sequence
gttatgatactgcagaagttataaa

SEQ ID NO: 158244 - DNA, 25 bp, Probe sequence
gtctaacccatcaaaattcgaagat

SEQ ID NO: 158245 - DNA, 25 bp, Probe sequence
gtggttatgtctaacccatcaaaat

SEQ ID NO: 158246 - DNA, 25 bp, Probe sequence
tagtggttatgtctaacccatcaaa

SEQ ID NO: 158247 - DNA, 25 bp, Probe sequence
tatgtctaacccatcaaaattcgaa

SEQ ID NO: 158248 - DNA, 25 bp, Probe sequence
tttgcagaattagtggttatgtcta

SEQ ID NO: 158249 - DNA, 25 bp, Probe sequence
tttacattaatgcatatcgtttagc

SEQ ID NO: 158250 - DNA, 25 bp, Probe sequence
ttagtggttatgtctaacccatcaa

SEQ ID NO: 158251 - DNA, 25 bp, Probe sequence
ttatgtctaacccatcaaaattcga

SEQ ID NO: 158252 - DNA, 25 bp, Probe sequence
ttagcagagagatattcaacaattg

SEQ ID NO: 158253 - DNA, 25 bp, Probe sequence
attctaggtttcccttgtaatcaat

SEQ ID NO: 158254 - DNA, 25 bp, Probe sequence
acgttgttaaacgatttgcacctca

SEQ ID NO: 158255 - DNA, 25 bp, Probe sequence
acagctagcgaatgtggctttactt

SEQ ID NO: 158256 - DNA, 25 bp, Probe sequence
aaactatggtgttaccttccctatg

SEQ ID NO: 158257 - DNA, 25 bp, Probe sequence
aacctgttcaaatcgaaagagaaat

SEQ ID NO: 158258 - DNA, 25 bp, Probe sequence
aacatcaattacctttatttagata

SEQ ID NO: 158259 - DNA, 25 bp, Probe sequence
aactatggtgttaccttccctatgc

SEQ ID NO: 158260 - DNA, 25 bp, Probe sequence
aaggtgttacttacaaattagatgc

SEQ ID NO: 158261 - DNA, 25 bp, Probe sequence
aatacagctagcgaatgtggcttta

SEQ ID NO: 158262 - DNA, 25 bp, Probe sequence
ctaggtttcccttgtaatcaatttg

SEQ ID NO: 158263 - DNA, 25 bp, Probe sequence
gctagcgaatgtggctttacttcac

SEQ ID NO: 158264 - DNA, 25 bp, Probe sequence
gcgaatgtggctttacttcacaatt

SEQ ID NO: 158265 - DNA, 25 bp, Probe sequence
gaaggtttgcaatcattatacgaga

SEQ ID NO: 158266 - DNA, 25 bp, Probe sequence
gaagcagctcaaaactgtaaattaa

SEQ ID NO: 158267 - DNA, 25 bp, Probe sequence
gttgttaaacgatttgcacctcaaa

SEQ ID NO: 158268 - DNA, 25 bp, Probe sequence
gttaccttccctatgcatcaaaaaa

SEQ ID NO: 158269 - DNA, 25 bp, Probe sequence
gttacttacaaattagatgcatata

SEQ ID NO: 158270 - DNA, 25 bp, Probe sequence
gtttcccttgtaatcaatttggtgg

SEQ ID NO: 158271 - DNA, 25 bp, Probe sequence
gggaacatcaattacctttatttag

SEQ ID NO: 158272 - DNA, 25 bp, Probe sequence
ggtttcccttgtaatcaatttggtg

SEQ ID NO: 158273 - DNA, 25 bp, Probe sequence
ggtttgcaatcattatacgagaaat

SEQ ID NO: 158274 - DNA, 25 bp, Probe sequence
ggagacaatttatgattttgtagta

SEQ ID NO: 158275 - DNA, 25 bp, Probe sequence
tgtaattctaggtttcccttgtaat

SEQ ID NO: 158276 - DNA, 25 bp, Probe sequence
tgttaaacgatttgcacctcaaaaa

SEQ ID NO: 158277 - DNA, 25 bp, Probe sequence
tgcacctcaaaaaaaacctgttcaa

SEQ ID NO: 158278 - DNA, 25 bp, Probe sequence
taaactatggtgttaccttccctat

SEQ ID NO: 158279 - DNA, 25 bp, Probe sequence
tcaaatggaatttcactaagttttt

SEQ ID NO: 158280 - DNA, 25 bp, Probe sequence
taattctaggtttcccttgtaatca

SEQ ID NO: 158281 - DNA, 25 bp, Probe sequence
taccttccctatgcatcaaaaaata

SEQ ID NO: 158282 - DNA, 25 bp, Probe sequence
tagcgaatgtggctttacttcacaa

SEQ ID NO: 158283 - DNA, 25 bp, Probe sequence
tagacgtaaaaggggaacatcaatt

SEQ ID NO: 158284 - DNA, 25 bp, Probe sequence
tatttagatatttgactgcggcaca

SEQ ID NO: 158285 - DNA, 25 bp, Probe sequence
ttagatatttgactgcggcacaaca

SEQ ID NO: 158286 - DNA, 25 bp, Probe sequence
ttaccttccctatgcatcaaaaaat

SEQ ID NO: 158287 - DNA, 25 bp, Probe sequence
attctccaaccaatcaacaattttt

SEQ ID NO: 158288 - DNA, 25 bp, Probe sequence
attatttatggatggtgcacgatta

SEQ ID NO: 158289 - DNA, 25 bp, Probe sequence
atttcagcagacactggtcatgttg

SEQ ID NO: 158290 - DNA, 25 bp, Probe sequence
aggaccatatggtattcccaggaat

SEQ ID NO: 158291 - DNA, 25 bp, Probe sequence
atcgtgttgttagattcgcaaccag

SEQ ID NO: 158292 - DNA, 25 bp, Probe sequence
atgactattaaagacatcgctaaat

SEQ ID NO: 158293 - DNA, 25 bp, Probe sequence
aggacggttaacaggcatacaattt

SEQ ID NO: 158294 - DNA, 25 bp, Probe sequence
agacactggtcatgttgctgtgcat

SEQ ID NO: 158295 - DNA, 25 bp, Probe sequence
aaccaatcaggttgttattaattca

SEQ ID NO: 158296 - DNA, 25 bp, Probe sequence
aagcagacatgctatcgaaatggca

SEQ ID NO: 158297 - DNA, 25 bp, Probe sequence
aaggctatcgtctttactttgattc

SEQ ID NO: 158298 - DNA, 25 bp, Probe sequence
aatcttgtacaagcttcgggatatg

SEQ ID NO: 158299 - DNA, 25 bp, Probe sequence
aattcacagctcaggcaattgaaaa

SEQ ID NO: 158300 - DNA, 25 bp, Probe sequence
ctggtcatgttgctgtgcatgaggg

SEQ ID NO: 158301 - DNA, 25 bp, Probe sequence
cgaaacaatttaccactcgaatcaa

SEQ ID NO: 158302 - DNA, 25 bp, Probe sequence
gctgtttgggaaaaatacgatgatc

SEQ ID NO: 158303 - DNA, 25 bp, Probe sequence
gcttcgggatatggctttgatcaat

SEQ ID NO: 158304 - DNA, 25 bp, Probe sequence
gcaatatcagcttccattatttatg

SEQ ID NO: 158305 - DNA, 25 bp, Probe sequence
gaatggtatatatttctcatcctac

SEQ ID NO: 158306 - DNA, 25 bp, Probe sequence
gatggtgcacgattagggtatggat

SEQ ID NO: 158307 - DNA, 25 bp, Probe sequence
gatgtattttatataggtggtacga

SEQ ID NO: 158308 - DNA, 25 bp, Probe sequence
gattagggtatggattgatgagtga

SEQ ID NO: 158309 - DNA, 25 bp, Probe sequence
gattatttagaaggtgctcatgaaa

SEQ ID NO: 158310 - DNA, 25 bp, Probe sequence
gttgaaacttacatggagacattta

SEQ ID NO: 158311 - DNA, 25 bp, Probe sequence
gtatgtaagcaatatcagcttccat

SEQ ID NO: 158312 - DNA, 25 bp, Probe sequence
gtacgaagataggtgcattatgcgg

SEQ ID NO: 158313 - DNA, 25 bp, Probe sequence
gtaattactataccctctaaggaag

SEQ ID NO: 158314 - DNA, 25 bp, Probe sequence
gtctttactttgattctccaaccaa

SEQ ID NO: 158315 - DNA, 25 bp, Probe sequence
gtgcttcagatgttgaaacttacat

SEQ ID NO: 158316 - DNA, 25 bp, Probe sequence
ggtgcaattgaatatagtggacata

SEQ ID NO: 158317 - DNA, 25 bp, Probe sequence
ggaaaagttagtgcttcagatgttg

SEQ ID NO: 158318 - DNA, 25 bp, Probe sequence
ggctttgatcaattcacagctcagg

SEQ ID NO: 158319 - DNA, 25 bp, Probe sequence
tgaaccgaaacaatttaccactcga

SEQ ID NO: 158320 - DNA, 25 bp, Probe sequence
tcaacatcgtgttgttagattcgca

SEQ ID NO: 158321 - DNA, 25 bp, Probe sequence
atccgtttttcgagtatgcacgttc

SEQ ID NO: 158322 - DNA, 25 bp, Probe sequence
atcaaatcacagctatattcaagta

SEQ ID NO: 158323 - DNA, 25 bp, Probe sequence
atcattgtagcattaattggtatat

SEQ ID NO: 158324 - DNA, 25 bp, Probe sequence
atgtctttttatgttgtacttatca

SEQ ID NO: 158325 - DNA, 25 bp, Probe sequence
agtctatctatacttttacagaaac

SEQ ID NO: 158326 - DNA, 25 bp, Probe sequence
agctatctcgaaaatggtaaattaa

SEQ ID NO: 158327 - DNA, 25 bp, Probe sequence
agcgaagccatagagctatctaaac

SEQ ID NO: 158328 - DNA, 25 bp, Probe sequence
acgatattatcgttacaagcaattt

SEQ ID NO: 158329 - DNA, 25 bp, Probe sequence
aaagagaattacgcaagattttaga

SEQ ID NO: 158330 - DNA, 25 bp, Probe sequence
aaagcattaaaggatcatattgaac

SEQ ID NO: 158331 - DNA, 25 bp, Probe sequence
aaacatccgtttttcgagtatgcac

SEQ ID NO: 158332 - DNA, 25 bp, Probe sequence
aattcatcaagaaagtctatctata

SEQ ID NO: 158333 - DNA, 25 bp, Probe sequence
gccatagagctatctaaacaccctt

SEQ ID NO: 158334 - DNA, 25 bp, Probe sequence
gcaatatcatgatcagtttaattca

SEQ ID NO: 158335 - DNA, 25 bp, Probe sequence
gaagtcaaatgctgagttctaataa

SEQ ID NO: 158336 - DNA, 25 bp, Probe sequence
gaaaaagttgtcggtcattacatta

SEQ ID NO: 158337 - DNA, 25 bp, Probe sequence
gaaaaaacattttatcactttgatg

SEQ ID NO: 158338 - DNA, 25 bp, Probe sequence
gagctatctaaacaccctttaaata

SEQ ID NO: 158339 - DNA, 25 bp, Probe sequence
gatggtacagttaatatcattcaag

SEQ ID NO: 158340 - DNA, 25 bp, Probe sequence
gatgtacctgatgagcatgatacag

SEQ ID NO: 158341 - DNA, 25 bp, Probe sequence
gataccgaagtttatgcaagaaagc

SEQ ID NO: 158342 - DNA, 25 bp, Probe sequence
gttcaaccaaatcgtgttatttatg

SEQ ID NO: 158343 - DNA, 25 bp, Probe sequence
gttcatttgattttatcattgtttc

SEQ ID NO: 158344 - DNA, 25 bp, Probe sequence
gttacaagcaatttagctactaaac

SEQ ID NO: 158345 - DNA, 25 bp, Probe sequence
gttatttatgatttttatgattatg

SEQ ID NO: 158346 - DNA, 25 bp, Probe sequence
gtttttcgagtatgcacgttcattt

SEQ ID NO: 158347 - DNA, 25 bp, Probe sequence
gtatgcacgttcatttgattttatc

SEQ ID NO: 158348 - DNA, 25 bp, Probe sequence
gtacttatcattatcattgtagcat

SEQ ID NO: 158349 - DNA, 25 bp, Probe sequence
tgctgagttctaataatgatgttgg

SEQ ID NO: 158350 - DNA, 25 bp, Probe sequence
tagctactaaacatccgtttttcga

SEQ ID NO: 158351 - DNA, 25 bp, Probe sequence
tcattgtttcagatatcggtttaat

SEQ ID NO: 158352 - DNA, 25 bp, Probe sequence
tcactttgatgtacctgatgagcat

SEQ ID NO: 158353 - DNA, 25 bp, Probe sequence
tacgacgtattattagcgaagccat

SEQ ID NO: 158354 - DNA, 25 bp, Probe sequence
ttactttagtgatggtacagttaat

SEQ ID NO: 158355 - DNA, 25 bp, Probe sequence
attctgatccagagcgaaagattgt

SEQ ID NO: 158356 - DNA, 25 bp, Probe sequence
attacacatgccttagctgaatcaa

SEQ ID NO: 158357 - DNA, 25 bp, Probe sequence
attagatgcattactttcttgtggt

SEQ ID NO: 158358 - DNA, 25 bp, Probe sequence
attagatagtgcttactctgaaatt

SEQ ID NO: 158359 - DNA, 25 bp, Probe sequence
atttcatttgatcatatgccttcag

SEQ ID NO: 158360 - DNA, 25 bp, Probe sequence
atatagttacatttccacgtggcgg

SEQ ID NO: 158361 - DNA, 25 bp, Probe sequence
atactatcagtatcgttatgcgttc

SEQ ID NO: 158362 - DNA, 25 bp, Probe sequence
atgccttcaggtattgatactatca

SEQ ID NO: 158363 - DNA, 25 bp, Probe sequence
atgcgtgaattatcttatgctggtt

SEQ ID NO: 158364 - DNA, 25 bp, Probe sequence
atgattaaccaaggtgcttcggaaa

SEQ ID NO: 158365 - DNA, 25 bp, Probe sequence
agaaatcacttatcgagaaatgcgt

SEQ ID NO: 158366 - DNA, 25 bp, Probe sequence
acatttccacgtggcggatcagata

SEQ ID NO: 158367 - DNA, 25 bp, Probe sequence
aaatttcaccgatgtgtctggtatt

SEQ ID NO: 158368 - DNA, 25 bp, Probe sequence
aaagattgttatcgtttctgctcca

SEQ ID NO: 158369 - DNA, 25 bp, Probe sequence
aaagctaatccaaatatcatcaaag

SEQ ID NO: 158370 - DNA, 25 bp, Probe sequence
aatgcgcaattgatagctttatata

SEQ ID NO: 158371 - DNA, 25 bp, Probe sequence
cactttataaagatcgcatccctgt

SEQ ID NO: 158372 - DNA, 25 bp, Probe sequence
ccaaattcggtggtagctccgtctc

SEQ ID NO: 158373 - DNA, 25 bp, Probe sequence
ccgtctccaatgctactcaaattaa

SEQ ID NO: 158374 - DNA, 25 bp, Probe sequence
gttatcgtttctgctccaggtaaaa

SEQ ID NO: 158375 - DNA, 25 bp, Probe sequence
gaagccttacaaccactttataaag

SEQ ID NO: 158376 - DNA, 25 bp, Probe sequence
gaaaaggtcattaatcatcttgatt

SEQ ID NO: 158377 - DNA, 25 bp, Probe sequence
gagttttgctatcacggggttgcat

SEQ ID NO: 158378 - DNA, 25 bp, Probe sequence
gattgtcggcgaaggtatgaataaa

SEQ ID NO: 158379 - DNA, 25 bp, Probe sequence
gtatttttgttactgacgtcccaca

SEQ ID NO: 158380 - DNA, 25 bp, Probe sequence
gtattatctacatatgagttttgct

SEQ ID NO: 158381 - DNA, 25 bp, Probe sequence
gtgatgttgatgagctaagtattga

SEQ ID NO: 158382 - DNA, 25 bp, Probe sequence
gtgttttccatgatgaagccttaca

SEQ ID NO: 158383 - DNA, 25 bp, Probe sequence
ggatcagatataactggcgccatca

SEQ ID NO: 158384 - DNA, 25 bp, Probe sequence
ggcgccatcatatcaagtggtgtta

SEQ ID NO: 158385 - DNA, 25 bp, Probe sequence
taaaaatacgaaccgccctcaagat

SEQ ID NO: 158386 - DNA, 25 bp, Probe sequence
tacggacgatagatgtgactttgga

SEQ ID NO: 158387 - DNA, 25 bp, Probe sequence
tactgacgtcccacaagaagcacaa

SEQ ID NO: 158388 - DNA, 25 bp, Probe sequence
tatgctggttttagtgttttccatg

SEQ ID NO: 158389 - DNA, 25 bp, Probe sequence
attacagtttatacaaatttagatt

SEQ ID NO: 158390 - DNA, 25 bp, Probe sequence
attttccgaagaatcatttgctgaa

SEQ ID NO: 158391 - DNA, 25 bp, Probe sequence
atttgatgatgtactaaagcaagat

SEQ ID NO: 158392 - DNA, 25 bp, Probe sequence
atactgctgaccaaatatatgctca

SEQ ID NO: 158393 - DNA, 25 bp, Probe sequence
atcagcgttcagtattacagtttat

SEQ ID NO: 158394 - DNA, 25 bp, Probe sequence
atgactggacacaaacagctaaata

SEQ ID NO: 158395 - DNA, 25 bp, Probe sequence
agaatcatttgctgaaaaccaatca

SEQ ID NO: 158396 - DNA, 25 bp, Probe sequence
agcattagaagaaaagaacggacaa

SEQ ID NO: 158397 - DNA, 25 bp, Probe sequence
accaatcagcgttcagtattacagt

SEQ ID NO: 158398 - DNA, 25 bp, Probe sequence
actgctgaccaaatatatgctcatg

SEQ ID NO: 158399 - DNA, 25 bp, Probe sequence
acaaatttatttgatgatgtactaa

SEQ ID NO: 158400 - DNA, 25 bp, Probe sequence
aaatttagattatactgctgaccaa

SEQ ID NO: 158401 - DNA, 25 bp, Probe sequence
aaaccaatcagcgttcagtattaca

SEQ ID NO: 158402 - DNA, 25 bp, Probe sequence
aaaaccaatcagcgttcagtattac

SEQ ID NO: 158403 - DNA, 25 bp, Probe sequence
aaccaatcagcgttcagtattacag

SEQ ID NO: 158404 - DNA, 25 bp, Probe sequence
aagcatgactggacacaaacagcta

SEQ ID NO: 158405 - DNA, 25 bp, Probe sequence
aaggaattattttccgaagaatcat

SEQ ID NO: 158406 - DNA, 25 bp, Probe sequence
aatttagattatactgctgaccaaa

SEQ ID NO: 158407 - DNA, 25 bp, Probe sequence
caatcagcgttcagtattacagttt

SEQ ID NO: 158408 - DNA, 25 bp, Probe sequence
ctgctgaccaaatatatgctcatgt

SEQ ID NO: 158409 - DNA, 25 bp, Probe sequence
gcgttcagtattacagtttatacaa

SEQ ID NO: 158410 - DNA, 25 bp, Probe sequence
gctgaccaaatatatgctcatgtaa

SEQ ID NO: 158411 - DNA, 25 bp, Probe sequence
gcatgactggacacaaacagctaaa

SEQ ID NO: 158412 - DNA, 25 bp, Probe sequence
gaacggacaattattaaagagaact

SEQ ID NO: 158413 - DNA, 25 bp, Probe sequence
gaaaaccaatcagcgttcagtatta

SEQ ID NO: 158414 - DNA, 25 bp, Probe sequence
gaccaaatatatgctcatgtaaaac

SEQ ID NO: 158415 - DNA, 25 bp, Probe sequence
gatttgttattgtagttcaagcatt

SEQ ID NO: 158416 - DNA, 25 bp, Probe sequence
gattatactgctgaccaaatatatg

SEQ ID NO: 158417 - DNA, 25 bp, Probe sequence
gattggacaaacaaatttatttgat

SEQ ID NO: 158418 - DNA, 25 bp, Probe sequence
gttattgtagttcaagcattagaag

SEQ ID NO: 158419 - DNA, 25 bp, Probe sequence
tccgaagaatcatttgctgaaaacc

SEQ ID NO: 158420 - DNA, 25 bp, Probe sequence
tcagcgttcagtattacagtttata

SEQ ID NO: 158421 - DNA, 25 bp, Probe sequence
tattttccgaagaatcatttgctga

SEQ ID NO: 158422 - DNA, 25 bp, Probe sequence
ttagattatactgctgaccaaatat

SEQ ID NO: 158423 - DNA, 25 bp, Probe sequence
attggtgcaattattccgtacacag

SEQ ID NO: 158424 - DNA, 25 bp, Probe sequence
attggtgtcatgctatatttcttaa

SEQ ID NO: 158425 - DNA, 25 bp, Probe sequence
attctagcgttgatttactttattc

SEQ ID NO: 158426 - DNA, 25 bp, Probe sequence
attatccgctgcaaattcaggtgtt

SEQ ID NO: 158427 - DNA, 25 bp, Probe sequence
atccagtatcaggttcattcagctc

SEQ ID NO: 158428 - DNA, 25 bp, Probe sequence
aggtggtgcaattgggactggtcta

SEQ ID NO: 158429 - DNA, 25 bp, Probe sequence
agtagttcaataagtcaaagcccat

SEQ ID NO: 158430 - DNA, 25 bp, Probe sequence
agcacctttttatccattaggacca

SEQ ID NO: 158431 - DNA, 25 bp, Probe sequence
agctactggtaatatcatttctcaa

SEQ ID NO: 158432 - DNA, 25 bp, Probe sequence
actcgcttatcttgttattggtgtc

SEQ ID NO: 158433 - DNA, 25 bp, Probe sequence
aaaggccaagcaccgtttgttggtg

SEQ ID NO: 158434 - DNA, 25 bp, Probe sequence
aatgaaccgtagtcttaactcaaga

SEQ ID NO: 158435 - DNA, 25 bp, Probe sequence
aatgttgtattccttaagttcagac

SEQ ID NO: 158436 - DNA, 25 bp, Probe sequence
caacacgctttattgactcatctct

SEQ ID NO: 158437 - DNA, 25 bp, Probe sequence
catttctcaagctggtcctggaggc

SEQ ID NO: 158438 - DNA, 25 bp, Probe sequence
cattcagctcttattcaacacgctt

SEQ ID NO: 158439 - DNA, 25 bp, Probe sequence
gacacatttccatgattgctatagg

SEQ ID NO: 158440 - DNA, 25 bp, Probe sequence
gactggtctatttgtagctactggt

SEQ ID NO: 158441 - DNA, 25 bp, Probe sequence
gagttggcaacattttatccagtat

SEQ ID NO: 158442 - DNA, 25 bp, Probe sequence
gtaggcatagcctttgcagcatcag

SEQ ID NO: 158443 - DNA, 25 bp, Probe sequence
gattttcggtatcttaggtggtcat

SEQ ID NO: 158444 - DNA, 25 bp, Probe sequence
gtttgttggtggtatctctggtttc

SEQ ID NO: 158445 - DNA, 25 bp, Probe sequence
gtttggggatcaagcatttggtcac

SEQ ID NO: 158446 - DNA, 25 bp, Probe sequence
gtagcgtcaaatgtgctttatttct

SEQ ID NO: 158447 - DNA, 25 bp, Probe sequence
gtcaaagcccatttacaattgtatt

SEQ ID NO: 158448 - DNA, 25 bp, Probe sequence
ggtcctaccatataaagcacctttt

SEQ ID NO: 158449 - DNA, 25 bp, Probe sequence
ggttgtattgggcattgtggtcatt

SEQ ID NO: 158450 - DNA, 25 bp, Probe sequence
tgctttatttctgggacacatttaa

SEQ ID NO: 158451 - DNA, 25 bp, Probe sequence
tcctggaggcgctatactcgcttat

SEQ ID NO: 158452 - DNA, 25 bp, Probe sequence
tatgcagtcgttgttattgttatta

SEQ ID NO: 158453 - DNA, 25 bp, Probe sequence
tattccgtacacagatccatcatta

SEQ ID NO: 158454 - DNA, 25 bp, Probe sequence
tttccaccccattacttggagctta

SEQ ID NO: 158455 - DNA, 25 bp, Probe sequence
tttggcgtattcttttattctatgt

SEQ ID NO: 158456 - DNA, 25 bp, Probe sequence
ttacctttaatcattctagcgttga

SEQ ID NO: 158457 - DNA, 25 bp, Probe sequence
atgaatggtttaaattctgttattg

SEQ ID NO: 158458 - DNA, 25 bp, Probe sequence
atgaattttttaatttacatcacct

SEQ ID NO: 158459 - DNA, 25 bp, Probe sequence
atggtttaaattctgttattggcgc

SEQ ID NO: 158460 - DNA, 25 bp, Probe sequence
actatgaattttttaatttacatca

SEQ ID NO: 158461 - DNA, 25 bp, Probe sequence
aaattctgttattggcgcaatgata

SEQ ID NO: 158462 - DNA, 25 bp, Probe sequence
aatggtttaaattctgttattggcg

SEQ ID NO: 158463 - DNA, 25 bp, Probe sequence
aatttacatcacctactataaatat

SEQ ID NO: 158464 - DNA, 25 bp, Probe sequence
caacaacagttactatgaatttttt

SEQ ID NO: 158465 - DNA, 25 bp, Probe sequence
caacagttactatgaattttttaat

SEQ ID NO: 158466 - DNA, 25 bp, Probe sequence
ctatgaattttttaatttacatcac

SEQ ID NO: 158467 - DNA, 25 bp, Probe sequence
gcaacaacagttactatgaattttt

SEQ ID NO: 158468 - DNA, 25 bp, Probe sequence
gaatggtttaaattctgttattggc

SEQ ID NO: 158469 - DNA, 25 bp, Probe sequence
gtttaaattctgttattggcgcaat

SEQ ID NO: 158470 - DNA, 25 bp, Probe sequence
ggtttaaattctgttattggcgcaa

SEQ ID NO: 158471 - DNA, 25 bp, Probe sequence
tggtttaaattctgttattggcgca

SEQ ID NO: 158472 - DNA, 25 bp, Probe sequence
tgaattttttaatttacatcaccta

SEQ ID NO: 158473 - DNA, 25 bp, Probe sequence
tgaatggtttaaattctgttattgg

SEQ ID NO: 158474 - DNA, 25 bp, Probe sequence
taaattctgttattggcgcaatgat

SEQ ID NO: 158475 - DNA, 25 bp, Probe sequence
tactatgaattttttaatttacatc

SEQ ID NO: 158476 - DNA, 25 bp, Probe sequence
tatgaattttttaatttacatcacc

SEQ ID NO: 158477 - DNA, 25 bp, Probe sequence
tttaatttacatcacctactataaa

SEQ ID NO: 158478 - DNA, 25 bp, Probe sequence
tttaaattctgttattggcgcaatg

SEQ ID NO: 158479 - DNA, 25 bp, Probe sequence
ttttttaatttacatcacctactat

SEQ ID NO: 158480 - DNA, 25 bp, Probe sequence
tttttaatttacatcacctactata

SEQ ID NO: 158481 - DNA, 25 bp, Probe sequence
ttttaatttacatcacctactataa

SEQ ID NO: 158482 - DNA, 25 bp, Probe sequence
ttactatgaattttttaatttacat

SEQ ID NO: 158483 - DNA, 25 bp, Probe sequence
ttaaattctgttattggcgcaatga

SEQ ID NO: 158484 - DNA, 25 bp, Probe sequence
ttaatttacatcacctactataaat

SEQ ID NO: 158485 - DNA, 25 bp, Probe sequence
attattgttgctatgactgaggaag

SEQ ID NO: 158486 - DNA, 25 bp, Probe sequence
atagtacaatggagccaatttacct

SEQ ID NO: 158487 - DNA, 25 bp, Probe sequence
atccgcctagtgttcgcgaaattgg

SEQ ID NO: 158488 - DNA, 25 bp, Probe sequence
aacgattcatgtgccagttattggt

SEQ ID NO: 158489 - DNA, 25 bp, Probe sequence
aagaagagatccaacgaaaccacgt

SEQ ID NO: 158490 - DNA, 25 bp, Probe sequence
aattgttcgcagtcaaaccatagca

SEQ ID NO: 158491 - DNA, 25 bp, Probe sequence
catattcatattaaacgtcgtaggc

SEQ ID NO: 158492 - DNA, 25 bp, Probe sequence
gccagttattggtaaagtcacagca

SEQ ID NO: 158493 - DNA, 25 bp, Probe sequence
gcatccagttcaactgttcatggtc

SEQ ID NO: 158494 - DNA, 25 bp, Probe sequence
gcagttggcttagcatccagttcaa

SEQ ID NO: 158495 - DNA, 25 bp, Probe sequence
gcaactgtcaaacgcttctataaag

SEQ ID NO: 158496 - DNA, 25 bp, Probe sequence
gaaaggttatccgcctagtgttcgc

SEQ ID NO: 158497 - DNA, 25 bp, Probe sequence
gaaaccacgtgctatagaaattgta

SEQ ID NO: 158498 - DNA, 25 bp, Probe sequence
gacggagacaaagtaattgttcgca

SEQ ID NO: 158499 - DNA, 25 bp, Probe sequence
gagaattaacaaaacgacaaagcga

SEQ ID NO: 158500 - DNA, 25 bp, Probe sequence
gagatccaacgaaaccacgtgctat

SEQ ID NO: 158501 - DNA, 25 bp, Probe sequence
gaggctggtatattagacggagaca

SEQ ID NO: 158502 - DNA, 25 bp, Probe sequence
gttcgcagtcaaaccatagcagaaa

SEQ ID NO: 158503 - DNA, 25 bp, Probe sequence
gttatcgattacaacctgaaaatag

SEQ ID NO: 158504 - DNA, 25 bp, Probe sequence
gtaattggtttgtaccgcgaaatgt

SEQ ID NO: 158505 - DNA, 25 bp, Probe sequence
gtcgtaggcgacagtatgattgagg

SEQ ID NO: 158506 - DNA, 25 bp, Probe sequence
gtgttcgcgaaattggtgaagcagt

SEQ ID NO: 158507 - DNA, 25 bp, Probe sequence
ggtgaagcagttggcttagcatcca

SEQ ID NO: 158508 - DNA, 25 bp, Probe sequence
ggtaaagtcacagcaggtgttccta

SEQ ID NO: 158509 - DNA, 25 bp, Probe sequence
ggttatccgcctagtgttcgcgaaa

SEQ ID NO: 158510 - DNA, 25 bp, Probe sequence
ggagacattattgttgctatgactg

SEQ ID NO: 158511 - DNA, 25 bp, Probe sequence
ggaagaaacgattcatgtgccagtt

SEQ ID NO: 158512 - DNA, 25 bp, Probe sequence
ggaagatgaagcaactgtcaaacgc

SEQ ID NO: 158513 - DNA, 25 bp, Probe sequence
ggcttagcatccagttcaactgttc

SEQ ID NO: 158514 - DNA, 25 bp, Probe sequence
ggcgacagtatgattgaggctggta

SEQ ID NO: 158515 - DNA, 25 bp, Probe sequence
tccattacctgaacacttaacatcg

SEQ ID NO: 158516 - DNA, 25 bp, Probe sequence
tcacagcaggtgttcctattaccgc

SEQ ID NO: 158517 - DNA, 25 bp, Probe sequence
tacctgaacacttaacatcgacaca

SEQ ID NO: 158518 - DNA, 25 bp, Probe sequence
tattttccattacctgaacacttaa

SEQ ID NO: 158519 - DNA, 25 bp, Probe sequence
attggtaaaattttcggatcagttg

SEQ ID NO: 158520 - DNA, 25 bp, Probe sequence
atttatccaatctgttatcgacttt

SEQ ID NO: 158521 - DNA, 25 bp, Probe sequence
atctgttatcgactttattatcatc

SEQ ID NO: 158522 - DNA, 25 bp, Probe sequence
atcgactttattatcatcgcgtttg

SEQ ID NO: 158523 - DNA, 25 bp, Probe sequence
atccaatctgttatcgactttatta

SEQ ID NO: 158524 - DNA, 25 bp, Probe sequence
atgttgtgttattaactgaaatcag

SEQ ID NO: 158525 - DNA, 25 bp, Probe sequence
acgtcttagatttagcaattgctgt

SEQ ID NO: 158526 - DNA, 25 bp, Probe sequence
aagagaggttgagtgtaatgttaaa

SEQ ID NO: 158527 - DNA, 25 bp, Probe sequence
aagattatatcttcattagtagaaa

SEQ ID NO: 158528 - DNA, 25 bp, Probe sequence
aaggtaacgtcttagatttagcaat

SEQ ID NO: 158529 - DNA, 25 bp, Probe sequence
ctgttgtgatgggtgcagctttcaa

SEQ ID NO: 158530 - DNA, 25 bp, Probe sequence
ccaatctgttatcgactttattatc

SEQ ID NO: 158531 - DNA, 25 bp, Probe sequence
gccgaagaagaagcagttgtggaag

SEQ ID NO: 158532 - DNA, 25 bp, Probe sequence
gcagctttcaacaagattatatctt

SEQ ID NO: 158533 - DNA, 25 bp, Probe sequence
gcaattgctgttgtgatgggtgcag

SEQ ID NO: 158534 - DNA, 25 bp, Probe sequence
gaattcaaagagttcgccttaaaag

SEQ ID NO: 158535 - DNA, 25 bp, Probe sequence
gaatggtcattctggggtattaaat

SEQ ID NO: 158536 - DNA, 25 bp, Probe sequence
gaagaaagaagaagccgaagaagaa

SEQ ID NO: 158537 - DNA, 25 bp, Probe sequence
gaagcagttgtggaagaaaatgttg

SEQ ID NO: 158538 - DNA, 25 bp, Probe sequence
gatgggtgcagctttcaacaagatt

SEQ ID NO: 158539 - DNA, 25 bp, Probe sequence
gttgtggaagaaaatgttgtgttat

SEQ ID NO: 158540 - DNA, 25 bp, Probe sequence
gttatcgactttattatcatcgcgt

SEQ ID NO: 158541 - DNA, 25 bp, Probe sequence
gggtgcagctttcaacaagattata

SEQ ID NO: 158542 - DNA, 25 bp, Probe sequence
ggtaaaattttcggatcagttgatt

SEQ ID NO: 158543 - DNA, 25 bp, Probe sequence
ggtttatttatccaatctgttatcg

SEQ ID NO: 158544 - DNA, 25 bp, Probe sequence
tgtgatgggtgcagctttcaacaag

SEQ ID NO: 158545 - DNA, 25 bp, Probe sequence
tgattttgctaaagaatggtcattc

SEQ ID NO: 158546 - DNA, 25 bp, Probe sequence
tgaataatctattttctaatttttt

SEQ ID NO: 158547 - DNA, 25 bp, Probe sequence
tcatcgcgtttgctttattcatctt

SEQ ID NO: 158548 - DNA, 25 bp, Probe sequence
taaaagaattcaaagagttcgcctt

SEQ ID NO: 158549 - DNA, 25 bp, Probe sequence
tatcatcgcgtttgctttattcatc

SEQ ID NO: 158550 - DNA, 25 bp, Probe sequence
ttttcggatcagttgattttgctaa

SEQ ID NO: 158551 - DNA, 25 bp, Probe sequence
ttatttgttgtataattgaggttac

SEQ ID NO: 158552 - DNA, 25 bp, Probe sequence
ttatccaatctgttatcgactttat

SEQ ID NO: 158553 - DNA, 25 bp, Probe sequence
ataaagtgctcgtgttttttgtaag

SEQ ID NO: 158554 - DNA, 25 bp, Probe sequence
ataataaagtgctcgtgttttttgt

SEQ ID NO: 158555 - DNA, 25 bp, Probe sequence
aggatttagtcctgcttttacagtt

SEQ ID NO: 158556 - DNA, 25 bp, Probe sequence
agcaaggatttagtcctgcttttac

SEQ ID NO: 158557 - DNA, 25 bp, Probe sequence
aagtgctcgtgttttttgtaagata

SEQ ID NO: 158558 - DNA, 25 bp, Probe sequence
aaggaagatgttgatattggctatg

SEQ ID NO: 158559 - DNA, 25 bp, Probe sequence
caaatagaacttactgatgcagcag

SEQ ID NO: 158560 - DNA, 25 bp, Probe sequence
cacgaagatgaaatttcttattcca

SEQ ID NO: 158561 - DNA, 25 bp, Probe sequence
ctgcttttacagttgaaccaaagga

SEQ ID NO: 158562 - DNA, 25 bp, Probe sequence
ctgatgcagcagtaacttggtttaa

SEQ ID NO: 158563 - DNA, 25 bp, Probe sequence
gcagcagtaacttggtttaaaaatg

SEQ ID NO: 158564 - DNA, 25 bp, Probe sequence
gaattccaactcaagcaaggattta

SEQ ID NO: 158565 - DNA, 25 bp, Probe sequence
gaagatgttgatattggctatgaac

SEQ ID NO: 158566 - DNA, 25 bp, Probe sequence
gaacaacaatatgacgatttaaatg

SEQ ID NO: 158567 - DNA, 25 bp, Probe sequence
gatgcagcagtaacttggtttaaaa

SEQ ID NO: 158568 - DNA, 25 bp, Probe sequence
gatttgtggtactttgaagatgacc

SEQ ID NO: 158569 - DNA, 25 bp, Probe sequence
gatatggtggcgaattccaactcaa

SEQ ID NO: 158570 - DNA, 25 bp, Probe sequence
gatttagtcctgcttttacagttga

SEQ ID NO: 158571 - DNA, 25 bp, Probe sequence
gtactttgaagatgaccacattatt

SEQ ID NO: 158572 - DNA, 25 bp, Probe sequence
gtaaatgtagttgatcacgaagatg

SEQ ID NO: 158573 - DNA, 25 bp, Probe sequence
gtcctgcttttacagttgaaccaaa

SEQ ID NO: 158574 - DNA, 25 bp, Probe sequence
gtgctcgtgttttttgtaagatatg

SEQ ID NO: 158575 - DNA, 25 bp, Probe sequence
gtgttttttgtaagatatggtggcg

SEQ ID NO: 158576 - DNA, 25 bp, Probe sequence
gtggcgaattccaactcaagcaagg

SEQ ID NO: 158577 - DNA, 25 bp, Probe sequence
tagcggaaaaagatttgtggtactt

SEQ ID NO: 158578 - DNA, 25 bp, Probe sequence
ggcgaattccaactcaagcaaggat

SEQ ID NO: 158579 - DNA, 25 bp, Probe sequence
tggtggcgaattccaactcaagcaa

SEQ ID NO: 158580 - DNA, 25 bp, Probe sequence
tgaagatgaccacattattgtaaat

SEQ ID NO: 158581 - DNA, 25 bp, Probe sequence
tccaactcaagcaaggatttagtcc

SEQ ID NO: 158582 - DNA, 25 bp, Probe sequence
tagtcctgcttttacagttgaacca

SEQ ID NO: 158583 - DNA, 25 bp, Probe sequence
tatggtggcgaattccaactcaagc

SEQ ID NO: 158584 - DNA, 25 bp, Probe sequence
tattgtaaatgtagttgatcacgaa

SEQ ID NO: 158585 - DNA, 25 bp, Probe sequence
tttagtcctgcttttacagttgaac

SEQ ID NO: 158586 - DNA, 25 bp, Probe sequence
ttggctatgaacaacaatatgacga

SEQ ID NO: 158587 - DNA, 25 bp, Probe sequence
atatgtttctttagcaagtatcgtt

SEQ ID NO: 158588 - DNA, 25 bp, Probe sequence
atcgtcatgttactactaagttatc

SEQ ID NO: 158589 - DNA, 25 bp, Probe sequence
agttcacgcagatggccctattagt

SEQ ID NO: 158590 - DNA, 25 bp, Probe sequence
aaattccaaggtggcaaagctgttg

SEQ ID NO: 158591 - DNA, 25 bp, Probe sequence
aatacttgcaattatcttctttatt

SEQ ID NO: 158592 - DNA, 25 bp, Probe sequence
aatttgctgtgtgattggctcgctt

SEQ ID NO: 158593 - DNA, 25 bp, Probe sequence
cagatggccctattagtactttttt

SEQ ID NO: 158594 - DNA, 25 bp, Probe sequence
catattgataattagacatcgctct

SEQ ID NO: 158595 - DNA, 25 bp, Probe sequence
cttggtaacatttctagatattttc

SEQ ID NO: 158596 - DNA, 25 bp, Probe sequence
ctagtgcaggtgtcgtcttgggagt

SEQ ID NO: 158597 - DNA, 25 bp, Probe sequence
ctaagttatcttatcggcgctttcc

SEQ ID NO: 158598 - DNA, 25 bp, Probe sequence
cgtcctgcaggattcttggtaacat

SEQ ID NO: 158599 - DNA, 25 bp, Probe sequence
gcgctttcccaagtggattcgtaat

SEQ ID NO: 158600 - DNA, 25 bp, Probe sequence
gctttagagtattaggtcgtcctgc

SEQ ID NO: 158601 - DNA, 25 bp, Probe sequence
gcaggattcttggtaacatttctag

SEQ ID NO: 158602 - DNA, 25 bp, Probe sequence
gcaactagtgcaggtgtcgtcttgg

SEQ ID NO: 158603 - DNA, 25 bp, Probe sequence
gcaaggatttttagaggcgaagaac

SEQ ID NO: 158604 - DNA, 25 bp, Probe sequence
gcaagtatcgttgcagcaatttgct

SEQ ID NO: 158605 - DNA, 25 bp, Probe sequence
gcaattatcttctttattgtattga

SEQ ID NO: 158606 - DNA, 25 bp, Probe sequence
gacatcgctctaatatcgcaaggat

SEQ ID NO: 158607 - DNA, 25 bp, Probe sequence
gataatcgtcatgttactactaagt

SEQ ID NO: 158608 - DNA, 25 bp, Probe sequence
gatattttcaaagggttcataactg

SEQ ID NO: 158609 - DNA, 25 bp, Probe sequence
gattggctcgcttatcattcaagac

SEQ ID NO: 158610 - DNA, 25 bp, Probe sequence
gtcgttagtttcttagtttcaatca

SEQ ID NO: 158611 - DNA, 25 bp, Probe sequence
gtggcaaagctgttgcaactagtgc

SEQ ID NO: 158612 - DNA, 25 bp, Probe sequence
ggtagtggtaatactggcgctacta

SEQ ID NO: 158613 - DNA, 25 bp, Probe sequence
ggcttattcgctatacttggacacg

SEQ ID NO: 158614 - DNA, 25 bp, Probe sequence
ggctcgcttatcattcaagactata

SEQ ID NO: 158615 - DNA, 25 bp, Probe sequence
tactggcgctactaatagctttaga

SEQ ID NO: 158616 - DNA, 25 bp, Probe sequence
tagtttcttagtttcaatcatattg

SEQ ID NO: 158617 - DNA, 25 bp, Probe sequence
taggtcgtcctgcaggattcttggt

SEQ ID NO: 158618 - DNA, 25 bp, Probe sequence
tatattttattagtcgttagtttct

SEQ ID NO: 158619 - DNA, 25 bp, Probe sequence
tattcgctatacttggacacgttta

SEQ ID NO: 158620 - DNA, 25 bp, Probe sequence
ttcataactgttttcttccctttat

SEQ ID NO: 158621 - DNA, 25 bp, Probe sequence
atttcttatacaatacaagagattt

SEQ ID NO: 158622 - DNA, 25 bp, Probe sequence
atatagagatacatcatcatttctt

SEQ ID NO: 158623 - DNA, 25 bp, Probe sequence
atagagatacatcatcatttcttat

SEQ ID NO: 158624 - DNA, 25 bp, Probe sequence
atacatcatcatttcttatacaata

SEQ ID NO: 158625 - DNA, 25 bp, Probe sequence
atcatcatttcttatacaatacaag

SEQ ID NO: 158626 - DNA, 25 bp, Probe sequence
atcatttcttatacaatacaagaga

SEQ ID NO: 158627 - DNA, 25 bp, Probe sequence
agatacatcatcatttcttatacaa

SEQ ID NO: 158628 - DNA, 25 bp, Probe sequence
agagatacatcatcatttcttatac

SEQ ID NO: 158629 - DNA, 25 bp, Probe sequence
acatcatcatttcttatacaataca

SEQ ID NO: 158630 - DNA, 25 bp, Probe sequence
aaatatagagatacatcatcatttc

SEQ ID NO: 158631 - DNA, 25 bp, Probe sequence
aatatagagatacatcatcatttct

SEQ ID NO: 158632 - DNA, 25 bp, Probe sequence
catcatttcttatacaatacaagag

SEQ ID NO: 158633 - DNA, 25 bp, Probe sequence
catcatcatttcttatacaatacaa

SEQ ID NO: 158634 - DNA, 25 bp, Probe sequence
cttctataaaattagaccgaattga

SEQ ID NO: 158635 - DNA, 25 bp, Probe sequence
catttcttatacaatacaagagatt

SEQ ID NO: 158636 - DNA, 25 bp, Probe sequence
ccttctataaaattagaccgaattg

SEQ ID NO: 158637 - DNA, 25 bp, Probe sequence
gagatacatcatcatttcttataca

SEQ ID NO: 158638 - DNA, 25 bp, Probe sequence
gatacatcatcatttcttatacaat

SEQ ID NO: 158639 - DNA, 25 bp, Probe sequence
gtaaatatagagatacatcatcatt

SEQ ID NO: 158640 - DNA, 25 bp, Probe sequence
tcttatacaatacaagagatttata

SEQ ID NO: 158641 - DNA, 25 bp, Probe sequence
tcatttcttatacaatacaagagat

SEQ ID NO: 158642 - DNA, 25 bp, Probe sequence
tcatcatttcttatacaatacaaga

SEQ ID NO: 158643 - DNA, 25 bp, Probe sequence
taaatatagagatacatcatcattt

SEQ ID NO: 158644 - DNA, 25 bp, Probe sequence
tacatcatcatttcttatacaatac

SEQ ID NO: 158645 - DNA, 25 bp, Probe sequence
tagagatacatcatcatttcttata

SEQ ID NO: 158646 - DNA, 25 bp, Probe sequence
tatagagatacatcatcatttctta

SEQ ID NO: 158647 - DNA, 25 bp, Probe sequence
tttcttatacaatacaagagattta

SEQ ID NO: 158648 - DNA, 25 bp, Probe sequence
ttctataaaattagaccgaattgaa

SEQ ID NO: 158649 - DNA, 25 bp, Probe sequence
attttctacactaatgatcatcaaa

SEQ ID NO: 158650 - DNA, 25 bp, Probe sequence
atcaaacagctattttctacactaa

SEQ ID NO: 158651 - DNA, 25 bp, Probe sequence
atgacgaaaccatttgacacctttg

SEQ ID NO: 158652 - DNA, 25 bp, Probe sequence
atgttgcattattctcatacaataa

SEQ ID NO: 158653 - DNA, 25 bp, Probe sequence
agccgaagactatcaccaagatttt

SEQ ID NO: 158654 - DNA, 25 bp, Probe sequence
accgtggtcctcaatatcaaacagc

SEQ ID NO: 158655 - DNA, 25 bp, Probe sequence
acagctattttctacactaatgatc

SEQ ID NO: 158656 - DNA, 25 bp, Probe sequence
acaaagccgaagactatcaccaaga

SEQ ID NO: 158657 - DNA, 25 bp, Probe sequence
aaaatacgattaatgctgataaggc

SEQ ID NO: 158658 - DNA, 25 bp, Probe sequence
aacttctggatatatgggcggacat

SEQ ID NO: 158659 - DNA, 25 bp, Probe sequence
aaccatttgacacctttgacggcat

SEQ ID NO: 158660 - DNA, 25 bp, Probe sequence
aagaccgtggtcctcaatatcaaac

SEQ ID NO: 158661 - DNA, 25 bp, Probe sequence
aatacagcttattttgccggaggtt

SEQ ID NO: 158662 - DNA, 25 bp, Probe sequence
aatatttttctcagtcattgaccca

SEQ ID NO: 158663 - DNA, 25 bp, Probe sequence
cagtcattgacccattagatacagg

SEQ ID NO: 158664 - DNA, 25 bp, Probe sequence
catttgacacctttgacggcataga

SEQ ID NO: 158665 - DNA, 25 bp, Probe sequence
cgaaaccatttgacacctttgacgg

SEQ ID NO: 158666 - DNA, 25 bp, Probe sequence
gcgtcacaattttacaaagccgaag

SEQ ID NO: 158667 - DNA, 25 bp, Probe sequence
gcttattttgccggaggttgctttt

SEQ ID NO: 158668 - DNA, 25 bp, Probe sequence
gaacaaaaaatacgccaagaataca

SEQ ID NO: 158669 - DNA, 25 bp, Probe sequence
gaacaagtaaaatcaggtacgagtg

SEQ ID NO: 158670 - DNA, 25 bp, Probe sequence
gaaattcaatatgatgttgcattat

SEQ ID NO: 158671 - DNA, 25 bp, Probe sequence
gactatcaccaagatttttataaga

SEQ ID NO: 158672 - DNA, 25 bp, Probe sequence
gatcatcaaaaagaactcgctgaga

SEQ ID NO: 158673 - DNA, 25 bp, Probe sequence
gtaacttctggatatatgggcggac

SEQ ID NO: 158674 - DNA, 25 bp, Probe sequence
gtggtcctcaatatcaaacagctat

SEQ ID NO: 158675 - DNA, 25 bp, Probe sequence
ggtcaatatcaagaccgtggtcctc

SEQ ID NO: 158676 - DNA, 25 bp, Probe sequence
ggttgcttttggtgtatgacgaaac

SEQ ID NO: 158677 - DNA, 25 bp, Probe sequence
ggaggttgcttttggtgtatgacga

SEQ ID NO: 158678 - DNA, 25 bp, Probe sequence
tgacacctttgacggcatagaaaaa

SEQ ID NO: 158679 - DNA, 25 bp, Probe sequence
tgctgataaggcaattgcaacaaaa

SEQ ID NO: 158680 - DNA, 25 bp, Probe sequence
tatatcgagcagcttaaaaatacga

SEQ ID NO: 158681 - DNA, 25 bp, Probe sequence
tttgccggaggttgcttttggtgta

SEQ ID NO: 158682 - DNA, 25 bp, Probe sequence
ttttctcagtcattgacccattaga

SEQ ID NO: 158683 - DNA, 25 bp, Probe sequence
attatggtgtggctggcgtaagaaa

SEQ ID NO: 158684 - DNA, 25 bp, Probe sequence
atagacaagcaattcacgttgttat

SEQ ID NO: 158685 - DNA, 25 bp, Probe sequence
atgccaatcgtcaatgtaaaattat

SEQ ID NO: 158686 - DNA, 25 bp, Probe sequence
atggtgtggctggcgtaagaaagtc

SEQ ID NO: 158687 - DNA, 25 bp, Probe sequence
agcaattcacgttgttatagaagaa

SEQ ID NO: 158688 - DNA, 25 bp, Probe sequence
accaaaccattatggtgtggctggc

SEQ ID NO: 158689 - DNA, 25 bp, Probe sequence
accattatggtgtggctggcgtaag

SEQ ID NO: 158690 - DNA, 25 bp, Probe sequence
aaaccaaaccattatggtgtggctg

SEQ ID NO: 158691 - DNA, 25 bp, Probe sequence
aaaccattatggtgtggctggcgta

SEQ ID NO: 158692 - DNA, 25 bp, Probe sequence
aaccattatggtgtggctggcgtaa

SEQ ID NO: 158693 - DNA, 25 bp, Probe sequence
aatagacaagcaattcacgttgtta

SEQ ID NO: 158694 - DNA, 25 bp, Probe sequence
aattattagaaggtcgttcggatga

SEQ ID NO: 158695 - DNA, 25 bp, Probe sequence
aattcacgttgttatagaagaaatg

SEQ ID NO: 158696 - DNA, 25 bp, Probe sequence
caagcaattcacgttgttatagaag

SEQ ID NO: 158697 - DNA, 25 bp, Probe sequence
caaaccattatggtgtggctggcgt

SEQ ID NO: 158698 - DNA, 25 bp, Probe sequence
cattatggtgtggctggcgtaagaa

SEQ ID NO: 158699 - DNA, 25 bp, Probe sequence
ccattatggtgtggctggcgtaaga

SEQ ID NO: 158700 - DNA, 25 bp, Probe sequence
gccaatcgtcaatgtaaaattatta

SEQ ID NO: 158701 - DNA, 25 bp, Probe sequence
gcaaatagacaagcaattcacgttg

SEQ ID NO: 158702 - DNA, 25 bp, Probe sequence
gaaggtcgttcggatgaacaattaa

SEQ ID NO: 158703 - DNA, 25 bp, Probe sequence
gaaaccaaaccattatggtgtggct

SEQ ID NO: 158704 - DNA, 25 bp, Probe sequence
gacaagcaattcacgttgttataga

SEQ ID NO: 158705 - DNA, 25 bp, Probe sequence
gtggctggcgtaagaaagtcagatc

SEQ ID NO: 158706 - DNA, 25 bp, Probe sequence
gtgtggctggcgtaagaaagtcaga

SEQ ID NO: 158707 - DNA, 25 bp, Probe sequence
ggtgtggctggcgtaagaaagtcag

SEQ ID NO: 158708 - DNA, 25 bp, Probe sequence
ggctggcgtaagaaagtcagatcaa

SEQ ID NO: 158709 - DNA, 25 bp, Probe sequence
tggcgtaagaaagtcagatcaataa

SEQ ID NO: 158710 - DNA, 25 bp, Probe sequence
tggtgtggctggcgtaagaaagtca

SEQ ID NO: 158711 - DNA, 25 bp, Probe sequence
tagaaggtcgttcggatgaacaatt

SEQ ID NO: 158712 - DNA, 25 bp, Probe sequence
tagacaagcaattcacgttgttata

SEQ ID NO: 158713 - DNA, 25 bp, Probe sequence
tatggtgtggctggcgtaagaaagt

SEQ ID NO: 158714 - DNA, 25 bp, Probe sequence
tattagaaggtcgttcggatgaaca

SEQ ID NO: 158715 - DNA, 25 bp, Probe sequence
ttattagaaggtcgttcggatgaac

SEQ ID NO: 158716 - DNA, 25 bp, Probe sequence
ttatggtgtggctggcgtaagaaag

SEQ ID NO: 158717 - DNA, 25 bp, Probe sequence
atacgcttgtgtcaccaggtacggt

SEQ ID NO: 158718 - DNA, 25 bp, Probe sequence
accaggtacggtgatacaggcgtta

SEQ ID NO: 158719 - DNA, 25 bp, Probe sequence
atgcaggcgcagtattttttgtcat

SEQ ID NO: 158720 - DNA, 25 bp, Probe sequence
atgcaagcacttacacgaaacccaa

SEQ ID NO: 158721 - DNA, 25 bp, Probe sequence
acgattattaccaccaaactataag

SEQ ID NO: 158722 - DNA, 25 bp, Probe sequence
acgggcgtcgagaacaatcattgcg

SEQ ID NO: 158723 - DNA, 25 bp, Probe sequence
aagcacttacacgaaacccaatagc

SEQ ID NO: 158724 - DNA, 25 bp, Probe sequence
aatcgttattgctggtttatgtctt

SEQ ID NO: 158725 - DNA, 25 bp, Probe sequence
aatagtagctatcttaagtttaatg

SEQ ID NO: 158726 - DNA, 25 bp, Probe sequence
catttatccaaattcaatcttttaa

SEQ ID NO: 158727 - DNA, 25 bp, Probe sequence
cattggcgctattgtcttaatctat

SEQ ID NO: 158728 - DNA, 25 bp, Probe sequence
ctggtgcacgggcgtcgagaacaat

SEQ ID NO: 158729 - DNA, 25 bp, Probe sequence
gcatttagcatggctgcacacatca

SEQ ID NO: 158730 - DNA, 25 bp, Probe sequence
gaagaaaggacgtcaacgcttatga

SEQ ID NO: 158731 - DNA, 25 bp, Probe sequence
gaaacagacttacaaggcctattat

SEQ ID NO: 158732 - DNA, 25 bp, Probe sequence
gatacaggcgttattcaactttgat

SEQ ID NO: 158733 - DNA, 25 bp, Probe sequence
gatacttattttaattgcatttagc

SEQ ID NO: 158734 - DNA, 25 bp, Probe sequence
gatagtgaaaacgatttacatgatg

SEQ ID NO: 158735 - DNA, 25 bp, Probe sequence
gtatttaattccttttactgcatta

SEQ ID NO: 158736 - DNA, 25 bp, Probe sequence
gtctcaggtttgttgatgcaagcac

SEQ ID NO: 158737 - DNA, 25 bp, Probe sequence
ggtttatgtcttgcaatagtagcta

SEQ ID NO: 158738 - DNA, 25 bp, Probe sequence
ggattattccgcttgtattgatact

SEQ ID NO: 158739 - DNA, 25 bp, Probe sequence
ggcttttcggtgtcaatgcaggcgc

SEQ ID NO: 158740 - DNA, 25 bp, Probe sequence
tggctgcacacatcaacatcttgat

SEQ ID NO: 158741 - DNA, 25 bp, Probe sequence
tgctacttaaaccaaaataccaaat

SEQ ID NO: 158742 - DNA, 25 bp, Probe sequence
tgattggaaatacgcttgtgtcacc

SEQ ID NO: 158743 - DNA, 25 bp, Probe sequence
tcttgatgacaagtgacgacattgc

SEQ ID NO: 158744 - DNA, 25 bp, Probe sequence
taagccactagagttgcctatcggt

SEQ ID NO: 158745 - DNA, 25 bp, Probe sequence
ttttcggtgtcaatgcaggcgcagt

SEQ ID NO: 158746 - DNA, 25 bp, Probe sequence
taccgctgtcattggcgctattgtc

SEQ ID NO: 158747 - DNA, 25 bp, Probe sequence
tagcatggctgcacacatcaacatc

SEQ ID NO: 158748 - DNA, 25 bp, Probe sequence
tagagttgcctatcggtgtcgttac

SEQ ID NO: 158749 - DNA, 25 bp, Probe sequence
tatcggtgtcgttaccgctgtcatt

SEQ ID NO: 158750 - DNA, 25 bp, Probe sequence
ttacatgatgttgtcactggtgcac

SEQ ID NO: 158751 - DNA, 25 bp, Probe sequence
atatgccaactaaacctggtgttat

SEQ ID NO: 158752 - DNA, 25 bp, Probe sequence
agaacacgactacgtaacaagcgtc

SEQ ID NO: 158753 - DNA, 25 bp, Probe sequence
acctcatatcgttgcatctagttta

SEQ ID NO: 158754 - DNA, 25 bp, Probe sequence
acctggtgttattgtttctgatact

SEQ ID NO: 158755 - DNA, 25 bp, Probe sequence
actactgctgaagaacacgactacg

SEQ ID NO: 158756 - DNA, 25 bp, Probe sequence
acttgcagctggtggttttcgtgat

SEQ ID NO: 158757 - DNA, 25 bp, Probe sequence
acaagcgtcgtaagtcatttacctc

SEQ ID NO: 158758 - DNA, 25 bp, Probe sequence
aaagcaatgatacagcaacacgaat

SEQ ID NO: 158759 - DNA, 25 bp, Probe sequence
aagccgatgtaattatttatgcaac

SEQ ID NO: 158760 - DNA, 25 bp, Probe sequence
aagcattgagtgattttgattgtta

SEQ ID NO: 158761 - DNA, 25 bp, Probe sequence
aagaactgttatcacctactcttgc

SEQ ID NO: 158762 - DNA, 25 bp, Probe sequence
aatgagcaagcagcaaacacgttaa

SEQ ID NO: 158763 - DNA, 25 bp, Probe sequence
aataccataaccctaatactaatat

SEQ ID NO: 158764 - DNA, 25 bp, Probe sequence
aatactgcgtatgatctatatgtag

SEQ ID NO: 158765 - DNA, 25 bp, Probe sequence
aatattcatttagtcagtggtcatc

SEQ ID NO: 158766 - DNA, 25 bp, Probe sequence
cacaaataaatatcttagcgagctt

SEQ ID NO: 158767 - DNA, 25 bp, Probe sequence
ctaggtggactaaatactgcgtatg

SEQ ID NO: 158768 - DNA, 25 bp, Probe sequence
cgagaacgcggtatgcaagcattga

SEQ ID NO: 158769 - DNA, 25 bp, Probe sequence
gctaaatttattgtaactactgctg

SEQ ID NO: 158770 - DNA, 25 bp, Probe sequence
gctagtagtaatgcacaaatgtgga

SEQ ID NO: 158771 - DNA, 25 bp, Probe sequence
gcatctagtttagttcatgttagtc

SEQ ID NO: 158772 - DNA, 25 bp, Probe sequence
gcacttatttgaaaacgcttattat

SEQ ID NO: 158773 - DNA, 25 bp, Probe sequence
gcaacacctgttgctatcacaaata

SEQ ID NO: 158774 - DNA, 25 bp, Probe sequence
gatatcactcgtatagctagtagta

SEQ ID NO: 158775 - DNA, 25 bp, Probe sequence
gtacgcgaagatatatacggtgctt

SEQ ID NO: 158776 - DNA, 25 bp, Probe sequence
gtcatttacctcatatcgttgcatc

SEQ ID NO: 158777 - DNA, 25 bp, Probe sequence
gtcagtggtcatccaatggctggta

SEQ ID NO: 158778 - DNA, 25 bp, Probe sequence
gtggaaagatatcaccttgagtaat

SEQ ID NO: 158779 - DNA, 25 bp, Probe sequence
ggtggttttcgtgatatcactcgta

SEQ ID NO: 158780 - DNA, 25 bp, Probe sequence
ggtcatccaatggctggtagtcata

SEQ ID NO: 158781 - DNA, 25 bp, Probe sequence
tggattaattggtggaagtcttgct

SEQ ID NO: 158782 - DNA, 25 bp, Probe sequence
tatcacctactcttgctaaatttat

SEQ ID NO: 158783 - DNA, 25 bp, Probe sequence
tattgtttctgatactggtagtact

SEQ ID NO: 158784 - DNA, 25 bp, Probe sequence
ttggtggaagtcttgctagcaatat

SEQ ID NO: 158785 - DNA, 25 bp, Probe sequence
attgaacatggagaaatggcagaat

SEQ ID NO: 158786 - DNA, 25 bp, Probe sequence
attgcattactctttacagctagtc

SEQ ID NO: 158787 - DNA, 25 bp, Probe sequence
attactctttacagctagtccagaa

SEQ ID NO: 158788 - DNA, 25 bp, Probe sequence
atatgagtgaagaagaactccgcga

SEQ ID NO: 158789 - DNA, 25 bp, Probe sequence
atatgattgcattactctttacagc

SEQ ID NO: 158790 - DNA, 25 bp, Probe sequence
atgattgcattactctttacagcta

SEQ ID NO: 158791 - DNA, 25 bp, Probe sequence
agtccagaagcagcaaataaacata

SEQ ID NO: 158792 - DNA, 25 bp, Probe sequence
actctttacagctagtccagaagca

SEQ ID NO: 158793 - DNA, 25 bp, Probe sequence
aacatatgattgcattactctttac

SEQ ID NO: 158794 - DNA, 25 bp, Probe sequence
aatggcagaattatttggattagat

SEQ ID NO: 158795 - DNA, 25 bp, Probe sequence
caaagtatatcgttgttatattgat

SEQ ID NO: 158796 - DNA, 25 bp, Probe sequence
cagctagtccagaagcagcaaataa

SEQ ID NO: 158797 - DNA, 25 bp, Probe sequence
cattactctttacagctagtccaga

SEQ ID NO: 158798 - DNA, 25 bp, Probe sequence
gcattactctttacagctagtccag

SEQ ID NO: 158799 - DNA, 25 bp, Probe sequence
gcatatttaaacatgttaattgaac

SEQ ID NO: 158800 - DNA, 25 bp, Probe sequence
gatatggaacatcctagaaaatcca

SEQ ID NO: 158801 - DNA, 25 bp, Probe sequence
gatattgcaagtattcgttctatag

SEQ ID NO: 158802 - DNA, 25 bp, Probe sequence
gattgcattactctttacagctagt

SEQ ID NO: 158803 - DNA, 25 bp, Probe sequence
gttatattgatatggaacatcctag

SEQ ID NO: 158804 - DNA, 25 bp, Probe sequence
gtattcgttctatagaaagaggctt

SEQ ID NO: 158805 - DNA, 25 bp, Probe sequence
ggaagacgagtgatatgtaaacata

SEQ ID NO: 158806 - DNA, 25 bp, Probe sequence
tgcattactctttacagctagtcca

SEQ ID NO: 158807 - DNA, 25 bp, Probe sequence
tgcaagtattcgttctatagaaaga

SEQ ID NO: 158808 - DNA, 25 bp, Probe sequence
tgctgatggaagacgagtgatatgt

SEQ ID NO: 158809 - DNA, 25 bp, Probe sequence
tctttacagctagtccagaagcagc

SEQ ID NO: 158810 - DNA, 25 bp, Probe sequence
taaacgaagttgaagaagactatca

SEQ ID NO: 158811 - DNA, 25 bp, Probe sequence
taaacatatgattgcattactcttt

SEQ ID NO: 158812 - DNA, 25 bp, Probe sequence
tacagctagtccagaagcagcaaat

SEQ ID NO: 158813 - DNA, 25 bp, Probe sequence
tagaaagaggctttaattattatca

SEQ ID NO: 158814 - DNA, 25 bp, Probe sequence
tttacagctagtccagaagcagcaa

SEQ ID NO: 158815 - DNA, 25 bp, Probe sequence
tattgcaagtattcgttctatagaa

SEQ ID NO: 158816 - DNA, 25 bp, Probe sequence
ttactctttacagctagtccagaag

SEQ ID NO: 158817 - DNA, 25 bp, Probe sequence
ttgcattactctttacagctagtcc

SEQ ID NO: 158818 - DNA, 25 bp, Probe sequence
ttgatattgcaagtattcgttctat

SEQ ID NO: 158819 - DNA, 25 bp, Probe sequence
atttatccgtgttacaacgcttagt

SEQ ID NO: 158820 - DNA, 25 bp, Probe sequence
atgagataacttcaaatttagatgt

SEQ ID NO: 158821 - DNA, 25 bp, Probe sequence
atgttgatagacacccttatacaaa

SEQ ID NO: 158822 - DNA, 25 bp, Probe sequence
agctttaaccctgattggacgattg

SEQ ID NO: 158823 - DNA, 25 bp, Probe sequence
agcagatggtgctacaagatatcaa

SEQ ID NO: 158824 - DNA, 25 bp, Probe sequence
agcgcaaacgattacgaacttaaat

SEQ ID NO: 158825 - DNA, 25 bp, Probe sequence
accctgattggacgattgagacctc

SEQ ID NO: 158826 - DNA, 25 bp, Probe sequence
aaagatttaatgtcatgcgttcgtt

SEQ ID NO: 158827 - DNA, 25 bp, Probe sequence
aaaacatgtgacttttggttataat

SEQ ID NO: 158828 - DNA, 25 bp, Probe sequence
aaaagtacgctcgcttcattggttc

SEQ ID NO: 158829 - DNA, 25 bp, Probe sequence
aacgcgcaattattgactaaattac

SEQ ID NO: 158830 - DNA, 25 bp, Probe sequence
aagaagcgttatattattacagagg

SEQ ID NO: 158831 - DNA, 25 bp, Probe sequence
aagatatcaatattactatacctga

SEQ ID NO: 158832 - DNA, 25 bp, Probe sequence
aatcattttatcgttatttctcatg

SEQ ID NO: 158833 - DNA, 25 bp, Probe sequence
caatattactatacctgatggagaa

SEQ ID NO: 158834 - DNA, 25 bp, Probe sequence
cagcctcgcgttttaatatgtgatg

SEQ ID NO: 158835 - DNA, 25 bp, Probe sequence
gcgaagtgagtggcggacaattaca

SEQ ID NO: 158836 - DNA, 25 bp, Probe sequence
gcgttcgttattagcacagcctcgc

SEQ ID NO: 158837 - DNA, 25 bp, Probe sequence
gaattatcgttcttaaggatggcat

SEQ ID NO: 158838 - DNA, 25 bp, Probe sequence
gacacccttatacaaaagaattagt

SEQ ID NO: 158839 - DNA, 25 bp, Probe sequence
gactaaattaccaagcgaagtgagt

SEQ ID NO: 158840 - DNA, 25 bp, Probe sequence
gagacctcattaaaagaagcgttat

SEQ ID NO: 158841 - DNA, 25 bp, Probe sequence
gagtggcggacaattacaaagattt

SEQ ID NO: 158842 - DNA, 25 bp, Probe sequence
gtcatgcgttcgttattagcacagc

SEQ ID NO: 158843 - DNA, 25 bp, Probe sequence
gtggctgtggtaaaagtacgctcgc

SEQ ID NO: 158844 - DNA, 25 bp, Probe sequence
ggtattttaggcgaaagtggctgtg

SEQ ID NO: 158845 - DNA, 25 bp, Probe sequence
ggatggcatgatagtcgatgatttt

SEQ ID NO: 158846 - DNA, 25 bp, Probe sequence
tgattggacgattgagacctcatta

SEQ ID NO: 158847 - DNA, 25 bp, Probe sequence
tcgttatttctcatgatttatccgt

SEQ ID NO: 158848 - DNA, 25 bp, Probe sequence
taactagctttaaccctgattggac

SEQ ID NO: 158849 - DNA, 25 bp, Probe sequence
tacaacatttatctacttttgagtt

SEQ ID NO: 158850 - DNA, 25 bp, Probe sequence
tagcacagcctcgcgttttaatatg

SEQ ID NO: 158851 - DNA, 25 bp, Probe sequence
tttctcatgatttatccgtgttaca

SEQ ID NO: 158852 - DNA, 25 bp, Probe sequence
ttaaaagcgcaaacgattacgaact

SEQ ID NO: 158853 - DNA, 25 bp, Probe sequence
ttccaactttctgggggccaacttg

SEQ ID NO: 158854 - DNA, 25 bp, Probe sequence
attgagtcaatattatggtcataca

SEQ ID NO: 158855 - DNA, 25 bp, Probe sequence
attaaagagggattactatgattga

SEQ ID NO: 158856 - DNA, 25 bp, Probe sequence
attatcacacataacttaagtcatg

SEQ ID NO: 158857 - DNA, 25 bp, Probe sequence
atttcaagtatgagcatttgcatcc

SEQ ID NO: 158858 - DNA, 25 bp, Probe sequence
atcattggatgctttgaacggtaat

SEQ ID NO: 158859 - DNA, 25 bp, Probe sequence
atgagtctcattgatatacaaaatt

SEQ ID NO: 158860 - DNA, 25 bp, Probe sequence
agtcatgtattgaaatattgtcagt

SEQ ID NO: 158861 - DNA, 25 bp, Probe sequence
agaacatggtcaaacattatttatt

SEQ ID NO: 158862 - DNA, 25 bp, Probe sequence
acagcatattgtattagaacatggt

SEQ ID NO: 158863 - DNA, 25 bp, Probe sequence
aaacagttaactgcgatttatcgta

SEQ ID NO: 158864 - DNA, 25 bp, Probe sequence
aacgaggtaatattaatcatttcaa

SEQ ID NO: 158865 - DNA, 25 bp, Probe sequence
aatattgtcagtacatttatgtttt

SEQ ID NO: 158866 - DNA, 25 bp, Probe sequence
aattaatcattgcagacgaaccagt

SEQ ID NO: 158867 - DNA, 25 bp, Probe sequence
cattggatgctttgaacggtaatca

SEQ ID NO: 158868 - DNA, 25 bp, Probe sequence
ctgcacgtatgattcgtaccaattt

SEQ ID NO: 158869 - DNA, 25 bp, Probe sequence
ctgcgatttatcgtaagcattataa

SEQ ID NO: 158870 - DNA, 25 bp, Probe sequence
cgtatgattcgtaccaatttgatgg

SEQ ID NO: 158871 - DNA, 25 bp, Probe sequence
gcagaaagttttaacgaccatacta

SEQ ID NO: 158872 - DNA, 25 bp, Probe sequence
gcatccgtatactgaacgtctaatt

SEQ ID NO: 158873 - DNA, 25 bp, Probe sequence
gcagacgaaccagttgcatcattgg

SEQ ID NO: 158874 - DNA, 25 bp, Probe sequence
gaaggtcaaatcattgaacgaggta

SEQ ID NO: 158875 - DNA, 25 bp, Probe sequence
gacgaaccagttgcatcattggatg

SEQ ID NO: 158876 - DNA, 25 bp, Probe sequence
gagcatttgcatccgtatactgaac

SEQ ID NO: 158877 - DNA, 25 bp, Probe sequence
gttaactgcgatttatcgtaagcat

SEQ ID NO: 158878 - DNA, 25 bp, Probe sequence
gtatactgaacgtctaattaaatat

SEQ ID NO: 158879 - DNA, 25 bp, Probe sequence
gtatgagcatttgcatccgtatact

SEQ ID NO: 158880 - DNA, 25 bp, Probe sequence
ggtcaaacattatttattatcacac

SEQ ID NO: 158881 - DNA, 25 bp, Probe sequence
tttctgggggccaacttgaacgcgt

SEQ ID NO: 158882 - DNA, 25 bp, Probe sequence
tgtcgtgggttaatttacaaagcaa

SEQ ID NO: 158883 - DNA, 25 bp, Probe sequence
tcaagtgatggatttattacagcat

SEQ ID NO: 158884 - DNA, 25 bp, Probe sequence
taaatatagtttccaactttctggg

SEQ ID NO: 158885 - DNA, 25 bp, Probe sequence
tacttgaatatttaccatttgattt

SEQ ID NO: 158886 - DNA, 25 bp, Probe sequence
tttgcatccgtatactgaacgtcta

SEQ ID NO: 158887 - DNA, 25 bp, Probe sequence
attatcggtgcacgttcaacattgt

SEQ ID NO: 158888 - DNA, 25 bp, Probe sequence
atttatcacaaacttttgaacctat

SEQ ID NO: 158889 - DNA, 25 bp, Probe sequence
atttcgtctcatccaattatgttga

SEQ ID NO: 158890 - DNA, 25 bp, Probe sequence
atcgttgtcataggtgttacactag

SEQ ID NO: 158891 - DNA, 25 bp, Probe sequence
atgcaaccaaagtcaatttatcaca

SEQ ID NO: 158892 - DNA, 25 bp, Probe sequence
agtattccagaatttatcatcatga

SEQ ID NO: 158893 - DNA, 25 bp, Probe sequence
agagtggggcgctatgttgcaacaa

SEQ ID NO: 158894 - DNA, 25 bp, Probe sequence
aaatggcacaattatttcatgtacc

SEQ ID NO: 158895 - DNA, 25 bp, Probe sequence
aacattaatagctatcgttgtcata

SEQ ID NO: 158896 - DNA, 25 bp, Probe sequence
aagttcactatcatttattgggtta

SEQ ID NO: 158897 - DNA, 25 bp, Probe sequence
aattatgttgattgcacctgcttca

SEQ ID NO: 158898 - DNA, 25 bp, Probe sequence
caaggtcgtgattttatttcgtctc

SEQ ID NO: 158899 - DNA, 25 bp, Probe sequence
cacctgcttcagtcattgctataac

SEQ ID NO: 158900 - DNA, 25 bp, Probe sequence
ccgccaacaccagagtggggcgcta

SEQ ID NO: 158901 - DNA, 25 bp, Probe sequence
gcacgttcaacattgtttgttactg

SEQ ID NO: 158902 - DNA, 25 bp, Probe sequence
gttggttgcatttattaggaactga

SEQ ID NO: 158903 - DNA, 25 bp, Probe sequence
gttacactaggtctatttgccggat

SEQ ID NO: 158904 - DNA, 25 bp, Probe sequence
gttttgatggtcgttgatttcggta

SEQ ID NO: 158905 - DNA, 25 bp, Probe sequence
gtcattgctataactattttaattt

SEQ ID NO: 158906 - DNA, 25 bp, Probe sequence
gtgattttatttcgtctcatccaat

SEQ ID NO: 158907 - DNA, 25 bp, Probe sequence
gggtggattgaacgattagtgttaa

SEQ ID NO: 158908 - DNA, 25 bp, Probe sequence
tggatgaattacacaaggttgacta

SEQ ID NO: 158909 - DNA, 25 bp, Probe sequence
ggagagatttatttacccgaattat

SEQ ID NO: 158910 - DNA, 25 bp, Probe sequence
ggaactgatgattatgggagagatt

SEQ ID NO: 158911 - DNA, 25 bp, Probe sequence
ggcgctatgttgcaacaaggtcgtg

SEQ ID NO: 158912 - DNA, 25 bp, Probe sequence
tgtcagtagtgaaaatgcaaccaaa

SEQ ID NO: 158913 - DNA, 25 bp, Probe sequence
tgattgcacctgcttcagtcattgc

SEQ ID NO: 158914 - DNA, 25 bp, Probe sequence
tgttaaggtttattgatgttggtct

SEQ ID NO: 158915 - DNA, 25 bp, Probe sequence
taacacctaaaattataccggctat

SEQ ID NO: 158916 - DNA, 25 bp, Probe sequence
tattaatacgtcatttaacacctaa

SEQ ID NO: 158917 - DNA, 25 bp, Probe sequence
tataccggctattatcgttttgatg

SEQ ID NO: 158918 - DNA, 25 bp, Probe sequence
ttgggttaggtgcacaaccgccaac

SEQ ID NO: 158919 - DNA, 25 bp, Probe sequence
ttatcatcatgattgctttagcaag

SEQ ID NO: 158920 - DNA, 25 bp, Probe sequence
ttgaacctattagttggttgcattt

SEQ ID NO: 158921 - DNA, 25 bp, Probe sequence
attagtttaccagcgttctttatcg

SEQ ID NO: 158922 - DNA, 25 bp, Probe sequence
attattttattatttattgtcacaa

SEQ ID NO: 158923 - DNA, 25 bp, Probe sequence
atagcagccaaacgatttcataagt

SEQ ID NO: 158924 - DNA, 25 bp, Probe sequence
atgaaattatcaccaggcaatcctg

SEQ ID NO: 158925 - DNA, 25 bp, Probe sequence
agcagcgtttacaattaggaaatcc

SEQ ID NO: 158926 - DNA, 25 bp, Probe sequence
actaagtcagtttatattacctgta

SEQ ID NO: 158927 - DNA, 25 bp, Probe sequence
acttgatccgaagcagcgtttacaa

SEQ ID NO: 158928 - DNA, 25 bp, Probe sequence
aaatctcgagattatcctgttattc

SEQ ID NO: 158929 - DNA, 25 bp, Probe sequence
aaaaccaatacaccattgatatcag

SEQ ID NO: 158930 - DNA, 25 bp, Probe sequence
aagaaccggtaacacagatattatt

SEQ ID NO: 158931 - DNA, 25 bp, Probe sequence
aatttatttgatatacctggtattg

SEQ ID NO: 158932 - DNA, 25 bp, Probe sequence
cctggtattggttatctattaatgg

SEQ ID NO: 158933 - DNA, 25 bp, Probe sequence
ccaacaattttgccgattatcccat

SEQ ID NO: 158934 - DNA, 25 bp, Probe sequence
gcttcttcgttgttattatcaatac

SEQ ID NO: 158935 - DNA, 25 bp, Probe sequence
gatgtagcacaagtgtcgacggaac

SEQ ID NO: 158936 - DNA, 25 bp, Probe sequence
gatagcgttatactaagtcagttta

SEQ ID NO: 158937 - DNA, 25 bp, Probe sequence
gatattattcaactatgcacccata

SEQ ID NO: 158938 - DNA, 25 bp, Probe sequence
gattctttattggtacagtggtggc

SEQ ID NO: 158939 - DNA, 25 bp, Probe sequence
gtttaccagcgttctttatcggtat

SEQ ID NO: 158940 - DNA, 25 bp, Probe sequence
gttattcaaggatgcgtgttattta

SEQ ID NO: 158941 - DNA, 25 bp, Probe sequence
gtacaagcatcaagattacgcggta

SEQ ID NO: 158942 - DNA, 25 bp, Probe sequence
gtctaataggtggtactgtagtgat

SEQ ID NO: 158943 - DNA, 25 bp, Probe sequence
gtcgacggaacaaataaatgcaacc

SEQ ID NO: 158944 - DNA, 25 bp, Probe sequence
gtgttatttattggcttcttcgttg

SEQ ID NO: 158945 - DNA, 25 bp, Probe sequence
ggtacagtggtggcattggatgaat

SEQ ID NO: 158946 - DNA, 25 bp, Probe sequence
ggatgaatcatttattacattttaa

SEQ ID NO: 158947 - DNA, 25 bp, Probe sequence
tgttttatttgttatttctacactt

SEQ ID NO: 158948 - DNA, 25 bp, Probe sequence
tcacgctatctttaggtatgtgtgc

SEQ ID NO: 158949 - DNA, 25 bp, Probe sequence
taccgctcggcattatagcagccaa

SEQ ID NO: 158950 - DNA, 25 bp, Probe sequence
taggtatgtgtgcatacatcattcg

SEQ ID NO: 158951 - DNA, 25 bp, Probe sequence
tatcaccaggcaatcctgttgataa

SEQ ID NO: 158952 - DNA, 25 bp, Probe sequence
tattaacgttattacttgatccgaa

SEQ ID NO: 158953 - DNA, 25 bp, Probe sequence
tattggcttcttcgttgttattatc

SEQ ID NO: 158954 - DNA, 25 bp, Probe sequence
ttatgcatatctataccgctcggca

SEQ ID NO: 158955 - DNA, 25 bp, Probe sequence
attaacaatattctgttgcttagtt

SEQ ID NO: 158956 - DNA, 25 bp, Probe sequence
attaggtgtgcttgcattttttatt

SEQ ID NO: 158957 - DNA, 25 bp, Probe sequence
atattaggtgtgcttgcatttttta

SEQ ID NO: 158958 - DNA, 25 bp, Probe sequence
atgacattattcgatatgcctaatt

SEQ ID NO: 158959 - DNA, 25 bp, Probe sequence
atgagtttattaattagttttctat

SEQ ID NO: 158960 - DNA, 25 bp, Probe sequence
aggtgtgcttgcattttttattcca

SEQ ID NO: 158961 - DNA, 25 bp, Probe sequence
acaatattctgttgcttagttttaa

SEQ ID NO: 158962 - DNA, 25 bp, Probe sequence
aatgattttattaacaatattctgt

SEQ ID NO: 158963 - DNA, 25 bp, Probe sequence
aatatcaaccattattaggatacgc

SEQ ID NO: 158964 - DNA, 25 bp, Probe sequence
aatattctgttgcttagttttaaat

SEQ ID NO: 158965 - DNA, 25 bp, Probe sequence
catttgttatattaggtgtgcttgc

SEQ ID NO: 158966 - DNA, 25 bp, Probe sequence
gcgctgaacttcgccgtaaagataa

SEQ ID NO: 158967 - DNA, 25 bp, Probe sequence
gcttgcattttttattccaaatttt

SEQ ID NO: 158968 - DNA, 25 bp, Probe sequence
gcattttttattccaaattttcaag

SEQ ID NO: 158969 - DNA, 25 bp, Probe sequence
gcagtaattacatttgttatattag

SEQ ID NO: 158970 - DNA, 25 bp, Probe sequence
gaaaagcgcgtaaattagaaaagca

SEQ ID NO: 158971 - DNA, 25 bp, Probe sequence
gacattattcgatatgcctaattat

SEQ ID NO: 158972 - DNA, 25 bp, Probe sequence
gatatgcctaattatttatggatca

SEQ ID NO: 158973 - DNA, 25 bp, Probe sequence
gttatattaggtgtgcttgcatttt

SEQ ID NO: 158974 - DNA, 25 bp, Probe sequence
gtgcttgcattttttattccaaatt

SEQ ID NO: 158975 - DNA, 25 bp, Probe sequence
gtgtgcttgcattttttattccaaa

SEQ ID NO: 158976 - DNA, 25 bp, Probe sequence
ggtgtgcttgcattttttattccaa

SEQ ID NO: 158977 - DNA, 25 bp, Probe sequence
tgtgcttgcattttttattccaaat

SEQ ID NO: 158978 - DNA, 25 bp, Probe sequence
tgcctaattatttatggatcacaac

SEQ ID NO: 158979 - DNA, 25 bp, Probe sequence
tctgttgcttagttttaaataaatg

SEQ ID NO: 158980 - DNA, 25 bp, Probe sequence
taattagttttctattatggtattt

SEQ ID NO: 158981 - DNA, 25 bp, Probe sequence
taggtgtgcttgcattttttattcc

SEQ ID NO: 158982 - DNA, 25 bp, Probe sequence
tatgcctaattatttatggatcaca

SEQ ID NO: 158983 - DNA, 25 bp, Probe sequence
tattctgttgcttagttttaaataa

SEQ ID NO: 158984 - DNA, 25 bp, Probe sequence
ttttattccaaattttcaagatata

SEQ ID NO: 158985 - DNA, 25 bp, Probe sequence
ttattcgatatgcctaattatttat

SEQ ID NO: 158986 - DNA, 25 bp, Probe sequence
ttcgatatgcctaattatttatgga

SEQ ID NO: 158987 - DNA, 25 bp, Probe sequence
ttgcattttttattccaaattttca

SEQ ID NO: 158988 - DNA, 25 bp, Probe sequence
ttgttatattaggtgtgcttgcatt

SEQ ID NO: 158989 - DNA, 25 bp, Probe sequence
attaacgcaacgtatcttattgata

SEQ ID NO: 158990 - DNA, 25 bp, Probe sequence
atagtcatattattaacgcaacgta

SEQ ID NO: 158991 - DNA, 25 bp, Probe sequence
atcgcctccgatttagaaagaatag

SEQ ID NO: 158992 - DNA, 25 bp, Probe sequence
atgtctatgtgagtattgaaaatgg

SEQ ID NO: 158993 - DNA, 25 bp, Probe sequence
aggagcaacttgatgatttaataaa

SEQ ID NO: 158994 - DNA, 25 bp, Probe sequence
acagcccattgcgagtgatttgcgt

SEQ ID NO: 158995 - DNA, 25 bp, Probe sequence
acaaagcaacagcccattgcgagtg

SEQ ID NO: 158996 - DNA, 25 bp, Probe sequence
aacgtattggtgatcatattattaa

SEQ ID NO: 158997 - DNA, 25 bp, Probe sequence
caacagcccattgcgagtgatttgc

SEQ ID NO: 158998 - DNA, 25 bp, Probe sequence
catcgctgaaagtgtttatttttat

SEQ ID NO: 158999 - DNA, 25 bp, Probe sequence
gaattacgtcggttaggtgcaaatg

SEQ ID NO: 159000 - DNA, 25 bp, Probe sequence
gcccattgcgagtgatttgcgtatg

SEQ ID NO: 159001 - DNA, 25 bp, Probe sequence
gcaacgtatcttattgataacgatc

SEQ ID NO: 159002 - DNA, 25 bp, Probe sequence
gaagatatcgatgacttatatagtc

SEQ ID NO: 159003 - DNA, 25 bp, Probe sequence
gacgatagaggctttgcacgacaaa

SEQ ID NO: 159004 - DNA, 25 bp, Probe sequence
gagcgagttatcatgttaattacaa

SEQ ID NO: 159005 - DNA, 25 bp, Probe sequence
gagaaataattgagcgtgatgaaga

SEQ ID NO: 159006 - DNA, 25 bp, Probe sequence
gagtgatttgcgtatgatgatttct

SEQ ID NO: 159007 - DNA, 25 bp, Probe sequence
gaggctttgcacgacaaacagttaa

SEQ ID NO: 159008 - DNA, 25 bp, Probe sequence
gatgattatgtgttaacccgtttaa

SEQ ID NO: 159009 - DNA, 25 bp, Probe sequence
gataacgatccatttgtcgctgcac

SEQ ID NO: 159010 - DNA, 25 bp, Probe sequence
gatatcaggagcaacttgatgattt

SEQ ID NO: 159011 - DNA, 25 bp, Probe sequence
gatttgcgtatgatgatttcttcat

SEQ ID NO: 159012 - DNA, 25 bp, Probe sequence
gttaattacaaagcaacagcccatt

SEQ ID NO: 159013 - DNA, 25 bp, Probe sequence
gtattgacgatagaggctttgcacg

SEQ ID NO: 159014 - DNA, 25 bp, Probe sequence
gtattgccaatattcgattgcgtac

SEQ ID NO: 159015 - DNA, 25 bp, Probe sequence
gtcggttaggtgcaaatgtctatgt

SEQ ID NO: 159016 - DNA, 25 bp, Probe sequence
gtgatcatattattaacatcgctga

SEQ ID NO: 159017 - DNA, 25 bp, Probe sequence
ggtgcaaatgtctatgtgagtattg

SEQ ID NO: 159018 - DNA, 25 bp, Probe sequence
tgtgttaacccgtttaaagacaatg

SEQ ID NO: 159019 - DNA, 25 bp, Probe sequence
taacgatccatttgtcgctgcacaa

SEQ ID NO: 159020 - DNA, 25 bp, Probe sequence
taacaggtacacattacgaacaata

SEQ ID NO: 159021 - DNA, 25 bp, Probe sequence
tttcttcattaaaaatcgcctccga

SEQ ID NO: 159022 - DNA, 25 bp, Probe sequence
ttatttttatttaacaggtacacat

SEQ ID NO: 159023 - DNA, 25 bp, Probe sequence
attgaacctgaagtcattttaatgg

SEQ ID NO: 159024 - DNA, 25 bp, Probe sequence
attacgtggcgctgcaatttgggat

SEQ ID NO: 159025 - DNA, 25 bp, Probe sequence
atttttcttaaatggttatgtcaat

SEQ ID NO: 159026 - DNA, 25 bp, Probe sequence
atatgcaacaagcagctcgtgtatc

SEQ ID NO: 159027 - DNA, 25 bp, Probe sequence
atagtttatccggtgggcaacaaca

SEQ ID NO: 159028 - DNA, 25 bp, Probe sequence
atcagataaaactgcatttttctta

SEQ ID NO: 159029 - DNA, 25 bp, Probe sequence
atggcgcaaacacttgcacaaacta

SEQ ID NO: 159030 - DNA, 25 bp, Probe sequence
agatccaatctcaacattaagagta

SEQ ID NO: 159031 - DNA, 25 bp, Probe sequence
actgataaaattttctctaacccat

SEQ ID NO: 159032 - DNA, 25 bp, Probe sequence
actcacattctgttatatattcaac

SEQ ID NO: 159033 - DNA, 25 bp, Probe sequence
acatcagcattagatccaatctcaa

SEQ ID NO: 159034 - DNA, 25 bp, Probe sequence
aaatttagacttatggtatggcgaa

SEQ ID NO: 159035 - DNA, 25 bp, Probe sequence
aaagttcttgatgaaatcgttgaga

SEQ ID NO: 159036 - DNA, 25 bp, Probe sequence
aaaccaaattactgccattataggt

SEQ ID NO: 159037 - DNA, 25 bp, Probe sequence
aaaacaccagatgatacaaactcac

SEQ ID NO: 159038 - DNA, 25 bp, Probe sequence
aacaaatatctcaaagtcatacgtt

SEQ ID NO: 159039 - DNA, 25 bp, Probe sequence
aagtcatacgtttgatgtctcacaa

SEQ ID NO: 159040 - DNA, 25 bp, Probe sequence
aatgcatatagtttatccggtgggc

SEQ ID NO: 159041 - DNA, 25 bp, Probe sequence
aattttctctaacccatcaaacaag

SEQ ID NO: 159042 - DNA, 25 bp, Probe sequence
caagcagctcgtgtatcagataaaa

SEQ ID NO: 159043 - DNA, 25 bp, Probe sequence
caacaacctaatccatttccaaaat

SEQ ID NO: 159044 - DNA, 25 bp, Probe sequence
cattataggtccatctggttgtggc

SEQ ID NO: 159045 - DNA, 25 bp, Probe sequence
gcgcgttgtttagcaattgaacctg

SEQ ID NO: 159046 - DNA, 25 bp, Probe sequence
gaattaaaggataggttgcacacaa

SEQ ID NO: 159047 - DNA, 25 bp, Probe sequence
gagaaatcattacgtggcgctgcaa

SEQ ID NO: 159048 - DNA, 25 bp, Probe sequence
gatgatacaaactcacattctgtta

SEQ ID NO: 159049 - DNA, 25 bp, Probe sequence
gataggttgcacacaaatgcatata

SEQ ID NO: 159050 - DNA, 25 bp, Probe sequence
gtctcacaaagtcatcataaaacac

SEQ ID NO: 159051 - DNA, 25 bp, Probe sequence
gtgtttgtatcgcgcgttgtttagc

SEQ ID NO: 159052 - DNA, 25 bp, Probe sequence
gtggcgctgcaatttgggatgaatt

SEQ ID NO: 159053 - DNA, 25 bp, Probe sequence
ggtccatctggttgtggcaaatcaa

SEQ ID NO: 159054 - DNA, 25 bp, Probe sequence
tacgtacaaatgtgggcatggtctt

SEQ ID NO: 159055 - DNA, 25 bp, Probe sequence
tatggtatggcgaaaatcatgcatt

SEQ ID NO: 159056 - DNA, 25 bp, Probe sequence
ttgaatcgaatggttgagttagtac

SEQ ID NO: 159057 - DNA, 25 bp, Probe sequence
attattggcaacacctagaagtata

SEQ ID NO: 159058 - DNA, 25 bp, Probe sequence
atcgttttactagttatcttaatct

SEQ ID NO: 159059 - DNA, 25 bp, Probe sequence
atgaccttactgatattaccaatta

SEQ ID NO: 159060 - DNA, 25 bp, Probe sequence
agacgtgttgtcttaccagcagcgt

SEQ ID NO: 159061 - DNA, 25 bp, Probe sequence
actcgtcgatcaacaacttgtccaa

SEQ ID NO: 159062 - DNA, 25 bp, Probe sequence
acaccatctatggctggcgttaaag

SEQ ID NO: 159063 - DNA, 25 bp, Probe sequence
aacatttatcatccagaacggttaa

SEQ ID NO: 159064 - DNA, 25 bp, Probe sequence
aactggattcattttgtctctttca

SEQ ID NO: 159065 - DNA, 25 bp, Probe sequence
aatagacaatcactcgtcgatcaac

SEQ ID NO: 159066 - DNA, 25 bp, Probe sequence
ctaactcagtacgcgaagcttctta

SEQ ID NO: 159067 - DNA, 25 bp, Probe sequence
gctggtgtaccatcagttgtatttg

SEQ ID NO: 159068 - DNA, 25 bp, Probe sequence
gcatcggcaggcattatcgttttac

SEQ ID NO: 159069 - DNA, 25 bp, Probe sequence
gcatgtacattattaggacttgtcg

SEQ ID NO: 159070 - DNA, 25 bp, Probe sequence
gcagcagcgctaacaatgaccttac

SEQ ID NO: 159071 - DNA, 25 bp, Probe sequence
gcagcgttacctggtattttaactg

SEQ ID NO: 159072 - DNA, 25 bp, Probe sequence
gaattccagaatgttgcatcggcag

SEQ ID NO: 159073 - DNA, 25 bp, Probe sequence
gaagccttgaaaatgggtaacagta

SEQ ID NO: 159074 - DNA, 25 bp, Probe sequence
gagctgtacctaactcagtacgcga

SEQ ID NO: 159075 - DNA, 25 bp, Probe sequence
gtatttccaatttagctggtgtacc

SEQ ID NO: 159076 - DNA, 25 bp, Probe sequence
gtatcattccattatcaatcatcct

SEQ ID NO: 159077 - DNA, 25 bp, Probe sequence
gtaacagtatattggcagcagcgct

SEQ ID NO: 159078 - DNA, 25 bp, Probe sequence
gtctctttcaagagcactgggagaa

SEQ ID NO: 159079 - DNA, 25 bp, Probe sequence
gtcaggaagcaattagagctgtacc

SEQ ID NO: 159080 - DNA, 25 bp, Probe sequence
gtcgtacttattgcgttgttaactc

SEQ ID NO: 159081 - DNA, 25 bp, Probe sequence
gtgttcaaactcatatttttagcat

SEQ ID NO: 159082 - DNA, 25 bp, Probe sequence
ggacttgtcgtacttattgcgttgt

SEQ ID NO: 159083 - DNA, 25 bp, Probe sequence
ggcgttgcgattattttacgtaaca

SEQ ID NO: 159084 - DNA, 25 bp, Probe sequence
tgggagaaacagcgccacttgtgct

SEQ ID NO: 159085 - DNA, 25 bp, Probe sequence
taatcggttcactttggttaatgtt

SEQ ID NO: 159086 - DNA, 25 bp, Probe sequence
ttgtcttaccagcagcgttacctgg

SEQ ID NO: 159087 - DNA, 25 bp, Probe sequence
tattggatcaattttcagcattacc

SEQ ID NO: 159088 - DNA, 25 bp, Probe sequence
tttcactaatttttcttcttcaaca

SEQ ID NO: 159089 - DNA, 25 bp, Probe sequence
ttaatcttaatgaatggcgttgcga

SEQ ID NO: 159090 - DNA, 25 bp, Probe sequence
ttcttcttcaacaccatctatggct

SEQ ID NO: 159091 - DNA, 25 bp, Probe sequence
atatcaaggtgccactgacgtcgct

SEQ ID NO: 159092 - DNA, 25 bp, Probe sequence
atatgctggtgaaatcttaaatgat

SEQ ID NO: 159093 - DNA, 25 bp, Probe sequence
atcaattatctaaaatcgcaccaac

SEQ ID NO: 159094 - DNA, 25 bp, Probe sequence
aggtgttaaacctgtaggtgctgta

SEQ ID NO: 159095 - DNA, 25 bp, Probe sequence
aggtgctgtagaatcatggacacaa

SEQ ID NO: 159096 - DNA, 25 bp, Probe sequence
agcttcagttgttaacttccgtgct

SEQ ID NO: 159097 - DNA, 25 bp, Probe sequence
aaatgcttgttgttacgcttgcttt

SEQ ID NO: 159098 - DNA, 25 bp, Probe sequence
aaacatgcaatgggtacaactgaaa

SEQ ID NO: 159099 - DNA, 25 bp, Probe sequence
aaaacaaccaagtatctgatgattt

SEQ ID NO: 159100 - DNA, 25 bp, Probe sequence
aaaatcgcaccaacagtttctactg

SEQ ID NO: 159101 - DNA, 25 bp, Probe sequence
aagatgctgcattagttaaaaagac

SEQ ID NO: 159102 - DNA, 25 bp, Probe sequence
cactgacgtcgctgtatctttaggt

SEQ ID NO: 159103 - DNA, 25 bp, Probe sequence
cagatccaaatgcgaaagatgctgc

SEQ ID NO: 159104 - DNA, 25 bp, Probe sequence
catggacacaaaaaccgaaattcga

SEQ ID NO: 159105 - DNA, 25 bp, Probe sequence
ctactgatacagttttcaaattcaa

SEQ ID NO: 159106 - DNA, 25 bp, Probe sequence
cgcttgctttcctacttgttttagc

SEQ ID NO: 159107 - DNA, 25 bp, Probe sequence
ccggacttaattgtcgcgtcaaaag

SEQ ID NO: 159108 - DNA, 25 bp, Probe sequence
gctttcctacttgttttagcaggat

SEQ ID NO: 159109 - DNA, 25 bp, Probe sequence
gcaccaacagtttctactgatacag

SEQ ID NO: 159110 - DNA, 25 bp, Probe sequence
gaacgctgatcatatttttgtagta

SEQ ID NO: 159111 - DNA, 25 bp, Probe sequence
gaaagcattccattaatgaacgctg

SEQ ID NO: 159112 - DNA, 25 bp, Probe sequence
gaaatcacttggaacttagctggcg

SEQ ID NO: 159113 - DNA, 25 bp, Probe sequence
gactgaaagcgaatggacttcaagt

SEQ ID NO: 159114 - DNA, 25 bp, Probe sequence
gacgtcgctgtatctttaggtgtta

SEQ ID NO: 159115 - DNA, 25 bp, Probe sequence
gatgcatggccattgaaagcttcag

SEQ ID NO: 159116 - DNA, 25 bp, Probe sequence
gatgataaagtagctgcattccaaa

SEQ ID NO: 159117 - DNA, 25 bp, Probe sequence
gttaacttccgtgctgatcatacaa

SEQ ID NO: 159118 - DNA, 25 bp, Probe sequence
gtcaagaacctgcacctaacttaga

SEQ ID NO: 159119 - DNA, 25 bp, Probe sequence
gtaaagatattatccaacttacatc

SEQ ID NO: 159120 - DNA, 25 bp, Probe sequence
ggaaacaacttcaattaaacatgca

SEQ ID NO: 159121 - DNA, 25 bp, Probe sequence
ggaacttagctggcggatataaatc

SEQ ID NO: 159122 - DNA, 25 bp, Probe sequence
tccgtgctgatcatacaagaattta

SEQ ID NO: 159123 - DNA, 25 bp, Probe sequence
ttatgctggtggatatgctggtgaa

SEQ ID NO: 159124 - DNA, 25 bp, Probe sequence
ttagcaggatgtagtgggaattcaa

SEQ ID NO: 159125 - DNA, 25 bp, Probe sequence
agcaggaataccaacaattgtgttt

SEQ ID NO: 159126 - DNA, 25 bp, Probe sequence
aaaccatcacttttttcaccagaat

SEQ ID NO: 159127 - DNA, 25 bp, Probe sequence
aaaatcacagttattgcgactatat

SEQ ID NO: 159128 - DNA, 25 bp, Probe sequence
aactgaatttctattttctactact

SEQ ID NO: 159129 - DNA, 25 bp, Probe sequence
aatgctataagtcccggcttagttg

SEQ ID NO: 159130 - DNA, 25 bp, Probe sequence
aattgtgtttggtttctttgcatta

SEQ ID NO: 159131 - DNA, 25 bp, Probe sequence
caagtgaccgtgcacgacgcataat

SEQ ID NO: 159132 - DNA, 25 bp, Probe sequence
cacttttttcaccagaattccaata

SEQ ID NO: 159133 - DNA, 25 bp, Probe sequence
cactaggtatattaatcacattgct

SEQ ID NO: 159134 - DNA, 25 bp, Probe sequence
ccttaatcatgaatttactttctca

SEQ ID NO: 159135 - DNA, 25 bp, Probe sequence
ccaacagcttcattaagtttaacaa

SEQ ID NO: 159136 - DNA, 25 bp, Probe sequence
gcgatttccattttaacaacactag

SEQ ID NO: 159137 - DNA, 25 bp, Probe sequence
gcaacatcaggtattgtagcttcaa

SEQ ID NO: 159138 - DNA, 25 bp, Probe sequence
gcaatttcagcgatttccattttaa

SEQ ID NO: 159139 - DNA, 25 bp, Probe sequence
gaatatgcaagtgaccgtgcacgac

SEQ ID NO: 159140 - DNA, 25 bp, Probe sequence
gagaaggtgcctatggacttggagc

SEQ ID NO: 159141 - DNA, 25 bp, Probe sequence
gacttcatctactaatgttaaagct

SEQ ID NO: 159142 - DNA, 25 bp, Probe sequence
gaccctaagtttggtatctgggcat

SEQ ID NO: 159143 - DNA, 25 bp, Probe sequence
gatgcaatggcatctgtaccaaata

SEQ ID NO: 159144 - DNA, 25 bp, Probe sequence
gatagcgacaggtgatgcaacattt

SEQ ID NO: 159145 - DNA, 25 bp, Probe sequence
gttctcgcgatttcaagagcaattg

SEQ ID NO: 159146 - DNA, 25 bp, Probe sequence
gttacaccagtattaagatctttca

SEQ ID NO: 159147 - DNA, 25 bp, Probe sequence
gtattatgattgtccctctcatcac

SEQ ID NO: 159148 - DNA, 25 bp, Probe sequence
gtcgggcttggtgcagcaatttatt

SEQ ID NO: 159149 - DNA, 25 bp, Probe sequence
gtccctctcatcacaagtttgagtg

SEQ ID NO: 159150 - DNA, 25 bp, Probe sequence
ggtgcctatggacttggagcaacta

SEQ ID NO: 159151 - DNA, 25 bp, Probe sequence
ggtcttggagagtttaatgctataa

SEQ ID NO: 159152 - DNA, 25 bp, Probe sequence
tgattgtatcattagcggcaggtag

SEQ ID NO: 159153 - DNA, 25 bp, Probe sequence
tgcagttccagtcgggcttggtgca

SEQ ID NO: 159154 - DNA, 25 bp, Probe sequence
tctgggcattgataatagggacttt

SEQ ID NO: 159155 - DNA, 25 bp, Probe sequence
tcacattgcttttagaaaccatcac

SEQ ID NO: 159156 - DNA, 25 bp, Probe sequence
tttctactacttggaatcctaccgg

SEQ ID NO: 159157 - DNA, 25 bp, Probe sequence
tatttatctttaccttaatcatgaa

SEQ ID NO: 159158 - DNA, 25 bp, Probe sequence
ttgcgactatatttgcagttccagt

SEQ ID NO: 159159 - DNA, 25 bp, Probe sequence
atacaaatgctatcgtttcttctgt

SEQ ID NO: 159160 - DNA, 25 bp, Probe sequence
atggtaaagcaacagagcctacgaa

SEQ ID NO: 159161 - DNA, 25 bp, Probe sequence
agtagaccattattcatttatgtaa

SEQ ID NO: 159162 - DNA, 25 bp, Probe sequence
agcagcaccagagaaaacatacaaa

SEQ ID NO: 159163 - DNA, 25 bp, Probe sequence
actttggatataacttctacgtaca

SEQ ID NO: 159164 - DNA, 25 bp, Probe sequence
aaatctcagcaggacaagctggtac

SEQ ID NO: 159165 - DNA, 25 bp, Probe sequence
aaagcaatttattctggaaaagcta

SEQ ID NO: 159166 - DNA, 25 bp, Probe sequence
aacaattcaagataactcttatgca

SEQ ID NO: 159167 - DNA, 25 bp, Probe sequence
aactcttatgcattaagtagaccat

SEQ ID NO: 159168 - DNA, 25 bp, Probe sequence
aagctggtacaggtgctggtttcca

SEQ ID NO: 159169 - DNA, 25 bp, Probe sequence
aatgctgtatcaccaaactcaagtc

SEQ ID NO: 159170 - DNA, 25 bp, Probe sequence
aattgcgcaagatggtgtaacggtt

SEQ ID NO: 159171 - DNA, 25 bp, Probe sequence
aatttatcaaattcgtcttagaaga

SEQ ID NO: 159172 - DNA, 25 bp, Probe sequence
cattgcaggagatatcgacttcgct

SEQ ID NO: 159173 - DNA, 25 bp, Probe sequence
cttcgctgatgcttctagaccaatt

SEQ ID NO: 159174 - DNA, 25 bp, Probe sequence
cgctgatgcttctagaccaattaaa

SEQ ID NO: 159175 - DNA, 25 bp, Probe sequence
ccaaactcaagtcatggtacttatg

SEQ ID NO: 159176 - DNA, 25 bp, Probe sequence
gctggtttccaaaaattcattgcag

SEQ ID NO: 159177 - DNA, 25 bp, Probe sequence
gaaaaatgggctcaagatcactcgg

SEQ ID NO: 159178 - DNA, 25 bp, Probe sequence
gagggaatcggatactttggatata

SEQ ID NO: 159179 - DNA, 25 bp, Probe sequence
gatggctcatcaacagtagcaccaa

SEQ ID NO: 159180 - DNA, 25 bp, Probe sequence
gatggtgtaacggttgctgtaaata

SEQ ID NO: 159181 - DNA, 25 bp, Probe sequence
gatcactcggatgctaaaatctcag

SEQ ID NO: 159182 - DNA, 25 bp, Probe sequence
gatatcgacttcgctgatgcttcta

SEQ ID NO: 159183 - DNA, 25 bp, Probe sequence
gtggcggtaatggtggcagtggtaa

SEQ ID NO: 159184 - DNA, 25 bp, Probe sequence
ggtggcagtggtaatagtgatttaa

SEQ ID NO: 159185 - DNA, 25 bp, Probe sequence
ggtgcaacactattattaggtgctt

SEQ ID NO: 159186 - DNA, 25 bp, Probe sequence
ggatatgtagcagcaccagagaaaa

SEQ ID NO: 159187 - DNA, 25 bp, Probe sequence
ggcaatttgttggtactacagcttt

SEQ ID NO: 159188 - DNA, 25 bp, Probe sequence
tgggctcaagatcactcggatgcta

SEQ ID NO: 159189 - DNA, 25 bp, Probe sequence
tgctatcgtttcttctgtaacgaaa

SEQ ID NO: 159190 - DNA, 25 bp, Probe sequence
tcaacagtagcaccaattgtggaga

SEQ ID NO: 159191 - DNA, 25 bp, Probe sequence
tacagctttaggtgcaacactatta

SEQ ID NO: 159192 - DNA, 25 bp, Probe sequence
ttaggtgcttgtggtggcggtaatg

SEQ ID NO: 159193 - DNA, 25 bp, Probe sequence
atttttaccacttgcacatgaacgt

SEQ ID NO: 159194 - DNA, 25 bp, Probe sequence
atatgcctgatattacgaaagataa

SEQ ID NO: 159195 - DNA, 25 bp, Probe sequence
accccgtgaagtgttagtaccatgg

SEQ ID NO: 159196 - DNA, 25 bp, Probe sequence
accacttgcacatgaacgtttagac

SEQ ID NO: 159197 - DNA, 25 bp, Probe sequence
accgcgtattacgaattggtagctt

SEQ ID NO: 159198 - DNA, 25 bp, Probe sequence
acattacgaattgaccgtgagaatc

SEQ ID NO: 159199 - DNA, 25 bp, Probe sequence
aaaatatgtttacacctgtacacga

SEQ ID NO: 159200 - DNA, 25 bp, Probe sequence
aacggatcgcgatggggcacgtata

SEQ ID NO: 159201 - DNA, 25 bp, Probe sequence
aagtcatctttgatttactagttga

SEQ ID NO: 159202 - DNA, 25 bp, Probe sequence
aatggttcatttttaccacttgcac

SEQ ID NO: 159203 - DNA, 25 bp, Probe sequence
catttatccaaaccgttcaggtgaa

SEQ ID NO: 159204 - DNA, 25 bp, Probe sequence
gcgatggggcacgtatagatgttgg

SEQ ID NO: 159205 - DNA, 25 bp, Probe sequence
gctaaagtacttaaaacggatcgcg

SEQ ID NO: 159206 - DNA, 25 bp, Probe sequence
gcacatgaacgtttagacgatgacg

SEQ ID NO: 159207 - DNA, 25 bp, Probe sequence
gaatatagtttcttcatttatccaa

SEQ ID NO: 159208 - DNA, 25 bp, Probe sequence
gaatctgttcaagttagaattatcg

SEQ ID NO: 159209 - DNA, 25 bp, Probe sequence
gagtaaaggttcattcaaacgtgca

SEQ ID NO: 159210 - DNA, 25 bp, Probe sequence
gatggtgaattaccattctgggaca

SEQ ID NO: 159211 - DNA, 25 bp, Probe sequence
gttcaggtgaattatttgcaactca

SEQ ID NO: 159212 - DNA, 25 bp, Probe sequence
gtgcaatcggtcacttatataaaca

SEQ ID NO: 159213 - DNA, 25 bp, Probe sequence
gggacaaatcaagccctgaagcgat

SEQ ID NO: 159214 - DNA, 25 bp, Probe sequence
ggttcattcaaacgtgcaatcggtc

SEQ ID NO: 159215 - DNA, 25 bp, Probe sequence
tgaccgtgagaatcatatgtatgga

SEQ ID NO: 159216 - DNA, 25 bp, Probe sequence
tgaaatcactatggccacaacctgg

SEQ ID NO: 159217 - DNA, 25 bp, Probe sequence
tcaaacgtgcaatcggtcacttata

SEQ ID NO: 159218 - DNA, 25 bp, Probe sequence
tcaagccctgaagcgattaaagaag

SEQ ID NO: 159219 - DNA, 25 bp, Probe sequence
tagaattccttgaagtagtagggtt

SEQ ID NO: 159220 - DNA, 25 bp, Probe sequence
tagtaggttctatagaattccttga

SEQ ID NO: 159221 - DNA, 25 bp, Probe sequence
tagtaccatgggaagatttaccaaa

SEQ ID NO: 159222 - DNA, 25 bp, Probe sequence
tttcttcatttatccaaaccgttca

SEQ ID NO: 159223 - DNA, 25 bp, Probe sequence
tttgcaactcaaaatatgcctgata

SEQ ID NO: 159224 - DNA, 25 bp, Probe sequence
ttattaagcgaatcaggttacaaaa

SEQ ID NO: 159225 - DNA, 25 bp, Probe sequence
ttaccattctgggacaaatcaagcc

SEQ ID NO: 159226 - DNA, 25 bp, Probe sequence
ttagcgagtgaatctgttgtagaaa

SEQ ID NO: 159227 - DNA, 25 bp, Probe sequence
attgtgacatgaactattgcgaaga

SEQ ID NO: 159228 - DNA, 25 bp, Probe sequence
ataattgtgacatgaactattgcga

SEQ ID NO: 159229 - DNA, 25 bp, Probe sequence
atcaatgtaaagttcagttcgataa

SEQ ID NO: 159230 - DNA, 25 bp, Probe sequence
atggtggttattcagtgactggcca

SEQ ID NO: 159231 - DNA, 25 bp, Probe sequence
agagccgattatgagggatggtggt

SEQ ID NO: 159232 - DNA, 25 bp, Probe sequence
agcactatcaacaattgattaatca

SEQ ID NO: 159233 - DNA, 25 bp, Probe sequence
gccgattatgagggatggtggttat

SEQ ID NO: 159234 - DNA, 25 bp, Probe sequence
gacagttaccaaaattagagccgat

SEQ ID NO: 159235 - DNA, 25 bp, Probe sequence
gaagtatattataaactaccaataa

SEQ ID NO: 159236 - DNA, 25 bp, Probe sequence
gaactattgcgaagattgtgaagag

SEQ ID NO: 159237 - DNA, 25 bp, Probe sequence
gacatgtttaagcactatcaacaat

SEQ ID NO: 159238 - DNA, 25 bp, Probe sequence
gactggccagaaaacattgttgaaa

SEQ ID NO: 159239 - DNA, 25 bp, Probe sequence
gagccgattatgagggatggtggtt

SEQ ID NO: 159240 - DNA, 25 bp, Probe sequence
gagggatggtggttattcagtgact

SEQ ID NO: 159241 - DNA, 25 bp, Probe sequence
gatggtggttattcagtgactggcc

SEQ ID NO: 159242 - DNA, 25 bp, Probe sequence
gatgacatgtttaagcactatcaac

SEQ ID NO: 159243 - DNA, 25 bp, Probe sequence
gatttacaaatattttatagtttca

SEQ ID NO: 159244 - DNA, 25 bp, Probe sequence
gattttgatgacatgtttaagcact

SEQ ID NO: 159245 - DNA, 25 bp, Probe sequence
gattaatcaatgtaaagttcagttc

SEQ ID NO: 159246 - DNA, 25 bp, Probe sequence
gttaccaaaattagagccgattatg

SEQ ID NO: 159247 - DNA, 25 bp, Probe sequence
gtttaagcactatcaacaattgatt

SEQ ID NO: 159248 - DNA, 25 bp, Probe sequence
gtgactggccagaaaacattgttga

SEQ ID NO: 159249 - DNA, 25 bp, Probe sequence
gtgacatgaactattgcgaagattg

SEQ ID NO: 159250 - DNA, 25 bp, Probe sequence
gtggttattcagtgactggccagaa

SEQ ID NO: 159251 - DNA, 25 bp, Probe sequence
gggatggtggttattcagtgactgg

SEQ ID NO: 159252 - DNA, 25 bp, Probe sequence
ggtggttattcagtgactggccaga

SEQ ID NO: 159253 - DNA, 25 bp, Probe sequence
ggttattcagtgactggccagaaaa

SEQ ID NO: 159254 - DNA, 25 bp, Probe sequence
ggatggtggttattcagtgactggc

SEQ ID NO: 159255 - DNA, 25 bp, Probe sequence
ggacagttaccaaaattagagccga

SEQ ID NO: 159256 - DNA, 25 bp, Probe sequence
tatgtcacaggcaaatataatattt

SEQ ID NO: 159257 - DNA, 25 bp, Probe sequence
tatagtttcattgttttacaaaata

SEQ ID NO: 159258 - DNA, 25 bp, Probe sequence
tattttatagtttcattgttttaca

SEQ ID NO: 159259 - DNA, 25 bp, Probe sequence
tattcagtgactggccagaaaacat

SEQ ID NO: 159260 - DNA, 25 bp, Probe sequence
ttgcgaagattgtgaagaggattta

SEQ ID NO: 159261 - DNA, 25 bp, Probe sequence
atagtggtcaatttttctggcccgc

SEQ ID NO: 159262 - DNA, 25 bp, Probe sequence
attaacgacaatggcttcaacagga

SEQ ID NO: 159263 - DNA, 25 bp, Probe sequence
attaagcattgtatacccagtagca

SEQ ID NO: 159264 - DNA, 25 bp, Probe sequence
atattgttcttaatcatcatttatt

SEQ ID NO: 159265 - DNA, 25 bp, Probe sequence
aggtgtgattgtaggtgcacttgat

SEQ ID NO: 159266 - DNA, 25 bp, Probe sequence
agactttagcggtaatagtgctgga

SEQ ID NO: 159267 - DNA, 25 bp, Probe sequence
agcactatatcattctaatttttca

SEQ ID NO: 159268 - DNA, 25 bp, Probe sequence
accaaggtttaaatgctgttatctc

SEQ ID NO: 159269 - DNA, 25 bp, Probe sequence
aaatccatctaagttaatcgatcgt

SEQ ID NO: 159270 - DNA, 25 bp, Probe sequence
aacaaattccagttattatcgtatt

SEQ ID NO: 159271 - DNA, 25 bp, Probe sequence
aactttgactgctggtttaattgca

SEQ ID NO: 159272 - DNA, 25 bp, Probe sequence
aagcatttgtattagttttcatttt

SEQ ID NO: 159273 - DNA, 25 bp, Probe sequence
aatcgatcgtattggttcattatta

SEQ ID NO: 159274 - DNA, 25 bp, Probe sequence
caagttttgctgaaggctttacaca

SEQ ID NO: 159275 - DNA, 25 bp, Probe sequence
catgggtcattgggtttacgctctt

SEQ ID NO: 159276 - DNA, 25 bp, Probe sequence
gcgtttgttctaactgggattggtt

SEQ ID NO: 159277 - DNA, 25 bp, Probe sequence
gcttcaacaggatttggttcattcg

SEQ ID NO: 159278 - DNA, 25 bp, Probe sequence
gctatgttttttggcgcaggcaatc

SEQ ID NO: 159279 - DNA, 25 bp, Probe sequence
gcaggcaatctaatttttcctccta

SEQ ID NO: 159280 - DNA, 25 bp, Probe sequence
gcaatacctagaactgcatctacat

SEQ ID NO: 159281 - DNA, 25 bp, Probe sequence
gaactgcatctacatcttttgaaat

SEQ ID NO: 159282 - DNA, 25 bp, Probe sequence
gagttttattattgctaaccaaggt

SEQ ID NO: 159283 - DNA, 25 bp, Probe sequence
gagtggttcccagtagcaattattg

SEQ ID NO: 159284 - DNA, 25 bp, Probe sequence
gattatctacttcatagtcgttttg

SEQ ID NO: 159285 - DNA, 25 bp, Probe sequence
gttatctcaatgtcaattccggtat

SEQ ID NO: 159286 - DNA, 25 bp, Probe sequence
gtagtatcgctttatttatatttac

SEQ ID NO: 159287 - DNA, 25 bp, Probe sequence
gggcttattgttgcagtttctgaat

SEQ ID NO: 159288 - DNA, 25 bp, Probe sequence
ggctttacacaaggctatttaacaa

SEQ ID NO: 159289 - DNA, 25 bp, Probe sequence
tggcccgccattttagcgtttgttc

SEQ ID NO: 159290 - DNA, 25 bp, Probe sequence
tgccaaattcataccgacaaaacgc

SEQ ID NO: 159291 - DNA, 25 bp, Probe sequence
tacgctcttcgctatgttttttggc

SEQ ID NO: 159292 - DNA, 25 bp, Probe sequence
taggctatctagtcggcatatttgt

SEQ ID NO: 159293 - DNA, 25 bp, Probe sequence
tattgtcgattttcagtgttattag

SEQ ID NO: 159294 - DNA, 25 bp, Probe sequence
ttttcctcctaatctcggattggat

SEQ ID NO: 159295 - DNA, 25 bp, Probe sequence
aattcccttactataatcctgttca

SEQ ID NO: 159296 - DNA, 25 bp, Probe sequence
attacgagttggttttggtcacatc

SEQ ID NO: 159297 - DNA, 25 bp, Probe sequence
attttcgttgaaggtgttgcgcatt

SEQ ID NO: 159298 - DNA, 25 bp, Probe sequence
atcgtgatggtgttgctattagagt

SEQ ID NO: 159299 - DNA, 25 bp, Probe sequence
aggtgttgcgcatttacctggacat

SEQ ID NO: 159300 - DNA, 25 bp, Probe sequence
agacttagctcgactcttattaaaa

SEQ ID NO: 159301 - DNA, 25 bp, Probe sequence
agctgactctaaatctgcagatagt

SEQ ID NO: 159302 - DNA, 25 bp, Probe sequence
actgatgcaagtcaagtcgatgggc

SEQ ID NO: 159303 - DNA, 25 bp, Probe sequence
aaggtggcgcctatttagaaatgga

SEQ ID NO: 159304 - DNA, 25 bp, Probe sequence
aatgcgtcgaaatcaacatcaacga

SEQ ID NO: 159305 - DNA, 25 bp, Probe sequence
aatacattagctagtccagagtttg

SEQ ID NO: 159306 - DNA, 25 bp, Probe sequence
aattctattaaagttgagcgcccaa

SEQ ID NO: 159307 - DNA, 25 bp, Probe sequence
cgtattatggcacttgaacctcaag

SEQ ID NO: 159308 - DNA, 25 bp, Probe sequence
gctgttggtcaaagccaagcatttc

SEQ ID NO: 159309 - DNA, 25 bp, Probe sequence
gaagctgtagaaatgtcacgtaaat

SEQ ID NO: 159310 - DNA, 25 bp, Probe sequence
gacatctctctccattattaaaaaa

SEQ ID NO: 159311 - DNA, 25 bp, Probe sequence
gacgaacagttagatgccaagcaag

SEQ ID NO: 159312 - DNA, 25 bp, Probe sequence
gatggcccacgtattatggcacttg

SEQ ID NO: 159313 - DNA, 25 bp, Probe sequence
gatgttgcaagacttagctcgactc

SEQ ID NO: 159314 - DNA, 25 bp, Probe sequence
gatgcgtcagcaagtatgcatgata

SEQ ID NO: 159315 - DNA, 25 bp, Probe sequence
gatagtgagtcaaaaggtggcgcct

SEQ ID NO: 159316 - DNA, 25 bp, Probe sequence
gatatgcgcgtattaaattctatta

SEQ ID NO: 159317 - DNA, 25 bp, Probe sequence
gatttctttgatataccatctatac

SEQ ID NO: 159318 - DNA, 25 bp, Probe sequence
gttgagcgcccaagtactgctaaat

SEQ ID NO: 159319 - DNA, 25 bp, Probe sequence
gttagctgcttacggttatcatatg

SEQ ID NO: 159320 - DNA, 25 bp, Probe sequence
gtagtgttattccacgagacgttaa

SEQ ID NO: 159321 - DNA, 25 bp, Probe sequence
gtcgatgggcaagatgatacttcag

SEQ ID NO: 159322 - DNA, 25 bp, Probe sequence
gtgaagaaggcgatgctgttggtca

SEQ ID NO: 159323 - DNA, 25 bp, Probe sequence
gtgaggatgcctttgattcagacga

SEQ ID NO: 159324 - DNA, 25 bp, Probe sequence
ggtcacatcgaccaagccatatcga

SEQ ID NO: 159325 - DNA, 25 bp, Probe sequence
ggcgaaccgtctgcatttaattata

SEQ ID NO: 159326 - DNA, 25 bp, Probe sequence
taattgatcttcgcttagatacacg

SEQ ID NO: 159327 - DNA, 25 bp, Probe sequence
tatgttcttatatttacctaatttt

SEQ ID NO: 159328 - DNA, 25 bp, Probe sequence
ttaactatgattactcaacctttga

SEQ ID NO: 159329 - DNA, 25 bp, Probe sequence
attacgaatccatacactggtgaag

SEQ ID NO: 159330 - DNA, 25 bp, Probe sequence
ataatgctgtagaactaaactttta

SEQ ID NO: 159331 - DNA, 25 bp, Probe sequence
atcgctttgttgttattcacgttga

SEQ ID NO: 159332 - DNA, 25 bp, Probe sequence
atgccagttgaacgtgcaattaaac

SEQ ID NO: 159333 - DNA, 25 bp, Probe sequence
agagcaaagtttattacaagatgat

SEQ ID NO: 159334 - DNA, 25 bp, Probe sequence
agaattcagattcaacagttttcaa

SEQ ID NO: 159335 - DNA, 25 bp, Probe sequence
acagttttcaatgatgcgaaggcat

SEQ ID NO: 159336 - DNA, 25 bp, Probe sequence
aaatttctgaagaagccgctagtat

SEQ ID NO: 159337 - DNA, 25 bp, Probe sequence
aaaatcgctttgttgttattcacgt

SEQ ID NO: 159338 - DNA, 25 bp, Probe sequence
aagctgtaccaggatttaacgttat

SEQ ID NO: 159339 - DNA, 25 bp, Probe sequence
cgtgcattattagacttgtgtgatt

SEQ ID NO: 159340 - DNA, 25 bp, Probe sequence
gcagcgataaatgaaggttatgttg

SEQ ID NO: 159341 - DNA, 25 bp, Probe sequence
gaatccatacactggtgaagtaatc

SEQ ID NO: 159342 - DNA, 25 bp, Probe sequence
gaagttgttgatacacccatgcatc

SEQ ID NO: 159343 - DNA, 25 bp, Probe sequence
gaagatttacgtactatgtctaagc

SEQ ID NO: 159344 - DNA, 25 bp, Probe sequence
gaacgtgaacaacaagcaatatata

SEQ ID NO: 159345 - DNA, 25 bp, Probe sequence
gaacgtgcaattaaacgtacaatta

SEQ ID NO: 159346 - DNA, 25 bp, Probe sequence
gaaagaggggcatattttatatatt

SEQ ID NO: 159347 - DNA, 25 bp, Probe sequence
gaaattgtctttgtagatggtccag

SEQ ID NO: 159348 - DNA, 25 bp, Probe sequence
gatggtccagttattaaagctatga

SEQ ID NO: 159349 - DNA, 25 bp, Probe sequence
gattatcgtcgtcaaattacgaatc

SEQ ID NO: 159350 - DNA, 25 bp, Probe sequence
gttggcagaaacattaagtgaagtt

SEQ ID NO: 159351 - DNA, 25 bp, Probe sequence
gttgatacacccatgcatcaagtca

SEQ ID NO: 159352 - DNA, 25 bp, Probe sequence
tttacgtactatgtctaagcaggga

SEQ ID NO: 159353 - DNA, 25 bp, Probe sequence
gtaatgccagttgaacgtgcaatta

SEQ ID NO: 159354 - DNA, 25 bp, Probe sequence
gtcaaattacgaatccatacactgg

SEQ ID NO: 159355 - DNA, 25 bp, Probe sequence
gtctaagcagggacaaatttctgaa

SEQ ID NO: 159356 - DNA, 25 bp, Probe sequence
gtgatttaatcactgtaatgccagt

SEQ ID NO: 159357 - DNA, 25 bp, Probe sequence
gggacaaatttctgaagaagccgct

SEQ ID NO: 159358 - DNA, 25 bp, Probe sequence
ggtgaagtaatcaaagctgtaccag

SEQ ID NO: 159359 - DNA, 25 bp, Probe sequence
ggaagatgaacgtgaacaacaagca

SEQ ID NO: 159360 - DNA, 25 bp, Probe sequence
taaatatggctaaacctgaaacatt

SEQ ID NO: 159361 - DNA, 25 bp, Probe sequence
tttagatacagaaagcttattaggc

SEQ ID NO: 159362 - DNA, 25 bp, Probe sequence
ttgtctttgtagatggtccagttat

SEQ ID NO: 159363 - DNA, 25 bp, Probe sequence
atccttctgccgtcattgcaatgga

SEQ ID NO: 159364 - DNA, 25 bp, Probe sequence
atgtcagtcgtatgactttgcgcca

SEQ ID NO: 159365 - DNA, 25 bp, Probe sequence
atggaggttgtctacgtgacgcaaa

SEQ ID NO: 159366 - DNA, 25 bp, Probe sequence
acacgcttcaagtatggatcaattt

SEQ ID NO: 159367 - DNA, 25 bp, Probe sequence
acaaatgcccaacacgcttcaagta

SEQ ID NO: 159368 - DNA, 25 bp, Probe sequence
aattgttagccgaagatggcatcgt

SEQ ID NO: 159369 - DNA, 25 bp, Probe sequence
cattctaagcaagctgatgcatttt

SEQ ID NO: 159370 - DNA, 25 bp, Probe sequence
cttcaaaaatcatagtcacgtgttt

SEQ ID NO: 159371 - DNA, 25 bp, Probe sequence
ctttgtgcgcgctttgatgtcagtc

SEQ ID NO: 159372 - DNA, 25 bp, Probe sequence
ctatgtcatcaattaattatcgtgt

SEQ ID NO: 159373 - DNA, 25 bp, Probe sequence
ctgacacgtataagacaatcggatt

SEQ ID NO: 159374 - DNA, 25 bp, Probe sequence
gcgcgctttgatgtcagtcgtatga

SEQ ID NO: 159375 - DNA, 25 bp, Probe sequence
gaagggacactttgttattccacaa

SEQ ID NO: 159376 - DNA, 25 bp, Probe sequence
gaaaatatccgagtggccatgcatt

SEQ ID NO: 159377 - DNA, 25 bp, Probe sequence
gaaaaggaactttgtgcgcgctttg

SEQ ID NO: 159378 - DNA, 25 bp, Probe sequence
gactttgcgccaagctataaaattg

SEQ ID NO: 159379 - DNA, 25 bp, Probe sequence
gatggcatcgtagagagtacaagag

SEQ ID NO: 159380 - DNA, 25 bp, Probe sequence
gtctacgtgacgcaaacacaaccaa

SEQ ID NO: 159381 - DNA, 25 bp, Probe sequence
gtcacgtgtttgatggtgatacaca

SEQ ID NO: 159382 - DNA, 25 bp, Probe sequence
gtcattgcaatggaacgctattatc

SEQ ID NO: 159383 - DNA, 25 bp, Probe sequence
gtgaatacacaaaacgaagacgaca

SEQ ID NO: 159384 - DNA, 25 bp, Probe sequence
ggtgatacacattgttggctgatta

SEQ ID NO: 159385 - DNA, 25 bp, Probe sequence
ggatcaatttaagcatccacttgat

SEQ ID NO: 159386 - DNA, 25 bp, Probe sequence
tggccatgcattacctactgaaaag

SEQ ID NO: 159387 - DNA, 25 bp, Probe sequence
tcgtatgactttgcgccaagctata

SEQ ID NO: 159388 - DNA, 25 bp, Probe sequence
tctgaattaacactgacacgtataa

SEQ ID NO: 159389 - DNA, 25 bp, Probe sequence
taaaaatgtctattaccaaagcgcc

SEQ ID NO: 159390 - DNA, 25 bp, Probe sequence
tacacattgttggctgattattgaa

SEQ ID NO: 159391 - DNA, 25 bp, Probe sequence
tatccgagtggccatgcattaccta

SEQ ID NO: 159392 - DNA, 25 bp, Probe sequence
tatagcaatgcatatcaatcagatt

SEQ ID NO: 159393 - DNA, 25 bp, Probe sequence
tattccacaaacaaatgcccaacac

SEQ ID NO: 159394 - DNA, 25 bp, Probe sequence
tttgtttgcaaaccatccttctgcc

SEQ ID NO: 159395 - DNA, 25 bp, Probe sequence
ttacctttataccgttaaatgtcat

SEQ ID NO: 159396 - DNA, 25 bp, Probe sequence
ttaagcatccacttgatcaaatatt

SEQ ID NO: 159397 - DNA, 25 bp, Probe sequence
atgatgttatcaacgaaactgaaga

SEQ ID NO: 159398 - DNA, 25 bp, Probe sequence
atgttacatgaaacttggaaagaac

SEQ ID NO: 159399 - DNA, 25 bp, Probe sequence
atgttatcaacgaaactgaagaata

SEQ ID NO: 159400 - DNA, 25 bp, Probe sequence
agtagaagtcattaatacagatgca

SEQ ID NO: 159401 - DNA, 25 bp, Probe sequence
agttggcggttactataaaacatat

SEQ ID NO: 159402 - DNA, 25 bp, Probe sequence
agaaatttacagtttctgacatgtt

SEQ ID NO: 159403 - DNA, 25 bp, Probe sequence
agaagtcattaatacagatgcaaag

SEQ ID NO: 159404 - DNA, 25 bp, Probe sequence
aaatttacagtttctgacatgttaa

SEQ ID NO: 159405 - DNA, 25 bp, Probe sequence
aagaaatttacagtttctgacatgt

SEQ ID NO: 159406 - DNA, 25 bp, Probe sequence
aagtcattaatacagatgcaaagaa

SEQ ID NO: 159407 - DNA, 25 bp, Probe sequence
aatttacagtttctgacatgttaac

SEQ ID NO: 159408 - DNA, 25 bp, Probe sequence
gcggttactataaaacatatttcaa

SEQ ID NO: 159409 - DNA, 25 bp, Probe sequence
gcaaacaatatgatgttatcaacga

SEQ ID NO: 159410 - DNA, 25 bp, Probe sequence
gcaaagaaatttacagtttctgaca

SEQ ID NO: 159411 - DNA, 25 bp, Probe sequence
gaagtcattaatacagatgcaaaga

SEQ ID NO: 159412 - DNA, 25 bp, Probe sequence
gaaatttacagtttctgacatgtta

SEQ ID NO: 159413 - DNA, 25 bp, Probe sequence
gatgttatcaacgaaactgaagaat

SEQ ID NO: 159414 - DNA, 25 bp, Probe sequence
gttggcggttactataaaacatatt

SEQ ID NO: 159415 - DNA, 25 bp, Probe sequence
gttacatgaaacttggaaagaacgt

SEQ ID NO: 159416 - DNA, 25 bp, Probe sequence
gttactataaaacatatttcaaaga

SEQ ID NO: 159417 - DNA, 25 bp, Probe sequence
gttatcaacgaaactgaagaatatt

SEQ ID NO: 159418 - DNA, 25 bp, Probe sequence
gtagaagtcattaatacagatgcaa

SEQ ID NO: 159419 - DNA, 25 bp, Probe sequence
gtcattaatacagatgcaaagaaat

SEQ ID NO: 159420 - DNA, 25 bp, Probe sequence
ggttactataaaacatatttcaaag

SEQ ID NO: 159421 - DNA, 25 bp, Probe sequence
ggcaaacaatatgatgttatcaacg

SEQ ID NO: 159422 - DNA, 25 bp, Probe sequence
tggcggttactataaaacatatttc

SEQ ID NO: 159423 - DNA, 25 bp, Probe sequence
ggcggttactataaaacatatttca

SEQ ID NO: 159424 - DNA, 25 bp, Probe sequence
tacatgaaacttggaaagaacgtac

SEQ ID NO: 159425 - DNA, 25 bp, Probe sequence
tcaacgaaactgaagaatattatca

SEQ ID NO: 159426 - DNA, 25 bp, Probe sequence
tagaagtcattaatacagatgcaaa

SEQ ID NO: 159427 - DNA, 25 bp, Probe sequence
tagttggcggttactataaaacata

SEQ ID NO: 159428 - DNA, 25 bp, Probe sequence
tatgatgttatcaacgaaactgaag

SEQ ID NO: 159429 - DNA, 25 bp, Probe sequence
ttagttggcggttactataaaacat

SEQ ID NO: 159430 - DNA, 25 bp, Probe sequence
ttggcggttactataaaacatattt

SEQ ID NO: 159431 - DNA, 25 bp, Probe sequence
atttgcagaataccaacccttcgac

SEQ ID NO: 159432 - DNA, 25 bp, Probe sequence
atattcggacttgaagtatttgcag

SEQ ID NO: 159433 - DNA, 25 bp, Probe sequence
atccgttacatcaagtgcaaggttt

SEQ ID NO: 159434 - DNA, 25 bp, Probe sequence
atggcgcagtcgatcaagttgagtt

SEQ ID NO: 159435 - DNA, 25 bp, Probe sequence
aacatttcatggttgacatattagg

SEQ ID NO: 159436 - DNA, 25 bp, Probe sequence
aactcaattcgtttcggcgatgcag

SEQ ID NO: 159437 - DNA, 25 bp, Probe sequence
aacccttcgacaatgctgactatca

SEQ ID NO: 159438 - DNA, 25 bp, Probe sequence
aagcccaggaacaagacttcaattt

SEQ ID NO: 159439 - DNA, 25 bp, Probe sequence
aaggatattccatttacaacagtta

SEQ ID NO: 159440 - DNA, 25 bp, Probe sequence
caagacttcaatttatacaagttcc

SEQ ID NO: 159441 - DNA, 25 bp, Probe sequence
cagaataccaacccttcgacaatgc

SEQ ID NO: 159442 - DNA, 25 bp, Probe sequence
cagtctcgaagataacaatggtcat

SEQ ID NO: 159443 - DNA, 25 bp, Probe sequence
cgagaataattatggcgttggttta

SEQ ID NO: 159444 - DNA, 25 bp, Probe sequence
gcgaaatcgcgcttagatgaagtgg

SEQ ID NO: 159445 - DNA, 25 bp, Probe sequence
gcgatgcagatataagcccaggaac

SEQ ID NO: 159446 - DNA, 25 bp, Probe sequence
gcgttggtttaggtatgccttcttt

SEQ ID NO: 159447 - DNA, 25 bp, Probe sequence
gcggtcaatccgttacatcaagtgc

SEQ ID NO: 159448 - DNA, 25 bp, Probe sequence
gctgactatcatgtccaagtattca

SEQ ID NO: 159449 - DNA, 25 bp, Probe sequence
gaatctcactttgtgggtattggat

SEQ ID NO: 159450 - DNA, 25 bp, Probe sequence
gaagaacttcttgaaaactcaattc

SEQ ID NO: 159451 - DNA, 25 bp, Probe sequence
gaacagacaaaacatttcatggttg

SEQ ID NO: 159452 - DNA, 25 bp, Probe sequence
gagcaattagaagaatctcactttg

SEQ ID NO: 159453 - DNA, 25 bp, Probe sequence
gaggagtatgcggaaatattatcga

SEQ ID NO: 159454 - DNA, 25 bp, Probe sequence
gatattacaggtcaaattttaacaa

SEQ ID NO: 159455 - DNA, 25 bp, Probe sequence
gggtggtctaggtggcgaaatacat

SEQ ID NO: 159456 - DNA, 25 bp, Probe sequence
tggaacgggtggtctaggtggcgaa

SEQ ID NO: 159457 - DNA, 25 bp, Probe sequence
ggattacgtacaccaactgactcag

SEQ ID NO: 159458 - DNA, 25 bp, Probe sequence
ggattatcgtttatattcactttac

SEQ ID NO: 159459 - DNA, 25 bp, Probe sequence
ggcaataaatatttcagtctcgaag

SEQ ID NO: 159460 - DNA, 25 bp, Probe sequence
ggcgaaatacatttaatgcctgtag

SEQ ID NO: 159461 - DNA, 25 bp, Probe sequence
taacaatggtcatattttctcaata

SEQ ID NO: 159462 - DNA, 25 bp, Probe sequence
tacaagttccaagtgagcaattaga

SEQ ID NO: 159463 - DNA, 25 bp, Probe sequence
tttctttaatcaagcgaaatcgcgc

SEQ ID NO: 159464 - DNA, 25 bp, Probe sequence
ttgtgggtattggattacgtacacc

SEQ ID NO: 159465 - DNA, 25 bp, Probe sequence
attgaaaacccagaagacttattat

SEQ ID NO: 159466 - DNA, 25 bp, Probe sequence
attacagaaggtaccattgcagaat

SEQ ID NO: 159467 - DNA, 25 bp, Probe sequence
attatgatattggtgtagctgtttc

SEQ ID NO: 159468 - DNA, 25 bp, Probe sequence
atgccagaggttaaagttccagaat

SEQ ID NO: 159469 - DNA, 25 bp, Probe sequence
acaagaccaattgcgattgatcaag

SEQ ID NO: 159470 - DNA, 25 bp, Probe sequence
acaatcaatatcctacaaaaccagt

SEQ ID NO: 159471 - DNA, 25 bp, Probe sequence
aaaggtgaagctattcttgaattag

SEQ ID NO: 159472 - DNA, 25 bp, Probe sequence
aaaaacttggcttagatgatatggt

SEQ ID NO: 159473 - DNA, 25 bp, Probe sequence
aagttccagaattagcagaatctat

SEQ ID NO: 159474 - DNA, 25 bp, Probe sequence
aatggcggtatttttggatcaatga

SEQ ID NO: 159475 - DNA, 25 bp, Probe sequence
tcatcggcgaaggtagtggcaatgc

SEQ ID NO: 159476 - DNA, 25 bp, Probe sequence
gctcgtgaaaatggtgtgaatcttg

SEQ ID NO: 159477 - DNA, 25 bp, Probe sequence
gcatcaacacaaacaacacaacaag

SEQ ID NO: 159478 - DNA, 25 bp, Probe sequence
gcatgcattcaattattacaagacc

SEQ ID NO: 159479 - DNA, 25 bp, Probe sequence
gcaggtgtattatctgaacaacttg

SEQ ID NO: 159480 - DNA, 25 bp, Probe sequence
gcaatcttaggcatgcattcaatta

SEQ ID NO: 159481 - DNA, 25 bp, Probe sequence
gaaggcgacactgtagaagttggac

SEQ ID NO: 159482 - DNA, 25 bp, Probe sequence
gaacaacttgcaagtgaaggcgaca

SEQ ID NO: 159483 - DNA, 25 bp, Probe sequence
gatacaatcgaaaatcgtccaatga

SEQ ID NO: 159484 - DNA, 25 bp, Probe sequence
gttaatgtcgaagttgtatctgaag

SEQ ID NO: 159485 - DNA, 25 bp, Probe sequence
gtatattgcattaagctatgatcat

SEQ ID NO: 159486 - DNA, 25 bp, Probe sequence
gtatccagaagttaatgcagaaatc

SEQ ID NO: 159487 - DNA, 25 bp, Probe sequence
gtacgccaattatcaatggtaatca

SEQ ID NO: 159488 - DNA, 25 bp, Probe sequence
gtaacgacaatactccacaacaaaa

SEQ ID NO: 159489 - DNA, 25 bp, Probe sequence
gtgaatcttgctgaagtaagtccga

SEQ ID NO: 159490 - DNA, 25 bp, Probe sequence
ggtagtggcaatgcttctaaagaaa

SEQ ID NO: 159491 - DNA, 25 bp, Probe sequence
ggttaatggttcatttacgattaca

SEQ ID NO: 159492 - DNA, 25 bp, Probe sequence
ggatcaatgatgagtacgccaatta

SEQ ID NO: 159493 - DNA, 25 bp, Probe sequence
ggcgacgacatgattacgaaacaat

SEQ ID NO: 159494 - DNA, 25 bp, Probe sequence
tggtaatcaagctgcaatcttaggc

SEQ ID NO: 159495 - DNA, 25 bp, Probe sequence
tcctacaaaaccagtgattcgtgaa

SEQ ID NO: 159496 - DNA, 25 bp, Probe sequence
tctttactaaagcttctgtagcagc

SEQ ID NO: 159497 - DNA, 25 bp, Probe sequence
ttaggatttatgtcattctttacta

SEQ ID NO: 159498 - DNA, 25 bp, Probe sequence
ttctgcgcgtcgatatgctcgtgaa

SEQ ID NO: 159499 - DNA, 25 bp, Probe sequence
atgactcaattgtaccagctttaaa

SEQ ID NO: 159500 - DNA, 25 bp, Probe sequence
atgatgactcaattgtaccagcttt

SEQ ID NO: 159501 - DNA, 25 bp, Probe sequence
agtcaaaatagcgacggcacaatta

SEQ ID NO: 159502 - DNA, 25 bp, Probe sequence
agtagtcaaaatagcgacggcacaa

SEQ ID NO: 159503 - DNA, 25 bp, Probe sequence
agaatgatgactcaattgtaccagc

SEQ ID NO: 159504 - DNA, 25 bp, Probe sequence
agcacaattaagaatgatgactcaa

SEQ ID NO: 159505 - DNA, 25 bp, Probe sequence
actcaattgtaccagctttaaaaag

SEQ ID NO: 159506 - DNA, 25 bp, Probe sequence
acaagtagtcaaaatagcgacggca

SEQ ID NO: 159507 - DNA, 25 bp, Probe sequence
aaatagcgacggcacaattaagcgt

SEQ ID NO: 159508 - DNA, 25 bp, Probe sequence
aaagtacaagtagtcaaaatagcga

SEQ ID NO: 159509 - DNA, 25 bp, Probe sequence
aaaatagcgacggcacaattaagcg

SEQ ID NO: 159510 - DNA, 25 bp, Probe sequence
aagaatgatgactcaattgtaccag

SEQ ID NO: 159511 - DNA, 25 bp, Probe sequence
aagtagtcaaaatagcgacggcaca

SEQ ID NO: 159512 - DNA, 25 bp, Probe sequence
aatgatgactcaattgtaccagctt

SEQ ID NO: 159513 - DNA, 25 bp, Probe sequence
aatagcgacggcacaattaagcgtg

SEQ ID NO: 159514 - DNA, 25 bp, Probe sequence
caagtagtcaaaatagcgacggcac

SEQ ID NO: 159515 - DNA, 25 bp, Probe sequence
caaaatagcgacggcacaattaagc

SEQ ID NO: 159516 - DNA, 25 bp, Probe sequence
cagcacaattaagaatgatgactca

SEQ ID NO: 159517 - DNA, 25 bp, Probe sequence
ctcaattgtaccagctttaaaaagt

SEQ ID NO: 159518 - DNA, 25 bp, Probe sequence
gcacaattaagaatgatgactcaat

SEQ ID NO: 159519 - DNA, 25 bp, Probe sequence
gaatgatgactcaattgtaccagct

SEQ ID NO: 159520 - DNA, 25 bp, Probe sequence
gactcaattgtaccagctttaaaaa

SEQ ID NO: 159521 - DNA, 25 bp, Probe sequence
gatgactcaattgtaccagctttaa

SEQ ID NO: 159522 - DNA, 25 bp, Probe sequence
gtagtcaaaatagcgacggcacaat

SEQ ID NO: 159523 - DNA, 25 bp, Probe sequence
gtacaagtagtcaaaatagcgacgg

SEQ ID NO: 159524 - DNA, 25 bp, Probe sequence
gtcaaaatagcgacggcacaattaa

SEQ ID NO: 159525 - DNA, 25 bp, Probe sequence
tgatgactcaattgtaccagcttta

SEQ ID NO: 159526 - DNA, 25 bp, Probe sequence
tgactcaattgtaccagctttaaaa

SEQ ID NO: 159527 - DNA, 25 bp, Probe sequence
tcaaaatagcgacggcacaattaag

SEQ ID NO: 159528 - DNA, 25 bp, Probe sequence
tcaattgtaccagctttaaaaagta

SEQ ID NO: 159529 - DNA, 25 bp, Probe sequence
taagaatgatgactcaattgtacca

SEQ ID NO: 159530 - DNA, 25 bp, Probe sequence
taccagctttaaaaagtacaagtag

SEQ ID NO: 159531 - DNA, 25 bp, Probe sequence
tagtcaaaatagcgacggcacaatt

SEQ ID NO: 159532 - DNA, 25 bp, Probe sequence
ttaagaatgatgactcaattgtacc

SEQ ID NO: 159533 - DNA, 25 bp, Probe sequence
attgccaaaacttgaagaagtgtca

SEQ ID NO: 159534 - DNA, 25 bp, Probe sequence
atacacaacgagctggggctccgac

SEQ ID NO: 159535 - DNA, 25 bp, Probe sequence
atgatacacaacgagctggggctcc

SEQ ID NO: 159536 - DNA, 25 bp, Probe sequence
acctgcagaacttgcattaccgtta

SEQ ID NO: 159537 - DNA, 25 bp, Probe sequence
acgaatccgtgttactcgttgcgat

SEQ ID NO: 159538 - DNA, 25 bp, Probe sequence
aaatccagacgaatccgtgttactc

SEQ ID NO: 159539 - DNA, 25 bp, Probe sequence
aaacctgcagaacttgcattaccgt

SEQ ID NO: 159540 - DNA, 25 bp, Probe sequence
cagacgaatccgtgttactcgttgc

SEQ ID NO: 159541 - DNA, 25 bp, Probe sequence
aagcgtgtcatgcgtctaattgata

SEQ ID NO: 159542 - DNA, 25 bp, Probe sequence
aaggtgcatggttatatgtctatcc

SEQ ID NO: 159543 - DNA, 25 bp, Probe sequence
aatccagacgaatccgtgttactcg

SEQ ID NO: 159544 - DNA, 25 bp, Probe sequence
aatcaaggtgcatggttatatgtct

SEQ ID NO: 159545 - DNA, 25 bp, Probe sequence
caatcatttacgtttgatcatttga

SEQ ID NO: 159546 - DNA, 25 bp, Probe sequence
cagaacttgcattaccgttacaagc

SEQ ID NO: 159547 - DNA, 25 bp, Probe sequence
cagttgccaaaccaattgatgagtt

SEQ ID NO: 159548 - DNA, 25 bp, Probe sequence
catggttatatgtctatccatatgt

SEQ ID NO: 159549 - DNA, 25 bp, Probe sequence
catgcgtctaattgataatattcgc

SEQ ID NO: 159550 - DNA, 25 bp, Probe sequence
catttacgtttgatcatttgaaaga

SEQ ID NO: 159551 - DNA, 25 bp, Probe sequence
ctagcacaattgccaaaacttgaag

SEQ ID NO: 159552 - DNA, 25 bp, Probe sequence
cgaatccgtgttactcgttgcgatt

SEQ ID NO: 159553 - DNA, 25 bp, Probe sequence
gccaaaccaattgatgagtttactt

SEQ ID NO: 159554 - DNA, 25 bp, Probe sequence
gcattactagcacaattgccaaaac

SEQ ID NO: 159555 - DNA, 25 bp, Probe sequence
gcacaattgccaaaacttgaagaag

SEQ ID NO: 159556 - DNA, 25 bp, Probe sequence
gcacaagatgatacacaacgagctg

SEQ ID NO: 159557 - DNA, 25 bp, Probe sequence
gaagcattactagcacaattgccaa

SEQ ID NO: 159558 - DNA, 25 bp, Probe sequence
gatgatacacaacgagctggggctc

SEQ ID NO: 159559 - DNA, 25 bp, Probe sequence
gatacacaacgagctggggctccga

SEQ ID NO: 159560 - DNA, 25 bp, Probe sequence
gatatggaaaaacctgcagaacttg

SEQ ID NO: 159561 - DNA, 25 bp, Probe sequence
gtgtcatgcgtctaattgataatat

SEQ ID NO: 159562 - DNA, 25 bp, Probe sequence
ggtgcatggttatatgtctatccat

SEQ ID NO: 159563 - DNA, 25 bp, Probe sequence
tgaagcattactagcacaattgcca

SEQ ID NO: 159564 - DNA, 25 bp, Probe sequence
tgcagaacttgcattaccgttacaa

SEQ ID NO: 159565 - DNA, 25 bp, Probe sequence
ttttagcaactggtaaaatgttcat

SEQ ID NO: 159566 - DNA, 25 bp, Probe sequence
ttactagcacaattgccaaaacttg

SEQ ID NO: 159567 - DNA, 25 bp, Probe sequence
attgcatcctgattatcaatttgat

SEQ ID NO: 159568 - DNA, 25 bp, Probe sequence
attaatgatgaaattcgctcgcgaa

SEQ ID NO: 159569 - DNA, 25 bp, Probe sequence
attagacttgaatgcatctttaggt

SEQ ID NO: 159570 - DNA, 25 bp, Probe sequence
accacgatgattacgtttgtcacga

SEQ ID NO: 159571 - DNA, 25 bp, Probe sequence
acggatctgacatctaaaaatctag

SEQ ID NO: 159572 - DNA, 25 bp, Probe sequence
acaacgcaagatttcaaagggtata

SEQ ID NO: 159573 - DNA, 25 bp, Probe sequence
aaccgcttgtcagtttatcaaataa

SEQ ID NO: 159574 - DNA, 25 bp, Probe sequence
aagacccagcagtattagaagaatc

SEQ ID NO: 159575 - DNA, 25 bp, Probe sequence
aagatatatctgcattagacttgaa

SEQ ID NO: 159576 - DNA, 25 bp, Probe sequence
aatacgtttaatgagatgatgagcc

SEQ ID NO: 159577 - DNA, 25 bp, Probe sequence
aatttatttcattctaagcctgtta

SEQ ID NO: 159578 - DNA, 25 bp, Probe sequence
caatttgatacggatctgacatcta

SEQ ID NO: 159579 - DNA, 25 bp, Probe sequence
caaattactaaaccgcttgtcagtt

SEQ ID NO: 159580 - DNA, 25 bp, Probe sequence
cacatgaattacgaacaccattaca

SEQ ID NO: 159581 - DNA, 25 bp, Probe sequence
cactcattaaaacaattgcatcctg

SEQ ID NO: 159582 - DNA, 25 bp, Probe sequence
cagaccgtgcatattaatgatgaaa

SEQ ID NO: 159583 - DNA, 25 bp, Probe sequence
ctaagcctgttaaagatatatctgc

SEQ ID NO: 159584 - DNA, 25 bp, Probe sequence
gaatgcatctttaggtaattttcaa

SEQ ID NO: 159585 - DNA, 25 bp, Probe sequence
gaagctcaagcgatattaataattt

SEQ ID NO: 159586 - DNA, 25 bp, Probe sequence
gaacaccattacaaattattcaagg

SEQ ID NO: 159587 - DNA, 25 bp, Probe sequence
gacaaaacgtaaattgcgcaataac

SEQ ID NO: 159588 - DNA, 25 bp, Probe sequence
gagacatcgaatgataacacagtga

SEQ ID NO: 159589 - DNA, 25 bp, Probe sequence
gagatgtaaatgacatttcttctga

SEQ ID NO: 159590 - DNA, 25 bp, Probe sequence
gatttcatttttgatcgcttttatc

SEQ ID NO: 159591 - DNA, 25 bp, Probe sequence
gattgcaacaattataactgccaca

SEQ ID NO: 159592 - DNA, 25 bp, Probe sequence
gtttgtcacgatatttttgttttgt

SEQ ID NO: 159593 - DNA, 25 bp, Probe sequence
gtaatggactcggattatctattgc

SEQ ID NO: 159594 - DNA, 25 bp, Probe sequence
gtggataaatctcgttcaagaagtc

SEQ ID NO: 159595 - DNA, 25 bp, Probe sequence
ggtcatttaaatttgattcagcgat

SEQ ID NO: 159596 - DNA, 25 bp, Probe sequence
ggattattgttaccacgatgattac

SEQ ID NO: 159597 - DNA, 25 bp, Probe sequence
taatagtgagcttgatgatgcagaa

SEQ ID NO: 159598 - DNA, 25 bp, Probe sequence
tttgatcgcttttatcgagtggata

SEQ ID NO: 159599 - DNA, 25 bp, Probe sequence
tttcttgaaagatacactgcataat

SEQ ID NO: 159600 - DNA, 25 bp, Probe sequence
ttcgctcgcgaatacactcattaaa

SEQ ID NO: 159601 - DNA, 25 bp, Probe sequence
atatcaaaccaacgtcgaataaaca

SEQ ID NO: 159602 - DNA, 25 bp, Probe sequence
atctttctgaaattttggctgcagc

SEQ ID NO: 159603 - DNA, 25 bp, Probe sequence
accaacgtcgaataaacatgactgg

SEQ ID NO: 159604 - DNA, 25 bp, Probe sequence
acctgacgtttcagctgaaatagca

SEQ ID NO: 159605 - DNA, 25 bp, Probe sequence
acgtcgaataaacatgactggaatt

SEQ ID NO: 159606 - DNA, 25 bp, Probe sequence
aaacatgactggaattaattttgaa

SEQ ID NO: 159607 - DNA, 25 bp, Probe sequence
aaaattaatatacctgacgtttcag

SEQ ID NO: 159608 - DNA, 25 bp, Probe sequence
aatgctgatgcaatcgttgttttca

SEQ ID NO: 159609 - DNA, 25 bp, Probe sequence
aatcggtatgataattagtaatttc

SEQ ID NO: 159610 - DNA, 25 bp, Probe sequence
aatagcatttaatctttctgaaatt

SEQ ID NO: 159611 - DNA, 25 bp, Probe sequence
aattttggctgcagctatcacgagc

SEQ ID NO: 159612 - DNA, 25 bp, Probe sequence
cacgagcgataatgttgatgttaat

SEQ ID NO: 159613 - DNA, 25 bp, Probe sequence
gctgcagctatcacgagcgataatg

SEQ ID NO: 159614 - DNA, 25 bp, Probe sequence
gctgatgcaatcgttgttttcatat

SEQ ID NO: 159615 - DNA, 25 bp, Probe sequence
gcagctatcacgagcgataatgttg

SEQ ID NO: 159616 - DNA, 25 bp, Probe sequence
gcaatcgttgttttcatatcaaacc

SEQ ID NO: 159617 - DNA, 25 bp, Probe sequence
gaaggtatgtttaaatctacaccaa

SEQ ID NO: 159618 - DNA, 25 bp, Probe sequence
gaaattttggctgcagctatcacga

SEQ ID NO: 159619 - DNA, 25 bp, Probe sequence
gactgcgcttaaaattaatatacct

SEQ ID NO: 159620 - DNA, 25 bp, Probe sequence
gatgcaatcgttgttttcatatcaa

SEQ ID NO: 159621 - DNA, 25 bp, Probe sequence
gttgttttcatatcaaaccaacgtc

SEQ ID NO: 159622 - DNA, 25 bp, Probe sequence
gtttcagctgaaatagcatttaatc

SEQ ID NO: 159623 - DNA, 25 bp, Probe sequence
ggtatgtttaaatctacaccaacca

SEQ ID NO: 159624 - DNA, 25 bp, Probe sequence
tggctgcagctatcacgagcgataa

SEQ ID NO: 159625 - DNA, 25 bp, Probe sequence
tgtttaaatctacaccaaccattat

SEQ ID NO: 159626 - DNA, 25 bp, Probe sequence
tgataattagtaatttcggttcttt

SEQ ID NO: 159627 - DNA, 25 bp, Probe sequence
tgatgttaataaaaatgctgatgca

SEQ ID NO: 159628 - DNA, 25 bp, Probe sequence
tcggttctttaattaatgaaggtat

SEQ ID NO: 159629 - DNA, 25 bp, Probe sequence
taatatacctgacgtttcagctgaa

SEQ ID NO: 159630 - DNA, 25 bp, Probe sequence
tatacctgacgtttcagctgaaata

SEQ ID NO: 159631 - DNA, 25 bp, Probe sequence
tttcatatcaaaccaacgtcgaata

SEQ ID NO: 159632 - DNA, 25 bp, Probe sequence
ttttggctgcagctatcacgagcga

SEQ ID NO: 159633 - DNA, 25 bp, Probe sequence
ttctgaaattttggctgcagctatc

SEQ ID NO: 159634 - DNA, 25 bp, Probe sequence
ttggctgcagctatcacgagcgata

SEQ ID NO: 159635 - DNA, 25 bp, Probe sequence
attacagcgaaaagtgatacgtatg

SEQ ID NO: 159636 - DNA, 25 bp, Probe sequence
acacctatcattataattacagcga

SEQ ID NO: 159637 - DNA, 25 bp, Probe sequence
acaacaatctacacctatcattata

SEQ ID NO: 159638 - DNA, 25 bp, Probe sequence
aaatggcgcagaaattgaattaaca

SEQ ID NO: 159639 - DNA, 25 bp, Probe sequence
aaaaccatacgatcgtgacaaaatg

SEQ ID NO: 159640 - DNA, 25 bp, Probe sequence
aagcgcttagccattactatgattt

SEQ ID NO: 159641 - DNA, 25 bp, Probe sequence
aagttgctgggcttgattacggtgc

SEQ ID NO: 159642 - DNA, 25 bp, Probe sequence
aatggcttagaaatttgtcgcaaaa

SEQ ID NO: 159643 - DNA, 25 bp, Probe sequence
aatgtggacacagagtatgatggac

SEQ ID NO: 159644 - DNA, 25 bp, Probe sequence
aatgtcgtagatgtttatataagat

SEQ ID NO: 159645 - DNA, 25 bp, Probe sequence
aatctacacctatcattataattac

SEQ ID NO: 159646 - DNA, 25 bp, Probe sequence
gcaacgggaacaaattttaaatcat

SEQ ID NO: 159647 - DNA, 25 bp, Probe sequence
gctgggcttgattacggtgcagacg

SEQ ID NO: 159648 - DNA, 25 bp, Probe sequence
gcttagccattactatgatttaatc

SEQ ID NO: 159649 - DNA, 25 bp, Probe sequence
gaacaaaacttagcaagatttcttg

SEQ ID NO: 159650 - DNA, 25 bp, Probe sequence
gaaacagttcgtggcgttgggtatg

SEQ ID NO: 159651 - DNA, 25 bp, Probe sequence
gacaacaacaatctacacctatcat

SEQ ID NO: 159652 - DNA, 25 bp, Probe sequence
gacggtttagataaagcgcttagcc

SEQ ID NO: 159653 - DNA, 25 bp, Probe sequence
gagtatgatggacaagacggtttag

SEQ ID NO: 159654 - DNA, 25 bp, Probe sequence
gatacgtatgacaaagttgctgggc

SEQ ID NO: 159655 - DNA, 25 bp, Probe sequence
gataaagcgcttagccattactatg

SEQ ID NO: 159656 - DNA, 25 bp, Probe sequence
gatattgaagaacttttagcaagaa

SEQ ID NO: 159657 - DNA, 25 bp, Probe sequence
gatttcttgaattggaactcacaca

SEQ ID NO: 159658 - DNA, 25 bp, Probe sequence
gattgaaacagttcgtggcgttggg

SEQ ID NO: 159659 - DNA, 25 bp, Probe sequence
gttgccgtcaattaatggcttagaa

SEQ ID NO: 159660 - DNA, 25 bp, Probe sequence
gttcgtggcgttgggtatgtgatac

SEQ ID NO: 159661 - DNA, 25 bp, Probe sequence
gtgcagacgattatatagttaagcc

SEQ ID NO: 159662 - DNA, 25 bp, Probe sequence
gtgacggtaaatggcgcagaaattg

SEQ ID NO: 159663 - DNA, 25 bp, Probe sequence
gtggcgttgggtatgtgatacgatg

SEQ ID NO: 159664 - DNA, 25 bp, Probe sequence
ggaactcacacatgaaaattacaat

SEQ ID NO: 159665 - DNA, 25 bp, Probe sequence
ggcttgattacggtgcagacgatta

SEQ ID NO: 159666 - DNA, 25 bp, Probe sequence
taatgttgccgtcaattaatggctt

SEQ ID NO: 159667 - DNA, 25 bp, Probe sequence
ttaaagtgacggtaaatggcgcaga

SEQ ID NO: 159668 - DNA, 25 bp, Probe sequence
taaaaaccatgttatgcaacgggaa

SEQ ID NO: 159669 - DNA, 25 bp, Probe sequence
atattattgccggcattattggtgg

SEQ ID NO: 159670 - DNA, 25 bp, Probe sequence
atatcacgtgtatatctaggtgtac

SEQ ID NO: 159671 - DNA, 25 bp, Probe sequence
atctaggtgtacattatccaacaga

SEQ ID NO: 159672 - DNA, 25 bp, Probe sequence
atccaacagatattattgccggcat

SEQ ID NO: 159673 - DNA, 25 bp, Probe sequence
atgtgcagctatgattttattgatt

SEQ ID NO: 159674 - DNA, 25 bp, Probe sequence
agagaaagacctacattgctgcgtt

SEQ ID NO: 159675 - DNA, 25 bp, Probe sequence
acgacatctatcatgcttggggcta

SEQ ID NO: 159676 - DNA, 25 bp, Probe sequence
acgtatctctttgctcatcgttttt

SEQ ID NO: 159677 - DNA, 25 bp, Probe sequence
acattgctgcgtttaattgatataa

SEQ ID NO: 159678 - DNA, 25 bp, Probe sequence
aaagcgccacaaaattgaagcatta

SEQ ID NO: 159679 - DNA, 25 bp, Probe sequence
aagtaggtgaagtctgggcaatgtt

SEQ ID NO: 159680 - DNA, 25 bp, Probe sequence
aaggtattcttatagggttatgtgc

SEQ ID NO: 159681 - DNA, 25 bp, Probe sequence
aatggaaacgtatctctttgctcat

SEQ ID NO: 159682 - DNA, 25 bp, Probe sequence
aattgaagcattattttttgcatta

SEQ ID NO: 159683 - DNA, 25 bp, Probe sequence
catctatcatgcttggggctactaa

SEQ ID NO: 159684 - DNA, 25 bp, Probe sequence
cattggtttttggaattatcgcgtt

SEQ ID NO: 159685 - DNA, 25 bp, Probe sequence
gcggtcatgctatgggatcaactgc

SEQ ID NO: 159686 - DNA, 25 bp, Probe sequence
gcattattttatcaacgttattact

SEQ ID NO: 159687 - DNA, 25 bp, Probe sequence
gcatatctcatgttaaagcgccaca

SEQ ID NO: 159688 - DNA, 25 bp, Probe sequence
gaattatcgcgtttttccacgaatc

SEQ ID NO: 159689 - DNA, 25 bp, Probe sequence
gaaagacctacattgctgcgtttaa

SEQ ID NO: 159690 - DNA, 25 bp, Probe sequence
gacctacattgctgcgtttaattga

SEQ ID NO: 159691 - DNA, 25 bp, Probe sequence
gatttccatatcacgtgtatatcta

SEQ ID NO: 159692 - DNA, 25 bp, Probe sequence
gattttattgatttccatatcacgt

SEQ ID NO: 159693 - DNA, 25 bp, Probe sequence
gttttcctagcggtcatgctatggg

SEQ ID NO: 159694 - DNA, 25 bp, Probe sequence
gtatttcattacttcttgtggcata

SEQ ID NO: 159695 - DNA, 25 bp, Probe sequence
gtctgggcaatgttatgtatttcat

SEQ ID NO: 159696 - DNA, 25 bp, Probe sequence
gggatcaactgcatattttggaagt

SEQ ID NO: 159697 - DNA, 25 bp, Probe sequence
gggttatgtgcagctatgattttat

SEQ ID NO: 159698 - DNA, 25 bp, Probe sequence
ggatttagttttcctagcggtcatg

SEQ ID NO: 159699 - DNA, 25 bp, Probe sequence
ggaaacgtatctctttgctcatcgt

SEQ ID NO: 159700 - DNA, 25 bp, Probe sequence
tcgcgtttttccacgaatcaagact

SEQ ID NO: 159701 - DNA, 25 bp, Probe sequence
tcatgcttggggctactaaagtagg

SEQ ID NO: 159702 - DNA, 25 bp, Probe sequence
ttacttcttgtggcatatctcatgt

SEQ ID NO: 159703 - DNA, 25 bp, Probe sequence
attaagtattatcctatttcgagtg

SEQ ID NO: 159704 - DNA, 25 bp, Probe sequence
atataccaactattattcatgaatc

SEQ ID NO: 159705 - DNA, 25 bp, Probe sequence
atcgcatttaccggagggggaacag

SEQ ID NO: 159706 - DNA, 25 bp, Probe sequence
atcccgaggcgaccaaattgacaat

SEQ ID NO: 159707 - DNA, 25 bp, Probe sequence
atggtaatgcacataatggttatca

SEQ ID NO: 159708 - DNA, 25 bp, Probe sequence
aggattagcgaataagatagcactt

SEQ ID NO: 159709 - DNA, 25 bp, Probe sequence
acaacatttgaagaaacgctaaact

SEQ ID NO: 159710 - DNA, 25 bp, Probe sequence
aaaggtattcttgatgctcgtaaag

SEQ ID NO: 159711 - DNA, 25 bp, Probe sequence
aaacctgatctattattttcaaaag

SEQ ID NO: 159712 - DNA, 25 bp, Probe sequence
aatggttatcaattaacaggcttta

SEQ ID NO: 159713 - DNA, 25 bp, Probe sequence
aatagcattattcgcgaaaacttag

SEQ ID NO: 159714 - DNA, 25 bp, Probe sequence
caaaaggtggatttgtatctgtgcc

SEQ ID NO: 159715 - DNA, 25 bp, Probe sequence
ctgacttaacaccaggattagcgaa

SEQ ID NO: 159716 - DNA, 25 bp, Probe sequence
cgtataccaatgttattagtaccat

SEQ ID NO: 159717 - DNA, 25 bp, Probe sequence
ccaactgcattatcacaaggttatg

SEQ ID NO: 159718 - DNA, 25 bp, Probe sequence
gaaaacttagatgcattattacaac

SEQ ID NO: 159719 - DNA, 25 bp, Probe sequence
gacaatgcaaatcattttgctgata

SEQ ID NO: 159720 - DNA, 25 bp, Probe sequence
gacgaaaatcgcatttaccggaggg

SEQ ID NO: 159721 - DNA, 25 bp, Probe sequence
gagttcttaacattacgtataccaa

SEQ ID NO: 159722 - DNA, 25 bp, Probe sequence
gatagcacttaaatttgccaagaaa

SEQ ID NO: 159723 - DNA, 25 bp, Probe sequence
gattgaatcacaactaccagaaatt

SEQ ID NO: 159724 - DNA, 25 bp, Probe sequence
gttgttattgcagccaaatcattaa

SEQ ID NO: 159725 - DNA, 25 bp, Probe sequence
gttatgggtggaagcttaggaagta

SEQ ID NO: 159726 - DNA, 25 bp, Probe sequence
gtttaattccaactgcattatcaca

SEQ ID NO: 159727 - DNA, 25 bp, Probe sequence
gtattatcctatttcgagtggtaaa

SEQ ID NO: 159728 - DNA, 25 bp, Probe sequence
gtaccattaggtttagatcaatccc

SEQ ID NO: 159729 - DNA, 25 bp, Probe sequence
ggaacaggaaagaactcgaattatc

SEQ ID NO: 159730 - DNA, 25 bp, Probe sequence
gggggaacagttggacacgtatcag

SEQ ID NO: 159731 - DNA, 25 bp, Probe sequence
ggacacgtatcagtaaatttaagtt

SEQ ID NO: 159732 - DNA, 25 bp, Probe sequence
taacagatttattagcaattacgga

SEQ ID NO: 159733 - DNA, 25 bp, Probe sequence
tattcatgaatctgacttaacacca

SEQ ID NO: 159734 - DNA, 25 bp, Probe sequence
tttagatcaatcccgaggcgaccaa

SEQ ID NO: 159735 - DNA, 25 bp, Probe sequence
ttcttgatgctcgtaaagttttgaa

SEQ ID NO: 159736 - DNA, 25 bp, Probe sequence
ttggagcaacaattcgagaagattt

SEQ ID NO: 159737 - DNA, 25 bp, Probe sequence
attgttgtcgaccaagaccaagcag

SEQ ID NO: 159738 - DNA, 25 bp, Probe sequence
attcatcgattaactggttcgaaag

SEQ ID NO: 159739 - DNA, 25 bp, Probe sequence
atccgtctaggtaaaatgtcagatt

SEQ ID NO: 159740 - DNA, 25 bp, Probe sequence
atgataaaggtgaaccattttatgc

SEQ ID NO: 159741 - DNA, 25 bp, Probe sequence
atgatgacattgactggccagtaaa

SEQ ID NO: 159742 - DNA, 25 bp, Probe sequence
atgatccgtctaggtaaaatgtcag

SEQ ID NO: 159743 - DNA, 25 bp, Probe sequence
atggctttattgttgtcgaccaaga

SEQ ID NO: 159744 - DNA, 25 bp, Probe sequence
agattatttgtacgtattagaggaa

SEQ ID NO: 159745 - DNA, 25 bp, Probe sequence
acgagcaatgggacgatcagtaccc

SEQ ID NO: 159746 - DNA, 25 bp, Probe sequence
acaaacctgcacaaggtttatttgc

SEQ ID NO: 159747 - DNA, 25 bp, Probe sequence
aaatttggatttcataaggtcggtg

SEQ ID NO: 159748 - DNA, 25 bp, Probe sequence
aagcacgtggtgcagaagttatttt

SEQ ID NO: 159749 - DNA, 25 bp, Probe sequence
aagaatataaaggagctgctacaga

SEQ ID NO: 159750 - DNA, 25 bp, Probe sequence
aatgacaaaatttatggctttattg

SEQ ID NO: 159751 - DNA, 25 bp, Probe sequence
aatttatggctttattgttgtcgac

SEQ ID NO: 159752 - DNA, 25 bp, Probe sequence
cctttgcgttaaacaaacctgcaca

SEQ ID NO: 159753 - DNA, 25 bp, Probe sequence
gttgtcgaccaagaccaagcagaat

SEQ ID NO: 159754 - DNA, 25 bp, Probe sequence
gctttattgttgtcgaccaagacca

SEQ ID NO: 159755 - DNA, 25 bp, Probe sequence
gaacacgacaacgagcaatgggacg

SEQ ID NO: 159756 - DNA, 25 bp, Probe sequence
gaacattttgaagaagatattgcta

SEQ ID NO: 159757 - DNA, 25 bp, Probe sequence
gaaagaacacgacaacgagcaatgg

SEQ ID NO: 159758 - DNA, 25 bp, Probe sequence
gacacctttgcgttaaacaaacctg

SEQ ID NO: 159759 - DNA, 25 bp, Probe sequence
gacaacgagcaatgggacgatcagt

SEQ ID NO: 159760 - DNA, 25 bp, Probe sequence
gaccaagaccaagcagaatggtatg

SEQ ID NO: 159761 - DNA, 25 bp, Probe sequence
gatcaaatcttaaatctagtagaag

SEQ ID NO: 159762 - DNA, 25 bp, Probe sequence
gatattgctaaagattatttgtacg

SEQ ID NO: 159763 - DNA, 25 bp, Probe sequence
gtatgatgacattgactggccagta

SEQ ID NO: 159764 - DNA, 25 bp, Probe sequence
gtgaacaattaatggaatatccgcc

SEQ ID NO: 159765 - DNA, 25 bp, Probe sequence
ggatttcataaggtcggtgaacaat

SEQ ID NO: 159766 - DNA, 25 bp, Probe sequence
ggagctgctacagaattattcaatt

SEQ ID NO: 159767 - DNA, 25 bp, Probe sequence
ggaatatccgccatatgataaaggt

SEQ ID NO: 159768 - DNA, 25 bp, Probe sequence
tgttattcatcgattaactggttcg

SEQ ID NO: 159769 - DNA, 25 bp, Probe sequence
tgcgttaaacaaacctgcacaaggt

SEQ ID NO: 159770 - DNA, 25 bp, Probe sequence
ttgactggccagtaaatagagaagg

SEQ ID NO: 159771 - DNA, 25 bp, Probe sequence
attcatcgaaacgcgttcacttaaa

SEQ ID NO: 159772 - DNA, 25 bp, Probe sequence
ataaacatgatgatgttctcgataa

SEQ ID NO: 159773 - DNA, 25 bp, Probe sequence
atcacagttgttgcatatattttta

SEQ ID NO: 159774 - DNA, 25 bp, Probe sequence
atgaagctgttaaaatggcaaatat

SEQ ID NO: 159775 - DNA, 25 bp, Probe sequence
accagacgttactattgacacacct

SEQ ID NO: 159776 - DNA, 25 bp, Probe sequence
aaagctcacaaagatggtttgaaaa

SEQ ID NO: 159777 - DNA, 25 bp, Probe sequence
aaaatgatcaaattatggttactag

SEQ ID NO: 159778 - DNA, 25 bp, Probe sequence
aactaattcatcgaaacgcgttcac

SEQ ID NO: 159779 - DNA, 25 bp, Probe sequence
aaggtgtcgtacaaactacaagaga

SEQ ID NO: 159780 - DNA, 25 bp, Probe sequence
caggtgaattgaaagatgcagttct

SEQ ID NO: 159781 - DNA, 25 bp, Probe sequence
cgtcctaaagatgtcattactaaag

SEQ ID NO: 159782 - DNA, 25 bp, Probe sequence
ccagatggtcattatattcacggta

SEQ ID NO: 159783 - DNA, 25 bp, Probe sequence
gctgtcatcacagttgttgcatata

SEQ ID NO: 159784 - DNA, 25 bp, Probe sequence
gaaggtgtttcaggtgattttgtag

SEQ ID NO: 159785 - DNA, 25 bp, Probe sequence
gaagcgaaagacatggatatatcca

SEQ ID NO: 159786 - DNA, 25 bp, Probe sequence
gaaatggttaacgccagatggtcat

SEQ ID NO: 159787 - DNA, 25 bp, Probe sequence
gacacacctaaatatcaatctttaa

SEQ ID NO: 159788 - DNA, 25 bp, Probe sequence
gacgttactattgacacacctaaat

SEQ ID NO: 159789 - DNA, 25 bp, Probe sequence
gaggtaactggtgaatttaataaag

SEQ ID NO: 159790 - DNA, 25 bp, Probe sequence
gatactgaagcaattcaaacttcta

SEQ ID NO: 159791 - DNA, 25 bp, Probe sequence
gttaaagctttccaacaagcgaata

SEQ ID NO: 159792 - DNA, 25 bp, Probe sequence
ggtggactactagatgaagctgtta

SEQ ID NO: 159793 - DNA, 25 bp, Probe sequence
ggtgattttgtaggtattggtgcag

SEQ ID NO: 159794 - DNA, 25 bp, Probe sequence
ggcattaaaccagacgttactattg

SEQ ID NO: 159795 - DNA, 25 bp, Probe sequence
ggatatatccatcttagtgaatgaa

SEQ ID NO: 159796 - DNA, 25 bp, Probe sequence
tgtcattcctaatacgaaaacattt

SEQ ID NO: 159797 - DNA, 25 bp, Probe sequence
tcatccgatgatgaacgcgctgaaa

SEQ ID NO: 159798 - DNA, 25 bp, Probe sequence
taacagctgtcatcacagttgttgc

SEQ ID NO: 159799 - DNA, 25 bp, Probe sequence
taaaagatccttattctgaatattt

SEQ ID NO: 159800 - DNA, 25 bp, Probe sequence
taaaacgttggcaattcatatcaat

SEQ ID NO: 159801 - DNA, 25 bp, Probe sequence
taaattccagaatgatacatcaggt

SEQ ID NO: 159802 - DNA, 25 bp, Probe sequence
tatcaatctttaaatgtcattccta

SEQ ID NO: 159803 - DNA, 25 bp, Probe sequence
ttcacttaaaacgttggcaattcat

SEQ ID NO: 159804 - DNA, 25 bp, Probe sequence
ttgtaggtattggtgcagaaatgca

SEQ ID NO: 159805 - DNA, 25 bp, Probe sequence
ataccacaaattatgcctgcctttc

SEQ ID NO: 159806 - DNA, 25 bp, Probe sequence
actggggctaattggggctggtggt

SEQ ID NO: 159807 - DNA, 25 bp, Probe sequence
atcaaagctgttggcccaggttcat

SEQ ID NO: 159808 - DNA, 25 bp, Probe sequence
atcagctatatctatataccagatg

SEQ ID NO: 159809 - DNA, 25 bp, Probe sequence
atcgccgcaattatctgtattccat

SEQ ID NO: 159810 - DNA, 25 bp, Probe sequence
atgttcacacaaaagcacacaaacg

SEQ ID NO: 159811 - DNA, 25 bp, Probe sequence
atggcacttatatttatcaaagctg

SEQ ID NO: 159812 - DNA, 25 bp, Probe sequence
agccgttgtaggtactttcatcgcc

SEQ ID NO: 159813 - DNA, 25 bp, Probe sequence
acgtgtcttcccagaaattgtaatg

SEQ ID NO: 159814 - DNA, 25 bp, Probe sequence
accagatggcgaagacttattacgt

SEQ ID NO: 159815 - DNA, 25 bp, Probe sequence
acgttcagcttctatactggggcta

SEQ ID NO: 159816 - DNA, 25 bp, Probe sequence
acactcgtatttgcagtcataccac

SEQ ID NO: 159817 - DNA, 25 bp, Probe sequence
acaccactcatatttgccattcaaa

SEQ ID NO: 159818 - DNA, 25 bp, Probe sequence
aactaaacttacgttcagcttctat

SEQ ID NO: 159819 - DNA, 25 bp, Probe sequence
aagtgttatacgtgtcttcccagaa

SEQ ID NO: 159820 - DNA, 25 bp, Probe sequence
aattatctgtattccattagcattt

SEQ ID NO: 159821 - DNA, 25 bp, Probe sequence
ctcatactttatcgctttgaactaa

SEQ ID NO: 159822 - DNA, 25 bp, Probe sequence
gccattcaaacacgttcttgggacc

SEQ ID NO: 159823 - DNA, 25 bp, Probe sequence
gcccaggttcattttcaggtgtatt

SEQ ID NO: 159824 - DNA, 25 bp, Probe sequence
gaatcattaaaggccagtggtgcga

SEQ ID NO: 159825 - DNA, 25 bp, Probe sequence
gaaacctttgcgatagccgttgtag

SEQ ID NO: 159826 - DNA, 25 bp, Probe sequence
gaaatcttaaaatccatattcagcg

SEQ ID NO: 159827 - DNA, 25 bp, Probe sequence
gttcttgggaccgtgtaggtattat

SEQ ID NO: 159828 - DNA, 25 bp, Probe sequence
gtttacttgaaacctttgcgatagc

SEQ ID NO: 159829 - DNA, 25 bp, Probe sequence
gtttcaggtgttagcaaatttattt

SEQ ID NO: 159830 - DNA, 25 bp, Probe sequence
gtaggtatgcttgggaaacttttag

SEQ ID NO: 159831 - DNA, 25 bp, Probe sequence
gtactttcatcgccgcaattatctg

SEQ ID NO: 159832 - DNA, 25 bp, Probe sequence
gtcttagctattatcatctgggcat

SEQ ID NO: 159833 - DNA, 25 bp, Probe sequence
gtgtattagctttaggtatccattc

SEQ ID NO: 159834 - DNA, 25 bp, Probe sequence
ggctggtggtatcgggacaccactc

SEQ ID NO: 159835 - DNA, 25 bp, Probe sequence
ggtttagtactaatggtcgcaattg

SEQ ID NO: 159836 - DNA, 25 bp, Probe sequence
tgcaggtgtaccaagtttagaactt

SEQ ID NO: 159837 - DNA, 25 bp, Probe sequence
tcatctgggcatttgcaggtgtacc

SEQ ID NO: 159838 - DNA, 25 bp, Probe sequence
tattcagcggattattccatcctga

SEQ ID NO: 159839 - DNA, 25 bp, Probe sequence
attgagacacatggtgatttcacat

SEQ ID NO: 159840 - DNA, 25 bp, Probe sequence
attgccaatgtctgtatttgatgat

SEQ ID NO: 159841 - DNA, 25 bp, Probe sequence
attcgttttatcaatttgtcatgac

SEQ ID NO: 159842 - DNA, 25 bp, Probe sequence
atttgacgatcttgctttcccaaaa

SEQ ID NO: 159843 - DNA, 25 bp, Probe sequence
atatttgacgatcttgctttcccaa

SEQ ID NO: 159844 - DNA, 25 bp, Probe sequence
atgaagaatatacggaatggctaaa

SEQ ID NO: 159845 - DNA, 25 bp, Probe sequence
atggtgatttcacattgccaatgtc

SEQ ID NO: 159846 - DNA, 25 bp, Probe sequence
acattgccaatgtctgtatttgatg

SEQ ID NO: 159847 - DNA, 25 bp, Probe sequence
aaaggtcgtctagcagaagagatat

SEQ ID NO: 159848 - DNA, 25 bp, Probe sequence
aactattcgttttatcaatttgtca

SEQ ID NO: 159849 - DNA, 25 bp, Probe sequence
cacatggtgatttcacattgccaat

SEQ ID NO: 159850 - DNA, 25 bp, Probe sequence
cttgctttcccaaaacacgatgatg

SEQ ID NO: 159851 - DNA, 25 bp, Probe sequence
ctattcgttttatcaatttgtcatg

SEQ ID NO: 159852 - DNA, 25 bp, Probe sequence
cgataaaggtcgtctagcagaagag

SEQ ID NO: 159853 - DNA, 25 bp, Probe sequence
cgttttatcaatttgtcatgacagt

SEQ ID NO: 159854 - DNA, 25 bp, Probe sequence
cgatcttgctttcccaaaacacgat

SEQ ID NO: 159855 - DNA, 25 bp, Probe sequence
gctttcccaaaacacgatgatgatt

SEQ ID NO: 159856 - DNA, 25 bp, Probe sequence
gaatatacggaatggctaaaatttt

SEQ ID NO: 159857 - DNA, 25 bp, Probe sequence
gacacgacgataaaggtcgtctagc

SEQ ID NO: 159858 - DNA, 25 bp, Probe sequence
gacacatggtgatttcacattgcca

SEQ ID NO: 159859 - DNA, 25 bp, Probe sequence
gatgattttaacatactgtctgatt

SEQ ID NO: 159860 - DNA, 25 bp, Probe sequence
gatcttgctttcccaaaacacgatg

SEQ ID NO: 159861 - DNA, 25 bp, Probe sequence
gatatttgacgatcttgctttccca

SEQ ID NO: 159862 - DNA, 25 bp, Probe sequence
gatttcacattgccaatgtctgtat

SEQ ID NO: 159863 - DNA, 25 bp, Probe sequence
gattttaacatactgtctgattata

SEQ ID NO: 159864 - DNA, 25 bp, Probe sequence
gtgatttcacattgccaatgtctgt

SEQ ID NO: 159865 - DNA, 25 bp, Probe sequence
gtggtcgacacgacgataaaggtcg

SEQ ID NO: 159866 - DNA, 25 bp, Probe sequence
ggtcgtctagcagaagagatatttg

SEQ ID NO: 159867 - DNA, 25 bp, Probe sequence
tttgacgatcttgctttcccaaaac

SEQ ID NO: 159868 - DNA, 25 bp, Probe sequence
tcttgctttcccaaaacacgatgat

SEQ ID NO: 159869 - DNA, 25 bp, Probe sequence
taacatactgtctgattatattgag

SEQ ID NO: 159870 - DNA, 25 bp, Probe sequence
tatttgacgatcttgctttcccaaa

SEQ ID NO: 159871 - DNA, 25 bp, Probe sequence
ttcccaaaacacgatgatgatttta

SEQ ID NO: 159872 - DNA, 25 bp, Probe sequence
ttgctttcccaaaacacgatgatga

SEQ ID NO: 159873 - DNA, 25 bp, Probe sequence
attagttcatatcggtttagacaca

SEQ ID NO: 159874 - DNA, 25 bp, Probe sequence
atttcaccaattataattactaaca

SEQ ID NO: 159875 - DNA, 25 bp, Probe sequence
atatcggtttagacacagttcaatt

SEQ ID NO: 159876 - DNA, 25 bp, Probe sequence
atcgcaatttatgcaccattaactg

SEQ ID NO: 159877 - DNA, 25 bp, Probe sequence
agacacagttcaattagacggtgaa

SEQ ID NO: 159878 - DNA, 25 bp, Probe sequence
agaagttcagaaagatatcgcaatt

SEQ ID NO: 159879 - DNA, 25 bp, Probe sequence
agaattattagttcatatcggttta

SEQ ID NO: 159880 - DNA, 25 bp, Probe sequence
acaatgtctttccaactaagcatgc

SEQ ID NO: 159881 - DNA, 25 bp, Probe sequence
aaattgaagatattccagatcctgt

SEQ ID NO: 159882 - DNA, 25 bp, Probe sequence
aagatatcgcaatttatgcaccatt

SEQ ID NO: 159883 - DNA, 25 bp, Probe sequence
aagtgattgatgtgacaatgaacta

SEQ ID NO: 159884 - DNA, 25 bp, Probe sequence
cagatcctgtattcgcacaaaaaat

SEQ ID NO: 159885 - DNA, 25 bp, Probe sequence
gcaggacgtgttgacaatgtctttc

SEQ ID NO: 159886 - DNA, 25 bp, Probe sequence
gaagttaacgtcggagatccattag

SEQ ID NO: 159887 - DNA, 25 bp, Probe sequence
gaagttgtgtctccaattgcaggac

SEQ ID NO: 159888 - DNA, 25 bp, Probe sequence
gaaaatgctgtgattaaaggtgaaa

SEQ ID NO: 159889 - DNA, 25 bp, Probe sequence
gacggtgaaggatttgaagtgttag

SEQ ID NO: 159890 - DNA, 25 bp, Probe sequence
gacgtgttgacaatgtctttccaac

SEQ ID NO: 159891 - DNA, 25 bp, Probe sequence
gatccattagtaagattcaaccttg

SEQ ID NO: 159892 - DNA, 25 bp, Probe sequence
gatattccagatcctgtattcgcac

SEQ ID NO: 159893 - DNA, 25 bp, Probe sequence
gttgtgtctccaattgcaggacgtg

SEQ ID NO: 159894 - DNA, 25 bp, Probe sequence
gttaacgtcggagatccattagtaa

SEQ ID NO: 159895 - DNA, 25 bp, Probe sequence
gttcatatcggtttagacacagttc

SEQ ID NO: 159896 - DNA, 25 bp, Probe sequence
gtttagacacagttcaattagacgg

SEQ ID NO: 159897 - DNA, 25 bp, Probe sequence
gtctccaattgcaggacgtgttgac

SEQ ID NO: 159898 - DNA, 25 bp, Probe sequence
gtcggagatccattagtaagattca

SEQ ID NO: 159899 - DNA, 25 bp, Probe sequence
gtgtctccaattgcaggacgtgttg

SEQ ID NO: 159900 - DNA, 25 bp, Probe sequence
ggatttgaagtgttagtgtctagtg

SEQ ID NO: 159901 - DNA, 25 bp, Probe sequence
tgtattcgcacaaaaaatgatgggc

SEQ ID NO: 159902 - DNA, 25 bp, Probe sequence
tattccagatcctgtattcgcacaa

SEQ ID NO: 159903 - DNA, 25 bp, Probe sequence
ttataattactaacactgatcaagc

SEQ ID NO: 159904 - DNA, 25 bp, Probe sequence
ttgacaatgtctttccaactaagca

SEQ ID NO: 159905 - DNA, 25 bp, Probe sequence
ttccagatcctgtattcgcacaaaa

SEQ ID NO: 159906 - DNA, 25 bp, Probe sequence
ttgaagtgttagtgtctagtggtga

SEQ ID NO: 159907 - DNA, 25 bp, Probe sequence
attagtcgacaaatcatttggtatg

SEQ ID NO: 159908 - DNA, 25 bp, Probe sequence
atggcgatttaatatcacattttga

SEQ ID NO: 159909 - DNA, 25 bp, Probe sequence
agtggcggcttaagatactgtatca

SEQ ID NO: 159910 - DNA, 25 bp, Probe sequence
agaagaattgggttatggcgattta

SEQ ID NO: 159911 - DNA, 25 bp, Probe sequence
actgaaccaccatttatgaatgaat

SEQ ID NO: 159912 - DNA, 25 bp, Probe sequence
acatctgaagaaaagtttcattctg

SEQ ID NO: 159913 - DNA, 25 bp, Probe sequence
aaagcgcttgatgacgatgaaatta

SEQ ID NO: 159914 - DNA, 25 bp, Probe sequence
aagcgcttgatgacgatgaaattat

SEQ ID NO: 159915 - DNA, 25 bp, Probe sequence
aagaattgggttatggcgatttaat

SEQ ID NO: 159916 - DNA, 25 bp, Probe sequence
aagaaagtggcggcttaagatactg

SEQ ID NO: 159917 - DNA, 25 bp, Probe sequence
aagtggcggcttaagatactgtatc

SEQ ID NO: 159918 - DNA, 25 bp, Probe sequence
aatattggaatcattttgctaaagg

SEQ ID NO: 159919 - DNA, 25 bp, Probe sequence
aattgggttatggcgatttaatatc

SEQ ID NO: 159920 - DNA, 25 bp, Probe sequence
gcgcttgatgacgatgaaattatag

SEQ ID NO: 159921 - DNA, 25 bp, Probe sequence
gcttgatgacgatgaaattatagaa

SEQ ID NO: 159922 - DNA, 25 bp, Probe sequence
gcactgaaccaccatttatgaatga

SEQ ID NO: 159923 - DNA, 25 bp, Probe sequence
gaagtgcgttcagaagaatcaaata

SEQ ID NO: 159924 - DNA, 25 bp, Probe sequence
gaagaatcaaatagtcatttaggac

SEQ ID NO: 159925 - DNA, 25 bp, Probe sequence
gaaccaccatttatgaatgaatatt

SEQ ID NO: 159926 - DNA, 25 bp, Probe sequence
gaactgaagtgcgttcagaagaatc

SEQ ID NO: 159927 - DNA, 25 bp, Probe sequence
gaaagtggcggcttaagatactgta

SEQ ID NO: 159928 - DNA, 25 bp, Probe sequence
gttatggcgatttaatatcacattt

SEQ ID NO: 159929 - DNA, 25 bp, Probe sequence
gtgcgttcagaagaatcaaatagtc

SEQ ID NO: 159930 - DNA, 25 bp, Probe sequence
gtggcggcttaagatactgtatcaa

SEQ ID NO: 159931 - DNA, 25 bp, Probe sequence
gggttatggcgatttaatatcacat

SEQ ID NO: 159932 - DNA, 25 bp, Probe sequence
ggtaaacctttatttacatctgaag

SEQ ID NO: 159933 - DNA, 25 bp, Probe sequence
ggcttaagatactgtatcaattccg

SEQ ID NO: 159934 - DNA, 25 bp, Probe sequence
ggcactgaaccaccatttatgaatg

SEQ ID NO: 159935 - DNA, 25 bp, Probe sequence
tggcgatttaatatcacattttgat

SEQ ID NO: 159936 - DNA, 25 bp, Probe sequence
tggcggcttaagatactgtatcaat

SEQ ID NO: 159937 - DNA, 25 bp, Probe sequence
tgaatattggaatcattttgctaaa

SEQ ID NO: 159938 - DNA, 25 bp, Probe sequence
tctggtaaacctttatttacatctg

SEQ ID NO: 159939 - DNA, 25 bp, Probe sequence
taaacctttatttacatctgaagaa

SEQ ID NO: 159940 - DNA, 25 bp, Probe sequence
tagaattagtcgacaaatcatttgg

SEQ ID NO: 159941 - DNA, 25 bp, Probe sequence
atttctatccagctgaagactacca

SEQ ID NO: 159942 - DNA, 25 bp, Probe sequence
atccaggcatcaagtcagtcgtatc

SEQ ID NO: 159943 - DNA, 25 bp, Probe sequence
aggatgtttctggtgcatggttaaa

SEQ ID NO: 159944 - DNA, 25 bp, Probe sequence
acgtttgatccagaggttacttcct

SEQ ID NO: 159945 - DNA, 25 bp, Probe sequence
agcagtacaaattacgtttgatcca

SEQ ID NO: 159946 - DNA, 25 bp, Probe sequence
accatataaaaatttctatccagct

SEQ ID NO: 159947 - DNA, 25 bp, Probe sequence
aaccggccatgtcgaagcagtacaa

SEQ ID NO: 159948 - DNA, 25 bp, Probe sequence
aagcgtttatagaatcacattgggg

SEQ ID NO: 159949 - DNA, 25 bp, Probe sequence
aagaaaccagtgattacacctatta

SEQ ID NO: 159950 - DNA, 25 bp, Probe sequence
caagggcaatttttcgatagaggcg

SEQ ID NO: 159951 - DNA, 25 bp, Probe sequence
catatccaggcatcaagtcagtcgt

SEQ ID NO: 159952 - DNA, 25 bp, Probe sequence
ccatttacatcatatccaggcatca

SEQ ID NO: 159953 - DNA, 25 bp, Probe sequence
gctgaagactaccatcaagattatt

SEQ ID NO: 159954 - DNA, 25 bp, Probe sequence
gctatcaaccagtcattttctatca

SEQ ID NO: 159955 - DNA, 25 bp, Probe sequence
gcaggaggatgtttctggtgcatgg

SEQ ID NO: 159956 - DNA, 25 bp, Probe sequence
gaatatgcaacattagcaggaggat

SEQ ID NO: 159957 - DNA, 25 bp, Probe sequence
gaacccggtacattattaccaatat

SEQ ID NO: 159958 - DNA, 25 bp, Probe sequence
gaacaaggtattttcaagaaaccag

SEQ ID NO: 159959 - DNA, 25 bp, Probe sequence
gaaaaaggctgctgagtttaaaaag

SEQ ID NO: 159960 - DNA, 25 bp, Probe sequence
gaggttacttcctttgaaaatatat

SEQ ID NO: 159961 - DNA, 25 bp, Probe sequence
gaggcgaaagctatcaaccagtcat

SEQ ID NO: 159962 - DNA, 25 bp, Probe sequence
gatgatcaagggcaatttttcgata

SEQ ID NO: 159963 - DNA, 25 bp, Probe sequence
gatccagaggttacttcctttgaaa

SEQ ID NO: 159964 - DNA, 25 bp, Probe sequence
gtttctggtgcatggttaaaccatt

SEQ ID NO: 159965 - DNA, 25 bp, Probe sequence
gtatctggttatagtggcggtcatg

SEQ ID NO: 159966 - DNA, 25 bp, Probe sequence
gtggttcaggtagaaaagcgtttat

SEQ ID NO: 159967 - DNA, 25 bp, Probe sequence
gtcgtatctggttatagtggcggtc

SEQ ID NO: 159968 - DNA, 25 bp, Probe sequence
gtgattacacctattaaaccatata

SEQ ID NO: 159969 - DNA, 25 bp, Probe sequence
ggcatcaagtcagtcgtatctggtt

SEQ ID NO: 159970 - DNA, 25 bp, Probe sequence
tcaaccagtcattttctatcatgat

SEQ ID NO: 159971 - DNA, 25 bp, Probe sequence
taaaccatttacatcatatccaggc

SEQ ID NO: 159972 - DNA, 25 bp, Probe sequence
tatccagctgaagactaccatcaag

SEQ ID NO: 159973 - DNA, 25 bp, Probe sequence
tatatttcaaaacatttgacccaac

SEQ ID NO: 159974 - DNA, 25 bp, Probe sequence
ttaccaatatcaacgtggttcaggt

SEQ ID NO: 159975 - DNA, 25 bp, Probe sequence
agggtatcaaatacaacacctagta

SEQ ID NO: 159976 - DNA, 25 bp, Probe sequence
actggtcaaggtgcgattggcctcg

SEQ ID NO: 159977 - DNA, 25 bp, Probe sequence
aacagactcaacatccgatttatct

SEQ ID NO: 159978 - DNA, 25 bp, Probe sequence
aagtttaactattgaaggagcttca

SEQ ID NO: 159979 - DNA, 25 bp, Probe sequence
aaggtgtctcaacttctgaaatagt

SEQ ID NO: 159980 - DNA, 25 bp, Probe sequence
aaggtttgattggtaatcttatgaa

SEQ ID NO: 159981 - DNA, 25 bp, Probe sequence
aattgctgaatttataggagatcat

SEQ ID NO: 159982 - DNA, 25 bp, Probe sequence
caacacctagtagagcttgtaaaag

SEQ ID NO: 159983 - DNA, 25 bp, Probe sequence
cgattggcctcgtagtccttaagaa

SEQ ID NO: 159984 - DNA, 25 bp, Probe sequence
gcttgtgcacaatgcgagaactcaa

SEQ ID NO: 159985 - DNA, 25 bp, Probe sequence
gaactcaaaattctagtatccaata

SEQ ID NO: 159986 - DNA, 25 bp, Probe sequence
gacaagtcagccagccataggtgaa

SEQ ID NO: 159987 - DNA, 25 bp, Probe sequence
gactcaacatccgatttatctaaag

SEQ ID NO: 159988 - DNA, 25 bp, Probe sequence
gagcttgtaaaagaaggtgtctcaa

SEQ ID NO: 159989 - DNA, 25 bp, Probe sequence
gatggtcgcttagagcttgtgcaca

SEQ ID NO: 159990 - DNA, 25 bp, Probe sequence
gatgtaaagacaagtcagccagcca

SEQ ID NO: 159991 - DNA, 25 bp, Probe sequence
gatgatggtcgcttagagcttgtgc

SEQ ID NO: 159992 - DNA, 25 bp, Probe sequence
gttatttctgcacatactggtcaag

SEQ ID NO: 159993 - DNA, 25 bp, Probe sequence
gtagttatagggcaattgaatcaat

SEQ ID NO: 159994 - DNA, 25 bp, Probe sequence
gtaactacaccagttatttctgcac

SEQ ID NO: 159995 - DNA, 25 bp, Probe sequence
gtcagccagccataggtgaatttat

SEQ ID NO: 159996 - DNA, 25 bp, Probe sequence
gtcgcttagagcttgtgcacaatgc

SEQ ID NO: 159997 - DNA, 25 bp, Probe sequence
gtcgcacatgctaacgtcattgaat

SEQ ID NO: 159998 - DNA, 25 bp, Probe sequence
ggtagatgctaatgtaactgttatt

SEQ ID NO: 159999 - DNA, 25 bp, Probe sequence
tggcctcgtagtccttaagaagtaa

SEQ ID NO: 160000 - DNA, 25 bp, Probe sequence
tgctaacgtcattgaatatgttgat

SEQ ID NO: 160001 - DNA, 25 bp, Probe sequence
tcaaggtgcgattggcctcgtagtc

SEQ ID NO: 160002 - DNA, 25 bp, Probe sequence
taacactgcttaccaagcaagtcaa

SEQ ID NO: 160003 - DNA, 25 bp, Probe sequence
tacaccagttatttctgcacatact

SEQ ID NO: 160004 - DNA, 25 bp, Probe sequence
tagtaacagactcaacatccgattt

SEQ ID NO: 160005 - DNA, 25 bp, Probe sequence
taggtgaatttatatctgcttatga

SEQ ID NO: 160006 - DNA, 25 bp, Probe sequence
tatatctgcttatgaagaactagga

SEQ ID NO: 160007 - DNA, 25 bp, Probe sequence
tattgattcaaaatctatttctttt

SEQ ID NO: 160008 - DNA, 25 bp, Probe sequence
ttggtgtcgcacatgctaacgtcat

SEQ ID NO: 160009 - DNA, 25 bp, Probe sequence
attccacatacctttctacatttaa

SEQ ID NO: 160010 - DNA, 25 bp, Probe sequence
atgactttatccattctagttgcac

SEQ ID NO: 160011 - DNA, 25 bp, Probe sequence
agatatttaccaactaccgggccat

SEQ ID NO: 160012 - DNA, 25 bp, Probe sequence
acaattccacatacctttctacatt

SEQ ID NO: 160013 - DNA, 25 bp, Probe sequence
aaattatcaacaggtcatactttag

SEQ ID NO: 160014 - DNA, 25 bp, Probe sequence
aaccactaccgaatcgtcgaaatgt

SEQ ID NO: 160015 - DNA, 25 bp, Probe sequence
aagactgggaagttgcctcttcagt

SEQ ID NO: 160016 - DNA, 25 bp, Probe sequence
aatacaattccacatacctttctac

SEQ ID NO: 160017 - DNA, 25 bp, Probe sequence
cacatacctttctacatttaattcg

SEQ ID NO: 160018 - DNA, 25 bp, Probe sequence
caccttatacatttgaagactggga

SEQ ID NO: 160019 - DNA, 25 bp, Probe sequence
catgtatattactgttattgaaggt

SEQ ID NO: 160020 - DNA, 25 bp, Probe sequence
catacctttctacatttaattcgta

SEQ ID NO: 160021 - DNA, 25 bp, Probe sequence
catactttagtaatgggtcgtaaga

SEQ ID NO: 160022 - DNA, 25 bp, Probe sequence
ctttccaccttatacatttgaagac

SEQ ID NO: 160023 - DNA, 25 bp, Probe sequence
cgtggtgatacgttctttccacctt

SEQ ID NO: 160024 - DNA, 25 bp, Probe sequence
cgttctttccaccttatacatttga

SEQ ID NO: 160025 - DNA, 25 bp, Probe sequence
gcacatgacttgcaacgagtaattg

SEQ ID NO: 160026 - DNA, 25 bp, Probe sequence
gaatcgattggtaaaccactaccga

SEQ ID NO: 160027 - DNA, 25 bp, Probe sequence
gaatcgtcgaaatgttgtacttact

SEQ ID NO: 160028 - DNA, 25 bp, Probe sequence
gaaatgttgtacttacttcagatac

SEQ ID NO: 160029 - DNA, 25 bp, Probe sequence
gaaatgattgataaagtggacgaca

SEQ ID NO: 160030 - DNA, 25 bp, Probe sequence
gactgggaagttgcctcttcagttg

SEQ ID NO: 160031 - DNA, 25 bp, Probe sequence
gacttgcaacgagtaattggttttg

SEQ ID NO: 160032 - DNA, 25 bp, Probe sequence
gactttatccattctagttgcacat

SEQ ID NO: 160033 - DNA, 25 bp, Probe sequence
gttgcctcttcagttgaaggtaaac

SEQ ID NO: 160034 - DNA, 25 bp, Probe sequence
gtggacgacatgtatattactgtta

SEQ ID NO: 160035 - DNA, 25 bp, Probe sequence
gggtcgtaagacatttgaatcgatt

SEQ ID NO: 160036 - DNA, 25 bp, Probe sequence
ggtgatacgttctttccaccttata

SEQ ID NO: 160037 - DNA, 25 bp, Probe sequence
tggtaaaccactaccgaatcgtcga

SEQ ID NO: 160038 - DNA, 25 bp, Probe sequence
ggaagttgcctcttcagttgaaggt

SEQ ID NO: 160039 - DNA, 25 bp, Probe sequence
tccattctagttgcacatgacttgc

SEQ ID NO: 160040 - DNA, 25 bp, Probe sequence
tacttcagatacaagtttcaacgta

SEQ ID NO: 160041 - DNA, 25 bp, Probe sequence
tatccattctagttgcacatgactt

SEQ ID NO: 160042 - DNA, 25 bp, Probe sequence
tatcaacaggtcatactttagtaat

SEQ ID NO: 160043 - DNA, 25 bp, Probe sequence
atatcgcaagctacgctttattgac

SEQ ID NO: 160044 - DNA, 25 bp, Probe sequence
atcacatccagcaataaaagctcca

SEQ ID NO: 160045 - DNA, 25 bp, Probe sequence
atcgtatctgcatggaatccaacag

SEQ ID NO: 160046 - DNA, 25 bp, Probe sequence
atgacagatttcgggcatcgtgcat

SEQ ID NO: 160047 - DNA, 25 bp, Probe sequence
atgttgaattcatttgatgcagcat

SEQ ID NO: 160048 - DNA, 25 bp, Probe sequence
agatggtaagttaagttgccagtta

SEQ ID NO: 160049 - DNA, 25 bp, Probe sequence
agcacgtgaaagcttcaatcctcca

SEQ ID NO: 160050 - DNA, 25 bp, Probe sequence
accaacgtagcgcagatatcttttt

SEQ ID NO: 160051 - DNA, 25 bp, Probe sequence
aaattgatacaatggcacttccgcc

SEQ ID NO: 160052 - DNA, 25 bp, Probe sequence
aaagcttcaatcctccaacattaaa

SEQ ID NO: 160053 - DNA, 25 bp, Probe sequence
aataaaagctccaatagcagtgtag

SEQ ID NO: 160054 - DNA, 25 bp, Probe sequence
caccttattgccaaagaatgtggac

SEQ ID NO: 160055 - DNA, 25 bp, Probe sequence
cagatatctttttaggtgtgccatt

SEQ ID NO: 160056 - DNA, 25 bp, Probe sequence
gaaacaatttaagcaacgtattctt

SEQ ID NO: 160057 - DNA, 25 bp, Probe sequence
gaaatgatcgcacaaatacaggtac

SEQ ID NO: 160058 - DNA, 25 bp, Probe sequence
gaaatttggtcatcaacttcgcttt

SEQ ID NO: 160059 - DNA, 25 bp, Probe sequence
gacacatcgtatctgcatggaatcc

SEQ ID NO: 160060 - DNA, 25 bp, Probe sequence
gagtgatcctgaatttaacgaacaa

SEQ ID NO: 160061 - DNA, 25 bp, Probe sequence
gatggtaatcattttgatcaactta

SEQ ID NO: 160062 - DNA, 25 bp, Probe sequence
gatgcagcatatcacagtctttgtg

SEQ ID NO: 160063 - DNA, 25 bp, Probe sequence
gatgcgattcaaacacaattagcac

SEQ ID NO: 160064 - DNA, 25 bp, Probe sequence
gttgactatgaatcacatccagcaa

SEQ ID NO: 160065 - DNA, 25 bp, Probe sequence
gggcatcgtgcattgagtgatcctg

SEQ ID NO: 160066 - DNA, 25 bp, Probe sequence
ggtgtgccatttaatatcgcaagct

SEQ ID NO: 160067 - DNA, 25 bp, Probe sequence
ggtccagatatgacagatttcgggc

SEQ ID NO: 160068 - DNA, 25 bp, Probe sequence
ggtcatcaacttcgctttgacttat

SEQ ID NO: 160069 - DNA, 25 bp, Probe sequence
ggtacgatttcgaaatttggtcatc

SEQ ID NO: 160070 - DNA, 25 bp, Probe sequence
ggatttccactattaacgacaaaga

SEQ ID NO: 160071 - DNA, 25 bp, Probe sequence
ggcgagattgggttgataaagatgg

SEQ ID NO: 160072 - DNA, 25 bp, Probe sequence
tgacttatctaaaggatttccacta

SEQ ID NO: 160073 - DNA, 25 bp, Probe sequence
tcaacttcgctttgacttatctaaa

SEQ ID NO: 160074 - DNA, 25 bp, Probe sequence
taagcaacgtattcttgaagatgat

SEQ ID NO: 160075 - DNA, 25 bp, Probe sequence
ttgatacaatggcacttccgccttg

SEQ ID NO: 160076 - DNA, 25 bp, Probe sequence
ttgccagttataccaacgtagcgca

SEQ ID NO: 160077 - DNA, 25 bp, Probe sequence
attaatgacattgcaatggacttaa

SEQ ID NO: 160078 - DNA, 25 bp, Probe sequence
atacagttacagtttttgctgggca

SEQ ID NO: 160079 - DNA, 25 bp, Probe sequence
atgaatgcatatgatgcttatatga

SEQ ID NO: 160080 - DNA, 25 bp, Probe sequence
aggtagagatattaatgacattgca

SEQ ID NO: 160081 - DNA, 25 bp, Probe sequence
agttattaactctacatgcggctgt

SEQ ID NO: 160082 - DNA, 25 bp, Probe sequence
acatagacctacaaatacagttaca

SEQ ID NO: 160083 - DNA, 25 bp, Probe sequence
acaaatgcgtggcgaattaactcaa

SEQ ID NO: 160084 - DNA, 25 bp, Probe sequence
aatgctgatgacactacttttgtag

SEQ ID NO: 160085 - DNA, 25 bp, Probe sequence
ctctacatgcggctgtgcagctgga

SEQ ID NO: 160086 - DNA, 25 bp, Probe sequence
ccttcgtatgctttattcaaaggtc

SEQ ID NO: 160087 - DNA, 25 bp, Probe sequence
ccatctagtccttcgtatgctttat

SEQ ID NO: 160088 - DNA, 25 bp, Probe sequence
gcgtggcgaattaactcaaaatggt

SEQ ID NO: 160089 - DNA, 25 bp, Probe sequence
gcggctgtgcagctggattagcaag

SEQ ID NO: 160090 - DNA, 25 bp, Probe sequence
gctgtgcagctggattagcaagacc

SEQ ID NO: 160091 - DNA, 25 bp, Probe sequence
gctacaatgcgagaattcattcagc

SEQ ID NO: 160092 - DNA, 25 bp, Probe sequence
gcaactgctacaatgcgagaattca

SEQ ID NO: 160093 - DNA, 25 bp, Probe sequence
gcaacacaaaatgaacatagaccta

SEQ ID NO: 160094 - DNA, 25 bp, Probe sequence
gcaatggacttaaaggatgcctttg

SEQ ID NO: 160095 - DNA, 25 bp, Probe sequence
gaagcaactgctacaatgcgagaat

SEQ ID NO: 160096 - DNA, 25 bp, Probe sequence
gaaattgcgcaacaaatgcgtggcg

SEQ ID NO: 160097 - DNA, 25 bp, Probe sequence
gagtatatgaaccaagtaaatgctg

SEQ ID NO: 160098 - DNA, 25 bp, Probe sequence
gatgacactacttttgtagttatta

SEQ ID NO: 160099 - DNA, 25 bp, Probe sequence
gatgcctttgacgaaaattgtaaat

SEQ ID NO: 160100 - DNA, 25 bp, Probe sequence
gatttagtttattttatgcctagag

SEQ ID NO: 160101 - DNA, 25 bp, Probe sequence
gattagcaagaccagctgcagtagc

SEQ ID NO: 160102 - DNA, 25 bp, Probe sequence
gttacagtttttgctgggcaagata

SEQ ID NO: 160103 - DNA, 25 bp, Probe sequence
gtaaatgctgatgacactacttttg

SEQ ID NO: 160104 - DNA, 25 bp, Probe sequence
ggcaagataaagaagcaactgctac

SEQ ID NO: 160105 - DNA, 25 bp, Probe sequence
tctagtccttcgtatgctttattca

SEQ ID NO: 160106 - DNA, 25 bp, Probe sequence
taactctacatgcggctgtgcagct

SEQ ID NO: 160107 - DNA, 25 bp, Probe sequence
tacatgcggctgtgcagctggatta

SEQ ID NO: 160108 - DNA, 25 bp, Probe sequence
tagtccttcgtatgctttattcaaa

SEQ ID NO: 160109 - DNA, 25 bp, Probe sequence
tattaactctacatgcggctgtgca

SEQ ID NO: 160110 - DNA, 25 bp, Probe sequence
tttatgcctagagaatttatcgaag

SEQ ID NO: 160111 - DNA, 25 bp, Probe sequence
aaggtaatgcagagcagcttcccgc

SEQ ID NO: 160112 - DNA, 25 bp, Probe sequence
ataaaagtcctgctgtaagaagaac

SEQ ID NO: 160113 - DNA, 25 bp, Probe sequence
atgacaatattgtttttatgcgtaa

SEQ ID NO: 160114 - DNA, 25 bp, Probe sequence
agtaccggttagacgtcaagcgatt

SEQ ID NO: 160115 - DNA, 25 bp, Probe sequence
ctagctacctatccagaatcacagt

SEQ ID NO: 160116 - DNA, 25 bp, Probe sequence
aggtggcgtgctgctatgtttatct

SEQ ID NO: 160117 - DNA, 25 bp, Probe sequence
agccgacttttgaagatataccgct

SEQ ID NO: 160118 - DNA, 25 bp, Probe sequence
aagcccatattaatgacaatgcgtt

SEQ ID NO: 160119 - DNA, 25 bp, Probe sequence
aagagaacaattaccacaaacatat

SEQ ID NO: 160120 - DNA, 25 bp, Probe sequence
catgtcatgaacttcttagctgttg

SEQ ID NO: 160121 - DNA, 25 bp, Probe sequence
cattttccaaagccgacttttgaag

SEQ ID NO: 160122 - DNA, 25 bp, Probe sequence
ctacctatccagaatcacagttacc

SEQ ID NO: 160123 - DNA, 25 bp, Probe sequence
gcgatttagggtatccagaggcact

SEQ ID NO: 160124 - DNA, 25 bp, Probe sequence
gctgttgataaggcaccaaaagctg

SEQ ID NO: 160125 - DNA, 25 bp, Probe sequence
gcaggggattgcataagcgatttag

SEQ ID NO: 160126 - DNA, 25 bp, Probe sequence
gcacttggttcagtatggaaacaaa

SEQ ID NO: 160127 - DNA, 25 bp, Probe sequence
gaagtaatggatggtgtcctagaag

SEQ ID NO: 160128 - DNA, 25 bp, Probe sequence
gaaaatcacgcaactaataattatc

SEQ ID NO: 160129 - DNA, 25 bp, Probe sequence
gaaaatcgttaggtggcgtgctgct

SEQ ID NO: 160130 - DNA, 25 bp, Probe sequence
gaaatggccatatctcgtattgaaa

SEQ ID NO: 160131 - DNA, 25 bp, Probe sequence
gaaattttacgtatagagccaacac

SEQ ID NO: 160132 - DNA, 25 bp, Probe sequence
gacatgtctctttggatgaatatca

SEQ ID NO: 160133 - DNA, 25 bp, Probe sequence
gttatctatagatggtatcacttcc

SEQ ID NO: 160134 - DNA, 25 bp, Probe sequence
gtatccagaggcactaccagaaatg

SEQ ID NO: 160135 - DNA, 25 bp, Probe sequence
gtatcacttccatttttcatgtcat

SEQ ID NO: 160136 - DNA, 25 bp, Probe sequence
gtgctgctatgtttatctttgatga

SEQ ID NO: 160137 - DNA, 25 bp, Probe sequence
ggggcttcgtgataaaagtcctgct

SEQ ID NO: 160138 - DNA, 25 bp, Probe sequence
ggtgctactattagatgatccacag

SEQ ID NO: 160139 - DNA, 25 bp, Probe sequence
ggtataccgtatcaaattaagctaa

SEQ ID NO: 160140 - DNA, 25 bp, Probe sequence
ggcactaccagaaatggtgctacta

SEQ ID NO: 160141 - DNA, 25 bp, Probe sequence
taccgtatttatataaggggcttcg

SEQ ID NO: 160142 - DNA, 25 bp, Probe sequence
tacctgatattaaagctgctttttc

SEQ ID NO: 160143 - DNA, 25 bp, Probe sequence
tatcatttctatcgacatgtctctt

SEQ ID NO: 160144 - DNA, 25 bp, Probe sequence
ttaagctaacttctgctgaccaaga

SEQ ID NO: 160145 - DNA, 25 bp, Probe sequence
attgtgcttatcatttggagcttca

SEQ ID NO: 160146 - DNA, 25 bp, Probe sequence
atgattccacctgatttcgagtatt

SEQ ID NO: 160147 - DNA, 25 bp, Probe sequence
atgtcatacgtattatatgcatttg

SEQ ID NO: 160148 - DNA, 25 bp, Probe sequence
accaattgcgttattatgtgctagc

SEQ ID NO: 160149 - DNA, 25 bp, Probe sequence
accttcatgttaatcattgtgctta

SEQ ID NO: 160150 - DNA, 25 bp, Probe sequence
acgagttttaccttcatgttaatca

SEQ ID NO: 160151 - DNA, 25 bp, Probe sequence
acggctgttggcgctaataaaataa

SEQ ID NO: 160152 - DNA, 25 bp, Probe sequence
acagcaacgattattttatttactt

SEQ ID NO: 160153 - DNA, 25 bp, Probe sequence
acagtattaggtagcatcgtttcaa

SEQ ID NO: 160154 - DNA, 25 bp, Probe sequence
aaaagtggatttcaataccctcgcg

SEQ ID NO: 160155 - DNA, 25 bp, Probe sequence
aacacttggtttatttcaatatcca

SEQ ID NO: 160156 - DNA, 25 bp, Probe sequence
gcgctggcggtattggattgtttta

SEQ ID NO: 160157 - DNA, 25 bp, Probe sequence
ccacctgatttcgagtatttacaac

SEQ ID NO: 160158 - DNA, 25 bp, Probe sequence
gccatatcgtcatttatgtcatacg

SEQ ID NO: 160159 - DNA, 25 bp, Probe sequence
gcttcagctgtgcttggattagtcg

SEQ ID NO: 160160 - DNA, 25 bp, Probe sequence
gcatcgtttcaataccaattgcgtt

SEQ ID NO: 160161 - DNA, 25 bp, Probe sequence
gaatcggtcaaattccagggatatt

SEQ ID NO: 160162 - DNA, 25 bp, Probe sequence
gaatggctatcgtaagtacagtatt

SEQ ID NO: 160163 - DNA, 25 bp, Probe sequence
gaaagtgagggcacatctcgcatga

SEQ ID NO: 160164 - DNA, 25 bp, Probe sequence
gatctattcaaacaaatgattccac

SEQ ID NO: 160165 - DNA, 25 bp, Probe sequence
gttgtaccacaagccatatcgtcat

SEQ ID NO: 160166 - DNA, 25 bp, Probe sequence
gtttattttaactatctgtattatt

SEQ ID NO: 160167 - DNA, 25 bp, Probe sequence
gtcgtcgtcattgattacatcagta

SEQ ID NO: 160168 - DNA, 25 bp, Probe sequence
ggattagtcggcgctggcggtattg

SEQ ID NO: 160169 - DNA, 25 bp, Probe sequence
ggattgttttcggtgttgtaccaca

SEQ ID NO: 160170 - DNA, 25 bp, Probe sequence
ggaagcaatgacggctgttggcgct

SEQ ID NO: 160171 - DNA, 25 bp, Probe sequence
ggaaacgatagatccaggtccaatg

SEQ ID NO: 160172 - DNA, 25 bp, Probe sequence
ggaatacctcaaataggtgatctat

SEQ ID NO: 160173 - DNA, 25 bp, Probe sequence
tgtgctagcaatatcgttcatcaaa

SEQ ID NO: 160174 - DNA, 25 bp, Probe sequence
tcatttggagcttcatttatacggg

SEQ ID NO: 160175 - DNA, 25 bp, Probe sequence
tacaaagtatgactcccttttaaag

SEQ ID NO: 160176 - DNA, 25 bp, Probe sequence
tattagcagcaatctttgtggctgt

SEQ ID NO: 160177 - DNA, 25 bp, Probe sequence
tttacaacaaattacaacgccaatg

SEQ ID NO: 160178 - DNA, 25 bp, Probe sequence
ttgtggctgtatttggaatcggtca

SEQ ID NO: 160179 - DNA, 25 bp, Probe sequence
atcaattttccatgttatggacttt

SEQ ID NO: 160180 - DNA, 25 bp, Probe sequence
atctatatcagaaacaccgaaccac

SEQ ID NO: 160181 - DNA, 25 bp, Probe sequence
atgacatcttaaaggttgaaggcgt

SEQ ID NO: 160182 - DNA, 25 bp, Probe sequence
agttgatgattcacagccagcattt

SEQ ID NO: 160183 - DNA, 25 bp, Probe sequence
accacaacacaatgaagattacact

SEQ ID NO: 160184 - DNA, 25 bp, Probe sequence
accgaaccacaacacaatgaagatt

SEQ ID NO: 160185 - DNA, 25 bp, Probe sequence
acagccagcatttattaatgacatc

SEQ ID NO: 160186 - DNA, 25 bp, Probe sequence
acaccgaaccacaacacaatgaaga

SEQ ID NO: 160187 - DNA, 25 bp, Probe sequence
acacaatgaagattacacttagtga

SEQ ID NO: 160188 - DNA, 25 bp, Probe sequence
aaatgacgcaaattgggaaacagta

SEQ ID NO: 160189 - DNA, 25 bp, Probe sequence
aaagttgatgattcacagccagcat

SEQ ID NO: 160190 - DNA, 25 bp, Probe sequence
aaacaccgaaccacaacacaatgaa

SEQ ID NO: 160191 - DNA, 25 bp, Probe sequence
aaaagtagaggctgtattcgaataa

SEQ ID NO: 160192 - DNA, 25 bp, Probe sequence
ctaaagttgatgattcacagccagc

SEQ ID NO: 160193 - DNA, 25 bp, Probe sequence
ccaaaagtagaggctgtattcgaat

SEQ ID NO: 160194 - DNA, 25 bp, Probe sequence
ccatgttatggactttatttcagta

SEQ ID NO: 160195 - DNA, 25 bp, Probe sequence
gccagcatttattaatgacatctta

SEQ ID NO: 160196 - DNA, 25 bp, Probe sequence
gaaggcgttaaatcaattttccatg

SEQ ID NO: 160197 - DNA, 25 bp, Probe sequence
gaagattacacttagtgaaagcaga

SEQ ID NO: 160198 - DNA, 25 bp, Probe sequence
gacatcagatacgtatactaaagtt

SEQ ID NO: 160199 - DNA, 25 bp, Probe sequence
gacatcttaaaggttgaaggcgtta

SEQ ID NO: 160200 - DNA, 25 bp, Probe sequence
gatgattcacagccagcatttatta

SEQ ID NO: 160201 - DNA, 25 bp, Probe sequence
gattcacagccagcatttattaatg

SEQ ID NO: 160202 - DNA, 25 bp, Probe sequence
gttgatgattcacagccagcattta

SEQ ID NO: 160203 - DNA, 25 bp, Probe sequence
gttaaatcaattttccatgttatgg

SEQ ID NO: 160204 - DNA, 25 bp, Probe sequence
gttatggactttatttcagtagata

SEQ ID NO: 160205 - DNA, 25 bp, Probe sequence
gtgaaagcagagaaggtatgacatc

SEQ ID NO: 160206 - DNA, 25 bp, Probe sequence
gggaaacagtattgccaaaagtaga

SEQ ID NO: 160207 - DNA, 25 bp, Probe sequence
ggtatgacatcagatacgtatacta

SEQ ID NO: 160208 - DNA, 25 bp, Probe sequence
ggcgttaaatcaattttccatgtta

SEQ ID NO: 160209 - DNA, 25 bp, Probe sequence
tgatgattcacagccagcatttatt

SEQ ID NO: 160210 - DNA, 25 bp, Probe sequence
tcagaaacaccgaaccacaacacaa

SEQ ID NO: 160211 - DNA, 25 bp, Probe sequence
tatcagaaacaccgaaccacaacac

SEQ ID NO: 160212 - DNA, 25 bp, Probe sequence
tatatcagaaacaccgaaccacaac

SEQ ID NO: 160213 - DNA, 25 bp, Probe sequence
atttttgtatcaatgagtgttcaat

SEQ ID NO: 160214 - DNA, 25 bp, Probe sequence
atcaatgtccaatcaaaactcgtct

SEQ ID NO: 160215 - DNA, 25 bp, Probe sequence
atgtccaatcaaaactcgtctgcgt

SEQ ID NO: 160216 - DNA, 25 bp, Probe sequence
aggggaaaacgaaggcgcatcattt

SEQ ID NO: 160217 - DNA, 25 bp, Probe sequence
agaggggaaaacgaaggcgcatcat

SEQ ID NO: 160218 - DNA, 25 bp, Probe sequence
acgaaggcgcatcatttttgtatca

SEQ ID NO: 160219 - DNA, 25 bp, Probe sequence
actcgtctgcgtaaattagagggga

SEQ ID NO: 160220 - DNA, 25 bp, Probe sequence
acaattaggaaatgaacttcaatag

SEQ ID NO: 160221 - DNA, 25 bp, Probe sequence
aaacgaaggcgcatcatttttgtat

SEQ ID NO: 160222 - DNA, 25 bp, Probe sequence
aactcgtctgcgtaaattagagggg

SEQ ID NO: 160223 - DNA, 25 bp, Probe sequence
aacgaaggcgcatcatttttgtatc

SEQ ID NO: 160224 - DNA, 25 bp, Probe sequence
aaggcgcatcatttttgtatcaatg

SEQ ID NO: 160225 - DNA, 25 bp, Probe sequence
aatgtccaatcaaaactcgtctgcg

SEQ ID NO: 160226 - DNA, 25 bp, Probe sequence
aatcaatgtccaatcaaaactcgtc

SEQ ID NO: 160227 - DNA, 25 bp, Probe sequence
aatcaaaactcgtctgcgtaaatta

SEQ ID NO: 160228 - DNA, 25 bp, Probe sequence
caatgtccaatcaaaactcgtctgc

SEQ ID NO: 160229 - DNA, 25 bp, Probe sequence
caatcaaaactcgtctgcgtaaatt

SEQ ID NO: 160230 - DNA, 25 bp, Probe sequence
cactcgcgaaaatagatgatttaat

SEQ ID NO: 160231 - DNA, 25 bp, Probe sequence
cttattgcaatcaatgtccaatcaa

SEQ ID NO: 160232 - DNA, 25 bp, Probe sequence
cgaaggcgcatcatttttgtatcaa

SEQ ID NO: 160233 - DNA, 25 bp, Probe sequence
gaatacttattgcaatcaatgtcca

SEQ ID NO: 160234 - DNA, 25 bp, Probe sequence
gaaggcgcatcatttttgtatcaat

SEQ ID NO: 160235 - DNA, 25 bp, Probe sequence
gaaaacgaaggcgcatcatttttgt

SEQ ID NO: 160236 - DNA, 25 bp, Probe sequence
gatgatttaatgaatacttattgca

SEQ ID NO: 160237 - DNA, 25 bp, Probe sequence
gtatcaatgagtgttcaatagggaa

SEQ ID NO: 160238 - DNA, 25 bp, Probe sequence
gtccaatcaaaactcgtctgcgtaa

SEQ ID NO: 160239 - DNA, 25 bp, Probe sequence
gggaaaacgaaggcgcatcattttt

SEQ ID NO: 160240 - DNA, 25 bp, Probe sequence
ggcgcatcatttttgtatcaatgag

SEQ ID NO: 160241 - DNA, 25 bp, Probe sequence
tgtccaatcaaaactcgtctgcgta

SEQ ID NO: 160242 - DNA, 25 bp, Probe sequence
tgcaatcaatgtccaatcaaaactc

SEQ ID NO: 160243 - DNA, 25 bp, Probe sequence
tccaatcaaaactcgtctgcgtaaa

SEQ ID NO: 160244 - DNA, 25 bp, Probe sequence
tcgtctgcgtaaattagaggggaaa

SEQ ID NO: 160245 - DNA, 25 bp, Probe sequence
tcaaaactcgtctgcgtaaattaga

SEQ ID NO: 160246 - DNA, 25 bp, Probe sequence
tacttattgcaatcaatgtccaatc

SEQ ID NO: 160247 - DNA, 25 bp, Probe sequence
ataaacctactttctattcaatact

SEQ ID NO: 160248 - DNA, 25 bp, Probe sequence
ataataaacctactttctattcaat

SEQ ID NO: 160249 - DNA, 25 bp, Probe sequence
atcaaaatttattttcgccataata

SEQ ID NO: 160250 - DNA, 25 bp, Probe sequence
atccattaaaaaacacgcatcactt

SEQ ID NO: 160251 - DNA, 25 bp, Probe sequence
agcatcaaaatttattttcgccata

SEQ ID NO: 160252 - DNA, 25 bp, Probe sequence
aaaaaacacgcatcacttaaataag

SEQ ID NO: 160253 - DNA, 25 bp, Probe sequence
cagcatcaaaatttattttcgccat

SEQ ID NO: 160254 - DNA, 25 bp, Probe sequence
catcaaaatttattttcgccataat

SEQ ID NO: 160255 - DNA, 25 bp, Probe sequence
cataataaacctactttctattcaa

SEQ ID NO: 160256 - DNA, 25 bp, Probe sequence
ctttcgtcgcagcatcaaaatttat

SEQ ID NO: 160257 - DNA, 25 bp, Probe sequence
cgtcgcagcatcaaaatttattttc

SEQ ID NO: 160258 - DNA, 25 bp, Probe sequence
cgcagcatcaaaatttattttcgcc

SEQ ID NO: 160259 - DNA, 25 bp, Probe sequence
cgccataataaacctactttctatt

SEQ ID NO: 160260 - DNA, 25 bp, Probe sequence
cctttcgtcgcagcatcaaaattta

SEQ ID NO: 160261 - DNA, 25 bp, Probe sequence
ccataataaacctactttctattca

SEQ ID NO: 160262 - DNA, 25 bp, Probe sequence
ccattaaaaaacacgcatcacttaa

SEQ ID NO: 160263 - DNA, 25 bp, Probe sequence
gccataataaacctactttctattc

SEQ ID NO: 160264 - DNA, 25 bp, Probe sequence
gcatcaaaatttattttcgccataa

SEQ ID NO: 160265 - DNA, 25 bp, Probe sequence
gcagcatcaaaatttattttcgcca

SEQ ID NO: 160266 - DNA, 25 bp, Probe sequence
gtcgcagcatcaaaatttattttcg

SEQ ID NO: 160267 - DNA, 25 bp, Probe sequence
tccattaaaaaacacgcatcactta

SEQ ID NO: 160268 - DNA, 25 bp, Probe sequence
tcctttcgtcgcagcatcaaaattt

SEQ ID NO: 160269 - DNA, 25 bp, Probe sequence
tcgccataataaacctactttctat

SEQ ID NO: 160270 - DNA, 25 bp, Probe sequence
tcgtcgcagcatcaaaatttatttt

SEQ ID NO: 160271 - DNA, 25 bp, Probe sequence
taataaacctactttctattcaata

SEQ ID NO: 160272 - DNA, 25 bp, Probe sequence
tacttagttaaagttactattactg

SEQ ID NO: 160273 - DNA, 25 bp, Probe sequence
tattttcgccataataaacctactt

SEQ ID NO: 160274 - DNA, 25 bp, Probe sequence
tttcgtcgcagcatcaaaatttatt

SEQ ID NO: 160275 - DNA, 25 bp, Probe sequence
tttcgccataataaacctactttct

SEQ ID NO: 160276 - DNA, 25 bp, Probe sequence
ttaaagttactattactgtaataca

SEQ ID NO: 160277 - DNA, 25 bp, Probe sequence
ttctattcaatacttagttaaagtt

SEQ ID NO: 160278 - DNA, 25 bp, Probe sequence
ttcgtcgcagcatcaaaatttattt

SEQ ID NO: 160279 - DNA, 25 bp, Probe sequence
ttcgccataataaacctactttcta

SEQ ID NO: 160280 - DNA, 25 bp, Probe sequence
ttcctttcgtcgcagcatcaaaatt

SEQ ID NO: 160281 - DNA, 25 bp, Probe sequence
attgtcggagaatgtctcatttcat

SEQ ID NO: 160282 - DNA, 25 bp, Probe sequence
attcaaggactttcagcagcatgta

SEQ ID NO: 160283 - DNA, 25 bp, Probe sequence
atatggcagaattaaactcacgaac

SEQ ID NO: 160284 - DNA, 25 bp, Probe sequence
atgcctgcaactttgtctattatta

SEQ ID NO: 160285 - DNA, 25 bp, Probe sequence
aggtatctataaaatggcttctgca

SEQ ID NO: 160286 - DNA, 25 bp, Probe sequence
agcgtgctacaaatcctttaatcga

SEQ ID NO: 160287 - DNA, 25 bp, Probe sequence
acagcaattgcaaatgcaccgttag

SEQ ID NO: 160288 - DNA, 25 bp, Probe sequence
acaccatcaacagatacagcaattg

SEQ ID NO: 160289 - DNA, 25 bp, Probe sequence
aactcacgaacattggtattatctt

SEQ ID NO: 160290 - DNA, 25 bp, Probe sequence
aaggcacacctgaaactaaatctaa

SEQ ID NO: 160291 - DNA, 25 bp, Probe sequence
caaatattcctttattacttattat

SEQ ID NO: 160292 - DNA, 25 bp, Probe sequence
caggtgcaacagcttcaaacttttt

SEQ ID NO: 160293 - DNA, 25 bp, Probe sequence
gcatgtattatgcctgcaactttgt

SEQ ID NO: 160294 - DNA, 25 bp, Probe sequence
gacaacgcgctttaagttattggtc

SEQ ID NO: 160295 - DNA, 25 bp, Probe sequence
gttcattttttggaggtgcagttgc

SEQ ID NO: 160296 - DNA, 25 bp, Probe sequence
gttaatgttgtaccaatacttgaag

SEQ ID NO: 160297 - DNA, 25 bp, Probe sequence
gttatcattttgttacttgtgccta

SEQ ID NO: 160298 - DNA, 25 bp, Probe sequence
gtataactgctttattttcaggaat

SEQ ID NO: 160299 - DNA, 25 bp, Probe sequence
gtaggagcaggtggtcttgctgata

SEQ ID NO: 160300 - DNA, 25 bp, Probe sequence
gtagccaacacatttgttcaaagag

SEQ ID NO: 160301 - DNA, 25 bp, Probe sequence
ggtctggttcttttagtcattatgc

SEQ ID NO: 160302 - DNA, 25 bp, Probe sequence
ggtactaattatgattcgtgttggt

SEQ ID NO: 160303 - DNA, 25 bp, Probe sequence
ggagcatttggcgtcgcattgagtg

SEQ ID NO: 160304 - DNA, 25 bp, Probe sequence
ggaacattaatagtagccaacacat

SEQ ID NO: 160305 - DNA, 25 bp, Probe sequence
ggctctggtgtttgttcattttttg

SEQ ID NO: 160306 - DNA, 25 bp, Probe sequence
tggctatttgcacaatcattggtta

SEQ ID NO: 160307 - DNA, 25 bp, Probe sequence
tgcaagcaggaagtttatcaatcac

SEQ ID NO: 160308 - DNA, 25 bp, Probe sequence
taacgttttggctatttgcacaatc

SEQ ID NO: 160309 - DNA, 25 bp, Probe sequence
tatcattcgttatcattttgttact

SEQ ID NO: 160310 - DNA, 25 bp, Probe sequence
tatagttcttgaaaagcgtgctaca

SEQ ID NO: 160311 - DNA, 25 bp, Probe sequence
tatttattctttggtttaggactag

SEQ ID NO: 160312 - DNA, 25 bp, Probe sequence
tttaggttggcgttggattttcatc

SEQ ID NO: 160313 - DNA, 25 bp, Probe sequence
ttggtcaattggctcatggggcggc

SEQ ID NO: 160314 - DNA, 25 bp, Probe sequence
ttggcgtcgcattgagtggtgcagt

SEQ ID NO: 160315 - DNA, 25 bp, Probe sequence
atttattccatttatctataggttc

SEQ ID NO: 160316 - DNA, 25 bp, Probe sequence
atataggtttcttctcagcgtttgc

SEQ ID NO: 160317 - DNA, 25 bp, Probe sequence
ataccaatagcaatcgcatctgcgt

SEQ ID NO: 160318 - DNA, 25 bp, Probe sequence
atcactttttcattaattccaacta

SEQ ID NO: 160319 - DNA, 25 bp, Probe sequence
atggccttgtttgtatggttcctag

SEQ ID NO: 160320 - DNA, 25 bp, Probe sequence
agcaggcggaattttacaatcagtt

SEQ ID NO: 160321 - DNA, 25 bp, Probe sequence
acatacggtgatttctggggcttcc

SEQ ID NO: 160322 - DNA, 25 bp, Probe sequence
aacagcacttggtataccagtttat

SEQ ID NO: 160323 - DNA, 25 bp, Probe sequence
aacgtagcagcattgtctatcgtat

SEQ ID NO: 160324 - DNA, 25 bp, Probe sequence
aattccaactacaggtaattcagga

SEQ ID NO: 160325 - DNA, 25 bp, Probe sequence
cagcgtttgctattgttatggggac

SEQ ID NO: 160326 - DNA, 25 bp, Probe sequence
cgcatctgcgttatctattgtgttg

SEQ ID NO: 160327 - DNA, 25 bp, Probe sequence
gcgatttacctttagcgatttcagt

SEQ ID NO: 160328 - DNA, 25 bp, Probe sequence
gcggcatcattaccatttgtgcggg

SEQ ID NO: 160329 - DNA, 25 bp, Probe sequence
gctgctgcaatccctgaaacaggtg

SEQ ID NO: 160330 - DNA, 25 bp, Probe sequence
gcattgtctatcgtatttgcgacac

SEQ ID NO: 160331 - DNA, 25 bp, Probe sequence
gcagaacttgctgctgcaatccctg

SEQ ID NO: 160332 - DNA, 25 bp, Probe sequence
gcaccatggtttggcgcaattatac

SEQ ID NO: 160333 - DNA, 25 bp, Probe sequence
gatttcagttggtatcggttgtatt

SEQ ID NO: 160334 - DNA, 25 bp, Probe sequence
gttgttctattgtatgtcatttgtt

SEQ ID NO: 160335 - DNA, 25 bp, Probe sequence
gtttatggtacgatcaatggctata

SEQ ID NO: 160336 - DNA, 25 bp, Probe sequence
gtatcggttgtattatggctgtgta

SEQ ID NO: 160337 - DNA, 25 bp, Probe sequence
gtgcggggttaacagcagcagaact

SEQ ID NO: 160338 - DNA, 25 bp, Probe sequence
ggtatgcgcgtaccatatgcaatgg

SEQ ID NO: 160339 - DNA, 25 bp, Probe sequence
ggaacagcaggaatggccttgtttg

SEQ ID NO: 160340 - DNA, 25 bp, Probe sequence
ggctatactatgactggtatgcgcg

SEQ ID NO: 160341 - DNA, 25 bp, Probe sequence
ggctgtgtatttattaattaacgct

SEQ ID NO: 160342 - DNA, 25 bp, Probe sequence
tggggacagttattggttcaggagt

SEQ ID NO: 160343 - DNA, 25 bp, Probe sequence
tttcctaggttcaaaagcaggcgga

SEQ ID NO: 160344 - DNA, 25 bp, Probe sequence
taatacactgtttacacaatttata

SEQ ID NO: 160345 - DNA, 25 bp, Probe sequence
tacaacttataatcgctatcatcat

SEQ ID NO: 160346 - DNA, 25 bp, Probe sequence
tatggttcctaggcggcatcattac

SEQ ID NO: 160347 - DNA, 25 bp, Probe sequence
tttgttatttggttgttctattgta

SEQ ID NO: 160348 - DNA, 25 bp, Probe sequence
ttgtgttgataaatttcctaggttc

SEQ ID NO: 160349 - DNA, 25 bp, Probe sequence
atgcagcaaatgttgccttgggact

SEQ ID NO: 160350 - DNA, 25 bp, Probe sequence
agcatgggaagctgatcttgttatc

SEQ ID NO: 160351 - DNA, 25 bp, Probe sequence
agcgccaatgagtgctatagcaggt

SEQ ID NO: 160352 - DNA, 25 bp, Probe sequence
acaacatggtggtcaaggtacttta

SEQ ID NO: 160353 - DNA, 25 bp, Probe sequence
aaatgctggcattggttcaggattt

SEQ ID NO: 160354 - DNA, 25 bp, Probe sequence
aaagaacctcatgaaagcgaatatc

SEQ ID NO: 160355 - DNA, 25 bp, Probe sequence
aaagcagaattattagcgccaatga

SEQ ID NO: 160356 - DNA, 25 bp, Probe sequence
aaacatttaccaaggacaagtgaca

SEQ ID NO: 160357 - DNA, 25 bp, Probe sequence
aagaaggcgctaagatcgtaactca

SEQ ID NO: 160358 - DNA, 25 bp, Probe sequence
aagaacttcaacaatggcattagca

SEQ ID NO: 160359 - DNA, 25 bp, Probe sequence
caaccaggagcagtcccaagaactt

SEQ ID NO: 160360 - DNA, 25 bp, Probe sequence
cgtaagttaacggatgcaggacata

SEQ ID NO: 160361 - DNA, 25 bp, Probe sequence
gccaaaattggttactcgtgagatg

SEQ ID NO: 160362 - DNA, 25 bp, Probe sequence
gcttgcacacccgaaaatgtgcgta

SEQ ID NO: 160363 - DNA, 25 bp, Probe sequence
gcaggtcaacgctcagcaattatgg

SEQ ID NO: 160364 - DNA, 25 bp, Probe sequence
gcagatgtatttatttctacaattt

SEQ ID NO: 160365 - DNA, 25 bp, Probe sequence
gcaagaagttggtgtaactgcgatt

SEQ ID NO: 160366 - DNA, 25 bp, Probe sequence
gcaattatgggagcttactactctg

SEQ ID NO: 160367 - DNA, 25 bp, Probe sequence
gaaaatgtggatatacctggtagta

SEQ ID NO: 160368 - DNA, 25 bp, Probe sequence
gatatagctattgaccaaggtggaa

SEQ ID NO: 160369 - DNA, 25 bp, Probe sequence
gtagcagcaacaaatgcagcaaatg

SEQ ID NO: 160370 - DNA, 25 bp, Probe sequence
gtacatatgtgattttcggtggtgg

SEQ ID NO: 160371 - DNA, 25 bp, Probe sequence
gtaactgcgattagtggtgaaacca

SEQ ID NO: 160372 - DNA, 25 bp, Probe sequence
gtcacagtagtcaaatcaacaccag

SEQ ID NO: 160373 - DNA, 25 bp, Probe sequence
gtgctatagcaggtcaacgctcagc

SEQ ID NO: 160374 - DNA, 25 bp, Probe sequence
gtgtgattcattatggtgtaccaaa

SEQ ID NO: 160375 - DNA, 25 bp, Probe sequence
ggttcaggattttctaacgatatgt

SEQ ID NO: 160376 - DNA, 25 bp, Probe sequence
ggttcagtattaatcgatatagcta

SEQ ID NO: 160377 - DNA, 25 bp, Probe sequence
ggagcagtcccaagaacttcaacaa

SEQ ID NO: 160378 - DNA, 25 bp, Probe sequence
tgttgccttgggactaaatgctaaa

SEQ ID NO: 160379 - DNA, 25 bp, Probe sequence
tgaaggacgtgtagcttgcacaccc

SEQ ID NO: 160380 - DNA, 25 bp, Probe sequence
tcaaggtactttagtgactggtgta

SEQ ID NO: 160381 - DNA, 25 bp, Probe sequence
tactactctgaagcacaacatggtg

SEQ ID NO: 160382 - DNA, 25 bp, Probe sequence
ttagaccaactacaatttctgatcc

SEQ ID NO: 160383 - DNA, 25 bp, Probe sequence
attgataccacaatttgattatgtt

SEQ ID NO: 160384 - DNA, 25 bp, Probe sequence
atattcaactgataacgatgtctat

SEQ ID NO: 160385 - DNA, 25 bp, Probe sequence
atgaactatatttatcgaagcgact

SEQ ID NO: 160386 - DNA, 25 bp, Probe sequence
atgaaatacgccctacacatgtagc

SEQ ID NO: 160387 - DNA, 25 bp, Probe sequence
atgtagctgtatgttgggatatggg

SEQ ID NO: 160388 - DNA, 25 bp, Probe sequence
atgggtgatacagcagatggatatg

SEQ ID NO: 160389 - DNA, 25 bp, Probe sequence
acgatgtctatattattacgggcga

SEQ ID NO: 160390 - DNA, 25 bp, Probe sequence
acaatttatgtacaattcacaaggt

SEQ ID NO: 160391 - DNA, 25 bp, Probe sequence
aaatattacttgtagatggtatggc

SEQ ID NO: 160392 - DNA, 25 bp, Probe sequence
aaatcgttctgcaccaccagaagaa

SEQ ID NO: 160393 - DNA, 25 bp, Probe sequence
aaagcgtttatgggtgatacagcag

SEQ ID NO: 160394 - DNA, 25 bp, Probe sequence
aaacggctattaagttaattcagca

SEQ ID NO: 160395 - DNA, 25 bp, Probe sequence
aaaacattgatgcattatcagctgg

SEQ ID NO: 160396 - DNA, 25 bp, Probe sequence
aatcatattttatcaatttgtaacg

SEQ ID NO: 160397 - DNA, 25 bp, Probe sequence
aatttcagagcaatttggctttgta

SEQ ID NO: 160398 - DNA, 25 bp, Probe sequence
cacacacaagtaccaattgatagtg

SEQ ID NO: 160399 - DNA, 25 bp, Probe sequence
gctgaaattcacacacaagtaccaa

SEQ ID NO: 160400 - DNA, 25 bp, Probe sequence
gctacaagtcttcataaacaattta

SEQ ID NO: 160401 - DNA, 25 bp, Probe sequence
gctttttgagaaaatgtcatttgca

SEQ ID NO: 160402 - DNA, 25 bp, Probe sequence
gcaccaccagaagaattgataccac

SEQ ID NO: 160403 - DNA, 25 bp, Probe sequence
gcaatacatgaaatacgccctacac

SEQ ID NO: 160404 - DNA, 25 bp, Probe sequence
gaaccacaacaactaatcgatatta

SEQ ID NO: 160405 - DNA, 25 bp, Probe sequence
gatatacattacatcgttttaacga

SEQ ID NO: 160406 - DNA, 25 bp, Probe sequence
gatttactgcaatgtattaatgaca

SEQ ID NO: 160407 - DNA, 25 bp, Probe sequence
gttaattcagcaatatcaaagcgtt

SEQ ID NO: 160408 - DNA, 25 bp, Probe sequence
gtacattagcacaacaatattcaac

SEQ ID NO: 160409 - DNA, 25 bp, Probe sequence
gtcatatcttttcggcaatacatga

SEQ ID NO: 160410 - DNA, 25 bp, Probe sequence
ggaaaatatatttcatcccattttt

SEQ ID NO: 160411 - DNA, 25 bp, Probe sequence
ggcgttaaaaactatgaagcggatg

SEQ ID NO: 160412 - DNA, 25 bp, Probe sequence
tgaagcggatgatgttataggtaca

SEQ ID NO: 160413 - DNA, 25 bp, Probe sequence
taagcaaaatcgttctgcaccacca

SEQ ID NO: 160414 - DNA, 25 bp, Probe sequence
tacgggcgacaaagatttactgcaa

SEQ ID NO: 160415 - DNA, 25 bp, Probe sequence
tacgccctacacatgtagctgtatg

SEQ ID NO: 160416 - DNA, 25 bp, Probe sequence
ttggctttgtaaatattggcgttaa

SEQ ID NO: 160417 - DNA, 25 bp, Probe sequence
atcaacaaattcgtcaaccaatgcg

SEQ ID NO: 160418 - DNA, 25 bp, Probe sequence
ataatttcggatgtgcctttgttca

SEQ ID NO: 160419 - DNA, 25 bp, Probe sequence
atcaaccacaaacatcaatcagcaa

SEQ ID NO: 160420 - DNA, 25 bp, Probe sequence
agacaacatatcaagtggctactga

SEQ ID NO: 160421 - DNA, 25 bp, Probe sequence
acagcgacagatgcgttacaagaac

SEQ ID NO: 160422 - DNA, 25 bp, Probe sequence
acagcagctactacagaaatatctt

SEQ ID NO: 160423 - DNA, 25 bp, Probe sequence
aaagctgatatttcacgtcgccaac

SEQ ID NO: 160424 - DNA, 25 bp, Probe sequence
aacgctaaaatcacaatcgcaatta

SEQ ID NO: 160425 - DNA, 25 bp, Probe sequence
aagctcagctagattacattcagtc

SEQ ID NO: 160426 - DNA, 25 bp, Probe sequence
aagtacacttacaatcagacatttt

SEQ ID NO: 160427 - DNA, 25 bp, Probe sequence
caacagcgattattaacagcgacag

SEQ ID NO: 160428 - DNA, 25 bp, Probe sequence
cagtgtttaattctcaaatgacgca

SEQ ID NO: 160429 - DNA, 25 bp, Probe sequence
gcagcaatatacatgttcgttcgtt

SEQ ID NO: 160430 - DNA, 25 bp, Probe sequence
gcaaattgcaccaatcgttcaacaa

SEQ ID NO: 160431 - DNA, 25 bp, Probe sequence
gaatcgccaaaatgtcgacgttgaa

SEQ ID NO: 160432 - DNA, 25 bp, Probe sequence
gaagcacttttacatacaattaacc

SEQ ID NO: 160433 - DNA, 25 bp, Probe sequence
gacatttttctgcaggtaaatcgac

SEQ ID NO: 160434 - DNA, 25 bp, Probe sequence
gacatttttgctgtatcaagtcgaa

SEQ ID NO: 160435 - DNA, 25 bp, Probe sequence
gactataaccacgttcaatctgaac

SEQ ID NO: 160436 - DNA, 25 bp, Probe sequence
gagctgcgtcagtcattgacgacta

SEQ ID NO: 160437 - DNA, 25 bp, Probe sequence
gttcgttcgttggacatttttctgc

SEQ ID NO: 160438 - DNA, 25 bp, Probe sequence
gttgcatcacatcagtcaataacag

SEQ ID NO: 160439 - DNA, 25 bp, Probe sequence
gtaccaacgacaagtaatactgcta

SEQ ID NO: 160440 - DNA, 25 bp, Probe sequence
gtgtcagtttcagacaatcacgata

SEQ ID NO: 160441 - DNA, 25 bp, Probe sequence
gggctacactcaaataaccaaaggc

SEQ ID NO: 160442 - DNA, 25 bp, Probe sequence
ggatgtgcctttgttcaagcgtaca

SEQ ID NO: 160443 - DNA, 25 bp, Probe sequence
ggaatacctgttgtgtttatcatta

SEQ ID NO: 160444 - DNA, 25 bp, Probe sequence
ggctgtagaagctgaatcgcaattt

SEQ ID NO: 160445 - DNA, 25 bp, Probe sequence
tgttgattcattagggctacactca

SEQ ID NO: 160446 - DNA, 25 bp, Probe sequence
tctccaaatcctactacagcagcta

SEQ ID NO: 160447 - DNA, 25 bp, Probe sequence
taatcctcagtttaactttgaatca

SEQ ID NO: 160448 - DNA, 25 bp, Probe sequence
tacgttgcaagatacaccaggtgtt

SEQ ID NO: 160449 - DNA, 25 bp, Probe sequence
tatgtacttacattttcagacgaag

SEQ ID NO: 160450 - DNA, 25 bp, Probe sequence
tattattgctaatttgccgaatcaa

SEQ ID NO: 160451 - DNA, 25 bp, Probe sequence
atatcacgtcaggtgaaattttcat

SEQ ID NO: 160452 - DNA, 25 bp, Probe sequence
atcaaccaagaattaggcatcacaa

SEQ ID NO: 160453 - DNA, 25 bp, Probe sequence
atctggtgctgggaaatccacgtta

SEQ ID NO: 160454 - DNA, 25 bp, Probe sequence
atggcacacgcatcattggtttacg

SEQ ID NO: 160455 - DNA, 25 bp, Probe sequence
agaatatggcacacgcatcattggt

SEQ ID NO: 160456 - DNA, 25 bp, Probe sequence
acgcatcattggtttacgtgatggt

SEQ ID NO: 160457 - DNA, 25 bp, Probe sequence
acgaaacaggttatggatgatttaa

SEQ ID NO: 160458 - DNA, 25 bp, Probe sequence
aacaacgtatatctattgcacgtgc

SEQ ID NO: 160459 - DNA, 25 bp, Probe sequence
aagtggacgtgtaggttatcaccct

SEQ ID NO: 160460 - DNA, 25 bp, Probe sequence
aagatctgtaaatcgtttgcatgat

SEQ ID NO: 160461 - DNA, 25 bp, Probe sequence
ctatcctaacggtcatgtaggcttg

SEQ ID NO: 160462 - DNA, 25 bp, Probe sequence
ccagttgcttcattagacccattaa

SEQ ID NO: 160463 - DNA, 25 bp, Probe sequence
gaagatgaaaagctaggagtgaact

SEQ ID NO: 160464 - DNA, 25 bp, Probe sequence
gaaatccacgttattaagatctgta

SEQ ID NO: 160465 - DNA, 25 bp, Probe sequence
gaaatgtactaagtggacgtgtagg

SEQ ID NO: 160466 - DNA, 25 bp, Probe sequence
ggacgtgtaggttatcaccctactt

SEQ ID NO: 160467 - DNA, 25 bp, Probe sequence
gatggtcctgcatctgaagcaacag

SEQ ID NO: 160468 - DNA, 25 bp, Probe sequence
gttgtctatgatggtcctgcatctg

SEQ ID NO: 160469 - DNA, 25 bp, Probe sequence
gtttgcatgatatcacgtcaggtga

SEQ ID NO: 160470 - DNA, 25 bp, Probe sequence
gtcagtaaagtctatcctaacggtc

SEQ ID NO: 160471 - DNA, 25 bp, Probe sequence
ggtgctgggaaatccacgttattaa

SEQ ID NO: 160472 - DNA, 25 bp, Probe sequence
ggtcaagtgtattacgaaatgtact

SEQ ID NO: 160473 - DNA, 25 bp, Probe sequence
ggttatcaccctacttggaaaatgg

SEQ ID NO: 160474 - DNA, 25 bp, Probe sequence
tgtaggcttgaaaaatattaactta

SEQ ID NO: 160475 - DNA, 25 bp, Probe sequence
tgaagcaacagatgacgtatttagt

SEQ ID NO: 160476 - DNA, 25 bp, Probe sequence
tagttaaacggtcaagtgtattacg

SEQ ID NO: 160477 - DNA, 25 bp, Probe sequence
tcggactatctggtgctgggaaatc

SEQ ID NO: 160478 - DNA, 25 bp, Probe sequence
tcaccctacttggaaaatggtatta

SEQ ID NO: 160479 - DNA, 25 bp, Probe sequence
taatcaacgctctgatgaattatca

SEQ ID NO: 160480 - DNA, 25 bp, Probe sequence
taaaaacgtcagtaaagtctatcct

SEQ ID NO: 160481 - DNA, 25 bp, Probe sequence
taaagtctatcctaacggtcatgta

SEQ ID NO: 160482 - DNA, 25 bp, Probe sequence
tagataaatataatcaacgctctga

SEQ ID NO: 160483 - DNA, 25 bp, Probe sequence
tattagaaatgcgccgaaatatagg

SEQ ID NO: 160484 - DNA, 25 bp, Probe sequence
ttgtcggactatctggtgctgggaa

SEQ ID NO: 160485 - DNA, 25 bp, Probe sequence
attggtattgccgttgtatgtttaa

SEQ ID NO: 160486 - DNA, 25 bp, Probe sequence
attgccgttgtatgtttaatgattt

SEQ ID NO: 160487 - DNA, 25 bp, Probe sequence
atgatgacgtcccacacggtttaat

SEQ ID NO: 160488 - DNA, 25 bp, Probe sequence
atgacgtcccacacggtttaatgat

SEQ ID NO: 160489 - DNA, 25 bp, Probe sequence
acgtcccacacggtttaatgatgaa

SEQ ID NO: 160490 - DNA, 25 bp, Probe sequence
aaacatgatgacgtcccacacggtt

SEQ ID NO: 160491 - DNA, 25 bp, Probe sequence
aacataatatcaaagtagaaccatc

SEQ ID NO: 160492 - DNA, 25 bp, Probe sequence
aacgacttattttggttatatgaat

SEQ ID NO: 160493 - DNA, 25 bp, Probe sequence
aattagtttctaaagatgatgggaa

SEQ ID NO: 160494 - DNA, 25 bp, Probe sequence
cgtcccacacggtttaatgatgaaa

SEQ ID NO: 160495 - DNA, 25 bp, Probe sequence
gaaaattcacgacatgcatatgaat

SEQ ID NO: 160496 - DNA, 25 bp, Probe sequence
gacttattttggttatatgaatagt

SEQ ID NO: 160497 - DNA, 25 bp, Probe sequence
gacgtcccacacggtttaatgatga

SEQ ID NO: 160498 - DNA, 25 bp, Probe sequence
gatgacgtcccacacggtttaatga

SEQ ID NO: 160499 - DNA, 25 bp, Probe sequence
gatggattagtcaaacataatatca

SEQ ID NO: 160500 - DNA, 25 bp, Probe sequence
gatgatgggaagacattttataaac

SEQ ID NO: 160501 - DNA, 25 bp, Probe sequence
gatgaaaattcacgacatgcatatg

SEQ ID NO: 160502 - DNA, 25 bp, Probe sequence
gattgttaaacatgatgacgtccca

SEQ ID NO: 160503 - DNA, 25 bp, Probe sequence
gttaaacatgatgacgtcccacacg

SEQ ID NO: 160504 - DNA, 25 bp, Probe sequence
gttattggtattgccgttgtatgtt

SEQ ID NO: 160505 - DNA, 25 bp, Probe sequence
gtattgccgttgtatgtttaatgat

SEQ ID NO: 160506 - DNA, 25 bp, Probe sequence
gggaagacattttataaacaagaga

SEQ ID NO: 160507 - DNA, 25 bp, Probe sequence
ggtattgccgttgtatgtttaatga

SEQ ID NO: 160508 - DNA, 25 bp, Probe sequence
tgatgacgtcccacacggtttaatg

SEQ ID NO: 160509 - DNA, 25 bp, Probe sequence
tgacgtcccacacggtttaatgatg

SEQ ID NO: 160510 - DNA, 25 bp, Probe sequence
tgttaaacatgatgacgtcccacac

SEQ ID NO: 160511 - DNA, 25 bp, Probe sequence
tgccgttgtatgtttaatgattttt

SEQ ID NO: 160512 - DNA, 25 bp, Probe sequence
taaacatgatgacgtcccacacggt

SEQ ID NO: 160513 - DNA, 25 bp, Probe sequence
tattggtattgccgttgtatgttta

SEQ ID NO: 160514 - DNA, 25 bp, Probe sequence
ttattggtattgccgttgtatgttt

SEQ ID NO: 160515 - DNA, 25 bp, Probe sequence
ttaaacatgatgacgtcccacacgg

SEQ ID NO: 160516 - DNA, 25 bp, Probe sequence
ttggtattgccgttgtatgtttaat

SEQ ID NO: 160517 - DNA, 25 bp, Probe sequence
ttgttaaacatgatgacgtcccaca

SEQ ID NO: 160518 - DNA, 25 bp, Probe sequence
ttgttattggtattgccgttgtatg

SEQ ID NO: 160519 - DNA, 25 bp, Probe sequence
attgttgaacgattacgtcgcgcat

SEQ ID NO: 160520 - DNA, 25 bp, Probe sequence
gacacatcaggttctggtttgaaca

SEQ ID NO: 160521 - DNA, 25 bp, Probe sequence
atggttgcgcacagcagaccgaatc

SEQ ID NO: 160522 - DNA, 25 bp, Probe sequence
agattagcacaaggtgaagcaccaa

SEQ ID NO: 160523 - DNA, 25 bp, Probe sequence
agaagcttgtttaattgctcaaaat

SEQ ID NO: 160524 - DNA, 25 bp, Probe sequence
accaaagcgctcccttgggaatcta

SEQ ID NO: 160525 - DNA, 25 bp, Probe sequence
acgattacgtcgcgcatataacgaa

SEQ ID NO: 160526 - DNA, 25 bp, Probe sequence
acaacatccatttttatctacatac

SEQ ID NO: 160527 - DNA, 25 bp, Probe sequence
aaaatatcgcacctggttttaatcg

SEQ ID NO: 160528 - DNA, 25 bp, Probe sequence
aattgatccattttgcggttcgggt

SEQ ID NO: 160529 - DNA, 25 bp, Probe sequence
cactacatagtgtgccagattgtca

SEQ ID NO: 160530 - DNA, 25 bp, Probe sequence
cgttggcagcaagtttaatccgtct

SEQ ID NO: 160531 - DNA, 25 bp, Probe sequence
ccagattgtcaggcgataactaaga

SEQ ID NO: 160532 - DNA, 25 bp, Probe sequence
gcgttaattggaaatcctccatatg

SEQ ID NO: 160533 - DNA, 25 bp, Probe sequence
gaatgtacttattatcaatactggg

SEQ ID NO: 160534 - DNA, 25 bp, Probe sequence
gaagttgaagaaatgtaccgttata

SEQ ID NO: 160535 - DNA, 25 bp, Probe sequence
gaagctgttgttgctagggaaattc

SEQ ID NO: 160536 - DNA, 25 bp, Probe sequence
gaagcggataagatggctgattatg

SEQ ID NO: 160537 - DNA, 25 bp, Probe sequence
gaccgaatcaaaattgttgttggac

SEQ ID NO: 160538 - DNA, 25 bp, Probe sequence
gagacgcaagtgcaattgtaaaggc

SEQ ID NO: 160539 - DNA, 25 bp, Probe sequence
gagcaatggaacatcatgccagcaa

SEQ ID NO: 160540 - DNA, 25 bp, Probe sequence
gtttcaattacttgcagtttgtccg

SEQ ID NO: 160541 - DNA, 25 bp, Probe sequence
gtttaatccgtcttgcaaactggaa

SEQ ID NO: 160542 - DNA, 25 bp, Probe sequence
gtaacttcccagttcaaggtagaag

SEQ ID NO: 160543 - DNA, 25 bp, Probe sequence
gtccgatgggattagaagctgttgt

SEQ ID NO: 160544 - DNA, 25 bp, Probe sequence
ggtgatacacctttaattgatccat

SEQ ID NO: 160545 - DNA, 25 bp, Probe sequence
tcctccatatggtgaacgtattggt

SEQ ID NO: 160546 - DNA, 25 bp, Probe sequence
tgttgttggacgttttaacgcaaca

SEQ ID NO: 160547 - DNA, 25 bp, Probe sequence
tgcggttcgggtacaatagctatag

SEQ ID NO: 160548 - DNA, 25 bp, Probe sequence
tacttgcagtttgtccgatgggatt

SEQ ID NO: 160549 - DNA, 25 bp, Probe sequence
tagagattgctaagcgtaacgctga

SEQ ID NO: 160550 - DNA, 25 bp, Probe sequence
tatttatgatgattaccgtgatgaa

SEQ ID NO: 160551 - DNA, 25 bp, Probe sequence
tattcgaacaaaccaaagcgctccc

SEQ ID NO: 160552 - DNA, 25 bp, Probe sequence
ttgctcaaaatatcgcacctggttt

SEQ ID NO: 160553 - DNA, 25 bp, Probe sequence
atacaacaacaaatacatcttcaaa

SEQ ID NO: 160554 - DNA, 25 bp, Probe sequence
atcagaagagaatcataaacttaaa

SEQ ID NO: 160555 - DNA, 25 bp, Probe sequence
atgtcagatgtttcattgaaattat

SEQ ID NO: 160556 - DNA, 25 bp, Probe sequence
atggctcgtggctatagaagagaag

SEQ ID NO: 160557 - DNA, 25 bp, Probe sequence
agaagaattaagactacgtgtagca

SEQ ID NO: 160558 - DNA, 25 bp, Probe sequence
acaacaacaaatacatcttcaaata

SEQ ID NO: 160559 - DNA, 25 bp, Probe sequence
aaaaaatggccgatatgaataatga

SEQ ID NO: 160560 - DNA, 25 bp, Probe sequence
aacaacaaatacatcttcaaataat

SEQ ID NO: 160561 - DNA, 25 bp, Probe sequence
aatggccgatatgaataatgaagtt

SEQ ID NO: 160562 - DNA, 25 bp, Probe sequence
aatacaacaacaaatacatcttcaa

SEQ ID NO: 160563 - DNA, 25 bp, Probe sequence
gcatttttagatgacattattgctg

SEQ ID NO: 160564 - DNA, 25 bp, Probe sequence
gaattaagactacgtgtagcaacat

SEQ ID NO: 160565 - DNA, 25 bp, Probe sequence
gaagtagatgcatttttagatgaca

SEQ ID NO: 160566 - DNA, 25 bp, Probe sequence
gaagttgtaaaattatcagaagaga

SEQ ID NO: 160567 - DNA, 25 bp, Probe sequence
gaagagaagaagtagatgcattttt

SEQ ID NO: 160568 - DNA, 25 bp, Probe sequence
gaagaagtagatgcatttttagatg

SEQ ID NO: 160569 - DNA, 25 bp, Probe sequence
gaagaattaagactacgtgtagcaa

SEQ ID NO: 160570 - DNA, 25 bp, Probe sequence
gagaagaagtagatgcatttttaga

SEQ ID NO: 160571 - DNA, 25 bp, Probe sequence
gatgacattattgctgattatcaaa

SEQ ID NO: 160572 - DNA, 25 bp, Probe sequence
gatgcatttttagatgacattattg

SEQ ID NO: 160573 - DNA, 25 bp, Probe sequence
gtttcattgaaattatcagcaaaag

SEQ ID NO: 160574 - DNA, 25 bp, Probe sequence
gtatttcaaacttagaaaaagctgt

SEQ ID NO: 160575 - DNA, 25 bp, Probe sequence
gtagatgcatttttagatgacatta

SEQ ID NO: 160576 - DNA, 25 bp, Probe sequence
ggctcgtggctatagaagagaagaa

SEQ ID NO: 160577 - DNA, 25 bp, Probe sequence
ggccgatatgaataatgaagttgta

SEQ ID NO: 160578 - DNA, 25 bp, Probe sequence
tcaggacaataaaagtttttcttcg

SEQ ID NO: 160579 - DNA, 25 bp, Probe sequence
tgacattattgctgattatcaaaaa

SEQ ID NO: 160580 - DNA, 25 bp, Probe sequence
taatgtagatattttaaaacgtatt

SEQ ID NO: 160581 - DNA, 25 bp, Probe sequence
tagatgacattattgctgattatca

SEQ ID NO: 160582 - DNA, 25 bp, Probe sequence
tttagatgacattattgctgattat

SEQ ID NO: 160583 - DNA, 25 bp, Probe sequence
tttttcttcgaataatacaacaaca

SEQ ID NO: 160584 - DNA, 25 bp, Probe sequence
ttttcttcgaataatacaacaacaa

SEQ ID NO: 160585 - DNA, 25 bp, Probe sequence
ttcttcgaataatacaacaacaaat

SEQ ID NO: 160586 - DNA, 25 bp, Probe sequence
ttgctgattatcaaaaaatggccga

SEQ ID NO: 160587 - DNA, 25 bp, Probe sequence
attgaattacaacgaacatatgatt

SEQ ID NO: 160588 - DNA, 25 bp, Probe sequence
attacaccgttccaaggacatacag

SEQ ID NO: 160589 - DNA, 25 bp, Probe sequence
atgacttacagtggtctgaagatca

SEQ ID NO: 160590 - DNA, 25 bp, Probe sequence
atgggtatagaattatggactgcag

SEQ ID NO: 160591 - DNA, 25 bp, Probe sequence
agtttgctgtaattacaccgttcca

SEQ ID NO: 160592 - DNA, 25 bp, Probe sequence
acaccgttccaaggacatacagaaa

SEQ ID NO: 160593 - DNA, 25 bp, Probe sequence
aacatttttaaagatgacgcacctg

SEQ ID NO: 160594 - DNA, 25 bp, Probe sequence
aagcatgcagattatgttgatagta

SEQ ID NO: 160595 - DNA, 25 bp, Probe sequence
aagatgacgcacctgaagtacatta

SEQ ID NO: 160596 - DNA, 25 bp, Probe sequence
caaactatacttgtgatattgtgac

SEQ ID NO: 160597 - DNA, 25 bp, Probe sequence
catatgattcgttaaagtttgctgt

SEQ ID NO: 160598 - DNA, 25 bp, Probe sequence
gctgtaattacaccgttccaaggac

SEQ ID NO: 160599 - DNA, 25 bp, Probe sequence
gcagatcaatttatgcttgaacatt

SEQ ID NO: 160600 - DNA, 25 bp, Probe sequence
gcacctgaagtacattatttaaaac

SEQ ID NO: 160601 - DNA, 25 bp, Probe sequence
gaatgggtgttaatacaagggcaaa

SEQ ID NO: 160602 - DNA, 25 bp, Probe sequence
gaacaactgttggatgaaggattag

SEQ ID NO: 160603 - DNA, 25 bp, Probe sequence
gactgcagaagttgttattgaatta

SEQ ID NO: 160604 - DNA, 25 bp, Probe sequence
gacgcacctgaagtacattatttaa

SEQ ID NO: 160605 - DNA, 25 bp, Probe sequence
gatgttagttgattttatggataaa

SEQ ID NO: 160606 - DNA, 25 bp, Probe sequence
gatagtatttttcatacgtcgtatc

SEQ ID NO: 160607 - DNA, 25 bp, Probe sequence
gtaattacaccgttccaaggacata

SEQ ID NO: 160608 - DNA, 25 bp, Probe sequence
gtaacaggttacaaatcattcgaat

SEQ ID NO: 160609 - DNA, 25 bp, Probe sequence
gtgacgttcgatgaattaacagcat

SEQ ID NO: 160610 - DNA, 25 bp, Probe sequence
gtgatattgtgacgttcgatgaatt

SEQ ID NO: 160611 - DNA, 25 bp, Probe sequence
gtggtctgaagatcaaagtttctaa

SEQ ID NO: 160612 - DNA, 25 bp, Probe sequence
ggtccttttcaatttaaacaagcag

SEQ ID NO: 160613 - DNA, 25 bp, Probe sequence
ggttacaaatcattcgaattaaaca

SEQ ID NO: 160614 - DNA, 25 bp, Probe sequence
ggatgaaggattagaatgggtgtta

SEQ ID NO: 160615 - DNA, 25 bp, Probe sequence
tgccaacataattaagcatgcagat

SEQ ID NO: 160616 - DNA, 25 bp, Probe sequence
tcatcaatgacttacagtggtctga

SEQ ID NO: 160617 - DNA, 25 bp, Probe sequence
taatcaaagtaagtatgccaacata

SEQ ID NO: 160618 - DNA, 25 bp, Probe sequence
taacagcattcatcaatgacttaca

SEQ ID NO: 160619 - DNA, 25 bp, Probe sequence
tacttgtgatattgtgacgttcgat

SEQ ID NO: 160620 - DNA, 25 bp, Probe sequence
tatggactgcagaagttgttattga

SEQ ID NO: 160621 - DNA, 25 bp, Probe sequence
attgaacaactttctgtcgaatgtc

SEQ ID NO: 160622 - DNA, 25 bp, Probe sequence
attacatcgtgaatttattatagaa

SEQ ID NO: 160623 - DNA, 25 bp, Probe sequence
atagaagtaccttatatgaattcaa

SEQ ID NO: 160624 - DNA, 25 bp, Probe sequence
atgagatcaaattacatcgtgaatt

SEQ ID NO: 160625 - DNA, 25 bp, Probe sequence
atgtcattttaagcgaacaagtcga

SEQ ID NO: 160626 - DNA, 25 bp, Probe sequence
agtcgaatcactaatttatgaagtt

SEQ ID NO: 160627 - DNA, 25 bp, Probe sequence
agatcatgatttttaccaaactgta

SEQ ID NO: 160628 - DNA, 25 bp, Probe sequence
agcgaacaagtcgaaagttatttat

SEQ ID NO: 160629 - DNA, 25 bp, Probe sequence
acaactttctgtcgaatgtcatttt

SEQ ID NO: 160630 - DNA, 25 bp, Probe sequence
aacaactttctgtcgaatgtcattt

SEQ ID NO: 160631 - DNA, 25 bp, Probe sequence
aacattgaacaactttctgtcgaat

SEQ ID NO: 160632 - DNA, 25 bp, Probe sequence
aactttctgtcgaatgtcattttaa

SEQ ID NO: 160633 - DNA, 25 bp, Probe sequence
aactgtaaagccatatactgaacat

SEQ ID NO: 160634 - DNA, 25 bp, Probe sequence
caagatcatgatttttaccaaactg

SEQ ID NO: 160635 - DNA, 25 bp, Probe sequence
ctttctgtcgaatgtcattttaagc

SEQ ID NO: 160636 - DNA, 25 bp, Probe sequence
ctcaatgagatcaaattacatcgtg

SEQ ID NO: 160637 - DNA, 25 bp, Probe sequence
ctaacattgaacaactttctgtcga

SEQ ID NO: 160638 - DNA, 25 bp, Probe sequence
gccatatactgaacatattgatagc

SEQ ID NO: 160639 - DNA, 25 bp, Probe sequence
gctaacattgaacaactttctgtcg

SEQ ID NO: 160640 - DNA, 25 bp, Probe sequence
gaatgtcattttaagcgaacaagtc

SEQ ID NO: 160641 - DNA, 25 bp, Probe sequence
gaagttaacaacatgcaacaaaatt

SEQ ID NO: 160642 - DNA, 25 bp, Probe sequence
gaagtaccttatatgaattcaagga

SEQ ID NO: 160643 - DNA, 25 bp, Probe sequence
gaacaactttctgtcgaatgtcatt

SEQ ID NO: 160644 - DNA, 25 bp, Probe sequence
gatttttaccaaactgtaaagccat

SEQ ID NO: 160645 - DNA, 25 bp, Probe sequence
gattgctaacattgaacaactttct

SEQ ID NO: 160646 - DNA, 25 bp, Probe sequence
gtaaagccatatactgaacatattg

SEQ ID NO: 160647 - DNA, 25 bp, Probe sequence
gtcgaatgtcattttaagcgaacaa

SEQ ID NO: 160648 - DNA, 25 bp, Probe sequence
gtgaatttattatagaagtacctta

SEQ ID NO: 160649 - DNA, 25 bp, Probe sequence
tgaacaactttctgtcgaatgtcat

SEQ ID NO: 160650 - DNA, 25 bp, Probe sequence
tcacaacaacaagatcatgattttt

SEQ ID NO: 160651 - DNA, 25 bp, Probe sequence
tacaaaatatattagatggcgtaac

SEQ ID NO: 160652 - DNA, 25 bp, Probe sequence
taccaaactgtaaagccatatactg

SEQ ID NO: 160653 - DNA, 25 bp, Probe sequence
ttatgaagttaacaacatgcaacaa

SEQ ID NO: 160654 - DNA, 25 bp, Probe sequence
ttctgtcgaatgtcattttaagcga

SEQ ID NO: 160655 - DNA, 25 bp, Probe sequence
atatcctgttgtgccaatgaatttt

SEQ ID NO: 160656 - DNA, 25 bp, Probe sequence
atcaatatcctgttgtgccaatgaa

SEQ ID NO: 160657 - DNA, 25 bp, Probe sequence
atcattttatgggctatcgacaaat

SEQ ID NO: 160658 - DNA, 25 bp, Probe sequence
atcctgttgtgccaatgaattttaa

SEQ ID NO: 160659 - DNA, 25 bp, Probe sequence
atgggctatcgacaaatgaagacct

SEQ ID NO: 160660 - DNA, 25 bp, Probe sequence
acttggatgaataccatagtaaaat

SEQ ID NO: 160661 - DNA, 25 bp, Probe sequence
aaatcaatatcctgttgtgccaatg

SEQ ID NO: 160662 - DNA, 25 bp, Probe sequence
aagaggtatttgataatttagaaca

SEQ ID NO: 160663 - DNA, 25 bp, Probe sequence
aatgaagacctttaaaactgaattg

SEQ ID NO: 160664 - DNA, 25 bp, Probe sequence
aatgaatgctagttatcaaacaagg

SEQ ID NO: 160665 - DNA, 25 bp, Probe sequence
aatatcctgttgtgccaatgaattt

SEQ ID NO: 160666 - DNA, 25 bp, Probe sequence
aatcaatatcctgttgtgccaatga

SEQ ID NO: 160667 - DNA, 25 bp, Probe sequence
aatatcattttatgggctatcgaca

SEQ ID NO: 160668 - DNA, 25 bp, Probe sequence
aattattgattattttaagcaggtt

SEQ ID NO: 160669 - DNA, 25 bp, Probe sequence
caatatcctgttgtgccaatgaatt

SEQ ID NO: 160670 - DNA, 25 bp, Probe sequence
ctgttgtgccaatgaattttaaaga

SEQ ID NO: 160671 - DNA, 25 bp, Probe sequence
gctatcgacaaatgaagacctttaa

SEQ ID NO: 160672 - DNA, 25 bp, Probe sequence
gaagacctttaaaactgaattgatt

SEQ ID NO: 160673 - DNA, 25 bp, Probe sequence
gaacgtaaatatcattttatgggct

SEQ ID NO: 160674 - DNA, 25 bp, Probe sequence
gatatgattatatgattgaacgtaa

SEQ ID NO: 160675 - DNA, 25 bp, Probe sequence
gattattttaagcaggttaatgaca

SEQ ID NO: 160676 - DNA, 25 bp, Probe sequence
gttgtgccaatgaattttaaagaaa

SEQ ID NO: 160677 - DNA, 25 bp, Probe sequence
gtaaatatcattttatgggctatcg

SEQ ID NO: 160678 - DNA, 25 bp, Probe sequence
gggctatcgacaaatgaagaccttt

SEQ ID NO: 160679 - DNA, 25 bp, Probe sequence
ggctatcgacaaatgaagaccttta

SEQ ID NO: 160680 - DNA, 25 bp, Probe sequence
tgggctatcgacaaatgaagacctt

SEQ ID NO: 160681 - DNA, 25 bp, Probe sequence
tcctgttgtgccaatgaattttaaa

SEQ ID NO: 160682 - DNA, 25 bp, Probe sequence
tcaatatcctgttgtgccaatgaat

SEQ ID NO: 160683 - DNA, 25 bp, Probe sequence
taaatcaatatcctgttgtgccaat

SEQ ID NO: 160684 - DNA, 25 bp, Probe sequence
tatgggctatcgacaaatgaagacc

SEQ ID NO: 160685 - DNA, 25 bp, Probe sequence
tatcctgttgtgccaatgaatttta

SEQ ID NO: 160686 - DNA, 25 bp, Probe sequence
tatcattttatgggctatcgacaaa

SEQ ID NO: 160687 - DNA, 25 bp, Probe sequence
ttttatgggctatcgacaaatgaag

SEQ ID NO: 160688 - DNA, 25 bp, Probe sequence
ttaaatcaatatcctgttgtgccaa

SEQ ID NO: 160689 - DNA, 25 bp, Probe sequence
attgtcagcgcaatgtacagacgtt

SEQ ID NO: 160690 - DNA, 25 bp, Probe sequence
atattcgttctatcggtctgtatcg

SEQ ID NO: 160691 - DNA, 25 bp, Probe sequence
atatgtttccggatgcagaatgtga

SEQ ID NO: 160692 - DNA, 25 bp, Probe sequence
atagagtaacaactgagctgtttaa

SEQ ID NO: 160693 - DNA, 25 bp, Probe sequence
atcaactcattttctttggaagata

SEQ ID NO: 160694 - DNA, 25 bp, Probe sequence
atcggtctgtatcgtaacaaagcta

SEQ ID NO: 160695 - DNA, 25 bp, Probe sequence
atccgttcgaattaactattgctgt

SEQ ID NO: 160696 - DNA, 25 bp, Probe sequence
atgttctgtcatacctagagataga

SEQ ID NO: 160697 - DNA, 25 bp, Probe sequence
agccatcatcaactcattttctttg

SEQ ID NO: 160698 - DNA, 25 bp, Probe sequence
agcccgaaaacctaaatgcgatatt

SEQ ID NO: 160699 - DNA, 25 bp, Probe sequence
actattgctgtattattgtcagcgc

SEQ ID NO: 160700 - DNA, 25 bp, Probe sequence
aaaacctaaatgcgatatttgtcca

SEQ ID NO: 160701 - DNA, 25 bp, Probe sequence
aactgctaatgtagtcatgagtgta

SEQ ID NO: 160702 - DNA, 25 bp, Probe sequence
aacgcctgaagattatttggcagtc

SEQ ID NO: 160703 - DNA, 25 bp, Probe sequence
aagaaactttgtcaatctttgattg

SEQ ID NO: 160704 - DNA, 25 bp, Probe sequence
cgcttaggtattaatcgttggaaag

SEQ ID NO: 160705 - DNA, 25 bp, Probe sequence
gaatgatattcgttctatcggtctg

SEQ ID NO: 160706 - DNA, 25 bp, Probe sequence
gaaccttcattagctgttgatacgc

SEQ ID NO: 160707 - DNA, 25 bp, Probe sequence
gaaagtttagcaggtgtaggacgta

SEQ ID NO: 160708 - DNA, 25 bp, Probe sequence
gaccgtttatgttctgtcataccta

SEQ ID NO: 160709 - DNA, 25 bp, Probe sequence
gagtgtagcatttgatgaaccttca

SEQ ID NO: 160710 - DNA, 25 bp, Probe sequence
gatgttatagcaaatatgtttccgg

SEQ ID NO: 160711 - DNA, 25 bp, Probe sequence
gatgaaccttcattagctgttgata

SEQ ID NO: 160712 - DNA, 25 bp, Probe sequence
gattatttggcagtcagtgatgaag

SEQ ID NO: 160713 - DNA, 25 bp, Probe sequence
gtgagacaggtagaagaccgtttat

SEQ ID NO: 160714 - DNA, 25 bp, Probe sequence
ggtgtaggacgtaaaactgctaatg

SEQ ID NO: 160715 - DNA, 25 bp, Probe sequence
ggagaaataccacaaacacataagg

SEQ ID NO: 160716 - DNA, 25 bp, Probe sequence
ggcagtcagtgatgaagaacttatg

SEQ ID NO: 160717 - DNA, 25 bp, Probe sequence
tggaagataccactgtttagcccga

SEQ ID NO: 160718 - DNA, 25 bp, Probe sequence
tgatacgcatgtagaacgtgtttct

SEQ ID NO: 160719 - DNA, 25 bp, Probe sequence
tcgttctatcggtctgtatcgtaac

SEQ ID NO: 160720 - DNA, 25 bp, Probe sequence
tcattagctgttgatacgcatgtag

SEQ ID NO: 160721 - DNA, 25 bp, Probe sequence
tagaacgtgtttctaaacgcttagg

SEQ ID NO: 160722 - DNA, 25 bp, Probe sequence
taaaacatgataatccgttcgaatt

SEQ ID NO: 160723 - DNA, 25 bp, Probe sequence
atgatggttaacatgggtacgccta

SEQ ID NO: 160724 - DNA, 25 bp, Probe sequence
atacagaaattaaactcgtaaatga

SEQ ID NO: 160725 - DNA, 25 bp, Probe sequence
atcctgataacatcaacatgatgat

SEQ ID NO: 160726 - DNA, 25 bp, Probe sequence
atgatgatggttaacatgggtacgc

SEQ ID NO: 160727 - DNA, 25 bp, Probe sequence
atggttaacatgggtacgcctaatt

SEQ ID NO: 160728 - DNA, 25 bp, Probe sequence
atgggtacgcctaatttaaatacag

SEQ ID NO: 160729 - DNA, 25 bp, Probe sequence
agaaattaaactcgtaaatgatgtt

SEQ ID NO: 160730 - DNA, 25 bp, Probe sequence
acagaaattaaactcgtaaatgatg

SEQ ID NO: 160731 - DNA, 25 bp, Probe sequence
aacatcaacatgatgatggttaaca

SEQ ID NO: 160732 - DNA, 25 bp, Probe sequence
aatcctgataacatcaacatgatga

SEQ ID NO: 160733 - DNA, 25 bp, Probe sequence
aatacagaaattaaactcgtaaatg

SEQ ID NO: 160734 - DNA, 25 bp, Probe sequence
cagaaattaaactcgtaaatgatgt

SEQ ID NO: 160735 - DNA, 25 bp, Probe sequence
catgggtacgcctaatttaaataca

SEQ ID NO: 160736 - DNA, 25 bp, Probe sequence
cgaatcctgataacatcaacatgat

SEQ ID NO: 160737 - DNA, 25 bp, Probe sequence
cctgataacatcaacatgatgatgg

SEQ ID NO: 160738 - DNA, 25 bp, Probe sequence
gaatcctgataacatcaacatgatg

SEQ ID NO: 160739 - DNA, 25 bp, Probe sequence
gaaattaaactcgtaaatgatgtta

SEQ ID NO: 160740 - DNA, 25 bp, Probe sequence
gatggttaacatgggtacgcctaat

SEQ ID NO: 160741 - DNA, 25 bp, Probe sequence
gatgatggttaacatgggtacgcct

SEQ ID NO: 160742 - DNA, 25 bp, Probe sequence
gataacatcaacatgatgatggtta

SEQ ID NO: 160743 - DNA, 25 bp, Probe sequence
gtacgcctaatttaaatacagaaat

SEQ ID NO: 160744 - DNA, 25 bp, Probe sequence
gtcgaatcctgataacatcaacatg

SEQ ID NO: 160745 - DNA, 25 bp, Probe sequence
gtgtcgaatcctgataacatcaaca

SEQ ID NO: 160746 - DNA, 25 bp, Probe sequence
tggttaacatgggtacgcctaattt

SEQ ID NO: 160747 - DNA, 25 bp, Probe sequence
tgggtacgcctaatttaaatacaga

SEQ ID NO: 160748 - DNA, 25 bp, Probe sequence
tgtcgaatcctgataacatcaacat

SEQ ID NO: 160749 - DNA, 25 bp, Probe sequence
tgatggttaacatgggtacgcctaa

SEQ ID NO: 160750 - DNA, 25 bp, Probe sequence
tgatgatggttaacatgggtacgcc

SEQ ID NO: 160751 - DNA, 25 bp, Probe sequence
tcctgataacatcaacatgatgatg

SEQ ID NO: 160752 - DNA, 25 bp, Probe sequence
tcgaatcctgataacatcaacatga

SEQ ID NO: 160753 - DNA, 25 bp, Probe sequence
taacatgggtacgcctaatttaaat

SEQ ID NO: 160754 - DNA, 25 bp, Probe sequence
taacatcaacatgatgatggttaac

SEQ ID NO: 160755 - DNA, 25 bp, Probe sequence
taaactcgtaaatgatgttaaaagt

SEQ ID NO: 160756 - DNA, 25 bp, Probe sequence
tacgcctaatttaaatacagaaatt

SEQ ID NO: 160757 - DNA, 25 bp, Probe sequence
attaagtcatatattgaagcaacaa

SEQ ID NO: 160758 - DNA, 25 bp, Probe sequence
atatgaatctagatccttttttcga

SEQ ID NO: 160759 - DNA, 25 bp, Probe sequence
atacatttgcaaggccgttatctcc

SEQ ID NO: 160760 - DNA, 25 bp, Probe sequence
ataaaccgaaaatgacgcacacagt

SEQ ID NO: 160761 - DNA, 25 bp, Probe sequence
atggattgatgttgataaacacgat

SEQ ID NO: 160762 - DNA, 25 bp, Probe sequence
aggtttagatgagcaagatttagtc

SEQ ID NO: 160763 - DNA, 25 bp, Probe sequence
agaagggctcaactatgcaaccacg

SEQ ID NO: 160764 - DNA, 25 bp, Probe sequence
acaagcggcattagacgaggcgaat

SEQ ID NO: 160765 - DNA, 25 bp, Probe sequence
acatttgcaaggccgttatctccat

SEQ ID NO: 160766 - DNA, 25 bp, Probe sequence
aaaagcaagacctgtagtgatacga

SEQ ID NO: 160767 - DNA, 25 bp, Probe sequence
aattgatttatgcttccgaaacatc

SEQ ID NO: 160768 - DNA, 25 bp, Probe sequence
caaggccgttatctccatatgaaat

SEQ ID NO: 160769 - DNA, 25 bp, Probe sequence
caaaacaattgacgattctagaaaa

SEQ ID NO: 160770 - DNA, 25 bp, Probe sequence
cttcagaagggctcaactatgcaac

SEQ ID NO: 160771 - DNA, 25 bp, Probe sequence
gcggcattagacgaggcgaatagtt

SEQ ID NO: 160772 - DNA, 25 bp, Probe sequence
gcaagatttagtcattttgcttaaa

SEQ ID NO: 160773 - DNA, 25 bp, Probe sequence
gcaagacctgtagtgatacgaagag

SEQ ID NO: 160774 - DNA, 25 bp, Probe sequence
gcaattatacaagcggcattagacg

SEQ ID NO: 160775 - DNA, 25 bp, Probe sequence
gaattgctagaattacaagttcaaa

SEQ ID NO: 160776 - DNA, 25 bp, Probe sequence
gaagagaattattagaccattacag

SEQ ID NO: 160777 - DNA, 25 bp, Probe sequence
gaagcaacaaagtatggaaacgaaa

SEQ ID NO: 160778 - DNA, 25 bp, Probe sequence
gaccattacagtgacttaggtttag

SEQ ID NO: 160779 - DNA, 25 bp, Probe sequence
gacgaggcgaatagtttgaataaac

SEQ ID NO: 160780 - DNA, 25 bp, Probe sequence
gacgcacacagttaaaacggtacct

SEQ ID NO: 160781 - DNA, 25 bp, Probe sequence
gatcgtattttacttaattggaaga

SEQ ID NO: 160782 - DNA, 25 bp, Probe sequence
gatattacaatggttattcaaaatt

SEQ ID NO: 160783 - DNA, 25 bp, Probe sequence
ggccgttatctccatatgaaataga

SEQ ID NO: 160784 - DNA, 25 bp, Probe sequence
tggttaaacggggagaaccttgatg

SEQ ID NO: 160785 - DNA, 25 bp, Probe sequence
tgatttatgcttccgaaacatcaaa

SEQ ID NO: 160786 - DNA, 25 bp, Probe sequence
tgaatctagatccttttttcgaaaa

SEQ ID NO: 160787 - DNA, 25 bp, Probe sequence
tagaggatacatttgcaaggccgtt

SEQ ID NO: 160788 - DNA, 25 bp, Probe sequence
tagtcattttgcttaaattgattta

SEQ ID NO: 160789 - DNA, 25 bp, Probe sequence
tttgcaaggccgttatctccatatg

SEQ ID NO: 160790 - DNA, 25 bp, Probe sequence
ttattagaccattacagtgacttag

SEQ ID NO: 160791 - DNA, 25 bp, Probe sequence
agataatcgttctgacttaggatac

SEQ ID NO: 160792 - DNA, 25 bp, Probe sequence
acagaattcttaatggatcaccgtc

SEQ ID NO: 160793 - DNA, 25 bp, Probe sequence
aaaacacgtagacacttgatcgagt

SEQ ID NO: 160794 - DNA, 25 bp, Probe sequence
aagcctttctatatgcaaccaaatc

SEQ ID NO: 160795 - DNA, 25 bp, Probe sequence
aatcgcctttttacaattacgtgat

SEQ ID NO: 160796 - DNA, 25 bp, Probe sequence
aatactttgatcaagatgcgttttt

SEQ ID NO: 160797 - DNA, 25 bp, Probe sequence
cacactgtggatttggtttaggttt

SEQ ID NO: 160798 - DNA, 25 bp, Probe sequence
catttggtccaactttcagagctga

SEQ ID NO: 160799 - DNA, 25 bp, Probe sequence
gcgccattcccaagattattaaacc

SEQ ID NO: 160800 - DNA, 25 bp, Probe sequence
gcgcatgactatccgattacaccta

SEQ ID NO: 160801 - DNA, 25 bp, Probe sequence
gcgacaccattccctagaatttcat

SEQ ID NO: 160802 - DNA, 25 bp, Probe sequence
gcatggatttctggtgttgaacacg

SEQ ID NO: 160803 - DNA, 25 bp, Probe sequence
gcagacttaattgcacctgaaggat

SEQ ID NO: 160804 - DNA, 25 bp, Probe sequence
gcaatggcacacggaaaagtatttt

SEQ ID NO: 160805 - DNA, 25 bp, Probe sequence
gaaggctttgatgatattgaatggg

SEQ ID NO: 160806 - DNA, 25 bp, Probe sequence
gaagaggtattcaaacttgcgaaag

SEQ ID NO: 160807 - DNA, 25 bp, Probe sequence
gaagttatttcagaagcgcatgact

SEQ ID NO: 160808 - DNA, 25 bp, Probe sequence
gaagattttggtgcgccacatgaaa

SEQ ID NO: 160809 - DNA, 25 bp, Probe sequence
gaacgtgtggatgacttagaattgt

SEQ ID NO: 160810 - DNA, 25 bp, Probe sequence
gaacaggctttatgcaaggcgtagt

SEQ ID NO: 160811 - DNA, 25 bp, Probe sequence
gaaagatcatttaaaccaagacgtt

SEQ ID NO: 160812 - DNA, 25 bp, Probe sequence
gaaatgaagttattcgtgcaacgta

SEQ ID NO: 160813 - DNA, 25 bp, Probe sequence
gacacttgatcgagttctggatgat

SEQ ID NO: 160814 - DNA, 25 bp, Probe sequence
gatgcgtttttatctcaaagtggtc

SEQ ID NO: 160815 - DNA, 25 bp, Probe sequence
gttacaggcacaattacagaagata

SEQ ID NO: 160816 - DNA, 25 bp, Probe sequence
gtggtcagttatacttagaagctgc

SEQ ID NO: 160817 - DNA, 25 bp, Probe sequence
ggttgatccaccaattttgacagca

SEQ ID NO: 160818 - DNA, 25 bp, Probe sequence
ggatcaccgtcatttatggttacgt

SEQ ID NO: 160819 - DNA, 25 bp, Probe sequence
tgaaaaagttgcgacaccattccct

SEQ ID NO: 160820 - DNA, 25 bp, Probe sequence
tcgtgcaacgtatgaatttttcaac

SEQ ID NO: 160821 - DNA, 25 bp, Probe sequence
tacgtgatggaacaggctttatgca

SEQ ID NO: 160822 - DNA, 25 bp, Probe sequence
tagacttacgtcgttatggtagtgt

SEQ ID NO: 160823 - DNA, 25 bp, Probe sequence
tagttactacttagacttacgtcgt

SEQ ID NO: 160824 - DNA, 25 bp, Probe sequence
tatccaactaaaattaagcctttct

SEQ ID NO: 160825 - DNA, 25 bp, Probe sequence
atattagatcagctcatgcatagtg

SEQ ID NO: 160826 - DNA, 25 bp, Probe sequence
atggtattaccttagcaaatgccca

SEQ ID NO: 160827 - DNA, 25 bp, Probe sequence
atgccgctactactgctaaattgat

SEQ ID NO: 160828 - DNA, 25 bp, Probe sequence
agcatatttacttgcggccttgatg

SEQ ID NO: 160829 - DNA, 25 bp, Probe sequence
agctgtagatcaacttggcttaaca

SEQ ID NO: 160830 - DNA, 25 bp, Probe sequence
acttgcggccttgatgtataatatt

SEQ ID NO: 160831 - DNA, 25 bp, Probe sequence
aaaaggcgacattcaacagtttgga

SEQ ID NO: 160832 - DNA, 25 bp, Probe sequence
aacctatgccgttgtggatttggaa

SEQ ID NO: 160833 - DNA, 25 bp, Probe sequence
aagctggacatactagtttcatttc

SEQ ID NO: 160834 - DNA, 25 bp, Probe sequence
aatggcagcttgaagtctttatata

SEQ ID NO: 160835 - DNA, 25 bp, Probe sequence
aatcatgcacatttaattcattctg

SEQ ID NO: 160836 - DNA, 25 bp, Probe sequence
aatattcaatatcgtcccaaaaaag

SEQ ID NO: 160837 - DNA, 25 bp, Probe sequence
aattgatatttttggcttgaaggct

SEQ ID NO: 160838 - DNA, 25 bp, Probe sequence
cgcttaccagactatgccttaaatc

SEQ ID NO: 160839 - DNA, 25 bp, Probe sequence
gccatactgcttggtacgtcaacat

SEQ ID NO: 160840 - DNA, 25 bp, Probe sequence
gctgacgaagatgccgctactactg

SEQ ID NO: 160841 - DNA, 25 bp, Probe sequence
gcatgtcatgatttctaccaatact

SEQ ID NO: 160842 - DNA, 25 bp, Probe sequence
gcaaatgcccatcgagctgacgaag

SEQ ID NO: 160843 - DNA, 25 bp, Probe sequence
gaaacatatgtaccggcacgtcacg

SEQ ID NO: 160844 - DNA, 25 bp, Probe sequence
gacgccgtccggagatatacaggaa

SEQ ID NO: 160845 - DNA, 25 bp, Probe sequence
gagcaattgttctcaacgatattta

SEQ ID NO: 160846 - DNA, 25 bp, Probe sequence
gatcgcggcataatagtttcatttg

SEQ ID NO: 160847 - DNA, 25 bp, Probe sequence
gatagcgaagttaccgtttatgaac

SEQ ID NO: 160848 - DNA, 25 bp, Probe sequence
gatattcatcgcttccataatgtat

SEQ ID NO: 160849 - DNA, 25 bp, Probe sequence
gtattaacacaacagcagaaccaaa

SEQ ID NO: 160850 - DNA, 25 bp, Probe sequence
gtggatgaagcacatcgcttaccag

SEQ ID NO: 160851 - DNA, 25 bp, Probe sequence
gggtatggcaacctatgccgttgtg

SEQ ID NO: 160852 - DNA, 25 bp, Probe sequence
ggtataacgtttgtgcgcaataacc

SEQ ID NO: 160853 - DNA, 25 bp, Probe sequence
ggattctgaattcacttcaactttc

SEQ ID NO: 160854 - DNA, 25 bp, Probe sequence
ttggattacagagacgccgtccgga

SEQ ID NO: 160855 - DNA, 25 bp, Probe sequence
tggcttaacatatcgaccgcaacaa

SEQ ID NO: 160856 - DNA, 25 bp, Probe sequence
taccggcacgtcacgatgttcatta

SEQ ID NO: 160857 - DNA, 25 bp, Probe sequence
tacctgatgcagttacacgttttag

SEQ ID NO: 160858 - DNA, 25 bp, Probe sequence
ttcattcaagcgttaacatccattg

SEQ ID NO: 160859 - DNA, 25 bp, Probe sequence
atttattcaattttacagtcagtgt

SEQ ID NO: 160860 - DNA, 25 bp, Probe sequence
ataatgtgtatcaaaatccaacgga

SEQ ID NO: 160861 - DNA, 25 bp, Probe sequence
atccaagaactttatgtcccggact

SEQ ID NO: 160862 - DNA, 25 bp, Probe sequence
atgccaatcgatatacatttgtatg

SEQ ID NO: 160863 - DNA, 25 bp, Probe sequence
atgacgaattcatttgtccgaataa

SEQ ID NO: 160864 - DNA, 25 bp, Probe sequence
gagacctacggtcatttacctgaat

SEQ ID NO: 160865 - DNA, 25 bp, Probe sequence
agccctctaccatgaattggtaacc

SEQ ID NO: 160866 - DNA, 25 bp, Probe sequence
aagtgacatctttaatactcaaaat

SEQ ID NO: 160867 - DNA, 25 bp, Probe sequence
aatcgaacgccactcataacatatg

SEQ ID NO: 160868 - DNA, 25 bp, Probe sequence
aatccaacggatactagaacgatga

SEQ ID NO: 160869 - DNA, 25 bp, Probe sequence
aattcaattcaagagacctacggtc

SEQ ID NO: 160870 - DNA, 25 bp, Probe sequence
aattgtcttttttcacttatccaag

SEQ ID NO: 160871 - DNA, 25 bp, Probe sequence
cacacaatctgtattctcaggtcgt

SEQ ID NO: 160872 - DNA, 25 bp, Probe sequence
gcatccgaatgatgtggctatcaca

SEQ ID NO: 160873 - DNA, 25 bp, Probe sequence
gaatgtcctctgaaaaatcaatgta

SEQ ID NO: 160874 - DNA, 25 bp, Probe sequence
gaacgatgattccatttttaaattc

SEQ ID NO: 160875 - DNA, 25 bp, Probe sequence
gacagattatgatgcgacatttatg

SEQ ID NO: 160876 - DNA, 25 bp, Probe sequence
gaggattctaaagccctctaccatg

SEQ ID NO: 160877 - DNA, 25 bp, Probe sequence
gatgtggaacctgtttttggattta

SEQ ID NO: 160878 - DNA, 25 bp, Probe sequence
gatgactttaatcgaacgccactca

SEQ ID NO: 160879 - DNA, 25 bp, Probe sequence
gatgcaggttatggtagtgaatcaa

SEQ ID NO: 160880 - DNA, 25 bp, Probe sequence
gatatgcctatcgtcatgataagta

SEQ ID NO: 160881 - DNA, 25 bp, Probe sequence
gatttgattggtagtcacttagata

SEQ ID NO: 160882 - DNA, 25 bp, Probe sequence
gtatggttataagcgagacttcaaa

SEQ ID NO: 160883 - DNA, 25 bp, Probe sequence
gtgatgattgttcagaatgtcctct

SEQ ID NO: 160884 - DNA, 25 bp, Probe sequence
gtgattctatatgcctacacacaat

SEQ ID NO: 160885 - DNA, 25 bp, Probe sequence
ggatgtctgtccgaggactcaataa

SEQ ID NO: 160886 - DNA, 25 bp, Probe sequence
ggacaacttaagccagggtataatt

SEQ ID NO: 160887 - DNA, 25 bp, Probe sequence
ggctatcacaaaatcaaaaaccttc

SEQ ID NO: 160888 - DNA, 25 bp, Probe sequence
tgggtttcactcggatgtctgtccg

SEQ ID NO: 160889 - DNA, 25 bp, Probe sequence
tacaaatagcaacaaattcccaatt

SEQ ID NO: 160890 - DNA, 25 bp, Probe sequence
tatgtcccggactcattatgattta

SEQ ID NO: 160891 - DNA, 25 bp, Probe sequence
ttatgatttatttttttattgctga

SEQ ID NO: 160892 - DNA, 25 bp, Probe sequence
ttcccaatttgttttatcttataat

SEQ ID NO: 160893 - DNA, 25 bp, Probe sequence
atacattcccacttgcgatgttaaa

SEQ ID NO: 160894 - DNA, 25 bp, Probe sequence
agttgatgttggtttcttaccacca

SEQ ID NO: 160895 - DNA, 25 bp, Probe sequence
agcacatgatcaaaaagcagctgat

SEQ ID NO: 160896 - DNA, 25 bp, Probe sequence
accaccaacggcatacacattagca

SEQ ID NO: 160897 - DNA, 25 bp, Probe sequence
acggcatacacattagcacatgatc

SEQ ID NO: 160898 - DNA, 25 bp, Probe sequence
acaattgttgaagctatgaagtcta

SEQ ID NO: 160899 - DNA, 25 bp, Probe sequence
aactgctggatatacattcccactt

SEQ ID NO: 160900 - DNA, 25 bp, Probe sequence
aacgaagcaggtattaatgcaacta

SEQ ID NO: 160901 - DNA, 25 bp, Probe sequence
aagcttttatagacattgctaaatc

SEQ ID NO: 160902 - DNA, 25 bp, Probe sequence
aagaaaattgccttacaagatgtaa

SEQ ID NO: 160903 - DNA, 25 bp, Probe sequence
aagattcaaatttcgacattgtaag

SEQ ID NO: 160904 - DNA, 25 bp, Probe sequence
aagatgtaacatcaactgctggata

SEQ ID NO: 160905 - DNA, 25 bp, Probe sequence
aaggtcatgaccaagcagttatctc

SEQ ID NO: 160906 - DNA, 25 bp, Probe sequence
aatgacacaatttctgtaagaccag

SEQ ID NO: 160907 - DNA, 25 bp, Probe sequence
caatttgtaccttcgcaaaatgctg

SEQ ID NO: 160908 - DNA, 25 bp, Probe sequence
ctgatttattattacaagcacaacg

SEQ ID NO: 160909 - DNA, 25 bp, Probe sequence
gctggatatacattcccacttgcga

SEQ ID NO: 160910 - DNA, 25 bp, Probe sequence
gctgtatttaacgatgcacgtaata

SEQ ID NO: 160911 - DNA, 25 bp, Probe sequence
gctattccgaatgacacaatttctg

SEQ ID NO: 160912 - DNA, 25 bp, Probe sequence
gaaggatacacagaaacgaaagatt

SEQ ID NO: 160913 - DNA, 25 bp, Probe sequence
gaaggtcacaaaattattagcgaag

SEQ ID NO: 160914 - DNA, 25 bp, Probe sequence
gaacgctagtaatgattcggattct

SEQ ID NO: 160915 - DNA, 25 bp, Probe sequence
gaccaagcagttatctcattattaa

SEQ ID NO: 160916 - DNA, 25 bp, Probe sequence
gattcggattctaaatcaggaggat

SEQ ID NO: 160917 - DNA, 25 bp, Probe sequence
gttagcagtcattgtttttgcagca

SEQ ID NO: 160918 - DNA, 25 bp, Probe sequence
gtaccttcgcaaaatgctggaacat

SEQ ID NO: 160919 - DNA, 25 bp, Probe sequence
gtgtctgtatcaactaactacaata

SEQ ID NO: 160920 - DNA, 25 bp, Probe sequence
taacgatgcacgtaatactgtgaaa

SEQ ID NO: 160921 - DNA, 25 bp, Probe sequence
tactgtgaaaaaagaccaaccaaat

SEQ ID NO: 160922 - DNA, 25 bp, Probe sequence
tttcttaccaccaacggcatacaca

SEQ ID NO: 160923 - DNA, 25 bp, Probe sequence
ttagcgaagtttattcacatgaagg

SEQ ID NO: 160924 - DNA, 25 bp, Probe sequence
ttaacacaagctattccgaatgaca

SEQ ID NO: 160925 - DNA, 25 bp, Probe sequence
ttccagttaaagtgtctgtatcaac

SEQ ID NO: 160926 - DNA, 25 bp, Probe sequence
ttgtttttgcagcagcatgtggaaa

SEQ ID NO: 160927 - DNA, 25 bp, Probe sequence
atatctggacaaagcattgcggaat

SEQ ID NO: 160928 - DNA, 25 bp, Probe sequence
agttctgctttgtttgattttagtg

SEQ ID NO: 160929 - DNA, 25 bp, Probe sequence
aaagtgaaatggccgaatgatatat

SEQ ID NO: 160930 - DNA, 25 bp, Probe sequence
aaagcattgcggaatcacttaatat

SEQ ID NO: 160931 - DNA, 25 bp, Probe sequence
aaaccgaattatatatctggacaaa

SEQ ID NO: 160932 - DNA, 25 bp, Probe sequence
aacagtttaaaggacaagcaattga

SEQ ID NO: 160933 - DNA, 25 bp, Probe sequence
aacgttgcattctcaatgatatcta

SEQ ID NO: 160934 - DNA, 25 bp, Probe sequence
aatagattctacacaacttgctgcg

SEQ ID NO: 160935 - DNA, 25 bp, Probe sequence
aattgttagagatgaagcgggtgaa

SEQ ID NO: 160936 - DNA, 25 bp, Probe sequence
caatcttcattttttatcttgagtg

SEQ ID NO: 160937 - DNA, 25 bp, Probe sequence
cttgctgcgaaaaagtcacttgttg

SEQ ID NO: 160938 - DNA, 25 bp, Probe sequence
gcaattgatttagattacgatggct

SEQ ID NO: 160939 - DNA, 25 bp, Probe sequence
gaatcacaccgtttaattagtgcag

SEQ ID NO: 160940 - DNA, 25 bp, Probe sequence
gaagcgggtgaatcacaccgtttaa

SEQ ID NO: 160941 - DNA, 25 bp, Probe sequence
gaaatggttgctaataatgatggta

SEQ ID NO: 160942 - DNA, 25 bp, Probe sequence
gacattggagttcttcaaaagggca

SEQ ID NO: 160943 - DNA, 25 bp, Probe sequence
gacctaacgttgcattctcaatgat

SEQ ID NO: 160944 - DNA, 25 bp, Probe sequence
gatgtacttcaattactctataaaa

SEQ ID NO: 160945 - DNA, 25 bp, Probe sequence
gattctacacaacttgctgcgaaaa

SEQ ID NO: 160946 - DNA, 25 bp, Probe sequence
gtataggtattaatttgacgcaaca

SEQ ID NO: 160947 - DNA, 25 bp, Probe sequence
gtatacgattcaatagattctacac

SEQ ID NO: 160948 - DNA, 25 bp, Probe sequence
gtcaagatgtacttcaattactcta

SEQ ID NO: 160949 - DNA, 25 bp, Probe sequence
gtcacttgttggaaatcaatcttca

SEQ ID NO: 160950 - DNA, 25 bp, Probe sequence
gtgattgaccaattaaagttagagg

SEQ ID NO: 160951 - DNA, 25 bp, Probe sequence
gtggtttcttaactgaaatggttgc

SEQ ID NO: 160952 - DNA, 25 bp, Probe sequence
gggcgatttaatagacattggagtt

SEQ ID NO: 160953 - DNA, 25 bp, Probe sequence
ggtaaagtgtgtggtttcttaactg

SEQ ID NO: 160954 - DNA, 25 bp, Probe sequence
ggagttcttcaaaagggcaaggact

SEQ ID NO: 160955 - DNA, 25 bp, Probe sequence
tgcgattcaacattttagtcaagat

SEQ ID NO: 160956 - DNA, 25 bp, Probe sequence
tagggataagagatgcgattcaaca

SEQ ID NO: 160957 - DNA, 25 bp, Probe sequence
tagaacgttgctatttacagaaaat

SEQ ID NO: 160958 - DNA, 25 bp, Probe sequence
ttacctttttctgaaattcgtgaag

SEQ ID NO: 160959 - DNA, 25 bp, Probe sequence
ttacgatggctatctaattgttaga

SEQ ID NO: 160960 - DNA, 25 bp, Probe sequence
ttaagacctaacgttgcattctcaa

SEQ ID NO: 160961 - DNA, 25 bp, Probe sequence
aaaatgtaatggttgcagcagacgt

SEQ ID NO: 160962 - DNA, 25 bp, Probe sequence
aacattacatcgtttacctatgcat

SEQ ID NO: 160963 - DNA, 25 bp, Probe sequence
aatgtttgtttatgattatgatacg

SEQ ID NO: 160964 - DNA, 25 bp, Probe sequence
aatcatttaaaatcgctgaaagcat

SEQ ID NO: 160965 - DNA, 25 bp, Probe sequence
gaatgcgatagcaatggatacagca

SEQ ID NO: 160966 - DNA, 25 bp, Probe sequence
gaatgcattaccaagtattattaca

SEQ ID NO: 160967 - DNA, 25 bp, Probe sequence
gaactgtaggtatagctgaggaacg

SEQ ID NO: 160968 - DNA, 25 bp, Probe sequence
gaacgattccaagaagatgctttac

SEQ ID NO: 160969 - DNA, 25 bp, Probe sequence
gaactaactaaattaatgcgaggta

SEQ ID NO: 160970 - DNA, 25 bp, Probe sequence
gaaatgggtggataatcatgtcaaa

SEQ ID NO: 160971 - DNA, 25 bp, Probe sequence
gacatgatggttaatggcggtgtac

SEQ ID NO: 160972 - DNA, 25 bp, Probe sequence
gaccaagtggtgttacatttgttcg

SEQ ID NO: 160973 - DNA, 25 bp, Probe sequence
gagcgtatagtgattgaactaacta

SEQ ID NO: 160974 - DNA, 25 bp, Probe sequence
gagatttcacgatgaatgcgatagc

SEQ ID NO: 160975 - DNA, 25 bp, Probe sequence
gatgctttacgtatgattcgatgtt

SEQ ID NO: 160976 - DNA, 25 bp, Probe sequence
gatattaattactcattgaagcctt

SEQ ID NO: 160977 - DNA, 25 bp, Probe sequence
gatttagaattgttgattgctatag

SEQ ID NO: 160978 - DNA, 25 bp, Probe sequence
gattatgtcgatcaccgtagaccaa

SEQ ID NO: 160979 - DNA, 25 bp, Probe sequence
gttaaccttcaaacgattgatgaaa

SEQ ID NO: 160980 - DNA, 25 bp, Probe sequence
gtaggtatagctgaggaacgattcc

SEQ ID NO: 160981 - DNA, 25 bp, Probe sequence
gtgacaacattccgggctgaagaag

SEQ ID NO: 160982 - DNA, 25 bp, Probe sequence
ggacatgaaccattaatcgttaacc

SEQ ID NO: 160983 - DNA, 25 bp, Probe sequence
tgtcgatcaccgtagaccaagtggt

SEQ ID NO: 160984 - DNA, 25 bp, Probe sequence
ggcggtgtacttatggcacatttaa

SEQ ID NO: 160985 - DNA, 25 bp, Probe sequence
tgtatgattattttgatggtcaaca

SEQ ID NO: 160986 - DNA, 25 bp, Probe sequence
tgaagcctttaaagctaagtaaccg

SEQ ID NO: 160987 - DNA, 25 bp, Probe sequence
tgaaccattaatcgttaaccttcaa

SEQ ID NO: 160988 - DNA, 25 bp, Probe sequence
tccgggctgaagaagattatgtcga

SEQ ID NO: 160989 - DNA, 25 bp, Probe sequence
tacatcgtttacctatgcataatag

SEQ ID NO: 160990 - DNA, 25 bp, Probe sequence
tacctgtaggtaaagaacatggcac

SEQ ID NO: 160991 - DNA, 25 bp, Probe sequence
tagaatctatctttagtcatacgat

SEQ ID NO: 160992 - DNA, 25 bp, Probe sequence
tagatatcacaacaagtgcaacgcc

SEQ ID NO: 160993 - DNA, 25 bp, Probe sequence
ttagtcatacgatacctgtaggtaa

SEQ ID NO: 160994 - DNA, 25 bp, Probe sequence
ttccagtcacaattatcatttgata

SEQ ID NO: 160995 - DNA, 25 bp, Probe sequence
atatgcactatgctgtacctcatgc

SEQ ID NO: 160996 - DNA, 25 bp, Probe sequence
ataccgatttataattttgtacgtg

SEQ ID NO: 160997 - DNA, 25 bp, Probe sequence
atcacaatttggtatagcaccagat

SEQ ID NO: 160998 - DNA, 25 bp, Probe sequence
atgctgtacctcatgcaatttgtgg

SEQ ID NO: 160999 - DNA, 25 bp, Probe sequence
aggtataacatgttacccgtccatg

SEQ ID NO: 161000 - DNA, 25 bp, Probe sequence
agatattgctgaacgttttggatca

SEQ ID NO: 161001 - DNA, 25 bp, Probe sequence
acaggcgtcgttccaattggttcaa

SEQ ID NO: 161002 - DNA, 25 bp, Probe sequence
aaacttcagaaaaacatgctagcag

SEQ ID NO: 161003 - DNA, 25 bp, Probe sequence
aacacagcattaaaatcacaatttg

SEQ ID NO: 161004 - DNA, 25 bp, Probe sequence
aattatgacaacgctacacggtact

SEQ ID NO: 161005 - DNA, 25 bp, Probe sequence
gtacgtgaaaatgagtttccaacta

SEQ ID NO: 161006 - DNA, 25 bp, Probe sequence
gaaagctttggactaactttacttg

SEQ ID NO: 161007 - DNA, 25 bp, Probe sequence
gaaacatttgcaaaagtacgtgaaa

SEQ ID NO: 161008 - DNA, 25 bp, Probe sequence
gacaacgctacacggtactgatatt

SEQ ID NO: 161009 - DNA, 25 bp, Probe sequence
gaggtcacgaagtacattttatcac

SEQ ID NO: 161010 - DNA, 25 bp, Probe sequence
gaggctatgaaaacaggcgtcgttc

SEQ ID NO: 161011 - DNA, 25 bp, Probe sequence
gatcattcactccaaggtgcaatta

SEQ ID NO: 161012 - DNA, 25 bp, Probe sequence
gattcagcgagtgactatgctatcc

SEQ ID NO: 161013 - DNA, 25 bp, Probe sequence
gttccaattggttcaaatgccggtg

SEQ ID NO: 161014 - DNA, 25 bp, Probe sequence
gttttgggctatgatcattcactcc

SEQ ID NO: 161015 - DNA, 25 bp, Probe sequence
ggtcctgaattagtgccaatgcgtc

SEQ ID NO: 161016 - DNA, 25 bp, Probe sequence
ggtactgatattactgttttgggct

SEQ ID NO: 161017 - DNA, 25 bp, Probe sequence
ggttcaaatgccggtggaattaaag

SEQ ID NO: 161018 - DNA, 25 bp, Probe sequence
ggactaactttacttgaggctatga

SEQ ID NO: 161019 - DNA, 25 bp, Probe sequence
ggctatgatcattcactccaaggtg

SEQ ID NO: 161020 - DNA, 25 bp, Probe sequence
tctggaattattgccacagaattag

SEQ ID NO: 161021 - DNA, 25 bp, Probe sequence
tcttgatttgttgcatatgcactat

SEQ ID NO: 161022 - DNA, 25 bp, Probe sequence
taacatgttacccgtccatgggtgg

SEQ ID NO: 161023 - DNA, 25 bp, Probe sequence
tacgttaagtactaaaatcgctgaa

SEQ ID NO: 161024 - DNA, 25 bp, Probe sequence
tatccaccgtatgatattacgttaa

SEQ ID NO: 161025 - DNA, 25 bp, Probe sequence
tttagctcgtgagatgtcaggtaaa

SEQ ID NO: 161026 - DNA, 25 bp, Probe sequence
ttatcacttcaaatatcccgtttag

SEQ ID NO: 161027 - DNA, 25 bp, Probe sequence
ttagcagagcgaggtcacgaagtac

SEQ ID NO: 161028 - DNA, 25 bp, Probe sequence
ttccaactaaacataacacagcatt

SEQ ID NO: 161029 - DNA, 25 bp, Probe sequence
atttttcaccattagctaacttagc

SEQ ID NO: 161030 - DNA, 25 bp, Probe sequence
atatttttcaccattagctaactta

SEQ ID NO: 161031 - DNA, 25 bp, Probe sequence
atattggacaatttaaaacaggata

SEQ ID NO: 161032 - DNA, 25 bp, Probe sequence
aggatatttttcaccattagctaac

SEQ ID NO: 161033 - DNA, 25 bp, Probe sequence
agaggaagcaaatacgattaaagca

SEQ ID NO: 161034 - DNA, 25 bp, Probe sequence
agtgggcgaacttgcacgtgaaata

SEQ ID NO: 161035 - DNA, 25 bp, Probe sequence
agaagtgggcgaacttgcacgtgaa

SEQ ID NO: 161036 - DNA, 25 bp, Probe sequence
agctaacttagctagattgactgaa

SEQ ID NO: 161037 - DNA, 25 bp, Probe sequence
acaggatatttttcaccattagcta

SEQ ID NO: 161038 - DNA, 25 bp, Probe sequence
aacaggatatttttcaccattagct

SEQ ID NO: 161039 - DNA, 25 bp, Probe sequence
aatggtagaaatgcaacgtgaagtt

SEQ ID NO: 161040 - DNA, 25 bp, Probe sequence
cgtgaagttgatgaatatattggac

SEQ ID NO: 161041 - DNA, 25 bp, Probe sequence
gcgaacttgcacgtgaaataaatca

SEQ ID NO: 161042 - DNA, 25 bp, Probe sequence
gcacgtgaaataaatcatacctatg

SEQ ID NO: 161043 - DNA, 25 bp, Probe sequence
gaagtgggcgaacttgcacgtgaaa

SEQ ID NO: 161044 - DNA, 25 bp, Probe sequence
gaagaagtgggcgaacttgcacgtg

SEQ ID NO: 161045 - DNA, 25 bp, Probe sequence
gaaataaatcatacctatggtgaaa

SEQ ID NO: 161046 - DNA, 25 bp, Probe sequence
gaaatcaatggtagaaatgcaacgt

SEQ ID NO: 161047 - DNA, 25 bp, Probe sequence
gatatgacagagagctttaatgaaa

SEQ ID NO: 161048 - DNA, 25 bp, Probe sequence
gatatttttcaccattagctaactt

SEQ ID NO: 161049 - DNA, 25 bp, Probe sequence
gattcagaggaagcaaatacgatta

SEQ ID NO: 161050 - DNA, 25 bp, Probe sequence
gattgactgaagaagtgggcgaact

SEQ ID NO: 161051 - DNA, 25 bp, Probe sequence
gttatgtttagcgaattcaatggga

SEQ ID NO: 161052 - DNA, 25 bp, Probe sequence
gtgttgttatgtttagcgaattcaa

SEQ ID NO: 161053 - DNA, 25 bp, Probe sequence
gggcgaacttgcacgtgaaataaat

SEQ ID NO: 161054 - DNA, 25 bp, Probe sequence
gggaatagatatgacagagagcttt

SEQ ID NO: 161055 - DNA, 25 bp, Probe sequence
ggatatttttcaccattagctaact

SEQ ID NO: 161056 - DNA, 25 bp, Probe sequence
tgggcgaacttgcacgtgaaataaa

SEQ ID NO: 161057 - DNA, 25 bp, Probe sequence
tacgattaaagcagaattaggtgat

SEQ ID NO: 161058 - DNA, 25 bp, Probe sequence
taggtgataatttatttgtgttgtt

SEQ ID NO: 161059 - DNA, 25 bp, Probe sequence
tatgtttagcgaattcaatgggaat

SEQ ID NO: 161060 - DNA, 25 bp, Probe sequence
tttttcaccattagctaacttagct

SEQ ID NO: 161061 - DNA, 25 bp, Probe sequence
ttatttgtgttgttatgtttagcga

SEQ ID NO: 161062 - DNA, 25 bp, Probe sequence
ttgtgttgttatgtttagcgaattc

SEQ ID NO: 161063 - DNA, 25 bp, Probe sequence
acgttaccagttgagtttgatgcga

SEQ ID NO: 161064 - DNA, 25 bp, Probe sequence
atctcctgcaaactatgacagacca

SEQ ID NO: 161065 - DNA, 25 bp, Probe sequence
atgtcattagcggtattattctcaa

SEQ ID NO: 161066 - DNA, 25 bp, Probe sequence
acctagggagttcattaagttatat

SEQ ID NO: 161067 - DNA, 25 bp, Probe sequence
agaaatattcacaagttagatcaac

SEQ ID NO: 161068 - DNA, 25 bp, Probe sequence
aacagcgataggtagtgcatttggt

SEQ ID NO: 161069 - DNA, 25 bp, Probe sequence
aaacgggtcgtgaagttgcattaga

SEQ ID NO: 161070 - DNA, 25 bp, Probe sequence
aactgctttatggattggtgctggt

SEQ ID NO: 161071 - DNA, 25 bp, Probe sequence
caaacggtatttatgatgtcgaagt

SEQ ID NO: 161072 - DNA, 25 bp, Probe sequence
cagagcagcattagtacctgttgca

SEQ ID NO: 161073 - DNA, 25 bp, Probe sequence
catgccattcaagatcaccaaggat

SEQ ID NO: 161074 - DNA, 25 bp, Probe sequence
gcgcgtaaagtattatctgcagcag

SEQ ID NO: 161075 - DNA, 25 bp, Probe sequence
gctggaactgcaattgcagcccacg

SEQ ID NO: 161076 - DNA, 25 bp, Probe sequence
gcttcctttatgggcacaacacaaa

SEQ ID NO: 161077 - DNA, 25 bp, Probe sequence
gcagcccacgaagttggtcatgcca

SEQ ID NO: 161078 - DNA, 25 bp, Probe sequence
gatcaactagtggtaaaacgggtcg

SEQ ID NO: 161079 - DNA, 25 bp, Probe sequence
gaaacaaattacggcattgaacatt

SEQ ID NO: 161080 - DNA, 25 bp, Probe sequence
gaaagttgtttcactatctcctgca

SEQ ID NO: 161081 - DNA, 25 bp, Probe sequence
gagtttattgtcttcaatttttact

SEQ ID NO: 161082 - DNA, 25 bp, Probe sequence
gatgtcgaagttgttaaaggtgaag

SEQ ID NO: 161083 - DNA, 25 bp, Probe sequence
gatcatcatgttaggtattatctta

SEQ ID NO: 161084 - DNA, 25 bp, Probe sequence
gattggtgctggtttaatgtcatta

SEQ ID NO: 161085 - DNA, 25 bp, Probe sequence
gttggtcatgccattcaagatcacc

SEQ ID NO: 161086 - DNA, 25 bp, Probe sequence
gtttgatgcgagttcaagagcgatg

SEQ ID NO: 161087 - DNA, 25 bp, Probe sequence
gtacctgttgcaaacctagggagtt

SEQ ID NO: 161088 - DNA, 25 bp, Probe sequence
gtcgctgtagcagagcttgtacgta

SEQ ID NO: 161089 - DNA, 25 bp, Probe sequence
gtgcatttggttcaactgctttatg

SEQ ID NO: 161090 - DNA, 25 bp, Probe sequence
ggattcttaacagatcattacgatc

SEQ ID NO: 161091 - DNA, 25 bp, Probe sequence
tgacagaccatcagttgctggaact

SEQ ID NO: 161092 - DNA, 25 bp, Probe sequence
tatctgcagcagcaatgacttatgt

SEQ ID NO: 161093 - DNA, 25 bp, Probe sequence
tattaatggtgcttcctttatgggc

SEQ ID NO: 161094 - DNA, 25 bp, Probe sequence
tattctcaattgttacgttaccagt

SEQ ID NO: 161095 - DNA, 25 bp, Probe sequence
ttcactatctcctgcaaactatgac

SEQ ID NO: 161096 - DNA, 25 bp, Probe sequence
ttggttcttaagattcagagcagca

SEQ ID NO: 161097 - DNA, 25 bp, Probe sequence
attagggatgatttatggttatata

SEQ ID NO: 161098 - DNA, 25 bp, Probe sequence
atcctaggtttaaacgttctatgat

SEQ ID NO: 161099 - DNA, 25 bp, Probe sequence
atggtgaacaattaagtcatacgcc

SEQ ID NO: 161100 - DNA, 25 bp, Probe sequence
accttcaatttccatattatgattt

SEQ ID NO: 161101 - DNA, 25 bp, Probe sequence
actattttcaccttcaatttccata

SEQ ID NO: 161102 - DNA, 25 bp, Probe sequence
aaattggtgtattatcatgttgtct

SEQ ID NO: 161103 - DNA, 25 bp, Probe sequence
cacatgtgtggcaaattggtgtatt

SEQ ID NO: 161104 - DNA, 25 bp, Probe sequence
caggcaatttacttctatcctaggt

SEQ ID NO: 161105 - DNA, 25 bp, Probe sequence
ccagatagcccaactgcaatattat

SEQ ID NO: 161106 - DNA, 25 bp, Probe sequence
gctactcatttgtaatatattaggg

SEQ ID NO: 161107 - DNA, 25 bp, Probe sequence
gcactggcatttgtaacattattca

SEQ ID NO: 161108 - DNA, 25 bp, Probe sequence
gcaatttacttctatcctaggttta

SEQ ID NO: 161109 - DNA, 25 bp, Probe sequence
gatttttgttccagatagcccaact

SEQ ID NO: 161110 - DNA, 25 bp, Probe sequence
gattttataactacacatgtgtggc

SEQ ID NO: 161111 - DNA, 25 bp, Probe sequence
gattatattgactattttcaccttc

SEQ ID NO: 161112 - DNA, 25 bp, Probe sequence
gttcaggcaatttacttctatccta

SEQ ID NO: 161113 - DNA, 25 bp, Probe sequence
gtttttggacttttgctttatattg

SEQ ID NO: 161114 - DNA, 25 bp, Probe sequence
ggcaatttacttctatcctaggttt

SEQ ID NO: 161115 - DNA, 25 bp, Probe sequence
ggtttaaacgttctatgattggaat

SEQ ID NO: 161116 - DNA, 25 bp, Probe sequence
gtgtttttggacttttgctttatat

SEQ ID NO: 161117 - DNA, 25 bp, Probe sequence
gtggcaaattggtgtattatcatgt

SEQ ID NO: 161118 - DNA, 25 bp, Probe sequence
ggatgatttatggttatatatggta

SEQ ID NO: 161119 - DNA, 25 bp, Probe sequence
ggacttttgctttatattgaattaa

SEQ ID NO: 161120 - DNA, 25 bp, Probe sequence
tgactattttcaccttcaatttcca

SEQ ID NO: 161121 - DNA, 25 bp, Probe sequence
tctatcctaggtttaaacgttctat

SEQ ID NO: 161122 - DNA, 25 bp, Probe sequence
tcaaatatgggatttgggcagttat

SEQ ID NO: 161123 - DNA, 25 bp, Probe sequence
taagatttttgttccagatagccca

SEQ ID NO: 161124 - DNA, 25 bp, Probe sequence
tattttcaccttcaatttccatatt

SEQ ID NO: 161125 - DNA, 25 bp, Probe sequence
tttggacttttgctttatattgaat

SEQ ID NO: 161126 - DNA, 25 bp, Probe sequence
ttttgttccagatagcccaactgca

SEQ ID NO: 161127 - DNA, 25 bp, Probe sequence
ttttcaccttcaatttccatattat

SEQ ID NO: 161128 - DNA, 25 bp, Probe sequence
ttcaccttcaatttccatattatga

SEQ ID NO: 161129 - DNA, 25 bp, Probe sequence
ttccagatagcccaactgcaatatt

SEQ ID NO: 161130 - DNA, 25 bp, Probe sequence
ttgttccagatagcccaactgcaat

SEQ ID NO: 161131 - DNA, 25 bp, Probe sequence
attgatttaagtttacagatgaatg

SEQ ID NO: 161132 - DNA, 25 bp, Probe sequence
attgcagtttgggtgcttaactata

SEQ ID NO: 161133 - DNA, 25 bp, Probe sequence
attcacttcgcaaacgtgtcaaagc

SEQ ID NO: 161134 - DNA, 25 bp, Probe sequence
agttgctcaactaacggaatcgccc

SEQ ID NO: 161135 - DNA, 25 bp, Probe sequence
agatcggcataaacatgcgttatta

SEQ ID NO: 161136 - DNA, 25 bp, Probe sequence
aacatgcgttattaatagattactt

SEQ ID NO: 161137 - DNA, 25 bp, Probe sequence
aacgtgtcaaagcgtgagcaaaggc

SEQ ID NO: 161138 - DNA, 25 bp, Probe sequence
aagcgtgagcaaaggctagatgatt

SEQ ID NO: 161139 - DNA, 25 bp, Probe sequence
aatacactcaagctagtaaataaac

SEQ ID NO: 161140 - DNA, 25 bp, Probe sequence
aatagtatggctatagatcggcata

SEQ ID NO: 161141 - DNA, 25 bp, Probe sequence
aatatcgatttaagtcgcgtattgc

SEQ ID NO: 161142 - DNA, 25 bp, Probe sequence
caaacattcattttgtagatacaaa

SEQ ID NO: 161143 - DNA, 25 bp, Probe sequence
caaattttaaatacactcaagctag

SEQ ID NO: 161144 - DNA, 25 bp, Probe sequence
cgcttctgcaattcaatttactaag

SEQ ID NO: 161145 - DNA, 25 bp, Probe sequence
gcgtattgcagtttgggtgcttaac

SEQ ID NO: 161146 - DNA, 25 bp, Probe sequence
gcaacgtttttatcaactaacgcaa

SEQ ID NO: 161147 - DNA, 25 bp, Probe sequence
gaatatttactttttcaatatcgat

SEQ ID NO: 161148 - DNA, 25 bp, Probe sequence
gaagtcacgcttctgcaattcaatt

SEQ ID NO: 161149 - DNA, 25 bp, Probe sequence
gatattcaaattcacttcgcaaacg

SEQ ID NO: 161150 - DNA, 25 bp, Probe sequence
gtgggaagtcacgcttctgcaattc

SEQ ID NO: 161151 - DNA, 25 bp, Probe sequence
gtttgggtgcttaactatataaaag

SEQ ID NO: 161152 - DNA, 25 bp, Probe sequence
gtcacgcttctgcaattcaatttac

SEQ ID NO: 161153 - DNA, 25 bp, Probe sequence
gtcgcgtattgcagtttgggtgctt

SEQ ID NO: 161154 - DNA, 25 bp, Probe sequence
gtgaatgaggcgaaattggcaaaca

SEQ ID NO: 161155 - DNA, 25 bp, Probe sequence
ggctagatgatttaatagttgctca

SEQ ID NO: 161156 - DNA, 25 bp, Probe sequence
ggcgaaattggcaaacattcatttt

SEQ ID NO: 161157 - DNA, 25 bp, Probe sequence
tggctatagatcggcataaacatgc

SEQ ID NO: 161158 - DNA, 25 bp, Probe sequence
taagtcgcgtattgcagtttgggtg

SEQ ID NO: 161159 - DNA, 25 bp, Probe sequence
tgaaatatttgattatatcgctaat

SEQ ID NO: 161160 - DNA, 25 bp, Probe sequence
tcgcaaacgtgtcaaagcgtgagca

SEQ ID NO: 161161 - DNA, 25 bp, Probe sequence
tcaaattcacttcgcaaacgtgtca

SEQ ID NO: 161162 - DNA, 25 bp, Probe sequence
tcaatttgaggacttagcagatgac

SEQ ID NO: 161163 - DNA, 25 bp, Probe sequence
ttatcaactaacgcaaattttaaat

SEQ ID NO: 161164 - DNA, 25 bp, Probe sequence
ttgctcaactaacggaatcgcccag

SEQ ID NO: 161165 - DNA, 25 bp, Probe sequence
attggcatgacgaattatcaagatt

SEQ ID NO: 161166 - DNA, 25 bp, Probe sequence
atttctttgaattagcatatccaac

SEQ ID NO: 161167 - DNA, 25 bp, Probe sequence
atctcaaaaaagccatttcttacga

SEQ ID NO: 161168 - DNA, 25 bp, Probe sequence
atgacttcagaagattatctcaaaa

SEQ ID NO: 161169 - DNA, 25 bp, Probe sequence
atgatggtcaatatttacgtgctac

SEQ ID NO: 161170 - DNA, 25 bp, Probe sequence
agagccaaatgatccaataatccat

SEQ ID NO: 161171 - DNA, 25 bp, Probe sequence
agaagctcaacatttctttgaatta

SEQ ID NO: 161172 - DNA, 25 bp, Probe sequence
acggcgatgctaatgaaggtgtatt

SEQ ID NO: 161173 - DNA, 25 bp, Probe sequence
aaatgacatcactcaagaagcaatt

SEQ ID NO: 161174 - DNA, 25 bp, Probe sequence
aaaaaaattatccagatgccattga

SEQ ID NO: 161175 - DNA, 25 bp, Probe sequence
aagaagatttggatcctacattcat

SEQ ID NO: 161176 - DNA, 25 bp, Probe sequence
aaggctacttgtatttacaatcatt

SEQ ID NO: 161177 - DNA, 25 bp, Probe sequence
aatggtgtaaacttattctctcgta

SEQ ID NO: 161178 - DNA, 25 bp, Probe sequence
aatgtatacaactggatgtttggaa

SEQ ID NO: 161179 - DNA, 25 bp, Probe sequence
aatgactacattactttctaaagat

SEQ ID NO: 161180 - DNA, 25 bp, Probe sequence
caatatttacgtgctacctctgaat

SEQ ID NO: 161181 - DNA, 25 bp, Probe sequence
cgcgtgttatatcacaaatatccag

SEQ ID NO: 161182 - DNA, 25 bp, Probe sequence
gcgttcgcctatggtcaagaagagc

SEQ ID NO: 161183 - DNA, 25 bp, Probe sequence
gaaggtttaatgtctgaaaatcaaa

SEQ ID NO: 161184 - DNA, 25 bp, Probe sequence
gaagcacttgaactagagccaaatg

SEQ ID NO: 161185 - DNA, 25 bp, Probe sequence
gaaaatcaaactgacgaagcgttag

SEQ ID NO: 161186 - DNA, 25 bp, Probe sequence
gacgaaagtgaattgctgatttatt

SEQ ID NO: 161187 - DNA, 25 bp, Probe sequence
gaggttgataatgcttaccaagaac

SEQ ID NO: 161188 - DNA, 25 bp, Probe sequence
gatcctgattatattcaaggctact

SEQ ID NO: 161189 - DNA, 25 bp, Probe sequence
gatgcgattcgcttatacgatgaaa

SEQ ID NO: 161190 - DNA, 25 bp, Probe sequence
gttgaaccatcacctgaaaagttga

SEQ ID NO: 161191 - DNA, 25 bp, Probe sequence
gtaaacttattctctcgtatggcag

SEQ ID NO: 161192 - DNA, 25 bp, Probe sequence
ggtaactatagtgatgcgattcgct

SEQ ID NO: 161193 - DNA, 25 bp, Probe sequence
ggaaatagaacacggcgatgctaat

SEQ ID NO: 161194 - DNA, 25 bp, Probe sequence
ggcatttagcgttcgcctatggtca

SEQ ID NO: 161195 - DNA, 25 bp, Probe sequence
tacgtgctacctctgaatacgaaac

SEQ ID NO: 161196 - DNA, 25 bp, Probe sequence
taagttatgttgaaccatcacctga

SEQ ID NO: 161197 - DNA, 25 bp, Probe sequence
tatgagtgattattatttctattta

SEQ ID NO: 161198 - DNA, 25 bp, Probe sequence
tattctctcgtatggcagattgtag

SEQ ID NO: 161199 - DNA, 25 bp, Probe sequence
gggtttgaattacaaccaactaatg

SEQ ID NO: 161200 - DNA, 25 bp, Probe sequence
attgttgcagcacttatcacaccag

SEQ ID NO: 161201 - DNA, 25 bp, Probe sequence
atatttcatctgcagcgttctttat

SEQ ID NO: 161202 - DNA, 25 bp, Probe sequence
ataggaatgatgcttgcagttgctt

SEQ ID NO: 161203 - DNA, 25 bp, Probe sequence
agattttcatgttcctggcgatatt

SEQ ID NO: 161204 - DNA, 25 bp, Probe sequence
actttgtacacaagcagttggcacg

SEQ ID NO: 161205 - DNA, 25 bp, Probe sequence
acaaccaactaatgatggattgatt

SEQ ID NO: 161206 - DNA, 25 bp, Probe sequence
aacacgttcaggtattattgatatt

SEQ ID NO: 161207 - DNA, 25 bp, Probe sequence
aacttttcaatcaaacaactggtgc

SEQ ID NO: 161208 - DNA, 25 bp, Probe sequence
aacggctgatatgttaaacttgtta

SEQ ID NO: 161209 - DNA, 25 bp, Probe sequence
caagcagttggcacgagtacaatta

SEQ ID NO: 161210 - DNA, 25 bp, Probe sequence
aagcaattgatgaactgcctgtaat

SEQ ID NO: 161211 - DNA, 25 bp, Probe sequence
aatagcattactttgtacacaagca

SEQ ID NO: 161212 - DNA, 25 bp, Probe sequence
caactggtgctgaacctactgcttc

SEQ ID NO: 161213 - DNA, 25 bp, Probe sequence
cagcgttctttattgttgcagcact

SEQ ID NO: 161214 - DNA, 25 bp, Probe sequence
ctgcttctattcgtattcaatacac

SEQ ID NO: 161215 - DNA, 25 bp, Probe sequence
cgaaatcatactgagacgatgttca

SEQ ID NO: 161216 - DNA, 25 bp, Probe sequence
cctgcagattttcatgttcctggcg

SEQ ID NO: 161217 - DNA, 25 bp, Probe sequence
cctactgcttctattcgtattcaat

SEQ ID NO: 161218 - DNA, 25 bp, Probe sequence
gcgttctttattgttgcagcactta

SEQ ID NO: 161219 - DNA, 25 bp, Probe sequence
gaattgatacaacggctgatatgtt

SEQ ID NO: 161220 - DNA, 25 bp, Probe sequence
gaacctactgcttctattcgtattc

SEQ ID NO: 161221 - DNA, 25 bp, Probe sequence
gaaagtgttttgtctggcgatgttt

SEQ ID NO: 161222 - DNA, 25 bp, Probe sequence
gagtacaattaaagatgccgaggaa

SEQ ID NO: 161223 - DNA, 25 bp, Probe sequence
gatgtaagtcgaaatcatactgaga

SEQ ID NO: 161224 - DNA, 25 bp, Probe sequence
gatgaactgcctgtaatagcattac

SEQ ID NO: 161225 - DNA, 25 bp, Probe sequence
gatgctgtaaatgtatcatttccag

SEQ ID NO: 161226 - DNA, 25 bp, Probe sequence
gtatcatttccaggatttttaccaa

SEQ ID NO: 161227 - DNA, 25 bp, Probe sequence
tggcgatatttcatctgcagcgttc

SEQ ID NO: 161228 - DNA, 25 bp, Probe sequence
tgttcctggcgatatttcatctgca

SEQ ID NO: 161229 - DNA, 25 bp, Probe sequence
taaacctgcagattttcatgttcct

SEQ ID NO: 161230 - DNA, 25 bp, Probe sequence
tacacaccaatgcttcaaccaataa

SEQ ID NO: 161231 - DNA, 25 bp, Probe sequence
tacacaagcagttggcacgagtaca

SEQ ID NO: 161232 - DNA, 25 bp, Probe sequence
ttcaatacacaccaatgcttcaacc

SEQ ID NO: 161233 - DNA, 25 bp, Probe sequence
attaagtggctatgcagaagtttat

SEQ ID NO: 161234 - DNA, 25 bp, Probe sequence
attagcacgtatattgatcagtttg

SEQ ID NO: 161235 - DNA, 25 bp, Probe sequence
atcgaacagcactttaaagatagag

SEQ ID NO: 161236 - DNA, 25 bp, Probe sequence
atgattctagtgttggcggtaaagt

SEQ ID NO: 161237 - DNA, 25 bp, Probe sequence
agtggctatgcagaagtttataagc

SEQ ID NO: 161238 - DNA, 25 bp, Probe sequence
agcacgtatattgatcagtttgatc

SEQ ID NO: 161239 - DNA, 25 bp, Probe sequence
aaaaccttatcggtgcattttatcg

SEQ ID NO: 161240 - DNA, 25 bp, Probe sequence
aaccttatcggtgcattttatcgtc

SEQ ID NO: 161241 - DNA, 25 bp, Probe sequence
aagacgttaccatttgagcaaatat

SEQ ID NO: 161242 - DNA, 25 bp, Probe sequence
cagtttgatcaaagttttatattaa

SEQ ID NO: 161243 - DNA, 25 bp, Probe sequence
ccttatcggtgcattttatcgtcca

SEQ ID NO: 161244 - DNA, 25 bp, Probe sequence
cggtgcattttatcgtccaactgct

SEQ ID NO: 161245 - DNA, 25 bp, Probe sequence
gcgcatgattctagtgttggcggta

SEQ ID NO: 161246 - DNA, 25 bp, Probe sequence
gcatgcgttattgaatggtgaatca

SEQ ID NO: 161247 - DNA, 25 bp, Probe sequence
gcatgattctagtgttggcggtaaa

SEQ ID NO: 161248 - DNA, 25 bp, Probe sequence
gcagaagtttataagcatgcgttat

SEQ ID NO: 161249 - DNA, 25 bp, Probe sequence
gcaattgaccatattagcacgtata

SEQ ID NO: 161250 - DNA, 25 bp, Probe sequence
gaccatattagcacgtatattgatc

SEQ ID NO: 161251 - DNA, 25 bp, Probe sequence
gagcaaatattaagtggctatgcag

SEQ ID NO: 161252 - DNA, 25 bp, Probe sequence
gatagagagatattacagtcattaa

SEQ ID NO: 161253 - DNA, 25 bp, Probe sequence
gattctagtgttggcggtaaagtgg

SEQ ID NO: 161254 - DNA, 25 bp, Probe sequence
gtgcattttatcgtccaactgctgt

SEQ ID NO: 161255 - DNA, 25 bp, Probe sequence
ggtgcaattgaccatattagcacgt

SEQ ID NO: 161256 - DNA, 25 bp, Probe sequence
ggtgcattttatcgtccaactgctg

SEQ ID NO: 161257 - DNA, 25 bp, Probe sequence
ggtatggataaatatattgctaaag

SEQ ID NO: 161258 - DNA, 25 bp, Probe sequence
tctagtgttggcggtaaagtgggta

SEQ ID NO: 161259 - DNA, 25 bp, Probe sequence
tggcggtaaagtgggtattaactca

SEQ ID NO: 161260 - DNA, 25 bp, Probe sequence
tcggtgcattttatcgtccaactgc

SEQ ID NO: 161261 - DNA, 25 bp, Probe sequence
taagcatgcgttattgaatggtgaa

SEQ ID NO: 161262 - DNA, 25 bp, Probe sequence
taaagacgttaccatttgagcaaat

SEQ ID NO: 161263 - DNA, 25 bp, Probe sequence
tagtgttggcggtaaagtgggtatt

SEQ ID NO: 161264 - DNA, 25 bp, Probe sequence
tatcggtgcattttatcgtccaact

SEQ ID NO: 161265 - DNA, 25 bp, Probe sequence
ttttaaatttaggtcatacatttgg

SEQ ID NO: 161266 - DNA, 25 bp, Probe sequence
ttatcggtgcattttatcgtccaac

SEQ ID NO: 161267 - DNA, 25 bp, Probe sequence
atataaatcaaatcgacatccttat

SEQ ID NO: 161268 - DNA, 25 bp, Probe sequence
ataaatcaaatcgacatccttataa

SEQ ID NO: 161269 - DNA, 25 bp, Probe sequence
atcaaatcgacatccttataaaaca

SEQ ID NO: 161270 - DNA, 25 bp, Probe sequence
atcgacatccttataaaacatcaga

SEQ ID NO: 161271 - DNA, 25 bp, Probe sequence
atccttataaaacatcagaaccact

SEQ ID NO: 161272 - DNA, 25 bp, Probe sequence
acatccttataaaacatcagaacca

SEQ ID NO: 161273 - DNA, 25 bp, Probe sequence
aaatataaatcaaatcgacatcctt

SEQ ID NO: 161274 - DNA, 25 bp, Probe sequence
aaatcaaatcgacatccttataaaa

SEQ ID NO: 161275 - DNA, 25 bp, Probe sequence
aaatcgacatccttataaaacatca

SEQ ID NO: 161276 - DNA, 25 bp, Probe sequence
aaaatataaatcaaatcgacatcct

SEQ ID NO: 161277 - DNA, 25 bp, Probe sequence
aatcgacatccttataaaacatcag

SEQ ID NO: 161278 - DNA, 25 bp, Probe sequence
aatcaaatcgacatccttataaaac

SEQ ID NO: 161279 - DNA, 25 bp, Probe sequence
aatataaatcaaatcgacatcctta

SEQ ID NO: 161280 - DNA, 25 bp, Probe sequence
caaatcgacatccttataaaacatc

SEQ ID NO: 161281 - DNA, 25 bp, Probe sequence
catccttataaaacatcagaaccac

SEQ ID NO: 161282 - DNA, 25 bp, Probe sequence
cttataaaacatcagaaccactaaa

SEQ ID NO: 161283 - DNA, 25 bp, Probe sequence
cgacatccttataaaacatcagaac

SEQ ID NO: 161284 - DNA, 25 bp, Probe sequence
ccttataaaacatcagaaccactaa

SEQ ID NO: 161285 - DNA, 25 bp, Probe sequence
gacatccttataaaacatcagaacc

SEQ ID NO: 161286 - DNA, 25 bp, Probe sequence
tccttataaaacatcagaaccacta

SEQ ID NO: 161287 - DNA, 25 bp, Probe sequence
tcgacatccttataaaacatcagaa

SEQ ID NO: 161288 - DNA, 25 bp, Probe sequence
tcaaatcgacatccttataaaacat

SEQ ID NO: 161289 - DNA, 25 bp, Probe sequence
taaaacatcagaaccactaaaaaca

SEQ ID NO: 161290 - DNA, 25 bp, Probe sequence
taaatcaaatcgacatccttataaa

SEQ ID NO: 161291 - DNA, 25 bp, Probe sequence
tataaaacatcagaaccactaaaaa

SEQ ID NO: 161292 - DNA, 25 bp, Probe sequence
tataaatcaaatcgacatccttata

SEQ ID NO: 161293 - DNA, 25 bp, Probe sequence
ttataaaacatcagaaccactaaaa

SEQ ID NO: 161294 - DNA, 25 bp, Probe sequence
attgaacgttctgatagttgtgctg

SEQ ID NO: 161295 - DNA, 25 bp, Probe sequence
atcacatggacctcaattaacagtt

SEQ ID NO: 161296 - DNA, 25 bp, Probe sequence
atggacctcaattaacagttattgt

SEQ ID NO: 161297 - DNA, 25 bp, Probe sequence
agttgtagttgaaaatatgcctgtt

SEQ ID NO: 161298 - DNA, 25 bp, Probe sequence
agaatcacatggacctcaattaaca

SEQ ID NO: 161299 - DNA, 25 bp, Probe sequence
acgttatataaaccattaaattcag

SEQ ID NO: 161300 - DNA, 25 bp, Probe sequence
acatggacctcaattaacagttatt

SEQ ID NO: 161301 - DNA, 25 bp, Probe sequence
acaattgaacgttctgatagttgtg

SEQ ID NO: 161302 - DNA, 25 bp, Probe sequence
aacaattgaacgttctgatagttgt

SEQ ID NO: 161303 - DNA, 25 bp, Probe sequence
aagttgtagttgaaaatatgcctgt

SEQ ID NO: 161304 - DNA, 25 bp, Probe sequence
aaggatttaaagcagctgaaaagcc

SEQ ID NO: 161305 - DNA, 25 bp, Probe sequence
aatcacatggacctcaattaacagt

SEQ ID NO: 161306 - DNA, 25 bp, Probe sequence
aattgaacgttctgatagttgtgct

SEQ ID NO: 161307 - DNA, 25 bp, Probe sequence
caattgaacgttctgatagttgtgc

SEQ ID NO: 161308 - DNA, 25 bp, Probe sequence
caacaattgaacgttctgatagttg

SEQ ID NO: 161309 - DNA, 25 bp, Probe sequence
cacatggacctcaattaacagttat

SEQ ID NO: 161310 - DNA, 25 bp, Probe sequence
catggacctcaattaacagttattg

SEQ ID NO: 161311 - DNA, 25 bp, Probe sequence
cgttatataaaccattaaattcagt

SEQ ID NO: 161312 - DNA, 25 bp, Probe sequence
gcaacaattgaacgttctgatagtt

SEQ ID NO: 161313 - DNA, 25 bp, Probe sequence
gaatcacatggacctcaattaacag

SEQ ID NO: 161314 - DNA, 25 bp, Probe sequence
gaaggatttaaagcagctgaaaagc

SEQ ID NO: 161315 - DNA, 25 bp, Probe sequence
gagaatcacatggacctcaattaac

SEQ ID NO: 161316 - DNA, 25 bp, Probe sequence
gttgtagttgaaaatatgcctgttg

SEQ ID NO: 161317 - DNA, 25 bp, Probe sequence
gtagttgaaaatatgcctgttggtg

SEQ ID NO: 161318 - DNA, 25 bp, Probe sequence
ggagaatcacatggacctcaattaa

SEQ ID NO: 161319 - DNA, 25 bp, Probe sequence
tgtagttgaaaatatgcctgttggt

SEQ ID NO: 161320 - DNA, 25 bp, Probe sequence
tcacatggacctcaattaacagtta

SEQ ID NO: 161321 - DNA, 25 bp, Probe sequence
tagttgaaaatatgcctgttggtgt

SEQ ID NO: 161322 - DNA, 25 bp, Probe sequence
ttgaacgttctgatagttgtgctgt

SEQ ID NO: 161323 - DNA, 25 bp, Probe sequence
ttgtagttgaaaatatgcctgttgg

SEQ ID NO: 161324 - DNA, 25 bp, Probe sequence
attactatatggtgctatattttta

SEQ ID NO: 161325 - DNA, 25 bp, Probe sequence
attatttttatactgactctcattt

SEQ ID NO: 161326 - DNA, 25 bp, Probe sequence
atttttatactgactctcatttata

SEQ ID NO: 161327 - DNA, 25 bp, Probe sequence
atactgactctcatttatatttttt

SEQ ID NO: 161328 - DNA, 25 bp, Probe sequence
agataaaccacttaatcctataaca

SEQ ID NO: 161329 - DNA, 25 bp, Probe sequence
actgactctcatttatattttttat

SEQ ID NO: 161330 - DNA, 25 bp, Probe sequence
actatatggtgctatatttttagat

SEQ ID NO: 161331 - DNA, 25 bp, Probe sequence
aaattatttttatactgactctcat

SEQ ID NO: 161332 - DNA, 25 bp, Probe sequence
aaaattatttttatactgactctca

SEQ ID NO: 161333 - DNA, 25 bp, Probe sequence
aattatttttatactgactctcatt

SEQ ID NO: 161334 - DNA, 25 bp, Probe sequence
cacttaatcctataacaaaaattat

SEQ ID NO: 161335 - DNA, 25 bp, Probe sequence
ctctcatttatattttttatgtatt

SEQ ID NO: 161336 - DNA, 25 bp, Probe sequence
ctgactctcatttatattttttatg

SEQ ID NO: 161337 - DNA, 25 bp, Probe sequence
gaagtcaaagtataacaaaagcgct

SEQ ID NO: 161338 - DNA, 25 bp, Probe sequence
gaagaatattatttcgattattttg

SEQ ID NO: 161339 - DNA, 25 bp, Probe sequence
gactctcatttatattttttatgta

SEQ ID NO: 161340 - DNA, 25 bp, Probe sequence
gataaaccacttaatcctataacaa

SEQ ID NO: 161341 - DNA, 25 bp, Probe sequence
gtcaaagtataacaaaagcgcttaa

SEQ ID NO: 161342 - DNA, 25 bp, Probe sequence
ggtgctatatttttagataaaccac

SEQ ID NO: 161343 - DNA, 25 bp, Probe sequence
ggaattactatatggtgctatattt

SEQ ID NO: 161344 - DNA, 25 bp, Probe sequence
tcgattattttggggattttaatgt

SEQ ID NO: 161345 - DNA, 25 bp, Probe sequence
tcatttatattttttatgtattagt

SEQ ID NO: 161346 - DNA, 25 bp, Probe sequence
taatggaattactatatggtgctat

SEQ ID NO: 161347 - DNA, 25 bp, Probe sequence
tactgactctcatttatatttttta

SEQ ID NO: 161348 - DNA, 25 bp, Probe sequence
tagataaaccacttaatcctataac

SEQ ID NO: 161349 - DNA, 25 bp, Probe sequence
tatactgactctcatttatattttt

SEQ ID NO: 161350 - DNA, 25 bp, Probe sequence
tattatttcgattattttggggatt

SEQ ID NO: 161351 - DNA, 25 bp, Probe sequence
tatttttatactgactctcatttat

SEQ ID NO: 161352 - DNA, 25 bp, Probe sequence
tttagataaaccacttaatcctata

SEQ ID NO: 161353 - DNA, 25 bp, Probe sequence
tttatactgactctcatttatattt

SEQ ID NO: 161354 - DNA, 25 bp, Probe sequence
ttttagataaaccacttaatcctat

SEQ ID NO: 161355 - DNA, 25 bp, Probe sequence
ttttatactgactctcatttatatt

SEQ ID NO: 161356 - DNA, 25 bp, Probe sequence
ttatttttatactgactctcattta

SEQ ID NO: 161357 - DNA, 25 bp, Probe sequence
ttatactgactctcatttatatttt

SEQ ID NO: 161358 - DNA, 25 bp, Probe sequence
attactagctatgcttcaccacgtg

SEQ ID NO: 161359 - DNA, 25 bp, Probe sequence
attattggcagcaccaatccttcag

SEQ ID NO: 161360 - DNA, 25 bp, Probe sequence
attacatcagcaccagtgttcgcaa

SEQ ID NO: 161361 - DNA, 25 bp, Probe sequence
atttcatttattacatcagcaccag

SEQ ID NO: 161362 - DNA, 25 bp, Probe sequence
acatcagcaccagtgttcgcaatgg

SEQ ID NO: 161363 - DNA, 25 bp, Probe sequence
aacttgtcggtggtaaattaatgca

SEQ ID NO: 161364 - DNA, 25 bp, Probe sequence
aagcttcaccaggatcaattagagg

SEQ ID NO: 161365 - DNA, 25 bp, Probe sequence
aatatcattcacggttcagattcat

SEQ ID NO: 161366 - DNA, 25 bp, Probe sequence
cagaagcttcaccaggatcaattag

SEQ ID NO: 161367 - DNA, 25 bp, Probe sequence
ctagctatgcttcaccacgtgatgc

SEQ ID NO: 161368 - DNA, 25 bp, Probe sequence
ccttcagaagcttcaccaggatcaa

SEQ ID NO: 161369 - DNA, 25 bp, Probe sequence
ccaatccttcagaagcttcaccagg

SEQ ID NO: 161370 - DNA, 25 bp, Probe sequence
gcagtacaaagaaatctaattggtg

SEQ ID NO: 161371 - DNA, 25 bp, Probe sequence
gcaccaatccttcagaagcttcacc

SEQ ID NO: 161372 - DNA, 25 bp, Probe sequence
gcagcaccaatccttcagaagcttc

SEQ ID NO: 161373 - DNA, 25 bp, Probe sequence
gcaccagtgttcgcaatggtagttg

SEQ ID NO: 161374 - DNA, 25 bp, Probe sequence
gaaaatgaaattactagctatgctt

SEQ ID NO: 161375 - DNA, 25 bp, Probe sequence
gaaattactagctatgcttcaccac

SEQ ID NO: 161376 - DNA, 25 bp, Probe sequence
gtatctagacatattattggcagca

SEQ ID NO: 161377 - DNA, 25 bp, Probe sequence
gtaccaatggaacttgctgaaacac

SEQ ID NO: 161378 - DNA, 25 bp, Probe sequence
gtcggtggtaaattaatgcaagtac

SEQ ID NO: 161379 - DNA, 25 bp, Probe sequence
gtgaagatgcagttaatgtatctag

SEQ ID NO: 161380 - DNA, 25 bp, Probe sequence
gtgttcgcaatggtagttgaaggtg

SEQ ID NO: 161381 - DNA, 25 bp, Probe sequence
gtggaacgtacatttttaatgatta

SEQ ID NO: 161382 - DNA, 25 bp, Probe sequence
ggtagttgaaggtgaagatgcagtt

SEQ ID NO: 161383 - DNA, 25 bp, Probe sequence
ggaacttgctgaaacacattatggt

SEQ ID NO: 161384 - DNA, 25 bp, Probe sequence
tgaaacacattatggtgaacaccaa

SEQ ID NO: 161385 - DNA, 25 bp, Probe sequence
tcagcaccagtgttcgcaatggtag

SEQ ID NO: 161386 - DNA, 25 bp, Probe sequence
tctagacatattattggcagcacca

SEQ ID NO: 161387 - DNA, 25 bp, Probe sequence
tcaattagaggtgatttaggtttaa

SEQ ID NO: 161388 - DNA, 25 bp, Probe sequence
tcattcacggttcagattcattaga

SEQ ID NO: 161389 - DNA, 25 bp, Probe sequence
tactagctatgcttcaccacgtgat

SEQ ID NO: 161390 - DNA, 25 bp, Probe sequence
ttaactgttggtagaaatatcattc

SEQ ID NO: 161391 - DNA, 25 bp, Probe sequence
ttcatttattacatcagcaccagtg

SEQ ID NO: 161392 - DNA, 25 bp, Probe sequence
attgccgtttgaagacaattctttt

SEQ ID NO: 161393 - DNA, 25 bp, Probe sequence
atggtggtatgtcttgaaacgagcc

SEQ ID NO: 161394 - DNA, 25 bp, Probe sequence
agatgtttgttgtggtactggtgat

SEQ ID NO: 161395 - DNA, 25 bp, Probe sequence
acttgttcatggtgatgcaatggaa

SEQ ID NO: 161396 - DNA, 25 bp, Probe sequence
aaaaactgcttcaatggaaaatgtt

SEQ ID NO: 161397 - DNA, 25 bp, Probe sequence
aagcattagatgtttgttgtggtac

SEQ ID NO: 161398 - DNA, 25 bp, Probe sequence
aagaagagttgaagcgcatgtttga

SEQ ID NO: 161399 - DNA, 25 bp, Probe sequence
aatgtgccagactatttagtcgcgt

SEQ ID NO: 161400 - DNA, 25 bp, Probe sequence
caactttgccagtctttaaacaaat

SEQ ID NO: 161401 - DNA, 25 bp, Probe sequence
caggtggtatggtggtatgtcttga

SEQ ID NO: 161402 - DNA, 25 bp, Probe sequence
gcaatggaattgccgtttgaagaca

SEQ ID NO: 161403 - DNA, 25 bp, Probe sequence
gcaatctacgtttaattttcctgga

SEQ ID NO: 161404 - DNA, 25 bp, Probe sequence
gaatagagtacttaaaccaggtggt

SEQ ID NO: 161405 - DNA, 25 bp, Probe sequence
gaatatgaatggttacagcaatcta

SEQ ID NO: 161406 - DNA, 25 bp, Probe sequence
gaatggttacagcaatctacgttta

SEQ ID NO: 161407 - DNA, 25 bp, Probe sequence
gaagacaattcttttgattatgtaa

SEQ ID NO: 161408 - DNA, 25 bp, Probe sequence
gagttgaagcgcatgtttgaagaag

SEQ ID NO: 161409 - DNA, 25 bp, Probe sequence
gattatgtaacaattgggtttggat

SEQ ID NO: 161410 - DNA, 25 bp, Probe sequence
gttgtggtactggtgattggacaat

SEQ ID NO: 161411 - DNA, 25 bp, Probe sequence
gttttacagggggcgttgctgcaat

SEQ ID NO: 161412 - DNA, 25 bp, Probe sequence
gttaaacttgttcatggtgatgcaa

SEQ ID NO: 161413 - DNA, 25 bp, Probe sequence
gtttgttgtggtactggtgattgga

SEQ ID NO: 161414 - DNA, 25 bp, Probe sequence
gtcttgaaacgagccaaccaacttt

SEQ ID NO: 161415 - DNA, 25 bp, Probe sequence
gtagttttacagggggcgttgctgc

SEQ ID NO: 161416 - DNA, 25 bp, Probe sequence
gtatgtcttgaaacgagccaaccaa

SEQ ID NO: 161417 - DNA, 25 bp, Probe sequence
gtgccagactatttagtcgcgttaa

SEQ ID NO: 161418 - DNA, 25 bp, Probe sequence
ggttacagcaatctacgtttaattt

SEQ ID NO: 161419 - DNA, 25 bp, Probe sequence
ggaaaatgttaaacttgttcatggt

SEQ ID NO: 161420 - DNA, 25 bp, Probe sequence
tgaaacgagccaaccaactttgcca

SEQ ID NO: 161421 - DNA, 25 bp, Probe sequence
tgccagtctttaaacaaatgtatgc

SEQ ID NO: 161422 - DNA, 25 bp, Probe sequence
tacagggggcgttgctgcaatgcac

SEQ ID NO: 161423 - DNA, 25 bp, Probe sequence
tatactttaaatttgttatgcctat

SEQ ID NO: 161424 - DNA, 25 bp, Probe sequence
ttaaatttgttatgcctatttttgg

SEQ ID NO: 161425 - DNA, 25 bp, Probe sequence
ttgactttagtgagaatatgttaga

SEQ ID NO: 161426 - DNA, 25 bp, Probe sequence
atattaatcatcggttaggtaagtt

SEQ ID NO: 161427 - DNA, 25 bp, Probe sequence
atatgatattccagatgttgccaaa

SEQ ID NO: 161428 - DNA, 25 bp, Probe sequence
atctcatttcggtatcaatattgat

SEQ ID NO: 161429 - DNA, 25 bp, Probe sequence
atgatattccagatgttgccaaagt

SEQ ID NO: 161430 - DNA, 25 bp, Probe sequence
atgattatgaaatttctcaagcaat

SEQ ID NO: 161431 - DNA, 25 bp, Probe sequence
acgttatctcatttcggtatcaata

SEQ ID NO: 161432 - DNA, 25 bp, Probe sequence
actatccatcatacttcaagaaata

SEQ ID NO: 161433 - DNA, 25 bp, Probe sequence
acacttttcccatatattacgttat

SEQ ID NO: 161434 - DNA, 25 bp, Probe sequence
aaattgaaacacttttcccatatat

SEQ ID NO: 161435 - DNA, 25 bp, Probe sequence
aaagcattacttacacgatatccaa

SEQ ID NO: 161436 - DNA, 25 bp, Probe sequence
aacattccattttgattggagattt

SEQ ID NO: 161437 - DNA, 25 bp, Probe sequence
aatcatttgtctaaacattccattt

SEQ ID NO: 161438 - DNA, 25 bp, Probe sequence
gcattacttacacgatatccaaaaa

SEQ ID NO: 161439 - DNA, 25 bp, Probe sequence
gcatgcctcacaattgacacatcaa

SEQ ID NO: 161440 - DNA, 25 bp, Probe sequence
gcacatttttatacgctactagcag

SEQ ID NO: 161441 - DNA, 25 bp, Probe sequence
gaatccattaatattaatcatcggt

SEQ ID NO: 161442 - DNA, 25 bp, Probe sequence
gaaacacttttcccatatattacgt

SEQ ID NO: 161443 - DNA, 25 bp, Probe sequence
gaaatcttcattacatcatcaagct

SEQ ID NO: 161444 - DNA, 25 bp, Probe sequence
gaaatttctcaagcaatagtaaaaa

SEQ ID NO: 161445 - DNA, 25 bp, Probe sequence
gatgacattacatataatcatttgt

SEQ ID NO: 161446 - DNA, 25 bp, Probe sequence
gatatgtctgattactatccatcat

SEQ ID NO: 161447 - DNA, 25 bp, Probe sequence
gattactatccatcatacttcaaga

SEQ ID NO: 161448 - DNA, 25 bp, Probe sequence
gattggagatttaattagtgcacat

SEQ ID NO: 161449 - DNA, 25 bp, Probe sequence
gtatcagaatatgaatccattaata

SEQ ID NO: 161450 - DNA, 25 bp, Probe sequence
gtctgattactatccatcatacttc

SEQ ID NO: 161451 - DNA, 25 bp, Probe sequence
ggaaacaactgttagcaaattggaa

SEQ ID NO: 161452 - DNA, 25 bp, Probe sequence
tcttcattacatcatcaagctttaa

SEQ ID NO: 161453 - DNA, 25 bp, Probe sequence
tcaatgagacaccttgatgacatta

SEQ ID NO: 161454 - DNA, 25 bp, Probe sequence
tacgctactagcagaaatcaatgat

SEQ ID NO: 161455 - DNA, 25 bp, Probe sequence
tattacgttatctcatttcggtatc

SEQ ID NO: 161456 - DNA, 25 bp, Probe sequence
tttcccatatattacgttatctcat

SEQ ID NO: 161457 - DNA, 25 bp, Probe sequence
ttagtgcacatttttatacgctact

SEQ ID NO: 161458 - DNA, 25 bp, Probe sequence
ttgacacatcaatgagacaccttga

SEQ ID NO: 161459 - DNA, 25 bp, Probe sequence
ttgtctaaacattccattttgattg

SEQ ID NO: 161460 - DNA, 25 bp, Probe sequence
attcgaatcaatccaaaactcactt

SEQ ID NO: 161461 - DNA, 25 bp, Probe sequence
atcaatccaaaactcacttgctaaa

SEQ ID NO: 161462 - DNA, 25 bp, Probe sequence
atcaatgcagttgcagagcaagctg

SEQ ID NO: 161463 - DNA, 25 bp, Probe sequence
atgcagttgcagagcaagctgattt

SEQ ID NO: 161464 - DNA, 25 bp, Probe sequence
aggtacgtgaacgtgctgcacgtaa

SEQ ID NO: 161465 - DNA, 25 bp, Probe sequence
agcaagtaaagttccagcattcaaa

SEQ ID NO: 161466 - DNA, 25 bp, Probe sequence
agcattcaaagctggtaaagcatta

SEQ ID NO: 161467 - DNA, 25 bp, Probe sequence
acgtgctgcacgtaaaggtcgtaac

SEQ ID NO: 161468 - DNA, 25 bp, Probe sequence
aacagatttaatcaatgcagttgca

SEQ ID NO: 161469 - DNA, 25 bp, Probe sequence
aactaaaaaagaagctggttcagca

SEQ ID NO: 161470 - DNA, 25 bp, Probe sequence
aagttccagcattcaaagctggtaa

SEQ ID NO: 161471 - DNA, 25 bp, Probe sequence
aatccaaaactcacttgctaaaggt

SEQ ID NO: 161472 - DNA, 25 bp, Probe sequence
caagtaaagttccagcattcaaagc

SEQ ID NO: 161473 - DNA, 25 bp, Probe sequence
caaaactcacttgctaaaggtgaaa

SEQ ID NO: 161474 - DNA, 25 bp, Probe sequence
ccagcaagtaaagttccagcattca

SEQ ID NO: 161475 - DNA, 25 bp, Probe sequence
gctgtattcgaatcaatccaaaact

SEQ ID NO: 161476 - DNA, 25 bp, Probe sequence
gctgcacgtaaaggtcgtaaccctc

SEQ ID NO: 161477 - DNA, 25 bp, Probe sequence
gctggttcagcagtagatgctgtat

SEQ ID NO: 161478 - DNA, 25 bp, Probe sequence
gcagtagatgctgtattcgaatcaa

SEQ ID NO: 161479 - DNA, 25 bp, Probe sequence
gaatcaatccaaaactcacttgcta

SEQ ID NO: 161480 - DNA, 25 bp, Probe sequence
gaagctggttcagcagtagatgctg

SEQ ID NO: 161481 - DNA, 25 bp, Probe sequence
tgcacgtaaaggtcgtaaccctcaa

SEQ ID NO: 161482 - DNA, 25 bp, Probe sequence
gatgctgtattcgaatcaatccaaa

SEQ ID NO: 161483 - DNA, 25 bp, Probe sequence
gatatcccagcaagtaaagttccag

SEQ ID NO: 161484 - DNA, 25 bp, Probe sequence
gtattcgaatcaatccaaaactcac

SEQ ID NO: 161485 - DNA, 25 bp, Probe sequence
gtagatgctgtattcgaatcaatcc

SEQ ID NO: 161486 - DNA, 25 bp, Probe sequence
gtaactttgaggtacgtgaacgtgc

SEQ ID NO: 161487 - DNA, 25 bp, Probe sequence
gtaaagaaattgatatcccagcaag

SEQ ID NO: 161488 - DNA, 25 bp, Probe sequence
gtgctgcacgtaaaggtcgtaaccc

SEQ ID NO: 161489 - DNA, 25 bp, Probe sequence
tgaggtacgtgaacgtgctgcacgt

SEQ ID NO: 161490 - DNA, 25 bp, Probe sequence
tttgaggtacgtgaacgtgctgcac

SEQ ID NO: 161491 - DNA, 25 bp, Probe sequence
tcccagcaagtaaagttccagcatt

SEQ ID NO: 161492 - DNA, 25 bp, Probe sequence
tcggtaactttgaggtacgtgaacg

SEQ ID NO: 161493 - DNA, 25 bp, Probe sequence
tatcccagcaagtaaagttccagca

SEQ ID NO: 161494 - DNA, 25 bp, Probe sequence
aggtggtatcggtgacttaatcgtt

SEQ ID NO: 161495 - DNA, 25 bp, Probe sequence
atcatcgcagtagcaagtggtatcg

SEQ ID NO: 161496 - DNA, 25 bp, Probe sequence
atcggtgacttaatcgttacttgca

SEQ ID NO: 161497 - DNA, 25 bp, Probe sequence
atgttaacatcatcgctacttcaga

SEQ ID NO: 161498 - DNA, 25 bp, Probe sequence
atggatcaagcattatctgaaatga

SEQ ID NO: 161499 - DNA, 25 bp, Probe sequence
aggtgccgatcctatgacatttcta

SEQ ID NO: 161500 - DNA, 25 bp, Probe sequence
agtcatgcggaagaagttgtagtca

SEQ ID NO: 161501 - DNA, 25 bp, Probe sequence
agcccttgccaatgttcttgcagaa

SEQ ID NO: 161502 - DNA, 25 bp, Probe sequence
aaacgtgtgtcagaaatgattgaag

SEQ ID NO: 161503 - DNA, 25 bp, Probe sequence
aaaagacttttatacatgttgctaa

SEQ ID NO: 161504 - DNA, 25 bp, Probe sequence
aagtggtatcgtagctggaattggc

SEQ ID NO: 161505 - DNA, 25 bp, Probe sequence
aatgcaggtattggcgtgttgtcag

SEQ ID NO: 161506 - DNA, 25 bp, Probe sequence
aatacgcgaaattagatgttaacat

SEQ ID NO: 161507 - DNA, 25 bp, Probe sequence
catcatcgctacttcagatatgacc

SEQ ID NO: 161508 - DNA, 25 bp, Probe sequence
cgtgttgtcagggccaagtcatgcg

SEQ ID NO: 161509 - DNA, 25 bp, Probe sequence
gccgatcctatgacatttctaggtt

SEQ ID NO: 161510 - DNA, 25 bp, Probe sequence
gcgtgtgtacacgaatgatgacttg

SEQ ID NO: 161511 - DNA, 25 bp, Probe sequence
gctggaattggctacggtgataatg

SEQ ID NO: 161512 - DNA, 25 bp, Probe sequence
gctacttcagatatgaccaaagcaa

SEQ ID NO: 161513 - DNA, 25 bp, Probe sequence
gctacggtgataatgcaaaagctgc

SEQ ID NO: 161514 - DNA, 25 bp, Probe sequence
gttcttgcagaaaatggacatgatg

SEQ ID NO: 161515 - DNA, 25 bp, Probe sequence
gtagtcaagcaaccaactacagttg

SEQ ID NO: 161516 - DNA, 25 bp, Probe sequence
gtaaaagatttaatggagcgcgata

SEQ ID NO: 161517 - DNA, 25 bp, Probe sequence
gtcagggccaagtcatgcggaagaa

SEQ ID NO: 161518 - DNA, 25 bp, Probe sequence
ggtgttgaacttggtggtgcattga

SEQ ID NO: 161519 - DNA, 25 bp, Probe sequence
ggtgcattgaaaaatatcatcgcag

SEQ ID NO: 161520 - DNA, 25 bp, Probe sequence
ggacatgatgttttgatgtggggta

SEQ ID NO: 161521 - DNA, 25 bp, Probe sequence
ggaagttttgggacagcccttgcca

SEQ ID NO: 161522 - DNA, 25 bp, Probe sequence
tgtggatatgccaattacaaatgca

SEQ ID NO: 161523 - DNA, 25 bp, Probe sequence
tgaatgattatttgcgtgtgtacac

SEQ ID NO: 161524 - DNA, 25 bp, Probe sequence
taggtgaaaagttaggtgccgatcc

SEQ ID NO: 161525 - DNA, 25 bp, Probe sequence
tatttacttaatggctttacctact

SEQ ID NO: 161526 - DNA, 25 bp, Probe sequence
tttacctactaaagcaatgcgagaa

SEQ ID NO: 161527 - DNA, 25 bp, Probe sequence
ttctaggtttaggtggtatcggtga

SEQ ID NO: 161528 - DNA, 25 bp, Probe sequence
atttttatggttaacgtgcgtgaag

SEQ ID NO: 161529 - DNA, 25 bp, Probe sequence
agggtcacatggtttaggtcttggt

SEQ ID NO: 161530 - DNA, 25 bp, Probe sequence
aggtcttggtgacttgttagatgca

SEQ ID NO: 161531 - DNA, 25 bp, Probe sequence
acgccaggtgtaacacgagatcgta

SEQ ID NO: 161532 - DNA, 25 bp, Probe sequence
aaattgcttttgtgtctgctaaaga

SEQ ID NO: 161533 - DNA, 25 bp, Probe sequence
aatggtcgctcaaattttatacaaa

SEQ ID NO: 161534 - DNA, 25 bp, Probe sequence
aatgcatttttcttataaacgctat

SEQ ID NO: 161535 - DNA, 25 bp, Probe sequence
caaacacaaattagagcgcaggcag

SEQ ID NO: 161536 - DNA, 25 bp, Probe sequence
cacaagttgctatagaaccaccgac

SEQ ID NO: 161537 - DNA, 25 bp, Probe sequence
gaaccctacaccaacagacaaaggt

SEQ ID NO: 161538 - DNA, 25 bp, Probe sequence
gaagcggatgttattatttttatgg

SEQ ID NO: 161539 - DNA, 25 bp, Probe sequence
gaaccaccgacatttgttgtatttg

SEQ ID NO: 161540 - DNA, 25 bp, Probe sequence
gacgtttgaatgtcttttatgcaac

SEQ ID NO: 161541 - DNA, 25 bp, Probe sequence
gagcgcaggcagaaatcgccataga

SEQ ID NO: 161542 - DNA, 25 bp, Probe sequence
gagagacgctattgatacagagtat

SEQ ID NO: 161543 - DNA, 25 bp, Probe sequence
gagatcgtatttattcttcaggtga

SEQ ID NO: 161544 - DNA, 25 bp, Probe sequence
gatgcaatttccatgaaccctacac

SEQ ID NO: 161545 - DNA, 25 bp, Probe sequence
gatgcagttgtttctcattttggtg

SEQ ID NO: 161546 - DNA, 25 bp, Probe sequence
gatttggtgaaccgtatccgatatc

SEQ ID NO: 161547 - DNA, 25 bp, Probe sequence
gattacgtacattattcccttacat

SEQ ID NO: 161548 - DNA, 25 bp, Probe sequence
gtatccgatatcagggtcacatggt

SEQ ID NO: 161549 - DNA, 25 bp, Probe sequence
gtacagacgtgtatgatttctattc

SEQ ID NO: 161550 - DNA, 25 bp, Probe sequence
ggtgatgcaccattccaaacacaaa

SEQ ID NO: 161551 - DNA, 25 bp, Probe sequence
ggtgaagatcgcgttatcgtttcta

SEQ ID NO: 161552 - DNA, 25 bp, Probe sequence
ggtaaagcagtcgtgattgtcgtaa

SEQ ID NO: 161553 - DNA, 25 bp, Probe sequence
ggtacaccaattcatattatagctc

SEQ ID NO: 161554 - DNA, 25 bp, Probe sequence
tccgtgccgcttttggttttgaagg

SEQ ID NO: 161555 - DNA, 25 bp, Probe sequence
tcgcgttatcgtttctaatgttgca

SEQ ID NO: 161556 - DNA, 25 bp, Probe sequence
tcgactatccattattggacgacca

SEQ ID NO: 161557 - DNA, 25 bp, Probe sequence
taatcgatactgctggtatgcgtaa

SEQ ID NO: 161558 - DNA, 25 bp, Probe sequence
tagtagctattgtaggtaggcctaa

SEQ ID NO: 161559 - DNA, 25 bp, Probe sequence
tagttggagaacgtgtttcgattgt

SEQ ID NO: 161560 - DNA, 25 bp, Probe sequence
ttagagaatcaaatccgtgccgctt

SEQ ID NO: 161561 - DNA, 25 bp, Probe sequence
ttgcagggacaacgagagacgctat

SEQ ID NO: 161562 - DNA, 25 bp, Probe sequence
attgaaactattgaaggcttccaac

SEQ ID NO: 161563 - DNA, 25 bp, Probe sequence
attgaaggcttccaacaaatgtttg

SEQ ID NO: 161564 - DNA, 25 bp, Probe sequence
attccgatgtatttaaagaagctca

SEQ ID NO: 161565 - DNA, 25 bp, Probe sequence
aggcttccaacaaatgtttgtcact

SEQ ID NO: 161566 - DNA, 25 bp, Probe sequence
agcaaagtccaatattatcaaataa

SEQ ID NO: 161567 - DNA, 25 bp, Probe sequence
acagcaaagtccaatattatcaaat

SEQ ID NO: 161568 - DNA, 25 bp, Probe sequence
acaattacaaaaaggcagtgcggaa

SEQ ID NO: 161569 - DNA, 25 bp, Probe sequence
aaatatgatattggctaccactatc

SEQ ID NO: 161570 - DNA, 25 bp, Probe sequence
aaaaagtgatgacgatggacagcaa

SEQ ID NO: 161571 - DNA, 25 bp, Probe sequence
aagtgatgacgatggacagcaaagt

SEQ ID NO: 161572 - DNA, 25 bp, Probe sequence
aaggcagtgcggaagaaacgattga

SEQ ID NO: 161573 - DNA, 25 bp, Probe sequence
aatcttaactatttgggaatctgaa

SEQ ID NO: 161574 - DNA, 25 bp, Probe sequence
aattggttgaattccgatgtattta

SEQ ID NO: 161575 - DNA, 25 bp, Probe sequence
cagtgcggaagaaacgattgaacgt

SEQ ID NO: 161576 - DNA, 25 bp, Probe sequence
ccgatgtatttaaagaagctcataa

SEQ ID NO: 161577 - DNA, 25 bp, Probe sequence
ccaacaaatgtttgtcactaaaaca

SEQ ID NO: 161578 - DNA, 25 bp, Probe sequence
gcttccaacaaatgtttgtcactaa

SEQ ID NO: 161579 - DNA, 25 bp, Probe sequence
gaaggcttccaacaaatgtttgtca

SEQ ID NO: 161580 - DNA, 25 bp, Probe sequence
gaagatagctttaataattggttga

SEQ ID NO: 161581 - DNA, 25 bp, Probe sequence
gaagctcataaaaatgtacgtttaa

SEQ ID NO: 161582 - DNA, 25 bp, Probe sequence
gaaactattgaaggcttccaacaaa

SEQ ID NO: 161583 - DNA, 25 bp, Probe sequence
gacagcaaagtccaatattatcaaa

SEQ ID NO: 161584 - DNA, 25 bp, Probe sequence
gatattggctaccactatcaaaaat

SEQ ID NO: 161585 - DNA, 25 bp, Probe sequence
gattgaacgtttttacaatagacaa

SEQ ID NO: 161586 - DNA, 25 bp, Probe sequence
ggttgaattccgatgtatttaaaga

SEQ ID NO: 161587 - DNA, 25 bp, Probe sequence
ggaatctgaagatagctttaataat

SEQ ID NO: 161588 - DNA, 25 bp, Probe sequence
ggcagaaaatagattacaattacaa

SEQ ID NO: 161589 - DNA, 25 bp, Probe sequence
ggcagtgcggaagaaacgattgaac

SEQ ID NO: 161590 - DNA, 25 bp, Probe sequence
tcaaatatgatattggctaccacta

SEQ ID NO: 161591 - DNA, 25 bp, Probe sequence
tatgatattggctaccactatcaaa

SEQ ID NO: 161592 - DNA, 25 bp, Probe sequence
tattggctaccactatcaaaaataa

SEQ ID NO: 161593 - DNA, 25 bp, Probe sequence
ttaactatttgggaatctgaagata

SEQ ID NO: 161594 - DNA, 25 bp, Probe sequence
ttgaacgtttttacaatagacaagg

SEQ ID NO: 161595 - DNA, 25 bp, Probe sequence
ttggttgaattccgatgtatttaaa

SEQ ID NO: 161596 - DNA, 25 bp, Probe sequence
atatttctgaaattgcacacaaaca

SEQ ID NO: 161597 - DNA, 25 bp, Probe sequence
atcaaagatacgttaccaacacctt

SEQ ID NO: 161598 - DNA, 25 bp, Probe sequence
aggtggtttggttgttgatgtagga

SEQ ID NO: 161599 - DNA, 25 bp, Probe sequence
agggcgacgaagttgaagcatatgt

SEQ ID NO: 161600 - DNA, 25 bp, Probe sequence
agcgcgtttaactcaatttggtgca

SEQ ID NO: 161601 - DNA, 25 bp, Probe sequence
aaaggtcaattccacgaaaatgatg

SEQ ID NO: 161602 - DNA, 25 bp, Probe sequence
aacacattggtacgccaggtgaagt

SEQ ID NO: 161603 - DNA, 25 bp, Probe sequence
aacagacttcattgaggatttctct

SEQ ID NO: 161604 - DNA, 25 bp, Probe sequence
aatttggtgcatttatagacattgg

SEQ ID NO: 161605 - DNA, 25 bp, Probe sequence
cacgaacatgttcaaacaccagaag

SEQ ID NO: 161606 - DNA, 25 bp, Probe sequence
gcatcatattgatagcccaagtgaa

SEQ ID NO: 161607 - DNA, 25 bp, Probe sequence
gcacacaaacacattggtacgccag

SEQ ID NO: 161608 - DNA, 25 bp, Probe sequence
gaaggtgtcgtagtaagattggcaa

SEQ ID NO: 161609 - DNA, 25 bp, Probe sequence
gaagtagtttcaattggtcaagatg

SEQ ID NO: 161610 - DNA, 25 bp, Probe sequence
gaagatgttgttgaaagtgatcctt

SEQ ID NO: 161611 - DNA, 25 bp, Probe sequence
gaagcatatgtcactaaagttgagt

SEQ ID NO: 161612 - DNA, 25 bp, Probe sequence
gaacgtatttcattatcaatcaaag

SEQ ID NO: 161613 - DNA, 25 bp, Probe sequence
gacaaagtcactggcgaggtacaac

SEQ ID NO: 161614 - DNA, 25 bp, Probe sequence
gacaagcaagttgttgttcatatca

SEQ ID NO: 161615 - DNA, 25 bp, Probe sequence
gtcactggcgaggtacaacaagttg

SEQ ID NO: 161616 - DNA, 25 bp, Probe sequence
gagtatcactatctattaaagcaac

SEQ ID NO: 161617 - DNA, 25 bp, Probe sequence
gaggatttctctgtgtttgatggac

SEQ ID NO: 161618 - DNA, 25 bp, Probe sequence
gatggtttagtgcatgtatctgaac

SEQ ID NO: 161619 - DNA, 25 bp, Probe sequence
gattggcaaactttggtgcatttgt

SEQ ID NO: 161620 - DNA, 25 bp, Probe sequence
gttcatatcaacggtggtaaattta

SEQ ID NO: 161621 - DNA, 25 bp, Probe sequence
gtatctgaactttctcacgaacatg

SEQ ID NO: 161622 - DNA, 25 bp, Probe sequence
ggattattcctattagtcaactatc

SEQ ID NO: 161623 - DNA, 25 bp, Probe sequence
ggcttcactaatttcaacagacttc

SEQ ID NO: 161624 - DNA, 25 bp, Probe sequence
tgaaactggagcttacatcttatct

SEQ ID NO: 161625 - DNA, 25 bp, Probe sequence
taatagagtcattttaagccgtaaa

SEQ ID NO: 161626 - DNA, 25 bp, Probe sequence
taagccgtaaagcagttgaacaaga

SEQ ID NO: 161627 - DNA, 25 bp, Probe sequence
tagaacctggtcaacaagtaaatgt

SEQ ID NO: 161628 - DNA, 25 bp, Probe sequence
tagtcaactatctacgcatcatatt

SEQ ID NO: 161629 - DNA, 25 bp, Probe sequence
tttgttccggcttcactaatttcaa

SEQ ID NO: 161630 - DNA, 25 bp, Probe sequence
ataacgaagatgtaacagacttttt

SEQ ID NO: 161631 - DNA, 25 bp, Probe sequence
agtgacattagatacgacaggcaag

SEQ ID NO: 161632 - DNA, 25 bp, Probe sequence
acatgtttcatacgttgcatctaaa

SEQ ID NO: 161633 - DNA, 25 bp, Probe sequence
aaaggtatcgtaatggatggtcgcg

SEQ ID NO: 161634 - DNA, 25 bp, Probe sequence
aaaactgaggactttgcaaaactag

SEQ ID NO: 161635 - DNA, 25 bp, Probe sequence
aagcagataaaggtcaatgtgtcat

SEQ ID NO: 161636 - DNA, 25 bp, Probe sequence
aatgatgtgacgcaacatgtttcat

SEQ ID NO: 161637 - DNA, 25 bp, Probe sequence
caatgtgtcattttagataacgaag

SEQ ID NO: 161638 - DNA, 25 bp, Probe sequence
cgtgatcaatatgacatgaaccgtg

SEQ ID NO: 161639 - DNA, 25 bp, Probe sequence
cgtaatggatggtcgcgatatcgga

SEQ ID NO: 161640 - DNA, 25 bp, Probe sequence
gcatcagttgaagagcgagcagaaa

SEQ ID NO: 161641 - DNA, 25 bp, Probe sequence
gcatctaaagagccagtacgttcat

SEQ ID NO: 161642 - DNA, 25 bp, Probe sequence
gcagtgacattagatacgacaggca

SEQ ID NO: 161643 - DNA, 25 bp, Probe sequence
gaagttactgacgaaattttagcga

SEQ ID NO: 161644 - DNA, 25 bp, Probe sequence
gaagatttaaaacgtgatattgaag

SEQ ID NO: 161645 - DNA, 25 bp, Probe sequence
gaagagcgagcagaaagaagatata

SEQ ID NO: 161646 - DNA, 25 bp, Probe sequence
gaaaagcagatgatgcagtgacatt

SEQ ID NO: 161647 - DNA, 25 bp, Probe sequence
gaaatatcaccattaagaaaagcag

SEQ ID NO: 161648 - DNA, 25 bp, Probe sequence
gaaattttagcgatggtgagtcaaa

SEQ ID NO: 161649 - DNA, 25 bp, Probe sequence
gacatgaaccgtgaaatatcaccat

SEQ ID NO: 161650 - DNA, 25 bp, Probe sequence
gaccaaacaacattagatttaactt

SEQ ID NO: 161651 - DNA, 25 bp, Probe sequence
gagttagctgcagaaaaaggtatcg

SEQ ID NO: 161652 - DNA, 25 bp, Probe sequence
gatatcggaactgtagtgctaccag

SEQ ID NO: 161653 - DNA, 25 bp, Probe sequence
gtttcatacgttgcatctaaagagc

SEQ ID NO: 161654 - DNA, 25 bp, Probe sequence
gtagtgctaccagatgcagatttaa

SEQ ID NO: 161655 - DNA, 25 bp, Probe sequence
gtcgcgatatcggaactgtagtgct

SEQ ID NO: 161656 - DNA, 25 bp, Probe sequence
ggatggtcgcgatatcggaactgta

SEQ ID NO: 161657 - DNA, 25 bp, Probe sequence
ggaactgtagtgctaccagatgcag

SEQ ID NO: 161658 - DNA, 25 bp, Probe sequence
ggactttgcaaaactagttgaccaa

SEQ ID NO: 161659 - DNA, 25 bp, Probe sequence
tgtgacgcaacatgtttcatacgtt

SEQ ID NO: 161660 - DNA, 25 bp, Probe sequence
tgattgcatcagttgaagagcgagc

SEQ ID NO: 161661 - DNA, 25 bp, Probe sequence
taaagagccagtacgttcattcgcc

SEQ ID NO: 161662 - DNA, 25 bp, Probe sequence
tacgttgcatctaaagagccagtac

SEQ ID NO: 161663 - DNA, 25 bp, Probe sequence
tatcgtgcattaacatacaaatatt

SEQ ID NO: 161664 - DNA, 25 bp, Probe sequence
attcgccttcaattaaaccgtggat

SEQ ID NO: 161665 - DNA, 25 bp, Probe sequence
attatcctactcaccaaacattttt

SEQ ID NO: 161666 - DNA, 25 bp, Probe sequence
attactacgacgaaagatgtttatg

SEQ ID NO: 161667 - DNA, 25 bp, Probe sequence
atcgatgctgctttggagttggaaa

SEQ ID NO: 161668 - DNA, 25 bp, Probe sequence
agtgttccattattttaaagaggca

SEQ ID NO: 161669 - DNA, 25 bp, Probe sequence
agatgtttatgaatgtcgattttta

SEQ ID NO: 161670 - DNA, 25 bp, Probe sequence
agaattcggctatcgatgctgcttt

SEQ ID NO: 161671 - DNA, 25 bp, Probe sequence
aaagtatcataattggtggagggcc

SEQ ID NO: 161672 - DNA, 25 bp, Probe sequence
aaagaggcacatccgtattttgatc

SEQ ID NO: 161673 - DNA, 25 bp, Probe sequence
aactgaagatactgtgacttatgaa

SEQ ID NO: 161674 - DNA, 25 bp, Probe sequence
aaccaagacgtaatcaagcgctagt

SEQ ID NO: 161675 - DNA, 25 bp, Probe sequence
aagctggtgctaacgtgacggttct

SEQ ID NO: 161676 - DNA, 25 bp, Probe sequence
aatgaatttggaacagcgcctatgt

SEQ ID NO: 161677 - DNA, 25 bp, Probe sequence
aatcaagcgctagtttattaccgag

SEQ ID NO: 161678 - DNA, 25 bp, Probe sequence
cgtggtggagattattcgccttcaa

SEQ ID NO: 161679 - DNA, 25 bp, Probe sequence
ccaaacatttttctcatcaagtgat

SEQ ID NO: 161680 - DNA, 25 bp, Probe sequence
gcgctagtttattaccgagaagttg

SEQ ID NO: 161681 - DNA, 25 bp, Probe sequence
gcgacaggctattatggtcagcata

SEQ ID NO: 161682 - DNA, 25 bp, Probe sequence
gcggatttacctaaagtgttccatt

SEQ ID NO: 161683 - DNA, 25 bp, Probe sequence
gcggattaagtgcggctattgaaca

SEQ ID NO: 161684 - DNA, 25 bp, Probe sequence
gagaagttgtaaaacatcatcaatt

SEQ ID NO: 161685 - DNA, 25 bp, Probe sequence
gatgcgaataccatttttattgaaa

SEQ ID NO: 161686 - DNA, 25 bp, Probe sequence
gatacttccaaatttcacagcatta

SEQ ID NO: 161687 - DNA, 25 bp, Probe sequence
gattggttatcatcccgattatgaa

SEQ ID NO: 161688 - DNA, 25 bp, Probe sequence
gtggagggccatgcggattaagtgc

SEQ ID NO: 161689 - DNA, 25 bp, Probe sequence
gtgacggttctatatcgtggtggag

SEQ ID NO: 161690 - DNA, 25 bp, Probe sequence
ggaacagcgcctatgtataataaag

SEQ ID NO: 161691 - DNA, 25 bp, Probe sequence
ggaatttaatgctaatgttacccaa

SEQ ID NO: 161692 - DNA, 25 bp, Probe sequence
ggcacatccgtattttgatcaagat

SEQ ID NO: 161693 - DNA, 25 bp, Probe sequence
tggagttggaaaaagctggtgctaa

SEQ ID NO: 161694 - DNA, 25 bp, Probe sequence
tcggctatcgatgctgctttggagt

SEQ ID NO: 161695 - DNA, 25 bp, Probe sequence
tactcaccaaacatttttctcatca

SEQ ID NO: 161696 - DNA, 25 bp, Probe sequence
tttttaacaatcgcgacaggctatt

SEQ ID NO: 161697 - DNA, 25 bp, Probe sequence
ttcaattaaaccgtggatacttcca

SEQ ID NO: 161698 - DNA, 25 bp, Probe sequence
atcacatccagaaccaatcgaagac

SEQ ID NO: 161699 - DNA, 25 bp, Probe sequence
agccatcaagacagtacacctcaac

SEQ ID NO: 161700 - DNA, 25 bp, Probe sequence
acggtcaacaaatcgttattccata

SEQ ID NO: 161701 - DNA, 25 bp, Probe sequence
acttataccgtatcgcaattcaata

SEQ ID NO: 161702 - DNA, 25 bp, Probe sequence
aacaacaacgtcaaggtggtggcca

SEQ ID NO: 161703 - DNA, 25 bp, Probe sequence
aacactgagcattcaacagtttctg

SEQ ID NO: 161704 - DNA, 25 bp, Probe sequence
aaccacatgcctctaataatgcaag

SEQ ID NO: 161705 - DNA, 25 bp, Probe sequence
aagacagtacacctcaacatgaaga

SEQ ID NO: 161706 - DNA, 25 bp, Probe sequence
aagacgccgtgatttagcaacgaat

SEQ ID NO: 161707 - DNA, 25 bp, Probe sequence
aagacacatctaaagacgcttctaa

SEQ ID NO: 161708 - DNA, 25 bp, Probe sequence
aatcaagcgaacaatcaagcacaaa

SEQ ID NO: 161709 - DNA, 25 bp, Probe sequence
caaattcacatcaagaccatacgga

SEQ ID NO: 161710 - DNA, 25 bp, Probe sequence
cagctgtactaattatcggtgcatt

SEQ ID NO: 161711 - DNA, 25 bp, Probe sequence
cagtttccgccaagaaatgcccaaa

SEQ ID NO: 161712 - DNA, 25 bp, Probe sequence
cggtgcattagcgatatttggaggc

SEQ ID NO: 161713 - DNA, 25 bp, Probe sequence
gcttcaaaaccacatgcctctaata

SEQ ID NO: 161714 - DNA, 25 bp, Probe sequence
gcaattcaatactacggttcaggtt

SEQ ID NO: 161715 - DNA, 25 bp, Probe sequence
gaatacggagcaacagtttccgcca

SEQ ID NO: 161716 - DNA, 25 bp, Probe sequence
gaacaatctcagcaacctaaaccat

SEQ ID NO: 161717 - DNA, 25 bp, Probe sequence
gaaacattcaaatgacgctcaaaac

SEQ ID NO: 161718 - DNA, 25 bp, Probe sequence
gaaagtcaagaacctagccatcaag

SEQ ID NO: 161719 - DNA, 25 bp, Probe sequence
gacaatgttcaaaatgaggctggca

SEQ ID NO: 161720 - DNA, 25 bp, Probe sequence
gaggctggcacaatagatgatcgtc

SEQ ID NO: 161721 - DNA, 25 bp, Probe sequence
gttaccattaattgcagctgtacta

SEQ ID NO: 161722 - DNA, 25 bp, Probe sequence
gtcaatcgatagacacaaattcaca

SEQ ID NO: 161723 - DNA, 25 bp, Probe sequence
gtcgaatcatcacacagtactgaaa

SEQ ID NO: 161724 - DNA, 25 bp, Probe sequence
gtgctggaacagcaggtttggctgg

SEQ ID NO: 161725 - DNA, 25 bp, Probe sequence
gtggcatggccaaagtattgttacc

SEQ ID NO: 161726 - DNA, 25 bp, Probe sequence
ggttcaggttcaccggaaaatgttg

SEQ ID NO: 161727 - DNA, 25 bp, Probe sequence
ggtggtggccaaagacatacagtga

SEQ ID NO: 161728 - DNA, 25 bp, Probe sequence
ggtttggctggaggcgcagcaagta

SEQ ID NO: 161729 - DNA, 25 bp, Probe sequence
ggaggcatggcattaaacaatcata

SEQ ID NO: 161730 - DNA, 25 bp, Probe sequence
tcgtcaagtcgaatcatcacacagt

SEQ ID NO: 161731 - DNA, 25 bp, Probe sequence
tagacgtgccaatggtttaagtggt

SEQ ID NO: 161732 - DNA, 25 bp, Probe sequence
gccgtttctacaacagtcgggacca

SEQ ID NO: 161733 - DNA, 25 bp, Probe sequence
atctcaccgttaatatctttaatgg

SEQ ID NO: 161734 - DNA, 25 bp, Probe sequence
atccaccggcacaagatcgatgttg

SEQ ID NO: 161735 - DNA, 25 bp, Probe sequence
atggatgaccaagttatgcagttga

SEQ ID NO: 161736 - DNA, 25 bp, Probe sequence
agagcgacacacagttcaacaacaa

SEQ ID NO: 161737 - DNA, 25 bp, Probe sequence
agcgcaacttatttatgattcaggt

SEQ ID NO: 161738 - DNA, 25 bp, Probe sequence
agccgacattaattatctcaccgtt

SEQ ID NO: 161739 - DNA, 25 bp, Probe sequence
acgtatttatcaggtaagccgacat

SEQ ID NO: 161740 - DNA, 25 bp, Probe sequence
acaagtccttctaactacattcaag

SEQ ID NO: 161741 - DNA, 25 bp, Probe sequence
aagttgcaaaatttatttctcagat

SEQ ID NO: 161742 - DNA, 25 bp, Probe sequence
aatgtctcaacaacacactctaggt

SEQ ID NO: 161743 - DNA, 25 bp, Probe sequence
caatcattcactttcatctttcaac

SEQ ID NO: 161744 - DNA, 25 bp, Probe sequence
ctatagtatcggcgccttgaaacag

SEQ ID NO: 161745 - DNA, 25 bp, Probe sequence
ctttcatctttcaacaagtccttct

SEQ ID NO: 161746 - DNA, 25 bp, Probe sequence
ccgcttcatctttctaagtccagaa

SEQ ID NO: 161747 - DNA, 25 bp, Probe sequence
gaattatcaagagcgacacacagtt

SEQ ID NO: 161748 - DNA, 25 bp, Probe sequence
gaatggggatatgatttcagaccac

SEQ ID NO: 161749 - DNA, 25 bp, Probe sequence
gaaacgttattatttgcagatatga

SEQ ID NO: 161750 - DNA, 25 bp, Probe sequence
gactttggcatgattgttctagatg

SEQ ID NO: 161751 - DNA, 25 bp, Probe sequence
gagtttgtgttatcaaatacctacg

SEQ ID NO: 161752 - DNA, 25 bp, Probe sequence
gatgtgtctgaatttagcgcaactt

SEQ ID NO: 161753 - DNA, 25 bp, Probe sequence
gatcgatgttgtgacaatgattcta

SEQ ID NO: 161754 - DNA, 25 bp, Probe sequence
gatattcgcacaatcattcactttc

SEQ ID NO: 161755 - DNA, 25 bp, Probe sequence
gatattccgattatagtcgcaacga

SEQ ID NO: 161756 - DNA, 25 bp, Probe sequence
gatttcagaccacattatgctctaa

SEQ ID NO: 161757 - DNA, 25 bp, Probe sequence
gattggctattgcaaattggatcaa

SEQ ID NO: 161758 - DNA, 25 bp, Probe sequence
gtaacatgtattcactctggtatgg

SEQ ID NO: 161759 - DNA, 25 bp, Probe sequence
gtcgcgatggtgaactaagtcaggc

SEQ ID NO: 161760 - DNA, 25 bp, Probe sequence
gtcgcaacgagtgcttttggtatgg

SEQ ID NO: 161761 - DNA, 25 bp, Probe sequence
tggttgctgccgtttctacaacagt

SEQ ID NO: 161762 - DNA, 25 bp, Probe sequence
tcattctatagtatcggcgccttga

SEQ ID NO: 161763 - DNA, 25 bp, Probe sequence
tacaacagtcgggaccaacgattat

SEQ ID NO: 161764 - DNA, 25 bp, Probe sequence
ttttcggtgaatatccaccggcaca

SEQ ID NO: 161765 - DNA, 25 bp, Probe sequence
ttaaaactacaatgaatcgcccaaa

SEQ ID NO: 161766 - DNA, 25 bp, Probe sequence
atatcacagtttaccactattaaaa

SEQ ID NO: 161767 - DNA, 25 bp, Probe sequence
atctcaccaaaccttttttgacgct

SEQ ID NO: 161768 - DNA, 25 bp, Probe sequence
atggaaatcatgttgcatcctagat

SEQ ID NO: 161769 - DNA, 25 bp, Probe sequence
agtggagaatatactattttatcaa

SEQ ID NO: 161770 - DNA, 25 bp, Probe sequence
agtatttacaatatcttagttggta

SEQ ID NO: 161771 - DNA, 25 bp, Probe sequence
acttacattattatttgcaaggcta

SEQ ID NO: 161772 - DNA, 25 bp, Probe sequence
acaacagttgtcattatatcacagt

SEQ ID NO: 161773 - DNA, 25 bp, Probe sequence
aaagggccatgttacttacattatt

SEQ ID NO: 161774 - DNA, 25 bp, Probe sequence
aacatttcaagcaattcaactatta

SEQ ID NO: 161775 - DNA, 25 bp, Probe sequence
aagaacaatttgacacgttatcata

SEQ ID NO: 161776 - DNA, 25 bp, Probe sequence
aagaggtgatctgaatgttgcatga

SEQ ID NO: 161777 - DNA, 25 bp, Probe sequence
aatactatcgaagatcatgtacttg

SEQ ID NO: 161778 - DNA, 25 bp, Probe sequence
cagcattacaacaaacatttaacta

SEQ ID NO: 161779 - DNA, 25 bp, Probe sequence
catgttgcatcctagatatacattt

SEQ ID NO: 161780 - DNA, 25 bp, Probe sequence
ctatctcaacagcaattgtttgaat

SEQ ID NO: 161781 - DNA, 25 bp, Probe sequence
gcaataactttaaaagggccatgtt

SEQ ID NO: 161782 - DNA, 25 bp, Probe sequence
gcaacacattataaaaacagcatta

SEQ ID NO: 161783 - DNA, 25 bp, Probe sequence
gcaaggctatgatgaaccaatgtat

SEQ ID NO: 161784 - DNA, 25 bp, Probe sequence
gaataatttagtgacaatgatgttt

SEQ ID NO: 161785 - DNA, 25 bp, Probe sequence
gaactacataacttgtttaaagcaa

SEQ ID NO: 161786 - DNA, 25 bp, Probe sequence
gacacgttatcatattttcaattaa

SEQ ID NO: 161787 - DNA, 25 bp, Probe sequence
gacgcttgtagtcaacaacagttgt

SEQ ID NO: 161788 - DNA, 25 bp, Probe sequence
gatgaaccaatgtatacgagacagc

SEQ ID NO: 161789 - DNA, 25 bp, Probe sequence
gatcatgtacttgaaatcttaatca

SEQ ID NO: 161790 - DNA, 25 bp, Probe sequence
gtatacgagacagcaagttagttta

SEQ ID NO: 161791 - DNA, 25 bp, Probe sequence
gtaccaatctctcaaaataataaga

SEQ ID NO: 161792 - DNA, 25 bp, Probe sequence
gtcattatatcacagtttaccacta

SEQ ID NO: 161793 - DNA, 25 bp, Probe sequence
gtctaattacgatgattatgttgaa

SEQ ID NO: 161794 - DNA, 25 bp, Probe sequence
tggtaagaaatctcaccaaaccttt

SEQ ID NO: 161795 - DNA, 25 bp, Probe sequence
tggggcaaacatttcaagcaattca

SEQ ID NO: 161796 - DNA, 25 bp, Probe sequence
tcaccaaaccttttttgacgcttgt

SEQ ID NO: 161797 - DNA, 25 bp, Probe sequence
tcaactattagtgcaaaccatgtct

SEQ ID NO: 161798 - DNA, 25 bp, Probe sequence
taaaatatccgtcttttgagctatt

SEQ ID NO: 161799 - DNA, 25 bp, Probe sequence
tatccgtcttttgagctatttttag

SEQ ID NO: 161800 - DNA, 25 bp, Probe sequence
attactggattaatcattgcaacaa

SEQ ID NO: 161801 - DNA, 25 bp, Probe sequence
attttactatatagaaggcttgcga

SEQ ID NO: 161802 - DNA, 25 bp, Probe sequence
atttctattgtatttattttactat

SEQ ID NO: 161803 - DNA, 25 bp, Probe sequence
atcattgcaacaatcgttatgacta

SEQ ID NO: 161804 - DNA, 25 bp, Probe sequence
accatttttgccaccatacttaact

SEQ ID NO: 161805 - DNA, 25 bp, Probe sequence
acgttcaacaaaatctttgattact

SEQ ID NO: 161806 - DNA, 25 bp, Probe sequence
acttttatcaagtttcctataccat

SEQ ID NO: 161807 - DNA, 25 bp, Probe sequence
aactgcttacgccatctataaaaat

SEQ ID NO: 161808 - DNA, 25 bp, Probe sequence
caagtttcctataccatttttgcca

SEQ ID NO: 161809 - DNA, 25 bp, Probe sequence
ctttagattttagtgatgtaccgtc

SEQ ID NO: 161810 - DNA, 25 bp, Probe sequence
gccaccatacttaactttagatttt

SEQ ID NO: 161811 - DNA, 25 bp, Probe sequence
gctgatatcgcaaataatcttaaag

SEQ ID NO: 161812 - DNA, 25 bp, Probe sequence
gctacatttacgtttggaccagttg

SEQ ID NO: 161813 - DNA, 25 bp, Probe sequence
gctaactttttagcaggcgcaagtt

SEQ ID NO: 161814 - DNA, 25 bp, Probe sequence
gcaacaaaataaacgtcttatcaca

SEQ ID NO: 161815 - DNA, 25 bp, Probe sequence
gaaggcttgcgaatttcttgaaaag

SEQ ID NO: 161816 - DNA, 25 bp, Probe sequence
gaactacttatttagtatgggcgat

SEQ ID NO: 161817 - DNA, 25 bp, Probe sequence
gtttcttattaactgcttacgccat

SEQ ID NO: 161818 - DNA, 25 bp, Probe sequence
gtatgttgagcgcgattgcgtttgt

SEQ ID NO: 161819 - DNA, 25 bp, Probe sequence
gtaccgtcactactagctacattta

SEQ ID NO: 161820 - DNA, 25 bp, Probe sequence
gtcactactagctacatttacgttt

SEQ ID NO: 161821 - DNA, 25 bp, Probe sequence
gtgatgtaccgtcactactagctac

SEQ ID NO: 161822 - DNA, 25 bp, Probe sequence
ggaattataccattcaatattatta

SEQ ID NO: 161823 - DNA, 25 bp, Probe sequence
tgaactatttcgttctattaccttt

SEQ ID NO: 161824 - DNA, 25 bp, Probe sequence
taagtatgttgagcgcgattgcgtt

SEQ ID NO: 161825 - DNA, 25 bp, Probe sequence
tactagctacatttacgtttggacc

SEQ ID NO: 161826 - DNA, 25 bp, Probe sequence
tacgtttggaccagttgccggtatc

SEQ ID NO: 161827 - DNA, 25 bp, Probe sequence
tacggtatgatatttaacttagctg

SEQ ID NO: 161828 - DNA, 25 bp, Probe sequence
tataccatttttgccaccatactta

SEQ ID NO: 161829 - DNA, 25 bp, Probe sequence
tatttagtatgggcgatccagttgg

SEQ ID NO: 161830 - DNA, 25 bp, Probe sequence
tattaactgcttacgccatctataa

SEQ ID NO: 161831 - DNA, 25 bp, Probe sequence
tttttgccaccatacttaactttag

SEQ ID NO: 161832 - DNA, 25 bp, Probe sequence
ttttagcaggcgcaagtttcttatt

SEQ ID NO: 161833 - DNA, 25 bp, Probe sequence
ttaacttagctgatatcgcaaataa

SEQ ID NO: 161834 - DNA, 25 bp, Probe sequence
attccaaacaatgctcgcaaatcac

SEQ ID NO: 161835 - DNA, 25 bp, Probe sequence
attaatcaagcaaacaacattccaa

SEQ ID NO: 161836 - DNA, 25 bp, Probe sequence
atcaagcaaacaacattccaaacaa

SEQ ID NO: 161837 - DNA, 25 bp, Probe sequence
atgacgatttttactcaattgagtg

SEQ ID NO: 161838 - DNA, 25 bp, Probe sequence
agtgatagaatcaaaaaagccatct

SEQ ID NO: 161839 - DNA, 25 bp, Probe sequence
agccatctcaaaaattaatcaagca

SEQ ID NO: 161840 - DNA, 25 bp, Probe sequence
acattccaaacaatgctcgcaaatc

SEQ ID NO: 161841 - DNA, 25 bp, Probe sequence
acaacattccaaacaatgctcgcaa

SEQ ID NO: 161842 - DNA, 25 bp, Probe sequence
acaatgctcgcaaatcaccaatgta

SEQ ID NO: 161843 - DNA, 25 bp, Probe sequence
aaagccatctcaaaaattaatcaag

SEQ ID NO: 161844 - DNA, 25 bp, Probe sequence
aaacaatgctcgcaaatcaccaatg

SEQ ID NO: 161845 - DNA, 25 bp, Probe sequence
aaacaacattccaaacaatgctcgc

SEQ ID NO: 161846 - DNA, 25 bp, Probe sequence
aaaagccatctcaaaaattaatcaa

SEQ ID NO: 161847 - DNA, 25 bp, Probe sequence
aacaatgctcgcaaatcaccaatgt

SEQ ID NO: 161848 - DNA, 25 bp, Probe sequence
aacaacattccaaacaatgctcgca

SEQ ID NO: 161849 - DNA, 25 bp, Probe sequence
aacattccaaacaatgctcgcaaat

SEQ ID NO: 161850 - DNA, 25 bp, Probe sequence
aagccatctcaaaaattaatcaagc

SEQ ID NO: 161851 - DNA, 25 bp, Probe sequence
aagcaaacaacattccaaacaatgc

SEQ ID NO: 161852 - DNA, 25 bp, Probe sequence
aatcaagcaaacaacattccaaaca

SEQ ID NO: 161853 - DNA, 25 bp, Probe sequence
aattaatcaagcaaacaacattcca

SEQ ID NO: 161854 - DNA, 25 bp, Probe sequence
caacattccaaacaatgctcgcaaa

SEQ ID NO: 161855 - DNA, 25 bp, Probe sequence
caaacaacattccaaacaatgctcg

SEQ ID NO: 161856 - DNA, 25 bp, Probe sequence
caaacaatgctcgcaaatcaccaat

SEQ ID NO: 161857 - DNA, 25 bp, Probe sequence
cattccaaacaatgctcgcaaatca

SEQ ID NO: 161858 - DNA, 25 bp, Probe sequence
ccaaacaatgctcgcaaatcaccaa

SEQ ID NO: 161859 - DNA, 25 bp, Probe sequence
gccatctcaaaaattaatcaagcaa

SEQ ID NO: 161860 - DNA, 25 bp, Probe sequence
gcaaacaacattccaaacaatgctc

SEQ ID NO: 161861 - DNA, 25 bp, Probe sequence
gacgatttttactcaattgagtgat

SEQ ID NO: 161862 - DNA, 25 bp, Probe sequence
gatttttactcaattgagtgataga

SEQ ID NO: 161863 - DNA, 25 bp, Probe sequence
tccaaacaatgctcgcaaatcacca

SEQ ID NO: 161864 - DNA, 25 bp, Probe sequence
tcaagcaaacaacattccaaacaat

SEQ ID NO: 161865 - DNA, 25 bp, Probe sequence
taatcaagcaaacaacattccaaac

SEQ ID NO: 161866 - DNA, 25 bp, Probe sequence
ttaatcaagcaaacaacattccaaa

SEQ ID NO: 161867 - DNA, 25 bp, Probe sequence
ttccaaacaatgctcgcaaatcacc

SEQ ID NO: 161868 - DNA, 25 bp, Probe sequence
attgcaggtgccgtattacctttac

SEQ ID NO: 161869 - DNA, 25 bp, Probe sequence
attggcttaatatttacagcgcttg

SEQ ID NO: 161870 - DNA, 25 bp, Probe sequence
atttacatcgaggctacacgctaca

SEQ ID NO: 161871 - DNA, 25 bp, Probe sequence
atttacagcgcttggtattgcaggt

SEQ ID NO: 161872 - DNA, 25 bp, Probe sequence
atatttacagcgcttggtattgcag

SEQ ID NO: 161873 - DNA, 25 bp, Probe sequence
atcatacaaaccgctgtactcttta

SEQ ID NO: 161874 - DNA, 25 bp, Probe sequence
atcgaggctacacgctacaacagaa

SEQ ID NO: 161875 - DNA, 25 bp, Probe sequence
accgctgtactctttacatttgtaa

SEQ ID NO: 161876 - DNA, 25 bp, Probe sequence
acttttatttacatcgaggctacac

SEQ ID NO: 161877 - DNA, 25 bp, Probe sequence
acatcgaggctacacgctacaacag

SEQ ID NO: 161878 - DNA, 25 bp, Probe sequence
aaattttaattagcttatacattgt

SEQ ID NO: 161879 - DNA, 25 bp, Probe sequence
aaaccgctgtactctttacatttgt

SEQ ID NO: 161880 - DNA, 25 bp, Probe sequence
caaaccgctgtactctttacatttg

SEQ ID NO: 161881 - DNA, 25 bp, Probe sequence
caggtgccgtattacctttactgcc

SEQ ID NO: 161882 - DNA, 25 bp, Probe sequence
catacaaaccgctgtactctttaca

SEQ ID NO: 161883 - DNA, 25 bp, Probe sequence
cgctgtactctttacatttgtaaaa

SEQ ID NO: 161884 - DNA, 25 bp, Probe sequence
gcttatacattgtaataggtttttc

SEQ ID NO: 161885 - DNA, 25 bp, Probe sequence
gaaaacttttatttacatcgaggct

SEQ ID NO: 161886 - DNA, 25 bp, Probe sequence
gaggctacacgctacaacagaaaat

SEQ ID NO: 161887 - DNA, 25 bp, Probe sequence
gttatcatacaaaccgctgtactct

SEQ ID NO: 161888 - DNA, 25 bp, Probe sequence
ggtattgcaggtgccgtattacctt

SEQ ID NO: 161889 - DNA, 25 bp, Probe sequence
ggattaatcataatggttatcatac

SEQ ID NO: 161890 - DNA, 25 bp, Probe sequence
ggcttaatatttacagcgcttggta

SEQ ID NO: 161891 - DNA, 25 bp, Probe sequence
ggctacacgctacaacagaaaatta

SEQ ID NO: 161892 - DNA, 25 bp, Probe sequence
tgtaaaaacattacccaaatcaaat

SEQ ID NO: 161893 - DNA, 25 bp, Probe sequence
tgcaggtgccgtattacctttactg

SEQ ID NO: 161894 - DNA, 25 bp, Probe sequence
tgccgtattacctttactgccaacg

SEQ ID NO: 161895 - DNA, 25 bp, Probe sequence
tcgaggctacacgctacaacagaaa

SEQ ID NO: 161896 - DNA, 25 bp, Probe sequence
tacaaaccgctgtactctttacatt

SEQ ID NO: 161897 - DNA, 25 bp, Probe sequence
taggtttttcaatttatatggtgga

SEQ ID NO: 161898 - DNA, 25 bp, Probe sequence
ttttacaattggcttattaatcaaa

SEQ ID NO: 161899 - DNA, 25 bp, Probe sequence
tttatatggtggatgttcttgcagt

SEQ ID NO: 161900 - DNA, 25 bp, Probe sequence
ttatttacatcgaggctacacgcta

SEQ ID NO: 161901 - DNA, 25 bp, Probe sequence
ttacatcgaggctacacgctacaac

SEQ ID NO: 161902 - DNA, 25 bp, Probe sequence
attgagtagctatagggtttatcaa

SEQ ID NO: 161903 - DNA, 25 bp, Probe sequence
atttaagcaggcagatgtatttgaa

SEQ ID NO: 161904 - DNA, 25 bp, Probe sequence
aggcagatgtatttgaagatttata

SEQ ID NO: 161905 - DNA, 25 bp, Probe sequence
agtagctatagggtttatcaagaca

SEQ ID NO: 161906 - DNA, 25 bp, Probe sequence
agcaggcagatgtatttgaagattt

SEQ ID NO: 161907 - DNA, 25 bp, Probe sequence
acgaaaaacgatttaagcaggcaga

SEQ ID NO: 161908 - DNA, 25 bp, Probe sequence
acgatttaagcaggcagatgtattt

SEQ ID NO: 161909 - DNA, 25 bp, Probe sequence
acagaattgagtagctatagggttt

SEQ ID NO: 161910 - DNA, 25 bp, Probe sequence
aaacgatttaagcaggcagatgtat

SEQ ID NO: 161911 - DNA, 25 bp, Probe sequence
aaaaacgatttaagcaggcagatgt

SEQ ID NO: 161912 - DNA, 25 bp, Probe sequence
aaaacgatttaagcaggcagatgta

SEQ ID NO: 161913 - DNA, 25 bp, Probe sequence
aacgaaaaacgatttaagcaggcag

SEQ ID NO: 161914 - DNA, 25 bp, Probe sequence
aacgatttaagcaggcagatgtatt

SEQ ID NO: 161915 - DNA, 25 bp, Probe sequence
aagcaggcagatgtatttgaagatt

SEQ ID NO: 161916 - DNA, 25 bp, Probe sequence
aattgagtagctatagggtttatca

SEQ ID NO: 161917 - DNA, 25 bp, Probe sequence
caaaatgaaacttttaaaagcgcat

SEQ ID NO: 161918 - DNA, 25 bp, Probe sequence
cagaattgagtagctatagggttta

SEQ ID NO: 161919 - DNA, 25 bp, Probe sequence
caggcagatgtatttgaagatttat

SEQ ID NO: 161920 - DNA, 25 bp, Probe sequence
cgatttaagcaggcagatgtatttg

SEQ ID NO: 161921 - DNA, 25 bp, Probe sequence
cgaaaaacgatttaagcaggcagat

SEQ ID NO: 161922 - DNA, 25 bp, Probe sequence
gcaggcagatgtatttgaagattta

SEQ ID NO: 161923 - DNA, 25 bp, Probe sequence
gcagatgtatttgaagatttatata

SEQ ID NO: 161924 - DNA, 25 bp, Probe sequence
gaattgagtagctatagggtttatc

SEQ ID NO: 161925 - DNA, 25 bp, Probe sequence
gaaaaacgatttaagcaggcagatg

SEQ ID NO: 161926 - DNA, 25 bp, Probe sequence
gagaaactaaaagacacaaataaat

SEQ ID NO: 161927 - DNA, 25 bp, Probe sequence
gagagaaactaaaagacacaaataa

SEQ ID NO: 161928 - DNA, 25 bp, Probe sequence
gagagtataattatttacaaaatga

SEQ ID NO: 161929 - DNA, 25 bp, Probe sequence
gagtagctatagggtttatcaagac

SEQ ID NO: 161930 - DNA, 25 bp, Probe sequence
gatttaagcaggcagatgtatttga

SEQ ID NO: 161931 - DNA, 25 bp, Probe sequence
ggcagatgtatttgaagatttatat

SEQ ID NO: 161932 - DNA, 25 bp, Probe sequence
tgagtagctatagggtttatcaaga

SEQ ID NO: 161933 - DNA, 25 bp, Probe sequence
taagcaggcagatgtatttgaagat

SEQ ID NO: 161934 - DNA, 25 bp, Probe sequence
tttaagcaggcagatgtatttgaag

SEQ ID NO: 161935 - DNA, 25 bp, Probe sequence
ttaagcaggcagatgtatttgaaga

SEQ ID NO: 161936 - DNA, 25 bp, Probe sequence
attgtaatgagtccgattgcagaaa

SEQ ID NO: 161937 - DNA, 25 bp, Probe sequence
atagcaacaatccaaatcacagtaa

SEQ ID NO: 161938 - DNA, 25 bp, Probe sequence
atcgagtccatcaattaagttaatt

SEQ ID NO: 161939 - DNA, 25 bp, Probe sequence
atgagtccgattgcagaaacacccg

SEQ ID NO: 161940 - DNA, 25 bp, Probe sequence
agcaacaatccaaatcacagtaatt

SEQ ID NO: 161941 - DNA, 25 bp, Probe sequence
accatcgagtccatcaattaagtta

SEQ ID NO: 161942 - DNA, 25 bp, Probe sequence
aaatcacagtaattggaatactaag

SEQ ID NO: 161943 - DNA, 25 bp, Probe sequence
aaaccatcgagtccatcaattaagt

SEQ ID NO: 161944 - DNA, 25 bp, Probe sequence
aaccatcgagtccatcaattaagtt

SEQ ID NO: 161945 - DNA, 25 bp, Probe sequence
aatgagtccgattgcagaaacaccc

SEQ ID NO: 161946 - DNA, 25 bp, Probe sequence
aatagcaacaatccaaatcacagta

SEQ ID NO: 161947 - DNA, 25 bp, Probe sequence
caacaatccaaatcacagtaattgg

SEQ ID NO: 161948 - DNA, 25 bp, Probe sequence
caaaccatcgagtccatcaattaag

SEQ ID NO: 161949 - DNA, 25 bp, Probe sequence
catcgagtccatcaattaagttaat

SEQ ID NO: 161950 - DNA, 25 bp, Probe sequence
ctattgtaatgagtccgattgcaga

SEQ ID NO: 161951 - DNA, 25 bp, Probe sequence
cctattgtaatgagtccgattgcag

SEQ ID NO: 161952 - DNA, 25 bp, Probe sequence
ccatcgagtccatcaattaagttaa

SEQ ID NO: 161953 - DNA, 25 bp, Probe sequence
ccaaaccatcgagtccatcaattaa

SEQ ID NO: 161954 - DNA, 25 bp, Probe sequence
gccaaaccatcgagtccatcaatta

SEQ ID NO: 161955 - DNA, 25 bp, Probe sequence
gcatttgtaatagcaacaatccaaa

SEQ ID NO: 161956 - DNA, 25 bp, Probe sequence
gcaacaatccaaatcacagtaattg

SEQ ID NO: 161957 - DNA, 25 bp, Probe sequence
gaaaatattagcttgtaaaattgca

SEQ ID NO: 161958 - DNA, 25 bp, Probe sequence
gtaatagcaacaatccaaatcacag

SEQ ID NO: 161959 - DNA, 25 bp, Probe sequence
gtaatgagtccgattgcagaaacac

SEQ ID NO: 161960 - DNA, 25 bp, Probe sequence
tgtaatgagtccgattgcagaaaca

SEQ ID NO: 161961 - DNA, 25 bp, Probe sequence
tgagtccgattgcagaaacacccga

SEQ ID NO: 161962 - DNA, 25 bp, Probe sequence
tgcatttgtaatagcaacaatccaa

SEQ ID NO: 161963 - DNA, 25 bp, Probe sequence
taatagcaacaatccaaatcacagt

SEQ ID NO: 161964 - DNA, 25 bp, Probe sequence
taatgagtccgattgcagaaacacc

SEQ ID NO: 161965 - DNA, 25 bp, Probe sequence
tagcaacaatccaaatcacagtaat

SEQ ID NO: 161966 - DNA, 25 bp, Probe sequence
tattagcttgtaaaattgcaatgaa

SEQ ID NO: 161967 - DNA, 25 bp, Probe sequence
tattgtaatgagtccgattgcagaa

SEQ ID NO: 161968 - DNA, 25 bp, Probe sequence
ttaagttaattgcatttgtaatagc

SEQ ID NO: 161969 - DNA, 25 bp, Probe sequence
ttgtaatgagtccgattgcagaaac

SEQ ID NO: 161970 - DNA, 25 bp, Probe sequence
ctgacccagcaatggtaccttatgc

SEQ ID NO: 161971 - DNA, 25 bp, Probe sequence
attatcttaagcaatcagacgaatt

SEQ ID NO: 161972 - DNA, 25 bp, Probe sequence
atctaatgaggcaataaaccctaat

SEQ ID NO: 161973 - DNA, 25 bp, Probe sequence
atggtgttagtccaaataattacaa

SEQ ID NO: 161974 - DNA, 25 bp, Probe sequence
aggcaataaaccctaataatccatt

SEQ ID NO: 161975 - DNA, 25 bp, Probe sequence
agagacaaactaaatgacgctaata

SEQ ID NO: 161976 - DNA, 25 bp, Probe sequence
agcaatggtaccttatgctgcttgg

SEQ ID NO: 161977 - DNA, 25 bp, Probe sequence
agcaatcagacgaatttgcagattt

SEQ ID NO: 161978 - DNA, 25 bp, Probe sequence
acccagcaatggtaccttatgctgc

SEQ ID NO: 161979 - DNA, 25 bp, Probe sequence
acggattatcttaagcaatcagacg

SEQ ID NO: 161980 - DNA, 25 bp, Probe sequence
acaaaccatgatttatcaaggaaca

SEQ ID NO: 161981 - DNA, 25 bp, Probe sequence
aaccaactggtgaacaaaccatgat

SEQ ID NO: 161982 - DNA, 25 bp, Probe sequence
aagcaggttgatgaatataatgata

SEQ ID NO: 161983 - DNA, 25 bp, Probe sequence
aagtcaacggattatcttaagcaat

SEQ ID NO: 161984 - DNA, 25 bp, Probe sequence
caattttagatgggaatttccaaat

SEQ ID NO: 161985 - DNA, 25 bp, Probe sequence
ccattaaaatctttagatatcggag

SEQ ID NO: 161986 - DNA, 25 bp, Probe sequence
gcctttgattgtacagatgttattt

SEQ ID NO: 161987 - DNA, 25 bp, Probe sequence
gctactgacccagcaatggtacctt

SEQ ID NO: 161988 - DNA, 25 bp, Probe sequence
gcaataaaccctaataatccattaa

SEQ ID NO: 161989 - DNA, 25 bp, Probe sequence
gaatttgcagatttatatagagaca

SEQ ID NO: 161990 - DNA, 25 bp, Probe sequence
gaaaaccaactggtgaacaaaccat

SEQ ID NO: 161991 - DNA, 25 bp, Probe sequence
gacaaactaaatgacgctaataaat

SEQ ID NO: 161992 - DNA, 25 bp, Probe sequence
gatatcggagatgattggttacaaa

SEQ ID NO: 161993 - DNA, 25 bp, Probe sequence
gattggttacaaaatgcgaaattaa

SEQ ID NO: 161994 - DNA, 25 bp, Probe sequence
gattgtacagatgttatttgaacca

SEQ ID NO: 161995 - DNA, 25 bp, Probe sequence
gtataactttacacaaaaatatggt

SEQ ID NO: 161996 - DNA, 25 bp, Probe sequence
gtacagatgttatttgaaccatcac

SEQ ID NO: 161997 - DNA, 25 bp, Probe sequence
ggtgaacaaaccatgatttatcaag

SEQ ID NO: 161998 - DNA, 25 bp, Probe sequence
ggataatagtaataagtcaacggat

SEQ ID NO: 161999 - DNA, 25 bp, Probe sequence
ggaaaaagatttaagcaggttgatg

SEQ ID NO: 162000 - DNA, 25 bp, Probe sequence
tgggaatttccaaattaattgtagc

SEQ ID NO: 162001 - DNA, 25 bp, Probe sequence
tgacccagcaatggtaccttatgct

SEQ ID NO: 162002 - DNA, 25 bp, Probe sequence
tcagacgaatttgcagatttatata

SEQ ID NO: 162003 - DNA, 25 bp, Probe sequence
tactgacccagcaatggtaccttat

SEQ ID NO: 162004 - DNA, 25 bp, Probe sequence
atcggggtttggagatgattggctc

SEQ ID NO: 162005 - DNA, 25 bp, Probe sequence
cattgtggcggatggcggtaattcg

SEQ ID NO: 162006 - DNA, 25 bp, Probe sequence
atctgcctctctaatacggtcaaac

SEQ ID NO: 162007 - DNA, 25 bp, Probe sequence
atgattccttatgctgcttggcaga

SEQ ID NO: 162008 - DNA, 25 bp, Probe sequence
atggtgtgcccaggttagatacttt

SEQ ID NO: 162009 - DNA, 25 bp, Probe sequence
agatcacgacttcagagatggagta

SEQ ID NO: 162010 - DNA, 25 bp, Probe sequence
agaacatgaagcctttgattgtaca

SEQ ID NO: 162011 - DNA, 25 bp, Probe sequence
aaacgatggatcaatctgcctctct

SEQ ID NO: 162012 - DNA, 25 bp, Probe sequence
aatccattaaaatcatcggggtttg

SEQ ID NO: 162013 - DNA, 25 bp, Probe sequence
cacatacgatactgtaccactaatc

SEQ ID NO: 162014 - DNA, 25 bp, Probe sequence
cgtcttgatcaaatggcacaacagt

SEQ ID NO: 162015 - DNA, 25 bp, Probe sequence
gctactgactcagcaatgattcctt

SEQ ID NO: 162016 - DNA, 25 bp, Probe sequence
gctagaccacgctttgataatatga

SEQ ID NO: 162017 - DNA, 25 bp, Probe sequence
gcagaaatttgctagaccacgcttt

SEQ ID NO: 162018 - DNA, 25 bp, Probe sequence
gcagtgtcaccaattttagataacc

SEQ ID NO: 162019 - DNA, 25 bp, Probe sequence
gaagttgtttgtaatggcttgaacg

SEQ ID NO: 162020 - DNA, 25 bp, Probe sequence
gaaagaatttttgtccctgattcct

SEQ ID NO: 162021 - DNA, 25 bp, Probe sequence
gaaaatcttgatgcgttgagtaaac

SEQ ID NO: 162022 - DNA, 25 bp, Probe sequence
gaaaaagttgttgctactgactcag

SEQ ID NO: 162023 - DNA, 25 bp, Probe sequence
gatccattcatcaaagatatgccag

SEQ ID NO: 162024 - DNA, 25 bp, Probe sequence
gatatgccaggaaaacgcgttaaca

SEQ ID NO: 162025 - DNA, 25 bp, Probe sequence
gattcgattgcacgttctggaagag

SEQ ID NO: 162026 - DNA, 25 bp, Probe sequence
gattggctccaaaatgctaaattaa

SEQ ID NO: 162027 - DNA, 25 bp, Probe sequence
gttagcagaatgcgtaatcttttta

SEQ ID NO: 162028 - DNA, 25 bp, Probe sequence
gtttggacaggagattcgattgcac

SEQ ID NO: 162029 - DNA, 25 bp, Probe sequence
gtaattcggaaggcggtgcaggagc

SEQ ID NO: 162030 - DNA, 25 bp, Probe sequence
gtacagggtctagttataccttcta

SEQ ID NO: 162031 - DNA, 25 bp, Probe sequence
gtaatttgaatggtgctgctgatat

SEQ ID NO: 162032 - DNA, 25 bp, Probe sequence
gtgctgttaaacacttattacctga

SEQ ID NO: 162033 - DNA, 25 bp, Probe sequence
gtccctgattcctaatgtaacttgt

SEQ ID NO: 162034 - DNA, 25 bp, Probe sequence
tagcggcgaaaatatggtacagggt

SEQ ID NO: 162035 - DNA, 25 bp, Probe sequence
tagatactttaatagacagccatgt

SEQ ID NO: 162036 - DNA, 25 bp, Probe sequence
tattacctgattttgcattggatgc

SEQ ID NO: 162037 - DNA, 25 bp, Probe sequence
ttattttaaacacacaagctcatgc

SEQ ID NO: 162038 - DNA, 25 bp, Probe sequence
atcggggtttggagatgattggctc

SEQ ID NO: 162039 - DNA, 25 bp, Probe sequence
cattgtggcggatggcggtaattcg

SEQ ID NO: 162040 - DNA, 25 bp, Probe sequence
atgattccttatgctgcttggcaga

SEQ ID NO: 162041 - DNA, 25 bp, Probe sequence
atggtgtgcccaggttagatacttt

SEQ ID NO: 162042 - DNA, 25 bp, Probe sequence
agatcacgacttcagagatggagta

SEQ ID NO: 162043 - DNA, 25 bp, Probe sequence
aatccattaaaatcatcggggtttg

SEQ ID NO: 162044 - DNA, 25 bp, Probe sequence
aatagcagactatgttcaaggtata

SEQ ID NO: 162045 - DNA, 25 bp, Probe sequence
cacatacgatactgtaccactaatc

SEQ ID NO: 162046 - DNA, 25 bp, Probe sequence
gccagtgttctcaagcgttttataa

SEQ ID NO: 162047 - DNA, 25 bp, Probe sequence
gctactgactcagcaatgattcctt

SEQ ID NO: 162048 - DNA, 25 bp, Probe sequence
gctagaccacgctttgataatatga

SEQ ID NO: 162049 - DNA, 25 bp, Probe sequence
gcagaaatttgctagaccacgcttt

SEQ ID NO: 162050 - DNA, 25 bp, Probe sequence
gcagtgtcaccaattttagataacc

SEQ ID NO: 162051 - DNA, 25 bp, Probe sequence
gaaagaatttttgtccctgattcct

SEQ ID NO: 162052 - DNA, 25 bp, Probe sequence
gaacatgaagcctttgattgtacaa

SEQ ID NO: 162053 - DNA, 25 bp, Probe sequence
gaaaatcttgatgcgttgagtaaac

SEQ ID NO: 162054 - DNA, 25 bp, Probe sequence
gaaaaagttgttgctactgactcag

SEQ ID NO: 162055 - DNA, 25 bp, Probe sequence
gaaaagctttaacgccagtgttctc

SEQ ID NO: 162056 - DNA, 25 bp, Probe sequence
gatccattcatcaaagatatgccag

SEQ ID NO: 162057 - DNA, 25 bp, Probe sequence
gatatgccaggaaaacgcgttaaca

SEQ ID NO: 162058 - DNA, 25 bp, Probe sequence
gatatttgaaccatcacattatgac

SEQ ID NO: 162059 - DNA, 25 bp, Probe sequence
gattcgattgcacgttctggaagag

SEQ ID NO: 162060 - DNA, 25 bp, Probe sequence
gattggctccaaaatgctaaattaa

SEQ ID NO: 162061 - DNA, 25 bp, Probe sequence
gttagcagaatgcgtaatcttttta

SEQ ID NO: 162062 - DNA, 25 bp, Probe sequence
gtttggacaggagattcgattgcac

SEQ ID NO: 162063 - DNA, 25 bp, Probe sequence
gtaattcggaaggcggtgcaggagc

SEQ ID NO: 162064 - DNA, 25 bp, Probe sequence
gtacagggtctagttataccttcta

SEQ ID NO: 162065 - DNA, 25 bp, Probe sequence
gtaatttgaatggtgctgctgatat

SEQ ID NO: 162066 - DNA, 25 bp, Probe sequence
gtgctgttaaacacttattacctga

SEQ ID NO: 162067 - DNA, 25 bp, Probe sequence
gtccctgattcctaatgtaacttgt

SEQ ID NO: 162068 - DNA, 25 bp, Probe sequence
ggcaaatgggagccttttcttaatg

SEQ ID NO: 162069 - DNA, 25 bp, Probe sequence
tagcggcgaaaatatggtacagggt

SEQ ID NO: 162070 - DNA, 25 bp, Probe sequence
tagatactttaatagacagccatgt

SEQ ID NO: 162071 - DNA, 25 bp, Probe sequence
tattacctgattttgcattggatgc

SEQ ID NO: 162072 - DNA, 25 bp, Probe sequence
atcaggggaatccaactggtcaaca

SEQ ID NO: 162073 - DNA, 25 bp, Probe sequence
atggtgcagggtctagctttacctt

SEQ ID NO: 162074 - DNA, 25 bp, Probe sequence
agcggtgaaaatatggtgcagggtc

SEQ ID NO: 162075 - DNA, 25 bp, Probe sequence
acatacgagttacttaatgatcagg

SEQ ID NO: 162076 - DNA, 25 bp, Probe sequence
acaattgtggcggatggtggtaatt

SEQ ID NO: 162077 - DNA, 25 bp, Probe sequence
aaagatgcttctgttcttgatgaaa

SEQ ID NO: 162078 - DNA, 25 bp, Probe sequence
aaagcaagtagaagaattcgcaaat

SEQ ID NO: 162079 - DNA, 25 bp, Probe sequence
aaacaattgtggcggatggtggtaa

SEQ ID NO: 162080 - DNA, 25 bp, Probe sequence
aaaatatggtgcagggtctagcttt

SEQ ID NO: 162081 - DNA, 25 bp, Probe sequence
aatgataatatgaatggtgctgctg

SEQ ID NO: 162082 - DNA, 25 bp, Probe sequence
aatatggtgcagggtctagctttac

SEQ ID NO: 162083 - DNA, 25 bp, Probe sequence
caaaacaattgtggcggatggtggt

SEQ ID NO: 162084 - DNA, 25 bp, Probe sequence
ctgctgatattaaaacatacgagtt

SEQ ID NO: 162085 - DNA, 25 bp, Probe sequence
cggatggtggtaattcggaaggtgg

SEQ ID NO: 162086 - DNA, 25 bp, Probe sequence
gcttctgttcttgatgaaaatgaat

SEQ ID NO: 162087 - DNA, 25 bp, Probe sequence
gcagttattgggtttatcaagatat

SEQ ID NO: 162088 - DNA, 25 bp, Probe sequence
gcagaattgagcagttattgggttt

SEQ ID NO: 162089 - DNA, 25 bp, Probe sequence
gaattgagcagttattgggtttatc

SEQ ID NO: 162090 - DNA, 25 bp, Probe sequence
gaattcgcaaatagttatcgacaaa

SEQ ID NO: 162091 - DNA, 25 bp, Probe sequence
gaagaattcgcaaatagttatcgac

SEQ ID NO: 162092 - DNA, 25 bp, Probe sequence
gacatagcagaattgagcagttatt

SEQ ID NO: 162093 - DNA, 25 bp, Probe sequence
gagcagttattgggtttatcaagat

SEQ ID NO: 162094 - DNA, 25 bp, Probe sequence
gatgcttctgttcttgatgaaaatg

SEQ ID NO: 162095 - DNA, 25 bp, Probe sequence
gattgcacgttccggaaaaggaact

SEQ ID NO: 162096 - DNA, 25 bp, Probe sequence
gatagggacatagcagaattgagca

SEQ ID NO: 162097 - DNA, 25 bp, Probe sequence
gggacatagcagaattgagcagtta

SEQ ID NO: 162098 - DNA, 25 bp, Probe sequence
ggtggtaattcggaaggtggtgcag

SEQ ID NO: 162099 - DNA, 25 bp, Probe sequence
ggtctagctttaccttctaattatt

SEQ ID NO: 162100 - DNA, 25 bp, Probe sequence
tggtgcagggtctagctttaccttc

SEQ ID NO: 162101 - DNA, 25 bp, Probe sequence
tgcagggtctagctttaccttctaa

SEQ ID NO: 162102 - DNA, 25 bp, Probe sequence
tcaggggaatccaactggtcaacag

SEQ ID NO: 162103 - DNA, 25 bp, Probe sequence
tatggtgcagggtctagctttacct

SEQ ID NO: 162104 - DNA, 25 bp, Probe sequence
ttaaagatgcttctgttcttgatga

SEQ ID NO: 162105 - DNA, 25 bp, Probe sequence
ttcgattgcacgttccggaaaagga

SEQ ID NO: 162106 - DNA, 25 bp, Probe sequence
atcgctacttgtgttgtaatattat

SEQ ID NO: 162107 - DNA, 25 bp, Probe sequence
atgactgaagacgtccctatcgcta

SEQ ID NO: 162108 - DNA, 25 bp, Probe sequence
atgactcaaatgttaaatatctact

SEQ ID NO: 162109 - DNA, 25 bp, Probe sequence
agtaatccatgttcaacaccgaggt

SEQ ID NO: 162110 - DNA, 25 bp, Probe sequence
aaatatctactaatgaaggacccaa

SEQ ID NO: 162111 - DNA, 25 bp, Probe sequence
aaggacccaagcaatgaacctggta

SEQ ID NO: 162112 - DNA, 25 bp, Probe sequence
aatgactgaagacgtccctatcgct

SEQ ID NO: 162113 - DNA, 25 bp, Probe sequence
ctatcgctacttgtgttgtaatatt

SEQ ID NO: 162114 - DNA, 25 bp, Probe sequence
ccctatcgctacttgtgttgtaata

SEQ ID NO: 162115 - DNA, 25 bp, Probe sequence
ccatttttaatatcaacttgttttg

SEQ ID NO: 162116 - DNA, 25 bp, Probe sequence
gctacttgtgttgtaatattatgta

SEQ ID NO: 162117 - DNA, 25 bp, Probe sequence
gaatgactgaagacgtccctatcgc

SEQ ID NO: 162118 - DNA, 25 bp, Probe sequence
gcaatgaacctggtaatagtccaaa

SEQ ID NO: 162119 - DNA, 25 bp, Probe sequence
gaaggacccaagcaatgaacctggt

SEQ ID NO: 162120 - DNA, 25 bp, Probe sequence
gaagaaagtcctgtcacaattagaa

SEQ ID NO: 162121 - DNA, 25 bp, Probe sequence
gaaagtcctgtcacaattagaatga

SEQ ID NO: 162122 - DNA, 25 bp, Probe sequence
gacccaagcaatgaacctggtaata

SEQ ID NO: 162123 - DNA, 25 bp, Probe sequence
gatggaaccatttttaatatcaact

SEQ ID NO: 162124 - DNA, 25 bp, Probe sequence
gatgaagaaagtcctgtcacaatta

SEQ ID NO: 162125 - DNA, 25 bp, Probe sequence
gtagtaatccatgttcaacaccgag

SEQ ID NO: 162126 - DNA, 25 bp, Probe sequence
gtaatccatgttcaacaccgaggta

SEQ ID NO: 162127 - DNA, 25 bp, Probe sequence
gtccctatcgctacttgtgttgtaa

SEQ ID NO: 162128 - DNA, 25 bp, Probe sequence
gtcctgtcacaattagaatgactga

SEQ ID NO: 162129 - DNA, 25 bp, Probe sequence
ggacccaagcaatgaacctggtaat

SEQ ID NO: 162130 - DNA, 25 bp, Probe sequence
ggaaccatttttaatatcaacttgt

SEQ ID NO: 162131 - DNA, 25 bp, Probe sequence
tgtagtaatccatgttcaacaccga

SEQ ID NO: 162132 - DNA, 25 bp, Probe sequence
tgttttgtttttaaatatccaagtg

SEQ ID NO: 162133 - DNA, 25 bp, Probe sequence
tgaacctggtaatagtccaaataaa

SEQ ID NO: 162134 - DNA, 25 bp, Probe sequence
tccaagtgatgaagaaagtcctgtc

SEQ ID NO: 162135 - DNA, 25 bp, Probe sequence
tccctatcgctacttgtgttgtaat

SEQ ID NO: 162136 - DNA, 25 bp, Probe sequence
tctactaatgaaggacccaagcaat

SEQ ID NO: 162137 - DNA, 25 bp, Probe sequence
taatccatgttcaacaccgaggtaa

SEQ ID NO: 162138 - DNA, 25 bp, Probe sequence
tatgtagtaatccatgttcaacacc

SEQ ID NO: 162139 - DNA, 25 bp, Probe sequence
tatctactaatgaaggacccaagca

SEQ ID NO: 162140 - DNA, 25 bp, Probe sequence
ataaacatcgtcaatcaacggcttc

SEQ ID NO: 162141 - DNA, 25 bp, Probe sequence
atgcatcacgttatacgaaacctgg

SEQ ID NO: 162142 - DNA, 25 bp, Probe sequence
agtattgctttaattacctttatgc

SEQ ID NO: 162143 - DNA, 25 bp, Probe sequence
acctttatgcaatactatttcacac

SEQ ID NO: 162144 - DNA, 25 bp, Probe sequence
acgattctttgttgtgaccacaagc

SEQ ID NO: 162145 - DNA, 25 bp, Probe sequence
acgaccattttgacgatgtgtttga

SEQ ID NO: 162146 - DNA, 25 bp, Probe sequence
acgtgtatctgaaggggattactct

SEQ ID NO: 162147 - DNA, 25 bp, Probe sequence
acaggcattgcaccagaacatttac

SEQ ID NO: 162148 - DNA, 25 bp, Probe sequence
actctatggtagaaggtgtcctagg

SEQ ID NO: 162149 - DNA, 25 bp, Probe sequence
aaaccttctgtcacaacgaaagatg

SEQ ID NO: 162150 - DNA, 25 bp, Probe sequence
aagagaccaagctacacgtgtatct

SEQ ID NO: 162151 - DNA, 25 bp, Probe sequence
caacagtctttgcgtttttcttatc

SEQ ID NO: 162152 - DNA, 25 bp, Probe sequence
gcctattgcagcgttactagataag

SEQ ID NO: 162153 - DNA, 25 bp, Probe sequence
gaagagcatgtcgacgcattatcca

SEQ ID NO: 162154 - DNA, 25 bp, Probe sequence
gaagtagtcaacaacgaccattttg

SEQ ID NO: 162155 - DNA, 25 bp, Probe sequence
gaagttcagcctattgcagcgttac

SEQ ID NO: 162156 - DNA, 25 bp, Probe sequence
gactaatgagcacaatctagatcaa

SEQ ID NO: 162157 - DNA, 25 bp, Probe sequence
gagccggctaaatagtgtcgtaatt

SEQ ID NO: 162158 - DNA, 25 bp, Probe sequence
gagacagcttaattaactctatggt

SEQ ID NO: 162159 - DNA, 25 bp, Probe sequence
gatgctgaagggttatccgtaaata

SEQ ID NO: 162160 - DNA, 25 bp, Probe sequence
gatgctagacgtataagttcactgg

SEQ ID NO: 162161 - DNA, 25 bp, Probe sequence
gatttcattgctaatgtatcacatg

SEQ ID NO: 162162 - DNA, 25 bp, Probe sequence
gttgatgcagcgagaacgcgaggta

SEQ ID NO: 162163 - DNA, 25 bp, Probe sequence
gttaggctatccaacaaaagcacag

SEQ ID NO: 162164 - DNA, 25 bp, Probe sequence
gtggtgttgttgtgacagttcgtga

SEQ ID NO: 162165 - DNA, 25 bp, Probe sequence
ggtgtcctaggtattaatgagagtc

SEQ ID NO: 162166 - DNA, 25 bp, Probe sequence
ggattactcttataaaccttctgtc

SEQ ID NO: 162167 - DNA, 25 bp, Probe sequence
ggatcgcatggaccaagtactaacg

SEQ ID NO: 162168 - DNA, 25 bp, Probe sequence
tgtcgacgcattatccacatctaaa

SEQ ID NO: 162169 - DNA, 25 bp, Probe sequence
ttatcgaagagcatggtggttccat

SEQ ID NO: 162170 - DNA, 25 bp, Probe sequence
ttcactggtcgaacaatcacataat

SEQ ID NO: 162171 - DNA, 25 bp, Probe sequence
ttacggctgttattttcttaacaat

SEQ ID NO: 162172 - DNA, 25 bp, Probe sequence
ttgaaaatcctggtgggttgatgat

SEQ ID NO: 162173 - DNA, 25 bp, Probe sequence
ttgtccttgatgaatcgaaacgttt

SEQ ID NO: 162174 - DNA, 25 bp, Probe sequence
atgttgcctgaaatggatggtatcc

SEQ ID NO: 162175 - DNA, 25 bp, Probe sequence
atggtgatttaagaacagttgatac

SEQ ID NO: 162176 - DNA, 25 bp, Probe sequence
agtcttaagagttaaagcacttcta

SEQ ID NO: 162177 - DNA, 25 bp, Probe sequence
agaagttaatttgactcctaaagag

SEQ ID NO: 162178 - DNA, 25 bp, Probe sequence
agaagaacgcaatctacaactgtag

SEQ ID NO: 162179 - DNA, 25 bp, Probe sequence
acatcgcgtacttgctgataatcaa

SEQ ID NO: 162180 - DNA, 25 bp, Probe sequence
acaccgattattatgttgactgcta

SEQ ID NO: 162181 - DNA, 25 bp, Probe sequence
acaaagcgaacctcacgcacgtgat

SEQ ID NO: 162182 - DNA, 25 bp, Probe sequence
aaagagaatcttttgaaatccatga

SEQ ID NO: 162183 - DNA, 25 bp, Probe sequence
aactgtagaacaaagcgaacctcac

SEQ ID NO: 162184 - DNA, 25 bp, Probe sequence
aagtatttgaccgtgaacaattatt

SEQ ID NO: 162185 - DNA, 25 bp, Probe sequence
aatgatgcacatcgcgtacttgctg

SEQ ID NO: 162186 - DNA, 25 bp, Probe sequence
gcgaacctcacgcacgtgatgtgat

SEQ ID NO: 162187 - DNA, 25 bp, Probe sequence
gcgtgaacataaacaaacaccgatt

SEQ ID NO: 162188 - DNA, 25 bp, Probe sequence
gcacgtgatgtgattgaatttaaac

SEQ ID NO: 162189 - DNA, 25 bp, Probe sequence
gcaagtaatggccaagaggcttatg

SEQ ID NO: 162190 - DNA, 25 bp, Probe sequence
gaagtttggcattatgaattctatg

SEQ ID NO: 162191 - DNA, 25 bp, Probe sequence
gaagctgcgcatatgattcaaacag

SEQ ID NO: 162192 - DNA, 25 bp, Probe sequence
gagaaaagttaaatcgtgtgtctag

SEQ ID NO: 162193 - DNA, 25 bp, Probe sequence
gaggcttatgaacttgcaatggaga

SEQ ID NO: 162194 - DNA, 25 bp, Probe sequence
gatgcacatcgcgtacttgctgata

SEQ ID NO: 162195 - DNA, 25 bp, Probe sequence
gattcaaacagtctggggcgttggg

SEQ ID NO: 162196 - DNA, 25 bp, Probe sequence
gttgatactcatgttaaacgactta

SEQ ID NO: 162197 - DNA, 25 bp, Probe sequence
gtcgaacgaaatacttatcgtagat

SEQ ID NO: 162198 - DNA, 25 bp, Probe sequence
gtctggggcgttgggtataaatttg

SEQ ID NO: 162199 - DNA, 25 bp, Probe sequence
ggtggcaactaaattgcgtgaacat

SEQ ID NO: 162200 - DNA, 25 bp, Probe sequence
ggtgaagaaacaaaccgtgttgaag

SEQ ID NO: 162201 - DNA, 25 bp, Probe sequence
ggttaaatctaatgatgagccggct

SEQ ID NO: 162202 - DNA, 25 bp, Probe sequence
ggatggtatccaggtggcaactaaa

SEQ ID NO: 162203 - DNA, 25 bp, Probe sequence
tcgtcaaaccattttcaccaagaga

SEQ ID NO: 162204 - DNA, 25 bp, Probe sequence
tctggtgcagatgattatatcgtca

SEQ ID NO: 162205 - DNA, 25 bp, Probe sequence
tatgttgactgctaaaggtgaagaa

SEQ ID NO: 162206 - DNA, 25 bp, Probe sequence
tatatcgtcaaaccattttcaccaa

SEQ ID NO: 162207 - DNA, 25 bp, Probe sequence
ttatgcttgcatactactagattta

SEQ ID NO: 162208 - DNA, 25 bp, Probe sequence
attgacgcctcatgaagtaaaagtg

SEQ ID NO: 162209 - DNA, 25 bp, Probe sequence
atttatcctgttggtcgtttagact

SEQ ID NO: 162210 - DNA, 25 bp, Probe sequence
atagcggttatacttcaagacgtaa

SEQ ID NO: 162211 - DNA, 25 bp, Probe sequence
atgatacttctggattgttattact

SEQ ID NO: 162212 - DNA, 25 bp, Probe sequence
atgttcgaacattttggtcatcaag

SEQ ID NO: 162213 - DNA, 25 bp, Probe sequence
actgtctcgtattgaatatgggcct

SEQ ID NO: 162214 - DNA, 25 bp, Probe sequence
acaaaaacgtatagctaatagcggt

SEQ ID NO: 162215 - DNA, 25 bp, Probe sequence
aagccatcagatacgattgaagttg

SEQ ID NO: 162216 - DNA, 25 bp, Probe sequence
aaccaactcaagtgataacaagtgt

SEQ ID NO: 162217 - DNA, 25 bp, Probe sequence
aagtgacgaaactgtctcgtattga

SEQ ID NO: 162218 - DNA, 25 bp, Probe sequence
aatgttgtcggtttgaatgctggtg

SEQ ID NO: 162219 - DNA, 25 bp, Probe sequence
aatgacacatccaagatatcaaatt

SEQ ID NO: 162220 - DNA, 25 bp, Probe sequence
cgtatttatcctgttggtcgtttag

SEQ ID NO: 162221 - DNA, 25 bp, Probe sequence
gcgtcatttagcagaacatgggaaa

SEQ ID NO: 162222 - DNA, 25 bp, Probe sequence
gctaatagcggttatacttcaagac

SEQ ID NO: 162223 - DNA, 25 bp, Probe sequence
gaatttactaatttaatgacacatc

SEQ ID NO: 162224 - DNA, 25 bp, Probe sequence
gaatatgggcctttaaatgttgtcg

SEQ ID NO: 162225 - DNA, 25 bp, Probe sequence
gaatgctggtgaaggacgtgtattg

SEQ ID NO: 162226 - DNA, 25 bp, Probe sequence
gaatggtacgactgtcactgaatta

SEQ ID NO: 162227 - DNA, 25 bp, Probe sequence
gaaggacgtgtattgacgcctcatg

SEQ ID NO: 162228 - DNA, 25 bp, Probe sequence
gaagatggtatgacgcaaccggctg

SEQ ID NO: 162229 - DNA, 25 bp, Probe sequence
gacgcaaccggctgaagtgaaagtt

SEQ ID NO: 162230 - DNA, 25 bp, Probe sequence
gacaaaatttacattttattccata

SEQ ID NO: 162231 - DNA, 25 bp, Probe sequence
gacgtgtattgacgcctcatgaagt

SEQ ID NO: 162232 - DNA, 25 bp, Probe sequence
gatgatagaggacgtacagtggtta

SEQ ID NO: 162233 - DNA, 25 bp, Probe sequence
gtatgacgcaaccggctgaagtgaa

SEQ ID NO: 162234 - DNA, 25 bp, Probe sequence
gtacgactgtcactgaattaggaac

SEQ ID NO: 162235 - DNA, 25 bp, Probe sequence
gtaaaagtgatgcgtcatttagcag

SEQ ID NO: 162236 - DNA, 25 bp, Probe sequence
gtcatcaagtgacgaaactgtctcg

SEQ ID NO: 162237 - DNA, 25 bp, Probe sequence
gtgaaagtgaatggtacgactgtca

SEQ ID NO: 162238 - DNA, 25 bp, Probe sequence
ggtcgtttagactatgatacttctg

SEQ ID NO: 162239 - DNA, 25 bp, Probe sequence
tgggcctttaaatgttgtcggtttg

SEQ ID NO: 162240 - DNA, 25 bp, Probe sequence
ttattccataaaccaactcaagtga

SEQ ID NO: 162241 - DNA, 25 bp, Probe sequence
ttgtcggtttgaatgctggtgaagg

SEQ ID NO: 162242 - DNA, 25 bp, Probe sequence
attaattcgtagtatcaattcagat

SEQ ID NO: 162243 - DNA, 25 bp, Probe sequence
atttccaatatagaagatttgccga

SEQ ID NO: 162244 - DNA, 25 bp, Probe sequence
atttgccgacaactgaagaagacga

SEQ ID NO: 162245 - DNA, 25 bp, Probe sequence
ataatcatggtatattagagtcgct

SEQ ID NO: 162246 - DNA, 25 bp, Probe sequence
atgaaattatcacaagcagcaatgg

SEQ ID NO: 162247 - DNA, 25 bp, Probe sequence
agtaatctagtcaatcaaaaaggag

SEQ ID NO: 162248 - DNA, 25 bp, Probe sequence
agatttgccgacaactgaagaagac

SEQ ID NO: 162249 - DNA, 25 bp, Probe sequence
agaagtgatattgaattaattcgta

SEQ ID NO: 162250 - DNA, 25 bp, Probe sequence
acagctggcgatgaaggtttagatg

SEQ ID NO: 162251 - DNA, 25 bp, Probe sequence
aagacattgattgccaaaggactag

SEQ ID NO: 162252 - DNA, 25 bp, Probe sequence
aagacgatgaagaaatggatgcttt

SEQ ID NO: 162253 - DNA, 25 bp, Probe sequence
aaggactagttgaggctaaagtggt

SEQ ID NO: 162254 - DNA, 25 bp, Probe sequence
aatatagaagatttgccgacaactg

SEQ ID NO: 162255 - DNA, 25 bp, Probe sequence
aattcgtagtatcaattcagatggt

SEQ ID NO: 162256 - DNA, 25 bp, Probe sequence
cagctggcgatgaaggtttagatga

SEQ ID NO: 162257 - DNA, 25 bp, Probe sequence
cattgattgccaaaggactagttga

SEQ ID NO: 162258 - DNA, 25 bp, Probe sequence
ctggcgatgaaggtttagatgaaaa

SEQ ID NO: 162259 - DNA, 25 bp, Probe sequence
gccaaaggactagttgaggctaaag

SEQ ID NO: 162260 - DNA, 25 bp, Probe sequence
gctggcgatgaaggtttagatgaaa

SEQ ID NO: 162261 - DNA, 25 bp, Probe sequence
gaagatttgccgacaactgaagaag

SEQ ID NO: 162262 - DNA, 25 bp, Probe sequence
gaacaattaattgaacaaaagtcac

SEQ ID NO: 162263 - DNA, 25 bp, Probe sequence
gaaaattattcatcacatggattaa

SEQ ID NO: 162264 - DNA, 25 bp, Probe sequence
gacattgattgccaaaggactagtt

SEQ ID NO: 162265 - DNA, 25 bp, Probe sequence
gattgccaaaggactagttgaggct

SEQ ID NO: 162266 - DNA, 25 bp, Probe sequence
gtcacaaatgaaattatcacaagca

SEQ ID NO: 162267 - DNA, 25 bp, Probe sequence
tacagctggcgatgaaggtttagat

SEQ ID NO: 162268 - DNA, 25 bp, Probe sequence
tagaagatttgccgacaactgaaga

SEQ ID NO: 162269 - DNA, 25 bp, Probe sequence
tatagaagatttgccgacaactgaa

SEQ ID NO: 162270 - DNA, 25 bp, Probe sequence
ttcgtagtatcaattcagatggtgc

SEQ ID NO: 162271 - DNA, 25 bp, Probe sequence
tttacagctggcgatgaaggtttag

SEQ ID NO: 162272 - DNA, 25 bp, Probe sequence
ttatttacagctggcgatgaaggtt

SEQ ID NO: 162273 - DNA, 25 bp, Probe sequence
ttgccgacaactgaagaagacgatg

SEQ ID NO: 162274 - DNA, 25 bp, Probe sequence
ttcagtaatctagtcaatcaaaaag

SEQ ID NO: 162275 - DNA, 25 bp, Probe sequence
ttgccaaaggactagttgaggctaa

SEQ ID NO: 162276 - DNA, 25 bp, Probe sequence
attttgaaacctaaagatgtcgtgt

SEQ ID NO: 162277 - DNA, 25 bp, Probe sequence
atattttgaaacctaaagatgtcgt

SEQ ID NO: 162278 - DNA, 25 bp, Probe sequence
atagaacgcattttacatacaaatg

SEQ ID NO: 162279 - DNA, 25 bp, Probe sequence
ataaagaatctgtcgtagcaagttt

SEQ ID NO: 162280 - DNA, 25 bp, Probe sequence
atcatagaacgcattttacatacaa

SEQ ID NO: 162281 - DNA, 25 bp, Probe sequence
atggataaagaatctgtcgtagcaa

SEQ ID NO: 162282 - DNA, 25 bp, Probe sequence
agaacgcattttacatacaaatgat

SEQ ID NO: 162283 - DNA, 25 bp, Probe sequence
acctaaagatgtcgtgttagatgta

SEQ ID NO: 162284 - DNA, 25 bp, Probe sequence
acatattcatattttgaaacctaaa

SEQ ID NO: 162285 - DNA, 25 bp, Probe sequence
acatcatagaacgcattttacatac

SEQ ID NO: 162286 - DNA, 25 bp, Probe sequence
aaagatgtcgtgttagatgtagata

SEQ ID NO: 162287 - DNA, 25 bp, Probe sequence
aaacctaaagatgtcgtgttagatg

SEQ ID NO: 162288 - DNA, 25 bp, Probe sequence
aaacatattcatattttgaaaccta

SEQ ID NO: 162289 - DNA, 25 bp, Probe sequence
aaaacatattcatattttgaaacct

SEQ ID NO: 162290 - DNA, 25 bp, Probe sequence
aacatattcatattttgaaacctaa

SEQ ID NO: 162291 - DNA, 25 bp, Probe sequence
aacgcattttacatacaaatgatga

SEQ ID NO: 162292 - DNA, 25 bp, Probe sequence
aacctaaagatgtcgtgttagatgt

SEQ ID NO: 162293 - DNA, 25 bp, Probe sequence
catcatagaacgcattttacataca

SEQ ID NO: 162294 - DNA, 25 bp, Probe sequence
catagaacgcattttacatacaaat

SEQ ID NO: 162295 - DNA, 25 bp, Probe sequence
gaacgcattttacatacaaatgatg

SEQ ID NO: 162296 - DNA, 25 bp, Probe sequence
gaaacaaaaagattgctgtagaaac

SEQ ID NO: 162297 - DNA, 25 bp, Probe sequence
gaaacctaaagatgtcgtgttagat

SEQ ID NO: 162298 - DNA, 25 bp, Probe sequence
gataaagaatctgtcgtagcaagtt

SEQ ID NO: 162299 - DNA, 25 bp, Probe sequence
ggataaagaatctgtcgtagcaagt

SEQ ID NO: 162300 - DNA, 25 bp, Probe sequence
tggataaagaatctgtcgtagcaag

SEQ ID NO: 162301 - DNA, 25 bp, Probe sequence
tgaaacctaaagatgtcgtgttaga

SEQ ID NO: 162302 - DNA, 25 bp, Probe sequence
tcatattttgaaacctaaagatgtc

SEQ ID NO: 162303 - DNA, 25 bp, Probe sequence
tcatagaacgcattttacatacaaa

SEQ ID NO: 162304 - DNA, 25 bp, Probe sequence
taaagatgtcgtgttagatgtagat

SEQ ID NO: 162305 - DNA, 25 bp, Probe sequence
tacatcatagaacgcattttacata

SEQ ID NO: 162306 - DNA, 25 bp, Probe sequence
tattttgaaacctaaagatgtcgtg

SEQ ID NO: 162307 - DNA, 25 bp, Probe sequence
tttgaaacctaaagatgtcgtgtta

SEQ ID NO: 162308 - DNA, 25 bp, Probe sequence
ttttgaaacctaaagatgtcgtgtt

SEQ ID NO: 162309 - DNA, 25 bp, Probe sequence
ttgaaacctaaagatgtcgtgttag

SEQ ID NO: 162310 - DNA, 25 bp, Probe sequence
atattgcaagtgaatacctagtatt

SEQ ID NO: 162311 - DNA, 25 bp, Probe sequence
atatgcagtacgttcatgcaatgaa

SEQ ID NO: 162312 - DNA, 25 bp, Probe sequence
atgacccacgggaagatttagttgg

SEQ ID NO: 162313 - DNA, 25 bp, Probe sequence
agatcattttaacttctttagtctg

SEQ ID NO: 162314 - DNA, 25 bp, Probe sequence
agtagtcactcactttttagctatt

SEQ ID NO: 162315 - DNA, 25 bp, Probe sequence
agagcagtatatgcagtacgttcat

SEQ ID NO: 162316 - DNA, 25 bp, Probe sequence
acctagtattagcgtcagaactctt

SEQ ID NO: 162317 - DNA, 25 bp, Probe sequence
aatccgaaaagagacatttaccatt

SEQ ID NO: 162318 - DNA, 25 bp, Probe sequence
cacctaaatctgttgaaatccgaaa

SEQ ID NO: 162319 - DNA, 25 bp, Probe sequence
ctatgcaagcattaacagagcagta

SEQ ID NO: 162320 - DNA, 25 bp, Probe sequence
ctgtttacgttttctgagccaattg

SEQ ID NO: 162321 - DNA, 25 bp, Probe sequence
ctgcatcttatccaaaaatttgaaa

SEQ ID NO: 162322 - DNA, 25 bp, Probe sequence
gccaattgaacaagtagtcactcac

SEQ ID NO: 162323 - DNA, 25 bp, Probe sequence
gctacagaacaagtgacatcgagat

SEQ ID NO: 162324 - DNA, 25 bp, Probe sequence
gacatttaccattcaacaagctaca

SEQ ID NO: 162325 - DNA, 25 bp, Probe sequence
gagttgagttaaatacacctaaatc

SEQ ID NO: 162326 - DNA, 25 bp, Probe sequence
gaggagtgaactaccattttggata

SEQ ID NO: 162327 - DNA, 25 bp, Probe sequence
gatgttgatgatgacccacgggaag

SEQ ID NO: 162328 - DNA, 25 bp, Probe sequence
gatgaatcttgggatccaaatcata

SEQ ID NO: 162329 - DNA, 25 bp, Probe sequence
gatttagttgggcgtttaatagaat

SEQ ID NO: 162330 - DNA, 25 bp, Probe sequence
gtaagatgctattaccacaatcaac

SEQ ID NO: 162331 - DNA, 25 bp, Probe sequence
gtcactcactttttagctattttag

SEQ ID NO: 162332 - DNA, 25 bp, Probe sequence
tgctattaccacaatcaacatcaga

SEQ ID NO: 162333 - DNA, 25 bp, Probe sequence
tcttgggatccaaatcatacgattg

SEQ ID NO: 162334 - DNA, 25 bp, Probe sequence
tcatgcaatgaaacagcttgaaatt

SEQ ID NO: 162335 - DNA, 25 bp, Probe sequence
tacgttttctgagccaattgaacaa

SEQ ID NO: 162336 - DNA, 25 bp, Probe sequence
tagcgtcagaactcttaatgattaa

SEQ ID NO: 162337 - DNA, 25 bp, Probe sequence
tagtctgtttacgttttctgagcca

SEQ ID NO: 162338 - DNA, 25 bp, Probe sequence
tatactgctattttaaatgacatga

SEQ ID NO: 162339 - DNA, 25 bp, Probe sequence
tatttatgatattcctatgcaagca

SEQ ID NO: 162340 - DNA, 25 bp, Probe sequence
ttagatgctttcaatggaccattag

SEQ ID NO: 162341 - DNA, 25 bp, Probe sequence
ttaccattcaacaagctacagaaca

SEQ ID NO: 162342 - DNA, 25 bp, Probe sequence
ttaactgaattaattgtagcttatc

SEQ ID NO: 162343 - DNA, 25 bp, Probe sequence
ttctttagtctgtttacgttttctg

SEQ ID NO: 162344 - DNA, 25 bp, Probe sequence
atgcggcgaaagatccaacggtatt

SEQ ID NO: 162345 - DNA, 25 bp, Probe sequence
attgcctgacgttttaaatgttgac

SEQ ID NO: 162346 - DNA, 25 bp, Probe sequence
gttagaacttctgtacgcaacggga

SEQ ID NO: 162347 - DNA, 25 bp, Probe sequence
atttcaacaatccgtagttttcatc

SEQ ID NO: 162348 - DNA, 25 bp, Probe sequence
atagatcgacaattaattcaagagt

SEQ ID NO: 162349 - DNA, 25 bp, Probe sequence
atgcatggtaaacctttatcacgac

SEQ ID NO: 162350 - DNA, 25 bp, Probe sequence
atgttaggtcactctgacatatcta

SEQ ID NO: 162351 - DNA, 25 bp, Probe sequence
atggcgcagatttaagagcagtgca

SEQ ID NO: 162352 - DNA, 25 bp, Probe sequence
acgcaacgggaatgcgtgtatctga

SEQ ID NO: 162353 - DNA, 25 bp, Probe sequence
acggtattattagattcaccaaaat

SEQ ID NO: 162354 - DNA, 25 bp, Probe sequence
aaaggactaagttctaacacaattg

SEQ ID NO: 162355 - DNA, 25 bp, Probe sequence
aacctttatcacgacaagcaatatg

SEQ ID NO: 162356 - DNA, 25 bp, Probe sequence
aagttctaacacaattggtgcttat

SEQ ID NO: 162357 - DNA, 25 bp, Probe sequence
aattcaagagtgtttggggcattta

SEQ ID NO: 162358 - DNA, 25 bp, Probe sequence
caatccgtagttttcatcaatttgc

SEQ ID NO: 162359 - DNA, 25 bp, Probe sequence
ccattaggcgacgcagtcattgagt

SEQ ID NO: 162360 - DNA, 25 bp, Probe sequence
gcgacgcagtcattgagtacttaac

SEQ ID NO: 162361 - DNA, 25 bp, Probe sequence
gaacttctgtacgcaacgggaatgc

SEQ ID NO: 162362 - DNA, 25 bp, Probe sequence
gactgaacatcatatctcgcatatt

SEQ ID NO: 162363 - DNA, 25 bp, Probe sequence
gatccaacggtattattagattcac

SEQ ID NO: 162364 - DNA, 25 bp, Probe sequence
gtatcaagattatatgactgaacat

SEQ ID NO: 162365 - DNA, 25 bp, Probe sequence
gtagttttcatcaatttgctataag

SEQ ID NO: 162366 - DNA, 25 bp, Probe sequence
gtacttaactacttatattgaaacg

SEQ ID NO: 162367 - DNA, 25 bp, Probe sequence
gtgatcgtacgatgttagaacttct

SEQ ID NO: 162368 - DNA, 25 bp, Probe sequence
ggggcatttaatagaccaagggcaa

SEQ ID NO: 162369 - DNA, 25 bp, Probe sequence
tgaaacgattagaccgcaactttta

SEQ ID NO: 162370 - DNA, 25 bp, Probe sequence
tgcgcgatttatttcaacaatccgt

SEQ ID NO: 162371 - DNA, 25 bp, Probe sequence
tcatatctcgcatattgattttata

SEQ ID NO: 162372 - DNA, 25 bp, Probe sequence
tacgcgtatttggtaaaggcgataa

SEQ ID NO: 162373 - DNA, 25 bp, Probe sequence
tagaccaagggcaatctgctaaatc

SEQ ID NO: 162374 - DNA, 25 bp, Probe sequence
taggtcactctgacatatctactac

SEQ ID NO: 162375 - DNA, 25 bp, Probe sequence
tatgacaaaaaattgcctgacgttt

SEQ ID NO: 162376 - DNA, 25 bp, Probe sequence
ttgaagaatatttgcgttttataca

SEQ ID NO: 162377 - DNA, 25 bp, Probe sequence
ttggtgcttatagacgtgatttgaa

SEQ ID NO: 162378 - DNA, 25 bp, Probe sequence
atcgatgaagatttgttaccagaag

SEQ ID NO: 162379 - DNA, 25 bp, Probe sequence
atcgtttaactttccatggtgtgtg

SEQ ID NO: 162380 - DNA, 25 bp, Probe sequence
agaacgttagagttgttagctgaac

SEQ ID NO: 162381 - DNA, 25 bp, Probe sequence
actttggtgatggcgtcgctcgttt

SEQ ID NO: 162382 - DNA, 25 bp, Probe sequence
aacgattaaatcgcgttaagcaaca

SEQ ID NO: 162383 - DNA, 25 bp, Probe sequence
aaacatttccaccatcatttagtat

SEQ ID NO: 162384 - DNA, 25 bp, Probe sequence
aacgcgaagctactgttagagttct

SEQ ID NO: 162385 - DNA, 25 bp, Probe sequence
aagcgcctgaaattggcttggcgac

SEQ ID NO: 162386 - DNA, 25 bp, Probe sequence
aagcaacaattacaacaatcatcat

SEQ ID NO: 162387 - DNA, 25 bp, Probe sequence
aagatcatctaagtgctgaagacgt

SEQ ID NO: 162388 - DNA, 25 bp, Probe sequence
aatcgcgttaagcaacaattacaac

SEQ ID NO: 162389 - DNA, 25 bp, Probe sequence
aattggcttggcgacagtatacaga

SEQ ID NO: 162390 - DNA, 25 bp, Probe sequence
caatcatcatataagctaacgccac

SEQ ID NO: 162391 - DNA, 25 bp, Probe sequence
gccacaacgcgaagctactgttaga

SEQ ID NO: 162392 - DNA, 25 bp, Probe sequence
gcgaagctactgttagagttctaat

SEQ ID NO: 162393 - DNA, 25 bp, Probe sequence
gctaacgccacaacgcgaagctact

SEQ ID NO: 162394 - DNA, 25 bp, Probe sequence
gcaaaacatttccaccatcatttag

SEQ ID NO: 162395 - DNA, 25 bp, Probe sequence
gaaggcgcaaaacatttccaccatc

SEQ ID NO: 162396 - DNA, 25 bp, Probe sequence
gatcatcgtttaactttccatggtg

SEQ ID NO: 162397 - DNA, 25 bp, Probe sequence
gttaccagaagttgaaaatcgagtt

SEQ ID NO: 162398 - DNA, 25 bp, Probe sequence
gttagctgaactaaaagttgtcgac

SEQ ID NO: 162399 - DNA, 25 bp, Probe sequence
gtttaactttccatggtgtgtgtga

SEQ ID NO: 162400 - DNA, 25 bp, Probe sequence
gtatgtatggaatgtggtcgtgtag

SEQ ID NO: 162401 - DNA, 25 bp, Probe sequence
gtgctgaagacgtatatctgaaagt

SEQ ID NO: 162402 - DNA, 25 bp, Probe sequence
ggaatgtggtcgtgtagatgaaatc

SEQ ID NO: 162403 - DNA, 25 bp, Probe sequence
ggcgacagtatacagaacgttagag

SEQ ID NO: 162404 - DNA, 25 bp, Probe sequence
ggcttggcgacagtatacagaacgt

SEQ ID NO: 162405 - DNA, 25 bp, Probe sequence
ggcgtcgctcgttttgatttaagaa

SEQ ID NO: 162406 - DNA, 25 bp, Probe sequence
tgatggcgtcgctcgttttgattta

SEQ ID NO: 162407 - DNA, 25 bp, Probe sequence
tcatataagctaacgccacaacgcg

SEQ ID NO: 162408 - DNA, 25 bp, Probe sequence
taactttccatggtgtgtgtgaaac

SEQ ID NO: 162409 - DNA, 25 bp, Probe sequence
tttccaccatcatttagtatgtatg

SEQ ID NO: 162410 - DNA, 25 bp, Probe sequence
tttagatcatcgtttaactttccat

SEQ ID NO: 162411 - DNA, 25 bp, Probe sequence
ttaactttggtgatggcgtcgctcg

SEQ ID NO: 162412 - DNA, 25 bp, Probe sequence
attgcattgcaacacctattattaa

SEQ ID NO: 162413 - DNA, 25 bp, Probe sequence
atattgccaaagagttaacacatgt

SEQ ID NO: 162414 - DNA, 25 bp, Probe sequence
atatgtatggttcaccaggtttttg

SEQ ID NO: 162415 - DNA, 25 bp, Probe sequence
ataatggtgcagttgctgtttgtgc

SEQ ID NO: 162416 - DNA, 25 bp, Probe sequence
agtgaaacagtatcgtaaaccagta

SEQ ID NO: 162417 - DNA, 25 bp, Probe sequence
agatgaagatgaatttgtcgaagtc

SEQ ID NO: 162418 - DNA, 25 bp, Probe sequence
agatatgtatggttcaccaggtttt

SEQ ID NO: 162419 - DNA, 25 bp, Probe sequence
aaacaattgatcgaacagttattta

SEQ ID NO: 162420 - DNA, 25 bp, Probe sequence
gcgaagactatcattgcattgcaac

SEQ ID NO: 162421 - DNA, 25 bp, Probe sequence
gcattgcaacacctattattaaatt

SEQ ID NO: 162422 - DNA, 25 bp, Probe sequence
gaagtcattaaagttccgattgaga

SEQ ID NO: 162423 - DNA, 25 bp, Probe sequence
gaagtcgtattagtgaaacagtatc

SEQ ID NO: 162424 - DNA, 25 bp, Probe sequence
gaagactatcattgcattgcaacac

SEQ ID NO: 162425 - DNA, 25 bp, Probe sequence
gaagaaacaggatatattgccaaag

SEQ ID NO: 162426 - DNA, 25 bp, Probe sequence
gaaacagtatcgtaaaccagtagaa

SEQ ID NO: 162427 - DNA, 25 bp, Probe sequence
gaaattcatacagtgacattaccaa

SEQ ID NO: 162428 - DNA, 25 bp, Probe sequence
gactatcattgcattgcaacaccta

SEQ ID NO: 162429 - DNA, 25 bp, Probe sequence
gagaatgttaaatcgatgctaatga

SEQ ID NO: 162430 - DNA, 25 bp, Probe sequence
gagaattagtttatcataatggtgc

SEQ ID NO: 162431 - DNA, 25 bp, Probe sequence
gatcgaacagttatttataatggca

SEQ ID NO: 162432 - DNA, 25 bp, Probe sequence
gttgtagatatgtatggttcaccag

SEQ ID NO: 162433 - DNA, 25 bp, Probe sequence
gtcgaagtcattaaagttccgattg

SEQ ID NO: 162434 - DNA, 25 bp, Probe sequence
gtcgtattagtgaaacagtatcgta

SEQ ID NO: 162435 - DNA, 25 bp, Probe sequence
tgacacctaaaaaagaagtcgtatt

SEQ ID NO: 162436 - DNA, 25 bp, Probe sequence
tcgtaaaccagtagaaaaaccattg

SEQ ID NO: 162437 - DNA, 25 bp, Probe sequence
tgccaaagagttaacacatgttgta

SEQ ID NO: 162438 - DNA, 25 bp, Probe sequence
tccagctggtaaattagaagatgat

SEQ ID NO: 162439 - DNA, 25 bp, Probe sequence
taatggtgcagttgctgtttgtgca

SEQ ID NO: 162440 - DNA, 25 bp, Probe sequence
taaagttccgattgagaatgttaaa

SEQ ID NO: 162441 - DNA, 25 bp, Probe sequence
tagaagatgcgaagactatcattgc

SEQ ID NO: 162442 - DNA, 25 bp, Probe sequence
tagaaattccagctggtaaattaga

SEQ ID NO: 162443 - DNA, 25 bp, Probe sequence
tttatcataatggtgcagttgctgt

SEQ ID NO: 162444 - DNA, 25 bp, Probe sequence
ttgcaacacctattattaaattata

SEQ ID NO: 162445 - DNA, 25 bp, Probe sequence
ttgtcgaagtcattaaagttccgat

SEQ ID NO: 162446 - DNA, 25 bp, Probe sequence
atttgaagaatttacagtgctggat

SEQ ID NO: 162447 - DNA, 25 bp, Probe sequence
atatgcggaacaactatcagtattt

SEQ ID NO: 162448 - DNA, 25 bp, Probe sequence
atcggagagtgtggtaagactttgt

SEQ ID NO: 162449 - DNA, 25 bp, Probe sequence
atgcggaacaactatcagtatttga

SEQ ID NO: 162450 - DNA, 25 bp, Probe sequence
atgaactgtcaatcggagagtgtgg

SEQ ID NO: 162451 - DNA, 25 bp, Probe sequence
agactttgtgtacgatatgcggaac

SEQ ID NO: 162452 - DNA, 25 bp, Probe sequence
agaatttacagtgctggatatttta

SEQ ID NO: 162453 - DNA, 25 bp, Probe sequence
acgatatgcggaacaactatcagta

SEQ ID NO: 162454 - DNA, 25 bp, Probe sequence
actacttgtgttgcaaggaaatgtg

SEQ ID NO: 162455 - DNA, 25 bp, Probe sequence
aaattcaaactacttgtgttgcaag

SEQ ID NO: 162456 - DNA, 25 bp, Probe sequence
aaaattcaaactacttgtgttgcaa

SEQ ID NO: 162457 - DNA, 25 bp, Probe sequence
aacatgcgaagtgaaatatagaaag

SEQ ID NO: 162458 - DNA, 25 bp, Probe sequence
ctttgtgtacgatatgcggaacaac

SEQ ID NO: 162459 - DNA, 25 bp, Probe sequence
ctgtcaatcggagagtgtggtaaga

SEQ ID NO: 162460 - DNA, 25 bp, Probe sequence
cggagagtgtggtaagactttgtgt

SEQ ID NO: 162461 - DNA, 25 bp, Probe sequence
gcgatatttctgtagaccaaatttc

SEQ ID NO: 162462 - DNA, 25 bp, Probe sequence
gcggaacaactatcagtatttgaag

SEQ ID NO: 162463 - DNA, 25 bp, Probe sequence
gaagaatttacagtgctggatattt

SEQ ID NO: 162464 - DNA, 25 bp, Probe sequence
gaactgtcaatcggagagtgtggta

SEQ ID NO: 162465 - DNA, 25 bp, Probe sequence
gaaaaattcaaactacttgtgttgc

SEQ ID NO: 162466 - DNA, 25 bp, Probe sequence
gactttgtgtacgatatgcggaaca

SEQ ID NO: 162467 - DNA, 25 bp, Probe sequence
gagagtgtggtaagactttgtgtac

SEQ ID NO: 162468 - DNA, 25 bp, Probe sequence
gagtgtggtaagactttgtgtacga

SEQ ID NO: 162469 - DNA, 25 bp, Probe sequence
gatatttctgtagaccaaatttcag

SEQ ID NO: 162470 - DNA, 25 bp, Probe sequence
gtacgatatgcggaacaactatcag

SEQ ID NO: 162471 - DNA, 25 bp, Probe sequence
gtacattatattatacttgtgaaaa

SEQ ID NO: 162472 - DNA, 25 bp, Probe sequence
gtggtaagactttgtgtacgatatg

SEQ ID NO: 162473 - DNA, 25 bp, Probe sequence
gtgtggtaagactttgtgtacgata

SEQ ID NO: 162474 - DNA, 25 bp, Probe sequence
ggtaagactttgtgtacgatatgcg

SEQ ID NO: 162475 - DNA, 25 bp, Probe sequence
ggaacaactatcagtatttgaagaa

SEQ ID NO: 162476 - DNA, 25 bp, Probe sequence
tgtgtacgatatgcggaacaactat

SEQ ID NO: 162477 - DNA, 25 bp, Probe sequence
taagactttgtgtacgatatgcgga

SEQ ID NO: 162478 - DNA, 25 bp, Probe sequence
tatttctgtagaccaaatttcagac

SEQ ID NO: 162479 - DNA, 25 bp, Probe sequence
ttcaaactacttgtgttgcaaggaa

SEQ ID NO: 162480 - DNA, 25 bp, Probe sequence
attgcgcctagattttttgaacgat

SEQ ID NO: 162481 - DNA, 25 bp, Probe sequence
atcatgacagttaatgttggcccga

SEQ ID NO: 162482 - DNA, 25 bp, Probe sequence
acaggcactgcaatttgaagacaat

SEQ ID NO: 162483 - DNA, 25 bp, Probe sequence
aaatgtatcaaattgcgcctagatt

SEQ ID NO: 162484 - DNA, 25 bp, Probe sequence
aaatgttattccttgtgacttaaat

SEQ ID NO: 162485 - DNA, 25 bp, Probe sequence
aatgttggcccgattgatacacctt

SEQ ID NO: 162486 - DNA, 25 bp, Probe sequence
aatgctgcacattatggggcatcga

SEQ ID NO: 162487 - DNA, 25 bp, Probe sequence
aatcggcctaaatggatgcatcatg

SEQ ID NO: 162488 - DNA, 25 bp, Probe sequence
gcccgattgatacaccttttcatca

SEQ ID NO: 162489 - DNA, 25 bp, Probe sequence
gccgacccatcaatgaagtatgcta

SEQ ID NO: 162490 - DNA, 25 bp, Probe sequence
gcttgcagaagatatcatttatggc

SEQ ID NO: 162491 - DNA, 25 bp, Probe sequence
gaatgctttaagactagagtcacca

SEQ ID NO: 162492 - DNA, 25 bp, Probe sequence
gaaacgtatcagcttaatttaatta

SEQ ID NO: 162493 - DNA, 25 bp, Probe sequence
gaccatatttaacatctaacgcaca

SEQ ID NO: 162494 - DNA, 25 bp, Probe sequence
ggggcatcgaaagcagggttttatg

SEQ ID NO: 162495 - DNA, 25 bp, Probe sequence
gagtcaccaaacttacatatcatga

SEQ ID NO: 162496 - DNA, 25 bp, Probe sequence
gatggattcatttatagtgcaggtt

SEQ ID NO: 162497 - DNA, 25 bp, Probe sequence
gatttgaagtcgatacaggcactgc

SEQ ID NO: 162498 - DNA, 25 bp, Probe sequence
gttgttggtgcgtgatgttgataaa

SEQ ID NO: 162499 - DNA, 25 bp, Probe sequence
gttttatatactgtgttgagaccat

SEQ ID NO: 162500 - DNA, 25 bp, Probe sequence
gtatttcaagtcaagctgcattttc

SEQ ID NO: 162501 - DNA, 25 bp, Probe sequence
gtgcatgtaacgttgttggtgcgtg

SEQ ID NO: 162502 - DNA, 25 bp, Probe sequence
gtgcaggtttaggttatttcaaatc

SEQ ID NO: 162503 - DNA, 25 bp, Probe sequence
gtgactggtggtacgagtggtttag

SEQ ID NO: 162504 - DNA, 25 bp, Probe sequence
gtggtttaggtttatcgattgtccg

SEQ ID NO: 162505 - DNA, 25 bp, Probe sequence
ggttatttcaaatctatttcagacc

SEQ ID NO: 162506 - DNA, 25 bp, Probe sequence
ggatgcatcatgcgttgaaaatgta

SEQ ID NO: 162507 - DNA, 25 bp, Probe sequence
ggacaacattttatagtgactggtg

SEQ ID NO: 162508 - DNA, 25 bp, Probe sequence
tgaacgatgtttccctaaattattt

SEQ ID NO: 162509 - DNA, 25 bp, Probe sequence
tgcttgatgctaatcagcttgcaga

SEQ ID NO: 162510 - DNA, 25 bp, Probe sequence
tcgattgtccgaaagttactagaaa

SEQ ID NO: 162511 - DNA, 25 bp, Probe sequence
taacgcacatattgtaggtatttca

SEQ ID NO: 162512 - DNA, 25 bp, Probe sequence
tatttcagaccatagtttttcagaa

SEQ ID NO: 162513 - DNA, 25 bp, Probe sequence
tttcatcaaaaagccgacccatcaa

SEQ ID NO: 162514 - DNA, 25 bp, Probe sequence
aaaataacccgtcaaacacagtgct

SEQ ID NO: 162515 - DNA, 25 bp, Probe sequence
atacatgtgttggcgggtttgtttt

SEQ ID NO: 162516 - DNA, 25 bp, Probe sequence
ataacccgtcaaacacagtgcttgc

SEQ ID NO: 162517 - DNA, 25 bp, Probe sequence
atgcatacatgtgttggcgggtttg

SEQ ID NO: 162518 - DNA, 25 bp, Probe sequence
agtaataaacaatgcttgccaaata

SEQ ID NO: 162519 - DNA, 25 bp, Probe sequence
acccgtcaaacacagtgcttgcgat

SEQ ID NO: 162520 - DNA, 25 bp, Probe sequence
acagtgcttgcgatgatgcatacat

SEQ ID NO: 162521 - DNA, 25 bp, Probe sequence
acacagtgcttgcgatgatgcatac

SEQ ID NO: 162522 - DNA, 25 bp, Probe sequence
aaataacccgtcaaacacagtgctt

SEQ ID NO: 162523 - DNA, 25 bp, Probe sequence
aaacacagtgcttgcgatgatgcat

SEQ ID NO: 162524 - DNA, 25 bp, Probe sequence
aacacagtgcttgcgatgatgcata

SEQ ID NO: 162525 - DNA, 25 bp, Probe sequence
taacccgtcaaacacagtgcttgcg

SEQ ID NO: 162526 - DNA, 25 bp, Probe sequence
aacccgtcaaacacagtgcttgcga

SEQ ID NO: 162527 - DNA, 25 bp, Probe sequence
aataacccgtcaaacacagtgcttg

SEQ ID NO: 162528 - DNA, 25 bp, Probe sequence
cacagtgcttgcgatgatgcataca

SEQ ID NO: 162529 - DNA, 25 bp, Probe sequence
cagtgcttgcgatgatgcatacatg

SEQ ID NO: 162530 - DNA, 25 bp, Probe sequence
catgtgttggcgggtttgtttttat

SEQ ID NO: 162531 - DNA, 25 bp, Probe sequence
cgtcaaacacagtgcttgcgatgat

SEQ ID NO: 162532 - DNA, 25 bp, Probe sequence
cccgtcaaacacagtgcttgcgatg

SEQ ID NO: 162533 - DNA, 25 bp, Probe sequence
ccgtcaaacacagtgcttgcgatga

SEQ ID NO: 162534 - DNA, 25 bp, Probe sequence
gcgatgatgcatacatgtgttggcg

SEQ ID NO: 162535 - DNA, 25 bp, Probe sequence
gcttgcgatgatgcatacatgtgtt

SEQ ID NO: 162536 - DNA, 25 bp, Probe sequence
gcatacatgtgttggcgggtttgtt

SEQ ID NO: 162537 - DNA, 25 bp, Probe sequence
gacaaagtaataaacaatgcttgcc

SEQ ID NO: 162538 - DNA, 25 bp, Probe sequence
gatgatgcatacatgtgttggcggg

SEQ ID NO: 162539 - DNA, 25 bp, Probe sequence
gatgcatacatgtgttggcgggttt

SEQ ID NO: 162540 - DNA, 25 bp, Probe sequence
gatagttttaaaatctaatgacaaa

SEQ ID NO: 162541 - DNA, 25 bp, Probe sequence
gtttgtttttattggtcttctatat

SEQ ID NO: 162542 - DNA, 25 bp, Probe sequence
gtgcttgcgatgatgcatacatgtg

SEQ ID NO: 162543 - DNA, 25 bp, Probe sequence
tgtgttggcgggtttgtttttattg

SEQ ID NO: 162544 - DNA, 25 bp, Probe sequence
tgatgcatacatgtgttggcgggtt

SEQ ID NO: 162545 - DNA, 25 bp, Probe sequence
tgcgatgatgcatacatgtgttggc

SEQ ID NO: 162546 - DNA, 25 bp, Probe sequence
tcaaacacagtgcttgcgatgatgc

SEQ ID NO: 162547 - DNA, 25 bp, Probe sequence
tacatgtgttggcgggtttgttttt

SEQ ID NO: 162548 - DNA, 25 bp, Probe sequence
atggcttttcgacgttggtgaaggt

SEQ ID NO: 162549 - DNA, 25 bp, Probe sequence
agaggcgcatttacttaatcatggt

SEQ ID NO: 162550 - DNA, 25 bp, Probe sequence
agagtaatggcacctgaaactacag

SEQ ID NO: 162551 - DNA, 25 bp, Probe sequence
agccaacaattatcatcatagccat

SEQ ID NO: 162552 - DNA, 25 bp, Probe sequence
aacattggtcttgaaccaggtccta

SEQ ID NO: 162553 - DNA, 25 bp, Probe sequence
aattccatatggcttttcgacgttg

SEQ ID NO: 162554 - DNA, 25 bp, Probe sequence
ctagtcgttcttttcagggcggtga

SEQ ID NO: 162555 - DNA, 25 bp, Probe sequence
cgtacgttgattacacatttgagca

SEQ ID NO: 162556 - DNA, 25 bp, Probe sequence
cgacgttggtgaaggtacacagcac

SEQ ID NO: 162557 - DNA, 25 bp, Probe sequence
gcgatcatatttttggtttgccagg

SEQ ID NO: 162558 - DNA, 25 bp, Probe sequence
gcaatcgccttaaatttagaaccat

SEQ ID NO: 162559 - DNA, 25 bp, Probe sequence
gaagttacattttttggaacgagtg

SEQ ID NO: 162560 - DNA, 25 bp, Probe sequence
gaaccaggtcctaaatatcaagaag

SEQ ID NO: 162561 - DNA, 25 bp, Probe sequence
gaagccaatgttaaacgtacgttga

SEQ ID NO: 162562 - DNA, 25 bp, Probe sequence
gaacgtgtgatttctagagatgctg

SEQ ID NO: 162563 - DNA, 25 bp, Probe sequence
gaaactacaggtacaatcaatgttg

SEQ ID NO: 162564 - DNA, 25 bp, Probe sequence
gagagaaatacacaagcaatcgcct

SEQ ID NO: 162565 - DNA, 25 bp, Probe sequence
gatggttttactgtagaggcgcatt

SEQ ID NO: 162566 - DNA, 25 bp, Probe sequence
gtcacatttaaactatccaattaca

SEQ ID NO: 162567 - DNA, 25 bp, Probe sequence
gtgacacatatatttattactcata

SEQ ID NO: 162568 - DNA, 25 bp, Probe sequence
gtgatggtacatgaagcgacctata

SEQ ID NO: 162569 - DNA, 25 bp, Probe sequence
ggtgatacaaaaccatgttctaatg

SEQ ID NO: 162570 - DNA, 25 bp, Probe sequence
ggtgaaaagcatttagccaacaatt

SEQ ID NO: 162571 - DNA, 25 bp, Probe sequence
ggtttgccaggattactttctagtc

SEQ ID NO: 162572 - DNA, 25 bp, Probe sequence
ggaacgagtgcaggtttgcctacaa

SEQ ID NO: 162573 - DNA, 25 bp, Probe sequence
tgagcaatcgctataatacagaaga

SEQ ID NO: 162574 - DNA, 25 bp, Probe sequence
tagaggtgagtccaaacagggtcca

SEQ ID NO: 162575 - DNA, 25 bp, Probe sequence
tctagagatgctgatgtgatggtac

SEQ ID NO: 162576 - DNA, 25 bp, Probe sequence
tacacagcaccaaattttacatcat

SEQ ID NO: 162577 - DNA, 25 bp, Probe sequence
tactttctagtcgttcttttcaggg

SEQ ID NO: 162578 - DNA, 25 bp, Probe sequence
tagccatattgaagacgtatttgca

SEQ ID NO: 162579 - DNA, 25 bp, Probe sequence
tatgaatttatcagagtcacattta

SEQ ID NO: 162580 - DNA, 25 bp, Probe sequence
tattactcatatgcatggcgatcat

SEQ ID NO: 162581 - DNA, 25 bp, Probe sequence
ttagaaccatattccaattccatat

SEQ ID NO: 162582 - DNA, 25 bp, Probe sequence
ggtgacttacctgtacctgagggta

SEQ ID NO: 162583 - DNA, 25 bp, Probe sequence
attctcgcacaccaatgcaatggga

SEQ ID NO: 162584 - DNA, 25 bp, Probe sequence
atatgaagcatgtgttatcgaacta

SEQ ID NO: 162585 - DNA, 25 bp, Probe sequence
atgaatcagcaacaagtcatgcagc

SEQ ID NO: 162586 - DNA, 25 bp, Probe sequence
agcagaattaactgtaccatttgat

SEQ ID NO: 162587 - DNA, 25 bp, Probe sequence
aaggttggaatgcgttgtttattga

SEQ ID NO: 162588 - DNA, 25 bp, Probe sequence
aattcacaagtttttgcgtacacga

SEQ ID NO: 162589 - DNA, 25 bp, Probe sequence
ctagtaaagacaatcccaaacgtga

SEQ ID NO: 162590 - DNA, 25 bp, Probe sequence
gacgtttgaagcgggtgacttacct

SEQ ID NO: 162591 - DNA, 25 bp, Probe sequence
gcaagttcttattgtaggtaatctt

SEQ ID NO: 162592 - DNA, 25 bp, Probe sequence
gaaccgagataattctcgcacacca

SEQ ID NO: 162593 - DNA, 25 bp, Probe sequence
gaactggtggtttgataaaggcatt

SEQ ID NO: 162594 - DNA, 25 bp, Probe sequence
gaaagatcgctcattaagtaagtat

SEQ ID NO: 162595 - DNA, 25 bp, Probe sequence
gacgtgtatcgacgtggggtgacga

SEQ ID NO: 162596 - DNA, 25 bp, Probe sequence
gaccaaccacgacgtgtatcgacgt

SEQ ID NO: 162597 - DNA, 25 bp, Probe sequence
gagggtaaaacatatgccccagcat

SEQ ID NO: 162598 - DNA, 25 bp, Probe sequence
gatggctctgaacctaacaactggg

SEQ ID NO: 162599 - DNA, 25 bp, Probe sequence
gatgctgatgactgggtcggggaag

SEQ ID NO: 162600 - DNA, 25 bp, Probe sequence
gtattggggatttacctggaatgat

SEQ ID NO: 162601 - DNA, 25 bp, Probe sequence
gtacgccattcatttatcaaggtca

SEQ ID NO: 162602 - DNA, 25 bp, Probe sequence
gtaagccctgatgatgctgatgact

SEQ ID NO: 162603 - DNA, 25 bp, Probe sequence
ggtgaaccgtggttcccagtgaatc

SEQ ID NO: 162604 - DNA, 25 bp, Probe sequence
gtggagatgtagacgctttacttgc

SEQ ID NO: 162605 - DNA, 25 bp, Probe sequence
ggggtgacgatgacaagtattggta

SEQ ID NO: 162606 - DNA, 25 bp, Probe sequence
ggtgaagcgaatggtgtaagccctg

SEQ ID NO: 162607 - DNA, 25 bp, Probe sequence
ggtaatcttactaaccacgaagcag

SEQ ID NO: 162608 - DNA, 25 bp, Probe sequence
ggctcagtccaatgtttaaatcacc

SEQ ID NO: 162609 - DNA, 25 bp, Probe sequence
tggtatgacgaattatccatttgaa

SEQ ID NO: 162610 - DNA, 25 bp, Probe sequence
tgaatcagccaggtatacaaacttg

SEQ ID NO: 162611 - DNA, 25 bp, Probe sequence
tctgatgaacatccttggtttatag

SEQ ID NO: 162612 - DNA, 25 bp, Probe sequence
tagtggtgattctcactttgatgta

SEQ ID NO: 162613 - DNA, 25 bp, Probe sequence
tatgccccagcatttgatgtagata

SEQ ID NO: 162614 - DNA, 25 bp, Probe sequence
tatcgatgtcatttggctcagtcca

SEQ ID NO: 162615 - DNA, 25 bp, Probe sequence
ttcttgcaacaaggtacgccattca

SEQ ID NO: 162616 - DNA, 25 bp, Probe sequence
attttcctaataccgctgctagaac

SEQ ID NO: 162617 - DNA, 25 bp, Probe sequence
atttgacacgacatgttattgaaca

SEQ ID NO: 162618 - DNA, 25 bp, Probe sequence
ataccgctgctagaactttaattac

SEQ ID NO: 162619 - DNA, 25 bp, Probe sequence
atcaatgtattgctaggaatttctg

SEQ ID NO: 162620 - DNA, 25 bp, Probe sequence
atcaagcctcgaatgttaggtcaac

SEQ ID NO: 162621 - DNA, 25 bp, Probe sequence
atggtacacaaacgacagtctcaaa

SEQ ID NO: 162622 - DNA, 25 bp, Probe sequence
agcacaggatgttattgaactcgtc

SEQ ID NO: 162623 - DNA, 25 bp, Probe sequence
agcgaagcgacaatttcaaaagtga

SEQ ID NO: 162624 - DNA, 25 bp, Probe sequence
acaggcaatcatttcgttagatgct

SEQ ID NO: 162625 - DNA, 25 bp, Probe sequence
aagcctacatcggatatagatcatc

SEQ ID NO: 162626 - DNA, 25 bp, Probe sequence
aagggtctgaggagcctattcgact

SEQ ID NO: 162627 - DNA, 25 bp, Probe sequence
catttcgttagatgctatgttacat

SEQ ID NO: 162628 - DNA, 25 bp, Probe sequence
ctatgttacatttagcgattttaag

SEQ ID NO: 162629 - DNA, 25 bp, Probe sequence
cggatatagatcatcaatttacaca

SEQ ID NO: 162630 - DNA, 25 bp, Probe sequence
gcatggctatggtacacaaacgaca

SEQ ID NO: 162631 - DNA, 25 bp, Probe sequence
gaattattttcctaataccgctgct

SEQ ID NO: 162632 - DNA, 25 bp, Probe sequence
gaatggttgatgcgtttatactgct

SEQ ID NO: 162633 - DNA, 25 bp, Probe sequence
gaaacgtgtaaccagcatggctatg

SEQ ID NO: 162634 - DNA, 25 bp, Probe sequence
gactgaatccattctacatcaatgt

SEQ ID NO: 162635 - DNA, 25 bp, Probe sequence
gtattgacatcaagcctcgaatgtt

SEQ ID NO: 162636 - DNA, 25 bp, Probe sequence
gtgattggtaagcctacatcggata

SEQ ID NO: 162637 - DNA, 25 bp, Probe sequence
ggttacgattaaagatgttgcacta

SEQ ID NO: 162638 - DNA, 25 bp, Probe sequence
ggacccaaatattaaacaggcaatc

SEQ ID NO: 162639 - DNA, 25 bp, Probe sequence
ggagcctattcgactgaatccattc

SEQ ID NO: 162640 - DNA, 25 bp, Probe sequence
ggaatttctgaaacgtgtaaccagc

SEQ ID NO: 162641 - DNA, 25 bp, Probe sequence
tgtttctccttcgacagtttcaaga

SEQ ID NO: 162642 - DNA, 25 bp, Probe sequence
tgcactaaaagccggtgtttctcct

SEQ ID NO: 162643 - DNA, 25 bp, Probe sequence
tgccatttattgtgattggtaagcc

SEQ ID NO: 162644 - DNA, 25 bp, Probe sequence
tcgaatgttaggtcaacaggctggt

SEQ ID NO: 162645 - DNA, 25 bp, Probe sequence
tctccttcgacagtttcaagagtta

SEQ ID NO: 162646 - DNA, 25 bp, Probe sequence
tatttaaccgaaattgcgtcaccac

SEQ ID NO: 162647 - DNA, 25 bp, Probe sequence
ttagcttctgaaaatttgacacgac

SEQ ID NO: 162648 - DNA, 25 bp, Probe sequence
ttcaatgattcttatttaaccgaaa

SEQ ID NO: 162649 - DNA, 25 bp, Probe sequence
ttgaactcgtcattatagatacaga

SEQ ID NO: 162650 - DNA, 25 bp, Probe sequence
attctttggccatatcgtctggatg

SEQ ID NO: 162651 - DNA, 25 bp, Probe sequence
attattccaccttatcattatgcca

SEQ ID NO: 162652 - DNA, 25 bp, Probe sequence
atgctggaattatcggtggcttgtt

SEQ ID NO: 162653 - DNA, 25 bp, Probe sequence
atgggtatattcatttatgctggaa

SEQ ID NO: 162654 - DNA, 25 bp, Probe sequence
cacctcgcacaccagaacgtaatgc

SEQ ID NO: 162655 - DNA, 25 bp, Probe sequence
aacccacctcaagagttattgcaac

SEQ ID NO: 162656 - DNA, 25 bp, Probe sequence
acaacattttgtctatcgctataaa

SEQ ID NO: 162657 - DNA, 25 bp, Probe sequence
aattgccttgggtaagctttattgt

SEQ ID NO: 162658 - DNA, 25 bp, Probe sequence
caacgaacccacctcaagagttatt

SEQ ID NO: 162659 - DNA, 25 bp, Probe sequence
catactgtacctgctgtgtgggatc

SEQ ID NO: 162660 - DNA, 25 bp, Probe sequence
ctatcgtcattgcaattatttactg

SEQ ID NO: 162661 - DNA, 25 bp, Probe sequence
ctgtttttggtattgctatttgggt

SEQ ID NO: 162662 - DNA, 25 bp, Probe sequence
cggtggcttgttatctggaattgta

SEQ ID NO: 162663 - DNA, 25 bp, Probe sequence
ccaccttatcattatgccaatcatg

SEQ ID NO: 162664 - DNA, 25 bp, Probe sequence
gccaatcatgcatactgtacctgct

SEQ ID NO: 162665 - DNA, 25 bp, Probe sequence
gctatttgggtattattccacctta

SEQ ID NO: 162666 - DNA, 25 bp, Probe sequence
gcatctgtcagaattctttggccat

SEQ ID NO: 162667 - DNA, 25 bp, Probe sequence
gcaattatttactgcatattagtta

SEQ ID NO: 162668 - DNA, 25 bp, Probe sequence
gaattatcggtggcttgttatctgg

SEQ ID NO: 162669 - DNA, 25 bp, Probe sequence
gaacgtaatgcaacgaacccacctc

SEQ ID NO: 162670 - DNA, 25 bp, Probe sequence
gacaaggtgctgtttttggtattgc

SEQ ID NO: 162671 - DNA, 25 bp, Probe sequence
gatgacaattgaattagtgcgacaa

SEQ ID NO: 162672 - DNA, 25 bp, Probe sequence
tgtacctgctgtgtgggatcaacca

SEQ ID NO: 162673 - DNA, 25 bp, Probe sequence
gtcagaattctttggccatatcgtc

SEQ ID NO: 162674 - DNA, 25 bp, Probe sequence
gtgcgacaacattttgtctatcgct

SEQ ID NO: 162675 - DNA, 25 bp, Probe sequence
gggtaagctttattgtccactttag

SEQ ID NO: 162676 - DNA, 25 bp, Probe sequence
ttgggaggtcatgtttccacctcgc

SEQ ID NO: 162677 - DNA, 25 bp, Probe sequence
ggatttagtagtgagtttacgcatc

SEQ ID NO: 162678 - DNA, 25 bp, Probe sequence
ggccatatcgtctggatgatgacaa

SEQ ID NO: 162679 - DNA, 25 bp, Probe sequence
tgtccactttagtttttctatcgtc

SEQ ID NO: 162680 - DNA, 25 bp, Probe sequence
tcatgcatactgtacctgctgtgtg

SEQ ID NO: 162681 - DNA, 25 bp, Probe sequence
tacgcatcaaacatatacattttca

SEQ ID NO: 162682 - DNA, 25 bp, Probe sequence
taggttgggaggtcatgtttccacc

SEQ ID NO: 162683 - DNA, 25 bp, Probe sequence
tagtttttctatcgtcattgcaatt

SEQ ID NO: 162684 - DNA, 25 bp, Probe sequence
atgttgcagttgaagtatcacctac

SEQ ID NO: 162685 - DNA, 25 bp, Probe sequence
aggactatgttgcagttgaagtatc

SEQ ID NO: 162686 - DNA, 25 bp, Probe sequence
agatgctgaaacgtcattgacgatt

SEQ ID NO: 162687 - DNA, 25 bp, Probe sequence
agctgaggactatgttgcagttgaa

SEQ ID NO: 162688 - DNA, 25 bp, Probe sequence
acaccgttagctgaggactatgttg

SEQ ID NO: 162689 - DNA, 25 bp, Probe sequence
accgttagctgaggactatgttgca

SEQ ID NO: 162690 - DNA, 25 bp, Probe sequence
aaagagaaaaactttgatgcattat

SEQ ID NO: 162691 - DNA, 25 bp, Probe sequence
aaagatgctgaaacgtcattgacga

SEQ ID NO: 162692 - DNA, 25 bp, Probe sequence
aaagcgaaagcattttggacagaaa

SEQ ID NO: 162693 - DNA, 25 bp, Probe sequence
aaacaccgttagctgaggactatgt

SEQ ID NO: 162694 - DNA, 25 bp, Probe sequence
aacgtcattgacgattatggcaaaa

SEQ ID NO: 162695 - DNA, 25 bp, Probe sequence
aacctaggaacaccatctttaatgt

SEQ ID NO: 162696 - DNA, 25 bp, Probe sequence
aagtgaaacaccgttagctgaggac

SEQ ID NO: 162697 - DNA, 25 bp, Probe sequence
caccgttagctgaggactatgttgc

SEQ ID NO: 162698 - DNA, 25 bp, Probe sequence
ctaggaacaccatctttaatgttta

SEQ ID NO: 162699 - DNA, 25 bp, Probe sequence
ctgaggactatgttgcagttgaagt

SEQ ID NO: 162700 - DNA, 25 bp, Probe sequence
gaacctaggaacaccatctttaatg

SEQ ID NO: 162701 - DNA, 25 bp, Probe sequence
gaaacaccgttagctgaggactatg

SEQ ID NO: 162702 - DNA, 25 bp, Probe sequence
gactatgttgcagttgaagtatcac

SEQ ID NO: 162703 - DNA, 25 bp, Probe sequence
gacgattatggcaaaagaatttatt

SEQ ID NO: 162704 - DNA, 25 bp, Probe sequence
gttgtaagtgaaacaccgttagctg

SEQ ID NO: 162705 - DNA, 25 bp, Probe sequence
gttaaatcaagttatgttatatgtt

SEQ ID NO: 162706 - DNA, 25 bp, Probe sequence
gttagctgaggactatgttgcagtt

SEQ ID NO: 162707 - DNA, 25 bp, Probe sequence
gtaagtgaaacaccgttagctgagg

SEQ ID NO: 162708 - DNA, 25 bp, Probe sequence
gtcattgacgattatggcaaaagaa

SEQ ID NO: 162709 - DNA, 25 bp, Probe sequence
gtgaacctaggaacaccatctttaa

SEQ ID NO: 162710 - DNA, 25 bp, Probe sequence
gtgaaacaccgttagctgaggacta

SEQ ID NO: 162711 - DNA, 25 bp, Probe sequence
ggtttaactgggcatgatatagtag

SEQ ID NO: 162712 - DNA, 25 bp, Probe sequence
ggaacaccatctttaatgtttaaag

SEQ ID NO: 162713 - DNA, 25 bp, Probe sequence
tgatgcattatactcaaaattaaat

SEQ ID NO: 162714 - DNA, 25 bp, Probe sequence
tgaacctaggaacaccatctttaat

SEQ ID NO: 162715 - DNA, 25 bp, Probe sequence
tttagaatttgttgttgtaagtgaa

SEQ ID NO: 162716 - DNA, 25 bp, Probe sequence
tttaggtttaactgggcatgatata

SEQ ID NO: 162717 - DNA, 25 bp, Probe sequence
ttaactgggcatgatatagtagaaa

SEQ ID NO: 162718 - DNA, 25 bp, Probe sequence
attggagcgttaactggtccgtcat

SEQ ID NO: 162719 - DNA, 25 bp, Probe sequence
atgccgggtggacaagaagaagctt

SEQ ID NO: 162720 - DNA, 25 bp, Probe sequence
atgcacaaggtttcgcgcaaatgcg

SEQ ID NO: 162721 - DNA, 25 bp, Probe sequence
atgttgtcgcaactggtgttcaaaa

SEQ ID NO: 162722 - DNA, 25 bp, Probe sequence
agaaggcgtattccatacacaatgg

SEQ ID NO: 162723 - DNA, 25 bp, Probe sequence
actggtccgtcattaatgccgggtg

SEQ ID NO: 162724 - DNA, 25 bp, Probe sequence
actgaatctgtatttgcacgtttta

SEQ ID NO: 162725 - DNA, 25 bp, Probe sequence
aaaacatcgttactgaatatcaaga

SEQ ID NO: 162726 - DNA, 25 bp, Probe sequence
aacacctggtttctcatcaagtatt

SEQ ID NO: 162727 - DNA, 25 bp, Probe sequence
aacttaattcaagcacaacgtgact

SEQ ID NO: 162728 - DNA, 25 bp, Probe sequence
aacttattgctagatccttacttta

SEQ ID NO: 162729 - DNA, 25 bp, Probe sequence
aacctagcttggaatattgaatcac

SEQ ID NO: 162730 - DNA, 25 bp, Probe sequence
aagagcgcgtaaatgcttctaaaga

SEQ ID NO: 162731 - DNA, 25 bp, Probe sequence
aagactggaatgctggtgaattaga

SEQ ID NO: 162732 - DNA, 25 bp, Probe sequence
aatggtgctggacactatgtgaaaa

SEQ ID NO: 162733 - DNA, 25 bp, Probe sequence
aatggtccaaaagcatcatttgatg

SEQ ID NO: 162734 - DNA, 25 bp, Probe sequence
aatcactggtgatattttcatgaaa

SEQ ID NO: 162735 - DNA, 25 bp, Probe sequence
cacaacgtgactacttcggtgctca

SEQ ID NO: 162736 - DNA, 25 bp, Probe sequence
cagatattcttgatgcaattgctgc

SEQ ID NO: 162737 - DNA, 25 bp, Probe sequence
cttggtgatttagctatgatttgga

SEQ ID NO: 162738 - DNA, 25 bp, Probe sequence
gcgttacgtgatgttgtcgcaactg

SEQ ID NO: 162739 - DNA, 25 bp, Probe sequence
gctgatttacctgcaaacttaattc

SEQ ID NO: 162740 - DNA, 25 bp, Probe sequence
gcacgttttatctcttcaatcaaag

SEQ ID NO: 162741 - DNA, 25 bp, Probe sequence
gaaaaaattcttgatactgcaggtc

SEQ ID NO: 162742 - DNA, 25 bp, Probe sequence
gacattgctcaaacgttcaaagact

SEQ ID NO: 162743 - DNA, 25 bp, Probe sequence
gacggtgcttcatgtgttacttata

SEQ ID NO: 162744 - DNA, 25 bp, Probe sequence
gagttattggtttagccgttatggg

SEQ ID NO: 162745 - DNA, 25 bp, Probe sequence
gatagtttgttacctttattagatg

SEQ ID NO: 162746 - DNA, 25 bp, Probe sequence
gtctcatgaagacattgctcaaacg

SEQ ID NO: 162747 - DNA, 25 bp, Probe sequence
gtgtatctgtatttaaccgctcaag

SEQ ID NO: 162748 - DNA, 25 bp, Probe sequence
ggtgtaccaacacctggtttctcat

SEQ ID NO: 162749 - DNA, 25 bp, Probe sequence
ggcaaaagacggtgcttcatgtgtt

SEQ ID NO: 162750 - DNA, 25 bp, Probe sequence
tggttcaagcaggtaaagctacgga

SEQ ID NO: 162751 - DNA, 25 bp, Probe sequence
tattggtatgggcgtttctggtggt

SEQ ID NO: 162752 - DNA, 25 bp, Probe sequence
atcccacatggacaaattcaatttg

SEQ ID NO: 162753 - DNA, 25 bp, Probe sequence
atacatttggtattccttcagtcat

SEQ ID NO: 162754 - DNA, 25 bp, Probe sequence
atgtgtttgaaactactgcatcaga

SEQ ID NO: 162755 - DNA, 25 bp, Probe sequence
accgacgcaaatgttaatttcagct

SEQ ID NO: 162756 - DNA, 25 bp, Probe sequence
actacggttgtaggtgcaccgacgc

SEQ ID NO: 162757 - DNA, 25 bp, Probe sequence
aaattcagagttgttggacgcggac

SEQ ID NO: 162758 - DNA, 25 bp, Probe sequence
aacttgtacaaatcgattctgagac

SEQ ID NO: 162759 - DNA, 25 bp, Probe sequence
aagatgacggctacatatactctga

SEQ ID NO: 162760 - DNA, 25 bp, Probe sequence
cggactttggttatgctattgatgc

SEQ ID NO: 162761 - DNA, 25 bp, Probe sequence
cgagccatatggatactgttgtacc

SEQ ID NO: 162762 - DNA, 25 bp, Probe sequence
gctcatgcaagtacgccaaaagagg

SEQ ID NO: 162763 - DNA, 25 bp, Probe sequence
gctattgatgcaagtgctgatgtcg

SEQ ID NO: 162764 - DNA, 25 bp, Probe sequence
gcacgttctcacgatccagaaagaa

SEQ ID NO: 162765 - DNA, 25 bp, Probe sequence
gaatcaacaatccaacctattttaa

SEQ ID NO: 162766 - DNA, 25 bp, Probe sequence
gaagaatcaggtttaattggtgcta

SEQ ID NO: 162767 - DNA, 25 bp, Probe sequence
gattaaatcattgaacttgcttgca

SEQ ID NO: 162768 - DNA, 25 bp, Probe sequence
gttggacgcggactttggttatgct

SEQ ID NO: 162769 - DNA, 25 bp, Probe sequence
gtttcatggcggttcagctacgaat

SEQ ID NO: 162770 - DNA, 25 bp, Probe sequence
gtaggtgcaccgacgcaaatgttaa

SEQ ID NO: 162771 - DNA, 25 bp, Probe sequence
gtacgccaaaagagggtgttagtgc

SEQ ID NO: 162772 - DNA, 25 bp, Probe sequence
gtacccgcaattaatgtaaagccaa

SEQ ID NO: 162773 - DNA, 25 bp, Probe sequence
gtgctcgtaatttaggattatctgc

SEQ ID NO: 162774 - DNA, 25 bp, Probe sequence
gtgttagtgctattaatattgcggc

SEQ ID NO: 162775 - DNA, 25 bp, Probe sequence
ggtgccaataatctagtgtgtacaa

SEQ ID NO: 162776 - DNA, 25 bp, Probe sequence
ggttcagacggcagtattattaata

SEQ ID NO: 162777 - DNA, 25 bp, Probe sequence
ggatactgttgtacccgcaattaat

SEQ ID NO: 162778 - DNA, 25 bp, Probe sequence
ggaacaacaaatcccacatggacaa

SEQ ID NO: 162779 - DNA, 25 bp, Probe sequence
tgaagcggctaaacatcctaaatta

SEQ ID NO: 162780 - DNA, 25 bp, Probe sequence
tcagctacgaatattgttgcagatg

SEQ ID NO: 162781 - DNA, 25 bp, Probe sequence
tactgcatcagaattaggtgggaaa

SEQ ID NO: 162782 - DNA, 25 bp, Probe sequence
tagaagcagaggcacgttctcacga

SEQ ID NO: 162783 - DNA, 25 bp, Probe sequence
tattggtaagtttcatggcggttca

SEQ ID NO: 162784 - DNA, 25 bp, Probe sequence
tttggtattccttcagtcattttag

SEQ ID NO: 162785 - DNA, 25 bp, Probe sequence
ttcagtcattttaggagtgggttat

SEQ ID NO: 162786 - DNA, 25 bp, Probe sequence
attagtaagctgttaggtttagata

SEQ ID NO: 162787 - DNA, 25 bp, Probe sequence
aaaggcgaagtctatcgcgttccga

SEQ ID NO: 162788 - DNA, 25 bp, Probe sequence
atcgcgttccgagatgttaaaaatc

SEQ ID NO: 162789 - DNA, 25 bp, Probe sequence
agtccaattgtactcggtattatcg

SEQ ID NO: 162790 - DNA, 25 bp, Probe sequence
agaaggtgtcattacgagttgcgtt

SEQ ID NO: 162791 - DNA, 25 bp, Probe sequence
acagcagtgggtatgactttaggtg

SEQ ID NO: 162792 - DNA, 25 bp, Probe sequence
acagcaatgcgtttacacaatttgt

SEQ ID NO: 162793 - DNA, 25 bp, Probe sequence
acacaatttgtatgagacgcgtttg

SEQ ID NO: 162794 - DNA, 25 bp, Probe sequence
aaagcgcttaactcgagagcaagta

SEQ ID NO: 162795 - DNA, 25 bp, Probe sequence
aacgaaaattcatactatcattatt

SEQ ID NO: 162796 - DNA, 25 bp, Probe sequence
aattgatgcacatttaattgttaat

SEQ ID NO: 162797 - DNA, 25 bp, Probe sequence
caaatcgcaatttggttcattgaaa

SEQ ID NO: 162798 - DNA, 25 bp, Probe sequence
cgtcactgctgaaagaaattggtct

SEQ ID NO: 162799 - DNA, 25 bp, Probe sequence
cgctcatcgaaagtatctgtcataa

SEQ ID NO: 162800 - DNA, 25 bp, Probe sequence
ccattgccaacaacacacaaagcgc

SEQ ID NO: 162801 - DNA, 25 bp, Probe sequence
gccaacaacacacaaagcgcttaac

SEQ ID NO: 162802 - DNA, 25 bp, Probe sequence
gctacaagcgattatttcaagatta

SEQ ID NO: 162803 - DNA, 25 bp, Probe sequence
gaatttaatgatgccaagtttagac

SEQ ID NO: 162804 - DNA, 25 bp, Probe sequence
gaagtctatcgcgttccgagatgtt

SEQ ID NO: 162805 - DNA, 25 bp, Probe sequence
gaagataccattgcgattgaatttg

SEQ ID NO: 162806 - DNA, 25 bp, Probe sequence
gaaaatgcatagtgaagtagcttaa

SEQ ID NO: 162807 - DNA, 25 bp, Probe sequence
gaaacattattactgttaattggac

SEQ ID NO: 162808 - DNA, 25 bp, Probe sequence
gaaaccgctcatcgaaagtatctgt

SEQ ID NO: 162809 - DNA, 25 bp, Probe sequence
gacaaacaactagacgaatacaaat

SEQ ID NO: 162810 - DNA, 25 bp, Probe sequence
gagacgcgtttgaaattggatgaac

SEQ ID NO: 162811 - DNA, 25 bp, Probe sequence
gttgcgttatattacttcatgtttt

SEQ ID NO: 162812 - DNA, 25 bp, Probe sequence
gtactcggtattatcgtattgttat

SEQ ID NO: 162813 - DNA, 25 bp, Probe sequence
taatgactatacagcaatgcgttta

SEQ ID NO: 162814 - DNA, 25 bp, Probe sequence
tacaaaagtacattcgctacaagcg

SEQ ID NO: 162815 - DNA, 25 bp, Probe sequence
taggtttagataattatgcttcaag

SEQ ID NO: 162816 - DNA, 25 bp, Probe sequence
tatcatgttttttagtattgttttt

SEQ ID NO: 162817 - DNA, 25 bp, Probe sequence
tatttataccattaactgtcgtatt

SEQ ID NO: 162818 - DNA, 25 bp, Probe sequence
tttagtattgtttttaggttcagca

SEQ ID NO: 162819 - DNA, 25 bp, Probe sequence
tttaggttcagcaatatttagttta

SEQ ID NO: 162820 - DNA, 25 bp, Probe sequence
attacctgatcgtctagtgacagta

SEQ ID NO: 162821 - DNA, 25 bp, Probe sequence
atcgcaagaccagcagcatcacatg

SEQ ID NO: 162822 - DNA, 25 bp, Probe sequence
atggacatgaatttcgatttataca

SEQ ID NO: 162823 - DNA, 25 bp, Probe sequence
agagcgcgtgaatacttcgaaggtt

SEQ ID NO: 162824 - DNA, 25 bp, Probe sequence
actactgcagaagatgttgacaaag

SEQ ID NO: 162825 - DNA, 25 bp, Probe sequence
acaacactagttatgatcaattctg

SEQ ID NO: 162826 - DNA, 25 bp, Probe sequence
aatcaattacaaacattattcaata

SEQ ID NO: 162827 - DNA, 25 bp, Probe sequence
caagtccgtcatttgcattagtaaa

SEQ ID NO: 162828 - DNA, 25 bp, Probe sequence
cgtattacctgatcgtctagtgaca

SEQ ID NO: 162829 - DNA, 25 bp, Probe sequence
gccttcaagtccgtcatttgcatta

SEQ ID NO: 162830 - DNA, 25 bp, Probe sequence
gcatcacatgctttacattatgacg

SEQ ID NO: 162831 - DNA, 25 bp, Probe sequence
gcaagaccagcagcatcacatgctt

SEQ ID NO: 162832 - DNA, 25 bp, Probe sequence
gaatctgcgggatatgagcaattaa

SEQ ID NO: 162833 - DNA, 25 bp, Probe sequence
gaaggttatgcgccttcaagtccgt

SEQ ID NO: 162834 - DNA, 25 bp, Probe sequence
gaaggtcatgatgtgatgaacgtaa

SEQ ID NO: 162835 - DNA, 25 bp, Probe sequence
gaagcgacacaaagagcgcgtgaat

SEQ ID NO: 162836 - DNA, 25 bp, Probe sequence
gaacggtgttgtagaacaagcaagg

SEQ ID NO: 162837 - DNA, 25 bp, Probe sequence
gaaagacatcaaatcgaaggtcatg

SEQ ID NO: 162838 - DNA, 25 bp, Probe sequence
gacagtatttgctggacaagataaa

SEQ ID NO: 162839 - DNA, 25 bp, Probe sequence
gaccagcagcatcacatgctttaca

SEQ ID NO: 162840 - DNA, 25 bp, Probe sequence
gatgttgacaaagttcttaaacaag

SEQ ID NO: 162841 - DNA, 25 bp, Probe sequence
gatcgtctagtgacagtatttgctg

SEQ ID NO: 162842 - DNA, 25 bp, Probe sequence
gatcaattctgtatgtggttgtgca

SEQ ID NO: 162843 - DNA, 25 bp, Probe sequence
gtatcgcaagaccagcagcatcaca

SEQ ID NO: 162844 - DNA, 25 bp, Probe sequence
gtatgtggttgtgcaggtggtatcg

SEQ ID NO: 162845 - DNA, 25 bp, Probe sequence
gtctagtgacagtatttgctggaca

SEQ ID NO: 162846 - DNA, 25 bp, Probe sequence
gtgcaggtggtatcgcaagaccagc

SEQ ID NO: 162847 - DNA, 25 bp, Probe sequence
gtgaatacttcgaaggttatgcgcc

SEQ ID NO: 162848 - DNA, 25 bp, Probe sequence
ggttgtgcaggtggtatcgcaagac

SEQ ID NO: 162849 - DNA, 25 bp, Probe sequence
ggatatgagcaattaactactgcag

SEQ ID NO: 162850 - DNA, 25 bp, Probe sequence
ggaatgaaattgaatctgcgggata

SEQ ID NO: 162851 - DNA, 25 bp, Probe sequence
tcgatttatacatgaacggtgttgt

SEQ ID NO: 162852 - DNA, 25 bp, Probe sequence
tacattatgacgtattacctgatcg

SEQ ID NO: 162853 - DNA, 25 bp, Probe sequence
ttaaacaagatggtacaacactagt

SEQ ID NO: 162854 - DNA, 25 bp, Probe sequence
atacgtacctgtgattaagcatgca

SEQ ID NO: 162855 - DNA, 25 bp, Probe sequence
ataatggtcgcttttcacctgttgt

SEQ ID NO: 162856 - DNA, 25 bp, Probe sequence
atcaagtaaccaatcatctgaagac

SEQ ID NO: 162857 - DNA, 25 bp, Probe sequence
atggtggtaccacagctcaatctga

SEQ ID NO: 162858 - DNA, 25 bp, Probe sequence
agagcatgacattgatttatcacaa

SEQ ID NO: 162859 - DNA, 25 bp, Probe sequence
agcaaaagtggatgagcatactcag

SEQ ID NO: 162860 - DNA, 25 bp, Probe sequence
agctcaatctgacaaacaagttcaa

SEQ ID NO: 162861 - DNA, 25 bp, Probe sequence
aacagcgtatcgaacagtatacttt

SEQ ID NO: 162862 - DNA, 25 bp, Probe sequence
aactcgcttcagagcatgacattga

SEQ ID NO: 162863 - DNA, 25 bp, Probe sequence
aagctgtagcagatgctttaaaagc

SEQ ID NO: 162864 - DNA, 25 bp, Probe sequence
aagcatgcagacgaaaagtcaatca

SEQ ID NO: 162865 - DNA, 25 bp, Probe sequence
aagtcaatcaaaggtatagctagag

SEQ ID NO: 162866 - DNA, 25 bp, Probe sequence
aatggttagtttctgttggtgatca

SEQ ID NO: 162867 - DNA, 25 bp, Probe sequence
aataatactggtacatttggttcag

SEQ ID NO: 162868 - DNA, 25 bp, Probe sequence
aatatttcaattgctgttgctgatg

SEQ ID NO: 162869 - DNA, 25 bp, Probe sequence
cacctgttgtatttaaactcgcttc

SEQ ID NO: 162870 - DNA, 25 bp, Probe sequence
catttggttcagtatcatcaatggg

SEQ ID NO: 162871 - DNA, 25 bp, Probe sequence
ccagtaaatggtgtgcgtaaagcaa

SEQ ID NO: 162872 - DNA, 25 bp, Probe sequence
gcctaagttaggtgagagtgttcat

SEQ ID NO: 162873 - DNA, 25 bp, Probe sequence
gaatcaatcgttaaaaagccagtag

SEQ ID NO: 162874 - DNA, 25 bp, Probe sequence
gaatcatattaaacagcgtatcgaa

SEQ ID NO: 162875 - DNA, 25 bp, Probe sequence
gaaccattatgtgaagttattacag

SEQ ID NO: 162876 - DNA, 25 bp, Probe sequence
gaaattttagttgaagcggggcaga

SEQ ID NO: 162877 - DNA, 25 bp, Probe sequence
gagcatactcagaaatctactaaaa

SEQ ID NO: 162878 - DNA, 25 bp, Probe sequence
gagattccacatgcatggatgatga

SEQ ID NO: 162879 - DNA, 25 bp, Probe sequence
gttctttgctttctttgtaaaagct

SEQ ID NO: 162880 - DNA, 25 bp, Probe sequence
gtttctgttggtgatcatattgatg

SEQ ID NO: 162881 - DNA, 25 bp, Probe sequence
gtaggtagtggatttgaaggtcgtg

SEQ ID NO: 162882 - DNA, 25 bp, Probe sequence
gtagctattgatacaattatctgta

SEQ ID NO: 162883 - DNA, 25 bp, Probe sequence
gtcgcttttcacctgttgtatttaa

SEQ ID NO: 162884 - DNA, 25 bp, Probe sequence
gtcccttccacgatatcaggaacaa

SEQ ID NO: 162885 - DNA, 25 bp, Probe sequence
gtggatttgaaggtcgtgtaactaa

SEQ ID NO: 162886 - DNA, 25 bp, Probe sequence
ggtaccacagctcaatctgacaaac

SEQ ID NO: 162887 - DNA, 25 bp, Probe sequence
tgaagtcccttccacgatatcagga

SEQ ID NO: 162888 - DNA, 25 bp, Probe sequence
attatgtcagaagtgtcagcgatta

SEQ ID NO: 162889 - DNA, 25 bp, Probe sequence
agtgaagctgcgaaaatgcgttatc

SEQ ID NO: 162890 - DNA, 25 bp, Probe sequence
agagttatcgatacgccattagctg

SEQ ID NO: 162891 - DNA, 25 bp, Probe sequence
agaaacaattattgatcgtgctaaa

SEQ ID NO: 162892 - DNA, 25 bp, Probe sequence
aaggtggcgtatttggtactactca

SEQ ID NO: 162893 - DNA, 25 bp, Probe sequence
caatcatgcgtttagctgctccaga

SEQ ID NO: 162894 - DNA, 25 bp, Probe sequence
cagagcattgcttgttcgatttaga

SEQ ID NO: 162895 - DNA, 25 bp, Probe sequence
cattggtgcagctatggtaggtaaa

SEQ ID NO: 162896 - DNA, 25 bp, Probe sequence
gccagaagaatattacactgtacct

SEQ ID NO: 162897 - DNA, 25 bp, Probe sequence
gcgaaaatgcgttatcgttcaaata

SEQ ID NO: 162898 - DNA, 25 bp, Probe sequence
gcgtttagctgctccagatgtacca

SEQ ID NO: 162899 - DNA, 25 bp, Probe sequence
gcgtatttggtactactcaaggact

SEQ ID NO: 162900 - DNA, 25 bp, Probe sequence
gctccagatgtaccatctatgccat

SEQ ID NO: 162901 - DNA, 25 bp, Probe sequence
gcttgttcgatttagatgcaccaat

SEQ ID NO: 162902 - DNA, 25 bp, Probe sequence
gcaatgcccattaacgattcgtgca

SEQ ID NO: 162903 - DNA, 25 bp, Probe sequence
gaaggtgaagatttaacagtatttt

SEQ ID NO: 162904 - DNA, 25 bp, Probe sequence
gagtcaaatattgttggaactgcca

SEQ ID NO: 162905 - DNA, 25 bp, Probe sequence
gatgcaccaatcatgcgtttagctg

SEQ ID NO: 162906 - DNA, 25 bp, Probe sequence
gatacgccattagctgagtcaaata

SEQ ID NO: 162907 - DNA, 25 bp, Probe sequence
gatttacgaactgtttatccattag

SEQ ID NO: 162908 - DNA, 25 bp, Probe sequence
gttcacggaggactatatcattcac

SEQ ID NO: 162909 - DNA, 25 bp, Probe sequence
gattcgtgcaccatttggtggcggt

SEQ ID NO: 162910 - DNA, 25 bp, Probe sequence
gttcaaataatgattggcaatgccc

SEQ ID NO: 162911 - DNA, 25 bp, Probe sequence
gtattgaaagtatatttgcttcatc

SEQ ID NO: 162912 - DNA, 25 bp, Probe sequence
gtattttgttatggattaatggtca

SEQ ID NO: 162913 - DNA, 25 bp, Probe sequence
gtgtcagcgattattgcagagcatt

SEQ ID NO: 162914 - DNA, 25 bp, Probe sequence
ggaactgccattggtgcagctatgg

SEQ ID NO: 162915 - DNA, 25 bp, Probe sequence
ggactatatcattcacaaagtattg

SEQ ID NO: 162916 - DNA, 25 bp, Probe sequence
tggtggcggtgttcacggaggacta

SEQ ID NO: 162917 - DNA, 25 bp, Probe sequence
ttagctgctccagatgtaccatcta

SEQ ID NO: 162918 - DNA, 25 bp, Probe sequence
tcaatttgcagattttattttacct

SEQ ID NO: 162919 - DNA, 25 bp, Probe sequence
taatggtcaattattgtttacaagc

SEQ ID NO: 162920 - DNA, 25 bp, Probe sequence
tacactgtacctttaggaaaagcag

SEQ ID NO: 162921 - DNA, 25 bp, Probe sequence
ttaacgattcgtgcaccatttggtg

SEQ ID NO: 162922 - DNA, 25 bp, Probe sequence
atacgcagctgaaaaattatcggat

SEQ ID NO: 162923 - DNA, 25 bp, Probe sequence
atcggatagagcacttggttacggt

SEQ ID NO: 162924 - DNA, 25 bp, Probe sequence
catgaaggtttaaacttcgcgggtg

SEQ ID NO: 162925 - DNA, 25 bp, Probe sequence
agtacctgattcattacaatacgca

SEQ ID NO: 162926 - DNA, 25 bp, Probe sequence
accgtgcaggtaaaattccatttgt

SEQ ID NO: 162927 - DNA, 25 bp, Probe sequence
acgcgccatatccaagtgtcgaaga

SEQ ID NO: 162928 - DNA, 25 bp, Probe sequence
acaaatgccatcacactttagtagt

SEQ ID NO: 162929 - DNA, 25 bp, Probe sequence
aaatatgcaatttcagtacctgatt

SEQ ID NO: 162930 - DNA, 25 bp, Probe sequence
aaagagttgctttcagctggcatta

SEQ ID NO: 162931 - DNA, 25 bp, Probe sequence
aaacttccttttgtatgtgtcatta

SEQ ID NO: 162932 - DNA, 25 bp, Probe sequence
aaggctgctgaagacgcgccatatc

SEQ ID NO: 162933 - DNA, 25 bp, Probe sequence
caagtgtcgaagaagcctatgcatt

SEQ ID NO: 162934 - DNA, 25 bp, Probe sequence
caaagttcaccggtagcaactcaaa

SEQ ID NO: 162935 - DNA, 25 bp, Probe sequence
ccatgctgttggtgctgctttagct

SEQ ID NO: 162936 - DNA, 25 bp, Probe sequence
gctatttctggtcaaggttcaactt

SEQ ID NO: 162937 - DNA, 25 bp, Probe sequence
gctttcagctggcattatcgatgat

SEQ ID NO: 162938 - DNA, 25 bp, Probe sequence
gcaagagatcgagctatttctggtc

SEQ ID NO: 162939 - DNA, 25 bp, Probe sequence
gcaactcaaataccccatgctgttg

SEQ ID NO: 162940 - DNA, 25 bp, Probe sequence
gaagcaactcagattgggatggcat

SEQ ID NO: 162941 - DNA, 25 bp, Probe sequence
gaagcagtaacaagtcgtatgacag

SEQ ID NO: 162942 - DNA, 25 bp, Probe sequence
gaagcctatgcatttgtgtacgaag

SEQ ID NO: 162943 - DNA, 25 bp, Probe sequence
gaagcggagcataaagacatcatca

SEQ ID NO: 162944 - DNA, 25 bp, Probe sequence
gaaagacgatgttaactctggtgga

SEQ ID NO: 162945 - DNA, 25 bp, Probe sequence
gactgtggttattgaaccgtgcagg

SEQ ID NO: 162946 - DNA, 25 bp, Probe sequence
gagatctagctttcgttacttatat

SEQ ID NO: 162947 - DNA, 25 bp, Probe sequence
gatgatgacgaccaatatcgtacga

SEQ ID NO: 162948 - DNA, 25 bp, Probe sequence
gatacgtttttatcagcgtttggaa

SEQ ID NO: 162949 - DNA, 25 bp, Probe sequence
gattgggatggcatacgcattagaa

SEQ ID NO: 162950 - DNA, 25 bp, Probe sequence
gtcgtatgacagctcattcatcaga

SEQ ID NO: 162951 - DNA, 25 bp, Probe sequence
gtggtcaaggacaagaagcaactca

SEQ ID NO: 162952 - DNA, 25 bp, Probe sequence
ttcgcgggtgtacacaaacttcctt

SEQ ID NO: 162953 - DNA, 25 bp, Probe sequence
taaatcattaggccttagcgaagaa

SEQ ID NO: 162954 - DNA, 25 bp, Probe sequence
tatcgatgatgcttggttggcagaa

SEQ ID NO: 162955 - DNA, 25 bp, Probe sequence
ttccatttgttgtaagtggtcaagg

SEQ ID NO: 162956 - DNA, 25 bp, Probe sequence
attgcttctatcggtttaaacattg

SEQ ID NO: 162957 - DNA, 25 bp, Probe sequence
atatttatgcagctggtgattgtat

SEQ ID NO: 162958 - DNA, 25 bp, Probe sequence
atgattggtccacatgtaacagaat

SEQ ID NO: 162959 - DNA, 25 bp, Probe sequence
atggctcggcattagaattaggact

SEQ ID NO: 162960 - DNA, 25 bp, Probe sequence
acccaatcccagtaaactataacat

SEQ ID NO: 162961 - DNA, 25 bp, Probe sequence
aaatcattgtcagcacgtggtgtta

SEQ ID NO: 162962 - DNA, 25 bp, Probe sequence
aaagtgttgctatcgattggtagaa

SEQ ID NO: 162963 - DNA, 25 bp, Probe sequence
aatgcaacacaatcacattgacatt

SEQ ID NO: 162964 - DNA, 25 bp, Probe sequence
caatatgatttagtcgttctcggtg

SEQ ID NO: 162965 - DNA, 25 bp, Probe sequence
cacaacctgaaattgcttctatcgg

SEQ ID NO: 162966 - DNA, 25 bp, Probe sequence
cacatccttccatctctgaagtgtt

SEQ ID NO: 162967 - DNA, 25 bp, Probe sequence
ctaagtgtatttattcacaacctga

SEQ ID NO: 162968 - DNA, 25 bp, Probe sequence
ggcacgggacgtattctaggtacat

SEQ ID NO: 162969 - DNA, 25 bp, Probe sequence
gcgatacgtgcgtctcaattaggta

SEQ ID NO: 162970 - DNA, 25 bp, Probe sequence
gcacgtggtgttaaattctatgagg

SEQ ID NO: 162971 - DNA, 25 bp, Probe sequence
gaacgacaactattaggaggtactt

SEQ ID NO: 162972 - DNA, 25 bp, Probe sequence
gagttgccattcttatcatttgatc

SEQ ID NO: 162973 - DNA, 25 bp, Probe sequence
gaggtacttgtctccataaaggttg

SEQ ID NO: 162974 - DNA, 25 bp, Probe sequence
gatatgttgctgcgatacgtgcgtc

SEQ ID NO: 162975 - DNA, 25 bp, Probe sequence
gtagaaaacctaacacatcagatat

SEQ ID NO: 162976 - DNA, 25 bp, Probe sequence
gtacatctatattttcacctcaaag

SEQ ID NO: 162977 - DNA, 25 bp, Probe sequence
gtaaacaagcttcacaactattaaa

SEQ ID NO: 162978 - DNA, 25 bp, Probe sequence
cagttcatgaatggctcggcattag

SEQ ID NO: 162979 - DNA, 25 bp, Probe sequence
ggttgtattcctactaaatcgctgc

SEQ ID NO: 162980 - DNA, 25 bp, Probe sequence
ggcagcaatgtttggcgttgatgtc

SEQ ID NO: 162981 - DNA, 25 bp, Probe sequence
tcgcctgcagagttgccattcttat

SEQ ID NO: 162982 - DNA, 25 bp, Probe sequence
taaagcagtgattgatagccatgac

SEQ ID NO: 162983 - DNA, 25 bp, Probe sequence
taaatcgctgcttaaatctgctgaa

SEQ ID NO: 162984 - DNA, 25 bp, Probe sequence
tattttcacctcaaagtggcacaat

SEQ ID NO: 162985 - DNA, 25 bp, Probe sequence
ttaggactaacaacacacgcacatc

SEQ ID NO: 162986 - DNA, 25 bp, Probe sequence
ttacaattggcacatgttggatcaa

SEQ ID NO: 162987 - DNA, 25 bp, Probe sequence
ttaattgcaactggttcttcgcctg

SEQ ID NO: 162988 - DNA, 25 bp, Probe sequence
ttctcggtggaggtactgcaggata

SEQ ID NO: 162989 - DNA, 25 bp, Probe sequence
ttggtggtggtgttatcggaatgga

SEQ ID NO: 162990 - DNA, 25 bp, Probe sequence
attactaaacacacgctcattgcag

SEQ ID NO: 162991 - DNA, 25 bp, Probe sequence
atttgtacctatcatcaattcgatt

SEQ ID NO: 162992 - DNA, 25 bp, Probe sequence
atcattgcatcaggaaacaagccaa

SEQ ID NO: 162993 - DNA, 25 bp, Probe sequence
atgtactaaatttgtacctatcatc

SEQ ID NO: 162994 - DNA, 25 bp, Probe sequence
atggaggtatgattcccaaagtgct

SEQ ID NO: 162995 - DNA, 25 bp, Probe sequence
agtgacatgcatccatcaattatta

SEQ ID NO: 162996 - DNA, 25 bp, Probe sequence
accagcaaatcgagccacactttgt

SEQ ID NO: 162997 - DNA, 25 bp, Probe sequence
acctatcatcaattcgattggtttc

SEQ ID NO: 162998 - DNA, 25 bp, Probe sequence
actaaacacacgctcattgcagacg

SEQ ID NO: 162999 - DNA, 25 bp, Probe sequence
aaacaacatctaccccattatcgtt

SEQ ID NO: 163000 - DNA, 25 bp, Probe sequence
aacacacgctcattgcagacgttaa

SEQ ID NO: 163001 - DNA, 25 bp, Probe sequence
aaaatggctgtcctaaagttatcat

SEQ ID NO: 163002 - DNA, 25 bp, Probe sequence
aacaacattaagcatttacgatcaa

SEQ ID NO: 163003 - DNA, 25 bp, Probe sequence
caataggcttatgtggtttggatgc

SEQ ID NO: 163004 - DNA, 25 bp, Probe sequence
caatgttctgcaataggcttatgtg

SEQ ID NO: 163005 - DNA, 25 bp, Probe sequence
caaaccagcaaatcgagccacactt

SEQ ID NO: 163006 - DNA, 25 bp, Probe sequence
cacgctcattgcagacgttaacact

SEQ ID NO: 163007 - DNA, 25 bp, Probe sequence
gctgtcctaaagttatcattgcatc

SEQ ID NO: 163008 - DNA, 25 bp, Probe sequence
gcattagtagctcaatttaaccagc

SEQ ID NO: 163009 - DNA, 25 bp, Probe sequence
gcatccatcaattattaacaacatt

SEQ ID NO: 163010 - DNA, 25 bp, Probe sequence
gcaaatcgagccacactttgttaat

SEQ ID NO: 163011 - DNA, 25 bp, Probe sequence
gaagcattatcaaaccagcaaatcg

SEQ ID NO: 163012 - DNA, 25 bp, Probe sequence
gacgttaacactgcattagtagctc

SEQ ID NO: 163013 - DNA, 25 bp, Probe sequence
gagccacactttgttaatggcctaa

SEQ ID NO: 163014 - DNA, 25 bp, Probe sequence
gagtgactgataaagcaaccatgac

SEQ ID NO: 163015 - DNA, 25 bp, Probe sequence
gatcaaacaacatctaccccattat

SEQ ID NO: 163016 - DNA, 25 bp, Probe sequence
gattggtttcaataaccatgatgga

SEQ ID NO: 163017 - DNA, 25 bp, Probe sequence
gttctgcaataggcttatgtggttt

SEQ ID NO: 163018 - DNA, 25 bp, Probe sequence
gttaatggcctaagagtgactgata

SEQ ID NO: 163019 - DNA, 25 bp, Probe sequence
gtcattaaaattggtggcagtacac

SEQ ID NO: 163020 - DNA, 25 bp, Probe sequence
gtggcccatttattaatgaagcatt

SEQ ID NO: 163021 - DNA, 25 bp, Probe sequence
ggcggtggcccatttattaatgaag

SEQ ID NO: 163022 - DNA, 25 bp, Probe sequence
ttacgatcaaacaacatctacccca

SEQ ID NO: 163023 - DNA, 25 bp, Probe sequence
ttgatcaacaatatggatatgtcgg

SEQ ID NO: 163024 - DNA, 25 bp, Probe sequence
attattagatattcatggccaacat

SEQ ID NO: 163025 - DNA, 25 bp, Probe sequence
ataccatttaacattattggataat

SEQ ID NO: 163026 - DNA, 25 bp, Probe sequence
atcaaacagttactttacaagattt

SEQ ID NO: 163027 - DNA, 25 bp, Probe sequence
atcacgttatcaagatttgttggat

SEQ ID NO: 163028 - DNA, 25 bp, Probe sequence
atggctaatacagaattcgacgaac

SEQ ID NO: 163029 - DNA, 25 bp, Probe sequence
agaagaaccgaatattgatggaatc

SEQ ID NO: 163030 - DNA, 25 bp, Probe sequence
aaaaggctgtcatcgaaggtatatt

SEQ ID NO: 163031 - DNA, 25 bp, Probe sequence
aatcgagaggtcaaactgcaatttt

SEQ ID NO: 163032 - DNA, 25 bp, Probe sequence
ccacaagttgcatcgatgagcgacc

SEQ ID NO: 163033 - DNA, 25 bp, Probe sequence
gcaattttattcgatgaggttgact

SEQ ID NO: 163034 - DNA, 25 bp, Probe sequence
gaatgatttcaggtgcaagtgttac

SEQ ID NO: 163035 - DNA, 25 bp, Probe sequence
gaatctcgtatgaatttgctgaata

SEQ ID NO: 163036 - DNA, 25 bp, Probe sequence
gaaggcgaaatagagcaacttgaaa

SEQ ID NO: 163037 - DNA, 25 bp, Probe sequence
gaagaattgtctgaagcacatctaa

SEQ ID NO: 163038 - DNA, 25 bp, Probe sequence
gaactttctagaattatgttagcgt

SEQ ID NO: 163039 - DNA, 25 bp, Probe sequence
gaactaagcaaccatttgttaacaa

SEQ ID NO: 163040 - DNA, 25 bp, Probe sequence
gaacaaagtacatcgcagttacgag

SEQ ID NO: 163041 - DNA, 25 bp, Probe sequence
gagcgaccatcatttattaatttcg

SEQ ID NO: 163042 - DNA, 25 bp, Probe sequence
gagagcttcatctgattttgtaaga

SEQ ID NO: 163043 - DNA, 25 bp, Probe sequence
gagaccacattgtatcggaaattca

SEQ ID NO: 163044 - DNA, 25 bp, Probe sequence
gaggttgactcaggtgtatctggac

SEQ ID NO: 163045 - DNA, 25 bp, Probe sequence
gatgatcgtacaacaacacaagttc

SEQ ID NO: 163046 - DNA, 25 bp, Probe sequence
gatgaaaatgctatcactgatcgtt

SEQ ID NO: 163047 - DNA, 25 bp, Probe sequence
gatattaaacgcattcaaaactctg

SEQ ID NO: 163048 - DNA, 25 bp, Probe sequence
gttgcatcgatgagcgaccatcatt

SEQ ID NO: 163049 - DNA, 25 bp, Probe sequence
gtagatgaagattttttattagtta

SEQ ID NO: 163050 - DNA, 25 bp, Probe sequence
gtcaaactgcaattttattcgatga

SEQ ID NO: 163051 - DNA, 25 bp, Probe sequence
gggagttaagagaccacattgtatc

SEQ ID NO: 163052 - DNA, 25 bp, Probe sequence
ggtgcaagtgttactgatttaactc

SEQ ID NO: 163053 - DNA, 25 bp, Probe sequence
ggataattacgcagaatcacgttat

SEQ ID NO: 163054 - DNA, 25 bp, Probe sequence
tagaatcagcagaccaagcattgct

SEQ ID NO: 163055 - DNA, 25 bp, Probe sequence
tttcagaattaatcgcatatcaaga

SEQ ID NO: 163056 - DNA, 25 bp, Probe sequence
ttatagaggttggacaagcgttatc

SEQ ID NO: 163057 - DNA, 25 bp, Probe sequence
ttgactcaggtgtatctggacaagc

SEQ ID NO: 163058 - DNA, 25 bp, Probe sequence
ataccttcaggtcaatatgtttata

SEQ ID NO: 163059 - DNA, 25 bp, Probe sequence
aaagtacctataccttcaggtcaat

SEQ ID NO: 163060 - DNA, 25 bp, Probe sequence
aacgattatgatttaaatgtcactc

SEQ ID NO: 163061 - DNA, 25 bp, Probe sequence
aagtcaagaattttcaatttgttat

SEQ ID NO: 163062 - DNA, 25 bp, Probe sequence
aatgatagaaaattccatcctttag

SEQ ID NO: 163063 - DNA, 25 bp, Probe sequence
aatgtcactcaagcaactgtttctc

SEQ ID NO: 163064 - DNA, 25 bp, Probe sequence
caagcaactgtttctcgtgatatta

SEQ ID NO: 163065 - DNA, 25 bp, Probe sequence
cactcaagcaactgtttctcgtgat

SEQ ID NO: 163066 - DNA, 25 bp, Probe sequence
cttattaaagtacctataccttcag

SEQ ID NO: 163067 - DNA, 25 bp, Probe sequence
cttgtttaattatttgtcgaagcaa

SEQ ID NO: 163068 - DNA, 25 bp, Probe sequence
gcacaatctattggagctatattag

SEQ ID NO: 163069 - DNA, 25 bp, Probe sequence
gcaactgtttctcgtgatattaaag

SEQ ID NO: 163070 - DNA, 25 bp, Probe sequence
gacgttatttaatggattcctttgt

SEQ ID NO: 163071 - DNA, 25 bp, Probe sequence
gaggcaagtgatgaaatcaagtcaa

SEQ ID NO: 163072 - DNA, 25 bp, Probe sequence
gatggtactgataatttacttgttc

SEQ ID NO: 163073 - DNA, 25 bp, Probe sequence
gatacttgtttaattatttgtcgaa

SEQ ID NO: 163074 - DNA, 25 bp, Probe sequence
gatagaaaattccatcctttagaaa

SEQ ID NO: 163075 - DNA, 25 bp, Probe sequence
gatattaaagaactacaacttatta

SEQ ID NO: 163076 - DNA, 25 bp, Probe sequence
gttaaacgattaaacgattatgatt

SEQ ID NO: 163077 - DNA, 25 bp, Probe sequence
gtttatagtttaccaaatgatagaa

SEQ ID NO: 163078 - DNA, 25 bp, Probe sequence
gtacctataccttcaggtcaatatg

SEQ ID NO: 163079 - DNA, 25 bp, Probe sequence
gtgcccaaaaaatcggttaggcata

SEQ ID NO: 163080 - DNA, 25 bp, Probe sequence
gtcaatatgtttatagtttaccaaa

SEQ ID NO: 163081 - DNA, 25 bp, Probe sequence
gtcactcaagcaactgtttctcgtg

SEQ ID NO: 163082 - DNA, 25 bp, Probe sequence
gtcgaagcaaagaggcaagtgatga

SEQ ID NO: 163083 - DNA, 25 bp, Probe sequence
ggtaatgcacaatctattggagcta

SEQ ID NO: 163084 - DNA, 25 bp, Probe sequence
ggtactgataatttacttgttctaa

SEQ ID NO: 163085 - DNA, 25 bp, Probe sequence
ggattcctttgttaatatagatggt

SEQ ID NO: 163086 - DNA, 25 bp, Probe sequence
ggcacaatttgtggtgatgatactt

SEQ ID NO: 163087 - DNA, 25 bp, Probe sequence
tgaacagatagagacacaagatgaa

SEQ ID NO: 163088 - DNA, 25 bp, Probe sequence
tccatcctttagaaaaattgggacg

SEQ ID NO: 163089 - DNA, 25 bp, Probe sequence
ttgggaagaagtactaggcacaatt

SEQ ID NO: 163090 - DNA, 25 bp, Probe sequence
ttacctggtaatgcacaatctattg

SEQ ID NO: 163091 - DNA, 25 bp, Probe sequence
ttgtggtgatgatacttgtttaatt

SEQ ID NO: 163092 - DNA, 25 bp, Probe sequence
attgacttatcatagagacgcagca

SEQ ID NO: 163093 - DNA, 25 bp, Probe sequence
atcgttgatttattttatagcaggg

SEQ ID NO: 163094 - DNA, 25 bp, Probe sequence
agagacgcagcagtggatgaactaa

SEQ ID NO: 163095 - DNA, 25 bp, Probe sequence
agatggcgcagaagataaattgact

SEQ ID NO: 163096 - DNA, 25 bp, Probe sequence
agcaggtgatgctttattaactaaa

SEQ ID NO: 163097 - DNA, 25 bp, Probe sequence
agcagatatcgctaatgtcgatgat

SEQ ID NO: 163098 - DNA, 25 bp, Probe sequence
acgcatccgaccagttctgttatta

SEQ ID NO: 163099 - DNA, 25 bp, Probe sequence
aaagatgatttattagactgctatg

SEQ ID NO: 163100 - DNA, 25 bp, Probe sequence
aaacacttattagaaatcgttgatt

SEQ ID NO: 163101 - DNA, 25 bp, Probe sequence
aaaagttctacaacggctgtcaata

SEQ ID NO: 163102 - DNA, 25 bp, Probe sequence
aacttttgcggttatgagtgcagca

SEQ ID NO: 163103 - DNA, 25 bp, Probe sequence
aactaaagcatttgaacttatttca

SEQ ID NO: 163104 - DNA, 25 bp, Probe sequence
aatggtcggcggtcaaatgttagat

SEQ ID NO: 163105 - DNA, 25 bp, Probe sequence
cacttattcatgatgacctaccagc

SEQ ID NO: 163106 - DNA, 25 bp, Probe sequence
gccaaccaattgatcttgaaacttt

SEQ ID NO: 163107 - DNA, 25 bp, Probe sequence
gcgaaggccaaccaattgatcttga

SEQ ID NO: 163108 - DNA, 25 bp, Probe sequence
gctgtcaatagcaagtggtcatgtt

SEQ ID NO: 163109 - DNA, 25 bp, Probe sequence
gaaagttatagttatcatttaggta

SEQ ID NO: 163110 - DNA, 25 bp, Probe sequence
gacctaccagcgatggataatgatg

SEQ ID NO: 163111 - DNA, 25 bp, Probe sequence
gagcgcaattgcactagaaatgatt

SEQ ID NO: 163112 - DNA, 25 bp, Probe sequence
gaccagttctgttattactcacttt

SEQ ID NO: 163113 - DNA, 25 bp, Probe sequence
gagtgcagcagatatcgctaatgtc

SEQ ID NO: 163114 - DNA, 25 bp, Probe sequence
gatatgcaaagcgaaggccaaccaa

SEQ ID NO: 163115 - DNA, 25 bp, Probe sequence
gattcatacatattcacttattcat

SEQ ID NO: 163116 - DNA, 25 bp, Probe sequence
gttgtattcattaaatgctggaggt

SEQ ID NO: 163117 - DNA, 25 bp, Probe sequence
gttattactcactttagattcacta

SEQ ID NO: 163118 - DNA, 25 bp, Probe sequence
gtaaaaaagtgggcagcgatcttga

SEQ ID NO: 163119 - DNA, 25 bp, Probe sequence
gtgggcagcgatcttgaaaataata

SEQ ID NO: 163120 - DNA, 25 bp, Probe sequence
ggtcatgttggaatggtcggcggtc

SEQ ID NO: 163121 - DNA, 25 bp, Probe sequence
ggcggtcaaatgttagatatgcaaa

SEQ ID NO: 163122 - DNA, 25 bp, Probe sequence
tgctggaggtaaacgcatccgacca

SEQ ID NO: 163123 - DNA, 25 bp, Probe sequence
tcatgatgacctaccagcgatggat

SEQ ID NO: 163124 - DNA, 25 bp, Probe sequence
tagattcactaaataccgagtatga

SEQ ID NO: 163125 - DNA, 25 bp, Probe sequence
ttattagactgctatggtgatgaag

SEQ ID NO: 163126 - DNA, 25 bp, Probe sequence
ataatgaaacagtatctttagagga

SEQ ID NO: 163127 - DNA, 25 bp, Probe sequence
atcagcagcttgtgacacaacttta

SEQ ID NO: 163128 - DNA, 25 bp, Probe sequence
atgaaactatcagcagcttgtgaca

SEQ ID NO: 163129 - DNA, 25 bp, Probe sequence
agcagcttgtgacacaactttaaaa

SEQ ID NO: 163130 - DNA, 25 bp, Probe sequence
acgtggtatgaaactatcagcagct

SEQ ID NO: 163131 - DNA, 25 bp, Probe sequence
actatcagcagcttgtgacacaact

SEQ ID NO: 163132 - DNA, 25 bp, Probe sequence
aaactatcagcagcttgtgacacaa

SEQ ID NO: 163133 - DNA, 25 bp, Probe sequence
aacagtatctttagaggaatcatta

SEQ ID NO: 163134 - DNA, 25 bp, Probe sequence
aactatcagcagcttgtgacacaac

SEQ ID NO: 163135 - DNA, 25 bp, Probe sequence
aacgtggtatgaaactatcagcagc

SEQ ID NO: 163136 - DNA, 25 bp, Probe sequence
aatgccgaaaaaaaggtgaatgact

SEQ ID NO: 163137 - DNA, 25 bp, Probe sequence
caacgtggtatgaaactatcagcag

SEQ ID NO: 163138 - DNA, 25 bp, Probe sequence
cagcagcttgtgacacaactttaaa

SEQ ID NO: 163139 - DNA, 25 bp, Probe sequence
cagtatctttagaggaatcattaga

SEQ ID NO: 163140 - DNA, 25 bp, Probe sequence
ctatcagcagcttgtgacacaactt

SEQ ID NO: 163141 - DNA, 25 bp, Probe sequence
cgtggtatgaaactatcagcagctt

SEQ ID NO: 163142 - DNA, 25 bp, Probe sequence
gcagcttgtgacacaactttaaaaa

SEQ ID NO: 163143 - DNA, 25 bp, Probe sequence
gaagaaatgatgcaagaattagagc

SEQ ID NO: 163144 - DNA, 25 bp, Probe sequence
gaagctgaggatgtaaaaaatgacg

SEQ ID NO: 163145 - DNA, 25 bp, Probe sequence
atgactaaagaaacgcaaagttttg

SEQ ID NO: 163146 - DNA, 25 bp, Probe sequence
gaaactatcagcagcttgtgacaca

SEQ ID NO: 163147 - DNA, 25 bp, Probe sequence
gaaacagtatctttagaggaatcat

SEQ ID NO: 163148 - DNA, 25 bp, Probe sequence
gatgtaaaaaatgacgaatctaccg

SEQ ID NO: 163149 - DNA, 25 bp, Probe sequence
gtatctttagaggaatcattagatt

SEQ ID NO: 163150 - DNA, 25 bp, Probe sequence
gtatgaaactatcagcagcttgtga

SEQ ID NO: 163151 - DNA, 25 bp, Probe sequence
gtgacacaactttaaaaaatgccga

SEQ ID NO: 163152 - DNA, 25 bp, Probe sequence
gtggtatgaaactatcagcagcttg

SEQ ID NO: 163153 - DNA, 25 bp, Probe sequence
ggtatgaaactatcagcagcttgtg

SEQ ID NO: 163154 - DNA, 25 bp, Probe sequence
tggtatgaaactatcagcagcttgt

SEQ ID NO: 163155 - DNA, 25 bp, Probe sequence
tgacacaactttaaaaaatgccgaa

SEQ ID NO: 163156 - DNA, 25 bp, Probe sequence
tgaaactatcagcagcttgtgacac

SEQ ID NO: 163157 - DNA, 25 bp, Probe sequence
tcagcagcttgtgacacaactttaa

SEQ ID NO: 163158 - DNA, 25 bp, Probe sequence
tatgaaactatcagcagcttgtgac

SEQ ID NO: 163159 - DNA, 25 bp, Probe sequence
tatcagcagcttgtgacacaacttt

SEQ ID NO: 163160 - DNA, 25 bp, Probe sequence
agtcgttttccattagctgaacaaa

SEQ ID NO: 163161 - DNA, 25 bp, Probe sequence
agagacatcgattaatgctgttgca

SEQ ID NO: 163162 - DNA, 25 bp, Probe sequence
agcgttataagtgccatgatgttca

SEQ ID NO: 163163 - DNA, 25 bp, Probe sequence
acaccagaccaatatgaattgctgc

SEQ ID NO: 163164 - DNA, 25 bp, Probe sequence
aaattgcagttttaacagcgagtac

SEQ ID NO: 163165 - DNA, 25 bp, Probe sequence
aaagcattcaagtggtcatttatac

SEQ ID NO: 163166 - DNA, 25 bp, Probe sequence
aagacgaagtcattacgagtactaa

SEQ ID NO: 163167 - DNA, 25 bp, Probe sequence
aatcttcaattgacaaaccaacttg

SEQ ID NO: 163168 - DNA, 25 bp, Probe sequence
caaccaactttattgtatgatcaac

SEQ ID NO: 163169 - DNA, 25 bp, Probe sequence
cagcgagtacaggtgccgcaattcg

SEQ ID NO: 163170 - DNA, 25 bp, Probe sequence
cattaagtgattttgctgcagacat

SEQ ID NO: 163171 - DNA, 25 bp, Probe sequence
ccacatctccaatctgtattgatta

SEQ ID NO: 163172 - DNA, 25 bp, Probe sequence
gctgtcgtccgtgcaatatataatt

SEQ ID NO: 163173 - DNA, 25 bp, Probe sequence
gctgctgttattgcaacaccagacc

SEQ ID NO: 163174 - DNA, 25 bp, Probe sequence
gcagacatcagagctgcgactccaa

SEQ ID NO: 163175 - DNA, 25 bp, Probe sequence
gcaacttttgaacaacagagacatc

SEQ ID NO: 163176 - DNA, 25 bp, Probe sequence
gaagaagctgtcgtccgtgcaatat

SEQ ID NO: 163177 - DNA, 25 bp, Probe sequence
gaagcacgtgtttctgtttttgaac

SEQ ID NO: 163178 - DNA, 25 bp, Probe sequence
gaacgtcgtggaaactatcaaattt

SEQ ID NO: 163179 - DNA, 25 bp, Probe sequence
gaaacaacaaattcaggcaactttt

SEQ ID NO: 163180 - DNA, 25 bp, Probe sequence
gactccaactcaagctgctgttatt

SEQ ID NO: 163181 - DNA, 25 bp, Probe sequence
gatgttcaaaggtagtgcttctaaa

SEQ ID NO: 163182 - DNA, 25 bp, Probe sequence
gatgaagtcttattagaagcacgtg

SEQ ID NO: 163183 - DNA, 25 bp, Probe sequence
gataaatagtcgttttccattagct

SEQ ID NO: 163184 - DNA, 25 bp, Probe sequence
gttgaacatttgtcatcgtattaca

SEQ ID NO: 163185 - DNA, 25 bp, Probe sequence
gtaagacaccgattatatcagcagt

SEQ ID NO: 163186 - DNA, 25 bp, Probe sequence
gtcagattatttaagtgtttcagct

SEQ ID NO: 163187 - DNA, 25 bp, Probe sequence
gtgccgcaattcgagatatccattc

SEQ ID NO: 163188 - DNA, 25 bp, Probe sequence
gtccaactaatacaatgttgcgtgg

SEQ ID NO: 163189 - DNA, 25 bp, Probe sequence
gtgtttctgtttttgaacgtcgtgg

SEQ ID NO: 163190 - DNA, 25 bp, Probe sequence
ggtcatgaaacagactttacattaa

SEQ ID NO: 163191 - DNA, 25 bp, Probe sequence
tgcttctaaattaaacttcgaacct

SEQ ID NO: 163192 - DNA, 25 bp, Probe sequence
tcagtttacattgactcgtttcatc

SEQ ID NO: 163193 - DNA, 25 bp, Probe sequence
tagataccattattgtaggtcgagg

SEQ ID NO: 163194 - DNA, 25 bp, Probe sequence
cccgagtgcaagcttttcaaacttt

SEQ ID NO: 163195 - DNA, 25 bp, Probe sequence
atattacacagtgatacacctgcta

SEQ ID NO: 163196 - DNA, 25 bp, Probe sequence
atcacgaacctgtattagacgagac

SEQ ID NO: 163197 - DNA, 25 bp, Probe sequence
atcccgagtgcaagcttttcaaact

SEQ ID NO: 163198 - DNA, 25 bp, Probe sequence
atgaaggacagtgatttaacgataa

SEQ ID NO: 163199 - DNA, 25 bp, Probe sequence
atggcaacatatgaaatattacaca

SEQ ID NO: 163200 - DNA, 25 bp, Probe sequence
acacctgctaaagtcgtaatgaatg

SEQ ID NO: 163201 - DNA, 25 bp, Probe sequence
aaaagattggactattgcacgttta

SEQ ID NO: 163202 - DNA, 25 bp, Probe sequence
aacggatcgtattattttaagaatg

SEQ ID NO: 163203 - DNA, 25 bp, Probe sequence
aagaatcccgagtgcaagcttttca

SEQ ID NO: 163204 - DNA, 25 bp, Probe sequence
aagacgataatccagatttagactt

SEQ ID NO: 163205 - DNA, 25 bp, Probe sequence
aagtcgtaatgaatgaagcagttga

SEQ ID NO: 163206 - DNA, 25 bp, Probe sequence
cagtgatacacctgctaaagtcgta

SEQ ID NO: 163207 - DNA, 25 bp, Probe sequence
cattggctagtttctggcgttaaag

SEQ ID NO: 163208 - DNA, 25 bp, Probe sequence
ctggcgttaaagatcacgaacctgt

SEQ ID NO: 163209 - DNA, 25 bp, Probe sequence
gcttttcaaactttatttcaattag

SEQ ID NO: 163210 - DNA, 25 bp, Probe sequence
gcaagcttttcaaactttatttcaa

SEQ ID NO: 163211 - DNA, 25 bp, Probe sequence
gaatttattcattggctagtttctg

SEQ ID NO: 163212 - DNA, 25 bp, Probe sequence
gaatcccgagtgcaagcttttcaaa

SEQ ID NO: 163213 - DNA, 25 bp, Probe sequence
gaagcagttgaattaacaaaacaat

SEQ ID NO: 163214 - DNA, 25 bp, Probe sequence
gaacctgtattagacgagacaatta

SEQ ID NO: 163215 - DNA, 25 bp, Probe sequence
gagtgcaagcttttcaaactttatt

SEQ ID NO: 163216 - DNA, 25 bp, Probe sequence
gatacacctgctaaagtcgtaatga

SEQ ID NO: 163217 - DNA, 25 bp, Probe sequence
gattggactattgcacgtttattaa

SEQ ID NO: 163218 - DNA, 25 bp, Probe sequence
gtttctggcgttaaagatcacgaac

SEQ ID NO: 163219 - DNA, 25 bp, Probe sequence
gtattattttaagaatggcaacata

SEQ ID NO: 163220 - DNA, 25 bp, Probe sequence
ggctagtttctggcgttaaagatca

SEQ ID NO: 163221 - DNA, 25 bp, Probe sequence
tggactattgcacgtttattaaaaa

SEQ ID NO: 163222 - DNA, 25 bp, Probe sequence
tgtattagacgagacaattagtcct

SEQ ID NO: 163223 - DNA, 25 bp, Probe sequence
tgagtcgtaaagaatcccgagtgca

SEQ ID NO: 163224 - DNA, 25 bp, Probe sequence
taaagatcacgaacctgtattagac

SEQ ID NO: 163225 - DNA, 25 bp, Probe sequence
tacacagtgatacacctgctaaagt

SEQ ID NO: 163226 - DNA, 25 bp, Probe sequence
tattcattggctagtttctggcgtt

SEQ ID NO: 163227 - DNA, 25 bp, Probe sequence
ttcattggctagtttctggcgttaa

SEQ ID NO: 163228 - DNA, 25 bp, Probe sequence
attcaatttctaatatgacagcgat

SEQ ID NO: 163229 - DNA, 25 bp, Probe sequence
atagatgtatattgtgcattaaaac

SEQ ID NO: 163230 - DNA, 25 bp, Probe sequence
atctgttattgcaagtatagctact

SEQ ID NO: 163231 - DNA, 25 bp, Probe sequence
atggtcaaagtaactgattattcaa

SEQ ID NO: 163232 - DNA, 25 bp, Probe sequence
agtgctatctgttattgcaagtata

SEQ ID NO: 163233 - DNA, 25 bp, Probe sequence
agaagtgctatctgttattgcaagt

SEQ ID NO: 163234 - DNA, 25 bp, Probe sequence
aagccgtgatttaaaaatcgagagt

SEQ ID NO: 163235 - DNA, 25 bp, Probe sequence
aagtcgaaggcatcactggccattt

SEQ ID NO: 163236 - DNA, 25 bp, Probe sequence
aatatgacagcgatagaacctaagc

SEQ ID NO: 163237 - DNA, 25 bp, Probe sequence
aatattcacattacacaaatcgtta

SEQ ID NO: 163238 - DNA, 25 bp, Probe sequence
catcactggccattttgctgaatta

SEQ ID NO: 163239 - DNA, 25 bp, Probe sequence
ctggccattttgctgaattaaaaga

SEQ ID NO: 163240 - DNA, 25 bp, Probe sequence
cgaaggcatcactggccattttgct

SEQ ID NO: 163241 - DNA, 25 bp, Probe sequence
gcgccagaagtgctatctgttattg

SEQ ID NO: 163242 - DNA, 25 bp, Probe sequence
gcatcactggccattttgctgaatt

SEQ ID NO: 163243 - DNA, 25 bp, Probe sequence
gcaagtatagctacttcggaagtcg

SEQ ID NO: 163244 - DNA, 25 bp, Probe sequence
gaacctaagcaaattaatattcaca

SEQ ID NO: 163245 - DNA, 25 bp, Probe sequence
gaaatagcgccagaagtgctatctg

SEQ ID NO: 163246 - DNA, 25 bp, Probe sequence
gacagcgatagaacctaagcaaatt

SEQ ID NO: 163247 - DNA, 25 bp, Probe sequence
gtaaagtagaaatagcgccagaagt

SEQ ID NO: 163248 - DNA, 25 bp, Probe sequence
gtaactgattattcaaattcaaaat

SEQ ID NO: 163249 - DNA, 25 bp, Probe sequence
gtcaatttttaattcaatttctaat

SEQ ID NO: 163250 - DNA, 25 bp, Probe sequence
gtcgaaggcatcactggccattttg

SEQ ID NO: 163251 - DNA, 25 bp, Probe sequence
ggtgttaatatttcaaaaactgcaa

SEQ ID NO: 163252 - DNA, 25 bp, Probe sequence
ggaagtcgaaggcatcactggccat

SEQ ID NO: 163253 - DNA, 25 bp, Probe sequence
tcgagagtaaagaagatggcatata

SEQ ID NO: 163254 - DNA, 25 bp, Probe sequence
tcactggccattttgctgaattaaa

SEQ ID NO: 163255 - DNA, 25 bp, Probe sequence
tcacattacacaaatcgttattgaa

SEQ ID NO: 163256 - DNA, 25 bp, Probe sequence
tagcgccagaagtgctatctgttat

SEQ ID NO: 163257 - DNA, 25 bp, Probe sequence
tagtcgtaaaaatttaagccgtgat

SEQ ID NO: 163258 - DNA, 25 bp, Probe sequence
tattgtgcattaaaacatggtgtta

SEQ ID NO: 163259 - DNA, 25 bp, Probe sequence
ttcaaacgtcaatttttaattcaat

SEQ ID NO: 163260 - DNA, 25 bp, Probe sequence
ttcaaaaactgcaaacaaaattcaa

SEQ ID NO: 163261 - DNA, 25 bp, Probe sequence
ttcggaagtcgaaggcatcactggc

SEQ ID NO: 163262 - DNA, 25 bp, Probe sequence
agaacttgaaactggcttccgaatg

SEQ ID NO: 163263 - DNA, 25 bp, Probe sequence
agtggaagaagcaccttccccaatt

SEQ ID NO: 163264 - DNA, 25 bp, Probe sequence
atattccgaacatcttatctattgc

SEQ ID NO: 163265 - DNA, 25 bp, Probe sequence
atccggtcatcattaaagctactgc

SEQ ID NO: 163266 - DNA, 25 bp, Probe sequence
agaactttatgccatcaccaggtaa

SEQ ID NO: 163267 - DNA, 25 bp, Probe sequence
agcgattatggctggcattcgtgca

SEQ ID NO: 163268 - DNA, 25 bp, Probe sequence
actggcttccgaatgacagaacaag

SEQ ID NO: 163269 - DNA, 25 bp, Probe sequence
actgttgcaatctattctgaagggg

SEQ ID NO: 163270 - DNA, 25 bp, Probe sequence
acatcttatctattgcaacttctac

SEQ ID NO: 163271 - DNA, 25 bp, Probe sequence
aaagccaatgttccagttgttcctg

SEQ ID NO: 163272 - DNA, 25 bp, Probe sequence
aacttccgccatattgaaatccaaa

SEQ ID NO: 163273 - DNA, 25 bp, Probe sequence
aacttctacaggttgtgatggcgtt

SEQ ID NO: 163274 - DNA, 25 bp, Probe sequence
aatgctgaaaatccttacaagaact

SEQ ID NO: 163275 - DNA, 25 bp, Probe sequence
catccgggttatggctttttagctg

SEQ ID NO: 163276 - DNA, 25 bp, Probe sequence
gcgaagcatgccaattgaagttcat

SEQ ID NO: 163277 - DNA, 25 bp, Probe sequence
gcagttaggattattcgcgcttgtc

SEQ ID NO: 163278 - DNA, 25 bp, Probe sequence
gcaccttccccaattttagatgatg

SEQ ID NO: 163279 - DNA, 25 bp, Probe sequence
gaaccgacacgagatgaagcgatta

SEQ ID NO: 163280 - DNA, 25 bp, Probe sequence
gaaattcatcgaaaacttccgccat

SEQ ID NO: 163281 - DNA, 25 bp, Probe sequence
gagcaatatcttgcaccaggtggat

SEQ ID NO: 163282 - DNA, 25 bp, Probe sequence
gaccaagttatcaatctatccaaaa

SEQ ID NO: 163283 - DNA, 25 bp, Probe sequence
gatgcgctacatactcaaattgctg

SEQ ID NO: 163284 - DNA, 25 bp, Probe sequence
gatacaactattccattccatatta

SEQ ID NO: 163285 - DNA, 25 bp, Probe sequence
gataccgccatattatgattcgatg

SEQ ID NO: 163286 - DNA, 25 bp, Probe sequence
gttgctatgggtgacgtgttaccgt

SEQ ID NO: 163287 - DNA, 25 bp, Probe sequence
gtaggtcccactttgtctaaagatt

SEQ ID NO: 163288 - DNA, 25 bp, Probe sequence
gtgaatttgtggttcttggtattga

SEQ ID NO: 163289 - DNA, 25 bp, Probe sequence
ggtgttcgaatagagtcagcatgtt

SEQ ID NO: 163290 - DNA, 25 bp, Probe sequence
tgatggcgttcatccgggttatggc

SEQ ID NO: 163291 - DNA, 25 bp, Probe sequence
tgaagcatattgcgtaggtcccact

SEQ ID NO: 163292 - DNA, 25 bp, Probe sequence
tcgcgcttgtcgtgatttaggcatc

SEQ ID NO: 163293 - DNA, 25 bp, Probe sequence
tcaagtagaacatcctgtaactgaa

SEQ ID NO: 163294 - DNA, 25 bp, Probe sequence
taggcatccaaactgttgcaatcta

SEQ ID NO: 163295 - DNA, 25 bp, Probe sequence
tatactaattatacgataccgccat

SEQ ID NO: 163296 - DNA, 25 bp, Probe sequence
atcacgccacaaatctcacaaatgc

SEQ ID NO: 163297 - DNA, 25 bp, Probe sequence
atcacaaaacaattaatgcacctat

SEQ ID NO: 163298 - DNA, 25 bp, Probe sequence
atgaaacaacagtgtgtattttaga

SEQ ID NO: 163299 - DNA, 25 bp, Probe sequence
agccaacttcagataatcacaaaac

SEQ ID NO: 163300 - DNA, 25 bp, Probe sequence
acaaatcgccatctccagacgaaga

SEQ ID NO: 163301 - DNA, 25 bp, Probe sequence
aaacaattaatgcacctatggtagg

SEQ ID NO: 163302 - DNA, 25 bp, Probe sequence
aaaactgaagctccaaagccaactt

SEQ ID NO: 163303 - DNA, 25 bp, Probe sequence
aagaaactgagattatcacgccaca

SEQ ID NO: 163304 - DNA, 25 bp, Probe sequence
aaggcaaagtgacgcttaagaaaga

SEQ ID NO: 163305 - DNA, 25 bp, Probe sequence
aatggtagagtatggccaaccgtta

SEQ ID NO: 163306 - DNA, 25 bp, Probe sequence
aatgcacctatggtaggtacatttt

SEQ ID NO: 163307 - DNA, 25 bp, Probe sequence
aatcgccatctccagacgaagaagc

SEQ ID NO: 163308 - DNA, 25 bp, Probe sequence
aatcaactttaacggaaatcaatat

SEQ ID NO: 163309 - DNA, 25 bp, Probe sequence
aattcaagcagaaatttcaggtgaa

SEQ ID NO: 163310 - DNA, 25 bp, Probe sequence
caaagccaacttcagataatcacaa

SEQ ID NO: 163311 - DNA, 25 bp, Probe sequence
cacgccacaaatctcacaaatgcca

SEQ ID NO: 163312 - DNA, 25 bp, Probe sequence
cattttacaaatcgccatctccaga

SEQ ID NO: 163313 - DNA, 25 bp, Probe sequence
gctccaaagccaacttcagataatc

SEQ ID NO: 163314 - DNA, 25 bp, Probe sequence
gcaagttggggacactgtttcaaat

SEQ ID NO: 163315 - DNA, 25 bp, Probe sequence
gagtatggccaaccgttatttaagg

SEQ ID NO: 163316 - DNA, 25 bp, Probe sequence
gaagctccaaagccaacttcagata

SEQ ID NO: 163317 - DNA, 25 bp, Probe sequence
gaaactgagattatcacgccacaaa

SEQ ID NO: 163318 - DNA, 25 bp, Probe sequence
gatactaaaggcaaagtgacgctta

SEQ ID NO: 163319 - DNA, 25 bp, Probe sequence
gttggggacactgtttcaaatgaaa

SEQ ID NO: 163320 - DNA, 25 bp, Probe sequence
gtagaagacggacaaatggtagagt

SEQ ID NO: 163321 - DNA, 25 bp, Probe sequence
gtagagtatggccaaccgttattta

SEQ ID NO: 163322 - DNA, 25 bp, Probe sequence
ggtacattttacaaatcgccatctc

SEQ ID NO: 163323 - DNA, 25 bp, Probe sequence
tgtgcaagttggggacactgtttca

SEQ ID NO: 163324 - DNA, 25 bp, Probe sequence
tgaaattctggataaatcaacttta

SEQ ID NO: 163325 - DNA, 25 bp, Probe sequence
tgaagctgcggcaatgcctatgcct

SEQ ID NO: 163326 - DNA, 25 bp, Probe sequence
tatggccaaccgttatttaaggtga

SEQ ID NO: 163327 - DNA, 25 bp, Probe sequence
ttttacaaatcgccatctccagacg

SEQ ID NO: 163328 - DNA, 25 bp, Probe sequence
ttatcacgccacaaatctcacaaat

SEQ ID NO: 163329 - DNA, 25 bp, Probe sequence
ttacaaatcgccatctccagacgaa

SEQ ID NO: 163330 - DNA, 25 bp, Probe sequence
atagatatattcgcaatggattggt

SEQ ID NO: 163331 - DNA, 25 bp, Probe sequence
ataaaacacgtctagctatcgcaaa

SEQ ID NO: 163332 - DNA, 25 bp, Probe sequence
ataagtcttctgaaaagcgtggcaa

SEQ ID NO: 163333 - DNA, 25 bp, Probe sequence
ataaccgtgaagaatttggacatta

SEQ ID NO: 163334 - DNA, 25 bp, Probe sequence
aggtcgtgatgatgcggttctttat

SEQ ID NO: 163335 - DNA, 25 bp, Probe sequence
agggcattatataagttatcctact

SEQ ID NO: 163336 - DNA, 25 bp, Probe sequence
agcgtgatatgagacaagcaggcaa

SEQ ID NO: 163337 - DNA, 25 bp, Probe sequence
acatattgcttgttaactattattg

SEQ ID NO: 163338 - DNA, 25 bp, Probe sequence
acacgtaaatccaatgtagtttgta

SEQ ID NO: 163339 - DNA, 25 bp, Probe sequence
aaagtaccatgtaagcacacaaaat

SEQ ID NO: 163340 - DNA, 25 bp, Probe sequence
aaagttgatgttaagcgtgatatga

SEQ ID NO: 163341 - DNA, 25 bp, Probe sequence
aaagcgtggcaaattagacgtaggg

SEQ ID NO: 163342 - DNA, 25 bp, Probe sequence
aactttcattaaaatggtctcctag

SEQ ID NO: 163343 - DNA, 25 bp, Probe sequence
aatcgcgtagtatttcagatgaaca

SEQ ID NO: 163344 - DNA, 25 bp, Probe sequence
ctcgtgttataaagtatcggctcaa

SEQ ID NO: 163345 - DNA, 25 bp, Probe sequence
gaacaagttgctaaacgtagacgtt

SEQ ID NO: 163346 - DNA, 25 bp, Probe sequence
gatactgtttggagtgttagaccat

SEQ ID NO: 163347 - DNA, 25 bp, Probe sequence
gatttctaagattttaggtcgtgat

SEQ ID NO: 163348 - DNA, 25 bp, Probe sequence
gttctgttgatggtgtttataatcc

SEQ ID NO: 163349 - DNA, 25 bp, Probe sequence
gttagaccatcaacatattgcttgt

SEQ ID NO: 163350 - DNA, 25 bp, Probe sequence
gtttataatcctttattagctgagg

SEQ ID NO: 163351 - DNA, 25 bp, Probe sequence
gtctagctatcgcaaagtatttaaa

SEQ ID NO: 163352 - DNA, 25 bp, Probe sequence
gtccatatcaacgtggttccattga

SEQ ID NO: 163353 - DNA, 25 bp, Probe sequence
gtgaacctatattaaatgactgtgt

SEQ ID NO: 163354 - DNA, 25 bp, Probe sequence
gtgatgatgcggttctttatagaga

SEQ ID NO: 163355 - DNA, 25 bp, Probe sequence
gggttgtccatatcaacgtggttcc

SEQ ID NO: 163356 - DNA, 25 bp, Probe sequence
ggtctcctagacagatagcaagtca

SEQ ID NO: 163357 - DNA, 25 bp, Probe sequence
ggtttaaacatcattcagatttcta

SEQ ID NO: 163358 - DNA, 25 bp, Probe sequence
ggacttttaagacagtattatccta

SEQ ID NO: 163359 - DNA, 25 bp, Probe sequence
ggaagatgctataaaatcgcgtagt

SEQ ID NO: 163360 - DNA, 25 bp, Probe sequence
tgtgaggcacgaacccgtcaattaa

SEQ ID NO: 163361 - DNA, 25 bp, Probe sequence
tgactgtgtgaggcacgaacccgtc

SEQ ID NO: 163362 - DNA, 25 bp, Probe sequence
tcctaaaggtacggattttgcaaat

SEQ ID NO: 163363 - DNA, 25 bp, Probe sequence
tattttagtgatttgggttgtccat

SEQ ID NO: 163364 - DNA, 25 bp, Probe sequence
attattaaaatcttcgactgaccat

SEQ ID NO: 163365 - DNA, 25 bp, Probe sequence
atatgattactgttgatggcgatac

SEQ ID NO: 163366 - DNA, 25 bp, Probe sequence
acgccaggtgcgtttaacgaggcaa

SEQ ID NO: 163367 - DNA, 25 bp, Probe sequence
atcagctatttttggcgaagatgcc

SEQ ID NO: 163368 - DNA, 25 bp, Probe sequence
atcttcgactgaccatacatttaat

SEQ ID NO: 163369 - DNA, 25 bp, Probe sequence
agcatgttgctgttgcttcaactgg

SEQ ID NO: 163370 - DNA, 25 bp, Probe sequence
acgaggcaattttaacaactgatac

SEQ ID NO: 163371 - DNA, 25 bp, Probe sequence
acatggcgatatcagtacacctcaa

SEQ ID NO: 163372 - DNA, 25 bp, Probe sequence
aaagctgcaccacttattgtcactg

SEQ ID NO: 163373 - DNA, 25 bp, Probe sequence
aacatgggttgctcaacaacttcaa

SEQ ID NO: 163374 - DNA, 25 bp, Probe sequence
aagaccatccacaatgggaaacatt

SEQ ID NO: 163375 - DNA, 25 bp, Probe sequence
cacatcggtttacgcgctaacaaaa

SEQ ID NO: 163376 - DNA, 25 bp, Probe sequence
caattttgtctgtacatttttagct

SEQ ID NO: 163377 - DNA, 25 bp, Probe sequence
caaataccatctgagcatgttgctg

SEQ ID NO: 163378 - DNA, 25 bp, Probe sequence
ctaattttgcaacgccaggtgcgtt

SEQ ID NO: 163379 - DNA, 25 bp, Probe sequence
gccagagatggcgaaggcgcaacaa

SEQ ID NO: 163380 - DNA, 25 bp, Probe sequence
gctgcaccacttattgtcactgaag

SEQ ID NO: 163381 - DNA, 25 bp, Probe sequence
gctcaacaacttcaaataccatctg

SEQ ID NO: 163382 - DNA, 25 bp, Probe sequence
gcagcgactgcatacggttgtgatt

SEQ ID NO: 163383 - DNA, 25 bp, Probe sequence
gcacttgttgttaattcagctaatg

SEQ ID NO: 163384 - DNA, 25 bp, Probe sequence
gaatcgaatacacttcatcaattat

SEQ ID NO: 163385 - DNA, 25 bp, Probe sequence
gaagatgccaattttggtcgaatca

SEQ ID NO: 163386 - DNA, 25 bp, Probe sequence
gaaacatcaagaaacgacatcacaa

SEQ ID NO: 163387 - DNA, 25 bp, Probe sequence
gatttatcctatgattatgtgcgta

SEQ ID NO: 163388 - DNA, 25 bp, Probe sequence
gttcaactgaaccaaatacctgtcg

SEQ ID NO: 163389 - DNA, 25 bp, Probe sequence
gtcactgaagacactttacaaaagt

SEQ ID NO: 163390 - DNA, 25 bp, Probe sequence
gtggtatgcacatcggtttacgcgc

SEQ ID NO: 163391 - DNA, 25 bp, Probe sequence
ggtaacgctgcagcgactgcatacg

SEQ ID NO: 163392 - DNA, 25 bp, Probe sequence
ggtcgaatcattacagctattggct

SEQ ID NO: 163393 - DNA, 25 bp, Probe sequence
ggtatggctgtactatttgatgagc

SEQ ID NO: 163394 - DNA, 25 bp, Probe sequence
tgcatacggttgtgatttatcctat

SEQ ID NO: 163395 - DNA, 25 bp, Probe sequence
tgcttgcttttataacaaccgatgc

SEQ ID NO: 163396 - DNA, 25 bp, Probe sequence
tcagtacacctcaaggcttcacggc

SEQ ID NO: 163397 - DNA, 25 bp, Probe sequence
tatggctaccatgcttgcttttata

SEQ ID NO: 163398 - DNA, 25 bp, Probe sequence
atatgataaagagattgatgcagtt

SEQ ID NO: 163399 - DNA, 25 bp, Probe sequence
ataactatttcttttgtttatgata

SEQ ID NO: 163400 - DNA, 25 bp, Probe sequence
atcaaagtaatcataaaccagttta

SEQ ID NO: 163401 - DNA, 25 bp, Probe sequence
atggtacagtgtggacaagtttata

SEQ ID NO: 163402 - DNA, 25 bp, Probe sequence
agtgagtcttcttttaagaagcctg

SEQ ID NO: 163403 - DNA, 25 bp, Probe sequence
agtatgagtgagtcttcttttaaga

SEQ ID NO: 163404 - DNA, 25 bp, Probe sequence
agatggtacagtgtggacaagttta

SEQ ID NO: 163405 - DNA, 25 bp, Probe sequence
actatttcttttgtttatgataaag

SEQ ID NO: 163406 - DNA, 25 bp, Probe sequence
aaagtatgagtgagtcttcttttaa

SEQ ID NO: 163407 - DNA, 25 bp, Probe sequence
aaagatggtacagtgtggacaagtt

SEQ ID NO: 163408 - DNA, 25 bp, Probe sequence
aagaatgagacaacagataaatatg

SEQ ID NO: 163409 - DNA, 25 bp, Probe sequence
aagatggtacagtgtggacaagttt

SEQ ID NO: 163410 - DNA, 25 bp, Probe sequence
aagtatgagtgagtcttcttttaag

SEQ ID NO: 163411 - DNA, 25 bp, Probe sequence
gaatatcaaagtaatcataaaccag

SEQ ID NO: 163412 - DNA, 25 bp, Probe sequence
gaaaaagtatgagtgagtcttcttt

SEQ ID NO: 163413 - DNA, 25 bp, Probe sequence
gagtcttcttttaagaagcctgaaa

SEQ ID NO: 163414 - DNA, 25 bp, Probe sequence
gagtgagtcttcttttaagaagcct

SEQ ID NO: 163415 - DNA, 25 bp, Probe sequence
gatggtacagtgtggacaagtttat

SEQ ID NO: 163416 - DNA, 25 bp, Probe sequence
gatggtaaatttataactatttctt

SEQ ID NO: 163417 - DNA, 25 bp, Probe sequence
gataaagagattgatgcagttttaa

SEQ ID NO: 163418 - DNA, 25 bp, Probe sequence
gataaagatggtacagtgtggacaa

SEQ ID NO: 163419 - DNA, 25 bp, Probe sequence
gtatgagtgagtcttcttttaagaa

SEQ ID NO: 163420 - DNA, 25 bp, Probe sequence
gtacagtgtggacaagtttatataa

SEQ ID NO: 163421 - DNA, 25 bp, Probe sequence
gtgagtcttcttttaagaagcctga

SEQ ID NO: 163422 - DNA, 25 bp, Probe sequence
ggtacagtgtggacaagtttatata

SEQ ID NO: 163423 - DNA, 25 bp, Probe sequence
tggtacagtgtggacaagtttatat

SEQ ID NO: 163424 - DNA, 25 bp, Probe sequence
tgataaagatggtacagtgtggaca

SEQ ID NO: 163425 - DNA, 25 bp, Probe sequence
tcaaagtaatcataaaccagtttat

SEQ ID NO: 163426 - DNA, 25 bp, Probe sequence
taactatttcttttgtttatgataa

SEQ ID NO: 163427 - DNA, 25 bp, Probe sequence
tacagtgtggacaagtttatataaa

SEQ ID NO: 163428 - DNA, 25 bp, Probe sequence
tatgagtgagtcttcttttaagaag

SEQ ID NO: 163429 - DNA, 25 bp, Probe sequence
tataactatttcttttgtttatgat

SEQ ID NO: 163430 - DNA, 25 bp, Probe sequence
tttataactatttcttttgtttatg

SEQ ID NO: 163431 - DNA, 25 bp, Probe sequence
ttataactatttcttttgtttatga

SEQ ID NO: 163432 - DNA, 25 bp, Probe sequence
attggttatcagattcctaaacaac

SEQ ID NO: 163433 - DNA, 25 bp, Probe sequence
attcatgtttattttgatacttatg

SEQ ID NO: 163434 - DNA, 25 bp, Probe sequence
atacgtgaagtttcttcaaattttg

SEQ ID NO: 163435 - DNA, 25 bp, Probe sequence
atcgtcaaacatctgcacaattgga

SEQ ID NO: 163436 - DNA, 25 bp, Probe sequence
agttcgtacagctgaaggttggcgt

SEQ ID NO: 163437 - DNA, 25 bp, Probe sequence
agttacaaaggattattacgataca

SEQ ID NO: 163438 - DNA, 25 bp, Probe sequence
acgatacattatttaaggattctaa

SEQ ID NO: 163439 - DNA, 25 bp, Probe sequence
acatctgcacaattggatttagttc

SEQ ID NO: 163440 - DNA, 25 bp, Probe sequence
acagctgaaggttggcgtattgata

SEQ ID NO: 163441 - DNA, 25 bp, Probe sequence
aacatcgtcaaacatctgcacaatt

SEQ ID NO: 163442 - DNA, 25 bp, Probe sequence
aagcaccacaaataaagcctttagt

SEQ ID NO: 163443 - DNA, 25 bp, Probe sequence
aattggatttagttcgtacagctga

SEQ ID NO: 163444 - DNA, 25 bp, Probe sequence
caaaaacagttatttctgatgaaga

SEQ ID NO: 163445 - DNA, 25 bp, Probe sequence
cagttcgacgaacgtattgaaacag

SEQ ID NO: 163446 - DNA, 25 bp, Probe sequence
cgtacagctgaaggttggcgtattg

SEQ ID NO: 163447 - DNA, 25 bp, Probe sequence
gctgaaggttggcgtattgataatt

SEQ ID NO: 163448 - DNA, 25 bp, Probe sequence
gaaggttggcgtattgataatttaa

SEQ ID NO: 163449 - DNA, 25 bp, Probe sequence
gacgaacgtattgaaacagatggag

SEQ ID NO: 163450 - DNA, 25 bp, Probe sequence
gagacaatcaaaaacagttatttct

SEQ ID NO: 163451 - DNA, 25 bp, Probe sequence
gatataacggttaatgatattcatg

SEQ ID NO: 163452 - DNA, 25 bp, Probe sequence
gatattcatgtttattttgatactt

SEQ ID NO: 163453 - DNA, 25 bp, Probe sequence
gattcttcttttaaatcaaaagcac

SEQ ID NO: 163454 - DNA, 25 bp, Probe sequence
gttttaattggttatcagattccta

SEQ ID NO: 163455 - DNA, 25 bp, Probe sequence
gtaacagtaatattattttgtgctg

SEQ ID NO: 163456 - DNA, 25 bp, Probe sequence
gtaatattattttgtgctgttttaa

SEQ ID NO: 163457 - DNA, 25 bp, Probe sequence
gtcaaacatctgcacaattggattt

SEQ ID NO: 163458 - DNA, 25 bp, Probe sequence
ggatttagttcgtacagctgaaggt

SEQ ID NO: 163459 - DNA, 25 bp, Probe sequence
ggaagaacaacgtatattaagagat

SEQ ID NO: 163460 - DNA, 25 bp, Probe sequence
tgaacatcgtcaaacatctgcacaa

SEQ ID NO: 163461 - DNA, 25 bp, Probe sequence
tgcacaattggatttagttcgtaca

SEQ ID NO: 163462 - DNA, 25 bp, Probe sequence
tataaagtttttgttcagttcgacg

SEQ ID NO: 163463 - DNA, 25 bp, Probe sequence
tatcagattcctaaacaacaagtta

SEQ ID NO: 163464 - DNA, 25 bp, Probe sequence
tattatgtttactcttgtaacagta

SEQ ID NO: 163465 - DNA, 25 bp, Probe sequence
ttttgtgctgttttaattggttatc

SEQ ID NO: 163466 - DNA, 25 bp, Probe sequence
attggcatgatgcacataaatggaa

SEQ ID NO: 163467 - DNA, 25 bp, Probe sequence
atatgcgcctgttggtgcgtcaaat

SEQ ID NO: 163468 - DNA, 25 bp, Probe sequence
atttccagtaattgtaatgtttttg

SEQ ID NO: 163469 - DNA, 25 bp, Probe sequence
atatgaatgcccgttggataccaac

SEQ ID NO: 163470 - DNA, 25 bp, Probe sequence
ataaaaatccggaacctggtgcatt

SEQ ID NO: 163471 - DNA, 25 bp, Probe sequence
atcatcattttgtgtgtggtggctt

SEQ ID NO: 163472 - DNA, 25 bp, Probe sequence
atgcccgttggataccaacagttga

SEQ ID NO: 163473 - DNA, 25 bp, Probe sequence
agcgaaagtcatcatcattttgtgt

SEQ ID NO: 163474 - DNA, 25 bp, Probe sequence
aagtacctgtgaatatttttatggc

SEQ ID NO: 163475 - DNA, 25 bp, Probe sequence
aataggtcccaaatatgcgcctgtt

SEQ ID NO: 163476 - DNA, 25 bp, Probe sequence
gaacctggtgcattatttattgctg

SEQ ID NO: 163477 - DNA, 25 bp, Probe sequence
gaaagatttaggcggttcagaagct

SEQ ID NO: 163478 - DNA, 25 bp, Probe sequence
gaaatgaattgggaaggtgctttta

SEQ ID NO: 163479 - DNA, 25 bp, Probe sequence
gaccctaataatatgaatgcccgtt

SEQ ID NO: 163480 - DNA, 25 bp, Probe sequence
gagtgaatcacaatggggtaaagga

SEQ ID NO: 163481 - DNA, 25 bp, Probe sequence
gatgggcattatggtcatgtggctg

SEQ ID NO: 163482 - DNA, 25 bp, Probe sequence
gattcatgattcaacatatccaact

SEQ ID NO: 163483 - DNA, 25 bp, Probe sequence
gttggtgcgtcaaatgaccctaata

SEQ ID NO: 163484 - DNA, 25 bp, Probe sequence
gttagtggcggtaatgtttcggcaa

SEQ ID NO: 163485 - DNA, 25 bp, Probe sequence
gtaataggtaaaacgccaataggtg

SEQ ID NO: 163486 - DNA, 25 bp, Probe sequence
gtcaaatgatgaccctggaaaaggt

SEQ ID NO: 163487 - DNA, 25 bp, Probe sequence
gtcatgtggctgttgttattggtgt

SEQ ID NO: 163488 - DNA, 25 bp, Probe sequence
gtggtggctttttttacatttccag

SEQ ID NO: 163489 - DNA, 25 bp, Probe sequence
ggtgcaggcggtcatgatgggcatt

SEQ ID NO: 163490 - DNA, 25 bp, Probe sequence
ggtcttaatgcgggagctaaaaatt

SEQ ID NO: 163491 - DNA, 25 bp, Probe sequence
ggtaaattgccacattggtcaaatg

SEQ ID NO: 163492 - DNA, 25 bp, Probe sequence
ggcggttcagaagctaaaacgtcat

SEQ ID NO: 163493 - DNA, 25 bp, Probe sequence
ggcggtaatgtttcggcaaatggta

SEQ ID NO: 163494 - DNA, 25 bp, Probe sequence
tgtacttggtatgcatacggtatgc

SEQ ID NO: 163495 - DNA, 25 bp, Probe sequence
tgatgctggttgtactgttagtggc

SEQ ID NO: 163496 - DNA, 25 bp, Probe sequence
tgctgaacaaggtgcaggcggtcat

SEQ ID NO: 163497 - DNA, 25 bp, Probe sequence
taatcctttgtctgttatgggttca

SEQ ID NO: 163498 - DNA, 25 bp, Probe sequence
tatgggttcaaaatcgattcatgat

SEQ ID NO: 163499 - DNA, 25 bp, Probe sequence
tattggtgtaagtgatggtggtaaa

SEQ ID NO: 163500 - DNA, 25 bp, Probe sequence
attacacgtaattctcagtcaaaag

SEQ ID NO: 163501 - DNA, 25 bp, Probe sequence
aggcgactggaatccgtttggtcaa

SEQ ID NO: 163502 - DNA, 25 bp, Probe sequence
agttgattttttctacatttgcttt

SEQ ID NO: 163503 - DNA, 25 bp, Probe sequence
aaatcaaagagatgaacccgcccca

SEQ ID NO: 163504 - DNA, 25 bp, Probe sequence
acatctgtgagtgcttacgctgttt

SEQ ID NO: 163505 - DNA, 25 bp, Probe sequence
aacaaccacaaaaagcatcacagca

SEQ ID NO: 163506 - DNA, 25 bp, Probe sequence
aactgcttatgatactgatgttcaa

SEQ ID NO: 163507 - DNA, 25 bp, Probe sequence
aagattcgtcatgaacaagcgcaaa

SEQ ID NO: 163508 - DNA, 25 bp, Probe sequence
aagtgcctgtatgacattcttattt

SEQ ID NO: 163509 - DNA, 25 bp, Probe sequence
aatccagttggagagccctcacatg

SEQ ID NO: 163510 - DNA, 25 bp, Probe sequence
aatctggaaatcgtaatcaacctat

SEQ ID NO: 163511 - DNA, 25 bp, Probe sequence
caggtgttacagattatgcgattga

SEQ ID NO: 163512 - DNA, 25 bp, Probe sequence
cggcgattttgttggcgatatatat

SEQ ID NO: 163513 - DNA, 25 bp, Probe sequence
cgccccaccacttcaaaatgataat

SEQ ID NO: 163514 - DNA, 25 bp, Probe sequence
gccacaagtggttaatcagccatta

SEQ ID NO: 163515 - DNA, 25 bp, Probe sequence
gcctattctgcttttaacatctgtg

SEQ ID NO: 163516 - DNA, 25 bp, Probe sequence
gctttttaattttgcctattctgct

SEQ ID NO: 163517 - DNA, 25 bp, Probe sequence
gcttacgctgtttctaatccagttg

SEQ ID NO: 163518 - DNA, 25 bp, Probe sequence
gaattatctgttttctctgcgtttg

SEQ ID NO: 163519 - DNA, 25 bp, Probe sequence
gacgcaaggttatgtatttcaaaag

SEQ ID NO: 163520 - DNA, 25 bp, Probe sequence
gatgtaaaatctgcttctgttgaat

SEQ ID NO: 163521 - DNA, 25 bp, Probe sequence
gatatacaaaggtcgccacaagtgg

SEQ ID NO: 163522 - DNA, 25 bp, Probe sequence
gatttatcacattatcgttcaatat

SEQ ID NO: 163523 - DNA, 25 bp, Probe sequence
gttggtttgtgtatcaagcttgcaa

SEQ ID NO: 163524 - DNA, 25 bp, Probe sequence
gtttttctcctagtgcaattggtgc

SEQ ID NO: 163525 - DNA, 25 bp, Probe sequence
gtgtcagattttttcttttctatga

SEQ ID NO: 163526 - DNA, 25 bp, Probe sequence
gtgtgtatcttttatgctttttaat

SEQ ID NO: 163527 - DNA, 25 bp, Probe sequence
ggtgttggtatacttgcgaatgcag

SEQ ID NO: 163528 - DNA, 25 bp, Probe sequence
tcgtggtaatattagtttttctcct

SEQ ID NO: 163529 - DNA, 25 bp, Probe sequence
tctgttttctctgcgtttgcaaaaa

SEQ ID NO: 163530 - DNA, 25 bp, Probe sequence
tctacatttgctttatttttattct

SEQ ID NO: 163531 - DNA, 25 bp, Probe sequence
tagtgagttttataccaggatttga

SEQ ID NO: 163532 - DNA, 25 bp, Probe sequence
ttggagagccctcacatgcagttaa

SEQ ID NO: 163533 - DNA, 25 bp, Probe sequence
ttggtgctggtgtgatgaatcgaac

SEQ ID NO: 163534 - DNA, 25 bp, Probe sequence
attgctattacgcatcaaattactt

SEQ ID NO: 163535 - DNA, 25 bp, Probe sequence
atcgctcagcttttaattcgtttta

SEQ ID NO: 163536 - DNA, 25 bp, Probe sequence
atgtttttaacagcacaaagaccag

SEQ ID NO: 163537 - DNA, 25 bp, Probe sequence
agacattcagaagtacgtttattag

SEQ ID NO: 163538 - DNA, 25 bp, Probe sequence
aaagcgtattgttatgaatggcgaa

SEQ ID NO: 163539 - DNA, 25 bp, Probe sequence
aaagcatattggtcgttatttgaga

SEQ ID NO: 163540 - DNA, 25 bp, Probe sequence
aaccgagtatatccctattgattat

SEQ ID NO: 163541 - DNA, 25 bp, Probe sequence
aaccgcatttattgtatttattaat

SEQ ID NO: 163542 - DNA, 25 bp, Probe sequence
aagcacctcatggattggttacagg

SEQ ID NO: 163543 - DNA, 25 bp, Probe sequence
caattagggttacgtgtgtctttag

SEQ ID NO: 163544 - DNA, 25 bp, Probe sequence
caaagaccagatgcagatgtgatta

SEQ ID NO: 163545 - DNA, 25 bp, Probe sequence
gcgtacgtatacagccttatcagaa

SEQ ID NO: 163546 - DNA, 25 bp, Probe sequence
gaatatgactattatccaacgatgt

SEQ ID NO: 163547 - DNA, 25 bp, Probe sequence
gaaccaattttatttgatgcacctt

SEQ ID NO: 163548 - DNA, 25 bp, Probe sequence
gaaaacaaccgagtatatccctatt

SEQ ID NO: 163549 - DNA, 25 bp, Probe sequence
gaaaggtcgtcaagctggtgtattt

SEQ ID NO: 163550 - DNA, 25 bp, Probe sequence
gacggttcgaggtttcaagataatt

SEQ ID NO: 163551 - DNA, 25 bp, Probe sequence
gatggttatcgtatgacctttggtc

SEQ ID NO: 163552 - DNA, 25 bp, Probe sequence
gatgcacctttaatggaacaatatg

SEQ ID NO: 163553 - DNA, 25 bp, Probe sequence
gttgtttgcatattttaaaccgcat

SEQ ID NO: 163554 - DNA, 25 bp, Probe sequence
gttatatgtaagcttatcgctcagc

SEQ ID NO: 163555 - DNA, 25 bp, Probe sequence
gtattagcatttatttttttggtat

SEQ ID NO: 163556 - DNA, 25 bp, Probe sequence
gtcaagctggtgtatttatgttttt

SEQ ID NO: 163557 - DNA, 25 bp, Probe sequence
gtgagttattccgtagacattcaga

SEQ ID NO: 163558 - DNA, 25 bp, Probe sequence
gtgattcgtgagttattccgtagac

SEQ ID NO: 163559 - DNA, 25 bp, Probe sequence
gtgtgtctttaggtaatttgtcaaa

SEQ ID NO: 163560 - DNA, 25 bp, Probe sequence
gggattttgtgaaagcacctcatgg

SEQ ID NO: 163561 - DNA, 25 bp, Probe sequence
tgaggtaacggcttttacttcaact

SEQ ID NO: 163562 - DNA, 25 bp, Probe sequence
tgagatatgaatttatgccacttaa

SEQ ID NO: 163563 - DNA, 25 bp, Probe sequence
tgaaccaatgtttaattctgaatta

SEQ ID NO: 163564 - DNA, 25 bp, Probe sequence
tgcgcccctatttcattatttttga

SEQ ID NO: 163565 - DNA, 25 bp, Probe sequence
tatgaagcgcgttattggtgatgat

SEQ ID NO: 163566 - DNA, 25 bp, Probe sequence
tttccgtaattttgatatgcgcccc

SEQ ID NO: 163567 - DNA, 25 bp, Probe sequence
ttgatatgcgcccctatttcattat

SEQ ID NO: 163568 - DNA, 25 bp, Probe sequence
attatggttgtctagaccctattgt

SEQ ID NO: 163569 - DNA, 25 bp, Probe sequence
attatcgtgttcgttctgagtctat

SEQ ID NO: 163570 - DNA, 25 bp, Probe sequence
ataatgcagtaattgaccctactcg

SEQ ID NO: 163571 - DNA, 25 bp, Probe sequence
agtgcttcggaagatgttcaagata

SEQ ID NO: 163572 - DNA, 25 bp, Probe sequence
agtgatttttatggacgtgttggaa

SEQ ID NO: 163573 - DNA, 25 bp, Probe sequence
agaagattctgcaagctctaaagct

SEQ ID NO: 163574 - DNA, 25 bp, Probe sequence
agctcaaaatatgccttttccggtt

SEQ ID NO: 163575 - DNA, 25 bp, Probe sequence
agcgtatgcgttattttttagagtc

SEQ ID NO: 163576 - DNA, 25 bp, Probe sequence
acggctgagcgtattgtttcgaatt

SEQ ID NO: 163577 - DNA, 25 bp, Probe sequence
actggcgaagtttgggcgtattatc

SEQ ID NO: 163578 - DNA, 25 bp, Probe sequence
aagtatcccctatttattaatcatt

SEQ ID NO: 163579 - DNA, 25 bp, Probe sequence
aatgcaacacatgacgtacaggaag

SEQ ID NO: 163580 - DNA, 25 bp, Probe sequence
caagctatttctgatacggttgaag

SEQ ID NO: 163581 - DNA, 25 bp, Probe sequence
cgttctgtttcacgtgaggaagctg

SEQ ID NO: 163582 - DNA, 25 bp, Probe sequence
gctgtcagtgatagtccgcatgttt

SEQ ID NO: 163583 - DNA, 25 bp, Probe sequence
gcagttaatccattagctgaccagt

SEQ ID NO: 163584 - DNA, 25 bp, Probe sequence
gaaattcggttctcgtagagatgtt

SEQ ID NO: 163585 - DNA, 25 bp, Probe sequence
gagaagtgactggctcaggtgtatt

SEQ ID NO: 163586 - DNA, 25 bp, Probe sequence
gagatttggctgatagttttctagg

SEQ ID NO: 163587 - DNA, 25 bp, Probe sequence
gagtttgcagaatggtttgacagag

SEQ ID NO: 163588 - DNA, 25 bp, Probe sequence
gagggttgggcttttagtgcttcaa

SEQ ID NO: 163589 - DNA, 25 bp, Probe sequence
gaggaagctgttgcaagttcaaggg

SEQ ID NO: 163590 - DNA, 25 bp, Probe sequence
gttgttgatgattttccgttagata

SEQ ID NO: 163591 - DNA, 25 bp, Probe sequence
gtttcgaattttggttttgatgtga

SEQ ID NO: 163592 - DNA, 25 bp, Probe sequence
gtaactttggttgtcattttgcatt

SEQ ID NO: 163593 - DNA, 25 bp, Probe sequence
gtccgcatgttttaattactggtca

SEQ ID NO: 163594 - DNA, 25 bp, Probe sequence
gggcgtattatcgtgttcgttctga

SEQ ID NO: 163595 - DNA, 25 bp, Probe sequence
ggtgtgtctcaaagtttgggaacaa

SEQ ID NO: 163596 - DNA, 25 bp, Probe sequence
ggtcaaatgttgtactgggatccaa

SEQ ID NO: 163597 - DNA, 25 bp, Probe sequence
ggttgtacattgtccatttgaggaa

SEQ ID NO: 163598 - DNA, 25 bp, Probe sequence
taaaagcaccgtatgcaggtttaag

SEQ ID NO: 163599 - DNA, 25 bp, Probe sequence
tagctgaccagttacaattgtttta

SEQ ID NO: 163600 - DNA, 25 bp, Probe sequence
tagtttattgttggccgcaaaaggt

SEQ ID NO: 163601 - DNA, 25 bp, Probe sequence
ttagctgacgatgcagttacactta

SEQ ID NO: 163602 - DNA, 25 bp, Probe sequence
attggtggacttatgtttatttact

SEQ ID NO: 163603 - DNA, 25 bp, Probe sequence
atttttgggctacatttttgattgt

SEQ ID NO: 163604 - DNA, 25 bp, Probe sequence
agatttttgggctacatttttgatt

SEQ ID NO: 163605 - DNA, 25 bp, Probe sequence
aaattaagttatgatgaagaagtag

SEQ ID NO: 163606 - DNA, 25 bp, Probe sequence
cttcttatgggattttgtaatattt

SEQ ID NO: 163607 - DNA, 25 bp, Probe sequence
cttatgggattttgtaatatttgtt

SEQ ID NO: 163608 - DNA, 25 bp, Probe sequence
gaaattatttttcttcttatgggat

SEQ ID NO: 163609 - DNA, 25 bp, Probe sequence
gatttttgggctacatttttgattg

SEQ ID NO: 163610 - DNA, 25 bp, Probe sequence
gttattttggtatttattacagcct

SEQ ID NO: 163611 - DNA, 25 bp, Probe sequence
tggacttatgtttatttactttacg

SEQ ID NO: 163612 - DNA, 25 bp, Probe sequence
tggtggacttatgtttatttacttt

SEQ ID NO: 163613 - DNA, 25 bp, Probe sequence
tgttattttggtatttattacagcc

SEQ ID NO: 163614 - DNA, 25 bp, Probe sequence
tcgtttagatttttgggctacattt

SEQ ID NO: 163615 - DNA, 25 bp, Probe sequence
tcttcttatgggattttgtaatatt

SEQ ID NO: 163616 - DNA, 25 bp, Probe sequence
tcttatgggattttgtaatatttgt

SEQ ID NO: 163617 - DNA, 25 bp, Probe sequence
taaattaagttatgatgaagaagta

SEQ ID NO: 163618 - DNA, 25 bp, Probe sequence
tagatttttgggctacatttttgat

SEQ ID NO: 163619 - DNA, 25 bp, Probe sequence
tatttttcttcttatgggattttgt

SEQ ID NO: 163620 - DNA, 25 bp, Probe sequence
tattttggtatttattacagcctgt

SEQ ID NO: 163621 - DNA, 25 bp, Probe sequence
tttgttattttggtatttattacag

SEQ ID NO: 163622 - DNA, 25 bp, Probe sequence
tttcttcttatgggattttgtaata

SEQ ID NO: 163623 - DNA, 25 bp, Probe sequence
tttcgtttagatttttgggctacat

SEQ ID NO: 163624 - DNA, 25 bp, Probe sequence
tttagatttttgggctacatttttg

SEQ ID NO: 163625 - DNA, 25 bp, Probe sequence
ttttcttcttatgggattttgtaat

SEQ ID NO: 163626 - DNA, 25 bp, Probe sequence
ttattttggtatttattacagcctg

SEQ ID NO: 163627 - DNA, 25 bp, Probe sequence
ttatttttcttcttatgggattttg

SEQ ID NO: 163628 - DNA, 25 bp, Probe sequence
ttatgggattttgtaatatttgttt

SEQ ID NO: 163629 - DNA, 25 bp, Probe sequence
ttagatttttgggctacatttttga

SEQ ID NO: 163630 - DNA, 25 bp, Probe sequence
ttcttatgggattttgtaatatttg

SEQ ID NO: 163631 - DNA, 25 bp, Probe sequence
ttcttcttatgggattttgtaatat

SEQ ID NO: 163632 - DNA, 25 bp, Probe sequence
ttcgtttagatttttgggctacatt

SEQ ID NO: 163633 - DNA, 25 bp, Probe sequence
ttggtggacttatgtttatttactt

SEQ ID NO: 163634 - DNA, 25 bp, Probe sequence
ttgttattttggtatttattacagc

SEQ ID NO: 163635 - DNA, 25 bp, Probe sequence
atgggcatatggttatattatttgt

SEQ ID NO: 163636 - DNA, 25 bp, Probe sequence
aatgggctagtggtaaatatgggca

SEQ ID NO: 163637 - DNA, 25 bp, Probe sequence
aatgcgattgcaggtgtttggaaaa

SEQ ID NO: 163638 - DNA, 25 bp, Probe sequence
cacttggtggagttggtgactggat

SEQ ID NO: 163639 - DNA, 25 bp, Probe sequence
ctgaccgtccatcacttggtggagt

SEQ ID NO: 163640 - DNA, 25 bp, Probe sequence
ccgtccatcacttggtggagttggt

SEQ ID NO: 163641 - DNA, 25 bp, Probe sequence
gcgattgcaggtgtttggaaaatga

SEQ ID NO: 163642 - DNA, 25 bp, Probe sequence
gcaggtgtttggaaaatgatttttg

SEQ ID NO: 163643 - DNA, 25 bp, Probe sequence
gaccgtccatcacttggtggagttg

SEQ ID NO: 163644 - DNA, 25 bp, Probe sequence
gttgttggtggctttttattcttag

SEQ ID NO: 163645 - DNA, 25 bp, Probe sequence
gtttctaaaggtcctgaacaggtat

SEQ ID NO: 163646 - DNA, 25 bp, Probe sequence
gtattgtaaaatgggctagtggtaa

SEQ ID NO: 163647 - DNA, 25 bp, Probe sequence
gtagtattggttgttggtattgtaa

SEQ ID NO: 163648 - DNA, 25 bp, Probe sequence
gtccatcacttggtggagttggtga

SEQ ID NO: 163649 - DNA, 25 bp, Probe sequence
gtcctgaacaggtatttaatgcgat

SEQ ID NO: 163650 - DNA, 25 bp, Probe sequence
gggctagtggtaaatatgggcatat

SEQ ID NO: 163651 - DNA, 25 bp, Probe sequence
ggtggagttggtgactggataagta

SEQ ID NO: 163652 - DNA, 25 bp, Probe sequence
ggtatttaatgcgattgcaggtgtt

SEQ ID NO: 163653 - DNA, 25 bp, Probe sequence
ggtattggtttagtagtattggttg

SEQ ID NO: 163654 - DNA, 25 bp, Probe sequence
ggttatattatttgttgttggtggc

SEQ ID NO: 163655 - DNA, 25 bp, Probe sequence
ggttgttggtattgtaaaatgggct

SEQ ID NO: 163656 - DNA, 25 bp, Probe sequence
ggagttggtgactggataagtaatg

SEQ ID NO: 163657 - DNA, 25 bp, Probe sequence
tggtttagtagtattggttgttggt

SEQ ID NO: 163658 - DNA, 25 bp, Probe sequence
tggtggctttttattcttagtttct

SEQ ID NO: 163659 - DNA, 25 bp, Probe sequence
tgttgttggtggctttttattctta

SEQ ID NO: 163660 - DNA, 25 bp, Probe sequence
tgttggtggctttttattcttagtt

SEQ ID NO: 163661 - DNA, 25 bp, Probe sequence
tgaccgtccatcacttggtggagtt

SEQ ID NO: 163662 - DNA, 25 bp, Probe sequence
tcttagtttctaaaggtcctgaaca

SEQ ID NO: 163663 - DNA, 25 bp, Probe sequence
tacgggtattggtttagtagtattg

SEQ ID NO: 163664 - DNA, 25 bp, Probe sequence
tattcttagtttctaaaggtcctga

SEQ ID NO: 163665 - DNA, 25 bp, Probe sequence
tatttgttgttggtggctttttatt

SEQ ID NO: 163666 - DNA, 25 bp, Probe sequence
tattatttgttgttggtggcttttt

SEQ ID NO: 163667 - DNA, 25 bp, Probe sequence
tttgttgttggtggctttttattct

SEQ ID NO: 163668 - DNA, 25 bp, Probe sequence
ttggaaaatgatttttggcggttga

SEQ ID NO: 163669 - DNA, 25 bp, Probe sequence
atttgtttttactcattattagcta

SEQ ID NO: 163670 - DNA, 25 bp, Probe sequence
atatgactaattctattggaggtta

SEQ ID NO: 163671 - DNA, 25 bp, Probe sequence
atgttgttgttgaatatccttattt

SEQ ID NO: 163672 - DNA, 25 bp, Probe sequence
aaacggaaagcattttgatattcct

SEQ ID NO: 163673 - DNA, 25 bp, Probe sequence
aaaaggcgatgattatgttgctaaa

SEQ ID NO: 163674 - DNA, 25 bp, Probe sequence
aagcaagtacattttaacacgattt

SEQ ID NO: 163675 - DNA, 25 bp, Probe sequence
aagattctcctttggagaatttgga

SEQ ID NO: 163676 - DNA, 25 bp, Probe sequence
aagtatgttgttgttgaatatcctt

SEQ ID NO: 163677 - DNA, 25 bp, Probe sequence
aattatgatgtgaatattactgaaa

SEQ ID NO: 163678 - DNA, 25 bp, Probe sequence
caagtacattttaacacgattttct

SEQ ID NO: 163679 - DNA, 25 bp, Probe sequence
cttctagtaagtctgatgatatggc

SEQ ID NO: 163680 - DNA, 25 bp, Probe sequence
gcgaatacagttcagtatagtccta

SEQ ID NO: 163681 - DNA, 25 bp, Probe sequence
gcttcttttattaaagctacaagag

SEQ ID NO: 163682 - DNA, 25 bp, Probe sequence
gaagataatgcgaatacagttcagt

SEQ ID NO: 163683 - DNA, 25 bp, Probe sequence
gaacaacgccgagtaattccaaaat

SEQ ID NO: 163684 - DNA, 25 bp, Probe sequence
gaaagataaagattctcctttggag

SEQ ID NO: 163685 - DNA, 25 bp, Probe sequence
gatattcctaaagaacaacgccgag

SEQ ID NO: 163686 - DNA, 25 bp, Probe sequence
gattatgttgctaaagttgaaattt

SEQ ID NO: 163687 - DNA, 25 bp, Probe sequence
gattgtaatttgtttttactcatta

SEQ ID NO: 163688 - DNA, 25 bp, Probe sequence
gtttttactcattattagctatttt

SEQ ID NO: 163689 - DNA, 25 bp, Probe sequence
gtcctaaattaaagttatatgctga

SEQ ID NO: 163690 - DNA, 25 bp, Probe sequence
ggcgatgattatgttgctaaagttg

SEQ ID NO: 163691 - DNA, 25 bp, Probe sequence
tgttaattcttttattagcttcttt

SEQ ID NO: 163692 - DNA, 25 bp, Probe sequence
tgaaatattttccatcagattataa

SEQ ID NO: 163693 - DNA, 25 bp, Probe sequence
tcgtcgtaagatgattgtaatttgt

SEQ ID NO: 163694 - DNA, 25 bp, Probe sequence
taattcttttattagcttcttttat

SEQ ID NO: 163695 - DNA, 25 bp, Probe sequence
taaagaacaacgccgagtaattcca

SEQ ID NO: 163696 - DNA, 25 bp, Probe sequence
tacagttcagtatagtcctaaatta

SEQ ID NO: 163697 - DNA, 25 bp, Probe sequence
tacagtatattgttaattatgatgt

SEQ ID NO: 163698 - DNA, 25 bp, Probe sequence
tagaaggaactagagaagtttctca

SEQ ID NO: 163699 - DNA, 25 bp, Probe sequence
ttcctaaagaacaacgccgagtaat

SEQ ID NO: 163700 - DNA, 25 bp, Probe sequence
ttatatccaaaaggcgatgattatg

SEQ ID NO: 163701 - DNA, 25 bp, Probe sequence
ttagctattttgttaattcttttat

SEQ ID NO: 163702 - DNA, 25 bp, Probe sequence
ttactcattattagctattttgtta

SEQ ID NO: 163703 - DNA, 25 bp, Probe sequence
atcggtttgcctataacgttgttca

SEQ ID NO: 163704 - DNA, 25 bp, Probe sequence
atcaatgggcattcacttacagtta

SEQ ID NO: 163705 - DNA, 25 bp, Probe sequence
ataacccctatttcagcagtaattg

SEQ ID NO: 163706 - DNA, 25 bp, Probe sequence
aggcatatgcagttaattgtgcgaa

SEQ ID NO: 163707 - DNA, 25 bp, Probe sequence
agtgccgtggaggcagttgttgact

SEQ ID NO: 163708 - DNA, 25 bp, Probe sequence
actgggttcaggtcactttccatat

SEQ ID NO: 163709 - DNA, 25 bp, Probe sequence
aaagtatggcgcaatctgaggggtt

SEQ ID NO: 163710 - DNA, 25 bp, Probe sequence
aaaaatcgtaagcggtggccattat

SEQ ID NO: 163711 - DNA, 25 bp, Probe sequence
aaaagctgagtgtgtttcacgtttt

SEQ ID NO: 163712 - DNA, 25 bp, Probe sequence
aacgtcattgtgatgtcgaagacat

SEQ ID NO: 163713 - DNA, 25 bp, Probe sequence
aagtccattgaggataatcttgatt

SEQ ID NO: 163714 - DNA, 25 bp, Probe sequence
ctagaccaacattaaagtccattga

SEQ ID NO: 163715 - DNA, 25 bp, Probe sequence
gcggtggccattatatagaccttgg

SEQ ID NO: 163716 - DNA, 25 bp, Probe sequence
gcaatttatattgtcgtttttatga

SEQ ID NO: 163717 - DNA, 25 bp, Probe sequence
gaattaatcattatttggaggcttt

SEQ ID NO: 163718 - DNA, 25 bp, Probe sequence
gaacaagcgtttaaacgtcattgtg

SEQ ID NO: 163719 - DNA, 25 bp, Probe sequence
gagcgtacaaataaaagtgccgtgg

SEQ ID NO: 163720 - DNA, 25 bp, Probe sequence
gaggggttgcttacagatactgatt

SEQ ID NO: 163721 - DNA, 25 bp, Probe sequence
gatacagtgttaactgccgaaagta

SEQ ID NO: 163722 - DNA, 25 bp, Probe sequence
gataaaattttagcgcattcacaat

SEQ ID NO: 163723 - DNA, 25 bp, Probe sequence
gttgctactactttagatacagtgt

SEQ ID NO: 163724 - DNA, 25 bp, Probe sequence
gtagagagtttgaacatcatttaca

SEQ ID NO: 163725 - DNA, 25 bp, Probe sequence
gggcattcacttacagttaactggt

SEQ ID NO: 163726 - DNA, 25 bp, Probe sequence
ggttatgtaaacaagttgctactac

SEQ ID NO: 163727 - DNA, 25 bp, Probe sequence
ggaggcagttgttgactgggttcag

SEQ ID NO: 163728 - DNA, 25 bp, Probe sequence
tggaagcgcaataaacggttttaat

SEQ ID NO: 163729 - DNA, 25 bp, Probe sequence
ggcgctactttttatattggttcta

SEQ ID NO: 163730 - DNA, 25 bp, Probe sequence
tgcataataatttgcgttttatctc

SEQ ID NO: 163731 - DNA, 25 bp, Probe sequence
tcaggtcactttccatataacccct

SEQ ID NO: 163732 - DNA, 25 bp, Probe sequence
taatcgcggttatgaattttcaaac

SEQ ID NO: 163733 - DNA, 25 bp, Probe sequence
tactaataggggggtagagcgtaca

SEQ ID NO: 163734 - DNA, 25 bp, Probe sequence
tatagaccttgggcgttatttatta

SEQ ID NO: 163735 - DNA, 25 bp, Probe sequence
tttccatataacccctatttcagca

SEQ ID NO: 163736 - DNA, 25 bp, Probe sequence
ttgaggacgttatcggtttgcctat

SEQ ID NO: 163737 - DNA, 25 bp, Probe sequence
attgcgggtcaagatgtatcagtca

SEQ ID NO: 163738 - DNA, 25 bp, Probe sequence
atttacaccacatctcgtaccaatg

SEQ ID NO: 163739 - DNA, 25 bp, Probe sequence
atcacaacgtgttcatttttcagaa

SEQ ID NO: 163740 - DNA, 25 bp, Probe sequence
atcagtgattgataaccttgtcaaa

SEQ ID NO: 163741 - DNA, 25 bp, Probe sequence
atcagtcatatttacaccacatctc

SEQ ID NO: 163742 - DNA, 25 bp, Probe sequence
atgctaatcagccatttgtcagaat

SEQ ID NO: 163743 - DNA, 25 bp, Probe sequence
atgactgtgatgtaattttctttgc

SEQ ID NO: 163744 - DNA, 25 bp, Probe sequence
atgacctcttattatgctaatcagc

SEQ ID NO: 163745 - DNA, 25 bp, Probe sequence
agtactcggtagtaactactgcgat

SEQ ID NO: 163746 - DNA, 25 bp, Probe sequence
agatttgtcatctattattattgat

SEQ ID NO: 163747 - DNA, 25 bp, Probe sequence
agcggttatggcgcaattgaattaa

SEQ ID NO: 163748 - DNA, 25 bp, Probe sequence
actgctgcagcacaagatgatttga

SEQ ID NO: 163749 - DNA, 25 bp, Probe sequence
taagaccggcgtgtcaggtgctggt

SEQ ID NO: 163750 - DNA, 25 bp, Probe sequence
aaacacatcctcatgtaacgattgc

SEQ ID NO: 163751 - DNA, 25 bp, Probe sequence
aaacacaaaccggaaatcgagcaat

SEQ ID NO: 163752 - DNA, 25 bp, Probe sequence
aacatttccacatttacaacatatt

SEQ ID NO: 163753 - DNA, 25 bp, Probe sequence
aatcgagcaatatttatctatcatt

SEQ ID NO: 163754 - DNA, 25 bp, Probe sequence
ctgaatatacgactgaatcattaca

SEQ ID NO: 163755 - DNA, 25 bp, Probe sequence
gctatttacagcatttcagaatggc

SEQ ID NO: 163756 - DNA, 25 bp, Probe sequence
gcaacatttcgaagcacttacagtg

SEQ ID NO: 163757 - DNA, 25 bp, Probe sequence
gcaatcggaaaccataaacacaaac

SEQ ID NO: 163758 - DNA, 25 bp, Probe sequence
gatattgggacttttccaaccacaa

SEQ ID NO: 163759 - DNA, 25 bp, Probe sequence
gttggcggtagcggttatggcgcaa

SEQ ID NO: 163760 - DNA, 25 bp, Probe sequence
gtaggtatcgttggcggtagcggtt

SEQ ID NO: 163761 - DNA, 25 bp, Probe sequence
gtaacgattgcacacatctactcac

SEQ ID NO: 163762 - DNA, 25 bp, Probe sequence
ggtgctggtcgttcattatcacaac

SEQ ID NO: 163763 - DNA, 25 bp, Probe sequence
tgtcaggtgctggtcgttcattatc

SEQ ID NO: 163764 - DNA, 25 bp, Probe sequence
tgatttgaatcatgctatttacagc

SEQ ID NO: 163765 - DNA, 25 bp, Probe sequence
tgcacacatctactcacattcaaaa

SEQ ID NO: 163766 - DNA, 25 bp, Probe sequence
ttccaaccacaaaagaagtactcgg

SEQ ID NO: 163767 - DNA, 25 bp, Probe sequence
tatttatctatcattgcgggtcaag

SEQ ID NO: 163768 - DNA, 25 bp, Probe sequence
tattacaaagaaactgctgcagcac

SEQ ID NO: 163769 - DNA, 25 bp, Probe sequence
ttattgatgctaagaccggcgtgtc

SEQ ID NO: 163770 - DNA, 25 bp, Probe sequence
ttagcattacatccacttattagcg

SEQ ID NO: 163771 - DNA, 25 bp, Probe sequence
attggggcgataaagtttcattaat

SEQ ID NO: 163772 - DNA, 25 bp, Probe sequence
atatcgctacacaaatagttcaaat

SEQ ID NO: 163773 - DNA, 25 bp, Probe sequence
atgttgctagtcgtataaattgggg

SEQ ID NO: 163774 - DNA, 25 bp, Probe sequence
agcagatagattatatcgctacaca

SEQ ID NO: 163775 - DNA, 25 bp, Probe sequence
actttagctaaagaaatacagtcta

SEQ ID NO: 163776 - DNA, 25 bp, Probe sequence
aaatttacgctgacctttgtctatt

SEQ ID NO: 163777 - DNA, 25 bp, Probe sequence
aatttacgctgacctttgtctattg

SEQ ID NO: 163778 - DNA, 25 bp, Probe sequence
ctttgtctattgtgtatgagcttga

SEQ ID NO: 163779 - DNA, 25 bp, Probe sequence
ctattgtgtatgagcttgagtgaag

SEQ ID NO: 163780 - DNA, 25 bp, Probe sequence
ctgacctttgtctattgtgtatgag

SEQ ID NO: 163781 - DNA, 25 bp, Probe sequence
cgctgacctttgtctattgtgtatg

SEQ ID NO: 163782 - DNA, 25 bp, Probe sequence
gctagtcgtataaattggggcgata

SEQ ID NO: 163783 - DNA, 25 bp, Probe sequence
gcaggacatggcagaatgctacaag

SEQ ID NO: 163784 - DNA, 25 bp, Probe sequence
gaatgctacaagttaatttggaaga

SEQ ID NO: 163785 - DNA, 25 bp, Probe sequence
gaacctattttaaactatgttgcta

SEQ ID NO: 163786 - DNA, 25 bp, Probe sequence
gacctttgtctattgtgtatgagct

SEQ ID NO: 163787 - DNA, 25 bp, Probe sequence
gagtgaacctattttaaactatgtt

SEQ ID NO: 163788 - DNA, 25 bp, Probe sequence
gagtgaagcaggacatggcagaatg

SEQ ID NO: 163789 - DNA, 25 bp, Probe sequence
gatagattatatcgctacacaaata

SEQ ID NO: 163790 - DNA, 25 bp, Probe sequence
gattattatacagcagatagattat

SEQ ID NO: 163791 - DNA, 25 bp, Probe sequence
gattatatcgctacacaaatagttc

SEQ ID NO: 163792 - DNA, 25 bp, Probe sequence
gtttcattaatgactttagctaaag

SEQ ID NO: 163793 - DNA, 25 bp, Probe sequence
gtcggcctaaaatttacgctgacct

SEQ ID NO: 163794 - DNA, 25 bp, Probe sequence
gtctaaatttaatgatagttacgtt

SEQ ID NO: 163795 - DNA, 25 bp, Probe sequence
gtctattgtgtatgagcttgagtga

SEQ ID NO: 163796 - DNA, 25 bp, Probe sequence
ggggcgataaagtttcattaatgac

SEQ ID NO: 163797 - DNA, 25 bp, Probe sequence
ggacatggcagaatgctacaagtta

SEQ ID NO: 163798 - DNA, 25 bp, Probe sequence
ggcagaatgctacaagttaatttgg

SEQ ID NO: 163799 - DNA, 25 bp, Probe sequence
ggcctaaaatttacgctgacctttg

SEQ ID NO: 163800 - DNA, 25 bp, Probe sequence
taaaatttacgctgacctttgtcta

SEQ ID NO: 163801 - DNA, 25 bp, Probe sequence
tacgctgacctttgtctattgtgta

SEQ ID NO: 163802 - DNA, 25 bp, Probe sequence
tttacgctgacctttgtctattgtg

SEQ ID NO: 163803 - DNA, 25 bp, Probe sequence
tttaaactatgttgctagtcgtata

SEQ ID NO: 163804 - DNA, 25 bp, Probe sequence
ttcaaatttgagtgaacctatttta

SEQ ID NO: 163805 - DNA, 25 bp, Probe sequence
attagttgaaccagacgttaaaatg

SEQ ID NO: 163806 - DNA, 25 bp, Probe sequence
atatgaaaatggagagcgtactgat

SEQ ID NO: 163807 - DNA, 25 bp, Probe sequence
atcgcatatagctggaatgcagaag

SEQ ID NO: 163808 - DNA, 25 bp, Probe sequence
atgcgaattagttgaaccagacgtt

SEQ ID NO: 163809 - DNA, 25 bp, Probe sequence
atgaaaccagtattggatattaaaa

SEQ ID NO: 163810 - DNA, 25 bp, Probe sequence
agtagttggttctaatagtgcactt

SEQ ID NO: 163811 - DNA, 25 bp, Probe sequence
agaatgcgaattagttgaaccagac

SEQ ID NO: 163812 - DNA, 25 bp, Probe sequence
accagacgttaaaatgtatgttcaa

SEQ ID NO: 163813 - DNA, 25 bp, Probe sequence
actatcgcatatagctggaatgcag

SEQ ID NO: 163814 - DNA, 25 bp, Probe sequence
acaaatcactgttaaaacgcctaat

SEQ ID NO: 163815 - DNA, 25 bp, Probe sequence
aatgtcaggcgattttggaactatc

SEQ ID NO: 163816 - DNA, 25 bp, Probe sequence
aatgtatgttcaaatgtcaggcgat

SEQ ID NO: 163817 - DNA, 25 bp, Probe sequence
caattaaactttttaggtgtagatg

SEQ ID NO: 163818 - DNA, 25 bp, Probe sequence
caaggcgaacaaatcactgttaaaa

SEQ ID NO: 163819 - DNA, 25 bp, Probe sequence
caaatcactgttaaaacgcctaata

SEQ ID NO: 163820 - DNA, 25 bp, Probe sequence
catatagctggaatgcagaagatat

SEQ ID NO: 163821 - DNA, 25 bp, Probe sequence
gcgaattagttgaaccagacgttaa

SEQ ID NO: 163822 - DNA, 25 bp, Probe sequence
gaattagactatttacaagaatgcg

SEQ ID NO: 163823 - DNA, 25 bp, Probe sequence
gaagatattaaagtagttggttcta

SEQ ID NO: 163824 - DNA, 25 bp, Probe sequence
gagagcgtactgataaaactgttta

SEQ ID NO: 163825 - DNA, 25 bp, Probe sequence
gattttggaactatcgcatatagct

SEQ ID NO: 163826 - DNA, 25 bp, Probe sequence
gttggttctaatagtgcacttaaac

SEQ ID NO: 163827 - DNA, 25 bp, Probe sequence
gttcaaatgtcaggcgattttggaa

SEQ ID NO: 163828 - DNA, 25 bp, Probe sequence
gtatgttcaaatgtcaggcgatttt

SEQ ID NO: 163829 - DNA, 25 bp, Probe sequence
gtagttggttctaatagtgcactta

SEQ ID NO: 163830 - DNA, 25 bp, Probe sequence
gtcaggcgattttggaactatcgca

SEQ ID NO: 163831 - DNA, 25 bp, Probe sequence
gtactgataaaactgtttatgcata

SEQ ID NO: 163832 - DNA, 25 bp, Probe sequence
ggttctaatagtgcacttaaacaaa

SEQ ID NO: 163833 - DNA, 25 bp, Probe sequence
ggaactatcgcatatagctggaatg

SEQ ID NO: 163834 - DNA, 25 bp, Probe sequence
ggcgaacaaatcactgttaaaacgc

SEQ ID NO: 163835 - DNA, 25 bp, Probe sequence
tggagagcgtactgataaaactgtt

SEQ ID NO: 163836 - DNA, 25 bp, Probe sequence
tagactatttacaagaatgcgaatt

SEQ ID NO: 163837 - DNA, 25 bp, Probe sequence
tatgcatataaattagcgagtcaag

SEQ ID NO: 163838 - DNA, 25 bp, Probe sequence
tttggaactatcgcatatagctgga

SEQ ID NO: 163839 - DNA, 25 bp, Probe sequence
atttttaaaacaatatggtgtgtct

SEQ ID NO: 163840 - DNA, 25 bp, Probe sequence
attttaagatttcatggtgtttcta

SEQ ID NO: 163841 - DNA, 25 bp, Probe sequence
atttgtaattttaagatttcatggt

SEQ ID NO: 163842 - DNA, 25 bp, Probe sequence
atttgtaagatgtatcatatttcaa

SEQ ID NO: 163843 - DNA, 25 bp, Probe sequence
ataattttgcatattttcgtatatt

SEQ ID NO: 163844 - DNA, 25 bp, Probe sequence
atgactgagtttacacctttttttg

SEQ ID NO: 163845 - DNA, 25 bp, Probe sequence
agaattttttgaggtgatgaaccga

SEQ ID NO: 163846 - DNA, 25 bp, Probe sequence
actgagtttacacctttttttgatg

SEQ ID NO: 163847 - DNA, 25 bp, Probe sequence
aaagaatgattatcgatttacttat

SEQ ID NO: 163848 - DNA, 25 bp, Probe sequence
aagatttcatggtgtttctaaaaga

SEQ ID NO: 163849 - DNA, 25 bp, Probe sequence
aatgtataattttgcatattttcgt

SEQ ID NO: 163850 - DNA, 25 bp, Probe sequence
aattttgcatattttcgtatattag

SEQ ID NO: 163851 - DNA, 25 bp, Probe sequence
cacctttttttgatggttcaaatca

SEQ ID NO: 163852 - DNA, 25 bp, Probe sequence
ctgagtttacacctttttttgatgg

SEQ ID NO: 163853 - DNA, 25 bp, Probe sequence
gcatattttcgtatattagaagttt

SEQ ID NO: 163854 - DNA, 25 bp, Probe sequence
gaatgattatcgatttacttataag

SEQ ID NO: 163855 - DNA, 25 bp, Probe sequence
gaagacttagaattttttgaggtga

SEQ ID NO: 163856 - DNA, 25 bp, Probe sequence
gacttagaattttttgaggtgatga

SEQ ID NO: 163857 - DNA, 25 bp, Probe sequence
gactgagtttacacctttttttgat

SEQ ID NO: 163858 - DNA, 25 bp, Probe sequence
gatggttcaaatcaattaaattatc

SEQ ID NO: 163859 - DNA, 25 bp, Probe sequence
gatgtatcatatttcaattgaagac

SEQ ID NO: 163860 - DNA, 25 bp, Probe sequence
gatttcatggtgtttctaaaagaaa

SEQ ID NO: 163861 - DNA, 25 bp, Probe sequence
gattatcgatttacttataaggatt

SEQ ID NO: 163862 - DNA, 25 bp, Probe sequence
gtatattagaagtttgtgaaatggc

SEQ ID NO: 163863 - DNA, 25 bp, Probe sequence
gtaagatgtatcatatttcaattga

SEQ ID NO: 163864 - DNA, 25 bp, Probe sequence
gtaattttaagatttcatggtgttt

SEQ ID NO: 163865 - DNA, 25 bp, Probe sequence
tgtataattttgcatattttcgtat

SEQ ID NO: 163866 - DNA, 25 bp, Probe sequence
tgagtttacacctttttttgatggt

SEQ ID NO: 163867 - DNA, 25 bp, Probe sequence
tgactgagtttacacctttttttga

SEQ ID NO: 163868 - DNA, 25 bp, Probe sequence
tacacctttttttgatggttcaaat

SEQ ID NO: 163869 - DNA, 25 bp, Probe sequence
ttagaattttttgaggtgatgaacc

SEQ ID NO: 163870 - DNA, 25 bp, Probe sequence
tatcgatttacttataaggattata

SEQ ID NO: 163871 - DNA, 25 bp, Probe sequence
ttttgcatattttcgtatattagaa

SEQ ID NO: 163872 - DNA, 25 bp, Probe sequence
ttaagatttcatggtgtttctaaaa

SEQ ID NO: 163873 - DNA, 25 bp, Probe sequence
attacgtaatttaagaactggtgca

SEQ ID NO: 163874 - DNA, 25 bp, Probe sequence
atcggtgttgaattacctaaaactg

SEQ ID NO: 163875 - DNA, 25 bp, Probe sequence
atgcaatatttatatgctgacggag

SEQ ID NO: 163876 - DNA, 25 bp, Probe sequence
acctggtattaaaggtgatactgca

SEQ ID NO: 163877 - DNA, 25 bp, Probe sequence
aaagcctggtaaaggttcagcattc

SEQ ID NO: 163878 - DNA, 25 bp, Probe sequence
aacagaactttcaagtgattactta

SEQ ID NO: 163879 - DNA, 25 bp, Probe sequence
aacactggtgatggaagctacattt

SEQ ID NO: 163880 - DNA, 25 bp, Probe sequence
aagttatagacttccaacatgtaaa

SEQ ID NO: 163881 - DNA, 25 bp, Probe sequence
aaggttcagcattcgttcgttcaaa

SEQ ID NO: 163882 - DNA, 25 bp, Probe sequence
aatttctgttgataacgctatttgg

SEQ ID NO: 163883 - DNA, 25 bp, Probe sequence
caggtttaacaatttctgttgataa

SEQ ID NO: 163884 - DNA, 25 bp, Probe sequence
ctgttgataacgctatttggaaagt

SEQ ID NO: 163885 - DNA, 25 bp, Probe sequence
gctgacggagataatcatgtattta

SEQ ID NO: 163886 - DNA, 25 bp, Probe sequence
gcattcgttcgttcaaaattacgta

SEQ ID NO: 163887 - DNA, 25 bp, Probe sequence
gcaatgattgaaaatcgtcgcatgc

SEQ ID NO: 163888 - DNA, 25 bp, Probe sequence
gaaggtgacgttttaattatcaaca

SEQ ID NO: 163889 - DNA, 25 bp, Probe sequence
gaaggtgaaactatcggtgttgaat

SEQ ID NO: 163890 - DNA, 25 bp, Probe sequence
gaactggtgcaattcaagagaaaac

SEQ ID NO: 163891 - DNA, 25 bp, Probe sequence
gaaaatcgtcgcatgcaatatttat

SEQ ID NO: 163892 - DNA, 25 bp, Probe sequence
gaaactatcggtgttgaattaccta

SEQ ID NO: 163893 - DNA, 25 bp, Probe sequence
gacttccaacatgtaaagcctggta

SEQ ID NO: 163894 - DNA, 25 bp, Probe sequence
gacgttttaattatcaacactggtg

SEQ ID NO: 163895 - DNA, 25 bp, Probe sequence
gagaaaacgtttagagctggtgaaa

SEQ ID NO: 163896 - DNA, 25 bp, Probe sequence
gttgaattacctaaaactgttgaat

SEQ ID NO: 163897 - DNA, 25 bp, Probe sequence
gttcagcattcgttcgttcaaaatt

SEQ ID NO: 163898 - DNA, 25 bp, Probe sequence
gtaactgaaacagaacctggtatta

SEQ ID NO: 163899 - DNA, 25 bp, Probe sequence
gtgaaaaagttgaaccagcaatgat

SEQ ID NO: 163900 - DNA, 25 bp, Probe sequence
ggtgatggaagctacatttcaagag

SEQ ID NO: 163901 - DNA, 25 bp, Probe sequence
ggtaaaggttcagcattcgttcgtt

SEQ ID NO: 163902 - DNA, 25 bp, Probe sequence
ggataatgaaagctttgaacaaaca

SEQ ID NO: 163903 - DNA, 25 bp, Probe sequence
ggaagtacaaattcaaacatacgaa

SEQ ID NO: 163904 - DNA, 25 bp, Probe sequence
tggaagctacatttcaagaggataa

SEQ ID NO: 163905 - DNA, 25 bp, Probe sequence
taaaggttcagcattcgttcgttca

SEQ ID NO: 163906 - DNA, 25 bp, Probe sequence
tacattaaatgtacctttatttgta

SEQ ID NO: 163907 - DNA, 25 bp, Probe sequence
atttggacattcactaggacatggt

SEQ ID NO: 163908 - DNA, 25 bp, Probe sequence
atgctggctcgtacgatacaagata

SEQ ID NO: 163909 - DNA, 25 bp, Probe sequence
agcatctggtcatagaggtgcatta

SEQ ID NO: 163910 - DNA, 25 bp, Probe sequence
actgtgttacagtagaacctggtgt

SEQ ID NO: 163911 - DNA, 25 bp, Probe sequence
acaagtgcatcgtattttagaacaa

SEQ ID NO: 163912 - DNA, 25 bp, Probe sequence
aaagccgtatatcattaataagcat

SEQ ID NO: 163913 - DNA, 25 bp, Probe sequence
aacaatatttgataacagactttag

SEQ ID NO: 163914 - DNA, 25 bp, Probe sequence
aatgcacaaaagaccttatagtttt

SEQ ID NO: 163915 - DNA, 25 bp, Probe sequence
gaaaatggttgtcaagtctttacta

SEQ ID NO: 163916 - DNA, 25 bp, Probe sequence
cagtggagcacttatcatatctaaa

SEQ ID NO: 163917 - DNA, 25 bp, Probe sequence
gaaggtttgggcggtataagaatag

SEQ ID NO: 163918 - DNA, 25 bp, Probe sequence
gaattaggagcagatggaccatcat

SEQ ID NO: 163919 - DNA, 25 bp, Probe sequence
gaagctgatgccatttcaagaaact

SEQ ID NO: 163920 - DNA, 25 bp, Probe sequence
gacctggcatgactggtgcagaagc

SEQ ID NO: 163921 - DNA, 25 bp, Probe sequence
gagcagaataacacaagtgcatcgt

SEQ ID NO: 163922 - DNA, 25 bp, Probe sequence
gagattagacctggcatgactggtg

SEQ ID NO: 163923 - DNA, 25 bp, Probe sequence
gagattaaagaattgctacaccaag

SEQ ID NO: 163924 - DNA, 25 bp, Probe sequence
gatgcgattatcattctttcggatt

SEQ ID NO: 163925 - DNA, 25 bp, Probe sequence
gatacgattgtagcatctggtcata

SEQ ID NO: 163926 - DNA, 25 bp, Probe sequence
gatatattgatcaagcaactaagca

SEQ ID NO: 163927 - DNA, 25 bp, Probe sequence
gttacagtagaacctggtgtttata

SEQ ID NO: 163928 - DNA, 25 bp, Probe sequence
gttatgatacataccttgaattaaa

SEQ ID NO: 163929 - DNA, 25 bp, Probe sequence
gtcaagtctttactaaatgcacaaa

SEQ ID NO: 163930 - DNA, 25 bp, Probe sequence
ggtgtttatatagaaggtttgggcg

SEQ ID NO: 163931 - DNA, 25 bp, Probe sequence
ggtgcagaagctgatgccatttcaa

SEQ ID NO: 163932 - DNA, 25 bp, Probe sequence
ggtttagaaatccatgaagggccaa

SEQ ID NO: 163933 - DNA, 25 bp, Probe sequence
ggccaatgctggctcgtacgataca

SEQ ID NO: 163934 - DNA, 25 bp, Probe sequence
tgaagggccaatgctggctcgtacg

SEQ ID NO: 163935 - DNA, 25 bp, Probe sequence
taaacttcaagttaacaactgtgtt

SEQ ID NO: 163936 - DNA, 25 bp, Probe sequence
tactggtaccagtggagcacttatc

SEQ ID NO: 163937 - DNA, 25 bp, Probe sequence
ttatcaggttttactggtaccagtg

SEQ ID NO: 163938 - DNA, 25 bp, Probe sequence
ttatcattctttcggattacaatag

SEQ ID NO: 163939 - DNA, 25 bp, Probe sequence
ttcactaggacatggtattggttta

SEQ ID NO: 163940 - DNA, 25 bp, Probe sequence
ttaataagcatttctaatactgtag

SEQ ID NO: 163941 - DNA, 25 bp, Probe sequence
aggcgtcaaactggtggccgtgggg

SEQ ID NO: 163942 - DNA, 25 bp, Probe sequence
atatggcaatggatgaagcgttatt

SEQ ID NO: 163943 - DNA, 25 bp, Probe sequence
atgactgaaacttggaattttatta

SEQ ID NO: 163944 - DNA, 25 bp, Probe sequence
agttcagtgtgttttgatgcaccaa

SEQ ID NO: 163945 - DNA, 25 bp, Probe sequence
acgtttttacacatggaatcctgca

SEQ ID NO: 163946 - DNA, 25 bp, Probe sequence
acagaagcgtacagagtgatttcac

SEQ ID NO: 163947 - DNA, 25 bp, Probe sequence
acacggttcgattttacaagatatt

SEQ ID NO: 163948 - DNA, 25 bp, Probe sequence
aaacgcctgaagagcgtcaaaaatt

SEQ ID NO: 163949 - DNA, 25 bp, Probe sequence
aaaacaacctcgaagttcagtgtgt

SEQ ID NO: 163950 - DNA, 25 bp, Probe sequence
aacacattactattagtcaaatgga

SEQ ID NO: 163951 - DNA, 25 bp, Probe sequence
aatatcgttcagatgaatggatgtt

SEQ ID NO: 163952 - DNA, 25 bp, Probe sequence
caacctcgaagttcagtgtgttttg

SEQ ID NO: 163953 - DNA, 25 bp, Probe sequence
caaaagggcgtaatcctccaacacg

SEQ ID NO: 163954 - DNA, 25 bp, Probe sequence
gcaccaagttggtatgagctagttg

SEQ ID NO: 163955 - DNA, 25 bp, Probe sequence
gcggtacctaaaacgcctgaagagc

SEQ ID NO: 163956 - DNA, 25 bp, Probe sequence
gcagttgccatcaatgatatttcag

SEQ ID NO: 163957 - DNA, 25 bp, Probe sequence
gaattaaagccacttgaattaacag

SEQ ID NO: 163958 - DNA, 25 bp, Probe sequence
gaagcgttattaaattttgtctcta

SEQ ID NO: 163959 - DNA, 25 bp, Probe sequence
gagctagttgttgaaggccgtaaga

SEQ ID NO: 163960 - DNA, 25 bp, Probe sequence
gaggtgaaattgatccagttatacg

SEQ ID NO: 163961 - DNA, 25 bp, Probe sequence
gagtgatttcacaaggattattaga

SEQ ID NO: 163962 - DNA, 25 bp, Probe sequence
gatccagttatacgtttttacacat

SEQ ID NO: 163963 - DNA, 25 bp, Probe sequence
gtcaaatggaagaagctttcgagaa

SEQ ID NO: 163964 - DNA, 25 bp, Probe sequence
gtgtgttttgatgcaccaagttggt

SEQ ID NO: 163965 - DNA, 25 bp, Probe sequence
ggccgtaagattgctgggagtgctc

SEQ ID NO: 163966 - DNA, 25 bp, Probe sequence
tggtctcgtaaggcgtcaaactggt

SEQ ID NO: 163967 - DNA, 25 bp, Probe sequence
tggaatcctgcaacattatcaatag

SEQ ID NO: 163968 - DNA, 25 bp, Probe sequence
tgctgggagtgctcaaacgagacaa

SEQ ID NO: 163969 - DNA, 25 bp, Probe sequence
tcctccaacacggttcgattttaca

SEQ ID NO: 163970 - DNA, 25 bp, Probe sequence
taatcctccaacacggttcgatttt

SEQ ID NO: 163971 - DNA, 25 bp, Probe sequence
taaattttgtctctagaggtgaaat

SEQ ID NO: 163972 - DNA, 25 bp, Probe sequence
tacaggaagtaaagacccatattat

SEQ ID NO: 163973 - DNA, 25 bp, Probe sequence
tattttgcggtacctaaaacgcctg

SEQ ID NO: 163974 - DNA, 25 bp, Probe sequence
ttcgttgaaaaagcagttgccatca

SEQ ID NO: 163975 - DNA, 25 bp, Probe sequence
attgatgacttgaaacgtgttgtaa

SEQ ID NO: 163976 - DNA, 25 bp, Probe sequence
atattcgaactatgggagcaactgg

SEQ ID NO: 163977 - DNA, 25 bp, Probe sequence
agatctcgtgaaggcagatatgcat

SEQ ID NO: 163978 - DNA, 25 bp, Probe sequence
agcaagttacttaccaaagccaatg

SEQ ID NO: 163979 - DNA, 25 bp, Probe sequence
acgctattatggacaaagttcgccc

SEQ ID NO: 163980 - DNA, 25 bp, Probe sequence
acagctgctcgtaaaccaatattaa

SEQ ID NO: 163981 - DNA, 25 bp, Probe sequence
acaactgtgattgatcgattagacg

SEQ ID NO: 163982 - DNA, 25 bp, Probe sequence
aaatccgtgaaatcgtccataatgc

SEQ ID NO: 163983 - DNA, 25 bp, Probe sequence
aaacatttactggtccacatggtgg

SEQ ID NO: 163984 - DNA, 25 bp, Probe sequence
aagagcttatacgtatattcgaact

SEQ ID NO: 163985 - DNA, 25 bp, Probe sequence
aattctatcggacgtgtaaaaccat

SEQ ID NO: 163986 - DNA, 25 bp, Probe sequence
aattctgttgagtcattgttagatg

SEQ ID NO: 163987 - DNA, 25 bp, Probe sequence
ccagcctcagcttcatttgcaggat

SEQ ID NO: 163988 - DNA, 25 bp, Probe sequence
gcggagtttcctgaagttgctgaac

SEQ ID NO: 163989 - DNA, 25 bp, Probe sequence
gcagctattatgttaactaatccaa

SEQ ID NO: 163990 - DNA, 25 bp, Probe sequence
gcacatggtgaatggactgcattga

SEQ ID NO: 163991 - DNA, 25 bp, Probe sequence
gaagtcattgtgccagattctgcgc

SEQ ID NO: 163992 - DNA, 25 bp, Probe sequence
gaagcagcggttcttaatgcgaatt

SEQ ID NO: 163993 - DNA, 25 bp, Probe sequence
gaaacacttgattattttatcgata

SEQ ID NO: 163994 - DNA, 25 bp, Probe sequence
gatttcggtgtacatccaccaacaa

SEQ ID NO: 163995 - DNA, 25 bp, Probe sequence
gagatatgggatttgatgctgttca

SEQ ID NO: 163996 - DNA, 25 bp, Probe sequence
gattctgcgcatggtacgaatccag

SEQ ID NO: 163997 - DNA, 25 bp, Probe sequence
gttgctgaactagacttagtacgtc

SEQ ID NO: 163998 - DNA, 25 bp, Probe sequence
gtatgatgattgaaccgactgagac

SEQ ID NO: 163999 - DNA, 25 bp, Probe sequence
gtacgtcattatactgaactttcaa

SEQ ID NO: 164000 - DNA, 25 bp, Probe sequence
gtgccagattctgcgcatggtacga

SEQ ID NO: 164001 - DNA, 25 bp, Probe sequence
gtgaatcacatccattacaagatga

SEQ ID NO: 164002 - DNA, 25 bp, Probe sequence
ggtgtacgtactttagacatggcta

SEQ ID NO: 164003 - DNA, 25 bp, Probe sequence
ggtgcgaatttaaacgctattatgg

SEQ ID NO: 164004 - DNA, 25 bp, Probe sequence
ggttcaggtccagtcggtgtagtaa

SEQ ID NO: 164005 - DNA, 25 bp, Probe sequence
ggacaaagttcgcccaggagatatg

SEQ ID NO: 164006 - DNA, 25 bp, Probe sequence
tgctgttcatttaaacttgcataaa

SEQ ID NO: 164007 - DNA, 25 bp, Probe sequence
taatggtgaaggtcatcgtgatgaa

SEQ ID NO: 164008 - DNA, 25 bp, Probe sequence
tagacgaagctacagctgctcgtaa

SEQ ID NO: 164009 - DNA, 25 bp, Probe sequence
gcgaagcggaaacaacgttacttag

SEQ ID NO: 164010 - DNA, 25 bp, Probe sequence
attgggattacttacacctccaggt

SEQ ID NO: 164011 - DNA, 25 bp, Probe sequence
attgcaatgtcagcacttggtaaac

SEQ ID NO: 164012 - DNA, 25 bp, Probe sequence
attacaagccatttttgagttccaa

SEQ ID NO: 164013 - DNA, 25 bp, Probe sequence
atcaagcattacaagtacttcatac

SEQ ID NO: 164014 - DNA, 25 bp, Probe sequence
atgatgggatgactagctttgctga

SEQ ID NO: 164015 - DNA, 25 bp, Probe sequence
acctccaggttcatttggtgcagat

SEQ ID NO: 164016 - DNA, 25 bp, Probe sequence
acagcatatacgccatatcaaccgg

SEQ ID NO: 164017 - DNA, 25 bp, Probe sequence
caagcacgtgaacaacatattcgac

SEQ ID NO: 164018 - DNA, 25 bp, Probe sequence
gccacattgtggatattttgcaacg

SEQ ID NO: 164019 - DNA, 25 bp, Probe sequence
gccatatcaaccggaaatttctcaa

SEQ ID NO: 164020 - DNA, 25 bp, Probe sequence
gcgacatctaatatttgttctaacc

SEQ ID NO: 164021 - DNA, 25 bp, Probe sequence
gctcaattcggtgggccacattgtg

SEQ ID NO: 164022 - DNA, 25 bp, Probe sequence
gaagtacaatattatcggtggtttt

SEQ ID NO: 164023 - DNA, 25 bp, Probe sequence
gaaacgcatacatcatttttgggtg

SEQ ID NO: 164024 - DNA, 25 bp, Probe sequence
gacgcgtaaggaattcgaagtagtg

SEQ ID NO: 164025 - DNA, 25 bp, Probe sequence
gatggtacatctttcaatgagtttg

SEQ ID NO: 164026 - DNA, 25 bp, Probe sequence
gatcagaattttacacagcatatac

SEQ ID NO: 164027 - DNA, 25 bp, Probe sequence
gatttagatggcactgttacagatt

SEQ ID NO: 164028 - DNA, 25 bp, Probe sequence
gtacttcatacttatgctaagacgc

SEQ ID NO: 164029 - DNA, 25 bp, Probe sequence
gtgagtcatcgttatatacctttaa

SEQ ID NO: 164030 - DNA, 25 bp, Probe sequence
gtgtttatgatcattacgcgccatc

SEQ ID NO: 164031 - DNA, 25 bp, Probe sequence
ggtaatcgtggctttgtattaacat

SEQ ID NO: 164032 - DNA, 25 bp, Probe sequence
ggtagattagtcggtcaaacacaag

SEQ ID NO: 164033 - DNA, 25 bp, Probe sequence
ggtatctatgatattgcagttcaaa

SEQ ID NO: 164034 - DNA, 25 bp, Probe sequence
ggatgtagcaaattcttctatgtat

SEQ ID NO: 164035 - DNA, 25 bp, Probe sequence
ggaattcctgctcaattcggtgggc

SEQ ID NO: 164036 - DNA, 25 bp, Probe sequence
tcggtggttttgatttaggtgttgt

SEQ ID NO: 164037 - DNA, 25 bp, Probe sequence
tacgcgccatcagttgtggatgcta

SEQ ID NO: 164038 - DNA, 25 bp, Probe sequence
tagaacatgctaactatgctaaaca

SEQ ID NO: 164039 - DNA, 25 bp, Probe sequence
taggtgttgtttcagacgactttaa

SEQ ID NO: 164040 - DNA, 25 bp, Probe sequence
tttttgggtgctggtgtttatgatc

SEQ ID NO: 164041 - DNA, 25 bp, Probe sequence
ttattcggtgatgtaccaagtgaca

SEQ ID NO: 164042 - DNA, 25 bp, Probe sequence
ttgttgtaggtgatactcagccatt

SEQ ID NO: 164043 - DNA, 25 bp, Probe sequence
atttgggatggtttattagagtata

SEQ ID NO: 164044 - DNA, 25 bp, Probe sequence
atacaaggaccaaaagctagagatt

SEQ ID NO: 164045 - DNA, 25 bp, Probe sequence
atcaggaaaatcaattgcacttgca

SEQ ID NO: 164046 - DNA, 25 bp, Probe sequence
atgccatgtgggttaggcgctcgtg

SEQ ID NO: 164047 - DNA, 25 bp, Probe sequence
atgaaggtggtatcgcttttgcaag

SEQ ID NO: 164048 - DNA, 25 bp, Probe sequence
agcattatatactgctttatgtaat

SEQ ID NO: 164049 - DNA, 25 bp, Probe sequence
aaaccaatatggtcaattagcaata

SEQ ID NO: 164050 - DNA, 25 bp, Probe sequence
aaccattaattgatgctgattttat

SEQ ID NO: 164051 - DNA, 25 bp, Probe sequence
aaggaattgcaagaactggttatga

SEQ ID NO: 164052 - DNA, 25 bp, Probe sequence
aattagctgacgacaattatttatt

SEQ ID NO: 164053 - DNA, 25 bp, Probe sequence
gaattcggaggatgggcgatgcctg

SEQ ID NO: 164054 - DNA, 25 bp, Probe sequence
caaacacctttatatcaaaattatg

SEQ ID NO: 164055 - DNA, 25 bp, Probe sequence
cgtcattttatctcagtcaggttac

SEQ ID NO: 164056 - DNA, 25 bp, Probe sequence
gaaggcggtattattgatgatttag

SEQ ID NO: 164057 - DNA, 25 bp, Probe sequence
gaacacagtctccatcatcaggaaa

SEQ ID NO: 164058 - DNA, 25 bp, Probe sequence
gagcataatgctgttcgatacgaaa

SEQ ID NO: 164059 - DNA, 25 bp, Probe sequence
gagtataatgttatgccatgtgggt

SEQ ID NO: 164060 - DNA, 25 bp, Probe sequence
gaggctggattgccattacatggac

SEQ ID NO: 164061 - DNA, 25 bp, Probe sequence
gatactgataatttaactacttcaa

SEQ ID NO: 164062 - DNA, 25 bp, Probe sequence
gtgggttaggcgctcgtgatacatt

SEQ ID NO: 164063 - DNA, 25 bp, Probe sequence
gttcgatacgaaattggcctgtttg

SEQ ID NO: 164064 - DNA, 25 bp, Probe sequence
gttcaagttcgtaagcgtcaattaa

SEQ ID NO: 164065 - DNA, 25 bp, Probe sequence
gttacacaggtgaagatgggtttga

SEQ ID NO: 164066 - DNA, 25 bp, Probe sequence
gtaacttcaggaacacagtctccat

SEQ ID NO: 164067 - DNA, 25 bp, Probe sequence
gtcagtttgtgcaatatttattatc

SEQ ID NO: 164068 - DNA, 25 bp, Probe sequence
ggtagagagttgcttgttcaagttc

SEQ ID NO: 164069 - DNA, 25 bp, Probe sequence
ggtaaagatgctagtcagtttgtgc

SEQ ID NO: 164070 - DNA, 25 bp, Probe sequence
ggcgatgcctgttcaattttcaagt

SEQ ID NO: 164071 - DNA, 25 bp, Probe sequence
ggcctgtttgatgttagtcatatgg

SEQ ID NO: 164072 - DNA, 25 bp, Probe sequence
ggcgctcgtgatacattaagattag

SEQ ID NO: 164073 - DNA, 25 bp, Probe sequence
tagttgttaatgctgctaatactga

SEQ ID NO: 164074 - DNA, 25 bp, Probe sequence
tatcgcttttgcaagtaaaccatta

SEQ ID NO: 164075 - DNA, 25 bp, Probe sequence
ttatctcagtcaggttacacaggtg

SEQ ID NO: 164076 - DNA, 25 bp, Probe sequence
ttaactgaatcaattacaccatatg

SEQ ID NO: 164077 - DNA, 25 bp, Probe sequence
attgctactggtggtggtattattg

SEQ ID NO: 164078 - DNA, 25 bp, Probe sequence
atttagagttcacatgtttgcaaga

SEQ ID NO: 164079 - DNA, 25 bp, Probe sequence
atttcaggaatttagagttcacatg

SEQ ID NO: 164080 - DNA, 25 bp, Probe sequence
atcaatgatgacccacatcgaccta

SEQ ID NO: 164081 - DNA, 25 bp, Probe sequence
atctacgattggtaaatacgttgca

SEQ ID NO: 164082 - DNA, 25 bp, Probe sequence
atcgacctaatgcaaataataagac

SEQ ID NO: 164083 - DNA, 25 bp, Probe sequence
atgaaatcgcattcaagaaatttga

SEQ ID NO: 164084 - DNA, 25 bp, Probe sequence
agtcgaatcaatgatgacccacatc

SEQ ID NO: 164085 - DNA, 25 bp, Probe sequence
agatataattgctactggtggtggt

SEQ ID NO: 164086 - DNA, 25 bp, Probe sequence
aaacatggtgaacaatatttcagga

SEQ ID NO: 164087 - DNA, 25 bp, Probe sequence
aacactgcagatataattgctactg

SEQ ID NO: 164088 - DNA, 25 bp, Probe sequence
aagacaatcaagcagttaaatgact

SEQ ID NO: 164089 - DNA, 25 bp, Probe sequence
aataaaagcgagtgatcagtattag

SEQ ID NO: 164090 - DNA, 25 bp, Probe sequence
caatgatgacccacatcgacctaat

SEQ ID NO: 164091 - DNA, 25 bp, Probe sequence
caagaaatttgatagtcatttgcta

SEQ ID NO: 164092 - DNA, 25 bp, Probe sequence
cccacatcgacctaatgcaaataat

SEQ ID NO: 164093 - DNA, 25 bp, Probe sequence
gaatcaatgatgacccacatcgacc

SEQ ID NO: 164094 - DNA, 25 bp, Probe sequence
gaatcatgataaatcaccaataatt

SEQ ID NO: 164095 - DNA, 25 bp, Probe sequence
gacccacatcgacctaatgcaaata

SEQ ID NO: 164096 - DNA, 25 bp, Probe sequence
gagttcacatgtttgcaagaatgta

SEQ ID NO: 164097 - DNA, 25 bp, Probe sequence
gatattatatatagtcgaatcaatg

SEQ ID NO: 164098 - DNA, 25 bp, Probe sequence
gttaaatgacttgtattgctcgcgg

SEQ ID NO: 164099 - DNA, 25 bp, Probe sequence
gtttgcaagaatgtattaacactgc

SEQ ID NO: 164100 - DNA, 25 bp, Probe sequence
gtcatttgctatcaatttcagaaat

SEQ ID NO: 164101 - DNA, 25 bp, Probe sequence
tgggtaccggtaaatctacgattgg

SEQ ID NO: 164102 - DNA, 25 bp, Probe sequence
ggaatttagagttcacatgtttgca

SEQ ID NO: 164103 - DNA, 25 bp, Probe sequence
tggtttcatgggtaccggtaaatct

SEQ ID NO: 164104 - DNA, 25 bp, Probe sequence
tgatgacccacatcgacctaatgca

SEQ ID NO: 164105 - DNA, 25 bp, Probe sequence
tgagcaaaatttatcatttattgat

SEQ ID NO: 164106 - DNA, 25 bp, Probe sequence
tgacccacatcgacctaatgcaaat

SEQ ID NO: 164107 - DNA, 25 bp, Probe sequence
tcatgggtaccggtaaatctacgat

SEQ ID NO: 164108 - DNA, 25 bp, Probe sequence
tagtcatttgctatcaatttcagaa

SEQ ID NO: 164109 - DNA, 25 bp, Probe sequence
ttaaatgacttgtattgctcgcgga

SEQ ID NO: 164110 - DNA, 25 bp, Probe sequence
ttggtaaatacgttgcagatgagca

SEQ ID NO: 164111 - DNA, 25 bp, Probe sequence
atagctctaataattatgcaccact

SEQ ID NO: 164112 - DNA, 25 bp, Probe sequence
aggccattgtcatccaacaattgtt

SEQ ID NO: 164113 - DNA, 25 bp, Probe sequence
agttgtctatcatttcacgtgtcct

SEQ ID NO: 164114 - DNA, 25 bp, Probe sequence
actctggtactgaagctgttgaagc

SEQ ID NO: 164115 - DNA, 25 bp, Probe sequence
aaattgctagaaaatggggctctga

SEQ ID NO: 164116 - DNA, 25 bp, Probe sequence
aacaattttcacggtcgtacacttg

SEQ ID NO: 164117 - DNA, 25 bp, Probe sequence
aactggttgaacgatcagaacgctt

SEQ ID NO: 164118 - DNA, 25 bp, Probe sequence
caagctgtgcgtcaactatgtgata

SEQ ID NO: 164119 - DNA, 25 bp, Probe sequence
cgcatcgtactatcattcgattgtc

SEQ ID NO: 164120 - DNA, 25 bp, Probe sequence
catttggtggtaaccctttagccat

SEQ ID NO: 164121 - DNA, 25 bp, Probe sequence
cccttaactctggtactgaagctgt

SEQ ID NO: 164122 - DNA, 25 bp, Probe sequence
gccattgcaatatcgacggcagcgc

SEQ ID NO: 164123 - DNA, 25 bp, Probe sequence
gcgttgctacaacttaaacatccta

SEQ ID NO: 164124 - DNA, 25 bp, Probe sequence
gtcctttatagtgacaatctcggga

SEQ ID NO: 164125 - DNA, 25 bp, Probe sequence
gcatttcgggtttttcagttgcaaa

SEQ ID NO: 164126 - DNA, 25 bp, Probe sequence
gcaaagacacgcatcgtactatcat

SEQ ID NO: 164127 - DNA, 25 bp, Probe sequence
gaacaagcttcaaagttgtctatca

SEQ ID NO: 164128 - DNA, 25 bp, Probe sequence
gaaaaaatttgtcatcttgctaaga

SEQ ID NO: 164129 - DNA, 25 bp, Probe sequence
gacggcagcgcttgatgtacttaaa

SEQ ID NO: 164130 - DNA, 25 bp, Probe sequence
gacggacaagttgaaatcatcgcta

SEQ ID NO: 164131 - DNA, 25 bp, Probe sequence
gatcagaacgcttaggttcattttt

SEQ ID NO: 164132 - DNA, 25 bp, Probe sequence
gttggtcttggtagaactgggaaat

SEQ ID NO: 164133 - DNA, 25 bp, Probe sequence
gttgcaaaccaaggccattgtcatc

SEQ ID NO: 164134 - DNA, 25 bp, Probe sequence
gttgcagcttttcaagacgttttta

SEQ ID NO: 164135 - DNA, 25 bp, Probe sequence
gtaaccctttagccattgcaatatc

SEQ ID NO: 164136 - DNA, 25 bp, Probe sequence
gtcgtacacttggctcattatcact

SEQ ID NO: 164137 - DNA, 25 bp, Probe sequence
ggctcattatcactatctaaccacg

SEQ ID NO: 164138 - DNA, 25 bp, Probe sequence
ggcgttaatataccaccgaaaggat

SEQ ID NO: 164139 - DNA, 25 bp, Probe sequence
tcactatctaaccacgacgcatata

SEQ ID NO: 164140 - DNA, 25 bp, Probe sequence
ttgggtggcggcttataccctgtat

SEQ ID NO: 164141 - DNA, 25 bp, Probe sequence
taggtaaggcattgggtggcggctt

SEQ ID NO: 164142 - DNA, 25 bp, Probe sequence
tatcatttcacgtgtcctttatagt

SEQ ID NO: 164143 - DNA, 25 bp, Probe sequence
tatagattgcatttcgggtttttca

SEQ ID NO: 164144 - DNA, 25 bp, Probe sequence
ttcaaggtgaaggtggcgttaatat

SEQ ID NO: 164145 - DNA, 25 bp, Probe sequence
attgaaatgttagtagcgatgatgg

SEQ ID NO: 164146 - DNA, 25 bp, Probe sequence
attgttccagacttaattagactta

SEQ ID NO: 164147 - DNA, 25 bp, Probe sequence
atttcgaatttttctcaagagatat

SEQ ID NO: 164148 - DNA, 25 bp, Probe sequence
atgacagaggaaatataacaatgat

SEQ ID NO: 164149 - DNA, 25 bp, Probe sequence
atgttacagcatttactgcaaatat

SEQ ID NO: 164150 - DNA, 25 bp, Probe sequence
agatttcgaatttttctcaagagat

SEQ ID NO: 164151 - DNA, 25 bp, Probe sequence
actgtagatttcgaatttttctcaa

SEQ ID NO: 164152 - DNA, 25 bp, Probe sequence
acagcatttactgcaaatatctact

SEQ ID NO: 164153 - DNA, 25 bp, Probe sequence
acaactgtagatttcgaatttttct

SEQ ID NO: 164154 - DNA, 25 bp, Probe sequence
aaaggtgaagaaatgatcgaataca

SEQ ID NO: 164155 - DNA, 25 bp, Probe sequence
aactgtagatttcgaatttttctca

SEQ ID NO: 164156 - DNA, 25 bp, Probe sequence
aatgttagtagcgatgatggttata

SEQ ID NO: 164157 - DNA, 25 bp, Probe sequence
aataatgttacagcatttactgcaa

SEQ ID NO: 164158 - DNA, 25 bp, Probe sequence
cagcatttactgcaaatatctacta

SEQ ID NO: 164159 - DNA, 25 bp, Probe sequence
ctgtagatttcgaatttttctcaag

SEQ ID NO: 164160 - DNA, 25 bp, Probe sequence
cgtatcattttacataaaggtgaag

SEQ ID NO: 164161 - DNA, 25 bp, Probe sequence
gcatttactgcaaatatctactata

SEQ ID NO: 164162 - DNA, 25 bp, Probe sequence
gaatttttctcaagagatattctag

SEQ ID NO: 164163 - DNA, 25 bp, Probe sequence
gaaatgttagtagcgatgatggtta

SEQ ID NO: 164164 - DNA, 25 bp, Probe sequence
gataacagttaaagtcggtacaaat

SEQ ID NO: 164165 - DNA, 25 bp, Probe sequence
gatttcgaatttttctcaagagata

SEQ ID NO: 164166 - DNA, 25 bp, Probe sequence
gttacagcatttactgcaaatatct

SEQ ID NO: 164167 - DNA, 25 bp, Probe sequence
gttagtagcgatgatggttataagt

SEQ ID NO: 164168 - DNA, 25 bp, Probe sequence
gtattaatgtcaaagctttttcgct

SEQ ID NO: 164169 - DNA, 25 bp, Probe sequence
gtatacagtattaatgtcaaagctt

SEQ ID NO: 164170 - DNA, 25 bp, Probe sequence
gtagatttcgaatttttctcaagag

SEQ ID NO: 164171 - DNA, 25 bp, Probe sequence
gtagcgatgatggttataagtataa

SEQ ID NO: 164172 - DNA, 25 bp, Probe sequence
ggtgaagaaatgatcgaatacaaat

SEQ ID NO: 164173 - DNA, 25 bp, Probe sequence
taatgttacagcatttactgcaaat

SEQ ID NO: 164174 - DNA, 25 bp, Probe sequence
tacagcatttactgcaaatatctac

SEQ ID NO: 164175 - DNA, 25 bp, Probe sequence
tagtagcgatgatggttataagtat

SEQ ID NO: 164176 - DNA, 25 bp, Probe sequence
tttactaattgttccagacttaatt

SEQ ID NO: 164177 - DNA, 25 bp, Probe sequence
ttactgcaaatatctactataaatc

SEQ ID NO: 164178 - DNA, 25 bp, Probe sequence
ttaacaactgtagatttcgaatttt

SEQ ID NO: 164179 - DNA, 25 bp, Probe sequence
atttactatgattgagatgcttgtg

SEQ ID NO: 164180 - DNA, 25 bp, Probe sequence
atattaagtcgcaagctatagcaaa

SEQ ID NO: 164181 - DNA, 25 bp, Probe sequence
atatcaataaatttggtagcataac

SEQ ID NO: 164182 - DNA, 25 bp, Probe sequence
atgattgagatgcttgtggtaatga

SEQ ID NO: 164183 - DNA, 25 bp, Probe sequence
agatgatgaggcaaatatcatttct

SEQ ID NO: 164184 - DNA, 25 bp, Probe sequence
actgaattgaattatattaagtcgc

SEQ ID NO: 164185 - DNA, 25 bp, Probe sequence
actatgattgagatgcttgtggtaa

SEQ ID NO: 164186 - DNA, 25 bp, Probe sequence
aaacagtgacactattaaagtaata

SEQ ID NO: 164187 - DNA, 25 bp, Probe sequence
aagttgatattattgcctttgataa

SEQ ID NO: 164188 - DNA, 25 bp, Probe sequence
aaggattaagcaatcttagagtaat

SEQ ID NO: 164189 - DNA, 25 bp, Probe sequence
aataattaatgttgcaaaagttgat

SEQ ID NO: 164190 - DNA, 25 bp, Probe sequence
cagtcagcatttactatgattgaga

SEQ ID NO: 164191 - DNA, 25 bp, Probe sequence
cttagagtaatagatgatgaggcaa

SEQ ID NO: 164192 - DNA, 25 bp, Probe sequence
gcaaatcaaggatatatcaatgtta

SEQ ID NO: 164193 - DNA, 25 bp, Probe sequence
gcaaaagttgatattattgcctttg

SEQ ID NO: 164194 - DNA, 25 bp, Probe sequence
gcaagctatagcaaatcaaggatat

SEQ ID NO: 164195 - DNA, 25 bp, Probe sequence
gagatgcttgtggtaatgatgttaa

SEQ ID NO: 164196 - DNA, 25 bp, Probe sequence
gatgcttgtggtaatgatgttaatc

SEQ ID NO: 164197 - DNA, 25 bp, Probe sequence
gattttatgaaaacagtgacactat

SEQ ID NO: 164198 - DNA, 25 bp, Probe sequence
gattgagatgcttgtggtaatgatg

SEQ ID NO: 164199 - DNA, 25 bp, Probe sequence
gttgatattattgcctttgataaaa

SEQ ID NO: 164200 - DNA, 25 bp, Probe sequence
gtcagcatttactatgattgagatg

SEQ ID NO: 164201 - DNA, 25 bp, Probe sequence
gtcgcaagctatagcaaatcaagga

SEQ ID NO: 164202 - DNA, 25 bp, Probe sequence
gggaatatcaataaatttggtagca

SEQ ID NO: 164203 - DNA, 25 bp, Probe sequence
ggtaatgatgttaatcagtatattt

SEQ ID NO: 164204 - DNA, 25 bp, Probe sequence
ggatatatcaatgttagattttatg

SEQ ID NO: 164205 - DNA, 25 bp, Probe sequence
ggaagaattcgttatgaaaagctat

SEQ ID NO: 164206 - DNA, 25 bp, Probe sequence
tgacatctaaaggattaagcaatct

SEQ ID NO: 164207 - DNA, 25 bp, Probe sequence
tgaattatattaagtcgcaagctat

SEQ ID NO: 164208 - DNA, 25 bp, Probe sequence
tgcttgtggtaatgatgttaatcag

SEQ ID NO: 164209 - DNA, 25 bp, Probe sequence
taagtcgcaagctatagcaaatcaa

SEQ ID NO: 164210 - DNA, 25 bp, Probe sequence
tattaagtcgcaagctatagcaaat

SEQ ID NO: 164211 - DNA, 25 bp, Probe sequence
ttactatgattgagatgcttgtggt

SEQ ID NO: 164212 - DNA, 25 bp, Probe sequence
ttgagatgcttgtggtaatgatgtt

SEQ ID NO: 164213 - DNA, 25 bp, Probe sequence
attgctaaacaaactgctcacatac

SEQ ID NO: 164214 - DNA, 25 bp, Probe sequence
atccatcgtctattgaagacttaat

SEQ ID NO: 164215 - DNA, 25 bp, Probe sequence
actgctcacatacaatcaacaggtt

SEQ ID NO: 164216 - DNA, 25 bp, Probe sequence
acaaactgctcacatacaatcaaca

SEQ ID NO: 164217 - DNA, 25 bp, Probe sequence
aaattgaagcgtatgcattgaaaca

SEQ ID NO: 164218 - DNA, 25 bp, Probe sequence
aaactgctcacatacaatcaacagg

SEQ ID NO: 164219 - DNA, 25 bp, Probe sequence
aaacaaactgctcacatacaatcaa

SEQ ID NO: 164220 - DNA, 25 bp, Probe sequence
aaaagacatgtaaatcaggagagac

SEQ ID NO: 164221 - DNA, 25 bp, Probe sequence
aacaaactgctcacatacaatcaac

SEQ ID NO: 164222 - DNA, 25 bp, Probe sequence
aacaggttgtaatgcacaggtaaaa

SEQ ID NO: 164223 - DNA, 25 bp, Probe sequence
aactcaagcgtttacattgatagag

SEQ ID NO: 164224 - DNA, 25 bp, Probe sequence
aagaaaactcaagcgtttacattga

SEQ ID NO: 164225 - DNA, 25 bp, Probe sequence
aatcaacaggttgtaatgcacaggt

SEQ ID NO: 164226 - DNA, 25 bp, Probe sequence
aattttaatcattccaaatattgct

SEQ ID NO: 164227 - DNA, 25 bp, Probe sequence
aattgcagatggttttataaaagaa

SEQ ID NO: 164228 - DNA, 25 bp, Probe sequence
caagcgtttacattgatagagatgc

SEQ ID NO: 164229 - DNA, 25 bp, Probe sequence
gcgtttacattgatagagatgctat

SEQ ID NO: 164230 - DNA, 25 bp, Probe sequence
gcacaggtaaaaatggttaatagtc

SEQ ID NO: 164231 - DNA, 25 bp, Probe sequence
gaagacttaattgcagatggtttta

SEQ ID NO: 164232 - DNA, 25 bp, Probe sequence
gaagcgtatgcattgaaacataata

SEQ ID NO: 164233 - DNA, 25 bp, Probe sequence
gaaaactcaagcgtttacattgata

SEQ ID NO: 164234 - DNA, 25 bp, Probe sequence
gaaacataatagaaatccatcgtct

SEQ ID NO: 164235 - DNA, 25 bp, Probe sequence
gaaatccatcgtctattgaagactt

SEQ ID NO: 164236 - DNA, 25 bp, Probe sequence
gacttaattgcagatggttttataa

SEQ ID NO: 164237 - DNA, 25 bp, Probe sequence
gagatgctattagtgttattaatca

SEQ ID NO: 164238 - DNA, 25 bp, Probe sequence
gtctattgaagacttaattgcagat

SEQ ID NO: 164239 - DNA, 25 bp, Probe sequence
tgctaaacaaactgctcacatacaa

SEQ ID NO: 164240 - DNA, 25 bp, Probe sequence
tgctcacatacaatcaacaggttgt

SEQ ID NO: 164241 - DNA, 25 bp, Probe sequence
tcaacaggttgtaatgcacaggtaa

SEQ ID NO: 164242 - DNA, 25 bp, Probe sequence
taatcattccaaatattgctaaaca

SEQ ID NO: 164243 - DNA, 25 bp, Probe sequence
taatcatcagtttattattaatttt

SEQ ID NO: 164244 - DNA, 25 bp, Probe sequence
tagaaatccatcgtctattgaagac

SEQ ID NO: 164245 - DNA, 25 bp, Probe sequence
tagtcaaattgaagcgtatgcattg

SEQ ID NO: 164246 - DNA, 25 bp, Probe sequence
tagtgttattaatcatcagtttatt

SEQ ID NO: 164247 - DNA, 25 bp, Probe sequence
atattcaactatcttcttttcaaaa

SEQ ID NO: 164248 - DNA, 25 bp, Probe sequence
atatcaggctatttccaattattta

SEQ ID NO: 164249 - DNA, 25 bp, Probe sequence
atcactgataggttatagcgatact

SEQ ID NO: 164250 - DNA, 25 bp, Probe sequence
agtagacgtttatattaaccatagt

SEQ ID NO: 164251 - DNA, 25 bp, Probe sequence
acctcacagtaattccacagtttca

SEQ ID NO: 164252 - DNA, 25 bp, Probe sequence
acagtaattccacagtttcaacaat

SEQ ID NO: 164253 - DNA, 25 bp, Probe sequence
aaatgctttaagcctcaattaatta

SEQ ID NO: 164254 - DNA, 25 bp, Probe sequence
aaactttgtgatgaaactaccgcta

SEQ ID NO: 164255 - DNA, 25 bp, Probe sequence
aaaatggtattacacttcaatcaat

SEQ ID NO: 164256 - DNA, 25 bp, Probe sequence
aacattgtcttttttcattaccagc

SEQ ID NO: 164257 - DNA, 25 bp, Probe sequence
aatgggatatggtttgcctcaaatt

SEQ ID NO: 164258 - DNA, 25 bp, Probe sequence
aatacatttaaactacattctaaga

SEQ ID NO: 164259 - DNA, 25 bp, Probe sequence
cagactcagtttttacagcctattt

SEQ ID NO: 164260 - DNA, 25 bp, Probe sequence
gcgacaattaagtaaggcccaacaa

SEQ ID NO: 164261 - DNA, 25 bp, Probe sequence
gcaataccccttaatactagtttct

SEQ ID NO: 164262 - DNA, 25 bp, Probe sequence
gaaactaccgctaatatcaggctat

SEQ ID NO: 164263 - DNA, 25 bp, Probe sequence
gaaatatggtttcactctgtatcaa

SEQ ID NO: 164264 - DNA, 25 bp, Probe sequence
gacagtttctaggtaaatacttatt

SEQ ID NO: 164265 - DNA, 25 bp, Probe sequence
gataaagcgataaaacagactcagt

SEQ ID NO: 164266 - DNA, 25 bp, Probe sequence
gattattatattaaacctcacagta

SEQ ID NO: 164267 - DNA, 25 bp, Probe sequence
gttaaagacactgcaatacccctta

SEQ ID NO: 164268 - DNA, 25 bp, Probe sequence
gtttcaacaattatatacttctatg

SEQ ID NO: 164269 - DNA, 25 bp, Probe sequence
gtatctatgttggctattattatga

SEQ ID NO: 164270 - DNA, 25 bp, Probe sequence
gtagtgatccatttagacagtttct

SEQ ID NO: 164271 - DNA, 25 bp, Probe sequence
gtagtaatgctcataatagtatcta

SEQ ID NO: 164272 - DNA, 25 bp, Probe sequence
gtaccaccattctaagtgaaatttc

SEQ ID NO: 164273 - DNA, 25 bp, Probe sequence
gtcttttttcattaccagcttacct

SEQ ID NO: 164274 - DNA, 25 bp, Probe sequence
gtgaaatttcaaatggtgcaccatg

SEQ ID NO: 164275 - DNA, 25 bp, Probe sequence
ggtttcactctgtatcaaagttttc

SEQ ID NO: 164276 - DNA, 25 bp, Probe sequence
taagcaattaggtaccaccattcta

SEQ ID NO: 164277 - DNA, 25 bp, Probe sequence
tacagcctattttatttttgatttt

SEQ ID NO: 164278 - DNA, 25 bp, Probe sequence
taggtttatttattgtcgcaattta

SEQ ID NO: 164279 - DNA, 25 bp, Probe sequence
tattaaccatagtagtgatccattt

SEQ ID NO: 164280 - DNA, 25 bp, Probe sequence
ttaccagcttacctactataattgt

SEQ ID NO: 164281 - DNA, 25 bp, Probe sequence
atttcttttcccataatcattcatt

SEQ ID NO: 164282 - DNA, 25 bp, Probe sequence
atacaggctagtttaagtggtcacc

SEQ ID NO: 164283 - DNA, 25 bp, Probe sequence
atgtatcaaatggtctcatacgcga

SEQ ID NO: 164284 - DNA, 25 bp, Probe sequence
agtggtcaccttgttctgactacat

SEQ ID NO: 164285 - DNA, 25 bp, Probe sequence
agtgatgtacattttattccagtta

SEQ ID NO: 164286 - DNA, 25 bp, Probe sequence
agcaggtgtcatttgtgaaactaca

SEQ ID NO: 164287 - DNA, 25 bp, Probe sequence
acagcaagtcgcacagagcggtcga

SEQ ID NO: 164288 - DNA, 25 bp, Probe sequence
aaaggtgctattttaaggctattag

SEQ ID NO: 164289 - DNA, 25 bp, Probe sequence
aaagctattttaagatgtgatcctg

SEQ ID NO: 164290 - DNA, 25 bp, Probe sequence
aagctgggcttgatgtttctacaca

SEQ ID NO: 164291 - DNA, 25 bp, Probe sequence
cagaattgtacctcaattttttcaa

SEQ ID NO: 164292 - DNA, 25 bp, Probe sequence
cgcacagagcggtcgatatagttac

SEQ ID NO: 164293 - DNA, 25 bp, Probe sequence
gcatgcaactgattgtaaaggtgct

SEQ ID NO: 164294 - DNA, 25 bp, Probe sequence
gcaacaactccgatatttcttttcc

SEQ ID NO: 164295 - DNA, 25 bp, Probe sequence
gaatatcaactttaccattgtcact

SEQ ID NO: 164296 - DNA, 25 bp, Probe sequence
gaaatgggcatttctgtacaagaat

SEQ ID NO: 164297 - DNA, 25 bp, Probe sequence
gaaattctatctcagcaacaactcc

SEQ ID NO: 164298 - DNA, 25 bp, Probe sequence
gatcctgtagagatgcaaattcctg

SEQ ID NO: 164299 - DNA, 25 bp, Probe sequence
gatgtttctacacagcaagtcgcac

SEQ ID NO: 164300 - DNA, 25 bp, Probe sequence
gatgtgatcctgatgttattttaat

SEQ ID NO: 164301 - DNA, 25 bp, Probe sequence
gatgttgccaagtgtgttatacagg

SEQ ID NO: 164302 - DNA, 25 bp, Probe sequence
gatacaggcaactaacttaattata

SEQ ID NO: 164303 - DNA, 25 bp, Probe sequence
gattttaaacacctcatgaataaga

SEQ ID NO: 164304 - DNA, 25 bp, Probe sequence
gttgtgttatcagaattgtacctca

SEQ ID NO: 164305 - DNA, 25 bp, Probe sequence
gttctgactacattgcatgcaactg

SEQ ID NO: 164306 - DNA, 25 bp, Probe sequence
gtaactactattaagcaacagcgac

SEQ ID NO: 164307 - DNA, 25 bp, Probe sequence
gtaatttctatagaggatcctgtag

SEQ ID NO: 164308 - DNA, 25 bp, Probe sequence
ggtctcatacgcgaataaagccttg

SEQ ID NO: 164309 - DNA, 25 bp, Probe sequence
taatcattcattaccatcatcattt

SEQ ID NO: 164310 - DNA, 25 bp, Probe sequence
taaaccaacgacttgtaactactat

SEQ ID NO: 164311 - DNA, 25 bp, Probe sequence
taccatcatcatttaagaacttaga

SEQ ID NO: 164312 - DNA, 25 bp, Probe sequence
tagagatgcaaattcctggtatcgt

SEQ ID NO: 164313 - DNA, 25 bp, Probe sequence
tatatgaagtttcaagctgggcttg

SEQ ID NO: 164314 - DNA, 25 bp, Probe sequence
ttaccattgtcacttggccaagaaa

SEQ ID NO: 164315 - DNA, 25 bp, Probe sequence
atatggattaccaattattacaagt

SEQ ID NO: 164316 - DNA, 25 bp, Probe sequence
atcgattcgatgtcccggtttatat

SEQ ID NO: 164317 - DNA, 25 bp, Probe sequence
atggaatcggacgtacagatttata

SEQ ID NO: 164318 - DNA, 25 bp, Probe sequence
acctttattccctggacatggtcca

SEQ ID NO: 164319 - DNA, 25 bp, Probe sequence
aaagctattttattaacacatgcac

SEQ ID NO: 164320 - DNA, 25 bp, Probe sequence
aagctgttattctgattgacccttc

SEQ ID NO: 164321 - DNA, 25 bp, Probe sequence
cactttgatcatatcggagcagtcg

SEQ ID NO: 164322 - DNA, 25 bp, Probe sequence
cacatgcacactttgatcatatcgg

SEQ ID NO: 164323 - DNA, 25 bp, Probe sequence
cggagcagtcgatgatatagttgat

SEQ ID NO: 164324 - DNA, 25 bp, Probe sequence
ctgattgacccttcaggtgaaagtg

SEQ ID NO: 164325 - DNA, 25 bp, Probe sequence
gcttaactttaggcttagttgatac

SEQ ID NO: 164326 - DNA, 25 bp, Probe sequence
gcatgaagcagagtttgattttcta

SEQ ID NO: 164327 - DNA, 25 bp, Probe sequence
gaaggcgatttacctttattccctg

SEQ ID NO: 164328 - DNA, 25 bp, Probe sequence
gaacaattaaatccatttttacacg

SEQ ID NO: 164329 - DNA, 25 bp, Probe sequence
gagtttgattttctaaaagatcccg

SEQ ID NO: 164330 - DNA, 25 bp, Probe sequence
gaggatttcaagcttaactttaggc

SEQ ID NO: 164331 - DNA, 25 bp, Probe sequence
gatgaattcgcagttgttggagata

SEQ ID NO: 164332 - DNA, 25 bp, Probe sequence
gatactaatacgtatttcatcgaaa

SEQ ID NO: 164333 - DNA, 25 bp, Probe sequence
gatttacctttattccctggacatg

SEQ ID NO: 164334 - DNA, 25 bp, Probe sequence
gatttaagtttaatgtgttacacac

SEQ ID NO: 164335 - DNA, 25 bp, Probe sequence
gttaaacgaaggtagcacagaaata

SEQ ID NO: 164336 - DNA, 25 bp, Probe sequence
gttacacacacctggacattcacca

SEQ ID NO: 164337 - DNA, 25 bp, Probe sequence
gttattctgattgacccttcaggtg

SEQ ID NO: 164338 - DNA, 25 bp, Probe sequence
ggacatggtccatatacgacggttg

SEQ ID NO: 164339 - DNA, 25 bp, Probe sequence
gtcccggtttatatgcatgaagcag

SEQ ID NO: 164340 - DNA, 25 bp, Probe sequence
gtgttacacacacctggacattcac

SEQ ID NO: 164341 - DNA, 25 bp, Probe sequence
ggtccatatacgacggttgatgatg

SEQ ID NO: 164342 - DNA, 25 bp, Probe sequence
ggacattcaccaggaagtttaacat

SEQ ID NO: 164343 - DNA, 25 bp, Probe sequence
tcgatgtcccggtttatatgcatga

SEQ ID NO: 164344 - DNA, 25 bp, Probe sequence
tacaagtaaggtaactcctgaaaag

SEQ ID NO: 164345 - DNA, 25 bp, Probe sequence
tacgacggttgatgatgaacaatta

SEQ ID NO: 164346 - DNA, 25 bp, Probe sequence
tagttgatcgattcgatgtcccggt

SEQ ID NO: 164347 - DNA, 25 bp, Probe sequence
tatgaaacgctagttgattctattc

SEQ ID NO: 164348 - DNA, 25 bp, Probe sequence
tattaacacatgcacactttgatca

SEQ ID NO: 164349 - DNA, 25 bp, Probe sequence
attgatgaccgacgagacaaatcta

SEQ ID NO: 164350 - DNA, 25 bp, Probe sequence
attgattttcaattaacaccaatga

SEQ ID NO: 164351 - DNA, 25 bp, Probe sequence
atgaatactctaattgaaggtgaat

SEQ ID NO: 164352 - DNA, 25 bp, Probe sequence
atgtggttgttattccagttggaac

SEQ ID NO: 164353 - DNA, 25 bp, Probe sequence
atggctattgttgatgtggttgtta

SEQ ID NO: 164354 - DNA, 25 bp, Probe sequence
actaacatcagtacaaaaacattta

SEQ ID NO: 164355 - DNA, 25 bp, Probe sequence
aacaccaatgaatactctaattgaa

SEQ ID NO: 164356 - DNA, 25 bp, Probe sequence
aagcgatgtattagaagttgtgcaa

SEQ ID NO: 164357 - DNA, 25 bp, Probe sequence
aaggtccgagtgttagtaaatatat

SEQ ID NO: 164358 - DNA, 25 bp, Probe sequence
aatatccgtattgatgaccgacgag

SEQ ID NO: 164359 - DNA, 25 bp, Probe sequence
caattaacaccaatgaatactctaa

SEQ ID NO: 164360 - DNA, 25 bp, Probe sequence
caaatatccgtattgatgaccgacg

SEQ ID NO: 164361 - DNA, 25 bp, Probe sequence
gcagatattcagaaaaaacttcaag

SEQ ID NO: 164362 - DNA, 25 bp, Probe sequence
gaatgataaactaacatcagtacaa

SEQ ID NO: 164363 - DNA, 25 bp, Probe sequence
gaaggtgaattaagcgatgtattag

SEQ ID NO: 164364 - DNA, 25 bp, Probe sequence
gaagttgtgcaagtgatacatgaat

SEQ ID NO: 164365 - DNA, 25 bp, Probe sequence
gaccgacgagacaaatctagaaaaa

SEQ ID NO: 164366 - DNA, 25 bp, Probe sequence
gagtttgtacaaatatccgtattga

SEQ ID NO: 164367 - DNA, 25 bp, Probe sequence
gatgtattagaagttgtgcaagtga

SEQ ID NO: 164368 - DNA, 25 bp, Probe sequence
gatgaccgacgagacaaatctagaa

SEQ ID NO: 164369 - DNA, 25 bp, Probe sequence
gatacatgaattaccttttgataaa

SEQ ID NO: 164370 - DNA, 25 bp, Probe sequence
gttgatgtggttgttattccagttg

SEQ ID NO: 164371 - DNA, 25 bp, Probe sequence
gtattgatgaccgacgagacaaatc

SEQ ID NO: 164372 - DNA, 25 bp, Probe sequence
gtagagtttgtacaaatatccgtat

SEQ ID NO: 164373 - DNA, 25 bp, Probe sequence
gtacaaatatccgtattgatgaccg

SEQ ID NO: 164374 - DNA, 25 bp, Probe sequence
ggaaggtccgagtgttagtaaatat

SEQ ID NO: 164375 - DNA, 25 bp, Probe sequence
gtgatacatgaattaccttttgata

SEQ ID NO: 164376 - DNA, 25 bp, Probe sequence
gtggttgttattccagttggaacgg

SEQ ID NO: 164377 - DNA, 25 bp, Probe sequence
tggaacggaaggtccgagtgttagt

SEQ ID NO: 164378 - DNA, 25 bp, Probe sequence
ggctattgttgatgtggttgttatt

SEQ ID NO: 164379 - DNA, 25 bp, Probe sequence
tccgtattgatgaccgacgagacaa

SEQ ID NO: 164380 - DNA, 25 bp, Probe sequence
tatccgtattgatgaccgacgagac

SEQ ID NO: 164381 - DNA, 25 bp, Probe sequence
tattccagttggaacggaaggtccg

SEQ ID NO: 164382 - DNA, 25 bp, Probe sequence
ttccagttggaacggaaggtccgag

SEQ ID NO: 164383 - DNA, 25 bp, Probe sequence
atttgcacctgctcaatttgaaact

SEQ ID NO: 164384 - DNA, 25 bp, Probe sequence
atatcataatttaacatttgcacct

SEQ ID NO: 164385 - DNA, 25 bp, Probe sequence
atagctgctttaggggagaaacaca

SEQ ID NO: 164386 - DNA, 25 bp, Probe sequence
atgtacttggcgtaggtattggtgt

SEQ ID NO: 164387 - DNA, 25 bp, Probe sequence
atggtcataatggctctggcgcaga

SEQ ID NO: 164388 - DNA, 25 bp, Probe sequence
aggtggaggaatgtctactgcagga

SEQ ID NO: 164389 - DNA, 25 bp, Probe sequence
agcagctgatgtaggcgggacgact

SEQ ID NO: 164390 - DNA, 25 bp, Probe sequence
agctggtgaccaattctgtattttc

SEQ ID NO: 164391 - DNA, 25 bp, Probe sequence
actgcaggacctattttaattgaaa

SEQ ID NO: 164392 - DNA, 25 bp, Probe sequence
aaatgtaattgtggtcgttctggat

SEQ ID NO: 164393 - DNA, 25 bp, Probe sequence
aaaggtgctggtgaaggtgccgatg

SEQ ID NO: 164394 - DNA, 25 bp, Probe sequence
aatggtctattcacactgatacatc

SEQ ID NO: 164395 - DNA, 25 bp, Probe sequence
aatggtgaaatcgtacatggtcata

SEQ ID NO: 164396 - DNA, 25 bp, Probe sequence
aatccgaaatatatcgttctaggtg

SEQ ID NO: 164397 - DNA, 25 bp, Probe sequence
aattaggtattttcacacctgaatt

SEQ ID NO: 164398 - DNA, 25 bp, Probe sequence
aattcgttgattgtccagtgtatgt

SEQ ID NO: 164399 - DNA, 25 bp, Probe sequence
cacactgatacatctgatagtacag

SEQ ID NO: 164400 - DNA, 25 bp, Probe sequence
cagcaaaagctgtttttgatgcggc

SEQ ID NO: 164401 - DNA, 25 bp, Probe sequence
gcgggacgacttgtaaattaggtat

SEQ ID NO: 164402 - DNA, 25 bp, Probe sequence
ccaggtcctgttgactttgaaaaag

SEQ ID NO: 164403 - DNA, 25 bp, Probe sequence
gctctggcgcagaaataggtcattt

SEQ ID NO: 164404 - DNA, 25 bp, Probe sequence
gcaggtattacaggagcagcaggat

SEQ ID NO: 164405 - DNA, 25 bp, Probe sequence
gcagcaggattaatcaagacctatg

SEQ ID NO: 164406 - DNA, 25 bp, Probe sequence
gaaggtgccgatgatgttgttgcca

SEQ ID NO: 164407 - DNA, 25 bp, Probe sequence
gaatgtctactgcaggacctatttt

SEQ ID NO: 164408 - DNA, 25 bp, Probe sequence
gagcagacttcgatcaacgatttaa

SEQ ID NO: 164409 - DNA, 25 bp, Probe sequence
gagcagtaaacttatattggccaga

SEQ ID NO: 164410 - DNA, 25 bp, Probe sequence
gatgctaacatagctgctttagggg

SEQ ID NO: 164411 - DNA, 25 bp, Probe sequence
gttgacgtttagatcttctatatta

SEQ ID NO: 164412 - DNA, 25 bp, Probe sequence
gttgttgccatcacacttggtacag

SEQ ID NO: 164413 - DNA, 25 bp, Probe sequence
gtggtcgttctggatgtattgaaac

SEQ ID NO: 164414 - DNA, 25 bp, Probe sequence
taggtcattttagagcagacttcga

SEQ ID NO: 164415 - DNA, 25 bp, Probe sequence
ttctactatccgaagttgacgttta

SEQ ID NO: 164416 - DNA, 25 bp, Probe sequence
ttgaaacagttgcttcagcgacagg

SEQ ID NO: 164417 - DNA, 25 bp, Probe sequence
attcaacaggagatttcatcattgt

SEQ ID NO: 164418 - DNA, 25 bp, Probe sequence
atatttgaaatgtacgttgataatt

SEQ ID NO: 164419 - DNA, 25 bp, Probe sequence
atatgaactgttatctaaggaagaa

SEQ ID NO: 164420 - DNA, 25 bp, Probe sequence
ataacttttatgatgtacaacagtt

SEQ ID NO: 164421 - DNA, 25 bp, Probe sequence
atcaatatgaactgttatctaagga

SEQ ID NO: 164422 - DNA, 25 bp, Probe sequence
atgtacgaaatgattcaacaggaga

SEQ ID NO: 164423 - DNA, 25 bp, Probe sequence
aggagatttcatcattgtatcaata

SEQ ID NO: 164424 - DNA, 25 bp, Probe sequence
agatttcatcattgtatcaatatga

SEQ ID NO: 164425 - DNA, 25 bp, Probe sequence
acttttatgatgtacaacagttatt

SEQ ID NO: 164426 - DNA, 25 bp, Probe sequence
acaggagatttcatcattgtatcaa

SEQ ID NO: 164427 - DNA, 25 bp, Probe sequence
aaataacttttatgatgtacaacag

SEQ ID NO: 164428 - DNA, 25 bp, Probe sequence
aacaggagatttcatcattgtatca

SEQ ID NO: 164429 - DNA, 25 bp, Probe sequence
caatatgaactgttatctaaggaag

SEQ ID NO: 164430 - DNA, 25 bp, Probe sequence
caacaggagatttcatcattgtatc

SEQ ID NO: 164431 - DNA, 25 bp, Probe sequence
caggagatttcatcattgtatcaat

SEQ ID NO: 164432 - DNA, 25 bp, Probe sequence
cattgtatcaatatgaactgttatc

SEQ ID NO: 164433 - DNA, 25 bp, Probe sequence
gaatatttgaaatgtacgttgataa

SEQ ID NO: 164434 - DNA, 25 bp, Probe sequence
gaagatatgtacgaaatgattcaac

SEQ ID NO: 164435 - DNA, 25 bp, Probe sequence
gaactgttatctaaggaagaatatt

SEQ ID NO: 164436 - DNA, 25 bp, Probe sequence
gaaaagttacggatttctaatatat

SEQ ID NO: 164437 - DNA, 25 bp, Probe sequence
gagatttcatcattgtatcaatatg

SEQ ID NO: 164438 - DNA, 25 bp, Probe sequence
gatgtacaacagttattgaaaagtt

SEQ ID NO: 164439 - DNA, 25 bp, Probe sequence
gatatgtacgaaatgattcaacagg

SEQ ID NO: 164440 - DNA, 25 bp, Probe sequence
gattcaacaggagatttcatcattg

SEQ ID NO: 164441 - DNA, 25 bp, Probe sequence
gtatcaatatgaactgttatctaag

SEQ ID NO: 164442 - DNA, 25 bp, Probe sequence
gtacgaaatgattcaacaggagatt

SEQ ID NO: 164443 - DNA, 25 bp, Probe sequence
gtacgttgataattaatcagagaag

SEQ ID NO: 164444 - DNA, 25 bp, Probe sequence
ggagatttcatcattgtatcaatat

SEQ ID NO: 164445 - DNA, 25 bp, Probe sequence
tcatcattgtatcaatatgaactgt

SEQ ID NO: 164446 - DNA, 25 bp, Probe sequence
tcaacaggagatttcatcattgtat

SEQ ID NO: 164447 - DNA, 25 bp, Probe sequence
tttatgatgtacaacagttattgaa

SEQ ID NO: 164448 - DNA, 25 bp, Probe sequence
ttcaacaggagatttcatcattgta

SEQ ID NO: 164449 - DNA, 25 bp, Probe sequence
ttgaaatgtacgttgataattaatc

SEQ ID NO: 164450 - DNA, 25 bp, Probe sequence
ttgtatcaatatgaactgttatcta

SEQ ID NO: 164451 - DNA, 25 bp, Probe sequence
atttttggctagacttatttcagaa

SEQ ID NO: 164452 - DNA, 25 bp, Probe sequence
atcactatcatttaatacgactaca

SEQ ID NO: 164453 - DNA, 25 bp, Probe sequence
atgccgatgatcaaacatattattt

SEQ ID NO: 164454 - DNA, 25 bp, Probe sequence
agtcgaagcaattattggttcatgg

SEQ ID NO: 164455 - DNA, 25 bp, Probe sequence
agtgcattttaatgtcgtacatggt

SEQ ID NO: 164456 - DNA, 25 bp, Probe sequence
aaacaacatatcaagtctacccaag

SEQ ID NO: 164457 - DNA, 25 bp, Probe sequence
aagcattaaatgcagaccctaaaaa

SEQ ID NO: 164458 - DNA, 25 bp, Probe sequence
aagtggtatgattatggctactatc

SEQ ID NO: 164459 - DNA, 25 bp, Probe sequence
aataactttaattggctattactat

SEQ ID NO: 164460 - DNA, 25 bp, Probe sequence
caatttttgcgatgatgtatgtttc

SEQ ID NO: 164461 - DNA, 25 bp, Probe sequence
cagttggggctagtggtgctatatt

SEQ ID NO: 164462 - DNA, 25 bp, Probe sequence
gcttgttatatttattgcacttcaa

SEQ ID NO: 164463 - DNA, 25 bp, Probe sequence
gcatatgccgaatatatttttggct

SEQ ID NO: 164464 - DNA, 25 bp, Probe sequence
gcagaaattttcaccggcaacatac

SEQ ID NO: 164465 - DNA, 25 bp, Probe sequence
gaatgtttcctaaatcaggtttatt

SEQ ID NO: 164466 - DNA, 25 bp, Probe sequence
gacaaagcgaaagtgcttgaacaca

SEQ ID NO: 164467 - DNA, 25 bp, Probe sequence
gaccaagaaatttggttagcccata

SEQ ID NO: 164468 - DNA, 25 bp, Probe sequence
gagttagcgatagcaaatcgttcat

SEQ ID NO: 164469 - DNA, 25 bp, Probe sequence
gatgttggcgggttagtgcatttta

SEQ ID NO: 164470 - DNA, 25 bp, Probe sequence
gatattagttggtgtttctctgttt

SEQ ID NO: 164471 - DNA, 25 bp, Probe sequence
gttacatcgatgtttttacatttta

SEQ ID NO: 164472 - DNA, 25 bp, Probe sequence
gttaggacagttattaattgcatta

SEQ ID NO: 164473 - DNA, 25 bp, Probe sequence
gtttggaaactttgtatcactatca

SEQ ID NO: 164474 - DNA, 25 bp, Probe sequence
gggagcgaggacttagaatgtttcc

SEQ ID NO: 164475 - DNA, 25 bp, Probe sequence
ggtgtttctctgtttatgtcaaata

SEQ ID NO: 164476 - DNA, 25 bp, Probe sequence
ggtatgacagaatgggagcgaggac

SEQ ID NO: 164477 - DNA, 25 bp, Probe sequence
ggtacttgaattttgatattgtcag

SEQ ID NO: 164478 - DNA, 25 bp, Probe sequence
ggatgttaactgtatactttattgc

SEQ ID NO: 164479 - DNA, 25 bp, Probe sequence
tctttcgaaccacaaagttttgaat

SEQ ID NO: 164480 - DNA, 25 bp, Probe sequence
tctacccaagaaatacgttttgaca

SEQ ID NO: 164481 - DNA, 25 bp, Probe sequence
tacgactacaatttcagttggggct

SEQ ID NO: 164482 - DNA, 25 bp, Probe sequence
tatgctttcattatttatttttggt

SEQ ID NO: 164483 - DNA, 25 bp, Probe sequence
ttttcaccggcaacatacacaataa

SEQ ID NO: 164484 - DNA, 25 bp, Probe sequence
ttatggctactatcaattctaagtc

SEQ ID NO: 164485 - DNA, 25 bp, Probe sequence
attggtatgggctgggttgttctca

SEQ ID NO: 164486 - DNA, 25 bp, Probe sequence
attggtttcattatcggcttcatta

SEQ ID NO: 164487 - DNA, 25 bp, Probe sequence
attattatgtactcagtcccagtgt

SEQ ID NO: 164488 - DNA, 25 bp, Probe sequence
atttataccctactagcaatcatgg

SEQ ID NO: 164489 - DNA, 25 bp, Probe sequence
atttgaaattgcatcgcgtgttaat

SEQ ID NO: 164490 - DNA, 25 bp, Probe sequence
atcaatgtaccattttctttacaat

SEQ ID NO: 164491 - DNA, 25 bp, Probe sequence
atccggtattcttagtattattagc

SEQ ID NO: 164492 - DNA, 25 bp, Probe sequence
atccatccattaggtggcatatctg

SEQ ID NO: 164493 - DNA, 25 bp, Probe sequence
agagttcatttcaagcacatcattc

SEQ ID NO: 164494 - DNA, 25 bp, Probe sequence
agcacatcattctcacaaactttga

SEQ ID NO: 164495 - DNA, 25 bp, Probe sequence
agcttcgtcttctttgtgattgcat

SEQ ID NO: 164496 - DNA, 25 bp, Probe sequence
acagcaattggcttaccatttctag

SEQ ID NO: 164497 - DNA, 25 bp, Probe sequence
acaataccttagatgcgctagcgtc

SEQ ID NO: 164498 - DNA, 25 bp, Probe sequence
aaagctagtccagagttcatttcaa

SEQ ID NO: 164499 - DNA, 25 bp, Probe sequence
aaaatggtggtattgccttagcgca

SEQ ID NO: 164500 - DNA, 25 bp, Probe sequence
aagtctggtactatcagtatcatta

SEQ ID NO: 164501 - DNA, 25 bp, Probe sequence
cacttgggtcaagctgctggttcta

SEQ ID NO: 164502 - DNA, 25 bp, Probe sequence
cttatcttcccaatacacttgggtc

SEQ ID NO: 164503 - DNA, 25 bp, Probe sequence
ccatttctaggtatcattgctattg

SEQ ID NO: 164504 - DNA, 25 bp, Probe sequence
gcgctagcgtcattggcatttggta

SEQ ID NO: 164505 - DNA, 25 bp, Probe sequence
gctggttctaacgtttttatcgcta

SEQ ID NO: 164506 - DNA, 25 bp, Probe sequence
gcatatctgatgcacctattagtaa

SEQ ID NO: 164507 - DNA, 25 bp, Probe sequence
gaattacctagcgattgcaacagtt

SEQ ID NO: 164508 - DNA, 25 bp, Probe sequence
gttcttatatccattagcaattgcc

SEQ ID NO: 164509 - DNA, 25 bp, Probe sequence
gtgattgcatggttttttgcgagaa

SEQ ID NO: 164510 - DNA, 25 bp, Probe sequence
ggttctatgttatttggtttattct

SEQ ID NO: 164511 - DNA, 25 bp, Probe sequence
ggttgttctcagtttgattggtttc

SEQ ID NO: 164512 - DNA, 25 bp, Probe sequence
ttttcgccttacctagactggcaac

SEQ ID NO: 164513 - DNA, 25 bp, Probe sequence
tcagtcccagtgttaatgttcttat

SEQ ID NO: 164514 - DNA, 25 bp, Probe sequence
tagttatcggaccatttttcgcctt

SEQ ID NO: 164515 - DNA, 25 bp, Probe sequence
tattatttgcttttatccatccatt

SEQ ID NO: 164516 - DNA, 25 bp, Probe sequence
ttttcacgattgccttatatctagt

SEQ ID NO: 164517 - DNA, 25 bp, Probe sequence
ttgcattttcgccatttttatcacc

SEQ ID NO: 164518 - DNA, 25 bp, Probe sequence
ttggtttattctttggtgccggcaa

SEQ ID NO: 164519 - DNA, 25 bp, Probe sequence
attgcgctagttctttcttttaatc

SEQ ID NO: 164520 - DNA, 25 bp, Probe sequence
atttaattgttgttcctggtgttgg

SEQ ID NO: 164521 - DNA, 25 bp, Probe sequence
atacgattttcaaataacatcattt

SEQ ID NO: 164522 - DNA, 25 bp, Probe sequence
ataagcttattatacgattttcaaa

SEQ ID NO: 164523 - DNA, 25 bp, Probe sequence
atgacatgtattgttattaacgata

SEQ ID NO: 164524 - DNA, 25 bp, Probe sequence
agttctttcttttaatcatgaagta

SEQ ID NO: 164525 - DNA, 25 bp, Probe sequence
agaaatcaattttttgcaactgaag

SEQ ID NO: 164526 - DNA, 25 bp, Probe sequence
acctagatttaattgttgttcctgg

SEQ ID NO: 164527 - DNA, 25 bp, Probe sequence
accggaatcattcgatcaaccagtc

SEQ ID NO: 164528 - DNA, 25 bp, Probe sequence
actttttctattattgaacaagcct

SEQ ID NO: 164529 - DNA, 25 bp, Probe sequence
aaagcgaaaagcagacacatggtta

SEQ ID NO: 164530 - DNA, 25 bp, Probe sequence
aacatcatttgaaccggaatcattc

SEQ ID NO: 164531 - DNA, 25 bp, Probe sequence
aacgcaattgcgctagttctttctt

SEQ ID NO: 164532 - DNA, 25 bp, Probe sequence
caattgcgctagttctttcttttaa

SEQ ID NO: 164533 - DNA, 25 bp, Probe sequence
caattttttgcaactgaagaataca

SEQ ID NO: 164534 - DNA, 25 bp, Probe sequence
gcgctagttctttcttttaatcatg

SEQ ID NO: 164535 - DNA, 25 bp, Probe sequence
gcagacacatggttaagaaatcaat

SEQ ID NO: 164536 - DNA, 25 bp, Probe sequence
gaattgggtatggtggtggctatta

SEQ ID NO: 164537 - DNA, 25 bp, Probe sequence
gaatcattcgatcaaccagtcgata

SEQ ID NO: 164538 - DNA, 25 bp, Probe sequence
gaagtagatactttttctattattg

SEQ ID NO: 164539 - DNA, 25 bp, Probe sequence
gaagcaaacgcaattgcgctagttc

SEQ ID NO: 164540 - DNA, 25 bp, Probe sequence
gaacaagccttaatggatcataaac

SEQ ID NO: 164541 - DNA, 25 bp, Probe sequence
gacaggtttttagctaattatcaga

SEQ ID NO: 164542 - DNA, 25 bp, Probe sequence
gttggatttcaagacgatggatata

SEQ ID NO: 164543 - DNA, 25 bp, Probe sequence
gttcctggtgttggatttcaagacg

SEQ ID NO: 164544 - DNA, 25 bp, Probe sequence
gtgaaacaacgaataacctagattt

SEQ ID NO: 164545 - DNA, 25 bp, Probe sequence
gtgggtgataatgtgactaaaaatg

SEQ ID NO: 164546 - DNA, 25 bp, Probe sequence
ggatttactatccaacttcaaaagg

SEQ ID NO: 164547 - DNA, 25 bp, Probe sequence
tgttgttcctggtgttggatttcaa

SEQ ID NO: 164548 - DNA, 25 bp, Probe sequence
tgaaccggaatcattcgatcaacca

SEQ ID NO: 164549 - DNA, 25 bp, Probe sequence
taatggatcataaacgtatttttgt

SEQ ID NO: 164550 - DNA, 25 bp, Probe sequence
ttactatccaacttcaaaaggtgaa

SEQ ID NO: 164551 - DNA, 25 bp, Probe sequence
ttagctaattatcagacaaagacaa

SEQ ID NO: 164552 - DNA, 25 bp, Probe sequence
ttcgatcaaccagtcgataaattga

SEQ ID NO: 164553 - DNA, 25 bp, Probe sequence
agaaataatccagaacgtgttgaaa

SEQ ID NO: 164554 - DNA, 25 bp, Probe sequence
agcttgtacggaatgtggtgacaga

SEQ ID NO: 164555 - DNA, 25 bp, Probe sequence
acggaatgtggtgacagaaactaca

SEQ ID NO: 164556 - DNA, 25 bp, Probe sequence
actacattacaactaagaacaaaag

SEQ ID NO: 164557 - DNA, 25 bp, Probe sequence
actttagcttgtacggaatgtggtg

SEQ ID NO: 164558 - DNA, 25 bp, Probe sequence
aaagaaataatccagaacgtgttga

SEQ ID NO: 164559 - DNA, 25 bp, Probe sequence
aactttagcttgtacggaatgtggt

SEQ ID NO: 164560 - DNA, 25 bp, Probe sequence
aagaaattctgttcacgtgaaaaca

SEQ ID NO: 164561 - DNA, 25 bp, Probe sequence
aatgaagaaattctgttcacgtgaa

SEQ ID NO: 164562 - DNA, 25 bp, Probe sequence
aatccagaacgtgttgaaatgaaga

SEQ ID NO: 164563 - DNA, 25 bp, Probe sequence
aataatccagaacgtgttgaaatga

SEQ ID NO: 164564 - DNA, 25 bp, Probe sequence
aattctgttcacgtgaaaacaaaca

SEQ ID NO: 164565 - DNA, 25 bp, Probe sequence
cagaaactacattacaactaagaac

SEQ ID NO: 164566 - DNA, 25 bp, Probe sequence
ctttagcttgtacggaatgtggtga

SEQ ID NO: 164567 - DNA, 25 bp, Probe sequence
taactttagcttgtacggaatgtgg

SEQ ID NO: 164568 - DNA, 25 bp, Probe sequence
gcgcgtaaacgtaactttagcttgt

SEQ ID NO: 164569 - DNA, 25 bp, Probe sequence
gcttgtacggaatgtggtgacagaa

SEQ ID NO: 164570 - DNA, 25 bp, Probe sequence
gaagaaattctgttcacgtgaaaac

SEQ ID NO: 164571 - DNA, 25 bp, Probe sequence
gaaactacattacaactaagaacaa

SEQ ID NO: 164572 - DNA, 25 bp, Probe sequence
gaaatgaagaaattctgttcacgtg

SEQ ID NO: 164573 - DNA, 25 bp, Probe sequence
gaaattctgttcacgtgaaaacaaa

SEQ ID NO: 164574 - DNA, 25 bp, Probe sequence
gacagaaactacattacaactaaga

SEQ ID NO: 164575 - DNA, 25 bp, Probe sequence
gtacggaatgtggtgacagaaacta

SEQ ID NO: 164576 - DNA, 25 bp, Probe sequence
gtaactttagcttgtacggaatgtg

SEQ ID NO: 164577 - DNA, 25 bp, Probe sequence
gtgacagaaactacattacaactaa

SEQ ID NO: 164578 - DNA, 25 bp, Probe sequence
gtggtgacagaaactacattacaac

SEQ ID NO: 164579 - DNA, 25 bp, Probe sequence
ggtgacagaaactacattacaacta

SEQ ID NO: 164580 - DNA, 25 bp, Probe sequence
tggtgacagaaactacattacaact

SEQ ID NO: 164581 - DNA, 25 bp, Probe sequence
tgttcacgtgaaaacaaacaaactt

SEQ ID NO: 164582 - DNA, 25 bp, Probe sequence
tagcttgtacggaatgtggtgacag

SEQ ID NO: 164583 - DNA, 25 bp, Probe sequence
tttagcttgtacggaatgtggtgac

SEQ ID NO: 164584 - DNA, 25 bp, Probe sequence
ttgtacggaatgtggtgacagaaac

SEQ ID NO: 164585 - DNA, 25 bp, Probe sequence
ttctgttcacgtgaaaacaaacaaa

SEQ ID NO: 164586 - DNA, 25 bp, Probe sequence
ttagcttgtacggaatgtggtgaca

SEQ ID NO: 164587 - DNA, 25 bp, Probe sequence
ataagcaagctttgatgcattcatc

SEQ ID NO: 164588 - DNA, 25 bp, Probe sequence
aggtcaaatcgaaccattaacaaat

SEQ ID NO: 164589 - DNA, 25 bp, Probe sequence
acaaatcgcacaaggctcacattat

SEQ ID NO: 164590 - DNA, 25 bp, Probe sequence
aaatggagacattcttgcgcttgcc

SEQ ID NO: 164591 - DNA, 25 bp, Probe sequence
cattcttgcgcttgccggaaagcag

SEQ ID NO: 164592 - DNA, 25 bp, Probe sequence
cccttattattctggtatggcttta

SEQ ID NO: 164593 - DNA, 25 bp, Probe sequence
cctgtaccaccaccatggttaacag

SEQ ID NO: 164594 - DNA, 25 bp, Probe sequence
gcagtactagtactacgtttaggtt

SEQ ID NO: 164595 - DNA, 25 bp, Probe sequence
gcaggaacagttttagatccacaaa

SEQ ID NO: 164596 - DNA, 25 bp, Probe sequence
gcaactttccaaattaccaggtgtt

SEQ ID NO: 164597 - DNA, 25 bp, Probe sequence
gaattgacagaacattacttatcca

SEQ ID NO: 164598 - DNA, 25 bp, Probe sequence
gaagtgttccaaaacggagagccaa

SEQ ID NO: 164599 - DNA, 25 bp, Probe sequence
gaaatacacaacggacaaatctggt

SEQ ID NO: 164600 - DNA, 25 bp, Probe sequence
gactgattatgacattggtacgttt

SEQ ID NO: 164601 - DNA, 25 bp, Probe sequence
gatcgtgttggaaaatcttacctag

SEQ ID NO: 164602 - DNA, 25 bp, Probe sequence
gagtatgcagcagtttctcagcaac

SEQ ID NO: 164603 - DNA, 25 bp, Probe sequence
gagtctgtgccaagaggtcgtattt

SEQ ID NO: 164604 - DNA, 25 bp, Probe sequence
gatgatccaaaattagcgttttcaa

SEQ ID NO: 164605 - DNA, 25 bp, Probe sequence
gatttctggattcagttgcatccta

SEQ ID NO: 164606 - DNA, 25 bp, Probe sequence
gtttctcagcaactttccaaattac

SEQ ID NO: 164607 - DNA, 25 bp, Probe sequence
ggtgtgattgtatttatttttgcag

SEQ ID NO: 164608 - DNA, 25 bp, Probe sequence
ggtgttaacacgtctatggattggg

SEQ ID NO: 164609 - DNA, 25 bp, Probe sequence
ggtcgatgaaccattacatttccaa

SEQ ID NO: 164610 - DNA, 25 bp, Probe sequence
ggagagccaagagttaactctactt

SEQ ID NO: 164611 - DNA, 25 bp, Probe sequence
ggaaatgttggatacggctgaaaag

SEQ ID NO: 164612 - DNA, 25 bp, Probe sequence
ggctattacatatactaggggtcga

SEQ ID NO: 164613 - DNA, 25 bp, Probe sequence
tgatacctatacaccattacaatta

SEQ ID NO: 164614 - DNA, 25 bp, Probe sequence
taatggcactgtcttgaacaaggtt

SEQ ID NO: 164615 - DNA, 25 bp, Probe sequence
tatccaaaggatattcacgcaatga

SEQ ID NO: 164616 - DNA, 25 bp, Probe sequence
tatcgacacctgctgaaggtattcc

SEQ ID NO: 164617 - DNA, 25 bp, Probe sequence
tatacaaatcagcctgtaccaccac

SEQ ID NO: 164618 - DNA, 25 bp, Probe sequence
agcgggagacccttattattctggt

SEQ ID NO: 164619 - DNA, 25 bp, Probe sequence
ttcggagatgtatcgacacctgctg

SEQ ID NO: 164620 - DNA, 25 bp, Probe sequence
ttggtacgtttacttctcaatttgc

SEQ ID NO: 164621 - DNA, 25 bp, Probe sequence
ggtttagacgtatgggaacacgctt

SEQ ID NO: 164622 - DNA, 25 bp, Probe sequence
atatcaaaacaaacgccctgactac

SEQ ID NO: 164623 - DNA, 25 bp, Probe sequence
atgttacgaaattaaatgctgcagt

SEQ ID NO: 164624 - DNA, 25 bp, Probe sequence
aaattaccatacgcatttgatgcat

SEQ ID NO: 164625 - DNA, 25 bp, Probe sequence
aaaacaaacgccctgactacattgg

SEQ ID NO: 164626 - DNA, 25 bp, Probe sequence
aactgctgtacgtaataatggcggt

SEQ ID NO: 164627 - DNA, 25 bp, Probe sequence
aacgccctgactacattggcgcatt

SEQ ID NO: 164628 - DNA, 25 bp, Probe sequence
aatgctgcagtagaaggtacagatt

SEQ ID NO: 164629 - DNA, 25 bp, Probe sequence
aattaccaaaattaccatacgcatt

SEQ ID NO: 164630 - DNA, 25 bp, Probe sequence
cagctgcacgctttggttcaggttg

SEQ ID NO: 164631 - DNA, 25 bp, Probe sequence
cattttggaatgtagttaactggga

SEQ ID NO: 164632 - DNA, 25 bp, Probe sequence
ccctgactacattggcgcattttgg

SEQ ID NO: 164633 - DNA, 25 bp, Probe sequence
gcacgctttggttcaggttgggctt

SEQ ID NO: 164634 - DNA, 25 bp, Probe sequence
ggttcaggttgggcttggttagtcg

SEQ ID NO: 164635 - DNA, 25 bp, Probe sequence
gcggtggacatttaaaccattcatt

SEQ ID NO: 164636 - DNA, 25 bp, Probe sequence
gctaacatccaaactgctgtacgta

SEQ ID NO: 164637 - DNA, 25 bp, Probe sequence
gcattagaaccacattttgacaaag

SEQ ID NO: 164638 - DNA, 25 bp, Probe sequence
gcatttgatgcattagaaccacatt

SEQ ID NO: 164639 - DNA, 25 bp, Probe sequence
gaacacgcttattacctaaaatatc

SEQ ID NO: 164640 - DNA, 25 bp, Probe sequence
gaacaatggggttctttagaagaat

SEQ ID NO: 164641 - DNA, 25 bp, Probe sequence
gacagtgtaccagctaacatccaaa

SEQ ID NO: 164642 - DNA, 25 bp, Probe sequence
gataatccattaactgagggtaaaa

SEQ ID NO: 164643 - DNA, 25 bp, Probe sequence
gttgctaatttagacagtgtaccag

SEQ ID NO: 164644 - DNA, 25 bp, Probe sequence
gttactttcaccaaactcagaagaa

SEQ ID NO: 164645 - DNA, 25 bp, Probe sequence
gtgtaccagctaacatccaaactgc

SEQ ID NO: 164646 - DNA, 25 bp, Probe sequence
ggttagtcgtaaacaatggccagtt

SEQ ID NO: 164647 - DNA, 25 bp, Probe sequence
ggccagttagaaattgtgactacac

SEQ ID NO: 164648 - DNA, 25 bp, Probe sequence
tcaggttgggcttggttagtcgtaa

SEQ ID NO: 164649 - DNA, 25 bp, Probe sequence
tgtgactacaccaaaccaagataat

SEQ ID NO: 164650 - DNA, 25 bp, Probe sequence
tgactacattggcgcattttggaat

SEQ ID NO: 164651 - DNA, 25 bp, Probe sequence
tcattattctgggagttactttcac

SEQ ID NO: 164652 - DNA, 25 bp, Probe sequence
tatgggaacacgcttattacctaaa

SEQ ID NO: 164653 - DNA, 25 bp, Probe sequence
tttgctgacaaagcagctgcacgct

SEQ ID NO: 164654 - DNA, 25 bp, Probe sequence
ttctgggagttactttcaccaaact

SEQ ID NO: 164655 - DNA, 25 bp, Probe sequence
atagaaacctgcacttatttaaaga

SEQ ID NO: 164656 - DNA, 25 bp, Probe sequence
attatcctggaatttcattcgacac

SEQ ID NO: 164657 - DNA, 25 bp, Probe sequence
attattgtccaatagatcagataaa

SEQ ID NO: 164658 - DNA, 25 bp, Probe sequence
atatgttagatatttttgtcgaaga

SEQ ID NO: 164659 - DNA, 25 bp, Probe sequence
atacagaacttgatggtgaaatgaa

SEQ ID NO: 164660 - DNA, 25 bp, Probe sequence
atcactacctggtgttaatattcac

SEQ ID NO: 164661 - DNA, 25 bp, Probe sequence
atggtgtatgtgagtcttgccaaga

SEQ ID NO: 164662 - DNA, 25 bp, Probe sequence
agaaacctgcacttatttaaagatt

SEQ ID NO: 164663 - DNA, 25 bp, Probe sequence
acaatatatagaaacctgcacttat

SEQ ID NO: 164664 - DNA, 25 bp, Probe sequence
aaaggtaatagattattgtccaata

SEQ ID NO: 164665 - DNA, 25 bp, Probe sequence
cactacctggtgttaatattcacaa

SEQ ID NO: 164666 - DNA, 25 bp, Probe sequence
cattttatctgtgaaaagtgtggag

SEQ ID NO: 164667 - DNA, 25 bp, Probe sequence
ctacctggtgttaatattcacaaac

SEQ ID NO: 164668 - DNA, 25 bp, Probe sequence
gaatttcattcgacacaatatatag

SEQ ID NO: 164669 - DNA, 25 bp, Probe sequence
gaagataagtatataaacgcaaagt

SEQ ID NO: 164670 - DNA, 25 bp, Probe sequence
gaaaatacagaacttgatggtgaaa

SEQ ID NO: 164671 - DNA, 25 bp, Probe sequence
gacacaatatatagaaacctgcact

SEQ ID NO: 164672 - DNA, 25 bp, Probe sequence
gagaacggtttaaaatatacagata

SEQ ID NO: 164673 - DNA, 25 bp, Probe sequence
gatatttttgtcgaagaagataagt

SEQ ID NO: 164674 - DNA, 25 bp, Probe sequence
gttaatattcacaaacacaaacttg

SEQ ID NO: 164675 - DNA, 25 bp, Probe sequence
gttagatatttttgtcgaagaagat

SEQ ID NO: 164676 - DNA, 25 bp, Probe sequence
gttatggatgaaaattatcctggaa

SEQ ID NO: 164677 - DNA, 25 bp, Probe sequence
gtttatggtgtatgtgagtcttgcc

SEQ ID NO: 164678 - DNA, 25 bp, Probe sequence
gtgtatgtgagtcttgccaagatta

SEQ ID NO: 164679 - DNA, 25 bp, Probe sequence
ggtgtatgtgagtcttgccaagatt

SEQ ID NO: 164680 - DNA, 25 bp, Probe sequence
tggaatttcattcgacacaatatat

SEQ ID NO: 164681 - DNA, 25 bp, Probe sequence
tgaagtttatggtgtatgtgagtct

SEQ ID NO: 164682 - DNA, 25 bp, Probe sequence
tcctggaatttcattcgacacaata

SEQ ID NO: 164683 - DNA, 25 bp, Probe sequence
tcatcattttatctgtgaaaagtgt

SEQ ID NO: 164684 - DNA, 25 bp, Probe sequence
tatcctggaatttcattcgacacaa

SEQ ID NO: 164685 - DNA, 25 bp, Probe sequence
tatatagaaacctgcacttatttaa

SEQ ID NO: 164686 - DNA, 25 bp, Probe sequence
ttatcactacctggtgttaatattc

SEQ ID NO: 164687 - DNA, 25 bp, Probe sequence
ttatggtgtatgtgagtcttgccaa

SEQ ID NO: 164688 - DNA, 25 bp, Probe sequence
ttcacaaacacaaacttgaagttta

SEQ ID NO: 164689 - DNA, 25 bp, Probe sequence
atttcattagctgatgggttcaatc

SEQ ID NO: 164690 - DNA, 25 bp, Probe sequence
atttctgcctcaatgcgtgttgtag

SEQ ID NO: 164691 - DNA, 25 bp, Probe sequence
ataggttttattgcgcctctaatcg

SEQ ID NO: 164692 - DNA, 25 bp, Probe sequence
atcggtgcttttatcgttgttagac

SEQ ID NO: 164693 - DNA, 25 bp, Probe sequence
atgagtgctggtatcgccttgagtg

SEQ ID NO: 164694 - DNA, 25 bp, Probe sequence
aggcttagtcctagctttctatatg

SEQ ID NO: 164695 - DNA, 25 bp, Probe sequence
aatggcttatcagaaaatgcgaatg

SEQ ID NO: 164696 - DNA, 25 bp, Probe sequence
aattgttggattgctatttggctca

SEQ ID NO: 164697 - DNA, 25 bp, Probe sequence
caatgtggtttggaatcttattcgc

SEQ ID NO: 164698 - DNA, 25 bp, Probe sequence
caacgattattgtcattgccatcat

SEQ ID NO: 164699 - DNA, 25 bp, Probe sequence
cgttgttagacgactatcacttata

SEQ ID NO: 164700 - DNA, 25 bp, Probe sequence
cctctaatcggtgcttttatcgttg

SEQ ID NO: 164701 - DNA, 25 bp, Probe sequence
cctagctttctatatggacatttct

SEQ ID NO: 164702 - DNA, 25 bp, Probe sequence
gccaacactagtatttattaatcca

SEQ ID NO: 164703 - DNA, 25 bp, Probe sequence
gcgtgttgtagggatactgttagta

SEQ ID NO: 164704 - DNA, 25 bp, Probe sequence
gctatttggctcaataagcgcagtg

SEQ ID NO: 164705 - DNA, 25 bp, Probe sequence
gctattccaattataatgagtgctg

SEQ ID NO: 164706 - DNA, 25 bp, Probe sequence
gcttaccaagaaattgctattccaa

SEQ ID NO: 164707 - DNA, 25 bp, Probe sequence
gaatcttattcgcaatagtaggtgc

SEQ ID NO: 164708 - DNA, 25 bp, Probe sequence
gaattttgattttatgaggtactct

SEQ ID NO: 164709 - DNA, 25 bp, Probe sequence
gaacgtcatacactgcttaccaaga

SEQ ID NO: 164710 - DNA, 25 bp, Probe sequence
gactatcacttatagctgatgctct

SEQ ID NO: 164711 - DNA, 25 bp, Probe sequence
gaggtactctttaattagtggtatc

SEQ ID NO: 164712 - DNA, 25 bp, Probe sequence
gagtgcaatcttcatttcattagct

SEQ ID NO: 164713 - DNA, 25 bp, Probe sequence
gttgttctgtttattacattgtttt

SEQ ID NO: 164714 - DNA, 25 bp, Probe sequence
gtatcttgataggttttattgcgcc

SEQ ID NO: 164715 - DNA, 25 bp, Probe sequence
gtagcgatggttatttctgcctcaa

SEQ ID NO: 164716 - DNA, 25 bp, Probe sequence
gtcattgccatcatagttgttctgt

SEQ ID NO: 164717 - DNA, 25 bp, Probe sequence
ggtatcgccttgagtgcaatcttca

SEQ ID NO: 164718 - DNA, 25 bp, Probe sequence
tatggacatttctccgggtggtgta

SEQ ID NO: 164719 - DNA, 25 bp, Probe sequence
tccgggtggtgtaattgtagttcta

SEQ ID NO: 164720 - DNA, 25 bp, Probe sequence
tttacttactattatgccaacacta

SEQ ID NO: 164721 - DNA, 25 bp, Probe sequence
tttacttatgattacaatggcttat

SEQ ID NO: 164722 - DNA, 25 bp, Probe sequence
ttaatcacgttaccaattgcaataa

SEQ ID NO: 164723 - DNA, 25 bp, Probe sequence
attgttggaccaaatggtgctggta

SEQ ID NO: 164724 - DNA, 25 bp, Probe sequence
attcaggtttcccagcaagtgttaa

SEQ ID NO: 164725 - DNA, 25 bp, Probe sequence
attaaattaagctatgtatcacaaa

SEQ ID NO: 164726 - DNA, 25 bp, Probe sequence
ataagcatttgcatttccatggtac

SEQ ID NO: 164727 - DNA, 25 bp, Probe sequence
atgcctttaattcaggtttcccagc

SEQ ID NO: 164728 - DNA, 25 bp, Probe sequence
acgatgacaccagtctttgaattga

SEQ ID NO: 164729 - DNA, 25 bp, Probe sequence
aaatttatggacatcctgtacgttt

SEQ ID NO: 164730 - DNA, 25 bp, Probe sequence
aaatgtcaattactactatgatcat

SEQ ID NO: 164731 - DNA, 25 bp, Probe sequence
aactgatgagtttaaatcacttgat

SEQ ID NO: 164732 - DNA, 25 bp, Probe sequence
aatatagcagaattatcaggtggtc

SEQ ID NO: 164733 - DNA, 25 bp, Probe sequence
caggtttcccagcaagtgttaaaga

SEQ ID NO: 164734 - DNA, 25 bp, Probe sequence
catcctgtacgttttgtcgatcatc

SEQ ID NO: 164735 - DNA, 25 bp, Probe sequence
ctactgaagtagcatgtttaaataa

SEQ ID NO: 164736 - DNA, 25 bp, Probe sequence
cgttttgtcgatcatcagcataatc

SEQ ID NO: 164737 - DNA, 25 bp, Probe sequence
cgtcttttccaaacatttaatagca

SEQ ID NO: 164738 - DNA, 25 bp, Probe sequence
cgagcattgatttcagaacctgcag

SEQ ID NO: 164739 - DNA, 25 bp, Probe sequence
gcggattaacaaagacaaaacgtct

SEQ ID NO: 164740 - DNA, 25 bp, Probe sequence
gcatttccatggtacaactgatgag

SEQ ID NO: 164741 - DNA, 25 bp, Probe sequence
gcatttgcatttccatggtacaact

SEQ ID NO: 164742 - DNA, 25 bp, Probe sequence
gcaaatgcctttaattcaggtttcc

SEQ ID NO: 164743 - DNA, 25 bp, Probe sequence
gaattttataatactttagatcaat

SEQ ID NO: 164744 - DNA, 25 bp, Probe sequence
gaatacgatgacaccagtctttgaa

SEQ ID NO: 164745 - DNA, 25 bp, Probe sequence
gaatggtattgatgcaaaacatgta

SEQ ID NO: 164746 - DNA, 25 bp, Probe sequence
gaacctgcagtattagtacttgatg

SEQ ID NO: 164747 - DNA, 25 bp, Probe sequence
gacaccagtctttgaattgaaaaat

SEQ ID NO: 164748 - DNA, 25 bp, Probe sequence
gatcatcagcataatcgagaatgtt

SEQ ID NO: 164749 - DNA, 25 bp, Probe sequence
gtacgttttgtcgatcatcagcata

SEQ ID NO: 164750 - DNA, 25 bp, Probe sequence
gtcaattactactatgatcataaaa

SEQ ID NO: 164751 - DNA, 25 bp, Probe sequence
gtgagaatacgatgacaccagtctt

SEQ ID NO: 164752 - DNA, 25 bp, Probe sequence
ggacatcctgtacgttttgtcgatc

SEQ ID NO: 164753 - DNA, 25 bp, Probe sequence
tatgtatcacaaaaagcaaatgcct

SEQ ID NO: 164754 - DNA, 25 bp, Probe sequence
tattacctttacaaagtggtgagat

SEQ ID NO: 164755 - DNA, 25 bp, Probe sequence
tttcagaacctgcagtattagtact

SEQ ID NO: 164756 - DNA, 25 bp, Probe sequence
ttaattcaggtttcccagcaagtgt

SEQ ID NO: 164757 - DNA, 25 bp, Probe sequence
attggcttcggttacattggttttg

SEQ ID NO: 164758 - DNA, 25 bp, Probe sequence
attgcgcttgaaacgatggcaggta

SEQ ID NO: 164759 - DNA, 25 bp, Probe sequence
attacattgtgcatcatgatagttt

SEQ ID NO: 164760 - DNA, 25 bp, Probe sequence
atactggtgcacctcaaaacacgcg

SEQ ID NO: 164761 - DNA, 25 bp, Probe sequence
ataatgtacgtattgcgcttgaaac

SEQ ID NO: 164762 - DNA, 25 bp, Probe sequence
atgtcatacgcatgatgctggatat

SEQ ID NO: 164763 - DNA, 25 bp, Probe sequence
atgttttgatacatgtcatacgcat

SEQ ID NO: 164764 - DNA, 25 bp, Probe sequence
aaagaggactttgatggcgtattaa

SEQ ID NO: 164765 - DNA, 25 bp, Probe sequence
aacacgcgccgtaaaagtattgaag

SEQ ID NO: 164766 - DNA, 25 bp, Probe sequence
aacgaacgtttatcagtatgttttg

SEQ ID NO: 164767 - DNA, 25 bp, Probe sequence
aaccgccatataaacttgaaattga

SEQ ID NO: 164768 - DNA, 25 bp, Probe sequence
aagatattgtattacatccaggtgc

SEQ ID NO: 164769 - DNA, 25 bp, Probe sequence
aagttgttcatgtcaatgattctaa

SEQ ID NO: 164770 - DNA, 25 bp, Probe sequence
cacctcaaaacacgcgccgtaaaag

SEQ ID NO: 164771 - DNA, 25 bp, Probe sequence
cagaaacgtttaatcttggtgtaga

SEQ ID NO: 164772 - DNA, 25 bp, Probe sequence
cgtggcgctcaaaaagaccgacatg

SEQ ID NO: 164773 - DNA, 25 bp, Probe sequence
gctggtgttgatgccggaattaata

SEQ ID NO: 164774 - DNA, 25 bp, Probe sequence
gcaaatacaaccaaaccagaaacgt

SEQ ID NO: 164775 - DNA, 25 bp, Probe sequence
gaagagttagcacgtattattgatg

SEQ ID NO: 164776 - DNA, 25 bp, Probe sequence
gaaaatcttagaaacaccttatgtt

SEQ ID NO: 164777 - DNA, 25 bp, Probe sequence
gaccgtggcgctcaaaaagaccgac

SEQ ID NO: 164778 - DNA, 25 bp, Probe sequence
gaccgacatgaaaatattggcttcg

SEQ ID NO: 164779 - DNA, 25 bp, Probe sequence
gattctaaaaatgaccgtggcgctc

SEQ ID NO: 164780 - DNA, 25 bp, Probe sequence
gttggagctggtgttgatgccggaa

SEQ ID NO: 164781 - DNA, 25 bp, Probe sequence
gttgttcatgcaccatacatcatta

SEQ ID NO: 164782 - DNA, 25 bp, Probe sequence
gttattaggatcacatgtttcaatg

SEQ ID NO: 164783 - DNA, 25 bp, Probe sequence
gttagaaggttctgctatagaagcg

SEQ ID NO: 164784 - DNA, 25 bp, Probe sequence
ggtaaaggtacagagattggtcgct

SEQ ID NO: 164785 - DNA, 25 bp, Probe sequence
ggttacattggttttgatgcattaa

SEQ ID NO: 164786 - DNA, 25 bp, Probe sequence
ggatcacatgtttcaatgagtggta

SEQ ID NO: 164787 - DNA, 25 bp, Probe sequence
tcttggtgtagatttcttgcaacaa

SEQ ID NO: 164788 - DNA, 25 bp, Probe sequence
tagcacgtattattgatggagttca

SEQ ID NO: 164789 - DNA, 25 bp, Probe sequence
tatctaatattgttgttcatgcacc

SEQ ID NO: 164790 - DNA, 25 bp, Probe sequence
tttatgatttatactggtgcacctc

SEQ ID NO: 164791 - DNA, 25 bp, Probe sequence
atcagcgtcaagcaagaatgcgcaa

SEQ ID NO: 164792 - DNA, 25 bp, Probe sequence
atgcgcaaagatgaccatttaacta

SEQ ID NO: 164793 - DNA, 25 bp, Probe sequence
agcacgttcactaaatgaagctggt

SEQ ID NO: 164794 - DNA, 25 bp, Probe sequence
agcatctcgtggtattgatattgaa

SEQ ID NO: 164795 - DNA, 25 bp, Probe sequence
acctactaaaggtgcagctaaagtt

SEQ ID NO: 164796 - DNA, 25 bp, Probe sequence
acgggtacagggaaatctcatgcat

SEQ ID NO: 164797 - DNA, 25 bp, Probe sequence
aaagaaccacaagcaatcgtagttg

SEQ ID NO: 164798 - DNA, 25 bp, Probe sequence
aaacgggacatttacatgtgcactt

SEQ ID NO: 164799 - DNA, 25 bp, Probe sequence
aactatacgatgcagcgaaccattt

SEQ ID NO: 164800 - DNA, 25 bp, Probe sequence
aagtttttattggtggtacagatat

SEQ ID NO: 164801 - DNA, 25 bp, Probe sequence
aatctcatgcatttttattaccatt

SEQ ID NO: 164802 - DNA, 25 bp, Probe sequence
aatattgcggtgtttagtgctacaa

SEQ ID NO: 164803 - DNA, 25 bp, Probe sequence
cattaatagaagatcgcggttttgt

SEQ ID NO: 164804 - DNA, 25 bp, Probe sequence
gccaatttaaagctggtgtttcagt

SEQ ID NO: 164805 - DNA, 25 bp, Probe sequence
gcagcgaaccatttaagccaattta

SEQ ID NO: 164806 - DNA, 25 bp, Probe sequence
gcaaatgatttagcacgttcactaa

SEQ ID NO: 164807 - DNA, 25 bp, Probe sequence
gcaatcgtagttgcaccaacaagag

SEQ ID NO: 164808 - DNA, 25 bp, Probe sequence
gcaattacgctttatagtcctgatg

SEQ ID NO: 164809 - DNA, 25 bp, Probe sequence
gaatctagtttaattgacgctgtga

SEQ ID NO: 164810 - DNA, 25 bp, Probe sequence
gaaggtgttagtcatgtcatcaatt

SEQ ID NO: 164811 - DNA, 25 bp, Probe sequence
gaagctggtattaaagttggtatga

SEQ ID NO: 164812 - DNA, 25 bp, Probe sequence
gaagcggatcttatgattgacttag

SEQ ID NO: 164813 - DNA, 25 bp, Probe sequence
gacgctgtgaaagaccttaattttg

SEQ ID NO: 164814 - DNA, 25 bp, Probe sequence
gagaacttgcacaacaactatacga

SEQ ID NO: 164815 - DNA, 25 bp, Probe sequence
gtaatttagaattccaatacgttat

SEQ ID NO: 164816 - DNA, 25 bp, Probe sequence
gtcatccagaatatgtagctgtcga

SEQ ID NO: 164817 - DNA, 25 bp, Probe sequence
gtgccaaatgatattgacttcttta

SEQ ID NO: 164818 - DNA, 25 bp, Probe sequence
ggcaaaacatccattcgaacaattt

SEQ ID NO: 164819 - DNA, 25 bp, Probe sequence
tggtcaatctcaaacgggtacaggg

SEQ ID NO: 164820 - DNA, 25 bp, Probe sequence
tgatatactaaatccatacttatgt

SEQ ID NO: 164821 - DNA, 25 bp, Probe sequence
taacgccacgtgaacgtaaacaaca

SEQ ID NO: 164822 - DNA, 25 bp, Probe sequence
taaagcgcacaatcagcgtcaagca

SEQ ID NO: 164823 - DNA, 25 bp, Probe sequence
tacatgtgcacttagcatcatattt

SEQ ID NO: 164824 - DNA, 25 bp, Probe sequence
tagtcctgatgaagaacacaatatt

SEQ ID NO: 164825 - DNA, 25 bp, Probe sequence
attggtggttcaggtattggatatg

SEQ ID NO: 164826 - DNA, 25 bp, Probe sequence
attgttagatcatcatgtgccattt

SEQ ID NO: 164827 - DNA, 25 bp, Probe sequence
atatgatgttggcgaaggcgatggg

SEQ ID NO: 164828 - DNA, 25 bp, Probe sequence
atacctaaggataatgttggaccat

SEQ ID NO: 164829 - DNA, 25 bp, Probe sequence
atggtgtcaatatgatgttggcgaa

SEQ ID NO: 164830 - DNA, 25 bp, Probe sequence
agtcatcatcctctaatctttaaag

SEQ ID NO: 164831 - DNA, 25 bp, Probe sequence
agatgttgaagttactggtgtttta

SEQ ID NO: 164832 - DNA, 25 bp, Probe sequence
agcattagactgtacgttggaagta

SEQ ID NO: 164833 - DNA, 25 bp, Probe sequence
actgctgaatcttgggataatgtag

SEQ ID NO: 164834 - DNA, 25 bp, Probe sequence
aatatcccaagtgtccgttttgttg

SEQ ID NO: 164835 - DNA, 25 bp, Probe sequence
aaagttcaaacatatatacctaagg

SEQ ID NO: 164836 - DNA, 25 bp, Probe sequence
aacatcatgatgccttagatgctaa

SEQ ID NO: 164837 - DNA, 25 bp, Probe sequence
aacgtattgcaattattggtggttc

SEQ ID NO: 164838 - DNA, 25 bp, Probe sequence
aatgacattggaagatttcgcagct

SEQ ID NO: 164839 - DNA, 25 bp, Probe sequence
aataccatccatatgaaacaccggt

SEQ ID NO: 164840 - DNA, 25 bp, Probe sequence
aatagcgatgcatacaaatttagat

SEQ ID NO: 164841 - DNA, 25 bp, Probe sequence
aatagctgatttaatgacattgtta

SEQ ID NO: 164842 - DNA, 25 bp, Probe sequence
caaggcgcagatgtctttgttacag

SEQ ID NO: 164843 - DNA, 25 bp, Probe sequence
caaaccagttggtgaagctaatcca

SEQ ID NO: 164844 - DNA, 25 bp, Probe sequence
ctttatggacttggcgttatggcag

SEQ ID NO: 164845 - DNA, 25 bp, Probe sequence
gcagatgtctttgttacaggtgata

SEQ ID NO: 164846 - DNA, 25 bp, Probe sequence
gcaattaattaaacaataccatcca

SEQ ID NO: 164847 - DNA, 25 bp, Probe sequence
gaaacaccggtatttgattttattg

SEQ ID NO: 164848 - DNA, 25 bp, Probe sequence
gacttggcgttatggcagaagtgga

SEQ ID NO: 164849 - DNA, 25 bp, Probe sequence
gttggaccatttaaagataagctta

SEQ ID NO: 164850 - DNA, 25 bp, Probe sequence
gttgaagcatctacaattaatacag

SEQ ID NO: 164851 - DNA, 25 bp, Probe sequence
gttactggtgttttaacagcattag

SEQ ID NO: 164852 - DNA, 25 bp, Probe sequence
gtccgttttgttggtgagtctaatc

SEQ ID NO: 164853 - DNA, 25 bp, Probe sequence
ggtgaagctaatccaacaataggac

SEQ ID NO: 164854 - DNA, 25 bp, Probe sequence
ggaagagggcaattcaaaccagttg

SEQ ID NO: 164855 - DNA, 25 bp, Probe sequence
taaaagctaatggttatggtttgat

SEQ ID NO: 164856 - DNA, 25 bp, Probe sequence
taaattaaatatcccaagtgtccgt

SEQ ID NO: 164857 - DNA, 25 bp, Probe sequence
tactattattagtcatcatcctcta

SEQ ID NO: 164858 - DNA, 25 bp, Probe sequence
tagatgctaaaattcatggtgtgaa

SEQ ID NO: 164859 - DNA, 25 bp, Probe sequence
attggctcagatcatgcttatttgc

SEQ ID NO: 164860 - DNA, 25 bp, Probe sequence
attgatgtacgtttaggggatggct

SEQ ID NO: 164861 - DNA, 25 bp, Probe sequence
attgctgtaattgaaagggtgttat

SEQ ID NO: 164862 - DNA, 25 bp, Probe sequence
attaaatcgaaactcaatactgaac

SEQ ID NO: 164863 - DNA, 25 bp, Probe sequence
atgcttatttgccaatctatgcaat

SEQ ID NO: 164864 - DNA, 25 bp, Probe sequence
agttattcaaggcccttttcaagct

SEQ ID NO: 164865 - DNA, 25 bp, Probe sequence
aacatccaaggttgattttacaaag

SEQ ID NO: 164866 - DNA, 25 bp, Probe sequence
aatcgcggatattggctcagatcat

SEQ ID NO: 164867 - DNA, 25 bp, Probe sequence
caaaaccatttatgcgaatgcggta

SEQ ID NO: 164868 - DNA, 25 bp, Probe sequence
gcgaatgcggtattgctggagaagt

SEQ ID NO: 164869 - DNA, 25 bp, Probe sequence
gctggagaagttattcaaggccctt

SEQ ID NO: 164870 - DNA, 25 bp, Probe sequence
gcggatattggctcagatcatgctt

SEQ ID NO: 164871 - DNA, 25 bp, Probe sequence
gcggtattgctggagaagttattca

SEQ ID NO: 164872 - DNA, 25 bp, Probe sequence
gctcagatcatgcttatttgccaat

SEQ ID NO: 164873 - DNA, 25 bp, Probe sequence
gagaagttattcaaggcccttttca

SEQ ID NO: 164874 - DNA, 25 bp, Probe sequence
gaagcactttatcatattaaatcga

SEQ ID NO: 164875 - DNA, 25 bp, Probe sequence
gacaaacattacaacaattgaatta

SEQ ID NO: 164876 - DNA, 25 bp, Probe sequence
gagagttagaagcactttatcatat

SEQ ID NO: 164877 - DNA, 25 bp, Probe sequence
gatgggcaagataagttaagtcaac

SEQ ID NO: 164878 - DNA, 25 bp, Probe sequence
gatcatgcttatttgccaatctatg

SEQ ID NO: 164879 - DNA, 25 bp, Probe sequence
gataagttaagtcaacatccaaggt

SEQ ID NO: 164880 - DNA, 25 bp, Probe sequence
gatattggctcagatcatgcttatt

SEQ ID NO: 164881 - DNA, 25 bp, Probe sequence
gtacgtttaggggatggcttaagtg

SEQ ID NO: 164882 - DNA, 25 bp, Probe sequence
ggtacaatcgcggatattggctcag

SEQ ID NO: 164883 - DNA, 25 bp, Probe sequence
ggaagaaaaaggccatatttatgaa

SEQ ID NO: 164884 - DNA, 25 bp, Probe sequence
taaaacaaggtacaatcgcggatat

SEQ ID NO: 164885 - DNA, 25 bp, Probe sequence
tgaaattcggaccaaaattgctgaa

SEQ ID NO: 164886 - DNA, 25 bp, Probe sequence
tcaacgtttagctcaaattaatgac

SEQ ID NO: 164887 - DNA, 25 bp, Probe sequence
tcgaaactcaatactgaacaacatc

SEQ ID NO: 164888 - DNA, 25 bp, Probe sequence
taggggatggcttaagtgttattca

SEQ ID NO: 164889 - DNA, 25 bp, Probe sequence
tattcaaggcccttttcaagctgct

SEQ ID NO: 164890 - DNA, 25 bp, Probe sequence
tatttatgaaattgttgtagcagaa

SEQ ID NO: 164891 - DNA, 25 bp, Probe sequence
ttatgcgaatgcggtattgctggag

SEQ ID NO: 164892 - DNA, 25 bp, Probe sequence
ttaatgacgaaattgctgtaattga

SEQ ID NO: 164893 - DNA, 25 bp, Probe sequence
attcgtatccctgtgcatatggtag

SEQ ID NO: 164894 - DNA, 25 bp, Probe sequence
atactgacgagaaactgaatccaag

SEQ ID NO: 164895 - DNA, 25 bp, Probe sequence
agacaagcaatcactcgtgcaattg

SEQ ID NO: 164896 - DNA, 25 bp, Probe sequence
aaatgacccagttcgtatgtacctt

SEQ ID NO: 164897 - DNA, 25 bp, Probe sequence
aaattgcgcaagaacctgtttcatt

SEQ ID NO: 164898 - DNA, 25 bp, Probe sequence
aaagatacgtaggtcgtggtatgtt

SEQ ID NO: 164899 - DNA, 25 bp, Probe sequence
aacaattgatccgacattaacatta

SEQ ID NO: 164900 - DNA, 25 bp, Probe sequence
aagttttcaacatatgcaacatggt

SEQ ID NO: 164901 - DNA, 25 bp, Probe sequence
aagtccttcagatcatgctgcttat

SEQ ID NO: 164902 - DNA, 25 bp, Probe sequence
aatccaagtgatcttagtgcccctc

SEQ ID NO: 164903 - DNA, 25 bp, Probe sequence
aatatgggtcttattaaagctgttg

SEQ ID NO: 164904 - DNA, 25 bp, Probe sequence
aattaattcgtgttcaacgtcaatt

SEQ ID NO: 164905 - DNA, 25 bp, Probe sequence
caaatggatgatttctttgatcaat

SEQ ID NO: 164906 - DNA, 25 bp, Probe sequence
gcgcaagaacctgtttcattagaaa

SEQ ID NO: 164907 - DNA, 25 bp, Probe sequence
gcagaagcgaacttacgtttagttg

SEQ ID NO: 164908 - DNA, 25 bp, Probe sequence
gcaacatggtggattagacaagcaa

SEQ ID NO: 164909 - DNA, 25 bp, Probe sequence
gaaatcgaattagccaaacgtattg

SEQ ID NO: 164910 - DNA, 25 bp, Probe sequence
gacatccaagtcgtagtaaacgttt

SEQ ID NO: 164911 - DNA, 25 bp, Probe sequence
gacccagttcgtatgtaccttaaag

SEQ ID NO: 164912 - DNA, 25 bp, Probe sequence
gatgacggcagaacaagaacacttg

SEQ ID NO: 164913 - DNA, 25 bp, Probe sequence
gatatcgactctgatcaaatggatg

SEQ ID NO: 164914 - DNA, 25 bp, Probe sequence
gatttggtcttgatgacggcagaac

SEQ ID NO: 164915 - DNA, 25 bp, Probe sequence
gttcaacgtcaattattacaggact

SEQ ID NO: 164916 - DNA, 25 bp, Probe sequence
gtatccctgtgcatatggtagaaac

SEQ ID NO: 164917 - DNA, 25 bp, Probe sequence
gtatgttattccttgatttaatcca

SEQ ID NO: 164918 - DNA, 25 bp, Probe sequence
gtcgagatccagcaccagaagaaat

SEQ ID NO: 164919 - DNA, 25 bp, Probe sequence
gtcgtggtatgttattccttgattt

SEQ ID NO: 164920 - DNA, 25 bp, Probe sequence
gtgcttgatacattaactgatagag

SEQ ID NO: 164921 - DNA, 25 bp, Probe sequence
ggtgttacacgtgaacgtattcgac

SEQ ID NO: 164922 - DNA, 25 bp, Probe sequence
ggatttaccagcagaaaaagttcgt

SEQ ID NO: 164923 - DNA, 25 bp, Probe sequence
ggatcaggaagcacaaagtccttca

SEQ ID NO: 164924 - DNA, 25 bp, Probe sequence
ggacttaggtcgagatccagcacca

SEQ ID NO: 164925 - DNA, 25 bp, Probe sequence
ttagtgcccctccaggtgttaaaat

SEQ ID NO: 164926 - DNA, 25 bp, Probe sequence
ttgggcgtgttaacttattaagtgc

SEQ ID NO: 164927 - DNA, 25 bp, Probe sequence
atgacctttcatatgaacgttattt

SEQ ID NO: 164928 - DNA, 25 bp, Probe sequence
agacaccttcatttacagtttctga

SEQ ID NO: 164929 - DNA, 25 bp, Probe sequence
acatttttgtcatgattttcttcaa

SEQ ID NO: 164930 - DNA, 25 bp, Probe sequence
aaattgcacataatgacctttcata

SEQ ID NO: 164931 - DNA, 25 bp, Probe sequence
aaaagtcatttgcacattataaagt

SEQ ID NO: 164932 - DNA, 25 bp, Probe sequence
aagcaccagccaattattatccaga

SEQ ID NO: 164933 - DNA, 25 bp, Probe sequence
aagagcgaggcattggctttgcacc

SEQ ID NO: 164934 - DNA, 25 bp, Probe sequence
cacccgatagctcacatttttgtca

SEQ ID NO: 164935 - DNA, 25 bp, Probe sequence
ccatttttcaatgttagtcctgagc

SEQ ID NO: 164936 - DNA, 25 bp, Probe sequence
gcggagcgagcatttttaaaacatt

SEQ ID NO: 164937 - DNA, 25 bp, Probe sequence
gctggcttgaaaaacgttgttgcaa

SEQ ID NO: 164938 - DNA, 25 bp, Probe sequence
gcacaatttgacaatttgagccgtc

SEQ ID NO: 164939 - DNA, 25 bp, Probe sequence
gaattgttggatattcaggtcgaac

SEQ ID NO: 164940 - DNA, 25 bp, Probe sequence
gaattagcatatgaagccggattat

SEQ ID NO: 164941 - DNA, 25 bp, Probe sequence
gaagtcttacatgatttttatgcgg

SEQ ID NO: 164942 - DNA, 25 bp, Probe sequence
gaagccggattattatcacgtaacg

SEQ ID NO: 164943 - DNA, 25 bp, Probe sequence
gaacctgagccaattggtatggcac

SEQ ID NO: 164944 - DNA, 25 bp, Probe sequence
gaacgtggttttacagatgcgctta

SEQ ID NO: 164945 - DNA, 25 bp, Probe sequence
gaaatcgtattatgtttcctttgaa

SEQ ID NO: 164946 - DNA, 25 bp, Probe sequence
gacatatcatttgttgaagcggtta

SEQ ID NO: 164947 - DNA, 25 bp, Probe sequence
gacagtcgaaggcgaacaagcatta

SEQ ID NO: 164948 - DNA, 25 bp, Probe sequence
gacgcaattatataggtttgtgtcc

SEQ ID NO: 164949 - DNA, 25 bp, Probe sequence
gatgctgtgcagtatgttaattcaa

SEQ ID NO: 164950 - DNA, 25 bp, Probe sequence
gtcgaacatataccggtcaagaacc

SEQ ID NO: 164951 - DNA, 25 bp, Probe sequence
gtgaagcaacacttaaaacaggtca

SEQ ID NO: 164952 - DNA, 25 bp, Probe sequence
gggaagctacaaggattggcgatgt

SEQ ID NO: 164953 - DNA, 25 bp, Probe sequence
ggtggcaatgtttttcaatttactc

SEQ ID NO: 164954 - DNA, 25 bp, Probe sequence
ggtgatagagttaatgttgctgtag

SEQ ID NO: 164955 - DNA, 25 bp, Probe sequence
ggtttgtgtccttttcatgatgaaa

SEQ ID NO: 164956 - DNA, 25 bp, Probe sequence
ggataacttcacaaatcagcatttt

SEQ ID NO: 164957 - DNA, 25 bp, Probe sequence
taaaatctgatactgctggcttgaa

SEQ ID NO: 164958 - DNA, 25 bp, Probe sequence
tacaattcaatcaagcaccagccaa

SEQ ID NO: 164959 - DNA, 25 bp, Probe sequence
ttcaaattgcttctgatgatttaca

SEQ ID NO: 164960 - DNA, 25 bp, Probe sequence
ttgatggggattttgcgggtagtga

SEQ ID NO: 164961 - DNA, 25 bp, Probe sequence
atgttgatgaagtgattcaagttgc

SEQ ID NO: 164962 - DNA, 25 bp, Probe sequence
agaaatgtatcgcacttaaaataag

SEQ ID NO: 164963 - DNA, 25 bp, Probe sequence
agaagtgacaccgccagatggctta

SEQ ID NO: 164964 - DNA, 25 bp, Probe sequence
agaaaattgatgcgatagagtttgc

SEQ ID NO: 164965 - DNA, 25 bp, Probe sequence
accgccagatggcttatatgatatt

SEQ ID NO: 164966 - DNA, 25 bp, Probe sequence
aaagttatgaatgtaccgattgtac

SEQ ID NO: 164967 - DNA, 25 bp, Probe sequence
aaatgctatcattgtttatacactt

SEQ ID NO: 164968 - DNA, 25 bp, Probe sequence
aaagcaatcgaagaaacagcaaacg

SEQ ID NO: 164969 - DNA, 25 bp, Probe sequence
aacagcaaacgatataatccattat

SEQ ID NO: 164970 - DNA, 25 bp, Probe sequence
aagctgatattgttttacttggtat

SEQ ID NO: 164971 - DNA, 25 bp, Probe sequence
aagtagcagaattccaattgaagtc

SEQ ID NO: 164972 - DNA, 25 bp, Probe sequence
cgagaacttcaaagacaccattatc

SEQ ID NO: 164973 - DNA, 25 bp, Probe sequence
ccttataatgagccaggtatcgttc

SEQ ID NO: 164974 - DNA, 25 bp, Probe sequence
gctatcattgtttatacacttatta

SEQ ID NO: 164975 - DNA, 25 bp, Probe sequence
gaaacggcagagttagttgctaggg

SEQ ID NO: 164976 - DNA, 25 bp, Probe sequence
gagccaggtatcgttcatagattag

SEQ ID NO: 164977 - DNA, 25 bp, Probe sequence
gatgtttctcaaaaagcaatcgaag

SEQ ID NO: 164978 - DNA, 25 bp, Probe sequence
gatcctaaaggattacctaaagctg

SEQ ID NO: 164979 - DNA, 25 bp, Probe sequence
gatatccatatattgaatcttttga

SEQ ID NO: 164980 - DNA, 25 bp, Probe sequence
gattgtaccagaagtgacaccgcca

SEQ ID NO: 164981 - DNA, 25 bp, Probe sequence
gattagatgatgcatatttcaagaa

SEQ ID NO: 164982 - DNA, 25 bp, Probe sequence
gttgctagggcaggtatttcacaat

SEQ ID NO: 164983 - DNA, 25 bp, Probe sequence
gtaccagaagtgacaccgccagatg

SEQ ID NO: 164984 - DNA, 25 bp, Probe sequence
gtaccgattgtaccagaagtgacac

SEQ ID NO: 164985 - DNA, 25 bp, Probe sequence
gtcctgtcattgatgtttctcaaaa

SEQ ID NO: 164986 - DNA, 25 bp, Probe sequence
gtgacaccgccagatggcttatatg

SEQ ID NO: 164987 - DNA, 25 bp, Probe sequence
ggattacctaaagctgatattgttt

SEQ ID NO: 164988 - DNA, 25 bp, Probe sequence
ggatgtcctgtcattgatgtttctc

SEQ ID NO: 164989 - DNA, 25 bp, Probe sequence
ggcagagttagttgctagggcaggt

SEQ ID NO: 164990 - DNA, 25 bp, Probe sequence
tggggccattaatggatttattatc

SEQ ID NO: 164991 - DNA, 25 bp, Probe sequence
tcgtaagtgaaattggatgtcctgt

SEQ ID NO: 164992 - DNA, 25 bp, Probe sequence
tcagattctataggtgaaacggcag

SEQ ID NO: 164993 - DNA, 25 bp, Probe sequence
tatacacttattaaacctgaaatga

SEQ ID NO: 164994 - DNA, 25 bp, Probe sequence
tttacttggtatttcgagaacttca

SEQ ID NO: 164995 - DNA, 25 bp, Probe sequence
attgcaaaagcggctggcattggta

SEQ ID NO: 164996 - DNA, 25 bp, Probe sequence
attcaccttctaaaatcgtcataga

SEQ ID NO: 164997 - DNA, 25 bp, Probe sequence
ataattttccgcgtgtaatagcaga

SEQ ID NO: 164998 - DNA, 25 bp, Probe sequence
aggccaaatccaatgtataaaatag

SEQ ID NO: 164999 - DNA, 25 bp, Probe sequence
agattcaccttctaaaatcgtcata

SEQ ID NO: 165000 - DNA, 25 bp, Probe sequence
actgcatcagtaggacataaaattg

SEQ ID NO: 165001 - DNA, 25 bp, Probe sequence
actgctactgcatcagtaggacata

SEQ ID NO: 165002 - DNA, 25 bp, Probe sequence
aaagattcaccttctaaaatcgtca

SEQ ID NO: 165003 - DNA, 25 bp, Probe sequence
aaaagcggctggcattggtaaggca

SEQ ID NO: 165004 - DNA, 25 bp, Probe sequence
aagcggctggcattggtaaggcagg

SEQ ID NO: 165005 - DNA, 25 bp, Probe sequence
aaggcaggccaaatccaatgtataa

SEQ ID NO: 165006 - DNA, 25 bp, Probe sequence
aatcgtcatagaacctttaggtaat

SEQ ID NO: 165007 - DNA, 25 bp, Probe sequence
aattttccgcgtgtaatagcagata

SEQ ID NO: 165008 - DNA, 25 bp, Probe sequence
cagatactgctactgcatcagtagg

SEQ ID NO: 165009 - DNA, 25 bp, Probe sequence
cattgagtaaagattcaccttctaa

SEQ ID NO: 165010 - DNA, 25 bp, Probe sequence
gcggctggcattggtaaggcaggcc

SEQ ID NO: 165011 - DNA, 25 bp, Probe sequence
gctgctattgcaaaagcggctggca

SEQ ID NO: 165012 - DNA, 25 bp, Probe sequence
gctattgcaaaagcggctggcattg

SEQ ID NO: 165013 - DNA, 25 bp, Probe sequence
gcatcattgagtaaagattcacctt

SEQ ID NO: 165014 - DNA, 25 bp, Probe sequence
gcaaaagcggctggcattggtaagg

SEQ ID NO: 165015 - DNA, 25 bp, Probe sequence
gatactgctactgcatcagtaggac

SEQ ID NO: 165016 - DNA, 25 bp, Probe sequence
gtaaggcaggccaaatccaatgtat

SEQ ID NO: 165017 - DNA, 25 bp, Probe sequence
gtaataattttccgcgtgtaatagc

SEQ ID NO: 165018 - DNA, 25 bp, Probe sequence
ggcattggtaaggcaggccaaatcc

SEQ ID NO: 165019 - DNA, 25 bp, Probe sequence
ggcaggccaaatccaatgtataaaa

SEQ ID NO: 165020 - DNA, 25 bp, Probe sequence
ggctggcattggtaaggcaggccaa

SEQ ID NO: 165021 - DNA, 25 bp, Probe sequence
tgctgctattgcaaaagcggctggc

SEQ ID NO: 165022 - DNA, 25 bp, Probe sequence
tccgcgtgtaatagcagatactgct

SEQ ID NO: 165023 - DNA, 25 bp, Probe sequence
taaaatcgtcatagaacctttaggt

SEQ ID NO: 165024 - DNA, 25 bp, Probe sequence
taggtaataattttccgcgtgtaat

SEQ ID NO: 165025 - DNA, 25 bp, Probe sequence
taggacataaaattgctgctattgc

SEQ ID NO: 165026 - DNA, 25 bp, Probe sequence
ttccgcgtgtaatagcagatactgc

SEQ ID NO: 165027 - DNA, 25 bp, Probe sequence
ttttccgcgtgtaatagcagatact

SEQ ID NO: 165028 - DNA, 25 bp, Probe sequence
ttgagtaaagattcaccttctaaaa

SEQ ID NO: 165029 - DNA, 25 bp, Probe sequence
atacgcagcagatagaatgattgaa

SEQ ID NO: 165030 - DNA, 25 bp, Probe sequence
atgaaaaacttcgacaatttgaggt

SEQ ID NO: 165031 - DNA, 25 bp, Probe sequence
atgacacgtatgcctaatgtcactt

SEQ ID NO: 165032 - DNA, 25 bp, Probe sequence
atgtcacttatttagaggaaagcga

SEQ ID NO: 165033 - DNA, 25 bp, Probe sequence
agtttatgacgctatttgtacaatt

SEQ ID NO: 165034 - DNA, 25 bp, Probe sequence
agagcaacgcttagaccagatttag

SEQ ID NO: 165035 - DNA, 25 bp, Probe sequence
agcgatattaacaatgtcaggtttt

SEQ ID NO: 165036 - DNA, 25 bp, Probe sequence
acgattttgttggtgtgtgttcaag

SEQ ID NO: 165037 - DNA, 25 bp, Probe sequence
cacgtatgcctaatgtcacttattt

SEQ ID NO: 165038 - DNA, 25 bp, Probe sequence
ctatatgtctcaacctgttgtgcta

SEQ ID NO: 165039 - DNA, 25 bp, Probe sequence
cgaattagtcatatacgcagcagat

SEQ ID NO: 165040 - DNA, 25 bp, Probe sequence
ccccgagttggatattattattcag

SEQ ID NO: 165041 - DNA, 25 bp, Probe sequence
cgcgtccccgagttggatattatta

SEQ ID NO: 165042 - DNA, 25 bp, Probe sequence
gcttcaatgattggagcagatattc

SEQ ID NO: 165043 - DNA, 25 bp, Probe sequence
gaatttccaaaacaacaatagctaa

SEQ ID NO: 165044 - DNA, 25 bp, Probe sequence
gaagataacgattttgttggtgtgt

SEQ ID NO: 165045 - DNA, 25 bp, Probe sequence
gaaaaagaaattgattcgattccaa

SEQ ID NO: 165046 - DNA, 25 bp, Probe sequence
gaaaagatttattaagagcttcaat

SEQ ID NO: 165047 - DNA, 25 bp, Probe sequence
gacaatttgaggttaaggactatat

SEQ ID NO: 165048 - DNA, 25 bp, Probe sequence
gacgctatttgtacaatttttttag

SEQ ID NO: 165049 - DNA, 25 bp, Probe sequence
gagaatacaacagtttatgacgcta

SEQ ID NO: 165050 - DNA, 25 bp, Probe sequence
gaggaaagcgaattagtcatatacg

SEQ ID NO: 165051 - DNA, 25 bp, Probe sequence
gatgtaagtacattatttattatta

SEQ ID NO: 165052 - DNA, 25 bp, Probe sequence
gttggtgtgtgttcaagaaaagatt

SEQ ID NO: 165053 - DNA, 25 bp, Probe sequence
gtatgcctaatgtcacttatttaga

SEQ ID NO: 165054 - DNA, 25 bp, Probe sequence
ggatattattattcaggtaaatcaa

SEQ ID NO: 165055 - DNA, 25 bp, Probe sequence
ggactatatgtctcaacctgttgtg

SEQ ID NO: 165056 - DNA, 25 bp, Probe sequence
tgtcaggttttttagaagcgcgtcc

SEQ ID NO: 165057 - DNA, 25 bp, Probe sequence
tcaacctgttgtgctaagagagaat

SEQ ID NO: 165058 - DNA, 25 bp, Probe sequence
tagtcatatacgcagcagatagaat

SEQ ID NO: 165059 - DNA, 25 bp, Probe sequence
tatgtctcaacctgttgtgctaaga

SEQ ID NO: 165060 - DNA, 25 bp, Probe sequence
ttagaccagatttagcgatattaac

SEQ ID NO: 165061 - DNA, 25 bp, Probe sequence
ttaacaagagcaacgcttagaccag

SEQ ID NO: 165062 - DNA, 25 bp, Probe sequence
ttgattcgattccaattgtaagaaa

SEQ ID NO: 165063 - DNA, 25 bp, Probe sequence
atttcaaggcaagaggcttctaaag

SEQ ID NO: 165064 - DNA, 25 bp, Probe sequence
atatcgtgaatatgcaggtatgttt

SEQ ID NO: 165065 - DNA, 25 bp, Probe sequence
atagaatcaggtacatctgcacagt

SEQ ID NO: 165066 - DNA, 25 bp, Probe sequence
atcaattattacaatttgttcttga

SEQ ID NO: 165067 - DNA, 25 bp, Probe sequence
atcattttaatgttatatcgtgaat

SEQ ID NO: 165068 - DNA, 25 bp, Probe sequence
atggtgcaaaagtaccacttatggc

SEQ ID NO: 165069 - DNA, 25 bp, Probe sequence
agtggtaatgacacacaagcagatt

SEQ ID NO: 165070 - DNA, 25 bp, Probe sequence
agcagttgattatggtgaatctgat

SEQ ID NO: 165071 - DNA, 25 bp, Probe sequence
acacaagcagatttaataggttata

SEQ ID NO: 165072 - DNA, 25 bp, Probe sequence
aaagtcagaaactaatcaaccaatt

SEQ ID NO: 165073 - DNA, 25 bp, Probe sequence
aacactatatttattagatgtatta

SEQ ID NO: 165074 - DNA, 25 bp, Probe sequence
aacgcaattgtttgtttatggtttg

SEQ ID NO: 165075 - DNA, 25 bp, Probe sequence
aagggattatcatcaaagcagttga

SEQ ID NO: 165076 - DNA, 25 bp, Probe sequence
aattctgtagatgttattagtcaac

SEQ ID NO: 165077 - DNA, 25 bp, Probe sequence
caagcgcaaacgcaattgtttgttt

SEQ ID NO: 165078 - DNA, 25 bp, Probe sequence
catctgcacagttaatgtcagtcgt

SEQ ID NO: 165079 - DNA, 25 bp, Probe sequence
catttaatcgctgtgctgtgagtgg

SEQ ID NO: 165080 - DNA, 25 bp, Probe sequence
ctctggcagctgaaactattgagcg

SEQ ID NO: 165081 - DNA, 25 bp, Probe sequence
cgattttaaatgagcatggtgcaaa

SEQ ID NO: 165082 - DNA, 25 bp, Probe sequence
gcatcatttaatcgctgtgctgtga

SEQ ID NO: 165083 - DNA, 25 bp, Probe sequence
gaattcattgaatatccatcaagaa

SEQ ID NO: 165084 - DNA, 25 bp, Probe sequence
gaatcaggtacatctgcacagttaa

SEQ ID NO: 165085 - DNA, 25 bp, Probe sequence
gagcatggtgcaaaagtaccactta

SEQ ID NO: 165086 - DNA, 25 bp, Probe sequence
gaggcttctaaagatgtacatgcag

SEQ ID NO: 165087 - DNA, 25 bp, Probe sequence
gttaatgcgccaaaaagggattatc

SEQ ID NO: 165088 - DNA, 25 bp, Probe sequence
gtggcgaggtatgggaacgttaaat

SEQ ID NO: 165089 - DNA, 25 bp, Probe sequence
gggaacgttaaattctgtagatgtt

SEQ ID NO: 165090 - DNA, 25 bp, Probe sequence
ggtacatctgcacagttaatgtcag

SEQ ID NO: 165091 - DNA, 25 bp, Probe sequence
tgtacatgcagttatattatcgaat

SEQ ID NO: 165092 - DNA, 25 bp, Probe sequence
tgtttatggtttgtttatttacaat

SEQ ID NO: 165093 - DNA, 25 bp, Probe sequence
tcgctgtgctgtgagtggtaatgac

SEQ ID NO: 165094 - DNA, 25 bp, Probe sequence
taatcgctgtgctgtgagtggtaat

SEQ ID NO: 165095 - DNA, 25 bp, Probe sequence
tatgcaggtatgttttttaaaagtc

SEQ ID NO: 165096 - DNA, 25 bp, Probe sequence
ttgcaccatataactatcaattatt

SEQ ID NO: 165097 - DNA, 25 bp, Probe sequence
attcattgatacgccaggtattcat

SEQ ID NO: 165098 - DNA, 25 bp, Probe sequence
atagatttagtgcatccagatgaat

SEQ ID NO: 165099 - DNA, 25 bp, Probe sequence
atccctcatgcgattggtgttaatg

SEQ ID NO: 165100 - DNA, 25 bp, Probe sequence
aggaattgtcattggaaaaggcggt

SEQ ID NO: 165101 - DNA, 25 bp, Probe sequence
atggactttacagagattgtaccta

SEQ ID NO: 165102 - DNA, 25 bp, Probe sequence
agagattgtacctatttcagcatta

SEQ ID NO: 165103 - DNA, 25 bp, Probe sequence
agaaatccctcatgcgattggtgtt

SEQ ID NO: 165104 - DNA, 25 bp, Probe sequence
acaagtgaagaaatccctcatgcga

SEQ ID NO: 165105 - DNA, 25 bp, Probe sequence
aagtcgctaaaaatacattatctga

SEQ ID NO: 165106 - DNA, 25 bp, Probe sequence
aatattatccagatgatcaaatttc

SEQ ID NO: 165107 - DNA, 25 bp, Probe sequence
cagaccatcctgaacaatttgtagt

SEQ ID NO: 165108 - DNA, 25 bp, Probe sequence
ccagatgaattaatgccaaagattg

SEQ ID NO: 165109 - DNA, 25 bp, Probe sequence
gcgcaaattatattcattgatacgc

SEQ ID NO: 165110 - DNA, 25 bp, Probe sequence
gcaatcatgtccgataaagctcaaa

SEQ ID NO: 165111 - DNA, 25 bp, Probe sequence
gaaaaaatccttcatcttacaagtg

SEQ ID NO: 165112 - DNA, 25 bp, Probe sequence
gaaagcgaagatcgtgttcatatcg

SEQ ID NO: 165113 - DNA, 25 bp, Probe sequence
gagactggcgaaacaaagttaactt

SEQ ID NO: 165114 - DNA, 25 bp, Probe sequence
gatgatcaaatttcagaccatcctg

SEQ ID NO: 165115 - DNA, 25 bp, Probe sequence
gatcgtgttcatatcgaagcaacta

SEQ ID NO: 165116 - DNA, 25 bp, Probe sequence
gatacgccaggtattcataaaccta

SEQ ID NO: 165117 - DNA, 25 bp, Probe sequence
gatttgtttcaattataggtagacc

SEQ ID NO: 165118 - DNA, 25 bp, Probe sequence
gttaagacaccagtatttttagtat

SEQ ID NO: 165119 - DNA, 25 bp, Probe sequence
gtagtgggtgaaatcattcgtgaaa

SEQ ID NO: 165120 - DNA, 25 bp, Probe sequence
gtacctatttcagcattagaagggc

SEQ ID NO: 165121 - DNA, 25 bp, Probe sequence
gtccgataaagctcaaacaactaga

SEQ ID NO: 165122 - DNA, 25 bp, Probe sequence
gtgcgagacgtgatatagaaatgct

SEQ ID NO: 165123 - DNA, 25 bp, Probe sequence
ggtgttaatgtggaccgtatggtta

SEQ ID NO: 165124 - DNA, 25 bp, Probe sequence
ggtgactatatgatgaaagtcgcta

SEQ ID NO: 165125 - DNA, 25 bp, Probe sequence
ggtcaaagttcaaagagactggcga

SEQ ID NO: 165126 - DNA, 25 bp, Probe sequence
ggtattcataaacctaaacacaaat

SEQ ID NO: 165127 - DNA, 25 bp, Probe sequence
ggccataaaatagcaatcatgtccg

SEQ ID NO: 165128 - DNA, 25 bp, Probe sequence
tcgccaaattggttatgttgaagac

SEQ ID NO: 165129 - DNA, 25 bp, Probe sequence
taactttattcgccaaattggttat

SEQ ID NO: 165130 - DNA, 25 bp, Probe sequence
tagaaatgcttctaggctctaaagt

SEQ ID NO: 165131 - DNA, 25 bp, Probe sequence
atttctcaaggatacagaccaggtg

SEQ ID NO: 165132 - DNA, 25 bp, Probe sequence
atcgatatgtgctgaacgagctagt

SEQ ID NO: 165133 - DNA, 25 bp, Probe sequence
atccattatcgatatgtgctgaacg

SEQ ID NO: 165134 - DNA, 25 bp, Probe sequence
atgtgatgatgatatgcctgtgtat

SEQ ID NO: 165135 - DNA, 25 bp, Probe sequence
atggtaccaatgtagaaaatgcttc

SEQ ID NO: 165136 - DNA, 25 bp, Probe sequence
agttatcaacctcattattttcaag

SEQ ID NO: 165137 - DNA, 25 bp, Probe sequence
accgtcatcaccttgtggtgcatgt

SEQ ID NO: 165138 - DNA, 25 bp, Probe sequence
aaaccgtcatcaccttgtggtgcat

SEQ ID NO: 165139 - DNA, 25 bp, Probe sequence
aagaatcatattcgccatacagtca

SEQ ID NO: 165140 - DNA, 25 bp, Probe sequence
aatgcttcttatccattatcgatat

SEQ ID NO: 165141 - DNA, 25 bp, Probe sequence
cttgtggtgcatgtcgtcaagtttt

SEQ ID NO: 165142 - DNA, 25 bp, Probe sequence
ctaccatttggattttcaggaaagg

SEQ ID NO: 165143 - DNA, 25 bp, Probe sequence
gctagtttggtatcggcaatttctc

SEQ ID NO: 165144 - DNA, 25 bp, Probe sequence
gcttcttatccattatcgatatgtg

SEQ ID NO: 165145 - DNA, 25 bp, Probe sequence
gcagataaaccgtcatcaccttgtg

SEQ ID NO: 165146 - DNA, 25 bp, Probe sequence
gcacaacaagaatcatattcgccat

SEQ ID NO: 165147 - DNA, 25 bp, Probe sequence
gaacgagctagtttggtatcggcaa

SEQ ID NO: 165148 - DNA, 25 bp, Probe sequence
gaaaatgcttcttatccattatcga

SEQ ID NO: 165149 - DNA, 25 bp, Probe sequence
gatgatatgcctgtgtatatgacaa

SEQ ID NO: 165150 - DNA, 25 bp, Probe sequence
gataaaccgtcatcaccttgtggtg

SEQ ID NO: 165151 - DNA, 25 bp, Probe sequence
gatacagaccaggtgattttgaatc

SEQ ID NO: 165152 - DNA, 25 bp, Probe sequence
gatatggttatgatgacagtcgcag

SEQ ID NO: 165153 - DNA, 25 bp, Probe sequence
gtagaactttttatggtaccaatgt

SEQ ID NO: 165154 - DNA, 25 bp, Probe sequence
gtttggtatcggcaatttctcaagg

SEQ ID NO: 165155 - DNA, 25 bp, Probe sequence
gtaaccgtagatgcagataaaccgt

SEQ ID NO: 165156 - DNA, 25 bp, Probe sequence
gtcatcaccttgtggtgcatgtcgt

SEQ ID NO: 165157 - DNA, 25 bp, Probe sequence
gtgctgaacgagctagtttggtatc

SEQ ID NO: 165158 - DNA, 25 bp, Probe sequence
ggcaatttctcaaggatacagacca

SEQ ID NO: 165159 - DNA, 25 bp, Probe sequence
tggttatgatgacagtcgcagagtt

SEQ ID NO: 165160 - DNA, 25 bp, Probe sequence
tcaccttgtggtgcatgtcgtcaag

SEQ ID NO: 165161 - DNA, 25 bp, Probe sequence
tatgcctgtgtatatgacaaatcat

SEQ ID NO: 165162 - DNA, 25 bp, Probe sequence
atcaacctcattattttcaagaagt

SEQ ID NO: 165163 - DNA, 25 bp, Probe sequence
tttgaatcaataactgtaaccgtag

SEQ ID NO: 165164 - DNA, 25 bp, Probe sequence
ttggtatcggcaatttctcaaggat

SEQ ID NO: 165165 - DNA, 25 bp, Probe sequence
attgttgctattgtctttggtctcg

SEQ ID NO: 165166 - DNA, 25 bp, Probe sequence
attgctattgcattagttctcactg

SEQ ID NO: 165167 - DNA, 25 bp, Probe sequence
attgcattagttctcactgttgaag

SEQ ID NO: 165168 - DNA, 25 bp, Probe sequence
attagttctcactgttgaagcttta

SEQ ID NO: 165169 - DNA, 25 bp, Probe sequence
atattagcatttattataggtttaa

SEQ ID NO: 165170 - DNA, 25 bp, Probe sequence
atgattgttgctattgtctttggtc

SEQ ID NO: 165171 - DNA, 25 bp, Probe sequence
agtggatatttatactcattgctat

SEQ ID NO: 165172 - DNA, 25 bp, Probe sequence
agactataaatttcttttacatgtg

SEQ ID NO: 165173 - DNA, 25 bp, Probe sequence
actcattgctattgcattagttctc

SEQ ID NO: 165174 - DNA, 25 bp, Probe sequence
aaatatgcacttgatgggctgaaaa

SEQ ID NO: 165175 - DNA, 25 bp, Probe sequence
aatttcttttacatgtgtttgcaat

SEQ ID NO: 165176 - DNA, 25 bp, Probe sequence
gcggcttttagtgtacttatagttt

SEQ ID NO: 165177 - DNA, 25 bp, Probe sequence
gctattgtctttggtctcgtactaa

SEQ ID NO: 165178 - DNA, 25 bp, Probe sequence
gctattgcattagttctcactgttg

SEQ ID NO: 165179 - DNA, 25 bp, Probe sequence
gctttaaacactgctattgaatatg

SEQ ID NO: 165180 - DNA, 25 bp, Probe sequence
gcattagttctcactgttgaagctt

SEQ ID NO: 165181 - DNA, 25 bp, Probe sequence
gaccgttgaatatcatgatttagct

SEQ ID NO: 165182 - DNA, 25 bp, Probe sequence
gatgggctgaaaatcttaattcaaa

SEQ ID NO: 165183 - DNA, 25 bp, Probe sequence
gatttagtgaccgttgaatatcatg

SEQ ID NO: 165184 - DNA, 25 bp, Probe sequence
gttgaagctttaaacactgctattg

SEQ ID NO: 165185 - DNA, 25 bp, Probe sequence
gtatttttaccacattttatagcgt

SEQ ID NO: 165186 - DNA, 25 bp, Probe sequence
gtacttatagtttcaatattagcat

SEQ ID NO: 165187 - DNA, 25 bp, Probe sequence
ggtttaaatatgcacttgatgggct

SEQ ID NO: 165188 - DNA, 25 bp, Probe sequence
ggatatttatactcattgctattgc

SEQ ID NO: 165189 - DNA, 25 bp, Probe sequence
tgcacttgatgggctgaaaatctta

SEQ ID NO: 165190 - DNA, 25 bp, Probe sequence
tgctattgtctttggtctcgtacta

SEQ ID NO: 165191 - DNA, 25 bp, Probe sequence
taatagtatttttaccacattttat

SEQ ID NO: 165192 - DNA, 25 bp, Probe sequence
taaacactgctattgaatatgttgt

SEQ ID NO: 165193 - DNA, 25 bp, Probe sequence
tatttatactcattgctattgcatt

SEQ ID NO: 165194 - DNA, 25 bp, Probe sequence
tattgtctttggtctcgtactaaat

SEQ ID NO: 165195 - DNA, 25 bp, Probe sequence
tttttaccacattttatagcgttat

SEQ ID NO: 165196 - DNA, 25 bp, Probe sequence
ttacatgtgtttgcaatgattgttg

SEQ ID NO: 165197 - DNA, 25 bp, Probe sequence
ttaccacattttatagcgttatttt

SEQ ID NO: 165198 - DNA, 25 bp, Probe sequence
ttgtctttggtctcgtactaaatat

SEQ ID NO: 165199 - DNA, 25 bp, Probe sequence
attgattttagtggtcttgatatac

SEQ ID NO: 165200 - DNA, 25 bp, Probe sequence
attacggacattcttttgaacgaga

SEQ ID NO: 165201 - DNA, 25 bp, Probe sequence
atatgactgaagcggatgaaaagga

SEQ ID NO: 165202 - DNA, 25 bp, Probe sequence
atcacacaggcttagttaaagatgc

SEQ ID NO: 165203 - DNA, 25 bp, Probe sequence
aggggatataattatctgtacggat

SEQ ID NO: 165204 - DNA, 25 bp, Probe sequence
agcaaacaattacggacattctttt

SEQ ID NO: 165205 - DNA, 25 bp, Probe sequence
acatggatttttgcatctattaggt

SEQ ID NO: 165206 - DNA, 25 bp, Probe sequence
aaaagaagagcatatagaagacgat

SEQ ID NO: 165207 - DNA, 25 bp, Probe sequence
gcgatcacacaggcttagttaaaga

SEQ ID NO: 165208 - DNA, 25 bp, Probe sequence
gctgagctttctgttacatttgtag

SEQ ID NO: 165209 - DNA, 25 bp, Probe sequence
gcattacatggatttttgcatctat

SEQ ID NO: 165210 - DNA, 25 bp, Probe sequence
gaagacgatgctgagctttctgtta

SEQ ID NO: 165211 - DNA, 25 bp, Probe sequence
gaacgagaattaggatttttagcat

SEQ ID NO: 165212 - DNA, 25 bp, Probe sequence
gacgatgctgagctttctgttacat

SEQ ID NO: 165213 - DNA, 25 bp, Probe sequence
gagctttctgttacatttgtagata

SEQ ID NO: 165214 - DNA, 25 bp, Probe sequence
gatgaaaaggaaatgtttggtcgac

SEQ ID NO: 165215 - DNA, 25 bp, Probe sequence
gatgctgagctttctgttacatttg

SEQ ID NO: 165216 - DNA, 25 bp, Probe sequence
gatagattttagcgatcacacaggc

SEQ ID NO: 165217 - DNA, 25 bp, Probe sequence
gatataccacgtgttttaggggata

SEQ ID NO: 165218 - DNA, 25 bp, Probe sequence
gattttagcgatcacacaggcttag

SEQ ID NO: 165219 - DNA, 25 bp, Probe sequence
gttacagatgtaatctcatttgctt

SEQ ID NO: 165220 - DNA, 25 bp, Probe sequence
gtttacgatagattttagcgatcac

SEQ ID NO: 165221 - DNA, 25 bp, Probe sequence
gtagcgcaagaacaagcaaacaatt

SEQ ID NO: 165222 - DNA, 25 bp, Probe sequence
gtacggatgtagcgcaagaacaagc

SEQ ID NO: 165223 - DNA, 25 bp, Probe sequence
gtcttgatataccacgtgttttagg

SEQ ID NO: 165224 - DNA, 25 bp, Probe sequence
gtcgacaagatacaatattaaacgc

SEQ ID NO: 165225 - DNA, 25 bp, Probe sequence
ggttatgatcatatgactgaagcgg

SEQ ID NO: 165226 - DNA, 25 bp, Probe sequence
ggatttttagcattacatggatttt

SEQ ID NO: 165227 - DNA, 25 bp, Probe sequence
ggaaatgtttggtcgacaagataca

SEQ ID NO: 165228 - DNA, 25 bp, Probe sequence
tggatttttgcatctattaggttat

SEQ ID NO: 165229 - DNA, 25 bp, Probe sequence
tacagatgtaatctcatttgcttta

SEQ ID NO: 165230 - DNA, 25 bp, Probe sequence
taccacgtgttttaggggatataat

SEQ ID NO: 165231 - DNA, 25 bp, Probe sequence
tttagcgatcacacaggcttagtta

SEQ ID NO: 165232 - DNA, 25 bp, Probe sequence
ttatctgtacggatgtagcgcaaga

SEQ ID NO: 165233 - DNA, 25 bp, Probe sequence
atacttttatagggcaaccgttatg

SEQ ID NO: 165234 - DNA, 25 bp, Probe sequence
atcacccgattatactgttggcaca

SEQ ID NO: 165235 - DNA, 25 bp, Probe sequence
atcgtccaacatcacccgattatac

SEQ ID NO: 165236 - DNA, 25 bp, Probe sequence
atcggctatacattacctgcaacat

SEQ ID NO: 165237 - DNA, 25 bp, Probe sequence
atcccgatgtgatgcattttgtcga

SEQ ID NO: 165238 - DNA, 25 bp, Probe sequence
atgctgaacgcatacctgtcattgc

SEQ ID NO: 165239 - DNA, 25 bp, Probe sequence
agctttaccagctgtatttggtggt

SEQ ID NO: 165240 - DNA, 25 bp, Probe sequence
aacaacgcattggagcttacttaat

SEQ ID NO: 165241 - DNA, 25 bp, Probe sequence
aactgttcaagctatttcaactatg

SEQ ID NO: 165242 - DNA, 25 bp, Probe sequence
ctgaaattgagataccgacaccatt

SEQ ID NO: 165243 - DNA, 25 bp, Probe sequence
ccgttatggggttctatcggctata

SEQ ID NO: 165244 - DNA, 25 bp, Probe sequence
gcaggcgtcgataaaatttttggtg

SEQ ID NO: 165245 - DNA, 25 bp, Probe sequence
gtgccgtcaacggtatcgcaggttc

SEQ ID NO: 165246 - DNA, 25 bp, Probe sequence
gcaacattaggttcacaattagcag

SEQ ID NO: 165247 - DNA, 25 bp, Probe sequence
gaagcagcctatcatcattactgga

SEQ ID NO: 165248 - DNA, 25 bp, Probe sequence
gaacgacttattcacggcatgtatg

SEQ ID NO: 165249 - DNA, 25 bp, Probe sequence
gacggctatacggtagaacgactta

SEQ ID NO: 165250 - DNA, 25 bp, Probe sequence
gacgcccagttcatttacatttacc

SEQ ID NO: 165251 - DNA, 25 bp, Probe sequence
gatggctcattgcaactaactgttc

SEQ ID NO: 165252 - DNA, 25 bp, Probe sequence
gataccagtagcacaactttcatta

SEQ ID NO: 165253 - DNA, 25 bp, Probe sequence
gttgcacaaggttatatcacacctg

SEQ ID NO: 165254 - DNA, 25 bp, Probe sequence
gttacgcagcggacggttatgcccg

SEQ ID NO: 165255 - DNA, 25 bp, Probe sequence
gtttgcacatataaccgttgcacaa

SEQ ID NO: 165256 - DNA, 25 bp, Probe sequence
ggtgttggcgaattaagtgccgtca

SEQ ID NO: 165257 - DNA, 25 bp, Probe sequence
ggtgttcctggtgattttaatctcg

SEQ ID NO: 165258 - DNA, 25 bp, Probe sequence
ggactcgctgcattagttactacat

SEQ ID NO: 165259 - DNA, 25 bp, Probe sequence
ggcacagaaccattaacacaacaaa

SEQ ID NO: 165260 - DNA, 25 bp, Probe sequence
ttgcgattacaggtgcgccgacacg

SEQ ID NO: 165261 - DNA, 25 bp, Probe sequence
taatctcgcttttctagacgatatt

SEQ ID NO: 165262 - DNA, 25 bp, Probe sequence
taaatatgtacatcactcacttggt

SEQ ID NO: 165263 - DNA, 25 bp, Probe sequence
tacagcaatcgccgaaagacgccca

SEQ ID NO: 165264 - DNA, 25 bp, Probe sequence
taccaatcgatgtcgcaatctctga

SEQ ID NO: 165265 - DNA, 25 bp, Probe sequence
tatgcccgtcttaatggactcgctg

SEQ ID NO: 165266 - DNA, 25 bp, Probe sequence
ttggtgaaggtacatttgacgacta

SEQ ID NO: 165267 - DNA, 25 bp, Probe sequence
aaggaagcggtcagtaggttacaca

SEQ ID NO: 165268 - DNA, 25 bp, Probe sequence
atgcctggaattatacaaatagacg

SEQ ID NO: 165269 - DNA, 25 bp, Probe sequence
aaatagcgccacttgcatatatgcg

SEQ ID NO: 165270 - DNA, 25 bp, Probe sequence
aacacaattcaacatctgttagatt

SEQ ID NO: 165271 - DNA, 25 bp, Probe sequence
aagtggacttaaggaagcggtcagt

SEQ ID NO: 165272 - DNA, 25 bp, Probe sequence
aatggcgcataataacacaattcaa

SEQ ID NO: 165273 - DNA, 25 bp, Probe sequence
aatctcaagctttaattggaaataa

SEQ ID NO: 165274 - DNA, 25 bp, Probe sequence
ctcaaatcgatttacctaaaggtgt

SEQ ID NO: 165275 - DNA, 25 bp, Probe sequence
gcggtcagtaggttacacaacgtta

SEQ ID NO: 165276 - DNA, 25 bp, Probe sequence
gctgttgaagcaggagagtcacttg

SEQ ID NO: 165277 - DNA, 25 bp, Probe sequence
gcggaatcagtattaatcaatttgc

SEQ ID NO: 165278 - DNA, 25 bp, Probe sequence
gaagagagtttcgatgttgtcatcc

SEQ ID NO: 165279 - DNA, 25 bp, Probe sequence
gaagcagctattaaaatggcgcata

SEQ ID NO: 165280 - DNA, 25 bp, Probe sequence
gacattcttagctgtagtttatgca

SEQ ID NO: 165281 - DNA, 25 bp, Probe sequence
gagtcacttggatttttaccaggag

SEQ ID NO: 165282 - DNA, 25 bp, Probe sequence
gagtttcgatgttgtcatccatgca

SEQ ID NO: 165283 - DNA, 25 bp, Probe sequence
gaggacaagaagttgccgttaaagg

SEQ ID NO: 165284 - DNA, 25 bp, Probe sequence
gatggggcaacgtatatatgttaat

SEQ ID NO: 165285 - DNA, 25 bp, Probe sequence
gatgttgtcatccatgcaagaggac

SEQ ID NO: 165286 - DNA, 25 bp, Probe sequence
gatgcatttggtaagacgattcgtg

SEQ ID NO: 165287 - DNA, 25 bp, Probe sequence
gattcgtgcgaaaacgatggggcaa

SEQ ID NO: 165288 - DNA, 25 bp, Probe sequence
gtttatgcagcaaagcaactccgta

SEQ ID NO: 165289 - DNA, 25 bp, Probe sequence
gtattaacaagacctgctgttgaag

SEQ ID NO: 165290 - DNA, 25 bp, Probe sequence
ggtataggtcctgctggtacaggta

SEQ ID NO: 165291 - DNA, 25 bp, Probe sequence
ggatttttaccaggagatttgaaag

SEQ ID NO: 165292 - DNA, 25 bp, Probe sequence
tgcagcaaagcaactccgtaaaggt

SEQ ID NO: 165293 - DNA, 25 bp, Probe sequence
tgctggtacaggtaagacattctta

SEQ ID NO: 165294 - DNA, 25 bp, Probe sequence
taacaagactaggttttggctcaaa

SEQ ID NO: 165295 - DNA, 25 bp, Probe sequence
tagcgccacttgcatatatgcgcgg

SEQ ID NO: 165296 - DNA, 25 bp, Probe sequence
tagatccatatttaagacctttata

SEQ ID NO: 165297 - DNA, 25 bp, Probe sequence
tagtatttggtataggtcctgctgg

SEQ ID NO: 165298 - DNA, 25 bp, Probe sequence
tttgtaattcttgatgaggcgcaga

SEQ ID NO: 165299 - DNA, 25 bp, Probe sequence
tttgctgaaggttattgatttaggt

SEQ ID NO: 165300 - DNA, 25 bp, Probe sequence
ttggctcaaaaatggtagttactgg

SEQ ID NO: 165301 - DNA, 25 bp, Probe sequence
atttgactaaatcagcgttccaatt

SEQ ID NO: 165302 - DNA, 25 bp, Probe sequence
atgatacgttaccacctttattcga

SEQ ID NO: 165303 - DNA, 25 bp, Probe sequence
agaccttctagacaagataattctg

SEQ ID NO: 165304 - DNA, 25 bp, Probe sequence
agagcctaaatcgaaacctgttgta

SEQ ID NO: 165305 - DNA, 25 bp, Probe sequence
accacctttattcgatgaacttcca

SEQ ID NO: 165306 - DNA, 25 bp, Probe sequence
acctgttgtagaacctatggcacct

SEQ ID NO: 165307 - DNA, 25 bp, Probe sequence
acagtgcctaaagcagaaccggtgg

SEQ ID NO: 165308 - DNA, 25 bp, Probe sequence
acaaaaccgatgacagagaaaccaa

SEQ ID NO: 165309 - DNA, 25 bp, Probe sequence
aaacgtgctagagatattattgagg

SEQ ID NO: 165310 - DNA, 25 bp, Probe sequence
aaacatctaccgataatgaaccaaa

SEQ ID NO: 165311 - DNA, 25 bp, Probe sequence
aaaacgattcgtactgacattgata

SEQ ID NO: 165312 - DNA, 25 bp, Probe sequence
aatacttatctgaacgtacaaaacg

SEQ ID NO: 165313 - DNA, 25 bp, Probe sequence
ctatcattactactatgcgcgaaaa

SEQ ID NO: 165314 - DNA, 25 bp, Probe sequence
cgattcgtactgacattgatagaga

SEQ ID NO: 165315 - DNA, 25 bp, Probe sequence
gccacctcaaaaaacatctaccgat

SEQ ID NO: 165316 - DNA, 25 bp, Probe sequence
gcctaaagcagaaccggtggagcag

SEQ ID NO: 165317 - DNA, 25 bp, Probe sequence
gaagaaattgagcgaacgtttaaag

SEQ ID NO: 165318 - DNA, 25 bp, Probe sequence
gaaccggtggagcagaaacatagac

SEQ ID NO: 165319 - DNA, 25 bp, Probe sequence
gacgtcaattagaaaaatcacttag

SEQ ID NO: 165320 - DNA, 25 bp, Probe sequence
gagcagaaacatagaccttctagac

SEQ ID NO: 165321 - DNA, 25 bp, Probe sequence
gagtgtcggtattctaatttttgtc

SEQ ID NO: 165322 - DNA, 25 bp, Probe sequence
gataattctgacgaaattagacgtc

SEQ ID NO: 165323 - DNA, 25 bp, Probe sequence
gatatggtcagaaattttagctaaa

SEQ ID NO: 165324 - DNA, 25 bp, Probe sequence
gttgtagaacctatggcacctaaaa

SEQ ID NO: 165325 - DNA, 25 bp, Probe sequence
gtcatatcagtgatcatttctatca

SEQ ID NO: 165326 - DNA, 25 bp, Probe sequence
ggtggcttttttgaagaaattgagc

SEQ ID NO: 165327 - DNA, 25 bp, Probe sequence
ggtattctaatttttgtcatatcag

SEQ ID NO: 165328 - DNA, 25 bp, Probe sequence
ggaagagcctaaatcgaaacctgtt

SEQ ID NO: 165329 - DNA, 25 bp, Probe sequence
tgcttaattctcaaaatgtcgaaaa

SEQ ID NO: 165330 - DNA, 25 bp, Probe sequence
tcagcgttccaatttgataaagatg

SEQ ID NO: 165331 - DNA, 25 bp, Probe sequence
tacgttaccacctttattcgatgaa

SEQ ID NO: 165332 - DNA, 25 bp, Probe sequence
tagaacctatggcacctaaaaaaca

SEQ ID NO: 165333 - DNA, 25 bp, Probe sequence
ttattcgatgaacttccaaaggaag

SEQ ID NO: 165334 - DNA, 25 bp, Probe sequence
tagacaaaatcaaaagccacctcaa

SEQ ID NO: 165335 - DNA, 25 bp, Probe sequence
attggttggtatgcgtttacgtcgt

SEQ ID NO: 165336 - DNA, 25 bp, Probe sequence
atattgctcgacttgttggtggtgc

SEQ ID NO: 165337 - DNA, 25 bp, Probe sequence
attggttctagtaagcatcatacag

SEQ ID NO: 165338 - DNA, 25 bp, Probe sequence
attggtgcagacttacaaactgaac

SEQ ID NO: 165339 - DNA, 25 bp, Probe sequence
atatcgaagctgatacaggcatgag

SEQ ID NO: 165340 - DNA, 25 bp, Probe sequence
agctatggctgaagcattacgttca

SEQ ID NO: 165341 - DNA, 25 bp, Probe sequence
acagaagtacttgaaaacccagata

SEQ ID NO: 165342 - DNA, 25 bp, Probe sequence
acaacaaaccaattagaatcgcatt

SEQ ID NO: 165343 - DNA, 25 bp, Probe sequence
aaaggtttagattcaggtactgcat

SEQ ID NO: 165344 - DNA, 25 bp, Probe sequence
aagccaaagctcgtatcacagttag

SEQ ID NO: 165345 - DNA, 25 bp, Probe sequence
ctccaagaaaagttatagcgccatt

SEQ ID NO: 165346 - DNA, 25 bp, Probe sequence
ccatttatcgcaggtgtagcaatga

SEQ ID NO: 165347 - DNA, 25 bp, Probe sequence
gcgtttacgtcgtgtatctccaaga

SEQ ID NO: 165348 - DNA, 25 bp, Probe sequence
gcgcgtgtacaagaaatgcatgcta

SEQ ID NO: 165349 - DNA, 25 bp, Probe sequence
gcggttcaaatgtctgttaatccta

SEQ ID NO: 165350 - DNA, 25 bp, Probe sequence
gctaatattgctcgacttgttggtg

SEQ ID NO: 165351 - DNA, 25 bp, Probe sequence
gctaatattgctgcacaacgtgctg

SEQ ID NO: 165352 - DNA, 25 bp, Probe sequence
gcaggactagcattaacaacaaacc

SEQ ID NO: 165353 - DNA, 25 bp, Probe sequence
gcacgtgttggtgaaggtatcgttt

SEQ ID NO: 165354 - DNA, 25 bp, Probe sequence
gcagctggcgttcatgttggtatag

SEQ ID NO: 165355 - DNA, 25 bp, Probe sequence
gaatcgcattatctagcaggaggaa

SEQ ID NO: 165356 - DNA, 25 bp, Probe sequence
gaagtaccattagctatggctgaag

SEQ ID NO: 165357 - DNA, 25 bp, Probe sequence
gaaacaatcatcgcacgtgttggtg

SEQ ID NO: 165358 - DNA, 25 bp, Probe sequence
gagctatggctgtagcaactgagca

SEQ ID NO: 165359 - DNA, 25 bp, Probe sequence
gagcaagaaatgaaagcgcgtgtac

SEQ ID NO: 165360 - DNA, 25 bp, Probe sequence
gatattgctgacgttgatattagta

SEQ ID NO: 165361 - DNA, 25 bp, Probe sequence
gttgaagccgaatctgaagtaccat

SEQ ID NO: 165362 - DNA, 25 bp, Probe sequence
gtctgttaatcctaaagtcattgaa

SEQ ID NO: 165363 - DNA, 25 bp, Probe sequence
ggtatcgtttcaacaattggttcta

SEQ ID NO: 165364 - DNA, 25 bp, Probe sequence
ggatttcagcgttagcagctggcgt

SEQ ID NO: 165365 - DNA, 25 bp, Probe sequence
ggacgtgacgtattagaagcggttc

SEQ ID NO: 165366 - DNA, 25 bp, Probe sequence
tgatgatgagtcacctgaacattaa

SEQ ID NO: 165367 - DNA, 25 bp, Probe sequence
tacgttcaggtaatatcagtgttaa

SEQ ID NO: 165368 - DNA, 25 bp, Probe sequence
ttgctgcacaacgtgctgacattga

SEQ ID NO: 165369 - DNA, 25 bp, Probe sequence
attttttacaaatgacaactatctt

SEQ ID NO: 165370 - DNA, 25 bp, Probe sequence
atgtcaatatgcattctatcttaat

SEQ ID NO: 165371 - DNA, 25 bp, Probe sequence
acctcgtaggaaagactgctcaaac

SEQ ID NO: 165372 - DNA, 25 bp, Probe sequence
acggctggagatacttgggttgaac

SEQ ID NO: 165373 - DNA, 25 bp, Probe sequence
actatcttggaatcaacggctggag

SEQ ID NO: 165374 - DNA, 25 bp, Probe sequence
acaattctcatgataaccgctcgca

SEQ ID NO: 165375 - DNA, 25 bp, Probe sequence
aacaacgctcggtgataatttgcta

SEQ ID NO: 165376 - DNA, 25 bp, Probe sequence
aatcaatgcagctggtattatcgcc

SEQ ID NO: 165377 - DNA, 25 bp, Probe sequence
aatattaacctgtttgacattctta

SEQ ID NO: 165378 - DNA, 25 bp, Probe sequence
ccgctcgcacctcgtaggaaagact

SEQ ID NO: 165379 - DNA, 25 bp, Probe sequence
gccacattatcattacttattttat

SEQ ID NO: 165380 - DNA, 25 bp, Probe sequence
gctcaaacagttacagatcttcgac

SEQ ID NO: 165381 - DNA, 25 bp, Probe sequence
gcttgcgaatgttatcgttgccttg

SEQ ID NO: 165382 - DNA, 25 bp, Probe sequence
gcagctggtattatcgccacattat

SEQ ID NO: 165383 - DNA, 25 bp, Probe sequence
gaatgttatcgttgccttgatttta

SEQ ID NO: 165384 - DNA, 25 bp, Probe sequence
gaacgtattgatgctgtttcagatg

SEQ ID NO: 165385 - DNA, 25 bp, Probe sequence
gacctgcagggattattttttgtga

SEQ ID NO: 165386 - DNA, 25 bp, Probe sequence
gagtagttgtgagggaagtagatta

SEQ ID NO: 165387 - DNA, 25 bp, Probe sequence
gattcaactaattctgagtcaggtt

SEQ ID NO: 165388 - DNA, 25 bp, Probe sequence
gtttgacattcttaggatttgtata

SEQ ID NO: 165389 - DNA, 25 bp, Probe sequence
ggtgcagtaattggtattattggca

SEQ ID NO: 165390 - DNA, 25 bp, Probe sequence
ggatttgtatatcaactttactcta

SEQ ID NO: 165391 - DNA, 25 bp, Probe sequence
tgatgctgtttcagatggcaacttt

SEQ ID NO: 165392 - DNA, 25 bp, Probe sequence
tcaacagaaagattccgtttttgga

SEQ ID NO: 165393 - DNA, 25 bp, Probe sequence
taatttgctatttatgcttgcgaat

SEQ ID NO: 165394 - DNA, 25 bp, Probe sequence
tacagatcttcgacctgcagggatt

SEQ ID NO: 165395 - DNA, 25 bp, Probe sequence
gagtcaggttacaattctcatgata

SEQ ID NO: 165396 - DNA, 25 bp, Probe sequence
tatgcattctatcttaatattctca

SEQ ID NO: 165397 - DNA, 25 bp, Probe sequence
tataattgttcaacctatttttacg

SEQ ID NO: 165398 - DNA, 25 bp, Probe sequence
tattctcaattggcgttatattagt

SEQ ID NO: 165399 - DNA, 25 bp, Probe sequence
tattggcatgatactgataactata

SEQ ID NO: 165400 - DNA, 25 bp, Probe sequence
ttatcgccacattatcattacttat

SEQ ID NO: 165401 - DNA, 25 bp, Probe sequence
ttgccttgattttaacgattgtaga

SEQ ID NO: 165402 - DNA, 25 bp, Probe sequence
ttgaattatttgtagttggtgcagt

SEQ ID NO: 165403 - DNA, 25 bp, Probe sequence
atcacttgaagatgcgttacgtaga

SEQ ID NO: 165404 - DNA, 25 bp, Probe sequence
atcagaagctgcacgtaaacgtaaa

SEQ ID NO: 165405 - DNA, 25 bp, Probe sequence
atgaatcacttgaagatgcgttacg

SEQ ID NO: 165406 - DNA, 25 bp, Probe sequence
agaaatcagaagctgcacgtaaacg

SEQ ID NO: 165407 - DNA, 25 bp, Probe sequence
agaagctgcacgtaaacgtaaattc

SEQ ID NO: 165408 - DNA, 25 bp, Probe sequence
acttgaagatgcgttacgtagattt

SEQ ID NO: 165409 - DNA, 25 bp, Probe sequence
acagtagtacgtaaaaatgaatcac

SEQ ID NO: 165410 - DNA, 25 bp, Probe sequence
acaatccaagaagtacgtaaacgtg

SEQ ID NO: 165411 - DNA, 25 bp, Probe sequence
aaatcagaagctgcacgtaaacgta

SEQ ID NO: 165412 - DNA, 25 bp, Probe sequence
aaaagaaatcagaagctgcacgtaa

SEQ ID NO: 165413 - DNA, 25 bp, Probe sequence
aagctgcacgtaaacgtaaattcaa

SEQ ID NO: 165414 - DNA, 25 bp, Probe sequence
aagaaatcagaagctgcacgtaaac

SEQ ID NO: 165415 - DNA, 25 bp, Probe sequence
aatgaatcacttgaagatgcgttac

SEQ ID NO: 165416 - DNA, 25 bp, Probe sequence
aatcagaagctgcacgtaaacgtaa

SEQ ID NO: 165417 - DNA, 25 bp, Probe sequence
aatcacttgaagatgcgttacgtag

SEQ ID NO: 165418 - DNA, 25 bp, Probe sequence
caatccaagaagtacgtaaacgtga

SEQ ID NO: 165419 - DNA, 25 bp, Probe sequence
cacttgaagatgcgttacgtagatt

SEQ ID NO: 165420 - DNA, 25 bp, Probe sequence
cagtttctaaaagtggaacaatcca

SEQ ID NO: 165421 - DNA, 25 bp, Probe sequence
cttgaagatgcgttacgtagattta

SEQ ID NO: 165422 - DNA, 25 bp, Probe sequence
gcgttacgtagatttaaacgttcag

SEQ ID NO: 165423 - DNA, 25 bp, Probe sequence
gctgcacgtaaacgtaaattcaaat

SEQ ID NO: 165424 - DNA, 25 bp, Probe sequence
gaatcacttgaagatgcgttacgta

SEQ ID NO: 165425 - DNA, 25 bp, Probe sequence
gaagatgcgttacgtagatttaaac

SEQ ID NO: 165426 - DNA, 25 bp, Probe sequence
gaagctgcacgtaaacgtaaattca

SEQ ID NO: 165427 - DNA, 25 bp, Probe sequence
gaacaatccaagaagtacgtaaacg

SEQ ID NO: 165428 - DNA, 25 bp, Probe sequence
gaaatcagaagctgcacgtaaacgt

SEQ ID NO: 165429 - DNA, 25 bp, Probe sequence
gatgcgttacgtagatttaaacgtt

SEQ ID NO: 165430 - DNA, 25 bp, Probe sequence
tgcgttacgtagatttaaacgttca

SEQ ID NO: 165431 - DNA, 25 bp, Probe sequence
tggaacaatccaagaagtacgtaaa

SEQ ID NO: 165432 - DNA, 25 bp, Probe sequence
tgcacgtaaacgtaaattcaaataa

SEQ ID NO: 165433 - DNA, 25 bp, Probe sequence
tgaatcacttgaagatgcgttacgt

SEQ ID NO: 165434 - DNA, 25 bp, Probe sequence
tcacttgaagatgcgttacgtagat

SEQ ID NO: 165435 - DNA, 25 bp, Probe sequence
ttcagtttctaaaagtggaacaatc

SEQ ID NO: 165436 - DNA, 25 bp, Probe sequence
ttgaagatgcgttacgtagatttaa

SEQ ID NO: 165437 - DNA, 25 bp, Probe sequence
attacgcaagcaaattatccattaa

SEQ ID NO: 165438 - DNA, 25 bp, Probe sequence
aacttggcccaattattacgtgatc

SEQ ID NO: 165439 - DNA, 25 bp, Probe sequence
atcgtaaagcataagttctctgaac

SEQ ID NO: 165440 - DNA, 25 bp, Probe sequence
aaatcctgatgctgtaatctgtgta

SEQ ID NO: 165441 - DNA, 25 bp, Probe sequence
aacaggttgttatgcgcaaacttca

SEQ ID NO: 165442 - DNA, 25 bp, Probe sequence
aagcgacgcaactagtgaattcagg

SEQ ID NO: 165443 - DNA, 25 bp, Probe sequence
aagttgtgcgtcatttgcatattcc

SEQ ID NO: 165444 - DNA, 25 bp, Probe sequence
cagacttggcagttacgagtgatgt

SEQ ID NO: 165445 - DNA, 25 bp, Probe sequence
gcataaagctttaccagacttggca

SEQ ID NO: 165446 - DNA, 25 bp, Probe sequence
gcacattctgtattattccatgggc

SEQ ID NO: 165447 - DNA, 25 bp, Probe sequence
gaagcaaactatgagcgcgttgact

SEQ ID NO: 165448 - DNA, 25 bp, Probe sequence
gaagcgaatgctgatgtatttgtta

SEQ ID NO: 165449 - DNA, 25 bp, Probe sequence
gaacgccaaccaattaatggtgttg

SEQ ID NO: 165450 - DNA, 25 bp, Probe sequence
gaacgaattcgaatttcttcaattg

SEQ ID NO: 165451 - DNA, 25 bp, Probe sequence
gaaactgaagcaatctggcaattat

SEQ ID NO: 165452 - DNA, 25 bp, Probe sequence
gaaattcctggtgtcgatgtagtag

SEQ ID NO: 165453 - DNA, 25 bp, Probe sequence
gacgggaattcatacaggtggatat

SEQ ID NO: 165454 - DNA, 25 bp, Probe sequence
gacgtgcaataagacaaaatcctga

SEQ ID NO: 165455 - DNA, 25 bp, Probe sequence
gacgaatcactcataggtcaaattg

SEQ ID NO: 165456 - DNA, 25 bp, Probe sequence
gagcgcgttgactttgaagcgaatg

SEQ ID NO: 165457 - DNA, 25 bp, Probe sequence
gatgtgcttgaagtaattcctgagg

SEQ ID NO: 165458 - DNA, 25 bp, Probe sequence
gttggtttcccaggtgaaactgaag

SEQ ID NO: 165459 - DNA, 25 bp, Probe sequence
gttgcgtttcacacattaggttgta

SEQ ID NO: 165460 - DNA, 25 bp, Probe sequence
gtattattccatgggctcgtggctt

SEQ ID NO: 165461 - DNA, 25 bp, Probe sequence
gtgatgtaattgttggtttcccagg

SEQ ID NO: 165462 - DNA, 25 bp, Probe sequence
ggcacgccagctgcaagaatggatg

SEQ ID NO: 165463 - DNA, 25 bp, Probe sequence
ggcttaatgcgttcaagagatccgg

SEQ ID NO: 165464 - DNA, 25 bp, Probe sequence
tgggctcgtggcttaatgcgttcaa

SEQ ID NO: 165465 - DNA, 25 bp, Probe sequence
tgtcaacagttgcgtttcacacatt

SEQ ID NO: 165466 - DNA, 25 bp, Probe sequence
tgttttcccttattctcctagaatt

SEQ ID NO: 165467 - DNA, 25 bp, Probe sequence
ttatgcgcaaacttcatcagctgaa

SEQ ID NO: 165468 - DNA, 25 bp, Probe sequence
ttacagatagaacacgtgcgtcatt

SEQ ID NO: 165469 - DNA, 25 bp, Probe sequence
ttctcctagaattggcacgccagct

SEQ ID NO: 165470 - DNA, 25 bp, Probe sequence
ttctctgaactgcatgttttccctt

SEQ ID NO: 165471 - DNA, 25 bp, Probe sequence
attaatacagaattgccagttgatg

SEQ ID NO: 165472 - DNA, 25 bp, Probe sequence
atactagtacagttgttggtcttgg

SEQ ID NO: 165473 - DNA, 25 bp, Probe sequence
atcgtttagtgattccatctattca

SEQ ID NO: 165474 - DNA, 25 bp, Probe sequence
aagctatcgtttagtgattccatct

SEQ ID NO: 165475 - DNA, 25 bp, Probe sequence
aagctactgaattgggtgcttcatc

SEQ ID NO: 165476 - DNA, 25 bp, Probe sequence
aagtgttgatgatttttggtcctga

SEQ ID NO: 165477 - DNA, 25 bp, Probe sequence
cagaattgccagttgatgttacgat

SEQ ID NO: 165478 - DNA, 25 bp, Probe sequence
gccagttgatgttacgatttgcagt

SEQ ID NO: 165479 - DNA, 25 bp, Probe sequence
gcgccattgtatgcgttaagtgcaa

SEQ ID NO: 165480 - DNA, 25 bp, Probe sequence
gctgacaaatatgagtggttgctac

SEQ ID NO: 165481 - DNA, 25 bp, Probe sequence
gcaatttcaagcaaactttacaaca

SEQ ID NO: 165482 - DNA, 25 bp, Probe sequence
gaagctgctgaacaaagctatcgtt

SEQ ID NO: 165483 - DNA, 25 bp, Probe sequence
gaaactgcgccattgtatgcgttaa

SEQ ID NO: 165484 - DNA, 25 bp, Probe sequence
gagaattttacgggcagaaactgcg

SEQ ID NO: 165485 - DNA, 25 bp, Probe sequence
gatgatttttggtcctgagggtggt

SEQ ID NO: 165486 - DNA, 25 bp, Probe sequence
gagtggttgctacaaaaagctactg

SEQ ID NO: 165487 - DNA, 25 bp, Probe sequence
gagggtggtttgtcagaaaatgaaa

SEQ ID NO: 165488 - DNA, 25 bp, Probe sequence
gatgtaagtcagcgtttttttatta

SEQ ID NO: 165489 - DNA, 25 bp, Probe sequence
gatggtgagttaagcaatttcaagc

SEQ ID NO: 165490 - DNA, 25 bp, Probe sequence
gatgttacgatttgcagtggactaa

SEQ ID NO: 165491 - DNA, 25 bp, Probe sequence
gatcaaacagtttatttatgtgaaa

SEQ ID NO: 165492 - DNA, 25 bp, Probe sequence
gattccatctattcaattcgagtcg

SEQ ID NO: 165493 - DNA, 25 bp, Probe sequence
gttatttcatagaccaaaacgctga

SEQ ID NO: 165494 - DNA, 25 bp, Probe sequence
gtaatgagatatgatgttggtagta

SEQ ID NO: 165495 - DNA, 25 bp, Probe sequence
gtgcaacgttatttcatagaccaaa

SEQ ID NO: 165496 - DNA, 25 bp, Probe sequence
gtgatactattgataattatgacta

SEQ ID NO: 165497 - DNA, 25 bp, Probe sequence
gggcagaaactgcgccattgtatgc

SEQ ID NO: 165498 - DNA, 25 bp, Probe sequence
tcaagcaaactttacaacaattcaa

SEQ ID NO: 165499 - DNA, 25 bp, Probe sequence
taattatgactatattcttattgca

SEQ ID NO: 165500 - DNA, 25 bp, Probe sequence
tagaccaaaacgctgatgtaagtca

SEQ ID NO: 165501 - DNA, 25 bp, Probe sequence
tatgcgttaagtgcaataagttatg

SEQ ID NO: 165502 - DNA, 25 bp, Probe sequence
tagtgattccatctattcaattcga

SEQ ID NO: 165503 - DNA, 25 bp, Probe sequence
ttccatctattcaattcgagtcgaa

SEQ ID NO: 165504 - DNA, 25 bp, Probe sequence
ttggtcctgagggtggtttgtcaga

SEQ ID NO: 165505 - DNA, 25 bp, Probe sequence
attggctaccaatatacttgaaaat

SEQ ID NO: 165506 - DNA, 25 bp, Probe sequence
attgccacagcattcagtaattgat

SEQ ID NO: 165507 - DNA, 25 bp, Probe sequence
attttagcgcatattattgatgaaa

SEQ ID NO: 165508 - DNA, 25 bp, Probe sequence
agcggatgaagagctttgcattgag

SEQ ID NO: 165509 - DNA, 25 bp, Probe sequence
acagtcacatatggagcgtgtaggt

SEQ ID NO: 165510 - DNA, 25 bp, Probe sequence
aaattatttcagaacaacatgacaa

SEQ ID NO: 165511 - DNA, 25 bp, Probe sequence
aagcgttggatattgatgaaatggc

SEQ ID NO: 165512 - DNA, 25 bp, Probe sequence
aatcatggatcaaatggtgtcgtga

SEQ ID NO: 165513 - DNA, 25 bp, Probe sequence
caaatggtgtcgtgatagaagattc

SEQ ID NO: 165514 - DNA, 25 bp, Probe sequence
gcggttattttattacttctggtat

SEQ ID NO: 165515 - DNA, 25 bp, Probe sequence
gaaggtatacagtcacatatggagc

SEQ ID NO: 165516 - DNA, 25 bp, Probe sequence
gaagctgttccaggtaacttattga

SEQ ID NO: 165517 - DNA, 25 bp, Probe sequence
gaactggacagagctttcaattatt

SEQ ID NO: 165518 - DNA, 25 bp, Probe sequence
gaaaaactatttccatccattccga

SEQ ID NO: 165519 - DNA, 25 bp, Probe sequence
gaaacatatgtattgccacagcatt

SEQ ID NO: 165520 - DNA, 25 bp, Probe sequence
gaaacgttaattgaagctgttccag

SEQ ID NO: 165521 - DNA, 25 bp, Probe sequence
gaaatggcagtgagtgtagctaaag

SEQ ID NO: 165522 - DNA, 25 bp, Probe sequence
gacagagctttcaattattattaat

SEQ ID NO: 165523 - DNA, 25 bp, Probe sequence
gatgttggtactggctcaggtatat

SEQ ID NO: 165524 - DNA, 25 bp, Probe sequence
gatcatccgactacaagtatgtgtt

SEQ ID NO: 165525 - DNA, 25 bp, Probe sequence
gttgggtttgtcttgttggccagaa

SEQ ID NO: 165526 - DNA, 25 bp, Probe sequence
gttgggaaacatatgctaaagaagc

SEQ ID NO: 165527 - DNA, 25 bp, Probe sequence
gtaatagcaaatattttagcgcata

SEQ ID NO: 165528 - DNA, 25 bp, Probe sequence
gtaattgatgttggtactggctcag

SEQ ID NO: 165529 - DNA, 25 bp, Probe sequence
gtcttgttggccagaaagtgagtga

SEQ ID NO: 165530 - DNA, 25 bp, Probe sequence
gggagtaagattgaaagcctatttt

SEQ ID NO: 165531 - DNA, 25 bp, Probe sequence
gggtttgtcttgttggccagaaagt

SEQ ID NO: 165532 - DNA, 25 bp, Probe sequence
gaagcagtagaattggctaccaata

SEQ ID NO: 165533 - DNA, 25 bp, Probe sequence
ggctcaggtatattaagtattgcaa

SEQ ID NO: 165534 - DNA, 25 bp, Probe sequence
tggagcgtgtaggttttaaaattat

SEQ ID NO: 165535 - DNA, 25 bp, Probe sequence
tccatccattccgagcgtcgaagaa

SEQ ID NO: 165536 - DNA, 25 bp, Probe sequence
taatactctaaatgaaggcggttat

SEQ ID NO: 165537 - DNA, 25 bp, Probe sequence
taaatacggtgaaatttacgctttg

SEQ ID NO: 165538 - DNA, 25 bp, Probe sequence
ttccgagcgtcgaagaagttcacaa

SEQ ID NO: 165539 - DNA, 25 bp, Probe sequence
agatatctttagctctttcttcggt

SEQ ID NO: 165540 - DNA, 25 bp, Probe sequence
acacaaacaggtaagcaattccgct

SEQ ID NO: 165541 - DNA, 25 bp, Probe sequence
aaagagatccaaatgcaccgcaaaa

SEQ ID NO: 165542 - DNA, 25 bp, Probe sequence
aaaccatctgaaacatttaaacgtg

SEQ ID NO: 165543 - DNA, 25 bp, Probe sequence
aagctttcgaaaaaatatcatccag

SEQ ID NO: 165544 - DNA, 25 bp, Probe sequence
aacgtgatggtgatgatatttatta

SEQ ID NO: 165545 - DNA, 25 bp, Probe sequence
aatggctctgactttggcggtttta

SEQ ID NO: 165546 - DNA, 25 bp, Probe sequence
aatgttcatggctatggatacggag

SEQ ID NO: 165547 - DNA, 25 bp, Probe sequence
aatgttagcttcccacaagcagctt

SEQ ID NO: 165548 - DNA, 25 bp, Probe sequence
cacaagcagctttaggcgatgaaat

SEQ ID NO: 165549 - DNA, 25 bp, Probe sequence
ccgcaaaaaggtgatgatcttcagt

SEQ ID NO: 165550 - DNA, 25 bp, Probe sequence
gcttcccacaagcagctttaggcga

SEQ ID NO: 165551 - DNA, 25 bp, Probe sequence
ccaacatgtcacggaaaaggtactg

SEQ ID NO: 165552 - DNA, 25 bp, Probe sequence
gcgcaagctatgatcaatttggaca

SEQ ID NO: 165553 - DNA, 25 bp, Probe sequence
gcttcggtggcggcggttttgaaga

SEQ ID NO: 165554 - DNA, 25 bp, Probe sequence
gaatttgcccaattaaatggtgaag

SEQ ID NO: 165555 - DNA, 25 bp, Probe sequence
tgaaggctctccaggcgtgaatgga

SEQ ID NO: 165556 - DNA, 25 bp, Probe sequence
gaagaagcttgtccaacatgtcacg

SEQ ID NO: 165557 - DNA, 25 bp, Probe sequence
gaagcctatgaagttttaagtgatg

SEQ ID NO: 165558 - DNA, 25 bp, Probe sequence
gaacaagtttgtcctaaatgtaatg

SEQ ID NO: 165559 - DNA, 25 bp, Probe sequence
gaaacatgtcatggtgatggtgcaa

SEQ ID NO: 165560 - DNA, 25 bp, Probe sequence
gaaatttctgaagcctatgaagttt

SEQ ID NO: 165561 - DNA, 25 bp, Probe sequence
gatggtgcaaagcctggaacaagta

SEQ ID NO: 165562 - DNA, 25 bp, Probe sequence
gtagttactgtaatggcgctggtca

SEQ ID NO: 165563 - DNA, 25 bp, Probe sequence
gtacctgaaggtgtcgacaatgaac

SEQ ID NO: 165564 - DNA, 25 bp, Probe sequence
gtgatgataataaacgcgcaagcta

SEQ ID NO: 165565 - DNA, 25 bp, Probe sequence
gtggcggcggttttgaagatatctt

SEQ ID NO: 165566 - DNA, 25 bp, Probe sequence
ggtggacaaggattcaatggctctg

SEQ ID NO: 165567 - DNA, 25 bp, Probe sequence
ggatacggagatttatatgttgata

SEQ ID NO: 165568 - DNA, 25 bp, Probe sequence
ggacctgctggtgatttatacgtag

SEQ ID NO: 165569 - DNA, 25 bp, Probe sequence
ggcgtgaatggaggacctgctggtg

SEQ ID NO: 165570 - DNA, 25 bp, Probe sequence
ggcgctggtcatgtagctgtagaac

SEQ ID NO: 165571 - DNA, 25 bp, Probe sequence
tttggcggttttagtggcttcggtg

SEQ ID NO: 165572 - DNA, 25 bp, Probe sequence
tagattagctggtgaaggctctcca

SEQ ID NO: 165573 - DNA, 25 bp, Probe sequence
ggaacctacacgccaagcaatgaaa

SEQ ID NO: 165574 - DNA, 25 bp, Probe sequence
atctcagctggtgaaaacggtccat

SEQ ID NO: 165575 - DNA, 25 bp, Probe sequence
atctcaaatctattcaacagcagta

SEQ ID NO: 165576 - DNA, 25 bp, Probe sequence
atctcattaccatttatctcagctg

SEQ ID NO: 165577 - DNA, 25 bp, Probe sequence
aggtgaacgtccaatggctgcggat

SEQ ID NO: 165578 - DNA, 25 bp, Probe sequence
agtactatcaacagccggtgacaac

SEQ ID NO: 165579 - DNA, 25 bp, Probe sequence
acgtaacactacgattcctacatct

SEQ ID NO: 165580 - DNA, 25 bp, Probe sequence
aaagatgctgaagttaacgctgaag

SEQ ID NO: 165581 - DNA, 25 bp, Probe sequence
aacactgttcaatctattaaacgtc

SEQ ID NO: 165582 - DNA, 25 bp, Probe sequence
aacaccatctgttgtagctttcaaa

SEQ ID NO: 165583 - DNA, 25 bp, Probe sequence
aagacgctcttaaaactgctttaga

SEQ ID NO: 165584 - DNA, 25 bp, Probe sequence
aagatgctggtaaaattgctggttt

SEQ ID NO: 165585 - DNA, 25 bp, Probe sequence
aaggtggcgttatcacaggtgacgt

SEQ ID NO: 165586 - DNA, 25 bp, Probe sequence
aatggcgtagacttatctcaagata

SEQ ID NO: 165587 - DNA, 25 bp, Probe sequence
aatcaagttcttcattatcagacga

SEQ ID NO: 165588 - DNA, 25 bp, Probe sequence
catacacaccacaagaaatctcagc

SEQ ID NO: 165589 - DNA, 25 bp, Probe sequence
cggtgacaacaaacttggcggtgat

SEQ ID NO: 165590 - DNA, 25 bp, Probe sequence
ccagctgaacgtggtaaacctcaaa

SEQ ID NO: 165591 - DNA, 25 bp, Probe sequence
gaaggttcacgtacaacaccatctg

SEQ ID NO: 165592 - DNA, 25 bp, Probe sequence
gaacaatggaacctacacgccaagc

SEQ ID NO: 165593 - DNA, 25 bp, Probe sequence
gaaaacggtccattacacttagaag

SEQ ID NO: 165594 - DNA, 25 bp, Probe sequence
gaaagacgctggcttaacaaactca

SEQ ID NO: 165595 - DNA, 25 bp, Probe sequence
gactgatattccaccagctgaacgt

SEQ ID NO: 165596 - DNA, 25 bp, Probe sequence
gagcaagcggctcaacagcaacaac

SEQ ID NO: 165597 - DNA, 25 bp, Probe sequence
gattccaattgactgatattccacc

SEQ ID NO: 165598 - DNA, 25 bp, Probe sequence
gtgacggtgtattcgaagtactatc

SEQ ID NO: 165599 - DNA, 25 bp, Probe sequence
gggagctgcaatccaaggtggcgtt

SEQ ID NO: 165600 - DNA, 25 bp, Probe sequence
ggtgtatcacaaactcaaatctcat

SEQ ID NO: 165601 - DNA, 25 bp, Probe sequence
ggctgcggataataaaacacttggt

SEQ ID NO: 165602 - DNA, 25 bp, Probe sequence
tggcggtgatgattttgaccaagta

SEQ ID NO: 165603 - DNA, 25 bp, Probe sequence
tgactacctagttgcagaattcaaa

SEQ ID NO: 165604 - DNA, 25 bp, Probe sequence
tagacgtaacaccactatctttagg

SEQ ID NO: 165605 - DNA, 25 bp, Probe sequence
ttggtggatcaactcgtattccagc

SEQ ID NO: 165606 - DNA, 25 bp, Probe sequence
ttcctacatctaaatctcaaatcta

SEQ ID NO: 165607 - DNA, 25 bp, Probe sequence
attcctgtaggtcttgtatacgcag

SEQ ID NO: 165608 - DNA, 25 bp, Probe sequence
attttcgcattaggtgtcgcaatcg

SEQ ID NO: 165609 - DNA, 25 bp, Probe sequence
attattctttattcacgcagtactt

SEQ ID NO: 165610 - DNA, 25 bp, Probe sequence
agcgtttattaattccattcggtct

SEQ ID NO: 165611 - DNA, 25 bp, Probe sequence
aaatgatgggtgacggtatcgctat

SEQ ID NO: 165612 - DNA, 25 bp, Probe sequence
aaacaggtgtgttcggcggtattat

SEQ ID NO: 165613 - DNA, 25 bp, Probe sequence
aacatgcaattggtcttgtatcaga

SEQ ID NO: 165614 - DNA, 25 bp, Probe sequence
aaggctttactttacatgttgagga

SEQ ID NO: 165615 - DNA, 25 bp, Probe sequence
aatccacatcggtttagacactgtt

SEQ ID NO: 165616 - DNA, 25 bp, Probe sequence
cattcggtctacatcacattttcca

SEQ ID NO: 165617 - DNA, 25 bp, Probe sequence
ctatcgcagcattcgtcggttacat

SEQ ID NO: 165618 - DNA, 25 bp, Probe sequence
cgcaccgttctggttcgagtttggt

SEQ ID NO: 165619 - DNA, 25 bp, Probe sequence
ccatcttatttaggtttcttcgctg

SEQ ID NO: 165620 - DNA, 25 bp, Probe sequence
gccgtattcttatttggtttcatca

SEQ ID NO: 165621 - DNA, 25 bp, Probe sequence
gccctggcagcttggtgttataaca

SEQ ID NO: 165622 - DNA, 25 bp, Probe sequence
gcgtttcgtacctattatgatggct

SEQ ID NO: 165623 - DNA, 25 bp, Probe sequence
gcagctttagcaatttatcacacag

SEQ ID NO: 165624 - DNA, 25 bp, Probe sequence
gaagtgcctgatcaagtgttcagcg

SEQ ID NO: 165625 - DNA, 25 bp, Probe sequence
gaagttcgtgcaccattcaacggta

SEQ ID NO: 165626 - DNA, 25 bp, Probe sequence
gaaacttttcggtcaattgcaacgt

SEQ ID NO: 165627 - DNA, 25 bp, Probe sequence
gaaagatttaggcgcatctggtgta

SEQ ID NO: 165628 - DNA, 25 bp, Probe sequence
gacgcttgtatcacacgtctacgtg

SEQ ID NO: 165629 - DNA, 25 bp, Probe sequence
gatggtttatcattcttaacattgt

SEQ ID NO: 165630 - DNA, 25 bp, Probe sequence
gatccagcgagtggttacgctagca

SEQ ID NO: 165631 - DNA, 25 bp, Probe sequence
gtttcttcgctggtaagcgtttcgt

SEQ ID NO: 165632 - DNA, 25 bp, Probe sequence
gtcgcaatcggattagctggcggtg

SEQ ID NO: 165633 - DNA, 25 bp, Probe sequence
gtgaattccctgttatgatgttcgg

SEQ ID NO: 165634 - DNA, 25 bp, Probe sequence
gggttctgctgctttaacatcattc

SEQ ID NO: 165635 - DNA, 25 bp, Probe sequence
ggtgaccaacgtatctttatcgaac

SEQ ID NO: 165636 - DNA, 25 bp, Probe sequence
ggcaacatttcatttggcgatcaat

SEQ ID NO: 165637 - DNA, 25 bp, Probe sequence
tgatgttcggtttacctgcagcagc

SEQ ID NO: 165638 - DNA, 25 bp, Probe sequence
tctaaagttgatgttcctggtttga

SEQ ID NO: 165639 - DNA, 25 bp, Probe sequence
tactggtgttgccgtattcttattt

SEQ ID NO: 165640 - DNA, 25 bp, Probe sequence
ttagactacatccgcaatcatgcaa

SEQ ID NO: 165641 - DNA, 25 bp, Probe sequence
attgatgattcagttgaacaagctg

SEQ ID NO: 165642 - DNA, 25 bp, Probe sequence
attcaccaagctgtagttcaagatg

SEQ ID NO: 165643 - DNA, 25 bp, Probe sequence
atttaaggctctacgctgagtttga

SEQ ID NO: 165644 - DNA, 25 bp, Probe sequence
atttgatccaaatattcaccaagct

SEQ ID NO: 165645 - DNA, 25 bp, Probe sequence
atagaacgtgcacttcaaattgaag

SEQ ID NO: 165646 - DNA, 25 bp, Probe sequence
atagagtattaagaccatcaatggt

SEQ ID NO: 165647 - DNA, 25 bp, Probe sequence
agcacaacgtgtgttaacagatatt

SEQ ID NO: 165648 - DNA, 25 bp, Probe sequence
aaatattcaccaagctgtagttcaa

SEQ ID NO: 165649 - DNA, 25 bp, Probe sequence
aaaacactgaatcaacagttgaaga

SEQ ID NO: 165650 - DNA, 25 bp, Probe sequence
aaaacatatcaagcacaacgtgtgt

SEQ ID NO: 165651 - DNA, 25 bp, Probe sequence
aaaaggtgtacaaatggtgcatgaa

SEQ ID NO: 165652 - DNA, 25 bp, Probe sequence
aagataatggtcttgaagttattaa

SEQ ID NO: 165653 - DNA, 25 bp, Probe sequence
aaggtcatttacaagatgaagcaat

SEQ ID NO: 165654 - DNA, 25 bp, Probe sequence
aaggctctacgctgagtttgaaaat

SEQ ID NO: 165655 - DNA, 25 bp, Probe sequence
aatggtgcatgaaagtttgattaac

SEQ ID NO: 165656 - DNA, 25 bp, Probe sequence
aattgaaggtgatgatgagactttt

SEQ ID NO: 165657 - DNA, 25 bp, Probe sequence
ctgaaggtgaagcatttgatccaaa

SEQ ID NO: 165658 - DNA, 25 bp, Probe sequence
gctgtagttcaagatgataaccctg

SEQ ID NO: 165659 - DNA, 25 bp, Probe sequence
gaatctggcgaaatcactcaagaac

SEQ ID NO: 165660 - DNA, 25 bp, Probe sequence
gaagcaatagaagaaacgtctgacg

SEQ ID NO: 165661 - DNA, 25 bp, Probe sequence
gaaacgtctgacgagaatgttattg

SEQ ID NO: 165662 - DNA, 25 bp, Probe sequence
gaaagtttgattaacgcactaaaag

SEQ ID NO: 165663 - DNA, 25 bp, Probe sequence
gaaatatttaaggctctacgctgag

SEQ ID NO: 165664 - DNA, 25 bp, Probe sequence
gaccatcaatggtcaaagtaaacca

SEQ ID NO: 165665 - DNA, 25 bp, Probe sequence
gagtttgaaaattataagcgtagaa

SEQ ID NO: 165666 - DNA, 25 bp, Probe sequence
gatgataaccctgattttgaatctg

SEQ ID NO: 165667 - DNA, 25 bp, Probe sequence
gatgagacttttaaatctcttcaaa

SEQ ID NO: 165668 - DNA, 25 bp, Probe sequence
gatccaaatattcaccaagctgtag

SEQ ID NO: 165669 - DNA, 25 bp, Probe sequence
gatattttaccagcaatagacaata

SEQ ID NO: 165670 - DNA, 25 bp, Probe sequence
gtgtgttaacagatattttaccagc

SEQ ID NO: 165671 - DNA, 25 bp, Probe sequence
ggcgaaatcactcaagaactacaaa

SEQ ID NO: 165672 - DNA, 25 bp, Probe sequence
taaccctgattttgaatctggcgaa

SEQ ID NO: 165673 - DNA, 25 bp, Probe sequence
tagacaatatagaacgtgcacttca

SEQ ID NO: 165674 - DNA, 25 bp, Probe sequence
ttaacgcactaaaagataatggtct

SEQ ID NO: 165675 - DNA, 25 bp, Probe sequence
atatctcaatatacaactttagttg

SEQ ID NO: 165676 - DNA, 25 bp, Probe sequence
atgatgtatcatcagcattgacata

SEQ ID NO: 165677 - DNA, 25 bp, Probe sequence
aggtattatgtcaatcgtttacttg

SEQ ID NO: 165678 - DNA, 25 bp, Probe sequence
agtaatgtatcttcaattcagccca

SEQ ID NO: 165679 - DNA, 25 bp, Probe sequence
agatgatattgtctcttttgttcaa

SEQ ID NO: 165680 - DNA, 25 bp, Probe sequence
acatcttgcttcagacataccgttt

SEQ ID NO: 165681 - DNA, 25 bp, Probe sequence
acaagatatatcttcaccaaatatt

SEQ ID NO: 165682 - DNA, 25 bp, Probe sequence
aacttgaatgttagtcctgctacaa

SEQ ID NO: 165683 - DNA, 25 bp, Probe sequence
aactttagttgttcatcctaatcat

SEQ ID NO: 165684 - DNA, 25 bp, Probe sequence
aattcagcccattctacaatatata

SEQ ID NO: 165685 - DNA, 25 bp, Probe sequence
cactaattgagcgacataacttgaa

SEQ ID NO: 165686 - DNA, 25 bp, Probe sequence
cttcaattcagcccattctacaata

SEQ ID NO: 165687 - DNA, 25 bp, Probe sequence
gacacatagttcttcagggcgttcg

SEQ ID NO: 165688 - DNA, 25 bp, Probe sequence
gatgaattatcaaatatatctcaat

SEQ ID NO: 165689 - DNA, 25 bp, Probe sequence
gattcgtgctaatcctaatttagtt

SEQ ID NO: 165690 - DNA, 25 bp, Probe sequence
gttgagcatgtacatcttgcttcag

SEQ ID NO: 165691 - DNA, 25 bp, Probe sequence
gttaaacttattgatgcattgaatg

SEQ ID NO: 165692 - DNA, 25 bp, Probe sequence
gttagtcctgctacaattagaaatg

SEQ ID NO: 165693 - DNA, 25 bp, Probe sequence
gtttacttgaacaaacatctcatca

SEQ ID NO: 165694 - DNA, 25 bp, Probe sequence
gtcaaatcgctgtgattggacctac

SEQ ID NO: 165695 - DNA, 25 bp, Probe sequence
gtctcttttgttcaatcagagcagg

SEQ ID NO: 165696 - DNA, 25 bp, Probe sequence
gtgattggacctacagctatgcatt

SEQ ID NO: 165697 - DNA, 25 bp, Probe sequence
gtgatatttcaattgtaacaagtca

SEQ ID NO: 165698 - DNA, 25 bp, Probe sequence
ggcgttcgccatcacaattaggttt

SEQ ID NO: 165699 - DNA, 25 bp, Probe sequence
ggttctaaaacactaattgagcgac

SEQ ID NO: 165700 - DNA, 25 bp, Probe sequence
ggttatcgtattttcatcaggtcat

SEQ ID NO: 165701 - DNA, 25 bp, Probe sequence
ggacctacagctatgcattatcaaa

SEQ ID NO: 165702 - DNA, 25 bp, Probe sequence
tgattttggacaacccgttggttct

SEQ ID NO: 165703 - DNA, 25 bp, Probe sequence
tgttgaggattatgttgattttgga

SEQ ID NO: 165704 - DNA, 25 bp, Probe sequence
tcgccatcacaattaggttttaggt

SEQ ID NO: 165705 - DNA, 25 bp, Probe sequence
tcagcattgacatattttgcagatg

SEQ ID NO: 165706 - DNA, 25 bp, Probe sequence
ttttcatcaggtcatgttgagcatg

SEQ ID NO: 165707 - DNA, 25 bp, Probe sequence
ttcttcagggcgttcgccatcacaa

SEQ ID NO: 165708 - DNA, 25 bp, Probe sequence
ttgatgacagcttaagtgatatttc

SEQ ID NO: 165709 - DNA, 25 bp, Probe sequence
attcaacatatttcgagttacggct

SEQ ID NO: 165710 - DNA, 25 bp, Probe sequence
atattatggatttggagcaggtgca

SEQ ID NO: 165711 - DNA, 25 bp, Probe sequence
atgtaggtggcggcacaccaacggc

SEQ ID NO: 165712 - DNA, 25 bp, Probe sequence
atcaatccagtgaatcattatatca

SEQ ID NO: 165713 - DNA, 25 bp, Probe sequence
atctcctttccatcaatacgaaata

SEQ ID NO: 165714 - DNA, 25 bp, Probe sequence
atgaggtttttgaagctttcctaat

SEQ ID NO: 165715 - DNA, 25 bp, Probe sequence
atgtatcatttaccgaaacagacga

SEQ ID NO: 165716 - DNA, 25 bp, Probe sequence
cggccctttctattaatcagttgga

SEQ ID NO: 165717 - DNA, 25 bp, Probe sequence
agatggccatgaatcagaacataat

SEQ ID NO: 165718 - DNA, 25 bp, Probe sequence
acaatctcctttccatcaatacgaa

SEQ ID NO: 165719 - DNA, 25 bp, Probe sequence
aaataaaccttctttgactgagaga

SEQ ID NO: 165720 - DNA, 25 bp, Probe sequence
aacagacgattgaagattttgaaca

SEQ ID NO: 165721 - DNA, 25 bp, Probe sequence
caacggccctttctattaatcagtt

SEQ ID NO: 165722 - DNA, 25 bp, Probe sequence
aagtgcatatatacatattccattt

SEQ ID NO: 165723 - DNA, 25 bp, Probe sequence
aattttgcattagatggccatgaat

SEQ ID NO: 165724 - DNA, 25 bp, Probe sequence
cggagttattgtctgttttaggtag

SEQ ID NO: 165725 - DNA, 25 bp, Probe sequence
cgttatacgaatatcaatccagtga

SEQ ID NO: 165726 - DNA, 25 bp, Probe sequence
gcaatacgtgatacgtttacaatca

SEQ ID NO: 165727 - DNA, 25 bp, Probe sequence
gaagcaaatcctgatgagttaacta

SEQ ID NO: 165728 - DNA, 25 bp, Probe sequence
gaacaaagtttagatctagctttag

SEQ ID NO: 165729 - DNA, 25 bp, Probe sequence
gaaagtgtctttggtcaaacaataa

SEQ ID NO: 165730 - DNA, 25 bp, Probe sequence
gaaagattacttaaagcaatacgtg

SEQ ID NO: 165731 - DNA, 25 bp, Probe sequence
gagttacggcttaatacttgaacct

SEQ ID NO: 165732 - DNA, 25 bp, Probe sequence
gaggatttaggtgctgacatgtatc

SEQ ID NO: 165733 - DNA, 25 bp, Probe sequence
gatagaacaatctcctttccatcaa

SEQ ID NO: 165734 - DNA, 25 bp, Probe sequence
gtagatgagtacttagatgcactaa

SEQ ID NO: 165735 - DNA, 25 bp, Probe sequence
gtctgttttaggtagaacgcacaat

SEQ ID NO: 165736 - DNA, 25 bp, Probe sequence
gtgcaagtggttatgtagatggtgt

SEQ ID NO: 165737 - DNA, 25 bp, Probe sequence
ggtagaacgcacaatactgaagata

SEQ ID NO: 165738 - DNA, 25 bp, Probe sequence
ggtttactggtttaatgaggaatat

SEQ ID NO: 165739 - DNA, 25 bp, Probe sequence
ggagcaggtgcaagtggttatgtag

SEQ ID NO: 165740 - DNA, 25 bp, Probe sequence
tatacatattccattttgtgtaaga

SEQ ID NO: 165741 - DNA, 25 bp, Probe sequence
tttcaatgggcgttcaaacattcaa

SEQ ID NO: 165742 - DNA, 25 bp, Probe sequence
ttgcgtttaaatgaaggtgtgagta

SEQ ID NO: 165743 - DNA, 25 bp, Probe sequence
atttgattctgagtatgatccatat

SEQ ID NO: 165744 - DNA, 25 bp, Probe sequence
atacgcctggacacgtcgattttac

SEQ ID NO: 165745 - DNA, 25 bp, Probe sequence
atggtatattgcggactgttcccaa

SEQ ID NO: 165746 - DNA, 25 bp, Probe sequence
agttgaagttgtgccagctccagat

SEQ ID NO: 165747 - DNA, 25 bp, Probe sequence
acattccatttaatcgatacgcctg

SEQ ID NO: 165748 - DNA, 25 bp, Probe sequence
acaaaattgatttacctgctgcaga

SEQ ID NO: 165749 - DNA, 25 bp, Probe sequence
aaaacgttaattccaagacagcaat

SEQ ID NO: 165750 - DNA, 25 bp, Probe sequence
aaggaatttctcgattatagcacat

SEQ ID NO: 165751 - DNA, 25 bp, Probe sequence
cacgttctttggcagcttgtgaggg

SEQ ID NO: 165752 - DNA, 25 bp, Probe sequence
gcgattttagtagtagatgcggctc

SEQ ID NO: 165753 - DNA, 25 bp, Probe sequence
gcagaacctgaacgcgtgaaacaag

SEQ ID NO: 165754 - DNA, 25 bp, Probe sequence
gaagttggaattaatacacctaagc

SEQ ID NO: 165755 - DNA, 25 bp, Probe sequence
gacacgtcgattttacatatgaagt

SEQ ID NO: 165756 - DNA, 25 bp, Probe sequence
gacctgcatcagaaccattgcaagg

SEQ ID NO: 165757 - DNA, 25 bp, Probe sequence
gaccacggaaaatctacattggctg

SEQ ID NO: 165758 - DNA, 25 bp, Probe sequence
gacgatgttgttttagcaagtgcta

SEQ ID NO: 165759 - DNA, 25 bp, Probe sequence
gagccatatgttcgtgcaactatga

SEQ ID NO: 165760 - DNA, 25 bp, Probe sequence
gagattttgcatatgaacgtggtaa

SEQ ID NO: 165761 - DNA, 25 bp, Probe sequence
gagttagagttattgcctgttatta

SEQ ID NO: 165762 - DNA, 25 bp, Probe sequence
gatgcatcattagaatttgagcctg

SEQ ID NO: 165763 - DNA, 25 bp, Probe sequence
gatgcggctcaaggtatcgaagcac

SEQ ID NO: 165764 - DNA, 25 bp, Probe sequence
gattatagcacatattgaccacgga

SEQ ID NO: 165765 - DNA, 25 bp, Probe sequence
gttgatgattctagggttggtgaca

SEQ ID NO: 165766 - DNA, 25 bp, Probe sequence
gttcgtgcaactatgatggttccaa

SEQ ID NO: 165767 - DNA, 25 bp, Probe sequence
gtatttgatttcttcgatcaactta

SEQ ID NO: 165768 - DNA, 25 bp, Probe sequence
ggtttcttaggtatgttacacatgg

SEQ ID NO: 165769 - DNA, 25 bp, Probe sequence
ggcggtgacataagccgtaaacgta

SEQ ID NO: 165770 - DNA, 25 bp, Probe sequence
tgaagtgtcacgttctttggcagct

SEQ ID NO: 165771 - DNA, 25 bp, Probe sequence
tacctgctgcagaacctgaacgcgt

SEQ ID NO: 165772 - DNA, 25 bp, Probe sequence
tcacattagctagtagacctgcatc

SEQ ID NO: 165773 - DNA, 25 bp, Probe sequence
tagaggggtaatttcatcgataaga

SEQ ID NO: 165774 - DNA, 25 bp, Probe sequence
tttagctaaatgttatggcggtgac

SEQ ID NO: 165775 - DNA, 25 bp, Probe sequence
ttgcggactgttcccaatagataac

SEQ ID NO: 165776 - DNA, 25 bp, Probe sequence
ttgtttatgaattacctttagctga

SEQ ID NO: 165777 - DNA, 25 bp, Probe sequence
atttttaggcgatagaccaacaatt

SEQ ID NO: 165778 - DNA, 25 bp, Probe sequence
atgagcgacaatattgtagctattt

SEQ ID NO: 165779 - DNA, 25 bp, Probe sequence
aggatatagtggacagcaaattgct

SEQ ID NO: 165780 - DNA, 25 bp, Probe sequence
agtaattaccgattattttatcaat

SEQ ID NO: 165781 - DNA, 25 bp, Probe sequence
agattgcaccaattgttgaagaaac

SEQ ID NO: 165782 - DNA, 25 bp, Probe sequence
agttgattttatttttaggcgatag

SEQ ID NO: 165783 - DNA, 25 bp, Probe sequence
agaacaagcaattcatttagtaaaa

SEQ ID NO: 165784 - DNA, 25 bp, Probe sequence
acattgcctttcttttcagataaaa

SEQ ID NO: 165785 - DNA, 25 bp, Probe sequence
aaacttaaatcatcatatatggata

SEQ ID NO: 165786 - DNA, 25 bp, Probe sequence
aaaactctaaaaaagcatgcaaggc

SEQ ID NO: 165787 - DNA, 25 bp, Probe sequence
aacattaacattgcctttcttttca

SEQ ID NO: 165788 - DNA, 25 bp, Probe sequence
aagagatgcattagatttatttatt

SEQ ID NO: 165789 - DNA, 25 bp, Probe sequence
aatgcatatatatttacaggtgaaa

SEQ ID NO: 165790 - DNA, 25 bp, Probe sequence
aatactggaattattcattctatct

SEQ ID NO: 165791 - DNA, 25 bp, Probe sequence
aatttgattgtctttgagatatatc

SEQ ID NO: 165792 - DNA, 25 bp, Probe sequence
caaaatgtatttttactgactgaat

SEQ ID NO: 165793 - DNA, 25 bp, Probe sequence
gcgttaggacaagtaagacattatc

SEQ ID NO: 165794 - DNA, 25 bp, Probe sequence
gagttgacaggtattaactttaata

SEQ ID NO: 165795 - DNA, 25 bp, Probe sequence
gatggcgaaaatttgattgtctttg

SEQ ID NO: 165796 - DNA, 25 bp, Probe sequence
gatgactttaactttgtgaaatata

SEQ ID NO: 165797 - DNA, 25 bp, Probe sequence
gatagagatgactttaactttgtga

SEQ ID NO: 165798 - DNA, 25 bp, Probe sequence
gatttatttattgagttgacaggta

SEQ ID NO: 165799 - DNA, 25 bp, Probe sequence
gtagctatttatggagatgtgcctg

SEQ ID NO: 165800 - DNA, 25 bp, Probe sequence
gtgcggaaactgattataaacttaa

SEQ ID NO: 165801 - DNA, 25 bp, Probe sequence
ggaattattcattctatctttataa

SEQ ID NO: 165802 - DNA, 25 bp, Probe sequence
ggcgatagaccaacaattaataagc

SEQ ID NO: 165803 - DNA, 25 bp, Probe sequence
tggagatgtgcctgaattggttgaa

SEQ ID NO: 165804 - DNA, 25 bp, Probe sequence
taagcaggatgttaaccaaattatt

SEQ ID NO: 165805 - DNA, 25 bp, Probe sequence
tacagagtaaaattagcgttaggac

SEQ ID NO: 165806 - DNA, 25 bp, Probe sequence
taccgattattttatcaatgtaaga

SEQ ID NO: 165807 - DNA, 25 bp, Probe sequence
tagatgcttgtgcggaaactgatta

SEQ ID NO: 165808 - DNA, 25 bp, Probe sequence
tatttttactgactgaatacattca

SEQ ID NO: 165809 - DNA, 25 bp, Probe sequence
ttaacattgcctttcttttcagata

SEQ ID NO: 165810 - DNA, 25 bp, Probe sequence
ttaactttaatattgtctcacaaga

SEQ ID NO: 165811 - DNA, 25 bp, Probe sequence
aaagctgcctagaatcgaaccggtc

SEQ ID NO: 165812 - DNA, 25 bp, Probe sequence
attttcattcatcatttcatttttt

SEQ ID NO: 165813 - DNA, 25 bp, Probe sequence
atcgaaccggtctaatttaattgag

SEQ ID NO: 165814 - DNA, 25 bp, Probe sequence
atccaaattcaacgtcaaggtagtg

SEQ ID NO: 165815 - DNA, 25 bp, Probe sequence
atgcacctagtgctgtaagagctat

SEQ ID NO: 165816 - DNA, 25 bp, Probe sequence
aggtatatatcatttgctggcagtt

SEQ ID NO: 165817 - DNA, 25 bp, Probe sequence
agttttattaatgggcgatgctagt

SEQ ID NO: 165818 - DNA, 25 bp, Probe sequence
agaacaatatgtatcatcttcctaa

SEQ ID NO: 165819 - DNA, 25 bp, Probe sequence
aaatatcatattttaccaacgctaa

SEQ ID NO: 165820 - DNA, 25 bp, Probe sequence
aacacatccacacaatgaccatatt

SEQ ID NO: 165821 - DNA, 25 bp, Probe sequence
aacgtttccaacaaattcacatcac

SEQ ID NO: 165822 - DNA, 25 bp, Probe sequence
aattctcagtttaatgagcgtgctc

SEQ ID NO: 165823 - DNA, 25 bp, Probe sequence
ctttcatcaacttcaatgggtggga

SEQ ID NO: 165824 - DNA, 25 bp, Probe sequence
gccgctaaattacttggttgaccta

SEQ ID NO: 165825 - DNA, 25 bp, Probe sequence
gctcaatacacaaattatgcaccta

SEQ ID NO: 165826 - DNA, 25 bp, Probe sequence
gcaaaggattcgcagtcgcatttac

SEQ ID NO: 165827 - DNA, 25 bp, Probe sequence
gactggttactagacctattcacaa

SEQ ID NO: 165828 - DNA, 25 bp, Probe sequence
gagcgtgctcaagtaatccaaattc

SEQ ID NO: 165829 - DNA, 25 bp, Probe sequence
gagtatctaattttaacacatccac

SEQ ID NO: 165830 - DNA, 25 bp, Probe sequence
gatagttttattccaaatagccgag

SEQ ID NO: 165831 - DNA, 25 bp, Probe sequence
gttttaattttcatgactggttact

SEQ ID NO: 165832 - DNA, 25 bp, Probe sequence
gtttccggatcgtattatggcattg

SEQ ID NO: 165833 - DNA, 25 bp, Probe sequence
gtatagttgtacaaagctgcctaga

SEQ ID NO: 165834 - DNA, 25 bp, Probe sequence
gtggggcagggagacagtattttat

SEQ ID NO: 165835 - DNA, 25 bp, Probe sequence
gtggctcgcatatagctgcaattgt

SEQ ID NO: 165836 - DNA, 25 bp, Probe sequence
ggtatttacattattcacaacaagc

SEQ ID NO: 165837 - DNA, 25 bp, Probe sequence
tgattcgggtattaagtttccggat

SEQ ID NO: 165838 - DNA, 25 bp, Probe sequence
taaacaacctagttattcaatttct

SEQ ID NO: 165839 - DNA, 25 bp, Probe sequence
tacgtttattgcacaattagcttca

SEQ ID NO: 165840 - DNA, 25 bp, Probe sequence
tattgtgggattaacgccgctaaat

SEQ ID NO: 165841 - DNA, 25 bp, Probe sequence
tttctctctttttaatcattttctc

SEQ ID NO: 165842 - DNA, 25 bp, Probe sequence
ttatggcattgattactggtgacgt

SEQ ID NO: 165843 - DNA, 25 bp, Probe sequence
ttagcttcatttatcgttgccattc

SEQ ID NO: 165844 - DNA, 25 bp, Probe sequence
ttgctggcagttagtggctcgcata

SEQ ID NO: 165845 - DNA, 25 bp, Probe sequence
attgctggtggttataatggctctg

SEQ ID NO: 165846 - DNA, 25 bp, Probe sequence
ataatggctctgtagctggcgaggt

SEQ ID NO: 165847 - DNA, 25 bp, Probe sequence
atgcagaaatgaatgctttattaca

SEQ ID NO: 165848 - DNA, 25 bp, Probe sequence
atgcagaagattatcataaccatga

SEQ ID NO: 165849 - DNA, 25 bp, Probe sequence
atgttactcattttccatgcctaaa

SEQ ID NO: 165850 - DNA, 25 bp, Probe sequence
atggcacaaagtcatttgctagcat

SEQ ID NO: 165851 - DNA, 25 bp, Probe sequence
aggtgtatctactgaaggtgcaaca

SEQ ID NO: 165852 - DNA, 25 bp, Probe sequence
aaattactcaaacaatctggtattg

SEQ ID NO: 165853 - DNA, 25 bp, Probe sequence
aacaatctatgttactcattttcca

SEQ ID NO: 165854 - DNA, 25 bp, Probe sequence
aagtcatttgctagcattacgttca

SEQ ID NO: 165855 - DNA, 25 bp, Probe sequence
aaggataatcgtattattgctggtg

SEQ ID NO: 165856 - DNA, 25 bp, Probe sequence
catttgctagcattacgttcaactt

SEQ ID NO: 165857 - DNA, 25 bp, Probe sequence
gctctgtagctggcgaggtgcattg

SEQ ID NO: 165858 - DNA, 25 bp, Probe sequence
gctagcattacgttcaacttgtcaa

SEQ ID NO: 165859 - DNA, 25 bp, Probe sequence
gcattacgttcaacttgtcaaagat

SEQ ID NO: 165860 - DNA, 25 bp, Probe sequence
gcaggtataaagcgtatctactatg

SEQ ID NO: 165861 - DNA, 25 bp, Probe sequence
gaatatgcaactaaattactcaaac

SEQ ID NO: 165862 - DNA, 25 bp, Probe sequence
gaatgctttattacaatgtgcaaaa

SEQ ID NO: 165863 - DNA, 25 bp, Probe sequence
gaaggtgcaacaatctatgttactc

SEQ ID NO: 165864 - DNA, 25 bp, Probe sequence
gaagatggacattgtatcagaacga

SEQ ID NO: 165865 - DNA, 25 bp, Probe sequence
gattatctgtaggtgcaacgattgt

SEQ ID NO: 165866 - DNA, 25 bp, Probe sequence
gttcaacttgtcaaagattatctgt

SEQ ID NO: 165867 - DNA, 25 bp, Probe sequence
gtatctactgaaggtgcaacaatct

SEQ ID NO: 165868 - DNA, 25 bp, Probe sequence
gtaggtgcaacgattgttaaggata

SEQ ID NO: 165869 - DNA, 25 bp, Probe sequence
gtagctggcgaggtgcattgtatag

SEQ ID NO: 165870 - DNA, 25 bp, Probe sequence
gtacaaagtcaattattcaagcagg

SEQ ID NO: 165871 - DNA, 25 bp, Probe sequence
gtgcaaaacaaggtgtatctactga

SEQ ID NO: 165872 - DNA, 25 bp, Probe sequence
ggcgaggtgcattgtatagatgaag

SEQ ID NO: 165873 - DNA, 25 bp, Probe sequence
tggtggttataatggctctgtagct

SEQ ID NO: 165874 - DNA, 25 bp, Probe sequence
tctatgttactcattttccatgcct

SEQ ID NO: 165875 - DNA, 25 bp, Probe sequence
taaagcgtatctactatgcagaaga

SEQ ID NO: 165876 - DNA, 25 bp, Probe sequence
tactcattttccatgcctaaattgt

SEQ ID NO: 165877 - DNA, 25 bp, Probe sequence
tatcagaacgatacatgcagaaatg

SEQ ID NO: 165878 - DNA, 25 bp, Probe sequence
ttccatgcctaaattgtacaaagtc

SEQ ID NO: 165879 - DNA, 25 bp, Probe sequence
atatcgcaaccaacaaggtgcattt

SEQ ID NO: 165880 - DNA, 25 bp, Probe sequence
atcagaattgatgtctgttcctgga

SEQ ID NO: 165881 - DNA, 25 bp, Probe sequence
atcgcaaccaacaaggtgcatttca

SEQ ID NO: 165882 - DNA, 25 bp, Probe sequence
atgggaacacaaataatactaaagt

SEQ ID NO: 165883 - DNA, 25 bp, Probe sequence
aggacaaaagaatgttgaaccacaa

SEQ ID NO: 165884 - DNA, 25 bp, Probe sequence
aggtgctgttaaacatcctaatgtt

SEQ ID NO: 165885 - DNA, 25 bp, Probe sequence
agctaatgcaattgttgaatatcgc

SEQ ID NO: 165886 - DNA, 25 bp, Probe sequence
accaacaaggtgcatttcaagaaat

SEQ ID NO: 165887 - DNA, 25 bp, Probe sequence
acatcctaatgtttataaaatgaca

SEQ ID NO: 165888 - DNA, 25 bp, Probe sequence
aaaaggtgctgttaaacatcctaat

SEQ ID NO: 165889 - DNA, 25 bp, Probe sequence
aagctaaagctaatgcaattgttga

SEQ ID NO: 165890 - DNA, 25 bp, Probe sequence
aagtgctgttgttttaattatggta

SEQ ID NO: 165891 - DNA, 25 bp, Probe sequence
aaggatagagtagttgatttacttg

SEQ ID NO: 165892 - DNA, 25 bp, Probe sequence
aatgacatctaaggatagagtagtt

SEQ ID NO: 165893 - DNA, 25 bp, Probe sequence
cagaattgatgtctgttcctggagt

SEQ ID NO: 165894 - DNA, 25 bp, Probe sequence
gcatttcaagaaattgacgatttga

SEQ ID NO: 165895 - DNA, 25 bp, Probe sequence
gcatctgtatcagaattgatgtctg

SEQ ID NO: 165896 - DNA, 25 bp, Probe sequence
gcaaccaacaaggtgcatttcaaga

SEQ ID NO: 165897 - DNA, 25 bp, Probe sequence
gcaattgttgaatatcgcaaccaac

SEQ ID NO: 165898 - DNA, 25 bp, Probe sequence
gaatatcgcaaccaacaaggtgcat

SEQ ID NO: 165899 - DNA, 25 bp, Probe sequence
gagacaagatgattatacttcaaga

SEQ ID NO: 165900 - DNA, 25 bp, Probe sequence
gatgtccaggtcaaagatggagata

SEQ ID NO: 165901 - DNA, 25 bp, Probe sequence
gttgatttacttgataaagcacaat

SEQ ID NO: 165902 - DNA, 25 bp, Probe sequence
gtatcaatttttattacgctataaa

SEQ ID NO: 165903 - DNA, 25 bp, Probe sequence
gtatcagaattgatgtctgttcctg

SEQ ID NO: 165904 - DNA, 25 bp, Probe sequence
gtgctgttgttttaattatggtatt

SEQ ID NO: 165905 - DNA, 25 bp, Probe sequence
gtggttttattgtatcaatttttat

SEQ ID NO: 165906 - DNA, 25 bp, Probe sequence
gggcaagctaaagctaatgcaattg

SEQ ID NO: 165907 - DNA, 25 bp, Probe sequence
ggtattaattggttttatattctgg

SEQ ID NO: 165908 - DNA, 25 bp, Probe sequence
ggttttatattctggagacaagatg

SEQ ID NO: 165909 - DNA, 25 bp, Probe sequence
tctgaaacaaagcactagtgaaaat

SEQ ID NO: 165910 - DNA, 25 bp, Probe sequence
taattggttttatattctggagaca

SEQ ID NO: 165911 - DNA, 25 bp, Probe sequence
tagaagatgtccaggtcaaagatgg

SEQ ID NO: 165912 - DNA, 25 bp, Probe sequence
ttgtatcaatttttattacgctata

SEQ ID NO: 165913 - DNA, 25 bp, Probe sequence
attggcttgaaggagatatgacatc

SEQ ID NO: 165914 - DNA, 25 bp, Probe sequence
atttttgatgtacatactgtttata

SEQ ID NO: 165915 - DNA, 25 bp, Probe sequence
atcatcactattttttgtgactctc

SEQ ID NO: 165916 - DNA, 25 bp, Probe sequence
atgttgaaacatttactgattttaa

SEQ ID NO: 165917 - DNA, 25 bp, Probe sequence
aggggacatttttttagcatgggat

SEQ ID NO: 165918 - DNA, 25 bp, Probe sequence
agtgtacgatcaattgactcaagat

SEQ ID NO: 165919 - DNA, 25 bp, Probe sequence
agaaagattgtttttcattgcgaaa

SEQ ID NO: 165920 - DNA, 25 bp, Probe sequence
agcatgggatgctgtgcaaggagat

SEQ ID NO: 165921 - DNA, 25 bp, Probe sequence
aaatcactgcaaagatgaatcaaat

SEQ ID NO: 165922 - DNA, 25 bp, Probe sequence
aacagttcaattagaagctttaggt

SEQ ID NO: 165923 - DNA, 25 bp, Probe sequence
aaaatgatgactttgtttaataatc

SEQ ID NO: 165924 - DNA, 25 bp, Probe sequence
aatcagcaaatgtaaattggcttga

SEQ ID NO: 165925 - DNA, 25 bp, Probe sequence
aattgactcaagatcaaccatatga

SEQ ID NO: 165926 - DNA, 25 bp, Probe sequence
cactattttttgtgactctctaaat

SEQ ID NO: 165927 - DNA, 25 bp, Probe sequence
gcggtactggtagtttaacagttca

SEQ ID NO: 165928 - DNA, 25 bp, Probe sequence
gcagaaatgagcctagtgtacgatc

SEQ ID NO: 165929 - DNA, 25 bp, Probe sequence
gcaacaacaatttgatatcatcact

SEQ ID NO: 165930 - DNA, 25 bp, Probe sequence
gaagctttaggtaatgttactggta

SEQ ID NO: 165931 - DNA, 25 bp, Probe sequence
gacatttttcattcgacatgaagat

SEQ ID NO: 165932 - DNA, 25 bp, Probe sequence
gactgttgcagctcaaaaatcagca

SEQ ID NO: 165933 - DNA, 25 bp, Probe sequence
gagcctagtgtacgatcaattgact

SEQ ID NO: 165934 - DNA, 25 bp, Probe sequence
gagatttacctttaagtgtttatca

SEQ ID NO: 165935 - DNA, 25 bp, Probe sequence
gagtctcattttcagagaacatttg

SEQ ID NO: 165936 - DNA, 25 bp, Probe sequence
gatatgttgactgttgcagctcaaa

SEQ ID NO: 165937 - DNA, 25 bp, Probe sequence
gatatgacatttttcattcgacatg

SEQ ID NO: 165938 - DNA, 25 bp, Probe sequence
gatattggatgcggtactggtagtt

SEQ ID NO: 165939 - DNA, 25 bp, Probe sequence
gattcaggtgtatttatttttgatg

SEQ ID NO: 165940 - DNA, 25 bp, Probe sequence
gttactggtatggatttaagtgttg

SEQ ID NO: 165941 - DNA, 25 bp, Probe sequence
gtcgcaatatgcagaaatgagccta

SEQ ID NO: 165942 - DNA, 25 bp, Probe sequence
gtgactctctaaattatttgcaaga

SEQ ID NO: 165943 - DNA, 25 bp, Probe sequence
gtgttgatatgttgactgttgcagc

SEQ ID NO: 165944 - DNA, 25 bp, Probe sequence
ggatgctgtgcaaggagatttacct

SEQ ID NO: 165945 - DNA, 25 bp, Probe sequence
tggatgcggtactggtagtttaaca

SEQ ID NO: 165946 - DNA, 25 bp, Probe sequence
tacctttaagtgtttatcatgatat

SEQ ID NO: 165947 - DNA, 25 bp, Probe sequence
atcagcgatatgacagattattttg

SEQ ID NO: 165948 - DNA, 25 bp, Probe sequence
agttcaagcgattgctagagcggtg

SEQ ID NO: 165949 - DNA, 25 bp, Probe sequence
aggcgaagatacgatttctttagaa

SEQ ID NO: 165950 - DNA, 25 bp, Probe sequence
agaaatgaaaggtatcagcgatatg

SEQ ID NO: 165951 - DNA, 25 bp, Probe sequence
acgacaagttcaagcgattgctaga

SEQ ID NO: 165952 - DNA, 25 bp, Probe sequence
acaagttcaagcgattgctagagcg

SEQ ID NO: 165953 - DNA, 25 bp, Probe sequence
acaagaattattagcaattgctgtg

SEQ ID NO: 165954 - DNA, 25 bp, Probe sequence
aaaggcgaagatacgatttctttag

SEQ ID NO: 165955 - DNA, 25 bp, Probe sequence
aacgcacggaaataatgaacgacaa

SEQ ID NO: 165956 - DNA, 25 bp, Probe sequence
aacgacaagttcaagcgattgctag

SEQ ID NO: 165957 - DNA, 25 bp, Probe sequence
aagcgattgctagagcggtgaaaga

SEQ ID NO: 165958 - DNA, 25 bp, Probe sequence
aagttcaagcgattgctagagcggt

SEQ ID NO: 165959 - DNA, 25 bp, Probe sequence
caagttcaagcgattgctagagcgg

SEQ ID NO: 165960 - DNA, 25 bp, Probe sequence
cagattattttgttgtaacgcacgg

SEQ ID NO: 165961 - DNA, 25 bp, Probe sequence
gcgaagatacgatttctttagaaat

SEQ ID NO: 165962 - DNA, 25 bp, Probe sequence
gcgatatgacagattattttgttgt

SEQ ID NO: 165963 - DNA, 25 bp, Probe sequence
gctgtggatgcaattgacaataaaa

SEQ ID NO: 165964 - DNA, 25 bp, Probe sequence
gcacggaaataatgaacgacaagtt

SEQ ID NO: 165965 - DNA, 25 bp, Probe sequence
gaacgacaagttcaagcgattgcta

SEQ ID NO: 165966 - DNA, 25 bp, Probe sequence
gaaaggtatcagcgatatgacagat

SEQ ID NO: 165967 - DNA, 25 bp, Probe sequence
gacaagttcaagcgattgctagagc

SEQ ID NO: 165968 - DNA, 25 bp, Probe sequence
gacagattattttgttgtaacgcac

SEQ ID NO: 165969 - DNA, 25 bp, Probe sequence
gattattttgttgtaacgcacggaa

SEQ ID NO: 165970 - DNA, 25 bp, Probe sequence
gattgctagagcggtgaaagaagta

SEQ ID NO: 165971 - DNA, 25 bp, Probe sequence
gttcaagcgattgctagagcggtga

SEQ ID NO: 165972 - DNA, 25 bp, Probe sequence
gtaacgcacggaaataatgaacgac

SEQ ID NO: 165973 - DNA, 25 bp, Probe sequence
ggtatcagcgatatgacagattatt

SEQ ID NO: 165974 - DNA, 25 bp, Probe sequence
tgctagagcggtgaaagaagtagcc

SEQ ID NO: 165975 - DNA, 25 bp, Probe sequence
tgctgtggatgcaattgacaataaa

SEQ ID NO: 165976 - DNA, 25 bp, Probe sequence
tcaagcgattgctagagcggtgaaa

SEQ ID NO: 165977 - DNA, 25 bp, Probe sequence
ttttgttgtaacgcacggaaataat

SEQ ID NO: 165978 - DNA, 25 bp, Probe sequence
ttattagcaattgctgtggatgcaa

SEQ ID NO: 165979 - DNA, 25 bp, Probe sequence
ttattttgttgtaacgcacggaaat

SEQ ID NO: 165980 - DNA, 25 bp, Probe sequence
ttcaagcgattgctagagcggtgaa

SEQ ID NO: 165981 - DNA, 25 bp, Probe sequence
atttatcaacttcagcgttacaaca

SEQ ID NO: 165982 - DNA, 25 bp, Probe sequence
atatcctaggtattgttggtgaatc

SEQ ID NO: 165983 - DNA, 25 bp, Probe sequence
atcaccgagtggcagcctataccga

SEQ ID NO: 165984 - DNA, 25 bp, Probe sequence
atgcgtcaacgtgtcatgatagcaa

SEQ ID NO: 165985 - DNA, 25 bp, Probe sequence
acgcttaatagatgcgattcctgat

SEQ ID NO: 165986 - DNA, 25 bp, Probe sequence
acatgcaactcgacaatttgatgct

SEQ ID NO: 165987 - DNA, 25 bp, Probe sequence
aaattcgatcgcgtgagcgtggatt

SEQ ID NO: 165988 - DNA, 25 bp, Probe sequence
aaagccacaaattttaatcgcagat

SEQ ID NO: 165989 - DNA, 25 bp, Probe sequence
aaacgaccactaatcattcatggga

SEQ ID NO: 165990 - DNA, 25 bp, Probe sequence
cacacgaattatctggtgggcaacg

SEQ ID NO: 165991 - DNA, 25 bp, Probe sequence
gacattagctaagacggtcgtcggt

SEQ ID NO: 165992 - DNA, 25 bp, Probe sequence
gctgtgtatcaattttgcgacgatg

SEQ ID NO: 165993 - DNA, 25 bp, Probe sequence
gaagtgtcgttgaaagtggcacggt

SEQ ID NO: 165994 - DNA, 25 bp, Probe sequence
gaagtccctttatgagtacacagaa

SEQ ID NO: 165995 - DNA, 25 bp, Probe sequence
gaactttctggtggtatgcgtcaac

SEQ ID NO: 165996 - DNA, 25 bp, Probe sequence
gagcgtggattacacatcaccgagt

SEQ ID NO: 165997 - DNA, 25 bp, Probe sequence
gatccattcgcatctattaatccaa

SEQ ID NO: 165998 - DNA, 25 bp, Probe sequence
gatttttcaagatccactctcttcg

SEQ ID NO: 165999 - DNA, 25 bp, Probe sequence
ggtcgtcggtctaaaggaagtgtca

SEQ ID NO: 166000 - DNA, 25 bp, Probe sequence
gtccgccaagaccgttaaacaatga

SEQ ID NO: 166001 - DNA, 25 bp, Probe sequence
ggcagcctataccgagcagttaatg

SEQ ID NO: 166002 - DNA, 25 bp, Probe sequence
ggaagtgtcagaaggctttatttgg

SEQ ID NO: 166003 - DNA, 25 bp, Probe sequence
ggcattgtcggtgaatcagggtcag

SEQ ID NO: 166004 - DNA, 25 bp, Probe sequence
ggcattagatgccagtacacaaaat

SEQ ID NO: 166005 - DNA, 25 bp, Probe sequence
ggcatcacttatttattcatcacac

SEQ ID NO: 166006 - DNA, 25 bp, Probe sequence
tccactctcttcgttgaatccaaga

SEQ ID NO: 166007 - DNA, 25 bp, Probe sequence
tctattatttttatcactcacgatt

SEQ ID NO: 166008 - DNA, 25 bp, Probe sequence
taaagtgattgtttgcgacgaggca

SEQ ID NO: 166009 - DNA, 25 bp, Probe sequence
tacagttagacttcggcatcactta

SEQ ID NO: 166010 - DNA, 25 bp, Probe sequence
tactgcagttaatgaagtcccttta

SEQ ID NO: 166011 - DNA, 25 bp, Probe sequence
tattcatcaaacgcgtccgccaaga

SEQ ID NO: 166012 - DNA, 25 bp, Probe sequence
tttcttatatcgctatccacacgaa

SEQ ID NO: 166013 - DNA, 25 bp, Probe sequence
ttttagggctactaccagattatcc

SEQ ID NO: 166014 - DNA, 25 bp, Probe sequence
ttaaatcgccacaacatacctatac

SEQ ID NO: 166015 - DNA, 25 bp, Probe sequence
atttctaaacgcacagtactatttt

SEQ ID NO: 166016 - DNA, 25 bp, Probe sequence
atgaaatttctaaacgcacagtact

SEQ ID NO: 166017 - DNA, 25 bp, Probe sequence
atgatctactgagttatggtagtga

SEQ ID NO: 166018 - DNA, 25 bp, Probe sequence
atggtagtgaaatattgcatggccc

SEQ ID NO: 166019 - DNA, 25 bp, Probe sequence
agaacaatcccaggagttgatgata

SEQ ID NO: 166020 - DNA, 25 bp, Probe sequence
actgccagagaaacgttataatcat

SEQ ID NO: 166021 - DNA, 25 bp, Probe sequence
acatgatttctgtaaatatgatgat

SEQ ID NO: 166022 - DNA, 25 bp, Probe sequence
aaatgtatcaaattgttcgacaata

SEQ ID NO: 166023 - DNA, 25 bp, Probe sequence
aacgcacagtactatttttaataca

SEQ ID NO: 166024 - DNA, 25 bp, Probe sequence
caaggtagtttagataagacaattt

SEQ ID NO: 166025 - DNA, 25 bp, Probe sequence
aattgttcgacaatacgaattaggt

SEQ ID NO: 166026 - DNA, 25 bp, Probe sequence
caatcccaggagttgatgatattcg

SEQ ID NO: 166027 - DNA, 25 bp, Probe sequence
gcaggtgtattacatgatttctgta

SEQ ID NO: 166028 - DNA, 25 bp, Probe sequence
gcacagtactatttttaatacagaa

SEQ ID NO: 166029 - DNA, 25 bp, Probe sequence
gaattaggtaatgatctactgagtt

SEQ ID NO: 166030 - DNA, 25 bp, Probe sequence
gaaacgttataatcattctttaaga

SEQ ID NO: 166031 - DNA, 25 bp, Probe sequence
gaaatttctaaacgcacagtactat

SEQ ID NO: 166032 - DNA, 25 bp, Probe sequence
gaaatttatgatggagacactagta

SEQ ID NO: 166033 - DNA, 25 bp, Probe sequence
gagaaactgccagagaaacgttata

SEQ ID NO: 166034 - DNA, 25 bp, Probe sequence
gagacactagtaaagtagaattagc

SEQ ID NO: 166035 - DNA, 25 bp, Probe sequence
gatgatattcgagatatggcataca

SEQ ID NO: 166036 - DNA, 25 bp, Probe sequence
gatgaggaagtattaatggctatca

SEQ ID NO: 166037 - DNA, 25 bp, Probe sequence
gatatggcatacaatcaaggtagtt

SEQ ID NO: 166038 - DNA, 25 bp, Probe sequence
gtagaattagcaggtgtattacatg

SEQ ID NO: 166039 - DNA, 25 bp, Probe sequence
gtgtgtgcagcaatcatggaacatg

SEQ ID NO: 166040 - DNA, 25 bp, Probe sequence
gtgtgcagcaatcatggaacatgaa

SEQ ID NO: 166041 - DNA, 25 bp, Probe sequence
ggtaatgatctactgagttatggta

SEQ ID NO: 166042 - DNA, 25 bp, Probe sequence
ggacgtcaacaaatgacaaaaactg

SEQ ID NO: 166043 - DNA, 25 bp, Probe sequence
ggaacatgaatatggtatcaatgat

SEQ ID NO: 166044 - DNA, 25 bp, Probe sequence
ggcatacaatcaaggtagtttagat

SEQ ID NO: 166045 - DNA, 25 bp, Probe sequence
tcccaggagttgatgatattcgaga

SEQ ID NO: 166046 - DNA, 25 bp, Probe sequence
taatcattctttaagagttgcagaa

SEQ ID NO: 166047 - DNA, 25 bp, Probe sequence
taatggctatcaaataccatactac

SEQ ID NO: 166048 - DNA, 25 bp, Probe sequence
ttgactgtttaaattattataacta

SEQ ID NO: 166049 - DNA, 25 bp, Probe sequence
gcggtcagtttaaccctatccatac

SEQ ID NO: 166050 - DNA, 25 bp, Probe sequence
acctagggtagatataagttcgaca

SEQ ID NO: 166051 - DNA, 25 bp, Probe sequence
acctatgacacgatcaaggcattca

SEQ ID NO: 166052 - DNA, 25 bp, Probe sequence
actgcacatatgatagtagctagcg

SEQ ID NO: 166053 - DNA, 25 bp, Probe sequence
aaatctatccaagttcttgttccta

SEQ ID NO: 166054 - DNA, 25 bp, Probe sequence
aagacagtgagttgtactttgttat

SEQ ID NO: 166055 - DNA, 25 bp, Probe sequence
caagttcttgttcctaaatccgttg

SEQ ID NO: 166056 - DNA, 25 bp, Probe sequence
cagtttaaccctatccatactgcac

SEQ ID NO: 166057 - DNA, 25 bp, Probe sequence
ccctatccatactgcacatatgata

SEQ ID NO: 166058 - DNA, 25 bp, Probe sequence
gccagatgaattttattttttacct

SEQ ID NO: 166059 - DNA, 25 bp, Probe sequence
gagttgtactttgttattgggacgg

SEQ ID NO: 166060 - DNA, 25 bp, Probe sequence
gacaatgattcgacaaagagttagt

SEQ ID NO: 166061 - DNA, 25 bp, Probe sequence
gacacgatcaaggcattcaaggagc

SEQ ID NO: 166062 - DNA, 25 bp, Probe sequence
gacgagcttggttttggagatattt

SEQ ID NO: 166063 - DNA, 25 bp, Probe sequence
gattgcaattcagatacctagggta

SEQ ID NO: 166064 - DNA, 25 bp, Probe sequence
gatcaaggcattcaaggagcaacac

SEQ ID NO: 166065 - DNA, 25 bp, Probe sequence
gatagtagctagcgaagtatttcat

SEQ ID NO: 166066 - DNA, 25 bp, Probe sequence
gatagtactttacggcggtcagttt

SEQ ID NO: 166067 - DNA, 25 bp, Probe sequence
gttcagcacagattaacaatgatac

SEQ ID NO: 166068 - DNA, 25 bp, Probe sequence
gttatacctatgacacgatcaaggc

SEQ ID NO: 166069 - DNA, 25 bp, Probe sequence
gttttatgtctccattgaaaaagca

SEQ ID NO: 166070 - DNA, 25 bp, Probe sequence
gtatttcatgaattacagccagatg

SEQ ID NO: 166071 - DNA, 25 bp, Probe sequence
gtagatataagttcgacaatgattc

SEQ ID NO: 166072 - DNA, 25 bp, Probe sequence
gtactttgttattgggacggatcag

SEQ ID NO: 166073 - DNA, 25 bp, Probe sequence
gggacggatcagtataaccaactag

SEQ ID NO: 166074 - DNA, 25 bp, Probe sequence
gggggaaggattatatgaacattga

SEQ ID NO: 166075 - DNA, 25 bp, Probe sequence
ggcattcaaggagcaacacaaagac

SEQ ID NO: 166076 - DNA, 25 bp, Probe sequence
tgttcctaaatccgttgaaaactat

SEQ ID NO: 166077 - DNA, 25 bp, Probe sequence
tccaagttcttgttcctaaatccgt

SEQ ID NO: 166078 - DNA, 25 bp, Probe sequence
taaccctatccatactgcacatatg

SEQ ID NO: 166079 - DNA, 25 bp, Probe sequence
tacttttgtagttgtaaatcgagac

SEQ ID NO: 166080 - DNA, 25 bp, Probe sequence
tacctagttttatgtctccattgaa

SEQ ID NO: 166081 - DNA, 25 bp, Probe sequence
tttttacctagttttatgtctccat

SEQ ID NO: 166082 - DNA, 25 bp, Probe sequence
ttatcgacgagcttggttttggaga

SEQ ID NO: 166083 - DNA, 25 bp, Probe sequence
attgatccgatttttcaaattggaa

SEQ ID NO: 166084 - DNA, 25 bp, Probe sequence
attagtgcaagtgattggatctatg

SEQ ID NO: 166085 - DNA, 25 bp, Probe sequence
atattgatccgatttttcaaattgg

SEQ ID NO: 166086 - DNA, 25 bp, Probe sequence
atacttaagaagtttagcacacaat

SEQ ID NO: 166087 - DNA, 25 bp, Probe sequence
agtttagcacacaatattgatccga

SEQ ID NO: 166088 - DNA, 25 bp, Probe sequence
agaagtttagcacacaatattgatc

SEQ ID NO: 166089 - DNA, 25 bp, Probe sequence
agcacacaatattgatccgattttt

SEQ ID NO: 166090 - DNA, 25 bp, Probe sequence
acttaagaagtttagcacacaatat

SEQ ID NO: 166091 - DNA, 25 bp, Probe sequence
acacaatattgatccgatttttcaa

SEQ ID NO: 166092 - DNA, 25 bp, Probe sequence
acaaatagatgatacgttagaaaac

SEQ ID NO: 166093 - DNA, 25 bp, Probe sequence
acaatattgatccgatttttcaaat

SEQ ID NO: 166094 - DNA, 25 bp, Probe sequence
aagtttagcacacaatattgatccg

SEQ ID NO: 166095 - DNA, 25 bp, Probe sequence
aatattgatccgatttttcaaattg

SEQ ID NO: 166096 - DNA, 25 bp, Probe sequence
cacaatattgatccgatttttcaaa

SEQ ID NO: 166097 - DNA, 25 bp, Probe sequence
cacacaatattgatccgatttttca

SEQ ID NO: 166098 - DNA, 25 bp, Probe sequence
gcacacaatattgatccgatttttc

SEQ ID NO: 166099 - DNA, 25 bp, Probe sequence
gaattagctgaaacattaagcgaag

SEQ ID NO: 166100 - DNA, 25 bp, Probe sequence
gaattagtgcaagtgattggatcta

SEQ ID NO: 166101 - DNA, 25 bp, Probe sequence
gaagtttagcacacaatattgatcc

SEQ ID NO: 166102 - DNA, 25 bp, Probe sequence
gagaattgattaaagtacatgtact

SEQ ID NO: 166103 - DNA, 25 bp, Probe sequence
gatgatacgttagaaaacagagaat

SEQ ID NO: 166104 - DNA, 25 bp, Probe sequence
gatccgatttttcaaattggaaaag

SEQ ID NO: 166105 - DNA, 25 bp, Probe sequence
gtttagcacacaatattgatccgat

SEQ ID NO: 166106 - DNA, 25 bp, Probe sequence
gtacatgtactacaaaataactttg

SEQ ID NO: 166107 - DNA, 25 bp, Probe sequence
gtactacaaaataactttgatgata

SEQ ID NO: 166108 - DNA, 25 bp, Probe sequence
taagaagtttagcacacaatattga

SEQ ID NO: 166109 - DNA, 25 bp, Probe sequence
tagctgaaacattaagcgaagctac

SEQ ID NO: 166110 - DNA, 25 bp, Probe sequence
tagcacacaatattgatccgatttt

SEQ ID NO: 166111 - DNA, 25 bp, Probe sequence
tagtgaattagtgcaagtgattgga

SEQ ID NO: 166112 - DNA, 25 bp, Probe sequence
tagtgcaagtgattggatctatgat

SEQ ID NO: 166113 - DNA, 25 bp, Probe sequence
tattgatccgatttttcaaattgga

SEQ ID NO: 166114 - DNA, 25 bp, Probe sequence
tttagcacacaatattgatccgatt

SEQ ID NO: 166115 - DNA, 25 bp, Probe sequence
ttagcacacaatattgatccgattt

SEQ ID NO: 166116 - DNA, 25 bp, Probe sequence
ttgatccgatttttcaaattggaaa

SEQ ID NO: 166117 - DNA, 25 bp, Probe sequence
atgaagctttaaatattccaattga

SEQ ID NO: 166118 - DNA, 25 bp, Probe sequence
agcgggtatggctggaaataacgaa

SEQ ID NO: 166119 - DNA, 25 bp, Probe sequence
agatgctgatattaattctatgaaa

SEQ ID NO: 166120 - DNA, 25 bp, Probe sequence
acgatggctcgttttgaatcttgga

SEQ ID NO: 166121 - DNA, 25 bp, Probe sequence
actgttgcgaatagaacgatggctc

SEQ ID NO: 166122 - DNA, 25 bp, Probe sequence
acaacaccagcgggtatggctggaa

SEQ ID NO: 166123 - DNA, 25 bp, Probe sequence
aaatcctatttcacattccttgtcg

SEQ ID NO: 166124 - DNA, 25 bp, Probe sequence
aaacacctattttagaggaagcaga

SEQ ID NO: 166125 - DNA, 25 bp, Probe sequence
aatggcttagatatgtttgtttacc

SEQ ID NO: 166126 - DNA, 25 bp, Probe sequence
aatttggactaataaagatgctgat

SEQ ID NO: 166127 - DNA, 25 bp, Probe sequence
catctttctcccaatactttaatga

SEQ ID NO: 166128 - DNA, 25 bp, Probe sequence
ccttgtcgcccgttatgcatagagc

SEQ ID NO: 166129 - DNA, 25 bp, Probe sequence
gaagcagagcgcaagggaaaccata

SEQ ID NO: 166130 - DNA, 25 bp, Probe sequence
gaaaagtatttagctgaattcgata

SEQ ID NO: 166131 - DNA, 25 bp, Probe sequence
gaaaacagcagttttacaacaatta

SEQ ID NO: 166132 - DNA, 25 bp, Probe sequence
gaaatcctatttcacattccttgtc

SEQ ID NO: 166133 - DNA, 25 bp, Probe sequence
taatacaacaccagcgggtatggct

SEQ ID NO: 166134 - DNA, 25 bp, Probe sequence
gaggaagcagagcgcaagggaaacc

SEQ ID NO: 166135 - DNA, 25 bp, Probe sequence
gagcgcaagggaaaccatatttata

SEQ ID NO: 166136 - DNA, 25 bp, Probe sequence
gatggctcgttttgaatcttggaat

SEQ ID NO: 166137 - DNA, 25 bp, Probe sequence
gttattaatacaacaccagcgggta

SEQ ID NO: 166138 - DNA, 25 bp, Probe sequence
gtttatccagatttagaaaatgcat

SEQ ID NO: 166139 - DNA, 25 bp, Probe sequence
gtcgcccgttatgcatagagcaaat

SEQ ID NO: 166140 - DNA, 25 bp, Probe sequence
gtggatagggtataatacagatggt

SEQ ID NO: 166141 - DNA, 25 bp, Probe sequence
gggaaaccatatttataatggctta

SEQ ID NO: 166142 - DNA, 25 bp, Probe sequence
ggtatggctggaaataacgaaagta

SEQ ID NO: 166143 - DNA, 25 bp, Probe sequence
tgcatagagcaaattttaattcttt

SEQ ID NO: 166144 - DNA, 25 bp, Probe sequence
tgcggaaagctttaaaatttggact

SEQ ID NO: 166145 - DNA, 25 bp, Probe sequence
tccttgtcgcccgttatgcatagag

SEQ ID NO: 166146 - DNA, 25 bp, Probe sequence
tcgttttgaatcttggaatttaaat

SEQ ID NO: 166147 - DNA, 25 bp, Probe sequence
tctttctcccaatactttaatgagt

SEQ ID NO: 166148 - DNA, 25 bp, Probe sequence
taatgagtgatattgtttatatacc

SEQ ID NO: 166149 - DNA, 25 bp, Probe sequence
ttctcccaatactttaatgagtgat

SEQ ID NO: 166150 - DNA, 25 bp, Probe sequence
ttgtcgcccgttatgcatagagcaa

SEQ ID NO: 166151 - DNA, 25 bp, Probe sequence
cgatttattaacgccacctggaaat

SEQ ID NO: 166152 - DNA, 25 bp, Probe sequence
atttatggcgtaatcaacttggcga

SEQ ID NO: 166153 - DNA, 25 bp, Probe sequence
atacaccaggtattattcaagatca

SEQ ID NO: 166154 - DNA, 25 bp, Probe sequence
atcgttcgtgttcctaaaaatgttg

SEQ ID NO: 166155 - DNA, 25 bp, Probe sequence
atgacttgaatatacatcgtactaa

SEQ ID NO: 166156 - DNA, 25 bp, Probe sequence
agcgcgcatagattatgtatcaggt

SEQ ID NO: 166157 - DNA, 25 bp, Probe sequence
aaatgtatcggttgtggtgcgccac

SEQ ID NO: 166158 - DNA, 25 bp, Probe sequence
aaatgacgcatttagttagtgaaaa

SEQ ID NO: 166159 - DNA, 25 bp, Probe sequence
aaggctggggcatagacgacttatt

SEQ ID NO: 166160 - DNA, 25 bp, Probe sequence
aaggctgttagacttgaaacaggca

SEQ ID NO: 166161 - DNA, 25 bp, Probe sequence
aatgcagttaaacgtattgtcggaa

SEQ ID NO: 166162 - DNA, 25 bp, Probe sequence
ctgattgaagctagtgttggtgaaa

SEQ ID NO: 166163 - DNA, 25 bp, Probe sequence
gctaaagtaatcgttcgtgttccta

SEQ ID NO: 166164 - DNA, 25 bp, Probe sequence
gcagacgttgtttccgcttgaaaaa

SEQ ID NO: 166165 - DNA, 25 bp, Probe sequence
gacgacttattatcatcaattgcga

SEQ ID NO: 166166 - DNA, 25 bp, Probe sequence
gatgtcgtattaatttcagctgaaa

SEQ ID NO: 166167 - DNA, 25 bp, Probe sequence
gatgttatgatctctggtctaggct

SEQ ID NO: 166168 - DNA, 25 bp, Probe sequence
gatctctggtctaggctttataact

SEQ ID NO: 166169 - DNA, 25 bp, Probe sequence
gataaaaagggtattgtcgtcaatg

SEQ ID NO: 166170 - DNA, 25 bp, Probe sequence
gattccctggaacaactttagatat

SEQ ID NO: 166171 - DNA, 25 bp, Probe sequence
gtttggaagctgacgatgtcgtatt

SEQ ID NO: 166172 - DNA, 25 bp, Probe sequence
gtaacaacttcaagattccctggaa

SEQ ID NO: 166173 - DNA, 25 bp, Probe sequence
gtgatttgcagacgttgtttccgct

SEQ ID NO: 166174 - DNA, 25 bp, Probe sequence
gtggatgtatttgactttgaaggat

SEQ ID NO: 166175 - DNA, 25 bp, Probe sequence
ggtgcgccacttcaatctgaagata

SEQ ID NO: 166176 - DNA, 25 bp, Probe sequence
ggcggtctagcgcgcatagattatg

SEQ ID NO: 166177 - DNA, 25 bp, Probe sequence
ggcgtaatcaacttggcgatttatt

SEQ ID NO: 166178 - DNA, 25 bp, Probe sequence
tgtatcaggtggtaaacgtccgtta

SEQ ID NO: 166179 - DNA, 25 bp, Probe sequence
taaaattattatcaggacttgcgga

SEQ ID NO: 166180 - DNA, 25 bp, Probe sequence
taaaacaacgcgtatatcaattaaa

SEQ ID NO: 166181 - DNA, 25 bp, Probe sequence
taggctttataactataggaccagg

SEQ ID NO: 166182 - DNA, 25 bp, Probe sequence
tatcggttgtggtgcgccacttcaa

SEQ ID NO: 166183 - DNA, 25 bp, Probe sequence
tttgtttcttttctaatgacttgaa

SEQ ID NO: 166184 - DNA, 25 bp, Probe sequence
ttatcatcaattgcgaatattcgag

SEQ ID NO: 166185 - DNA, 25 bp, Probe sequence
ataggtgaccaaatgcttactgatg

SEQ ID NO: 166186 - DNA, 25 bp, Probe sequence
atacgctagtaggttgggatgttaa

SEQ ID NO: 166187 - DNA, 25 bp, Probe sequence
ataatgagtctcgtgttgctagttt

SEQ ID NO: 166188 - DNA, 25 bp, Probe sequence
atgaaaaaggaatcactattacaat

SEQ ID NO: 166189 - DNA, 25 bp, Probe sequence
atgccgaattcatatgttcaatcaa

SEQ ID NO: 166190 - DNA, 25 bp, Probe sequence
acgattattacgtcatttcagtaaa

SEQ ID NO: 166191 - DNA, 25 bp, Probe sequence
acagatttagataatacgctagtag

SEQ ID NO: 166192 - DNA, 25 bp, Probe sequence
acagaacgtgttaaagcatggttta

SEQ ID NO: 166193 - DNA, 25 bp, Probe sequence
aaagcgtttgataaagcaataacta

SEQ ID NO: 166194 - DNA, 25 bp, Probe sequence
aaaaaggttatatcacatgggagga

SEQ ID NO: 166195 - DNA, 25 bp, Probe sequence
aatgagtctcgtgttgctagtttta

SEQ ID NO: 166196 - DNA, 25 bp, Probe sequence
aatgcttactgatgtatttggtggt

SEQ ID NO: 166197 - DNA, 25 bp, Probe sequence
gccgaattcatatgttcaatcaata

SEQ ID NO: 166198 - DNA, 25 bp, Probe sequence
gcatttagacatcgattttattttt

SEQ ID NO: 166199 - DNA, 25 bp, Probe sequence
gcatggtttaaggaagctaatgaaa

SEQ ID NO: 166200 - DNA, 25 bp, Probe sequence
gaacctacagaacgtgttaaagcat

SEQ ID NO: 166201 - DNA, 25 bp, Probe sequence
gacaagttagtggacaaaggcgtta

SEQ ID NO: 166202 - DNA, 25 bp, Probe sequence
gaaagacgattattacgtcatttca

SEQ ID NO: 166203 - DNA, 25 bp, Probe sequence
gagtctcgtgttgctagttttagtc

SEQ ID NO: 166204 - DNA, 25 bp, Probe sequence
gatcaaactgttgttataggtgacc

SEQ ID NO: 166205 - DNA, 25 bp, Probe sequence
gttgggatgttaaagaacctacaga

SEQ ID NO: 166206 - DNA, 25 bp, Probe sequence
gttttagtcagcatttagacatcga

SEQ ID NO: 166207 - DNA, 25 bp, Probe sequence
gtctcgtgttgctagttttagtcag

SEQ ID NO: 166208 - DNA, 25 bp, Probe sequence
gtgttgctagttttagtcagcattt

SEQ ID NO: 166209 - DNA, 25 bp, Probe sequence
gtgtctaataataatgagtctcgtg

SEQ ID NO: 166210 - DNA, 25 bp, Probe sequence
ggtgaccaaatgcttactgatgtat

SEQ ID NO: 166211 - DNA, 25 bp, Probe sequence
tggacaaaggcgttaaaggtattat

SEQ ID NO: 166212 - DNA, 25 bp, Probe sequence
ggttatatcacatgggaggaaaatt

SEQ ID NO: 166213 - DNA, 25 bp, Probe sequence
ggcgttaaaggtattattacagatt

SEQ ID NO: 166214 - DNA, 25 bp, Probe sequence
tcgcaagttttttatgccgaattca

SEQ ID NO: 166215 - DNA, 25 bp, Probe sequence
tcagcatttagacatcgattttatt

SEQ ID NO: 166216 - DNA, 25 bp, Probe sequence
tttttaaagcgagaaagccaatggg

SEQ ID NO: 166217 - DNA, 25 bp, Probe sequence
ttagttcgcaagttttttatgccga

SEQ ID NO: 166218 - DNA, 25 bp, Probe sequence
ttcatatgttcaatcaatatttcaa

SEQ ID NO: 166219 - DNA, 25 bp, Probe sequence
atgccggtagcatttcaatcaagta

SEQ ID NO: 166220 - DNA, 25 bp, Probe sequence
atgtaccatttgttgtagttcgtgc

SEQ ID NO: 166221 - DNA, 25 bp, Probe sequence
agcgaaatttcagttgcacatgtta

SEQ ID NO: 166222 - DNA, 25 bp, Probe sequence
accatttgttgtagttcgtgcagtt

SEQ ID NO: 166223 - DNA, 25 bp, Probe sequence
aaagtatctcaagttgtacaacaac

SEQ ID NO: 166224 - DNA, 25 bp, Probe sequence
aaactgttgaagcattagtgtctca

SEQ ID NO: 166225 - DNA, 25 bp, Probe sequence
aacagctaaagtaggcttaattgta

SEQ ID NO: 166226 - DNA, 25 bp, Probe sequence
aatgcgatggcggttgaaatggaag

SEQ ID NO: 166227 - DNA, 25 bp, Probe sequence
cagacttagcaaatggagaagcgga

SEQ ID NO: 166228 - DNA, 25 bp, Probe sequence
catgttatcaatttaatgtaccatt

SEQ ID NO: 166229 - DNA, 25 bp, Probe sequence
gctgcaatttctacgacattattaa

SEQ ID NO: 166230 - DNA, 25 bp, Probe sequence
gctttatcggtagtgttgaacaacg

SEQ ID NO: 166231 - DNA, 25 bp, Probe sequence
gcatttccaaatgcgatggcggttg

SEQ ID NO: 166232 - DNA, 25 bp, Probe sequence
gcacatgttaaattttatactggca

SEQ ID NO: 166233 - DNA, 25 bp, Probe sequence
gatagagaagtagtgattacccaaa

SEQ ID NO: 166234 - DNA, 25 bp, Probe sequence
gatagctttatcggtagtgttgaac

SEQ ID NO: 166235 - DNA, 25 bp, Probe sequence
gttaatgctgcaatttctacgacat

SEQ ID NO: 166236 - DNA, 25 bp, Probe sequence
gtttaaatgtaggtgacgttcttat

SEQ ID NO: 166237 - DNA, 25 bp, Probe sequence
gtatcatcaagtcaaactgttgaag

SEQ ID NO: 166238 - DNA, 25 bp, Probe sequence
gtagcatttcaatcaagtaaacctt

SEQ ID NO: 166239 - DNA, 25 bp, Probe sequence
gtaagtggtgatagctttatcggta

SEQ ID NO: 166240 - DNA, 25 bp, Probe sequence
gtgcagtttcagacttagcaaatgg

SEQ ID NO: 166241 - DNA, 25 bp, Probe sequence
gtgacgttcttataagtgatgatgt

SEQ ID NO: 166242 - DNA, 25 bp, Probe sequence
ggttctgctggagctttagatgaaa

SEQ ID NO: 166243 - DNA, 25 bp, Probe sequence
ggaagcaactgcaattgcacaaaca

SEQ ID NO: 166244 - DNA, 25 bp, Probe sequence
tggtgccatggaagaagaagtaaca

SEQ ID NO: 166245 - DNA, 25 bp, Probe sequence
tgtaggtgacgttcttataagtgat

SEQ ID NO: 166246 - DNA, 25 bp, Probe sequence
tgttgtagttcgtgcagtttcagac

SEQ ID NO: 166247 - DNA, 25 bp, Probe sequence
tgattggtataattggtgccatgga

SEQ ID NO: 166248 - DNA, 25 bp, Probe sequence
tgaagcattagtgtctcaattataa

SEQ ID NO: 166249 - DNA, 25 bp, Probe sequence
taatacaggttctgctggagcttta

SEQ ID NO: 166250 - DNA, 25 bp, Probe sequence
taccacagatgccggtagcatttca

SEQ ID NO: 166251 - DNA, 25 bp, Probe sequence
tagttcgtgcagtttcagacttagc

SEQ ID NO: 166252 - DNA, 25 bp, Probe sequence
ttatactggcattttaaaagataga

SEQ ID NO: 166253 - DNA, 25 bp, Probe sequence
aggcgtttatgactgcttcaaatca

SEQ ID NO: 166254 - DNA, 25 bp, Probe sequence
catgttgggttacaacctgaaacca

SEQ ID NO: 166255 - DNA, 25 bp, Probe sequence
actgctttgacattttcatatgtta

SEQ ID NO: 166256 - DNA, 25 bp, Probe sequence
aaaagtatttttcatgaacacaatg

SEQ ID NO: 166257 - DNA, 25 bp, Probe sequence
aagttcagaggcctcgtggatcaat

SEQ ID NO: 166258 - DNA, 25 bp, Probe sequence
aataaccaagcatcagaatttctta

SEQ ID NO: 166259 - DNA, 25 bp, Probe sequence
aattatactgctttgacattttcat

SEQ ID NO: 166260 - DNA, 25 bp, Probe sequence
aattctttaccatatgcagctagag

SEQ ID NO: 166261 - DNA, 25 bp, Probe sequence
caagctcttgagtgattattatgat

SEQ ID NO: 166262 - DNA, 25 bp, Probe sequence
ctaatattaatatcatacctatgga

SEQ ID NO: 166263 - DNA, 25 bp, Probe sequence
cgcctcagccgttcaaaatcatggc

SEQ ID NO: 166264 - DNA, 25 bp, Probe sequence
gaattgtggtgatttgacggaattt

SEQ ID NO: 166265 - DNA, 25 bp, Probe sequence
gaatttcttaagttcagaggcctcg

SEQ ID NO: 166266 - DNA, 25 bp, Probe sequence
gaatttttgtatctcctttcaatgg

SEQ ID NO: 166267 - DNA, 25 bp, Probe sequence
gacggaatttattgacacaatgctt

SEQ ID NO: 166268 - DNA, 25 bp, Probe sequence
gagacattagagcgatttatgataa

SEQ ID NO: 166269 - DNA, 25 bp, Probe sequence
gaggcctcgtggatcaatataaaga

SEQ ID NO: 166270 - DNA, 25 bp, Probe sequence
gatagagcacttaattctttaccat

SEQ ID NO: 166271 - DNA, 25 bp, Probe sequence
gatttataattgccaagctcttgag

SEQ ID NO: 166272 - DNA, 25 bp, Probe sequence
gattgcacatgcgttaaataaccaa

SEQ ID NO: 166273 - DNA, 25 bp, Probe sequence
gttcaaaatcatggctagtcattat

SEQ ID NO: 166274 - DNA, 25 bp, Probe sequence
gttaatgatttggaatatcctctat

SEQ ID NO: 166275 - DNA, 25 bp, Probe sequence
gttagatggagagctatttcgtaaa

SEQ ID NO: 166276 - DNA, 25 bp, Probe sequence
gtttgaatatatacatcctttttat

SEQ ID NO: 166277 - DNA, 25 bp, Probe sequence
gtaaaaattttgtcggtgtgcatga

SEQ ID NO: 166278 - DNA, 25 bp, Probe sequence
gtcggtgtgcatgatgggtcaacga

SEQ ID NO: 166279 - DNA, 25 bp, Probe sequence
tcctttttatgatggcaatggtaga

SEQ ID NO: 166280 - DNA, 25 bp, Probe sequence
taacgctttatttaactagtcatta

SEQ ID NO: 166281 - DNA, 25 bp, Probe sequence
taaaatattttgatgcgcctcagcc

SEQ ID NO: 166282 - DNA, 25 bp, Probe sequence
taaacaagagattgcacatgcgtta

SEQ ID NO: 166283 - DNA, 25 bp, Probe sequence
taccaaaaatggatgcgactgaaaa

SEQ ID NO: 166284 - DNA, 25 bp, Probe sequence
tatcctctattctttatggtgacta

SEQ ID NO: 166285 - DNA, 25 bp, Probe sequence
ttacaaggcgtttatgactgcttca

SEQ ID NO: 166286 - DNA, 25 bp, Probe sequence
ttgtatctcctttcaatggataaat

SEQ ID NO: 166287 - DNA, 25 bp, Probe sequence
attggctcagcatacacaagcgcaa

SEQ ID NO: 166288 - DNA, 25 bp, Probe sequence
attacctttgcaggtgcacatcgta

SEQ ID NO: 166289 - DNA, 25 bp, Probe sequence
agcaggcgcgataaatggatggatt

SEQ ID NO: 166290 - DNA, 25 bp, Probe sequence
acacccaaattggatgttcatcttt

SEQ ID NO: 166291 - DNA, 25 bp, Probe sequence
aaatccaccagcgtcagtttttgaa

SEQ ID NO: 166292 - DNA, 25 bp, Probe sequence
aacatccaatgaaattagtcttgcc

SEQ ID NO: 166293 - DNA, 25 bp, Probe sequence
aaccaatcagccttttaattatagc

SEQ ID NO: 166294 - DNA, 25 bp, Probe sequence
ccaccttatggtgatgcttttgtgc

SEQ ID NO: 166295 - DNA, 25 bp, Probe sequence
gctatgtcatcagtaattggctcag

SEQ ID NO: 166296 - DNA, 25 bp, Probe sequence
gcatacatttgcgccagaacatcca

SEQ ID NO: 166297 - DNA, 25 bp, Probe sequence
gcatacacaagcgcaacatttttaa

SEQ ID NO: 166298 - DNA, 25 bp, Probe sequence
gcacatcgtatattagactctggca

SEQ ID NO: 166299 - DNA, 25 bp, Probe sequence
gacactaagttctgaaaatccacca

SEQ ID NO: 166300 - DNA, 25 bp, Probe sequence
gactctggcattaaaggtaagcaat

SEQ ID NO: 166301 - DNA, 25 bp, Probe sequence
gatgtttgtttctaatccaccttat

SEQ ID NO: 166302 - DNA, 25 bp, Probe sequence
gattgcatttggtggtctagctttt

SEQ ID NO: 166303 - DNA, 25 bp, Probe sequence
gttggtggaactgtaggtggttata

SEQ ID NO: 166304 - DNA, 25 bp, Probe sequence
gttgttgtaacaggtgtgacactaa

SEQ ID NO: 166305 - DNA, 25 bp, Probe sequence
gttcatctttggtatcgttgcagta

SEQ ID NO: 166306 - DNA, 25 bp, Probe sequence
gtttttgaacacgcaattggaccaa

SEQ ID NO: 166307 - DNA, 25 bp, Probe sequence
gtattgtgatgattttagttgtggc

SEQ ID NO: 166308 - DNA, 25 bp, Probe sequence
gtatcgttgcagtacttgttacaat

SEQ ID NO: 166309 - DNA, 25 bp, Probe sequence
gtaatattgctggtgccggtttagg

SEQ ID NO: 166310 - DNA, 25 bp, Probe sequence
gtgattgtgtttatcgttatttcaa

SEQ ID NO: 166311 - DNA, 25 bp, Probe sequence
gggcttggtactgttatctcaatat

SEQ ID NO: 166312 - DNA, 25 bp, Probe sequence
ggggcgcagctattactgcaatctt

SEQ ID NO: 166313 - DNA, 25 bp, Probe sequence
ggtggtctagcttttaatattggta

SEQ ID NO: 166314 - DNA, 25 bp, Probe sequence
ggatggattttacctattacgttag

SEQ ID NO: 166315 - DNA, 25 bp, Probe sequence
ggacgttgtttcaatgattcttggt

SEQ ID NO: 166316 - DNA, 25 bp, Probe sequence
tgctggtgccggtttaggtttaaat

SEQ ID NO: 166317 - DNA, 25 bp, Probe sequence
taaagttgttcctgggcttggtact

SEQ ID NO: 166318 - DNA, 25 bp, Probe sequence
tgacaggtatattctcattcaaaga

SEQ ID NO: 166319 - DNA, 25 bp, Probe sequence
tatggcgcatattagttgtaactgg

SEQ ID NO: 166320 - DNA, 25 bp, Probe sequence
ttcgcatttgccatattactgtcta

SEQ ID NO: 166321 - DNA, 25 bp, Probe sequence
ataatttatctggtaagttgtcgaa

SEQ ID NO: 166322 - DNA, 25 bp, Probe sequence
atcccgcgctgaaacaaaaaatcga

SEQ ID NO: 166323 - DNA, 25 bp, Probe sequence
atgctactgactcgacatacaaaag

SEQ ID NO: 166324 - DNA, 25 bp, Probe sequence
atgtttttggcaatgaagtgggaac

SEQ ID NO: 166325 - DNA, 25 bp, Probe sequence
acgtaaaagatcccgcgctgaaaca

SEQ ID NO: 166326 - DNA, 25 bp, Probe sequence
aaagacgtaaaagatcccgcgctga

SEQ ID NO: 166327 - DNA, 25 bp, Probe sequence
aaattcatttgaaagatggtcttaa

SEQ ID NO: 166328 - DNA, 25 bp, Probe sequence
aaatcgaaaacaatcaatttttgat

SEQ ID NO: 166329 - DNA, 25 bp, Probe sequence
aaaggtagataagaacacacataaa

SEQ ID NO: 166330 - DNA, 25 bp, Probe sequence
aaaggcaataatcatcaagatcaga

SEQ ID NO: 166331 - DNA, 25 bp, Probe sequence
aacttagaaacgctttatgaaattg

SEQ ID NO: 166332 - DNA, 25 bp, Probe sequence
aagatcccgcgctgaaacaaaaaat

SEQ ID NO: 166333 - DNA, 25 bp, Probe sequence
aagtggtgatttaacaagcatttta

SEQ ID NO: 166334 - DNA, 25 bp, Probe sequence
aataactggtgaatatgacacaact

SEQ ID NO: 166335 - DNA, 25 bp, Probe sequence
aattttctggttaaacttagcagca

SEQ ID NO: 166336 - DNA, 25 bp, Probe sequence
caagatcagaaactttatttttatt

SEQ ID NO: 166337 - DNA, 25 bp, Probe sequence
cacatgatcctaccactgattatta

SEQ ID NO: 166338 - DNA, 25 bp, Probe sequence
ctggttaaacttagcagcaattatt

SEQ ID NO: 166339 - DNA, 25 bp, Probe sequence
gcatcaacaaaggtggaattaaagg

SEQ ID NO: 166340 - DNA, 25 bp, Probe sequence
gaaagtcacacatgatcctaccact

SEQ ID NO: 166341 - DNA, 25 bp, Probe sequence
gaaattgatggtcacgataatcccc

SEQ ID NO: 166342 - DNA, 25 bp, Probe sequence
gactcgacatacaaaagttatccag

SEQ ID NO: 166343 - DNA, 25 bp, Probe sequence
gagcttttaaaagaagaccgtatgt

SEQ ID NO: 166344 - DNA, 25 bp, Probe sequence
gaccgtatgttgttaaaggtagata

SEQ ID NO: 166345 - DNA, 25 bp, Probe sequence
gatggtcacgataatccccattatg

SEQ ID NO: 166346 - DNA, 25 bp, Probe sequence
gatcctaccactgattattataatt

SEQ ID NO: 166347 - DNA, 25 bp, Probe sequence
gatcaagacacatggtatatagaat

SEQ ID NO: 166348 - DNA, 25 bp, Probe sequence
gattcaaagtggtgatttaacaagc

SEQ ID NO: 166349 - DNA, 25 bp, Probe sequence
gttgttggatcagatgagcttttaa

SEQ ID NO: 166350 - DNA, 25 bp, Probe sequence
gtaaaagatcccgcgctgaaacaaa

SEQ ID NO: 166351 - DNA, 25 bp, Probe sequence
gggaatgagtgatttaaaaggcaat

SEQ ID NO: 166352 - DNA, 25 bp, Probe sequence
ggtcacgataatccccattatgaaa

SEQ ID NO: 166353 - DNA, 25 bp, Probe sequence
tcttattcagttgttggatcagatg

SEQ ID NO: 166354 - DNA, 25 bp, Probe sequence
tcacacatgatcctaccactgatta

SEQ ID NO: 166355 - DNA, 25 bp, Probe sequence
attcatatctaatttcagaagcaaa

SEQ ID NO: 166356 - DNA, 25 bp, Probe sequence
atagcacaagctgtttatgactttg

SEQ ID NO: 166357 - DNA, 25 bp, Probe sequence
atgcgagttgatttgaattgtgatt

SEQ ID NO: 166358 - DNA, 25 bp, Probe sequence
agtgtttgctgatagacgatacgaa

SEQ ID NO: 166359 - DNA, 25 bp, Probe sequence
agtaggattagcaaattcatatcta

SEQ ID NO: 166360 - DNA, 25 bp, Probe sequence
acgatacgaagatgatgggcagctc

SEQ ID NO: 166361 - DNA, 25 bp, Probe sequence
acttgccaaagcacataatgttgca

SEQ ID NO: 166362 - DNA, 25 bp, Probe sequence
acaagggttttgtcgcattcatcaa

SEQ ID NO: 166363 - DNA, 25 bp, Probe sequence
aagtgcgaatgttgcttgtggtttt

SEQ ID NO: 166364 - DNA, 25 bp, Probe sequence
aatgttgcagtaggtgcacatcctg

SEQ ID NO: 166365 - DNA, 25 bp, Probe sequence
ctgacgaagcacttaagcaggtttt

SEQ ID NO: 166366 - DNA, 25 bp, Probe sequence
gctgtttatgactttgatccatcac

SEQ ID NO: 166367 - DNA, 25 bp, Probe sequence
gcttctgaagtgtttgctgatagac

SEQ ID NO: 166368 - DNA, 25 bp, Probe sequence
gcacatcctggtttacctgatttga

SEQ ID NO: 166369 - DNA, 25 bp, Probe sequence
gaaggcattgatattcaatccttat

SEQ ID NO: 166370 - DNA, 25 bp, Probe sequence
gaagtaacgttacaagcagatacaa

SEQ ID NO: 166371 - DNA, 25 bp, Probe sequence
gaaaggctttggcagacgaaatata

SEQ ID NO: 166372 - DNA, 25 bp, Probe sequence
gactttgatccatcactagtgttag

SEQ ID NO: 166373 - DNA, 25 bp, Probe sequence
gatgggcagctcgttagtagaaaag

SEQ ID NO: 166374 - DNA, 25 bp, Probe sequence
gattactgatactgacgaagcactt

SEQ ID NO: 166375 - DNA, 25 bp, Probe sequence
gtatcagatgggtgcaaaagacaga

SEQ ID NO: 166376 - DNA, 25 bp, Probe sequence
gtaggtgcacatcctggtttacctg

SEQ ID NO: 166377 - DNA, 25 bp, Probe sequence
gtcggattaattacagcttctgaag

SEQ ID NO: 166378 - DNA, 25 bp, Probe sequence
gtgatgctgtgattactgatactga

SEQ ID NO: 166379 - DNA, 25 bp, Probe sequence
gtgatttaggcgaagcatttggaaa

SEQ ID NO: 166380 - DNA, 25 bp, Probe sequence
ggtgatggagaacatgcattattat

SEQ ID NO: 166381 - DNA, 25 bp, Probe sequence
ggtgcattacaagggttttgtcgca

SEQ ID NO: 166382 - DNA, 25 bp, Probe sequence
ggtttacctgatttgaaaggctttg

SEQ ID NO: 166383 - DNA, 25 bp, Probe sequence
tggtgatcatcaaattattccgtta

SEQ ID NO: 166384 - DNA, 25 bp, Probe sequence
tgatttatcaattaggtgcattaca

SEQ ID NO: 166385 - DNA, 25 bp, Probe sequence
tgaaacggtaaaacttgccaaagca

SEQ ID NO: 166386 - DNA, 25 bp, Probe sequence
tgcttgtggttttcacgctggtgat

SEQ ID NO: 166387 - DNA, 25 bp, Probe sequence
tacaatttgtgtgcatggtgatgga

SEQ ID NO: 166388 - DNA, 25 bp, Probe sequence
ttattccgttaattacaagtgcgaa

SEQ ID NO: 166389 - DNA, 25 bp, Probe sequence
atttcaaccaacaccaggtaaagtg

SEQ ID NO: 166390 - DNA, 25 bp, Probe sequence
cttgccaaagacatcggttatccag

SEQ ID NO: 166391 - DNA, 25 bp, Probe sequence
atctcatgatagagcttcagcaatt

SEQ ID NO: 166392 - DNA, 25 bp, Probe sequence
atgtgcgagtcgattctttactata

SEQ ID NO: 166393 - DNA, 25 bp, Probe sequence
agctgccagtggcggtggtggtaaa

SEQ ID NO: 166394 - DNA, 25 bp, Probe sequence
acctcaaggctttaatgtgcgagtc

SEQ ID NO: 166395 - DNA, 25 bp, Probe sequence
actggtgctaatgcaattcacccag

SEQ ID NO: 166396 - DNA, 25 bp, Probe sequence
acagttcatcatgcaggtgttcctg

SEQ ID NO: 166397 - DNA, 25 bp, Probe sequence
aacataatcatttacctttttcaca

SEQ ID NO: 166398 - DNA, 25 bp, Probe sequence
aagaatctccttgtgcagcattaac

SEQ ID NO: 166399 - DNA, 25 bp, Probe sequence
cacggttatcaagtttcaccatatt

SEQ ID NO: 166400 - DNA, 25 bp, Probe sequence
caccatattatgattctttagtagc

SEQ ID NO: 166401 - DNA, 25 bp, Probe sequence
gcgagaataaatgccgaaaatcctg

SEQ ID NO: 166402 - DNA, 25 bp, Probe sequence
gcaattcacccaggatatggctttt

SEQ ID NO: 166403 - DNA, 25 bp, Probe sequence
gaagtgcaggtacgattgaattttt

SEQ ID NO: 166404 - DNA, 25 bp, Probe sequence
gacatcggttatccagttgttatca

SEQ ID NO: 166405 - DNA, 25 bp, Probe sequence
gacagcgttacatttacctcaaggc

SEQ ID NO: 166406 - DNA, 25 bp, Probe sequence
gagcagaacgtgatttggttgcagc

SEQ ID NO: 166407 - DNA, 25 bp, Probe sequence
gatggattttctacaactgccgatt

SEQ ID NO: 166408 - DNA, 25 bp, Probe sequence
gatgatcgtgtttatgttgaggctt

SEQ ID NO: 166409 - DNA, 25 bp, Probe sequence
gatgctgttaaagttgcacgtgcag

SEQ ID NO: 166410 - DNA, 25 bp, Probe sequence
gattctttactatatcacggttatc

SEQ ID NO: 166411 - DNA, 25 bp, Probe sequence
gttgttatcaaagctgccagtggcg

SEQ ID NO: 166412 - DNA, 25 bp, Probe sequence
gttgaggcttttatacctgttgcaa

SEQ ID NO: 166413 - DNA, 25 bp, Probe sequence
gttttaaattatccactatatcgtg

SEQ ID NO: 166414 - DNA, 25 bp, Probe sequence
ggggaacgtgattgttctgtacaac

SEQ ID NO: 166415 - DNA, 25 bp, Probe sequence
ggggacgagcaaagcttgcatgtac

SEQ ID NO: 166416 - DNA, 25 bp, Probe sequence
ggtgttcctgtgattccaggatcaa

SEQ ID NO: 166417 - DNA, 25 bp, Probe sequence
ggcatagcgtttatagggcctacta

SEQ ID NO: 166418 - DNA, 25 bp, Probe sequence
tgaatgctcgaatacaagttgaaca

SEQ ID NO: 166419 - DNA, 25 bp, Probe sequence
tctgctgcacaaatcactggtgcta

SEQ ID NO: 166420 - DNA, 25 bp, Probe sequence
tctacaactgccgattttttatatg

SEQ ID NO: 166421 - DNA, 25 bp, Probe sequence
tatggctttttatcagaatcaacaa

SEQ ID NO: 166422 - DNA, 25 bp, Probe sequence
ttgaccgcatcatatctgctgcaca

SEQ ID NO: 166423 - DNA, 25 bp, Probe sequence
atttggctgcacacagtaatcaatc

SEQ ID NO: 166424 - DNA, 25 bp, Probe sequence
ataactccgatgtttcgacaaatga

SEQ ID NO: 166425 - DNA, 25 bp, Probe sequence
atcatttggctgcacacagtaatca

SEQ ID NO: 166426 - DNA, 25 bp, Probe sequence
atgaaatagaaattgacttcactga

SEQ ID NO: 166427 - DNA, 25 bp, Probe sequence
atgataactccgatgtttcgacaaa

SEQ ID NO: 166428 - DNA, 25 bp, Probe sequence
aggatatgttgaagcgatgaaagta

SEQ ID NO: 166429 - DNA, 25 bp, Probe sequence
acaaatgttgaatacgaccaagttt

SEQ ID NO: 166430 - DNA, 25 bp, Probe sequence
aaacgaggtaacaacagatgttgct

SEQ ID NO: 166431 - DNA, 25 bp, Probe sequence
aactccgatgtttcgacaaatgatt

SEQ ID NO: 166432 - DNA, 25 bp, Probe sequence
aagaattaactgaaccaattgtgaa

SEQ ID NO: 166433 - DNA, 25 bp, Probe sequence
aatgttgaatacgaccaagttttgg

SEQ ID NO: 166434 - DNA, 25 bp, Probe sequence
aatgataactccgatgtttcgacaa

SEQ ID NO: 166435 - DNA, 25 bp, Probe sequence
aatcatttggctgcacacagtaatc

SEQ ID NO: 166436 - DNA, 25 bp, Probe sequence
aataatgatttgacagcttcaaaag

SEQ ID NO: 166437 - DNA, 25 bp, Probe sequence
ctgcacacagtaatcaatcaaatca

SEQ ID NO: 166438 - DNA, 25 bp, Probe sequence
gctgcacacagtaatcaatcaaatc

SEQ ID NO: 166439 - DNA, 25 bp, Probe sequence
gaatgataactccgatgtttcgaca

SEQ ID NO: 166440 - DNA, 25 bp, Probe sequence
gaatcatttggctgcacacagtaat

SEQ ID NO: 166441 - DNA, 25 bp, Probe sequence
gaacaataatgatttgacagcttca

SEQ ID NO: 166442 - DNA, 25 bp, Probe sequence
gatgtttcgacaaatgattatcatg

SEQ ID NO: 166443 - DNA, 25 bp, Probe sequence
gatgaaagtattaaacgaggtaaca

SEQ ID NO: 166444 - DNA, 25 bp, Probe sequence
gataactccgatgtttcgacaaatg

SEQ ID NO: 166445 - DNA, 25 bp, Probe sequence
gtcggtgacaaagttaacaagggag

SEQ ID NO: 166446 - DNA, 25 bp, Probe sequence
ggtgacaaagttaacaagggagata

SEQ ID NO: 166447 - DNA, 25 bp, Probe sequence
ggtaacaacagatgttgctggagaa

SEQ ID NO: 166448 - DNA, 25 bp, Probe sequence
ggctgcacacagtaatcaatcaaat

SEQ ID NO: 166449 - DNA, 25 bp, Probe sequence
tgtttcgacaaatgattatcatgac

SEQ ID NO: 166450 - DNA, 25 bp, Probe sequence
tgataactccgatgtttcgacaaat

SEQ ID NO: 166451 - DNA, 25 bp, Probe sequence
tgaatacgaccaagttttggtacgt

SEQ ID NO: 166452 - DNA, 25 bp, Probe sequence
tccgatgtttcgacaaatgattatc

SEQ ID NO: 166453 - DNA, 25 bp, Probe sequence
tcatttggctgcacacagtaatcaa

SEQ ID NO: 166454 - DNA, 25 bp, Probe sequence
ttataggatatgttgaagcgatgaa

SEQ ID NO: 166455 - DNA, 25 bp, Probe sequence
ttatcatgacattaaatcaccaatg

SEQ ID NO: 166456 - DNA, 25 bp, Probe sequence
ttggctgcacacagtaatcaatcaa

SEQ ID NO: 166457 - DNA, 25 bp, Probe sequence
attcatttacaggacgatttattgc

SEQ ID NO: 166458 - DNA, 25 bp, Probe sequence
atttgatctgccaaagttagcacag

SEQ ID NO: 166459 - DNA, 25 bp, Probe sequence
acgcggttatcttacttttggtcat

SEQ ID NO: 166460 - DNA, 25 bp, Probe sequence
aaaactatatcaatgaattctgtca

SEQ ID NO: 166461 - DNA, 25 bp, Probe sequence
aagactccaatttttgatacatcta

SEQ ID NO: 166462 - DNA, 25 bp, Probe sequence
caatttagttttaaggttgcgcagt

SEQ ID NO: 166463 - DNA, 25 bp, Probe sequence
caaatgatggtcaacctattattct

SEQ ID NO: 166464 - DNA, 25 bp, Probe sequence
cacattcttcaaggacctcaattcg

SEQ ID NO: 166465 - DNA, 25 bp, Probe sequence
ctagcttgcgacatacttcgaaaaa

SEQ ID NO: 166466 - DNA, 25 bp, Probe sequence
gccaaagttagcacagatgaaacca

SEQ ID NO: 166467 - DNA, 25 bp, Probe sequence
gcaactgtatgcaaatttgatctgc

SEQ ID NO: 166468 - DNA, 25 bp, Probe sequence
gaatatactttgattggtcctacca

SEQ ID NO: 166469 - DNA, 25 bp, Probe sequence
gaattctgtcatattagctgagaaa

SEQ ID NO: 166470 - DNA, 25 bp, Probe sequence
gaatcgggaacaaatgtctctgttt

SEQ ID NO: 166471 - DNA, 25 bp, Probe sequence
gaagctgtagataagaatcgggaac

SEQ ID NO: 166472 - DNA, 25 bp, Probe sequence
gaaagttatgcaacacatacccgaa

SEQ ID NO: 166473 - DNA, 25 bp, Probe sequence
gagcgaaaattgtaaatcatccata

SEQ ID NO: 166474 - DNA, 25 bp, Probe sequence
gatggtccagcgattgaatatactt

SEQ ID NO: 166475 - DNA, 25 bp, Probe sequence
gatatcatttctgaaccggttgctc

SEQ ID NO: 166476 - DNA, 25 bp, Probe sequence
gtctctgtttaatgaaattcttaag

SEQ ID NO: 166477 - DNA, 25 bp, Probe sequence
ggtggttataccaaaattgcaactg

SEQ ID NO: 166478 - DNA, 25 bp, Probe sequence
ggatatcattccaagaagctgtaga

SEQ ID NO: 166479 - DNA, 25 bp, Probe sequence
ggacctcaattcgaggcattttctg

SEQ ID NO: 166480 - DNA, 25 bp, Probe sequence
ggcattttctgaagaggctagagcg

SEQ ID NO: 166481 - DNA, 25 bp, Probe sequence
tcgtttggaaggtgacagcgttgca

SEQ ID NO: 166482 - DNA, 25 bp, Probe sequence
taattaacaatgatggtccagcgat

SEQ ID NO: 166483 - DNA, 25 bp, Probe sequence
tacaggacgatttattgccagaaaa

SEQ ID NO: 166484 - DNA, 25 bp, Probe sequence
tacatttgttataaccggtggtagt

SEQ ID NO: 166485 - DNA, 25 bp, Probe sequence
tacatctagcttgcgacatacttcg

SEQ ID NO: 166486 - DNA, 25 bp, Probe sequence
tatcatttctgaaccggttgctctt

SEQ ID NO: 166487 - DNA, 25 bp, Probe sequence
tattatacacattcttcaaggacct

SEQ ID NO: 166488 - DNA, 25 bp, Probe sequence
ttttgatacatctagcttgcgacat

SEQ ID NO: 166489 - DNA, 25 bp, Probe sequence
ttagctgagaaaggtgacattttaa

SEQ ID NO: 166490 - DNA, 25 bp, Probe sequence
ttggtcctaccattcaatttaatac

SEQ ID NO: 166491 - DNA, 25 bp, Probe sequence
atacctgttcaatatggtggtacat

SEQ ID NO: 166492 - DNA, 25 bp, Probe sequence
atcagattctcctggcggatggcaa

SEQ ID NO: 166493 - DNA, 25 bp, Probe sequence
atgtcacagcaatggtacggtggat

SEQ ID NO: 166494 - DNA, 25 bp, Probe sequence
atgttcatgctgtgaatcaaaccaa

SEQ ID NO: 166495 - DNA, 25 bp, Probe sequence
agcagcgagcgtgaaccaatgtcaa

SEQ ID NO: 166496 - DNA, 25 bp, Probe sequence
agcataatcgaataactgttgagca

SEQ ID NO: 166497 - DNA, 25 bp, Probe sequence
aaaattcatgcaggttctgtaggta

SEQ ID NO: 166498 - DNA, 25 bp, Probe sequence
aagagatatatcagatggcaacttt

SEQ ID NO: 166499 - DNA, 25 bp, Probe sequence
aagatattgtcccttcgtatcgagc

SEQ ID NO: 166500 - DNA, 25 bp, Probe sequence
aagtatttagcagcgagcgtgaacc

SEQ ID NO: 166501 - DNA, 25 bp, Probe sequence
catacacctagacgtaatcagccaa

SEQ ID NO: 166502 - DNA, 25 bp, Probe sequence
ctagacgtaatcagccaaggttaaa

SEQ ID NO: 166503 - DNA, 25 bp, Probe sequence
ccttcgtatcgagcagttctaatat

SEQ ID NO: 166504 - DNA, 25 bp, Probe sequence
gcgagcgtgaaccaatgtcaatgta

SEQ ID NO: 166505 - DNA, 25 bp, Probe sequence
gcaatggtacggtggatacgagaaa

SEQ ID NO: 166506 - DNA, 25 bp, Probe sequence
gaataatcaaacaggactatatcca

SEQ ID NO: 166507 - DNA, 25 bp, Probe sequence
gaacaactacatacacctagacgta

SEQ ID NO: 166508 - DNA, 25 bp, Probe sequence
gaaattcaagatattgtcccttcgt

SEQ ID NO: 166509 - DNA, 25 bp, Probe sequence
gacgcacaccgttaaaagtatttag

SEQ ID NO: 166510 - DNA, 25 bp, Probe sequence
gagcagttctaatatattttgatga

SEQ ID NO: 166511 - DNA, 25 bp, Probe sequence
gagaatggatacaattttatgcaat

SEQ ID NO: 166512 - DNA, 25 bp, Probe sequence
gatggcaactttaatgttgatgact

SEQ ID NO: 166513 - DNA, 25 bp, Probe sequence
gattctcctggcggatggcaaatta

SEQ ID NO: 166514 - DNA, 25 bp, Probe sequence
gtggatgtaagatttattaacgagc

SEQ ID NO: 166515 - DNA, 25 bp, Probe sequence
ggatttccatacttaggcggacttg

SEQ ID NO: 166516 - DNA, 25 bp, Probe sequence
ggactatatccatcagattctcctg

SEQ ID NO: 166517 - DNA, 25 bp, Probe sequence
ggcaaattattggacgcacaccgtt

SEQ ID NO: 166518 - DNA, 25 bp, Probe sequence
tgtcccttcgtatcgagcagttcta

SEQ ID NO: 166519 - DNA, 25 bp, Probe sequence
tcagccaaggttaaaaattcatgca

SEQ ID NO: 166520 - DNA, 25 bp, Probe sequence
taatatatatgctaggatttatgcc

SEQ ID NO: 166521 - DNA, 25 bp, Probe sequence
taggcggacttgatgaacaactaca

SEQ ID NO: 166522 - DNA, 25 bp, Probe sequence
tatccatcagattctcctggcggat

SEQ ID NO: 166523 - DNA, 25 bp, Probe sequence
tattgtcccttcgtatcgagcagtt

SEQ ID NO: 166524 - DNA, 25 bp, Probe sequence
ttaatgttgatgactgggtggtgat

SEQ ID NO: 166525 - DNA, 25 bp, Probe sequence
attagagcgtgaacttgaagaatta

SEQ ID NO: 166526 - DNA, 25 bp, Probe sequence
atttcaaatgaatcaccaatggcta

SEQ ID NO: 166527 - DNA, 25 bp, Probe sequence
atgcattaatcattgaagatactgg

SEQ ID NO: 166528 - DNA, 25 bp, Probe sequence
atggctaaagcgttaattggtaaag

SEQ ID NO: 166529 - DNA, 25 bp, Probe sequence
agatactggagataacaacgttgtt

SEQ ID NO: 166530 - DNA, 25 bp, Probe sequence
agcgtcctgaagttgtagagaaaat

SEQ ID NO: 166531 - DNA, 25 bp, Probe sequence
aattaaagttgcacgttcatttggt

SEQ ID NO: 166532 - DNA, 25 bp, Probe sequence
aaagttgcacgttcatttggtgact

SEQ ID NO: 166533 - DNA, 25 bp, Probe sequence
aaacagttaagcgtcctgaagttgt

SEQ ID NO: 166534 - DNA, 25 bp, Probe sequence
aacgtttgtagaattaccaggtgat

SEQ ID NO: 166535 - DNA, 25 bp, Probe sequence
aagcaatatccaatgactcaagaag

SEQ ID NO: 166536 - DNA, 25 bp, Probe sequence
caaaagcaatatccaatgactcaag

SEQ ID NO: 166537 - DNA, 25 bp, Probe sequence
ctacctaatggtggcgaaatgaacg

SEQ ID NO: 166538 - DNA, 25 bp, Probe sequence
cgtgttccactacctaatggtggcg

SEQ ID NO: 166539 - DNA, 25 bp, Probe sequence
gcacgttcatttggtgacttatcag

SEQ ID NO: 166540 - DNA, 25 bp, Probe sequence
gaattaccaggtgatgaagaggaaa

SEQ ID NO: 166541 - DNA, 25 bp, Probe sequence
gaatcaccaatggctaaagcgttaa

SEQ ID NO: 166542 - DNA, 25 bp, Probe sequence
gaagaggaaagttatcaaatcgttg

SEQ ID NO: 166543 - DNA, 25 bp, Probe sequence
gaacaaggattcatcgaacaagata

SEQ ID NO: 166544 - DNA, 25 bp, Probe sequence
gaaaaattagagcgtgaacttgaag

SEQ ID NO: 166545 - DNA, 25 bp, Probe sequence
gagaactctgagtatgatgcagcaa

SEQ ID NO: 166546 - DNA, 25 bp, Probe sequence
gatgcatttaatggtaagatttcaa

SEQ ID NO: 166547 - DNA, 25 bp, Probe sequence
gttgcacgttcatttggtgacttat

SEQ ID NO: 166548 - DNA, 25 bp, Probe sequence
gttccactacctaatggtggcgaaa

SEQ ID NO: 166549 - DNA, 25 bp, Probe sequence
gttaagcgtcctgaagttgtagaga

SEQ ID NO: 166550 - DNA, 25 bp, Probe sequence
gttatcaaatcgttggttcagctga

SEQ ID NO: 166551 - DNA, 25 bp, Probe sequence
ggttcagctgaatcagatgcattta

SEQ ID NO: 166552 - DNA, 25 bp, Probe sequence
ggattcatcgaacaagatattcaaa

SEQ ID NO: 166553 - DNA, 25 bp, Probe sequence
tgaacgtaaaaattgttaatatcca

SEQ ID NO: 166554 - DNA, 25 bp, Probe sequence
tcgttggttcagctgaatcagatgc

SEQ ID NO: 166555 - DNA, 25 bp, Probe sequence
tcaaatcgttggttcagctgaatca

SEQ ID NO: 166556 - DNA, 25 bp, Probe sequence
tcaaagaattgagcatatgttaaga

SEQ ID NO: 166557 - DNA, 25 bp, Probe sequence
tatccaatgactcaagaaggttttg

SEQ ID NO: 166558 - DNA, 25 bp, Probe sequence
tttggtgacttatcagagaactctg

SEQ ID NO: 166559 - DNA, 25 bp, Probe sequence
attcagtctttagttagcaagcaat

SEQ ID NO: 166560 - DNA, 25 bp, Probe sequence
attacgccgtttaacacgagatact

SEQ ID NO: 166561 - DNA, 25 bp, Probe sequence
attattcctgaaggtgggagcaata

SEQ ID NO: 166562 - DNA, 25 bp, Probe sequence
atgaccatccatttgcattcgataa

SEQ ID NO: 166563 - DNA, 25 bp, Probe sequence
atgttgatacagatgcagacttgag

SEQ ID NO: 166564 - DNA, 25 bp, Probe sequence
agtgtcgctttacttgctcaagatt

SEQ ID NO: 166565 - DNA, 25 bp, Probe sequence
agtgttgttagacctatgcatgacc

SEQ ID NO: 166566 - DNA, 25 bp, Probe sequence
aaagagcgtgggcgttcaatggact

SEQ ID NO: 166567 - DNA, 25 bp, Probe sequence
aaagcacttgactttcgacgagcgc

SEQ ID NO: 166568 - DNA, 25 bp, Probe sequence
aaaccaattatgaccatccatttgc

SEQ ID NO: 166569 - DNA, 25 bp, Probe sequence
aaacttagaaggtcatagtgtcgct

SEQ ID NO: 166570 - DNA, 25 bp, Probe sequence
aacaactgtaactaacgaaattatg

SEQ ID NO: 166571 - DNA, 25 bp, Probe sequence
aagaagtgacattaccattgatttt

SEQ ID NO: 166572 - DNA, 25 bp, Probe sequence
gcatagctggtggatctggctcagg

SEQ ID NO: 166573 - DNA, 25 bp, Probe sequence
gcatgaccaatttattgaaccgact

SEQ ID NO: 166574 - DNA, 25 bp, Probe sequence
gcagacttgagaatattacgccgtt

SEQ ID NO: 166575 - DNA, 25 bp, Probe sequence
gaaccgactaagaaatatgctgata

SEQ ID NO: 166576 - DNA, 25 bp, Probe sequence
gacaacaaaaattcagtctttagtt

SEQ ID NO: 166577 - DNA, 25 bp, Probe sequence
gactttcgacgagcgcctagaaacc

SEQ ID NO: 166578 - DNA, 25 bp, Probe sequence
gacattaccattgattttaaaccta

SEQ ID NO: 166579 - DNA, 25 bp, Probe sequence
gagcgcctagaaaccaattatgacc

SEQ ID NO: 166580 - DNA, 25 bp, Probe sequence
gagatactaaagagcgtgggcgttc

SEQ ID NO: 166581 - DNA, 25 bp, Probe sequence
gttagacctatgcatgaccaattta

SEQ ID NO: 166582 - DNA, 25 bp, Probe sequence
gtaccgacatatgattatgctagtc

SEQ ID NO: 166583 - DNA, 25 bp, Probe sequence
gtaaagcagtagaagtaccgacata

SEQ ID NO: 166584 - DNA, 25 bp, Probe sequence
ggtcatagtgtcgctttacttgctc

SEQ ID NO: 166585 - DNA, 25 bp, Probe sequence
ggtattacgtgatatgatggatgtt

SEQ ID NO: 166586 - DNA, 25 bp, Probe sequence
ggatctggctcaggaaaaacaactg

SEQ ID NO: 166587 - DNA, 25 bp, Probe sequence
tggactctgttatcaatcaatattt

SEQ ID NO: 166588 - DNA, 25 bp, Probe sequence
tgggcgttcaatggactctgttatc

SEQ ID NO: 166589 - DNA, 25 bp, Probe sequence
tgaaagctactacaatcattggcat

SEQ ID NO: 166590 - DNA, 25 bp, Probe sequence
tcattggcatagctggtggatctgg

SEQ ID NO: 166591 - DNA, 25 bp, Probe sequence
tacttgctcaagattactattataa

SEQ ID NO: 166592 - DNA, 25 bp, Probe sequence
tatgctgatataattattcctgaag

SEQ ID NO: 166593 - DNA, 25 bp, Probe sequence
agaaggtaacagcttagacgcggcg

SEQ ID NO: 166594 - DNA, 25 bp, Probe sequence
atatggattacgttcaaatgctgat

SEQ ID NO: 166595 - DNA, 25 bp, Probe sequence
atagctgaaggtgttgaatttgcga

SEQ ID NO: 166596 - DNA, 25 bp, Probe sequence
atctactcaacaatcactttctaat

SEQ ID NO: 166597 - DNA, 25 bp, Probe sequence
aggtatcattgttgcagatccttta

SEQ ID NO: 166598 - DNA, 25 bp, Probe sequence
agcagtacattatggcgctgatgcc

SEQ ID NO: 166599 - DNA, 25 bp, Probe sequence
aaattgcgactattcaacaacgaaa

SEQ ID NO: 166600 - DNA, 25 bp, Probe sequence
aaatcgaagcatttattcatggtgc

SEQ ID NO: 166601 - DNA, 25 bp, Probe sequence
aagactggtgcgacaggtatcattg

SEQ ID NO: 166602 - DNA, 25 bp, Probe sequence
aaggattggatcgtgttgtattagc

SEQ ID NO: 166603 - DNA, 25 bp, Probe sequence
gcgccatccattacaaatcgttcaa

SEQ ID NO: 166604 - DNA, 25 bp, Probe sequence
gcattctttgagggaacacctggtt

SEQ ID NO: 166605 - DNA, 25 bp, Probe sequence
gcaacagttgtctcagtatatcgta

SEQ ID NO: 166606 - DNA, 25 bp, Probe sequence
gaatttgcgaaccgttacggtgcca

SEQ ID NO: 166607 - DNA, 25 bp, Probe sequence
gaaggtctagaatcatatttgcgta

SEQ ID NO: 166608 - DNA, 25 bp, Probe sequence
gagaccggcgcgatggaaatgcgtg

SEQ ID NO: 166609 - DNA, 25 bp, Probe sequence
gaaattcatttatctactcaacaat

SEQ ID NO: 166610 - DNA, 25 bp, Probe sequence
gagattaaatcaactcctaaaacag

SEQ ID NO: 166611 - DNA, 25 bp, Probe sequence
gatgcgtatgcggcagatcctgaca

SEQ ID NO: 166612 - DNA, 25 bp, Probe sequence
gatgccgtatttttaggtggtcaag

SEQ ID NO: 166613 - DNA, 25 bp, Probe sequence
gatcgcccgatatatccaaacaaca

SEQ ID NO: 166614 - DNA, 25 bp, Probe sequence
gattccaacagaggcggttgctgtc

SEQ ID NO: 166615 - DNA, 25 bp, Probe sequence
gttgcagatcctttaattatcgaaa

SEQ ID NO: 166616 - DNA, 25 bp, Probe sequence
gttgcgccaaaacttgaaattcatt

SEQ ID NO: 166617 - DNA, 25 bp, Probe sequence
gttcaaattaaagtggatcgcccga

SEQ ID NO: 166618 - DNA, 25 bp, Probe sequence
gtatcgcctattcaggtagatgtac

SEQ ID NO: 166619 - DNA, 25 bp, Probe sequence
gtaaagtcattgatgcgtatgcggc

SEQ ID NO: 166620 - DNA, 25 bp, Probe sequence
ggcgctgatgccgtatttttaggtg

SEQ ID NO: 166621 - DNA, 25 bp, Probe sequence
tggatattggtgtggactcattaaa

SEQ ID NO: 166622 - DNA, 25 bp, Probe sequence
tgtattagcacgtgagaccggcgcg

SEQ ID NO: 166623 - DNA, 25 bp, Probe sequence
tggtgctatgtgtatcgcctattca

SEQ ID NO: 166624 - DNA, 25 bp, Probe sequence
tcatatgactgcaagggattccaac

SEQ ID NO: 166625 - DNA, 25 bp, Probe sequence
tacggtgccaaaatttatgttacga

SEQ ID NO: 166626 - DNA, 25 bp, Probe sequence
ttagcacctgctggaaacttagaaa

SEQ ID NO: 166627 - DNA, 25 bp, Probe sequence
attactggggtaaaagaggcgcatc

SEQ ID NO: 166628 - DNA, 25 bp, Probe sequence
atcgaccatttgacgaaggtttctt

SEQ ID NO: 166629 - DNA, 25 bp, Probe sequence
atcgtcaagcgatagatttgtacaa

SEQ ID NO: 166630 - DNA, 25 bp, Probe sequence
agagctgtcttagcacgtgagctga

SEQ ID NO: 166631 - DNA, 25 bp, Probe sequence
agcacgtgagctgaatttggatgaa

SEQ ID NO: 166632 - DNA, 25 bp, Probe sequence
aaatcgatggtattctacaaacgga

SEQ ID NO: 166633 - DNA, 25 bp, Probe sequence
aaagcgtatgctactaggcaattat

SEQ ID NO: 166634 - DNA, 25 bp, Probe sequence
aagccatatggaaacacttattgat

SEQ ID NO: 166635 - DNA, 25 bp, Probe sequence
caataccacttcattggaatgcaga

SEQ ID NO: 166636 - DNA, 25 bp, Probe sequence
caacctgatcatcgaccatttgacg

SEQ ID NO: 166637 - DNA, 25 bp, Probe sequence
cttccaggggaattcaatagacaac

SEQ ID NO: 166638 - DNA, 25 bp, Probe sequence
tcggggatccagcagtagtaatgta

SEQ ID NO: 166639 - DNA, 25 bp, Probe sequence
gcaccattttttgaggcgggtatag

SEQ ID NO: 166640 - DNA, 25 bp, Probe sequence
gaattattttcggggatccagcagt

SEQ ID NO: 166641 - DNA, 25 bp, Probe sequence
gaaattcaacctgatcatcgaccat

SEQ ID NO: 166642 - DNA, 25 bp, Probe sequence
gacagaggctgtcgcattagctcac

SEQ ID NO: 166643 - DNA, 25 bp, Probe sequence
gacagaattacttgtcacacccaag

SEQ ID NO: 166644 - DNA, 25 bp, Probe sequence
gaggcgggtatagattcatttaaaa

SEQ ID NO: 166645 - DNA, 25 bp, Probe sequence
gaggcgcatcaagagctgtcttagc

SEQ ID NO: 166646 - DNA, 25 bp, Probe sequence
gttagtaactaatcattttcaatgt

SEQ ID NO: 166647 - DNA, 25 bp, Probe sequence
gtaattggcgagcaaaagtttggtt

SEQ ID NO: 166648 - DNA, 25 bp, Probe sequence
gtagtaatgtatgtgaaggcgcaag

SEQ ID NO: 166649 - DNA, 25 bp, Probe sequence
gtcaccaaacgacatttgtttaatt

SEQ ID NO: 166650 - DNA, 25 bp, Probe sequence
gtcacacccaagtcattaagccata

SEQ ID NO: 166651 - DNA, 25 bp, Probe sequence
ggtgcagatgcttttgtaattggcg

SEQ ID NO: 166652 - DNA, 25 bp, Probe sequence
ggtaacggaacagtatcgtcaagcg

SEQ ID NO: 166653 - DNA, 25 bp, Probe sequence
ggtacgcacattatgtcaccaaacg

SEQ ID NO: 166654 - DNA, 25 bp, Probe sequence
ggaatgcagagacgttagtaactaa

SEQ ID NO: 166655 - DNA, 25 bp, Probe sequence
ggcaattattatacgttccaagatc

SEQ ID NO: 166656 - DNA, 25 bp, Probe sequence
ggctgtcgcattagctcacaaaaac

SEQ ID NO: 166657 - DNA, 25 bp, Probe sequence
tgaggtgcaagttcaaggaatgact

SEQ ID NO: 166658 - DNA, 25 bp, Probe sequence
tgaacgtcgcaatgatgaacaatct

SEQ ID NO: 166659 - DNA, 25 bp, Probe sequence
tacccagtttacgaagattacaatg

SEQ ID NO: 166660 - DNA, 25 bp, Probe sequence
ttgaagaattagcaccattttttga

SEQ ID NO: 166661 - DNA, 25 bp, Probe sequence
attttttgaaatatatacaccactt

SEQ ID NO: 166662 - DNA, 25 bp, Probe sequence
atcgaagttttgcgtgaatttgccg

SEQ ID NO: 166663 - DNA, 25 bp, Probe sequence
atagttcaatcgaagttttgcgtga

SEQ ID NO: 166664 - DNA, 25 bp, Probe sequence
atcacggttttgtatcggatattgg

SEQ ID NO: 166665 - DNA, 25 bp, Probe sequence
atgcaattcgcttctatatctgatg

SEQ ID NO: 166666 - DNA, 25 bp, Probe sequence
atgtcacaacgatagagcgtaatga

SEQ ID NO: 166667 - DNA, 25 bp, Probe sequence
acatcaacatcaaaatagttcaatc

SEQ ID NO: 166668 - DNA, 25 bp, Probe sequence
aagcaccaaggtctcgtaattacag

SEQ ID NO: 166669 - DNA, 25 bp, Probe sequence
aagcaaccaggatatacaacgaatt

SEQ ID NO: 166670 - DNA, 25 bp, Probe sequence
caaccaggatatacaacgaattttt

SEQ ID NO: 166671 - DNA, 25 bp, Probe sequence
caaggtctcgtaattacagataatg

SEQ ID NO: 166672 - DNA, 25 bp, Probe sequence
cagcaatcggctatagttctatgca

SEQ ID NO: 166673 - DNA, 25 bp, Probe sequence
ctatatctgatgacattcatgtcac

SEQ ID NO: 166674 - DNA, 25 bp, Probe sequence
ccacttttaaagcaccaaggtctcg

SEQ ID NO: 166675 - DNA, 25 bp, Probe sequence
gctatagttctatgcaattcgcttc

SEQ ID NO: 166676 - DNA, 25 bp, Probe sequence
gaaggtaatgctttagagcaatttg

SEQ ID NO: 166677 - DNA, 25 bp, Probe sequence
gaaaaccaggttcgaattattgaag

SEQ ID NO: 166678 - DNA, 25 bp, Probe sequence
gaaacgatgattcaatatgctaaac

SEQ ID NO: 166679 - DNA, 25 bp, Probe sequence
gaaattggtacagcaatcggctata

SEQ ID NO: 166680 - DNA, 25 bp, Probe sequence
gacattcatgtcacaacgatagagc

SEQ ID NO: 166681 - DNA, 25 bp, Probe sequence
gacgatggattagcgatttcaatta

SEQ ID NO: 166682 - DNA, 25 bp, Probe sequence
gatgcagcaaaagcgcaatcaaaga

SEQ ID NO: 166683 - DNA, 25 bp, Probe sequence
gatatgatatttattgatgcagcaa

SEQ ID NO: 166684 - DNA, 25 bp, Probe sequence
gttctatgcaattcgcttctatatc

SEQ ID NO: 166685 - DNA, 25 bp, Probe sequence
gttttatatcacggttttgtatcgg

SEQ ID NO: 166686 - DNA, 25 bp, Probe sequence
tatagacgatggattagcgatttca

SEQ ID NO: 166687 - DNA, 25 bp, Probe sequence
gggattgttagatcgagaaatgtaa

SEQ ID NO: 166688 - DNA, 25 bp, Probe sequence
ggtacagcaatcggctatagttcta

SEQ ID NO: 166689 - DNA, 25 bp, Probe sequence
ggatattgggattgttagatcgaga

SEQ ID NO: 166690 - DNA, 25 bp, Probe sequence
ggattagcgatttcaattaaaggag

SEQ ID NO: 166691 - DNA, 25 bp, Probe sequence
taatgttttatatcacggttttgta

SEQ ID NO: 166692 - DNA, 25 bp, Probe sequence
tagttctatgcaattcgcttctata

SEQ ID NO: 166693 - DNA, 25 bp, Probe sequence
tatacaccacttttaaagcaccaag

SEQ ID NO: 166694 - DNA, 25 bp, Probe sequence
ttaatagatttacatcaacatcaaa

SEQ ID NO: 166695 - DNA, 25 bp, Probe sequence
attctgctgaaggaccacaaggttt

SEQ ID NO: 166696 - DNA, 25 bp, Probe sequence
attatatattacagcacaccctttt

SEQ ID NO: 166697 - DNA, 25 bp, Probe sequence
atggcgaaacgttaactgatgatga

SEQ ID NO: 166698 - DNA, 25 bp, Probe sequence
actgaaggacctgctgctgattttg

SEQ ID NO: 166699 - DNA, 25 bp, Probe sequence
aaaagtattacacattcaatcacgt

SEQ ID NO: 166700 - DNA, 25 bp, Probe sequence
aactggtatcaaattctatggcggc

SEQ ID NO: 166701 - DNA, 25 bp, Probe sequence
aatcacgtggtggatattatactga

SEQ ID NO: 166702 - DNA, 25 bp, Probe sequence
cacacccttttaatgaactggtatc

SEQ ID NO: 166703 - DNA, 25 bp, Probe sequence
ctgattttgaaatgggtgaccgtta

SEQ ID NO: 166704 - DNA, 25 bp, Probe sequence
gcatttatcgaaacatatcaacaac

SEQ ID NO: 166705 - DNA, 25 bp, Probe sequence
gaaggacctgctgctgattttgaaa

SEQ ID NO: 166706 - DNA, 25 bp, Probe sequence
gaagtgaaacatattgatttatttg

SEQ ID NO: 166707 - DNA, 25 bp, Probe sequence
gacaaagatgtattaactggttggg

SEQ ID NO: 166708 - DNA, 25 bp, Probe sequence
gacattcttaggtgtgccatcatat

SEQ ID NO: 166709 - DNA, 25 bp, Probe sequence
gacctgctgctgattttgaaatggg

SEQ ID NO: 166710 - DNA, 25 bp, Probe sequence
gagtaatggcgaaacgttaactgat

SEQ ID NO: 166711 - DNA, 25 bp, Probe sequence
gatgctatttcaattgcaggtaaaa

SEQ ID NO: 166712 - DNA, 25 bp, Probe sequence
gatattatactgaaggacctgctgc

SEQ ID NO: 166713 - DNA, 25 bp, Probe sequence
gatttatttgaaacttatattccag

SEQ ID NO: 166714 - DNA, 25 bp, Probe sequence
gtttcaagattgagtgacattttag

SEQ ID NO: 166715 - DNA, 25 bp, Probe sequence
ggtgtgccatcatatgaaacaatca

SEQ ID NO: 166716 - DNA, 25 bp, Probe sequence
ggaccacaaggtttactaactgaca

SEQ ID NO: 166717 - DNA, 25 bp, Probe sequence
ggcggctggtaaagcatttatcgaa

SEQ ID NO: 166718 - DNA, 25 bp, Probe sequence
tgggtgaccgttatttaagaacaat

SEQ ID NO: 166719 - DNA, 25 bp, Probe sequence
taacgcctatgtggaacctttcttt

SEQ ID NO: 166720 - DNA, 25 bp, Probe sequence
taaatattctgctgaaggaccacaa

SEQ ID NO: 166721 - DNA, 25 bp, Probe sequence
tatcaaattctatggcggctggtaa

SEQ ID NO: 166722 - DNA, 25 bp, Probe sequence
tatattccagttattgacaaagatg

SEQ ID NO: 166723 - DNA, 25 bp, Probe sequence
ttatgacattcttaggtgtgccatc

SEQ ID NO: 166724 - DNA, 25 bp, Probe sequence
ttacacattcaatcacgtggtggat

SEQ ID NO: 166725 - DNA, 25 bp, Probe sequence
ttacagcacacccttttaatgaact

SEQ ID NO: 166726 - DNA, 25 bp, Probe sequence
ttctttcccacctgtagttaaagca

SEQ ID NO: 166727 - DNA, 25 bp, Probe sequence
ttcccacctgtagttaaagcatata

SEQ ID NO: 166728 - DNA, 25 bp, Probe sequence
ttgtaacgcctatgtggaacctttc

SEQ ID NO: 166729 - DNA, 25 bp, Probe sequence
atcgaaactgatgaagaatgggaca

SEQ ID NO: 166730 - DNA, 25 bp, Probe sequence
atgactgaacataatcatgattcac

SEQ ID NO: 166731 - DNA, 25 bp, Probe sequence
aggtgctcaatcagatgaagacgat

SEQ ID NO: 166732 - DNA, 25 bp, Probe sequence
agacgatatgattgagcttgtacca

SEQ ID NO: 166733 - DNA, 25 bp, Probe sequence
gagtcaggtgacggtggtaagttag

SEQ ID NO: 166734 - DNA, 25 bp, Probe sequence
accagatgagtcaggtgacggtggt

SEQ ID NO: 166735 - DNA, 25 bp, Probe sequence
aaaagagtatgttatcttagctgaa

SEQ ID NO: 166736 - DNA, 25 bp, Probe sequence
aagttttagaattttatcatcctga

SEQ ID NO: 166737 - DNA, 25 bp, Probe sequence
aattttatcatcctgaattcaaaaa

SEQ ID NO: 166738 - DNA, 25 bp, Probe sequence
cttagctgaagaaggtgctcaatca

SEQ ID NO: 166739 - DNA, 25 bp, Probe sequence
gcttgtaccaatgatcaatgaacca

SEQ ID NO: 166740 - DNA, 25 bp, Probe sequence
gaatgggacatgattgaagaagttg

SEQ ID NO: 166741 - DNA, 25 bp, Probe sequence
gaaggtgctcaatcagatgaagacg

SEQ ID NO: 166742 - DNA, 25 bp, Probe sequence
gaagaattattaactttattcgatg

SEQ ID NO: 166743 - DNA, 25 bp, Probe sequence
gaacataatcatgattcacaactag

SEQ ID NO: 166744 - DNA, 25 bp, Probe sequence
gacggtggtaagttagtaccaatcg

SEQ ID NO: 166745 - DNA, 25 bp, Probe sequence
gacgatatgattgagcttgtaccaa

SEQ ID NO: 166746 - DNA, 25 bp, Probe sequence
gagcttgtaccaatgatcaatgaac

SEQ ID NO: 166747 - DNA, 25 bp, Probe sequence
gagtatgttatcttagctgaagaag

SEQ ID NO: 166748 - DNA, 25 bp, Probe sequence
gatatgattgagcttgtaccaatga

SEQ ID NO: 166749 - DNA, 25 bp, Probe sequence
gttagtaccaatcgaaactgatgaa

SEQ ID NO: 166750 - DNA, 25 bp, Probe sequence
gttttagaattttatcatcctgaat

SEQ ID NO: 166751 - DNA, 25 bp, Probe sequence
gtaccaatgatcaatgaaccagatg

SEQ ID NO: 166752 - DNA, 25 bp, Probe sequence
gtaccaatcgaaactgatgaagaat

SEQ ID NO: 166753 - DNA, 25 bp, Probe sequence
gtgctcaatcagatgaagacgatat

SEQ ID NO: 166754 - DNA, 25 bp, Probe sequence
ggtaagttagtaccaatcgaaactg

SEQ ID NO: 166755 - DNA, 25 bp, Probe sequence
tcaggtgacggtggtaagttagtac

SEQ ID NO: 166756 - DNA, 25 bp, Probe sequence
tgattgagcttgtaccaatgatcaa

SEQ ID NO: 166757 - DNA, 25 bp, Probe sequence
tgatcaatgaaccagatgagtcagg

SEQ ID NO: 166758 - DNA, 25 bp, Probe sequence
tgaagagggaaatgaagttttatac

SEQ ID NO: 166759 - DNA, 25 bp, Probe sequence
tgaaccagatgagtcaggtgacggt

SEQ ID NO: 166760 - DNA, 25 bp, Probe sequence
taatcatgattcacaactagaaatt

SEQ ID NO: 166761 - DNA, 25 bp, Probe sequence
tatcatcctgaattcaaaaaagagt

SEQ ID NO: 166762 - DNA, 25 bp, Probe sequence
ttaactttattcgatgaagagggaa

SEQ ID NO: 166763 - DNA, 25 bp, Probe sequence
aaattttaggactcgatgtcggtag

SEQ ID NO: 166764 - DNA, 25 bp, Probe sequence
attagaagcagatgtttcaagacaa

SEQ ID NO: 166765 - DNA, 25 bp, Probe sequence
ataattcaataggatttcgaggcga

SEQ ID NO: 166766 - DNA, 25 bp, Probe sequence
atggctgctgaacgatcattattag

SEQ ID NO: 166767 - DNA, 25 bp, Probe sequence
aggactacctaaaaacatgaataat

SEQ ID NO: 166768 - DNA, 25 bp, Probe sequence
aggctatttagattcactacattaa

SEQ ID NO: 166769 - DNA, 25 bp, Probe sequence
aggattagacacactccgaatcaat

SEQ ID NO: 166770 - DNA, 25 bp, Probe sequence
agtgattgataaaatggcagcggta

SEQ ID NO: 166771 - DNA, 25 bp, Probe sequence
acaaggctatttagattcactacat

SEQ ID NO: 166772 - DNA, 25 bp, Probe sequence
aacataatgtgggtacagtcgtaat

SEQ ID NO: 166773 - DNA, 25 bp, Probe sequence
aagcttatccttctattgagattgt

SEQ ID NO: 166774 - DNA, 25 bp, Probe sequence
aatgggttggacggcacaaggatta

SEQ ID NO: 166775 - DNA, 25 bp, Probe sequence
cttctattgagattgtgatgtggga

SEQ ID NO: 166776 - DNA, 25 bp, Probe sequence
gcggtatttattttacaaggctatt

SEQ ID NO: 166777 - DNA, 25 bp, Probe sequence
gctgctgaacgatcattattagaag

SEQ ID NO: 166778 - DNA, 25 bp, Probe sequence
gcttatccttctattgagattgtga

SEQ ID NO: 166779 - DNA, 25 bp, Probe sequence
gcacaatggctgctgaacgatcatt

SEQ ID NO: 166780 - DNA, 25 bp, Probe sequence
gaaaaattattagaagcttatcctt

SEQ ID NO: 166781 - DNA, 25 bp, Probe sequence
gacacactccgaatcaatgaagaaa

SEQ ID NO: 166782 - DNA, 25 bp, Probe sequence
gactcgatgtcggtagtagaacggt

SEQ ID NO: 166783 - DNA, 25 bp, Probe sequence
gacggcacaaggattagacacactc

SEQ ID NO: 166784 - DNA, 25 bp, Probe sequence
gagattgtgatgtgggatgaaagat

SEQ ID NO: 166785 - DNA, 25 bp, Probe sequence
gatgtcggtagtagaacggtaggaa

SEQ ID NO: 166786 - DNA, 25 bp, Probe sequence
gattaagcacaatggctgctgaacg

SEQ ID NO: 166787 - DNA, 25 bp, Probe sequence
gtagaacggtaggaattgcaattag

SEQ ID NO: 166788 - DNA, 25 bp, Probe sequence
ggtacagtcgtaataggactaccta

SEQ ID NO: 166789 - DNA, 25 bp, Probe sequence
ggtattgaccaattagtagacatta

SEQ ID NO: 166790 - DNA, 25 bp, Probe sequence
ggatttcgaggcgaagcttcgttaa

SEQ ID NO: 166791 - DNA, 25 bp, Probe sequence
ggcagcggtatttattttacaaggc

SEQ ID NO: 166792 - DNA, 25 bp, Probe sequence
ggcacaaggattagacacactccga

SEQ ID NO: 166793 - DNA, 25 bp, Probe sequence
ggcgaagcttcgttaacatataaag

SEQ ID NO: 166794 - DNA, 25 bp, Probe sequence
tagtgatataatgggttggacggca

SEQ ID NO: 166795 - DNA, 25 bp, Probe sequence
ttagacacactccgaatcaatgaag

SEQ ID NO: 166796 - DNA, 25 bp, Probe sequence
ttcgaggcgaagcttcgttaacata

SEQ ID NO: 166797 - DNA, 25 bp, Probe sequence
attgtaggttatttattatcaggtg

SEQ ID NO: 166798 - DNA, 25 bp, Probe sequence
attatcaggtgaccctgcgtatatt

SEQ ID NO: 166799 - DNA, 25 bp, Probe sequence
atttattatcaggtgaccctgcgta

SEQ ID NO: 166800 - DNA, 25 bp, Probe sequence
atataatgccgtaaaccaaattgta

SEQ ID NO: 166801 - DNA, 25 bp, Probe sequence
ataatgccgtaaaccaaattgtagg

SEQ ID NO: 166802 - DNA, 25 bp, Probe sequence
atcaggtgaccctgcgtatattcca

SEQ ID NO: 166803 - DNA, 25 bp, Probe sequence
aggttatttattatcaggtgaccct

SEQ ID NO: 166804 - DNA, 25 bp, Probe sequence
aattcgactatgaagaacttccaac

SEQ ID NO: 166805 - DNA, 25 bp, Probe sequence
aattcgtcatattgatagagatgtt

SEQ ID NO: 166806 - DNA, 25 bp, Probe sequence
caaattcgtcatattgatagagatg

SEQ ID NO: 166807 - DNA, 25 bp, Probe sequence
cgaggatataatgccgtaaaccaaa

SEQ ID NO: 166808 - DNA, 25 bp, Probe sequence
gcaagaaatcaaattcgtcatattg

SEQ ID NO: 166809 - DNA, 25 bp, Probe sequence
gaagcaagaaatcaaattcgtcata

SEQ ID NO: 166810 - DNA, 25 bp, Probe sequence
gaacgaggatataatgccgtaaacc

SEQ ID NO: 166811 - DNA, 25 bp, Probe sequence
gaaattcgactatgaagaacttcca

SEQ ID NO: 166812 - DNA, 25 bp, Probe sequence
gaggatataatgccgtaaaccaaat

SEQ ID NO: 166813 - DNA, 25 bp, Probe sequence
gatgaacgaggatataatgccgtaa

SEQ ID NO: 166814 - DNA, 25 bp, Probe sequence
gataaaacaatgaaattcgactatg

SEQ ID NO: 166815 - DNA, 25 bp, Probe sequence
gttatttattatcaggtgaccctgc

SEQ ID NO: 166816 - DNA, 25 bp, Probe sequence
gtttatcgaacattagatgaacgag

SEQ ID NO: 166817 - DNA, 25 bp, Probe sequence
ggttatttattatcaggtgaccctg

SEQ ID NO: 166818 - DNA, 25 bp, Probe sequence
ggatataatgccgtaaaccaaattg

SEQ ID NO: 166819 - DNA, 25 bp, Probe sequence
tgtaggttatttattatcaggtgac

SEQ ID NO: 166820 - DNA, 25 bp, Probe sequence
tcaggtgaccctgcgtatattccac

SEQ ID NO: 166821 - DNA, 25 bp, Probe sequence
tgccgtaaaccaaattgtaggttat

SEQ ID NO: 166822 - DNA, 25 bp, Probe sequence
tcgtcatattgatagagatgttatt

SEQ ID NO: 166823 - DNA, 25 bp, Probe sequence
taatgccgtaaaccaaattgtaggt

SEQ ID NO: 166824 - DNA, 25 bp, Probe sequence
tatcaggtgaccctgcgtatattcc

SEQ ID NO: 166825 - DNA, 25 bp, Probe sequence
tatttattatcaggtgaccctgcgt

SEQ ID NO: 166826 - DNA, 25 bp, Probe sequence
tattatcaggtgaccctgcgtatat

SEQ ID NO: 166827 - DNA, 25 bp, Probe sequence
ttattatcaggtgaccctgcgtata

SEQ ID NO: 166828 - DNA, 25 bp, Probe sequence
tttattatcaggtgaccctgcgtat

SEQ ID NO: 166829 - DNA, 25 bp, Probe sequence
ttatcaggtgaccctgcgtatattc

SEQ ID NO: 166830 - DNA, 25 bp, Probe sequence
ttgtttcttactatttaaaagagca

SEQ ID NO: 166831 - DNA, 25 bp, Probe sequence
atatggtgatgttgtgcgtgtagta

SEQ ID NO: 166832 - DNA, 25 bp, Probe sequence
atatggcaccattttcaattgaatt

SEQ ID NO: 166833 - DNA, 25 bp, Probe sequence
atgtggtggtattcatgtccgcaat

SEQ ID NO: 166834 - DNA, 25 bp, Probe sequence
atgggcgcaatggcattattcggtg

SEQ ID NO: 166835 - DNA, 25 bp, Probe sequence
acgtcgattgttacgtcgtgccgtt

SEQ ID NO: 166836 - DNA, 25 bp, Probe sequence
agtatcgatggttgcaactgtccct

SEQ ID NO: 166837 - DNA, 25 bp, Probe sequence
agatcatagttacacaccattacct

SEQ ID NO: 166838 - DNA, 25 bp, Probe sequence
acatctgcaagtacttttgttggtt

SEQ ID NO: 166839 - DNA, 25 bp, Probe sequence
acactgagattttctatgatcgcgg

SEQ ID NO: 166840 - DNA, 25 bp, Probe sequence
aaaggtggcggtcgtccagatatgg

SEQ ID NO: 166841 - DNA, 25 bp, Probe sequence
aaaatgttggtttcacagcgcgtca

SEQ ID NO: 166842 - DNA, 25 bp, Probe sequence
caacgtgatcgtgcacgtcaagcac

SEQ ID NO: 166843 - DNA, 25 bp, Probe sequence
cgaaagcaattcgctcgacaatgga

SEQ ID NO: 166844 - DNA, 25 bp, Probe sequence
gcatggggcttgagcgtatggcctc

SEQ ID NO: 166845 - DNA, 25 bp, Probe sequence
gcgcgtcaccatacattctttgaaa

SEQ ID NO: 166846 - DNA, 25 bp, Probe sequence
gcatatggacaagacgatccggcag

SEQ ID NO: 166847 - DNA, 25 bp, Probe sequence
gcaacacatttattacatgcagcgt

SEQ ID NO: 166848 - DNA, 25 bp, Probe sequence
gatcgtttacgttttgatttctctc

SEQ ID NO: 166849 - DNA, 25 bp, Probe sequence
gatatggctcaaggtggcggtacac

SEQ ID NO: 166850 - DNA, 25 bp, Probe sequence
gttgaaccttctgcaccattagtgc

SEQ ID NO: 166851 - DNA, 25 bp, Probe sequence
gttaggtaacttctcaattggtgat

SEQ ID NO: 166852 - DNA, 25 bp, Probe sequence
gttggttatgatactgcgacagctc

SEQ ID NO: 166853 - DNA, 25 bp, Probe sequence
gttgcaactgtccctaaatctttaa

SEQ ID NO: 166854 - DNA, 25 bp, Probe sequence
gtatggcctcagtttctcaaaatgt

SEQ ID NO: 166855 - DNA, 25 bp, Probe sequence
gtacaggagctggtgtgcgtcgtat

SEQ ID NO: 166856 - DNA, 25 bp, Probe sequence
gtcaagcacgtcaaaattctcaatc

SEQ ID NO: 166857 - DNA, 25 bp, Probe sequence
gggtgatcatgttaaccaagctggt

SEQ ID NO: 166858 - DNA, 25 bp, Probe sequence
tgtacgttacgattcatccggaaga

SEQ ID NO: 166859 - DNA, 25 bp, Probe sequence
tgttggcgctacagtgtctgctgaa

SEQ ID NO: 166860 - DNA, 25 bp, Probe sequence
tcgtgccgttcgttttagtcaaacg

SEQ ID NO: 166861 - DNA, 25 bp, Probe sequence
tcatgtccgcaatacttctgaaatt

SEQ ID NO: 166862 - DNA, 25 bp, Probe sequence
ttctgatggtgcattacctgccaat

SEQ ID NO: 166863 - DNA, 25 bp, Probe sequence
ttgctgaccacattcgtacgattgc

SEQ ID NO: 166864 - DNA, 25 bp, Probe sequence
ttgatttctctcattttggtccaat

SEQ ID NO: 166865 - DNA, 25 bp, Probe sequence
atgctgagattcatggcttatcatt

SEQ ID NO: 166866 - DNA, 25 bp, Probe sequence
atgtcagaccctacactatttgatt

SEQ ID NO: 166867 - DNA, 25 bp, Probe sequence
atggctgatattcaagtgcttgcac

SEQ ID NO: 166868 - DNA, 25 bp, Probe sequence
agactttgatacaatgccaactgtt

SEQ ID NO: 166869 - DNA, 25 bp, Probe sequence
actgtcaggcaaaccaaataccaac

SEQ ID NO: 166870 - DNA, 25 bp, Probe sequence
aaagctgcgttgctctatacgttag

SEQ ID NO: 166871 - DNA, 25 bp, Probe sequence
aacgcacgactcataatcattgatg

SEQ ID NO: 166872 - DNA, 25 bp, Probe sequence
aaggtactgttgaagcgatattgtt

SEQ ID NO: 166873 - DNA, 25 bp, Probe sequence
aatggtcaagcgcgtttaacacaat

SEQ ID NO: 166874 - DNA, 25 bp, Probe sequence
aatggcaatttatcagttttatctc

SEQ ID NO: 166875 - DNA, 25 bp, Probe sequence
caagttgcaattccaagtttgtatt

SEQ ID NO: 166876 - DNA, 25 bp, Probe sequence
cagttcctttagatgcacaattgat

SEQ ID NO: 166877 - DNA, 25 bp, Probe sequence
cgaatcaagtgaactatgcagcttc

SEQ ID NO: 166878 - DNA, 25 bp, Probe sequence
gccaactgttgtagggtttcttccg

SEQ ID NO: 166879 - DNA, 25 bp, Probe sequence
gccttctgtaggtcctggtcaagta

SEQ ID NO: 166880 - DNA, 25 bp, Probe sequence
gaatttcctattgttatcatgccta

SEQ ID NO: 166881 - DNA, 25 bp, Probe sequence
gaagctttgcaaacggctatcaatt

SEQ ID NO: 166882 - DNA, 25 bp, Probe sequence
gacgattcatcgtttaataggttgg

SEQ ID NO: 166883 - DNA, 25 bp, Probe sequence
gagtttggtgatgtagtctttagaa

SEQ ID NO: 166884 - DNA, 25 bp, Probe sequence
gatgaggaccaattgccttctgtag

SEQ ID NO: 166885 - DNA, 25 bp, Probe sequence
gatgattatccagttgtattagcag

SEQ ID NO: 166886 - DNA, 25 bp, Probe sequence
gattcgtttacatgatttagggttt

SEQ ID NO: 166887 - DNA, 25 bp, Probe sequence
gatattacacagcgttttcatgata

SEQ ID NO: 166888 - DNA, 25 bp, Probe sequence
gttatcatgcctattgttaaacagt

SEQ ID NO: 166889 - DNA, 25 bp, Probe sequence
gtattagcagcgccaacaggaagag

SEQ ID NO: 166890 - DNA, 25 bp, Probe sequence
gtgatgctattaaccggtggaccgg

SEQ ID NO: 166891 - DNA, 25 bp, Probe sequence
gtagggtttcttccgaatattgttg

SEQ ID NO: 166892 - DNA, 25 bp, Probe sequence
gtagaagcgccaatgtcatcgaatg

SEQ ID NO: 166893 - DNA, 25 bp, Probe sequence
gggagaaatcacgccgtatgacttt

SEQ ID NO: 166894 - DNA, 25 bp, Probe sequence
gggcaagttgttgatcatccacgtt

SEQ ID NO: 166895 - DNA, 25 bp, Probe sequence
gggacatacatatttgcctatcaat

SEQ ID NO: 166896 - DNA, 25 bp, Probe sequence
tggtcctaaactttcaatggcaatt

SEQ ID NO: 166897 - DNA, 25 bp, Probe sequence
tcaatccataaatcacaaggttcag

SEQ ID NO: 166898 - DNA, 25 bp, Probe sequence
ttgttgaaggcgatgtctacacatt

SEQ ID NO: 166899 - DNA, 25 bp, Probe sequence
attatatcaacaagcattacaaaca

SEQ ID NO: 166900 - DNA, 25 bp, Probe sequence
atagatccgaagaatggcgtcgtat

SEQ ID NO: 166901 - DNA, 25 bp, Probe sequence
atcggtatggcgtttaatcagttag

SEQ ID NO: 166902 - DNA, 25 bp, Probe sequence
agaagaagcgttacaagcattgttc

SEQ ID NO: 166903 - DNA, 25 bp, Probe sequence
agctgtgactatcgaccctaaacac

SEQ ID NO: 166904 - DNA, 25 bp, Probe sequence
agctggcattgccgtatttaatgac

SEQ ID NO: 166905 - DNA, 25 bp, Probe sequence
acacttattaagtcagcatgcgctg

SEQ ID NO: 166906 - DNA, 25 bp, Probe sequence
aaatcatgttgatgcaagatacaat

SEQ ID NO: 166907 - DNA, 25 bp, Probe sequence
aaagaagctgtgactatcgacccta

SEQ ID NO: 166908 - DNA, 25 bp, Probe sequence
aacagagattgaacaagttgattgt

SEQ ID NO: 166909 - DNA, 25 bp, Probe sequence
aactcaacttaaacatgtattaacg

SEQ ID NO: 166910 - DNA, 25 bp, Probe sequence
aagacaaagatgcagaagttcaatt

SEQ ID NO: 166911 - DNA, 25 bp, Probe sequence
aatgtatattataatcagcaacgtt

SEQ ID NO: 166912 - DNA, 25 bp, Probe sequence
caaaaagctttaacaatagatccga

SEQ ID NO: 166913 - DNA, 25 bp, Probe sequence
cagcatgcgctgaaaacattcacta

SEQ ID NO: 166914 - DNA, 25 bp, Probe sequence
cattgccgtatttaatgactgctgc

SEQ ID NO: 166915 - DNA, 25 bp, Probe sequence
gcgaatgagattgaaaaggcagagc

SEQ ID NO: 166916 - DNA, 25 bp, Probe sequence
gcatgcgctgaaaacattcactaaa

SEQ ID NO: 166917 - DNA, 25 bp, Probe sequence
gaatcatttaagctggcattgccgt

SEQ ID NO: 166918 - DNA, 25 bp, Probe sequence
gaagttcaatttcaatatggtcttg

SEQ ID NO: 166919 - DNA, 25 bp, Probe sequence
gaagcgttacaagcattgttcggaa

SEQ ID NO: 166920 - DNA, 25 bp, Probe sequence
gaagccataactcaacttaaacatg

SEQ ID NO: 166921 - DNA, 25 bp, Probe sequence
gatccgaagaatggcgtcgtatttt

SEQ ID NO: 166922 - DNA, 25 bp, Probe sequence
gtttaatgaagccataactcaactt

SEQ ID NO: 166923 - DNA, 25 bp, Probe sequence
gtatggcgtttaatcagttagaatc

SEQ ID NO: 166924 - DNA, 25 bp, Probe sequence
gtacttgctgatgcgaatgagattg

SEQ ID NO: 166925 - DNA, 25 bp, Probe sequence
gtaattatatgatcggtatggcgtt

SEQ ID NO: 166926 - DNA, 25 bp, Probe sequence
ggcgtttaatcagttagaatcattt

SEQ ID NO: 166927 - DNA, 25 bp, Probe sequence
tgactatcgaccctaaacacttatt

SEQ ID NO: 166928 - DNA, 25 bp, Probe sequence
tcaacaagcattacaaacagagatt

SEQ ID NO: 166929 - DNA, 25 bp, Probe sequence
tacaagcattgttcggaaatatcga

SEQ ID NO: 166930 - DNA, 25 bp, Probe sequence
tatcgaccctaaacacttattaagt

SEQ ID NO: 166931 - DNA, 25 bp, Probe sequence
tatggtcttgtattatgtcaattag

SEQ ID NO: 166932 - DNA, 25 bp, Probe sequence
ttataatcagcaacgttatcaagaa

SEQ ID NO: 166933 - DNA, 25 bp, Probe sequence
atcaaggtgatgtgtgtcttggtgg

SEQ ID NO: 166934 - DNA, 25 bp, Probe sequence
agagcaatcacacctggacaagcag

SEQ ID NO: 166935 - DNA, 25 bp, Probe sequence
acgtgttgtcgttggtatgtcaggc

SEQ ID NO: 166936 - DNA, 25 bp, Probe sequence
actgcaactgaagattacaacgatg

SEQ ID NO: 166937 - DNA, 25 bp, Probe sequence
acacctggacaagcagttgtttttt

SEQ ID NO: 166938 - DNA, 25 bp, Probe sequence
aaagtctttacgtatttcttagatg

SEQ ID NO: 166939 - DNA, 25 bp, Probe sequence
aaaagtgatgttcccaattggcgac

SEQ ID NO: 166940 - DNA, 25 bp, Probe sequence
aacgaccatgcactacgtgttactt

SEQ ID NO: 166941 - DNA, 25 bp, Probe sequence
aagtgtgtaatcaaattggcattcc

SEQ ID NO: 166942 - DNA, 25 bp, Probe sequence
aaggttatgatgtcattggcatatt

SEQ ID NO: 166943 - DNA, 25 bp, Probe sequence
cattacgcacgcatacatcgtcatg

SEQ ID NO: 166944 - DNA, 25 bp, Probe sequence
ctacgtgttacttttgctgagccag

SEQ ID NO: 166945 - DNA, 25 bp, Probe sequence
cgaaaatggcgtatgtactgcaact

SEQ ID NO: 166946 - DNA, 25 bp, Probe sequence
cgcacgcatacatcgtcatgaagat

SEQ ID NO: 166947 - DNA, 25 bp, Probe sequence
gcgatccttggtttgttgtcggtaa

SEQ ID NO: 166948 - DNA, 25 bp, Probe sequence
gctgagccagtaagagcaatcacac

SEQ ID NO: 166949 - DNA, 25 bp, Probe sequence
gcttcagactattcatttgtaaatc

SEQ ID NO: 166950 - DNA, 25 bp, Probe sequence
gaagtgcgtcgaattgctgaagaac

SEQ ID NO: 166951 - DNA, 25 bp, Probe sequence
gaacaaggattccatcacgatgcat

SEQ ID NO: 166952 - DNA, 25 bp, Probe sequence
gaaaaactgggatgacactgacgaa

SEQ ID NO: 166953 - DNA, 25 bp, Probe sequence
gatggtcatgttgaaatgttacgtg

SEQ ID NO: 166954 - DNA, 25 bp, Probe sequence
gatcatgcgatgaatttaggtgcag

SEQ ID NO: 166955 - DNA, 25 bp, Probe sequence
gatcaaacatacttcttgaatcaat

SEQ ID NO: 166956 - DNA, 25 bp, Probe sequence
gtcgttggtatgtcaggcggtgtag

SEQ ID NO: 166957 - DNA, 25 bp, Probe sequence
gtgaaacgtgaaaacgaccatgcac

SEQ ID NO: 166958 - DNA, 25 bp, Probe sequence
ggtggagatggcgatccttggtttg

SEQ ID NO: 166959 - DNA, 25 bp, Probe sequence
ggcggtgtagatagttctgtaacag

SEQ ID NO: 166960 - DNA, 25 bp, Probe sequence
tgttcccaattggcgacatcgaaaa

SEQ ID NO: 166961 - DNA, 25 bp, Probe sequence
tcaaggttttgaatgtacagctaaa

SEQ ID NO: 166962 - DNA, 25 bp, Probe sequence
taaagcctttttagatcatgcgatg

SEQ ID NO: 166963 - DNA, 25 bp, Probe sequence
tacttaattgcttcagactattcat

SEQ ID NO: 166964 - DNA, 25 bp, Probe sequence
taggtgcagattatgtagcaacagg

SEQ ID NO: 166965 - DNA, 25 bp, Probe sequence
ttctgtaacagcccacgtcttaaaa

SEQ ID NO: 166966 - DNA, 25 bp, Probe sequence
ttccatcacgatgcattatacagtg

SEQ ID NO: 166967 - DNA, 25 bp, Probe sequence
atgctaagggaagagatgcgcgtaa

SEQ ID NO: 166968 - DNA, 25 bp, Probe sequence
agacgattttagtatctattatgtt

SEQ ID NO: 166969 - DNA, 25 bp, Probe sequence
acatcgaagattgaacatcattctg

SEQ ID NO: 166970 - DNA, 25 bp, Probe sequence
acaattcgcattatggtaatccatc

SEQ ID NO: 166971 - DNA, 25 bp, Probe sequence
aaatctatgtgtcgtctggatctgc

SEQ ID NO: 166972 - DNA, 25 bp, Probe sequence
aacctgaagtagtagatgcgatgat

SEQ ID NO: 166973 - DNA, 25 bp, Probe sequence
caattacttggtgcagatacacatg

SEQ ID NO: 166974 - DNA, 25 bp, Probe sequence
caagaaagagcgattccatttgaat

SEQ ID NO: 166975 - DNA, 25 bp, Probe sequence
catcattctgtgttacatgtttttg

SEQ ID NO: 166976 - DNA, 25 bp, Probe sequence
catatttccatgttgatgcggttca

SEQ ID NO: 166977 - DNA, 25 bp, Probe sequence
cattcgattcgatttagttttaacg

SEQ ID NO: 166978 - DNA, 25 bp, Probe sequence
gcgaccacaccagtaaaacctgaag

SEQ ID NO: 166979 - DNA, 25 bp, Probe sequence
gctgagacaaatgcatatttccatg

SEQ ID NO: 166980 - DNA, 25 bp, Probe sequence
gcatgtacagcaggctctacacaac

SEQ ID NO: 166981 - DNA, 25 bp, Probe sequence
gcagattatgctgcgaccacaccag

SEQ ID NO: 166982 - DNA, 25 bp, Probe sequence
gaacaagaattgaaacgccgtgcag

SEQ ID NO: 166983 - DNA, 25 bp, Probe sequence
gacatcttgatgttaagtttgacga

SEQ ID NO: 166984 - DNA, 25 bp, Probe sequence
gacggatgctacaggccatattgta

SEQ ID NO: 166985 - DNA, 25 bp, Probe sequence
gagcgatcaaatcattcgattcgat

SEQ ID NO: 166986 - DNA, 25 bp, Probe sequence
gagatcgacgcaatgagtattactg

SEQ ID NO: 166987 - DNA, 25 bp, Probe sequence
gagtcaagacgtcaaattgcacaat

SEQ ID NO: 166988 - DNA, 25 bp, Probe sequence
gatgatacaggtgctattgatttag

SEQ ID NO: 166989 - DNA, 25 bp, Probe sequence
gattatcctcaacttggcggtgaac

SEQ ID NO: 166990 - DNA, 25 bp, Probe sequence
gttttagatgcaatgttcgaagatg

SEQ ID NO: 166991 - DNA, 25 bp, Probe sequence
gtttgacgaatttgagatcgacgca

SEQ ID NO: 166992 - DNA, 25 bp, Probe sequence
gtcgtctggatctgcatgtacagca

SEQ ID NO: 166993 - DNA, 25 bp, Probe sequence
ggtaatcacattatcacatcgaaga

SEQ ID NO: 166994 - DNA, 25 bp, Probe sequence
ggtaatccatcatcaatacatgcta

SEQ ID NO: 166995 - DNA, 25 bp, Probe sequence
ggttcaatgacggatgctacaggcc

SEQ ID NO: 166996 - DNA, 25 bp, Probe sequence
ggcacagtgcaacaaatttatgata

SEQ ID NO: 166997 - DNA, 25 bp, Probe sequence
tgttggatatggcacaaatctatgt

SEQ ID NO: 166998 - DNA, 25 bp, Probe sequence
tgcggttcaagcaattggacatctt

SEQ ID NO: 166999 - DNA, 25 bp, Probe sequence
tctacacaaccgtcgcatgttttag

SEQ ID NO: 167000 - DNA, 25 bp, Probe sequence
taaatctatattttccgtttgttga

SEQ ID NO: 167001 - DNA, 25 bp, Probe sequence
attagaaaaagaaggtcagcaagat

SEQ ID NO: 167002 - DNA, 25 bp, Probe sequence
ataactgatgcaattgataaactta

SEQ ID NO: 167003 - DNA, 25 bp, Probe sequence
agacgaaagtaagttcgatcaattt

SEQ ID NO: 167004 - DNA, 25 bp, Probe sequence
agaaaaagaaggtcagcaagataaa

SEQ ID NO: 167005 - DNA, 25 bp, Probe sequence
actgatgcaattgataaacttaaaa

SEQ ID NO: 167006 - DNA, 25 bp, Probe sequence
acagtaggtaacgttactgataaca

SEQ ID NO: 167007 - DNA, 25 bp, Probe sequence
acaaaataactgatgcaattgataa

SEQ ID NO: 167008 - DNA, 25 bp, Probe sequence
aaataactgatgcaattgataaact

SEQ ID NO: 167009 - DNA, 25 bp, Probe sequence
aaacaaaataactgatgcaattgat

SEQ ID NO: 167010 - DNA, 25 bp, Probe sequence
aaaataactgatgcaattgataaac

SEQ ID NO: 167011 - DNA, 25 bp, Probe sequence
aacaaaataactgatgcaattgata

SEQ ID NO: 167012 - DNA, 25 bp, Probe sequence
aactgatgcaattgataaacttaaa

SEQ ID NO: 167013 - DNA, 25 bp, Probe sequence
aacgttactgataacaaagaattag

SEQ ID NO: 167014 - DNA, 25 bp, Probe sequence
aataactgatgcaattgataaactt

SEQ ID NO: 167015 - DNA, 25 bp, Probe sequence
caaaagaagttgttgaaaatgctaa

SEQ ID NO: 167016 - DNA, 25 bp, Probe sequence
caaaataactgatgcaattgataaa

SEQ ID NO: 167017 - DNA, 25 bp, Probe sequence
cagacgaaagtaagttcgatcaatt

SEQ ID NO: 167018 - DNA, 25 bp, Probe sequence
cagtaggtaacgttactgataacaa

SEQ ID NO: 167019 - DNA, 25 bp, Probe sequence
ctgatgcaattgataaacttaaaaa

SEQ ID NO: 167020 - DNA, 25 bp, Probe sequence
gctaaaaacaaaataactgatgcaa

SEQ ID NO: 167021 - DNA, 25 bp, Probe sequence
gcagacgaaagtaagttcgatcaat

SEQ ID NO: 167022 - DNA, 25 bp, Probe sequence
gaattagaaaaagaaggtcagcaag

SEQ ID NO: 167023 - DNA, 25 bp, Probe sequence
gaaaaagaaggtcagcaagataaag

SEQ ID NO: 167024 - DNA, 25 bp, Probe sequence
gaaagtaagttcgatcaatttaaag

SEQ ID NO: 167025 - DNA, 25 bp, Probe sequence
gacgaaagtaagttcgatcaattta

SEQ ID NO: 167026 - DNA, 25 bp, Probe sequence
gatgcaattgataaacttaaaaaat

SEQ ID NO: 167027 - DNA, 25 bp, Probe sequence
gtaggtaacgttactgataacaaag

SEQ ID NO: 167028 - DNA, 25 bp, Probe sequence
gtaacgttactgataacaaagaatt

SEQ ID NO: 167029 - DNA, 25 bp, Probe sequence
ggtaacgttactgataacaaagaat

SEQ ID NO: 167030 - DNA, 25 bp, Probe sequence
ggcagacgaaagtaagttcgatcaa

SEQ ID NO: 167031 - DNA, 25 bp, Probe sequence
taacgttactgataacaaagaatta

SEQ ID NO: 167032 - DNA, 25 bp, Probe sequence
taactgatgcaattgataaacttaa

SEQ ID NO: 167033 - DNA, 25 bp, Probe sequence
tagaaaaagaaggtcagcaagataa

SEQ ID NO: 167034 - DNA, 25 bp, Probe sequence
taggtaacgttactgataacaaaga

SEQ ID NO: 167035 - DNA, 25 bp, Probe sequence
attacttcttaaacatcattcctga

SEQ ID NO: 167036 - DNA, 25 bp, Probe sequence
attattcattttacctaaccatcct

SEQ ID NO: 167037 - DNA, 25 bp, Probe sequence
atatgacataatgacggaggacatc

SEQ ID NO: 167038 - DNA, 25 bp, Probe sequence
atcattcctgaattaatcggtgtat

SEQ ID NO: 167039 - DNA, 25 bp, Probe sequence
atctatattacttatctttttctgt

SEQ ID NO: 167040 - DNA, 25 bp, Probe sequence
aaaatactttatgttgtcaaaatca

SEQ ID NO: 167041 - DNA, 25 bp, Probe sequence
aatctttgcttatatcatgttattt

SEQ ID NO: 167042 - DNA, 25 bp, Probe sequence
aatcaacgcttatacatatgacata

SEQ ID NO: 167043 - DNA, 25 bp, Probe sequence
cacgttttaatttatgtattggctg

SEQ ID NO: 167044 - DNA, 25 bp, Probe sequence
cacgcaacatatacaactattttat

SEQ ID NO: 167045 - DNA, 25 bp, Probe sequence
cacccaaattacttcttaaacatca

SEQ ID NO: 167046 - DNA, 25 bp, Probe sequence
ctattttattagtaccgtatgcgta

SEQ ID NO: 167047 - DNA, 25 bp, Probe sequence
cctaaccatcctattattaaatctg

SEQ ID NO: 167048 - DNA, 25 bp, Probe sequence
gctggtgtagaggcatttattaata

SEQ ID NO: 167049 - DNA, 25 bp, Probe sequence
gctttgcaaatggtattggcttagt

SEQ ID NO: 167050 - DNA, 25 bp, Probe sequence
gcagacggtgcagttgaatatggcg

SEQ ID NO: 167051 - DNA, 25 bp, Probe sequence
gaagtttttagcaataacacacgtt

SEQ ID NO: 167052 - DNA, 25 bp, Probe sequence
gacttgtcagcttaaagatatctat

SEQ ID NO: 167053 - DNA, 25 bp, Probe sequence
gacggaggacatcatgattctatct

SEQ ID NO: 167054 - DNA, 25 bp, Probe sequence
gatatctattaatcactcaaaacaa

SEQ ID NO: 167055 - DNA, 25 bp, Probe sequence
gtattggctggtgtagaggcattta

SEQ ID NO: 167056 - DNA, 25 bp, Probe sequence
gtatttcttatatgtacgtattaaa

SEQ ID NO: 167057 - DNA, 25 bp, Probe sequence
gtattattattaacacacgcaacat

SEQ ID NO: 167058 - DNA, 25 bp, Probe sequence
gtaccgtatgcgtatttcttatatg

SEQ ID NO: 167059 - DNA, 25 bp, Probe sequence
gtcaaaatcaacgcttatacatatg

SEQ ID NO: 167060 - DNA, 25 bp, Probe sequence
ggtgcagttgaatatggcgttaaaa

SEQ ID NO: 167061 - DNA, 25 bp, Probe sequence
ggacatcatgattctatctatatta

SEQ ID NO: 167062 - DNA, 25 bp, Probe sequence
ggcttagttatattaatctttgctt

SEQ ID NO: 167063 - DNA, 25 bp, Probe sequence
tcattttacctaaccatcctattat

SEQ ID NO: 167064 - DNA, 25 bp, Probe sequence
taacacacgcaacatatacaactat

SEQ ID NO: 167065 - DNA, 25 bp, Probe sequence
taaagatacatttagctttgcaaat

SEQ ID NO: 167066 - DNA, 25 bp, Probe sequence
tacttatctttttctgtatcagact

SEQ ID NO: 167067 - DNA, 25 bp, Probe sequence
ttaggtggtatttggacattaaaat

SEQ ID NO: 167068 - DNA, 25 bp, Probe sequence
ttctgtatcagacttgtcagcttaa

SEQ ID NO: 167069 - DNA, 25 bp, Probe sequence
atgcggggttaattcgaagtgtacg

SEQ ID NO: 167070 - DNA, 25 bp, Probe sequence
attgatgatttctcttgctaaaaaa

SEQ ID NO: 167071 - DNA, 25 bp, Probe sequence
attgaatcagaaccacctgcgcaaa

SEQ ID NO: 167072 - DNA, 25 bp, Probe sequence
atctcagcaggggatattataagac

SEQ ID NO: 167073 - DNA, 25 bp, Probe sequence
acaacattgaaatatttagcggaat

SEQ ID NO: 167074 - DNA, 25 bp, Probe sequence
acaactatggattcgcatgagagat

SEQ ID NO: 167075 - DNA, 25 bp, Probe sequence
aaagaggggcaaggatgtatatcat

SEQ ID NO: 167076 - DNA, 25 bp, Probe sequence
aaccacctgcgcaaaaacaactatg

SEQ ID NO: 167077 - DNA, 25 bp, Probe sequence
aagggagatatggacttacattgat

SEQ ID NO: 167078 - DNA, 25 bp, Probe sequence
aattcgaagtgtacgcggtgctaaa

SEQ ID NO: 167079 - DNA, 25 bp, Probe sequence
cacctgcgcaaaaacaactatggat

SEQ ID NO: 167080 - DNA, 25 bp, Probe sequence
cagaaccacctgcgcaaaaacaact

SEQ ID NO: 167081 - DNA, 25 bp, Probe sequence
ccagcggaagaaatctcagcagggg

SEQ ID NO: 167082 - DNA, 25 bp, Probe sequence
gcggtgctaaaggtggataccaatt

SEQ ID NO: 167083 - DNA, 25 bp, Probe sequence
gaatcagaaccacctgcgcaaaaac

SEQ ID NO: 167084 - DNA, 25 bp, Probe sequence
gaagtgtacgcggtgctaaaggtgg

SEQ ID NO: 167085 - DNA, 25 bp, Probe sequence
gaaggtccaattacatttgttgaaa

SEQ ID NO: 167086 - DNA, 25 bp, Probe sequence
gaagatttagacggatacatgtttt

SEQ ID NO: 167087 - DNA, 25 bp, Probe sequence
gaacagcttgtaggtcctttaagaa

SEQ ID NO: 167088 - DNA, 25 bp, Probe sequence
gaaaatttctactaaagggagatat

SEQ ID NO: 167089 - DNA, 25 bp, Probe sequence
gacttacattgatgatttctcttgc

SEQ ID NO: 167090 - DNA, 25 bp, Probe sequence
gagtgatttatatttagaacagctt

SEQ ID NO: 167091 - DNA, 25 bp, Probe sequence
gtattgaatcagaaccacctgcgca

SEQ ID NO: 167092 - DNA, 25 bp, Probe sequence
gtacgcggtgctaaaggtggatacc

SEQ ID NO: 167093 - DNA, 25 bp, Probe sequence
ggtccaattacatttgttgaaagta

SEQ ID NO: 167094 - DNA, 25 bp, Probe sequence
ggttaattcgaagtgtacgcggtgc

SEQ ID NO: 167095 - DNA, 25 bp, Probe sequence
ggattcgcatgagagatgcagtgag

SEQ ID NO: 167096 - DNA, 25 bp, Probe sequence
ggaagaaatctcagcaggggatatt

SEQ ID NO: 167097 - DNA, 25 bp, Probe sequence
tgtaggtcctttaagaaatgcgggg

SEQ ID NO: 167098 - DNA, 25 bp, Probe sequence
tgtatatcattaaagtcaattgctg

SEQ ID NO: 167099 - DNA, 25 bp, Probe sequence
tgcagtgagagatgttttagataat

SEQ ID NO: 167100 - DNA, 25 bp, Probe sequence
tacattgatgatttctcttgctaaa

SEQ ID NO: 167101 - DNA, 25 bp, Probe sequence
tagacggatacatgttttatattta

SEQ ID NO: 167102 - DNA, 25 bp, Probe sequence
ttagaacagcttgtaggtcctttaa

SEQ ID NO: 167103 - DNA, 25 bp, Probe sequence
atggccaaaattattcgtcaaaaat

SEQ ID NO: 167104 - DNA, 25 bp, Probe sequence
agttatgtggtgaatgacgtattaa

SEQ ID NO: 167105 - DNA, 25 bp, Probe sequence
acttggcgttggaggtgttggttca

SEQ ID NO: 167106 - DNA, 25 bp, Probe sequence
acaaatgccaccttcttcaaatgcc

SEQ ID NO: 167107 - DNA, 25 bp, Probe sequence
aaacagacaattacacgctttaact

SEQ ID NO: 167108 - DNA, 25 bp, Probe sequence
aaaagatattccagttcgtcgcatt

SEQ ID NO: 167109 - DNA, 25 bp, Probe sequence
aaaatgctatcaatcgaaaaggaca

SEQ ID NO: 167110 - DNA, 25 bp, Probe sequence
aacacataccgatccaatggccaaa

SEQ ID NO: 167111 - DNA, 25 bp, Probe sequence
aacagatccaacacgttttacaatt

SEQ ID NO: 167112 - DNA, 25 bp, Probe sequence
caagaaatgaactagcgattggaca

SEQ ID NO: 167113 - DNA, 25 bp, Probe sequence
gaattcgtaaagggattccagttgt

SEQ ID NO: 167114 - DNA, 25 bp, Probe sequence
gaaaaggacaaatgccaccttcttc

SEQ ID NO: 167115 - DNA, 25 bp, Probe sequence
caaactgttgtcatacttggcgttg

SEQ ID NO: 167116 - DNA, 25 bp, Probe sequence
caccttcttcaaatgcctttgtgcc

SEQ ID NO: 167117 - DNA, 25 bp, Probe sequence
cacgttttacaatttcagatatctc

SEQ ID NO: 167118 - DNA, 25 bp, Probe sequence
cagatatctctaaaacacataccga

SEQ ID NO: 167119 - DNA, 25 bp, Probe sequence
cttcaaatgcctttgtgccaagtgt

SEQ ID NO: 167120 - DNA, 25 bp, Probe sequence
gaaagagtgtcttgaccgagggatt

SEQ ID NO: 167121 - DNA, 25 bp, Probe sequence
gaaagtccaattgtcataagagaag

SEQ ID NO: 167122 - DNA, 25 bp, Probe sequence
gaccgagggattaaagtgatttcca

SEQ ID NO: 167123 - DNA, 25 bp, Probe sequence
gatccaatggccaaaattattcgtc

SEQ ID NO: 167124 - DNA, 25 bp, Probe sequence
gatatagattattttgtagatgcaa

SEQ ID NO: 167125 - DNA, 25 bp, Probe sequence
gatattccagttcgtcgcattaaag

SEQ ID NO: 167126 - DNA, 25 bp, Probe sequence
gatttattgaagcaacaaactgttg

SEQ ID NO: 167127 - DNA, 25 bp, Probe sequence
gttgtcatacttggcgttggaggtg

SEQ ID NO: 167128 - DNA, 25 bp, Probe sequence
gttcgtcgcattaaagacaaagggc

SEQ ID NO: 167129 - DNA, 25 bp, Probe sequence
gtgatttccagtatgggtgctgcaa

SEQ ID NO: 167130 - DNA, 25 bp, Probe sequence
gggattccagttgtattttcagatg

SEQ ID NO: 167131 - DNA, 25 bp, Probe sequence
gggtgctgcaaataaaacagatcca

SEQ ID NO: 167132 - DNA, 25 bp, Probe sequence
tacacgctttaactacaacggtagg

SEQ ID NO: 167133 - DNA, 25 bp, Probe sequence
tagcaagaacgaatattggtcatat

SEQ ID NO: 167134 - DNA, 25 bp, Probe sequence
ttttcagatgaaagtccaattgtca

SEQ ID NO: 167135 - DNA, 25 bp, Probe sequence
ttaatccagattgtaaagtcacgcc

SEQ ID NO: 167136 - DNA, 25 bp, Probe sequence
ttggaggtgttggttcatttgctgc

SEQ ID NO: 167137 - DNA, 25 bp, Probe sequence
attttaagttactatgtacttatgt

SEQ ID NO: 167138 - DNA, 25 bp, Probe sequence
atagcgtttaataaatgtttcctcg

SEQ ID NO: 167139 - DNA, 25 bp, Probe sequence
ataaatgtttcctcgttgaattttg

SEQ ID NO: 167140 - DNA, 25 bp, Probe sequence
atgtacttatgtataaatcagtgaa

SEQ ID NO: 167141 - DNA, 25 bp, Probe sequence
agttactatgtacttatgtataaat

SEQ ID NO: 167142 - DNA, 25 bp, Probe sequence
actatgtacttatgtataaatcagt

SEQ ID NO: 167143 - DNA, 25 bp, Probe sequence
acttatgtataaatcagtgaaagag

SEQ ID NO: 167144 - DNA, 25 bp, Probe sequence
aagttactatgtacttatgtataaa

SEQ ID NO: 167145 - DNA, 25 bp, Probe sequence
aattttaagttactatgtacttatg

SEQ ID NO: 167146 - DNA, 25 bp, Probe sequence
cttatgtataaatcagtgaaagagg

SEQ ID NO: 167147 - DNA, 25 bp, Probe sequence
ctatgtacttatgtataaatcagtg

SEQ ID NO: 167148 - DNA, 25 bp, Probe sequence
gcgtttaataaatgtttcctcgttg

SEQ ID NO: 167149 - DNA, 25 bp, Probe sequence
gttactatgtacttatgtataaatc

SEQ ID NO: 167150 - DNA, 25 bp, Probe sequence
gtacttatgtataaatcagtgaaag

SEQ ID NO: 167151 - DNA, 25 bp, Probe sequence
tgggttttatagcgtttaataaatg

SEQ ID NO: 167152 - DNA, 25 bp, Probe sequence
tgtacttatgtataaatcagtgaaa

SEQ ID NO: 167153 - DNA, 25 bp, Probe sequence
taataaatgtttcctcgttgaattt

SEQ ID NO: 167154 - DNA, 25 bp, Probe sequence
taagttactatgtacttatgtataa

SEQ ID NO: 167155 - DNA, 25 bp, Probe sequence
taaatgtttcctcgttgaattttgg

SEQ ID NO: 167156 - DNA, 25 bp, Probe sequence
tactatgtacttatgtataaatcag

SEQ ID NO: 167157 - DNA, 25 bp, Probe sequence
tacttatgtataaatcagtgaaaga

SEQ ID NO: 167158 - DNA, 25 bp, Probe sequence
tagcgtttaataaatgtttcctcgt

SEQ ID NO: 167159 - DNA, 25 bp, Probe sequence
tatgtacttatgtataaatcagtga

SEQ ID NO: 167160 - DNA, 25 bp, Probe sequence
tatagcgtttaataaatgtttcctc

SEQ ID NO: 167161 - DNA, 25 bp, Probe sequence
tttaagttactatgtacttatgtat

SEQ ID NO: 167162 - DNA, 25 bp, Probe sequence
tttaataaatgtttcctcgttgaat

SEQ ID NO: 167163 - DNA, 25 bp, Probe sequence
ttttaagttactatgtacttatgta

SEQ ID NO: 167164 - DNA, 25 bp, Probe sequence
ttatagcgtttaataaatgtttcct

SEQ ID NO: 167165 - DNA, 25 bp, Probe sequence
ttactatgtacttatgtataaatca

SEQ ID NO: 167166 - DNA, 25 bp, Probe sequence
ttaagttactatgtacttatgtata

SEQ ID NO: 167167 - DNA, 25 bp, Probe sequence
ttaataaatgtttcctcgttgaatt

SEQ ID NO: 167168 - DNA, 25 bp, Probe sequence
attttcatcgtataacaacatacac

SEQ ID NO: 167169 - DNA, 25 bp, Probe sequence
atttaacagataacacatttgaaaa

SEQ ID NO: 167170 - DNA, 25 bp, Probe sequence
atttacttgatttaacagataacac

SEQ ID NO: 167171 - DNA, 25 bp, Probe sequence
agtattttcatcgtataacaacata

SEQ ID NO: 167172 - DNA, 25 bp, Probe sequence
agatttacttgatttaacagataac

SEQ ID NO: 167173 - DNA, 25 bp, Probe sequence
acttgatttaacagataacacattt

SEQ ID NO: 167174 - DNA, 25 bp, Probe sequence
aaagtattttcatcgtataacaaca

SEQ ID NO: 167175 - DNA, 25 bp, Probe sequence
aagtattttcatcgtataacaacat

SEQ ID NO: 167176 - DNA, 25 bp, Probe sequence
cagaggtgtatttgatttaaatgat

SEQ ID NO: 167177 - DNA, 25 bp, Probe sequence
cttgatttaacagataacacatttg

SEQ ID NO: 167178 - DNA, 25 bp, Probe sequence
gaggtgtatttgatttaaatgattt

SEQ ID NO: 167179 - DNA, 25 bp, Probe sequence
gatttacttgatttaacagataaca

SEQ ID NO: 167180 - DNA, 25 bp, Probe sequence
gatttaacagataacacatttgaaa

SEQ ID NO: 167181 - DNA, 25 bp, Probe sequence
gattaaaagtattttcatcgtataa

SEQ ID NO: 167182 - DNA, 25 bp, Probe sequence
gtatttatataggaagtttttagat

SEQ ID NO: 167183 - DNA, 25 bp, Probe sequence
gtattttcatcgtataacaacatac

SEQ ID NO: 167184 - DNA, 25 bp, Probe sequence
gtataacaacatacacgataaaatt

SEQ ID NO: 167185 - DNA, 25 bp, Probe sequence
ggtgtatttgatttaaatgatttta

SEQ ID NO: 167186 - DNA, 25 bp, Probe sequence
tcatcgtataacaacatacacgata

SEQ ID NO: 167187 - DNA, 25 bp, Probe sequence
taaaagtattttcatcgtataacaa

SEQ ID NO: 167188 - DNA, 25 bp, Probe sequence
tacttgatttaacagataacacatt

SEQ ID NO: 167189 - DNA, 25 bp, Probe sequence
tagattaaaagtattttcatcgtat

SEQ ID NO: 167190 - DNA, 25 bp, Probe sequence
taggaagtttttagatttacttgat

SEQ ID NO: 167191 - DNA, 25 bp, Probe sequence
tattttcatcgtataacaacataca

SEQ ID NO: 167192 - DNA, 25 bp, Probe sequence
tttcatcgtataacaacatacacga

SEQ ID NO: 167193 - DNA, 25 bp, Probe sequence
tttacttgatttaacagataacaca

SEQ ID NO: 167194 - DNA, 25 bp, Probe sequence
tttagatttacttgatttaacagat

SEQ ID NO: 167195 - DNA, 25 bp, Probe sequence
ttttagatttacttgatttaacaga

SEQ ID NO: 167196 - DNA, 25 bp, Probe sequence
ttttcatcgtataacaacatacacg

SEQ ID NO: 167197 - DNA, 25 bp, Probe sequence
tttttagatttacttgatttaacag

SEQ ID NO: 167198 - DNA, 25 bp, Probe sequence
ttagatttacttgatttaacagata

SEQ ID NO: 167199 - DNA, 25 bp, Probe sequence
ttacttgatttaacagataacacat

SEQ ID NO: 167200 - DNA, 25 bp, Probe sequence
ttaaaagtattttcatcgtataaca

SEQ ID NO: 167201 - DNA, 25 bp, Probe sequence
ttgatttaacagataacacatttga

SEQ ID NO: 167202 - DNA, 25 bp, Probe sequence
atatgacaactggtgaatctgaaac

SEQ ID NO: 167203 - DNA, 25 bp, Probe sequence
aggtgccaagtttacaatcgttatt

SEQ ID NO: 167204 - DNA, 25 bp, Probe sequence
agattgtcaatcacgtttgcataca

SEQ ID NO: 167205 - DNA, 25 bp, Probe sequence
acaggtattggttttgcgctaagta

SEQ ID NO: 167206 - DNA, 25 bp, Probe sequence
acaagcagaccgtttaggtgccaag

SEQ ID NO: 167207 - DNA, 25 bp, Probe sequence
gaagatcctaacttagttcgtggat

SEQ ID NO: 167208 - DNA, 25 bp, Probe sequence
ctttgtggtggtggccgttataatg

SEQ ID NO: 167209 - DNA, 25 bp, Probe sequence
ctaactatgatggtgccattacaac

SEQ ID NO: 167210 - DNA, 25 bp, Probe sequence
ctgcagttgtgcgttcatatattga

SEQ ID NO: 167211 - DNA, 25 bp, Probe sequence
cgattattgcttgcacttgaagaag

SEQ ID NO: 167212 - DNA, 25 bp, Probe sequence
cgctatcgtcaatttaatcaatttg

SEQ ID NO: 167213 - DNA, 25 bp, Probe sequence
gcaaggtaatccaaaccaaccaatt

SEQ ID NO: 167214 - DNA, 25 bp, Probe sequence
gaattttgttcagattgtcaatcac

SEQ ID NO: 167215 - DNA, 25 bp, Probe sequence
gaagtattacattaagacctgaggg

SEQ ID NO: 167216 - DNA, 25 bp, Probe sequence
gaagcgattaagactgcacctagaa

SEQ ID NO: 167217 - DNA, 25 bp, Probe sequence
gaagctattggtgctgaaaatccta

SEQ ID NO: 167218 - DNA, 25 bp, Probe sequence
gactgcacctagaatcactgatttc

SEQ ID NO: 167219 - DNA, 25 bp, Probe sequence
gacctgagggaacagctgcagttgt

SEQ ID NO: 167220 - DNA, 25 bp, Probe sequence
gacgcattagtcgaatattttaaga

SEQ ID NO: 167221 - DNA, 25 bp, Probe sequence
gagggacgcaggatattttacctga

SEQ ID NO: 167222 - DNA, 25 bp, Probe sequence
gatgatttaggtattccatatattg

SEQ ID NO: 167223 - DNA, 25 bp, Probe sequence
gatgcagaagtattagctatggtta

SEQ ID NO: 167224 - DNA, 25 bp, Probe sequence
gatcaagcagatcgatatgctgtga

SEQ ID NO: 167225 - DNA, 25 bp, Probe sequence
gattggattattatacacatacagc

SEQ ID NO: 167226 - DNA, 25 bp, Probe sequence
gtttgcatacaaatccgatgcgaat

SEQ ID NO: 167227 - DNA, 25 bp, Probe sequence
gtacagatctttttgcaagaggtgt

SEQ ID NO: 167228 - DNA, 25 bp, Probe sequence
gtgaaacactttgaaccagtaattc

SEQ ID NO: 167229 - DNA, 25 bp, Probe sequence
gtgtaggggatatggcgtctcgaaa

SEQ ID NO: 167230 - DNA, 25 bp, Probe sequence
gtggtggccgttataatggtttatt

SEQ ID NO: 167231 - DNA, 25 bp, Probe sequence
ggttatgcatatttatcaatcattt

SEQ ID NO: 167232 - DNA, 25 bp, Probe sequence
ggaccgatgtttagatatgaacgta

SEQ ID NO: 167233 - DNA, 25 bp, Probe sequence
taaactttattacaatggaccgatg

SEQ ID NO: 167234 - DNA, 25 bp, Probe sequence
tagaattgctagatggtccaagtga

SEQ ID NO: 167235 - DNA, 25 bp, Probe sequence
ttggtgattcaaccgatgtcgtaca

SEQ ID NO: 167236 - DNA, 25 bp, Probe sequence
agagctttagcagatacgttagacg

SEQ ID NO: 167237 - DNA, 25 bp, Probe sequence
agaattgcagcgtactttagaaaaa

SEQ ID NO: 167238 - DNA, 25 bp, Probe sequence
aaatgctgaattacgtacaggtcca

SEQ ID NO: 167239 - DNA, 25 bp, Probe sequence
aacaatagtgcttgatcctggtcat

SEQ ID NO: 167240 - DNA, 25 bp, Probe sequence
aacgtactctaatagtagtgattgc

SEQ ID NO: 167241 - DNA, 25 bp, Probe sequence
aacccaactgatgaaacgatgatta

SEQ ID NO: 167242 - DNA, 25 bp, Probe sequence
aagttcctgctgttttattagaatt

SEQ ID NO: 167243 - DNA, 25 bp, Probe sequence
aaggttggatagctggatggcacac

SEQ ID NO: 167244 - DNA, 25 bp, Probe sequence
aaggcgatgcctatttgagtataca

SEQ ID NO: 167245 - DNA, 25 bp, Probe sequence
aatggaatgacagtttattggtatc

SEQ ID NO: 167246 - DNA, 25 bp, Probe sequence
cagacgatacatatgtttcactaga

SEQ ID NO: 167247 - DNA, 25 bp, Probe sequence
gcttgatcctggtcatggaggtagt

SEQ ID NO: 167248 - DNA, 25 bp, Probe sequence
gcctttgtcttatttatcatctttt

SEQ ID NO: 167249 - DNA, 25 bp, Probe sequence
gaaggcgcaactgttaagatgacaa

SEQ ID NO: 167250 - DNA, 25 bp, Probe sequence
gaagttgaagatacatccagtaatg

SEQ ID NO: 167251 - DNA, 25 bp, Probe sequence
gaccagggtgcttcaagcaatacta

SEQ ID NO: 167252 - DNA, 25 bp, Probe sequence
gaggcatggttatctaaaaagggtc

SEQ ID NO: 167253 - DNA, 25 bp, Probe sequence
gatacgttagacgctacgattcaga

SEQ ID NO: 167254 - DNA, 25 bp, Probe sequence
gatagctggatggcacacaaattta

SEQ ID NO: 167255 - DNA, 25 bp, Probe sequence
gatattgtcgcggataatacgaagg

SEQ ID NO: 167256 - DNA, 25 bp, Probe sequence
gttatattagtaacccaactgatga

SEQ ID NO: 167257 - DNA, 25 bp, Probe sequence
gtagtgattgcctttgtcttattta

SEQ ID NO: 167258 - DNA, 25 bp, Probe sequence
gtacaggtccaaacgctgcgtatcc

SEQ ID NO: 167259 - DNA, 25 bp, Probe sequence
gtccaaacgctgcgtatccagtcat

SEQ ID NO: 167260 - DNA, 25 bp, Probe sequence
ggtagtgaccagggtgcttcaagca

SEQ ID NO: 167261 - DNA, 25 bp, Probe sequence
ggcacacaaatttagatattgtcgc

SEQ ID NO: 167262 - DNA, 25 bp, Probe sequence
tggaggtagtgaccagggtgcttca

SEQ ID NO: 167263 - DNA, 25 bp, Probe sequence
tcgtgatatcaaaggcgatgcctat

SEQ ID NO: 167264 - DNA, 25 bp, Probe sequence
tctaatcgcggttcaagacaagaaa

SEQ ID NO: 167265 - DNA, 25 bp, Probe sequence
taagacaaacaaaagttcctgctgt

SEQ ID NO: 167266 - DNA, 25 bp, Probe sequence
taagatgacaagaacagacgataca

SEQ ID NO: 167267 - DNA, 25 bp, Probe sequence
tactttctaatcgcggttcaagaca

SEQ ID NO: 167268 - DNA, 25 bp, Probe sequence
ttagacgctacgattcagaagaaag

SEQ ID NO: 167269 - DNA, 25 bp, Probe sequence
tatcatctttttatttttattgctg

SEQ ID NO: 167270 - DNA, 25 bp, Probe sequence
attgctaatgcaagattatttgaag

SEQ ID NO: 167271 - DNA, 25 bp, Probe sequence
attaaactttaatatccaacaaatg

SEQ ID NO: 167272 - DNA, 25 bp, Probe sequence
atgatgcgctacgagcgtatggtct

SEQ ID NO: 167273 - DNA, 25 bp, Probe sequence
atgagtattttaatgatgcgctacg

SEQ ID NO: 167274 - DNA, 25 bp, Probe sequence
atgatggtccagtcactattattta

SEQ ID NO: 167275 - DNA, 25 bp, Probe sequence
actctacagagcaagatgcagatgt

SEQ ID NO: 167276 - DNA, 25 bp, Probe sequence
aaataatgatggtccagtcactatt

SEQ ID NO: 167277 - DNA, 25 bp, Probe sequence
aacaggtgaatttggaacacacatg

SEQ ID NO: 167278 - DNA, 25 bp, Probe sequence
aaggatattgtttattagtcggtat

SEQ ID NO: 167279 - DNA, 25 bp, Probe sequence
caatttactctctatgcagatgtaa

SEQ ID NO: 167280 - DNA, 25 bp, Probe sequence
cacaatttactctctatgcagatgt

SEQ ID NO: 167281 - DNA, 25 bp, Probe sequence
caaattctaaaaatcctgatcaagc

SEQ ID NO: 167282 - DNA, 25 bp, Probe sequence
cagtttcacaatttactctctatgc

SEQ ID NO: 167283 - DNA, 25 bp, Probe sequence
gcatcggtgacgaatgatacattaa

SEQ ID NO: 167284 - DNA, 25 bp, Probe sequence
gaatttggaacacacatgaatgtta

SEQ ID NO: 167285 - DNA, 25 bp, Probe sequence
gaagcatcggtgacgaatgatacat

SEQ ID NO: 167286 - DNA, 25 bp, Probe sequence
gaaagtcaggacggcaaaattcaat

SEQ ID NO: 167287 - DNA, 25 bp, Probe sequence
gagcaagatgcagatgtaattgcaa

SEQ ID NO: 167288 - DNA, 25 bp, Probe sequence
gagttaaagaagcatcggtgacgaa

SEQ ID NO: 167289 - DNA, 25 bp, Probe sequence
gatggtccagtcactattatttatg

SEQ ID NO: 167290 - DNA, 25 bp, Probe sequence
gtttcacaatttactctctatgcag

SEQ ID NO: 167291 - DNA, 25 bp, Probe sequence
gtattttaatgatgcgctacgagcg

SEQ ID NO: 167292 - DNA, 25 bp, Probe sequence
gtcactattatttatgaaagtcagg

SEQ ID NO: 167293 - DNA, 25 bp, Probe sequence
ggtgaatttggaacacacatgaatg

SEQ ID NO: 167294 - DNA, 25 bp, Probe sequence
ggtccagtcactattatttatgaaa

SEQ ID NO: 167295 - DNA, 25 bp, Probe sequence
ggtttctcaaattctaaaaatcctg

SEQ ID NO: 167296 - DNA, 25 bp, Probe sequence
tccaggtttctcaaattctaaaaat

SEQ ID NO: 167297 - DNA, 25 bp, Probe sequence
taaccgtccaggtttctcaaattct

SEQ ID NO: 167298 - DNA, 25 bp, Probe sequence
taatgatggtccagtcactattatt

SEQ ID NO: 167299 - DNA, 25 bp, Probe sequence
tactctctatgcagatgtaaaaaaa

SEQ ID NO: 167300 - DNA, 25 bp, Probe sequence
tatcagtttcacaatttactctcta

SEQ ID NO: 167301 - DNA, 25 bp, Probe sequence
tattgtttattagtcggtatcggtc

SEQ ID NO: 167302 - DNA, 25 bp, Probe sequence
ttcacaatttactctctatgcagat

SEQ ID NO: 167303 - DNA, 25 bp, Probe sequence
ttgtttattagtcggtatcggtcag

SEQ ID NO: 167304 - DNA, 25 bp, Probe sequence
atcagtcattgcatactacagtagt

SEQ ID NO: 167305 - DNA, 25 bp, Probe sequence
agtacatcgcactgattgcccaaat

SEQ ID NO: 167306 - DNA, 25 bp, Probe sequence
agatacggctcttcgttatattgat

SEQ ID NO: 167307 - DNA, 25 bp, Probe sequence
aactgcgtatgaccgaaatggcttg

SEQ ID NO: 167308 - DNA, 25 bp, Probe sequence
aagcgtatatcgaaacggctattga

SEQ ID NO: 167309 - DNA, 25 bp, Probe sequence
aagatgatttattcgcagctgtagg

SEQ ID NO: 167310 - DNA, 25 bp, Probe sequence
aatttttgatttgttggcgatacgt

SEQ ID NO: 167311 - DNA, 25 bp, Probe sequence
cagctgtaggatttggcggcgtgac

SEQ ID NO: 167312 - DNA, 25 bp, Probe sequence
cggcgtgacatccttacagattgtt

SEQ ID NO: 167313 - DNA, 25 bp, Probe sequence
tggtgttgcagcacactgggcttac

SEQ ID NO: 167314 - DNA, 25 bp, Probe sequence
gcgatacttgggttggtgcatacgt

SEQ ID NO: 167315 - DNA, 25 bp, Probe sequence
gcatttaccccagcgagtgatgtta

SEQ ID NO: 167316 - DNA, 25 bp, Probe sequence
gaagttacgaaatcattgcctatta

SEQ ID NO: 167317 - DNA, 25 bp, Probe sequence
gaagttgctcgaattgttgatggtg

SEQ ID NO: 167318 - DNA, 25 bp, Probe sequence
gaagcacataaaggtcagttccgaa

SEQ ID NO: 167319 - DNA, 25 bp, Probe sequence
gaacgtttgatatgcacgaaattgc

SEQ ID NO: 167320 - DNA, 25 bp, Probe sequence
gagacccgctcgaaatccaaatacg

SEQ ID NO: 167321 - DNA, 25 bp, Probe sequence
gaaatgcgattagacggaccgacga

SEQ ID NO: 167322 - DNA, 25 bp, Probe sequence
gacggaccgacgattgtcgcaggtt

SEQ ID NO: 167323 - DNA, 25 bp, Probe sequence
gatacaccgtatacatttgaagatg

SEQ ID NO: 167324 - DNA, 25 bp, Probe sequence
gattgccaaagatgtacgcgtaatt

SEQ ID NO: 167325 - DNA, 25 bp, Probe sequence
gattttgcttatgcgattcacagtg

SEQ ID NO: 167326 - DNA, 25 bp, Probe sequence
gattaccatacattatgcatcctat

SEQ ID NO: 167327 - DNA, 25 bp, Probe sequence
gattgtcgcaggttttttgcatgat

SEQ ID NO: 167328 - DNA, 25 bp, Probe sequence
gttgtaatcctataccaggtgatga

SEQ ID NO: 167329 - DNA, 25 bp, Probe sequence
gttaaatcgtctagtgccaaaggta

SEQ ID NO: 167330 - DNA, 25 bp, Probe sequence
gtactacaagctgttagctcgacag

SEQ ID NO: 167331 - DNA, 25 bp, Probe sequence
ggtgctgtgccgattgattttgctt

SEQ ID NO: 167332 - DNA, 25 bp, Probe sequence
tggaaaccgatgccaggacgtttta

SEQ ID NO: 167333 - DNA, 25 bp, Probe sequence
ggcgatacgtgttattgtcaattct

SEQ ID NO: 167334 - DNA, 25 bp, Probe sequence
tgagttgccatatggtgctgtgccg

SEQ ID NO: 167335 - DNA, 25 bp, Probe sequence
tgcgtaccttgaaagccatgccgcg

SEQ ID NO: 167336 - DNA, 25 bp, Probe sequence
tcgtctgacgctcaagaatttatgg

SEQ ID NO: 167337 - DNA, 25 bp, Probe sequence
tagctcgacagccggcaatttaatt

SEQ ID NO: 167338 - DNA, 25 bp, Probe sequence
atcgttgtaggacctgaagcgcgtg

SEQ ID NO: 167339 - DNA, 25 bp, Probe sequence
agatgatttattagctactggtggt

SEQ ID NO: 167340 - DNA, 25 bp, Probe sequence
agaagttcaagattggccgaaacca

SEQ ID NO: 167341 - DNA, 25 bp, Probe sequence
agaatacgcaaaagacagagatgtt

SEQ ID NO: 167342 - DNA, 25 bp, Probe sequence
agcgcgtggctttatcattggctgt

SEQ ID NO: 167343 - DNA, 25 bp, Probe sequence
accaggtgttagtttcaaggatatt

SEQ ID NO: 167344 - DNA, 25 bp, Probe sequence
actggtggtacgattgaagcagcaa

SEQ ID NO: 167345 - DNA, 25 bp, Probe sequence
aaagcaatacgtatcagaagttcaa

SEQ ID NO: 167346 - DNA, 25 bp, Probe sequence
aagatgcaattaaaccaggtcaacg

SEQ ID NO: 167347 - DNA, 25 bp, Probe sequence
aatggggattggctttgcacctgtt

SEQ ID NO: 167348 - DNA, 25 bp, Probe sequence
caaggatattactacaattatggat

SEQ ID NO: 167349 - DNA, 25 bp, Probe sequence
catatggctatgcaacagataaaat

SEQ ID NO: 167350 - DNA, 25 bp, Probe sequence
cattcgttatgagtatgacctagaa

SEQ ID NO: 167351 - DNA, 25 bp, Probe sequence
ctgtcctgtagcttattcaatgggg

SEQ ID NO: 167352 - DNA, 25 bp, Probe sequence
cctgtagcttattcaatggggattg

SEQ ID NO: 167353 - DNA, 25 bp, Probe sequence
gagtatgacctagaatatggtacaa

SEQ ID NO: 167354 - DNA, 25 bp, Probe sequence
gagtttaatctcatacgacgaataa

SEQ ID NO: 167355 - DNA, 25 bp, Probe sequence
gatgttgatatcgttgtaggacctg

SEQ ID NO: 167356 - DNA, 25 bp, Probe sequence
gtaggacctgaagcgcgtggcttta

SEQ ID NO: 167357 - DNA, 25 bp, Probe sequence
gattggccgaaaccaggtgttagtt

SEQ ID NO: 167358 - DNA, 25 bp, Probe sequence
gattggctttgcacctgttagaaaa

SEQ ID NO: 167359 - DNA, 25 bp, Probe sequence
gggaaattacctcgtgaagtcattc

SEQ ID NO: 167360 - DNA, 25 bp, Probe sequence
ggacctgaagcgcgtggctttatca

SEQ ID NO: 167361 - DNA, 25 bp, Probe sequence
ggtcaacgtgtgttaattacagatg

SEQ ID NO: 167362 - DNA, 25 bp, Probe sequence
ggtacaaatgttttaacaatgcaca

SEQ ID NO: 167363 - DNA, 25 bp, Probe sequence
ggtatcgtagtaggtattgcattta

SEQ ID NO: 167364 - DNA, 25 bp, Probe sequence
ggtattgcatttataattgaattga

SEQ ID NO: 167365 - DNA, 25 bp, Probe sequence
ggctttatcattggctgtcctgtag

SEQ ID NO: 167366 - DNA, 25 bp, Probe sequence
tggataatggtgaagcatatggcta

SEQ ID NO: 167367 - DNA, 25 bp, Probe sequence
taaaccaggtcaacgtgtgttaatt

SEQ ID NO: 167368 - DNA, 25 bp, Probe sequence
tacctcgtgaagtcattcgttatga

SEQ ID NO: 167369 - DNA, 25 bp, Probe sequence
tatcattggctgtcctgtagcttat

SEQ ID NO: 167370 - DNA, 25 bp, Probe sequence
tattagctactggtggtacgattga

SEQ ID NO: 167371 - DNA, 25 bp, Probe sequence
ttggctgtcctgtagcttattcaat

SEQ ID NO: 167372 - DNA, 25 bp, Probe sequence
gacccttcggaacagatttttctag

SEQ ID NO: 167373 - DNA, 25 bp, Probe sequence
atggaatggtaatcaatcaccgcaa

SEQ ID NO: 167374 - DNA, 25 bp, Probe sequence
atggctgcaggtatgacgatggata

SEQ ID NO: 167375 - DNA, 25 bp, Probe sequence
aggatggcatattcctaaccgcttt

SEQ ID NO: 167376 - DNA, 25 bp, Probe sequence
agttttgcaacataatcattcgatt

SEQ ID NO: 167377 - DNA, 25 bp, Probe sequence
aacattacaacttttaggtgcacaa

SEQ ID NO: 167378 - DNA, 25 bp, Probe sequence
aagatcgattgattccagcaaagta

SEQ ID NO: 167379 - DNA, 25 bp, Probe sequence
ctaaccgctttaccgaaggatatgg

SEQ ID NO: 167380 - DNA, 25 bp, Probe sequence
cagatttttctagacctatttttga

SEQ ID NO: 167381 - DNA, 25 bp, Probe sequence
gctgtaggtcgtttagatgacgcat

SEQ ID NO: 167382 - DNA, 25 bp, Probe sequence
gcttgcgaattgttgatgactgacg

SEQ ID NO: 167383 - DNA, 25 bp, Probe sequence
gcaacaactgcaattttctcaactt

SEQ ID NO: 167384 - DNA, 25 bp, Probe sequence
gaagcatatgcaatcgtacatccaa

SEQ ID NO: 167385 - DNA, 25 bp, Probe sequence
gatgacgcatcattagcttgcgaat

SEQ ID NO: 167386 - DNA, 25 bp, Probe sequence
gatttacttcgatggtatacctaat

SEQ ID NO: 167387 - DNA, 25 bp, Probe sequence
gttgcgataggtaccattgcggatt

SEQ ID NO: 167388 - DNA, 25 bp, Probe sequence
gtacatccaatgcatccatcgttta

SEQ ID NO: 167389 - DNA, 25 bp, Probe sequence
gtcgaaacatttgctttgccaacat

SEQ ID NO: 167390 - DNA, 25 bp, Probe sequence
gtccgacctctgttaaagcattgct

SEQ ID NO: 167391 - DNA, 25 bp, Probe sequence
ggtgtcttaggtattgttgcttcga

SEQ ID NO: 167392 - DNA, 25 bp, Probe sequence
ggatctgttcaaatcaacgaatgga

SEQ ID NO: 167393 - DNA, 25 bp, Probe sequence
ggatgatttatcagtttcttcagtt

SEQ ID NO: 167394 - DNA, 25 bp, Probe sequence
ggcaaaatggacacttagaacctga

SEQ ID NO: 167395 - DNA, 25 bp, Probe sequence
tggtgaaagtaatatcgccgcgcta

SEQ ID NO: 167396 - DNA, 25 bp, Probe sequence
tggcggccatcatatggctgcaggt

SEQ ID NO: 167397 - DNA, 25 bp, Probe sequence
tccatcgtttaattatccgttccaa

SEQ ID NO: 167398 - DNA, 25 bp, Probe sequence
tccgttccaacaattgtgtggtgca

SEQ ID NO: 167399 - DNA, 25 bp, Probe sequence
tatgaatcgtttaagacccttcgga

SEQ ID NO: 167400 - DNA, 25 bp, Probe sequence
taatatcgccgcgctattttggcaa

SEQ ID NO: 167401 - DNA, 25 bp, Probe sequence
taatcgctaaatttggcggccatca

SEQ ID NO: 167402 - DNA, 25 bp, Probe sequence
tattggacctagacttaatgctgta

SEQ ID NO: 167403 - DNA, 25 bp, Probe sequence
tattgtcgtgcttattcatcctaaa

SEQ ID NO: 167404 - DNA, 25 bp, Probe sequence
ttaaatgatcaatgtccgacctctg

SEQ ID NO: 167405 - DNA, 25 bp, Probe sequence
ttaattcgaatcaatcaacaacctg

SEQ ID NO: 167406 - DNA, 25 bp, Probe sequence
attccttggggagactatcatttca

SEQ ID NO: 167407 - DNA, 25 bp, Probe sequence
atcacagaacggccgtagcttagca

SEQ ID NO: 167408 - DNA, 25 bp, Probe sequence
atcactaattcaacaacatcagcca

SEQ ID NO: 167409 - DNA, 25 bp, Probe sequence
atcgatgttagtgaatcgtatgcga

SEQ ID NO: 167410 - DNA, 25 bp, Probe sequence
atcgctatcgtattttacaatctct

SEQ ID NO: 167411 - DNA, 25 bp, Probe sequence
atgtcatcatattatcgagttacga

SEQ ID NO: 167412 - DNA, 25 bp, Probe sequence
acaacatcagccagaattagtaatt

SEQ ID NO: 167413 - DNA, 25 bp, Probe sequence
aatggcgtcgatttactcaatgata

SEQ ID NO: 167414 - DNA, 25 bp, Probe sequence
aatcgtatgcgatgcgaacatttaa

SEQ ID NO: 167415 - DNA, 25 bp, Probe sequence
aatatttacaaatgtcgccaagtga

SEQ ID NO: 167416 - DNA, 25 bp, Probe sequence
aattactgatattcgtatgccacgt

SEQ ID NO: 167417 - DNA, 25 bp, Probe sequence
caaagtaggcttttcagagtataaa

SEQ ID NO: 167418 - DNA, 25 bp, Probe sequence
gcgatgcgaacatttaaagatcatg

SEQ ID NO: 167419 - DNA, 25 bp, Probe sequence
gcaatcttatcaaacgaaagtgact

SEQ ID NO: 167420 - DNA, 25 bp, Probe sequence
gaaattgcagacaaagtaggctttt

SEQ ID NO: 167421 - DNA, 25 bp, Probe sequence
gacttgtccgtaccttattagagca

SEQ ID NO: 167422 - DNA, 25 bp, Probe sequence
gaccatgcacaattagaagttattt

SEQ ID NO: 167423 - DNA, 25 bp, Probe sequence
gagcaacaatcacagaacggccgta

SEQ ID NO: 167424 - DNA, 25 bp, Probe sequence
gatggtgttgaagcattatcactaa

SEQ ID NO: 167425 - DNA, 25 bp, Probe sequence
gatcatgttggtattacaattgtcg

SEQ ID NO: 167426 - DNA, 25 bp, Probe sequence
gattatttaaatcgctatcgtattt

SEQ ID NO: 167427 - DNA, 25 bp, Probe sequence
gttacgatgactttgaatatatgaa

SEQ ID NO: 167428 - DNA, 25 bp, Probe sequence
gtatgccacgtaaaaatggcgtcga

SEQ ID NO: 167429 - DNA, 25 bp, Probe sequence
gtcgatttactcaatgatattgcgc

SEQ ID NO: 167430 - DNA, 25 bp, Probe sequence
gtccgtaccttattagagcaacaat

SEQ ID NO: 167431 - DNA, 25 bp, Probe sequence
gtcgccaagtgattattgtaagcaa

SEQ ID NO: 167432 - DNA, 25 bp, Probe sequence
gtgactgtttcagatttaattcaac

SEQ ID NO: 167433 - DNA, 25 bp, Probe sequence
ggggagactatcatttcaatacaat

SEQ ID NO: 167434 - DNA, 25 bp, Probe sequence
ggtattacaattgtcgattatttaa

SEQ ID NO: 167435 - DNA, 25 bp, Probe sequence
ttaggaagacttgtccgtaccttat

SEQ ID NO: 167436 - DNA, 25 bp, Probe sequence
tcaatacaatatacactgctaaaga

SEQ ID NO: 167437 - DNA, 25 bp, Probe sequence
taaagcaaatcattccttggggaga

SEQ ID NO: 167438 - DNA, 25 bp, Probe sequence
ttaaggtagttatttgtgatgatga

SEQ ID NO: 167439 - DNA, 25 bp, Probe sequence
ttcaacatcatgttcttgattattt

SEQ ID NO: 167440 - DNA, 25 bp, Probe sequence
aactttaccaggattagcggcgttg

SEQ ID NO: 167441 - DNA, 25 bp, Probe sequence
attcttcggtgctcctacgatattc

SEQ ID NO: 167442 - DNA, 25 bp, Probe sequence
attcttcttcggtgaaagttcagtt

SEQ ID NO: 167443 - DNA, 25 bp, Probe sequence
attctcttcaatcttcattgccgtt

SEQ ID NO: 167444 - DNA, 25 bp, Probe sequence
atttattcatgcttggattctaccg

SEQ ID NO: 167445 - DNA, 25 bp, Probe sequence
atcgtaacgtttgaccgtgtacgtg

SEQ ID NO: 167446 - DNA, 25 bp, Probe sequence
atgtcatggttgtttggttagattt

SEQ ID NO: 167447 - DNA, 25 bp, Probe sequence
agttgctatactattcttcggtgct

SEQ ID NO: 167448 - DNA, 25 bp, Probe sequence
aaatcgaaattcggtgacacacctc

SEQ ID NO: 167449 - DNA, 25 bp, Probe sequence
agcggcgttggtattaggtgtaggt

SEQ ID NO: 167450 - DNA, 25 bp, Probe sequence
aactcagtaggtgcccaatttggtc

SEQ ID NO: 167451 - DNA, 25 bp, Probe sequence
actgtgtttgcatcgtttattggtg

SEQ ID NO: 167452 - DNA, 25 bp, Probe sequence
aaagccttacaatcaacagcgcaaa

SEQ ID NO: 167453 - DNA, 25 bp, Probe sequence
aaaccctaaatttatttctgcagca

SEQ ID NO: 167454 - DNA, 25 bp, Probe sequence
aagacgatttaacgcgtgctcaaga

SEQ ID NO: 167455 - DNA, 25 bp, Probe sequence
aatgatctttgttacagccgtgttc

SEQ ID NO: 167456 - DNA, 25 bp, Probe sequence
cgtaaaattttatcttctcaagcta

SEQ ID NO: 167457 - DNA, 25 bp, Probe sequence
gccgctgtattaacaattgtcggtt

SEQ ID NO: 167458 - DNA, 25 bp, Probe sequence
gccgcagcagtattattcttcttcg

SEQ ID NO: 167459 - DNA, 25 bp, Probe sequence
gctcctacgatattcaactttactt

SEQ ID NO: 167460 - DNA, 25 bp, Probe sequence
gttcagttaaaggtttcgcgacaat

SEQ ID NO: 167461 - DNA, 25 bp, Probe sequence
gcaggttctttaccagttgacttga

SEQ ID NO: 167462 - DNA, 25 bp, Probe sequence
gacaacttatatctatctaacgtta

SEQ ID NO: 167463 - DNA, 25 bp, Probe sequence
gattctaccgattacctggtttagt

SEQ ID NO: 167464 - DNA, 25 bp, Probe sequence
gatttaacatttatcgccgctgtat

SEQ ID NO: 167465 - DNA, 25 bp, Probe sequence
gattgatttctggtgtattctcttc

SEQ ID NO: 167466 - DNA, 25 bp, Probe sequence
gttacagccgtgttcttatcaagat

SEQ ID NO: 167467 - DNA, 25 bp, Probe sequence
gtagcatttaatttcatttccgggg

SEQ ID NO: 167468 - DNA, 25 bp, Probe sequence
ggtatcatcatctatgtatcattac

SEQ ID NO: 167469 - DNA, 25 bp, Probe sequence
tgggtctttcatctgtattggcatt

SEQ ID NO: 167470 - DNA, 25 bp, Probe sequence
tgtagttgtcggtttagttattctt

SEQ ID NO: 167471 - DNA, 25 bp, Probe sequence
taacaacagttatcgccgcagcagt

SEQ ID NO: 167472 - DNA, 25 bp, Probe sequence
ttattatcattacttgtttcatcaa

SEQ ID NO: 167473 - DNA, 25 bp, Probe sequence
ttctgcagcaagtgttgatcaacca

SEQ ID NO: 167474 - DNA, 25 bp, Probe sequence
attaataacattcaatctggtcaaa

SEQ ID NO: 167475 - DNA, 25 bp, Probe sequence
atttttgcggttatgtatttcttga

SEQ ID NO: 167476 - DNA, 25 bp, Probe sequence
atttcttgatgatcagaccacaaca

SEQ ID NO: 167477 - DNA, 25 bp, Probe sequence
atatagtcgtaatttttgcggttat

SEQ ID NO: 167478 - DNA, 25 bp, Probe sequence
atcagaccacaacaaaaacgtgcga

SEQ ID NO: 167479 - DNA, 25 bp, Probe sequence
atgtatttcttgatgatcagaccac

SEQ ID NO: 167480 - DNA, 25 bp, Probe sequence
agcagtagatgaaacaactgttgtt

SEQ ID NO: 167481 - DNA, 25 bp, Probe sequence
acctgctattaaacaagttgaccct

SEQ ID NO: 167482 - DNA, 25 bp, Probe sequence
aaaacgtgcgaaacagcatcgtgag

SEQ ID NO: 167483 - DNA, 25 bp, Probe sequence
aacgtgcgaaacagcatcgtgagtt

SEQ ID NO: 167484 - DNA, 25 bp, Probe sequence
caatctggtcaaagaattacaacta

SEQ ID NO: 167485 - DNA, 25 bp, Probe sequence
catggtactgaattaactttcgaaa

SEQ ID NO: 167486 - DNA, 25 bp, Probe sequence
cggttatgtatttcttgatgatcag

SEQ ID NO: 167487 - DNA, 25 bp, Probe sequence
cgaaacagcatcgtgagttgattaa

SEQ ID NO: 167488 - DNA, 25 bp, Probe sequence
gctattaaacaagttgacccttcat

SEQ ID NO: 167489 - DNA, 25 bp, Probe sequence
gaattacaactattggtggtattaa

SEQ ID NO: 167490 - DNA, 25 bp, Probe sequence
gaaacaactgttgttattacagtta

SEQ ID NO: 167491 - DNA, 25 bp, Probe sequence
gtcgtaatttttgcggttatgtatt

SEQ ID NO: 167492 - DNA, 25 bp, Probe sequence
gatgatcagaccacaacaaaaacgt

SEQ ID NO: 167493 - DNA, 25 bp, Probe sequence
gtatttcttgatgatcagaccacaa

SEQ ID NO: 167494 - DNA, 25 bp, Probe sequence
gtaatttttgcggttatgtatttct

SEQ ID NO: 167495 - DNA, 25 bp, Probe sequence
gtgcgaaacagcatcgtgagttgat

SEQ ID NO: 167496 - DNA, 25 bp, Probe sequence
ggtcatggtactgaattaactttcg

SEQ ID NO: 167497 - DNA, 25 bp, Probe sequence
ggtattaaaggtactgttaaagcag

SEQ ID NO: 167498 - DNA, 25 bp, Probe sequence
tgaattaactttcgaaaaacctgct

SEQ ID NO: 167499 - DNA, 25 bp, Probe sequence
tgcggttatgtatttcttgatgatc

SEQ ID NO: 167500 - DNA, 25 bp, Probe sequence
taataacattcaatctggtcaaaga

SEQ ID NO: 167501 - DNA, 25 bp, Probe sequence
tagtcgtaatttttgcggttatgta

SEQ ID NO: 167502 - DNA, 25 bp, Probe sequence
tattaaacaagttgacccttcataa

SEQ ID NO: 167503 - DNA, 25 bp, Probe sequence
tattacagttaatggtcatggtact

SEQ ID NO: 167504 - DNA, 25 bp, Probe sequence
tattggtggtattaaaggtactgtt

SEQ ID NO: 167505 - DNA, 25 bp, Probe sequence
tttgcggttatgtatttcttgatga

SEQ ID NO: 167506 - DNA, 25 bp, Probe sequence
ttcgaaaaacctgctattaaacaag

SEQ ID NO: 167507 - DNA, 25 bp, Probe sequence
ttcttgatgatcagaccacaacaaa

SEQ ID NO: 167508 - DNA, 25 bp, Probe sequence
atttgatgaatgtccaccgatgcct

SEQ ID NO: 167509 - DNA, 25 bp, Probe sequence
atttgcagatgatttaagaccgtta

SEQ ID NO: 167510 - DNA, 25 bp, Probe sequence
atgcctgcagtaacatacgaacaca

SEQ ID NO: 167511 - DNA, 25 bp, Probe sequence
atgcacaccaaagacctgaagatca

SEQ ID NO: 167512 - DNA, 25 bp, Probe sequence
atgggtgtaggatctccagatgcgt

SEQ ID NO: 167513 - DNA, 25 bp, Probe sequence
agcgtatatacgtcatttaatcaag

SEQ ID NO: 167514 - DNA, 25 bp, Probe sequence
acatcgcaaggtcgtttagttatta

SEQ ID NO: 167515 - DNA, 25 bp, Probe sequence
acaatcaggtgcgcgtttaggtatc

SEQ ID NO: 167516 - DNA, 25 bp, Probe sequence
aacacctatgtttatgccagttggt

SEQ ID NO: 167517 - DNA, 25 bp, Probe sequence
aagccattcgagaagatcgtctttt

SEQ ID NO: 167518 - DNA, 25 bp, Probe sequence
aatcattttgggcaacacatatcat

SEQ ID NO: 167519 - DNA, 25 bp, Probe sequence
gatcaagcattgttcggcattatac

SEQ ID NO: 167520 - DNA, 25 bp, Probe sequence
aattagattttcctggttatgcaat

SEQ ID NO: 167521 - DNA, 25 bp, Probe sequence
gccagttggtactaaagcaaccgtt

SEQ ID NO: 167522 - DNA, 25 bp, Probe sequence
gcagaggaaacttttggtattcgtc

SEQ ID NO: 167523 - DNA, 25 bp, Probe sequence
gaaggcgtggaatttagacatcata

SEQ ID NO: 167524 - DNA, 25 bp, Probe sequence
gaagaattcttcgagcaatatggat

SEQ ID NO: 167525 - DNA, 25 bp, Probe sequence
gaacatacagagcagtttatgccta

SEQ ID NO: 167526 - DNA, 25 bp, Probe sequence
gaaaagatgtctagatgcacaccaa

SEQ ID NO: 167527 - DNA, 25 bp, Probe sequence
gaaatggtacttgtatgacatcgca

SEQ ID NO: 167528 - DNA, 25 bp, Probe sequence
gattcaggcggtttccaagtgttta

SEQ ID NO: 167529 - DNA, 25 bp, Probe sequence
gtagtattcgcggcatggatatgtt

SEQ ID NO: 167530 - DNA, 25 bp, Probe sequence
gggtctaaattatttttgagtcctg

SEQ ID NO: 167531 - DNA, 25 bp, Probe sequence
ggtattcgtcttactactattcata

SEQ ID NO: 167532 - DNA, 25 bp, Probe sequence
ggatctccagatgcgttaatcgaat

SEQ ID NO: 167533 - DNA, 25 bp, Probe sequence
ggatatgtttgattgtgtcttaccg

SEQ ID NO: 167534 - DNA, 25 bp, Probe sequence
tgtcttaccgacacgtattgccaga

SEQ ID NO: 167535 - DNA, 25 bp, Probe sequence
tgtcagttggtgaacctaaaccggt

SEQ ID NO: 167536 - DNA, 25 bp, Probe sequence
tccaccgatgcctgctgaatatgat

SEQ ID NO: 167537 - DNA, 25 bp, Probe sequence
tgcacacaccacacggttcatttga

SEQ ID NO: 167538 - DNA, 25 bp, Probe sequence
tcaaacacgctgggggattacataa

SEQ ID NO: 167539 - DNA, 25 bp, Probe sequence
tatcatttgtggttacaacccggaa

SEQ ID NO: 167540 - DNA, 25 bp, Probe sequence
tattcataatttacattttctgcta

SEQ ID NO: 167541 - DNA, 25 bp, Probe sequence
tttaggtatcgtgcacacaccacac

SEQ ID NO: 167542 - DNA, 25 bp, Probe sequence
attgatggccagattactaattttc

SEQ ID NO: 167543 - DNA, 25 bp, Probe sequence
attgctcaaacgcctttaaaagatc

SEQ ID NO: 167544 - DNA, 25 bp, Probe sequence
attaggggaaatgccactgccacca

SEQ ID NO: 167545 - DNA, 25 bp, Probe sequence
atttgttgaaacgagtggctggact

SEQ ID NO: 167546 - DNA, 25 bp, Probe sequence
atatcgcatttgttacattacatgt

SEQ ID NO: 167547 - DNA, 25 bp, Probe sequence
atagtcgtttattagtcatggatag

SEQ ID NO: 167548 - DNA, 25 bp, Probe sequence
atcatgcgtttacattatgaaggta

SEQ ID NO: 167549 - DNA, 25 bp, Probe sequence
atcattgagtattttagacctggtg

SEQ ID NO: 167550 - DNA, 25 bp, Probe sequence
atgacacaagaaacagctgatttat

SEQ ID NO: 167551 - DNA, 25 bp, Probe sequence
agattctttagttttggcgatgcaa

SEQ ID NO: 167552 - DNA, 25 bp, Probe sequence
agaacgtttagatgatccagatcgt

SEQ ID NO: 167553 - DNA, 25 bp, Probe sequence
agaatttgactatgacttaccagaa

SEQ ID NO: 167554 - DNA, 25 bp, Probe sequence
acattagtgcttaacgatacgcgag

SEQ ID NO: 167555 - DNA, 25 bp, Probe sequence
aaagtggttcagcggcagcaccaac

SEQ ID NO: 167556 - DNA, 25 bp, Probe sequence
aagatcgtgatcatagtcgtttatt

SEQ ID NO: 167557 - DNA, 25 bp, Probe sequence
aatgccagctagactttttggttta

SEQ ID NO: 167558 - DNA, 25 bp, Probe sequence
aatatatttatttatccaggatttg

SEQ ID NO: 167559 - DNA, 25 bp, Probe sequence
cagattactaattttcatttaccaa

SEQ ID NO: 167560 - DNA, 25 bp, Probe sequence
ccactgccaccatacatcaaagaac

SEQ ID NO: 167561 - DNA, 25 bp, Probe sequence
gccaccatacatcaaagaacgttta

SEQ ID NO: 167562 - DNA, 25 bp, Probe sequence
gaatcattaattgctcaaacgcctt

SEQ ID NO: 167563 - DNA, 25 bp, Probe sequence
gaaaccagctaagcgtattaaagtt

SEQ ID NO: 167564 - DNA, 25 bp, Probe sequence
gagtggctggactaatatatttatt

SEQ ID NO: 167565 - DNA, 25 bp, Probe sequence
gatccagatcgttatcaaacagttt

SEQ ID NO: 167566 - DNA, 25 bp, Probe sequence
gatacgcgagtaatgccagctagac

SEQ ID NO: 167567 - DNA, 25 bp, Probe sequence
gttatgctagtatcagcgtttagta

SEQ ID NO: 167568 - DNA, 25 bp, Probe sequence
gtgaaaatgttctgaatgcttataa

SEQ ID NO: 167569 - DNA, 25 bp, Probe sequence
gggaagtcttactgaaaccagctaa

SEQ ID NO: 167570 - DNA, 25 bp, Probe sequence
ggtacaacttcaacacgtacacttg

SEQ ID NO: 167571 - DNA, 25 bp, Probe sequence
ggattacattttactgatgagttat

SEQ ID NO: 167572 - DNA, 25 bp, Probe sequence
tagacctggtgatacattagtgctt

SEQ ID NO: 167573 - DNA, 25 bp, Probe sequence
taggtacgtttagaccggtgagcgt

SEQ ID NO: 167574 - DNA, 25 bp, Probe sequence
ttcgacgcgatcatgataaatttgt

SEQ ID NO: 167575 - DNA, 25 bp, Probe sequence
ttggcgatgcaatgttaattatata

SEQ ID NO: 167576 - DNA, 25 bp, Probe sequence
attgaggacgtttatgagccatttc

SEQ ID NO: 167577 - DNA, 25 bp, Probe sequence
atacgtacagtatcagggccttcat

SEQ ID NO: 167578 - DNA, 25 bp, Probe sequence
aggcgatgaggctagaagtatccgt

SEQ ID NO: 167579 - DNA, 25 bp, Probe sequence
agggatcgatttggtgtgcacttaa

SEQ ID NO: 167580 - DNA, 25 bp, Probe sequence
agatcatgtattgctttttggcccc

SEQ ID NO: 167581 - DNA, 25 bp, Probe sequence
agcacgcattaggtttacttcaagt

SEQ ID NO: 167582 - DNA, 25 bp, Probe sequence
aacttcgtcatgaaccattagatca

SEQ ID NO: 167583 - DNA, 25 bp, Probe sequence
aacattatctaatatcattgccaat

SEQ ID NO: 167584 - DNA, 25 bp, Probe sequence
aagcggctaaacttcgtcatgaacc

SEQ ID NO: 167585 - DNA, 25 bp, Probe sequence
aagacctggtgatttggctgcaatt

SEQ ID NO: 167586 - DNA, 25 bp, Probe sequence
cacagactgagtagtgttgttgaag

SEQ ID NO: 167587 - DNA, 25 bp, Probe sequence
ctccattcactttggtaggtgcaac

SEQ ID NO: 167588 - DNA, 25 bp, Probe sequence
cgggtaagagacttccagcaagtga

SEQ ID NO: 167589 - DNA, 25 bp, Probe sequence
gctaaacgttctagagggactccaa

SEQ ID NO: 167590 - DNA, 25 bp, Probe sequence
gacttacctccattcactttggtag

SEQ ID NO: 167591 - DNA, 25 bp, Probe sequence
gaagtatccgtatcgacttacctcc

SEQ ID NO: 167592 - DNA, 25 bp, Probe sequence
gcaacaccattagcttatgaacatt

SEQ ID NO: 167593 - DNA, 25 bp, Probe sequence
gaattgtcgcttagacctacgagat

SEQ ID NO: 167594 - DNA, 25 bp, Probe sequence
gaatgagcgtatggttgatcaatca

SEQ ID NO: 167595 - DNA, 25 bp, Probe sequence
gaacagctgaggttttaggcacagg

SEQ ID NO: 167596 - DNA, 25 bp, Probe sequence
gaaactgatttcgaattgtcgctta

SEQ ID NO: 167597 - DNA, 25 bp, Probe sequence
gaggttttaggcacaggtattgatg

SEQ ID NO: 167598 - DNA, 25 bp, Probe sequence
gatcaacacggactagattacattg

SEQ ID NO: 167599 - DNA, 25 bp, Probe sequence
gtttatgagccatttcttattcaga

SEQ ID NO: 167600 - DNA, 25 bp, Probe sequence
gtgatttggctgcaattttatcagg

SEQ ID NO: 167601 - DNA, 25 bp, Probe sequence
gtggcagaaaagcaacaccattagc

SEQ ID NO: 167602 - DNA, 25 bp, Probe sequence
gggccttcattagaaagacctggtg

SEQ ID NO: 167603 - DNA, 25 bp, Probe sequence
ggtttacttcaagttgatcaacacg

SEQ ID NO: 167604 - DNA, 25 bp, Probe sequence
ggacctgttggtttagatacgattg

SEQ ID NO: 167605 - DNA, 25 bp, Probe sequence
tggcccccctggattaggtaagaca

SEQ ID NO: 167606 - DNA, 25 bp, Probe sequence
tcagaaaggctttttagaacgtacg

SEQ ID NO: 167607 - DNA, 25 bp, Probe sequence
taacaggtccactaagggatcgatt

SEQ ID NO: 167608 - DNA, 25 bp, Probe sequence
tagacctacgagattacgacaatat

SEQ ID NO: 167609 - DNA, 25 bp, Probe sequence
tataccctgcaatggaagatttctt

SEQ ID NO: 167610 - DNA, 25 bp, Probe sequence
attcaaacaccaaattcttatcgtt

SEQ ID NO: 167611 - DNA, 25 bp, Probe sequence
attattgtatggatttagtagtgaa

SEQ ID NO: 167612 - DNA, 25 bp, Probe sequence
atatgactcagttgatgaagctgtt

SEQ ID NO: 167613 - DNA, 25 bp, Probe sequence
atcagctttagctattttagcgaca

SEQ ID NO: 167614 - DNA, 25 bp, Probe sequence
atgtacgcgtatgtcaaaggtaagt

SEQ ID NO: 167615 - DNA, 25 bp, Probe sequence
aggtaagttaacacatttatatcct

SEQ ID NO: 167616 - DNA, 25 bp, Probe sequence
aggtcttcaattagttgtatcttaa

SEQ ID NO: 167617 - DNA, 25 bp, Probe sequence
agatatgttcttgagtttaattaaa

SEQ ID NO: 167618 - DNA, 25 bp, Probe sequence
actggtattggtccgaaatcagctt

SEQ ID NO: 167619 - DNA, 25 bp, Probe sequence
actgctggtgttggttatgaaattc

SEQ ID NO: 167620 - DNA, 25 bp, Probe sequence
aaagcatctagatcatgaagtttta

SEQ ID NO: 167621 - DNA, 25 bp, Probe sequence
aacacatttatatcctacacacgta

SEQ ID NO: 167622 - DNA, 25 bp, Probe sequence
aacgagagcttgcaaaagttgagaa

SEQ ID NO: 167623 - DNA, 25 bp, Probe sequence
aagaagcaatgttagcgttagaagc

SEQ ID NO: 167624 - DNA, 25 bp, Probe sequence
aagaaaacggcaagacagattgtct

SEQ ID NO: 167625 - DNA, 25 bp, Probe sequence
aattcttatcgttttcaaaagcatc

SEQ ID NO: 167626 - DNA, 25 bp, Probe sequence
cacacgtagttgttgaaactgctgg

SEQ ID NO: 167627 - DNA, 25 bp, Probe sequence
gcaagatcaattcgtgcaagaagca

SEQ ID NO: 167628 - DNA, 25 bp, Probe sequence
gaagtaaaacgtgccattgaaaatg

SEQ ID NO: 167629 - DNA, 25 bp, Probe sequence
gaagatagcgattcattattacaag

SEQ ID NO: 167630 - DNA, 25 bp, Probe sequence
gaagctgttaaggcaggtcttcaat

SEQ ID NO: 167631 - DNA, 25 bp, Probe sequence
gacagattgtcttagatttaaaagg

SEQ ID NO: 167632 - DNA, 25 bp, Probe sequence
gatacgtatttaactaaattcccag

SEQ ID NO: 167633 - DNA, 25 bp, Probe sequence
gattcattattacaagtagacgcta

SEQ ID NO: 167634 - DNA, 25 bp, Probe sequence
gttgttgaaactgctggtgttggtt

SEQ ID NO: 167635 - DNA, 25 bp, Probe sequence
gttcgtgaagatgcacaattattgt

SEQ ID NO: 167636 - DNA, 25 bp, Probe sequence
gttagcgttagaagcattaggttat

SEQ ID NO: 167637 - DNA, 25 bp, Probe sequence
gtattggtccgaaatcagctttagc

SEQ ID NO: 167638 - DNA, 25 bp, Probe sequence
ggttattctaaacgagagcttgcaa

SEQ ID NO: 167639 - DNA, 25 bp, Probe sequence
ggcaggtcttcaattagttgtatct

SEQ ID NO: 167640 - DNA, 25 bp, Probe sequence
tcgttttcaaaagcatctagatcat

SEQ ID NO: 167641 - DNA, 25 bp, Probe sequence
tacatctttaattgttcgtgaagat

SEQ ID NO: 167642 - DNA, 25 bp, Probe sequence
tatatcctacacacgtagttgttga

SEQ ID NO: 167643 - DNA, 25 bp, Probe sequence
ttggtccgaaatcagctttagctat

SEQ ID NO: 167644 - DNA, 25 bp, Probe sequence
attatcactgaatgctaaatctaaa

SEQ ID NO: 167645 - DNA, 25 bp, Probe sequence
atccgacattgtccatttatgatgc

SEQ ID NO: 167646 - DNA, 25 bp, Probe sequence
atgtcttgcctgaatccgtggttaa

SEQ ID NO: 167647 - DNA, 25 bp, Probe sequence
agtgatccgacattgtccatttatg

SEQ ID NO: 167648 - DNA, 25 bp, Probe sequence
agaagatgtcttgcctgaatccgtg

SEQ ID NO: 167649 - DNA, 25 bp, Probe sequence
aaagcaacaataacattatcactga

SEQ ID NO: 167650 - DNA, 25 bp, Probe sequence
taaaaagtgatccgacattgtccat

SEQ ID NO: 167651 - DNA, 25 bp, Probe sequence
aacattgaagattaaagatgcctta

SEQ ID NO: 167652 - DNA, 25 bp, Probe sequence
aatgcttgaccatcgagaatttaca

SEQ ID NO: 167653 - DNA, 25 bp, Probe sequence
cattgtccatttatgatgccgttaa

SEQ ID NO: 167654 - DNA, 25 bp, Probe sequence
cgttaaacagtttgatctatctaga

SEQ ID NO: 167655 - DNA, 25 bp, Probe sequence
gcctgaatccgtggttaaaacattg

SEQ ID NO: 167656 - DNA, 25 bp, Probe sequence
gctaaatctaaagaaacttcagtag

SEQ ID NO: 167657 - DNA, 25 bp, Probe sequence
gcttgaccatcgagaatttacatta

SEQ ID NO: 167658 - DNA, 25 bp, Probe sequence
gaatccgtggttaaaacattgaaga

SEQ ID NO: 167659 - DNA, 25 bp, Probe sequence
gaactatctgtattaacgattcatc

SEQ ID NO: 167660 - DNA, 25 bp, Probe sequence
gaaacgatatttccagtagacgata

SEQ ID NO: 167661 - DNA, 25 bp, Probe sequence
gacattgtccatttatgatgccgtt

SEQ ID NO: 167662 - DNA, 25 bp, Probe sequence
gaccatcgagaatttacattaattt

SEQ ID NO: 167663 - DNA, 25 bp, Probe sequence
gagaagatgtcttgcctgaatccgt

SEQ ID NO: 167664 - DNA, 25 bp, Probe sequence
gatgttatatcaaagttagaactat

SEQ ID NO: 167665 - DNA, 25 bp, Probe sequence
gatgccgttaaacagtttgatctat

SEQ ID NO: 167666 - DNA, 25 bp, Probe sequence
gatgccttaaaaagtgatccgacat

SEQ ID NO: 167667 - DNA, 25 bp, Probe sequence
gatctatctagaagtgctttttata

SEQ ID NO: 167668 - DNA, 25 bp, Probe sequence
gataaaatgcttgaccatcgagaat

SEQ ID NO: 167669 - DNA, 25 bp, Probe sequence
gattcatcaaagtattccaatggaa

SEQ ID NO: 167670 - DNA, 25 bp, Probe sequence
gttggcacgtgtactagatgttata

SEQ ID NO: 167671 - DNA, 25 bp, Probe sequence
gtcttgcctgaatccgtggttaaaa

SEQ ID NO: 167672 - DNA, 25 bp, Probe sequence
gtagacgataaaatgcttgaccatc

SEQ ID NO: 167673 - DNA, 25 bp, Probe sequence
gtccatttatgatgccgttaaacag

SEQ ID NO: 167674 - DNA, 25 bp, Probe sequence
ggtatgttggcacgtgtactagatg

SEQ ID NO: 167675 - DNA, 25 bp, Probe sequence
ggcacgtgtactagatgttatatca

SEQ ID NO: 167676 - DNA, 25 bp, Probe sequence
taacgattcatcaaagtattccaat

SEQ ID NO: 167677 - DNA, 25 bp, Probe sequence
tatgatgccgttaaacagtttgatc

SEQ ID NO: 167678 - DNA, 25 bp, Probe sequence
agacctcaaatcgtagtagctaaca

SEQ ID NO: 167679 - DNA, 25 bp, Probe sequence
accctgcacctgacttcagtgaaaa

SEQ ID NO: 167680 - DNA, 25 bp, Probe sequence
aagatggtcaaagagctgtagtagc

SEQ ID NO: 167681 - DNA, 25 bp, Probe sequence
aatcgactttattatctatcgtttc

SEQ ID NO: 167682 - DNA, 25 bp, Probe sequence
aatatctcttaaagccggtgatggt

SEQ ID NO: 167683 - DNA, 25 bp, Probe sequence
gaccagctggcggtgacggtggtaa

SEQ ID NO: 167684 - DNA, 25 bp, Probe sequence
gccggtgatggtggtaatggtatta

SEQ ID NO: 167685 - DNA, 25 bp, Probe sequence
gcggtgacggtggtaaaggtgcttc

SEQ ID NO: 167686 - DNA, 25 bp, Probe sequence
gcggtcgaggtggccgaggtaattc

SEQ ID NO: 167687 - DNA, 25 bp, Probe sequence
gcagtacgtcgatttgctcgtcaaa

SEQ ID NO: 167688 - DNA, 25 bp, Probe sequence
gcaacgtttagaagatagacctcaa

SEQ ID NO: 167689 - DNA, 25 bp, Probe sequence
gtagcgaagggcggtcgaggtggcc

SEQ ID NO: 167690 - DNA, 25 bp, Probe sequence
gaaggtgcatctgatggcgttggat

SEQ ID NO: 167691 - DNA, 25 bp, Probe sequence
gaagtgttagcagatcttgttgaag

SEQ ID NO: 167692 - DNA, 25 bp, Probe sequence
gagatgatgatggtgcttatgtggt

SEQ ID NO: 167693 - DNA, 25 bp, Probe sequence
gatggatttacctgaatcacaagat

SEQ ID NO: 167694 - DNA, 25 bp, Probe sequence
gatccagcagtacgtcgatttgctc

SEQ ID NO: 167695 - DNA, 25 bp, Probe sequence
gatatcgttagaattcttggcggag

SEQ ID NO: 167696 - DNA, 25 bp, Probe sequence
gttggcattaaccgagtattatata

SEQ ID NO: 167697 - DNA, 25 bp, Probe sequence
gtaccatttggtggaccagctggcg

SEQ ID NO: 167698 - DNA, 25 bp, Probe sequence
gttatggcagatttaccaggtttaa

SEQ ID NO: 167699 - DNA, 25 bp, Probe sequence
gtaattcacgttttgcaacacctag

SEQ ID NO: 167700 - DNA, 25 bp, Probe sequence
gtaaaggtgcttcagtcgtatttga

SEQ ID NO: 167701 - DNA, 25 bp, Probe sequence
gtcgatcaagtcaaaatatctctta

SEQ ID NO: 167702 - DNA, 25 bp, Probe sequence
gtgccagttattccagtttcaacaa

SEQ ID NO: 167703 - DNA, 25 bp, Probe sequence
ggggcatatcattttacaacgatta

SEQ ID NO: 167704 - DNA, 25 bp, Probe sequence
ggattagtaggtttccctagtgtgg

SEQ ID NO: 167705 - DNA, 25 bp, Probe sequence
ggcgttggattaggacatcaatttt

SEQ ID NO: 167706 - DNA, 25 bp, Probe sequence
ggcgaagatgtgccagttattccag

SEQ ID NO: 167707 - DNA, 25 bp, Probe sequence
tggccgaggtaattcacgttttgca

SEQ ID NO: 167708 - DNA, 25 bp, Probe sequence
tgctcgtcaaatgcgttcgatgggt

SEQ ID NO: 167709 - DNA, 25 bp, Probe sequence
tccctagtgtgggtaaatcgacttt

SEQ ID NO: 167710 - DNA, 25 bp, Probe sequence
tctatcgtttcaaaagctaagccta

SEQ ID NO: 167711 - DNA, 25 bp, Probe sequence
ttgcaacacctagaaaccctgcacc

SEQ ID NO: 167712 - DNA, 25 bp, Probe sequence
caattcttcgcatctaaaaaagggg

SEQ ID NO: 167713 - DNA, 25 bp, Probe sequence
acttacaattcttcgcatctaaaaa

SEQ ID NO: 167714 - DNA, 25 bp, Probe sequence
aacgtgctgacggtcaattcgtaac

SEQ ID NO: 167715 - DNA, 25 bp, Probe sequence
acaggtggttcaattttatatcgcc

SEQ ID NO: 167716 - DNA, 25 bp, Probe sequence
aaatgtaggtcgtggtggcgatgat

SEQ ID NO: 167717 - DNA, 25 bp, Probe sequence
aaaacggacgtgactctgaatcaaa

SEQ ID NO: 167718 - DNA, 25 bp, Probe sequence
caattttatatcgccaacgtggtac

SEQ ID NO: 167719 - DNA, 25 bp, Probe sequence
caagtttctgtatatgcagtagctg

SEQ ID NO: 167720 - DNA, 25 bp, Probe sequence
cattattcgctaaaatcgacggcgt

SEQ ID NO: 167721 - DNA, 25 bp, Probe sequence
cggacgtgactctgaatcaaaacgc

SEQ ID NO: 167722 - DNA, 25 bp, Probe sequence
gctgacggtcaattcgtaacaggtg

SEQ ID NO: 167723 - DNA, 25 bp, Probe sequence
gaatcaaaacgcttaggtgctaaac

SEQ ID NO: 167724 - DNA, 25 bp, Probe sequence
gactctgaatcaaaacgcttaggtg

SEQ ID NO: 167725 - DNA, 25 bp, Probe sequence
gacggtcaattcgtaacaggtggtt

SEQ ID NO: 167726 - DNA, 25 bp, Probe sequence
gacgtgactctgaatcaaaacgctt

SEQ ID NO: 167727 - DNA, 25 bp, Probe sequence
gatgatacattattcgctaaaatcg

SEQ ID NO: 167728 - DNA, 25 bp, Probe sequence
gtttctgtatatgcagtagctgaat

SEQ ID NO: 167729 - DNA, 25 bp, Probe sequence
gtaggtcgtggtggcgatgatacat

SEQ ID NO: 167730 - DNA, 25 bp, Probe sequence
gtgctgacggtcaattcgtaacagg

SEQ ID NO: 167731 - DNA, 25 bp, Probe sequence
gtgaaaatgtaggtcgtggtggcga

SEQ ID NO: 167732 - DNA, 25 bp, Probe sequence
ggtggcgatgatacattattcgcta

SEQ ID NO: 167733 - DNA, 25 bp, Probe sequence
ggtggttcaattttatatcgccaac

SEQ ID NO: 167734 - DNA, 25 bp, Probe sequence
ggtgctaaacgtgctgacggtcaat

SEQ ID NO: 167735 - DNA, 25 bp, Probe sequence
ggtcgcgacaaaaaacaagtttctg

SEQ ID NO: 167736 - DNA, 25 bp, Probe sequence
ggtcgtggtggcgatgatacattat

SEQ ID NO: 167737 - DNA, 25 bp, Probe sequence
ggtcaattcgtaacaggtggttcaa

SEQ ID NO: 167738 - DNA, 25 bp, Probe sequence
ggttcaattttatatcgccaacgtg

SEQ ID NO: 167739 - DNA, 25 bp, Probe sequence
tgctaaacgtgctgacggtcaattc

SEQ ID NO: 167740 - DNA, 25 bp, Probe sequence
tctacaaaaaacggacgtgactctg

SEQ ID NO: 167741 - DNA, 25 bp, Probe sequence
taaacgtgctgacggtcaattcgta

SEQ ID NO: 167742 - DNA, 25 bp, Probe sequence
taggtgctaaacgtgctgacggtca

SEQ ID NO: 167743 - DNA, 25 bp, Probe sequence
tatcgccaacgtggtactaaaattt

SEQ ID NO: 167744 - DNA, 25 bp, Probe sequence
tttatatcgccaacgtggtactaaa

SEQ ID NO: 167745 - DNA, 25 bp, Probe sequence
ttaccctggtgaaaatgtaggtcgt

SEQ ID NO: 167746 - DNA, 25 bp, Probe sequence
attatggatggccatgctgaccatg

SEQ ID NO: 167747 - DNA, 25 bp, Probe sequence
ataggattgacatctgagagaccag

SEQ ID NO: 167748 - DNA, 25 bp, Probe sequence
atcgtttgtgctggagcttcagctg

SEQ ID NO: 167749 - DNA, 25 bp, Probe sequence
atgatatcgtttgtgctggagcttc

SEQ ID NO: 167750 - DNA, 25 bp, Probe sequence
atggatggccatgctgaccatggtg

SEQ ID NO: 167751 - DNA, 25 bp, Probe sequence
atggtcatgatatcgtttgtgctgg

SEQ ID NO: 167752 - DNA, 25 bp, Probe sequence
agcgcaactaattcttcaaacaatg

SEQ ID NO: 167753 - DNA, 25 bp, Probe sequence
aactaattcttcaaacaatgcttgt

SEQ ID NO: 167754 - DNA, 25 bp, Probe sequence
aacgatgaagcgcaactaattcttc

SEQ ID NO: 167755 - DNA, 25 bp, Probe sequence
aatgcgattataggattgacatctg

SEQ ID NO: 167756 - DNA, 25 bp, Probe sequence
aattcttcaaacaatgcttgtgtct

SEQ ID NO: 167757 - DNA, 25 bp, Probe sequence
gcttcagctgtattgtttggtagtg

SEQ ID NO: 167758 - DNA, 25 bp, Probe sequence
gacaatggtggtcattttcatataa

SEQ ID NO: 167759 - DNA, 25 bp, Probe sequence
gacgttattatggatggccatgctg

SEQ ID NO: 167760 - DNA, 25 bp, Probe sequence
gacgacaatggtggtcattttcata

SEQ ID NO: 167761 - DNA, 25 bp, Probe sequence
gaccagatatcaattatgacgacaa

SEQ ID NO: 167762 - DNA, 25 bp, Probe sequence
gagcttcagctgtattgtttggtag

SEQ ID NO: 167763 - DNA, 25 bp, Probe sequence
gagagaccagatatcaattatgacg

SEQ ID NO: 167764 - DNA, 25 bp, Probe sequence
gatggccatgctgaccatggtgaat

SEQ ID NO: 167765 - DNA, 25 bp, Probe sequence
gatgaaggcaaagtaacagacgtta

SEQ ID NO: 167766 - DNA, 25 bp, Probe sequence
gatatcgtttgtgctggagcttcag

SEQ ID NO: 167767 - DNA, 25 bp, Probe sequence
gattactgttgatattacagttaat

SEQ ID NO: 167768 - DNA, 25 bp, Probe sequence
gtttgtgctggagcttcagctgtat

SEQ ID NO: 167769 - DNA, 25 bp, Probe sequence
gtcatgatatcgtttgtgctggagc

SEQ ID NO: 167770 - DNA, 25 bp, Probe sequence
gtgctggagcttcagctgtattgtt

SEQ ID NO: 167771 - DNA, 25 bp, Probe sequence
ggtggtcattttcatataagaagcg

SEQ ID NO: 167772 - DNA, 25 bp, Probe sequence
ggtgaatatggtcatgatatcgttt

SEQ ID NO: 167773 - DNA, 25 bp, Probe sequence
ggagcttcagctgtattgtttggta

SEQ ID NO: 167774 - DNA, 25 bp, Probe sequence
ggccatgctgaccatggtgaatatg

SEQ ID NO: 167775 - DNA, 25 bp, Probe sequence
tgtttggtagtgttaatgcgattat

SEQ ID NO: 167776 - DNA, 25 bp, Probe sequence
tcagctgtattgtttggtagtgtta

SEQ ID NO: 167777 - DNA, 25 bp, Probe sequence
tatcaattatgacgacaatggtggt

SEQ ID NO: 167778 - DNA, 25 bp, Probe sequence
ttttcatataagaagcgttgataca

SEQ ID NO: 167779 - DNA, 25 bp, Probe sequence
ttcaaacaatgcttgtgtctttaca

SEQ ID NO: 167780 - DNA, 25 bp, Probe sequence
atacgccaacgatgaccgttttact

SEQ ID NO: 167781 - DNA, 25 bp, Probe sequence
attcgtttcaagagctcgatttaac

SEQ ID NO: 167782 - DNA, 25 bp, Probe sequence
attatcgcaaatgttacgttactca

SEQ ID NO: 167783 - DNA, 25 bp, Probe sequence
atgccatctatatttggattgagca

SEQ ID NO: 167784 - DNA, 25 bp, Probe sequence
atgaaagtcagtcatctttacatca

SEQ ID NO: 167785 - DNA, 25 bp, Probe sequence
agcatcgtacgattcatcaacatgt

SEQ ID NO: 167786 - DNA, 25 bp, Probe sequence
acgtcgcttgcgtgatattcagtta

SEQ ID NO: 167787 - DNA, 25 bp, Probe sequence
actatacgcctgacattggcacgtc

SEQ ID NO: 167788 - DNA, 25 bp, Probe sequence
aacagcccgcaacactttattatga

SEQ ID NO: 167789 - DNA, 25 bp, Probe sequence
aactgtggtccaacaattatcgcaa

SEQ ID NO: 167790 - DNA, 25 bp, Probe sequence
aagttctgaagaagcgcgtcaccag

SEQ ID NO: 167791 - DNA, 25 bp, Probe sequence
cgatcgttatttgcgtctactattt

SEQ ID NO: 167792 - DNA, 25 bp, Probe sequence
cctcatttcctattcaatacgatgc

SEQ ID NO: 167793 - DNA, 25 bp, Probe sequence
gccaaaaatcgtcatctaggtacat

SEQ ID NO: 167794 - DNA, 25 bp, Probe sequence
gctgaccatcgtctcattatttata

SEQ ID NO: 167795 - DNA, 25 bp, Probe sequence
gcaatatgtacgccaatctcttaat

SEQ ID NO: 167796 - DNA, 25 bp, Probe sequence
gaatttacatgttttagtttgcgac

SEQ ID NO: 167797 - DNA, 25 bp, Probe sequence
gaagatggtatcacgttgttaattg

SEQ ID NO: 167798 - DNA, 25 bp, Probe sequence
gaagcgcgtcaccagacaattggta

SEQ ID NO: 167799 - DNA, 25 bp, Probe sequence
gacaattcgcacttatcgttgatca

SEQ ID NO: 167800 - DNA, 25 bp, Probe sequence
gacattggcacgtcagaatttacat

SEQ ID NO: 167801 - DNA, 25 bp, Probe sequence
gacggcatacaaaccttatagacat

SEQ ID NO: 167802 - DNA, 25 bp, Probe sequence
gagcatacagaacgtcgcttgcgtg

SEQ ID NO: 167803 - DNA, 25 bp, Probe sequence
gagcaactgatccattctatcgagc

SEQ ID NO: 167804 - DNA, 25 bp, Probe sequence
gttaattgttatggccgtagttctt

SEQ ID NO: 167805 - DNA, 25 bp, Probe sequence
gttactcattacgtacaaactcaca

SEQ ID NO: 167806 - DNA, 25 bp, Probe sequence
gtcatctcgcctgcaatatgtacgc

SEQ ID NO: 167807 - DNA, 25 bp, Probe sequence
ggactagtaagcttctatgccatct

SEQ ID NO: 167808 - DNA, 25 bp, Probe sequence
tggccgtagttcttgttttactagt

SEQ ID NO: 167809 - DNA, 25 bp, Probe sequence
taaaattaatacaccaacagcccgc

SEQ ID NO: 167810 - DNA, 25 bp, Probe sequence
taaaccatgctgaccatcgtctcat

SEQ ID NO: 167811 - DNA, 25 bp, Probe sequence
ttcaatatggttcacatgcacgact

SEQ ID NO: 167812 - DNA, 25 bp, Probe sequence
ttttcaacgcatcagcttaaattca

SEQ ID NO: 167813 - DNA, 25 bp, Probe sequence
ttacgttatctccgaaattagcaca

SEQ ID NO: 167814 - DNA, 25 bp, Probe sequence
attatttgtaggtggagattcagtt

SEQ ID NO: 167815 - DNA, 25 bp, Probe sequence
atcactgtattcacatacaaacgtc

SEQ ID NO: 167816 - DNA, 25 bp, Probe sequence
accatacactaaattaacaatcgat

SEQ ID NO: 167817 - DNA, 25 bp, Probe sequence
aaaaaggccatcgtcaaccatacac

SEQ ID NO: 167818 - DNA, 25 bp, Probe sequence
aaaaggccatcgtcaaccatacact

SEQ ID NO: 167819 - DNA, 25 bp, Probe sequence
aacaatcgataaaatcaacgcgtaa

SEQ ID NO: 167820 - DNA, 25 bp, Probe sequence
aacgaaggagatacttttacatttg

SEQ ID NO: 167821 - DNA, 25 bp, Probe sequence
aagtattatttgtaggtggagattc

SEQ ID NO: 167822 - DNA, 25 bp, Probe sequence
aaggtgcaacagttactgctactgt

SEQ ID NO: 167823 - DNA, 25 bp, Probe sequence
aaggagatacttttacatttgataa

SEQ ID NO: 167824 - DNA, 25 bp, Probe sequence
cacatacaaacgtcgtaaaaattca

SEQ ID NO: 167825 - DNA, 25 bp, Probe sequence
cactgtattcacatacaaacgtcgt

SEQ ID NO: 167826 - DNA, 25 bp, Probe sequence
catcgtcaaccatacactaaattaa

SEQ ID NO: 167827 - DNA, 25 bp, Probe sequence
cgtaaaaaaggccatcgtcaaccat

SEQ ID NO: 167828 - DNA, 25 bp, Probe sequence
gccatcgtcaaccatacactaaatt

SEQ ID NO: 167829 - DNA, 25 bp, Probe sequence
gcgccaacagttgaaggtgcaacag

SEQ ID NO: 167830 - DNA, 25 bp, Probe sequence
gaaatcttcgttgaaaaattagacg

SEQ ID NO: 167831 - DNA, 25 bp, Probe sequence
gcaacagttactgctactgttaata

SEQ ID NO: 167832 - DNA, 25 bp, Probe sequence
gaaggtgcaacagttactgctactg

SEQ ID NO: 167833 - DNA, 25 bp, Probe sequence
gaaggtcaagaaatcttcgttgaaa

SEQ ID NO: 167834 - DNA, 25 bp, Probe sequence
gaaacaggtggaaaacaaatcaaag

SEQ ID NO: 167835 - DNA, 25 bp, Probe sequence
gagcgccaacagttgaaggtgcaac

SEQ ID NO: 167836 - DNA, 25 bp, Probe sequence
gagattcagttaaagttggagcgcc

SEQ ID NO: 167837 - DNA, 25 bp, Probe sequence
gattcagttaaagttggagcgccaa

SEQ ID NO: 167838 - DNA, 25 bp, Probe sequence
gttggagcgccaacagttgaaggtg

SEQ ID NO: 167839 - DNA, 25 bp, Probe sequence
gtattcacatacaaacgtcgtaaaa

SEQ ID NO: 167840 - DNA, 25 bp, Probe sequence
gtcaaccatacactaaattaacaat

SEQ ID NO: 167841 - DNA, 25 bp, Probe sequence
ggtgcaacagttactgctactgtta

SEQ ID NO: 167842 - DNA, 25 bp, Probe sequence
tggagcgccaacagttgaaggtgca

SEQ ID NO: 167843 - DNA, 25 bp, Probe sequence
tcgtcaaccatacactaaattaaca

SEQ ID NO: 167844 - DNA, 25 bp, Probe sequence
taaaaaaatcactgtattcacatac

SEQ ID NO: 167845 - DNA, 25 bp, Probe sequence
taaaaaaggccatcgtcaaccatac

SEQ ID NO: 167846 - DNA, 25 bp, Probe sequence
tagacgtaaacgaaggagatacttt

SEQ ID NO: 167847 - DNA, 25 bp, Probe sequence
ttgaaggtgcaacagttactgctac

SEQ ID NO: 167848 - DNA, 25 bp, Probe sequence
attgtttttagcacttatagatcga

SEQ ID NO: 167849 - DNA, 25 bp, Probe sequence
atggagtgtacttatttggctatat

SEQ ID NO: 167850 - DNA, 25 bp, Probe sequence
agtctttagattattgccaacatta

SEQ ID NO: 167851 - DNA, 25 bp, Probe sequence
agatcattcgatgttattcattatt

SEQ ID NO: 167852 - DNA, 25 bp, Probe sequence
agcacttatagatcgattctttaaa

SEQ ID NO: 167853 - DNA, 25 bp, Probe sequence
agcaccttattattagaagtctatg

SEQ ID NO: 167854 - DNA, 25 bp, Probe sequence
actttggtagtatttatggagtgta

SEQ ID NO: 167855 - DNA, 25 bp, Probe sequence
acttatttggctatatattgttttt

SEQ ID NO: 167856 - DNA, 25 bp, Probe sequence
acttgtatttgtaccacaccttaca

SEQ ID NO: 167857 - DNA, 25 bp, Probe sequence
acactgtattattttttgataggta

SEQ ID NO: 167858 - DNA, 25 bp, Probe sequence
aaattttttacaaagatcattcgat

SEQ ID NO: 167859 - DNA, 25 bp, Probe sequence
cattattgctcagcatatttttagg

SEQ ID NO: 167860 - DNA, 25 bp, Probe sequence
cgatgttattcattattatattagc

SEQ ID NO: 167861 - DNA, 25 bp, Probe sequence
gcgtacactgtattattttttgata

SEQ ID NO: 167862 - DNA, 25 bp, Probe sequence
gctttggcgtatcattattgctcag

SEQ ID NO: 167863 - DNA, 25 bp, Probe sequence
gaagtctatgtggcattaatatacg

SEQ ID NO: 167864 - DNA, 25 bp, Probe sequence
gaacttgtatttgtaccacacctta

SEQ ID NO: 167865 - DNA, 25 bp, Probe sequence
gagtgtacttatttggctatatatt

SEQ ID NO: 167866 - DNA, 25 bp, Probe sequence
gataggtattttactattttatata

SEQ ID NO: 167867 - DNA, 25 bp, Probe sequence
gatattattcattttgtagtcttta

SEQ ID NO: 167868 - DNA, 25 bp, Probe sequence
gttaggattcattcaatttgatatt

SEQ ID NO: 167869 - DNA, 25 bp, Probe sequence
gtatttgtaccacaccttacattta

SEQ ID NO: 167870 - DNA, 25 bp, Probe sequence
gtttgaacttgtatttgtaccacac

SEQ ID NO: 167871 - DNA, 25 bp, Probe sequence
gtatattttaatgatggtagtgtat

SEQ ID NO: 167872 - DNA, 25 bp, Probe sequence
gtagtctttagattattgccaacat

SEQ ID NO: 167873 - DNA, 25 bp, Probe sequence
gtaccacaccttacatttatgtata

SEQ ID NO: 167874 - DNA, 25 bp, Probe sequence
ggcgtatcattattgctcagcatat

SEQ ID NO: 167875 - DNA, 25 bp, Probe sequence
tctatgtggcattaatatacggtat

SEQ ID NO: 167876 - DNA, 25 bp, Probe sequence
taatgactgatgtatactttggtag

SEQ ID NO: 167877 - DNA, 25 bp, Probe sequence
tagatactgcaattgggcttcttat

SEQ ID NO: 167878 - DNA, 25 bp, Probe sequence
tatccgttgattataaagttcctta

SEQ ID NO: 167879 - DNA, 25 bp, Probe sequence
tatacggtatgttaggattcattca

SEQ ID NO: 167880 - DNA, 25 bp, Probe sequence
ttttagcacttatagatcgattctt

SEQ ID NO: 167881 - DNA, 25 bp, Probe sequence
ttggcgtatcattattgctcagcat

SEQ ID NO: 167882 - DNA, 25 bp, Probe sequence
ataggtgattctgtgtcttttggac

SEQ ID NO: 167883 - DNA, 25 bp, Probe sequence
agaactcagaacttgtaattagtga

SEQ ID NO: 167884 - DNA, 25 bp, Probe sequence
aaatgatcaatacggcttagctaaa

SEQ ID NO: 167885 - DNA, 25 bp, Probe sequence
aagtcgttacaagtggattagctga

SEQ ID NO: 167886 - DNA, 25 bp, Probe sequence
aatctcaactaatacacgtgcgggt

SEQ ID NO: 167887 - DNA, 25 bp, Probe sequence
aatctcaatcacctcctgaacaata

SEQ ID NO: 167888 - DNA, 25 bp, Probe sequence
aatttgatcctatttctactacggt

SEQ ID NO: 167889 - DNA, 25 bp, Probe sequence
caatcacctcctgaacaatatatag

SEQ ID NO: 167890 - DNA, 25 bp, Probe sequence
aattgggctgtccatacgttcacaa

SEQ ID NO: 167891 - DNA, 25 bp, Probe sequence
caaattaattgttgttttatgtgca

SEQ ID NO: 167892 - DNA, 25 bp, Probe sequence
cacgtgcgggtaaattatctgtaaa

SEQ ID NO: 167893 - DNA, 25 bp, Probe sequence
catacgttcacaatctcaatcacct

SEQ ID NO: 167894 - DNA, 25 bp, Probe sequence
ctgtaaatatacaacacggttctaa

SEQ ID NO: 167895 - DNA, 25 bp, Probe sequence
gctgatcaactaccaagtaatttat

SEQ ID NO: 167896 - DNA, 25 bp, Probe sequence
gcaagaaatccggatcagtggatga

SEQ ID NO: 167897 - DNA, 25 bp, Probe sequence
gaagtgactaaggttcaaaatgatc

SEQ ID NO: 167898 - DNA, 25 bp, Probe sequence
gacaacgagttgtgagttatccagt

SEQ ID NO: 167899 - DNA, 25 bp, Probe sequence
gagatcctaaaacaattcctgatga

SEQ ID NO: 167900 - DNA, 25 bp, Probe sequence
gagttatccagttaattttgttgct

SEQ ID NO: 167901 - DNA, 25 bp, Probe sequence
gatgacatcacaaggttttgttgga

SEQ ID NO: 167902 - DNA, 25 bp, Probe sequence
gattctgtgtcttttggacaacgag

SEQ ID NO: 167903 - DNA, 25 bp, Probe sequence
gttaataaattttcttcacaagttg

SEQ ID NO: 167904 - DNA, 25 bp, Probe sequence
gtttatgttgcaaaaagagatccta

SEQ ID NO: 167905 - DNA, 25 bp, Probe sequence
gtggattagctgatcaactaccaag

SEQ ID NO: 167906 - DNA, 25 bp, Probe sequence
gggatctaaatcaggtataacttca

SEQ ID NO: 167907 - DNA, 25 bp, Probe sequence
tgctggtacgattggggactttttt

SEQ ID NO: 167908 - DNA, 25 bp, Probe sequence
taagaaccaacaattagaagcggaa

SEQ ID NO: 167909 - DNA, 25 bp, Probe sequence
taacttcaaatatggctgtgatgac

SEQ ID NO: 167910 - DNA, 25 bp, Probe sequence
ttttgttgctggtacgattggggac

SEQ ID NO: 167911 - DNA, 25 bp, Probe sequence
ttattgcattaattgggctgtccat

SEQ ID NO: 167912 - DNA, 25 bp, Probe sequence
ttatgtgcaattatcgtttttattg

SEQ ID NO: 167913 - DNA, 25 bp, Probe sequence
ttcacaatctcaatcacctcctgaa

SEQ ID NO: 167914 - DNA, 25 bp, Probe sequence
ttcttcacaagttgatttaatctca

SEQ ID NO: 167915 - DNA, 25 bp, Probe sequence
ttgatcctatttctactacggtttt

SEQ ID NO: 167916 - DNA, 25 bp, Probe sequence
atatcgccttgaaatacgcaccttt

SEQ ID NO: 167917 - DNA, 25 bp, Probe sequence
atgagattgatatttagtatgatta

SEQ ID NO: 167918 - DNA, 25 bp, Probe sequence
atggctgtgtctggaatgaatcgca

SEQ ID NO: 167919 - DNA, 25 bp, Probe sequence
acccactaatgatgcccaacatgtt

SEQ ID NO: 167920 - DNA, 25 bp, Probe sequence
acaagacttaaatgaattagggcaa

SEQ ID NO: 167921 - DNA, 25 bp, Probe sequence
aatgaatcaagttacgcaacccact

SEQ ID NO: 167922 - DNA, 25 bp, Probe sequence
gaatcaagttacgcaacccactaat

SEQ ID NO: 167923 - DNA, 25 bp, Probe sequence
gcccaacatgtttatgtaagtggtg

SEQ ID NO: 167924 - DNA, 25 bp, Probe sequence
gcaacccactaatgatgcccaacat

SEQ ID NO: 167925 - DNA, 25 bp, Probe sequence
gaatttgaaatgcaacaagacttaa

SEQ ID NO: 167926 - DNA, 25 bp, Probe sequence
gaatcgcatggcttataatgatcaa

SEQ ID NO: 167927 - DNA, 25 bp, Probe sequence
gaacaagattggaatcctgtaaatc

SEQ ID NO: 167928 - DNA, 25 bp, Probe sequence
gagtttatggctgtgtctggaatga

SEQ ID NO: 167929 - DNA, 25 bp, Probe sequence
gaggagacgaatttattctttataa

SEQ ID NO: 167930 - DNA, 25 bp, Probe sequence
gatgagtcaatgcgtgtttacaata

SEQ ID NO: 167931 - DNA, 25 bp, Probe sequence
gttacgcaacccactaatgatgccc

SEQ ID NO: 167932 - DNA, 25 bp, Probe sequence
gtttatatcgccttgaaatacgcac

SEQ ID NO: 167933 - DNA, 25 bp, Probe sequence
gtaagtggtgagaaatattcattaa

SEQ ID NO: 167934 - DNA, 25 bp, Probe sequence
gtcaatgcgtgtttacaatactgaa

SEQ ID NO: 167935 - DNA, 25 bp, Probe sequence
gtctggaatgaatcgcatggcttat

SEQ ID NO: 167936 - DNA, 25 bp, Probe sequence
gtgataattgtttatatcgccttga

SEQ ID NO: 167937 - DNA, 25 bp, Probe sequence
gtgtctggaatgaatcgcatggctt

SEQ ID NO: 167938 - DNA, 25 bp, Probe sequence
ggtcaaagaggagacgaatttattc

SEQ ID NO: 167939 - DNA, 25 bp, Probe sequence
ggagatgagtcaatgcgtgtttaca

SEQ ID NO: 167940 - DNA, 25 bp, Probe sequence
ggaatcctgtaaatcacgataatga

SEQ ID NO: 167941 - DNA, 25 bp, Probe sequence
ggctgtgtctggaatgaatcgcatg

SEQ ID NO: 167942 - DNA, 25 bp, Probe sequence
tgtaccattaagccaaattaaaaat

SEQ ID NO: 167943 - DNA, 25 bp, Probe sequence
tgaattagggcaaaatttacaacta

SEQ ID NO: 167944 - DNA, 25 bp, Probe sequence
tgcgtgtttacaatactgaatttga

SEQ ID NO: 167945 - DNA, 25 bp, Probe sequence
tcgcatggcttataatgatcaatat

SEQ ID NO: 167946 - DNA, 25 bp, Probe sequence
tcaagttacgcaacccactaatgat

SEQ ID NO: 167947 - DNA, 25 bp, Probe sequence
taatgatgcccaacatgtttatgta

SEQ ID NO: 167948 - DNA, 25 bp, Probe sequence
tacgcaacccactaatgatgcccaa

SEQ ID NO: 167949 - DNA, 25 bp, Probe sequence
tatagcagtaatagcaattgtgata

SEQ ID NO: 167950 - DNA, 25 bp, Probe sequence
ctatttattattatcggggttctcg

SEQ ID NO: 167951 - DNA, 25 bp, Probe sequence
attagctttatctacgttaggtatt

SEQ ID NO: 167952 - DNA, 25 bp, Probe sequence
attattatcggggttctcgtgccaa

SEQ ID NO: 167953 - DNA, 25 bp, Probe sequence
atacgatttttatctaacgcatttg

SEQ ID NO: 167954 - DNA, 25 bp, Probe sequence
atgaacctgtaacaaagcgcaatct

SEQ ID NO: 167955 - DNA, 25 bp, Probe sequence
agtggtagctacgcgctgatacgat

SEQ ID NO: 167956 - DNA, 25 bp, Probe sequence
agcttttcctttattaagtgtagca

SEQ ID NO: 167957 - DNA, 25 bp, Probe sequence
agctacgcgctgatacgatttttat

SEQ ID NO: 167958 - DNA, 25 bp, Probe sequence
actaagtggtagctacgcgctgata

SEQ ID NO: 167959 - DNA, 25 bp, Probe sequence
aacattagctttatctacgttaggt

SEQ ID NO: 167960 - DNA, 25 bp, Probe sequence
aatgaacctgtaacaaagcgcaatc

SEQ ID NO: 167961 - DNA, 25 bp, Probe sequence
cttttcctttattaagtgtagcaat

SEQ ID NO: 167962 - DNA, 25 bp, Probe sequence
cgcgctgatacgatttttatctaac

SEQ ID NO: 167963 - DNA, 25 bp, Probe sequence
gctacgcgctgatacgatttttatc

SEQ ID NO: 167964 - DNA, 25 bp, Probe sequence
gctttatctacgttaggtattttag

SEQ ID NO: 167965 - DNA, 25 bp, Probe sequence
gactctatttattattatcggggtt

SEQ ID NO: 167966 - DNA, 25 bp, Probe sequence
gatttttatctaacgcatttgggcg

SEQ ID NO: 167967 - DNA, 25 bp, Probe sequence
gttctcgtgccaatggtttatacca

SEQ ID NO: 167968 - DNA, 25 bp, Probe sequence
gtttataccatgcagttaaatatta

SEQ ID NO: 167969 - DNA, 25 bp, Probe sequence
gtagctacgcgctgatacgattttt

SEQ ID NO: 167970 - DNA, 25 bp, Probe sequence
gtgactctatttattattatcgggg

SEQ ID NO: 167971 - DNA, 25 bp, Probe sequence
gtggtagctacgcgctgatacgatt

SEQ ID NO: 167972 - DNA, 25 bp, Probe sequence
gggttctcgtgccaatggtttatac

SEQ ID NO: 167973 - DNA, 25 bp, Probe sequence
ggggttctcgtgccaatggtttata

SEQ ID NO: 167974 - DNA, 25 bp, Probe sequence
ggtagctacgcgctgatacgatttt

SEQ ID NO: 167975 - DNA, 25 bp, Probe sequence
ggttctcgtgccaatggtttatacc

SEQ ID NO: 167976 - DNA, 25 bp, Probe sequence
gctgatacgatttttatctaacgca

SEQ ID NO: 167977 - DNA, 25 bp, Probe sequence
tctcgtgccaatggtttataccatg

SEQ ID NO: 167978 - DNA, 25 bp, Probe sequence
taataacattagctttatctacgtt

SEQ ID NO: 167979 - DNA, 25 bp, Probe sequence
taagtggtagctacgcgctgatacg

SEQ ID NO: 167980 - DNA, 25 bp, Probe sequence
tacgcgctgatacgatttttatcta

SEQ ID NO: 167981 - DNA, 25 bp, Probe sequence
ttttatctaacgcatttgggcgtaa

SEQ ID NO: 167982 - DNA, 25 bp, Probe sequence
ttattattatcggggttctcgtgcc

SEQ ID NO: 167983 - DNA, 25 bp, Probe sequence
ttactaagtggtagctacgcgctga

SEQ ID NO: 167984 - DNA, 25 bp, Probe sequence
accagtcttgtagaagcgggttact

SEQ ID NO: 167985 - DNA, 25 bp, Probe sequence
atgccaatgcaatcatcgcagttca

SEQ ID NO: 167986 - DNA, 25 bp, Probe sequence
agtattgcggtgagagaaaatgcca

SEQ ID NO: 167987 - DNA, 25 bp, Probe sequence
agcgggttactttgatgaaaatgat

SEQ ID NO: 167988 - DNA, 25 bp, Probe sequence
acaccggaagaaaaggattctcgag

SEQ ID NO: 167989 - DNA, 25 bp, Probe sequence
aaaggtacattaaatagttcgattg

SEQ ID NO: 167990 - DNA, 25 bp, Probe sequence
aaagtctttcgaatacagaattatt

SEQ ID NO: 167991 - DNA, 25 bp, Probe sequence
aaaaataacgcaaccaagtgatgtt

SEQ ID NO: 167992 - DNA, 25 bp, Probe sequence
aatagttcgattgtacatccacgtg

SEQ ID NO: 167993 - DNA, 25 bp, Probe sequence
caagaacattttgtcattttattgt

SEQ ID NO: 167994 - DNA, 25 bp, Probe sequence
cagttcataatcatccatccggtga

SEQ ID NO: 167995 - DNA, 25 bp, Probe sequence
catcgcagttcataatcatccatcc

SEQ ID NO: 167996 - DNA, 25 bp, Probe sequence
gccatggtgcaaaaagtctttcgaa

SEQ ID NO: 167997 - DNA, 25 bp, Probe sequence
gctgattatatgattccaacaatga

SEQ ID NO: 167998 - DNA, 25 bp, Probe sequence
gcaatcatcgcagttcataatcatc

SEQ ID NO: 167999 - DNA, 25 bp, Probe sequence
gaaaatgccaatgcaatcatcgcag

SEQ ID NO: 168000 - DNA, 25 bp, Probe sequence
gaaagatttaacacaagaacatttt

SEQ ID NO: 168001 - DNA, 25 bp, Probe sequence
gaaatgccaagagaacgtttgttaa

SEQ ID NO: 168002 - DNA, 25 bp, Probe sequence
gaaatggtaacttcagaaatgccaa

SEQ ID NO: 168003 - DNA, 25 bp, Probe sequence
gaggttgaaggagtgtggtttgatt

SEQ ID NO: 168004 - DNA, 25 bp, Probe sequence
gatttaccagtcttgtagaagcggg

SEQ ID NO: 168005 - DNA, 25 bp, Probe sequence
gtagtgattaaagaaacctgtgttt

SEQ ID NO: 168006 - DNA, 25 bp, Probe sequence
gtagaagcgggttactttgatgaaa

SEQ ID NO: 168007 - DNA, 25 bp, Probe sequence
tgagttaggggaaaggatggggaga

SEQ ID NO: 168008 - DNA, 25 bp, Probe sequence
gtgatgttgctgattatatgattcc

SEQ ID NO: 168009 - DNA, 25 bp, Probe sequence
ggtgataatagatttaccagtcttg

SEQ ID NO: 168010 - DNA, 25 bp, Probe sequence
agaacgtttgttaagccatggtgca

SEQ ID NO: 168011 - DNA, 25 bp, Probe sequence
ggagaagagctgaaaataatcgtat

SEQ ID NO: 168012 - DNA, 25 bp, Probe sequence
tgaaggagtgtggtttgattttagg

SEQ ID NO: 168013 - DNA, 25 bp, Probe sequence
tcataatcatccatccggtgatgta

SEQ ID NO: 168014 - DNA, 25 bp, Probe sequence
tagttcgattgtacatccacgtgaa

SEQ ID NO: 168015 - DNA, 25 bp, Probe sequence
tattggatcatattataatcggtga

SEQ ID NO: 168016 - DNA, 25 bp, Probe sequence
ttagctatattaattaacaccggaa

SEQ ID NO: 168017 - DNA, 25 bp, Probe sequence
ttagtaatgaactgcttaaatctgc

SEQ ID NO: 168018 - DNA, 25 bp, Probe sequence
attaccatgatatttaagccgatta

SEQ ID NO: 168019 - DNA, 25 bp, Probe sequence
atttacatttgtcattgctggttta

SEQ ID NO: 168020 - DNA, 25 bp, Probe sequence
atatctgcactttctttgtttttcc

SEQ ID NO: 168021 - DNA, 25 bp, Probe sequence
atcattattagtatgaccacgcata

SEQ ID NO: 168022 - DNA, 25 bp, Probe sequence
atgaccacgcatatattctactttt

SEQ ID NO: 168023 - DNA, 25 bp, Probe sequence
acgttttactaatatctgcactttc

SEQ ID NO: 168024 - DNA, 25 bp, Probe sequence
acatttgtcattgctggtttagttg

SEQ ID NO: 168025 - DNA, 25 bp, Probe sequence
aaatggtatgaattaatgccgatta

SEQ ID NO: 168026 - DNA, 25 bp, Probe sequence
aactacatatgtttttctgcttatt

SEQ ID NO: 168027 - DNA, 25 bp, Probe sequence
aatgttagattgtcgcttaattata

SEQ ID NO: 168028 - DNA, 25 bp, Probe sequence
aattcacttttttataatgatatcc

SEQ ID NO: 168029 - DNA, 25 bp, Probe sequence
gcatatattctactttttatttcgg

SEQ ID NO: 168030 - DNA, 25 bp, Probe sequence
gaattaatgccgattattagttttt

SEQ ID NO: 168031 - DNA, 25 bp, Probe sequence
gaagaaacgtcatttgattatttac

SEQ ID NO: 168032 - DNA, 25 bp, Probe sequence
gaaacctttgctttaatacctatcg

SEQ ID NO: 168033 - DNA, 25 bp, Probe sequence
gaccgatatcacttctttaatgtta

SEQ ID NO: 168034 - DNA, 25 bp, Probe sequence
gatcgaaatgtgattattgtaattc

SEQ ID NO: 168035 - DNA, 25 bp, Probe sequence
gatatccatcaatttttaggaggcg

SEQ ID NO: 168036 - DNA, 25 bp, Probe sequence
gttttctatatcaatttatatctat

SEQ ID NO: 168037 - DNA, 25 bp, Probe sequence
gtttagttgctttaattaccatgat

SEQ ID NO: 168038 - DNA, 25 bp, Probe sequence
tgttccatttatatttatttccttt

SEQ ID NO: 168039 - DNA, 25 bp, Probe sequence
tgatttcacatacgtaaatgctacg

SEQ ID NO: 168040 - DNA, 25 bp, Probe sequence
tgcagttgtatttttagttttctat

SEQ ID NO: 168041 - DNA, 25 bp, Probe sequence
tccctctccaattcactatttatgt

SEQ ID NO: 168042 - DNA, 25 bp, Probe sequence
tctccaattcactatttatgtcatt

SEQ ID NO: 168043 - DNA, 25 bp, Probe sequence
tattggttatggtgacgttttacta

SEQ ID NO: 168044 - DNA, 25 bp, Probe sequence
tactatgaccgatatcacttcttta

SEQ ID NO: 168045 - DNA, 25 bp, Probe sequence
taccccttgttccatttatatttat

SEQ ID NO: 168046 - DNA, 25 bp, Probe sequence
tacctatcgtctttattaagtatga

SEQ ID NO: 168047 - DNA, 25 bp, Probe sequence
tatccagtagcttttatcattatta

SEQ ID NO: 168048 - DNA, 25 bp, Probe sequence
tatttccttttttatcaattcactt

SEQ ID NO: 168049 - DNA, 25 bp, Probe sequence
tattaccccttgttccatttatatt

SEQ ID NO: 168050 - DNA, 25 bp, Probe sequence
ttctgcttatttttactatgaccga

SEQ ID NO: 168051 - DNA, 25 bp, Probe sequence
ttgctttaatacctatcgtctttat

SEQ ID NO: 168052 - DNA, 25 bp, Probe sequence
attgctagggataaaggcgcgatta

SEQ ID NO: 168053 - DNA, 25 bp, Probe sequence
gttcgttggactggacgtattgagc

SEQ ID NO: 168054 - DNA, 25 bp, Probe sequence
attttggtgaaatacatcctgttga

SEQ ID NO: 168055 - DNA, 25 bp, Probe sequence
atttggcatcaaaccaggtgttaaa

SEQ ID NO: 168056 - DNA, 25 bp, Probe sequence
atcggtctagaccatacagatattt

SEQ ID NO: 168057 - DNA, 25 bp, Probe sequence
aggtgttgcaactgaattcgaaata

SEQ ID NO: 168058 - DNA, 25 bp, Probe sequence
acgtatggaatggatgctagcacaa

SEQ ID NO: 168059 - DNA, 25 bp, Probe sequence
acattagtaattaccggtagtctgt

SEQ ID NO: 168060 - DNA, 25 bp, Probe sequence
acatcctgttgattttgtcattgtt

SEQ ID NO: 168061 - DNA, 25 bp, Probe sequence
aagtagatattttgttctcagcaat

SEQ ID NO: 168062 - DNA, 25 bp, Probe sequence
aatgatgaatttacttaccgttata

SEQ ID NO: 168063 - DNA, 25 bp, Probe sequence
cgattcgacaaatgtctttacaccg

SEQ ID NO: 168064 - DNA, 25 bp, Probe sequence
gcgcgattataaagcctaacgttcc

SEQ ID NO: 168065 - DNA, 25 bp, Probe sequence
gctagcacaatttaataatcctcaa

SEQ ID NO: 168066 - DNA, 25 bp, Probe sequence
gcattagccataacagctcttattg

SEQ ID NO: 168067 - DNA, 25 bp, Probe sequence
gaattagtatcacgtattaaaccag

SEQ ID NO: 168068 - DNA, 25 bp, Probe sequence
gaattacctagagagcttgtattgg

SEQ ID NO: 168069 - DNA, 25 bp, Probe sequence
gaagtaggtacatttacgtcgccgt

SEQ ID NO: 168070 - DNA, 25 bp, Probe sequence
gacggtattgaatcagttcgttgga

SEQ ID NO: 168071 - DNA, 25 bp, Probe sequence
gttgcttaccttagaacagctttag

SEQ ID NO: 168072 - DNA, 25 bp, Probe sequence
gtaaaggctctacagttgcttacct

SEQ ID NO: 168073 - DNA, 25 bp, Probe sequence
gtcattgttgaggctggattgggta

SEQ ID NO: 168074 - DNA, 25 bp, Probe sequence
ggtggtacttatctagatattgcta

SEQ ID NO: 168075 - DNA, 25 bp, Probe sequence
ggtgtgccaatatcaaatgacgcta

SEQ ID NO: 168076 - DNA, 25 bp, Probe sequence
ggtgcatgacaaacctttaatcatt

SEQ ID NO: 168077 - DNA, 25 bp, Probe sequence
ggacgtattgagcaggtgcatgaca

SEQ ID NO: 168078 - DNA, 25 bp, Probe sequence
ggcgcacataattcagagagtatag

SEQ ID NO: 168079 - DNA, 25 bp, Probe sequence
tgattttccgaaagcgttacgcaaa

SEQ ID NO: 168080 - DNA, 25 bp, Probe sequence
tcgtgaacgcgcaattgaacaacat

SEQ ID NO: 168081 - DNA, 25 bp, Probe sequence
taatcattttggatggcgcacataa

SEQ ID NO: 168082 - DNA, 25 bp, Probe sequence
tacgtcgccgtttattgaaacattt

SEQ ID NO: 168083 - DNA, 25 bp, Probe sequence
tatgcaactgaatttgattttccga

SEQ ID NO: 168084 - DNA, 25 bp, Probe sequence
tatcaatcttaactagtatcggtct

SEQ ID NO: 168085 - DNA, 25 bp, Probe sequence
ttaagggtattcatgtaggtggcac

SEQ ID NO: 168086 - DNA, 25 bp, Probe sequence
attgggatcctaaagcacgtacagc

SEQ ID NO: 168087 - DNA, 25 bp, Probe sequence
atgatcctcgtgaagttgaagcggg

SEQ ID NO: 168088 - DNA, 25 bp, Probe sequence
atcaaattccggcttggtatcataa

SEQ ID NO: 168089 - DNA, 25 bp, Probe sequence
atgctacatccattcatgccatttg

SEQ ID NO: 168090 - DNA, 25 bp, Probe sequence
atggtggggtcatcaaattccggct

SEQ ID NO: 168091 - DNA, 25 bp, Probe sequence
aggacgcgaactgcctattttagca

SEQ ID NO: 168092 - DNA, 25 bp, Probe sequence
aggtcattcagaacgatctggcgct

SEQ ID NO: 168093 - DNA, 25 bp, Probe sequence
agagtatgcgtcatttattcgtgcg

SEQ ID NO: 168094 - DNA, 25 bp, Probe sequence
agcacgtacagctttatctgatatt

SEQ ID NO: 168095 - DNA, 25 bp, Probe sequence
agcttcatggccagaagtgcgtgaa

SEQ ID NO: 168096 - DNA, 25 bp, Probe sequence
accaatcgtaggacgcgaactgcct

SEQ ID NO: 168097 - DNA, 25 bp, Probe sequence
aacgatactacccaacaaatgcctt

SEQ ID NO: 168098 - DNA, 25 bp, Probe sequence
catatacaattgttatcccgccacc

SEQ ID NO: 168099 - DNA, 25 bp, Probe sequence
ctttctctacgttaggttggcctga

SEQ ID NO: 168100 - DNA, 25 bp, Probe sequence
gaatttacagatcgtcgtccattta

SEQ ID NO: 168101 - DNA, 25 bp, Probe sequence
gaagtaaatacgccattgtctaaag

SEQ ID NO: 168102 - DNA, 25 bp, Probe sequence
gaaagtgacaccagcacatgaccct

SEQ ID NO: 168103 - DNA, 25 bp, Probe sequence
gatctggcgctgttgttgaaccata

SEQ ID NO: 168104 - DNA, 25 bp, Probe sequence
gatcgtattgatttttatccgcaac

SEQ ID NO: 168105 - DNA, 25 bp, Probe sequence
gatacagcgattgttgttaacccta

SEQ ID NO: 168106 - DNA, 25 bp, Probe sequence
gatacgtggttctcaagtgctttat

SEQ ID NO: 168107 - DNA, 25 bp, Probe sequence
gatacgatacgttatacttaccagg

SEQ ID NO: 168108 - DNA, 25 bp, Probe sequence
gttcaaggtgcgttttatcatttta

SEQ ID NO: 168109 - DNA, 25 bp, Probe sequence
ggtgctgatagcttgcgttacttct

SEQ ID NO: 168110 - DNA, 25 bp, Probe sequence
ggtatggaccgttttgattgtcgta

SEQ ID NO: 168111 - DNA, 25 bp, Probe sequence
ggtttgtgcgcatggaagacttagc

SEQ ID NO: 168112 - DNA, 25 bp, Probe sequence
ggttcatctccaggacatgatttaa

SEQ ID NO: 168113 - DNA, 25 bp, Probe sequence
ggagaagaagcgccaactgatattg

SEQ ID NO: 168114 - DNA, 25 bp, Probe sequence
tggatcatgctggtattgcgacaca

SEQ ID NO: 168115 - DNA, 25 bp, Probe sequence
tcaagtgctttatggcctttctcta

SEQ ID NO: 168116 - DNA, 25 bp, Probe sequence
tagacttcggttctggtgctatgaa

SEQ ID NO: 168117 - DNA, 25 bp, Probe sequence
ttatccgcaacgtttcgaacataca

SEQ ID NO: 168118 - DNA, 25 bp, Probe sequence
tattcgtgcgcaatgggctaaatta

SEQ ID NO: 168119 - DNA, 25 bp, Probe sequence
ttatcccgccaccaaatgtaactgg

SEQ ID NO: 168120 - DNA, 25 bp, Probe sequence
attattagcaccactcattgtatta

SEQ ID NO: 168121 - DNA, 25 bp, Probe sequence
atattttccgaatctttttcatcct

SEQ ID NO: 168122 - DNA, 25 bp, Probe sequence
atatcgttcgaataagcgtgaagat

SEQ ID NO: 168123 - DNA, 25 bp, Probe sequence
atcagatagttttagttgcattagc

SEQ ID NO: 168124 - DNA, 25 bp, Probe sequence
atgaattgtttcttggtgcagcacc

SEQ ID NO: 168125 - DNA, 25 bp, Probe sequence
atgatggtaacatgcatgcgaatgg

SEQ ID NO: 168126 - DNA, 25 bp, Probe sequence
agttgcattagctactggtgccgat

SEQ ID NO: 168127 - DNA, 25 bp, Probe sequence
accgttcatttcatatttttttcat

SEQ ID NO: 168128 - DNA, 25 bp, Probe sequence
acatttacactagatcattggttgt

SEQ ID NO: 168129 - DNA, 25 bp, Probe sequence
aagtcttgcctttatcacaagtatt

SEQ ID NO: 168130 - DNA, 25 bp, Probe sequence
aattgcgcatttattgtcagattta

SEQ ID NO: 168131 - DNA, 25 bp, Probe sequence
aattggtgcgctaatcatggtttat

SEQ ID NO: 168132 - DNA, 25 bp, Probe sequence
caaacgtgctaatttgttagttgtt

SEQ ID NO: 168133 - DNA, 25 bp, Probe sequence
catggctgaacaagacaaacgtgct

SEQ ID NO: 168134 - DNA, 25 bp, Probe sequence
catcacgaattatatttgttgttgt

SEQ ID NO: 168135 - DNA, 25 bp, Probe sequence
catacatttctttgataataatcct

SEQ ID NO: 168136 - DNA, 25 bp, Probe sequence
cattgtgttcgttttatcatttttt

SEQ ID NO: 168137 - DNA, 25 bp, Probe sequence
gcgatagctatctttatagtttatc

SEQ ID NO: 168138 - DNA, 25 bp, Probe sequence
gctactggtgccgatgttgctatga

SEQ ID NO: 168139 - DNA, 25 bp, Probe sequence
gcaccactcattgtattaattgttt

SEQ ID NO: 168140 - DNA, 25 bp, Probe sequence
gaattggagttcaaattgcgcattt

SEQ ID NO: 168141 - DNA, 25 bp, Probe sequence
gaatctttttcatcctatttattat

SEQ ID NO: 168142 - DNA, 25 bp, Probe sequence
gaaataatttcattgtgttcgtttt

SEQ ID NO: 168143 - DNA, 25 bp, Probe sequence
gatcattggttgttgaacatggcac

SEQ ID NO: 168144 - DNA, 25 bp, Probe sequence
gttagcttaacgcaaacatcacgaa

SEQ ID NO: 168145 - DNA, 25 bp, Probe sequence
gtttccaacatttcaattattagca

SEQ ID NO: 168146 - DNA, 25 bp, Probe sequence
gtgcaaatcggatcaacgtttacga

SEQ ID NO: 168147 - DNA, 25 bp, Probe sequence
ggtgcagcaccaggaggggttaatc

SEQ ID NO: 168148 - DNA, 25 bp, Probe sequence
ggtgccgatgttgctatgattacga

SEQ ID NO: 168149 - DNA, 25 bp, Probe sequence
tgttgttgttttagtaccgttcatt

SEQ ID NO: 168150 - DNA, 25 bp, Probe sequence
taattgtttggaatttttctacagg

SEQ ID NO: 168151 - DNA, 25 bp, Probe sequence
tataccaggagcactaacacaaatg

SEQ ID NO: 168152 - DNA, 25 bp, Probe sequence
ttaaatggccattcttacttagtga

SEQ ID NO: 168153 - DNA, 25 bp, Probe sequence
ttatgtttggtcctattatcgcatc

SEQ ID NO: 168154 - DNA, 25 bp, Probe sequence
atagcatgcatcatcgagtaagtga

SEQ ID NO: 168155 - DNA, 25 bp, Probe sequence
atcaaacttgattcgtccaatttta

SEQ ID NO: 168156 - DNA, 25 bp, Probe sequence
atccaaatacaacaacgacaggcta

SEQ ID NO: 168157 - DNA, 25 bp, Probe sequence
atcctgtatcaatcgtttatccaat

SEQ ID NO: 168158 - DNA, 25 bp, Probe sequence
atgttgatggtattgctttagttaa

SEQ ID NO: 168159 - DNA, 25 bp, Probe sequence
agacgtctaaagtcattgaagatgt

SEQ ID NO: 168160 - DNA, 25 bp, Probe sequence
acaccctcatcctaagcgtaaaaag

SEQ ID NO: 168161 - DNA, 25 bp, Probe sequence
aaattgcgtactcaaatccaaatac

SEQ ID NO: 168162 - DNA, 25 bp, Probe sequence
aagtactgctttcaaacttgcataa

SEQ ID NO: 168163 - DNA, 25 bp, Probe sequence
aaggttatcctgtatcaatcgttta

SEQ ID NO: 168164 - DNA, 25 bp, Probe sequence
caagatttattacaacctatactta

SEQ ID NO: 168165 - DNA, 25 bp, Probe sequence
caagccgctcagtacaacaacgatt

SEQ ID NO: 168166 - DNA, 25 bp, Probe sequence
caacgacaggctatcaacatatgcg

SEQ ID NO: 168167 - DNA, 25 bp, Probe sequence
cagagttcgatgccaagtcaattcg

SEQ ID NO: 168168 - DNA, 25 bp, Probe sequence
gcgatgcaactgtcaaagacgtcta

SEQ ID NO: 168169 - DNA, 25 bp, Probe sequence
gctacgaacaagatgcacgcacatg

SEQ ID NO: 168170 - DNA, 25 bp, Probe sequence
gctatttatagcatgcatcatcgag

SEQ ID NO: 168171 - DNA, 25 bp, Probe sequence
gcaggtctaagctacgaacaagatg

SEQ ID NO: 168172 - DNA, 25 bp, Probe sequence
gcaattagaggattatcgctcgaac

SEQ ID NO: 168173 - DNA, 25 bp, Probe sequence
gaacatacctttaataccgaaatct

SEQ ID NO: 168174 - DNA, 25 bp, Probe sequence
gagtaagtgatgtgcatcaattcca

SEQ ID NO: 168175 - DNA, 25 bp, Probe sequence
gaggattatcgctcgaacaataaat

SEQ ID NO: 168176 - DNA, 25 bp, Probe sequence
gatcatccagaagattttgttccct

SEQ ID NO: 168177 - DNA, 25 bp, Probe sequence
gatcagtctatcgaaaatcttaaga

SEQ ID NO: 168178 - DNA, 25 bp, Probe sequence
gatacatctgtaacacagcaattag

SEQ ID NO: 168179 - DNA, 25 bp, Probe sequence
gattagttgcagagttcgatgccaa

SEQ ID NO: 168180 - DNA, 25 bp, Probe sequence
gattttgttccctatcaagatacat

SEQ ID NO: 168181 - DNA, 25 bp, Probe sequence
gttagtgaacaaagcgatcagtcta

SEQ ID NO: 168182 - DNA, 25 bp, Probe sequence
gtattaacagtttattctccgtatc

SEQ ID NO: 168183 - DNA, 25 bp, Probe sequence
ggatctactcaagtactgctttcaa

SEQ ID NO: 168184 - DNA, 25 bp, Probe sequence
tagtgcaatatttaacaagccgctc

SEQ ID NO: 168185 - DNA, 25 bp, Probe sequence
ttattctccgtatcaatcaaacttg

SEQ ID NO: 168186 - DNA, 25 bp, Probe sequence
ttatatcttgctattatttctcatt

SEQ ID NO: 168187 - DNA, 25 bp, Probe sequence
ttaaaaatgcacaccctcatcctaa

SEQ ID NO: 168188 - DNA, 25 bp, Probe sequence
atatgctttgtagtcaaaactgcta

SEQ ID NO: 168189 - DNA, 25 bp, Probe sequence
atcttaacaaacgtgaagctcaagc

SEQ ID NO: 168190 - DNA, 25 bp, Probe sequence
atgctttgtagtcaaaactgctagc

SEQ ID NO: 168191 - DNA, 25 bp, Probe sequence
atgggcggcgacttgatagtgaaag

SEQ ID NO: 168192 - DNA, 25 bp, Probe sequence
agtccatatatgctttgtagtcaaa

SEQ ID NO: 168193 - DNA, 25 bp, Probe sequence
agtgaaagtccatatatgctttgta

SEQ ID NO: 168194 - DNA, 25 bp, Probe sequence
agtcaaaactgctagcggatattgt

SEQ ID NO: 168195 - DNA, 25 bp, Probe sequence
acgtgaagctcaagcagcaatttag

SEQ ID NO: 168196 - DNA, 25 bp, Probe sequence
actgctagcggatattgttatctta

SEQ ID NO: 168197 - DNA, 25 bp, Probe sequence
acaaacgtgaagctcaagcagcaat

SEQ ID NO: 168198 - DNA, 25 bp, Probe sequence
aaactgctagcggatattgttatct

SEQ ID NO: 168199 - DNA, 25 bp, Probe sequence
aaacgtgaagctcaagcagcaattt

SEQ ID NO: 168200 - DNA, 25 bp, Probe sequence
aaaactgctagcggatattgttatc

SEQ ID NO: 168201 - DNA, 25 bp, Probe sequence
aactgctagcggatattgttatctt

SEQ ID NO: 168202 - DNA, 25 bp, Probe sequence
aacgtgaagctcaagcagcaattta

SEQ ID NO: 168203 - DNA, 25 bp, Probe sequence
aagtccatatatgctttgtagtcaa

SEQ ID NO: 168204 - DNA, 25 bp, Probe sequence
caaacgtgaagctcaagcagcaatt

SEQ ID NO: 168205 - DNA, 25 bp, Probe sequence
ctttgtagtcaaaactgctagcgga

SEQ ID NO: 168206 - DNA, 25 bp, Probe sequence
gctagcggatattgttatcttaaca

SEQ ID NO: 168207 - DNA, 25 bp, Probe sequence
gctttgtagtcaaaactgctagcgg

SEQ ID NO: 168208 - DNA, 25 bp, Probe sequence
gaaagtccatatatgctttgtagtc

SEQ ID NO: 168209 - DNA, 25 bp, Probe sequence
gttatcttaacaaacgtgaagctca

SEQ ID NO: 168210 - DNA, 25 bp, Probe sequence
gtagtcaaaactgctagcggatatt

SEQ ID NO: 168211 - DNA, 25 bp, Probe sequence
gtcaaaactgctagcggatattgtt

SEQ ID NO: 168212 - DNA, 25 bp, Probe sequence
gtccatatatgctttgtagtcaaaa

SEQ ID NO: 168213 - DNA, 25 bp, Probe sequence
ggcggcgacttgatagtgaaagtcc

SEQ ID NO: 168214 - DNA, 25 bp, Probe sequence
ggcgacttgatagtgaaagtccata

SEQ ID NO: 168215 - DNA, 25 bp, Probe sequence
tgggcggcgacttgatagtgaaagt

SEQ ID NO: 168216 - DNA, 25 bp, Probe sequence
tgctagcggatattgttatcttaac

SEQ ID NO: 168217 - DNA, 25 bp, Probe sequence
tcaaaactgctagcggatattgtta

SEQ ID NO: 168218 - DNA, 25 bp, Probe sequence
taacaaacgtgaagctcaagcagca

SEQ ID NO: 168219 - DNA, 25 bp, Probe sequence
tttgtagtcaaaactgctagcggat

SEQ ID NO: 168220 - DNA, 25 bp, Probe sequence
ttgtagtcaaaactgctagcggata

SEQ ID NO: 168221 - DNA, 25 bp, Probe sequence
ttgatagtgaaagtccatatatgct

SEQ ID NO: 168222 - DNA, 25 bp, Probe sequence
attctcctggtgtgcctgaaggtat

SEQ ID NO: 168223 - DNA, 25 bp, Probe sequence
attaacgccagagacatatgagtat

SEQ ID NO: 168224 - DNA, 25 bp, Probe sequence
attaggattgccggattctcctggt

SEQ ID NO: 168225 - DNA, 25 bp, Probe sequence
atacaattacagttccatacaatga

SEQ ID NO: 168226 - DNA, 25 bp, Probe sequence
atggtcatagtgattcgttattaat

SEQ ID NO: 168227 - DNA, 25 bp, Probe sequence
agtccagtacgcgcatttaaatcag

SEQ ID NO: 168228 - DNA, 25 bp, Probe sequence
agttttggtgcatcaacattacttg

SEQ ID NO: 168229 - DNA, 25 bp, Probe sequence
agcatttgatacggctttaagtcgt

SEQ ID NO: 168230 - DNA, 25 bp, Probe sequence
agctcgttattgaccgagtaccttc

SEQ ID NO: 168231 - DNA, 25 bp, Probe sequence
acggcgcattgctaattttcgatga

SEQ ID NO: 168232 - DNA, 25 bp, Probe sequence
atgaaggacctgtaactaattttga

SEQ ID NO: 168233 - DNA, 25 bp, Probe sequence
ctgttgctggtaatatgggtgtcgt

SEQ ID NO: 168234 - DNA, 25 bp, Probe sequence
gaaggtgtgtttttaccaccatctc

SEQ ID NO: 168235 - DNA, 25 bp, Probe sequence
gagaccctcaagttattagtcattt

SEQ ID NO: 168236 - DNA, 25 bp, Probe sequence
gagtcggttatcattgtgcacaagg

SEQ ID NO: 168237 - DNA, 25 bp, Probe sequence
gatgcacttaaaatcgctttcgaaa

SEQ ID NO: 168238 - DNA, 25 bp, Probe sequence
gttaggcgatatacttgaagacggt

SEQ ID NO: 168239 - DNA, 25 bp, Probe sequence
gtttttaccaccatctcaatttgaa

SEQ ID NO: 168240 - DNA, 25 bp, Probe sequence
gtatttgctaaacacaatgtaccaa

SEQ ID NO: 168241 - DNA, 25 bp, Probe sequence
gtaatgactggtttcagagtcggtt

SEQ ID NO: 168242 - DNA, 25 bp, Probe sequence
gtgcgtatggtgtcatctggtacag

SEQ ID NO: 168243 - DNA, 25 bp, Probe sequence
gtgacaccagatttaacttgcttag

SEQ ID NO: 168244 - DNA, 25 bp, Probe sequence
gtgtaatcgtagaacctgttgctgg

SEQ ID NO: 168245 - DNA, 25 bp, Probe sequence
gtggtgtaaatagtccagtacgcgc

SEQ ID NO: 168246 - DNA, 25 bp, Probe sequence
ggtacagaagctacattggatactt

SEQ ID NO: 168247 - DNA, 25 bp, Probe sequence
ggttgctgaaactttaatgcctggt

SEQ ID NO: 168248 - DNA, 25 bp, Probe sequence
ggatcatatagcaccattaggaaat

SEQ ID NO: 168249 - DNA, 25 bp, Probe sequence
tcaggaaatcctcttgcaatgacaa

SEQ ID NO: 168250 - DNA, 25 bp, Probe sequence
tcagtagatacaccagcaattttta

SEQ ID NO: 168251 - DNA, 25 bp, Probe sequence
taagattagcacgtggttatactgg

SEQ ID NO: 168252 - DNA, 25 bp, Probe sequence
taaattggcgcagctcgttattgac

SEQ ID NO: 168253 - DNA, 25 bp, Probe sequence
tatctacggcacacacgaaagaaga

SEQ ID NO: 168254 - DNA, 25 bp, Probe sequence
tttgaaggttgctatcatggtcata

SEQ ID NO: 168255 - DNA, 25 bp, Probe sequence
ttacgactgaatacggcgcattgct

SEQ ID NO: 168256 - DNA, 25 bp, Probe sequence
atatgatggatggttttgttgctga

SEQ ID NO: 168257 - DNA, 25 bp, Probe sequence
atagtatgactaaagcagcggcaca

SEQ ID NO: 168258 - DNA, 25 bp, Probe sequence
atcatacgaatgttccagttgttgc

SEQ ID NO: 168259 - DNA, 25 bp, Probe sequence
ttcacgatggtgttattcaacaggc

SEQ ID NO: 168260 - DNA, 25 bp, Probe sequence
aggacatttgtcgctatttagataa

SEQ ID NO: 168261 - DNA, 25 bp, Probe sequence
aggtgctgatatgattattacgtat

SEQ ID NO: 168262 - DNA, 25 bp, Probe sequence
agaagattgagatcatcagcgacaa

SEQ ID NO: 168263 - DNA, 25 bp, Probe sequence
agcttatgacttaggcatacgtgcc

SEQ ID NO: 168264 - DNA, 25 bp, Probe sequence
aagcagcggcacaaaatggttggat

SEQ ID NO: 168265 - DNA, 25 bp, Probe sequence
gccaggtgtataccaaatcagtttg

SEQ ID NO: 168266 - DNA, 25 bp, Probe sequence
gctaaccgtttggaagcacttcgtg

SEQ ID NO: 168267 - DNA, 25 bp, Probe sequence
gaatatactgatcatggtcattgtg

SEQ ID NO: 168268 - DNA, 25 bp, Probe sequence
gaagggtgcgacatgatgattgtta

SEQ ID NO: 168269 - DNA, 25 bp, Probe sequence
gaagccggctattacaatattccta

SEQ ID NO: 168270 - DNA, 25 bp, Probe sequence
gaacgtgtcgttatggaacaaatgg

SEQ ID NO: 168271 - DNA, 25 bp, Probe sequence
gatgcagcagattcagcgccatcat

SEQ ID NO: 168272 - DNA, 25 bp, Probe sequence
gatgattgttaaacctgctctaagt

SEQ ID NO: 168273 - DNA, 25 bp, Probe sequence
gatgaccatacacatgacgttgaca

SEQ ID NO: 168274 - DNA, 25 bp, Probe sequence
gatgacttattaattgttgcagaca

SEQ ID NO: 168275 - DNA, 25 bp, Probe sequence
gattcagcgccatcatttggggata

SEQ ID NO: 168276 - DNA, 25 bp, Probe sequence
gttgcagacacttgtttatgtgaat

SEQ ID NO: 168277 - DNA, 25 bp, Probe sequence
gttccagttgttgcatataatgtga

SEQ ID NO: 168278 - DNA, 25 bp, Probe sequence
gtttcaatgaaacgtgcaggtgctg

SEQ ID NO: 168279 - DNA, 25 bp, Probe sequence
gtatcagatggaccctgctaaccgt

SEQ ID NO: 168280 - DNA, 25 bp, Probe sequence
gtcgtggattagatgaagccggcta

SEQ ID NO: 168281 - DNA, 25 bp, Probe sequence
ggtgtcaagtatgcatcaagtttct

SEQ ID NO: 168282 - DNA, 25 bp, Probe sequence
ggtactggtgcatacattcacgatg

SEQ ID NO: 168283 - DNA, 25 bp, Probe sequence
ggaccctgctaaccgtttggaagca

SEQ ID NO: 168284 - DNA, 25 bp, Probe sequence
ggaccttttagagatgcagcagatt

SEQ ID NO: 168285 - DNA, 25 bp, Probe sequence
ggcatacgtgccattatgtttttcg

SEQ ID NO: 168286 - DNA, 25 bp, Probe sequence
tatgtttttcggtgttccaaactca

SEQ ID NO: 168287 - DNA, 25 bp, Probe sequence
ttcaacaggcaacacgtattgctaa

SEQ ID NO: 168288 - DNA, 25 bp, Probe sequence
ttaagtcattgccaggtgtatacca

SEQ ID NO: 168289 - DNA, 25 bp, Probe sequence
ttgttgctgaaattcgtcgtggatt

SEQ ID NO: 168290 - DNA, 25 bp, Probe sequence
atttagtatcaattattcacaaacc

SEQ ID NO: 168291 - DNA, 25 bp, Probe sequence
atgacatgcaaagtgatttagtatc

SEQ ID NO: 168292 - DNA, 25 bp, Probe sequence
atgttgataacattgctgtgatagg

SEQ ID NO: 168293 - DNA, 25 bp, Probe sequence
agtcgtattttgctattggagaaca

SEQ ID NO: 168294 - DNA, 25 bp, Probe sequence
agtgaattggcgagaccattgttat

SEQ ID NO: 168295 - DNA, 25 bp, Probe sequence
acattttcaagttcgtcggcagtac

SEQ ID NO: 168296 - DNA, 25 bp, Probe sequence
aaatcaacgctatgactggcttatt

SEQ ID NO: 168297 - DNA, 25 bp, Probe sequence
aaaatacttttgccttcgagtgaat

SEQ ID NO: 168298 - DNA, 25 bp, Probe sequence
aacgctatgactggcttattttttc

SEQ ID NO: 168299 - DNA, 25 bp, Probe sequence
aagccactaaattttgatattcatt

SEQ ID NO: 168300 - DNA, 25 bp, Probe sequence
aatgctgtgaaattcttttataaat

SEQ ID NO: 168301 - DNA, 25 bp, Probe sequence
aatagatttatatacttcagtgcct

SEQ ID NO: 168302 - DNA, 25 bp, Probe sequence
aattcaagtcgtattttgctattgg

SEQ ID NO: 168303 - DNA, 25 bp, Probe sequence
caaacactcgaatcactaattgaaa

SEQ ID NO: 168304 - DNA, 25 bp, Probe sequence
cacttggcattcgagttgattttat

SEQ ID NO: 168305 - DNA, 25 bp, Probe sequence
gccaaacgacttttctcaagaagga

SEQ ID NO: 168306 - DNA, 25 bp, Probe sequence
gcagaaattcaaacactcgaatcac

SEQ ID NO: 168307 - DNA, 25 bp, Probe sequence
gaacatcaacaaatcgatgcattaa

SEQ ID NO: 168308 - DNA, 25 bp, Probe sequence
gacagcgcaatattgtgaatcactt

SEQ ID NO: 168309 - DNA, 25 bp, Probe sequence
gatgcattaacattttcaagttcgt

SEQ ID NO: 168310 - DNA, 25 bp, Probe sequence
gatttgtaccaaaattcaagtcgta

SEQ ID NO: 168311 - DNA, 25 bp, Probe sequence
gatattcatttgttaaatcaacgct

SEQ ID NO: 168312 - DNA, 25 bp, Probe sequence
gattttatgccaaacgacttttctc

SEQ ID NO: 168313 - DNA, 25 bp, Probe sequence
gttatgacacaaacaaatgacatgc

SEQ ID NO: 168314 - DNA, 25 bp, Probe sequence
gtcggcagtacgttattattttaat

SEQ ID NO: 168315 - DNA, 25 bp, Probe sequence
gtgaatcacttggcattcgagttga

SEQ ID NO: 168316 - DNA, 25 bp, Probe sequence
gtgataggaagtaagacagcgcaat

SEQ ID NO: 168317 - DNA, 25 bp, Probe sequence
ggagaacaaacagcacggaccatta

SEQ ID NO: 168318 - DNA, 25 bp, Probe sequence
tgactggcttattttttcatctaaa

SEQ ID NO: 168319 - DNA, 25 bp, Probe sequence
tgaagccagttgtagttatgacaca

SEQ ID NO: 168320 - DNA, 25 bp, Probe sequence
tgccttcgagtgaattggcgagacc

SEQ ID NO: 168321 - DNA, 25 bp, Probe sequence
tcaagttcgtcggcagtacgttatt

SEQ ID NO: 168322 - DNA, 25 bp, Probe sequence
tatacttcagtgcctaacaaacaaa

SEQ ID NO: 168323 - DNA, 25 bp, Probe sequence
ttatgccaaacgacttttctcaaga

SEQ ID NO: 168324 - DNA, 25 bp, Probe sequence
atgaccccagatggtaaagaacgat

SEQ ID NO: 168325 - DNA, 25 bp, Probe sequence
attggtactagttcattacgtcgtg

SEQ ID NO: 168326 - DNA, 25 bp, Probe sequence
attgtaacatcttatcttgatagag

SEQ ID NO: 168327 - DNA, 25 bp, Probe sequence
atatcgatatggcaatacactcgct

SEQ ID NO: 168328 - DNA, 25 bp, Probe sequence
atgtgtgactgctgaacgaacgttt

SEQ ID NO: 168329 - DNA, 25 bp, Probe sequence
gaacggaacagatccggttgagtta

SEQ ID NO: 168330 - DNA, 25 bp, Probe sequence
agagcaaggtgcttatgaaattata

SEQ ID NO: 168331 - DNA, 25 bp, Probe sequence
aagctgtcgagccaaatctagaaat

SEQ ID NO: 168332 - DNA, 25 bp, Probe sequence
caattgtctaaagtcggaggcaaag

SEQ ID NO: 168333 - DNA, 25 bp, Probe sequence
caccactatcccaattgccagaagg

SEQ ID NO: 168334 - DNA, 25 bp, Probe sequence
ctttaacacaaagccagcaatttat

SEQ ID NO: 168335 - DNA, 25 bp, Probe sequence
caaactgaagattatgatgcgatta

SEQ ID NO: 168336 - DNA, 25 bp, Probe sequence
gctgcagctggtttaagaagaatgg

SEQ ID NO: 168337 - DNA, 25 bp, Probe sequence
gcaggatatgctacaatctcagatc

SEQ ID NO: 168338 - DNA, 25 bp, Probe sequence
gaatgggctggtcagatgatattgt

SEQ ID NO: 168339 - DNA, 25 bp, Probe sequence
gaacgaacgtttttagcagaaatgg

SEQ ID NO: 168340 - DNA, 25 bp, Probe sequence
gaaattgtcacgaaaggcgatcgta

SEQ ID NO: 168341 - DNA, 25 bp, Probe sequence
gacaaggtgctttagggatagaatg

SEQ ID NO: 168342 - DNA, 25 bp, Probe sequence
gagaattaccttttgatgcgtatat

SEQ ID NO: 168343 - DNA, 25 bp, Probe sequence
gatgaggttgcaaaatgtgtgactg

SEQ ID NO: 168344 - DNA, 25 bp, Probe sequence
gatgcgtatatttctaaaacacata

SEQ ID NO: 168345 - DNA, 25 bp, Probe sequence
gatgcgattattttagctgcagctg

SEQ ID NO: 168346 - DNA, 25 bp, Probe sequence
gatagagatacattgttacctgcaa

SEQ ID NO: 168347 - DNA, 25 bp, Probe sequence
gtcggaggcaaaggcttatttgtta

SEQ ID NO: 168348 - DNA, 25 bp, Probe sequence
gtcgtggtgcacaaatattatctaa

SEQ ID NO: 168349 - DNA, 25 bp, Probe sequence
tggatggtagttgtcaggtgccaat

SEQ ID NO: 168350 - DNA, 25 bp, Probe sequence
tgcgtaaattagtcgttggctccag

SEQ ID NO: 168351 - DNA, 25 bp, Probe sequence
tctaaaacacatacaccactatccc

SEQ ID NO: 168352 - DNA, 25 bp, Probe sequence
tacaggtttaattatgaccccagat

SEQ ID NO: 168353 - DNA, 25 bp, Probe sequence
tagttcattacgtcgtggtgcacaa

SEQ ID NO: 168354 - DNA, 25 bp, Probe sequence
tatccctgatagagaattacctttt

SEQ ID NO: 168355 - DNA, 25 bp, Probe sequence
ttagggatagaatgtcgtagtgacg

SEQ ID NO: 168356 - DNA, 25 bp, Probe sequence
ttagtcgttggctccagaagaagta

SEQ ID NO: 168357 - DNA, 25 bp, Probe sequence
ttaacattaggttgtatccctgata

SEQ ID NO: 168358 - DNA, 25 bp, Probe sequence
attgtcattattactaaacatcatt

SEQ ID NO: 168359 - DNA, 25 bp, Probe sequence
attactaaacatcattgaacaggct

SEQ ID NO: 168360 - DNA, 25 bp, Probe sequence
attattactaaacatcattgaacag

SEQ ID NO: 168361 - DNA, 25 bp, Probe sequence
atcattgaacaggctgataataaga

SEQ ID NO: 168362 - DNA, 25 bp, Probe sequence
agaaataaggcaaccgccgcatcct

SEQ ID NO: 168363 - DNA, 25 bp, Probe sequence
actaaacatcattgaacaggctgat

SEQ ID NO: 168364 - DNA, 25 bp, Probe sequence
acatcattgaacaggctgataataa

SEQ ID NO: 168365 - DNA, 25 bp, Probe sequence
aaagaaataaggcaaccgccgcatc

SEQ ID NO: 168366 - DNA, 25 bp, Probe sequence
aaacatcattgaacaggctgataat

SEQ ID NO: 168367 - DNA, 25 bp, Probe sequence
aacaggctgataataagattattaa

SEQ ID NO: 168368 - DNA, 25 bp, Probe sequence
aacatcattgaacaggctgataata

SEQ ID NO: 168369 - DNA, 25 bp, Probe sequence
aagaaataaggcaaccgccgcatcc

SEQ ID NO: 168370 - DNA, 25 bp, Probe sequence
aattgtcattattactaaacatcat

SEQ ID NO: 168371 - DNA, 25 bp, Probe sequence
catcattgaacaggctgataataag

SEQ ID NO: 168372 - DNA, 25 bp, Probe sequence
cattattactaaacatcattgaaca

SEQ ID NO: 168373 - DNA, 25 bp, Probe sequence
cattgaacaggctgataataagatt

SEQ ID NO: 168374 - DNA, 25 bp, Probe sequence
ctaaacatcattgaacaggctgata

SEQ ID NO: 168375 - DNA, 25 bp, Probe sequence
gaattgtcattattactaaacatca

SEQ ID NO: 168376 - DNA, 25 bp, Probe sequence
gaacaggctgataataagattatta

SEQ ID NO: 168377 - DNA, 25 bp, Probe sequence
gtcattattactaaacatcattgaa

SEQ ID NO: 168378 - DNA, 25 bp, Probe sequence
gtggaattgtcattattactaaaca

SEQ ID NO: 168379 - DNA, 25 bp, Probe sequence
ggaattgtcattattactaaacatc

SEQ ID NO: 168380 - DNA, 25 bp, Probe sequence
tggaattgtcattattactaaacat

SEQ ID NO: 168381 - DNA, 25 bp, Probe sequence
tgtcattattactaaacatcattga

SEQ ID NO: 168382 - DNA, 25 bp, Probe sequence
tgaacaggctgataataagattatt

SEQ ID NO: 168383 - DNA, 25 bp, Probe sequence
tcattgaacaggctgataataagat

SEQ ID NO: 168384 - DNA, 25 bp, Probe sequence
tcattattactaaacatcattgaac

SEQ ID NO: 168385 - DNA, 25 bp, Probe sequence
taaacatcattgaacaggctgataa

SEQ ID NO: 168386 - DNA, 25 bp, Probe sequence
tactaaacatcattgaacaggctga

SEQ ID NO: 168387 - DNA, 25 bp, Probe sequence
tattactaaacatcattgaacaggc

SEQ ID NO: 168388 - DNA, 25 bp, Probe sequence
ttattactaaacatcattgaacagg

SEQ ID NO: 168389 - DNA, 25 bp, Probe sequence
ttactaaacatcattgaacaggctg

SEQ ID NO: 168390 - DNA, 25 bp, Probe sequence
ttgaacaggctgataataagattat

SEQ ID NO: 168391 - DNA, 25 bp, Probe sequence
ttgtcattattactaaacatcattg

SEQ ID NO: 168392 - DNA, 25 bp, Probe sequence
atatcatgcaataccgtaatttgaa

SEQ ID NO: 168393 - DNA, 25 bp, Probe sequence
atctctttaattcttaaccttatca

SEQ ID NO: 168394 - DNA, 25 bp, Probe sequence
actctcttcaattattacagtatta

SEQ ID NO: 168395 - DNA, 25 bp, Probe sequence
actataacattattttattttgctt

SEQ ID NO: 168396 - DNA, 25 bp, Probe sequence
acatattccattagggtctatttca

SEQ ID NO: 168397 - DNA, 25 bp, Probe sequence
aaaacctgtttattcgattcaatga

SEQ ID NO: 168398 - DNA, 25 bp, Probe sequence
aacaatctctttatctatttttatt

SEQ ID NO: 168399 - DNA, 25 bp, Probe sequence
aacacttttagggatgaatacattt

SEQ ID NO: 168400 - DNA, 25 bp, Probe sequence
aagttatgtcttctttgccttagct

SEQ ID NO: 168401 - DNA, 25 bp, Probe sequence
aagtgggtggataattctcatattt

SEQ ID NO: 168402 - DNA, 25 bp, Probe sequence
aatttattttttgcaacacattttg

SEQ ID NO: 168403 - DNA, 25 bp, Probe sequence
aattctcatatttagtattatttta

SEQ ID NO: 168404 - DNA, 25 bp, Probe sequence
gccttagcttttgtcaatgcattac

SEQ ID NO: 168405 - DNA, 25 bp, Probe sequence
gctacacttgaatcaattgtgtttt

SEQ ID NO: 168406 - DNA, 25 bp, Probe sequence
gaatacatttcaaccgacacattat

SEQ ID NO: 168407 - DNA, 25 bp, Probe sequence
gaagtttaggcatatatttattggg

SEQ ID NO: 168408 - DNA, 25 bp, Probe sequence
gaacgtatattcattgacccgaagg

SEQ ID NO: 168409 - DNA, 25 bp, Probe sequence
gaaaattgctgttgtagacgagtta

SEQ ID NO: 168410 - DNA, 25 bp, Probe sequence
gacccgaaggtaatactctcttcaa

SEQ ID NO: 168411 - DNA, 25 bp, Probe sequence
gattatttcaatctctttaattctt

SEQ ID NO: 168412 - DNA, 25 bp, Probe sequence
gtagacgagttactgttagtccata

SEQ ID NO: 168413 - DNA, 25 bp, Probe sequence
gtagcgttgctacacttgaatcaat

SEQ ID NO: 168414 - DNA, 25 bp, Probe sequence
ggggtgtaatttcagttggtgaacg

SEQ ID NO: 168415 - DNA, 25 bp, Probe sequence
gggtctatttcagatgtattctata

SEQ ID NO: 168416 - DNA, 25 bp, Probe sequence
ggtctagctgtgttaagttatgtct

SEQ ID NO: 168417 - DNA, 25 bp, Probe sequence
ggttttacaaacaatctctttatct

SEQ ID NO: 168418 - DNA, 25 bp, Probe sequence
tgtcaatgcattactgtatatcatg

SEQ ID NO: 168419 - DNA, 25 bp, Probe sequence
tcttctttgccttagcttttgtcaa

SEQ ID NO: 168420 - DNA, 25 bp, Probe sequence
taatcagtatcatttgctattttta

SEQ ID NO: 168421 - DNA, 25 bp, Probe sequence
tatatttattggggattgtttgggt

SEQ ID NO: 168422 - DNA, 25 bp, Probe sequence
tttcaaccgacacattatactaata

SEQ ID NO: 168423 - DNA, 25 bp, Probe sequence
ttatgtcttctttgccttagctttt

SEQ ID NO: 168424 - DNA, 25 bp, Probe sequence
ttctctgtgtttttcttgaatttaa

SEQ ID NO: 168425 - DNA, 25 bp, Probe sequence
ttgaatttctctgtgtttttcttga

SEQ ID NO: 168426 - DNA, 25 bp, Probe sequence
attagtataaatcatcgcacagctg

SEQ ID NO: 168427 - DNA, 25 bp, Probe sequence
atcgcacagctgatgttgcactaag

SEQ ID NO: 168428 - DNA, 25 bp, Probe sequence
atgccttacgaattgcccatgaaga

SEQ ID NO: 168429 - DNA, 25 bp, Probe sequence
agtgccatcacaaacatctttaatt

SEQ ID NO: 168430 - DNA, 25 bp, Probe sequence
agcgcaaagcacaggtacgacagga

SEQ ID NO: 168431 - DNA, 25 bp, Probe sequence
agcggctgcaacaatttcggaacaa

SEQ ID NO: 168432 - DNA, 25 bp, Probe sequence
aagctatcattattggtgcagggga

SEQ ID NO: 168433 - DNA, 25 bp, Probe sequence
cactattaaatcttcttggttctgg

SEQ ID NO: 168434 - DNA, 25 bp, Probe sequence
cagcgcgacgtatctttagttttga

SEQ ID NO: 168435 - DNA, 25 bp, Probe sequence
gcgtgtcacttctggtttagattca

SEQ ID NO: 168436 - DNA, 25 bp, Probe sequence
gaagtatatgctgttgttgatcaaa

SEQ ID NO: 168437 - DNA, 25 bp, Probe sequence
gaacctggtattagtgccatcacaa

SEQ ID NO: 168438 - DNA, 25 bp, Probe sequence
gaactatcatcattaccaaatttac

SEQ ID NO: 168439 - DNA, 25 bp, Probe sequence
gaacatttattgcgtgtcacttctg

SEQ ID NO: 168440 - DNA, 25 bp, Probe sequence
gagatgatgccttacgaattgccca

SEQ ID NO: 168441 - DNA, 25 bp, Probe sequence
gagtgcacaatcttatatcattaca

SEQ ID NO: 168442 - DNA, 25 bp, Probe sequence
gatgcatttttcttagcgcaaagca

SEQ ID NO: 168443 - DNA, 25 bp, Probe sequence
gatcgtaaattgccagggttaagcg

SEQ ID NO: 168444 - DNA, 25 bp, Probe sequence
gatcaaattcacacaggtcgttact

SEQ ID NO: 168445 - DNA, 25 bp, Probe sequence
gattcaatcgtacttggagaaactc

SEQ ID NO: 168446 - DNA, 25 bp, Probe sequence
gattgatattgcagttcctcgagat

SEQ ID NO: 168447 - DNA, 25 bp, Probe sequence
gttgatgcaaacttacgtgagcgac

SEQ ID NO: 168448 - DNA, 25 bp, Probe sequence
gttccagtgattagagctttacgtg

SEQ ID NO: 168449 - DNA, 25 bp, Probe sequence
gtatgttgggtgttgttccagtgat

SEQ ID NO: 168450 - DNA, 25 bp, Probe sequence
gtaagtgtgtcttatgctgcggtcg

SEQ ID NO: 168451 - DNA, 25 bp, Probe sequence
tgtcctcatgagcaagcgaagcaac

SEQ ID NO: 168452 - DNA, 25 bp, Probe sequence
gtgagcgacaattagcggctgcaac

SEQ ID NO: 168453 - DNA, 25 bp, Probe sequence
gtgggggacgaagcagtagaacatt

SEQ ID NO: 168454 - DNA, 25 bp, Probe sequence
ggaaatttcagcgcgacgtatcttt

SEQ ID NO: 168455 - DNA, 25 bp, Probe sequence
tcctcgagatattgaacctggtatt

SEQ ID NO: 168456 - DNA, 25 bp, Probe sequence
tcttatgctgcggtcgagttggcga

SEQ ID NO: 168457 - DNA, 25 bp, Probe sequence
tctagctcgtgcatttggatttgaa

SEQ ID NO: 168458 - DNA, 25 bp, Probe sequence
tcacacaggtcgttactatattcaa

SEQ ID NO: 168459 - DNA, 25 bp, Probe sequence
tattcaacgatttctagctcgtgca

SEQ ID NO: 168460 - DNA, 25 bp, Probe sequence
atggacccagacgatacaattgtaa

SEQ ID NO: 168461 - DNA, 25 bp, Probe sequence
atatggcacgtacatcacagcaacc

SEQ ID NO: 168462 - DNA, 25 bp, Probe sequence
atgatccaacacaagatgatatctt

SEQ ID NO: 168463 - DNA, 25 bp, Probe sequence
atggaatttaattgaaccgtatatt

SEQ ID NO: 168464 - DNA, 25 bp, Probe sequence
agttatatgcactaaagaagacaaa

SEQ ID NO: 168465 - DNA, 25 bp, Probe sequence
aagacatgatccaacacaagatgat

SEQ ID NO: 168466 - DNA, 25 bp, Probe sequence
aagttgcactgagcggtcgatctaa

SEQ ID NO: 168467 - DNA, 25 bp, Probe sequence
aagtctacatttatcaatagtatga

SEQ ID NO: 168468 - DNA, 25 bp, Probe sequence
aatatccagaaacagaattgtctga

SEQ ID NO: 168469 - DNA, 25 bp, Probe sequence
caacttatttttgtggatgttccag

SEQ ID NO: 168470 - DNA, 25 bp, Probe sequence
cagcaacccggcaaaacgcaaacgt

SEQ ID NO: 168471 - DNA, 25 bp, Probe sequence
ctgagcggtcgatctaatgtaggta

SEQ ID NO: 168472 - DNA, 25 bp, Probe sequence
cgatacaattgtaagttattcatca

SEQ ID NO: 168473 - DNA, 25 bp, Probe sequence
gcggtcgatctaatgtaggtaagtc

SEQ ID NO: 168474 - DNA, 25 bp, Probe sequence
gctaaagtaagtaaaacacaacgtg

SEQ ID NO: 168475 - DNA, 25 bp, Probe sequence
gaattgtctgaagttgcactgagcg

SEQ ID NO: 168476 - DNA, 25 bp, Probe sequence
gacacaattagatatggacccagac

SEQ ID NO: 168477 - DNA, 25 bp, Probe sequence
gatatggacccagacgatacaattg

SEQ ID NO: 168478 - DNA, 25 bp, Probe sequence
gattggcagaaaaaatatggcacgt

SEQ ID NO: 168479 - DNA, 25 bp, Probe sequence
gttgcactgagcggtcgatctaatg

SEQ ID NO: 168480 - DNA, 25 bp, Probe sequence
gtctgaagttgcactgagcggtcga

SEQ ID NO: 168481 - DNA, 25 bp, Probe sequence
ggacccagacgatacaattgtaagt

SEQ ID NO: 168482 - DNA, 25 bp, Probe sequence
tgtacaattatttgaaacattttga

SEQ ID NO: 168483 - DNA, 25 bp, Probe sequence
tgtaagttattcatcaattcaaaat

SEQ ID NO: 168484 - DNA, 25 bp, Probe sequence
tgaagttgcactgagcggtcgatct

SEQ ID NO: 168485 - DNA, 25 bp, Probe sequence
tgcactgagcggtcgatctaatgta

SEQ ID NO: 168486 - DNA, 25 bp, Probe sequence
tcacagcaacccggcaaaacgcaaa

SEQ ID NO: 168487 - DNA, 25 bp, Probe sequence
tagatgaacaacttatttttgtgga

SEQ ID NO: 168488 - DNA, 25 bp, Probe sequence
taggtaagtctacatttatcaatag

SEQ ID NO: 168489 - DNA, 25 bp, Probe sequence
tattcctactttagttatatgcact

SEQ ID NO: 168490 - DNA, 25 bp, Probe sequence
tttaattgaaccgtatatttcatag

SEQ ID NO: 168491 - DNA, 25 bp, Probe sequence
ttttgatattcctactttagttata

SEQ ID NO: 168492 - DNA, 25 bp, Probe sequence
ttgtctgaagttgcactgagcggtc

SEQ ID NO: 168493 - DNA, 25 bp, Probe sequence
ttgatttaagacatgatccaacaca

SEQ ID NO: 168494 - DNA, 25 bp, Probe sequence
attcgcccagaagatttgcaagcct

SEQ ID NO: 168495 - DNA, 25 bp, Probe sequence
ataaccactataagcgtattcaaca

SEQ ID NO: 168496 - DNA, 25 bp, Probe sequence
atcggacgtgtgccaattgtagcta

SEQ ID NO: 168497 - DNA, 25 bp, Probe sequence
atcttatttattcttggtggtgcct

SEQ ID NO: 168498 - DNA, 25 bp, Probe sequence
atgtttgatgtgccttctaacgaaa

SEQ ID NO: 168499 - DNA, 25 bp, Probe sequence
agagttcactgaagaagctttatca

SEQ ID NO: 168500 - DNA, 25 bp, Probe sequence
aacaggtgcgcgtggtttacgttca

SEQ ID NO: 168501 - DNA, 25 bp, Probe sequence
acacatctataacacgtgacgtttc

SEQ ID NO: 168502 - DNA, 25 bp, Probe sequence
aacgcaacctaaaaatgcacttgtg

SEQ ID NO: 168503 - DNA, 25 bp, Probe sequence
aaggtgttcaacaagcattgcttaa

SEQ ID NO: 168504 - DNA, 25 bp, Probe sequence
aatttgaaatgctctttctgcggaa

SEQ ID NO: 168505 - DNA, 25 bp, Probe sequence
caagcagctgactttgacattgata

SEQ ID NO: 168506 - DNA, 25 bp, Probe sequence
cagaattacctactcctaaagaaat

SEQ ID NO: 168507 - DNA, 25 bp, Probe sequence
gcattattagcacaaattcgcccag

SEQ ID NO: 168508 - DNA, 25 bp, Probe sequence
gcacgtaaatctgaaaacacatcta

SEQ ID NO: 168509 - DNA, 25 bp, Probe sequence
gcaagcctatggtttgattcctgaa

SEQ ID NO: 168510 - DNA, 25 bp, Probe sequence
gaattatgctcagaaatcgtcgaag

SEQ ID NO: 168511 - DNA, 25 bp, Probe sequence
gaaggtagttattacagcacaaaca

SEQ ID NO: 168512 - DNA, 25 bp, Probe sequence
gaagctggttatgtaggcgatgatg

SEQ ID NO: 168513 - DNA, 25 bp, Probe sequence
gatgcgacaagtttaactgaagctg

SEQ ID NO: 168514 - DNA, 25 bp, Probe sequence
gattcctgaatttatcggacgtgtg

SEQ ID NO: 168515 - DNA, 25 bp, Probe sequence
gtgcgcgtggtttacgttcaatcat

SEQ ID NO: 168516 - DNA, 25 bp, Probe sequence
gtgacgtttcaggtgaaggtgttca

SEQ ID NO: 168517 - DNA, 25 bp, Probe sequence
gtgattaagcgccgtcttggtgaaa

SEQ ID NO: 168518 - DNA, 25 bp, Probe sequence
gtgttccgccacaaggtggacgcaa

SEQ ID NO: 168519 - DNA, 25 bp, Probe sequence
ggtggacgcaaacatccaaaccaag

SEQ ID NO: 168520 - DNA, 25 bp, Probe sequence
tggtggtgcctttgatggtattgaa

SEQ ID NO: 168521 - DNA, 25 bp, Probe sequence
tgaaaaacatcttaacgcaacctaa

SEQ ID NO: 168522 - DNA, 25 bp, Probe sequence
tgaatgtaccatttgcaattgcaga

SEQ ID NO: 168523 - DNA, 25 bp, Probe sequence
tgcaagtgttccgccacaaggtgga

SEQ ID NO: 168524 - DNA, 25 bp, Probe sequence
ttaattgggccaacaggtagtggta

SEQ ID NO: 168525 - DNA, 25 bp, Probe sequence
ttagctcaaaacacttctgaagcga

SEQ ID NO: 168526 - DNA, 25 bp, Probe sequence
ttagccaagacgttgaatgtaccat

SEQ ID NO: 168527 - DNA, 25 bp, Probe sequence
ttggtttctcaagcaatgaagctga

SEQ ID NO: 168528 - DNA, 25 bp, Probe sequence
attgaccacagcttaggacatttag

SEQ ID NO: 168529 - DNA, 25 bp, Probe sequence
attcctgaagcaatggttaatactg

SEQ ID NO: 168530 - DNA, 25 bp, Probe sequence
atactttaggtaatactgatatcat

SEQ ID NO: 168531 - DNA, 25 bp, Probe sequence
agttgcacaaccagaagtaagtgtt

SEQ ID NO: 168532 - DNA, 25 bp, Probe sequence
acagttacagttgagccagaagtta

SEQ ID NO: 168533 - DNA, 25 bp, Probe sequence
acaacaatcgatattcctgaagcaa

SEQ ID NO: 168534 - DNA, 25 bp, Probe sequence
aaagctactgataatacaacaatcg

SEQ ID NO: 168535 - DNA, 25 bp, Probe sequence
aagatgttgtcgtaacattcccaga

SEQ ID NO: 168536 - DNA, 25 bp, Probe sequence
aatcgaagctactgatgaagatatc

SEQ ID NO: 168537 - DNA, 25 bp, Probe sequence
cattatatcaagatgctatcgacat

SEQ ID NO: 168538 - DNA, 25 bp, Probe sequence
cattcccagaagaataccatgctga

SEQ ID NO: 168539 - DNA, 25 bp, Probe sequence
cttatggtgaagcaattgacgaaac

SEQ ID NO: 168540 - DNA, 25 bp, Probe sequence
cgtacttccaaatctcaggtcaaga

SEQ ID NO: 168541 - DNA, 25 bp, Probe sequence
gcacaaagaattcaacaacaaggtt

SEQ ID NO: 168542 - DNA, 25 bp, Probe sequence
gaattagatcgtatggtgtctgaat

SEQ ID NO: 168543 - DNA, 25 bp, Probe sequence
gaagaattcgaaggtggacaagctg

SEQ ID NO: 168544 - DNA, 25 bp, Probe sequence
gaaagacgatgcagaacaacgtgtt

SEQ ID NO: 168545 - DNA, 25 bp, Probe sequence
gaacaacgctttggtgtagaagcat

SEQ ID NO: 168546 - DNA, 25 bp, Probe sequence
gaaactgaattatctgatgatgagt

SEQ ID NO: 168547 - DNA, 25 bp, Probe sequence
gacattttattaccagatgcttatg

SEQ ID NO: 168548 - DNA, 25 bp, Probe sequence
gactttagtggttcagttgacggag

SEQ ID NO: 168549 - DNA, 25 bp, Probe sequence
gagataacgcaaagttcgttgaagg

SEQ ID NO: 168550 - DNA, 25 bp, Probe sequence
gatgctatcgacattttattaccag

SEQ ID NO: 168551 - DNA, 25 bp, Probe sequence
gatgcagaagcaaatacagtagacg

SEQ ID NO: 168552 - DNA, 25 bp, Probe sequence
gttgaaaatggcgacacagttaaca

SEQ ID NO: 168553 - DNA, 25 bp, Probe sequence
gttactgttcctgcagaaaaagtaa

SEQ ID NO: 168554 - DNA, 25 bp, Probe sequence
gtatggtgtctgaatttgcacaaag

SEQ ID NO: 168555 - DNA, 25 bp, Probe sequence
gtaaaggtaaagtgccacgtccaat

SEQ ID NO: 168556 - DNA, 25 bp, Probe sequence
gtaaacaatttaatatctcagttga

SEQ ID NO: 168557 - DNA, 25 bp, Probe sequence
ggacaagctgaaggttacgatttag

SEQ ID NO: 168558 - DNA, 25 bp, Probe sequence
taaacaaagcgttagatcaagcatt

SEQ ID NO: 168559 - DNA, 25 bp, Probe sequence
tagaaatcggttcaggttcattcat

SEQ ID NO: 168560 - DNA, 25 bp, Probe sequence
tttcatttttgaagcaacagttaca

SEQ ID NO: 168561 - DNA, 25 bp, Probe sequence
ttacaaacgtacttccaaatctcag

SEQ ID NO: 168562 - DNA, 25 bp, Probe sequence
attcaatttctaaccctttgcattc

SEQ ID NO: 168563 - DNA, 25 bp, Probe sequence
atttctaaccctttgcattcacaaa

SEQ ID NO: 168564 - DNA, 25 bp, Probe sequence
atacgtatcaacatcaagcgcttgt

SEQ ID NO: 168565 - DNA, 25 bp, Probe sequence
atcaacatcaagcgcttgtagatca

SEQ ID NO: 168566 - DNA, 25 bp, Probe sequence
atcacatacgtatcaacatcaagcg

SEQ ID NO: 168567 - DNA, 25 bp, Probe sequence
agcaaacactgacttaaataaatta

SEQ ID NO: 168568 - DNA, 25 bp, Probe sequence
agcgcttgtagatcaattacatgaa

SEQ ID NO: 168569 - DNA, 25 bp, Probe sequence
acgtatcaacatcaagcgcttgtag

SEQ ID NO: 168570 - DNA, 25 bp, Probe sequence
acatcacatacgtatcaacatcaag

SEQ ID NO: 168571 - DNA, 25 bp, Probe sequence
actacatcacatacgtatcaacatc

SEQ ID NO: 168572 - DNA, 25 bp, Probe sequence
acatacgtatcaacatcaagcgctt

SEQ ID NO: 168573 - DNA, 25 bp, Probe sequence
aaccctttgcattcacaaaacaatt

SEQ ID NO: 168574 - DNA, 25 bp, Probe sequence
aatctgaaactacatcacatacgta

SEQ ID NO: 168575 - DNA, 25 bp, Probe sequence
caaaacatatttagttgctggtatt

SEQ ID NO: 168576 - DNA, 25 bp, Probe sequence
catcaagcgcttgtagatcaattac

SEQ ID NO: 168577 - DNA, 25 bp, Probe sequence
ctaaccctttgcattcacaaaacaa

SEQ ID NO: 168578 - DNA, 25 bp, Probe sequence
gcgctccttgatacgactggtatta

SEQ ID NO: 168579 - DNA, 25 bp, Probe sequence
gctggtattaaagcggcgctccttg

SEQ ID NO: 168580 - DNA, 25 bp, Probe sequence
gctccttgatacgactggtattaaa

SEQ ID NO: 168581 - DNA, 25 bp, Probe sequence
gctatacgcactaaaaatttggatc

SEQ ID NO: 168582 - DNA, 25 bp, Probe sequence
gcaaatctgaaactacatcacatac

SEQ ID NO: 168583 - DNA, 25 bp, Probe sequence
gcaagcaaatctgaaactacatcac

SEQ ID NO: 168584 - DNA, 25 bp, Probe sequence
gaaactacatcacatacgtatcaac

SEQ ID NO: 168585 - DNA, 25 bp, Probe sequence
gactggtattaaattagcaagcaaa

SEQ ID NO: 168586 - DNA, 25 bp, Probe sequence
gttgctggtattaaagcggcgctcc

SEQ ID NO: 168587 - DNA, 25 bp, Probe sequence
ggtattaaagcggcgctccttgata

SEQ ID NO: 168588 - DNA, 25 bp, Probe sequence
tggatcaaatgactaaagcgaaaca

SEQ ID NO: 168589 - DNA, 25 bp, Probe sequence
tgaattaatagcaaacactgactta

SEQ ID NO: 168590 - DNA, 25 bp, Probe sequence
tgctggtattaaagcggcgctcctt

SEQ ID NO: 168591 - DNA, 25 bp, Probe sequence
tcaatttctaaccctttgcattcac

SEQ ID NO: 168592 - DNA, 25 bp, Probe sequence
tacgcactaaaaatttggatcaaat

SEQ ID NO: 168593 - DNA, 25 bp, Probe sequence
tacgactggtattaaattagcaagc

SEQ ID NO: 168594 - DNA, 25 bp, Probe sequence
ttctaaccctttgcattcacaaaac

SEQ ID NO: 168595 - DNA, 25 bp, Probe sequence
ttaaagcggcgctccttgatacgac

SEQ ID NO: 168596 - DNA, 25 bp, Probe sequence
attgtcttattgaaaactggcatac

SEQ ID NO: 168597 - DNA, 25 bp, Probe sequence
atatgagacggggtcatttcttgaa

SEQ ID NO: 168598 - DNA, 25 bp, Probe sequence
atgaacgtcaatttgaactcactga

SEQ ID NO: 168599 - DNA, 25 bp, Probe sequence
atgacctgatgtatgaatatattgt

SEQ ID NO: 168600 - DNA, 25 bp, Probe sequence
atggcattacatcctcttaaagaat

SEQ ID NO: 168601 - DNA, 25 bp, Probe sequence
actggcatacaacaatatgatgcat

SEQ ID NO: 168602 - DNA, 25 bp, Probe sequence
acatatcgctgaagaagcacaccat

SEQ ID NO: 168603 - DNA, 25 bp, Probe sequence
acagacgcacttgattttgaagtta

SEQ ID NO: 168604 - DNA, 25 bp, Probe sequence
acaagaatggcattacatcctctta

SEQ ID NO: 168605 - DNA, 25 bp, Probe sequence
acaatattttgaagcggtagaagta

SEQ ID NO: 168606 - DNA, 25 bp, Probe sequence
caatgatgaaatgccgtatgttata

SEQ ID NO: 168607 - DNA, 25 bp, Probe sequence
cactctatcatgatttatccaattg

SEQ ID NO: 168608 - DNA, 25 bp, Probe sequence
gctgaagaagcacaccatattatga

SEQ ID NO: 168609 - DNA, 25 bp, Probe sequence
gcaaattgtacacaagaactgacaa

SEQ ID NO: 168610 - DNA, 25 bp, Probe sequence
gaattacaaagtatcgatgcattta

SEQ ID NO: 168611 - DNA, 25 bp, Probe sequence
gaagcggtagaagtaattcatcaaa

SEQ ID NO: 168612 - DNA, 25 bp, Probe sequence
gaacaagaccaaaactatgacctga

SEQ ID NO: 168613 - DNA, 25 bp, Probe sequence
gacaatggtcattttcaatttcaag

SEQ ID NO: 168614 - DNA, 25 bp, Probe sequence
gacggggtcatttcttgaattaaga

SEQ ID NO: 168615 - DNA, 25 bp, Probe sequence
gaccaaaactatgacctgatgtatg

SEQ ID NO: 168616 - DNA, 25 bp, Probe sequence
gagggaacagacgcacttgattttg

SEQ ID NO: 168617 - DNA, 25 bp, Probe sequence
gatgcatttaattttattcagcaat

SEQ ID NO: 168618 - DNA, 25 bp, Probe sequence
gatacgttatcaatgagggaacaga

SEQ ID NO: 168619 - DNA, 25 bp, Probe sequence
gatattgaaactttgtttgaaacga

SEQ ID NO: 168620 - DNA, 25 bp, Probe sequence
gattaatgcatacgaatgttatttc

SEQ ID NO: 168621 - DNA, 25 bp, Probe sequence
gttatacctaacgttatggaaacat

SEQ ID NO: 168622 - DNA, 25 bp, Probe sequence
gtcagatattattcagtttcctaac

SEQ ID NO: 168623 - DNA, 25 bp, Probe sequence
tgaaatgccgtatgttatatgagac

SEQ ID NO: 168624 - DNA, 25 bp, Probe sequence
tgaactcactgaagaaatagcaatg

SEQ ID NO: 168625 - DNA, 25 bp, Probe sequence
tcagtttcctaactcttcgaaaaag

SEQ ID NO: 168626 - DNA, 25 bp, Probe sequence
tacatcctcttaaagaatttgctaa

SEQ ID NO: 168627 - DNA, 25 bp, Probe sequence
tataaaacgtgctgaacaagaccaa

SEQ ID NO: 168628 - DNA, 25 bp, Probe sequence
tattcagtttcctaactcttcgaaa

SEQ ID NO: 168629 - DNA, 25 bp, Probe sequence
ttatgaataatcactctatcatgat

SEQ ID NO: 168630 - DNA, 25 bp, Probe sequence
attagtgtatgaacgattatctggc

SEQ ID NO: 168631 - DNA, 25 bp, Probe sequence
atcttcaataggtgtaggcggtcat

SEQ ID NO: 168632 - DNA, 25 bp, Probe sequence
aaaatatttttgatgcgctaagtca

SEQ ID NO: 168633 - DNA, 25 bp, Probe sequence
aacaaatcattgtagtacctagaga

SEQ ID NO: 168634 - DNA, 25 bp, Probe sequence
aaggcaacatagagtcatatgatga

SEQ ID NO: 168635 - DNA, 25 bp, Probe sequence
caatatgaagttaagcgacgcggcg

SEQ ID NO: 168636 - DNA, 25 bp, Probe sequence
caactcatttcttattgtttacttg

SEQ ID NO: 168637 - DNA, 25 bp, Probe sequence
ctggcggtggagaagctcgattgca

SEQ ID NO: 168638 - DNA, 25 bp, Probe sequence
gcgacgcggcgatatggaagaggat

SEQ ID NO: 168639 - DNA, 25 bp, Probe sequence
gcatggacaatcttcaataggtgta

SEQ ID NO: 168640 - DNA, 25 bp, Probe sequence
gcaaggtacatattggtgttgtatt

SEQ ID NO: 168641 - DNA, 25 bp, Probe sequence
gaatatatcggttttattaatgacg

SEQ ID NO: 168642 - DNA, 25 bp, Probe sequence
gaatgatgttccaggagcagaatct

SEQ ID NO: 168643 - DNA, 25 bp, Probe sequence
gaagtaggtttaagtgagcaagatt

SEQ ID NO: 168644 - DNA, 25 bp, Probe sequence
gaagtgggcaaggtacatattggtg

SEQ ID NO: 168645 - DNA, 25 bp, Probe sequence
gaagtattgagagttaatgcacaga

SEQ ID NO: 168646 - DNA, 25 bp, Probe sequence
gaagttaagcgacgcggcgatatgg

SEQ ID NO: 168647 - DNA, 25 bp, Probe sequence
gaagctcgattgcatggacaatctt

SEQ ID NO: 168648 - DNA, 25 bp, Probe sequence
gaaacagatactttacgaataaaat

SEQ ID NO: 168649 - DNA, 25 bp, Probe sequence
gacgcggcgatatggaagaggatcc

SEQ ID NO: 168650 - DNA, 25 bp, Probe sequence
gagcagaatctattaacgaagtatt

SEQ ID NO: 168651 - DNA, 25 bp, Probe sequence
gattatctggcggtggagaagctcg

SEQ ID NO: 168652 - DNA, 25 bp, Probe sequence
gttccaggagcagaatctattaacg

SEQ ID NO: 168653 - DNA, 25 bp, Probe sequence
gtatttaaaatcactgtaagtacga

SEQ ID NO: 168654 - DNA, 25 bp, Probe sequence
gtatgaacgattatctggcggtgga

SEQ ID NO: 168655 - DNA, 25 bp, Probe sequence
gtaagtacgaatgatgtagaagcta

SEQ ID NO: 168656 - DNA, 25 bp, Probe sequence
gtggagaagctcgattgcatggaca

SEQ ID NO: 168657 - DNA, 25 bp, Probe sequence
ggatccatcatataaacaactcatt

SEQ ID NO: 168658 - DNA, 25 bp, Probe sequence
ggcggtcatatgaatgatgttccag

SEQ ID NO: 168659 - DNA, 25 bp, Probe sequence
tgtagtacctagagaaattattttt

SEQ ID NO: 168660 - DNA, 25 bp, Probe sequence
tgtttacttgaaaatgagcatggcg

SEQ ID NO: 168661 - DNA, 25 bp, Probe sequence
tgatgcgctaagtcaatatgaagtt

SEQ ID NO: 168662 - DNA, 25 bp, Probe sequence
tgagcatggcgagatattagtgtat

SEQ ID NO: 168663 - DNA, 25 bp, Probe sequence
taggtgtaggcggtcatatgaatga

SEQ ID NO: 168664 - DNA, 25 bp, Probe sequence
attatggattacacgtatcaacgca

SEQ ID NO: 168665 - DNA, 25 bp, Probe sequence
atttctgacgaaaaagcatttgctc

SEQ ID NO: 168666 - DNA, 25 bp, Probe sequence
atcaacgcagcagctcgtcaacatg

SEQ ID NO: 168667 - DNA, 25 bp, Probe sequence
atgccacgagttaaaggtggaacag

SEQ ID NO: 168668 - DNA, 25 bp, Probe sequence
acgcagcagctcgtcaacatgaaat

SEQ ID NO: 168669 - DNA, 25 bp, Probe sequence
acgtgacttccgtaaattatggatt

SEQ ID NO: 168670 - DNA, 25 bp, Probe sequence
acagtaacaagagcgcgtcgtaaaa

SEQ ID NO: 168671 - DNA, 25 bp, Probe sequence
aaagctggtatcgacattaaccgta

SEQ ID NO: 168672 - DNA, 25 bp, Probe sequence
aaaagcatttgctcaattagtaact

SEQ ID NO: 168673 - DNA, 25 bp, Probe sequence
aagcaacaagtaatgaaatcaggtc

SEQ ID NO: 168674 - DNA, 25 bp, Probe sequence
aagtagctaagcaacaagtaatgaa

SEQ ID NO: 168675 - DNA, 25 bp, Probe sequence
aatgagctactcacgtttaatgaac

SEQ ID NO: 168676 - DNA, 25 bp, Probe sequence
caagagcgcgtcgtaaaaaaacgat

SEQ ID NO: 168677 - DNA, 25 bp, Probe sequence
caacgcagcagctcgtcaacatgaa

SEQ ID NO: 168678 - DNA, 25 bp, Probe sequence
catacattatacaaagtagctaagc

SEQ ID NO: 168679 - DNA, 25 bp, Probe sequence
cgtatcaacgcagcagctcgtcaac

SEQ ID NO: 168680 - DNA, 25 bp, Probe sequence
gctggtatcgacattaaccgtaaaa

SEQ ID NO: 168681 - DNA, 25 bp, Probe sequence
gcatttgctcaattagtaactaaag

SEQ ID NO: 168682 - DNA, 25 bp, Probe sequence
gcagcagctcgtcaacatgaaatga

SEQ ID NO: 168683 - DNA, 25 bp, Probe sequence
gaccgtcgtcaacgtaaacgtgact

SEQ ID NO: 168684 - DNA, 25 bp, Probe sequence
gagctactcacgtttaatgaacggt

SEQ ID NO: 168685 - DNA, 25 bp, Probe sequence
gtatcaacgcagcagctcgtcaaca

SEQ ID NO: 168686 - DNA, 25 bp, Probe sequence
gtgaccgtcgtcaacgtaaacgtga

SEQ ID NO: 168687 - DNA, 25 bp, Probe sequence
gtaaacgtgacttccgtaaattatg

SEQ ID NO: 168688 - DNA, 25 bp, Probe sequence
gtcaacatgaaatgagctactcacg

SEQ ID NO: 168689 - DNA, 25 bp, Probe sequence
gtcgtcaacgtaaacgtgacttccg

SEQ ID NO: 168690 - DNA, 25 bp, Probe sequence
ggtggaacagtaacaagagcgcgtc

SEQ ID NO: 168691 - DNA, 25 bp, Probe sequence
ggttacttcggttcaaaacatacat

SEQ ID NO: 168692 - DNA, 25 bp, Probe sequence
ggattacacgtatcaacgcagcagc

SEQ ID NO: 168693 - DNA, 25 bp, Probe sequence
ggaacagtaacaagagcgcgtcgta

SEQ ID NO: 168694 - DNA, 25 bp, Probe sequence
tccgtgaccgtcgtcaacgtaaacg

SEQ ID NO: 168695 - DNA, 25 bp, Probe sequence
tcggttcaaaacatacattatacaa

SEQ ID NO: 168696 - DNA, 25 bp, Probe sequence
tacacgtatcaacgcagcagctcgt

SEQ ID NO: 168697 - DNA, 25 bp, Probe sequence
tactcacgtttaatgaacggtttga

SEQ ID NO: 168698 - DNA, 25 bp, Probe sequence
atctcacttattcgcaaacaagagc

SEQ ID NO: 168699 - DNA, 25 bp, Probe sequence
atgaaaactcaccgcggagcagcta

SEQ ID NO: 168700 - DNA, 25 bp, Probe sequence
aggtcaattaaaacgttcaagagct

SEQ ID NO: 168701 - DNA, 25 bp, Probe sequence
agagctttcacatctcacttattcg

SEQ ID NO: 168702 - DNA, 25 bp, Probe sequence
agagcactaaacaaaaacgtcaatt

SEQ ID NO: 168703 - DNA, 25 bp, Probe sequence
accgcggagcagctaaacgtgttaa

SEQ ID NO: 168704 - DNA, 25 bp, Probe sequence
acgttcaagagctttcacatctcac

SEQ ID NO: 168705 - DNA, 25 bp, Probe sequence
acgtgttaaaagaactgcttcaggt

SEQ ID NO: 168706 - DNA, 25 bp, Probe sequence
acgtcaattacgtaaagctagatta

SEQ ID NO: 168707 - DNA, 25 bp, Probe sequence
acgtgtaaaacaattattagcatac

SEQ ID NO: 168708 - DNA, 25 bp, Probe sequence
actcaccgcggagcagctaaacgtg

SEQ ID NO: 168709 - DNA, 25 bp, Probe sequence
actgcttcaggtcaattaaaacgtt

SEQ ID NO: 168710 - DNA, 25 bp, Probe sequence
acatctcacttattcgcaaacaaga

SEQ ID NO: 168711 - DNA, 25 bp, Probe sequence
aaatgaaaactcaccgcggagcagc

SEQ ID NO: 168712 - DNA, 25 bp, Probe sequence
aactcaccgcggagcagctaaacgt

SEQ ID NO: 168713 - DNA, 25 bp, Probe sequence
aaaactcaccgcggagcagctaaac

SEQ ID NO: 168714 - DNA, 25 bp, Probe sequence
aaaacgttcaagagctttcacatct

SEQ ID NO: 168715 - DNA, 25 bp, Probe sequence
aaaagaactgcttcaggtcaattaa

SEQ ID NO: 168716 - DNA, 25 bp, Probe sequence
aagctagattagtgtctaagagcga

SEQ ID NO: 168717 - DNA, 25 bp, Probe sequence
aagagctttcacatctcacttattc

SEQ ID NO: 168718 - DNA, 25 bp, Probe sequence
ctttcacatctcacttattcgcaaa

SEQ ID NO: 168719 - DNA, 25 bp, Probe sequence
cgcggagcagctaaacgtgttaaaa

SEQ ID NO: 168720 - DNA, 25 bp, Probe sequence
gccaaaaatgaaaactcaccgcgga

SEQ ID NO: 168721 - DNA, 25 bp, Probe sequence
tcaccgcggagcagctaaacgtgtt

SEQ ID NO: 168722 - DNA, 25 bp, Probe sequence
gcttcaggtcaattaaaacgttcaa

SEQ ID NO: 168723 - DNA, 25 bp, Probe sequence
gaactgcttcaggtcaattaaaacg

SEQ ID NO: 168724 - DNA, 25 bp, Probe sequence
gttcaagagctttcacatctcactt

SEQ ID NO: 168725 - DNA, 25 bp, Probe sequence
tgaaaactcaccgcggagcagctaa

SEQ ID NO: 168726 - DNA, 25 bp, Probe sequence
tcacttattcgcaaacaagagcact

SEQ ID NO: 168727 - DNA, 25 bp, Probe sequence
tcacatctcacttattcgcaaacaa

SEQ ID NO: 168728 - DNA, 25 bp, Probe sequence
tcaagagctttcacatctcacttat

SEQ ID NO: 168729 - DNA, 25 bp, Probe sequence
tttcacatctcacttattcgcaaac

SEQ ID NO: 168730 - DNA, 25 bp, Probe sequence
ttattcgcaaacaagagcactaaac

SEQ ID NO: 168731 - DNA, 25 bp, Probe sequence
ttcacatctcacttattcgcaaaca

SEQ ID NO: 168732 - DNA, 25 bp, Probe sequence
attcgtttcagagggcgtgccatta

SEQ ID NO: 168733 - DNA, 25 bp, Probe sequence
atagcaacagttgaacaaaaaccta

SEQ ID NO: 168734 - DNA, 25 bp, Probe sequence
atgttagcgccaacagctgaaaaat

SEQ ID NO: 168735 - DNA, 25 bp, Probe sequence
atggctgaacgtgtagatttagact

SEQ ID NO: 168736 - DNA, 25 bp, Probe sequence
aaatggacgggcgtcaaatgtttat

SEQ ID NO: 168737 - DNA, 25 bp, Probe sequence
aaatcaatgacaaaattcgtgcaaa

SEQ ID NO: 168738 - DNA, 25 bp, Probe sequence
aaatgtaaagtatctattcgtttca

SEQ ID NO: 168739 - DNA, 25 bp, Probe sequence
aaagatcaaactcaaatcaatgaca

SEQ ID NO: 168740 - DNA, 25 bp, Probe sequence
aattcttaactaaaggcgataaatg

SEQ ID NO: 168741 - DNA, 25 bp, Probe sequence
caattgaggaacatgatttccaaac

SEQ ID NO: 168742 - DNA, 25 bp, Probe sequence
caccgaatgcgaaaccaccagttgc

SEQ ID NO: 168743 - DNA, 25 bp, Probe sequence
gccattacgcataaggaaattggtc

SEQ ID NO: 168744 - DNA, 25 bp, Probe sequence
gaatgcgaaaccaccagttgcaaga

SEQ ID NO: 168745 - DNA, 25 bp, Probe sequence
gaacgtgtagatttagacttagtgg

SEQ ID NO: 168746 - DNA, 25 bp, Probe sequence
gaaaccaccagttgcaagaattatg

SEQ ID NO: 168747 - DNA, 25 bp, Probe sequence
gaaattcgtttaagtccaacaattg

SEQ ID NO: 168748 - DNA, 25 bp, Probe sequence
gaaattggtcaacgtgtgctagaaa

SEQ ID NO: 168749 - DNA, 25 bp, Probe sequence
gacttagtggtcgttgcaccgaatg

SEQ ID NO: 168750 - DNA, 25 bp, Probe sequence
gagggcgtgccattacgcataagga

SEQ ID NO: 168751 - DNA, 25 bp, Probe sequence
gttgcaagaattatggattacggta

SEQ ID NO: 168752 - DNA, 25 bp, Probe sequence
gttgcaccgaatgcgaaaccaccag

SEQ ID NO: 168753 - DNA, 25 bp, Probe sequence
gtttaagtccaacaattgaggaaca

SEQ ID NO: 168754 - DNA, 25 bp, Probe sequence
gtatctattcgtttcagagggcgtg

SEQ ID NO: 168755 - DNA, 25 bp, Probe sequence
gtcgttgcaccgaatgcgaaaccac

SEQ ID NO: 168756 - DNA, 25 bp, Probe sequence
gtggtcgttgcaccgaatgcgaaac

SEQ ID NO: 168757 - DNA, 25 bp, Probe sequence
ggtgttaaatcaaagcgtgaagctt

SEQ ID NO: 168758 - DNA, 25 bp, Probe sequence
ggtcaacgtgtgctagaaaaatatg

SEQ ID NO: 168759 - DNA, 25 bp, Probe sequence
tggattacggtaaattcaaattcga

SEQ ID NO: 168760 - DNA, 25 bp, Probe sequence
tcgtgcaaaagaattacgtttaatc

SEQ ID NO: 168761 - DNA, 25 bp, Probe sequence
tctattcgtttcagagggcgtgcca

SEQ ID NO: 168762 - DNA, 25 bp, Probe sequence
tcgtttcagagggcgtgccattacg

SEQ ID NO: 168763 - DNA, 25 bp, Probe sequence
tagtggtcgttgcaccgaatgcgaa

SEQ ID NO: 168764 - DNA, 25 bp, Probe sequence
ttagacttagtggtcgttgcaccga

SEQ ID NO: 168765 - DNA, 25 bp, Probe sequence
ttcagagggcgtgccattacgcata

SEQ ID NO: 168766 - DNA, 25 bp, Probe sequence
atttctatgattgcgattgggggtt

SEQ ID NO: 168767 - DNA, 25 bp, Probe sequence
atcctgaacgtgctgtgccgaaagc

SEQ ID NO: 168768 - DNA, 25 bp, Probe sequence
atgctacaagatttgttgatccatc

SEQ ID NO: 168769 - DNA, 25 bp, Probe sequence
catctttagggtttgcgcttggttg

SEQ ID NO: 168770 - DNA, 25 bp, Probe sequence
aagtcattcaatattggacaccatt

SEQ ID NO: 168771 - DNA, 25 bp, Probe sequence
aagtgaatactggttggcattgata

SEQ ID NO: 168772 - DNA, 25 bp, Probe sequence
aattccttatgatagtagtgcatta

SEQ ID NO: 168773 - DNA, 25 bp, Probe sequence
ccagtatttttagcattctttattt

SEQ ID NO: 168774 - DNA, 25 bp, Probe sequence
gcattctttatttatcataagcttc

SEQ ID NO: 168775 - DNA, 25 bp, Probe sequence
gcaggtgctttgggtgcattaatag

SEQ ID NO: 168776 - DNA, 25 bp, Probe sequence
gcagcagatattacgattgcagcac

SEQ ID NO: 168777 - DNA, 25 bp, Probe sequence
gcaattcatgatgcaggtgctttgg

SEQ ID NO: 168778 - DNA, 25 bp, Probe sequence
gaatcatgggtggtcatgttgtagg

SEQ ID NO: 168779 - DNA, 25 bp, Probe sequence
gaaaatcctgaacgtgctgtgccga

SEQ ID NO: 168780 - DNA, 25 bp, Probe sequence
gagattttaattttagtcgcttctt

SEQ ID NO: 168781 - DNA, 25 bp, Probe sequence
gttgatccatctttagggtttgcgc

SEQ ID NO: 168782 - DNA, 25 bp, Probe sequence
gttatcggtatgttaattccttatg

SEQ ID NO: 168783 - DNA, 25 bp, Probe sequence
gttttcattgcaattggtttattaa

SEQ ID NO: 168784 - DNA, 25 bp, Probe sequence
gtaacttctggtggagcaattcatg

SEQ ID NO: 168785 - DNA, 25 bp, Probe sequence
gtcgcttcttaattacgtatatggg

SEQ ID NO: 168786 - DNA, 25 bp, Probe sequence
gggtttgcgcttggttggaactatt

SEQ ID NO: 168787 - DNA, 25 bp, Probe sequence
ggggacttaaagatcgtcatatttc

SEQ ID NO: 168788 - DNA, 25 bp, Probe sequence
gggtgcattaataggatacgcaatt

SEQ ID NO: 168789 - DNA, 25 bp, Probe sequence
ggtacaggtttatttgtaacttctg

SEQ ID NO: 168790 - DNA, 25 bp, Probe sequence
ggtatttttcttaatgacgtcactt

SEQ ID NO: 168791 - DNA, 25 bp, Probe sequence
tggaactattggtttaactgggtag

SEQ ID NO: 168792 - DNA, 25 bp, Probe sequence
tgcgattgggggttgtattggtaca

SEQ ID NO: 168793 - DNA, 25 bp, Probe sequence
tcatttagtacatatgctacaagat

SEQ ID NO: 168794 - DNA, 25 bp, Probe sequence
taatttttagtctgaattcgttatc

SEQ ID NO: 168795 - DNA, 25 bp, Probe sequence
tacagttattgttttcattgcaatt

SEQ ID NO: 168796 - DNA, 25 bp, Probe sequence
tacgattgcagcacaagtcattcaa

SEQ ID NO: 168797 - DNA, 25 bp, Probe sequence
tacgtcaagacgtgtcaatggatga

SEQ ID NO: 168798 - DNA, 25 bp, Probe sequence
tattattttacattttagccatttt

SEQ ID NO: 168799 - DNA, 25 bp, Probe sequence
ttttagccatttttgttatcggtat

SEQ ID NO: 168800 - DNA, 25 bp, Probe sequence
atgagcttggcttatcgtacgaaga

SEQ ID NO: 168801 - DNA, 25 bp, Probe sequence
atggtgaacatcatcgtccagttgt

SEQ ID NO: 168802 - DNA, 25 bp, Probe sequence
agttcaaatcattccagttaacgtt

SEQ ID NO: 168803 - DNA, 25 bp, Probe sequence
agcggcattctatggtccgaaacta

SEQ ID NO: 168804 - DNA, 25 bp, Probe sequence
agagacattatcaacagcacaactt

SEQ ID NO: 168805 - DNA, 25 bp, Probe sequence
actgcacatttaatggcacacgcga

SEQ ID NO: 168806 - DNA, 25 bp, Probe sequence
acatctggtcactgggatcactatc

SEQ ID NO: 168807 - DNA, 25 bp, Probe sequence
acagcacaacttgatttcttattac

SEQ ID NO: 168808 - DNA, 25 bp, Probe sequence
aaactattatctacagcaggtgcat

SEQ ID NO: 168809 - DNA, 25 bp, Probe sequence
aatcgacgcgattcctgaagatgaa

SEQ ID NO: 168810 - DNA, 25 bp, Probe sequence
catcgtccagttgttattcatcgtg

SEQ ID NO: 168811 - DNA, 25 bp, Probe sequence
gccattatggttacctaacggtgca

SEQ ID NO: 168812 - DNA, 25 bp, Probe sequence
gccggcaaatttaacgggcaacttg

SEQ ID NO: 168813 - DNA, 25 bp, Probe sequence
gcattcccaacttggttagcgccaa

SEQ ID NO: 168814 - DNA, 25 bp, Probe sequence
gcaggtgcatactggcgtggagata

SEQ ID NO: 168815 - DNA, 25 bp, Probe sequence
gaaactaaaggtgcattcccaactt

SEQ ID NO: 168816 - DNA, 25 bp, Probe sequence
gcaagtggtgctgtatcaggattac

SEQ ID NO: 168817 - DNA, 25 bp, Probe sequence
gaagatatgttcccaccaatgcagt

SEQ ID NO: 168818 - DNA, 25 bp, Probe sequence
gaagcgattggtgaagcggcattct

SEQ ID NO: 168819 - DNA, 25 bp, Probe sequence
gacattgaccaaaacatctcatctg

SEQ ID NO: 168820 - DNA, 25 bp, Probe sequence
gactttggtttcgaggattatagct

SEQ ID NO: 168821 - DNA, 25 bp, Probe sequence
gaggcagcggatgagcttggcttat

SEQ ID NO: 168822 - DNA, 25 bp, Probe sequence
gattttactgatttatgtcgtggag

SEQ ID NO: 168823 - DNA, 25 bp, Probe sequence
gattcacatatctttgttcgacctg

SEQ ID NO: 168824 - DNA, 25 bp, Probe sequence
gtcgtggagttcacgttccatcaac

SEQ ID NO: 168825 - DNA, 25 bp, Probe sequence
gttggtgctggtttgccattatggt

SEQ ID NO: 168826 - DNA, 25 bp, Probe sequence
gttcgtgtaagtattgatgaccgta

SEQ ID NO: 168827 - DNA, 25 bp, Probe sequence
gttcacgttccatcaacagctaaaa

SEQ ID NO: 168828 - DNA, 25 bp, Probe sequence
ggtattacgtcattctactgcacat

SEQ ID NO: 168829 - DNA, 25 bp, Probe sequence
tacattatgattatgcgcgccaatt

SEQ ID NO: 168830 - DNA, 25 bp, Probe sequence
tatagcacaatcaattagtcctgga

SEQ ID NO: 168831 - DNA, 25 bp, Probe sequence
ttattcatcgtggtgttgtatcaac

SEQ ID NO: 168832 - DNA, 25 bp, Probe sequence
ttacgtccaatgaactgtccacatc

SEQ ID NO: 168833 - DNA, 25 bp, Probe sequence
ttctactatgacttcgacattgacc

SEQ ID NO: 168834 - DNA, 25 bp, Probe sequence
attactacttcatttatggtatttg

SEQ ID NO: 168835 - DNA, 25 bp, Probe sequence
attagatgattactacttcatttat

SEQ ID NO: 168836 - DNA, 25 bp, Probe sequence
atttgtaatgaatacccggatcaag

SEQ ID NO: 168837 - DNA, 25 bp, Probe sequence
atacccggatcaagaccgttatctt

SEQ ID NO: 168838 - DNA, 25 bp, Probe sequence
atgaatacccggatcaagaccgtta

SEQ ID NO: 168839 - DNA, 25 bp, Probe sequence
atcaagaccgttatcttaagcagag

SEQ ID NO: 168840 - DNA, 25 bp, Probe sequence
agatgattactacttcatttatggt

SEQ ID NO: 168841 - DNA, 25 bp, Probe sequence
actacttcatttatggtatttgtaa

SEQ ID NO: 168842 - DNA, 25 bp, Probe sequence
aaattagatgattactacttcattt

SEQ ID NO: 168843 - DNA, 25 bp, Probe sequence
aagaccgttatcttaagcagagata

SEQ ID NO: 168844 - DNA, 25 bp, Probe sequence
aatgaatacccggatcaagaccgtt

SEQ ID NO: 168845 - DNA, 25 bp, Probe sequence
aatacccggatcaagaccgttatct

SEQ ID NO: 168846 - DNA, 25 bp, Probe sequence
caagaccgttatcttaagcagagat

SEQ ID NO: 168847 - DNA, 25 bp, Probe sequence
ctacttcatttatggtatttgtaat

SEQ ID NO: 168848 - DNA, 25 bp, Probe sequence
cggatcaagaccgttatcttaagca

SEQ ID NO: 168849 - DNA, 25 bp, Probe sequence
cccggatcaagaccgttatcttaag

SEQ ID NO: 168850 - DNA, 25 bp, Probe sequence
ccggatcaagaccgttatcttaagc

SEQ ID NO: 168851 - DNA, 25 bp, Probe sequence
gaatacccggatcaagaccgttatc

SEQ ID NO: 168852 - DNA, 25 bp, Probe sequence
gaccgttatcttaagcagagatatt

SEQ ID NO: 168853 - DNA, 25 bp, Probe sequence
gatgattactacttcatttatggta

SEQ ID NO: 168854 - DNA, 25 bp, Probe sequence
gatcaagaccgttatcttaagcaga

SEQ ID NO: 168855 - DNA, 25 bp, Probe sequence
gattactacttcatttatggtattt

SEQ ID NO: 168856 - DNA, 25 bp, Probe sequence
gtaatgaatacccggatcaagaccg

SEQ ID NO: 168857 - DNA, 25 bp, Probe sequence
ggatcaagaccgttatcttaagcag

SEQ ID NO: 168858 - DNA, 25 bp, Probe sequence
tgtaatgaatacccggatcaagacc

SEQ ID NO: 168859 - DNA, 25 bp, Probe sequence
tgattactacttcatttatggtatt

SEQ ID NO: 168860 - DNA, 25 bp, Probe sequence
tgaatacccggatcaagaccgttat

SEQ ID NO: 168861 - DNA, 25 bp, Probe sequence
tacccggatcaagaccgttatctta

SEQ ID NO: 168862 - DNA, 25 bp, Probe sequence
tcaagaccgttatcttaagcagaga

SEQ ID NO: 168863 - DNA, 25 bp, Probe sequence
tactacttcatttatggtatttgta

SEQ ID NO: 168864 - DNA, 25 bp, Probe sequence
tatttgtaatgaatacccggatcaa

SEQ ID NO: 168865 - DNA, 25 bp, Probe sequence
ttactacttcatttatggtatttgt

SEQ ID NO: 168866 - DNA, 25 bp, Probe sequence
ttgtttgatgagaatatggttaata

SEQ ID NO: 168867 - DNA, 25 bp, Probe sequence
ttgtaatgaatacccggatcaagac

SEQ ID NO: 168868 - DNA, 25 bp, Probe sequence
atgacccagatgttaagcaattttt

SEQ ID NO: 168869 - DNA, 25 bp, Probe sequence
aggtgcaattgcgaatcagctcaaa

SEQ ID NO: 168870 - DNA, 25 bp, Probe sequence
agaagtaatcaatgacccagatgtt

SEQ ID NO: 168871 - DNA, 25 bp, Probe sequence
agcaatttttggaagcgcatcgagc

SEQ ID NO: 168872 - DNA, 25 bp, Probe sequence
acatcgcgtaagagaagcaaacatt

SEQ ID NO: 168873 - DNA, 25 bp, Probe sequence
aagtataattaacacgtcgcaggac

SEQ ID NO: 168874 - DNA, 25 bp, Probe sequence
aatgcttgatgatattggggctgaa

SEQ ID NO: 168875 - DNA, 25 bp, Probe sequence
aattacatctcatcatatgcaacga

SEQ ID NO: 168876 - DNA, 25 bp, Probe sequence
caaatttcgtaaaggggcatgtgcc

SEQ ID NO: 168877 - DNA, 25 bp, Probe sequence
gcgaatcagctcaaatctaagaagg

SEQ ID NO: 168878 - DNA, 25 bp, Probe sequence
gaaggtacgttcgacaattatttat

SEQ ID NO: 168879 - DNA, 25 bp, Probe sequence
gaagactaaagcagcacgtattatt

SEQ ID NO: 168880 - DNA, 25 bp, Probe sequence
gaagcgcatcgagctgaattaacga

SEQ ID NO: 168881 - DNA, 25 bp, Probe sequence
gaagctgagctaattacatctcatc

SEQ ID NO: 168882 - DNA, 25 bp, Probe sequence
gaacgtgtcaaatctttgtcaacac

SEQ ID NO: 168883 - DNA, 25 bp, Probe sequence
gaacatcatttagcgatgactcgtg

SEQ ID NO: 168884 - DNA, 25 bp, Probe sequence
gactccatgggtgagagatgaggta

SEQ ID NO: 168885 - DNA, 25 bp, Probe sequence
gacggtcataaatttgctgattgtc

SEQ ID NO: 168886 - DNA, 25 bp, Probe sequence
gagaccgtcttgatgtagctatggc

SEQ ID NO: 168887 - DNA, 25 bp, Probe sequence
ggtggctttaaagatggttcttttg

SEQ ID NO: 168888 - DNA, 25 bp, Probe sequence
gatgaggtaattggacctttgctac

SEQ ID NO: 168889 - DNA, 25 bp, Probe sequence
gtacgacgaagaacgctttgaagct

SEQ ID NO: 168890 - DNA, 25 bp, Probe sequence
gtacagcaataactaatggggaaca

SEQ ID NO: 168891 - DNA, 25 bp, Probe sequence
ggggctgaagaagtgactccatggg

SEQ ID NO: 168892 - DNA, 25 bp, Probe sequence
ggggcatgtgcctgagttatatgtt

SEQ ID NO: 168893 - DNA, 25 bp, Probe sequence
ggtaaatcttttattctaggtgcaa

SEQ ID NO: 168894 - DNA, 25 bp, Probe sequence
ggttcatgaattaccaacattcttt

SEQ ID NO: 168895 - DNA, 25 bp, Probe sequence
ggcagcagatgatatttgtacagca

SEQ ID NO: 168896 - DNA, 25 bp, Probe sequence
ggcctttacctttatggtccatttg

SEQ ID NO: 168897 - DNA, 25 bp, Probe sequence
tcgacaattatttatttaccggaat

SEQ ID NO: 168898 - DNA, 25 bp, Probe sequence
tagcgatgactcgtgatggtgaaga

SEQ ID NO: 168899 - DNA, 25 bp, Probe sequence
ttaccaacattctttagttctaatt

SEQ ID NO: 168900 - DNA, 25 bp, Probe sequence
ttaacacgtcgcaggactttgaaaa

SEQ ID NO: 168901 - DNA, 25 bp, Probe sequence
ttgctgattgtccaaatttcgtaaa

SEQ ID NO: 168902 - DNA, 25 bp, Probe sequence
atgaaatgggtagacgtcccgatag

SEQ ID NO: 168903 - DNA, 25 bp, Probe sequence
aggtgcgtcatatcctatgggttta

SEQ ID NO: 168904 - DNA, 25 bp, Probe sequence
aacattgcacgaacgattgcattgc

SEQ ID NO: 168905 - DNA, 25 bp, Probe sequence
aagacctgatgatgtcgcagccaaa

SEQ ID NO: 168906 - DNA, 25 bp, Probe sequence
gcaatgttaaccgcgcgtttactta

SEQ ID NO: 168907 - DNA, 25 bp, Probe sequence
gcgttgaattgatgagtgccgtacc

SEQ ID NO: 168908 - DNA, 25 bp, Probe sequence
gcgattcctgaagtattgtcactca

SEQ ID NO: 168909 - DNA, 25 bp, Probe sequence
gcaaagcaaggcgcattattccacg

SEQ ID NO: 168910 - DNA, 25 bp, Probe sequence
gacaccacgatggaggcattagcca

SEQ ID NO: 168911 - DNA, 25 bp, Probe sequence
gacgtatcacgcgaagatcaagatg

SEQ ID NO: 168912 - DNA, 25 bp, Probe sequence
gagtgccgtaccaatgggtggcaac

SEQ ID NO: 168913 - DNA, 25 bp, Probe sequence
gatgtcattgttggtacggcttttc

SEQ ID NO: 168914 - DNA, 25 bp, Probe sequence
gatcaagatgcttatgctgtcagaa

SEQ ID NO: 168915 - DNA, 25 bp, Probe sequence
gatatacttgtagctggtggcgttg

SEQ ID NO: 168916 - DNA, 25 bp, Probe sequence
gttacggcatggttacgatgtgtat

SEQ ID NO: 168917 - DNA, 25 bp, Probe sequence
gtaggtctagatatatcacgtacga

SEQ ID NO: 168918 - DNA, 25 bp, Probe sequence
gtagcatcccaatttgacgtatcac

SEQ ID NO: 168919 - DNA, 25 bp, Probe sequence
gtaccgggtcaaacagtgaatcgct

SEQ ID NO: 168920 - DNA, 25 bp, Probe sequence
gtacgaatgtgaatggtggcgctat

SEQ ID NO: 168921 - DNA, 25 bp, Probe sequence
gtacggcttttccagaaggattaca

SEQ ID NO: 168922 - DNA, 25 bp, Probe sequence
gtcactcagcaatctatctgttgaa

SEQ ID NO: 168923 - DNA, 25 bp, Probe sequence
gtgaatcgctactgctcatcaggat

SEQ ID NO: 168924 - DNA, 25 bp, Probe sequence
gggtggcaacgagcccacaaacaat

SEQ ID NO: 168925 - DNA, 25 bp, Probe sequence
ggcgcattattccacgaaagacctg

SEQ ID NO: 168926 - DNA, 25 bp, Probe sequence
ggcattagccaaattacgtacagta

SEQ ID NO: 168927 - DNA, 25 bp, Probe sequence
ggcgttcagccgcagcgaaagcaaa

SEQ ID NO: 168928 - DNA, 25 bp, Probe sequence
tggcgctattgctttaggtcatcca

SEQ ID NO: 168929 - DNA, 25 bp, Probe sequence
tgtagcttatgggcgttcagccgca

SEQ ID NO: 168930 - DNA, 25 bp, Probe sequence
tgacacctattgcacgattcgttgg

SEQ ID NO: 168931 - DNA, 25 bp, Probe sequence
tctgccccactttctgatggtgcag

SEQ ID NO: 168932 - DNA, 25 bp, Probe sequence
taaggcagtaggcgttgacccgaaa

SEQ ID NO: 168933 - DNA, 25 bp, Probe sequence
tacaaaccatcgcgattgcagccaa

SEQ ID NO: 168934 - DNA, 25 bp, Probe sequence
taggtcatccattaggtgctacagg

SEQ ID NO: 168935 - DNA, 25 bp, Probe sequence
tattgggcctgcatatgcgattcct

SEQ ID NO: 168936 - DNA, 25 bp, Probe sequence
ataggtgaacacgttatgaacttgt

SEQ ID NO: 168937 - DNA, 25 bp, Probe sequence
atacttaatggacttgtgcgttctt

SEQ ID NO: 168938 - DNA, 25 bp, Probe sequence
atgaacttgttaatgcatgttgatc

SEQ ID NO: 168939 - DNA, 25 bp, Probe sequence
atgtaattctacacaatctaaagtt

SEQ ID NO: 168940 - DNA, 25 bp, Probe sequence
agttgtagattcaaggcatgccgat

SEQ ID NO: 168941 - DNA, 25 bp, Probe sequence
agatttgcatcagtctataaagaat

SEQ ID NO: 168942 - DNA, 25 bp, Probe sequence
aacaaggttgaatggcaattacgag

SEQ ID NO: 168943 - DNA, 25 bp, Probe sequence
aaatgccattcgaagacgaagagaa

SEQ ID NO: 168944 - DNA, 25 bp, Probe sequence
aatggacttgtgcgttcttgtgaga

SEQ ID NO: 168945 - DNA, 25 bp, Probe sequence
aattgtggaacacgtttcactacat

SEQ ID NO: 168946 - DNA, 25 bp, Probe sequence
cttaatggacttgtgcgttcttgtg

SEQ ID NO: 168947 - DNA, 25 bp, Probe sequence
gcgaaaacaaacggagtgatgctta

SEQ ID NO: 168948 - DNA, 25 bp, Probe sequence
gcatgttgatcaagtttcatatgtt

SEQ ID NO: 168949 - DNA, 25 bp, Probe sequence
gcatcgatgcaagggattttaagcg

SEQ ID NO: 168950 - DNA, 25 bp, Probe sequence
gcacaagagagcagttttcaagaga

SEQ ID NO: 168951 - DNA, 25 bp, Probe sequence
gaatggcaattacgagatgaaggtc

SEQ ID NO: 168952 - DNA, 25 bp, Probe sequence
gaagttagtcagcttatagttgtga

SEQ ID NO: 168953 - DNA, 25 bp, Probe sequence
gaacatatcgaagttagtcagctta

SEQ ID NO: 168954 - DNA, 25 bp, Probe sequence
gaacacgtttcactacatttgaaca

SEQ ID NO: 168955 - DNA, 25 bp, Probe sequence
gaaacgaccagttagatatcaacaa

SEQ ID NO: 168956 - DNA, 25 bp, Probe sequence
gaaatgcccgaaatgtaattctaca

SEQ ID NO: 168957 - DNA, 25 bp, Probe sequence
gatggcacaagagagcagttttcaa

SEQ ID NO: 168958 - DNA, 25 bp, Probe sequence
gatgaaggtcatacggaagtgtctt

SEQ ID NO: 168959 - DNA, 25 bp, Probe sequence
gatatcaacaacttgaagacataac

SEQ ID NO: 168960 - DNA, 25 bp, Probe sequence
gttgatcaattgttagcatcgatgc

SEQ ID NO: 168961 - DNA, 25 bp, Probe sequence
gtttcactacatttgaacatatcga

SEQ ID NO: 168962 - DNA, 25 bp, Probe sequence
gtgcgttcttgtgagaaacgaccag

SEQ ID NO: 168963 - DNA, 25 bp, Probe sequence
gtggaacacgtttcactacatttga

SEQ ID NO: 168964 - DNA, 25 bp, Probe sequence
ggtcatacggaagtgtcttcacgag

SEQ ID NO: 168965 - DNA, 25 bp, Probe sequence
ggacttgtgcgttcttgtgagaaac

SEQ ID NO: 168966 - DNA, 25 bp, Probe sequence
ggaagtgtcttcacgagatataggt

SEQ ID NO: 168967 - DNA, 25 bp, Probe sequence
tgtagattcaaggcatgccgatgaa

SEQ ID NO: 168968 - DNA, 25 bp, Probe sequence
tgccgatgaattaaatgccattcga

SEQ ID NO: 168969 - DNA, 25 bp, Probe sequence
tcatatgttagatttgcatcagtct

SEQ ID NO: 168970 - DNA, 25 bp, Probe sequence
attggttgctgatcgcaatcctgaa

SEQ ID NO: 168971 - DNA, 25 bp, Probe sequence
attcagctattattgatgcaaaatc

SEQ ID NO: 168972 - DNA, 25 bp, Probe sequence
attattcctacttctactggtgcgg

SEQ ID NO: 168973 - DNA, 25 bp, Probe sequence
atgactactgttcacgctattacaa

SEQ ID NO: 168974 - DNA, 25 bp, Probe sequence
atggtttaatgactactgttcacgc

SEQ ID NO: 168975 - DNA, 25 bp, Probe sequence
aggtggacatgttcaaatggtagtt

SEQ ID NO: 168976 - DNA, 25 bp, Probe sequence
agccatcgcacatattaaagcaggt

SEQ ID NO: 168977 - DNA, 25 bp, Probe sequence
accactagtgtctgttgattttaat

SEQ ID NO: 168978 - DNA, 25 bp, Probe sequence
acggcatggcattacgtgtaccaac

SEQ ID NO: 168979 - DNA, 25 bp, Probe sequence
actggtgcggcgaaagctttaaaag

SEQ ID NO: 168980 - DNA, 25 bp, Probe sequence
aaatgctagttatccacccgaaaca

SEQ ID NO: 168981 - DNA, 25 bp, Probe sequence
aaaccaagcttttgaaaatgcaggt

SEQ ID NO: 168982 - DNA, 25 bp, Probe sequence
ctacttctactggtgcggcgaaagc

SEQ ID NO: 168983 - DNA, 25 bp, Probe sequence
cgcaatcctgaaaacttgccatgga

SEQ ID NO: 168984 - DNA, 25 bp, Probe sequence
gctgagcaaattggagcacttttga

SEQ ID NO: 168985 - DNA, 25 bp, Probe sequence
gcattggtccagttgcaaaagtttt

SEQ ID NO: 168986 - DNA, 25 bp, Probe sequence
gcaactggtaaatttaatcatggtg

SEQ ID NO: 168987 - DNA, 25 bp, Probe sequence
gaatgtatcgctcgttgatttagtt

SEQ ID NO: 168988 - DNA, 25 bp, Probe sequence
gaatggtattacgtattgcattaca

SEQ ID NO: 168989 - DNA, 25 bp, Probe sequence
gaaggtaaattacacggcatggcat

SEQ ID NO: 168990 - DNA, 25 bp, Probe sequence
gaaagcattattcctacttctactg

SEQ ID NO: 168991 - DNA, 25 bp, Probe sequence
gatatagaagcatttgacattttta

SEQ ID NO: 168992 - DNA, 25 bp, Probe sequence
gatattgctatagatgcaactggta

SEQ ID NO: 168993 - DNA, 25 bp, Probe sequence
gttcacgctattacaaatgaccaaa

SEQ ID NO: 168994 - DNA, 25 bp, Probe sequence
gtcgaacatcaaccactagtgtctg

SEQ ID NO: 168995 - DNA, 25 bp, Probe sequence
gtaccaacaaagaatgtatcgctcg

SEQ ID NO: 168996 - DNA, 25 bp, Probe sequence
gtaaaagttattgcttggtatgata

SEQ ID NO: 168997 - DNA, 25 bp, Probe sequence
gtaatgcttcatgtactactaattg

SEQ ID NO: 168998 - DNA, 25 bp, Probe sequence
tggtgataaagccatcgcacatatt

SEQ ID NO: 168999 - DNA, 25 bp, Probe sequence
tgtactactaattgcattggtccag

SEQ ID NO: 169000 - DNA, 25 bp, Probe sequence
tcgctcgttgatttagttgttgatt

SEQ ID NO: 169001 - DNA, 25 bp, Probe sequence
tatccacccgaaacaattgcacatt

SEQ ID NO: 169002 - DNA, 25 bp, Probe sequence
ttgttaactggtccttcaaaaggtg

SEQ ID NO: 169003 - DNA, 25 bp, Probe sequence
ttgcacatttaatcaattacgatac

SEQ ID NO: 169004 - DNA, 25 bp, Probe sequence
atgccgaaagttattggtctaacag

SEQ ID NO: 169005 - DNA, 25 bp, Probe sequence
atggatattccattattatttgaaa

SEQ ID NO: 169006 - DNA, 25 bp, Probe sequence
agctcaagtacgagaagtctttggt

SEQ ID NO: 169007 - DNA, 25 bp, Probe sequence
acatcctatcgtgcgagatattatg

SEQ ID NO: 169008 - DNA, 25 bp, Probe sequence
aaatggtgagatgaatcgtcgttat

SEQ ID NO: 169009 - DNA, 25 bp, Probe sequence
aaagcagccagggaagctgttaaaa

SEQ ID NO: 169010 - DNA, 25 bp, Probe sequence
aaacgcttagaattaaatgctatca

SEQ ID NO: 169011 - DNA, 25 bp, Probe sequence
aagccgaatggccgatcatgttatc

SEQ ID NO: 169012 - DNA, 25 bp, Probe sequence
aatggatcgtttaatgcaacgtaat

SEQ ID NO: 169013 - DNA, 25 bp, Probe sequence
aatgctatcatacatcctatcgtgc

SEQ ID NO: 169014 - DNA, 25 bp, Probe sequence
caacagtatcagaactcttatccgt

SEQ ID NO: 169015 - DNA, 25 bp, Probe sequence
caaaaccttgagagattgttagaag

SEQ ID NO: 169016 - DNA, 25 bp, Probe sequence
cagtagacgaagtgtgggttgtata

SEQ ID NO: 169017 - DNA, 25 bp, Probe sequence
cagaactcttatccgtattcggttt

SEQ ID NO: 169018 - DNA, 25 bp, Probe sequence
catccagaaaaacgcttagaattaa

SEQ ID NO: 169019 - DNA, 25 bp, Probe sequence
gaaggttatattgaaaagccgaatt

SEQ ID NO: 169020 - DNA, 25 bp, Probe sequence
gaatggccgatcatgttatcgataa

SEQ ID NO: 169021 - DNA, 25 bp, Probe sequence
gaagtctttggtgatgaagcaattg

SEQ ID NO: 169022 - DNA, 25 bp, Probe sequence
gaaagtatacaaatggatcgtttaa

SEQ ID NO: 169023 - DNA, 25 bp, Probe sequence
gatgaatcgtcgttatatgggtgat

SEQ ID NO: 169024 - DNA, 25 bp, Probe sequence
gatcatgttatcgataatttagggg

SEQ ID NO: 169025 - DNA, 25 bp, Probe sequence
gtatcagaactcttatccgtattcg

SEQ ID NO: 169026 - DNA, 25 bp, Probe sequence
gtagatgctgataaagcagccaggg

SEQ ID NO: 169027 - DNA, 25 bp, Probe sequence
gtgggttgtatacacttctgaaagt

SEQ ID NO: 169028 - DNA, 25 bp, Probe sequence
gtgtctatagccaaatttctattga

SEQ ID NO: 169029 - DNA, 25 bp, Probe sequence
gtggaatcgcctcaggaaaatcaac

SEQ ID NO: 169030 - DNA, 25 bp, Probe sequence
ggtctaacaggtggaatcgcctcag

SEQ ID NO: 169031 - DNA, 25 bp, Probe sequence
ggagtaaaggtttagctcaagtacg

SEQ ID NO: 169032 - DNA, 25 bp, Probe sequence
tgctatcatacatcctatcgtgcga

SEQ ID NO: 169033 - DNA, 25 bp, Probe sequence
tcgcctcaggaaaatcaacagtatc

SEQ ID NO: 169034 - DNA, 25 bp, Probe sequence
ttcggttttaaagtagtagatgctg

SEQ ID NO: 169035 - DNA, 25 bp, Probe sequence
taacaggtggaatcgcctcaggaaa

SEQ ID NO: 169036 - DNA, 25 bp, Probe sequence
tatcatacatcctatcgtgcgagat

SEQ ID NO: 169037 - DNA, 25 bp, Probe sequence
tataatgtaatcatggatattccat

SEQ ID NO: 169038 - DNA, 25 bp, Probe sequence
atacctaattatcgtaagcattggc

SEQ ID NO: 169039 - DNA, 25 bp, Probe sequence
atcatcgcgacaagaaatagtcatt

SEQ ID NO: 169040 - DNA, 25 bp, Probe sequence
atcgtcatgctgatggaaaaactgg

SEQ ID NO: 169041 - DNA, 25 bp, Probe sequence
atgaagcattgacgtattatttaaa

SEQ ID NO: 169042 - DNA, 25 bp, Probe sequence
aactttatcggaaggctataccatt

SEQ ID NO: 169043 - DNA, 25 bp, Probe sequence
aaatcgaattcatcaacagtctaat

SEQ ID NO: 169044 - DNA, 25 bp, Probe sequence
aaagctcaaggcaaggaaacaatta

SEQ ID NO: 169045 - DNA, 25 bp, Probe sequence
aagcgttgtttcgtgcaggtgtttt

SEQ ID NO: 169046 - DNA, 25 bp, Probe sequence
aagtgtgtggaagtcaaattgaaac

SEQ ID NO: 169047 - DNA, 25 bp, Probe sequence
aatgtatataagcagccggtatgca

SEQ ID NO: 169048 - DNA, 25 bp, Probe sequence
aatttattcagatatacgtcgtttt

SEQ ID NO: 169049 - DNA, 25 bp, Probe sequence
aattgaacacgttatattttcggat

SEQ ID NO: 169050 - DNA, 25 bp, Probe sequence
cagattatcgtcatgctgatggaaa

SEQ ID NO: 169051 - DNA, 25 bp, Probe sequence
gcggtacaagtatttcagattatcg

SEQ ID NO: 169052 - DNA, 25 bp, Probe sequence
gcatgtgaagcgttgtttcgtgcag

SEQ ID NO: 169053 - DNA, 25 bp, Probe sequence
gcagccggtatgcaaagtgtgtgga

SEQ ID NO: 169054 - DNA, 25 bp, Probe sequence
gaattgaaccctacgttataaatca

SEQ ID NO: 169055 - DNA, 25 bp, Probe sequence
gaagaagtaaatatatcgtttttca

SEQ ID NO: 169056 - DNA, 25 bp, Probe sequence
gaaaaactggtgagatgcaattgca

SEQ ID NO: 169057 - DNA, 25 bp, Probe sequence
gaaacaaaaatcatcgcgacaagaa

SEQ ID NO: 169058 - DNA, 25 bp, Probe sequence
gaaatgttgcgtctgtagcatctta

SEQ ID NO: 169059 - DNA, 25 bp, Probe sequence
gaaatggttttttattatgttagag

SEQ ID NO: 169060 - DNA, 25 bp, Probe sequence
gacttaacacaccaacaacaagaaa

SEQ ID NO: 169061 - DNA, 25 bp, Probe sequence
gatatacgtcgttttggagaaatta

SEQ ID NO: 169062 - DNA, 25 bp, Probe sequence
gttgtttcgtgcaggtgttttacca

SEQ ID NO: 169063 - DNA, 25 bp, Probe sequence
gtaatcgaaggtaaagctcaaggca

SEQ ID NO: 169064 - DNA, 25 bp, Probe sequence
gtaagcattggcatgttatttttga

SEQ ID NO: 169065 - DNA, 25 bp, Probe sequence
tggatcataaagtaatcgcaggttg

SEQ ID NO: 169066 - DNA, 25 bp, Probe sequence
tgcccgaattaccagaagtagaaca

SEQ ID NO: 169067 - DNA, 25 bp, Probe sequence
tgcgtctgtagcatcttatccttca

SEQ ID NO: 169068 - DNA, 25 bp, Probe sequence
taaaagacttaacacaccaacaaca

SEQ ID NO: 169069 - DNA, 25 bp, Probe sequence
taaacgagaacaacgtacattaatt

SEQ ID NO: 169070 - DNA, 25 bp, Probe sequence
tagtcattattgtccagtatgtcaa

SEQ ID NO: 169071 - DNA, 25 bp, Probe sequence
ttcgtgcaggtgttttaccagataa

SEQ ID NO: 169072 - DNA, 25 bp, Probe sequence
atattcctgatattacgagtcgtaa

SEQ ID NO: 169073 - DNA, 25 bp, Probe sequence
ataattgatccatctcgtacgatta

SEQ ID NO: 169074 - DNA, 25 bp, Probe sequence
atgcattgcaattagatgttccatt

SEQ ID NO: 169075 - DNA, 25 bp, Probe sequence
agtgatgatcaacgtatccatacac

SEQ ID NO: 169076 - DNA, 25 bp, Probe sequence
agacgtcttgattcgaaatatccat

SEQ ID NO: 169077 - DNA, 25 bp, Probe sequence
agccaaatcattttttagtagcgtt

SEQ ID NO: 169078 - DNA, 25 bp, Probe sequence
acatcgtcgacgctatattcctgat

SEQ ID NO: 169079 - DNA, 25 bp, Probe sequence
aaacgccgcctgaactaagtgagca

SEQ ID NO: 169080 - DNA, 25 bp, Probe sequence
aaatccatatgttgcttctattact

SEQ ID NO: 169081 - DNA, 25 bp, Probe sequence
aaacaaagcaggcattcataccaat

SEQ ID NO: 169082 - DNA, 25 bp, Probe sequence
aatcagttgtttcattgtacggtca

SEQ ID NO: 169083 - DNA, 25 bp, Probe sequence
caaactttagcgcaaactggacgtt

SEQ ID NO: 169084 - DNA, 25 bp, Probe sequence
ccatccatttcgaattagacggtgg

SEQ ID NO: 169085 - DNA, 25 bp, Probe sequence
gctaccgctagctaagattttaagt

SEQ ID NO: 169086 - DNA, 25 bp, Probe sequence
gcttctattactgatgcaatttact

SEQ ID NO: 169087 - DNA, 25 bp, Probe sequence
gcaaggtgaacatcctatcattgat

SEQ ID NO: 169088 - DNA, 25 bp, Probe sequence
gaaagaagcatttatcaacggcgat

SEQ ID NO: 169089 - DNA, 25 bp, Probe sequence
gaaatatccatgatgcagctggtga

SEQ ID NO: 169090 - DNA, 25 bp, Probe sequence
gagctttttatgcattacctttgtt

SEQ ID NO: 169091 - DNA, 25 bp, Probe sequence
gagacattacaattacctgttatta

SEQ ID NO: 169092 - DNA, 25 bp, Probe sequence
gagaccgagatttaacacaacttgc

SEQ ID NO: 169093 - DNA, 25 bp, Probe sequence
gatgttgatcattatacacctgact

SEQ ID NO: 169094 - DNA, 25 bp, Probe sequence
gatgatattcatacagcaactgcta

SEQ ID NO: 169095 - DNA, 25 bp, Probe sequence
gattatttagctagtttcccaggtg

SEQ ID NO: 169096 - DNA, 25 bp, Probe sequence
gtactgctatgaatacgccaataca

SEQ ID NO: 169097 - DNA, 25 bp, Probe sequence
gtcgatagtttaatgcgtcgtcaag

SEQ ID NO: 169098 - DNA, 25 bp, Probe sequence
gtggaaacattgctacatcgtcgac

SEQ ID NO: 169099 - DNA, 25 bp, Probe sequence
gggagatacttctgataatatacca

SEQ ID NO: 169100 - DNA, 25 bp, Probe sequence
ggctttgctgaacgtactgctatga

SEQ ID NO: 169101 - DNA, 25 bp, Probe sequence
ggcagtgctgcagatatcattaaac

SEQ ID NO: 169102 - DNA, 25 bp, Probe sequence
tctactgctgtagatgtcttagagc

SEQ ID NO: 169103 - DNA, 25 bp, Probe sequence
taaaggtggacgccagaaaacgccg

SEQ ID NO: 169104 - DNA, 25 bp, Probe sequence
tataccaggtgttgcaggtgttgga

SEQ ID NO: 169105 - DNA, 25 bp, Probe sequence
ttcgatattatgttggccagttata

SEQ ID NO: 169106 - DNA, 25 bp, Probe sequence
attaaagcgtcgtatcattatgata

SEQ ID NO: 169107 - DNA, 25 bp, Probe sequence
atttactgcaaatcgaacacttaat

SEQ ID NO: 169108 - DNA, 25 bp, Probe sequence
atgtgtttcggcgtcgacactagtc

SEQ ID NO: 169109 - DNA, 25 bp, Probe sequence
aaggtgcatcactagttttagctgt

SEQ ID NO: 169110 - DNA, 25 bp, Probe sequence
agctgtgatatatcttagtgcattt

SEQ ID NO: 169111 - DNA, 25 bp, Probe sequence
acttccatatggtgtcattttcagt

SEQ ID NO: 169112 - DNA, 25 bp, Probe sequence
aaagatcatccacgacaagaggttt

SEQ ID NO: 169113 - DNA, 25 bp, Probe sequence
aagtatgattgcagcgcttattatt

SEQ ID NO: 169114 - DNA, 25 bp, Probe sequence
catcacttaatggtcgctatatcgg

SEQ ID NO: 169115 - DNA, 25 bp, Probe sequence
gcgcttattatttatctactgctta

SEQ ID NO: 169116 - DNA, 25 bp, Probe sequence
gcgacatcaacactaatttcactct

SEQ ID NO: 169117 - DNA, 25 bp, Probe sequence
gctgtacatgtaagctggttacgtt

SEQ ID NO: 169118 - DNA, 25 bp, Probe sequence
gctggttacgttggctttcatatgg

SEQ ID NO: 169119 - DNA, 25 bp, Probe sequence
gctggtttgcaggattttataatta

SEQ ID NO: 169120 - DNA, 25 bp, Probe sequence
gcttcttcggtcaattatttatgga

SEQ ID NO: 169121 - DNA, 25 bp, Probe sequence
gcatcatccgtcaccaatcaataaa

SEQ ID NO: 169122 - DNA, 25 bp, Probe sequence
gcagatacatatggctggtttgcag

SEQ ID NO: 169123 - DNA, 25 bp, Probe sequence
gcacgatgatttacaatggtttagc

SEQ ID NO: 169124 - DNA, 25 bp, Probe sequence
gaatcattgccgtttgaacattata

SEQ ID NO: 169125 - DNA, 25 bp, Probe sequence
gaacattatatgcatcatccgtcac

SEQ ID NO: 169126 - DNA, 25 bp, Probe sequence
gttttccaatccaaattatcgcaaa

SEQ ID NO: 169127 - DNA, 25 bp, Probe sequence
gtatcattttaattttagcttttct

SEQ ID NO: 169128 - DNA, 25 bp, Probe sequence
gtatgtggttactttgcgttttcga

SEQ ID NO: 169129 - DNA, 25 bp, Probe sequence
gtcgacactagtcattgttactcca

SEQ ID NO: 169130 - DNA, 25 bp, Probe sequence
gtgacattattccactgtatcattt

SEQ ID NO: 169131 - DNA, 25 bp, Probe sequence
ggatgattatgcacattacacgttg

SEQ ID NO: 169132 - DNA, 25 bp, Probe sequence
ggtacaatcattatgttttccaatc

SEQ ID NO: 169133 - DNA, 25 bp, Probe sequence
ggatttgcatcacttaatggtcgct

SEQ ID NO: 169134 - DNA, 25 bp, Probe sequence
tctactgcttagaagtgatcggtat

SEQ ID NO: 169135 - DNA, 25 bp, Probe sequence
tcactttaccgctttattatttact

SEQ ID NO: 169136 - DNA, 25 bp, Probe sequence
taattttaccaagtgctatttatgc

SEQ ID NO: 169137 - DNA, 25 bp, Probe sequence
taggatttatcactttaccgcttta

SEQ ID NO: 169138 - DNA, 25 bp, Probe sequence
tatacagtggaatcattgccgtttg

SEQ ID NO: 169139 - DNA, 25 bp, Probe sequence
ttgcgttttcgatatttgtaggtat

SEQ ID NO: 169140 - DNA, 25 bp, Probe sequence
attgctcaagttatcacgaatttgt

SEQ ID NO: 169141 - DNA, 25 bp, Probe sequence
atttatcagatttaacgcggcgtat

SEQ ID NO: 169142 - DNA, 25 bp, Probe sequence
atattccaagtgctattttaatgat

SEQ ID NO: 169143 - DNA, 25 bp, Probe sequence
atttgtctgtattttgcaagccgta

SEQ ID NO: 169144 - DNA, 25 bp, Probe sequence
agtccatgccaagtactttgatatt

SEQ ID NO: 169145 - DNA, 25 bp, Probe sequence
accaatgatttagcacgacgccttc

SEQ ID NO: 169146 - DNA, 25 bp, Probe sequence
gcatatagtagaggcccaccaaggc

SEQ ID NO: 169147 - DNA, 25 bp, Probe sequence
aaagcgctttttgtgtctaccaatg

SEQ ID NO: 169148 - DNA, 25 bp, Probe sequence
aaaaacacgaacaagctctagcaac

SEQ ID NO: 169149 - DNA, 25 bp, Probe sequence
aagggattttagttgtgatgcatga

SEQ ID NO: 169150 - DNA, 25 bp, Probe sequence
aaggctcaacgttcaaagttattct

SEQ ID NO: 169151 - DNA, 25 bp, Probe sequence
gaatagtcaagttggcaaaggctca

SEQ ID NO: 169152 - DNA, 25 bp, Probe sequence
cagaaatgcattggacgttgtggaa

SEQ ID NO: 169153 - DNA, 25 bp, Probe sequence
gcacgacgccttcaaaagcttaata

SEQ ID NO: 169154 - DNA, 25 bp, Probe sequence
gaagtttcaccaccgcttaatgtta

SEQ ID NO: 169155 - DNA, 25 bp, Probe sequence
gaagttacttatgcaacacaattgt

SEQ ID NO: 169156 - DNA, 25 bp, Probe sequence
gaacagttcaacatctcgcataata

SEQ ID NO: 169157 - DNA, 25 bp, Probe sequence
gagattctggtgggacaggtcttgg

SEQ ID NO: 169158 - DNA, 25 bp, Probe sequence
gacaggtcttggattatcaattaca

SEQ ID NO: 169159 - DNA, 25 bp, Probe sequence
gactttcgtgtcattttcgaagtac

SEQ ID NO: 169160 - DNA, 25 bp, Probe sequence
gagcaaaaaattcaatccaaccgtt

SEQ ID NO: 169161 - DNA, 25 bp, Probe sequence
gaggcccaccaaggcaatattgaag

SEQ ID NO: 169162 - DNA, 25 bp, Probe sequence
gatggagatattaacgttcgtgtgt

SEQ ID NO: 169163 - DNA, 25 bp, Probe sequence
gatgcggaatcattagacatgtttt

SEQ ID NO: 169164 - DNA, 25 bp, Probe sequence
gataatatgatgactcaagccaatc

SEQ ID NO: 169165 - DNA, 25 bp, Probe sequence
gatttatcgcatattgagcaacata

SEQ ID NO: 169166 - DNA, 25 bp, Probe sequence
gttgcaataaaccaagtccatgcca

SEQ ID NO: 169167 - DNA, 25 bp, Probe sequence
gttcgtgtgtatcgagatgactttc

SEQ ID NO: 169168 - DNA, 25 bp, Probe sequence
ggttattatcacatacgtgtacctg

SEQ ID NO: 169169 - DNA, 25 bp, Probe sequence
taatccgtcccattcaagaagttac

SEQ ID NO: 169170 - DNA, 25 bp, Probe sequence
taggcattattattcacgcttccat

SEQ ID NO: 169171 - DNA, 25 bp, Probe sequence
tatcagttttgttacattaggcatt

SEQ ID NO: 169172 - DNA, 25 bp, Probe sequence
ttcacgcttccatcacatatgtttt

SEQ ID NO: 169173 - DNA, 25 bp, Probe sequence
ttgcaagccgtagttttaagcgtac

SEQ ID NO: 169174 - DNA, 25 bp, Probe sequence
attggagctaacaccgaaagaattt

SEQ ID NO: 169175 - DNA, 25 bp, Probe sequence
attattttagatgttatgctaccta

SEQ ID NO: 169176 - DNA, 25 bp, Probe sequence
atgtcgcaaaaagtgttggtagtag

SEQ ID NO: 169177 - DNA, 25 bp, Probe sequence
actgtgcgtggcttaggctataaat

SEQ ID NO: 169178 - DNA, 25 bp, Probe sequence
aagcctttttcacctagagaagttg

SEQ ID NO: 169179 - DNA, 25 bp, Probe sequence
caacttattaaaactgtgcgtggct

SEQ ID NO: 169180 - DNA, 25 bp, Probe sequence
cagctggttatgaagttgttgtcgc

SEQ ID NO: 169181 - DNA, 25 bp, Probe sequence
catcggatcgatacgtattagaccc

SEQ ID NO: 169182 - DNA, 25 bp, Probe sequence
cctagagaagttgttgcccgtgtga

SEQ ID NO: 169183 - DNA, 25 bp, Probe sequence
gcgtggcttaggctataaattggaa

SEQ ID NO: 169184 - DNA, 25 bp, Probe sequence
gctacctaaaaaagatggcattgac

SEQ ID NO: 169185 - DNA, 25 bp, Probe sequence
gaatttgcaggagactcaagaattg

SEQ ID NO: 169186 - DNA, 25 bp, Probe sequence
gaagttgttgcccgtgtgaaagcca

SEQ ID NO: 169187 - DNA, 25 bp, Probe sequence
gaagttgttgtcgcatttgatggtg

SEQ ID NO: 169188 - DNA, 25 bp, Probe sequence
gaacattcaatcgtaacattactta

SEQ ID NO: 169189 - DNA, 25 bp, Probe sequence
gaaagccattttaagacgttctcaa

SEQ ID NO: 169190 - DNA, 25 bp, Probe sequence
gacaaggcagagtcattacgagaga

SEQ ID NO: 169191 - DNA, 25 bp, Probe sequence
gactaagcctttttcacctagagaa

SEQ ID NO: 169192 - DNA, 25 bp, Probe sequence
gatggcattgacgtatgtaagactg

SEQ ID NO: 169193 - DNA, 25 bp, Probe sequence
gatgtacatatcagtcatttaagag

SEQ ID NO: 169194 - DNA, 25 bp, Probe sequence
gatgatattaccatcggatcgatac

SEQ ID NO: 169195 - DNA, 25 bp, Probe sequence
gttggtagtagatgacgaacattca

SEQ ID NO: 169196 - DNA, 25 bp, Probe sequence
gttgcccgtgtgaaagccattttaa

SEQ ID NO: 169197 - DNA, 25 bp, Probe sequence
gtcgcatttgatggtgatgaggctt

SEQ ID NO: 169198 - DNA, 25 bp, Probe sequence
ggaattatgaatttgcaggagactc

SEQ ID NO: 169199 - DNA, 25 bp, Probe sequence
taagacgttctcaatttgtaaaaga

SEQ ID NO: 169200 - DNA, 25 bp, Probe sequence
taaaactgtgcgtggcttaggctat

SEQ ID NO: 169201 - DNA, 25 bp, Probe sequence
taaaaatttagtccctatattaatg

SEQ ID NO: 169202 - DNA, 25 bp, Probe sequence
tacgtattagacccgattattttga

SEQ ID NO: 169203 - DNA, 25 bp, Probe sequence
tatgactaagcctttttcacctaga

SEQ ID NO: 169204 - DNA, 25 bp, Probe sequence
tagacccgattattttgaagtatat

SEQ ID NO: 169205 - DNA, 25 bp, Probe sequence
taggtttagaattaggtgccgatga

SEQ ID NO: 169206 - DNA, 25 bp, Probe sequence
tttgatcgggtattaggtttagaat

SEQ ID NO: 169207 - DNA, 25 bp, Probe sequence
ttaggtgccgatgactatatgacta

SEQ ID NO: 169208 - DNA, 25 bp, Probe sequence
attcgattcccagaaacttcaggta

SEQ ID NO: 169209 - DNA, 25 bp, Probe sequence
attggtggtggtattagatcattaa

SEQ ID NO: 169210 - DNA, 25 bp, Probe sequence
atatgctatcgataataaccgtaaa

SEQ ID NO: 169211 - DNA, 25 bp, Probe sequence
atcacctgttaaacgtccacaagat

SEQ ID NO: 169212 - DNA, 25 bp, Probe sequence
agttgttacttatgactttgcccgt

SEQ ID NO: 169213 - DNA, 25 bp, Probe sequence
agctgagcatgatgttgtagcaact

SEQ ID NO: 169214 - DNA, 25 bp, Probe sequence
acttatgactttgcccgtttaatgg

SEQ ID NO: 169215 - DNA, 25 bp, Probe sequence
acaacaaattttaactcgtccagct

SEQ ID NO: 169216 - DNA, 25 bp, Probe sequence
aactcgtccagctgagcatgatgtt

SEQ ID NO: 169217 - DNA, 25 bp, Probe sequence
aagtgaatccatcttcagtaatttt

SEQ ID NO: 169218 - DNA, 25 bp, Probe sequence
ccgtaaatcagttactttagttcat

SEQ ID NO: 169219 - DNA, 25 bp, Probe sequence
ccaattatcccatttattatcggtg

SEQ ID NO: 169220 - DNA, 25 bp, Probe sequence
gccgagttatagatgctgctgttga

SEQ ID NO: 169221 - DNA, 25 bp, Probe sequence
gcgccaggtgcaaacattaattatg

SEQ ID NO: 169222 - DNA, 25 bp, Probe sequence
gcagtggggttacgatttagcatta

SEQ ID NO: 169223 - DNA, 25 bp, Probe sequence
gcaactatgaacttgaatggtgact

SEQ ID NO: 169224 - DNA, 25 bp, Probe sequence
gaattggaccggatatttggaaggc

SEQ ID NO: 169225 - DNA, 25 bp, Probe sequence
gaatggttacctcaagaaacacttg

SEQ ID NO: 169226 - DNA, 25 bp, Probe sequence
gaaggctcatttaagcagtggggtt

SEQ ID NO: 169227 - DNA, 25 bp, Probe sequence
gaagcaacacatggtacagctccaa

SEQ ID NO: 169228 - DNA, 25 bp, Probe sequence
gaagtttctacatcagcatttgcag

SEQ ID NO: 169229 - DNA, 25 bp, Probe sequence
gaagacatttatgctggtattgaat

SEQ ID NO: 169230 - DNA, 25 bp, Probe sequence
gatgctgctgttgagaaagcctata

SEQ ID NO: 169231 - DNA, 25 bp, Probe sequence
gattctattgctgacattttcttac

SEQ ID NO: 169232 - DNA, 25 bp, Probe sequence
gttgatatggttattttccgtgaaa

SEQ ID NO: 169233 - DNA, 25 bp, Probe sequence
gtacagctccaaaatatgcaggttt

SEQ ID NO: 169234 - DNA, 25 bp, Probe sequence
gtggtattggtattgcgccaggtgc

SEQ ID NO: 169235 - DNA, 25 bp, Probe sequence
ggagtaccatcacctgttaaacgtc

SEQ ID NO: 169236 - DNA, 25 bp, Probe sequence
ggatggtgctgaagaagtttctaca

SEQ ID NO: 169237 - DNA, 25 bp, Probe sequence
ggacctttaacaacaccaattggtg

SEQ ID NO: 169238 - DNA, 25 bp, Probe sequence
tgcccgtttaatggatggtgctgaa

SEQ ID NO: 169239 - DNA, 25 bp, Probe sequence
taggatggcaagaagcggcagataa

SEQ ID NO: 169240 - DNA, 25 bp, Probe sequence
ttagctgcacaagttggtggtattg

SEQ ID NO: 169241 - DNA, 25 bp, Probe sequence
ttggaaggcagcaagccgagttata

SEQ ID NO: 169242 - DNA, 25 bp, Probe sequence
atatgtactcaggtattgtagcagc

SEQ ID NO: 169243 - DNA, 25 bp, Probe sequence
atacctcatgacttattcacgccaa

SEQ ID NO: 169244 - DNA, 25 bp, Probe sequence
ataatagaattatgcgtcctagagc

SEQ ID NO: 169245 - DNA, 25 bp, Probe sequence
atgccggctatgatattgatgatct

SEQ ID NO: 169246 - DNA, 25 bp, Probe sequence
agtgcgagtgtttatcactgtatgg

SEQ ID NO: 169247 - DNA, 25 bp, Probe sequence
acgtcattatcatatattgcacatt

SEQ ID NO: 169248 - DNA, 25 bp, Probe sequence
acatgacattaaatcctcgtgtgta

SEQ ID NO: 169249 - DNA, 25 bp, Probe sequence
acagcgtttgctcgagtaagacaag

SEQ ID NO: 169250 - DNA, 25 bp, Probe sequence
aagcctaatcctgacttaagttatg

SEQ ID NO: 169251 - DNA, 25 bp, Probe sequence
aagggccattacatggtggtgcaaa

SEQ ID NO: 169252 - DNA, 25 bp, Probe sequence
aatgttgatttttatagtgcgagtg

SEQ ID NO: 169253 - DNA, 25 bp, Probe sequence
caatctttgctgtaagtcgttctgc

SEQ ID NO: 169254 - DNA, 25 bp, Probe sequence
catcattagttacagcgtttgctcg

SEQ ID NO: 169255 - DNA, 25 bp, Probe sequence
cttattcacgccaatctttgctgta

SEQ ID NO: 169256 - DNA, 25 bp, Probe sequence
cttattttacacgctgatcatgagt

SEQ ID NO: 169257 - DNA, 25 bp, Probe sequence
gttacgtggggaattaccaacagat

SEQ ID NO: 169258 - DNA, 25 bp, Probe sequence
gcaaacttcctatatatgttacgtg

SEQ ID NO: 169259 - DNA, 25 bp, Probe sequence
gaagaagttattttcctattatgga

SEQ ID NO: 169260 - DNA, 25 bp, Probe sequence
gacagcattacgtacgtcattatca

SEQ ID NO: 169261 - DNA, 25 bp, Probe sequence
gacgatgttatctgagattgggtca

SEQ ID NO: 169262 - DNA, 25 bp, Probe sequence
gacgctggtcgtgaagaattatttg

SEQ ID NO: 169263 - DNA, 25 bp, Probe sequence
gagcaatgcgtatacaggctaaagt

SEQ ID NO: 169264 - DNA, 25 bp, Probe sequence
gagaaatgagccgtcaaattacgaa

SEQ ID NO: 169265 - DNA, 25 bp, Probe sequence
gatggtgatcctagagcgaaatatt

SEQ ID NO: 169266 - DNA, 25 bp, Probe sequence
gatggattgctcatattttagaaca

SEQ ID NO: 169267 - DNA, 25 bp, Probe sequence
gatgatctagctgaaaatgcgcaat

SEQ ID NO: 169268 - DNA, 25 bp, Probe sequence
gatcacgtgcatccaatgacagcat

SEQ ID NO: 169269 - DNA, 25 bp, Probe sequence
gatcatgagttgaacgcatctgcat

SEQ ID NO: 169270 - DNA, 25 bp, Probe sequence
gtaggttctctgaaagggccattac

SEQ ID NO: 169271 - DNA, 25 bp, Probe sequence
gtatgttacagatcacgtgcatcca

SEQ ID NO: 169272 - DNA, 25 bp, Probe sequence
gtcaattgacttatgccggctatga

SEQ ID NO: 169273 - DNA, 25 bp, Probe sequence
gtcgttctgcaggatggattgctca

SEQ ID NO: 169274 - DNA, 25 bp, Probe sequence
tgaaaatgttgatgcttacttagat

SEQ ID NO: 169275 - DNA, 25 bp, Probe sequence
tagaaggggttatcgcagcggagac

SEQ ID NO: 169276 - DNA, 25 bp, Probe sequence
tttctttaacccaccacgtattatg

SEQ ID NO: 169277 - DNA, 25 bp, Probe sequence
attactctgctatcaatgtacctaa

SEQ ID NO: 169278 - DNA, 25 bp, Probe sequence
atcgcatttgcgaaagtctctacaa

SEQ ID NO: 169279 - DNA, 25 bp, Probe sequence
atgatgtgcctggctttgtcgcaaa

SEQ ID NO: 169280 - DNA, 25 bp, Probe sequence
agtctctacaaatgcctttgaggca

SEQ ID NO: 169281 - DNA, 25 bp, Probe sequence
actgggcaagcgattggtcgtccta

SEQ ID NO: 169282 - DNA, 25 bp, Probe sequence
aaagctaccgatgatttccgagaca

SEQ ID NO: 169283 - DNA, 25 bp, Probe sequence
aaagctcgacttgtttacgatgttg

SEQ ID NO: 169284 - DNA, 25 bp, Probe sequence
aaacgatccaaatctcattgcgaaa

SEQ ID NO: 169285 - DNA, 25 bp, Probe sequence
aaaaggcgcatgaagacggtcttgt

SEQ ID NO: 169286 - DNA, 25 bp, Probe sequence
aacgtgtcgaagttgcgctcaaacg

SEQ ID NO: 169287 - DNA, 25 bp, Probe sequence
aacgattctttggtctacatttctt

SEQ ID NO: 169288 - DNA, 25 bp, Probe sequence
ctcacctattgttgtcgctgcaagt

SEQ ID NO: 169289 - DNA, 25 bp, Probe sequence
cgcttgtctgggggttcaactggaa

SEQ ID NO: 169290 - DNA, 25 bp, Probe sequence
gttcaaggtcgtgccttaggcggtg

SEQ ID NO: 169291 - DNA, 25 bp, Probe sequence
gctgatcgcatattacgcacatcgc

SEQ ID NO: 169292 - DNA, 25 bp, Probe sequence
gaaaccagtagtcacagctgttcaa

SEQ ID NO: 169293 - DNA, 25 bp, Probe sequence
gacgaagcgggactatttttatggg

SEQ ID NO: 169294 - DNA, 25 bp, Probe sequence
gagcttgtactttactcacctattg

SEQ ID NO: 169295 - DNA, 25 bp, Probe sequence
gagacatagaccgtgcgcttgtctg

SEQ ID NO: 169296 - DNA, 25 bp, Probe sequence
gagttaatacctacgtcacacacga

SEQ ID NO: 169297 - DNA, 25 bp, Probe sequence
gaggcacgtcgttatggttatttac

SEQ ID NO: 169298 - DNA, 25 bp, Probe sequence
gatgacaaacaagcttccatgacaa

SEQ ID NO: 169299 - DNA, 25 bp, Probe sequence
gattatgtacctgtatcgcaaccac

SEQ ID NO: 169300 - DNA, 25 bp, Probe sequence
gtagatgtggatgctttaactgggc

SEQ ID NO: 169301 - DNA, 25 bp, Probe sequence
gtgatgccaaactttccgtaactca

SEQ ID NO: 169302 - DNA, 25 bp, Probe sequence
ggtcttgtagatgatgtcgttgcac

SEQ ID NO: 169303 - DNA, 25 bp, Probe sequence
ggaaacttggtccattccaattatg

SEQ ID NO: 169304 - DNA, 25 bp, Probe sequence
ggccttgcagaaatggctgatcgca

SEQ ID NO: 169305 - DNA, 25 bp, Probe sequence
taaagtaaccgttcttggcgcaggc

SEQ ID NO: 169306 - DNA, 25 bp, Probe sequence
tatcgcaaccacaattaccaatttt

SEQ ID NO: 169307 - DNA, 25 bp, Probe sequence
tatattccgaatcctagacatcaat

SEQ ID NO: 169308 - DNA, 25 bp, Probe sequence
ttgtcgcaaatagagtcggcacgca

SEQ ID NO: 169309 - DNA, 25 bp, Probe sequence
ttatgtatcgcgccgagcaacacaa

SEQ ID NO: 169310 - DNA, 25 bp, Probe sequence
attgcagcaagtttcgtacgtcgtc

SEQ ID NO: 169311 - DNA, 25 bp, Probe sequence
attactgctggtgtaccaactggtg

SEQ ID NO: 169312 - DNA, 25 bp, Probe sequence
agtgaatgctatcggtatttcggtt

SEQ ID NO: 169313 - DNA, 25 bp, Probe sequence
acgttgcacgattaaacttttcaca

SEQ ID NO: 169314 - DNA, 25 bp, Probe sequence
acgtgctacacgtgcagaagctagt

SEQ ID NO: 169315 - DNA, 25 bp, Probe sequence
actgctgctggtttatatcctgaag

SEQ ID NO: 169316 - DNA, 25 bp, Probe sequence
acaattggaccagcttcagaatcag

SEQ ID NO: 169317 - DNA, 25 bp, Probe sequence
aaaggtccagaaattcgtacgcata

SEQ ID NO: 169318 - DNA, 25 bp, Probe sequence
aaaccagttattacagctacacaaa

SEQ ID NO: 169319 - DNA, 25 bp, Probe sequence
aacaatgcagttgcaacagctgttg

SEQ ID NO: 169320 - DNA, 25 bp, Probe sequence
aagctaacatttcagtattccctaa

SEQ ID NO: 169321 - DNA, 25 bp, Probe sequence
aatgctggtatgaacgttgcacgat

SEQ ID NO: 169322 - DNA, 25 bp, Probe sequence
cagaagctagtgacgttgccaacgc

SEQ ID NO: 169323 - DNA, 25 bp, Probe sequence
cgtacgtcgtcctagtgatgtttta

SEQ ID NO: 169324 - DNA, 25 bp, Probe sequence
gaaaatgttgacttcattgcagcaa

SEQ ID NO: 169325 - DNA, 25 bp, Probe sequence
gaaaatccacctagttggtgacgaa

SEQ ID NO: 169326 - DNA, 25 bp, Probe sequence
gacggtatcattgaacttgaacgtg

SEQ ID NO: 169327 - DNA, 25 bp, Probe sequence
gatgaaacgtttgtaccttatgtag

SEQ ID NO: 169328 - DNA, 25 bp, Probe sequence
gatgctgaagatatccgtttcggta

SEQ ID NO: 169329 - DNA, 25 bp, Probe sequence
gttggtactacgttagttgctgaaa

SEQ ID NO: 169330 - DNA, 25 bp, Probe sequence
gttgccaacgcaatctatgatggta

SEQ ID NO: 169331 - DNA, 25 bp, Probe sequence
gttatctggtgaaactgctgctggt

SEQ ID NO: 169332 - DNA, 25 bp, Probe sequence
gtaggttcatacattttacttgatg

SEQ ID NO: 169333 - DNA, 25 bp, Probe sequence
gtctgatggtttaatggttgcacgt

SEQ ID NO: 169334 - DNA, 25 bp, Probe sequence
gtgatattttaaactctggtgagct

SEQ ID NO: 169335 - DNA, 25 bp, Probe sequence
gtggttcaacggcacgtactatctc

SEQ ID NO: 169336 - DNA, 25 bp, Probe sequence
ggttgcacgtggtgacatgggtgtt

SEQ ID NO: 169337 - DNA, 25 bp, Probe sequence
tgtagctgctactgaaagtggttca

SEQ ID NO: 169338 - DNA, 25 bp, Probe sequence
tgttagttacgattgatgctgctca

SEQ ID NO: 169339 - DNA, 25 bp, Probe sequence
tgctgtatcagctgaagcagcccaa

SEQ ID NO: 169340 - DNA, 25 bp, Probe sequence
tagattctatgcaacgtaacccacg

SEQ ID NO: 169341 - DNA, 25 bp, Probe sequence
tatgcaacgtaacccacgtgctaca

SEQ ID NO: 169342 - DNA, 25 bp, Probe sequence
tatttcggttgcacatacagcttta

SEQ ID NO: 169343 - DNA, 25 bp, Probe sequence
ttggacgtggatcagttgttggtac

SEQ ID NO: 169344 - DNA, 25 bp, Probe sequence
atagtctatatgaacttgctaacaa

SEQ ID NO: 169345 - DNA, 25 bp, Probe sequence
atacgattattggcttagtcgacaa

SEQ ID NO: 169346 - DNA, 25 bp, Probe sequence
agtcacgcacgaacatttatcattg

SEQ ID NO: 169347 - DNA, 25 bp, Probe sequence
cgttcaacgtggtggtagcccaaca

SEQ ID NO: 169348 - DNA, 25 bp, Probe sequence
acgattcagcgtggaggtacattct

SEQ ID NO: 169349 - DNA, 25 bp, Probe sequence
actgcgtcaagtcacgcacgaacat

SEQ ID NO: 169350 - DNA, 25 bp, Probe sequence
aaattgtagcaacatcttttgatga

SEQ ID NO: 169351 - DNA, 25 bp, Probe sequence
aagagggattgagggccttgtagtt

SEQ ID NO: 169352 - DNA, 25 bp, Probe sequence
aattcaaactatcggtattcctggt

SEQ ID NO: 169353 - DNA, 25 bp, Probe sequence
gcggtgcacaacgcatcagtgagga

SEQ ID NO: 169354 - DNA, 25 bp, Probe sequence
gcggtagacttattaatgcaaggtg

SEQ ID NO: 169355 - DNA, 25 bp, Probe sequence
gaatgctgccgtaagagcagttgtt

SEQ ID NO: 169356 - DNA, 25 bp, Probe sequence
gaagtacgtaaagttgcaatcgaaa

SEQ ID NO: 169357 - DNA, 25 bp, Probe sequence
gaagcaatgggccgtgattgtggag

SEQ ID NO: 169358 - DNA, 25 bp, Probe sequence
gaaacactcaatcgttcttgtagca

SEQ ID NO: 169359 - DNA, 25 bp, Probe sequence
gagcagttgttcgtacagcaattta

SEQ ID NO: 169360 - DNA, 25 bp, Probe sequence
gagtgtctgtgttaggtcacgttca

SEQ ID NO: 169361 - DNA, 25 bp, Probe sequence
gttatcgcggtgcacaacgcatcag

SEQ ID NO: 169362 - DNA, 25 bp, Probe sequence
gtttatggtgtgtatcatggttacc

SEQ ID NO: 169363 - DNA, 25 bp, Probe sequence
gtattcagcaagatgtccagagttt

SEQ ID NO: 169364 - DNA, 25 bp, Probe sequence
gtctgtgttaggtcacgttcaacgt

SEQ ID NO: 169365 - DNA, 25 bp, Probe sequence
gtgcggatagagttttagcatcacg

SEQ ID NO: 169366 - DNA, 25 bp, Probe sequence
gggccttgtagttattggtggtgac

SEQ ID NO: 169367 - DNA, 25 bp, Probe sequence
gtggtgacggtagttatcgcggtgc

SEQ ID NO: 169368 - DNA, 25 bp, Probe sequence
gtggtagcccaacaggtgcggatag

SEQ ID NO: 169369 - DNA, 25 bp, Probe sequence
gggccgtgattgtggagatctagca

SEQ ID NO: 169370 - DNA, 25 bp, Probe sequence
ggatcagttggggatacgattcagc

SEQ ID NO: 169371 - DNA, 25 bp, Probe sequence
ggtgctgagacaattgtagttccag

SEQ ID NO: 169372 - DNA, 25 bp, Probe sequence
ggtattcctggtacgattgacaatg

SEQ ID NO: 169373 - DNA, 25 bp, Probe sequence
ggtactgattttacaattggatttg

SEQ ID NO: 169374 - DNA, 25 bp, Probe sequence
ggagatctagcattatgggctggat

SEQ ID NO: 169375 - DNA, 25 bp, Probe sequence
ggaggtacattcttgtattcagcaa

SEQ ID NO: 169376 - DNA, 25 bp, Probe sequence
tgggctggattatcagttggtgctg

SEQ ID NO: 169377 - DNA, 25 bp, Probe sequence
taggtggatatgcggtagacttatt

SEQ ID NO: 169378 - DNA, 25 bp, Probe sequence
attactgcccatgatattaagcaat

SEQ ID NO: 169379 - DNA, 25 bp, Probe sequence
atattccatatatctttgattcgtt

SEQ ID NO: 169380 - DNA, 25 bp, Probe sequence
atttggctaaaattgcagctgaaac

SEQ ID NO: 169381 - DNA, 25 bp, Probe sequence
atgattggtggtattggctttttaa

SEQ ID NO: 169382 - DNA, 25 bp, Probe sequence
atgtcatttctgaaccacttggcgg

SEQ ID NO: 169383 - DNA, 25 bp, Probe sequence
atggaaagacagtaatttggctaaa

SEQ ID NO: 169384 - DNA, 25 bp, Probe sequence
agattcacttgagtcattatcacgt

SEQ ID NO: 169385 - DNA, 25 bp, Probe sequence
agatgatgtcatttctgaaccactt

SEQ ID NO: 169386 - DNA, 25 bp, Probe sequence
accacttggcggtgcacataaagat

SEQ ID NO: 169387 - DNA, 25 bp, Probe sequence
aaaaccatgggatcgtgtgcaaatt

SEQ ID NO: 169388 - DNA, 25 bp, Probe sequence
aacaaatttgattgagatggcttca

SEQ ID NO: 169389 - DNA, 25 bp, Probe sequence
aagctttagctattaaatcagcgtt

SEQ ID NO: 169390 - DNA, 25 bp, Probe sequence
aaggtgcatatcctggtaaagctgc

SEQ ID NO: 169391 - DNA, 25 bp, Probe sequence
aattcagaaatatcggttcttatat

SEQ ID NO: 169392 - DNA, 25 bp, Probe sequence
caatcgtcctatctttacatttata

SEQ ID NO: 169393 - DNA, 25 bp, Probe sequence
gaagaacgtggacaaagtgaatcta

SEQ ID NO: 169394 - DNA, 25 bp, Probe sequence
gaagcgtcattggaacgagaaacta

SEQ ID NO: 169395 - DNA, 25 bp, Probe sequence
gaaacaatgaaaattactgcccatg

SEQ ID NO: 169396 - DNA, 25 bp, Probe sequence
gaaaaattcaatcgtcctatcttta

SEQ ID NO: 169397 - DNA, 25 bp, Probe sequence
gaaattgacatgcttgaagcgtcat

SEQ ID NO: 169398 - DNA, 25 bp, Probe sequence
gagatgatccagcaatgattggtgg

SEQ ID NO: 169399 - DNA, 25 bp, Probe sequence
gattcgtttatggaactacatggtg

SEQ ID NO: 169400 - DNA, 25 bp, Probe sequence
gttattggacaacaacgtggaaaag

SEQ ID NO: 169401 - DNA, 25 bp, Probe sequence
gtcattatcacgtgatgaaattgct

SEQ ID NO: 169402 - DNA, 25 bp, Probe sequence
gtcattggtgaaggtggcagtggag

SEQ ID NO: 169403 - DNA, 25 bp, Probe sequence
ggtgcagcggcattattatggaaag

SEQ ID NO: 169404 - DNA, 25 bp, Probe sequence
ggatcgtgtgcaaattgcgcgtttg

SEQ ID NO: 169405 - DNA, 25 bp, Probe sequence
ggaactacatggtgatcgtaatttt

SEQ ID NO: 169406 - DNA, 25 bp, Probe sequence
ggctttttaaatggtcgtgctgtta

SEQ ID NO: 169407 - DNA, 25 bp, Probe sequence
tgcgcgtttgcaagaaagacctacg

SEQ ID NO: 169408 - DNA, 25 bp, Probe sequence
tcgtaattttagagatgatccagca

SEQ ID NO: 169409 - DNA, 25 bp, Probe sequence
tactctgttatatctcctgaaggtg

SEQ ID NO: 169410 - DNA, 25 bp, Probe sequence
tatctcctgaaggtgcagcggcatt

SEQ ID NO: 169411 - DNA, 25 bp, Probe sequence
ttctgaaccacttggcggtgcacat

SEQ ID NO: 169412 - DNA, 25 bp, Probe sequence
attgctttaactgcgtataaacgta

SEQ ID NO: 169413 - DNA, 25 bp, Probe sequence
attgccagatgatttccaaactgca

SEQ ID NO: 169414 - DNA, 25 bp, Probe sequence
attactgcactgagaaccgtttacc

SEQ ID NO: 169415 - DNA, 25 bp, Probe sequence
atttccaaactgcagaatttttatt

SEQ ID NO: 169416 - DNA, 25 bp, Probe sequence
atatgcgtcaaacattgtctgaaat

SEQ ID NO: 169417 - DNA, 25 bp, Probe sequence
atcatatttaacacatccaactact

SEQ ID NO: 169418 - DNA, 25 bp, Probe sequence
atgactaagtgtccaaagtgtaaga

SEQ ID NO: 169419 - DNA, 25 bp, Probe sequence
atgacctctgcgaatccattagatt

SEQ ID NO: 169420 - DNA, 25 bp, Probe sequence
atgtcgcatcattgattactgcact

SEQ ID NO: 169421 - DNA, 25 bp, Probe sequence
agtgtatctttaaaacgtcattctg

SEQ ID NO: 169422 - DNA, 25 bp, Probe sequence
aaaaataatgatgtgcctgcaggta

SEQ ID NO: 169423 - DNA, 25 bp, Probe sequence
aaaatccatcaagaggtgactaaat

SEQ ID NO: 169424 - DNA, 25 bp, Probe sequence
aatccattagattttccaagttatt

SEQ ID NO: 169425 - DNA, 25 bp, Probe sequence
aatatcttacagtacaagactctaa

SEQ ID NO: 169426 - DNA, 25 bp, Probe sequence
caagttttgcatcagttggtgatat

SEQ ID NO: 169427 - DNA, 25 bp, Probe sequence
cttttctctgcaagtggtggtgcac

SEQ ID NO: 169428 - DNA, 25 bp, Probe sequence
ctggtggtgtatctgcaagttttgc

SEQ ID NO: 169429 - DNA, 25 bp, Probe sequence
cgtcattctgacgctggactattat

SEQ ID NO: 169430 - DNA, 25 bp, Probe sequence
gcactgagaaccgtttaccatttat

SEQ ID NO: 169431 - DNA, 25 bp, Probe sequence
gcaggtcgtcgagttattgaacaga

SEQ ID NO: 169432 - DNA, 25 bp, Probe sequence
gaatgggaagtatgggatcggttat

SEQ ID NO: 169433 - DNA, 25 bp, Probe sequence
gaaggatcatttacagaattcgata

SEQ ID NO: 169434 - DNA, 25 bp, Probe sequence
gacgctggactattatatatatcat

SEQ ID NO: 169435 - DNA, 25 bp, Probe sequence
gatggtatgaaatttggcgttgctg

SEQ ID NO: 169436 - DNA, 25 bp, Probe sequence
gataagggaatgacctctgcgaatc

SEQ ID NO: 169437 - DNA, 25 bp, Probe sequence
gataggttttgcaggtcgtcgagtt

SEQ ID NO: 169438 - DNA, 25 bp, Probe sequence
gtgcctgcaggtattatgactaagt

SEQ ID NO: 169439 - DNA, 25 bp, Probe sequence
gtgatcatcatattgctttaactgc

SEQ ID NO: 169440 - DNA, 25 bp, Probe sequence
gtggtggtgcacgtatgcaagaagg

SEQ ID NO: 169441 - DNA, 25 bp, Probe sequence
ggtattatttccttgatgcaaatgg

SEQ ID NO: 169442 - DNA, 25 bp, Probe sequence
tgtgtgctttaattgtgatcatcat

SEQ ID NO: 169443 - DNA, 25 bp, Probe sequence
tgctgtcatggattcacgttttaga

SEQ ID NO: 169444 - DNA, 25 bp, Probe sequence
tccaactactggtggtgtatctgca

SEQ ID NO: 169445 - DNA, 25 bp, Probe sequence
tttggcgttgctgtcatggattcac

SEQ ID NO: 169446 - DNA, 25 bp, Probe sequence
atggggtgcctattgcgttaaatac

SEQ ID NO: 169447 - DNA, 25 bp, Probe sequence
agtattattcaaaagcttcgctggt

SEQ ID NO: 169448 - DNA, 25 bp, Probe sequence
agctgtagaagcgattgctgattta

SEQ ID NO: 169449 - DNA, 25 bp, Probe sequence
aaataatacctgatgatgccaaagc

SEQ ID NO: 169450 - DNA, 25 bp, Probe sequence
aaacgtgtagcgccatcagttgctc

SEQ ID NO: 169451 - DNA, 25 bp, Probe sequence
aatccaattatatttgcaatggcta

SEQ ID NO: 169452 - DNA, 25 bp, Probe sequence
aataatgtattagctttccctggta

SEQ ID NO: 169453 - DNA, 25 bp, Probe sequence
gcttcgctggtatcaatggggtgcc

SEQ ID NO: 169454 - DNA, 25 bp, Probe sequence
gccatcagttgctcgtaatgttgct

SEQ ID NO: 169455 - DNA, 25 bp, Probe sequence
gccattgttaaattactatacgcgt

SEQ ID NO: 169456 - DNA, 25 bp, Probe sequence
gcggcaatggaatctggagtagcta

SEQ ID NO: 169457 - DNA, 25 bp, Probe sequence
gaagttgatccgcaagatgtgtatg

SEQ ID NO: 169458 - DNA, 25 bp, Probe sequence
gaggtgcattagaggttgaagctac

SEQ ID NO: 169459 - DNA, 25 bp, Probe sequence
gaggcgcaatttttgaaggacgttc

SEQ ID NO: 169460 - DNA, 25 bp, Probe sequence
gatggaacagcggtattaggtttag

SEQ ID NO: 169461 - DNA, 25 bp, Probe sequence
gtatcccaggaccgtttgataaacg

SEQ ID NO: 169462 - DNA, 25 bp, Probe sequence
gttgttggtacaggacgttcagact

SEQ ID NO: 169463 - DNA, 25 bp, Probe sequence
gtttctgtagctaatgcgctgtcac

SEQ ID NO: 169464 - DNA, 25 bp, Probe sequence
ggtgcagcaggaatagccattgtta

SEQ ID NO: 169465 - DNA, 25 bp, Probe sequence
ggttatgtgtgactcaagaggcgca

SEQ ID NO: 169466 - DNA, 25 bp, Probe sequence
ggacgttcagactatcctaaccaaa

SEQ ID NO: 169467 - DNA, 25 bp, Probe sequence
ggacctgaagcaagtattcctgtaa

SEQ ID NO: 169468 - DNA, 25 bp, Probe sequence
ggaaatgcacaaacgtaatcaaggt

SEQ ID NO: 169469 - DNA, 25 bp, Probe sequence
tgacgatcaacatggtacagcaatt

SEQ ID NO: 169470 - DNA, 25 bp, Probe sequence
tgaagactactgtatcccaggaccg

SEQ ID NO: 169471 - DNA, 25 bp, Probe sequence
tgcgctgtcacaagatatggttaag

SEQ ID NO: 169472 - DNA, 25 bp, Probe sequence
tcggcaccacgttgttttgaaattg

SEQ ID NO: 169473 - DNA, 25 bp, Probe sequence
tcacctggcgttgctgaaccgtgta

SEQ ID NO: 169474 - DNA, 25 bp, Probe sequence
taagtttagcatactcacctggcgt

SEQ ID NO: 169475 - DNA, 25 bp, Probe sequence
tagaggatatttcggcaccacgttg

SEQ ID NO: 169476 - DNA, 25 bp, Probe sequence
tattccggtattccatgacgatcaa

SEQ ID NO: 169477 - DNA, 25 bp, Probe sequence
ttagctttccctggtatttttagag

SEQ ID NO: 169478 - DNA, 25 bp, Probe sequence
ttgtactaaatggtgctggtgcagc

SEQ ID NO: 169479 - DNA, 25 bp, Probe sequence
ttgcaatggctaatccaaatcctga

SEQ ID NO: 169480 - DNA, 25 bp, Probe sequence
atatgaatatgcccctttaacgaaa

SEQ ID NO: 169481 - DNA, 25 bp, Probe sequence
atggttttcctagagcacatgctgt

SEQ ID NO: 169482 - DNA, 25 bp, Probe sequence
actttcggtcatctgcttgcaagag

SEQ ID NO: 169483 - DNA, 25 bp, Probe sequence
aaatatcatcaatctctacttcctc

SEQ ID NO: 169484 - DNA, 25 bp, Probe sequence
aaacccagaacgtgtaacaatgcct

SEQ ID NO: 169485 - DNA, 25 bp, Probe sequence
aacacgttcaacgttgttgcaagct

SEQ ID NO: 169486 - DNA, 25 bp, Probe sequence
aacttctttgtatagaccaggtcca

SEQ ID NO: 169487 - DNA, 25 bp, Probe sequence
aatggacaatgactgaagccgaacg

SEQ ID NO: 169488 - DNA, 25 bp, Probe sequence
aatatttgtggcgtgtcttagttac

SEQ ID NO: 169489 - DNA, 25 bp, Probe sequence
cgcaaggagatacgactggcatatt

SEQ ID NO: 169490 - DNA, 25 bp, Probe sequence
gccaccgaacattaacgaaagtcat

SEQ ID NO: 169491 - DNA, 25 bp, Probe sequence
gaattgcctgatgcacttattagtc

SEQ ID NO: 169492 - DNA, 25 bp, Probe sequence
gaagatgccgtaagacttgctgtgt

SEQ ID NO: 169493 - DNA, 25 bp, Probe sequence
gaaatttcaagtttaatcccacata

SEQ ID NO: 169494 - DNA, 25 bp, Probe sequence
gacatacatctacacatgcggcagg

SEQ ID NO: 169495 - DNA, 25 bp, Probe sequence
gactttgaagatacacgccgagaaa

SEQ ID NO: 169496 - DNA, 25 bp, Probe sequence
gagctgttcttgaaagtgagcgtca

SEQ ID NO: 169497 - DNA, 25 bp, Probe sequence
gagcacatgctgtcagctattctaa

SEQ ID NO: 169498 - DNA, 25 bp, Probe sequence
gagattcagacattagccacttttg

SEQ ID NO: 169499 - DNA, 25 bp, Probe sequence
gatggtgtgattttccctaatcagt

SEQ ID NO: 169500 - DNA, 25 bp, Probe sequence
gatgttgtgttatccttttatgatg

SEQ ID NO: 169501 - DNA, 25 bp, Probe sequence
gatgcacttgccataactgacacca

SEQ ID NO: 169502 - DNA, 25 bp, Probe sequence
gtatcactatattgccaccgaacat

SEQ ID NO: 169503 - DNA, 25 bp, Probe sequence
gtatctggaattgtgactttcggtc

SEQ ID NO: 169504 - DNA, 25 bp, Probe sequence
gtctgaaaatgttgatgcacttgcc

SEQ ID NO: 169505 - DNA, 25 bp, Probe sequence
gtgagcgtcaacattttatagaagg

SEQ ID NO: 169506 - DNA, 25 bp, Probe sequence
gtgggagcgtttgatgcttttggta

SEQ ID NO: 169507 - DNA, 25 bp, Probe sequence
ggtcaaaatatggcattcgtcacat

SEQ ID NO: 169508 - DNA, 25 bp, Probe sequence
ggattttatgtttcgcaacacccag

SEQ ID NO: 169509 - DNA, 25 bp, Probe sequence
ggaagaaattccaacttacattaca

SEQ ID NO: 169510 - DNA, 25 bp, Probe sequence
tcgaaaccatcgacatgaacgctgg

SEQ ID NO: 169511 - DNA, 25 bp, Probe sequence
tatggcgagctacatgtatctggaa

SEQ ID NO: 169512 - DNA, 25 bp, Probe sequence
ttatacaatcctttaaccctagtga

SEQ ID NO: 169513 - DNA, 25 bp, Probe sequence
ttgattttgctagacgtataccgaa

SEQ ID NO: 169514 - DNA, 25 bp, Probe sequence
attgcgcaagattttggtggcggtg

SEQ ID NO: 169515 - DNA, 25 bp, Probe sequence
agcagaaatttccgcaaaagcaagt

SEQ ID NO: 169516 - DNA, 25 bp, Probe sequence
acgaacgcgtcatctacaagtgaaa

SEQ ID NO: 169517 - DNA, 25 bp, Probe sequence
acgatacaattattatacacagaca

SEQ ID NO: 169518 - DNA, 25 bp, Probe sequence
actatattcagcagaaatttccgca

SEQ ID NO: 169519 - DNA, 25 bp, Probe sequence
acaatacctcagaacatactatgga

SEQ ID NO: 169520 - DNA, 25 bp, Probe sequence
aaatagatcatcatcctgcagttga

SEQ ID NO: 169521 - DNA, 25 bp, Probe sequence
aaatgttgccgtttcaaggttatgt

SEQ ID NO: 169522 - DNA, 25 bp, Probe sequence
aatgctccacgaattgacgatgaac

SEQ ID NO: 169523 - DNA, 25 bp, Probe sequence
catcctgcagttgatcagtatggtg

SEQ ID NO: 169524 - DNA, 25 bp, Probe sequence
catccgaatgcgtcaggagtttcag

SEQ ID NO: 169525 - DNA, 25 bp, Probe sequence
gcgattcctttttaacaatacctca

SEQ ID NO: 169526 - DNA, 25 bp, Probe sequence
gcggaatcatcattaagttttattg

SEQ ID NO: 169527 - DNA, 25 bp, Probe sequence
gctggaaagttaattgggcatgata

SEQ ID NO: 169528 - DNA, 25 bp, Probe sequence
gcagtgggtgaagcggaatcatcat

SEQ ID NO: 169529 - DNA, 25 bp, Probe sequence
gaagcatctcagtttgttaatacaa

SEQ ID NO: 169530 - DNA, 25 bp, Probe sequence
gaacatactatggaaattgctggaa

SEQ ID NO: 169531 - DNA, 25 bp, Probe sequence
gagcaattcggtattcagccaaatg

SEQ ID NO: 169532 - DNA, 25 bp, Probe sequence
gatgcatatggttcacaacttggtt

SEQ ID NO: 169533 - DNA, 25 bp, Probe sequence
gatactgggcgattcctttttaaca

SEQ ID NO: 169534 - DNA, 25 bp, Probe sequence
gataaaacatatcaagatgcgcttg

SEQ ID NO: 169535 - DNA, 25 bp, Probe sequence
gatttaatctcacattttaatgatg

SEQ ID NO: 169536 - DNA, 25 bp, Probe sequence
gttaatacaattgctgacatcaaag

SEQ ID NO: 169537 - DNA, 25 bp, Probe sequence
gttttacaacatttcgaacttatgg

SEQ ID NO: 169538 - DNA, 25 bp, Probe sequence
gtattggagcaattcggtattcagc

SEQ ID NO: 169539 - DNA, 25 bp, Probe sequence
gtatgtgatactgccaatgctccac

SEQ ID NO: 169540 - DNA, 25 bp, Probe sequence
gggcatgatattgatcataatgcgc

SEQ ID NO: 169541 - DNA, 25 bp, Probe sequence
tgggatgaatttgagcaacttgcta

SEQ ID NO: 169542 - DNA, 25 bp, Probe sequence
tgccgtttcaaggttatgttttaca

SEQ ID NO: 169543 - DNA, 25 bp, Probe sequence
tcgtcggtgatactgggcgattcct

SEQ ID NO: 169544 - DNA, 25 bp, Probe sequence
tcagccaaatgaagcatctcagttt

SEQ ID NO: 169545 - DNA, 25 bp, Probe sequence
tacacagacatgttagaccagatcc

SEQ ID NO: 169546 - DNA, 25 bp, Probe sequence
tactgccaatgctccacgaattgac

SEQ ID NO: 169547 - DNA, 25 bp, Probe sequence
tagttaatacgaacgcgtcatctac

SEQ ID NO: 169548 - DNA, 25 bp, Probe sequence
tagacgtcggaagaaacttcgccaa

SEQ ID NO: 169549 - DNA, 25 bp, Probe sequence
attgaattgattcctgtcgtttcga

SEQ ID NO: 169550 - DNA, 25 bp, Probe sequence
attgaatcgttatctataggctcta

SEQ ID NO: 169551 - DNA, 25 bp, Probe sequence
attattgatggccaagtgttaggtg

SEQ ID NO: 169552 - DNA, 25 bp, Probe sequence
atttcggtgcgtaaaatcgctaaat

SEQ ID NO: 169553 - DNA, 25 bp, Probe sequence
atttacctgttctatcatcaagtta

SEQ ID NO: 169554 - DNA, 25 bp, Probe sequence
ataggctctaaaatttcggtgcgta

SEQ ID NO: 169555 - DNA, 25 bp, Probe sequence
atcacatataacagtgcgctttggc

SEQ ID NO: 169556 - DNA, 25 bp, Probe sequence
agcagattataagcgtatggcgaat

SEQ ID NO: 169557 - DNA, 25 bp, Probe sequence
acgatcaaatcgccaaatatataac

SEQ ID NO: 169558 - DNA, 25 bp, Probe sequence
acggctatattaattactggtggat

SEQ ID NO: 169559 - DNA, 25 bp, Probe sequence
aaacagtacctattgaatcacatat

SEQ ID NO: 169560 - DNA, 25 bp, Probe sequence
aaaacgacaaagtagcgagcgctct

SEQ ID NO: 169561 - DNA, 25 bp, Probe sequence
aactggccatacaagatttccggta

SEQ ID NO: 169562 - DNA, 25 bp, Probe sequence
aagatggtatctaaatttgcaattg

SEQ ID NO: 169563 - DNA, 25 bp, Probe sequence
aatattatcaacaaagcacttttta

SEQ ID NO: 169564 - DNA, 25 bp, Probe sequence
caagatttccggtagtcaatgagtc

SEQ ID NO: 169565 - DNA, 25 bp, Probe sequence
gcgctctcgtgatatgccaaatgtt

SEQ ID NO: 169566 - DNA, 25 bp, Probe sequence
gcgcatatgatgatttgggaaggta

SEQ ID NO: 169567 - DNA, 25 bp, Probe sequence
gaattacagtagaagtttcaccact

SEQ ID NO: 169568 - DNA, 25 bp, Probe sequence
gaagggacagcatatcgtgcaatta

SEQ ID NO: 169569 - DNA, 25 bp, Probe sequence
gaagatgtgcagattgaagctttaa

SEQ ID NO: 169570 - DNA, 25 bp, Probe sequence
gatcgtgttggtacggttcgaatcg

SEQ ID NO: 169571 - DNA, 25 bp, Probe sequence
gagtacagtagcaagttgtgcgcat

SEQ ID NO: 169572 - DNA, 25 bp, Probe sequence
gattcctgtcgtttcgagtaataaa

SEQ ID NO: 169573 - DNA, 25 bp, Probe sequence
gtagcgagcgctctcgtgatatgcc

SEQ ID NO: 169574 - DNA, 25 bp, Probe sequence
gtgaacatgcatagtcaaaacgaca

SEQ ID NO: 169575 - DNA, 25 bp, Probe sequence
ggagcaatggaactcaaagatattt

SEQ ID NO: 169576 - DNA, 25 bp, Probe sequence
ggcatggtcgcaacgatagatcgtg

SEQ ID NO: 169577 - DNA, 25 bp, Probe sequence
tgcgctttggcatactagacgtcgg

SEQ ID NO: 169578 - DNA, 25 bp, Probe sequence
tctgtgctgtttgatacgatgaaaa

SEQ ID NO: 169579 - DNA, 25 bp, Probe sequence
taaaatgggcatggtcgcaacgata

SEQ ID NO: 169580 - DNA, 25 bp, Probe sequence
tactggtggatttaagccatctaat

SEQ ID NO: 169581 - DNA, 25 bp, Probe sequence
ttgcgaatgaacatgatttacctgt

SEQ ID NO: 169582 - DNA, 25 bp, Probe sequence
attgcgaaacgtcatccagttgatg

SEQ ID NO: 169583 - DNA, 25 bp, Probe sequence
attccagtttatttaggtatgccaa

SEQ ID NO: 169584 - DNA, 25 bp, Probe sequence
atttcatagttcaagttttacacat

SEQ ID NO: 169585 - DNA, 25 bp, Probe sequence
atatcacggtgttgaaaatgttcat

SEQ ID NO: 169586 - DNA, 25 bp, Probe sequence
atcgaacaagatccacaacaattta

SEQ ID NO: 169587 - DNA, 25 bp, Probe sequence
atggtatgaatattggtggtaaagc

SEQ ID NO: 169588 - DNA, 25 bp, Probe sequence
agcaaactttgatttcggaagcgtt

SEQ ID NO: 169589 - DNA, 25 bp, Probe sequence
acaggtctgtttagtgacatgtcac

SEQ ID NO: 169590 - DNA, 25 bp, Probe sequence
aaatggctgactatctttcttcata

SEQ ID NO: 169591 - DNA, 25 bp, Probe sequence
aaaccaggtgaatctgttcagtttt

SEQ ID NO: 169592 - DNA, 25 bp, Probe sequence
aacgtcatccagttgatgtatgttt

SEQ ID NO: 169593 - DNA, 25 bp, Probe sequence
caaaaatttctgtaccgattcatta

SEQ ID NO: 169594 - DNA, 25 bp, Probe sequence
gctgactatctttcttcatatcacg

SEQ ID NO: 169595 - DNA, 25 bp, Probe sequence
gcaggtagactatatcgttttaacg

SEQ ID NO: 169596 - DNA, 25 bp, Probe sequence
gcacggtcattttgatcattttggt

SEQ ID NO: 169597 - DNA, 25 bp, Probe sequence
gaatattgaaacagtgcaggtagac

SEQ ID NO: 169598 - DNA, 25 bp, Probe sequence
gacgtgcaaattttaaaaccaggtg

SEQ ID NO: 169599 - DNA, 25 bp, Probe sequence
gatgtatgttttgtaccaattggag

SEQ ID NO: 169600 - DNA, 25 bp, Probe sequence
gatgctgttaatgtaggggacgtgc

SEQ ID NO: 169601 - DNA, 25 bp, Probe sequence
gatacattcccattaatcgaacaag

SEQ ID NO: 169602 - DNA, 25 bp, Probe sequence
gattcattatgatacattcccatta

SEQ ID NO: 169603 - DNA, 25 bp, Probe sequence
gttcaagcatttcatagttcaagtt

SEQ ID NO: 169604 - DNA, 25 bp, Probe sequence
gttttaacgcacggtcattttgatc

SEQ ID NO: 169605 - DNA, 25 bp, Probe sequence
gtatgccaatgggtatcgtgtttga

SEQ ID NO: 169606 - DNA, 25 bp, Probe sequence
gtcacttattgcgaaacgtcatcca

SEQ ID NO: 169607 - DNA, 25 bp, Probe sequence
gtgacatgtcacttattgcgaaacg

SEQ ID NO: 169608 - DNA, 25 bp, Probe sequence
gggtattgatgatgcaagttatgct

SEQ ID NO: 169609 - DNA, 25 bp, Probe sequence
gggtatcgtgtttgaagttgaagga

SEQ ID NO: 169610 - DNA, 25 bp, Probe sequence
ggagataattttacgatgggtattg

SEQ ID NO: 169611 - DNA, 25 bp, Probe sequence
ggaaaaacaatttatcatactggtg

SEQ ID NO: 169612 - DNA, 25 bp, Probe sequence
ggaagcgttaaatttgttcaagcat

SEQ ID NO: 169613 - DNA, 25 bp, Probe sequence
ggaagtgcagaaatggctgactatc

SEQ ID NO: 169614 - DNA, 25 bp, Probe sequence
tcatactggtgatacaggtctgttt

SEQ ID NO: 169615 - DNA, 25 bp, Probe sequence
tatctttcttcatatcacggtgttg

SEQ ID NO: 169616 - DNA, 25 bp, Probe sequence
aggtttagggcataacactttctat

SEQ ID NO: 169617 - DNA, 25 bp, Probe sequence
ctaccctactcggtgttcaccaagg

SEQ ID NO: 169618 - DNA, 25 bp, Probe sequence
gttcggacgttgcgggaggtcttga

SEQ ID NO: 169619 - DNA, 25 bp, Probe sequence
attggatagacgctactgtacccga

SEQ ID NO: 169620 - DNA, 25 bp, Probe sequence
atggcaacatgtgctcaattagcta

SEQ ID NO: 169621 - DNA, 25 bp, Probe sequence
agcggatcgcttacaaaacataaca

SEQ ID NO: 169622 - DNA, 25 bp, Probe sequence
cagaacacggttcggacgttgcggg

SEQ ID NO: 169623 - DNA, 25 bp, Probe sequence
aaactggcaaaccccattgctttgt

SEQ ID NO: 169624 - DNA, 25 bp, Probe sequence
aacactttctatttcggaggtagca

SEQ ID NO: 169625 - DNA, 25 bp, Probe sequence
aatgcctagtcaactatttcagttt

SEQ ID NO: 169626 - DNA, 25 bp, Probe sequence
aatgccttagtaattggacgcgctt

SEQ ID NO: 169627 - DNA, 25 bp, Probe sequence
catgctttgctttaactgaaccaga

SEQ ID NO: 169628 - DNA, 25 bp, Probe sequence
ctggcgctttacgtgccacattaga

SEQ ID NO: 169629 - DNA, 25 bp, Probe sequence
ccccattgctttgtagtcagaccag

SEQ ID NO: 169630 - DNA, 25 bp, Probe sequence
gctactgtacccgaggactatttta

SEQ ID NO: 169631 - DNA, 25 bp, Probe sequence
gcaggcgttgcttatatggctacag

SEQ ID NO: 169632 - DNA, 25 bp, Probe sequence
gactggagattctgctttcgtataa

SEQ ID NO: 169633 - DNA, 25 bp, Probe sequence
gatggcgtcgatattgaagtcattg

SEQ ID NO: 169634 - DNA, 25 bp, Probe sequence
gatgtcattccagtattcgcagtaa

SEQ ID NO: 169635 - DNA, 25 bp, Probe sequence
gtcactgagcgtaagcaattcggca

SEQ ID NO: 169636 - DNA, 25 bp, Probe sequence
gtcagaccagaacaagatggcgtcg

SEQ ID NO: 169637 - DNA, 25 bp, Probe sequence
ggtggtgcacatgtatctgatgtca

SEQ ID NO: 169638 - DNA, 25 bp, Probe sequence
ggatcgtccaaacgccaaaatgcct

SEQ ID NO: 169639 - DNA, 25 bp, Probe sequence
ggtaatggcatactagctgacgatt

SEQ ID NO: 169640 - DNA, 25 bp, Probe sequence
ggaggtcttgaaacagtcgctgaac

SEQ ID NO: 169641 - DNA, 25 bp, Probe sequence
ggctacaggtggtatggctggcgct

SEQ ID NO: 169642 - DNA, 25 bp, Probe sequence
tgatgaatgccttacgtttgcgtga

SEQ ID NO: 169643 - DNA, 25 bp, Probe sequence
tgatattgcacgtttcttctctgat

SEQ ID NO: 169644 - DNA, 25 bp, Probe sequence
tgaactgcgtacatgctttgcttta

SEQ ID NO: 169645 - DNA, 25 bp, Probe sequence
tcttacctactcgcgcgatttgata

SEQ ID NO: 169646 - DNA, 25 bp, Probe sequence
taaaatcgcacttcgcattgttcct

SEQ ID NO: 169647 - DNA, 25 bp, Probe sequence
tttgatatttccttagctaccctac

SEQ ID NO: 169648 - DNA, 25 bp, Probe sequence
ttggacgcgctttgactggagattc

SEQ ID NO: 169649 - DNA, 25 bp, Probe sequence
tttcagtttttcatgtcttacctac

SEQ ID NO: 169650 - DNA, 25 bp, Probe sequence
attgatttgattcattacatgttac

SEQ ID NO: 169651 - DNA, 25 bp, Probe sequence
atatgtgtttctagcttgtttgtta

SEQ ID NO: 169652 - DNA, 25 bp, Probe sequence
atacctgcatatgtgtttctagctt

SEQ ID NO: 169653 - DNA, 25 bp, Probe sequence
atgtgtttctagcttgtttgttaca

SEQ ID NO: 169654 - DNA, 25 bp, Probe sequence
acctgcatatgtgtttctagcttgt

SEQ ID NO: 169655 - DNA, 25 bp, Probe sequence
actgatgaacatacctgcatatgtg

SEQ ID NO: 169656 - DNA, 25 bp, Probe sequence
acatacctgcatatgtgtttctagc

SEQ ID NO: 169657 - DNA, 25 bp, Probe sequence
aacatacctgcatatgtgtttctag

SEQ ID NO: 169658 - DNA, 25 bp, Probe sequence
catacctgcatatgtgtttctagct

SEQ ID NO: 169659 - DNA, 25 bp, Probe sequence
catatgtgtttctagcttgtttgtt

SEQ ID NO: 169660 - DNA, 25 bp, Probe sequence
ctgcatatgtgtttctagcttgttt

SEQ ID NO: 169661 - DNA, 25 bp, Probe sequence
cctgcatatgtgtttctagcttgtt

SEQ ID NO: 169662 - DNA, 25 bp, Probe sequence
gcatatgtgtttctagcttgtttgt

SEQ ID NO: 169663 - DNA, 25 bp, Probe sequence
gaacatacctgcatatgtgtttcta

SEQ ID NO: 169664 - DNA, 25 bp, Probe sequence
gatgaacatacctgcatatgtgttt

SEQ ID NO: 169665 - DNA, 25 bp, Probe sequence
gatttgattcattacatgttactga

SEQ ID NO: 169666 - DNA, 25 bp, Probe sequence
gatattgatttgattcattacatgt

SEQ ID NO: 169667 - DNA, 25 bp, Probe sequence
gattcattacatgttactgatgaac

SEQ ID NO: 169668 - DNA, 25 bp, Probe sequence
gttacatattgcatttagacttgga

SEQ ID NO: 169669 - DNA, 25 bp, Probe sequence
gttactgatgaacatacctgcatat

SEQ ID NO: 169670 - DNA, 25 bp, Probe sequence
gtttctagcttgtttgttacatatt

SEQ ID NO: 169671 - DNA, 25 bp, Probe sequence
gtgtttctagcttgtttgttacata

SEQ ID NO: 169672 - DNA, 25 bp, Probe sequence
tgtgtttctagcttgtttgttacat

SEQ ID NO: 169673 - DNA, 25 bp, Probe sequence
tgtttctagcttgtttgttacatat

SEQ ID NO: 169674 - DNA, 25 bp, Probe sequence
tgatttgattcattacatgttactg

SEQ ID NO: 169675 - DNA, 25 bp, Probe sequence
tgaacatacctgcatatgtgtttct

SEQ ID NO: 169676 - DNA, 25 bp, Probe sequence
tgcatatgtgtttctagcttgtttg

SEQ ID NO: 169677 - DNA, 25 bp, Probe sequence
tacctgcatatgtgtttctagcttg

SEQ ID NO: 169678 - DNA, 25 bp, Probe sequence
tatgtgtttctagcttgtttgttac

SEQ ID NO: 169679 - DNA, 25 bp, Probe sequence
tttgttacatattgcatttagactt

SEQ ID NO: 169680 - DNA, 25 bp, Probe sequence
tttgattcattacatgttactgatg

SEQ ID NO: 169681 - DNA, 25 bp, Probe sequence
tttctagcttgtttgttacatattg

SEQ ID NO: 169682 - DNA, 25 bp, Probe sequence
ttactgatgaacatacctgcatatg

SEQ ID NO: 169683 - DNA, 25 bp, Probe sequence
ttgttacatattgcatttagacttg

SEQ ID NO: 169684 - DNA, 25 bp, Probe sequence
attagatgatttattcggtggacgt

SEQ ID NO: 169685 - DNA, 25 bp, Probe sequence
attccaggtgctaaagcgccaagac

SEQ ID NO: 169686 - DNA, 25 bp, Probe sequence
attacgacacatgatgatcctacat

SEQ ID NO: 169687 - DNA, 25 bp, Probe sequence
ataggtgcagttttaattccaggtg

SEQ ID NO: 169688 - DNA, 25 bp, Probe sequence
atcggtggtggtcaagcaggaacaa

SEQ ID NO: 169689 - DNA, 25 bp, Probe sequence
atgaaaatcgtgttggtttatcacc

SEQ ID NO: 169690 - DNA, 25 bp, Probe sequence
agtggtgtgcacgctttagtagaaa

SEQ ID NO: 169691 - DNA, 25 bp, Probe sequence
aaggcgttgcagaggcatttgaaat

SEQ ID NO: 169692 - DNA, 25 bp, Probe sequence
aatccgttgaatattgagttgtatg

SEQ ID NO: 169693 - DNA, 25 bp, Probe sequence
aataatgctacgctaccttatgcgc

SEQ ID NO: 169694 - DNA, 25 bp, Probe sequence
aatcaaatcaaccattatcattagg

SEQ ID NO: 169695 - DNA, 25 bp, Probe sequence
caaggcggtatttttgaaacaactg

SEQ ID NO: 169696 - DNA, 25 bp, Probe sequence
catacaattatgtcaaatccgttga

SEQ ID NO: 169697 - DNA, 25 bp, Probe sequence
cttatgcgctcatgctagctaataa

SEQ ID NO: 169698 - DNA, 25 bp, Probe sequence
gcgccaagacttgtaacagaagaca

SEQ ID NO: 169699 - DNA, 25 bp, Probe sequence
gcaggtgctgagattgttgctgaac

SEQ ID NO: 169700 - DNA, 25 bp, Probe sequence
gcagctaaaattgcactaggactag

SEQ ID NO: 169701 - DNA, 25 bp, Probe sequence
gaatgtcagctcaagttggcgcaga

SEQ ID NO: 169702 - DNA, 25 bp, Probe sequence
gacattgctattgatcaaggcggta

SEQ ID NO: 169703 - DNA, 25 bp, Probe sequence
gactgtgcagttaccagaccgatct

SEQ ID NO: 169704 - DNA, 25 bp, Probe sequence
gtcacgtaaccaataaaggcgttgc

SEQ ID NO: 169705 - DNA, 25 bp, Probe sequence
gaggtagcaggaagaatgtcagctc

SEQ ID NO: 169706 - DNA, 25 bp, Probe sequence
gatgttaatccaaagcgtttacaac

SEQ ID NO: 169707 - DNA, 25 bp, Probe sequence
gttggcgcagagttcctacaaaaac

SEQ ID NO: 169708 - DNA, 25 bp, Probe sequence
gtttgggatgtggatatggttatta

SEQ ID NO: 169709 - DNA, 25 bp, Probe sequence
gtaactattatcggtggtggtcaag

SEQ ID NO: 169710 - DNA, 25 bp, Probe sequence
gtggaaacaaatgcgggttcaggat

SEQ ID NO: 169711 - DNA, 25 bp, Probe sequence
gggtcagttattattgacattgcta

SEQ ID NO: 169712 - DNA, 25 bp, Probe sequence
ggtggtatgggaattctactaggtg

SEQ ID NO: 169713 - DNA, 25 bp, Probe sequence
ggtgtggttcattatgcagttgcaa

SEQ ID NO: 169714 - DNA, 25 bp, Probe sequence
ggactaggtgcagatgttacgattt

SEQ ID NO: 169715 - DNA, 25 bp, Probe sequence
taccgcgtacttcgacgttagcttt

SEQ ID NO: 169716 - DNA, 25 bp, Probe sequence
tacgctaccttatgcgctcatgcta

SEQ ID NO: 169717 - DNA, 25 bp, Probe sequence
tattcggtggacgtgtacatacaat

SEQ ID NO: 169718 - DNA, 25 bp, Probe sequence
attggatcatatgctgcgagaatgc

SEQ ID NO: 169719 - DNA, 25 bp, Probe sequence
attccatcaaacaatgcctgaaaaa

SEQ ID NO: 169720 - DNA, 25 bp, Probe sequence
attaggattatcaggtacatctagt

SEQ ID NO: 169721 - DNA, 25 bp, Probe sequence
atcaattgcagctatcgatggcggt

SEQ ID NO: 169722 - DNA, 25 bp, Probe sequence
atagcttgccatatcattattataa

SEQ ID NO: 169723 - DNA, 25 bp, Probe sequence
atgtcaaaattaatcttggctatca

SEQ ID NO: 169724 - DNA, 25 bp, Probe sequence
atggcggtaaatctattgatacatc

SEQ ID NO: 169725 - DNA, 25 bp, Probe sequence
agcgaattagcaccgcttcacaacc

SEQ ID NO: 169726 - DNA, 25 bp, Probe sequence
acatcaatgggcttcacaccacttg

SEQ ID NO: 169727 - DNA, 25 bp, Probe sequence
aaaactgctgaacaagtattggaaa

SEQ ID NO: 169728 - DNA, 25 bp, Probe sequence
aacaatgggtactcgttctggtaat

SEQ ID NO: 169729 - DNA, 25 bp, Probe sequence
aatggctttagatgtatttgcttct

SEQ ID NO: 169730 - DNA, 25 bp, Probe sequence
caaagagcggcagaaatgttagata

SEQ ID NO: 169731 - DNA, 25 bp, Probe sequence
gctggtgtaacaatgggtactcgtt

SEQ ID NO: 169732 - DNA, 25 bp, Probe sequence
gcttcacaacccagctaacttgatg

SEQ ID NO: 169733 - DNA, 25 bp, Probe sequence
gctgaatcaggtaaagcacgttcac

SEQ ID NO: 169734 - DNA, 25 bp, Probe sequence
gctgcgagaatgcatggtgttgatg

SEQ ID NO: 169735 - DNA, 25 bp, Probe sequence
gctaacttgatgggtattcgtgctt

SEQ ID NO: 169736 - DNA, 25 bp, Probe sequence
gcatatctatatagcttgccatatc

SEQ ID NO: 169737 - DNA, 25 bp, Probe sequence
gcagctatcgatggcggtaaatcta

SEQ ID NO: 169738 - DNA, 25 bp, Probe sequence
gcacgttcacaaatggctttagatg

SEQ ID NO: 169739 - DNA, 25 bp, Probe sequence
gaccctgctttaattccatttatta

SEQ ID NO: 169740 - DNA, 25 bp, Probe sequence
gatgtatttgcttctaaaattcaca

SEQ ID NO: 169741 - DNA, 25 bp, Probe sequence
gtttactgggatcctaagaaaaatg

SEQ ID NO: 169742 - DNA, 25 bp, Probe sequence
ggtacatctagtgatttacgtgact

SEQ ID NO: 169743 - DNA, 25 bp, Probe sequence
ggtcaccgtgttgtacatggtggtg

SEQ ID NO: 169744 - DNA, 25 bp, Probe sequence
ggcttcacaccacttgctggtgtaa

SEQ ID NO: 169745 - DNA, 25 bp, Probe sequence
tggtggtgaaaaattccctgaatca

SEQ ID NO: 169746 - DNA, 25 bp, Probe sequence
tgatgggtattcgtgctttccgtaa

SEQ ID NO: 169747 - DNA, 25 bp, Probe sequence
tgatacagcattccatcaaacaatg

SEQ ID NO: 169748 - DNA, 25 bp, Probe sequence
tattgaccctgctttaattccattt

SEQ ID NO: 169749 - DNA, 25 bp, Probe sequence
ttacgtgacttatcagaagaagctg

SEQ ID NO: 169750 - DNA, 25 bp, Probe sequence
ttctggtaatattgaccctgcttta

SEQ ID NO: 169751 - DNA, 25 bp, Probe sequence
ttgatacatcaatgggcttcacacc

SEQ ID NO: 169752 - DNA, 25 bp, Probe sequence
atcacgtgttagtgtacatttagca

SEQ ID NO: 169753 - DNA, 25 bp, Probe sequence
aggacatagttattcacattattta

SEQ ID NO: 169754 - DNA, 25 bp, Probe sequence
acatattgttgatattgcaagtggt

SEQ ID NO: 169755 - DNA, 25 bp, Probe sequence
aaatcttgggctagcaatggaacaa

SEQ ID NO: 169756 - DNA, 25 bp, Probe sequence
aacaattatggaacgcttgtttcat

SEQ ID NO: 169757 - DNA, 25 bp, Probe sequence
aagatcgacgtaaagcattccaatt

SEQ ID NO: 169758 - DNA, 25 bp, Probe sequence
aagatgctggatatgcctttctagt

SEQ ID NO: 169759 - DNA, 25 bp, Probe sequence
aattacaccagattcaattggattg

SEQ ID NO: 169760 - DNA, 25 bp, Probe sequence
caagcaaatcatcaaattacaccag

SEQ ID NO: 169761 - DNA, 25 bp, Probe sequence
caggtgaacatgtaaaacagcttga

SEQ ID NO: 169762 - DNA, 25 bp, Probe sequence
cttcacaatttcaaggatttatgac

SEQ ID NO: 169763 - DNA, 25 bp, Probe sequence
ccggtcatttaagtgctactgtaaa

SEQ ID NO: 169764 - DNA, 25 bp, Probe sequence
ccagtaggctattatccaattgatg

SEQ ID NO: 169765 - DNA, 25 bp, Probe sequence
gcctttctagtggtaccaagtaata

SEQ ID NO: 169766 - DNA, 25 bp, Probe sequence
gcattccaatttgcatatttaagtt

SEQ ID NO: 169767 - DNA, 25 bp, Probe sequence
gcaaacttcttagaaattcctttcg

SEQ ID NO: 169768 - DNA, 25 bp, Probe sequence
gcaagcatttttaaatttaccacca

SEQ ID NO: 169769 - DNA, 25 bp, Probe sequence
gaagtgttacctgaaattgcggtta

SEQ ID NO: 169770 - DNA, 25 bp, Probe sequence
gaagttgatccagttttatcacgtg

SEQ ID NO: 169771 - DNA, 25 bp, Probe sequence
gaagaagcagatatcgttattggtg

SEQ ID NO: 169772 - DNA, 25 bp, Probe sequence
gaacaatcgacgttacaagatcgac

SEQ ID NO: 169773 - DNA, 25 bp, Probe sequence
gaaaaagcgcgaaaatctatattaa

SEQ ID NO: 169774 - DNA, 25 bp, Probe sequence
gaaattcctttcgatgtgtatcctc

SEQ ID NO: 169775 - DNA, 25 bp, Probe sequence
gaaattgcggttatgcatcatttaa

SEQ ID NO: 169776 - DNA, 25 bp, Probe sequence
gacagagttaaatcagtggatggac

SEQ ID NO: 169777 - DNA, 25 bp, Probe sequence
gatccagttttatcacgtgttagtg

SEQ ID NO: 169778 - DNA, 25 bp, Probe sequence
gttattggtgattttccagtaggct

SEQ ID NO: 169779 - DNA, 25 bp, Probe sequence
gttttattgaaaatcttgggctagc

SEQ ID NO: 169780 - DNA, 25 bp, Probe sequence
gtgattttccagtaggctattatcc

SEQ ID NO: 169781 - DNA, 25 bp, Probe sequence
gtgtacatttagcaaacttcttaga

SEQ ID NO: 169782 - DNA, 25 bp, Probe sequence
gtggatggacacaaatcgtcctaaa

SEQ ID NO: 169783 - DNA, 25 bp, Probe sequence
ggatatgcctttctagtggtaccaa

SEQ ID NO: 169784 - DNA, 25 bp, Probe sequence
tcgatgtgtatcctcaagatgccat

SEQ ID NO: 169785 - DNA, 25 bp, Probe sequence
tattggcaaatattcctgatttcaa

SEQ ID NO: 169786 - DNA, 25 bp, Probe sequence
attagctcgtgcagtatttgtatta

SEQ ID NO: 169787 - DNA, 25 bp, Probe sequence
atcagcagactcgcaaattcaactc

SEQ ID NO: 169788 - DNA, 25 bp, Probe sequence
agattttgatgctgctttagctgca

SEQ ID NO: 169789 - DNA, 25 bp, Probe sequence
agcagactcgcaaattcaactctga

SEQ ID NO: 169790 - DNA, 25 bp, Probe sequence
aaagaagaggggattgtgcttacaa

SEQ ID NO: 169791 - DNA, 25 bp, Probe sequence
aaagatggtgcgcttcagcaggttt

SEQ ID NO: 169792 - DNA, 25 bp, Probe sequence
aagtgaccaccgtgacttatcattt

SEQ ID NO: 169793 - DNA, 25 bp, Probe sequence
aataacattcaaaggtggaccaatc

SEQ ID NO: 169794 - DNA, 25 bp, Probe sequence
cagacttaccattcgcacaaaaaag

SEQ ID NO: 169795 - DNA, 25 bp, Probe sequence
ccgtgacttatcatttggtgaaaac

SEQ ID NO: 169796 - DNA, 25 bp, Probe sequence
gctgctttagctgcatacaaaaata

SEQ ID NO: 169797 - DNA, 25 bp, Probe sequence
gctcgtgcagtatttgtattagatg

SEQ ID NO: 169798 - DNA, 25 bp, Probe sequence
gcttcagcaggtttagacaatgtca

SEQ ID NO: 169799 - DNA, 25 bp, Probe sequence
gtggaccaatccacttaaaaggtca

SEQ ID NO: 169800 - DNA, 25 bp, Probe sequence
gcaggtttagacaatgtcattacat

SEQ ID NO: 169801 - DNA, 25 bp, Probe sequence
gaaggtactgatttcccagattttg

SEQ ID NO: 169802 - DNA, 25 bp, Probe sequence
gaacttcgcttattagctcgtgcag

SEQ ID NO: 169803 - DNA, 25 bp, Probe sequence
gaaattaattagtgtggtaccatca

SEQ ID NO: 169804 - DNA, 25 bp, Probe sequence
gatggtgcgcttcagcaggtttaga

SEQ ID NO: 169805 - DNA, 25 bp, Probe sequence
gatacaggtgtttgtgatcagcaga

SEQ ID NO: 169806 - DNA, 25 bp, Probe sequence
gatttcccagattttgatgctgctt

SEQ ID NO: 169807 - DNA, 25 bp, Probe sequence
gttagtgaaggtactgatttcccag

SEQ ID NO: 169808 - DNA, 25 bp, Probe sequence
gtaacattagcagattatgctggta

SEQ ID NO: 169809 - DNA, 25 bp, Probe sequence
gtcattacattaagtgaccaccgtg

SEQ ID NO: 169810 - DNA, 25 bp, Probe sequence
gtgaccaccgtgacttatcatttgg

SEQ ID NO: 169811 - DNA, 25 bp, Probe sequence
gtgattttgcacctgattttacagt

SEQ ID NO: 169812 - DNA, 25 bp, Probe sequence
gtggtaccatcaattgatacaggtg

SEQ ID NO: 169813 - DNA, 25 bp, Probe sequence
ggtgtttgtgatcagcagactcgca

SEQ ID NO: 169814 - DNA, 25 bp, Probe sequence
ggtgaaaactatggcgttgttatgg

SEQ ID NO: 169815 - DNA, 25 bp, Probe sequence
ggtgcgcttcagcaggtttagacaa

SEQ ID NO: 169816 - DNA, 25 bp, Probe sequence
ggcgttgttatggaagaacttcgct

SEQ ID NO: 169817 - DNA, 25 bp, Probe sequence
tgcacctgattttacagtgttagat

SEQ ID NO: 169818 - DNA, 25 bp, Probe sequence
tcgcttattagctcgtgcagtattt

SEQ ID NO: 169819 - DNA, 25 bp, Probe sequence
ttgatgctgctttagctgcatacaa

SEQ ID NO: 169820 - DNA, 25 bp, Probe sequence
attgcactttcgtcggtgtttatat

SEQ ID NO: 169821 - DNA, 25 bp, Probe sequence
atttttggcatctgcatgtggcgca

SEQ ID NO: 169822 - DNA, 25 bp, Probe sequence
atggttccgtcacaaatattgaaac

SEQ ID NO: 169823 - DNA, 25 bp, Probe sequence
accatctgtggctttaggtacaaat

SEQ ID NO: 169824 - DNA, 25 bp, Probe sequence
acgccagcattattagcaatcggtc

SEQ ID NO: 169825 - DNA, 25 bp, Probe sequence
actcaatttacatttaagaaagcca

SEQ ID NO: 169826 - DNA, 25 bp, Probe sequence
aatttctacgccagcattattagca

SEQ ID NO: 169827 - DNA, 25 bp, Probe sequence
ctgcatgtggcgcatatattgcaac

SEQ ID NO: 169828 - DNA, 25 bp, Probe sequence
cggcttttatgatggatttgtaggt

SEQ ID NO: 169829 - DNA, 25 bp, Probe sequence
cggtgtttatattcacattacttaa

SEQ ID NO: 169830 - DNA, 25 bp, Probe sequence
cgtcggtgtttatattcacattact

SEQ ID NO: 169831 - DNA, 25 bp, Probe sequence
gcattattagcaatcggtctaccac

SEQ ID NO: 169832 - DNA, 25 bp, Probe sequence
gcactttcgtcggtgtttatattca

SEQ ID NO: 169833 - DNA, 25 bp, Probe sequence
gttgttgccaaattatttggttttg

SEQ ID NO: 169834 - DNA, 25 bp, Probe sequence
gttcatttatgctttttgtattgtt

SEQ ID NO: 169835 - DNA, 25 bp, Probe sequence
gttttgtatttttggcatctgcatg

SEQ ID NO: 169836 - DNA, 25 bp, Probe sequence
gtgcgcttgtattatttatggtatt

SEQ ID NO: 169837 - DNA, 25 bp, Probe sequence
ggtctaccaccatctgtggctttag

SEQ ID NO: 169838 - DNA, 25 bp, Probe sequence
ggtttaatttctacgccagcattat

SEQ ID NO: 169839 - DNA, 25 bp, Probe sequence
ttatagattcggttgtagggggtgg

SEQ ID NO: 169840 - DNA, 25 bp, Probe sequence
ggaacaggttcatttatgctttttg

SEQ ID NO: 169841 - DNA, 25 bp, Probe sequence
ggcatctgcatgtggcgcatatatt

SEQ ID NO: 169842 - DNA, 25 bp, Probe sequence
ggcgtttatagattcggttgtaggg

SEQ ID NO: 169843 - DNA, 25 bp, Probe sequence
tcgcggcgtttatagattcggttgt

SEQ ID NO: 169844 - DNA, 25 bp, Probe sequence
taccaccatctgtggctttaggtac

SEQ ID NO: 169845 - DNA, 25 bp, Probe sequence
tgcttttgattatattcaacaattt

SEQ ID NO: 169846 - DNA, 25 bp, Probe sequence
taggtgcgcttgtattatttatggt

SEQ ID NO: 169847 - DNA, 25 bp, Probe sequence
tatttggttttatcgcggcgtttat

SEQ ID NO: 169848 - DNA, 25 bp, Probe sequence
tattagcaatcggtctaccaccatc

SEQ ID NO: 169849 - DNA, 25 bp, Probe sequence
tttgcttctaatataggtgcgcttg

SEQ ID NO: 169850 - DNA, 25 bp, Probe sequence
tttggcatctgcatgtggcgcatat

SEQ ID NO: 169851 - DNA, 25 bp, Probe sequence
tttatggtattaggacaagtagatt

SEQ ID NO: 169852 - DNA, 25 bp, Probe sequence
ttatcgcggcgtttatagattcggt

SEQ ID NO: 169853 - DNA, 25 bp, Probe sequence
ttggttttgtatttttggcatctgc

SEQ ID NO: 169854 - DNA, 25 bp, Probe sequence
atgaagaagttgttccgggttcagg

SEQ ID NO: 169855 - DNA, 25 bp, Probe sequence
atttgcgcagcaatttgaagaaaac

SEQ ID NO: 169856 - DNA, 25 bp, Probe sequence
atgctttcaggcggtatagactcac

SEQ ID NO: 169857 - DNA, 25 bp, Probe sequence
atgcgtgttgctgataaattagtac

SEQ ID NO: 169858 - DNA, 25 bp, Probe sequence
agatgattaatcgtgctgttgaaaa

SEQ ID NO: 169859 - DNA, 25 bp, Probe sequence
agaacagcaaacaaaccaattaata

SEQ ID NO: 169860 - DNA, 25 bp, Probe sequence
aaaattgatgtgaagcgtgccgata

SEQ ID NO: 169861 - DNA, 25 bp, Probe sequence
aattggtacatttgaaacatctatt

SEQ ID NO: 169862 - DNA, 25 bp, Probe sequence
aattgcatattgtaccatttacaga

SEQ ID NO: 169863 - DNA, 25 bp, Probe sequence
cagatcatgaaattcgagtggaagt

SEQ ID NO: 169864 - DNA, 25 bp, Probe sequence
gcgtgccgataaaaatttcccaatg

SEQ ID NO: 169865 - DNA, 25 bp, Probe sequence
gcggtatagactcaccagttgctgg

SEQ ID NO: 169866 - DNA, 25 bp, Probe sequence
gaattgacacgtattttagctgaac

SEQ ID NO: 169867 - DNA, 25 bp, Probe sequence
gaagtatgatcacttgcttgttaga

SEQ ID NO: 169868 - DNA, 25 bp, Probe sequence
gaagcgattcatttccatagtccac

SEQ ID NO: 169869 - DNA, 25 bp, Probe sequence
gacgttactaatgctttcaggcggt

SEQ ID NO: 169870 - DNA, 25 bp, Probe sequence
gagacgtatgatgatgcgtgttgct

SEQ ID NO: 169871 - DNA, 25 bp, Probe sequence
gagatcgtatgtatattgaacttga

SEQ ID NO: 169872 - DNA, 25 bp, Probe sequence
gagtggaagttagattagatgcaat

SEQ ID NO: 169873 - DNA, 25 bp, Probe sequence
gtaccatttacagaattgcaaaaac

SEQ ID NO: 169874 - DNA, 25 bp, Probe sequence
gtacatccaagatatacaatgactt

SEQ ID NO: 169875 - DNA, 25 bp, Probe sequence
gtccaccatttacaagtgatcaagc

SEQ ID NO: 169876 - DNA, 25 bp, Probe sequence
gtggcgtaacaattgaagcgattca

SEQ ID NO: 169877 - DNA, 25 bp, Probe sequence
ggattaccagttggtactggtggta

SEQ ID NO: 169878 - DNA, 25 bp, Probe sequence
tggtactggtggtaagacgttacta

SEQ ID NO: 169879 - DNA, 25 bp, Probe sequence
tggaagtgatgagacgtggcgtaac

SEQ ID NO: 169880 - DNA, 25 bp, Probe sequence
tgaacttgaagaccatgcagatata

SEQ ID NO: 169881 - DNA, 25 bp, Probe sequence
tttcccaatggatacgtatgaatta

SEQ ID NO: 169882 - DNA, 25 bp, Probe sequence
tcacttgcttgttagatacggggag

SEQ ID NO: 169883 - DNA, 25 bp, Probe sequence
taaatctattagtccagtattaaaa

SEQ ID NO: 169884 - DNA, 25 bp, Probe sequence
tacaatgacttcaacgagacgtatg

SEQ ID NO: 169885 - DNA, 25 bp, Probe sequence
tttccatagtccaccatttacaagt

SEQ ID NO: 169886 - DNA, 25 bp, Probe sequence
ttagctgaacgtgttggaccaatta

SEQ ID NO: 169887 - DNA, 25 bp, Probe sequence
ttcatttccatagtccaccatttac

SEQ ID NO: 169888 - DNA, 25 bp, Probe sequence
attaaatgaagtattggctgcaatg

SEQ ID NO: 169889 - DNA, 25 bp, Probe sequence
atagtccgcataaagctggtttgca

SEQ ID NO: 169890 - DNA, 25 bp, Probe sequence
atcagacaaatctattgaaggtagt

SEQ ID NO: 169891 - DNA, 25 bp, Probe sequence
agtgcttgttcatctaaacgtaata

SEQ ID NO: 169892 - DNA, 25 bp, Probe sequence
agcattcggcaaaatttcaatggat

SEQ ID NO: 169893 - DNA, 25 bp, Probe sequence
aaattatcctaaggcacattttcat

SEQ ID NO: 169894 - DNA, 25 bp, Probe sequence
aagtcggtttagtaacatgtatgta

SEQ ID NO: 169895 - DNA, 25 bp, Probe sequence
aatccgaatagtccgcataaagctg

SEQ ID NO: 169896 - DNA, 25 bp, Probe sequence
aatcaatcaatgtattataatccga

SEQ ID NO: 169897 - DNA, 25 bp, Probe sequence
aatatgacattatgatatctacgac

SEQ ID NO: 169898 - DNA, 25 bp, Probe sequence
gcggttcaagcattcggcaaaattt

SEQ ID NO: 169899 - DNA, 25 bp, Probe sequence
gaatagtccgcataaagctggtttg

SEQ ID NO: 169900 - DNA, 25 bp, Probe sequence
gaaggtagtataagattatcatttg

SEQ ID NO: 169901 - DNA, 25 bp, Probe sequence
gaagtattagttaatgctttttcaa

SEQ ID NO: 169902 - DNA, 25 bp, Probe sequence
gaagcattgaatgcatttgttactg

SEQ ID NO: 169903 - DNA, 25 bp, Probe sequence
gaaatatttatcatcatttatgagg

SEQ ID NO: 169904 - DNA, 25 bp, Probe sequence
gacgaaagcatttgaagaagtgtta

SEQ ID NO: 169905 - DNA, 25 bp, Probe sequence
gaggaaattaaggagttgctaaaat

SEQ ID NO: 169906 - DNA, 25 bp, Probe sequence
gatgcggttcaagcattcggcaaaa

SEQ ID NO: 169907 - DNA, 25 bp, Probe sequence
gatacagcgaaggaaataattacat

SEQ ID NO: 169908 - DNA, 25 bp, Probe sequence
gttcaagcattcggcaaaatttcaa

SEQ ID NO: 169909 - DNA, 25 bp, Probe sequence
gttcaccattcgttttaaatattag

SEQ ID NO: 169910 - DNA, 25 bp, Probe sequence
gttaatgctttttcaaaatatgaca

SEQ ID NO: 169911 - DNA, 25 bp, Probe sequence
gtattggctgcaatgggattatcag

SEQ ID NO: 169912 - DNA, 25 bp, Probe sequence
gtattataatccgaatagtccgcat

SEQ ID NO: 169913 - DNA, 25 bp, Probe sequence
gtagatgcggttcaagcattcggca

SEQ ID NO: 169914 - DNA, 25 bp, Probe sequence
ggcacattttcatgtagatgcggtt

SEQ ID NO: 169915 - DNA, 25 bp, Probe sequence
ggctgcaatgggattatcagacaaa

SEQ ID NO: 169916 - DNA, 25 bp, Probe sequence
tgcggcaacgacgaaagcatttgaa

SEQ ID NO: 169917 - DNA, 25 bp, Probe sequence
taaataatgacgtccgtcaattttt

SEQ ID NO: 169918 - DNA, 25 bp, Probe sequence
tatcgtaaatttgatacagcgaagg

SEQ ID NO: 169919 - DNA, 25 bp, Probe sequence
tatatctagataatgcggcaacgac

SEQ ID NO: 169920 - DNA, 25 bp, Probe sequence
tttcctggcgtaaaaggtgaagtat

SEQ ID NO: 169921 - DNA, 25 bp, Probe sequence
ttatcctaaggcacattttcatgta

SEQ ID NO: 169922 - DNA, 25 bp, Probe sequence
atatggttgccgtgatcttaaagtt

SEQ ID NO: 169923 - DNA, 25 bp, Probe sequence
atagcgaggttcaggataatttaca

SEQ ID NO: 169924 - DNA, 25 bp, Probe sequence
atcgtcatcaatttggtgaggcagc

SEQ ID NO: 169925 - DNA, 25 bp, Probe sequence
atgatgttcttgttaatgctgttta

SEQ ID NO: 169926 - DNA, 25 bp, Probe sequence
agttgaagggtatgatctggatcac

SEQ ID NO: 169927 - DNA, 25 bp, Probe sequence
agttacgaacaaagctatcagcaac

SEQ ID NO: 169928 - DNA, 25 bp, Probe sequence
acgtgatgttttagcaaatcgtcat

SEQ ID NO: 169929 - DNA, 25 bp, Probe sequence
aaatccataatgctgaggctttatt

SEQ ID NO: 169930 - DNA, 25 bp, Probe sequence
aaatcatctgattcaattgcgtgaa

SEQ ID NO: 169931 - DNA, 25 bp, Probe sequence
aaccatatagctgccttgaatgaac

SEQ ID NO: 169932 - DNA, 25 bp, Probe sequence
aagcgcacaaccatatagctgcctt

SEQ ID NO: 169933 - DNA, 25 bp, Probe sequence
aagcgtgcgattgaaattgcagagc

SEQ ID NO: 169934 - DNA, 25 bp, Probe sequence
aataagtatctagctcctgtggaag

SEQ ID NO: 169935 - DNA, 25 bp, Probe sequence
aattacctggtcaattccaagattt

SEQ ID NO: 169936 - DNA, 25 bp, Probe sequence
cagagcttagtttcgttgaaccatt

SEQ ID NO: 169937 - DNA, 25 bp, Probe sequence
ccttttgatcaaaaccttgcacaat

SEQ ID NO: 169938 - DNA, 25 bp, Probe sequence
gcgttcctgaaaggtttatcatcat

SEQ ID NO: 169939 - DNA, 25 bp, Probe sequence
gaagatcatgtcacagttattaatg

SEQ ID NO: 169940 - DNA, 25 bp, Probe sequence
gaacaatttagtgaacgtccaatac

SEQ ID NO: 169941 - DNA, 25 bp, Probe sequence
gaaaagctacaaaatcatctgattc

SEQ ID NO: 169942 - DNA, 25 bp, Probe sequence
gacatgaattatacattgcaaacag

SEQ ID NO: 169943 - DNA, 25 bp, Probe sequence
gagccaaggttagagcaatatgaag

SEQ ID NO: 169944 - DNA, 25 bp, Probe sequence
gatggtaattatgtacaagcgcaca

SEQ ID NO: 169945 - DNA, 25 bp, Probe sequence
gatcatgaagttcgtgatgttaacg

SEQ ID NO: 169946 - DNA, 25 bp, Probe sequence
gatatcgtaaggactatagcaatgt

SEQ ID NO: 169947 - DNA, 25 bp, Probe sequence
gattgctgtaggtgtattattctat

SEQ ID NO: 169948 - DNA, 25 bp, Probe sequence
gtagacagtacattacaaagcttaa

SEQ ID NO: 169949 - DNA, 25 bp, Probe sequence
gtcgattacttgcttctaacttaac

SEQ ID NO: 169950 - DNA, 25 bp, Probe sequence
gtgaacgtccaatacacgttaaaca

SEQ ID NO: 169951 - DNA, 25 bp, Probe sequence
gtgtatcgtcgattacttgcttcta

SEQ ID NO: 169952 - DNA, 25 bp, Probe sequence
ggtgtattattctatttacgttcaa

SEQ ID NO: 169953 - DNA, 25 bp, Probe sequence
tggtgttatatatcattttggcaat

SEQ ID NO: 169954 - DNA, 25 bp, Probe sequence
taaatttagtttcaacgcatctcaa

SEQ ID NO: 169955 - DNA, 25 bp, Probe sequence
ttctaacttaacaagcgttcctgaa

SEQ ID NO: 169956 - DNA, 25 bp, Probe sequence
attaaaactgctcttctatgctgaa

SEQ ID NO: 169957 - DNA, 25 bp, Probe sequence
atatcatccaaggtggttcacaacc

SEQ ID NO: 169958 - DNA, 25 bp, Probe sequence
atccagattatcaccaaccttttca

SEQ ID NO: 169959 - DNA, 25 bp, Probe sequence
agtacgctacgtgctagtaatttta

SEQ ID NO: 169960 - DNA, 25 bp, Probe sequence
accaaccttttcaagcaacacctgt

SEQ ID NO: 169961 - DNA, 25 bp, Probe sequence
accattgaattggcggcttaaccca

SEQ ID NO: 169962 - DNA, 25 bp, Probe sequence
acaagtggtacaaccggatcaccta

SEQ ID NO: 169963 - DNA, 25 bp, Probe sequence
acatcttggacataccaacaactca

SEQ ID NO: 169964 - DNA, 25 bp, Probe sequence
aaaccagataaacttgcgattcgac

SEQ ID NO: 169965 - DNA, 25 bp, Probe sequence
aagcctgccgttattgatcacgcaa

SEQ ID NO: 169966 - DNA, 25 bp, Probe sequence
aagttcactcaccgatattgaccaa

SEQ ID NO: 169967 - DNA, 25 bp, Probe sequence
aaggtgtgatgttctcatatgaatc

SEQ ID NO: 169968 - DNA, 25 bp, Probe sequence
caattgctgcagccattatacttcg

SEQ ID NO: 169969 - DNA, 25 bp, Probe sequence
caacaactcaatgcacgcgctgata

SEQ ID NO: 169970 - DNA, 25 bp, Probe sequence
ctggtggcgaaaatgtcttaccatc

SEQ ID NO: 169971 - DNA, 25 bp, Probe sequence
gctaaaaatgtcacgccaggatatt

SEQ ID NO: 169972 - DNA, 25 bp, Probe sequence
gcacgcgctgataatatggcacatt

SEQ ID NO: 169973 - DNA, 25 bp, Probe sequence
gaaccacaagatcttgcagcattaa

SEQ ID NO: 169974 - DNA, 25 bp, Probe sequence
gacttcgatgatgacaagcctgccg

SEQ ID NO: 169975 - DNA, 25 bp, Probe sequence
gagcatccactagtagaccggtgtg

SEQ ID NO: 169976 - DNA, 25 bp, Probe sequence
gatgttatcggtatttttgcgccaa

SEQ ID NO: 169977 - DNA, 25 bp, Probe sequence
gatgaacctcattacgctgaaattt

SEQ ID NO: 169978 - DNA, 25 bp, Probe sequence
gattgcacaatatcaccctacattt

SEQ ID NO: 169979 - DNA, 25 bp, Probe sequence
gttgatgcacgtatccttgatgata

SEQ ID NO: 169980 - DNA, 25 bp, Probe sequence
gtatcaacaccaatgttccatgttt

SEQ ID NO: 169981 - DNA, 25 bp, Probe sequence
gtacctactggtgagattggcgaac

SEQ ID NO: 169982 - DNA, 25 bp, Probe sequence
gtgcggtttttttaccattgaattg

SEQ ID NO: 169983 - DNA, 25 bp, Probe sequence
gtgtggtcgttggctatgatcatcc

SEQ ID NO: 169984 - DNA, 25 bp, Probe sequence
ggttcacaaccattaccaagtatcc

SEQ ID NO: 169985 - DNA, 25 bp, Probe sequence
ggcacattatttaacatctcaaggt

SEQ ID NO: 169986 - DNA, 25 bp, Probe sequence
tatgcgaagtcgtttagcaggttat

SEQ ID NO: 169987 - DNA, 25 bp, Probe sequence
taccagtgacacatatgccgttaaa

SEQ ID NO: 169988 - DNA, 25 bp, Probe sequence
taccaagtatccaagcagcttttaa

SEQ ID NO: 169989 - DNA, 25 bp, Probe sequence
tatcaccctacatttattatcatga

SEQ ID NO: 169990 - DNA, 25 bp, Probe sequence
atttaggtgaacttagaggtgtact

SEQ ID NO: 169991 - DNA, 25 bp, Probe sequence
atactgagactgttgtgccatttga

SEQ ID NO: 169992 - DNA, 25 bp, Probe sequence
atgctgctttggaagagtttgcaac

SEQ ID NO: 169993 - DNA, 25 bp, Probe sequence
atgccgactatgttattaatcattt

SEQ ID NO: 169994 - DNA, 25 bp, Probe sequence
aggtcttcattcacatatagattgg

SEQ ID NO: 169995 - DNA, 25 bp, Probe sequence
agttaaggtacttctgaatgattta

SEQ ID NO: 169996 - DNA, 25 bp, Probe sequence
agcacgaactacttttaagacaggt

SEQ ID NO: 169997 - DNA, 25 bp, Probe sequence
acagagttacatgtttcggatgcta

SEQ ID NO: 169998 - DNA, 25 bp, Probe sequence
aaataatatttatgctgctttggaa

SEQ ID NO: 169999 - DNA, 25 bp, Probe sequence
aagcgcatcatgccgactatgttat

SEQ ID NO: 170000 - DNA, 25 bp, Probe sequence
aagaacgttgtttcgatgtctctgc

SEQ ID NO: 170001 - DNA, 25 bp, Probe sequence
aagggtgcattatggacgttagcgc

SEQ ID NO: 170002 - DNA, 25 bp, Probe sequence
aaggtgctggtttcgaattaggtat

SEQ ID NO: 170003 - DNA, 25 bp, Probe sequence
aaggatgctgcaggtgagttagaag

SEQ ID NO: 170004 - DNA, 25 bp, Probe sequence
gcacgaccattaggaaagccgaatc

SEQ ID NO: 170005 - DNA, 25 bp, Probe sequence
gcaacaggtcgtccttatactgaga

SEQ ID NO: 170006 - DNA, 25 bp, Probe sequence
gcaagtgatgttttagaagcagaga

SEQ ID NO: 170007 - DNA, 25 bp, Probe sequence
gaatccttttagttatatcgcagct

SEQ ID NO: 170008 - DNA, 25 bp, Probe sequence
gaatggtatttaggatcgaagttgt

SEQ ID NO: 170009 - DNA, 25 bp, Probe sequence
gaagcagagaatatgtatccgcaag

SEQ ID NO: 170010 - DNA, 25 bp, Probe sequence
gagtttgcaacaacagagttacatg

SEQ ID NO: 170011 - DNA, 25 bp, Probe sequence
gatgtctctgcattaacggtatatg

SEQ ID NO: 170012 - DNA, 25 bp, Probe sequence
gatgagcctgtcgaattgaagttgc

SEQ ID NO: 170013 - DNA, 25 bp, Probe sequence
gatgacgtatttatagtaggcgatt

SEQ ID NO: 170014 - DNA, 25 bp, Probe sequence
gttgtttcgatgtctctgcattaac

SEQ ID NO: 170015 - DNA, 25 bp, Probe sequence
gttagctgacttattaagtgctcaa

SEQ ID NO: 170016 - DNA, 25 bp, Probe sequence
gtaggcgattcgttagctgacttat

SEQ ID NO: 170017 - DNA, 25 bp, Probe sequence
gtgttatttaggtcttcattcacat

SEQ ID NO: 170018 - DNA, 25 bp, Probe sequence
gggaaactttgactgataacgatat

SEQ ID NO: 170019 - DNA, 25 bp, Probe sequence
ggtgagttagaagcgcatcatgccg

SEQ ID NO: 170020 - DNA, 25 bp, Probe sequence
ggacgttagcgcaagaagtttatca

SEQ ID NO: 170021 - DNA, 25 bp, Probe sequence
tgaacaactacctttacaatttttg

SEQ ID NO: 170022 - DNA, 25 bp, Probe sequence
tatgtatccgcaagcacgaccatta

SEQ ID NO: 170023 - DNA, 25 bp, Probe sequence
tatttatcgtttttagtattcattt

SEQ ID NO: 170024 - DNA, 25 bp, Probe sequence
attgcaatgttaagtaagtcaccaa

SEQ ID NO: 170025 - DNA, 25 bp, Probe sequence
attacctgttgcttatgttggtcct

SEQ ID NO: 170026 - DNA, 25 bp, Probe sequence
atcggtaaagataatattcctaagg

SEQ ID NO: 170027 - DNA, 25 bp, Probe sequence
atcctaatcaaattcattatatggc

SEQ ID NO: 170028 - DNA, 25 bp, Probe sequence
atgctaggtatggcattatatccta

SEQ ID NO: 170029 - DNA, 25 bp, Probe sequence
accaatcgatattaacgatttacct

SEQ ID NO: 170030 - DNA, 25 bp, Probe sequence
aaaagagattgaaacacgaacagca

SEQ ID NO: 170031 - DNA, 25 bp, Probe sequence
aacgcccaatcaatttgttgaaaga

SEQ ID NO: 170032 - DNA, 25 bp, Probe sequence
aagtcaccaatattacctgttgctt

SEQ ID NO: 170033 - DNA, 25 bp, Probe sequence
aatatgtcgtaacttgtacgcatga

SEQ ID NO: 170034 - DNA, 25 bp, Probe sequence
caccaatattacctgttgcttatgt

SEQ ID NO: 170035 - DNA, 25 bp, Probe sequence
caggttctcgcacatcgcaagaagg

SEQ ID NO: 170036 - DNA, 25 bp, Probe sequence
ctcgcacatcgcaagaaggtgcacc

SEQ ID NO: 170037 - DNA, 25 bp, Probe sequence
cctgttgcttatgttggtcctacta

SEQ ID NO: 170038 - DNA, 25 bp, Probe sequence
gcttatgttggtcctactaagattc

SEQ ID NO: 170039 - DNA, 25 bp, Probe sequence
gacagttggtatcttcccaacaggt

SEQ ID NO: 170040 - DNA, 25 bp, Probe sequence
gaaacacgaacagcaaagttacaac

SEQ ID NO: 170041 - DNA, 25 bp, Probe sequence
gaaacgtggtgcttcaacaattgca

SEQ ID NO: 170042 - DNA, 25 bp, Probe sequence
gtattcagtgattagtaagattttg

SEQ ID NO: 170043 - DNA, 25 bp, Probe sequence
gtagatcgtgaaaatccaggaccta

SEQ ID NO: 170044 - DNA, 25 bp, Probe sequence
gtaagattttgaatttcattttagt

SEQ ID NO: 170045 - DNA, 25 bp, Probe sequence
gtcaaaatcattatacgtaatcggt

SEQ ID NO: 170046 - DNA, 25 bp, Probe sequence
gtggtgcttcaacaattgcaatgtt

SEQ ID NO: 170047 - DNA, 25 bp, Probe sequence
ggttctcgcacatcgcaagaaggtg

SEQ ID NO: 170048 - DNA, 25 bp, Probe sequence
ggcattatatcctaatcaaattcat

SEQ ID NO: 170049 - DNA, 25 bp, Probe sequence
tgtacgcatgaaagttataacgaag

SEQ ID NO: 170050 - DNA, 25 bp, Probe sequence
tgaaaatccaggacctagtacttta

SEQ ID NO: 170051 - DNA, 25 bp, Probe sequence
ttggtatcttcccaacaggttctcg

SEQ ID NO: 170052 - DNA, 25 bp, Probe sequence
taataagacagttggtatcttccca

SEQ ID NO: 170053 - DNA, 25 bp, Probe sequence
taacgtctttaaatgcatttcctgt

SEQ ID NO: 170054 - DNA, 25 bp, Probe sequence
taaaacgaaacgagcgtatcgatta

SEQ ID NO: 170055 - DNA, 25 bp, Probe sequence
taaaacgcccaatcaatttgttgaa

SEQ ID NO: 170056 - DNA, 25 bp, Probe sequence
taaatgcatttcctgtagatcgtga

SEQ ID NO: 170057 - DNA, 25 bp, Probe sequence
tagtactttaaaacgcccaatcaat

SEQ ID NO: 170058 - DNA, 25 bp, Probe sequence
attcacatacacgattttacaagct

SEQ ID NO: 170059 - DNA, 25 bp, Probe sequence
atatcgttgaagtccttattgaaac

SEQ ID NO: 170060 - DNA, 25 bp, Probe sequence
atggtcaaacagacgcatacggttt

SEQ ID NO: 170061 - DNA, 25 bp, Probe sequence
agtggtattgaattaatgcgtcgta

SEQ ID NO: 170062 - DNA, 25 bp, Probe sequence
agtcgtttagaacatggtatttcat

SEQ ID NO: 170063 - DNA, 25 bp, Probe sequence
actattccgcttgtaactaaatcag

SEQ ID NO: 170064 - DNA, 25 bp, Probe sequence
acaagctattgatttcggtcatttg

SEQ ID NO: 170065 - DNA, 25 bp, Probe sequence
acaagcattatttagtggtgattta

SEQ ID NO: 170066 - DNA, 25 bp, Probe sequence
aaagattcaatccaaagtcgtttag

SEQ ID NO: 170067 - DNA, 25 bp, Probe sequence
aacaagtgacgttatactgcggtgc

SEQ ID NO: 170068 - DNA, 25 bp, Probe sequence
aagatgttaacaatggtgcgattta

SEQ ID NO: 170069 - DNA, 25 bp, Probe sequence
aagatgttaattatgctttagcacc

SEQ ID NO: 170070 - DNA, 25 bp, Probe sequence
aatcagaagaacgtgtgctacaaac

SEQ ID NO: 170071 - DNA, 25 bp, Probe sequence
aatacttcatggttaactatcaata

SEQ ID NO: 170072 - DNA, 25 bp, Probe sequence
cacgtcggcgttaattacatgttag

SEQ ID NO: 170073 - DNA, 25 bp, Probe sequence
tcgtcctatcgttttaattggcggt

SEQ ID NO: 170074 - DNA, 25 bp, Probe sequence
gcatacggtttaactattccgcttg

SEQ ID NO: 170075 - DNA, 25 bp, Probe sequence
gcatttctccttctaaacgacaagc

SEQ ID NO: 170076 - DNA, 25 bp, Probe sequence
gaatttacgattattcgtcgcggta

SEQ ID NO: 170077 - DNA, 25 bp, Probe sequence
gaacatggacatcgtcctatcgttt

SEQ ID NO: 170078 - DNA, 25 bp, Probe sequence
gaaacaggcatttctccttctaaac

SEQ ID NO: 170079 - DNA, 25 bp, Probe sequence
gaaattgatcgcttagaacaatcta

SEQ ID NO: 170080 - DNA, 25 bp, Probe sequence
gatttaaagatgtgcctcaagtgac

SEQ ID NO: 170081 - DNA, 25 bp, Probe sequence
gtcaggtgctgtttggttagatgct

SEQ ID NO: 170082 - DNA, 25 bp, Probe sequence
gtgcctcaagtgacattatcaaatg

SEQ ID NO: 170083 - DNA, 25 bp, Probe sequence
gtgactatggtaaacacgtcggcgt

SEQ ID NO: 170084 - DNA, 25 bp, Probe sequence
gtggatcagatcaatggggtaatat

SEQ ID NO: 170085 - DNA, 25 bp, Probe sequence
ggtgcagtgcttgttaataatagag

SEQ ID NO: 170086 - DNA, 25 bp, Probe sequence
ggtatgattggtgatccatcaggta

SEQ ID NO: 170087 - DNA, 25 bp, Probe sequence
ggaacagaccatggtgcagtgcttg

SEQ ID NO: 170088 - DNA, 25 bp, Probe sequence
ggagaggtcttatttatcaacaaac

SEQ ID NO: 170089 - DNA, 25 bp, Probe sequence
tgcaatccgtatttcacaagcatta

SEQ ID NO: 170090 - DNA, 25 bp, Probe sequence
taattggcggtggtacaggtatgat

SEQ ID NO: 170091 - DNA, 25 bp, Probe sequence
taatgcgtcgtatgtatggtcaaac

SEQ ID NO: 170092 - DNA, 25 bp, Probe sequence
atttggattcattgttgtggttact

SEQ ID NO: 170093 - DNA, 25 bp, Probe sequence
atatttggattcattgttgtggtta

SEQ ID NO: 170094 - DNA, 25 bp, Probe sequence
agtgagcatcaattaacgctttttt

SEQ ID NO: 170095 - DNA, 25 bp, Probe sequence
agcatcaattaacgcttttttcgat

SEQ ID NO: 170096 - DNA, 25 bp, Probe sequence
actgctgtttttaatatttggattc

SEQ ID NO: 170097 - DNA, 25 bp, Probe sequence
aaagtgagcatcaattaacgctttt

SEQ ID NO: 170098 - DNA, 25 bp, Probe sequence
aaaaagtgagcatcaattaacgctt

SEQ ID NO: 170099 - DNA, 25 bp, Probe sequence
aaaagtgagcatcaattaacgcttt

SEQ ID NO: 170100 - DNA, 25 bp, Probe sequence
aagtgagcatcaattaacgcttttt

SEQ ID NO: 170101 - DNA, 25 bp, Probe sequence
aatatttggattcattgttgtggtt

SEQ ID NO: 170102 - DNA, 25 bp, Probe sequence
ctgctgtttttaatatttggattca

SEQ ID NO: 170103 - DNA, 25 bp, Probe sequence
ctgtttttaatatttggattcattg

SEQ ID NO: 170104 - DNA, 25 bp, Probe sequence
gctgtttttaatatttggattcatt

SEQ ID NO: 170105 - DNA, 25 bp, Probe sequence
gcatcaattaacgcttttttcgatt

SEQ ID NO: 170106 - DNA, 25 bp, Probe sequence
gagcatcaattaacgcttttttcga

SEQ ID NO: 170107 - DNA, 25 bp, Probe sequence
gattcattgttgtggttactttaaa

SEQ ID NO: 170108 - DNA, 25 bp, Probe sequence
gtttttaatatttggattcattgtt

SEQ ID NO: 170109 - DNA, 25 bp, Probe sequence
gtgagcatcaattaacgcttttttc

SEQ ID NO: 170110 - DNA, 25 bp, Probe sequence
gtggttactttaaaaagtgagcatc

SEQ ID NO: 170111 - DNA, 25 bp, Probe sequence
ggattcattgttgtggttactttaa

SEQ ID NO: 170112 - DNA, 25 bp, Probe sequence
tggttactttaaaaagtgagcatca

SEQ ID NO: 170113 - DNA, 25 bp, Probe sequence
tggattcattgttgtggttacttta

SEQ ID NO: 170114 - DNA, 25 bp, Probe sequence
tgtttttaatatttggattcattgt

SEQ ID NO: 170115 - DNA, 25 bp, Probe sequence
tgagcatcaattaacgcttttttcg

SEQ ID NO: 170116 - DNA, 25 bp, Probe sequence
tgctgtttttaatatttggattcat

SEQ ID NO: 170117 - DNA, 25 bp, Probe sequence
tcattgttgtggttactttaaaaag

SEQ ID NO: 170118 - DNA, 25 bp, Probe sequence
taatatttggattcattgttgtggt

SEQ ID NO: 170119 - DNA, 25 bp, Probe sequence
tttggattcattgttgtggttactt

SEQ ID NO: 170120 - DNA, 25 bp, Probe sequence
tatttggattcattgttgtggttac

SEQ ID NO: 170121 - DNA, 25 bp, Probe sequence
tttaatatttggattcattgttgtg

SEQ ID NO: 170122 - DNA, 25 bp, Probe sequence
tttttaatatttggattcattgttg

SEQ ID NO: 170123 - DNA, 25 bp, Probe sequence
ttttaatatttggattcattgttgt

SEQ ID NO: 170124 - DNA, 25 bp, Probe sequence
ttaatatttggattcattgttgtgg

SEQ ID NO: 170125 - DNA, 25 bp, Probe sequence
ttggattcattgttgtggttacttt

SEQ ID NO: 170126 - DNA, 25 bp, Probe sequence
attggcgaccaattgattttcaaat

SEQ ID NO: 170127 - DNA, 25 bp, Probe sequence
atttttaattacttctcaacatcaa

SEQ ID NO: 170128 - DNA, 25 bp, Probe sequence
ataaagattatgcctatattcgttt

SEQ ID NO: 170129 - DNA, 25 bp, Probe sequence
ataacccagacgactatgtggatga

SEQ ID NO: 170130 - DNA, 25 bp, Probe sequence
atggtctttgcacagcctattacta

SEQ ID NO: 170131 - DNA, 25 bp, Probe sequence
acatacagctgataattggcgacca

SEQ ID NO: 170132 - DNA, 25 bp, Probe sequence
aaatcaaacacaacctgctacgcaa

SEQ ID NO: 170133 - DNA, 25 bp, Probe sequence
aaagtcgttgtggcaaacattggtt

SEQ ID NO: 170134 - DNA, 25 bp, Probe sequence
aaaacaactgaacatctgccgagtg

SEQ ID NO: 170135 - DNA, 25 bp, Probe sequence
aaaattattagctccgtatcacaaa

SEQ ID NO: 170136 - DNA, 25 bp, Probe sequence
aacctatttataacgatccttcact

SEQ ID NO: 170137 - DNA, 25 bp, Probe sequence
aattaaggtctttctattctattag

SEQ ID NO: 170138 - DNA, 25 bp, Probe sequence
cattatgctagtactgttgaaccag

SEQ ID NO: 170139 - DNA, 25 bp, Probe sequence
gcctattactaataacccagacgac

SEQ ID NO: 170140 - DNA, 25 bp, Probe sequence
gccaaccagctcatgaaacaaattc

SEQ ID NO: 170141 - DNA, 25 bp, Probe sequence
gccggcacaccatcgaaagaaaaca

SEQ ID NO: 170142 - DNA, 25 bp, Probe sequence
gcatcggtcattgtcagtacactat

SEQ ID NO: 170143 - DNA, 25 bp, Probe sequence
gcagatcaagcgtcaagccaaccag

SEQ ID NO: 170144 - DNA, 25 bp, Probe sequence
gaagaccatgcctatattcgattcc

SEQ ID NO: 170145 - DNA, 25 bp, Probe sequence
gaacatctgccgagtgatattcata

SEQ ID NO: 170146 - DNA, 25 bp, Probe sequence
gaacatccattctatacagcaactt

SEQ ID NO: 170147 - DNA, 25 bp, Probe sequence
gaaacaacttcaagccaatcatggt

SEQ ID NO: 170148 - DNA, 25 bp, Probe sequence
gagtcaagtaatcagtcggatgtta

SEQ ID NO: 170149 - DNA, 25 bp, Probe sequence
gatgttgatcatttatccgatatgt

SEQ ID NO: 170150 - DNA, 25 bp, Probe sequence
gttaatcaacagtatccaccagcag

SEQ ID NO: 170151 - DNA, 25 bp, Probe sequence
gtatccaccagcagatgaatcacta

SEQ ID NO: 170152 - DNA, 25 bp, Probe sequence
gtcactactgtttctaaagatccta

SEQ ID NO: 170153 - DNA, 25 bp, Probe sequence
ggtaaacgtgtcactactgtttcta

SEQ ID NO: 170154 - DNA, 25 bp, Probe sequence
ggtatgttagctttattcattccta

SEQ ID NO: 170155 - DNA, 25 bp, Probe sequence
tctaggcgttgcatcggtcattgtc

SEQ ID NO: 170156 - DNA, 25 bp, Probe sequence
tcctgcagcggatgaatcacttaaa

SEQ ID NO: 170157 - DNA, 25 bp, Probe sequence
taaaaacccggctatcatcgataaa

SEQ ID NO: 170158 - DNA, 25 bp, Probe sequence
tactatcactttttcagcatcaaag

SEQ ID NO: 170159 - DNA, 25 bp, Probe sequence
ttagacatcaatactgcttcaacat

SEQ ID NO: 170160 - DNA, 25 bp, Probe sequence
ataacgtacgaattgccttaactga

SEQ ID NO: 170161 - DNA, 25 bp, Probe sequence
atcatgactatgcctggtttaccta

SEQ ID NO: 170162 - DNA, 25 bp, Probe sequence
atggtggaccatttgcgaatatcgc

SEQ ID NO: 170163 - DNA, 25 bp, Probe sequence
aggtggacctacaaatggtgtacca

SEQ ID NO: 170164 - DNA, 25 bp, Probe sequence
agtagcgtctgaaattatggcgatt

SEQ ID NO: 170165 - DNA, 25 bp, Probe sequence
agagatcgcaagccagttacagttg

SEQ ID NO: 170166 - DNA, 25 bp, Probe sequence
agaaccttatggtcattacaaagct

SEQ ID NO: 170167 - DNA, 25 bp, Probe sequence
agcgttgacaggtgcaatcatgact

SEQ ID NO: 170168 - DNA, 25 bp, Probe sequence
aaaacacaatattcattctcagatg

SEQ ID NO: 170169 - DNA, 25 bp, Probe sequence
caactgaaacagcacgtgatttagc

SEQ ID NO: 170170 - DNA, 25 bp, Probe sequence
gcgaatcaatcaacactacaaccaa

SEQ ID NO: 170171 - DNA, 25 bp, Probe sequence
gctgcatcagtaggtatttcagagg

SEQ ID NO: 170172 - DNA, 25 bp, Probe sequence
gaatatcgcacacggttgtaactca

SEQ ID NO: 170173 - DNA, 25 bp, Probe sequence
gaatgatcgtgcacttagacatgta

SEQ ID NO: 170174 - DNA, 25 bp, Probe sequence
gaagtcattgatcaacctaattcat

SEQ ID NO: 170175 - DNA, 25 bp, Probe sequence
gagcccaacaccagctggtgaaggt

SEQ ID NO: 170176 - DNA, 25 bp, Probe sequence
gagagcctgctttaggaccaacatt

SEQ ID NO: 170177 - DNA, 25 bp, Probe sequence
ggtgtagaaccggttgttgcaatta

SEQ ID NO: 170178 - DNA, 25 bp, Probe sequence
gatggtcatgcaattgggttattct

SEQ ID NO: 170179 - DNA, 25 bp, Probe sequence
gatcaaacgttgttaggtgcaccat

SEQ ID NO: 170180 - DNA, 25 bp, Probe sequence
gataattacccagtatgtatggcga

SEQ ID NO: 170181 - DNA, 25 bp, Probe sequence
gttaggtgcaccatcaggatttgaa

SEQ ID NO: 170182 - DNA, 25 bp, Probe sequence
gtgcaggatttatcgtagcgttgac

SEQ ID NO: 170183 - DNA, 25 bp, Probe sequence
gtgatttagctgatatcgttgtaac

SEQ ID NO: 170184 - DNA, 25 bp, Probe sequence
ggtgtaccacgtgaagatggcttta

SEQ ID NO: 170185 - DNA, 25 bp, Probe sequence
ggtggtggttatgcgcaagtcttac

SEQ ID NO: 170186 - DNA, 25 bp, Probe sequence
ggtaaaggtggcgttgacttagcaa

SEQ ID NO: 170187 - DNA, 25 bp, Probe sequence
ggtttagctgatgcattccatgagt

SEQ ID NO: 170188 - DNA, 25 bp, Probe sequence
tggatttggttcagacttaggcgct

SEQ ID NO: 170189 - DNA, 25 bp, Probe sequence
tggatgttactgatgatggtcatgc

SEQ ID NO: 170190 - DNA, 25 bp, Probe sequence
tcgttgtaacggaagctggatttgg

SEQ ID NO: 170191 - DNA, 25 bp, Probe sequence
tagtaactgcgatgagcccaacacc

SEQ ID NO: 170192 - DNA, 25 bp, Probe sequence
tatgcgcaagtcttacctatggaag

SEQ ID NO: 170193 - DNA, 25 bp, Probe sequence
ttgtgactgaaatctatggcggttc

SEQ ID NO: 170194 - DNA, 25 bp, Probe sequence
attggtgcaattgttgggccgttat

SEQ ID NO: 170195 - DNA, 25 bp, Probe sequence
attgtatagctggtggtcgcttttc

SEQ ID NO: 170196 - DNA, 25 bp, Probe sequence
atttatgtcgcgtacacctgaacta

SEQ ID NO: 170197 - DNA, 25 bp, Probe sequence
atgattgttaactatccaacgatgg

SEQ ID NO: 170198 - DNA, 25 bp, Probe sequence
aggcattgttacctcgagtacctgt

SEQ ID NO: 170199 - DNA, 25 bp, Probe sequence
aggctggccatcaatgatgtatcgt

SEQ ID NO: 170200 - DNA, 25 bp, Probe sequence
accaaatcgaatgggcaaccttgct

SEQ ID NO: 170201 - DNA, 25 bp, Probe sequence
aacgatggacgtcaagcttggctca

SEQ ID NO: 170202 - DNA, 25 bp, Probe sequence
aagcttggctcaatgggcaaaccat

SEQ ID NO: 170203 - DNA, 25 bp, Probe sequence
aagtcggatgatggtttgattttac

SEQ ID NO: 170204 - DNA, 25 bp, Probe sequence
aagtgacgatttggtatacggcacc

SEQ ID NO: 170205 - DNA, 25 bp, Probe sequence
aatgagtgctggtgacgatattgtt

SEQ ID NO: 170206 - DNA, 25 bp, Probe sequence
catgcagcaccacgtgaaatcgaat

SEQ ID NO: 170207 - DNA, 25 bp, Probe sequence
ccaggttgggttacaggaacatctt

SEQ ID NO: 170208 - DNA, 25 bp, Probe sequence
gcgtacacctgaactatattttgcg

SEQ ID NO: 170209 - DNA, 25 bp, Probe sequence
gagactggtatgtatctggtgattc

SEQ ID NO: 170210 - DNA, 25 bp, Probe sequence
gttacgttcgattctatcagtaggt

SEQ ID NO: 170211 - DNA, 25 bp, Probe sequence
gttagtgcactatatttctggaaaa

SEQ ID NO: 170212 - DNA, 25 bp, Probe sequence
gtatacggcaccaacagctttaaga

SEQ ID NO: 170213 - DNA, 25 bp, Probe sequence
gggcaaaccattacctggtattcaa

SEQ ID NO: 170214 - DNA, 25 bp, Probe sequence
gggccgttatttgaagcatttatgg

SEQ ID NO: 170215 - DNA, 25 bp, Probe sequence
ggtgtacagcagatccaggttgggt

SEQ ID NO: 170216 - DNA, 25 bp, Probe sequence
ggtgagcctttaaatcctgaagtta

SEQ ID NO: 170217 - DNA, 25 bp, Probe sequence
ggttgaacacgaagcagttgccgaa

SEQ ID NO: 170218 - DNA, 25 bp, Probe sequence
ggtattcaagctgcaattatcgatg

SEQ ID NO: 170219 - DNA, 25 bp, Probe sequence
ggttccaaggacgtgttgatgatgt

SEQ ID NO: 170220 - DNA, 25 bp, Probe sequence
ggaaactgctagcgatgaatttgac

SEQ ID NO: 170221 - DNA, 25 bp, Probe sequence
ggaacatcttatggtatttttgcac

SEQ ID NO: 170222 - DNA, 25 bp, Probe sequence
tgcaccatggttaaatggcgctaca

SEQ ID NO: 170223 - DNA, 25 bp, Probe sequence
taaacctgatccggttcgcggtgaa

SEQ ID NO: 170224 - DNA, 25 bp, Probe sequence
tatgacttgtcatcgttacgttcga

SEQ ID NO: 170225 - DNA, 25 bp, Probe sequence
tatattttgcgttgttaggtgtttt

SEQ ID NO: 170226 - DNA, 25 bp, Probe sequence
tttacattatacatcaggttctact

SEQ ID NO: 170227 - DNA, 25 bp, Probe sequence
ttaaggcgtttgttgcactgagaaa

SEQ ID NO: 170228 - DNA, 25 bp, Probe sequence
attcacaacttgctcgtggacttga

SEQ ID NO: 170229 - DNA, 25 bp, Probe sequence
ataaatcaatcatctgtacctgtag

SEQ ID NO: 170230 - DNA, 25 bp, Probe sequence
atcatctgtacctgtagtagtatca

SEQ ID NO: 170231 - DNA, 25 bp, Probe sequence
atcggtgcagtagggatgcgcttat

SEQ ID NO: 170232 - DNA, 25 bp, Probe sequence
agagaagcgcgtgtctctatggcca

SEQ ID NO: 170233 - DNA, 25 bp, Probe sequence
aacagtaggtgtgatcattccagat

SEQ ID NO: 170234 - DNA, 25 bp, Probe sequence
aatcatttgctttagtaggtggaga

SEQ ID NO: 170235 - DNA, 25 bp, Probe sequence
aatatcactcaattatttcaaattc

SEQ ID NO: 170236 - DNA, 25 bp, Probe sequence
cacagaattgaataccgaggaacta

SEQ ID NO: 170237 - DNA, 25 bp, Probe sequence
caggaacaaatggtaaggatgcaca

SEQ ID NO: 170238 - DNA, 25 bp, Probe sequence
cattatatgatatcggtgcagtagg

SEQ ID NO: 170239 - DNA, 25 bp, Probe sequence
gctcgtggacttgaagatattgcaa

SEQ ID NO: 170240 - DNA, 25 bp, Probe sequence
gccacagtgtcgcgtgttgttaatg

SEQ ID NO: 170241 - DNA, 25 bp, Probe sequence
gctgttgctagaggtttagctagta

SEQ ID NO: 170242 - DNA, 25 bp, Probe sequence
gaattgttctggtgctgaaagttat

SEQ ID NO: 170243 - DNA, 25 bp, Probe sequence
gaattatcgtccaaatgctgttgct

SEQ ID NO: 170244 - DNA, 25 bp, Probe sequence
gaaaaaggcgctaaatcatttgctt

SEQ ID NO: 170245 - DNA, 25 bp, Probe sequence
gacagttactatatatgatgtagca

SEQ ID NO: 170246 - DNA, 25 bp, Probe sequence
gaccacaactttctagtgttattca

SEQ ID NO: 170247 - DNA, 25 bp, Probe sequence
gatggttagaccacaactttctagt

SEQ ID NO: 170248 - DNA, 25 bp, Probe sequence
gatggtattattttccttggtggta

SEQ ID NO: 170249 - DNA, 25 bp, Probe sequence
gatgtagcaagagaagcgcgtgtct

SEQ ID NO: 170250 - DNA, 25 bp, Probe sequence
gatacattgaattgttctggtgctg

SEQ ID NO: 170251 - DNA, 25 bp, Probe sequence
gtagggatgcgcttattaacaaaat

SEQ ID NO: 170252 - DNA, 25 bp, Probe sequence
gtcattaagcgtttgaattatcgtc

SEQ ID NO: 170253 - DNA, 25 bp, Probe sequence
gtcgcgtgttgttaatgggaaccaa

SEQ ID NO: 170254 - DNA, 25 bp, Probe sequence
gtccaaatgctgttgctagaggttt

SEQ ID NO: 170255 - DNA, 25 bp, Probe sequence
gtgtgatcattccagatatatctaa

SEQ ID NO: 170256 - DNA, 25 bp, Probe sequence
ggatgctggtattaaagttccagag

SEQ ID NO: 170257 - DNA, 25 bp, Probe sequence
tgattttactgaagctgcgaaagaa

SEQ ID NO: 170258 - DNA, 25 bp, Probe sequence
tagtgcaatggatgctggtattaaa

SEQ ID NO: 170259 - DNA, 25 bp, Probe sequence
tatctattattcacaacttgctcgt

SEQ ID NO: 170260 - DNA, 25 bp, Probe sequence
tatttcaaattcagataacgatcct

SEQ ID NO: 170261 - DNA, 25 bp, Probe sequence
tttccttggtggtacaattactgaa

SEQ ID NO: 170262 - DNA, 25 bp, Probe sequence
atctaaacgtggtgaactagcacaa

SEQ ID NO: 170263 - DNA, 25 bp, Probe sequence
atgcagctgaatacattgcttcaca

SEQ ID NO: 170264 - DNA, 25 bp, Probe sequence
aggtacacacttaccagtcatggta

SEQ ID NO: 170265 - DNA, 25 bp, Probe sequence
agctgttgctaaaaacttacatgct

SEQ ID NO: 170266 - DNA, 25 bp, Probe sequence
aaagcctctacagatttacaaaaat

SEQ ID NO: 170267 - DNA, 25 bp, Probe sequence
aaacgtggtttatctgctacaatcg

SEQ ID NO: 170268 - DNA, 25 bp, Probe sequence
aagatatcatgttaccaactgcgaa

SEQ ID NO: 170269 - DNA, 25 bp, Probe sequence
aatgattttgaagtggctgatgagt

SEQ ID NO: 170270 - DNA, 25 bp, Probe sequence
aatcatttgtatttgggccatgttc

SEQ ID NO: 170271 - DNA, 25 bp, Probe sequence
aatttattcgtggcggtgcatttaa

SEQ ID NO: 170272 - DNA, 25 bp, Probe sequence
cacgtaatatgcaaaacttcgagtt

SEQ ID NO: 170273 - DNA, 25 bp, Probe sequence
cagatccatctgttgcacttagtga

SEQ ID NO: 170274 - DNA, 25 bp, Probe sequence
ctgaggtgcatccagatccatctgt

SEQ ID NO: 170275 - DNA, 25 bp, Probe sequence
ccaactgcgaaagcagcattagcag

SEQ ID NO: 170276 - DNA, 25 bp, Probe sequence
gccgtacgaaaaagcctattctatt

SEQ ID NO: 170277 - DNA, 25 bp, Probe sequence
gctgatgagtatttagacgtattcc

SEQ ID NO: 170278 - DNA, 25 bp, Probe sequence
gaatacattgcttcacaaggtaatc

SEQ ID NO: 170279 - DNA, 25 bp, Probe sequence
gaagctggccgtacgaaaaagccta

SEQ ID NO: 170280 - DNA, 25 bp, Probe sequence
gaacttatgaaaaggcgacacgtaa

SEQ ID NO: 170281 - DNA, 25 bp, Probe sequence
gacgtattccaaattggtgcacgta

SEQ ID NO: 170282 - DNA, 25 bp, Probe sequence
gatgaattccaagcattttatgatg

SEQ ID NO: 170283 - DNA, 25 bp, Probe sequence
gatgcgggtcaacaaatggatttag

SEQ ID NO: 170284 - DNA, 25 bp, Probe sequence
gatatttcagcagtaccaattttaa

SEQ ID NO: 170285 - DNA, 25 bp, Probe sequence
gttatggctgaggtgcatccagatc

SEQ ID NO: 170286 - DNA, 25 bp, Probe sequence
gttgtcagcgaaatcgtaaatccaa

SEQ ID NO: 170287 - DNA, 25 bp, Probe sequence
gttgcacttagtgatgcgggtcaac

SEQ ID NO: 170288 - DNA, 25 bp, Probe sequence
gtatcacgtaagttgaaacctgaag

SEQ ID NO: 170289 - DNA, 25 bp, Probe sequence
gtgaacgtggaatccgaacttatga

SEQ ID NO: 170290 - DNA, 25 bp, Probe sequence
gggccatgttcagttgaatcatttg

SEQ ID NO: 170291 - DNA, 25 bp, Probe sequence
ggtttatctgctacaatcgaagagt

SEQ ID NO: 170292 - DNA, 25 bp, Probe sequence
ggagacggcaataaatcatttgtat

SEQ ID NO: 170293 - DNA, 25 bp, Probe sequence
ggcgacacgtaacactttagatatt

SEQ ID NO: 170294 - DNA, 25 bp, Probe sequence
tgaaacctgaagatacgattgtaac

SEQ ID NO: 170295 - DNA, 25 bp, Probe sequence
tcgaagagtttgtttatgcagctga

SEQ ID NO: 170296 - DNA, 25 bp, Probe sequence
attgatggaatacctgaacccgcat

SEQ ID NO: 170297 - DNA, 25 bp, Probe sequence
atcttgtcgattatgtatacgtcac

SEQ ID NO: 170298 - DNA, 25 bp, Probe sequence
agtcattatttaccagccttgtctg

SEQ ID NO: 170299 - DNA, 25 bp, Probe sequence
agtgttatcatgtcgcattaaacgc

SEQ ID NO: 170300 - DNA, 25 bp, Probe sequence
acgtgctgtgttagcgcaacatgac

SEQ ID NO: 170301 - DNA, 25 bp, Probe sequence
aaatcacatggcacgacttacaaca

SEQ ID NO: 170302 - DNA, 25 bp, Probe sequence
aacacagctgttgatcctagatacg

SEQ ID NO: 170303 - DNA, 25 bp, Probe sequence
aacatgacacatatcatacgcccaa

SEQ ID NO: 170304 - DNA, 25 bp, Probe sequence
aatggtgtatcagttgcctatctta

SEQ ID NO: 170305 - DNA, 25 bp, Probe sequence
aatgcagatgtgcgcatgcctcatg

SEQ ID NO: 170306 - DNA, 25 bp, Probe sequence
aattagcatcggttatggcatcaat

SEQ ID NO: 170307 - DNA, 25 bp, Probe sequence
cattagctgtagccaacttacccgc

SEQ ID NO: 170308 - DNA, 25 bp, Probe sequence
cattccctagcgttgatgtggcact

SEQ ID NO: 170309 - DNA, 25 bp, Probe sequence
gccgaagttctacgtgctgtgttag

SEQ ID NO: 170310 - DNA, 25 bp, Probe sequence
gaaattgcaccaggtcttgatttgc

SEQ ID NO: 170311 - DNA, 25 bp, Probe sequence
gaggttgatcaatacggcaatgtca

SEQ ID NO: 170312 - DNA, 25 bp, Probe sequence
gatgttggcattttcggtggattcg

SEQ ID NO: 170313 - DNA, 25 bp, Probe sequence
gttgatcctagatacggtggcggta

SEQ ID NO: 170314 - DNA, 25 bp, Probe sequence
gttgcctatcttagctttgctgagg

SEQ ID NO: 170315 - DNA, 25 bp, Probe sequence
gttatcccaggaaatcttgtcgatt

SEQ ID NO: 170316 - DNA, 25 bp, Probe sequence
gtgagccatatcgactttaatgcac

SEQ ID NO: 170317 - DNA, 25 bp, Probe sequence
gtgattggtttaccagcattagctg

SEQ ID NO: 170318 - DNA, 25 bp, Probe sequence
gtgtcttacttcaatgaccgactaa

SEQ ID NO: 170319 - DNA, 25 bp, Probe sequence
gtggcactactgagaggaacatacg

SEQ ID NO: 170320 - DNA, 25 bp, Probe sequence
ggtggattcgttgggagtcgtgaac

SEQ ID NO: 170321 - DNA, 25 bp, Probe sequence
ggtatcattgcaactcattatcgtc

SEQ ID NO: 170322 - DNA, 25 bp, Probe sequence
ggcaatgtcaacgtgtcttacttca

SEQ ID NO: 170323 - DNA, 25 bp, Probe sequence
ggcatcaataatgaactctctaatt

SEQ ID NO: 170324 - DNA, 25 bp, Probe sequence
tgtgcgcatgcctcatgatcgagca

SEQ ID NO: 170325 - DNA, 25 bp, Probe sequence
taacggcttcttccaaaacggcaca

SEQ ID NO: 170326 - DNA, 25 bp, Probe sequence
tgaacccgcattaccttttaatagt

SEQ ID NO: 170327 - DNA, 25 bp, Probe sequence
tccgacgtgctgctcagtttttaac

SEQ ID NO: 170328 - DNA, 25 bp, Probe sequence
ttatcttttcaggtacttttgtagc

SEQ ID NO: 170329 - DNA, 25 bp, Probe sequence
ttgtagctggcagtcatgtctcatg

SEQ ID NO: 170330 - DNA, 25 bp, Probe sequence
agtatcaaaaccagagtcacaagct

SEQ ID NO: 170331 - DNA, 25 bp, Probe sequence
agcagtggcattgaaagcacaacaa

SEQ ID NO: 170332 - DNA, 25 bp, Probe sequence
aaagtgcagctgtatcaaatgaaga

SEQ ID NO: 170333 - DNA, 25 bp, Probe sequence
aaaagtgcagctgtatcaaatgaag

SEQ ID NO: 170334 - DNA, 25 bp, Probe sequence
aacaccaggttcaaaagagagtcaa

SEQ ID NO: 170335 - DNA, 25 bp, Probe sequence
aacacacttatcaaaatgaaccact

SEQ ID NO: 170336 - DNA, 25 bp, Probe sequence
aagaggcacaagaggttcaagaagc

SEQ ID NO: 170337 - DNA, 25 bp, Probe sequence
aaggcacaacaagcagcgataaaag

SEQ ID NO: 170338 - DNA, 25 bp, Probe sequence
caagtgcagcaaaggtagaagtatc

SEQ ID NO: 170339 - DNA, 25 bp, Probe sequence
caacaaatgctaaatcatccaatgc

SEQ ID NO: 170340 - DNA, 25 bp, Probe sequence
cgcgcttgttggttcagctttaggt

SEQ ID NO: 170341 - DNA, 25 bp, Probe sequence
gcatctacaaataaaacttcaggtc

SEQ ID NO: 170342 - DNA, 25 bp, Probe sequence
gaagaaacggttgcctatacaaaag

SEQ ID NO: 170343 - DNA, 25 bp, Probe sequence
gaagaaccaaaagcagtggcattga

SEQ ID NO: 170344 - DNA, 25 bp, Probe sequence
gaagcaagctaaattaacaccaggt

SEQ ID NO: 170345 - DNA, 25 bp, Probe sequence
gaagcgttatttgcagaaaaaccag

SEQ ID NO: 170346 - DNA, 25 bp, Probe sequence
gaaagaaattcctcaattagttact

SEQ ID NO: 170347 - DNA, 25 bp, Probe sequence
gaaagattagcaaacgctgcaaaac

SEQ ID NO: 170348 - DNA, 25 bp, Probe sequence
gagcaagcggcattaaaggcacaac

SEQ ID NO: 170349 - DNA, 25 bp, Probe sequence
gagaagcacaagcagaagcggataa

SEQ ID NO: 170350 - DNA, 25 bp, Probe sequence
gaggcacaagaggttcaagaagcta

SEQ ID NO: 170351 - DNA, 25 bp, Probe sequence
gaggcacaagagattcaagaagcta

SEQ ID NO: 170352 - DNA, 25 bp, Probe sequence
gatacatcacaagaggcacaagagg

SEQ ID NO: 170353 - DNA, 25 bp, Probe sequence
gatacatcacaagaagcacaagaga

SEQ ID NO: 170354 - DNA, 25 bp, Probe sequence
gatacatcacaagaggcacaagaga

SEQ ID NO: 170355 - DNA, 25 bp, Probe sequence
gttggttcagctttaggtttgtatt

SEQ ID NO: 170356 - DNA, 25 bp, Probe sequence
gttgttagttttataactggcgcgc

SEQ ID NO: 170357 - DNA, 25 bp, Probe sequence
gtatcagagacagagacggttaata

SEQ ID NO: 170358 - DNA, 25 bp, Probe sequence
gtcaaagaacaagaactgtcgcaaa

SEQ ID NO: 170359 - DNA, 25 bp, Probe sequence
gtggcattgaaagcacaacaagcag

SEQ ID NO: 170360 - DNA, 25 bp, Probe sequence
ggcattgaaagcacaacaagcagcg

SEQ ID NO: 170361 - DNA, 25 bp, Probe sequence
tgaaccactaccaaaccgtaaagat

SEQ ID NO: 170362 - DNA, 25 bp, Probe sequence
tcatccaatgcatcaaaaacgccaa

SEQ ID NO: 170363 - DNA, 25 bp, Probe sequence
tataactggcgcgcttgttggttca

SEQ ID NO: 170364 - DNA, 25 bp, Probe sequence
agtatcaaaaccagagtcacaagct

SEQ ID NO: 170365 - DNA, 25 bp, Probe sequence
aaagtgcagctgtatcaaatgaaga

SEQ ID NO: 170366 - DNA, 25 bp, Probe sequence
aaagtgtggctgtatcaaatgaaga

SEQ ID NO: 170367 - DNA, 25 bp, Probe sequence
aacaccaggttcaaaagagagtcaa

SEQ ID NO: 170368 - DNA, 25 bp, Probe sequence
aacacacttatcaaaatgaaccact

SEQ ID NO: 170369 - DNA, 25 bp, Probe sequence
aagaaccaaaagcagtggcattgaa

SEQ ID NO: 170370 - DNA, 25 bp, Probe sequence
aagtgacacgtcacaagaggcacaa

SEQ ID NO: 170371 - DNA, 25 bp, Probe sequence
aaggcacaacaagcagcgataaaag

SEQ ID NO: 170372 - DNA, 25 bp, Probe sequence
caagtgcagcaaaggtagaagtatc

SEQ ID NO: 170373 - DNA, 25 bp, Probe sequence
caacaaatgctaaatcatccaatgc

SEQ ID NO: 170374 - DNA, 25 bp, Probe sequence
cgcgcttgttggttcagctttaggt

SEQ ID NO: 170375 - DNA, 25 bp, Probe sequence
gcatctacaaataaaacttcaggtc

SEQ ID NO: 170376 - DNA, 25 bp, Probe sequence
gcatcggcattaaaagtacaacaag

SEQ ID NO: 170377 - DNA, 25 bp, Probe sequence
gcagagaaagacagtgacacatcaa

SEQ ID NO: 170378 - DNA, 25 bp, Probe sequence
gaagaaacggttgcctatacaaaag

SEQ ID NO: 170379 - DNA, 25 bp, Probe sequence
gaagagtcaaaagcatcggcattaa

SEQ ID NO: 170380 - DNA, 25 bp, Probe sequence
gaagcaagctaaattaacaccaggt

SEQ ID NO: 170381 - DNA, 25 bp, Probe sequence
gaagcgttatttgcagaaaaaccag

SEQ ID NO: 170382 - DNA, 25 bp, Probe sequence
gaaagaaattcctcaattagttact

SEQ ID NO: 170383 - DNA, 25 bp, Probe sequence
gaaagattagcaaacgctgcaaaac

SEQ ID NO: 170384 - DNA, 25 bp, Probe sequence
gagcaagcggcattaaaggcacaac

SEQ ID NO: 170385 - DNA, 25 bp, Probe sequence
gagaagcacaagcagaagcggataa

SEQ ID NO: 170386 - DNA, 25 bp, Probe sequence
gaggcacaagaggttcaagaagcta

SEQ ID NO: 170387 - DNA, 25 bp, Probe sequence
gaggcacaagagattcaagaagcta

SEQ ID NO: 170388 - DNA, 25 bp, Probe sequence
gatacatcacaagaggcacaagagg

SEQ ID NO: 170389 - DNA, 25 bp, Probe sequence
gatacatcacaagaagcacaagaga

SEQ ID NO: 170390 - DNA, 25 bp, Probe sequence
gttggttcagctttaggtttgtatt

SEQ ID NO: 170391 - DNA, 25 bp, Probe sequence
gttgttagttttataactggcgcgc

SEQ ID NO: 170392 - DNA, 25 bp, Probe sequence
gtatcagagacagagacggttaata

SEQ ID NO: 170393 - DNA, 25 bp, Probe sequence
gtcaaagaacaagaactgtcgcaaa

SEQ ID NO: 170394 - DNA, 25 bp, Probe sequence
ggcattgaaagcacaacaagcagcg

SEQ ID NO: 170395 - DNA, 25 bp, Probe sequence
tgaaccactaccaaaccgtaaagat

SEQ ID NO: 170396 - DNA, 25 bp, Probe sequence
tcatccaatgcatcaaaaacgccaa

SEQ ID NO: 170397 - DNA, 25 bp, Probe sequence
tataactggcgcgcttgttggttca

SEQ ID NO: 170398 - DNA, 25 bp, Probe sequence
atgaacaagcggcattgaaggcaca

SEQ ID NO: 170399 - DNA, 25 bp, Probe sequence
aggcatcggcattgaaggcacaaca

SEQ ID NO: 170400 - DNA, 25 bp, Probe sequence
agttcaagtaactcaacgacaaaga

SEQ ID NO: 170401 - DNA, 25 bp, Probe sequence
agaaacggataaaagtgcggctgta

SEQ ID NO: 170402 - DNA, 25 bp, Probe sequence
aaaggcatcggcattgaaggcacaa

SEQ ID NO: 170403 - DNA, 25 bp, Probe sequence
aacaagcggcattgaaggcacaaca

SEQ ID NO: 170404 - DNA, 25 bp, Probe sequence
aactcaacgacaaagactaatcaaa

SEQ ID NO: 170405 - DNA, 25 bp, Probe sequence
aagcatcgacattaaacgtatcgaa

SEQ ID NO: 170406 - DNA, 25 bp, Probe sequence
aagagaagcacaaacagaaacggat

SEQ ID NO: 170407 - DNA, 25 bp, Probe sequence
aaggcatcggcattgaaggcacaac

SEQ ID NO: 170408 - DNA, 25 bp, Probe sequence
caaaggcatcggcattgaaggcaca

SEQ ID NO: 170409 - DNA, 25 bp, Probe sequence
caaaagcatcgacattaaacgtatc

SEQ ID NO: 170410 - DNA, 25 bp, Probe sequence
catcggcattgaaggcacaacaagc

SEQ ID NO: 170411 - DNA, 25 bp, Probe sequence
ctcaacgacaaagactaatcaaaaa

SEQ ID NO: 170412 - DNA, 25 bp, Probe sequence
gcatcgacattaaacgtatcgaaag

SEQ ID NO: 170413 - DNA, 25 bp, Probe sequence
gcatcggcattgaaggcacaacaag

SEQ ID NO: 170414 - DNA, 25 bp, Probe sequence
gcacaagcgattcaagaagtgaaga

SEQ ID NO: 170415 - DNA, 25 bp, Probe sequence
gaatcaaaagcatcgacattaaacg

SEQ ID NO: 170416 - DNA, 25 bp, Probe sequence
gaagtgaagaaagaagcgcaagcag

SEQ ID NO: 170417 - DNA, 25 bp, Probe sequence
gaagagtcaaaggcatcggcattga

SEQ ID NO: 170418 - DNA, 25 bp, Probe sequence
gaagaatcaaaagcatcgacattaa

SEQ ID NO: 170419 - DNA, 25 bp, Probe sequence
gaagcacaagcgattcaagaagtga

SEQ ID NO: 170420 - DNA, 25 bp, Probe sequence
gaacaagcggcattgaaggcacaac

SEQ ID NO: 170421 - DNA, 25 bp, Probe sequence
gacattaaacgtatcgaaagaagag

SEQ ID NO: 170422 - DNA, 25 bp, Probe sequence
gagaagcacaaacagaaacggataa

SEQ ID NO: 170423 - DNA, 25 bp, Probe sequence
gagtcaaaggcatcggcattgaagg

SEQ ID NO: 170424 - DNA, 25 bp, Probe sequence
gtatcagaaacagttaatacagata

SEQ ID NO: 170425 - DNA, 25 bp, Probe sequence
gtaactcaacgacaaagactaatca

SEQ ID NO: 170426 - DNA, 25 bp, Probe sequence
gtcaaaggcatcggcattgaaggca

SEQ ID NO: 170427 - DNA, 25 bp, Probe sequence
ggttcagctttaggcttatatttta

SEQ ID NO: 170428 - DNA, 25 bp, Probe sequence
ggcatcggcattgaaggcacaacaa

SEQ ID NO: 170429 - DNA, 25 bp, Probe sequence
tggttcagctttaggcttatatttt

SEQ ID NO: 170430 - DNA, 25 bp, Probe sequence
tgaagaaagaagcgcaagcagaaac

SEQ ID NO: 170431 - DNA, 25 bp, Probe sequence
tcagctttaggcttatattttaaaa

SEQ ID NO: 170432 - DNA, 25 bp, Probe sequence
atgagcaagcagcattaaaagcaca

SEQ ID NO: 170433 - DNA, 25 bp, Probe sequence
agcaagctaaattaacaccaggttc

SEQ ID NO: 170434 - DNA, 25 bp, Probe sequence
acagctgttgacaagaaatcaggta

SEQ ID NO: 170435 - DNA, 25 bp, Probe sequence
aaagtgtagctgtatcaaatgaaga

SEQ ID NO: 170436 - DNA, 25 bp, Probe sequence
aaaccagttgctaaaaatgacttga

SEQ ID NO: 170437 - DNA, 25 bp, Probe sequence
aacaccaggttcaaaagagagtcaa

SEQ ID NO: 170438 - DNA, 25 bp, Probe sequence
aacacacttatcaaaatgaaccatt

SEQ ID NO: 170439 - DNA, 25 bp, Probe sequence
aacgctgcaaaacagaagcaagcta

SEQ ID NO: 170440 - DNA, 25 bp, Probe sequence
aagcagtggcattaaaggtatcgaa

SEQ ID NO: 170441 - DNA, 25 bp, Probe sequence
aagagagtcaattaactgaagcgtt

SEQ ID NO: 170442 - DNA, 25 bp, Probe sequence
aagtagttcaagtaagtcaactcaa

SEQ ID NO: 170443 - DNA, 25 bp, Probe sequence
aataagaaatcatcacaaggtgcaa

SEQ ID NO: 170444 - DNA, 25 bp, Probe sequence
caacaaatgctaaatcatccaatgc

SEQ ID NO: 170445 - DNA, 25 bp, Probe sequence
caaaaacgccaaatgctaaagttga

SEQ ID NO: 170446 - DNA, 25 bp, Probe sequence
gcaacttgaagaaacggttgccttt

SEQ ID NO: 170447 - DNA, 25 bp, Probe sequence
cgcgcttgttggttcagctttaggt

SEQ ID NO: 170448 - DNA, 25 bp, Probe sequence
gctgaaagattagcaaacgctgcaa

SEQ ID NO: 170449 - DNA, 25 bp, Probe sequence
gcatctacaaataaaacttcaggtc

SEQ ID NO: 170450 - DNA, 25 bp, Probe sequence
gaatgatgtatcagagtcagagaca

SEQ ID NO: 170451 - DNA, 25 bp, Probe sequence
gaagcgttatttgcagaaaaaccag

SEQ ID NO: 170452 - DNA, 25 bp, Probe sequence
gaaagaaattcctcaattagttact

SEQ ID NO: 170453 - DNA, 25 bp, Probe sequence
gagtcagagacagttaatatagata

SEQ ID NO: 170454 - DNA, 25 bp, Probe sequence
gaggcacaagagattcaagaagcta

SEQ ID NO: 170455 - DNA, 25 bp, Probe sequence
gatacatcacaagaggcacaagaga

SEQ ID NO: 170456 - DNA, 25 bp, Probe sequence
gttggttcagctttaggtttgtatt

SEQ ID NO: 170457 - DNA, 25 bp, Probe sequence
gttgttagttttataactggcgcgc

SEQ ID NO: 170458 - DNA, 25 bp, Probe sequence
gttgcctttacaaaagaacgtgttg

SEQ ID NO: 170459 - DNA, 25 bp, Probe sequence
gtcaaagaacaagaactgtcgcaaa

SEQ ID NO: 170460 - DNA, 25 bp, Probe sequence
ggtgttattacacgtaaagctgatg

SEQ ID NO: 170461 - DNA, 25 bp, Probe sequence
ggtatcgaaagaagagtcacaagct

SEQ ID NO: 170462 - DNA, 25 bp, Probe sequence
tgaaccattacccaaccgtaaagat

SEQ ID NO: 170463 - DNA, 25 bp, Probe sequence
tcatccaatgcatcaaaaacgccaa

SEQ ID NO: 170464 - DNA, 25 bp, Probe sequence
tagagaaacgtacattcaatgacta

SEQ ID NO: 170465 - DNA, 25 bp, Probe sequence
tataactggcgcgcttgttggttca

SEQ ID NO: 170466 - DNA, 25 bp, Probe sequence
agcaactgatgcaaatcatagctat

SEQ ID NO: 170467 - DNA, 25 bp, Probe sequence
aagataaaatctcacaagttgttca

SEQ ID NO: 170468 - DNA, 25 bp, Probe sequence
aattacacataatatttctcaaaat

SEQ ID NO: 170469 - DNA, 25 bp, Probe sequence
aattgctggaattatcgctgcgatt

SEQ ID NO: 170470 - DNA, 25 bp, Probe sequence
cagtacaaacgttaaacagctctgt

SEQ ID NO: 170471 - DNA, 25 bp, Probe sequence
ctaccgtcgtggaagtgcaaattac

SEQ ID NO: 170472 - DNA, 25 bp, Probe sequence
gctctgtagatcgtgtaacaaattc

SEQ ID NO: 170473 - DNA, 25 bp, Probe sequence
gctgcgattgcattcttaattttat

SEQ ID NO: 170474 - DNA, 25 bp, Probe sequence
gaaacaacagatttacttcataaag

SEQ ID NO: 170475 - DNA, 25 bp, Probe sequence
gacggtgtagaaggtcaagttcaag

SEQ ID NO: 170476 - DNA, 25 bp, Probe sequence
gattgcattcttaattttatgtatc

SEQ ID NO: 170477 - DNA, 25 bp, Probe sequence
gttgttcaatggtcaaatgttgcaa

SEQ ID NO: 170478 - DNA, 25 bp, Probe sequence
gtatcgtagctgtattaaattctgt

SEQ ID NO: 170479 - DNA, 25 bp, Probe sequence
gtatcggtatcgtagctgtattaaa

SEQ ID NO: 170480 - DNA, 25 bp, Probe sequence
gtagatgctgttaaaggtatcggtg

SEQ ID NO: 170481 - DNA, 25 bp, Probe sequence
gtagctgtattaaattctgttaaga

SEQ ID NO: 170482 - DNA, 25 bp, Probe sequence
gtaaagtagatcgtttaaactcagt

SEQ ID NO: 170483 - DNA, 25 bp, Probe sequence
gtggaagtgcaaattacaaagctaa

SEQ ID NO: 170484 - DNA, 25 bp, Probe sequence
ggtgactcagtacaaacgttaaaca

SEQ ID NO: 170485 - DNA, 25 bp, Probe sequence
ggtcaagttcaaggtattactcgtg

SEQ ID NO: 170486 - DNA, 25 bp, Probe sequence
ggtatcggtgactcagtacaaacgt

SEQ ID NO: 170487 - DNA, 25 bp, Probe sequence
ggtattactcgtgaaacaacagatt

SEQ ID NO: 170488 - DNA, 25 bp, Probe sequence
ggattggattttaccaattgctgga

SEQ ID NO: 170489 - DNA, 25 bp, Probe sequence
ggcaaaatagacactaccgtcgtgg

SEQ ID NO: 170490 - DNA, 25 bp, Probe sequence
tggtcaaatgttgcaatggaaattg

SEQ ID NO: 170491 - DNA, 25 bp, Probe sequence
tgatgcaaatcatagctatacttct

SEQ ID NO: 170492 - DNA, 25 bp, Probe sequence
tgctgttaaaggtatcggtgactca

SEQ ID NO: 170493 - DNA, 25 bp, Probe sequence
tagacactaccgtcgtggaagtgca

SEQ ID NO: 170494 - DNA, 25 bp, Probe sequence
tctcacaagttgttcaatggtcaaa

SEQ ID NO: 170495 - DNA, 25 bp, Probe sequence
ttaactgaggatatccaaggtaaag

SEQ ID NO: 170496 - DNA, 25 bp, Probe sequence
taaacagctctgtagatcgtgtaac

SEQ ID NO: 170497 - DNA, 25 bp, Probe sequence
tatgttgcaaaaacacttgacggtg

SEQ ID NO: 170498 - DNA, 25 bp, Probe sequence
tttatgtatcggtatcgtagctgta

SEQ ID NO: 170499 - DNA, 25 bp, Probe sequence
ttatcgctgcgattgcattcttaat

SEQ ID NO: 170500 - DNA, 25 bp, Probe sequence
attgatttcgatcatcctgattatt

SEQ ID NO: 170501 - DNA, 25 bp, Probe sequence
atgattatgcacaccatccaagaga

SEQ ID NO: 170502 - DNA, 25 bp, Probe sequence
atgatgtttttgatgcattccaaga

SEQ ID NO: 170503 - DNA, 25 bp, Probe sequence
atggtgagttttatgatcacttcct

SEQ ID NO: 170504 - DNA, 25 bp, Probe sequence
aggtattattgcttggggtgatgat

SEQ ID NO: 170505 - DNA, 25 bp, Probe sequence
agtaaagcagatcgtgtattcttat

SEQ ID NO: 170506 - DNA, 25 bp, Probe sequence
agtagctgtaactggtgcacatggt

SEQ ID NO: 170507 - DNA, 25 bp, Probe sequence
acgtatttacagaagttgctcttag

SEQ ID NO: 170508 - DNA, 25 bp, Probe sequence
acttctacaacaggtttattatcac

SEQ ID NO: 170509 - DNA, 25 bp, Probe sequence
acagcacgaaagaaatatccacata

SEQ ID NO: 170510 - DNA, 25 bp, Probe sequence
acacactatcattttgtcggaatta

SEQ ID NO: 170511 - DNA, 25 bp, Probe sequence
aaggtactgcttttgatgtgtatgt

SEQ ID NO: 170512 - DNA, 25 bp, Probe sequence
aatgcattagctgtaattgcgatta

SEQ ID NO: 170513 - DNA, 25 bp, Probe sequence
aatactggcgcattaacgatacaag

SEQ ID NO: 170514 - DNA, 25 bp, Probe sequence
gaatatagacgtcactttttaagtt

SEQ ID NO: 170515 - DNA, 25 bp, Probe sequence
gaagcattagaaacgtttggtggtg

SEQ ID NO: 170516 - DNA, 25 bp, Probe sequence
gacttcatttttaattggtgatggc

SEQ ID NO: 170517 - DNA, 25 bp, Probe sequence
gagttcattagcacaaatcatgcat

SEQ ID NO: 170518 - DNA, 25 bp, Probe sequence
gatgtgtatgtggatggtgagtttt

SEQ ID NO: 170519 - DNA, 25 bp, Probe sequence
gattatttcgcttttgaggcatgtg

SEQ ID NO: 170520 - DNA, 25 bp, Probe sequence
gttgttgcagtatttcaaccacaca

SEQ ID NO: 170521 - DNA, 25 bp, Probe sequence
gtatgggattgcctgaaagtgatta

SEQ ID NO: 170522 - DNA, 25 bp, Probe sequence
ggtggtgttaaacgtcgtttcaatg

SEQ ID NO: 170523 - DNA, 25 bp, Probe sequence
ggtgaccatacagttttaaatgcat

SEQ ID NO: 170524 - DNA, 25 bp, Probe sequence
ggtgcacatggtaaaacttctacaa

SEQ ID NO: 170525 - DNA, 25 bp, Probe sequence
ggtaatgcattcgcgagtagccatg

SEQ ID NO: 170526 - DNA, 25 bp, Probe sequence
ggatcggatattgagaactacgtat

SEQ ID NO: 170527 - DNA, 25 bp, Probe sequence
tggtgatggcacaggtatgggattg

SEQ ID NO: 170528 - DNA, 25 bp, Probe sequence
tgatcaatatacttcagtagctgta

SEQ ID NO: 170529 - DNA, 25 bp, Probe sequence
tcggatgacatttatgctcaaaata

SEQ ID NO: 170530 - DNA, 25 bp, Probe sequence
tcaaccacacactttctctagaaca

SEQ ID NO: 170531 - DNA, 25 bp, Probe sequence
taaacctgattacgcaattatgaca

SEQ ID NO: 170532 - DNA, 25 bp, Probe sequence
taaaggttctggcatgagttcatta

SEQ ID NO: 170533 - DNA, 25 bp, Probe sequence
ttgaagcagatgttccaatttatta

SEQ ID NO: 170534 - DNA, 25 bp, Probe sequence
attgcaggtgcaactggatcaggga

SEQ ID NO: 170535 - DNA, 25 bp, Probe sequence
attccgttttcctatgagcgtagct

SEQ ID NO: 170536 - DNA, 25 bp, Probe sequence
atgatatttatagtcgtccgagggg

SEQ ID NO: 170537 - DNA, 25 bp, Probe sequence
atgttgtcatgacgccatctgataa

SEQ ID NO: 170538 - DNA, 25 bp, Probe sequence
agaacaataccatcgagactatcgc

SEQ ID NO: 170539 - DNA, 25 bp, Probe sequence
acgccacacgcactaattgcaggtg

SEQ ID NO: 170540 - DNA, 25 bp, Probe sequence
aaagatcattcacattaccatacga

SEQ ID NO: 170541 - DNA, 25 bp, Probe sequence
aagccgatgattcgtaaaggcccaa

SEQ ID NO: 170542 - DNA, 25 bp, Probe sequence
aagccaggtacatatgtttctgcaa

SEQ ID NO: 170543 - DNA, 25 bp, Probe sequence
aagacttcagaggtaccgtcagcta

SEQ ID NO: 170544 - DNA, 25 bp, Probe sequence
aaggtacatttgtttctgatgacga

SEQ ID NO: 170545 - DNA, 25 bp, Probe sequence
aatgtgcctgaattaaagcctgtac

SEQ ID NO: 170546 - DNA, 25 bp, Probe sequence
aattgccaagtgtttcattactaga

SEQ ID NO: 170547 - DNA, 25 bp, Probe sequence
caaagccacgattctcgttcacaaa

SEQ ID NO: 170548 - DNA, 25 bp, Probe sequence
cgagactatcgcaaacaaagccacg

SEQ ID NO: 170549 - DNA, 25 bp, Probe sequence
gcatgtagacgctcctaaaacgcaa

SEQ ID NO: 170550 - DNA, 25 bp, Probe sequence
gaaaatggtcgtatccctgtaagta

SEQ ID NO: 170551 - DNA, 25 bp, Probe sequence
gatcatgactcattactgcctcaaa

SEQ ID NO: 170552 - DNA, 25 bp, Probe sequence
gatttaatgatgatggctccgcaag

SEQ ID NO: 170553 - DNA, 25 bp, Probe sequence
gatattgctaaaacgccacacgcac

SEQ ID NO: 170554 - DNA, 25 bp, Probe sequence
gttgcaccggtaattacagatgtca

SEQ ID NO: 170555 - DNA, 25 bp, Probe sequence
gttcacaaaaacgacatcgccgtag

SEQ ID NO: 170556 - DNA, 25 bp, Probe sequence
gtagctacgcaaagaccatctgtca

SEQ ID NO: 170557 - DNA, 25 bp, Probe sequence
gtcaaagcagctacacagagtttaa

SEQ ID NO: 170558 - DNA, 25 bp, Probe sequence
ggtaccgtcagctatttttggcaca

SEQ ID NO: 170559 - DNA, 25 bp, Probe sequence
ggtttgccacatttagttgcaccgg

SEQ ID NO: 170560 - DNA, 25 bp, Probe sequence
tgaagttccgaaccaaaatccaacg

SEQ ID NO: 170561 - DNA, 25 bp, Probe sequence
tccaggaactagtcgtgttggtatt

SEQ ID NO: 170562 - DNA, 25 bp, Probe sequence
tacgttctattattgaatctccaag

SEQ ID NO: 170563 - DNA, 25 bp, Probe sequence
tagacagtggtggagcagaacgctt

SEQ ID NO: 170564 - DNA, 25 bp, Probe sequence
tatgtttcgagtgctaatggttcaa

SEQ ID NO: 170565 - DNA, 25 bp, Probe sequence
ttagagcaactcggttatgtttcga

SEQ ID NO: 170566 - DNA, 25 bp, Probe sequence
ttagctccttataatggtttgccac

SEQ ID NO: 170567 - DNA, 25 bp, Probe sequence
ttgatcaatcaacttcgtcttcagt

SEQ ID NO: 170568 - DNA, 25 bp, Probe sequence
atcaccgaaatttgtagttggctac

SEQ ID NO: 170569 - DNA, 25 bp, Probe sequence
atgaatttattttacaatcctaaat

SEQ ID NO: 170570 - DNA, 25 bp, Probe sequence
atgaaggtaatgttgtaggttataa

SEQ ID NO: 170571 - DNA, 25 bp, Probe sequence
agtaggtgcagtgatgcctagcggt

SEQ ID NO: 170572 - DNA, 25 bp, Probe sequence
agctggacagaaagttgttgttgct

SEQ ID NO: 170573 - DNA, 25 bp, Probe sequence
acaaattgtatgtggcgcgcctaac

SEQ ID NO: 170574 - DNA, 25 bp, Probe sequence
aactaaagacaaacatcctgatgca

SEQ ID NO: 170575 - DNA, 25 bp, Probe sequence
aagcgtatttcagaagctggttttg

SEQ ID NO: 170576 - DNA, 25 bp, Probe sequence
aatgtattccaaaagcgtatttcag

SEQ ID NO: 170577 - DNA, 25 bp, Probe sequence
aattaaatgctgatctatcaccgaa

SEQ ID NO: 170578 - DNA, 25 bp, Probe sequence
aattgaaccagttgaaggtgaatta

SEQ ID NO: 170579 - DNA, 25 bp, Probe sequence
cagaaagttgttgttgctaaagtag

SEQ ID NO: 170580 - DNA, 25 bp, Probe sequence
cagaagctggttttgattataaatt

SEQ ID NO: 170581 - DNA, 25 bp, Probe sequence
cgcgcctaacgttgaagctggacag

SEQ ID NO: 170582 - DNA, 25 bp, Probe sequence
gcctcaagcggtatgatttgttcaa

SEQ ID NO: 170583 - DNA, 25 bp, Probe sequence
gcggtatggtaattaaagatgctga

SEQ ID NO: 170584 - DNA, 25 bp, Probe sequence
gaattacgtggtgttgcctcaagcg

SEQ ID NO: 170585 - DNA, 25 bp, Probe sequence
gaattgaatttacctaatgcacctg

SEQ ID NO: 170586 - DNA, 25 bp, Probe sequence
gaatttacctaatgcacctgaagaa

SEQ ID NO: 170587 - DNA, 25 bp, Probe sequence
gaaggtaatgttgtaggttataata

SEQ ID NO: 170588 - DNA, 25 bp, Probe sequence
gaaatgacacattacaaattgtatg

SEQ ID NO: 170589 - DNA, 25 bp, Probe sequence
gacaaacatcctgatgcagataaat

SEQ ID NO: 170590 - DNA, 25 bp, Probe sequence
gatgaacttgtaaatgtattccaaa

SEQ ID NO: 170591 - DNA, 25 bp, Probe sequence
gatgcctagcggtatggtaattaaa

SEQ ID NO: 170592 - DNA, 25 bp, Probe sequence
gatgctgaattacgtggtgttgcct

SEQ ID NO: 170593 - DNA, 25 bp, Probe sequence
gtatgtggcgcgcctaacgttgaag

SEQ ID NO: 170594 - DNA, 25 bp, Probe sequence
gtaggagatgtcgcatttttacaaa

SEQ ID NO: 170595 - DNA, 25 bp, Probe sequence
gtagttggctacgttgaaactaaag

SEQ ID NO: 170596 - DNA, 25 bp, Probe sequence
gtcgcatttttacaaattgaaccag

SEQ ID NO: 170597 - DNA, 25 bp, Probe sequence
gtgcagtgatgcctagcggtatggt

SEQ ID NO: 170598 - DNA, 25 bp, Probe sequence
ggtattatggtattaaatgacagct

SEQ ID NO: 170599 - DNA, 25 bp, Probe sequence
tggtgttgcctcaagcggtatgatt

SEQ ID NO: 170600 - DNA, 25 bp, Probe sequence
tgctgatctatcaccgaaatttgta

SEQ ID NO: 170601 - DNA, 25 bp, Probe sequence
taaatgacagctatgaaattggaca

SEQ ID NO: 170602 - DNA, 25 bp, Probe sequence
atcatctagtcaaattatgcctgtc

SEQ ID NO: 170603 - DNA, 25 bp, Probe sequence
atgacgggtatgatgcaagtaggat

SEQ ID NO: 170604 - DNA, 25 bp, Probe sequence
atgaaattgaggcacaatgtcaagg

SEQ ID NO: 170605 - DNA, 25 bp, Probe sequence
atggaatttttcactaaaggtctag

SEQ ID NO: 170606 - DNA, 25 bp, Probe sequence
acagggtcatcttgaaccgatattt

SEQ ID NO: 170607 - DNA, 25 bp, Probe sequence
aaagagatccaaacgtgattcagcg

SEQ ID NO: 170608 - DNA, 25 bp, Probe sequence
aaacaggatatgatgtgatggcaca

SEQ ID NO: 170609 - DNA, 25 bp, Probe sequence
aacttaacgctatagtcgcaaaata

SEQ ID NO: 170610 - DNA, 25 bp, Probe sequence
aacccttgagagtatatcatctagt

SEQ ID NO: 170611 - DNA, 25 bp, Probe sequence
aaggtgttccttttatctatgatga

SEQ ID NO: 170612 - DNA, 25 bp, Probe sequence
aatggcagataaaacccttgagagt

SEQ ID NO: 170613 - DNA, 25 bp, Probe sequence
aattgtttattacgttgatgaagct

SEQ ID NO: 170614 - DNA, 25 bp, Probe sequence
caattacatcattatcctttggata

SEQ ID NO: 170615 - DNA, 25 bp, Probe sequence
cagcgtttagaagcaaatcgtcgta

SEQ ID NO: 170616 - DNA, 25 bp, Probe sequence
cagtttattatgcagtcgatttagg

SEQ ID NO: 170617 - DNA, 25 bp, Probe sequence
ctcgtagcagtgccacaccaagatg

SEQ ID NO: 170618 - DNA, 25 bp, Probe sequence
ctaaaggtctagttccaattacatc

SEQ ID NO: 170619 - DNA, 25 bp, Probe sequence
gcagtgccacaccaagatgtgttaa

SEQ ID NO: 170620 - DNA, 25 bp, Probe sequence
gaaacagcagtttattatgcagtcg

SEQ ID NO: 170621 - DNA, 25 bp, Probe sequence
gaaactttgcgtatttatcgaacag

SEQ ID NO: 170622 - DNA, 25 bp, Probe sequence
gaaatgctcgtagcagtgccacacc

SEQ ID NO: 170623 - DNA, 25 bp, Probe sequence
gaggatttgaagttaactgaacaac

SEQ ID NO: 170624 - DNA, 25 bp, Probe sequence
gatgtgttaattattgcagatatac

SEQ ID NO: 170625 - DNA, 25 bp, Probe sequence
gatgaagctattgcacaaatggcag

SEQ ID NO: 170626 - DNA, 25 bp, Probe sequence
gatccaaacgtgattcagcgtttag

SEQ ID NO: 170627 - DNA, 25 bp, Probe sequence
gtttaagccatttagacgttgattt

SEQ ID NO: 170628 - DNA, 25 bp, Probe sequence
gtcattagagcgactagctttgata

SEQ ID NO: 170629 - DNA, 25 bp, Probe sequence
gtgatggcacatttaacaatggaat

SEQ ID NO: 170630 - DNA, 25 bp, Probe sequence
ggtcatcttgaaccgatatttattt

SEQ ID NO: 170631 - DNA, 25 bp, Probe sequence
ggtatcacgattaaacttaacgcta

SEQ ID NO: 170632 - DNA, 25 bp, Probe sequence
tgaatacctttcaaatgagagataa

SEQ ID NO: 170633 - DNA, 25 bp, Probe sequence
tcctttggatataaacagggtcatc

SEQ ID NO: 170634 - DNA, 25 bp, Probe sequence
tatgcctgtcattagagcgactagc

SEQ ID NO: 170635 - DNA, 25 bp, Probe sequence
ttattaactcaaatgacgggtatga

SEQ ID NO: 170636 - DNA, 25 bp, Probe sequence
attcactgcaggctggtgtccagat

SEQ ID NO: 170637 - DNA, 25 bp, Probe sequence
atatcctatgtttgacttcgtatca

SEQ ID NO: 170638 - DNA, 25 bp, Probe sequence
atcagaacaacaatttgaatcttta

SEQ ID NO: 170639 - DNA, 25 bp, Probe sequence
atcctatgtttgacttcgtatcagt

SEQ ID NO: 170640 - DNA, 25 bp, Probe sequence
aggtgctacagtatttgaattcact

SEQ ID NO: 170641 - DNA, 25 bp, Probe sequence
agatatcctatgtttgacttcgtat

SEQ ID NO: 170642 - DNA, 25 bp, Probe sequence
agatagatgcatttttagctcaata

SEQ ID NO: 170643 - DNA, 25 bp, Probe sequence
agcgagatatcctatgtttgacttc

SEQ ID NO: 170644 - DNA, 25 bp, Probe sequence
actgcttggaagttatattggaaaa

SEQ ID NO: 170645 - DNA, 25 bp, Probe sequence
aaaacaaggtgctacagtatttgaa

SEQ ID NO: 170646 - DNA, 25 bp, Probe sequence
aattcactgcaggctggtgtccaga

SEQ ID NO: 170647 - DNA, 25 bp, Probe sequence
aatttatggatatttgtattgaaaa

SEQ ID NO: 170648 - DNA, 25 bp, Probe sequence
cactgcaggctggtgtccagattgt

SEQ ID NO: 170649 - DNA, 25 bp, Probe sequence
ctgcaggctggtgtccagattgtag

SEQ ID NO: 170650 - DNA, 25 bp, Probe sequence
cctatgtttgacttcgtatcagtag

SEQ ID NO: 170651 - DNA, 25 bp, Probe sequence
gctggtgtccagattgtagagtgat

SEQ ID NO: 170652 - DNA, 25 bp, Probe sequence
gcaggctggtgtccagattgtagag

SEQ ID NO: 170653 - DNA, 25 bp, Probe sequence
gaattcactgcaggctggtgtccag

SEQ ID NO: 170654 - DNA, 25 bp, Probe sequence
gaatctttaaaacaaggtgctacag

SEQ ID NO: 170655 - DNA, 25 bp, Probe sequence
gaaccagatttaccggaattagaag

SEQ ID NO: 170656 - DNA, 25 bp, Probe sequence
gaagcgagatatcctatgtttgact

SEQ ID NO: 170657 - DNA, 25 bp, Probe sequence
gaacagatagatgcatttttagctc

SEQ ID NO: 170658 - DNA, 25 bp, Probe sequence
gaaacaacttgaatcagaacaacaa

SEQ ID NO: 170659 - DNA, 25 bp, Probe sequence
gagatatcctatgtttgacttcgta

SEQ ID NO: 170660 - DNA, 25 bp, Probe sequence
gagtgatagaaccagatttaccgga

SEQ ID NO: 170661 - DNA, 25 bp, Probe sequence
gatagaaccagatttaccggaatta

SEQ ID NO: 170662 - DNA, 25 bp, Probe sequence
gatttaccggaattagaagcgagat

SEQ ID NO: 170663 - DNA, 25 bp, Probe sequence
gtttgacttcgtatcagtagaccgt

SEQ ID NO: 170664 - DNA, 25 bp, Probe sequence
gtatttgaattcactgcaggctggt

SEQ ID NO: 170665 - DNA, 25 bp, Probe sequence
ggtgtccagattgtagagtgataga

SEQ ID NO: 170666 - DNA, 25 bp, Probe sequence
tagagtgatagaaccagatttaccg

SEQ ID NO: 170667 - DNA, 25 bp, Probe sequence
ttcactgcaggctggtgtccagatt

SEQ ID NO: 170668 - DNA, 25 bp, Probe sequence
ttgaattcactgcaggctggtgtcc

SEQ ID NO: 170669 - DNA, 25 bp, Probe sequence
ttgacttcgtatcagtagaccgtga

SEQ ID NO: 170670 - DNA, 25 bp, Probe sequence
atatacctaaacattttcgtactgg

SEQ ID NO: 170671 - DNA, 25 bp, Probe sequence
atatgactcagcaaatggcgccgta

SEQ ID NO: 170672 - DNA, 25 bp, Probe sequence
atagtacagactcagtatttgatat

SEQ ID NO: 170673 - DNA, 25 bp, Probe sequence
ataatcgttatggttgtgtcttggc

SEQ ID NO: 170674 - DNA, 25 bp, Probe sequence
atcggtgttgtttctaatataccta

SEQ ID NO: 170675 - DNA, 25 bp, Probe sequence
agtgctaaagcatgggataatcgtt

SEQ ID NO: 170676 - DNA, 25 bp, Probe sequence
agatgtagacttgtatgttggcgca

SEQ ID NO: 170677 - DNA, 25 bp, Probe sequence
acgtgtaatgattgcagcacatatg

SEQ ID NO: 170678 - DNA, 25 bp, Probe sequence
actttcagaagccatttgtaattta

SEQ ID NO: 170679 - DNA, 25 bp, Probe sequence
acacgccattcacacagttatctga

SEQ ID NO: 170680 - DNA, 25 bp, Probe sequence
aacattttcgtactggtagtgaagg

SEQ ID NO: 170681 - DNA, 25 bp, Probe sequence
aactgagcttcatggggcaccaggt

SEQ ID NO: 170682 - DNA, 25 bp, Probe sequence
aattcacaaatttaggtggtgttgc

SEQ ID NO: 170683 - DNA, 25 bp, Probe sequence
cgaggtgcgaaagcatctgcagaga

SEQ ID NO: 170684 - DNA, 25 bp, Probe sequence
gcgtgagcgcggaatagatatagga

SEQ ID NO: 170685 - DNA, 25 bp, Probe sequence
gctagatctttactttcagaagcca

SEQ ID NO: 170686 - DNA, 25 bp, Probe sequence
gcagttattggtgtatgtgcacgat

SEQ ID NO: 170687 - DNA, 25 bp, Probe sequence
gcagagatgatagacccagacgttg

SEQ ID NO: 170688 - DNA, 25 bp, Probe sequence
gaattcaaactttaactgagcttca

SEQ ID NO: 170689 - DNA, 25 bp, Probe sequence
gaagaggttggattacgaggtgcga

SEQ ID NO: 170690 - DNA, 25 bp, Probe sequence
gaagcacatgacattgaacatcaat

SEQ ID NO: 170691 - DNA, 25 bp, Probe sequence
gacggtacaatgattttaaagcctg

SEQ ID NO: 170692 - DNA, 25 bp, Probe sequence
gagatacaattgtacctcacacgcc

SEQ ID NO: 170693 - DNA, 25 bp, Probe sequence
gatatttggcaaggacaacgcttag

SEQ ID NO: 170694 - DNA, 25 bp, Probe sequence
gattgttcacctgccaatgacgtta

SEQ ID NO: 170695 - DNA, 25 bp, Probe sequence
gttaattcgcataaaagacggtaca

SEQ ID NO: 170696 - DNA, 25 bp, Probe sequence
gtatgttggcgcaaatgttcaagaa

SEQ ID NO: 170697 - DNA, 25 bp, Probe sequence
gtaacattacaacgaattcaaactt

SEQ ID NO: 170698 - DNA, 25 bp, Probe sequence
gtgcacgatatattcatagtacaga

SEQ ID NO: 170699 - DNA, 25 bp, Probe sequence
ggggcaccaggttttgaagaagaag

SEQ ID NO: 170700 - DNA, 25 bp, Probe sequence
ggttgtgtcttggcaattgaaatac

SEQ ID NO: 170701 - DNA, 25 bp, Probe sequence
tgatagacccagacgttgcatttgt

SEQ ID NO: 170702 - DNA, 25 bp, Probe sequence
tctgaacatcgatatagtgctaaag

SEQ ID NO: 170703 - DNA, 25 bp, Probe sequence
ttaacattagatataggtgctcaaa

SEQ ID NO: 170704 - DNA, 25 bp, Probe sequence
atgtttggtgttgttccgaagccgt

SEQ ID NO: 170705 - DNA, 25 bp, Probe sequence
attggttcttgttttatcatgatga

SEQ ID NO: 170706 - DNA, 25 bp, Probe sequence
atttaccgacacatccaattttgat

SEQ ID NO: 170707 - DNA, 25 bp, Probe sequence
gttccgaagccgttgtggtcaaagc

SEQ ID NO: 170708 - DNA, 25 bp, Probe sequence
atcggggatatatctattcattatc

SEQ ID NO: 170709 - DNA, 25 bp, Probe sequence
atgctgccggtttgactgatcaagc

SEQ ID NO: 170710 - DNA, 25 bp, Probe sequence
agatgagtggcatgagtttattgca

SEQ ID NO: 170711 - DNA, 25 bp, Probe sequence
agatgcatatattttacgtgaaaca

SEQ ID NO: 170712 - DNA, 25 bp, Probe sequence
actactgcacataaaaatcctctat

SEQ ID NO: 170713 - DNA, 25 bp, Probe sequence
acatagtggaggtcatagctttggc

SEQ ID NO: 170714 - DNA, 25 bp, Probe sequence
aaggcgattatagtaacaagttgat

SEQ ID NO: 170715 - DNA, 25 bp, Probe sequence
aatgacacatatgcattttgatcat

SEQ ID NO: 170716 - DNA, 25 bp, Probe sequence
caatattggttcttgttttatcatg

SEQ ID NO: 170717 - DNA, 25 bp, Probe sequence
cagttcatatgggtgatatattccc

SEQ ID NO: 170718 - DNA, 25 bp, Probe sequence
catatgatgattatcctatgcaatc

SEQ ID NO: 170719 - DNA, 25 bp, Probe sequence
cattttgatcatgctgccggtttga

SEQ ID NO: 170720 - DNA, 25 bp, Probe sequence
gaagccgttgtggtcaaagcaatac

SEQ ID NO: 170721 - DNA, 25 bp, Probe sequence
gaaaactactttgctgtaaaataca

SEQ ID NO: 170722 - DNA, 25 bp, Probe sequence
gaaaatgcgattcatgttgtgcaac

SEQ ID NO: 170723 - DNA, 25 bp, Probe sequence
gacacatccaattttgattcaaacg

SEQ ID NO: 170724 - DNA, 25 bp, Probe sequence
tgttgttccgaagccgttgtggtca

SEQ ID NO: 170725 - DNA, 25 bp, Probe sequence
gttgtgcaacaagatgagtggcatg

SEQ ID NO: 170726 - DNA, 25 bp, Probe sequence
gtaaatcaacttactgggataagaa

SEQ ID NO: 170727 - DNA, 25 bp, Probe sequence
gtggaggtcatagctttggccacac

SEQ ID NO: 170728 - DNA, 25 bp, Probe sequence
gggtatcaagatgcaacatagtgga

SEQ ID NO: 170729 - DNA, 25 bp, Probe sequence
ggatggcggtgcaatgtttggtgtt

SEQ ID NO: 170730 - DNA, 25 bp, Probe sequence
ggagataaagcagttcatatgggtg

SEQ ID NO: 170731 - DNA, 25 bp, Probe sequence
ggacatgcaatttttgaaaatgcga

SEQ ID NO: 170732 - DNA, 25 bp, Probe sequence
ggcaatacaaaaatggatggcggtg

SEQ ID NO: 170733 - DNA, 25 bp, Probe sequence
tgattcaaacggctcaatataattt

SEQ ID NO: 170734 - DNA, 25 bp, Probe sequence
tgcacataaaaatcctctatgggta

SEQ ID NO: 170735 - DNA, 25 bp, Probe sequence
tcaaatcaatttaccgacacatcca

SEQ ID NO: 170736 - DNA, 25 bp, Probe sequence
taacgccaaaggatattgattatgt

SEQ ID NO: 170737 - DNA, 25 bp, Probe sequence
ttgatcatgctgccggtttgactga

SEQ ID NO: 170738 - DNA, 25 bp, Probe sequence
acgtatcatacgtttttagcgttgt

SEQ ID NO: 170739 - DNA, 25 bp, Probe sequence
acattagctgctcaaaatcctcata

SEQ ID NO: 170740 - DNA, 25 bp, Probe sequence
aaatcctcatattaactatatttca

SEQ ID NO: 170741 - DNA, 25 bp, Probe sequence
aaaagatcatcctgaattggttgac

SEQ ID NO: 170742 - DNA, 25 bp, Probe sequence
aactgataacagaggactatttgcc

SEQ ID NO: 170743 - DNA, 25 bp, Probe sequence
aacgcaaccgatacacattgaaatt

SEQ ID NO: 170744 - DNA, 25 bp, Probe sequence
cagatccatggccaaaaaatcgtca

SEQ ID NO: 170745 - DNA, 25 bp, Probe sequence
cagaggactatttgcctacagttta

SEQ ID NO: 170746 - DNA, 25 bp, Probe sequence
gcctacagtttagaaagtatgtctc

SEQ ID NO: 170747 - DNA, 25 bp, Probe sequence
gcgaagtttcgcgtatttatttgaa

SEQ ID NO: 170748 - DNA, 25 bp, Probe sequence
gctgctcaaaatcctcatattaact

SEQ ID NO: 170749 - DNA, 25 bp, Probe sequence
gcaaaacgacgtttaacgtatcata

SEQ ID NO: 170750 - DNA, 25 bp, Probe sequence
gagagttcgatacaaaccatgggct

SEQ ID NO: 170751 - DNA, 25 bp, Probe sequence
gaagcgaaattccattcacaaaaat

SEQ ID NO: 170752 - DNA, 25 bp, Probe sequence
gaaaagtatcgtttataaagtattg

SEQ ID NO: 170753 - DNA, 25 bp, Probe sequence
gaaagtatgtctcaatttggaatgt

SEQ ID NO: 170754 - DNA, 25 bp, Probe sequence
gtcacgtatttatcgtatggaagcg

SEQ ID NO: 170755 - DNA, 25 bp, Probe sequence
gaaattggttcgggtatggggcagt

SEQ ID NO: 170756 - DNA, 25 bp, Probe sequence
gatcatcctgaattggttgacatgg

SEQ ID NO: 170757 - DNA, 25 bp, Probe sequence
gatacacattgaaattggttcgggt

SEQ ID NO: 170758 - DNA, 25 bp, Probe sequence
gtttattacaacattagctgctcaa

SEQ ID NO: 170759 - DNA, 25 bp, Probe sequence
gtttgataaaacgcaaccgatacac

SEQ ID NO: 170760 - DNA, 25 bp, Probe sequence
gtctcaatttggaatgtattttaca

SEQ ID NO: 170761 - DNA, 25 bp, Probe sequence
ggggcagtttattacaacattagct

SEQ ID NO: 170762 - DNA, 25 bp, Probe sequence
tggttcgggtatggggcagtttatt

SEQ ID NO: 170763 - DNA, 25 bp, Probe sequence
ggactatttgcctacagtttagaaa

SEQ ID NO: 170764 - DNA, 25 bp, Probe sequence
tgaacttttcagatccatggccaaa

SEQ ID NO: 170765 - DNA, 25 bp, Probe sequence
tcgcgtatttatttgaacttttcag

SEQ ID NO: 170766 - DNA, 25 bp, Probe sequence
tcaagaagacgatggcagtaatatt

SEQ ID NO: 170767 - DNA, 25 bp, Probe sequence
taaagggtcacgtatttatcgtatg

SEQ ID NO: 170768 - DNA, 25 bp, Probe sequence
tacgtttttagcgttgtatcaacaa

SEQ ID NO: 170769 - DNA, 25 bp, Probe sequence
tagcgttgtatcaacaaatcttaaa

SEQ ID NO: 170770 - DNA, 25 bp, Probe sequence
ttaactatatttcaatggaacgtga

SEQ ID NO: 170771 - DNA, 25 bp, Probe sequence
ttagctgctcaaaatcctcatatta

SEQ ID NO: 170772 - DNA, 25 bp, Probe sequence
attgctacttcgtttcatgaatcta

SEQ ID NO: 170773 - DNA, 25 bp, Probe sequence
attcatttatcacatcattaggtaa

SEQ ID NO: 170774 - DNA, 25 bp, Probe sequence
atttattgcaactgtttctcatgaa

SEQ ID NO: 170775 - DNA, 25 bp, Probe sequence
atccttcatttattgcaactgtttc

SEQ ID NO: 170776 - DNA, 25 bp, Probe sequence
agtggtccatcaacaggaggtaatg

SEQ ID NO: 170777 - DNA, 25 bp, Probe sequence
acattgtcgttaggaataatcactc

SEQ ID NO: 170778 - DNA, 25 bp, Probe sequence
aaatgtctggacatgatccaaattt

SEQ ID NO: 170779 - DNA, 25 bp, Probe sequence
aaagcaatgaggtggcctttccaat

SEQ ID NO: 170780 - DNA, 25 bp, Probe sequence
aaagctaattcatttatcacatcat

SEQ ID NO: 170781 - DNA, 25 bp, Probe sequence
aaggctcaggagatacaagtgaatt

SEQ ID NO: 170782 - DNA, 25 bp, Probe sequence
aatgaccccaatgtagatttaataa

SEQ ID NO: 170783 - DNA, 25 bp, Probe sequence
aatatggatgttactcatgctacta

SEQ ID NO: 170784 - DNA, 25 bp, Probe sequence
cagtggtttcaatccttcatttatt

SEQ ID NO: 170785 - DNA, 25 bp, Probe sequence
cttcgtttcatgaatctaaagctga

SEQ ID NO: 170786 - DNA, 25 bp, Probe sequence
ctcctattgctacttcgtttcatga

SEQ ID NO: 170787 - DNA, 25 bp, Probe sequence
ctgtttctcatgaaaaaggctcagg

SEQ ID NO: 170788 - DNA, 25 bp, Probe sequence
gcgataagtggggggtcacacaaaa

SEQ ID NO: 170789 - DNA, 25 bp, Probe sequence
gaattacccccattagtacacagtg

SEQ ID NO: 170790 - DNA, 25 bp, Probe sequence
gaataatcactcctattgctacttc

SEQ ID NO: 170791 - DNA, 25 bp, Probe sequence
gaagaacaacacactatggcaatag

SEQ ID NO: 170792 - DNA, 25 bp, Probe sequence
gactattagctgcaacattgtcgtt

SEQ ID NO: 170793 - DNA, 25 bp, Probe sequence
gaggtggcctttccaatacaatatt

SEQ ID NO: 170794 - DNA, 25 bp, Probe sequence
gatgttactcatgctactagaagaa

SEQ ID NO: 170795 - DNA, 25 bp, Probe sequence
gtacacagtggtttcaatccttcat

SEQ ID NO: 170796 - DNA, 25 bp, Probe sequence
gtaatggttcatttaattattcaaa

SEQ ID NO: 170797 - DNA, 25 bp, Probe sequence
gtctcaaaacaaatgaccccaatgt

SEQ ID NO: 170798 - DNA, 25 bp, Probe sequence
gtgaactggaaaactcatgaaatta

SEQ ID NO: 170799 - DNA, 25 bp, Probe sequence
ggggggtcacacaaaatattcagtt

SEQ ID NO: 170800 - DNA, 25 bp, Probe sequence
ggtaattttaatagtggtccatcaa

SEQ ID NO: 170801 - DNA, 25 bp, Probe sequence
ggttttatcaattcaaagactactt

SEQ ID NO: 170802 - DNA, 25 bp, Probe sequence
tgtgccagacaatgaattaccccca

SEQ ID NO: 170803 - DNA, 25 bp, Probe sequence
tccgagagactattttgtgccagac

SEQ ID NO: 170804 - DNA, 25 bp, Probe sequence
taaaccatatagtcaaaatccgaga

SEQ ID NO: 170805 - DNA, 25 bp, Probe sequence
tattcagtttgattttgttaaagat

SEQ ID NO: 170806 - DNA, 25 bp, Probe sequence
attggtgtcctatctcgaaaacaaa

SEQ ID NO: 170807 - DNA, 25 bp, Probe sequence
atatctctaacggcttgtcaggtgg

SEQ ID NO: 170808 - DNA, 25 bp, Probe sequence
acttcttggaatatcacaaaatgcc

SEQ ID NO: 170809 - DNA, 25 bp, Probe sequence
acatatcacacctgtaagtgagaaa

SEQ ID NO: 170810 - DNA, 25 bp, Probe sequence
aaattggttgggatgttgaagcaca

SEQ ID NO: 170811 - DNA, 25 bp, Probe sequence
aaaatgccagtgttatccagaggta

SEQ ID NO: 170812 - DNA, 25 bp, Probe sequence
aacaactgcaacatcagattccgat

SEQ ID NO: 170813 - DNA, 25 bp, Probe sequence
aacatttattctggctatacaaagc

SEQ ID NO: 170814 - DNA, 25 bp, Probe sequence
aacatttcaattaattcagattcta

SEQ ID NO: 170815 - DNA, 25 bp, Probe sequence
aagccaaatccaaaagacactatta

SEQ ID NO: 170816 - DNA, 25 bp, Probe sequence
aatgctggacaaaacttcttggaat

SEQ ID NO: 170817 - DNA, 25 bp, Probe sequence
caaacttttggatcaacttcaactg

SEQ ID NO: 170818 - DNA, 25 bp, Probe sequence
caaaaattactgttacttatcaaag

SEQ ID NO: 170819 - DNA, 25 bp, Probe sequence
cagattctaatgactcagtaaacgt

SEQ ID NO: 170820 - DNA, 25 bp, Probe sequence
cctatctcgaaaacaaaacgctgca

SEQ ID NO: 170821 - DNA, 25 bp, Probe sequence
gctgctggaaacatttattctggct

SEQ ID NO: 170822 - DNA, 25 bp, Probe sequence
gcttgtcaggtggaggtaatggttc

SEQ ID NO: 170823 - DNA, 25 bp, Probe sequence
gcaacatcagattccgataagttaa

SEQ ID NO: 170824 - DNA, 25 bp, Probe sequence
gaatttattggtgtcctatctcgaa

SEQ ID NO: 170825 - DNA, 25 bp, Probe sequence
gaaatgtttttaggctcaagacaaa

SEQ ID NO: 170826 - DNA, 25 bp, Probe sequence
gacaaagcaacttaaatgctggaca

SEQ ID NO: 170827 - DNA, 25 bp, Probe sequence
gacactattagttctcaattttatt

SEQ ID NO: 170828 - DNA, 25 bp, Probe sequence
gatacattaatactcaaagctgctg

SEQ ID NO: 170829 - DNA, 25 bp, Probe sequence
gatattaatatctctaacggcttgt

SEQ ID NO: 170830 - DNA, 25 bp, Probe sequence
gttacatcaattgcattgcttttgc

SEQ ID NO: 170831 - DNA, 25 bp, Probe sequence
gtaaacgttgtagattatgcaccta

SEQ ID NO: 170832 - DNA, 25 bp, Probe sequence
gtaatggttcaaaatctttttcaga

SEQ ID NO: 170833 - DNA, 25 bp, Probe sequence
ggatcaacttcaactggataggtaa

SEQ ID NO: 170834 - DNA, 25 bp, Probe sequence
ggcagagatagttatcattcaactt

SEQ ID NO: 170835 - DNA, 25 bp, Probe sequence
tggggttctaagtacaacatttcaa

SEQ ID NO: 170836 - DNA, 25 bp, Probe sequence
tgcattgcttttgctatccaataca

SEQ ID NO: 170837 - DNA, 25 bp, Probe sequence
tctaacggcttgtcaggtggaggta

SEQ ID NO: 170838 - DNA, 25 bp, Probe sequence
tagttctcaattttattggggttct

SEQ ID NO: 170839 - DNA, 25 bp, Probe sequence
ttatccagaggtaacttcaatccag

SEQ ID NO: 170840 - DNA, 25 bp, Probe sequence
atcatcaattaccgctaaaggtcaa

SEQ ID NO: 170841 - DNA, 25 bp, Probe sequence
atccgttcgtgaagcattagatcat

SEQ ID NO: 170842 - DNA, 25 bp, Probe sequence
atcgcgtcagaaatttagaatctca

SEQ ID NO: 170843 - DNA, 25 bp, Probe sequence
atgcattcatctggcaaagacttaa

SEQ ID NO: 170844 - DNA, 25 bp, Probe sequence
agatgttaatcaaactcctgttggt

SEQ ID NO: 170845 - DNA, 25 bp, Probe sequence
agctaatccttttatggcaatttat

SEQ ID NO: 170846 - DNA, 25 bp, Probe sequence
accctgaacttgtatctgaattagc

SEQ ID NO: 170847 - DNA, 25 bp, Probe sequence
actgtagatgttaaggaacgtcaca

SEQ ID NO: 170848 - DNA, 25 bp, Probe sequence
ctcctgttggtacaggcccttacca

SEQ ID NO: 170849 - DNA, 25 bp, Probe sequence
acacctgaaggtatctatttaatcg

SEQ ID NO: 170850 - DNA, 25 bp, Probe sequence
aaaatgactaaatccgttcgtgaag

SEQ ID NO: 170851 - DNA, 25 bp, Probe sequence
aaacaaagtctattgcaccttatga

SEQ ID NO: 170852 - DNA, 25 bp, Probe sequence
aaaagaccgttctgcatgggatgca

SEQ ID NO: 170853 - DNA, 25 bp, Probe sequence
aacagttatattgcttacaacgatc

SEQ ID NO: 170854 - DNA, 25 bp, Probe sequence
aacttgatcatattactgtgacgta

SEQ ID NO: 170855 - DNA, 25 bp, Probe sequence
gttaattacgtatgacggtcgtcca

SEQ ID NO: 170856 - DNA, 25 bp, Probe sequence
ctgtgacgtaccaagaagacggcaa

SEQ ID NO: 170857 - DNA, 25 bp, Probe sequence
ctgatgtcccagttaataaagttca

SEQ ID NO: 170858 - DNA, 25 bp, Probe sequence
ccgcttaccctgaacttgtatctga

SEQ ID NO: 170859 - DNA, 25 bp, Probe sequence
gcgcaagtattacaatcagatgcta

SEQ ID NO: 170860 - DNA, 25 bp, Probe sequence
gaattagctaatccttttatggcaa

SEQ ID NO: 170861 - DNA, 25 bp, Probe sequence
gaatctggatttagaacttctttac

SEQ ID NO: 170862 - DNA, 25 bp, Probe sequence
gaagacggcaataatcgcgtcagaa

SEQ ID NO: 170863 - DNA, 25 bp, Probe sequence
gaacttctttacttatgtataatca

SEQ ID NO: 170864 - DNA, 25 bp, Probe sequence
gacggtcgtccagagctatcgaaaa

SEQ ID NO: 170865 - DNA, 25 bp, Probe sequence
gaaatctagccttgaaaatagcatg

SEQ ID NO: 170866 - DNA, 25 bp, Probe sequence
gagctatcgaaaattgcgcaagtat

SEQ ID NO: 170867 - DNA, 25 bp, Probe sequence
gtcgaattttaaggactattggcaa

SEQ ID NO: 170868 - DNA, 25 bp, Probe sequence
gtgaaatcgtatcatcaaccaaatg

SEQ ID NO: 170869 - DNA, 25 bp, Probe sequence
ggtgctgcagaatcattatttaaaa

SEQ ID NO: 170870 - DNA, 25 bp, Probe sequence
ggtattgcagatcatatttatcaag

SEQ ID NO: 170871 - DNA, 25 bp, Probe sequence
ggaacgtcacaatatttctaatgat

SEQ ID NO: 170872 - DNA, 25 bp, Probe sequence
tgcaccttatgaaacagatgtacca

SEQ ID NO: 170873 - DNA, 25 bp, Probe sequence
ttaccaatatcatcaattaccgcta

SEQ ID NO: 170874 - DNA, 25 bp, Probe sequence
attactcctgagattatgcttaata

SEQ ID NO: 170875 - DNA, 25 bp, Probe sequence
atggctgaacaagatggacaaaagt

SEQ ID NO: 170876 - DNA, 25 bp, Probe sequence
aggatatgaacacttggcttaaatt

SEQ ID NO: 170877 - DNA, 25 bp, Probe sequence
agatacacaattctagacctttatt

SEQ ID NO: 170878 - DNA, 25 bp, Probe sequence
acaacaatggtctgaatggcttgaa

SEQ ID NO: 170879 - DNA, 25 bp, Probe sequence
aacaagagttgcacatttattaaag

SEQ ID NO: 170880 - DNA, 25 bp, Probe sequence
aagagcatataccgagtttagattc

SEQ ID NO: 170881 - DNA, 25 bp, Probe sequence
aatgcctctttatcaagagaagttt

SEQ ID NO: 170882 - DNA, 25 bp, Probe sequence
caaatccatttattgcggcattatc

SEQ ID NO: 170883 - DNA, 25 bp, Probe sequence
cgttttttcactgttgtacatggtg

SEQ ID NO: 170884 - DNA, 25 bp, Probe sequence
ccggcaattgatatcggaatgctgc

SEQ ID NO: 170885 - DNA, 25 bp, Probe sequence
ccatttattgcggcattatcagcag

SEQ ID NO: 170886 - DNA, 25 bp, Probe sequence
gcggcattatcagcagaaggtattg

SEQ ID NO: 170887 - DNA, 25 bp, Probe sequence
gctgctttacaactatgttccacaa

SEQ ID NO: 170888 - DNA, 25 bp, Probe sequence
gctttacaactatgttccacaacaa

SEQ ID NO: 170889 - DNA, 25 bp, Probe sequence
gcagacccggcaattgatatcggaa

SEQ ID NO: 170890 - DNA, 25 bp, Probe sequence
gaatgctgctttacaactatgttcc

SEQ ID NO: 170891 - DNA, 25 bp, Probe sequence
gaacctattactcctgagattatgc

SEQ ID NO: 170892 - DNA, 25 bp, Probe sequence
gaacacttggcttaaattcctaaat

SEQ ID NO: 170893 - DNA, 25 bp, Probe sequence
gaaatggtatacggtaattcaatct

SEQ ID NO: 170894 - DNA, 25 bp, Probe sequence
gaaattcaaatccatttattgcggc

SEQ ID NO: 170895 - DNA, 25 bp, Probe sequence
gagaagttttaacacatcatattgt

SEQ ID NO: 170896 - DNA, 25 bp, Probe sequence
gatatcggaatgctgctttacaact

SEQ ID NO: 170897 - DNA, 25 bp, Probe sequence
gttccacaacaacaatggtctgaat

SEQ ID NO: 170898 - DNA, 25 bp, Probe sequence
gtatgttaaagcgtatggaaatgga

SEQ ID NO: 170899 - DNA, 25 bp, Probe sequence
gtgagaaaatcattaacctatttag

SEQ ID NO: 170900 - DNA, 25 bp, Probe sequence
ggtctgaatggcttgaaacatatgg

SEQ ID NO: 170901 - DNA, 25 bp, Probe sequence
ggaaatggaacctattactcctgag

SEQ ID NO: 170902 - DNA, 25 bp, Probe sequence
taacctatttagaagagcatatacc

SEQ ID NO: 170903 - DNA, 25 bp, Probe sequence
taaaattaatgcctctttatcaaga

SEQ ID NO: 170904 - DNA, 25 bp, Probe sequence
tacggtaattcaatctataggtctt

SEQ ID NO: 170905 - DNA, 25 bp, Probe sequence
tagaaacaggcgaggttgttacagc

SEQ ID NO: 170906 - DNA, 25 bp, Probe sequence
ttcactgttgtacatggtgatgtga

SEQ ID NO: 170907 - DNA, 25 bp, Probe sequence
ttgtgcccaaattagtatggacgaa

SEQ ID NO: 170908 - DNA, 25 bp, Probe sequence
atccgatggttacgttgcgacatta

SEQ ID NO: 170909 - DNA, 25 bp, Probe sequence
atcgtccttatgatcatttagaaaa

SEQ ID NO: 170910 - DNA, 25 bp, Probe sequence
acgtatttggcgatggtatttatga

SEQ ID NO: 170911 - DNA, 25 bp, Probe sequence
acatccgattaacaactatattctt

SEQ ID NO: 170912 - DNA, 25 bp, Probe sequence
acacctgaagtagaaccagcaattg

SEQ ID NO: 170913 - DNA, 25 bp, Probe sequence
acaactatattcttaatggtattac

SEQ ID NO: 170914 - DNA, 25 bp, Probe sequence
aaacgcagatgaagttattgtttca

SEQ ID NO: 170915 - DNA, 25 bp, Probe sequence
aagagttatgatcgtccttatgatc

SEQ ID NO: 170916 - DNA, 25 bp, Probe sequence
aaggtttcatacaacgacagaggat

SEQ ID NO: 170917 - DNA, 25 bp, Probe sequence
aatggtgagtttgtaagtccaagtg

SEQ ID NO: 170918 - DNA, 25 bp, Probe sequence
aatggtgtgaatggtgttaccgttg

SEQ ID NO: 170919 - DNA, 25 bp, Probe sequence
gcttatgcaattaaagacggtgtga

SEQ ID NO: 170920 - DNA, 25 bp, Probe sequence
gaattaattgaactatctcgtaaat

SEQ ID NO: 170921 - DNA, 25 bp, Probe sequence
gaaggatcttcaagtaatgcttatg

SEQ ID NO: 170922 - DNA, 25 bp, Probe sequence
gaagcaaaggtttcatacaacgaca

SEQ ID NO: 170923 - DNA, 25 bp, Probe sequence
gaaacgtttactgtagatttcttga

SEQ ID NO: 170924 - DNA, 25 bp, Probe sequence
gaaagatttttacgtagtgccaatg

SEQ ID NO: 170925 - DNA, 25 bp, Probe sequence
gatatccgatggttacgttgcgaca

SEQ ID NO: 170926 - DNA, 25 bp, Probe sequence
gacagaggatacgtatttggcgatg

SEQ ID NO: 170927 - DNA, 25 bp, Probe sequence
gacggtgtgatttatacacatccga

SEQ ID NO: 170928 - DNA, 25 bp, Probe sequence
gatcttcaagtaatgcttatgcaat

SEQ ID NO: 170929 - DNA, 25 bp, Probe sequence
gttacgttgcgacattaaaagcttg

SEQ ID NO: 170930 - DNA, 25 bp, Probe sequence
gttattgtttcaagtacttcagctg

SEQ ID NO: 170931 - DNA, 25 bp, Probe sequence
gtatatagagtcacacagtatttaa

SEQ ID NO: 170932 - DNA, 25 bp, Probe sequence
gtacttcagctgaggttacacctgt

SEQ ID NO: 170933 - DNA, 25 bp, Probe sequence
gtaagtccaagtgaagcaaaggttt

SEQ ID NO: 170934 - DNA, 25 bp, Probe sequence
gtgatttatacacatccgattaaca

SEQ ID NO: 170935 - DNA, 25 bp, Probe sequence
ggtgttaccgttgaagatatccgat

SEQ ID NO: 170936 - DNA, 25 bp, Probe sequence
ggttacacctgttattaaattagat

SEQ ID NO: 170937 - DNA, 25 bp, Probe sequence
tttttacgtagtgccaatgagattg

SEQ ID NO: 170938 - DNA, 25 bp, Probe sequence
tcagctgaggttacacctgttatta

SEQ ID NO: 170939 - DNA, 25 bp, Probe sequence
taatgatggtaaagttggcccaatt

SEQ ID NO: 170940 - DNA, 25 bp, Probe sequence
taaagttggcccaattacacgtcaa

SEQ ID NO: 170941 - DNA, 25 bp, Probe sequence
tagaaccagcaattgttgcttatac

SEQ ID NO: 170942 - DNA, 25 bp, Probe sequence
attaggtaaagtccaaccaccacat

SEQ ID NO: 170943 - DNA, 25 bp, Probe sequence
atgctatcatagctagaggtacact

SEQ ID NO: 170944 - DNA, 25 bp, Probe sequence
atgtcatgttgacgttgttcctgct

SEQ ID NO: 170945 - DNA, 25 bp, Probe sequence
agaagacgcaccagttggtccaggt

SEQ ID NO: 170946 - DNA, 25 bp, Probe sequence
agcatttagtaatcgctacttattt

SEQ ID NO: 170947 - DNA, 25 bp, Probe sequence
acgtattaggtatcttatgtcatgt

SEQ ID NO: 170948 - DNA, 25 bp, Probe sequence
aaatctggtgaacgttacaacatgg

SEQ ID NO: 170949 - DNA, 25 bp, Probe sequence
aaagcatcagaagacgcaccagttg

SEQ ID NO: 170950 - DNA, 25 bp, Probe sequence
aaagctatggatcgttttgcaaatg

SEQ ID NO: 170951 - DNA, 25 bp, Probe sequence
aaggtaaagcggttcatggtatgga

SEQ ID NO: 170952 - DNA, 25 bp, Probe sequence
aatgccaacattaggttttgcacca

SEQ ID NO: 170953 - DNA, 25 bp, Probe sequence
ccatctatcggtgtgaatgcgggtc

SEQ ID NO: 170954 - DNA, 25 bp, Probe sequence
gaagcaatttattcattatgcgtgg

SEQ ID NO: 170955 - DNA, 25 bp, Probe sequence
gacaagggtgtagcatttggcgcaa

SEQ ID NO: 170956 - DNA, 25 bp, Probe sequence
gaaattccatacagatgtcatgggt

SEQ ID NO: 170957 - DNA, 25 bp, Probe sequence
gacaaaggtccaacaattgctgctt

SEQ ID NO: 170958 - DNA, 25 bp, Probe sequence
gacagatgttattcaagactttgag

SEQ ID NO: 170959 - DNA, 25 bp, Probe sequence
gacgttgttcctgctggtgatggat

SEQ ID NO: 170960 - DNA, 25 bp, Probe sequence
gagccggttgtaacagaagatgcta

SEQ ID NO: 170961 - DNA, 25 bp, Probe sequence
gaggtacacttgatgacaaaggtcc

SEQ ID NO: 170962 - DNA, 25 bp, Probe sequence
gatggatttacaacacatgatgtgg

SEQ ID NO: 170963 - DNA, 25 bp, Probe sequence
gatgtggatcatattgcaggaagaa

SEQ ID NO: 170964 - DNA, 25 bp, Probe sequence
gatagtactgttgatagtggcattc

SEQ ID NO: 170965 - DNA, 25 bp, Probe sequence
gatatgactgaaccttatactatag

SEQ ID NO: 170966 - DNA, 25 bp, Probe sequence
gttttgcaccagatgcagaatttcc

SEQ ID NO: 170967 - DNA, 25 bp, Probe sequence
gtgaatgcgggtctttacttactaa

SEQ ID NO: 170968 - DNA, 25 bp, Probe sequence
gtacggatcgctattttaaaacaga

SEQ ID NO: 170969 - DNA, 25 bp, Probe sequence
gtccaggtcctcgtaaggcattaga

SEQ ID NO: 170970 - DNA, 25 bp, Probe sequence
gtccaacaattgctgcttattatgc

SEQ ID NO: 170971 - DNA, 25 bp, Probe sequence
gtccaaccaccacattatgttgata

SEQ ID NO: 170972 - DNA, 25 bp, Probe sequence
gtggcattctagttttaacagttga

SEQ ID NO: 170973 - DNA, 25 bp, Probe sequence
ggtggcggtacttatgcgagaaact

SEQ ID NO: 170974 - DNA, 25 bp, Probe sequence
tatttaacgcaactagtatttactt

SEQ ID NO: 170975 - DNA, 25 bp, Probe sequence
ttggcgcaatgtttagtgattctga

SEQ ID NO: 170976 - DNA, 25 bp, Probe sequence
attaatttcttgcactatcacgaca

SEQ ID NO: 170977 - DNA, 25 bp, Probe sequence
atttcttgcactatcacgacagtta

SEQ ID NO: 170978 - DNA, 25 bp, Probe sequence
atactttgtcaaaccaacgagcatt

SEQ ID NO: 170979 - DNA, 25 bp, Probe sequence
atcgattaatttcttgcactatcac

SEQ ID NO: 170980 - DNA, 25 bp, Probe sequence
acgtaatcatcacggatacttatcg

SEQ ID NO: 170981 - DNA, 25 bp, Probe sequence
actttgtcaaaccaacgagcattat

SEQ ID NO: 170982 - DNA, 25 bp, Probe sequence
aacgagcattattggaaattgaacg

SEQ ID NO: 170983 - DNA, 25 bp, Probe sequence
aatcatcacggatacttatcgatta

SEQ ID NO: 170984 - DNA, 25 bp, Probe sequence
aatttcttgcactatcacgacagtt

SEQ ID NO: 170985 - DNA, 25 bp, Probe sequence
cttgcactatcacgacagttacaaa

SEQ ID NO: 170986 - DNA, 25 bp, Probe sequence
cttatcgattaatttcttgcactat

SEQ ID NO: 170987 - DNA, 25 bp, Probe sequence
gaatatactttgtcaaaccaacgag

SEQ ID NO: 170988 - DNA, 25 bp, Probe sequence
gaacgtaatcatcacggatacttat

SEQ ID NO: 170989 - DNA, 25 bp, Probe sequence
gacgaatatactttgtcaaaccaac

SEQ ID NO: 170990 - DNA, 25 bp, Probe sequence
gatacttatcgattaatttcttgca

SEQ ID NO: 170991 - DNA, 25 bp, Probe sequence
gattaatttcttgcactatcacgac

SEQ ID NO: 170992 - DNA, 25 bp, Probe sequence
ttatcgattaatttcttgcactatc

SEQ ID NO: 170993 - DNA, 25 bp, Probe sequence
gtaatcatcacggatacttatcgat

SEQ ID NO: 170994 - DNA, 25 bp, Probe sequence
gtcaaaccaacgagcattattggaa

SEQ ID NO: 170995 - DNA, 25 bp, Probe sequence
ggatacttatcgattaatttcttgc

SEQ ID NO: 170996 - DNA, 25 bp, Probe sequence
ggaaattgaacgtaatcatcacgga

SEQ ID NO: 170997 - DNA, 25 bp, Probe sequence
tgcactatcacgacagttacaaaac

SEQ ID NO: 170998 - DNA, 25 bp, Probe sequence
tcgattaatttcttgcactatcacg

SEQ ID NO: 170999 - DNA, 25 bp, Probe sequence
tcttgcactatcacgacagttacaa

SEQ ID NO: 171000 - DNA, 25 bp, Probe sequence
tcatcacggatacttatcgattaat

SEQ ID NO: 171001 - DNA, 25 bp, Probe sequence
taatttcttgcactatcacgacagt

SEQ ID NO: 171002 - DNA, 25 bp, Probe sequence
tacttatcgattaatttcttgcact

SEQ ID NO: 171003 - DNA, 25 bp, Probe sequence
tttgtcaaaccaacgagcattattg

SEQ ID NO: 171004 - DNA, 25 bp, Probe sequence
tttcttgcactatcacgacagttac

SEQ ID NO: 171005 - DNA, 25 bp, Probe sequence
ttattcgacgaatatactttgtcaa

SEQ ID NO: 171006 - DNA, 25 bp, Probe sequence
ttaatttcttgcactatcacgacag

SEQ ID NO: 171007 - DNA, 25 bp, Probe sequence
ttgaacgtaatcatcacggatactt

SEQ ID NO: 171008 - DNA, 25 bp, Probe sequence
ttcgacgaatatactttgtcaaacc

SEQ ID NO: 171009 - DNA, 25 bp, Probe sequence
ttcttgcactatcacgacagttaca

SEQ ID NO: 171010 - DNA, 25 bp, Probe sequence
attacgaaccctcaagcatttaact

SEQ ID NO: 171011 - DNA, 25 bp, Probe sequence
atagatgacaaaataagcgaactta

SEQ ID NO: 171012 - DNA, 25 bp, Probe sequence
atcaacgaagcagaagagcgttcag

SEQ ID NO: 171013 - DNA, 25 bp, Probe sequence
atgagttaattccgactgttttcgc

SEQ ID NO: 171014 - DNA, 25 bp, Probe sequence
agttaattacgaaccctcaagcatt

SEQ ID NO: 171015 - DNA, 25 bp, Probe sequence
agctcgtattgatgaactgattgat

SEQ ID NO: 171016 - DNA, 25 bp, Probe sequence
acgcctcaagaattaatgttggctt

SEQ ID NO: 171017 - DNA, 25 bp, Probe sequence
acaaaagtcaaaatgcttactgaaa

SEQ ID NO: 171018 - DNA, 25 bp, Probe sequence
aaaacgaatcgcaaggaatactcac

SEQ ID NO: 171019 - DNA, 25 bp, Probe sequence
aaccaatcaatgatgaggatgtcat

SEQ ID NO: 171020 - DNA, 25 bp, Probe sequence
aagcgaacttactcaagaaaaatca

SEQ ID NO: 171021 - DNA, 25 bp, Probe sequence
aatgctgaatcagtaacagagctta

SEQ ID NO: 171022 - DNA, 25 bp, Probe sequence
caatgtatgtagttgttgtggtcaa

SEQ ID NO: 171023 - DNA, 25 bp, Probe sequence
caagcatttaacttactagattgga

SEQ ID NO: 171024 - DNA, 25 bp, Probe sequence
catctagatgatgttatttctgaat

SEQ ID NO: 171025 - DNA, 25 bp, Probe sequence
cattacaatggctgcttttcgataa

SEQ ID NO: 171026 - DNA, 25 bp, Probe sequence
gttaattccgactgttttcgcagaa

SEQ ID NO: 171027 - DNA, 25 bp, Probe sequence
gcaaccgcattacaatggctgcttt

SEQ ID NO: 171028 - DNA, 25 bp, Probe sequence
gaatactcacgaagtcgaacgaaga

SEQ ID NO: 171029 - DNA, 25 bp, Probe sequence
gcaaggaatactcacgaagtcgaac

SEQ ID NO: 171030 - DNA, 25 bp, Probe sequence
gaaccctcaagcatttaacttacta

SEQ ID NO: 171031 - DNA, 25 bp, Probe sequence
gacagcggtttaaataacgcctcaa

SEQ ID NO: 171032 - DNA, 25 bp, Probe sequence
gatgaactgattgatgaagatgtat

SEQ ID NO: 171033 - DNA, 25 bp, Probe sequence
gtaaaggattataaagctcgtattg

SEQ ID NO: 171034 - DNA, 25 bp, Probe sequence
tgtagttgttgtggtcaacagttac

SEQ ID NO: 171035 - DNA, 25 bp, Probe sequence
tgagcgtatagatattcaaaacggt

SEQ ID NO: 171036 - DNA, 25 bp, Probe sequence
tgagcaacttgaaaatgagcgtata

SEQ ID NO: 171037 - DNA, 25 bp, Probe sequence
tcaaagatattccgatacgtattaa

SEQ ID NO: 171038 - DNA, 25 bp, Probe sequence
tcaataccttagttaacggcgaatt

SEQ ID NO: 171039 - DNA, 25 bp, Probe sequence
tattcaataccttagttaacggcga

SEQ ID NO: 171040 - DNA, 25 bp, Probe sequence
tattcaagttaattacgaaccctca

SEQ ID NO: 171041 - DNA, 25 bp, Probe sequence
ttcgcagaatttgaaatcgacggaa

SEQ ID NO: 171042 - DNA, 25 bp, Probe sequence
ttaatgttggcttagatatcatcaa

SEQ ID NO: 171043 - DNA, 25 bp, Probe sequence
ttccgactgttttcgcagaatttga

SEQ ID NO: 171044 - DNA, 25 bp, Probe sequence
atttacgtatcgtcactgaagaaga

SEQ ID NO: 171045 - DNA, 25 bp, Probe sequence
ataatttacgtatcgtcactgaaga

SEQ ID NO: 171046 - DNA, 25 bp, Probe sequence
atatgacaataagactgacgaaagt

SEQ ID NO: 171047 - DNA, 25 bp, Probe sequence
ataggtggcgctgtagcagctgtac

SEQ ID NO: 171048 - DNA, 25 bp, Probe sequence
atagtcgtgacaagctgaaagcaga

SEQ ID NO: 171049 - DNA, 25 bp, Probe sequence
ataaagcgacgcaattaggaacaat

SEQ ID NO: 171050 - DNA, 25 bp, Probe sequence
atcaaaatttaccgaatatgacaat

SEQ ID NO: 171051 - DNA, 25 bp, Probe sequence
aggtggcgctgtagcagctgtactt

SEQ ID NO: 171052 - DNA, 25 bp, Probe sequence
agcagctgtacttgttacacgtaaa

SEQ ID NO: 171053 - DNA, 25 bp, Probe sequence
agctgtacttgttacacgtaaagat

SEQ ID NO: 171054 - DNA, 25 bp, Probe sequence
accgaatatgacaataagactgacg

SEQ ID NO: 171055 - DNA, 25 bp, Probe sequence
acttgttacacgtaaagatagtcgt

SEQ ID NO: 171056 - DNA, 25 bp, Probe sequence
aaatccgaaagaatatgctaataga

SEQ ID NO: 171057 - DNA, 25 bp, Probe sequence
aaacaagatcctcaaagctataaag

SEQ ID NO: 171058 - DNA, 25 bp, Probe sequence
aacaagatcctcaaagctataaaga

SEQ ID NO: 171059 - DNA, 25 bp, Probe sequence
aacaaatccgaaagaatatgctaat

SEQ ID NO: 171060 - DNA, 25 bp, Probe sequence
caaataataatttacgtatcgtcac

SEQ ID NO: 171061 - DNA, 25 bp, Probe sequence
ctgtagcagctgtacttgttacacg

SEQ ID NO: 171062 - DNA, 25 bp, Probe sequence
gcgctgtagcagctgtacttgttac

SEQ ID NO: 171063 - DNA, 25 bp, Probe sequence
gctgtagcagctgtacttgttacac

SEQ ID NO: 171064 - DNA, 25 bp, Probe sequence
gcagctgtacttgttacacgtaaag

SEQ ID NO: 171065 - DNA, 25 bp, Probe sequence
gatagtcgtgacaagctgaaagcag

SEQ ID NO: 171066 - DNA, 25 bp, Probe sequence
gtataggtggcgctgtagcagctgt

SEQ ID NO: 171067 - DNA, 25 bp, Probe sequence
gtagcagctgtacttgttacacgta

SEQ ID NO: 171068 - DNA, 25 bp, Probe sequence
gtaaatttgatgatgaaggtggcgc

SEQ ID NO: 171069 - DNA, 25 bp, Probe sequence
gtcgtgacaagctgaaagcagaata

SEQ ID NO: 171070 - DNA, 25 bp, Probe sequence
gtggcgctgtagcagctgtacttgt

SEQ ID NO: 171071 - DNA, 25 bp, Probe sequence
ggtggcgctgtagcagctgtacttg

SEQ ID NO: 171072 - DNA, 25 bp, Probe sequence
ggtataggtggcgctgtagcagctg

SEQ ID NO: 171073 - DNA, 25 bp, Probe sequence
tggcgctgtagcagctgtacttgtt

SEQ ID NO: 171074 - DNA, 25 bp, Probe sequence
tgctaaggataaagcgacgcaatta

SEQ ID NO: 171075 - DNA, 25 bp, Probe sequence
taataatttacgtatcgtcactgaa

SEQ ID NO: 171076 - DNA, 25 bp, Probe sequence
tagcagctgtacttgttacacgtaa

SEQ ID NO: 171077 - DNA, 25 bp, Probe sequence
taggtggcgctgtagcagctgtact

SEQ ID NO: 171078 - DNA, 25 bp, Probe sequence
agagtcacaaggcaatttggaattg

SEQ ID NO: 171079 - DNA, 25 bp, Probe sequence
attccttacggcaacaaaatgcagt

SEQ ID NO: 171080 - DNA, 25 bp, Probe sequence
atgccttattagacatggtaacgca

SEQ ID NO: 171081 - DNA, 25 bp, Probe sequence
acgttatatcaacacatcaacagat

SEQ ID NO: 171082 - DNA, 25 bp, Probe sequence
acaacgtagctatcacggtaatgta

SEQ ID NO: 171083 - DNA, 25 bp, Probe sequence
acaagaatccgaacaacgtcaacgc

SEQ ID NO: 171084 - DNA, 25 bp, Probe sequence
acaagacttctttaacatcgacaaa

SEQ ID NO: 171085 - DNA, 25 bp, Probe sequence
aaatgataagcctattgatgtatct

SEQ ID NO: 171086 - DNA, 25 bp, Probe sequence
aaacattatcggtgcgtactgcaca

SEQ ID NO: 171087 - DNA, 25 bp, Probe sequence
aaacagttatcaatagagctgctaa

SEQ ID NO: 171088 - DNA, 25 bp, Probe sequence
aacgtgatgcaggtgctcaagatgt

SEQ ID NO: 171089 - DNA, 25 bp, Probe sequence
aatgcagttacaacgtagctatcac

SEQ ID NO: 171090 - DNA, 25 bp, Probe sequence
caattggactttgaacaaccagttc

SEQ ID NO: 171091 - DNA, 25 bp, Probe sequence
aatccagctaaaaatcaatgctact

SEQ ID NO: 171092 - DNA, 25 bp, Probe sequence
taaaggcgatacattcaagcaagaa

SEQ ID NO: 171093 - DNA, 25 bp, Probe sequence
gctactttattccttacggcaacaa

SEQ ID NO: 171094 - DNA, 25 bp, Probe sequence
gaagtcatgactattgaacaaatta

SEQ ID NO: 171095 - DNA, 25 bp, Probe sequence
gaacgtatctgacaacgtattaaac

SEQ ID NO: 171096 - DNA, 25 bp, Probe sequence
gaaacaggacgtatcaaagcgatta

SEQ ID NO: 171097 - DNA, 25 bp, Probe sequence
gaaatgggagaaacaggacgtatca

SEQ ID NO: 171098 - DNA, 25 bp, Probe sequence
gagctgctaaacgttatatcaacac

SEQ ID NO: 171099 - DNA, 25 bp, Probe sequence
gagagttttagagtcacaaggcaat

SEQ ID NO: 171100 - DNA, 25 bp, Probe sequence
gatggacgagataactatattgaag

SEQ ID NO: 171101 - DNA, 25 bp, Probe sequence
gatgttaaaacgtgatgcaggtgct

SEQ ID NO: 171102 - DNA, 25 bp, Probe sequence
gatgttgttgctcaagtgatttata

SEQ ID NO: 171103 - DNA, 25 bp, Probe sequence
gatacaagcaaagcaaatgccttat

SEQ ID NO: 171104 - DNA, 25 bp, Probe sequence
gattattcaccaagtaatgccatga

SEQ ID NO: 171105 - DNA, 25 bp, Probe sequence
gtaacgcaaggtttaaatccagcta

SEQ ID NO: 171106 - DNA, 25 bp, Probe sequence
gtgcgtactgcacaatcgtatttaa

SEQ ID NO: 171107 - DNA, 25 bp, Probe sequence
ggtgctcaagatgttgttgctcaag

SEQ ID NO: 171108 - DNA, 25 bp, Probe sequence
ggatgcagtcatcaatgattaaaga

SEQ ID NO: 171109 - DNA, 25 bp, Probe sequence
ggaattgccaaatgattattcacca

SEQ ID NO: 171110 - DNA, 25 bp, Probe sequence
tgcacaatcgtatttaatgatggac

SEQ ID NO: 171111 - DNA, 25 bp, Probe sequence
tcaatgctactttattccttacggc

SEQ ID NO: 171112 - DNA, 25 bp, Probe sequence
attttgaaagtcatcgcttatgcac

SEQ ID NO: 171113 - DNA, 25 bp, Probe sequence
atgctaacgagcctgtggctttctt

SEQ ID NO: 171114 - DNA, 25 bp, Probe sequence
atgatgctaacgagcctgtggcttt

SEQ ID NO: 171115 - DNA, 25 bp, Probe sequence
atggagtctcattttagcttagaac

SEQ ID NO: 171116 - DNA, 25 bp, Probe sequence
agcaaatgatttaactagactcgaa

SEQ ID NO: 171117 - DNA, 25 bp, Probe sequence
agcctgtggctttcttattacaaag

SEQ ID NO: 171118 - DNA, 25 bp, Probe sequence
acgagcctgtggctttcttattaca

SEQ ID NO: 171119 - DNA, 25 bp, Probe sequence
acatgatgctaacgagcctgtggct

SEQ ID NO: 171120 - DNA, 25 bp, Probe sequence
aaatgatttaactagactcgaagaa

SEQ ID NO: 171121 - DNA, 25 bp, Probe sequence
aacatgatgctaacgagcctgtggc

SEQ ID NO: 171122 - DNA, 25 bp, Probe sequence
aactagactcgaagaaatacattta

SEQ ID NO: 171123 - DNA, 25 bp, Probe sequence
aacgagcctgtggctttcttattac

SEQ ID NO: 171124 - DNA, 25 bp, Probe sequence
aagttaattatatctatgaacaaat

SEQ ID NO: 171125 - DNA, 25 bp, Probe sequence
aagtcatcgcttatgcacgattaag

SEQ ID NO: 171126 - DNA, 25 bp, Probe sequence
catgatgctaacgagcctgtggctt

SEQ ID NO: 171127 - DNA, 25 bp, Probe sequence
catcgcttatgcacgattaaggcaa

SEQ ID NO: 171128 - DNA, 25 bp, Probe sequence
ctaacgagcctgtggctttcttatt

SEQ ID NO: 171129 - DNA, 25 bp, Probe sequence
ctcattttagcttagaacatgctat

SEQ ID NO: 171130 - DNA, 25 bp, Probe sequence
gctaacgagcctgtggctttcttat

SEQ ID NO: 171131 - DNA, 25 bp, Probe sequence
gcttatgcacgattaaggcaaagca

SEQ ID NO: 171132 - DNA, 25 bp, Probe sequence
gcacgattaaggcaaagcaagagct

SEQ ID NO: 171133 - DNA, 25 bp, Probe sequence
gaattatggagtctcattttagctt

SEQ ID NO: 171134 - DNA, 25 bp, Probe sequence
gaacatgatgctaacgagcctgtgg

SEQ ID NO: 171135 - DNA, 25 bp, Probe sequence
gaaagtcatcgcttatgcacgatta

SEQ ID NO: 171136 - DNA, 25 bp, Probe sequence
gagcctgtggctttcttattacaaa

SEQ ID NO: 171137 - DNA, 25 bp, Probe sequence
gagtctcattttagcttagaacatg

SEQ ID NO: 171138 - DNA, 25 bp, Probe sequence
gatgctaacgagcctgtggctttct

SEQ ID NO: 171139 - DNA, 25 bp, Probe sequence
gtcatcgcttatgcacgattaaggc

SEQ ID NO: 171140 - DNA, 25 bp, Probe sequence
gtctcattttagcttagaacatgct

SEQ ID NO: 171141 - DNA, 25 bp, Probe sequence
ggagtctcattttagcttagaacat

SEQ ID NO: 171142 - DNA, 25 bp, Probe sequence
tgctaacgagcctgtggctttctta

SEQ ID NO: 171143 - DNA, 25 bp, Probe sequence
taacgagcctgtggctttcttatta

SEQ ID NO: 171144 - DNA, 25 bp, Probe sequence
tttgaaagtcatcgcttatgcacga

SEQ ID NO: 171145 - DNA, 25 bp, Probe sequence
ttatggagtctcattttagcttaga

SEQ ID NO: 171146 - DNA, 25 bp, Probe sequence
accagtaaaagataatccgtttgcg

SEQ ID NO: 171147 - DNA, 25 bp, Probe sequence
agataatccgtttgcgaatgcaaat

SEQ ID NO: 171148 - DNA, 25 bp, Probe sequence
agcagagaacgttaataaataccta

SEQ ID NO: 171149 - DNA, 25 bp, Probe sequence
acgtggacaatcgcaatattcaaat

SEQ ID NO: 171150 - DNA, 25 bp, Probe sequence
acacgtggacaatcgcaatattcaa

SEQ ID NO: 171151 - DNA, 25 bp, Probe sequence
aaagataatccgtttgcgaatgcaa

SEQ ID NO: 171152 - DNA, 25 bp, Probe sequence
aaacacgtggacaatcgcaatattc

SEQ ID NO: 171153 - DNA, 25 bp, Probe sequence
aaaagataatccgtttgcgaatgca

SEQ ID NO: 171154 - DNA, 25 bp, Probe sequence
aacacgtggacaatcgcaatattca

SEQ ID NO: 171155 - DNA, 25 bp, Probe sequence
aacagaacaatattagttggtcgtt

SEQ ID NO: 171156 - DNA, 25 bp, Probe sequence
aacaaacacgtggacaatcgcaata

SEQ ID NO: 171157 - DNA, 25 bp, Probe sequence
aatgtagcatcattcacattagcag

SEQ ID NO: 171158 - DNA, 25 bp, Probe sequence
caacaaacacgtggacaatcgcaat

SEQ ID NO: 171159 - DNA, 25 bp, Probe sequence
caaacacgtggacaatcgcaatatt

SEQ ID NO: 171160 - DNA, 25 bp, Probe sequence
caaagtggtgtaaatgtagcatcat

SEQ ID NO: 171161 - DNA, 25 bp, Probe sequence
cacgtggacaatcgcaatattcaaa

SEQ ID NO: 171162 - DNA, 25 bp, Probe sequence
cagaacaatattagttggtcgttta

SEQ ID NO: 171163 - DNA, 25 bp, Probe sequence
tcgtttaactagagacccagaatta

SEQ ID NO: 171164 - DNA, 25 bp, Probe sequence
gcaatattcaaataacaaaccagta

SEQ ID NO: 171165 - DNA, 25 bp, Probe sequence
gaaaataaggaaggtcaacgtgtat

SEQ ID NO: 171166 - DNA, 25 bp, Probe sequence
gagaacgttaataaatacctatcta

SEQ ID NO: 171167 - DNA, 25 bp, Probe sequence
gatagtattcaatttttagaaccga

SEQ ID NO: 171168 - DNA, 25 bp, Probe sequence
gttggtcgtttaactagagacccag

SEQ ID NO: 171169 - DNA, 25 bp, Probe sequence
gtttaactagagacccagaattaag

SEQ ID NO: 171170 - DNA, 25 bp, Probe sequence
gtagatggtaggttacaaacgcgga

SEQ ID NO: 171171 - DNA, 25 bp, Probe sequence
gtcgtttaactagagacccagaatt

SEQ ID NO: 171172 - DNA, 25 bp, Probe sequence
gtggtgtaaatgtagcatcattcac

SEQ ID NO: 171173 - DNA, 25 bp, Probe sequence
gggcgtagatggtaggttacaaacg

SEQ ID NO: 171174 - DNA, 25 bp, Probe sequence
gtggacaatcgcaatattcaaataa

SEQ ID NO: 171175 - DNA, 25 bp, Probe sequence
ggacaatcgcaatattcaaataaca

SEQ ID NO: 171176 - DNA, 25 bp, Probe sequence
tggtcgtttaactagagacccagaa

SEQ ID NO: 171177 - DNA, 25 bp, Probe sequence
tcatcgtatttaaaaaacaagcaga

SEQ ID NO: 171178 - DNA, 25 bp, Probe sequence
taaatacctatctaaaggatcgttg

SEQ ID NO: 171179 - DNA, 25 bp, Probe sequence
tagatggtaggttacaaacgcggaa

SEQ ID NO: 171180 - DNA, 25 bp, Probe sequence
attgatcgctcaattcaaaatcatt

SEQ ID NO: 171181 - DNA, 25 bp, Probe sequence
atttactcatggaagcgaatcattc

SEQ ID NO: 171182 - DNA, 25 bp, Probe sequence
atcaaaccaacatcaaaacaacatc

SEQ ID NO: 171183 - DNA, 25 bp, Probe sequence
atcgctcaattcaaaatcattggct

SEQ ID NO: 171184 - DNA, 25 bp, Probe sequence
agtattgatcgctcaattcaaaatc

SEQ ID NO: 171185 - DNA, 25 bp, Probe sequence
aagagaacattttcaaagtttgaag

SEQ ID NO: 171186 - DNA, 25 bp, Probe sequence
aatcattggctatttaaagaaaaga

SEQ ID NO: 171187 - DNA, 25 bp, Probe sequence
caaaacaacatcaaaatataccctt

SEQ ID NO: 171188 - DNA, 25 bp, Probe sequence
caaaccaacatcaaaacaacatcag

SEQ ID NO: 171189 - DNA, 25 bp, Probe sequence
catggaagcgaatcattcaaaggca

SEQ ID NO: 171190 - DNA, 25 bp, Probe sequence
cgagagtgatggaatgttagaagtc

SEQ ID NO: 171191 - DNA, 25 bp, Probe sequence
cgacatcaaaccaacatcaaaacaa

SEQ ID NO: 171192 - DNA, 25 bp, Probe sequence
gcgaatcattcaaaggcaaaagtgc

SEQ ID NO: 171193 - DNA, 25 bp, Probe sequence
gctcaattcaaaatcattggctatt

SEQ ID NO: 171194 - DNA, 25 bp, Probe sequence
gaagcatggatatatttactcatgg

SEQ ID NO: 171195 - DNA, 25 bp, Probe sequence
gactggttggataagtattgatcgc

SEQ ID NO: 171196 - DNA, 25 bp, Probe sequence
gaccttgtctgacctttttaactgg

SEQ ID NO: 171197 - DNA, 25 bp, Probe sequence
gatcgctcaattcaaaatcattggc

SEQ ID NO: 171198 - DNA, 25 bp, Probe sequence
gtttgaagcatggatatatttactc

SEQ ID NO: 171199 - DNA, 25 bp, Probe sequence
gtctgacctttttaactggtcacga

SEQ ID NO: 171200 - DNA, 25 bp, Probe sequence
gtgatggaatgttagaagtcaaaac

SEQ ID NO: 171201 - DNA, 25 bp, Probe sequence
ggatatatttactcatggaagcgaa

SEQ ID NO: 171202 - DNA, 25 bp, Probe sequence
ggttggataagtattgatcgctcaa

SEQ ID NO: 171203 - DNA, 25 bp, Probe sequence
ggataagtattgatcgctcaattca

SEQ ID NO: 171204 - DNA, 25 bp, Probe sequence
tggtcacgatttaaagtgaaaacct

SEQ ID NO: 171205 - DNA, 25 bp, Probe sequence
tgacctttttaactggtcacgattt

SEQ ID NO: 171206 - DNA, 25 bp, Probe sequence
tgaccttgtctgacctttttaactg

SEQ ID NO: 171207 - DNA, 25 bp, Probe sequence
tctgacctttttaactggtcacgat

SEQ ID NO: 171208 - DNA, 25 bp, Probe sequence
tactcatggaagcgaatcattcaaa

SEQ ID NO: 171209 - DNA, 25 bp, Probe sequence
tatatttactcatggaagcgaatca

SEQ ID NO: 171210 - DNA, 25 bp, Probe sequence
ttttaactggtcacgatttaaagtg

SEQ ID NO: 171211 - DNA, 25 bp, Probe sequence
ttactcgagagtgatggaatgttag

SEQ ID NO: 171212 - DNA, 25 bp, Probe sequence
ttgaccttgtctgacctttttaact

SEQ ID NO: 171213 - DNA, 25 bp, Probe sequence
ttgtctgacctttttaactggtcac

SEQ ID NO: 171214 - DNA, 25 bp, Probe sequence
attcagatcaaatagttaccgcatc

SEQ ID NO: 171215 - DNA, 25 bp, Probe sequence
atcaaatagttaccgcatcacttaa

SEQ ID NO: 171216 - DNA, 25 bp, Probe sequence
atgagaagaagaaggtaaccgcctt

SEQ ID NO: 171217 - DNA, 25 bp, Probe sequence
atgattcagatcaaatagttaccgc

SEQ ID NO: 171218 - DNA, 25 bp, Probe sequence
atggggataatgtaaagaatggtga

SEQ ID NO: 171219 - DNA, 25 bp, Probe sequence
agatcaaatagttaccgcatcactt

SEQ ID NO: 171220 - DNA, 25 bp, Probe sequence
acccaaatggctcacagacagcacg

SEQ ID NO: 171221 - DNA, 25 bp, Probe sequence
acacccaaatggctcacagacagca

SEQ ID NO: 171222 - DNA, 25 bp, Probe sequence
aaatcgctaaagacagaaataaagt

SEQ ID NO: 171223 - DNA, 25 bp, Probe sequence
aaacacccaaatggctcacagacag

SEQ ID NO: 171224 - DNA, 25 bp, Probe sequence
aaaaaacacccaaatggctcacaga

SEQ ID NO: 171225 - DNA, 25 bp, Probe sequence
aaaacacccaaatggctcacagaca

SEQ ID NO: 171226 - DNA, 25 bp, Probe sequence
aaaaacacccaaatggctcacagac

SEQ ID NO: 171227 - DNA, 25 bp, Probe sequence
aacacccaaatggctcacagacagc

SEQ ID NO: 171228 - DNA, 25 bp, Probe sequence
aatgagaagaagaaggtaaccgcct

SEQ ID NO: 171229 - DNA, 25 bp, Probe sequence
cacccaaatggctcacagacagcac

SEQ ID NO: 171230 - DNA, 25 bp, Probe sequence
cagatcaaatagttaccgcatcact

SEQ ID NO: 171231 - DNA, 25 bp, Probe sequence
cataactccttacaatttagacgat

SEQ ID NO: 171232 - DNA, 25 bp, Probe sequence
cccaaatggctcacagacagcacga

SEQ ID NO: 171233 - DNA, 25 bp, Probe sequence
ccaaatggctcacagacagcacgag

SEQ ID NO: 171234 - DNA, 25 bp, Probe sequence
gaatgagaagaagaaggtaaccgcc

SEQ ID NO: 171235 - DNA, 25 bp, Probe sequence
gaatggggataatgtaaagaatggt

SEQ ID NO: 171236 - DNA, 25 bp, Probe sequence
gagaagaagaaggtaaccgccttcg

SEQ ID NO: 171237 - DNA, 25 bp, Probe sequence
gatcaaatagttaccgcatcactta

SEQ ID NO: 171238 - DNA, 25 bp, Probe sequence
gataatgtaaagaatggtgagaatg

SEQ ID NO: 171239 - DNA, 25 bp, Probe sequence
gattcagatcaaatagttaccgcat

SEQ ID NO: 171240 - DNA, 25 bp, Probe sequence
gtttcataactccttacaatttaga

SEQ ID NO: 171241 - DNA, 25 bp, Probe sequence
gggataatgtaaagaatggtgagaa

SEQ ID NO: 171242 - DNA, 25 bp, Probe sequence
ggggataatgtaaagaatggtgaga

SEQ ID NO: 171243 - DNA, 25 bp, Probe sequence
tgattcagatcaaatagttaccgca

SEQ ID NO: 171244 - DNA, 25 bp, Probe sequence
tcagatcaaatagttaccgcatcac

SEQ ID NO: 171245 - DNA, 25 bp, Probe sequence
taaaatcgctaaagacagaaataaa

SEQ ID NO: 171246 - DNA, 25 bp, Probe sequence
ttcggtttcataactccttacaatt

SEQ ID NO: 171247 - DNA, 25 bp, Probe sequence
ttcagatcaaatagttaccgcatca

SEQ ID NO: 171248 - DNA, 25 bp, Probe sequence
agttaaacgaatgtttcatagcatt

SEQ ID NO: 171249 - DNA, 25 bp, Probe sequence
agatcatcattcaaaaaccgttatt

SEQ ID NO: 171250 - DNA, 25 bp, Probe sequence
accgttattgatttaatacctgaat

SEQ ID NO: 171251 - DNA, 25 bp, Probe sequence
acagaagggcttttattgataacga

SEQ ID NO: 171252 - DNA, 25 bp, Probe sequence
aatttttagcaaatatgggcgtcgg

SEQ ID NO: 171253 - DNA, 25 bp, Probe sequence
aaacgtcacacgtaacaatttatga

SEQ ID NO: 171254 - DNA, 25 bp, Probe sequence
aacacatatagaaccagaaaacgat

SEQ ID NO: 171255 - DNA, 25 bp, Probe sequence
aagatacagaagggcttttattgat

SEQ ID NO: 171256 - DNA, 25 bp, Probe sequence
aaggccttgtaaatgtcaacgaaca

SEQ ID NO: 171257 - DNA, 25 bp, Probe sequence
caccaaaaacacatatagaaccaga

SEQ ID NO: 171258 - DNA, 25 bp, Probe sequence
catgaattaatgagtccaaacaaac

SEQ ID NO: 171259 - DNA, 25 bp, Probe sequence
ctgatggcaaggttaagcctgcaat

SEQ ID NO: 171260 - DNA, 25 bp, Probe sequence
cggttggtcgtcttgataaagatac

SEQ ID NO: 171261 - DNA, 25 bp, Probe sequence
gcaactgaagatcatcattcaaaaa

SEQ ID NO: 171262 - DNA, 25 bp, Probe sequence
gaagggcttttattgataacgaatg

SEQ ID NO: 171263 - DNA, 25 bp, Probe sequence
gaaggaaaatatcatcaagttaaac

SEQ ID NO: 171264 - DNA, 25 bp, Probe sequence
gaagttatttcagcaaatcctatca

SEQ ID NO: 171265 - DNA, 25 bp, Probe sequence
gacgtatcaaaattgctgatttaga

SEQ ID NO: 171266 - DNA, 25 bp, Probe sequence
gagtccaaacaaacatgtttctaaa

SEQ ID NO: 171267 - DNA, 25 bp, Probe sequence
gaggtattacatttaagacgtatca

SEQ ID NO: 171268 - DNA, 25 bp, Probe sequence
gataacgaatgatggtgattttaat

SEQ ID NO: 171269 - DNA, 25 bp, Probe sequence
gataatcaaacgtcacacgtaacaa

SEQ ID NO: 171270 - DNA, 25 bp, Probe sequence
gattcaggagaatatcgtttattaa

SEQ ID NO: 171271 - DNA, 25 bp, Probe sequence
gttatttcagcaaatcctatcactg

SEQ ID NO: 171272 - DNA, 25 bp, Probe sequence
gtttcatagcattcaaaatgaggta

SEQ ID NO: 171273 - DNA, 25 bp, Probe sequence
gtcacacgtaacaatttatgaagga

SEQ ID NO: 171274 - DNA, 25 bp, Probe sequence
gtcaacgaacaagtaattaaatcac

SEQ ID NO: 171275 - DNA, 25 bp, Probe sequence
gtaattaaatcaccaaaaacacata

SEQ ID NO: 171276 - DNA, 25 bp, Probe sequence
ggagaatatcgtttattaactgaaa

SEQ ID NO: 171277 - DNA, 25 bp, Probe sequence
tgatttaatacctgaataccaacat

SEQ ID NO: 171278 - DNA, 25 bp, Probe sequence
tgaaaatgtctatattatgttaaat

SEQ ID NO: 171279 - DNA, 25 bp, Probe sequence
tattgataatcaaacgtcacacgta

SEQ ID NO: 171280 - DNA, 25 bp, Probe sequence
tttcagcaaatcctatcactgaaga

SEQ ID NO: 171281 - DNA, 25 bp, Probe sequence
ttggtcgtcttgataaagatacaga

SEQ ID NO: 171282 - DNA, 25 bp, Probe sequence
atatcttaatagcatttttagtaat

SEQ ID NO: 171283 - DNA, 25 bp, Probe sequence
atctcttttatcgcatagcaattat

SEQ ID NO: 171284 - DNA, 25 bp, Probe sequence
atcgcatagcaattatttttcttaa

SEQ ID NO: 171285 - DNA, 25 bp, Probe sequence
atgttaatgcttgctactatcttta

SEQ ID NO: 171286 - DNA, 25 bp, Probe sequence
agttcaagggagctatgaggaatga

SEQ ID NO: 171287 - DNA, 25 bp, Probe sequence
agagtaaaaagactatacacacaaa

SEQ ID NO: 171288 - DNA, 25 bp, Probe sequence
agacgcatatcttaatagcattttt

SEQ ID NO: 171289 - DNA, 25 bp, Probe sequence
aacaagttcaagggagctatgagga

SEQ ID NO: 171290 - DNA, 25 bp, Probe sequence
aatgttaatgcttgctactatcttt

SEQ ID NO: 171291 - DNA, 25 bp, Probe sequence
aatgcttgctactatctttatgata

SEQ ID NO: 171292 - DNA, 25 bp, Probe sequence
ctcttttatcgcatagcaattattt

SEQ ID NO: 171293 - DNA, 25 bp, Probe sequence
cgtttatctcttttatcgcatagca

SEQ ID NO: 171294 - DNA, 25 bp, Probe sequence
cgcatatcttaatagcatttttagt

SEQ ID NO: 171295 - DNA, 25 bp, Probe sequence
gcgtttatctcttttatcgcatagc

SEQ ID NO: 171296 - DNA, 25 bp, Probe sequence
gcttataaacatcaaaagacgcata

SEQ ID NO: 171297 - DNA, 25 bp, Probe sequence
gcttgctactatctttatgatatct

SEQ ID NO: 171298 - DNA, 25 bp, Probe sequence
gcatagcaattatttttcttaagag

SEQ ID NO: 171299 - DNA, 25 bp, Probe sequence
gaaatgttaatgcttgctactatct

SEQ ID NO: 171300 - DNA, 25 bp, Probe sequence
gagtaagctcaaacaagttcaaggg

SEQ ID NO: 171301 - DNA, 25 bp, Probe sequence
gttaatgcttgctactatctttatg

SEQ ID NO: 171302 - DNA, 25 bp, Probe sequence
gtttatctcttttatcgcatagcaa

SEQ ID NO: 171303 - DNA, 25 bp, Probe sequence
gtttggcgtttatctcttttatcgc

SEQ ID NO: 171304 - DNA, 25 bp, Probe sequence
gtaatgttttttatgagtaagctca

SEQ ID NO: 171305 - DNA, 25 bp, Probe sequence
ggtttggcgtttatctcttttatcg

SEQ ID NO: 171306 - DNA, 25 bp, Probe sequence
tggcgtttatctcttttatcgcata

SEQ ID NO: 171307 - DNA, 25 bp, Probe sequence
tgctactatctttatgatatctaca

SEQ ID NO: 171308 - DNA, 25 bp, Probe sequence
taatagggtttggcgtttatctctt

SEQ ID NO: 171309 - DNA, 25 bp, Probe sequence
taatgcttgctactatctttatgat

SEQ ID NO: 171310 - DNA, 25 bp, Probe sequence
tagcaattatttttcttaagagtaa

SEQ ID NO: 171311 - DNA, 25 bp, Probe sequence
tatgaaatgttaatgcttgctacta

SEQ ID NO: 171312 - DNA, 25 bp, Probe sequence
tttggcgtttatctcttttatcgca

SEQ ID NO: 171313 - DNA, 25 bp, Probe sequence
ttatcgcatagcaattatttttctt

SEQ ID NO: 171314 - DNA, 25 bp, Probe sequence
ttatctcttttatcgcatagcaatt

SEQ ID NO: 171315 - DNA, 25 bp, Probe sequence
ttggcgtttatctcttttatcgcat

SEQ ID NO: 171316 - DNA, 25 bp, Probe sequence
atattattccaacagaacagcatga

SEQ ID NO: 171317 - DNA, 25 bp, Probe sequence
atatactttagcaggaggtgttgtg

SEQ ID NO: 171318 - DNA, 25 bp, Probe sequence
atatccgatatatttagattgtttt

SEQ ID NO: 171319 - DNA, 25 bp, Probe sequence
atagagcttataatcatattgatag

SEQ ID NO: 171320 - DNA, 25 bp, Probe sequence
atcacttcagagtaccgacgaaaaa

SEQ ID NO: 171321 - DNA, 25 bp, Probe sequence
aggaagcatatatactttagcagga

SEQ ID NO: 171322 - DNA, 25 bp, Probe sequence
agatgattggagcttatattattcc

SEQ ID NO: 171323 - DNA, 25 bp, Probe sequence
aaaagcgtatgaaaatgttattgga

SEQ ID NO: 171324 - DNA, 25 bp, Probe sequence
aacgattataatctttatcttgata

SEQ ID NO: 171325 - DNA, 25 bp, Probe sequence
aagatgagtttcaacaatgaattta

SEQ ID NO: 171326 - DNA, 25 bp, Probe sequence
aagtctttaataatttagataagca

SEQ ID NO: 171327 - DNA, 25 bp, Probe sequence
cacttcagagtaccgacgaaaaata

SEQ ID NO: 171328 - DNA, 25 bp, Probe sequence
caggaggtgttgtgctttattcagt

SEQ ID NO: 171329 - DNA, 25 bp, Probe sequence
ccaacagaacagcatgaatttttag

SEQ ID NO: 171330 - DNA, 25 bp, Probe sequence
gcatatatactttagcaggaggtgt

SEQ ID NO: 171331 - DNA, 25 bp, Probe sequence
gaatttttagatttttttgatattg

SEQ ID NO: 171332 - DNA, 25 bp, Probe sequence
gaacgagcaaataataggaagcata

SEQ ID NO: 171333 - DNA, 25 bp, Probe sequence
gagatttttaggtattttacagatt

SEQ ID NO: 171334 - DNA, 25 bp, Probe sequence
gaggtgttgtgctttattcagttaa

SEQ ID NO: 171335 - DNA, 25 bp, Probe sequence
gatagttttatcacttcagagtacc

SEQ ID NO: 171336 - DNA, 25 bp, Probe sequence
gatttttttgatattgaagtcttta

SEQ ID NO: 171337 - DNA, 25 bp, Probe sequence
gttttatcacttcagagtaccgacg

SEQ ID NO: 171338 - DNA, 25 bp, Probe sequence
gtgttgtgctttattcagttaaaga

SEQ ID NO: 171339 - DNA, 25 bp, Probe sequence
ggtattttacagattctaacttaca

SEQ ID NO: 171340 - DNA, 25 bp, Probe sequence
ggaggtgttgtgctttattcagtta

SEQ ID NO: 171341 - DNA, 25 bp, Probe sequence
ggagcttatattattccaacagaac

SEQ ID NO: 171342 - DNA, 25 bp, Probe sequence
ggaagattttaagatgagtttcaac

SEQ ID NO: 171343 - DNA, 25 bp, Probe sequence
tgttatggaaacaattgctattata

SEQ ID NO: 171344 - DNA, 25 bp, Probe sequence
tgaagaacagtttagtcaaaagttt

SEQ ID NO: 171345 - DNA, 25 bp, Probe sequence
taatccttcttttgttatggaaaca

SEQ ID NO: 171346 - DNA, 25 bp, Probe sequence
tacagattctaacttacaacgtaaa

SEQ ID NO: 171347 - DNA, 25 bp, Probe sequence
tacaaatcagattttttttaatcct

SEQ ID NO: 171348 - DNA, 25 bp, Probe sequence
ttatcacttcagagtaccgacgaaa

SEQ ID NO: 171349 - DNA, 25 bp, Probe sequence
tatcaaatagagttaaggcaatgga

SEQ ID NO: 171350 - DNA, 25 bp, Probe sequence
attggtatattcacactctggtatt

SEQ ID NO: 171351 - DNA, 25 bp, Probe sequence
attgcaattgcagttgcgacagcag

SEQ ID NO: 171352 - DNA, 25 bp, Probe sequence
aggtcatgaccctaaccatgatggt

SEQ ID NO: 171353 - DNA, 25 bp, Probe sequence
agatgtgtcatatggcaagatgtat

SEQ ID NO: 171354 - DNA, 25 bp, Probe sequence
acggtgctttatctttagttggtat

SEQ ID NO: 171355 - DNA, 25 bp, Probe sequence
aaaacgcgtcttgcggacgaattct

SEQ ID NO: 171356 - DNA, 25 bp, Probe sequence
aaaacatttgcagaaggtcgcttac

SEQ ID NO: 171357 - DNA, 25 bp, Probe sequence
aaaatatggcgccgttcacatacgc

SEQ ID NO: 171358 - DNA, 25 bp, Probe sequence
aagcgtaagcataatattgatcgta

SEQ ID NO: 171359 - DNA, 25 bp, Probe sequence
aatttacacataacggtgctttatc

SEQ ID NO: 171360 - DNA, 25 bp, Probe sequence
gccaatggtattgctacttttgcag

SEQ ID NO: 171361 - DNA, 25 bp, Probe sequence
gctacttttgcagcagcagttggtg

SEQ ID NO: 171362 - DNA, 25 bp, Probe sequence
gcagttggtgcgattattggtatat

SEQ ID NO: 171363 - DNA, 25 bp, Probe sequence
gcacgcgtgattttcatattaatcg

SEQ ID NO: 171364 - DNA, 25 bp, Probe sequence
gaattatccattatttaacttagta

SEQ ID NO: 171365 - DNA, 25 bp, Probe sequence
gaaggtcgcttacatgaaatgcatc

SEQ ID NO: 171366 - DNA, 25 bp, Probe sequence
gagcaaattgcacgcgtgattttca

SEQ ID NO: 171367 - DNA, 25 bp, Probe sequence
gatccaattgttttaggtcatgacc

SEQ ID NO: 171368 - DNA, 25 bp, Probe sequence
gatcgtatggtcgaatctgattaca

SEQ ID NO: 171369 - DNA, 25 bp, Probe sequence
gttggtataccttcacagttacaag

SEQ ID NO: 171370 - DNA, 25 bp, Probe sequence
gttcacatacgcttatgcaccatat

SEQ ID NO: 171371 - DNA, 25 bp, Probe sequence
gtttataactgttccagctagtatt

SEQ ID NO: 171372 - DNA, 25 bp, Probe sequence
gtattggaattatggccttggcaca

SEQ ID NO: 171373 - DNA, 25 bp, Probe sequence
gtggacaagaaaatatggcgccgtt

SEQ ID NO: 171374 - DNA, 25 bp, Probe sequence
ggtacaatcacaattaaaacgcgtc

SEQ ID NO: 171375 - DNA, 25 bp, Probe sequence
ggtattctaatttacggtacaatca

SEQ ID NO: 171376 - DNA, 25 bp, Probe sequence
ggcgtactttttatcattccattca

SEQ ID NO: 171377 - DNA, 25 bp, Probe sequence
tgattccgacatcattaagtgctgg

SEQ ID NO: 171378 - DNA, 25 bp, Probe sequence
tgcatcatcaaattagaacatctat

SEQ ID NO: 171379 - DNA, 25 bp, Probe sequence
tcttgcggacgaattcttaggtgaa

SEQ ID NO: 171380 - DNA, 25 bp, Probe sequence
tattctattatgcgcctgtagcaat

SEQ ID NO: 171381 - DNA, 25 bp, Probe sequence
ttttatcattccattcaactattta

SEQ ID NO: 171382 - DNA, 25 bp, Probe sequence
ttgcgacagcaggtgtaccattagc

SEQ ID NO: 171383 - DNA, 25 bp, Probe sequence
ttctatggttacgatccaattgttt

SEQ ID NO: 171384 - DNA, 25 bp, Probe sequence
atcgcatttaatttacctgtaggca

SEQ ID NO: 171385 - DNA, 25 bp, Probe sequence
agggctaatgttttgtgctcgactg

SEQ ID NO: 171386 - DNA, 25 bp, Probe sequence
accttaaaactgcaccaaatccgat

SEQ ID NO: 171387 - DNA, 25 bp, Probe sequence
accatgtttatgtatcacgatttga

SEQ ID NO: 171388 - DNA, 25 bp, Probe sequence
acctaaccttccattcattgtagtt

SEQ ID NO: 171389 - DNA, 25 bp, Probe sequence
aaaaaggttcatctttgctctacct

SEQ ID NO: 171390 - DNA, 25 bp, Probe sequence
aaaactgcaccaaatccgatgaatc

SEQ ID NO: 171391 - DNA, 25 bp, Probe sequence
aacaagatgttggtcgttggtttgc

SEQ ID NO: 171392 - DNA, 25 bp, Probe sequence
aacgtgctgttacaagcatcgcatt

SEQ ID NO: 171393 - DNA, 25 bp, Probe sequence
aatgttttgtgctcgactgaaattc

SEQ ID NO: 171394 - DNA, 25 bp, Probe sequence
caagcatcgcatttaatttacctgt

SEQ ID NO: 171395 - DNA, 25 bp, Probe sequence
cacgatttgaatgtgagggctaatg

SEQ ID NO: 171396 - DNA, 25 bp, Probe sequence
catctttgctctaccttaaaactgc

SEQ ID NO: 171397 - DNA, 25 bp, Probe sequence
ctctaccttaaaactgcaccaaatc

SEQ ID NO: 171398 - DNA, 25 bp, Probe sequence
gctgttacaagcatcgcatttaatt

SEQ ID NO: 171399 - DNA, 25 bp, Probe sequence
gaatcatcaaaataactggaaaggt

SEQ ID NO: 171400 - DNA, 25 bp, Probe sequence
gatgttggtcgttggtttgcacatt

SEQ ID NO: 171401 - DNA, 25 bp, Probe sequence
gttggtttgcacattttgtaaaata

SEQ ID NO: 171402 - DNA, 25 bp, Probe sequence
gttttgtgctcgactgaaattcaac

SEQ ID NO: 171403 - DNA, 25 bp, Probe sequence
gtaggcaccatgtttatgtatcacg

SEQ ID NO: 171404 - DNA, 25 bp, Probe sequence
gtaaaatatacacctaaccttccat

SEQ ID NO: 171405 - DNA, 25 bp, Probe sequence
gtgctcgactgaaattcaacaagat

SEQ ID NO: 171406 - DNA, 25 bp, Probe sequence
ggtcgttggtttgcacattttgtaa

SEQ ID NO: 171407 - DNA, 25 bp, Probe sequence
ggttcatctttgctctaccttaaaa

SEQ ID NO: 171408 - DNA, 25 bp, Probe sequence
ggcaccatgtttatgtatcacgatt

SEQ ID NO: 171409 - DNA, 25 bp, Probe sequence
ggctaatgttttgtgctcgactgaa

SEQ ID NO: 171410 - DNA, 25 bp, Probe sequence
tgcaccaaatccgatgaatcatcaa

SEQ ID NO: 171411 - DNA, 25 bp, Probe sequence
taatttacctgtaggcaccatgttt

SEQ ID NO: 171412 - DNA, 25 bp, Probe sequence
taaccttccattcattgtagttgga

SEQ ID NO: 171413 - DNA, 25 bp, Probe sequence
tacacctaaccttccattcattgta

SEQ ID NO: 171414 - DNA, 25 bp, Probe sequence
tttgctctaccttaaaactgcacca

SEQ ID NO: 171415 - DNA, 25 bp, Probe sequence
ttatacactaaaacgtgctgttaca

SEQ ID NO: 171416 - DNA, 25 bp, Probe sequence
ttacctgtaggcaccatgtttatgt

SEQ ID NO: 171417 - DNA, 25 bp, Probe sequence
ttggtcgttggtttgcacattttgt

SEQ ID NO: 171418 - DNA, 25 bp, Probe sequence
ggtaagttttctgacgacactaggt

SEQ ID NO: 171419 - DNA, 25 bp, Probe sequence
aggcacttttgaagactggtggcaa

SEQ ID NO: 171420 - DNA, 25 bp, Probe sequence
agtacgatctacaacctaaaggcac

SEQ ID NO: 171421 - DNA, 25 bp, Probe sequence
acgggtaaatcaactgcagcggctt

SEQ ID NO: 171422 - DNA, 25 bp, Probe sequence
actaatcatgtatggcttcagcatc

SEQ ID NO: 171423 - DNA, 25 bp, Probe sequence
acaagtttcttgaccccaaatctgg

SEQ ID NO: 171424 - DNA, 25 bp, Probe sequence
acaattaatgcgccaatcactgcct

SEQ ID NO: 171425 - DNA, 25 bp, Probe sequence
aaagtccatacgcttatctagtcca

SEQ ID NO: 171426 - DNA, 25 bp, Probe sequence
aacatcgcaaaagttaccttcacta

SEQ ID NO: 171427 - DNA, 25 bp, Probe sequence
aactaacgctgacaacgcagatact

SEQ ID NO: 171428 - DNA, 25 bp, Probe sequence
aagattacatccagtcagacgccaa

SEQ ID NO: 171429 - DNA, 25 bp, Probe sequence
catgaggttgaattcgcaggtacga

SEQ ID NO: 171430 - DNA, 25 bp, Probe sequence
ctgcctctgtcatcgttgtatacgg

SEQ ID NO: 171431 - DNA, 25 bp, Probe sequence
ctgcagcggctttaggagtctcaat

SEQ ID NO: 171432 - DNA, 25 bp, Probe sequence
cgaactgtcatctgcaacctttaaa

SEQ ID NO: 171433 - DNA, 25 bp, Probe sequence
gccacacctgttgatttgaatgctg

SEQ ID NO: 171434 - DNA, 25 bp, Probe sequence
gctgtagtgtttggtatttcttcat

SEQ ID NO: 171435 - DNA, 25 bp, Probe sequence
gcaggtacgattttctcatttacgg

SEQ ID NO: 171436 - DNA, 25 bp, Probe sequence
gcaaccattacaacatcagcacgta

SEQ ID NO: 171437 - DNA, 25 bp, Probe sequence
gaaacttgttactcgaacttgctgt

SEQ ID NO: 171438 - DNA, 25 bp, Probe sequence
gacactaggttatcaacgcttattg

SEQ ID NO: 171439 - DNA, 25 bp, Probe sequence
gaaattacacagtcgcaggcggatg

SEQ ID NO: 171440 - DNA, 25 bp, Probe sequence
gataaaggtgtcgtcatttcattag

SEQ ID NO: 171441 - DNA, 25 bp, Probe sequence
gatacaactggtttgctctattcaa

SEQ ID NO: 171442 - DNA, 25 bp, Probe sequence
gttgtatacgggtgtcggtgtgtta

SEQ ID NO: 171443 - DNA, 25 bp, Probe sequence
gttagtgagcgaagcctagctgata

SEQ ID NO: 171444 - DNA, 25 bp, Probe sequence
gtgaatatccatactggcttactga

SEQ ID NO: 171445 - DNA, 25 bp, Probe sequence
ggtgaaaatgattgcctcggttttt

SEQ ID NO: 171446 - DNA, 25 bp, Probe sequence
ggtcatatcatgccattagtagctg

SEQ ID NO: 171447 - DNA, 25 bp, Probe sequence
ggatgttcaaacgctatgcaaccat

SEQ ID NO: 171448 - DNA, 25 bp, Probe sequence
ggaatggcactagaaacgcgcttga

SEQ ID NO: 171449 - DNA, 25 bp, Probe sequence
tgctctattcaattgccgaaggtca

SEQ ID NO: 171450 - DNA, 25 bp, Probe sequence
tctcaataaccggcaaccctactaa

SEQ ID NO: 171451 - DNA, 25 bp, Probe sequence
ttggaacgtgtcattgccacacctg

SEQ ID NO: 171452 - DNA, 25 bp, Probe sequence
attccagttcaatatgcataatagt

SEQ ID NO: 171453 - DNA, 25 bp, Probe sequence
attacttgccagcaatgttgcagca

SEQ ID NO: 171454 - DNA, 25 bp, Probe sequence
atcaaacataagcaagaacgtccag

SEQ ID NO: 171455 - DNA, 25 bp, Probe sequence
atggaaacttgtagcgcaacgcgaa

SEQ ID NO: 171456 - DNA, 25 bp, Probe sequence
atggatacacatagctcagataagc

SEQ ID NO: 171457 - DNA, 25 bp, Probe sequence
agtattgccaattacttgccagcaa

SEQ ID NO: 171458 - DNA, 25 bp, Probe sequence
agcaagaacgtccagagtacgtaaa

SEQ ID NO: 171459 - DNA, 25 bp, Probe sequence
agcgcaacgcgaaaacgaacaattc

SEQ ID NO: 171460 - DNA, 25 bp, Probe sequence
acataagcaagaacgtccagagtac

SEQ ID NO: 171461 - DNA, 25 bp, Probe sequence
acagtcattacagaagttattacaa

SEQ ID NO: 171462 - DNA, 25 bp, Probe sequence
aagcgtcacagtcattacagaagtt

SEQ ID NO: 171463 - DNA, 25 bp, Probe sequence
aaggaactagaagagattgattact

SEQ ID NO: 171464 - DNA, 25 bp, Probe sequence
aatgagcatgaaacgttatattaca

SEQ ID NO: 171465 - DNA, 25 bp, Probe sequence
cttgccagcaatgttgcagcaacag

SEQ ID NO: 171466 - DNA, 25 bp, Probe sequence
gccaattacttgccagcaatgttgc

SEQ ID NO: 171467 - DNA, 25 bp, Probe sequence
gcgtcacagtcattacagaagttat

SEQ ID NO: 171468 - DNA, 25 bp, Probe sequence
gctcagataagcgtcacagtcatta

SEQ ID NO: 171469 - DNA, 25 bp, Probe sequence
gctatcaatattaataaggtctaca

SEQ ID NO: 171470 - DNA, 25 bp, Probe sequence
gaaaacgaacaattcaaggaactag

SEQ ID NO: 171471 - DNA, 25 bp, Probe sequence
gaaacttgtagcgcaacgcgaaaac

SEQ ID NO: 171472 - DNA, 25 bp, Probe sequence
gagtacgtaaaaattcataaggcaa

SEQ ID NO: 171473 - DNA, 25 bp, Probe sequence
gataagcgtcacagtcattacagaa

SEQ ID NO: 171474 - DNA, 25 bp, Probe sequence
gattgattactttcatatattccag

SEQ ID NO: 171475 - DNA, 25 bp, Probe sequence
gttcaatatgcataatagtcaatta

SEQ ID NO: 171476 - DNA, 25 bp, Probe sequence
gttatggaaacttgtagcgcaacgc

SEQ ID NO: 171477 - DNA, 25 bp, Probe sequence
gttatattacacgtagtattgccaa

SEQ ID NO: 171478 - DNA, 25 bp, Probe sequence
gtagtattgccaattacttgccagc

SEQ ID NO: 171479 - DNA, 25 bp, Probe sequence
gtcatgttgttacctgaagaatatt

SEQ ID NO: 171480 - DNA, 25 bp, Probe sequence
tgttgcagcaacagttatggaaact

SEQ ID NO: 171481 - DNA, 25 bp, Probe sequence
tacacatagctcagataagcgtcac

SEQ ID NO: 171482 - DNA, 25 bp, Probe sequence
tactttcatatattccagttcaata

SEQ ID NO: 171483 - DNA, 25 bp, Probe sequence
ttattacgtcatgttgttacctgaa

SEQ ID NO: 171484 - DNA, 25 bp, Probe sequence
ttacgtcatgttgttacctgaagaa

SEQ ID NO: 171485 - DNA, 25 bp, Probe sequence
ttaataaggtctacattatccgaga

SEQ ID NO: 171486 - DNA, 25 bp, Probe sequence
aggcatggacaattaaaccattaaa

SEQ ID NO: 171487 - DNA, 25 bp, Probe sequence
atacgctagaaaggcatggacaatt

SEQ ID NO: 171488 - DNA, 25 bp, Probe sequence
atggtggcgttaattttataaatct

SEQ ID NO: 171489 - DNA, 25 bp, Probe sequence
agaagtacttacaattataacgatg

SEQ ID NO: 171490 - DNA, 25 bp, Probe sequence
agccatgacaagcacacggatattc

SEQ ID NO: 171491 - DNA, 25 bp, Probe sequence
acaattataacgatgtatcctcatt

SEQ ID NO: 171492 - DNA, 25 bp, Probe sequence
aaatcagtatattaacaaatcctca

SEQ ID NO: 171493 - DNA, 25 bp, Probe sequence
aaaagatgaatatggtggcgttaat

SEQ ID NO: 171494 - DNA, 25 bp, Probe sequence
aaaacatatcgaaaacagccatgac

SEQ ID NO: 171495 - DNA, 25 bp, Probe sequence
aaaacctcttgtggaaaatcgagtg

SEQ ID NO: 171496 - DNA, 25 bp, Probe sequence
aaaacctcacagtaagaaaatcagt

SEQ ID NO: 171497 - DNA, 25 bp, Probe sequence
aaaatgcatcgttatcttctcaaga

SEQ ID NO: 171498 - DNA, 25 bp, Probe sequence
aacagccatgacaagcacacggata

SEQ ID NO: 171499 - DNA, 25 bp, Probe sequence
aacgatgtatcctcattatgatggt

SEQ ID NO: 171500 - DNA, 25 bp, Probe sequence
aagcacacggatattcacattatga

SEQ ID NO: 171501 - DNA, 25 bp, Probe sequence
aagtgtattagaaactgaagcgata

SEQ ID NO: 171502 - DNA, 25 bp, Probe sequence
caacgttgaccttacaacacaactt

SEQ ID NO: 171503 - DNA, 25 bp, Probe sequence
gctgtcaaagaagccgatagtgttt

SEQ ID NO: 171504 - DNA, 25 bp, Probe sequence
gcatccattaaatccatacgctaga

SEQ ID NO: 171505 - DNA, 25 bp, Probe sequence
gcatcgttatcttctcaagaaaact

SEQ ID NO: 171506 - DNA, 25 bp, Probe sequence
gaagtattagacatgttaaaacctc

SEQ ID NO: 171507 - DNA, 25 bp, Probe sequence
gaaatcatgcatccattaaatccat

SEQ ID NO: 171508 - DNA, 25 bp, Probe sequence
gacaagcacacggatattcacatta

SEQ ID NO: 171509 - DNA, 25 bp, Probe sequence
gacatgttaaaacctcacagtaaga

SEQ ID NO: 171510 - DNA, 25 bp, Probe sequence
gaccttacaacacaacttattgtca

SEQ ID NO: 171511 - DNA, 25 bp, Probe sequence
gatggtgttatcaacgttgacctta

SEQ ID NO: 171512 - DNA, 25 bp, Probe sequence
gatagtgttttattggcttggggtt

SEQ ID NO: 171513 - DNA, 25 bp, Probe sequence
gtatattaacaaatcctcaaacaaa

SEQ ID NO: 171514 - DNA, 25 bp, Probe sequence
gtatcctcattatgatggtgttatc

SEQ ID NO: 171515 - DNA, 25 bp, Probe sequence
ggtgttatcaacgttgaccttacaa

SEQ ID NO: 171516 - DNA, 25 bp, Probe sequence
tgatacccccattaatttaaaacat

SEQ ID NO: 171517 - DNA, 25 bp, Probe sequence
tgaagcgatatttagtcaggataaa

SEQ ID NO: 171518 - DNA, 25 bp, Probe sequence
tttcaaatattgatacccccattaa

SEQ ID NO: 171519 - DNA, 25 bp, Probe sequence
ttcacattatgaaagctgtcaaaga

SEQ ID NO: 171520 - DNA, 25 bp, Probe sequence
attctatcacatccattgttcaccc

SEQ ID NO: 171521 - DNA, 25 bp, Probe sequence
attatcgccttttcatcaaacaaaa

SEQ ID NO: 171522 - DNA, 25 bp, Probe sequence
atttaatgcatcaaccacacatcga

SEQ ID NO: 171523 - DNA, 25 bp, Probe sequence
atatttaatgcatcaaccacacatc

SEQ ID NO: 171524 - DNA, 25 bp, Probe sequence
atcaaccacacatcgatgttattaa

SEQ ID NO: 171525 - DNA, 25 bp, Probe sequence
atccattgttcaccctgacttaata

SEQ ID NO: 171526 - DNA, 25 bp, Probe sequence
atgcatcaaccacacatcgatgtta

SEQ ID NO: 171527 - DNA, 25 bp, Probe sequence
atgagctatattccatttatatgaa

SEQ ID NO: 171528 - DNA, 25 bp, Probe sequence
atgatgattctatcacatccattgt

SEQ ID NO: 171529 - DNA, 25 bp, Probe sequence
atgattctatcacatccattgttca

SEQ ID NO: 171530 - DNA, 25 bp, Probe sequence
aggcattatcgccttttcatcaaac

SEQ ID NO: 171531 - DNA, 25 bp, Probe sequence
acacatcgatgttattaaaggcatt

SEQ ID NO: 171532 - DNA, 25 bp, Probe sequence
aatgcatcaaccacacatcgatgtt

SEQ ID NO: 171533 - DNA, 25 bp, Probe sequence
caatatttaatgcatcaaccacaca

SEQ ID NO: 171534 - DNA, 25 bp, Probe sequence
caaccacacatcgatgttattaaag

SEQ ID NO: 171535 - DNA, 25 bp, Probe sequence
cattatcgccttttcatcaaacaaa

SEQ ID NO: 171536 - DNA, 25 bp, Probe sequence
cattgttcaccctgacttaatagaa

SEQ ID NO: 171537 - DNA, 25 bp, Probe sequence
ccattgttcaccctgacttaataga

SEQ ID NO: 171538 - DNA, 25 bp, Probe sequence
gctatattccatttatatgaatgat

SEQ ID NO: 171539 - DNA, 25 bp, Probe sequence
gcattatcgccttttcatcaaacaa

SEQ ID NO: 171540 - DNA, 25 bp, Probe sequence
gcatcaaccacacatcgatgttatt

SEQ ID NO: 171541 - DNA, 25 bp, Probe sequence
gaatgatgattctatcacatccatt

SEQ ID NO: 171542 - DNA, 25 bp, Probe sequence
gaagtataccaatatttaatgcatc

SEQ ID NO: 171543 - DNA, 25 bp, Probe sequence
gaaagtatagagcttatccataatg

SEQ ID NO: 171544 - DNA, 25 bp, Probe sequence
gattctatcacatccattgttcacc

SEQ ID NO: 171545 - DNA, 25 bp, Probe sequence
gttcaccctgacttaatagaaagta

SEQ ID NO: 171546 - DNA, 25 bp, Probe sequence
gtatagagcttatccataatgagta

SEQ ID NO: 171547 - DNA, 25 bp, Probe sequence
tgattctatcacatccattgttcac

SEQ ID NO: 171548 - DNA, 25 bp, Probe sequence
tccattgttcaccctgacttaatag

SEQ ID NO: 171549 - DNA, 25 bp, Probe sequence
taaaggcattatcgccttttcatca

SEQ ID NO: 171550 - DNA, 25 bp, Probe sequence
taccaatatttaatgcatcaaccac

SEQ ID NO: 171551 - DNA, 25 bp, Probe sequence
tatcgccttttcatcaaacaaaaaa

SEQ ID NO: 171552 - DNA, 25 bp, Probe sequence
tttaatgcatcaaccacacatcgat

SEQ ID NO: 171553 - DNA, 25 bp, Probe sequence
ttgttcaccctgacttaatagaaag

SEQ ID NO: 171554 - DNA, 25 bp, Probe sequence
atgctgaccgagaacacttcatttt

SEQ ID NO: 171555 - DNA, 25 bp, Probe sequence
agccatattaagtaacgcaacgggt

SEQ ID NO: 171556 - DNA, 25 bp, Probe sequence
accgtctctataggaaccattaatt

SEQ ID NO: 171557 - DNA, 25 bp, Probe sequence
aaacagccatattaagtaacgcaac

SEQ ID NO: 171558 - DNA, 25 bp, Probe sequence
aacgcaacgggtatgattattggcc

SEQ ID NO: 171559 - DNA, 25 bp, Probe sequence
aagtggagacatattaaccatagta

SEQ ID NO: 171560 - DNA, 25 bp, Probe sequence
cacatattgaaaccgtctctatagg

SEQ ID NO: 171561 - DNA, 25 bp, Probe sequence
cctacacatattgaaaccgtctcta

SEQ ID NO: 171562 - DNA, 25 bp, Probe sequence
cctcgagaaatatttaaaacagcca

SEQ ID NO: 171563 - DNA, 25 bp, Probe sequence
ccacccaagtggagacatattaacc

SEQ ID NO: 171564 - DNA, 25 bp, Probe sequence
ccaaaagacgctgctgatattatgc

SEQ ID NO: 171565 - DNA, 25 bp, Probe sequence
gctgaccgagaacacttcattttaa

SEQ ID NO: 171566 - DNA, 25 bp, Probe sequence
gctgctgatattatgcgtgacttca

SEQ ID NO: 171567 - DNA, 25 bp, Probe sequence
gcttgaatagcaaaaatgaacctac

SEQ ID NO: 171568 - DNA, 25 bp, Probe sequence
gaatagatgttgtcaaagtccaaat

SEQ ID NO: 171569 - DNA, 25 bp, Probe sequence
gaagaaccaaaagacgctgctgata

SEQ ID NO: 171570 - DNA, 25 bp, Probe sequence
gaacctacacatattgaaaccgtct

SEQ ID NO: 171571 - DNA, 25 bp, Probe sequence
gaacacttcattttaatttgcttga

SEQ ID NO: 171572 - DNA, 25 bp, Probe sequence
gaaaccgtctctataggaaccatta

SEQ ID NO: 171573 - DNA, 25 bp, Probe sequence
gagaacacttcattttaatttgctt

SEQ ID NO: 171574 - DNA, 25 bp, Probe sequence
gattattggccataaccacccaagt

SEQ ID NO: 171575 - DNA, 25 bp, Probe sequence
gatgttgtcaaagtccaaatggtta

SEQ ID NO: 171576 - DNA, 25 bp, Probe sequence
gatattatgcgtgacttcataggaa

SEQ ID NO: 171577 - DNA, 25 bp, Probe sequence
gtgacttcataggaaatgctgaccg

SEQ ID NO: 171578 - DNA, 25 bp, Probe sequence
ggttatacatcctcgagaaatattt

SEQ ID NO: 171579 - DNA, 25 bp, Probe sequence
ggaaatgctgaccgagaacacttca

SEQ ID NO: 171580 - DNA, 25 bp, Probe sequence
ggccataaccacccaagtggagaca

SEQ ID NO: 171581 - DNA, 25 bp, Probe sequence
tctataggaaccattaattttgcgg

SEQ ID NO: 171582 - DNA, 25 bp, Probe sequence
taattttgcggttatacatcctcga

SEQ ID NO: 171583 - DNA, 25 bp, Probe sequence
taaagaagatacactttggtattta

SEQ ID NO: 171584 - DNA, 25 bp, Probe sequence
tatgattattggccataaccaccca

SEQ ID NO: 171585 - DNA, 25 bp, Probe sequence
tattggccataaccacccaagtgga

SEQ ID NO: 171586 - DNA, 25 bp, Probe sequence
ttttgcggttatacatcctcgagaa

SEQ ID NO: 171587 - DNA, 25 bp, Probe sequence
ttgcggttatacatcctcgagaaat

SEQ ID NO: 171588 - DNA, 25 bp, Probe sequence
atatgtgaacaattcattgactaaa

SEQ ID NO: 171589 - DNA, 25 bp, Probe sequence
agtacctgataatgtgagaaatctc

SEQ ID NO: 171590 - DNA, 25 bp, Probe sequence
agatggttacaaatactatagcttt

SEQ ID NO: 171591 - DNA, 25 bp, Probe sequence
gttgaaggcggtccaactttgcgtt

SEQ ID NO: 171592 - DNA, 25 bp, Probe sequence
agctttgttgactctatcggacttc

SEQ ID NO: 171593 - DNA, 25 bp, Probe sequence
accaatcaagcaacgaatcaagcat

SEQ ID NO: 171594 - DNA, 25 bp, Probe sequence
actatagctttgttgactctatcgg

SEQ ID NO: 171595 - DNA, 25 bp, Probe sequence
acaattcaggcgttgatgttaatga

SEQ ID NO: 171596 - DNA, 25 bp, Probe sequence
aaatgctgatactaatgatacgatt

SEQ ID NO: 171597 - DNA, 25 bp, Probe sequence
aagccgaagttgacagacgtattca

SEQ ID NO: 171598 - DNA, 25 bp, Probe sequence
aagactgttgaaggcggtccaactt

SEQ ID NO: 171599 - DNA, 25 bp, Probe sequence
aagatttcattaattcagctgcaga

SEQ ID NO: 171600 - DNA, 25 bp, Probe sequence
aaggcgcaacaaatgttattatcaa

SEQ ID NO: 171601 - DNA, 25 bp, Probe sequence
cacaagatttcattaattcagctgc

SEQ ID NO: 171602 - DNA, 25 bp, Probe sequence
caggcgttgatgttaatgatatgaa

SEQ ID NO: 171603 - DNA, 25 bp, Probe sequence
ctttgttgactctatcggacttcat

SEQ ID NO: 171604 - DNA, 25 bp, Probe sequence
ctctatcggacttcattctgggtca

SEQ ID NO: 171605 - DNA, 25 bp, Probe sequence
gctgatactaatgatacgattgctg

SEQ ID NO: 171606 - DNA, 25 bp, Probe sequence
gcattacaagccgaagttgacagac

SEQ ID NO: 171607 - DNA, 25 bp, Probe sequence
gcaacaaccaatcaagcaacgaatc

SEQ ID NO: 171608 - DNA, 25 bp, Probe sequence
gcaatgttgtaaatgataaagcgcg

SEQ ID NO: 171609 - DNA, 25 bp, Probe sequence
gagaaatctcaaaattcaatttgta

SEQ ID NO: 171610 - DNA, 25 bp, Probe sequence
gatacgattgctgaaaagactgttg

SEQ ID NO: 171611 - DNA, 25 bp, Probe sequence
gattttccaagtaacaattcaggcg

SEQ ID NO: 171612 - DNA, 25 bp, Probe sequence
ggtcaaggcgcaacaaatgttatta

SEQ ID NO: 171613 - DNA, 25 bp, Probe sequence
tgttgactctatcggacttcattct

SEQ ID NO: 171614 - DNA, 25 bp, Probe sequence
tgactctatcggacttcattctggg

SEQ ID NO: 171615 - DNA, 25 bp, Probe sequence
tgacagacgtattcaacaagctgat

SEQ ID NO: 171616 - DNA, 25 bp, Probe sequence
tccaagtaacaattcaggcgttgat

SEQ ID NO: 171617 - DNA, 25 bp, Probe sequence
taattcagctgcagaaagtcatact

SEQ ID NO: 171618 - DNA, 25 bp, Probe sequence
tcaatctgcaacaaccaatcaagca

SEQ ID NO: 171619 - DNA, 25 bp, Probe sequence
tttgcgtttatttaaagtacctgat

SEQ ID NO: 171620 - DNA, 25 bp, Probe sequence
ttcagctgcagaaagtcatactgta

SEQ ID NO: 171621 - DNA, 25 bp, Probe sequence
ttcacaagataaagatgttgctaat

SEQ ID NO: 171622 - DNA, 25 bp, Probe sequence
atcatgcagataagactgcccaagt

SEQ ID NO: 171623 - DNA, 25 bp, Probe sequence
agatacaccacatgcaacagttgat

SEQ ID NO: 171624 - DNA, 25 bp, Probe sequence
agctcaaaatgcactaatcgatcaa

SEQ ID NO: 171625 - DNA, 25 bp, Probe sequence
agcgcgtcaatctgttggtgtaaaa

SEQ ID NO: 171626 - DNA, 25 bp, Probe sequence
acgagctgcgcttgatagcattgaa

SEQ ID NO: 171627 - DNA, 25 bp, Probe sequence
actgagactgatggcaacgacaaca

SEQ ID NO: 171628 - DNA, 25 bp, Probe sequence
aagcgaatattcaagcaacggtaga

SEQ ID NO: 171629 - DNA, 25 bp, Probe sequence
aagatgctgctgttactgatgttag

SEQ ID NO: 171630 - DNA, 25 bp, Probe sequence
aatggcattgctacactaaaaggtg

SEQ ID NO: 171631 - DNA, 25 bp, Probe sequence
aatacgttggatactactcaagatg

SEQ ID NO: 171632 - DNA, 25 bp, Probe sequence
aattcagccagctccaaaagtttgt

SEQ ID NO: 171633 - DNA, 25 bp, Probe sequence
caacctcatattgtaattaagcctg

SEQ ID NO: 171634 - DNA, 25 bp, Probe sequence
caaaagttaaaccagctgcacgtga

SEQ ID NO: 171635 - DNA, 25 bp, Probe sequence
cttgcacgcgtcactgctttagtgc

SEQ ID NO: 171636 - DNA, 25 bp, Probe sequence
ctcgatgcaatccgaaatacgttgg

SEQ ID NO: 171637 - DNA, 25 bp, Probe sequence
ctgttggtgtaaaagccgaagctca

SEQ ID NO: 171638 - DNA, 25 bp, Probe sequence
gcagaagtggatcgaactgagactg

SEQ ID NO: 171639 - DNA, 25 bp, Probe sequence
gcaattaaattaccagctgaagcga

SEQ ID NO: 171640 - DNA, 25 bp, Probe sequence
gaatcaattaattagcgacacactc

SEQ ID NO: 171641 - DNA, 25 bp, Probe sequence
gaaagaatttgcactgattacaggt

SEQ ID NO: 171642 - DNA, 25 bp, Probe sequence
gaaaggcgtctgctcgagaacaatt

SEQ ID NO: 171643 - DNA, 25 bp, Probe sequence
gacacactcaaacaagcgcaacaag

SEQ ID NO: 171644 - DNA, 25 bp, Probe sequence
gactgcccaagttaatcaagatagt

SEQ ID NO: 171645 - DNA, 25 bp, Probe sequence
gagacacatgaatcgcgcaaagttg

SEQ ID NO: 171646 - DNA, 25 bp, Probe sequence
gagatgttgctattgatactttaaa

SEQ ID NO: 171647 - DNA, 25 bp, Probe sequence
gattacaggtgcggctttgttagct

SEQ ID NO: 171648 - DNA, 25 bp, Probe sequence
gtaagacgtaaacgagctgcgcttg

SEQ ID NO: 171649 - DNA, 25 bp, Probe sequence
gtcaagcgcttgatagcattgcttt

SEQ ID NO: 171650 - DNA, 25 bp, Probe sequence
gtgcggctttgttagctagaagacg

SEQ ID NO: 171651 - DNA, 25 bp, Probe sequence
gtggatcaagagttagcaacggcaa

SEQ ID NO: 171652 - DNA, 25 bp, Probe sequence
tgatgatacaacaagtcaagcgctt

SEQ ID NO: 171653 - DNA, 25 bp, Probe sequence
tcgatcaaagcgatttatcaactga

SEQ ID NO: 171654 - DNA, 25 bp, Probe sequence
tcaagccatgacagatattacgaat

SEQ ID NO: 171655 - DNA, 25 bp, Probe sequence
ttaagcctgaagcacaacaagcaat

SEQ ID NO: 171656 - DNA, 25 bp, Probe sequence
ggtggaggttcaggtaactcgccgg

SEQ ID NO: 171657 - DNA, 25 bp, Probe sequence
attggtctacattctggttcgcatg

SEQ ID NO: 171658 - DNA, 25 bp, Probe sequence
atgtgacgtatgatgcggcgaatcg

SEQ ID NO: 171659 - DNA, 25 bp, Probe sequence
agttgcgtgttaataatgtaccgac

SEQ ID NO: 171660 - DNA, 25 bp, Probe sequence
agttgttcctcaagtgacacataaa

SEQ ID NO: 171661 - DNA, 25 bp, Probe sequence
actaatcaatcaacgaatcaagcat

SEQ ID NO: 171662 - DNA, 25 bp, Probe sequence
aaagacgtgcacaaacgattttaga

SEQ ID NO: 171663 - DNA, 25 bp, Probe sequence
aacttcggtgcttcatttaatacag

SEQ ID NO: 171664 - DNA, 25 bp, Probe sequence
aagaatttacagtcacaacttcatt

SEQ ID NO: 171665 - DNA, 25 bp, Probe sequence
aatggaacccacagctactaataat

SEQ ID NO: 171666 - DNA, 25 bp, Probe sequence
aatttaccaggctttacacttatca

SEQ ID NO: 171667 - DNA, 25 bp, Probe sequence
aattgcattaggtcgtattaaggga

SEQ ID NO: 171668 - DNA, 25 bp, Probe sequence
caagccgaggttgatagacgcattc

SEQ ID NO: 171669 - DNA, 25 bp, Probe sequence
gcggcaggaaacggtggtgcaccag

SEQ ID NO: 171670 - DNA, 25 bp, Probe sequence
gaataatggtaacttcggtgcttca

SEQ ID NO: 171671 - DNA, 25 bp, Probe sequence
gaaaaatcagtagcttatggtccga

SEQ ID NO: 171672 - DNA, 25 bp, Probe sequence
gacgaacaatggaacccacagctac

SEQ ID NO: 171673 - DNA, 25 bp, Probe sequence
gactttgttgactcaattggtctac

SEQ ID NO: 171674 - DNA, 25 bp, Probe sequence
gagatgctaagaactatcaagcaca

SEQ ID NO: 171675 - DNA, 25 bp, Probe sequence
gatgcggcgaatcgagtgataacaa

SEQ ID NO: 171676 - DNA, 25 bp, Probe sequence
gtaggtgtgtttagtcatgcgatgg

SEQ ID NO: 171677 - DNA, 25 bp, Probe sequence
gtaccatcagtaacagttgttgata

SEQ ID NO: 171678 - DNA, 25 bp, Probe sequence
gtggtgcaccagtagcaattacagc

SEQ ID NO: 171679 - DNA, 25 bp, Probe sequence
ggtaactcgccggcacgattaatgc

SEQ ID NO: 171680 - DNA, 25 bp, Probe sequence
ggctttacacttatcaatggtggta

SEQ ID NO: 171681 - DNA, 25 bp, Probe sequence
tggcgtttgtttaaagtgcctgaaa

SEQ ID NO: 171682 - DNA, 25 bp, Probe sequence
tgtagtgtcgaataataccacatta

SEQ ID NO: 171683 - DNA, 25 bp, Probe sequence
tgatagacgcattcaacaagctgat

SEQ ID NO: 171684 - DNA, 25 bp, Probe sequence
tgctgtcttttgatgacaatggtat

SEQ ID NO: 171685 - DNA, 25 bp, Probe sequence
tccagcggctgcagcggcaggaaac

SEQ ID NO: 171686 - DNA, 25 bp, Probe sequence
tcaatctgcaacaactaatcaatca

SEQ ID NO: 171687 - DNA, 25 bp, Probe sequence
taccaaccgttctgtaccatcagta

SEQ ID NO: 171688 - DNA, 25 bp, Probe sequence
ttttccaagcagtaattcaggtgtt

SEQ ID NO: 171689 - DNA, 25 bp, Probe sequence
ttctggttcgcatgtctatgttgaa

SEQ ID NO: 171690 - DNA, 25 bp, Probe sequence
attgctttagtagcgcctgaacata

SEQ ID NO: 171691 - DNA, 25 bp, Probe sequence
atcaatcaagcagtaacgaataatg

SEQ ID NO: 171692 - DNA, 25 bp, Probe sequence
agtaaagcaacaatatgaggctaaa

SEQ ID NO: 171693 - DNA, 25 bp, Probe sequence
agtagcgcctgaacatattgttaga

SEQ ID NO: 171694 - DNA, 25 bp, Probe sequence
agaaatagagcaagctgaacatgcg

SEQ ID NO: 171695 - DNA, 25 bp, Probe sequence
agcattgctttagtagcgcctgaac

SEQ ID NO: 171696 - DNA, 25 bp, Probe sequence
agcgcctgaacatattgttagagca

SEQ ID NO: 171697 - DNA, 25 bp, Probe sequence
acaaaacatcaatcaagcagtaacg

SEQ ID NO: 171698 - DNA, 25 bp, Probe sequence
aaatagagcaagctgaacatgcgac

SEQ ID NO: 171699 - DNA, 25 bp, Probe sequence
aaacatcaatcaagcagtaacgaat

SEQ ID NO: 171700 - DNA, 25 bp, Probe sequence
aaaacatcaatcaagcagtaacgaa

SEQ ID NO: 171701 - DNA, 25 bp, Probe sequence
aacatcaatcaagcagtaacgaata

SEQ ID NO: 171702 - DNA, 25 bp, Probe sequence
aagcaagaaatagagcaagctgaac

SEQ ID NO: 171703 - DNA, 25 bp, Probe sequence
aagaaatagagcaagctgaacatgc

SEQ ID NO: 171704 - DNA, 25 bp, Probe sequence
caaaacatcaatcaagcagtaacga

SEQ ID NO: 171705 - DNA, 25 bp, Probe sequence
cagtaaagcaacaatatgaggctaa

SEQ ID NO: 171706 - DNA, 25 bp, Probe sequence
catcaatcaagcagtaacgaataat

SEQ ID NO: 171707 - DNA, 25 bp, Probe sequence
cattgctttagtagcgcctgaacat

SEQ ID NO: 171708 - DNA, 25 bp, Probe sequence
ctttagtagcgcctgaacatattgt

SEQ ID NO: 171709 - DNA, 25 bp, Probe sequence
gctttagtagcgcctgaacatattg

SEQ ID NO: 171710 - DNA, 25 bp, Probe sequence
gcattgctttagtagcgcctgaaca

SEQ ID NO: 171711 - DNA, 25 bp, Probe sequence
gcagtaaagcaacaatatgaggcta

SEQ ID NO: 171712 - DNA, 25 bp, Probe sequence
gcaagaaatagagcaagctgaacat

SEQ ID NO: 171713 - DNA, 25 bp, Probe sequence
gaaatagagcaagctgaacatgcga

SEQ ID NO: 171714 - DNA, 25 bp, Probe sequence
gtagcgcctgaacatattgttagag

SEQ ID NO: 171715 - DNA, 25 bp, Probe sequence
gtaaagcaacaatatgaggctaaaa

SEQ ID NO: 171716 - DNA, 25 bp, Probe sequence
tgctttagtagcgcctgaacatatt

SEQ ID NO: 171717 - DNA, 25 bp, Probe sequence
tcaatcaagcagtaacgaataatga

SEQ ID NO: 171718 - DNA, 25 bp, Probe sequence
tagcgcctgaacatattgttagagc

SEQ ID NO: 171719 - DNA, 25 bp, Probe sequence
tagcattgctttagtagcgcctgaa

SEQ ID NO: 171720 - DNA, 25 bp, Probe sequence
tagtagcgcctgaacatattgttag

SEQ ID NO: 171721 - DNA, 25 bp, Probe sequence
ttgctttagtagcgcctgaacatat

SEQ ID NO: 171722 - DNA, 25 bp, Probe sequence
tttagtagcgcctgaacatattgtt

SEQ ID NO: 171723 - DNA, 25 bp, Probe sequence
ttagtagcgcctgaacatattgtta

SEQ ID NO: 171724 - DNA, 25 bp, Probe sequence
atcaagcattacctggcaactcaca

SEQ ID NO: 171725 - DNA, 25 bp, Probe sequence
atgcaacaccagcagatccaacggc

SEQ ID NO: 171726 - DNA, 25 bp, Probe sequence
agagaagcagacgtgctgcgccaac

SEQ ID NO: 171727 - DNA, 25 bp, Probe sequence
agactcaatcggtcttcattctggg

SEQ ID NO: 171728 - DNA, 25 bp, Probe sequence
agctacgtgtgaacaatgtgccaac

SEQ ID NO: 171729 - DNA, 25 bp, Probe sequence
aaagattttcctagcggtaattcag

SEQ ID NO: 171730 - DNA, 25 bp, Probe sequence
aagccacgaaccacgcattagaaca

SEQ ID NO: 171731 - DNA, 25 bp, Probe sequence
aatttaccaggctacacactgatta

SEQ ID NO: 171732 - DNA, 25 bp, Probe sequence
cacacgccagatgctactcaagatg

SEQ ID NO: 171733 - DNA, 25 bp, Probe sequence
caacaactgatcccaatgccaataa

SEQ ID NO: 171734 - DNA, 25 bp, Probe sequence
caaaatactcctaatgcacatgcaa

SEQ ID NO: 171735 - DNA, 25 bp, Probe sequence
ctagcgcgtcgcctgcgcaaaataa

SEQ ID NO: 171736 - DNA, 25 bp, Probe sequence
cctattgcgcctgtaactgttgtca

SEQ ID NO: 171737 - DNA, 25 bp, Probe sequence
gtggaggtacagggaattcgccggc

SEQ ID NO: 171738 - DNA, 25 bp, Probe sequence
gctgcgccaacagatcctaatgcaa

SEQ ID NO: 171739 - DNA, 25 bp, Probe sequence
gaattaacgcaagccacgaaccacg

SEQ ID NO: 171740 - DNA, 25 bp, Probe sequence
gaaccgttctgtgcctacagtaact

SEQ ID NO: 171741 - DNA, 25 bp, Probe sequence
gaccaagtacgaaccgttctgtgcc

SEQ ID NO: 171742 - DNA, 25 bp, Probe sequence
gacgcattgcaagccgaagtcgata

SEQ ID NO: 171743 - DNA, 25 bp, Probe sequence
gagaaattatcaatcacacgccaga

SEQ ID NO: 171744 - DNA, 25 bp, Probe sequence
gatgttcgtcattcgtctgataagc

SEQ ID NO: 171745 - DNA, 25 bp, Probe sequence
gattcagcgcgtcatctgactttaa

SEQ ID NO: 171746 - DNA, 25 bp, Probe sequence
gttaattcgcagtgttgacgctgaa

SEQ ID NO: 171747 - DNA, 25 bp, Probe sequence
gtaaatgctgctgtagctgttgcga

SEQ ID NO: 171748 - DNA, 25 bp, Probe sequence
gtatacaagccattgaaccagctac

SEQ ID NO: 171749 - DNA, 25 bp, Probe sequence
gtaggggtgtttagtcatgcaatgg

SEQ ID NO: 171750 - DNA, 25 bp, Probe sequence
gtaactttggcgcttcattcaatac

SEQ ID NO: 171751 - DNA, 25 bp, Probe sequence
ggtgcagttgcgccacaagtgacac

SEQ ID NO: 171752 - DNA, 25 bp, Probe sequence
ggaattcgccggcacgactaatgcc

SEQ ID NO: 171753 - DNA, 25 bp, Probe sequence
tgtggcaaatcaagtcgggcctgct

SEQ ID NO: 171754 - DNA, 25 bp, Probe sequence
ggagacactgcaacaccagttgtta

SEQ ID NO: 171755 - DNA, 25 bp, Probe sequence
tggtccgatttggcgcttattaaaa

SEQ ID NO: 171756 - DNA, 25 bp, Probe sequence
tgaatgccattaatcctattgcgcc

SEQ ID NO: 171757 - DNA, 25 bp, Probe sequence
tcaacagcaacagagccagcggcga

SEQ ID NO: 171758 - DNA, 25 bp, Probe sequence
atcaagcgcttgacgacattgcatt

SEQ ID NO: 171759 - DNA, 25 bp, Probe sequence
agatacaccacatgctacgacagat

SEQ ID NO: 171760 - DNA, 25 bp, Probe sequence
agcgcgtcaatctgtcagcgcaaaa

SEQ ID NO: 171761 - DNA, 25 bp, Probe sequence
acgacacacttaaacaaggtcaaca

SEQ ID NO: 171762 - DNA, 25 bp, Probe sequence
gaaccgcacattgtggttaaacctg

SEQ ID NO: 171763 - DNA, 25 bp, Probe sequence
actgaggctgatggtaacaacaaca

SEQ ID NO: 171764 - DNA, 25 bp, Probe sequence
aaattgagcaagcggaacatgcgac

SEQ ID NO: 171765 - DNA, 25 bp, Probe sequence
aaattaaaccagcagcacgtgaaaa

SEQ ID NO: 171766 - DNA, 25 bp, Probe sequence
aaatacaaatgcaaccactgaagaa

SEQ ID NO: 171767 - DNA, 25 bp, Probe sequence
aaaggcgtagaaccgcacattgtgg

SEQ ID NO: 171768 - DNA, 25 bp, Probe sequence
aagcgagcgcagataaccaagtaga

SEQ ID NO: 171769 - DNA, 25 bp, Probe sequence
aagcaactgcgcgagaacaattaac

SEQ ID NO: 171770 - DNA, 25 bp, Probe sequence
aagatacgcaactcattattgatga

SEQ ID NO: 171771 - DNA, 25 bp, Probe sequence
aatgactcaacaaatcaagcgcttg

SEQ ID NO: 171772 - DNA, 25 bp, Probe sequence
aatacgctagatacaacgcaagatg

SEQ ID NO: 171773 - DNA, 25 bp, Probe sequence
caattaaattacctgctgaagtgat

SEQ ID NO: 171774 - DNA, 25 bp, Probe sequence
caagaagccataaaagcgagcgcag

SEQ ID NO: 171775 - DNA, 25 bp, Probe sequence
caagatgcagctgtcaatgatgtta

SEQ ID NO: 171776 - DNA, 25 bp, Probe sequence
ccaaaagtggggcaacctgctccaa

SEQ ID NO: 171777 - DNA, 25 bp, Probe sequence
cgtgcagcgttggataacattgatg

SEQ ID NO: 171778 - DNA, 25 bp, Probe sequence
gcagaagtggatcaaactgaggctg

SEQ ID NO: 171779 - DNA, 25 bp, Probe sequence
gcaaaccaacaaataaacgacacac

SEQ ID NO: 171780 - DNA, 25 bp, Probe sequence
gcacaaaccaatcagcattatagtg

SEQ ID NO: 171781 - DNA, 25 bp, Probe sequence
gaaatgttgctattgctgcgttaaa

SEQ ID NO: 171782 - DNA, 25 bp, Probe sequence
gacaagcggcgttagataaaatcaa

SEQ ID NO: 171783 - DNA, 25 bp, Probe sequence
gacaatacgacacaagatgcagctg

SEQ ID NO: 171784 - DNA, 25 bp, Probe sequence
gacattgcattagtgacgcctgacc

SEQ ID NO: 171785 - DNA, 25 bp, Probe sequence
gacgcctgaccatattgttagagca

SEQ ID NO: 171786 - DNA, 25 bp, Probe sequence
gatgatcttgcacgtgttacacatt

SEQ ID NO: 171787 - DNA, 25 bp, Probe sequence
gttagacgcaaacgtgcagcgttgg

SEQ ID NO: 171788 - DNA, 25 bp, Probe sequence
gtattaacggacttagcaactgcaa

SEQ ID NO: 171789 - DNA, 25 bp, Probe sequence
gtagaccaagatttagcaacggcaa

SEQ ID NO: 171790 - DNA, 25 bp, Probe sequence
ggttaaacctgaagctcaagaagcc

SEQ ID NO: 171791 - DNA, 25 bp, Probe sequence
ttagcactaattacaggcgcagcat

SEQ ID NO: 171792 - DNA, 25 bp, Probe sequence
atcacttggatttacaataactaca

SEQ ID NO: 171793 - DNA, 25 bp, Probe sequence
atctcatgatttaatttttccaatt

SEQ ID NO: 171794 - DNA, 25 bp, Probe sequence
atctgaaccggatataaaccaaaat

SEQ ID NO: 171795 - DNA, 25 bp, Probe sequence
atggtggtcttacatttaatagttc

SEQ ID NO: 171796 - DNA, 25 bp, Probe sequence
agaactagtaccttttgttccatat

SEQ ID NO: 171797 - DNA, 25 bp, Probe sequence
agctatacgagtttgatggttctgc

SEQ ID NO: 171798 - DNA, 25 bp, Probe sequence
acgagtttgatggttctgcatttga

SEQ ID NO: 171799 - DNA, 25 bp, Probe sequence
actagtaccttttgttccatataag

SEQ ID NO: 171800 - DNA, 25 bp, Probe sequence
aaattttggaggttgttgtatgtat

SEQ ID NO: 171801 - DNA, 25 bp, Probe sequence
aacaatcgacaatagacaatcactt

SEQ ID NO: 171802 - DNA, 25 bp, Probe sequence
aatacctaaatctgaaccggatata

SEQ ID NO: 171803 - DNA, 25 bp, Probe sequence
aattctagacagtttttatctcatg

SEQ ID NO: 171804 - DNA, 25 bp, Probe sequence
catgtataatacctaaatctgaacc

SEQ ID NO: 171805 - DNA, 25 bp, Probe sequence
ctgtaattattattttgattctaga

SEQ ID NO: 171806 - DNA, 25 bp, Probe sequence
gcaagacactggctcactaaagaaa

SEQ ID NO: 171807 - DNA, 25 bp, Probe sequence
gaagaaattatctactgtaattatt

SEQ ID NO: 171808 - DNA, 25 bp, Probe sequence
gaactagattacaaagcaagacact

SEQ ID NO: 171809 - DNA, 25 bp, Probe sequence
gacactggctcactaaagaaaaaaa

SEQ ID NO: 171810 - DNA, 25 bp, Probe sequence
gacagtttttatctcatgatttaat

SEQ ID NO: 171811 - DNA, 25 bp, Probe sequence
gagataaattaattactgtacaggt

SEQ ID NO: 171812 - DNA, 25 bp, Probe sequence
gatggttctgcatttgaatctggat

SEQ ID NO: 171813 - DNA, 25 bp, Probe sequence
gattctagaaatagtttttcataat

SEQ ID NO: 171814 - DNA, 25 bp, Probe sequence
gttccatatttttatacatgtataa

SEQ ID NO: 171815 - DNA, 25 bp, Probe sequence
gtttgatggttctgcatttgaatct

SEQ ID NO: 171816 - DNA, 25 bp, Probe sequence
gtatggtggtcttacatttaatagt

SEQ ID NO: 171817 - DNA, 25 bp, Probe sequence
gtctccacctgttgaaggaagagga

SEQ ID NO: 171818 - DNA, 25 bp, Probe sequence
ggttctgcatttgaatctggatata

SEQ ID NO: 171819 - DNA, 25 bp, Probe sequence
ggaagtatttcttaatactcactga

SEQ ID NO: 171820 - DNA, 25 bp, Probe sequence
tcgacaatagacaatcacttggatt

SEQ ID NO: 171821 - DNA, 25 bp, Probe sequence
tacaaagcaagacactggctcacta

SEQ ID NO: 171822 - DNA, 25 bp, Probe sequence
tactgtacaggtaacaatcgacaat

SEQ ID NO: 171823 - DNA, 25 bp, Probe sequence
tagtaccttttgttccatataagtt

SEQ ID NO: 171824 - DNA, 25 bp, Probe sequence
tttttccaattgagtataagagtta

SEQ ID NO: 171825 - DNA, 25 bp, Probe sequence
ttggaggttgttgtatgtatggtgg

SEQ ID NO: 171826 - DNA, 25 bp, Probe sequence
attatttacgttacatcgatcctaa

SEQ ID NO: 171827 - DNA, 25 bp, Probe sequence
atggtgcatcattcttagtcttaag

SEQ ID NO: 171828 - DNA, 25 bp, Probe sequence
agagtctattacgtaccaaccttgg

SEQ ID NO: 171829 - DNA, 25 bp, Probe sequence
agagctaccattgttgttacctgaa

SEQ ID NO: 171830 - DNA, 25 bp, Probe sequence
agcacctattgcaccacatatcggt

SEQ ID NO: 171831 - DNA, 25 bp, Probe sequence
agcggcaattactaaagctattcaa

SEQ ID NO: 171832 - DNA, 25 bp, Probe sequence
aactgttcctgaagaagagctacca

SEQ ID NO: 171833 - DNA, 25 bp, Probe sequence
cattggttacctgttgatttatata

SEQ ID NO: 171834 - DNA, 25 bp, Probe sequence
gcgaaccaattcctgtcattcattg

SEQ ID NO: 171835 - DNA, 25 bp, Probe sequence
gcattcggattaccagcagagcaat

SEQ ID NO: 171836 - DNA, 25 bp, Probe sequence
gcaagaaattgccttatctaatgac

SEQ ID NO: 171837 - DNA, 25 bp, Probe sequence
gcaattatggcagtaccagcgcatg

SEQ ID NO: 171838 - DNA, 25 bp, Probe sequence
gagattggttattcagtcgtcagcg

SEQ ID NO: 171839 - DNA, 25 bp, Probe sequence
gatggggtgggatgcattcggatta

SEQ ID NO: 171840 - DNA, 25 bp, Probe sequence
gatgggtctcgtcgattcttagatc

SEQ ID NO: 171841 - DNA, 25 bp, Probe sequence
gatttagatgatttagattggcctg

SEQ ID NO: 171842 - DNA, 25 bp, Probe sequence
gtcgtcagcgttattggggcgaacc

SEQ ID NO: 171843 - DNA, 25 bp, Probe sequence
gtagaagtatttacgactagaccag

SEQ ID NO: 171844 - DNA, 25 bp, Probe sequence
gtaccaaccttggccaacttatgac

SEQ ID NO: 171845 - DNA, 25 bp, Probe sequence
gtcatcgctgttcctcaaaaattag

SEQ ID NO: 171846 - DNA, 25 bp, Probe sequence
gggcaggtagttgttggtattattt

SEQ ID NO: 171847 - DNA, 25 bp, Probe sequence
gggttcagttatgattgggatcgtg

SEQ ID NO: 171848 - DNA, 25 bp, Probe sequence
ggtgctggtttacatgttggacatc

SEQ ID NO: 171849 - DNA, 25 bp, Probe sequence
ggattagatgggtctcgtcgattct

SEQ ID NO: 171850 - DNA, 25 bp, Probe sequence
ggacacagtggattttcatacagtt

SEQ ID NO: 171851 - DNA, 25 bp, Probe sequence
ggcagtaccagcgcatgatgacaga

SEQ ID NO: 171852 - DNA, 25 bp, Probe sequence
ggcttcgttaaaatgttagcaccta

SEQ ID NO: 171853 - DNA, 25 bp, Probe sequence
ggccaacttatgacgaagcactact

SEQ ID NO: 171854 - DNA, 25 bp, Probe sequence
tgggacctttagatgctgcaattgc

SEQ ID NO: 171855 - DNA, 25 bp, Probe sequence
tcatgaaagtcatcgctgttcctca

SEQ ID NO: 171856 - DNA, 25 bp, Probe sequence
tcaagccatcagggactggtgagtc

SEQ ID NO: 171857 - DNA, 25 bp, Probe sequence
taaaccttacattgaaggcttcgtt

SEQ ID NO: 171858 - DNA, 25 bp, Probe sequence
tacagcaacagatatcatttcaaga

SEQ ID NO: 171859 - DNA, 25 bp, Probe sequence
ttttatgctttagacatgtttccat

SEQ ID NO: 171860 - DNA, 25 bp, Probe sequence
attggaactttcacttgtctttgta

SEQ ID NO: 171861 - DNA, 25 bp, Probe sequence
atttgttgtcggtatgattatttta

SEQ ID NO: 171862 - DNA, 25 bp, Probe sequence
atattcaatgggagtctacaatcgc

SEQ ID NO: 171863 - DNA, 25 bp, Probe sequence
atacctaaatcagtctggtggctag

SEQ ID NO: 171864 - DNA, 25 bp, Probe sequence
atatgcgcatgatgtttatcggtat

SEQ ID NO: 171865 - DNA, 25 bp, Probe sequence
atcttattatgtatgttgtgtttgc

SEQ ID NO: 171866 - DNA, 25 bp, Probe sequence
atgctgtatggcttgtaatgttagg

SEQ ID NO: 171867 - DNA, 25 bp, Probe sequence
agcaagatttatttcattagtacta

SEQ ID NO: 171868 - DNA, 25 bp, Probe sequence
agcaaatgtttgtcggcatcatcat

SEQ ID NO: 171869 - DNA, 25 bp, Probe sequence
agccaatcagttagcgccagatggt

SEQ ID NO: 171870 - DNA, 25 bp, Probe sequence
agcgccagatggtaagcaaggacag

SEQ ID NO: 171871 - DNA, 25 bp, Probe sequence
actatatctttttagccaatcttat

SEQ ID NO: 171872 - DNA, 25 bp, Probe sequence
aactgttgctggtttagtgctaatg

SEQ ID NO: 171873 - DNA, 25 bp, Probe sequence
catggcgttaaatattactggttcc

SEQ ID NO: 171874 - DNA, 25 bp, Probe sequence
cttgtcgcggtaacgcaatttaata

SEQ ID NO: 171875 - DNA, 25 bp, Probe sequence
gctgcaatgggcggctttgtcgcag

SEQ ID NO: 171876 - DNA, 25 bp, Probe sequence
gcagttccaactatagccaatcagt

SEQ ID NO: 171877 - DNA, 25 bp, Probe sequence
gcaaggacagtaccaaggttttgtg

SEQ ID NO: 171878 - DNA, 25 bp, Probe sequence
gcaatgtttgcaatttgttgggttg

SEQ ID NO: 171879 - DNA, 25 bp, Probe sequence
gaatgattattcctgcgatatacgc

SEQ ID NO: 171880 - DNA, 25 bp, Probe sequence
gttctttgtcacgagttttgccgaa

SEQ ID NO: 171881 - DNA, 25 bp, Probe sequence
gtacaacgctacttaatttctttca

SEQ ID NO: 171882 - DNA, 25 bp, Probe sequence
gtcggcatcatcatttttatgttgt

SEQ ID NO: 171883 - DNA, 25 bp, Probe sequence
gggtggccttggtatgctgtatggc

SEQ ID NO: 171884 - DNA, 25 bp, Probe sequence
ggtggctagtaattggcatggcgtt

SEQ ID NO: 171885 - DNA, 25 bp, Probe sequence
ggtccatttcttggtggtgtattag

SEQ ID NO: 171886 - DNA, 25 bp, Probe sequence
ggttttgtgaattcagctgctacag

SEQ ID NO: 171887 - DNA, 25 bp, Probe sequence
ggaaacttattaggtggttcactat

SEQ ID NO: 171888 - DNA, 25 bp, Probe sequence
ggcggctttgtcgcagaatttagct

SEQ ID NO: 171889 - DNA, 25 bp, Probe sequence
ggcggaagacaaacgtttaatgcga

SEQ ID NO: 171890 - DNA, 25 bp, Probe sequence
tactggttccagttttttgtggcct

SEQ ID NO: 171891 - DNA, 25 bp, Probe sequence
taatttctttcacgggtggccttgg

SEQ ID NO: 171892 - DNA, 25 bp, Probe sequence
tagtagcacaaccattaattaaacc

SEQ ID NO: 171893 - DNA, 25 bp, Probe sequence
tttttatgttgtcgttctttgtcac

SEQ ID NO: 171894 - DNA, 25 bp, Probe sequence
attagaaacacttttgggtgacatt

SEQ ID NO: 171895 - DNA, 25 bp, Probe sequence
attttgcaattagaaacacttttgg

SEQ ID NO: 171896 - DNA, 25 bp, Probe sequence
atttacaaagagcgtcctgttgacg

SEQ ID NO: 171897 - DNA, 25 bp, Probe sequence
agttgttgaatttcatcagtgatgc

SEQ ID NO: 171898 - DNA, 25 bp, Probe sequence
acttttgggtgacattaactcaatt

SEQ ID NO: 171899 - DNA, 25 bp, Probe sequence
acacttttgggtgacattaactcaa

SEQ ID NO: 171900 - DNA, 25 bp, Probe sequence
aaagtagagttgttgaatttcatca

SEQ ID NO: 171901 - DNA, 25 bp, Probe sequence
aagagcgtcctgttgacgatgaaag

SEQ ID NO: 171902 - DNA, 25 bp, Probe sequence
aatagtttaaacgcaattattgctg

SEQ ID NO: 171903 - DNA, 25 bp, Probe sequence
caattttcagcgagattgaaagcga

SEQ ID NO: 171904 - DNA, 25 bp, Probe sequence
caaagagcgtcctgttgacgatgaa

SEQ ID NO: 171905 - DNA, 25 bp, Probe sequence
cattaactcaattttcagcgagatt

SEQ ID NO: 171906 - DNA, 25 bp, Probe sequence
gcgtcctgttgacgatgaaagaaca

SEQ ID NO: 171907 - DNA, 25 bp, Probe sequence
gcaagtagagcaacagcaatgcaaa

SEQ ID NO: 171908 - DNA, 25 bp, Probe sequence
gcaattagaaacacttttgggtgac

SEQ ID NO: 171909 - DNA, 25 bp, Probe sequence
gaatggatttacaaagagcgtcctg

SEQ ID NO: 171910 - DNA, 25 bp, Probe sequence
gaaacacttttgggtgacattaact

SEQ ID NO: 171911 - DNA, 25 bp, Probe sequence
gaaatggacagatttgttgaagtta

SEQ ID NO: 171912 - DNA, 25 bp, Probe sequence
gacagatttgttgaagttaaaccgt

SEQ ID NO: 171913 - DNA, 25 bp, Probe sequence
gacattaactcaattttcagcgaga

SEQ ID NO: 171914 - DNA, 25 bp, Probe sequence
gacgatgaaagaacagttattattc

SEQ ID NO: 171915 - DNA, 25 bp, Probe sequence
gagcgtcctgttgacgatgaaagaa

SEQ ID NO: 171916 - DNA, 25 bp, Probe sequence
gagcaacagcaatgcaaaatagttt

SEQ ID NO: 171917 - DNA, 25 bp, Probe sequence
gatttacaaagagcgtcctgttgac

SEQ ID NO: 171918 - DNA, 25 bp, Probe sequence
gtttaaacgcaattattgctgtgta

SEQ ID NO: 171919 - DNA, 25 bp, Probe sequence
gtagagttgttgaatttcatcagtg

SEQ ID NO: 171920 - DNA, 25 bp, Probe sequence
gtgacattaactcaattttcagcga

SEQ ID NO: 171921 - DNA, 25 bp, Probe sequence
gggtgacattaactcaattttcagc

SEQ ID NO: 171922 - DNA, 25 bp, Probe sequence
ggatttacaaagagcgtcctgttga

SEQ ID NO: 171923 - DNA, 25 bp, Probe sequence
tgttgaagttaaaccgtataagcgt

SEQ ID NO: 171924 - DNA, 25 bp, Probe sequence
tgacgcttaaagaaatggacagatt

SEQ ID NO: 171925 - DNA, 25 bp, Probe sequence
taactcaattttcagcgagattgaa

SEQ ID NO: 171926 - DNA, 25 bp, Probe sequence
tacaaagagcgtcctgttgacgatg

SEQ ID NO: 171927 - DNA, 25 bp, Probe sequence
tttgggtgacattaactcaattttc

SEQ ID NO: 171928 - DNA, 25 bp, Probe sequence
atttcttcattttcattgtatgttg

SEQ ID NO: 171929 - DNA, 25 bp, Probe sequence
atttgtgttcctgctacaacttctt

SEQ ID NO: 171930 - DNA, 25 bp, Probe sequence
atggttgcttcactgttttattatg

SEQ ID NO: 171931 - DNA, 25 bp, Probe sequence
acgatggttgcttcactgttttatt

SEQ ID NO: 171932 - DNA, 25 bp, Probe sequence
acgttattcatttgtgttcctgcta

SEQ ID NO: 171933 - DNA, 25 bp, Probe sequence
aacgtacaatgtattacctgggtat

SEQ ID NO: 171934 - DNA, 25 bp, Probe sequence
aaacagtgaagcaatccgtaacgat

SEQ ID NO: 171935 - DNA, 25 bp, Probe sequence
aataagtgctgttacttctccctta

SEQ ID NO: 171936 - DNA, 25 bp, Probe sequence
caatccgtaacgatggttgcttcac

SEQ ID NO: 171937 - DNA, 25 bp, Probe sequence
cactgtaacgagtccattttctttt

SEQ ID NO: 171938 - DNA, 25 bp, Probe sequence
cattgtatgttgaaagtgacactgt

SEQ ID NO: 171939 - DNA, 25 bp, Probe sequence
ctgttacttctcccttaaatacaat

SEQ ID NO: 171940 - DNA, 25 bp, Probe sequence
ccttcttctacccataatttaaatg

SEQ ID NO: 171941 - DNA, 25 bp, Probe sequence
gaaagtgacactgtaacgagtccat

SEQ ID NO: 171942 - DNA, 25 bp, Probe sequence
gagtccattttctttttttatggat

SEQ ID NO: 171943 - DNA, 25 bp, Probe sequence
gttgcttcactgttttattatgaat

SEQ ID NO: 171944 - DNA, 25 bp, Probe sequence
gttattcatttgtgttcctgctaca

SEQ ID NO: 171945 - DNA, 25 bp, Probe sequence
gtaacgatggttgcttcactgtttt

SEQ ID NO: 171946 - DNA, 25 bp, Probe sequence
gtaatttcagcgataacgtacaatg

SEQ ID NO: 171947 - DNA, 25 bp, Probe sequence
gtgacactgtaacgagtccattttc

SEQ ID NO: 171948 - DNA, 25 bp, Probe sequence
ggatttcttatttgtaatttcagcg

SEQ ID NO: 171949 - DNA, 25 bp, Probe sequence
tgtattacctgggtatacaggttta

SEQ ID NO: 171950 - DNA, 25 bp, Probe sequence
tccgtaacgatggttgcttcactgt

SEQ ID NO: 171951 - DNA, 25 bp, Probe sequence
tctcccttaaatacaatttcttcat

SEQ ID NO: 171952 - DNA, 25 bp, Probe sequence
tcttctacccataatttaaatgata

SEQ ID NO: 171953 - DNA, 25 bp, Probe sequence
tctttttttatggatttcttatttg

SEQ ID NO: 171954 - DNA, 25 bp, Probe sequence
tcatttgtgttcctgctacaacttc

SEQ ID NO: 171955 - DNA, 25 bp, Probe sequence
taataagtgctgttacttctccctt

SEQ ID NO: 171956 - DNA, 25 bp, Probe sequence
taacgttattcatttgtgttcctgc

SEQ ID NO: 171957 - DNA, 25 bp, Probe sequence
taaatacaatttcttcattttcatt

SEQ ID NO: 171958 - DNA, 25 bp, Probe sequence
tacttctcccttaaatacaatttct

SEQ ID NO: 171959 - DNA, 25 bp, Probe sequence
tattgaaagtgtatgcatgccagat

SEQ ID NO: 171960 - DNA, 25 bp, Probe sequence
tattcatttgtgttcctgctacaac

SEQ ID NO: 171961 - DNA, 25 bp, Probe sequence
ttgaaagtgtatgcatgccagatgc

SEQ ID NO: 171962 - DNA, 25 bp, Probe sequence
agcaagttggtttgcacgtgctggt

SEQ ID NO: 171963 - DNA, 25 bp, Probe sequence
accatcaactccccaattagcaagt

SEQ ID NO: 171964 - DNA, 25 bp, Probe sequence
actccccaattagcaagttggtttg

SEQ ID NO: 171965 - DNA, 25 bp, Probe sequence
acgtgctggtttgtttacagtccat

SEQ ID NO: 171966 - DNA, 25 bp, Probe sequence
actattttagcattacagtaatcta

SEQ ID NO: 171967 - DNA, 25 bp, Probe sequence
aagtttggcatcttcagtgtttact

SEQ ID NO: 171968 - DNA, 25 bp, Probe sequence
aagttggtttgcacgtgctggtttg

SEQ ID NO: 171969 - DNA, 25 bp, Probe sequence
caccattttatctgcattgtctgta

SEQ ID NO: 171970 - DNA, 25 bp, Probe sequence
catacgttcaattcataacccgctt

SEQ ID NO: 171971 - DNA, 25 bp, Probe sequence
cattttatctgcattgtctgtaaag

SEQ ID NO: 171972 - DNA, 25 bp, Probe sequence
ctgcattgtctgtaaagataccatc

SEQ ID NO: 171973 - DNA, 25 bp, Probe sequence
gctggtttgtttacagtccatacgt

SEQ ID NO: 171974 - DNA, 25 bp, Probe sequence
gctttagtaagtttggcatcttcag

SEQ ID NO: 171975 - DNA, 25 bp, Probe sequence
gcacgtgctggtttgtttacagtcc

SEQ ID NO: 171976 - DNA, 25 bp, Probe sequence
gtttgcacgtgctggtttgtttaca

SEQ ID NO: 171977 - DNA, 25 bp, Probe sequence
gtttggcatcttcagtgtttactat

SEQ ID NO: 171978 - DNA, 25 bp, Probe sequence
gtaagtttggcatcttcagtgttta

SEQ ID NO: 171979 - DNA, 25 bp, Probe sequence
gtctgtaaagataccatcaactccc

SEQ ID NO: 171980 - DNA, 25 bp, Probe sequence
gtccatacgttcaattcataacccg

SEQ ID NO: 171981 - DNA, 25 bp, Probe sequence
gtgctggtttgtttacagtccatac

SEQ ID NO: 171982 - DNA, 25 bp, Probe sequence
ggtttgtttacagtccatacgttca

SEQ ID NO: 171983 - DNA, 25 bp, Probe sequence
ggcatcttcagtgtttactatttta

SEQ ID NO: 171984 - DNA, 25 bp, Probe sequence
tgtttacagtccatacgttcaattc

SEQ ID NO: 171985 - DNA, 25 bp, Probe sequence
tgtaaagataccatcaactccccaa

SEQ ID NO: 171986 - DNA, 25 bp, Probe sequence
tgcaccattttatctgcattgtctg

SEQ ID NO: 171987 - DNA, 25 bp, Probe sequence
tcaactccccaattagcaagttggt

SEQ ID NO: 171988 - DNA, 25 bp, Probe sequence
tcttcagtgtttactattttagcat

SEQ ID NO: 171989 - DNA, 25 bp, Probe sequence
taaagataccatcaactccccaatt

SEQ ID NO: 171990 - DNA, 25 bp, Probe sequence
tacagtccatacgttcaattcataa

SEQ ID NO: 171991 - DNA, 25 bp, Probe sequence
tacttttgctttagtaagtttggca

SEQ ID NO: 171992 - DNA, 25 bp, Probe sequence
tacgttcaattcataacccgcttct

SEQ ID NO: 171993 - DNA, 25 bp, Probe sequence
tttacagtccatacgttcaattcat

SEQ ID NO: 171994 - DNA, 25 bp, Probe sequence
ttggcatcttcagtgtttactattt

SEQ ID NO: 171995 - DNA, 25 bp, Probe sequence
ttggtttgcacgtgctggtttgttt

SEQ ID NO: 171996 - DNA, 25 bp, Probe sequence
agatacgatggctcatattcatgac

SEQ ID NO: 171997 - DNA, 25 bp, Probe sequence
agcgtcaatacaatgggctttattg

SEQ ID NO: 171998 - DNA, 25 bp, Probe sequence
accacgaggttcacaatgagccaga

SEQ ID NO: 171999 - DNA, 25 bp, Probe sequence
aaatgatgcgaaaggcgtcgttgtt

SEQ ID NO: 172000 - DNA, 25 bp, Probe sequence
aaagacacacgttttaatgttggtg

SEQ ID NO: 172001 - DNA, 25 bp, Probe sequence
aaacgtatcacgaaagtttgctaga

SEQ ID NO: 172002 - DNA, 25 bp, Probe sequence
aaaaagcaacgtatcattggtataa

SEQ ID NO: 172003 - DNA, 25 bp, Probe sequence
ctagggcaattgatgagtttaaaga

SEQ ID NO: 172004 - DNA, 25 bp, Probe sequence
gcctggtcaaggtcaaacttcaaga

SEQ ID NO: 172005 - DNA, 25 bp, Probe sequence
gcgttatattctgactttcttaaat

SEQ ID NO: 172006 - DNA, 25 bp, Probe sequence
gcgtcgttgttattgctcataatat

SEQ ID NO: 172007 - DNA, 25 bp, Probe sequence
gcttggcaaggtttttaccacgagg

SEQ ID NO: 172008 - DNA, 25 bp, Probe sequence
gaattgccaatcgaggggatgatgt

SEQ ID NO: 172009 - DNA, 25 bp, Probe sequence
gaattatattttaaagcttggcaag

SEQ ID NO: 172010 - DNA, 25 bp, Probe sequence
gaagaaatggctatcatgtgattat

SEQ ID NO: 172011 - DNA, 25 bp, Probe sequence
gaaaggcgtcgttgttattgctcat

SEQ ID NO: 172012 - DNA, 25 bp, Probe sequence
gggagatttgcctggtcaaggtcaa

SEQ ID NO: 172013 - DNA, 25 bp, Probe sequence
gatgatgttaatttctcctatgcta

SEQ ID NO: 172014 - DNA, 25 bp, Probe sequence
gatatgcatatgttattacgatgtt

SEQ ID NO: 172015 - DNA, 25 bp, Probe sequence
gtgattatgggagatttgcctggtc

SEQ ID NO: 172016 - DNA, 25 bp, Probe sequence
gtcaaggtcaaacttcaagagctaa

SEQ ID NO: 172017 - DNA, 25 bp, Probe sequence
gtaatgcgttatattctgactttct

SEQ ID NO: 172018 - DNA, 25 bp, Probe sequence
gtggaagtgggaagctgaaaatgat

SEQ ID NO: 172019 - DNA, 25 bp, Probe sequence
ggtttttaccacgaggttcacaatg

SEQ ID NO: 172020 - DNA, 25 bp, Probe sequence
tggctcatattcatgacattcaacc

SEQ ID NO: 172021 - DNA, 25 bp, Probe sequence
tgggctttattgttgaagatgacga

SEQ ID NO: 172022 - DNA, 25 bp, Probe sequence
tgagacgatgaaagatacgatggct

SEQ ID NO: 172023 - DNA, 25 bp, Probe sequence
tgaaaactttcaaacgtatcacgaa

SEQ ID NO: 172024 - DNA, 25 bp, Probe sequence
tctcctatgctagaacttcaaaaga

SEQ ID NO: 172025 - DNA, 25 bp, Probe sequence
taatttctcctatgctagaacttca

SEQ ID NO: 172026 - DNA, 25 bp, Probe sequence
taggacttggcggtttgattttatt

SEQ ID NO: 172027 - DNA, 25 bp, Probe sequence
taggggtaggacttggcggtttgat

SEQ ID NO: 172028 - DNA, 25 bp, Probe sequence
tatcaaacacctgaattatatttta

SEQ ID NO: 172029 - DNA, 25 bp, Probe sequence
tataaaattcctacttatgtattag

SEQ ID NO: 172030 - DNA, 25 bp, Probe sequence
attgaatcttcaacggctacggcat

SEQ ID NO: 172031 - DNA, 25 bp, Probe sequence
atgttttgtctttagagggagagtt

SEQ ID NO: 172032 - DNA, 25 bp, Probe sequence
atgtgtttgtgatgtagctaatatc

SEQ ID NO: 172033 - DNA, 25 bp, Probe sequence
acagcttgtagaaaaagctttcttg

SEQ ID NO: 172034 - DNA, 25 bp, Probe sequence
aaaagaccttgctaaacagaatcct

SEQ ID NO: 172035 - DNA, 25 bp, Probe sequence
aagaccttgctaaacagaatcctat

SEQ ID NO: 172036 - DNA, 25 bp, Probe sequence
aagtttttaaggctctatcagatga

SEQ ID NO: 172037 - DNA, 25 bp, Probe sequence
aaggctctatcagatgatacaagag

SEQ ID NO: 172038 - DNA, 25 bp, Probe sequence
aattgcttatgttttgtctttagag

SEQ ID NO: 172039 - DNA, 25 bp, Probe sequence
caaagggaggttgctagtattggat

SEQ ID NO: 172040 - DNA, 25 bp, Probe sequence
catcccatcatttaagattattgaa

SEQ ID NO: 172041 - DNA, 25 bp, Probe sequence
cttgctaaacagaatcctatggatg

SEQ ID NO: 172042 - DNA, 25 bp, Probe sequence
gcgaaagtttttaaggctctatcag

SEQ ID NO: 172043 - DNA, 25 bp, Probe sequence
gctacggcatcccatcatttaagat

SEQ ID NO: 172044 - DNA, 25 bp, Probe sequence
gaatcctatggatgtagcgaaagtt

SEQ ID NO: 172045 - DNA, 25 bp, Probe sequence
gaagttacctatattcatgaagata

SEQ ID NO: 172046 - DNA, 25 bp, Probe sequence
gaccttgctaaacagaatcctatgg

SEQ ID NO: 172047 - DNA, 25 bp, Probe sequence
gagcatgttaaacagcttgtagaaa

SEQ ID NO: 172048 - DNA, 25 bp, Probe sequence
gagagttatgtgtttgtgatgtagc

SEQ ID NO: 172049 - DNA, 25 bp, Probe sequence
gagttatgtgtttgtgatgtagcta

SEQ ID NO: 172050 - DNA, 25 bp, Probe sequence
gagggagagttatgtgtttgtgatg

SEQ ID NO: 172051 - DNA, 25 bp, Probe sequence
gatacaagagttaaaattgcttatg

SEQ ID NO: 172052 - DNA, 25 bp, Probe sequence
gatatgtgtgaagttacctatattc

SEQ ID NO: 172053 - DNA, 25 bp, Probe sequence
gtagctaatatcattgaatcttcaa

SEQ ID NO: 172054 - DNA, 25 bp, Probe sequence
gtgtgaagttacctatattcatgaa

SEQ ID NO: 172055 - DNA, 25 bp, Probe sequence
ggctaaaaaagaccttgctaaacag

SEQ ID NO: 172056 - DNA, 25 bp, Probe sequence
ggcatcccatcatttaagattattg

SEQ ID NO: 172057 - DNA, 25 bp, Probe sequence
tgaatcttcaacggctacggcatcc

SEQ ID NO: 172058 - DNA, 25 bp, Probe sequence
tgaagataaggtaaacagggctaaa

SEQ ID NO: 172059 - DNA, 25 bp, Probe sequence
tgcttatgttttgtctttagaggga

SEQ ID NO: 172060 - DNA, 25 bp, Probe sequence
tattcactagatgatgagcatgtta

SEQ ID NO: 172061 - DNA, 25 bp, Probe sequence
tacggcatcccatcatttaagatta

SEQ ID NO: 172062 - DNA, 25 bp, Probe sequence
tagtctattattcactagatgatga

SEQ ID NO: 172063 - DNA, 25 bp, Probe sequence
tttttaaggctctatcagatgatac

SEQ ID NO: 172064 - DNA, 25 bp, Probe sequence
atttgctataattatgttattgaag

SEQ ID NO: 172065 - DNA, 25 bp, Probe sequence
atatggacaacaataatactataaa

SEQ ID NO: 172066 - DNA, 25 bp, Probe sequence
atagaaatctacatagtgaatttgc

SEQ ID NO: 172067 - DNA, 25 bp, Probe sequence
atagtgaatttgctataattatgtt

SEQ ID NO: 172068 - DNA, 25 bp, Probe sequence
ataatatggacaacaataatactat

SEQ ID NO: 172069 - DNA, 25 bp, Probe sequence
atctacatagtgaatttgctataat

SEQ ID NO: 172070 - DNA, 25 bp, Probe sequence
atggacaacaataatactataaata

SEQ ID NO: 172071 - DNA, 25 bp, Probe sequence
agtgaatttgctataattatgttat

SEQ ID NO: 172072 - DNA, 25 bp, Probe sequence
agaaatctacatagtgaatttgcta

SEQ ID NO: 172073 - DNA, 25 bp, Probe sequence
acatagtgaatttgctataattatg

SEQ ID NO: 172074 - DNA, 25 bp, Probe sequence
aaatctacatagtgaatttgctata

SEQ ID NO: 172075 - DNA, 25 bp, Probe sequence
aatctacatagtgaatttgctataa

SEQ ID NO: 172076 - DNA, 25 bp, Probe sequence
aataatatggacaacaataatacta

SEQ ID NO: 172077 - DNA, 25 bp, Probe sequence
aatatggacaacaataatactataa

SEQ ID NO: 172078 - DNA, 25 bp, Probe sequence
aatttgctataattatgttattgaa

SEQ ID NO: 172079 - DNA, 25 bp, Probe sequence
catagtgaatttgctataattatgt

SEQ ID NO: 172080 - DNA, 25 bp, Probe sequence
ctacatagtgaatttgctataatta

SEQ ID NO: 172081 - DNA, 25 bp, Probe sequence
gctataattatgttattgaagatta

SEQ ID NO: 172082 - DNA, 25 bp, Probe sequence
gaatttgctataattatgttattga

SEQ ID NO: 172083 - DNA, 25 bp, Probe sequence
gaaatctacatagtgaatttgctat

SEQ ID NO: 172084 - DNA, 25 bp, Probe sequence
gacaacaataatactataaatagaa

SEQ ID NO: 172085 - DNA, 25 bp, Probe sequence
gtgaatttgctataattatgttatt

SEQ ID NO: 172086 - DNA, 25 bp, Probe sequence
ggacaacaataatactataaataga

SEQ ID NO: 172087 - DNA, 25 bp, Probe sequence
tggacaacaataatactataaatag

SEQ ID NO: 172088 - DNA, 25 bp, Probe sequence
tgaatttgctataattatgttattg

SEQ ID NO: 172089 - DNA, 25 bp, Probe sequence
tgctataattatgttattgaagatt

SEQ ID NO: 172090 - DNA, 25 bp, Probe sequence
tctacatagtgaatttgctataatt

SEQ ID NO: 172091 - DNA, 25 bp, Probe sequence
taatatggacaacaataatactata

SEQ ID NO: 172092 - DNA, 25 bp, Probe sequence
tacatagtgaatttgctataattat

SEQ ID NO: 172093 - DNA, 25 bp, Probe sequence
tagaaatctacatagtgaatttgct

SEQ ID NO: 172094 - DNA, 25 bp, Probe sequence
tagtgaatttgctataattatgtta

SEQ ID NO: 172095 - DNA, 25 bp, Probe sequence
tatggacaacaataatactataaat

SEQ ID NO: 172096 - DNA, 25 bp, Probe sequence
tttgctataattatgttattgaaga

SEQ ID NO: 172097 - DNA, 25 bp, Probe sequence
ttgctataattatgttattgaagat

SEQ ID NO: 172098 - DNA, 25 bp, Probe sequence
atataccgtacttcacgaccttaag

SEQ ID NO: 172099 - DNA, 25 bp, Probe sequence
atagggactgcaattgtgataggag

SEQ ID NO: 172100 - DNA, 25 bp, Probe sequence
atgggttatcggactacttggactt

SEQ ID NO: 172101 - DNA, 25 bp, Probe sequence
atgctctgatttcatttcttctttg

SEQ ID NO: 172102 - DNA, 25 bp, Probe sequence
acttcacgaccttaagtatgtctga

SEQ ID NO: 172103 - DNA, 25 bp, Probe sequence
catattaattcttttgttttcgcaa

SEQ ID NO: 172104 - DNA, 25 bp, Probe sequence
gctatgtcagttaccgtctagcttc

SEQ ID NO: 172105 - DNA, 25 bp, Probe sequence
gcaacaggaattgattatctcgtca

SEQ ID NO: 172106 - DNA, 25 bp, Probe sequence
gaaatatgaacgttggattgtacca

SEQ ID NO: 172107 - DNA, 25 bp, Probe sequence
gacttttccatttatataccgtact

SEQ ID NO: 172108 - DNA, 25 bp, Probe sequence
gattttcatcgtattggcttccagt

SEQ ID NO: 172109 - DNA, 25 bp, Probe sequence
gttggattgtaccaattgtattcat

SEQ ID NO: 172110 - DNA, 25 bp, Probe sequence
gtcttttagttgcacagggggttgt

SEQ ID NO: 172111 - DNA, 25 bp, Probe sequence
gttatttttgacgatgattttcatc

SEQ ID NO: 172112 - DNA, 25 bp, Probe sequence
gtctttctaattatggttggagttt

SEQ ID NO: 172113 - DNA, 25 bp, Probe sequence
gtatgtctgaaatctttattgtcac

SEQ ID NO: 172114 - DNA, 25 bp, Probe sequence
gtagcattttatctttattctcctc

SEQ ID NO: 172115 - DNA, 25 bp, Probe sequence
gtcctatccctaaaatatttggaga

SEQ ID NO: 172116 - DNA, 25 bp, Probe sequence
gtctagcttccttcgattttatatc

SEQ ID NO: 172117 - DNA, 25 bp, Probe sequence
gtgataggagcaagtcttttagttg

SEQ ID NO: 172118 - DNA, 25 bp, Probe sequence
gggttgtaaatttaattcctcagca

SEQ ID NO: 172119 - DNA, 25 bp, Probe sequence
ggttggagttttgtgctatgtcagt

SEQ ID NO: 172120 - DNA, 25 bp, Probe sequence
ggcttccagtgcggatgacttttcc

SEQ ID NO: 172121 - DNA, 25 bp, Probe sequence
tgatcgcgacgatactgacggctac

SEQ ID NO: 172122 - DNA, 25 bp, Probe sequence
tgtattcattgggctaggtatttat

SEQ ID NO: 172123 - DNA, 25 bp, Probe sequence
tgaagaaaagtcctatccctaaaat

SEQ ID NO: 172124 - DNA, 25 bp, Probe sequence
tcggactacttggacttttaccact

SEQ ID NO: 172125 - DNA, 25 bp, Probe sequence
taattcctcagcaatgggttatcgg

SEQ ID NO: 172126 - DNA, 25 bp, Probe sequence
tactgacggctactgcggtatatgt

SEQ ID NO: 172127 - DNA, 25 bp, Probe sequence
tactgcggtatatgtagcaacagga

SEQ ID NO: 172128 - DNA, 25 bp, Probe sequence
taccactttacctaggcgtgaaaat

SEQ ID NO: 172129 - DNA, 25 bp, Probe sequence
tatctcgtcatattaattcttttgt

SEQ ID NO: 172130 - DNA, 25 bp, Probe sequence
tttatctttattctcctctggaaaa

SEQ ID NO: 172131 - DNA, 25 bp, Probe sequence
ttattgtcactattgtctttctaat

SEQ ID NO: 172132 - DNA, 25 bp, Probe sequence
gggaatacccttgtaaatcttactg

SEQ ID NO: 172133 - DNA, 25 bp, Probe sequence
attaggacacattaacggttcaact

SEQ ID NO: 172134 - DNA, 25 bp, Probe sequence
atactcacttatcgatcaagcaatc

SEQ ID NO: 172135 - DNA, 25 bp, Probe sequence
agttaattgcttgtaccatgagtat

SEQ ID NO: 172136 - DNA, 25 bp, Probe sequence
agatcctggtttcaatagtgatatt

SEQ ID NO: 172137 - DNA, 25 bp, Probe sequence
acttcaatagtgctcctttaataga

SEQ ID NO: 172138 - DNA, 25 bp, Probe sequence
acactgctacaggtacaacaattgt

SEQ ID NO: 172139 - DNA, 25 bp, Probe sequence
aaatgttgattctttatactcactt

SEQ ID NO: 172140 - DNA, 25 bp, Probe sequence
aaagcttgcgattatttagccaaac

SEQ ID NO: 172141 - DNA, 25 bp, Probe sequence
aaaagcgcaatcaactcgcgttaaa

SEQ ID NO: 172142 - DNA, 25 bp, Probe sequence
aacaatatttcaacgggtgagcaaa

SEQ ID NO: 172143 - DNA, 25 bp, Probe sequence
aagcggtaaccgaagcactaaagct

SEQ ID NO: 172144 - DNA, 25 bp, Probe sequence
caaaatgtttgaccttatgttacct

SEQ ID NO: 172145 - DNA, 25 bp, Probe sequence
cagcaatgatcatcgcaaatggcgc

SEQ ID NO: 172146 - DNA, 25 bp, Probe sequence
gcaaatggcgctaaagcagcaggta

SEQ ID NO: 172147 - DNA, 25 bp, Probe sequence
gcaaagaacttcaatagtgctcctt

SEQ ID NO: 172148 - DNA, 25 bp, Probe sequence
gaaatcaatgacactgctacaggta

SEQ ID NO: 172149 - DNA, 25 bp, Probe sequence
gaccttatgttacctaaggatccaa

SEQ ID NO: 172150 - DNA, 25 bp, Probe sequence
gagtatggatgttatgggaatttca

SEQ ID NO: 172151 - DNA, 25 bp, Probe sequence
gatgtcgtgaatttaaagggtggat

SEQ ID NO: 172152 - DNA, 25 bp, Probe sequence
gtaacagttacagatcctggtttca

SEQ ID NO: 172153 - DNA, 25 bp, Probe sequence
gtcgattatggtggcgtaggtactt

SEQ ID NO: 172154 - DNA, 25 bp, Probe sequence
ggtgagcaaatcgaggtaacagtta

SEQ ID NO: 172155 - DNA, 25 bp, Probe sequence
ggttcaactttacacccagtagaag

SEQ ID NO: 172156 - DNA, 25 bp, Probe sequence
ggatccaatacatatgccattatca

SEQ ID NO: 172157 - DNA, 25 bp, Probe sequence
ggactaggtaatattatgatgcgtt

SEQ ID NO: 172158 - DNA, 25 bp, Probe sequence
ggacatactgagcaagcaaatcata

SEQ ID NO: 172159 - DNA, 25 bp, Probe sequence
ggcagtagcagcaatgatcatcgca

SEQ ID NO: 172160 - DNA, 25 bp, Probe sequence
tggggcctcaacgcattaaaaaaag

SEQ ID NO: 172161 - DNA, 25 bp, Probe sequence
ggcgtaggtacttatattggacata

SEQ ID NO: 172162 - DNA, 25 bp, Probe sequence
tgttttatttagcggtgagttagat

SEQ ID NO: 172163 - DNA, 25 bp, Probe sequence
tcagtgccctggacctattgttaat

SEQ ID NO: 172164 - DNA, 25 bp, Probe sequence
tactttttggggcctcaacgcatta

SEQ ID NO: 172165 - DNA, 25 bp, Probe sequence
tttagaggtcttcagtgccctggac

SEQ ID NO: 172166 - DNA, 25 bp, Probe sequence
attagaagtcttacacactccaggc

SEQ ID NO: 172167 - DNA, 25 bp, Probe sequence
atttgctgcaacattaccagactat

SEQ ID NO: 172168 - DNA, 25 bp, Probe sequence
agaagcattccatggtggtcatatg

SEQ ID NO: 172169 - DNA, 25 bp, Probe sequence
agcggtgacttcatctttgttggtg

SEQ ID NO: 172170 - DNA, 25 bp, Probe sequence
agcgctaggttcattacctacaact

SEQ ID NO: 172171 - DNA, 25 bp, Probe sequence
actttaacactcaatcagccagctc

SEQ ID NO: 172172 - DNA, 25 bp, Probe sequence
acacatttcgttaagcatcaagata

SEQ ID NO: 172173 - DNA, 25 bp, Probe sequence
aaagctgtaaatgttgaaggttcta

SEQ ID NO: 172174 - DNA, 25 bp, Probe sequence
aactgcttttgatcttcgaagtaaa

SEQ ID NO: 172175 - DNA, 25 bp, Probe sequence
ccaatgggattatttagcggtgact

SEQ ID NO: 172176 - DNA, 25 bp, Probe sequence
gccatccccctgagagtattagttt

SEQ ID NO: 172177 - DNA, 25 bp, Probe sequence
gcaatgattattgaccctatacgag

SEQ ID NO: 172178 - DNA, 25 bp, Probe sequence
gcaatacacaaactgcttttgatct

SEQ ID NO: 172179 - DNA, 25 bp, Probe sequence
gaatgcaagtatatacgtatctgat

SEQ ID NO: 172180 - DNA, 25 bp, Probe sequence
gaaggttctacaaaaatcggagcaa

SEQ ID NO: 172181 - DNA, 25 bp, Probe sequence
gacaatttttcacaagcatcttatt

SEQ ID NO: 172182 - DNA, 25 bp, Probe sequence
gactatattcaaatttggccaggtc

SEQ ID NO: 172183 - DNA, 25 bp, Probe sequence
gatgaaacttcatttatcgaaactt

SEQ ID NO: 172184 - DNA, 25 bp, Probe sequence
gtttaccctagttcaagcaatacac

SEQ ID NO: 172185 - DNA, 25 bp, Probe sequence
gtatcagtccatacaatttgctgca

SEQ ID NO: 172186 - DNA, 25 bp, Probe sequence
gtaccaaccatataatgtttaccct

SEQ ID NO: 172187 - DNA, 25 bp, Probe sequence
gggggttccagtataccaatgggat

SEQ ID NO: 172188 - DNA, 25 bp, Probe sequence
gtggtcatatgcatggaactatcaa

SEQ ID NO: 172189 - DNA, 25 bp, Probe sequence
gggagtccttgtggtaaagcgctag

SEQ ID NO: 172190 - DNA, 25 bp, Probe sequence
ggtgatgtaggtagaccagatctat

SEQ ID NO: 172191 - DNA, 25 bp, Probe sequence
ggattcacaattactaaagctgcag

SEQ ID NO: 172192 - DNA, 25 bp, Probe sequence
ggccaggtcatggtgcagggagtcc

SEQ ID NO: 172193 - DNA, 25 bp, Probe sequence
tgaccctatacgagatttaacaaaa

SEQ ID NO: 172194 - DNA, 25 bp, Probe sequence
tccaccacaccatttttcacaaatg

SEQ ID NO: 172195 - DNA, 25 bp, Probe sequence
tacctacaactactttgggttatga

SEQ ID NO: 172196 - DNA, 25 bp, Probe sequence
tatgcctaaacaaacacatttcgtt

SEQ ID NO: 172197 - DNA, 25 bp, Probe sequence
tttaattggatgtcaacgtacagga

SEQ ID NO: 172198 - DNA, 25 bp, Probe sequence
ttactgacgaaggtgggggttccag

SEQ ID NO: 172199 - DNA, 25 bp, Probe sequence
ttgcttcaggtattagagatgtggc

SEQ ID NO: 172200 - DNA, 25 bp, Probe sequence
attaggatgcgtaattcgcggtgct

SEQ ID NO: 172201 - DNA, 25 bp, Probe sequence
atgcgtaattcgcggtgctacgtct

SEQ ID NO: 172202 - DNA, 25 bp, Probe sequence
agcctcatcaggaaattatgatgca

SEQ ID NO: 172203 - DNA, 25 bp, Probe sequence
acgactgaaagtattgaacaagctg

SEQ ID NO: 172204 - DNA, 25 bp, Probe sequence
aaattagcctcatcaggaaattatg

SEQ ID NO: 172205 - DNA, 25 bp, Probe sequence
aaactaatgtaccagtcatatttgg

SEQ ID NO: 172206 - DNA, 25 bp, Probe sequence
aagatactttgattcgacatgatgt

SEQ ID NO: 172207 - DNA, 25 bp, Probe sequence
aatgatcaaactaatgtaccagtca

SEQ ID NO: 172208 - DNA, 25 bp, Probe sequence
catatttggtattttaacgactgaa

SEQ ID NO: 172209 - DNA, 25 bp, Probe sequence
ccagtcatatttggtattttaacga

SEQ ID NO: 172210 - DNA, 25 bp, Probe sequence
gcgtttgaaattcctttagtagcta

SEQ ID NO: 172211 - DNA, 25 bp, Probe sequence
gcagtaagtgcaattgaaatggcta

SEQ ID NO: 172212 - DNA, 25 bp, Probe sequence
gaagtcgcgaaaggtgtttctaaag

SEQ ID NO: 172213 - DNA, 25 bp, Probe sequence
gaaatggctaatttattaaaatcta

SEQ ID NO: 172214 - DNA, 25 bp, Probe sequence
gatgcgtaattcgcggtgctacgtc

SEQ ID NO: 172215 - DNA, 25 bp, Probe sequence
gatcaaactaatgtaccagtcatat

SEQ ID NO: 172216 - DNA, 25 bp, Probe sequence
gatactttgattcgacatgatgtta

SEQ ID NO: 172217 - DNA, 25 bp, Probe sequence
gattttatcactggaagattacttg

SEQ ID NO: 172218 - DNA, 25 bp, Probe sequence
gtagctaaaaaattagcctcatcag

SEQ ID NO: 172219 - DNA, 25 bp, Probe sequence
gtaatgaagtcgcgaaaggtgtttc

SEQ ID NO: 172220 - DNA, 25 bp, Probe sequence
gtgcgtttgaaattcctttagtagc

SEQ ID NO: 172221 - DNA, 25 bp, Probe sequence
gtgcaattgaaatggctaatttatt

SEQ ID NO: 172222 - DNA, 25 bp, Probe sequence
ggtgcgtttgaaattcctttagtag

SEQ ID NO: 172223 - DNA, 25 bp, Probe sequence
ggtgcaaaagatactttgattcgac

SEQ ID NO: 172224 - DNA, 25 bp, Probe sequence
ggatgcgtaattcgcggtgctacgt

SEQ ID NO: 172225 - DNA, 25 bp, Probe sequence
ggaagattacttgaaggtgcaaaag

SEQ ID NO: 172226 - DNA, 25 bp, Probe sequence
tcgtagttagtcgatttaatgattt

SEQ ID NO: 172227 - DNA, 25 bp, Probe sequence
tatgtttgtaatgaagtcgcgaaag

SEQ ID NO: 172228 - DNA, 25 bp, Probe sequence
tacattaggatgcgtaattcgcggt

SEQ ID NO: 172229 - DNA, 25 bp, Probe sequence
tactttgattcgacatgatgttaat

SEQ ID NO: 172230 - DNA, 25 bp, Probe sequence
taggatgcgtaattcgcggtgctac

SEQ ID NO: 172231 - DNA, 25 bp, Probe sequence
tagtcgatttaatgattttatcact

SEQ ID NO: 172232 - DNA, 25 bp, Probe sequence
tatcactggaagattacttgaaggt

SEQ ID NO: 172233 - DNA, 25 bp, Probe sequence
ttggtattttaacgactgaaagtat

SEQ ID NO: 172234 - DNA, 25 bp, Probe sequence
agctaaacttactggtgccaagccc

SEQ ID NO: 172235 - DNA, 25 bp, Probe sequence
attgacagtgctttaatggctttaa

SEQ ID NO: 172236 - DNA, 25 bp, Probe sequence
atctacctcaagaaggtcgtggcat

SEQ ID NO: 172237 - DNA, 25 bp, Probe sequence
atcgtcctggtcatttatttccatt

SEQ ID NO: 172238 - DNA, 25 bp, Probe sequence
atgcctacagatttcggaacatttg

SEQ ID NO: 172239 - DNA, 25 bp, Probe sequence
atgaatgatgacggcacgatggcga

SEQ ID NO: 172240 - DNA, 25 bp, Probe sequence
atgtacgcttacattctgcgtgcct

SEQ ID NO: 172241 - DNA, 25 bp, Probe sequence
accagaaacggtacataatcatgat

SEQ ID NO: 172242 - DNA, 25 bp, Probe sequence
aaatggttgatgataactccgacat

SEQ ID NO: 172243 - DNA, 25 bp, Probe sequence
aactgcaaatttagcattaggtttt

SEQ ID NO: 172244 - DNA, 25 bp, Probe sequence
aagaattgaagttatcgtaccagaa

SEQ ID NO: 172245 - DNA, 25 bp, Probe sequence
aagattttaatcgtcctggtcattt

SEQ ID NO: 172246 - DNA, 25 bp, Probe sequence
caaaaggtgcaattcgacaacatga

SEQ ID NO: 172247 - DNA, 25 bp, Probe sequence
cgagattatcatattgctgcacaga

SEQ ID NO: 172248 - DNA, 25 bp, Probe sequence
gccttacaggcgatattttccatag

SEQ ID NO: 172249 - DNA, 25 bp, Probe sequence
gcccgctggtgtcatttgtgagatt

SEQ ID NO: 172250 - DNA, 25 bp, Probe sequence
gcgatattttccatagtcaacgttg

SEQ ID NO: 172251 - DNA, 25 bp, Probe sequence
gcttatgaacgtacattgactgcca

SEQ ID NO: 172252 - DNA, 25 bp, Probe sequence
gaaggtcgtggcataggattgttaa

SEQ ID NO: 172253 - DNA, 25 bp, Probe sequence
gaagcggctgttgatttagctaaac

SEQ ID NO: 172254 - DNA, 25 bp, Probe sequence
gacatctttggtacgcaatttacag

SEQ ID NO: 172255 - DNA, 25 bp, Probe sequence
gacggcacgatggcgaaaggacaag

SEQ ID NO: 172256 - DNA, 25 bp, Probe sequence
gattgttaaacaaattacgcgcata

SEQ ID NO: 172257 - DNA, 25 bp, Probe sequence
gtcaacgttgtgattgtggtgctca

SEQ ID NO: 172258 - DNA, 25 bp, Probe sequence
gtcatttatttccattagtagcaca

SEQ ID NO: 172259 - DNA, 25 bp, Probe sequence
gtggtgctcaacttgaatcgtctat

SEQ ID NO: 172260 - DNA, 25 bp, Probe sequence
ggggattaatatgcgcaccagtgtc

SEQ ID NO: 172261 - DNA, 25 bp, Probe sequence
ggcatgattatttatctacctcaag

SEQ ID NO: 172262 - DNA, 25 bp, Probe sequence
tgactgccaaaaagctcattgatcc

SEQ ID NO: 172263 - DNA, 25 bp, Probe sequence
tgcgcaccagtgtctaaagatattg

SEQ ID NO: 172264 - DNA, 25 bp, Probe sequence
tacattctgcgtgccttacaggcga

SEQ ID NO: 172265 - DNA, 25 bp, Probe sequence
taactccgacatctttggtacgcaa

SEQ ID NO: 172266 - DNA, 25 bp, Probe sequence
tacgcgcatatgaattaattgagca

SEQ ID NO: 172267 - DNA, 25 bp, Probe sequence
ttgcacaacgtttggatttggtaca

SEQ ID NO: 172268 - DNA, 25 bp, Probe sequence
attcgtcaatcagtcaggacgattg

SEQ ID NO: 172269 - DNA, 25 bp, Probe sequence
attttgtcctcggtcatgtagatga

SEQ ID NO: 172270 - DNA, 25 bp, Probe sequence
ataaagaccaattatctgtagataa

SEQ ID NO: 172271 - DNA, 25 bp, Probe sequence
atcttattccagaaacgaggcgttc

SEQ ID NO: 172272 - DNA, 25 bp, Probe sequence
atgtttactggcatcgttgaagaaa

SEQ ID NO: 172273 - DNA, 25 bp, Probe sequence
acctatttagcagatgttaagcgac

SEQ ID NO: 172274 - DNA, 25 bp, Probe sequence
aagtgttcaaattcgtcaatcagtc

SEQ ID NO: 172275 - DNA, 25 bp, Probe sequence
aatggtgcatgtttaacagtgattg

SEQ ID NO: 172276 - DNA, 25 bp, Probe sequence
aatttagagcgtgccatgagtggta

SEQ ID NO: 172277 - DNA, 25 bp, Probe sequence
cagacgttttgtttaaatatgttga

SEQ ID NO: 172278 - DNA, 25 bp, Probe sequence
gcatattggtgattccatcagtgtt

SEQ ID NO: 172279 - DNA, 25 bp, Probe sequence
gcatcgttgaagaaataggtgtcgt

SEQ ID NO: 172280 - DNA, 25 bp, Probe sequence
gcagatatgcatattggtgattcca

SEQ ID NO: 172281 - DNA, 25 bp, Probe sequence
gaagtaaatttagagcgtgccatga

SEQ ID NO: 172282 - DNA, 25 bp, Probe sequence
gaagcacataagattacggcagata

SEQ ID NO: 172283 - DNA, 25 bp, Probe sequence
gaaacgaggcgttcaacgattttat

SEQ ID NO: 172284 - DNA, 25 bp, Probe sequence
gacattcatcttattccagaaacga

SEQ ID NO: 172285 - DNA, 25 bp, Probe sequence
gagcgtgccatgagtggtaacggta

SEQ ID NO: 172286 - DNA, 25 bp, Probe sequence
gatgttaagcgacaatcagaagtaa

SEQ ID NO: 172287 - DNA, 25 bp, Probe sequence
gataacagttttgacattcatctta

SEQ ID NO: 172288 - DNA, 25 bp, Probe sequence
gattcaatgtagccaacatattaat

SEQ ID NO: 172289 - DNA, 25 bp, Probe sequence
gattccatcagtgttaatggtgcat

SEQ ID NO: 172290 - DNA, 25 bp, Probe sequence
gttcaaattcgtcaatcagtcagga

SEQ ID NO: 172291 - DNA, 25 bp, Probe sequence
gttttgacattcatcttattccaga

SEQ ID NO: 172292 - DNA, 25 bp, Probe sequence
gtagatgaactaggaacagtttcaa

SEQ ID NO: 172293 - DNA, 25 bp, Probe sequence
gtcctcggtcatgtagatgaactag

SEQ ID NO: 172294 - DNA, 25 bp, Probe sequence
tggtaacggtaggtttggtggacat

SEQ ID NO: 172295 - DNA, 25 bp, Probe sequence
tggacattttgtcctcggtcatgta

SEQ ID NO: 172296 - DNA, 25 bp, Probe sequence
tggtggacattttgtcctcggtcat

SEQ ID NO: 172297 - DNA, 25 bp, Probe sequence
tcaacgattttatcatccaaaaaat

SEQ ID NO: 172298 - DNA, 25 bp, Probe sequence
taaattaagagcatttggtttttag

SEQ ID NO: 172299 - DNA, 25 bp, Probe sequence
taaagtacatttagaaacagacgtt

SEQ ID NO: 172300 - DNA, 25 bp, Probe sequence
taggtgtcgttaaaagtgttcaaat

SEQ ID NO: 172301 - DNA, 25 bp, Probe sequence
ttattacgattcaatgtagccaaca

SEQ ID NO: 172302 - DNA, 25 bp, Probe sequence
atactacacgtattcaagatggaaa

SEQ ID NO: 172303 - DNA, 25 bp, Probe sequence
atgccccgaaattaattggcggatc

SEQ ID NO: 172304 - DNA, 25 bp, Probe sequence
atggtacaaggtcaaacaggtgtta

SEQ ID NO: 172305 - DNA, 25 bp, Probe sequence
agatgaatcaacaccaatttggata

SEQ ID NO: 172306 - DNA, 25 bp, Probe sequence
acaggtgttaatccacccgttggcg

SEQ ID NO: 172307 - DNA, 25 bp, Probe sequence
acagtgaaagtatctgcaagtttag

SEQ ID NO: 172308 - DNA, 25 bp, Probe sequence
aaaggtgacaagcatgcggaggttc

SEQ ID NO: 172309 - DNA, 25 bp, Probe sequence
aaaagtaatattgtctaagtctggg

SEQ ID NO: 172310 - DNA, 25 bp, Probe sequence
aaccactacttcagaatttctccaa

SEQ ID NO: 172311 - DNA, 25 bp, Probe sequence
aatgctgaaggtgcgacgatttata

SEQ ID NO: 172312 - DNA, 25 bp, Probe sequence
aatttattctctattatgccccgaa

SEQ ID NO: 172313 - DNA, 25 bp, Probe sequence
cacggtattgaggttgaatgcgttg

SEQ ID NO: 172314 - DNA, 25 bp, Probe sequence
cgatttatattacgttagagccatg

SEQ ID NO: 172315 - DNA, 25 bp, Probe sequence
gcatcacaattataccaagactttt

SEQ ID NO: 172316 - DNA, 25 bp, Probe sequence
gcatgcggaggttcaagcacttgat

SEQ ID NO: 172317 - DNA, 25 bp, Probe sequence
gcaaagcaactgccacaaattacag

SEQ ID NO: 172318 - DNA, 25 bp, Probe sequence
gaatttctccaatctaattatatag

SEQ ID NO: 172319 - DNA, 25 bp, Probe sequence
gaaattgttcattccgagttattaa

SEQ ID NO: 172320 - DNA, 25 bp, Probe sequence
gagccatgtagtcattttggttcaa

SEQ ID NO: 172321 - DNA, 25 bp, Probe sequence
gatgtgattgagataccagatgcga

SEQ ID NO: 172322 - DNA, 25 bp, Probe sequence
gatgatccacaatatactacacgta

SEQ ID NO: 172323 - DNA, 25 bp, Probe sequence
gataccagatgcgaaccaatttgaa

SEQ ID NO: 172324 - DNA, 25 bp, Probe sequence
gttggtattggtgcacacttgagaa

SEQ ID NO: 172325 - DNA, 25 bp, Probe sequence
gatttaacaacaattcttcacaatt

SEQ ID NO: 172326 - DNA, 25 bp, Probe sequence
ggtccaaccactacttcagaatttc

SEQ ID NO: 172327 - DNA, 25 bp, Probe sequence
ggtaggattgttggtattggtgcac

SEQ ID NO: 172328 - DNA, 25 bp, Probe sequence
ggagttggaactttgctagtcgagg

SEQ ID NO: 172329 - DNA, 25 bp, Probe sequence
ggacaaagtcaatggattactaaca

SEQ ID NO: 172330 - DNA, 25 bp, Probe sequence
tgtctaagtctgggaatattcattt

SEQ ID NO: 172331 - DNA, 25 bp, Probe sequence
tgaggttgaatgcgttgatgatgaa

SEQ ID NO: 172332 - DNA, 25 bp, Probe sequence
tctataagttaagacatcgacacga

SEQ ID NO: 172333 - DNA, 25 bp, Probe sequence
tcaagcacttgatatggcacaacaa

SEQ ID NO: 172334 - DNA, 25 bp, Probe sequence
ttgctagtcgaggcaggtccaacca

SEQ ID NO: 172335 - DNA, 25 bp, Probe sequence
ttggcggatctggaaattatcaatt

SEQ ID NO: 172336 - DNA, 25 bp, Probe sequence
attatcgtcacggattcaacctctg

SEQ ID NO: 172337 - DNA, 25 bp, Probe sequence
atatctcttcaagtgagtatatcga

SEQ ID NO: 172338 - DNA, 25 bp, Probe sequence
atcgtcacggattcaacctctgatt

SEQ ID NO: 172339 - DNA, 25 bp, Probe sequence
atggctaaacaaattatcgtcacgg

SEQ ID NO: 172340 - DNA, 25 bp, Probe sequence
accattaagcctgacaatcgacggg

SEQ ID NO: 172341 - DNA, 25 bp, Probe sequence
acgtcaaaacaagtcaaccacctat

SEQ ID NO: 172342 - DNA, 25 bp, Probe sequence
actgctgttcaagcgagccatatgg

SEQ ID NO: 172343 - DNA, 25 bp, Probe sequence
acattcatgttataccattaagcct

SEQ ID NO: 172344 - DNA, 25 bp, Probe sequence
acaagtcaaccacctattggtcgat

SEQ ID NO: 172345 - DNA, 25 bp, Probe sequence
aagcctgacaatcgacgggaaatct

SEQ ID NO: 172346 - DNA, 25 bp, Probe sequence
aagcgagccatatggtagatggtaa

SEQ ID NO: 172347 - DNA, 25 bp, Probe sequence
aagtattcatctttcgtcaggctta

SEQ ID NO: 172348 - DNA, 25 bp, Probe sequence
aatactgctgttcaagcgagccata

SEQ ID NO: 172349 - DNA, 25 bp, Probe sequence
aattgttgaattggttctgttgcaa

SEQ ID NO: 172350 - DNA, 25 bp, Probe sequence
caagtgagtatatcgatcatattga

SEQ ID NO: 172351 - DNA, 25 bp, Probe sequence
caacctctgatttatcacatgaata

SEQ ID NO: 172352 - DNA, 25 bp, Probe sequence
ctgttcaagcgagccatatggtaga

SEQ ID NO: 172353 - DNA, 25 bp, Probe sequence
ccacctattggtcgatttattgaaa

SEQ ID NO: 172354 - DNA, 25 bp, Probe sequence
gaaaatgatgcagacgtcaaaacaa

SEQ ID NO: 172355 - DNA, 25 bp, Probe sequence
gacaatcgacgggaaatcttacact

SEQ ID NO: 172356 - DNA, 25 bp, Probe sequence
gacgggaaatcttacactgatcaag

SEQ ID NO: 172357 - DNA, 25 bp, Probe sequence
gagcaattagctcaagatgacgttg

SEQ ID NO: 172358 - DNA, 25 bp, Probe sequence
gattctaaatctatttcgtttgggt

SEQ ID NO: 172359 - DNA, 25 bp, Probe sequence
gttataccattaagcctgacaatcg

SEQ ID NO: 172360 - DNA, 25 bp, Probe sequence
gtattcatctttcgtcaggcttaag

SEQ ID NO: 172361 - DNA, 25 bp, Probe sequence
gtcaaccacctattggtcgatttat

SEQ ID NO: 172362 - DNA, 25 bp, Probe sequence
gtcacggattcaacctctgatttat

SEQ ID NO: 172363 - DNA, 25 bp, Probe sequence
gtggtacttataatactgctgttca

SEQ ID NO: 172364 - DNA, 25 bp, Probe sequence
ggtcgatttattgaaacatatgagc

SEQ ID NO: 172365 - DNA, 25 bp, Probe sequence
ggtaatattacagtgattgattcta

SEQ ID NO: 172366 - DNA, 25 bp, Probe sequence
ggattcaacctctgatttatcacat

SEQ ID NO: 172367 - DNA, 25 bp, Probe sequence
tgggttaggttatcaaattaagcaa

SEQ ID NO: 172368 - DNA, 25 bp, Probe sequence
tttcgtcaggcttaagtggtactta

SEQ ID NO: 172369 - DNA, 25 bp, Probe sequence
tcatctttcgtcaggcttaagtggt

SEQ ID NO: 172370 - DNA, 25 bp, Probe sequence
aactgggaagtcgaatcttcagtag

SEQ ID NO: 172371 - DNA, 25 bp, Probe sequence
attctttccaccatacacattcgaa

SEQ ID NO: 172372 - DNA, 25 bp, Probe sequence
atacacttgtaatggcacggaaaac

SEQ ID NO: 172373 - DNA, 25 bp, Probe sequence
actgaccactgggaatacacttgta

SEQ ID NO: 172374 - DNA, 25 bp, Probe sequence
actaaccaagcttcatttcaccatg

SEQ ID NO: 172375 - DNA, 25 bp, Probe sequence
aaaatactataccgcatacattctt

SEQ ID NO: 172376 - DNA, 25 bp, Probe sequence
aacgttatacgaagcaatgattgac

SEQ ID NO: 172377 - DNA, 25 bp, Probe sequence
aagcatattaaacaactgaccactg

SEQ ID NO: 172378 - DNA, 25 bp, Probe sequence
aagagttatctggtcatgtttttat

SEQ ID NO: 172379 - DNA, 25 bp, Probe sequence
aaggagacacattctttccaccata

SEQ ID NO: 172380 - DNA, 25 bp, Probe sequence
aattctatagggaagccattgccaa

SEQ ID NO: 172381 - DNA, 25 bp, Probe sequence
cattgggtaccaaaatcaattacct

SEQ ID NO: 172382 - DNA, 25 bp, Probe sequence
ctggtcatgtttttatatttggagg

SEQ ID NO: 172383 - DNA, 25 bp, Probe sequence
ccaccatacacattcgaaaactggg

SEQ ID NO: 172384 - DNA, 25 bp, Probe sequence
gccattgccaaatagacgtaacgtc

SEQ ID NO: 172385 - DNA, 25 bp, Probe sequence
gacgtaacgtcgtactcactaacca

SEQ ID NO: 172386 - DNA, 25 bp, Probe sequence
gaagcaatgattgaccaggtagatg

SEQ ID NO: 172387 - DNA, 25 bp, Probe sequence
gacattatcaataattgtcgctcac

SEQ ID NO: 172388 - DNA, 25 bp, Probe sequence
gatgttataaactctcttgatgaaa

SEQ ID NO: 172389 - DNA, 25 bp, Probe sequence
gattgaccaggtagatgatatgtat

SEQ ID NO: 172390 - DNA, 25 bp, Probe sequence
gtactcactaaccaagcttcatttc

SEQ ID NO: 172391 - DNA, 25 bp, Probe sequence
gggaagccattgccaaatagacgta

SEQ ID NO: 172392 - DNA, 25 bp, Probe sequence
ggggtagatgttataaactctcttg

SEQ ID NO: 172393 - DNA, 25 bp, Probe sequence
ggaaagtttcaaggagacacattct

SEQ ID NO: 172394 - DNA, 25 bp, Probe sequence
ggcacttaccaaatgatttaaagca

SEQ ID NO: 172395 - DNA, 25 bp, Probe sequence
tggcacggaaaacttttaattctat

SEQ ID NO: 172396 - DNA, 25 bp, Probe sequence
tttggaggacaaacgttatacgaag

SEQ ID NO: 172397 - DNA, 25 bp, Probe sequence
tcttcagtagaaggtcaactagatg

SEQ ID NO: 172398 - DNA, 25 bp, Probe sequence
tcatttcaccatgaaggggtagatg

SEQ ID NO: 172399 - DNA, 25 bp, Probe sequence
taacgtcgtactcactaaccaagct

SEQ ID NO: 172400 - DNA, 25 bp, Probe sequence
taattgtcgctcacgataaacaaag

SEQ ID NO: 172401 - DNA, 25 bp, Probe sequence
taaacaaagagtcattgggtaccaa

SEQ ID NO: 172402 - DNA, 25 bp, Probe sequence
tacattcttacatttagtgcgtaga

SEQ ID NO: 172403 - DNA, 25 bp, Probe sequence
tataccgcatacattcttacattta

SEQ ID NO: 172404 - DNA, 25 bp, Probe sequence
atttcggcaatgcaccgcttgatac

SEQ ID NO: 172405 - DNA, 25 bp, Probe sequence
atgaactggacgatattgcgattat

SEQ ID NO: 172406 - DNA, 25 bp, Probe sequence
atgttgtcattaacgcgacaggtgc

SEQ ID NO: 172407 - DNA, 25 bp, Probe sequence
atgattgcgataggtcaaatgacaa

SEQ ID NO: 172408 - DNA, 25 bp, Probe sequence
agcgcgtccaacagaaatgggcatt

SEQ ID NO: 172409 - DNA, 25 bp, Probe sequence
aaatgatagttctgagctgctaatt

SEQ ID NO: 172410 - DNA, 25 bp, Probe sequence
aaaggatatatcgctacgccttatc

SEQ ID NO: 172411 - DNA, 25 bp, Probe sequence
aacatcatttcggcaatgcaccgct

SEQ ID NO: 172412 - DNA, 25 bp, Probe sequence
aacgcgacaggtgcaaaaagtcatt

SEQ ID NO: 172413 - DNA, 25 bp, Probe sequence
aagaggtacaatgatagacgtgaca

SEQ ID NO: 172414 - DNA, 25 bp, Probe sequence
aatgcctccaagaactgctgaacta

SEQ ID NO: 172415 - DNA, 25 bp, Probe sequence
cgctacgccttatccaacatataat

SEQ ID NO: 172416 - DNA, 25 bp, Probe sequence
gaatttaacttattacatatgtact

SEQ ID NO: 172417 - DNA, 25 bp, Probe sequence
gaagtatgatttagcgcgtccaaca

SEQ ID NO: 172418 - DNA, 25 bp, Probe sequence
gaacctgcatatttaccgagatttg

SEQ ID NO: 172419 - DNA, 25 bp, Probe sequence
gaactgctgaactaattattgaatt

SEQ ID NO: 172420 - DNA, 25 bp, Probe sequence
gaactgctggtgtaagtgtattgag

SEQ ID NO: 172421 - DNA, 25 bp, Probe sequence
gaaaccaatcaagttattagtccaa

SEQ ID NO: 172422 - DNA, 25 bp, Probe sequence
gacgtgacattcaagtacttaacta

SEQ ID NO: 172423 - DNA, 25 bp, Probe sequence
gacgtacaggaaatcatattgcaga

SEQ ID NO: 172424 - DNA, 25 bp, Probe sequence
gagctgctaattaatatgccttcga

SEQ ID NO: 172425 - DNA, 25 bp, Probe sequence
gagatttgtattcggacattatatg

SEQ ID NO: 172426 - DNA, 25 bp, Probe sequence
gatggcaagttgtattatttttcat

SEQ ID NO: 172427 - DNA, 25 bp, Probe sequence
gattttaattttgatgaacctgcat

SEQ ID NO: 172428 - DNA, 25 bp, Probe sequence
gtatctcaattatatgatgctttag

SEQ ID NO: 172429 - DNA, 25 bp, Probe sequence
gtacatttgcctaccatgatccata

SEQ ID NO: 172430 - DNA, 25 bp, Probe sequence
gggacagggcgtaccatttcaaaat

SEQ ID NO: 172431 - DNA, 25 bp, Probe sequence
ggcatgggaactgctggtgtaagtg

SEQ ID NO: 172432 - DNA, 25 bp, Probe sequence
tgagagagttagttaagcacccgaa

SEQ ID NO: 172433 - DNA, 25 bp, Probe sequence
taccaattactatgacgagtcgttc

SEQ ID NO: 172434 - DNA, 25 bp, Probe sequence
ttaacatgtggtacatttgcctacc

SEQ ID NO: 172435 - DNA, 25 bp, Probe sequence
ttaaattcaaatccaatgcctccaa

SEQ ID NO: 172436 - DNA, 25 bp, Probe sequence
ttgcgattattggtacaggccttgc

SEQ ID NO: 172437 - DNA, 25 bp, Probe sequence
ttgcctaccatgatccatataactt

SEQ ID NO: 172438 - DNA, 25 bp, Probe sequence
atttcgataacgtttcacaagctgg

SEQ ID NO: 172439 - DNA, 25 bp, Probe sequence
atttgttagttgatcccgatatgaa

SEQ ID NO: 172440 - DNA, 25 bp, Probe sequence
ataacgtttcacaagctggtagaga

SEQ ID NO: 172441 - DNA, 25 bp, Probe sequence
atcactacatttgttagttgatccc

SEQ ID NO: 172442 - DNA, 25 bp, Probe sequence
agatttcgataacgtttcacaagct

SEQ ID NO: 172443 - DNA, 25 bp, Probe sequence
acgtttcacaagctggtagagaaat

SEQ ID NO: 172444 - DNA, 25 bp, Probe sequence
actacatttgttagttgatcccgat

SEQ ID NO: 172445 - DNA, 25 bp, Probe sequence
acatttgttagttgatcccgatatg

SEQ ID NO: 172446 - DNA, 25 bp, Probe sequence
acaagctggtagagaaatcttaaaa

SEQ ID NO: 172447 - DNA, 25 bp, Probe sequence
aaagtatcactacatttgttagttg

SEQ ID NO: 172448 - DNA, 25 bp, Probe sequence
aaagatttcgataacgtttcacaag

SEQ ID NO: 172449 - DNA, 25 bp, Probe sequence
aagatttcgataacgtttcacaagc

SEQ ID NO: 172450 - DNA, 25 bp, Probe sequence
cactacatttgttagttgatcccga

SEQ ID NO: 172451 - DNA, 25 bp, Probe sequence
catttgttagttgatcccgatatga

SEQ ID NO: 172452 - DNA, 25 bp, Probe sequence
cgataacgtttcacaagctggtaga

SEQ ID NO: 172453 - DNA, 25 bp, Probe sequence
gaaaaaagtatcactacatttgtta

SEQ ID NO: 172454 - DNA, 25 bp, Probe sequence
gagattatcaaatacgcacaagaaa

SEQ ID NO: 172455 - DNA, 25 bp, Probe sequence
gatgagattatcaaatacgcacaag

SEQ ID NO: 172456 - DNA, 25 bp, Probe sequence
gatcccgatatgaaagatgagatta

SEQ ID NO: 172457 - DNA, 25 bp, Probe sequence
gataacgtttcacaagctggtagag

SEQ ID NO: 172458 - DNA, 25 bp, Probe sequence
gatttcgataacgtttcacaagctg

SEQ ID NO: 172459 - DNA, 25 bp, Probe sequence
gattatcaaatacgcacaagaaaaa

SEQ ID NO: 172460 - DNA, 25 bp, Probe sequence
gttgatcccgatatgaaagatgaga

SEQ ID NO: 172461 - DNA, 25 bp, Probe sequence
gttagttgatcccgatatgaaagat

SEQ ID NO: 172462 - DNA, 25 bp, Probe sequence
gtatcactacatttgttagttgatc

SEQ ID NO: 172463 - DNA, 25 bp, Probe sequence
tgaagaaaattcagtcttttttggt

SEQ ID NO: 172464 - DNA, 25 bp, Probe sequence
tcgataacgtttcacaagctggtag

SEQ ID NO: 172465 - DNA, 25 bp, Probe sequence
tcactacatttgttagttgatcccg

SEQ ID NO: 172466 - DNA, 25 bp, Probe sequence
taacgtttcacaagctggtagagaa

SEQ ID NO: 172467 - DNA, 25 bp, Probe sequence
tacatttgttagttgatcccgatat

SEQ ID NO: 172468 - DNA, 25 bp, Probe sequence
tttcgataacgtttcacaagctggt

SEQ ID NO: 172469 - DNA, 25 bp, Probe sequence
ttcacaagctggtagagaaatctta

SEQ ID NO: 172470 - DNA, 25 bp, Probe sequence
ttcgataacgtttcacaagctggta

SEQ ID NO: 172471 - DNA, 25 bp, Probe sequence
ttgttagttgatcccgatatgaaag

SEQ ID NO: 172472 - DNA, 25 bp, Probe sequence
atataatgccactactactggagaa

SEQ ID NO: 172473 - DNA, 25 bp, Probe sequence
ataatgccactactactggagaaat

SEQ ID NO: 172474 - DNA, 25 bp, Probe sequence
atgccactactactggagaaattgt

SEQ ID NO: 172475 - DNA, 25 bp, Probe sequence
aggagggtaatttaaatggcgaatg

SEQ ID NO: 172476 - DNA, 25 bp, Probe sequence
atggcgaatggtgtattaatgatgt

SEQ ID NO: 172477 - DNA, 25 bp, Probe sequence
accgaatactattatccacttcaaa

SEQ ID NO: 172478 - DNA, 25 bp, Probe sequence
acgctgttaatggaattgttacctt

SEQ ID NO: 172479 - DNA, 25 bp, Probe sequence
actatctttaacaaccgaatactat

SEQ ID NO: 172480 - DNA, 25 bp, Probe sequence
acaaccgaatactattatccacttc

SEQ ID NO: 172481 - DNA, 25 bp, Probe sequence
acaaatatatagatgcttatcatgt

SEQ ID NO: 172482 - DNA, 25 bp, Probe sequence
aaatactaggtgtcgcaaaggaatt

SEQ ID NO: 172483 - DNA, 25 bp, Probe sequence
aatggatataatgccactactactg

SEQ ID NO: 172484 - DNA, 25 bp, Probe sequence
aatggaattgttacctttacacatg

SEQ ID NO: 172485 - DNA, 25 bp, Probe sequence
aatgaactatctttaacaaccgaat

SEQ ID NO: 172486 - DNA, 25 bp, Probe sequence
aatactattatccacttcaaaacgc

SEQ ID NO: 172487 - DNA, 25 bp, Probe sequence
cactactactggagaaattgttaaa

SEQ ID NO: 172488 - DNA, 25 bp, Probe sequence
ctattatccacttcaaaacgcaata

SEQ ID NO: 172489 - DNA, 25 bp, Probe sequence
ctgttagtaaaatagcagcaaacgc

SEQ ID NO: 172490 - DNA, 25 bp, Probe sequence
gcagcaaacgctgttaatggaattg

SEQ ID NO: 172491 - DNA, 25 bp, Probe sequence
gaatctaaatggcaagaacagtgga

SEQ ID NO: 172492 - DNA, 25 bp, Probe sequence
gaactatctttaacaaccgaatact

SEQ ID NO: 172493 - DNA, 25 bp, Probe sequence
gaaagataaaatactaggtgtcgca

SEQ ID NO: 172494 - DNA, 25 bp, Probe sequence
gttacctttacacatgaacaaaata

SEQ ID NO: 172495 - DNA, 25 bp, Probe sequence
ggtgtcgcaaaggaattatttataa

SEQ ID NO: 172496 - DNA, 25 bp, Probe sequence
ggatataatgccactactactggag

SEQ ID NO: 172497 - DNA, 25 bp, Probe sequence
ggaattgttacctttacacatgaac

SEQ ID NO: 172498 - DNA, 25 bp, Probe sequence
tgaacaagttctctcaaattttttt

SEQ ID NO: 172499 - DNA, 25 bp, Probe sequence
taaagggaatctttattatcacttt

SEQ ID NO: 172500 - DNA, 25 bp, Probe sequence
taaacttatgaacaagttctctcaa

SEQ ID NO: 172501 - DNA, 25 bp, Probe sequence
tactaggtgtcgcaaaggaattatt

SEQ ID NO: 172502 - DNA, 25 bp, Probe sequence
tactattatccacttcaaaacgcaa

SEQ ID NO: 172503 - DNA, 25 bp, Probe sequence
tagatgcttatcatgtaatttttaa

SEQ ID NO: 172504 - DNA, 25 bp, Probe sequence
tatccacttcaaaacgcaataattg

SEQ ID NO: 172505 - DNA, 25 bp, Probe sequence
ttaatgatgttaatgctgttagtaa

SEQ ID NO: 172506 - DNA, 25 bp, Probe sequence
atttgctgttgtctcatttttattt

SEQ ID NO: 172507 - DNA, 25 bp, Probe sequence
atagcggtacttttatcgataatga

SEQ ID NO: 172508 - DNA, 25 bp, Probe sequence
atccgatcagatatttttcaaacat

SEQ ID NO: 172509 - DNA, 25 bp, Probe sequence
atccaggagaacatcaatatgctac

SEQ ID NO: 172510 - DNA, 25 bp, Probe sequence
aggaaaatacttcaaatactttgtg

SEQ ID NO: 172511 - DNA, 25 bp, Probe sequence
aaagcatggttgggatacacctgaa

SEQ ID NO: 172512 - DNA, 25 bp, Probe sequence
aaagctgctaaagataagcacgtta

SEQ ID NO: 172513 - DNA, 25 bp, Probe sequence
aactggcgcagttaaaagtgaatta

SEQ ID NO: 172514 - DNA, 25 bp, Probe sequence
aagcacttcttatcaagcacagatc

SEQ ID NO: 172515 - DNA, 25 bp, Probe sequence
aagcacagatcaaaatacattgtat

SEQ ID NO: 172516 - DNA, 25 bp, Probe sequence
aagtttatttaatttcacatgcatt

SEQ ID NO: 172517 - DNA, 25 bp, Probe sequence
aagtgggcagaaagtaatgcaacaa

SEQ ID NO: 172518 - DNA, 25 bp, Probe sequence
aatgttacattaaacgatgcagcaa

SEQ ID NO: 172519 - DNA, 25 bp, Probe sequence
aatgcaacaattatcgctgactttt

SEQ ID NO: 172520 - DNA, 25 bp, Probe sequence
aattatacgagtcaacaggtatcaa

SEQ ID NO: 172521 - DNA, 25 bp, Probe sequence
cacatgcattattagaaactggcgc

SEQ ID NO: 172522 - DNA, 25 bp, Probe sequence
caggcggtgctgatttcattcataa

SEQ ID NO: 172523 - DNA, 25 bp, Probe sequence
gcatggagagatgcatctgcaactg

SEQ ID NO: 172524 - DNA, 25 bp, Probe sequence
gcaacaattatcgctgacttttata

SEQ ID NO: 172525 - DNA, 25 bp, Probe sequence
gaaaaagctatttcaggcggtgctg

SEQ ID NO: 172526 - DNA, 25 bp, Probe sequence
gaaacatacggatgatttcttaaaa

SEQ ID NO: 172527 - DNA, 25 bp, Probe sequence
gagagatgcatctgcaactgaaatt

SEQ ID NO: 172528 - DNA, 25 bp, Probe sequence
gataagcacgttaacgaagtttatt

SEQ ID NO: 172529 - DNA, 25 bp, Probe sequence
gatagaccaacgttattgaaacata

SEQ ID NO: 172530 - DNA, 25 bp, Probe sequence
gttgggatacacctgaaaaagctat

SEQ ID NO: 172531 - DNA, 25 bp, Probe sequence
gttgtcatatttgctgttgtctcat

SEQ ID NO: 172532 - DNA, 25 bp, Probe sequence
gtcatatttgctgttgtctcatttt

SEQ ID NO: 172533 - DNA, 25 bp, Probe sequence
gtgcaatggatagcggtacttttat

SEQ ID NO: 172534 - DNA, 25 bp, Probe sequence
ggacttgttgtcatatttgctgttg

SEQ ID NO: 172535 - DNA, 25 bp, Probe sequence
tgttgtctcatttttatttttctca

SEQ ID NO: 172536 - DNA, 25 bp, Probe sequence
tgatttcattcataagcacttctta

SEQ ID NO: 172537 - DNA, 25 bp, Probe sequence
tatttttctcaatgatatccgatca

SEQ ID NO: 172538 - DNA, 25 bp, Probe sequence
tttttcaaacatgttaaatccgaca

SEQ ID NO: 172539 - DNA, 25 bp, Probe sequence
tttggaataataggacttgttgtca

SEQ ID NO: 172540 - DNA, 25 bp, Probe sequence
atttctactgacaaaatagcaacta

SEQ ID NO: 172541 - DNA, 25 bp, Probe sequence
atagatttaaaaggcgtcacagata

SEQ ID NO: 172542 - DNA, 25 bp, Probe sequence
atgtatggaggggccactttatcag

SEQ ID NO: 172543 - DNA, 25 bp, Probe sequence
atggaggggccactttatcaggaca

SEQ ID NO: 172544 - DNA, 25 bp, Probe sequence
aggacaatacttaaattctgctaga

SEQ ID NO: 172545 - DNA, 25 bp, Probe sequence
aggggccactttatcaggacaatac

SEQ ID NO: 172546 - DNA, 25 bp, Probe sequence
accaatgatttgatctcagaatcta

SEQ ID NO: 172547 - DNA, 25 bp, Probe sequence
acatgtatggaggggccactttatc

SEQ ID NO: 172548 - DNA, 25 bp, Probe sequence
aatgatttgatctcagaatctaata

SEQ ID NO: 172549 - DNA, 25 bp, Probe sequence
aatacatgtatggaggggccacttt

SEQ ID NO: 172550 - DNA, 25 bp, Probe sequence
cattgattataatggtccttgtaaa

SEQ ID NO: 172551 - DNA, 25 bp, Probe sequence
ctcagaatctaataattgggacgaa

SEQ ID NO: 172552 - DNA, 25 bp, Probe sequence
gccactttatcaggacaatacttaa

SEQ ID NO: 172553 - DNA, 25 bp, Probe sequence
gaatctgaaaaatttcatcttgatg

SEQ ID NO: 172554 - DNA, 25 bp, Probe sequence
gacaatacttaaattctgctagaaa

SEQ ID NO: 172555 - DNA, 25 bp, Probe sequence
gactgcctgtaagttttttgaaaat

SEQ ID NO: 172556 - DNA, 25 bp, Probe sequence
gagatggactgcctgtaagtttttt

SEQ ID NO: 172557 - DNA, 25 bp, Probe sequence
gatggactgcctgtaagttttttga

SEQ ID NO: 172558 - DNA, 25 bp, Probe sequence
gatctcagaatctaataattgggac

SEQ ID NO: 172559 - DNA, 25 bp, Probe sequence
gatattggtgtaggtaacttaagaa

SEQ ID NO: 172560 - DNA, 25 bp, Probe sequence
gatttgttttatacaggagatggac

SEQ ID NO: 172561 - DNA, 25 bp, Probe sequence
gatttaaaaggcgtcacagataaaa

SEQ ID NO: 172562 - DNA, 25 bp, Probe sequence
gtatggaggggccactttatcagga

SEQ ID NO: 172563 - DNA, 25 bp, Probe sequence
gggccactttatcaggacaatactt

SEQ ID NO: 172564 - DNA, 25 bp, Probe sequence
ggtaccaatgatttgatctcagaat

SEQ ID NO: 172565 - DNA, 25 bp, Probe sequence
ggagatggactgcctgtaagttttt

SEQ ID NO: 172566 - DNA, 25 bp, Probe sequence
ggaggggccactttatcaggacaat

SEQ ID NO: 172567 - DNA, 25 bp, Probe sequence
ggcattgattataatggtccttgta

SEQ ID NO: 172568 - DNA, 25 bp, Probe sequence
tggactgcctgtaagttttttgaaa

SEQ ID NO: 172569 - DNA, 25 bp, Probe sequence
tggaggggccactttatcaggacaa

SEQ ID NO: 172570 - DNA, 25 bp, Probe sequence
tggatatttttggcattgattataa

SEQ ID NO: 172571 - DNA, 25 bp, Probe sequence
tgtaggtaacttaagaaatttctat

SEQ ID NO: 172572 - DNA, 25 bp, Probe sequence
tcattttcatatgatttgttttata

SEQ ID NO: 172573 - DNA, 25 bp, Probe sequence
taaattctgctagaaaaatccctat

SEQ ID NO: 172574 - DNA, 25 bp, Probe sequence
attccagatgcttcaatttcatttg

SEQ ID NO: 172575 - DNA, 25 bp, Probe sequence
atgtttcagtatttgcaggacgtat

SEQ ID NO: 172576 - DNA, 25 bp, Probe sequence
atgtatttgttaaaattcctattgt

SEQ ID NO: 172577 - DNA, 25 bp, Probe sequence
agaggctgtaaaagttacgcatagt

SEQ ID NO: 172578 - DNA, 25 bp, Probe sequence
acaaacttaggtcgcgatattaacg

SEQ ID NO: 172579 - DNA, 25 bp, Probe sequence
aacagattacaaagcttttgctgaa

SEQ ID NO: 172580 - DNA, 25 bp, Probe sequence
aagcgggcgtaacagattacaaagc

SEQ ID NO: 172581 - DNA, 25 bp, Probe sequence
aaggctttgcgaaagatattcaatc

SEQ ID NO: 172582 - DNA, 25 bp, Probe sequence
caggcgtagatccattaccattaat

SEQ ID NO: 172583 - DNA, 25 bp, Probe sequence
ctttcagctgacaatgtgagattaa

SEQ ID NO: 172584 - DNA, 25 bp, Probe sequence
gccaacatatgtttcagtatttgca

SEQ ID NO: 172585 - DNA, 25 bp, Probe sequence
gctgtgaaagaaattccagatgctt

SEQ ID NO: 172586 - DNA, 25 bp, Probe sequence
gcttttgctgaagaagctgtgaaag

SEQ ID NO: 172587 - DNA, 25 bp, Probe sequence
gcaggacgtattgcagatacaggcg

SEQ ID NO: 172588 - DNA, 25 bp, Probe sequence
gaaggtgtgccaacatatgtttcag

SEQ ID NO: 172589 - DNA, 25 bp, Probe sequence
gaagcagtaactgaaggtgtgccaa

SEQ ID NO: 172590 - DNA, 25 bp, Probe sequence
gaaagcagcttataaaaacaaacaa

SEQ ID NO: 172591 - DNA, 25 bp, Probe sequence
gacggcgttaaattattatgggcaa

SEQ ID NO: 172592 - DNA, 25 bp, Probe sequence
gatacaggcgtagatccattaccat

SEQ ID NO: 172593 - DNA, 25 bp, Probe sequence
gatattcaatcttcaggtctttcta

SEQ ID NO: 172594 - DNA, 25 bp, Probe sequence
gattcaagctgatgaaattggtgca

SEQ ID NO: 172595 - DNA, 25 bp, Probe sequence
gttgccgcgaattattcaatgtgat

SEQ ID NO: 172596 - DNA, 25 bp, Probe sequence
gttacgcatagtaaagacggcgtta

SEQ ID NO: 172597 - DNA, 25 bp, Probe sequence
gtagatacagttaaaggctttgcga

SEQ ID NO: 172598 - DNA, 25 bp, Probe sequence
gtgaatacaaacttaggtcgcgata

SEQ ID NO: 172599 - DNA, 25 bp, Probe sequence
gtgagattaaacgttacggctgttt

SEQ ID NO: 172600 - DNA, 25 bp, Probe sequence
gggcaagttgccgcgaattattcaa

SEQ ID NO: 172601 - DNA, 25 bp, Probe sequence
ggtgaatcaacgattcctttaatta

SEQ ID NO: 172602 - DNA, 25 bp, Probe sequence
tgaaattggtgcagatattattaca

SEQ ID NO: 172603 - DNA, 25 bp, Probe sequence
tgaagtatttgcagacgatttagaa

SEQ ID NO: 172604 - DNA, 25 bp, Probe sequence
taggtcgcgatattaacgaattatc

SEQ ID NO: 172605 - DNA, 25 bp, Probe sequence
tattcaatgtgattcaagctgatga

SEQ ID NO: 172606 - DNA, 25 bp, Probe sequence
tattcaatcttcaggtctttctatt

SEQ ID NO: 172607 - DNA, 25 bp, Probe sequence
tttgcagacgatttagaaactatgg

SEQ ID NO: 172608 - DNA, 25 bp, Probe sequence
atcgtgatggaatcttggtcaccat

SEQ ID NO: 172609 - DNA, 25 bp, Probe sequence
agtcacctgcccaagttgttttaag

SEQ ID NO: 172610 - DNA, 25 bp, Probe sequence
agataagagaattggacctgatcca

SEQ ID NO: 172611 - DNA, 25 bp, Probe sequence
acatttggaagctttgttggcacaa

SEQ ID NO: 172612 - DNA, 25 bp, Probe sequence
aaatgacgcgaattgatggtttaaa

SEQ ID NO: 172613 - DNA, 25 bp, Probe sequence
aaagacattgctcaagaattaggaa

SEQ ID NO: 172614 - DNA, 25 bp, Probe sequence
aagtaggtgctggcattcgtgccgg

SEQ ID NO: 172615 - DNA, 25 bp, Probe sequence
caactggtattgctagagaagactt

SEQ ID NO: 172616 - DNA, 25 bp, Probe sequence
cacctgcccaagttgttttaagatg

SEQ ID NO: 172617 - DNA, 25 bp, Probe sequence
gaattaggaaagtcacctgcccaag

SEQ ID NO: 172618 - DNA, 25 bp, Probe sequence
gaagctagtttatctagattaggtt

SEQ ID NO: 172619 - DNA, 25 bp, Probe sequence
gaagaacaagtaggtgctggcattc

SEQ ID NO: 172620 - DNA, 25 bp, Probe sequence
gaagctttgttggcacaagtgtcaa

SEQ ID NO: 172621 - DNA, 25 bp, Probe sequence
gaagccgtaatggttgatacatgga

SEQ ID NO: 172622 - DNA, 25 bp, Probe sequence
gaacgaagccgtaatggttgataca

SEQ ID NO: 172623 - DNA, 25 bp, Probe sequence
gagaagacttatttattacttcaaa

SEQ ID NO: 172624 - DNA, 25 bp, Probe sequence
gagacaattaaagacattgctcaag

SEQ ID NO: 172625 - DNA, 25 bp, Probe sequence
gatggaatcttggtcaccattgatg

SEQ ID NO: 172626 - DNA, 25 bp, Probe sequence
gatgccacaaattggtttagggaca

SEQ ID NO: 172627 - DNA, 25 bp, Probe sequence
gataccgcaaaagtttatgggaatg

SEQ ID NO: 172628 - DNA, 25 bp, Probe sequence
gatttcgaattatcagatgaacaaa

SEQ ID NO: 172629 - DNA, 25 bp, Probe sequence
gatttgtatctagtacattggccag

SEQ ID NO: 172630 - DNA, 25 bp, Probe sequence
gttgttttaagatggaatgtgcagc

SEQ ID NO: 172631 - DNA, 25 bp, Probe sequence
gtatgccattgaacaaggatatcgt

SEQ ID NO: 172632 - DNA, 25 bp, Probe sequence
ggtgtcagcaattttgaacctgaac

SEQ ID NO: 172633 - DNA, 25 bp, Probe sequence
ggatatcgtagtattgataccgcaa

SEQ ID NO: 172634 - DNA, 25 bp, Probe sequence
ggaaacacgatgccacaaattggtt

SEQ ID NO: 172635 - DNA, 25 bp, Probe sequence
ggaaagtgttaagtatgccattgaa

SEQ ID NO: 172636 - DNA, 25 bp, Probe sequence
ggcacaagtgtcaattaaacctgta

SEQ ID NO: 172637 - DNA, 25 bp, Probe sequence
tggtttagggacatttcgtgtggaa

SEQ ID NO: 172638 - DNA, 25 bp, Probe sequence
tgaacctgaacatttggaagctttg

SEQ ID NO: 172639 - DNA, 25 bp, Probe sequence
taggaaagtcacctgcccaagttgt

SEQ ID NO: 172640 - DNA, 25 bp, Probe sequence
ttgaaattatatttggcagcacaac

SEQ ID NO: 172641 - DNA, 25 bp, Probe sequence
ttggtcaccattgatgaatgcacaa

SEQ ID NO: 172642 - DNA, 25 bp, Probe sequence
attccatggtcgtattcaatacaac

SEQ ID NO: 172643 - DNA, 25 bp, Probe sequence
atatctttttaccaaaggatggctt

SEQ ID NO: 172644 - DNA, 25 bp, Probe sequence
agtatttgatacattggatttagat

SEQ ID NO: 172645 - DNA, 25 bp, Probe sequence
agaactggtctttatattattgatt

SEQ ID NO: 172646 - DNA, 25 bp, Probe sequence
acatggttagtacaaaagatcgtga

SEQ ID NO: 172647 - DNA, 25 bp, Probe sequence
aaaagtctcatgaagaagctttaga

SEQ ID NO: 172648 - DNA, 25 bp, Probe sequence
aacaaatttgtattccatggtcgta

SEQ ID NO: 172649 - DNA, 25 bp, Probe sequence
aagatcgtgagattgacgcattaaa

SEQ ID NO: 172650 - DNA, 25 bp, Probe sequence
aagtgcttgtcggtgctgaacaatt

SEQ ID NO: 172651 - DNA, 25 bp, Probe sequence
aaggatggctttaataatattgaac

SEQ ID NO: 172652 - DNA, 25 bp, Probe sequence
aatagtgctgtcaaagtgcttgtcg

SEQ ID NO: 172653 - DNA, 25 bp, Probe sequence
aattgttctcgaaaaatcatagtga

SEQ ID NO: 172654 - DNA, 25 bp, Probe sequence
caatacaacgtggaagacttacaac

SEQ ID NO: 172655 - DNA, 25 bp, Probe sequence
gactcattattgcagtagtcattgc

SEQ ID NO: 172656 - DNA, 25 bp, Probe sequence
gattataatcacatggttagtacaa

SEQ ID NO: 172657 - DNA, 25 bp, Probe sequence
gattctcaattgttaaaaggtcatg

SEQ ID NO: 172658 - DNA, 25 bp, Probe sequence
gtagtcattgcattaatcttttttg

SEQ ID NO: 172659 - DNA, 25 bp, Probe sequence
gtcggtgctgaacaattagacgagt

SEQ ID NO: 172660 - DNA, 25 bp, Probe sequence
gtcaaagtgcttgtcggtgctgaac

SEQ ID NO: 172661 - DNA, 25 bp, Probe sequence
gtgctgtcaaagtgcttgtcggtgc

SEQ ID NO: 172662 - DNA, 25 bp, Probe sequence
ggtctttatattattgattctcaat

SEQ ID NO: 172663 - DNA, 25 bp, Probe sequence
ggatcaaaatgatgacaaacgttca

SEQ ID NO: 172664 - DNA, 25 bp, Probe sequence
ggacatgagattaattggtattcgt

SEQ ID NO: 172665 - DNA, 25 bp, Probe sequence
ggaagacttacaacaaatgatggat

SEQ ID NO: 172666 - DNA, 25 bp, Probe sequence
tggcggtcaatttaaagatttacca

SEQ ID NO: 172667 - DNA, 25 bp, Probe sequence
tgaacgaattagtcatttagtatta

SEQ ID NO: 172668 - DNA, 25 bp, Probe sequence
tgcacattatggcaaatatcttttt

SEQ ID NO: 172669 - DNA, 25 bp, Probe sequence
tcgaccagaagatatgcacattatg

SEQ ID NO: 172670 - DNA, 25 bp, Probe sequence
tagacgagttctttaacaaatttgt

SEQ ID NO: 172671 - DNA, 25 bp, Probe sequence
tagtcattggactcattattgcagt

SEQ ID NO: 172672 - DNA, 25 bp, Probe sequence
tttgtattccatggtcgtattcaat

SEQ ID NO: 172673 - DNA, 25 bp, Probe sequence
ttaaacaattggctgaagacttaca

SEQ ID NO: 172674 - DNA, 25 bp, Probe sequence
ttgcattaatcttttttgtcctttt

SEQ ID NO: 172675 - DNA, 25 bp, Probe sequence
ttgacgcattaaaattgttctcgaa

SEQ ID NO: 172676 - DNA, 25 bp, Probe sequence
atttatcacatcaattggcaaaacg

SEQ ID NO: 172677 - DNA, 25 bp, Probe sequence
atcacctgacattgcacaaggcgtg

SEQ ID NO: 172678 - DNA, 25 bp, Probe sequence
atcggtggacctcaaggtgatgcag

SEQ ID NO: 172679 - DNA, 25 bp, Probe sequence
atccaactgttccagaaaacttgat

SEQ ID NO: 172680 - DNA, 25 bp, Probe sequence
atgcctctagcaatttatttatcac

SEQ ID NO: 172681 - DNA, 25 bp, Probe sequence
atggtcattttggacgtacagatgt

SEQ ID NO: 172682 - DNA, 25 bp, Probe sequence
acgattatttacttcagagtctgtt

SEQ ID NO: 172683 - DNA, 25 bp, Probe sequence
acatcaatcctacaggacgctttgt

SEQ ID NO: 172684 - DNA, 25 bp, Probe sequence
acaggtatggcattgatcgccggcg

SEQ ID NO: 172685 - DNA, 25 bp, Probe sequence
acaaactgctgcttatggtcatttt

SEQ ID NO: 172686 - DNA, 25 bp, Probe sequence
acaaccgatttacaaacaaactgct

SEQ ID NO: 172687 - DNA, 25 bp, Probe sequence
aacactttgacctaagacctgcagg

SEQ ID NO: 172688 - DNA, 25 bp, Probe sequence
aacaatggcaattttaactgcgatt

SEQ ID NO: 172689 - DNA, 25 bp, Probe sequence
aactaaattctacatcaatcctaca

SEQ ID NO: 172690 - DNA, 25 bp, Probe sequence
aatgcttgatttgaaacaaccgatt

SEQ ID NO: 172691 - DNA, 25 bp, Probe sequence
caggacgctttgtaatcggtggacc

SEQ ID NO: 172692 - DNA, 25 bp, Probe sequence
catgtcatttatccaactgttccag

SEQ ID NO: 172693 - DNA, 25 bp, Probe sequence
gctgcacgttatgtggctaaaaata

SEQ ID NO: 172694 - DNA, 25 bp, Probe sequence
gcacaaggcgtggataaagcattag

SEQ ID NO: 172695 - DNA, 25 bp, Probe sequence
gcaacaggtgcaggtgaccaaggtt

SEQ ID NO: 172696 - DNA, 25 bp, Probe sequence
gaagcagttagaaaacactttgacc

SEQ ID NO: 172697 - DNA, 25 bp, Probe sequence
gacggtaaagttcaggtcactgttg

SEQ ID NO: 172698 - DNA, 25 bp, Probe sequence
gaccaagtgtcagatgcaatattag

SEQ ID NO: 172699 - DNA, 25 bp, Probe sequence
gagtctgttacagaaggacacccag

SEQ ID NO: 172700 - DNA, 25 bp, Probe sequence
gatgaacaatcacctgacattgcac

SEQ ID NO: 172701 - DNA, 25 bp, Probe sequence
gatcgccggcgaaatttctacaaca

SEQ ID NO: 172702 - DNA, 25 bp, Probe sequence
gattgtcgtatcaacacaacatgct

SEQ ID NO: 172703 - DNA, 25 bp, Probe sequence
gtgaagtacaattggcatatgcgat

SEQ ID NO: 172704 - DNA, 25 bp, Probe sequence
ggtgttgcagaaccagtgtcaattg

SEQ ID NO: 172705 - DNA, 25 bp, Probe sequence
ggtgatgcaggattaacaggacgta

SEQ ID NO: 172706 - DNA, 25 bp, Probe sequence
ggacacccagataaaatcgctgacc

SEQ ID NO: 172707 - DNA, 25 bp, Probe sequence
tggcatatgcgattggtgttgcaga

SEQ ID NO: 172708 - DNA, 25 bp, Probe sequence
tgcacgtgtagcttgtgaaacaact

SEQ ID NO: 172709 - DNA, 25 bp, Probe sequence
taatgtttggttacgcaacgaatga

SEQ ID NO: 172710 - DNA, 25 bp, Probe sequence
attttatcaaatggcagaaggacat

SEQ ID NO: 172711 - DNA, 25 bp, Probe sequence
atgattggtcatccgaaaaaagatc

SEQ ID NO: 172712 - DNA, 25 bp, Probe sequence
atggagggaaagaccagcaagttgg

SEQ ID NO: 172713 - DNA, 25 bp, Probe sequence
agtgattgggccatactaccgaggt

SEQ ID NO: 172714 - DNA, 25 bp, Probe sequence
agaccaccagcgatggttgaaacat

SEQ ID NO: 172715 - DNA, 25 bp, Probe sequence
actaccgaggtaacaatgggagtga

SEQ ID NO: 172716 - DNA, 25 bp, Probe sequence
agcaagttggtattcatcatgcgta

SEQ ID NO: 172717 - DNA, 25 bp, Probe sequence
accagcgatggttgaaacattgact

SEQ ID NO: 172718 - DNA, 25 bp, Probe sequence
aaacgtaaacgaatgccaattgaat

SEQ ID NO: 172719 - DNA, 25 bp, Probe sequence
gattgggccatactaccgaggtaac

SEQ ID NO: 172720 - DNA, 25 bp, Probe sequence
caatattaattgtacatggagggaa

SEQ ID NO: 172721 - DNA, 25 bp, Probe sequence
cacgccaagcgattccaaacattaa

SEQ ID NO: 172722 - DNA, 25 bp, Probe sequence
gccaagaccaccagcgatggttgaa

SEQ ID NO: 172723 - DNA, 25 bp, Probe sequence
gccaagcgattccaaacattaatga

SEQ ID NO: 172724 - DNA, 25 bp, Probe sequence
gcatatgaggcacgccaagcgattc

SEQ ID NO: 172725 - DNA, 25 bp, Probe sequence
gcaattttcagatagtcaaacttta

SEQ ID NO: 172726 - DNA, 25 bp, Probe sequence
gaaggacatgtgccaagaccaccag

SEQ ID NO: 172727 - DNA, 25 bp, Probe sequence
gaagaaattacatatttgtcagatg

SEQ ID NO: 172728 - DNA, 25 bp, Probe sequence
gattaatgcaattttcagatagtca

SEQ ID NO: 172729 - DNA, 25 bp, Probe sequence
gttggtattcatcatgcgtattatt

SEQ ID NO: 172730 - DNA, 25 bp, Probe sequence
gtcaaactttagtgattgggccata

SEQ ID NO: 172731 - DNA, 25 bp, Probe sequence
gtaaaagctttaatgatgacaccac

SEQ ID NO: 172732 - DNA, 25 bp, Probe sequence
gggccatactaccgaggtaacaatg

SEQ ID NO: 172733 - DNA, 25 bp, Probe sequence
gtgtgcgcgcaggtagattaatgca

SEQ ID NO: 172734 - DNA, 25 bp, Probe sequence
ggttgaaacattgacttatattaaa

SEQ ID NO: 172735 - DNA, 25 bp, Probe sequence
ggacgtgtgcgcgcaggtagattaa

SEQ ID NO: 172736 - DNA, 25 bp, Probe sequence
ggcacgccaagcgattccaaacatt

SEQ ID NO: 172737 - DNA, 25 bp, Probe sequence
tgtgccaagaccaccagcgatggtt

SEQ ID NO: 172738 - DNA, 25 bp, Probe sequence
tgaggcacgccaagcgattccaaac

SEQ ID NO: 172739 - DNA, 25 bp, Probe sequence
tgatgacaccacatcatgaagtaaa

SEQ ID NO: 172740 - DNA, 25 bp, Probe sequence
taggacgtgtgcgcgcaggtagatt

SEQ ID NO: 172741 - DNA, 25 bp, Probe sequence
tatgaggcacgccaagcgattccaa

SEQ ID NO: 172742 - DNA, 25 bp, Probe sequence
tattcatcatgcgtattatttagcg

SEQ ID NO: 172743 - DNA, 25 bp, Probe sequence
ttttacgcatcaattcgaagaaatt

SEQ ID NO: 172744 - DNA, 25 bp, Probe sequence
atttaaaagtggaatttagctcatc

SEQ ID NO: 172745 - DNA, 25 bp, Probe sequence
atttaccagatcaatatttgcaaat

SEQ ID NO: 172746 - DNA, 25 bp, Probe sequence
ataggagtagctgtgtataaggata

SEQ ID NO: 172747 - DNA, 25 bp, Probe sequence
atacatttatcgttactacagataa

SEQ ID NO: 172748 - DNA, 25 bp, Probe sequence
atcagactatcatattgatgtttat

SEQ ID NO: 172749 - DNA, 25 bp, Probe sequence
atgttaatacatttatcgttactac

SEQ ID NO: 172750 - DNA, 25 bp, Probe sequence
agattcatcagactatcatattgat

SEQ ID NO: 172751 - DNA, 25 bp, Probe sequence
agatcaatatttgcaaatttataat

SEQ ID NO: 172752 - DNA, 25 bp, Probe sequence
aaatttaattgcaatatgtagtgta

SEQ ID NO: 172753 - DNA, 25 bp, Probe sequence
aaaggaaatttaccagatcaatatt

SEQ ID NO: 172754 - DNA, 25 bp, Probe sequence
aacaatagattcatcagactatcat

SEQ ID NO: 172755 - DNA, 25 bp, Probe sequence
aatacatttatcgttactacagata

SEQ ID NO: 172756 - DNA, 25 bp, Probe sequence
aatagattcatcagactatcatatt

SEQ ID NO: 172757 - DNA, 25 bp, Probe sequence
cagactatcatattgatgtttattt

SEQ ID NO: 172758 - DNA, 25 bp, Probe sequence
cattctcattcggagcataaagaat

SEQ ID NO: 172759 - DNA, 25 bp, Probe sequence
cattcggagcataaagaatcatttt

SEQ ID NO: 172760 - DNA, 25 bp, Probe sequence
gaatgactagtgatgtacaaaaagg

SEQ ID NO: 172761 - DNA, 25 bp, Probe sequence
gaaagttactgcacaagaacttgat

SEQ ID NO: 172762 - DNA, 25 bp, Probe sequence
gaaatttaccagatcaatatttgca

SEQ ID NO: 172763 - DNA, 25 bp, Probe sequence
gactagtgatgtacaaaaaggttat

SEQ ID NO: 172764 - DNA, 25 bp, Probe sequence
gttaatacatttatcgttactacag

SEQ ID NO: 172765 - DNA, 25 bp, Probe sequence
gttactgcacaagaacttgatatta

SEQ ID NO: 172766 - DNA, 25 bp, Probe sequence
gtagtgtaaacaatgcatatgcaaa

SEQ ID NO: 172767 - DNA, 25 bp, Probe sequence
gtagctgtgtataaggataatgtaa

SEQ ID NO: 172768 - DNA, 25 bp, Probe sequence
gtaacacctcatgaaaataataaat

SEQ ID NO: 172769 - DNA, 25 bp, Probe sequence
ggggtaacacctcatgaaaataata

SEQ ID NO: 172770 - DNA, 25 bp, Probe sequence
gggtaacacctcatgaaaataataa

SEQ ID NO: 172771 - DNA, 25 bp, Probe sequence
ggagtagctgtgtataaggataatg

SEQ ID NO: 172772 - DNA, 25 bp, Probe sequence
ggaaatttaccagatcaatatttgc

SEQ ID NO: 172773 - DNA, 25 bp, Probe sequence
taatacatttatcgttactacagat

SEQ ID NO: 172774 - DNA, 25 bp, Probe sequence
tagattcatcagactatcatattga

SEQ ID NO: 172775 - DNA, 25 bp, Probe sequence
tttgtgtaagaagtcaagtgtagac

SEQ ID NO: 172776 - DNA, 25 bp, Probe sequence
ttaatacatttatcgttactacaga

SEQ ID NO: 172777 - DNA, 25 bp, Probe sequence
ttctcattcggagcataaagaatca

SEQ ID NO: 172778 - DNA, 25 bp, Probe sequence
atttgcctttatcttcatatgtgtt

SEQ ID NO: 172779 - DNA, 25 bp, Probe sequence
atcttcatatgtgttaagtcttgca

SEQ ID NO: 172780 - DNA, 25 bp, Probe sequence
atgttaaatggcaatcctaaaccag

SEQ ID NO: 172781 - DNA, 25 bp, Probe sequence
atgtgttaagtcttgcagcttacta

SEQ ID NO: 172782 - DNA, 25 bp, Probe sequence
atggcaatcctaaaccagaacaatt

SEQ ID NO: 172783 - DNA, 25 bp, Probe sequence
accagaacaattgaataaagcgagt

SEQ ID NO: 172784 - DNA, 25 bp, Probe sequence
actggtctaatggataatatgaggt

SEQ ID NO: 172785 - DNA, 25 bp, Probe sequence
aagttatttgcctttatcttcatat

SEQ ID NO: 172786 - DNA, 25 bp, Probe sequence
aagtcttgcagcttactatttatgt

SEQ ID NO: 172787 - DNA, 25 bp, Probe sequence
aatcctaaaccagaacaattgaata

SEQ ID NO: 172788 - DNA, 25 bp, Probe sequence
aatgctatttttcattggataatat

SEQ ID NO: 172789 - DNA, 25 bp, Probe sequence
aatatgaggtatttgtatgatgata

SEQ ID NO: 172790 - DNA, 25 bp, Probe sequence
cagaaacaaacattaaatcccaaga

SEQ ID NO: 172791 - DNA, 25 bp, Probe sequence
cttgcagcttactatttatgttaaa

SEQ ID NO: 172792 - DNA, 25 bp, Probe sequence
cgtagatttgtttgggacaaactat

SEQ ID NO: 172793 - DNA, 25 bp, Probe sequence
gcctttatcttcatatgtgttaagt

SEQ ID NO: 172794 - DNA, 25 bp, Probe sequence
gaattcactggtctaatggataata

SEQ ID NO: 172795 - DNA, 25 bp, Probe sequence
gagtgaattcactggtctaatggat

SEQ ID NO: 172796 - DNA, 25 bp, Probe sequence
gttaagtcttgcagcttactattta

SEQ ID NO: 172797 - DNA, 25 bp, Probe sequence
gttatttgcctttatcttcatatgt

SEQ ID NO: 172798 - DNA, 25 bp, Probe sequence
gtttttacaacatgatttattattt

SEQ ID NO: 172799 - DNA, 25 bp, Probe sequence
gtcttgcagcttactatttatgtta

SEQ ID NO: 172800 - DNA, 25 bp, Probe sequence
gtgaattcactggtctaatggataa

SEQ ID NO: 172801 - DNA, 25 bp, Probe sequence
gtgttaagtcttgcagcttactatt

SEQ ID NO: 172802 - DNA, 25 bp, Probe sequence
gggacaaactattataatcaatgct

SEQ ID NO: 172803 - DNA, 25 bp, Probe sequence
ggtatttgtatgatgataaacacgt

SEQ ID NO: 172804 - DNA, 25 bp, Probe sequence
tgcagcttactatttatgttaaatg

SEQ ID NO: 172805 - DNA, 25 bp, Probe sequence
tcccaagaaaagtttttacaacatg

SEQ ID NO: 172806 - DNA, 25 bp, Probe sequence
tcatatgtgttaagtcttgcagctt

SEQ ID NO: 172807 - DNA, 25 bp, Probe sequence
taataaaagcctttcggataaatat

SEQ ID NO: 172808 - DNA, 25 bp, Probe sequence
taatcaatgctatttttcattggat

SEQ ID NO: 172809 - DNA, 25 bp, Probe sequence
taaacacgtatcagaaacaaacatt

SEQ ID NO: 172810 - DNA, 25 bp, Probe sequence
taaagcgagtgaattcactggtcta

SEQ ID NO: 172811 - DNA, 25 bp, Probe sequence
ttgcctttatcttcatatgtgttaa

SEQ ID NO: 172812 - DNA, 25 bp, Probe sequence
atcttttgatatacctactaataag

SEQ ID NO: 172813 - DNA, 25 bp, Probe sequence
atggcggtgtgaccgagcatgatgg

SEQ ID NO: 172814 - DNA, 25 bp, Probe sequence
agttagaaactatttacttaagcat

SEQ ID NO: 172815 - DNA, 25 bp, Probe sequence
atgtatggcggtgtgaccgagcatg

SEQ ID NO: 172816 - DNA, 25 bp, Probe sequence
agttcgccttatgagactggctata

SEQ ID NO: 172817 - DNA, 25 bp, Probe sequence
acagttgagagtaaatctattaatg

SEQ ID NO: 172818 - DNA, 25 bp, Probe sequence
aaataattcaactgataactctcat

SEQ ID NO: 172819 - DNA, 25 bp, Probe sequence
aaacgagagaaattcattatctttt

SEQ ID NO: 172820 - DNA, 25 bp, Probe sequence
aacataacagcacaagaaatagatt

SEQ ID NO: 172821 - DNA, 25 bp, Probe sequence
aagaaaaacataacagcacaagaaa

SEQ ID NO: 172822 - DNA, 25 bp, Probe sequence
gccttatgagactggctatataaag

SEQ ID NO: 172823 - DNA, 25 bp, Probe sequence
gcggtgtgaccgagcatgatggaaa

SEQ ID NO: 172824 - DNA, 25 bp, Probe sequence
gaaattcattatcttttgatatacc

SEQ ID NO: 172825 - DNA, 25 bp, Probe sequence
gactggctatataaagtttatcgaa

SEQ ID NO: 172826 - DNA, 25 bp, Probe sequence
gaccgagcatgatggaaatcaaata

SEQ ID NO: 172827 - DNA, 25 bp, Probe sequence
gagactggctatataaagtttatcg

SEQ ID NO: 172828 - DNA, 25 bp, Probe sequence
gagagaaattcattatcttttgata

SEQ ID NO: 172829 - DNA, 25 bp, Probe sequence
gatatacctactaataagaaaaaca

SEQ ID NO: 172830 - DNA, 25 bp, Probe sequence
gttcgccttatgagactggctatat

SEQ ID NO: 172831 - DNA, 25 bp, Probe sequence
gtatggcggtgtgaccgagcatgat

SEQ ID NO: 172832 - DNA, 25 bp, Probe sequence
gtgtgaccgagcatgatggaaatca

SEQ ID NO: 172833 - DNA, 25 bp, Probe sequence
ggtgtgaccgagcatgatggaaatc

SEQ ID NO: 172834 - DNA, 25 bp, Probe sequence
ggcggtgtgaccgagcatgatggaa

SEQ ID NO: 172835 - DNA, 25 bp, Probe sequence
tgtgaccgagcatgatggaaatcaa

SEQ ID NO: 172836 - DNA, 25 bp, Probe sequence
tgtatggcggtgtgaccgagcatga

SEQ ID NO: 172837 - DNA, 25 bp, Probe sequence
tcgccttatgagactggctatataa

SEQ ID NO: 172838 - DNA, 25 bp, Probe sequence
taattcaactgataactctcataat

SEQ ID NO: 172839 - DNA, 25 bp, Probe sequence
taatgtagaagttcatttaaccaaa

SEQ ID NO: 172840 - DNA, 25 bp, Probe sequence
tatccgactaaatatttactaattt

SEQ ID NO: 172841 - DNA, 25 bp, Probe sequence
tatggcggtgtgaccgagcatgatg

SEQ ID NO: 172842 - DNA, 25 bp, Probe sequence
tttatccgactaaatatttactaat

SEQ ID NO: 172843 - DNA, 25 bp, Probe sequence
ttatcttttgatatacctactaata

SEQ ID NO: 172844 - DNA, 25 bp, Probe sequence
ttagaaactatttacttaagcataa

SEQ ID NO: 172845 - DNA, 25 bp, Probe sequence
ttcattatcttttgatatacctact

SEQ ID NO: 172846 - DNA, 25 bp, Probe sequence
attaaaaagcttatgagattgttct

SEQ ID NO: 172847 - DNA, 25 bp, Probe sequence
ataacgtggcaattagacgagtcaa

SEQ ID NO: 172848 - DNA, 25 bp, Probe sequence
atcaactactgaataatactataat

SEQ ID NO: 172849 - DNA, 25 bp, Probe sequence
atgcttatacggaggagttacgata

SEQ ID NO: 172850 - DNA, 25 bp, Probe sequence
agaacagttagctcatctaattatc

SEQ ID NO: 172851 - DNA, 25 bp, Probe sequence
acgtggcaattagacgagtcaaata

SEQ ID NO: 172852 - DNA, 25 bp, Probe sequence
acagatcaactactgaataatacta

SEQ ID NO: 172853 - DNA, 25 bp, Probe sequence
aaatgtgtaggcttaactgaagaaa

SEQ ID NO: 172854 - DNA, 25 bp, Probe sequence
aaacatcatgcttatacggaggagt

SEQ ID NO: 172855 - DNA, 25 bp, Probe sequence
aaaaggatgcattttctttcattct

SEQ ID NO: 172856 - DNA, 25 bp, Probe sequence
aacagttagctcatctaattatcat

SEQ ID NO: 172857 - DNA, 25 bp, Probe sequence
aactcatcagatttagcaaatcaat

SEQ ID NO: 172858 - DNA, 25 bp, Probe sequence
agcagagttttttcaattttatagt

SEQ ID NO: 172859 - DNA, 25 bp, Probe sequence
aaggctaaagtaacagtacaagaat

SEQ ID NO: 172860 - DNA, 25 bp, Probe sequence
aatatagatatttatggactgtatt

SEQ ID NO: 172861 - DNA, 25 bp, Probe sequence
aattagtacagatcaactactgaat

SEQ ID NO: 172862 - DNA, 25 bp, Probe sequence
cagttagctcatctaattatcatat

SEQ ID NO: 172863 - DNA, 25 bp, Probe sequence
catcatgcttatacggaggagttac

SEQ ID NO: 172864 - DNA, 25 bp, Probe sequence
gaaaaaacatcatgcttatacggag

SEQ ID NO: 172865 - DNA, 25 bp, Probe sequence
gaaataaatgtgtaggcttaactga

SEQ ID NO: 172866 - DNA, 25 bp, Probe sequence
gacgagtcaaataaaattagtacag

SEQ ID NO: 172867 - DNA, 25 bp, Probe sequence
gagttttttcaattttatagtgata

SEQ ID NO: 172868 - DNA, 25 bp, Probe sequence
gataccggtaacatacaaaaaggat

SEQ ID NO: 172869 - DNA, 25 bp, Probe sequence
gatatatccgtacttaaaacttcta

SEQ ID NO: 172870 - DNA, 25 bp, Probe sequence
gttataggcgttaatgtatttaaag

SEQ ID NO: 172871 - DNA, 25 bp, Probe sequence
gtttaactcatcagatttagcaaat

SEQ ID NO: 172872 - DNA, 25 bp, Probe sequence
gtgataatagaacagttagctcatc

SEQ ID NO: 172873 - DNA, 25 bp, Probe sequence
ggagcagagttttttcaattttata

SEQ ID NO: 172874 - DNA, 25 bp, Probe sequence
tgagtttaactcatcagatttagca

SEQ ID NO: 172875 - DNA, 25 bp, Probe sequence
tagtttgaaagttgagtttaactca

SEQ ID NO: 172876 - DNA, 25 bp, Probe sequence
tacaataaagataccggtaacatac

SEQ ID NO: 172877 - DNA, 25 bp, Probe sequence
tatatccgtacttaaaacttctagt

SEQ ID NO: 172878 - DNA, 25 bp, Probe sequence
tatactgatataacgtggcaattag

SEQ ID NO: 172879 - DNA, 25 bp, Probe sequence
tattgatatatccgtacttaaaact

SEQ ID NO: 172880 - DNA, 25 bp, Probe sequence
atgcctccaacgatagtaattaact

SEQ ID NO: 172881 - DNA, 25 bp, Probe sequence
atgtgctagctattccaacgtttaa

SEQ ID NO: 172882 - DNA, 25 bp, Probe sequence
acgcggggaaagtagtgctgaagca

SEQ ID NO: 172883 - DNA, 25 bp, Probe sequence
acagcagggccagtgttgtttaact

SEQ ID NO: 172884 - DNA, 25 bp, Probe sequence
aaatcaattgctttttaccaaacat

SEQ ID NO: 172885 - DNA, 25 bp, Probe sequence
aacacatgatcaaactgattttgta

SEQ ID NO: 172886 - DNA, 25 bp, Probe sequence
aatgtagggatgtgatgcgcgtgaa

SEQ ID NO: 172887 - DNA, 25 bp, Probe sequence
aatcatgtgctagctattccaacgt

SEQ ID NO: 172888 - DNA, 25 bp, Probe sequence
aatataccattgaaacacatgatca

SEQ ID NO: 172889 - DNA, 25 bp, Probe sequence
caatgatattgaactcgcacaacgg

SEQ ID NO: 172890 - DNA, 25 bp, Probe sequence
cacaacggagtttcttactgcaaga

SEQ ID NO: 172891 - DNA, 25 bp, Probe sequence
ctcgcacaacggagtttcttactgc

SEQ ID NO: 172892 - DNA, 25 bp, Probe sequence
ctgcaagatagtaccattttaaaat

SEQ ID NO: 172893 - DNA, 25 bp, Probe sequence
gcgtagagagggtgcaatcacttgg

SEQ ID NO: 172894 - DNA, 25 bp, Probe sequence
gctattccaacgtttaaaaatcaat

SEQ ID NO: 172895 - DNA, 25 bp, Probe sequence
gcaagaacgattatttagaaacagc

SEQ ID NO: 172896 - DNA, 25 bp, Probe sequence
gaagttgaatcattggtaagcaaga

SEQ ID NO: 172897 - DNA, 25 bp, Probe sequence
gagatagcagatggcaatcatgtgc

SEQ ID NO: 172898 - DNA, 25 bp, Probe sequence
gagtttcttactgcaagatagtacc

SEQ ID NO: 172899 - DNA, 25 bp, Probe sequence
gatggcaatcatgtgctagctattc

SEQ ID NO: 172900 - DNA, 25 bp, Probe sequence
gatgtatattttatcgaagttgaat

SEQ ID NO: 172901 - DNA, 25 bp, Probe sequence
gggaacgcggggaaagtagtgctga

SEQ ID NO: 172902 - DNA, 25 bp, Probe sequence
gtagggatgtgatgcgcgtgaagtt

SEQ ID NO: 172903 - DNA, 25 bp, Probe sequence
gtgctagctattccaacgtttaaaa

SEQ ID NO: 172904 - DNA, 25 bp, Probe sequence
gtgatgcgcgtgaagtttagggata

SEQ ID NO: 172905 - DNA, 25 bp, Probe sequence
gtgttgtttaactgtatcaatgata

SEQ ID NO: 172906 - DNA, 25 bp, Probe sequence
gggccagtgttgtttaactgtatca

SEQ ID NO: 172907 - DNA, 25 bp, Probe sequence
gggatgtgatgcgcgtgaagtttag

SEQ ID NO: 172908 - DNA, 25 bp, Probe sequence
ggcaatcatgtgctagctattccaa

SEQ ID NO: 172909 - DNA, 25 bp, Probe sequence
tgaagaaacaggcgccaaagttaaa

SEQ ID NO: 172910 - DNA, 25 bp, Probe sequence
tgctttttaccaaacataatttacg

SEQ ID NO: 172911 - DNA, 25 bp, Probe sequence
taaagataatcgtcaagttaatttg

SEQ ID NO: 172912 - DNA, 25 bp, Probe sequence
tagaaacagcagggccagtgttgtt

SEQ ID NO: 172913 - DNA, 25 bp, Probe sequence
tatatgaagaaacaggcgccaaagt

SEQ ID NO: 172914 - DNA, 25 bp, Probe sequence
ggggaatgtaacgcttttcaaacag

SEQ ID NO: 172915 - DNA, 25 bp, Probe sequence
attagcgcgtgaacaggttctttat

SEQ ID NO: 172916 - DNA, 25 bp, Probe sequence
atcgtgattgtttgtttatcgaatt

SEQ ID NO: 172917 - DNA, 25 bp, Probe sequence
atccaggagatgttacaccagcagg

SEQ ID NO: 172918 - DNA, 25 bp, Probe sequence
atgaagttgacagctttgcattttt

SEQ ID NO: 172919 - DNA, 25 bp, Probe sequence
aggttctttatatcgaagagccatt

SEQ ID NO: 172920 - DNA, 25 bp, Probe sequence
acagcgatgcttgctcgtaaaggtg

SEQ ID NO: 172921 - DNA, 25 bp, Probe sequence
aaaaccatttcgtctaggtggcatt

SEQ ID NO: 172922 - DNA, 25 bp, Probe sequence
aatacgcctgctgcaagggcaacta

SEQ ID NO: 172923 - DNA, 25 bp, Probe sequence
caaattgtaacaccgaaagtcactt

SEQ ID NO: 172924 - DNA, 25 bp, Probe sequence
cactttcaattggttatagatgcaa

SEQ ID NO: 172925 - DNA, 25 bp, Probe sequence
catttcgtctaggtggcattgataa

SEQ ID NO: 172926 - DNA, 25 bp, Probe sequence
gcctgctgcaagggcaactattgtc

SEQ ID NO: 172927 - DNA, 25 bp, Probe sequence
cctcaaatcatgcatcaaattagag

SEQ ID NO: 172928 - DNA, 25 bp, Probe sequence
gcatatttcggggaatgtaacgctt

SEQ ID NO: 172929 - DNA, 25 bp, Probe sequence
gagcggcttatcaaataaacaacta

SEQ ID NO: 172930 - DNA, 25 bp, Probe sequence
gattcattggaaaatacgcctgctg

SEQ ID NO: 172931 - DNA, 25 bp, Probe sequence
gttgacagctttgcatttttataaa

SEQ ID NO: 172932 - DNA, 25 bp, Probe sequence
gttacaccagcaggttattattttg

SEQ ID NO: 172933 - DNA, 25 bp, Probe sequence
gtaacgcttttcaaacagattggta

SEQ ID NO: 172934 - DNA, 25 bp, Probe sequence
gtaattgagcaatggttcgaagata

SEQ ID NO: 172935 - DNA, 25 bp, Probe sequence
gtcatggcattgtatcaaatgtttc

SEQ ID NO: 172936 - DNA, 25 bp, Probe sequence
gtgcaaacggcaattgatactttga

SEQ ID NO: 172937 - DNA, 25 bp, Probe sequence
gtggcattgataaagtgcaaacggc

SEQ ID NO: 172938 - DNA, 25 bp, Probe sequence
gggcaactattgtcatggcattgta

SEQ ID NO: 172939 - DNA, 25 bp, Probe sequence
tggatataactcaattacaaccata

SEQ ID NO: 172940 - DNA, 25 bp, Probe sequence
tgttgtattaaaaccatttcgtcta

SEQ ID NO: 172941 - DNA, 25 bp, Probe sequence
tgagccatttaagtcacaaattgta

SEQ ID NO: 172942 - DNA, 25 bp, Probe sequence
tgcatcaaattagagtgttacggga

SEQ ID NO: 172943 - DNA, 25 bp, Probe sequence
tgctcgtaaaggtgattatccagga

SEQ ID NO: 172944 - DNA, 25 bp, Probe sequence
tcgcccccctttagtggatataact

SEQ ID NO: 172945 - DNA, 25 bp, Probe sequence
taaaagaggggcgactcgaatttcg

SEQ ID NO: 172946 - DNA, 25 bp, Probe sequence
tattttacagcgatgcttgctcgta

SEQ ID NO: 172947 - DNA, 25 bp, Probe sequence
ttttcagtagcatatggagcgacag

SEQ ID NO: 172948 - DNA, 25 bp, Probe sequence
attgacatcatgaaagaaaagcaaa

SEQ ID NO: 172949 - DNA, 25 bp, Probe sequence
attaacgaagtgattgacatcatga

SEQ ID NO: 172950 - DNA, 25 bp, Probe sequence
atatctgttacagtcattaacgaag

SEQ ID NO: 172951 - DNA, 25 bp, Probe sequence
atctgttacagtcattaacgaagtg

SEQ ID NO: 172952 - DNA, 25 bp, Probe sequence
agtcattaacgaagtgattgacatc

SEQ ID NO: 172953 - DNA, 25 bp, Probe sequence
acgaagtgattgacatcatgaaaga

SEQ ID NO: 172954 - DNA, 25 bp, Probe sequence
acagtcattaacgaagtgattgaca

SEQ ID NO: 172955 - DNA, 25 bp, Probe sequence
acaaatatctgttacagtcattaac

SEQ ID NO: 172956 - DNA, 25 bp, Probe sequence
aaatatctgttacagtcattaacga

SEQ ID NO: 172957 - DNA, 25 bp, Probe sequence
aacgaagtgattgacatcatgaaag

SEQ ID NO: 172958 - DNA, 25 bp, Probe sequence
aagtgattgacatcatgaaagaaaa

SEQ ID NO: 172959 - DNA, 25 bp, Probe sequence
aatatctgttacagtcattaacgaa

SEQ ID NO: 172960 - DNA, 25 bp, Probe sequence
caaatatctgttacagtcattaacg

SEQ ID NO: 172961 - DNA, 25 bp, Probe sequence
cagtcattaacgaagtgattgacat

SEQ ID NO: 172962 - DNA, 25 bp, Probe sequence
cattaacgaagtgattgacatcatg

SEQ ID NO: 172963 - DNA, 25 bp, Probe sequence
ctgttacagtcattaacgaagtgat

SEQ ID NO: 172964 - DNA, 25 bp, Probe sequence
cgaagtgattgacatcatgaaagaa

SEQ ID NO: 172965 - DNA, 25 bp, Probe sequence
gaagtgattgacatcatgaaagaaa

SEQ ID NO: 172966 - DNA, 25 bp, Probe sequence
gattgacatcatgaaagaaaagcaa

SEQ ID NO: 172967 - DNA, 25 bp, Probe sequence
gttacagtcattaacgaagtgattg

SEQ ID NO: 172968 - DNA, 25 bp, Probe sequence
gtcattaacgaagtgattgacatca

SEQ ID NO: 172969 - DNA, 25 bp, Probe sequence
gtgattgacatcatgaaagaaaagc

SEQ ID NO: 172970 - DNA, 25 bp, Probe sequence
tgttacagtcattaacgaagtgatt

SEQ ID NO: 172971 - DNA, 25 bp, Probe sequence
tgattgacatcatgaaagaaaagca

SEQ ID NO: 172972 - DNA, 25 bp, Probe sequence
tgacatcatgaaagaaaagcaaaat

SEQ ID NO: 172973 - DNA, 25 bp, Probe sequence
tctgttacagtcattaacgaagtga

SEQ ID NO: 172974 - DNA, 25 bp, Probe sequence
tcattaacgaagtgattgacatcat

SEQ ID NO: 172975 - DNA, 25 bp, Probe sequence
taacgaagtgattgacatcatgaaa

SEQ ID NO: 172976 - DNA, 25 bp, Probe sequence
tacagtcattaacgaagtgattgac

SEQ ID NO: 172977 - DNA, 25 bp, Probe sequence
tatctgttacagtcattaacgaagt

SEQ ID NO: 172978 - DNA, 25 bp, Probe sequence
ttacagtcattaacgaagtgattga

SEQ ID NO: 172979 - DNA, 25 bp, Probe sequence
ttaacgaagtgattgacatcatgaa

SEQ ID NO: 172980 - DNA, 25 bp, Probe sequence
agagctaaacgtcactattctatcg

SEQ ID NO: 172981 - DNA, 25 bp, Probe sequence
accaggccaatacatcacagttgat

SEQ ID NO: 172982 - DNA, 25 bp, Probe sequence
acctttcaaagacaacttcaacagt

SEQ ID NO: 172983 - DNA, 25 bp, Probe sequence
acgatatggatcgcgtacactacga

SEQ ID NO: 172984 - DNA, 25 bp, Probe sequence
acgtcaatcttttatccaaaaatgt

SEQ ID NO: 172985 - DNA, 25 bp, Probe sequence
acgtcactattctatcgtatcaggt

SEQ ID NO: 172986 - DNA, 25 bp, Probe sequence
acaagtttatgctgaacattatcca

SEQ ID NO: 172987 - DNA, 25 bp, Probe sequence
aaacttccatatagagctaaacgtc

SEQ ID NO: 172988 - DNA, 25 bp, Probe sequence
aacatttattccaagactaagcgtt

SEQ ID NO: 172989 - DNA, 25 bp, Probe sequence
aaggcgatatgattaatttagctgc

SEQ ID NO: 172990 - DNA, 25 bp, Probe sequence
cacaacttttcttaggttcaggtat

SEQ ID NO: 172991 - DNA, 25 bp, Probe sequence
cagatggttcaagttgctgaaaatg

SEQ ID NO: 172992 - DNA, 25 bp, Probe sequence
cattagcacaagctgtaatggccgc

SEQ ID NO: 172993 - DNA, 25 bp, Probe sequence
cgactgaaccacaacttttcttagg

SEQ ID NO: 172994 - DNA, 25 bp, Probe sequence
cctgtaggtggattcgtattagaga

SEQ ID NO: 172995 - DNA, 25 bp, Probe sequence
cctgaaatttatatctgtggtggta

SEQ ID NO: 172996 - DNA, 25 bp, Probe sequence
gcgtacactacgaaacatttattcc

SEQ ID NO: 172997 - DNA, 25 bp, Probe sequence
gctgcctctgccaaaggtttagata

SEQ ID NO: 172998 - DNA, 25 bp, Probe sequence
gcaatcttcagcattagcacaagct

SEQ ID NO: 172999 - DNA, 25 bp, Probe sequence
gaagtttcaacaattttacacgatg

SEQ ID NO: 173000 - DNA, 25 bp, Probe sequence
gaacaacatttacctttcaaagaca

SEQ ID NO: 173001 - DNA, 25 bp, Probe sequence
gaaattacgtcaatcttttatccaa

SEQ ID NO: 173002 - DNA, 25 bp, Probe sequence
gagaatacgactgaaccacaacttt

SEQ ID NO: 173003 - DNA, 25 bp, Probe sequence
gaggcatgcaatcttcagcattagc

SEQ ID NO: 173004 - DNA, 25 bp, Probe sequence
gatcgaagcacttaaatctttaaat

SEQ ID NO: 173005 - DNA, 25 bp, Probe sequence
gttattgcggatgtgttcatccaaa

SEQ ID NO: 173006 - DNA, 25 bp, Probe sequence
gtcacaacagaacatgaaggcgaag

SEQ ID NO: 173007 - DNA, 25 bp, Probe sequence
gtggtggtacaaaattcttacaatc

SEQ ID NO: 173008 - DNA, 25 bp, Probe sequence
tgtatgaagctgcctctgccaaagg

SEQ ID NO: 173009 - DNA, 25 bp, Probe sequence
tgaagctgcctctgccaaaggttta

SEQ ID NO: 173010 - DNA, 25 bp, Probe sequence
tgctgaacattatccaattgtgggg

SEQ ID NO: 173011 - DNA, 25 bp, Probe sequence
tcttacaatctatgatcgaagcact

SEQ ID NO: 173012 - DNA, 25 bp, Probe sequence
taaaccattcaaaattaccaatatt

SEQ ID NO: 173013 - DNA, 25 bp, Probe sequence
ttggcgttaaacgtgatgtcacaac

SEQ ID NO: 173014 - DNA, 25 bp, Probe sequence
attggcttatgcaacaaggtttaca

SEQ ID NO: 173015 - DNA, 25 bp, Probe sequence
atttttaacagcaacaccggaaatg

SEQ ID NO: 173016 - DNA, 25 bp, Probe sequence
atcatattgcgataacagacggtca

SEQ ID NO: 173017 - DNA, 25 bp, Probe sequence
actaattggctatctgtcttgccga

SEQ ID NO: 173018 - DNA, 25 bp, Probe sequence
acatcgaatgaaactgtggtgccga

SEQ ID NO: 173019 - DNA, 25 bp, Probe sequence
acaccggaaatgttgcatgcacgtc

SEQ ID NO: 173020 - DNA, 25 bp, Probe sequence
aaatgttgcatgcacgtcctgacac

SEQ ID NO: 173021 - DNA, 25 bp, Probe sequence
acaagcacaacaaaatggacatcat

SEQ ID NO: 173022 - DNA, 25 bp, Probe sequence
aaagagagcttgggatttgatcgtg

SEQ ID NO: 173023 - DNA, 25 bp, Probe sequence
aacgtttcgtaatcattatgccagt

SEQ ID NO: 173024 - DNA, 25 bp, Probe sequence
cacatttcgcttgtgccacaaactt

SEQ ID NO: 173025 - DNA, 25 bp, Probe sequence
cgctggatgatattgaattcgctgg

SEQ ID NO: 173026 - DNA, 25 bp, Probe sequence
gcgatgattaatacaaggttgacac

SEQ ID NO: 173027 - DNA, 25 bp, Probe sequence
gctatctgtcttgccgatttatcat

SEQ ID NO: 173028 - DNA, 25 bp, Probe sequence
gcattacaatataacctgccaattt

SEQ ID NO: 173029 - DNA, 25 bp, Probe sequence
gacggtcaagaatcttatacttatc

SEQ ID NO: 173030 - DNA, 25 bp, Probe sequence
gagggtttcaaattgtatcgctgga

SEQ ID NO: 173031 - DNA, 25 bp, Probe sequence
gatttatcatatttcgggtctcagt

SEQ ID NO: 173032 - DNA, 25 bp, Probe sequence
gtagggcatcctgatgatacttggg

SEQ ID NO: 173033 - DNA, 25 bp, Probe sequence
gtgtacttttaagagctgttattga

SEQ ID NO: 173034 - DNA, 25 bp, Probe sequence
gggctatacatagataattcgattc

SEQ ID NO: 173035 - DNA, 25 bp, Probe sequence
ggtgacattgctgaaatagatcatg

SEQ ID NO: 173036 - DNA, 25 bp, Probe sequence
ggtagcgaagcaatttccaggtatc

SEQ ID NO: 173037 - DNA, 25 bp, Probe sequence
ggttgatactttaccttatacatca

SEQ ID NO: 173038 - DNA, 25 bp, Probe sequence
ggcacaattgattgcatatttatca

SEQ ID NO: 173039 - DNA, 25 bp, Probe sequence
ggcggtgaaaatatttatccatatc

SEQ ID NO: 173040 - DNA, 25 bp, Probe sequence
tgacgcagtatgtgtagggcatcct

SEQ ID NO: 173041 - DNA, 25 bp, Probe sequence
tcaaggcttatcaacaatctcgtgt

SEQ ID NO: 173042 - DNA, 25 bp, Probe sequence
tcaatgccgaacaaattttaacgat

SEQ ID NO: 173043 - DNA, 25 bp, Probe sequence
tactgtgaagcgagtctattggcta

SEQ ID NO: 173044 - DNA, 25 bp, Probe sequence
tactgtgcgcattgttgataaattc

SEQ ID NO: 173045 - DNA, 25 bp, Probe sequence
tatccaacagatttaacgggtacgt

SEQ ID NO: 173046 - DNA, 25 bp, Probe sequence
tatgccagtgcaatcggatgtaaag

SEQ ID NO: 173047 - DNA, 25 bp, Probe sequence
tatttcgggtctcagtgtactttta

SEQ ID NO: 173048 - DNA, 25 bp, Probe sequence
attggactttctgaacgcactgtgt

SEQ ID NO: 173049 - DNA, 25 bp, Probe sequence
attcaatctaatttagcattttcaa

SEQ ID NO: 173050 - DNA, 25 bp, Probe sequence
atgatattggactttctgaacgcac

SEQ ID NO: 173051 - DNA, 25 bp, Probe sequence
agcgactaaagtgaagtttccagta

SEQ ID NO: 173052 - DNA, 25 bp, Probe sequence
agaaagcgtattacactgtttactt

SEQ ID NO: 173053 - DNA, 25 bp, Probe sequence
agcaggcatttatacagcgaactta

SEQ ID NO: 173054 - DNA, 25 bp, Probe sequence
acagcgaacttaatcaatacaggcg

SEQ ID NO: 173055 - DNA, 25 bp, Probe sequence
acatccacataaaataacaacaaac

SEQ ID NO: 173056 - DNA, 25 bp, Probe sequence
acaaacgacttgaatgctaaactta

SEQ ID NO: 173057 - DNA, 25 bp, Probe sequence
acaatcactgtgaatggtacaagcc

SEQ ID NO: 173058 - DNA, 25 bp, Probe sequence
aaatacacggttcattttaagaatg

SEQ ID NO: 173059 - DNA, 25 bp, Probe sequence
aaatctgacagaggcgttagtgaac

SEQ ID NO: 173060 - DNA, 25 bp, Probe sequence
aaagctgcgaaacaagattcaaaag

SEQ ID NO: 173061 - DNA, 25 bp, Probe sequence
aagcgatcaaggtattactaaacat

SEQ ID NO: 173062 - DNA, 25 bp, Probe sequence
aagactttctaagcaagcaaaatac

SEQ ID NO: 173063 - DNA, 25 bp, Probe sequence
aatcaagtgccatattcaattaatt

SEQ ID NO: 173064 - DNA, 25 bp, Probe sequence
caatcactgtgaatggtacaagcca

SEQ ID NO: 173065 - DNA, 25 bp, Probe sequence
caagtgccgtatacaatcactgtga

SEQ ID NO: 173066 - DNA, 25 bp, Probe sequence
ctgccgcagctaagcaaatagataa

SEQ ID NO: 173067 - DNA, 25 bp, Probe sequence
gcaggcattcacacagctgacttaa

SEQ ID NO: 173068 - DNA, 25 bp, Probe sequence
gaatttgcgtttttacatccacata

SEQ ID NO: 173069 - DNA, 25 bp, Probe sequence
gaatgctaaacttagactagcgtta

SEQ ID NO: 173070 - DNA, 25 bp, Probe sequence
gaaagcaggcattcacacagctgac

SEQ ID NO: 173071 - DNA, 25 bp, Probe sequence
gactttctgaacgcactgtgtataa

SEQ ID NO: 173072 - DNA, 25 bp, Probe sequence
gagttgtcgatttgaaagcaggcat

SEQ ID NO: 173073 - DNA, 25 bp, Probe sequence
gaggcgttagtgaacgtgatttgaa

SEQ ID NO: 173074 - DNA, 25 bp, Probe sequence
gaggtataactgatgtagatttaag

SEQ ID NO: 173075 - DNA, 25 bp, Probe sequence
gttgaccttaaatcagatatcttta

SEQ ID NO: 173076 - DNA, 25 bp, Probe sequence
gtgaagtttccagtaacgataaatg

SEQ ID NO: 173077 - DNA, 25 bp, Probe sequence
ggtacaacaactaatattcaatcta

SEQ ID NO: 173078 - DNA, 25 bp, Probe sequence
ggatattctaaaatacagattccat

SEQ ID NO: 173079 - DNA, 25 bp, Probe sequence
taagcaagcaaaatacacggttcat

SEQ ID NO: 173080 - DNA, 25 bp, Probe sequence
taaagcaattagtgttaacgtagat

SEQ ID NO: 173081 - DNA, 25 bp, Probe sequence
taaactcgaatatttatacagctaa

SEQ ID NO: 173082 - DNA, 25 bp, Probe sequence
agtaaaagcggagcgttatgtacca

SEQ ID NO: 173083 - DNA, 25 bp, Probe sequence
atttcatggatcccgagcaacaaca

SEQ ID NO: 173084 - DNA, 25 bp, Probe sequence
atgaaatttcatggatcccgagcaa

SEQ ID NO: 173085 - DNA, 25 bp, Probe sequence
atggatcccgagcaacaacattagc

SEQ ID NO: 173086 - DNA, 25 bp, Probe sequence
aaagacgggtcatcaaaatttgttg

SEQ ID NO: 173087 - DNA, 25 bp, Probe sequence
aaatttcatggatcccgagcaacaa

SEQ ID NO: 173088 - DNA, 25 bp, Probe sequence
aaaagatcagcaaattagttataaa

SEQ ID NO: 173089 - DNA, 25 bp, Probe sequence
aaaatttgttgacttaaaagctgcg

SEQ ID NO: 173090 - DNA, 25 bp, Probe sequence
aagtgactaacaaagcgactaaagt

SEQ ID NO: 173091 - DNA, 25 bp, Probe sequence
aatgtgaaacaacacactaaatcta

SEQ ID NO: 173092 - DNA, 25 bp, Probe sequence
aatttcatggatcccgagcaacaac

SEQ ID NO: 173093 - DNA, 25 bp, Probe sequence
aattgcagtaaatggagcatcaaat

SEQ ID NO: 173094 - DNA, 25 bp, Probe sequence
caaatccaactttatcagatttaaa

SEQ ID NO: 173095 - DNA, 25 bp, Probe sequence
cagtttcgaaagtaaaagcggagcg

SEQ ID NO: 173096 - DNA, 25 bp, Probe sequence
catggatcccgagcaacaacattag

SEQ ID NO: 173097 - DNA, 25 bp, Probe sequence
gcgcttaataaagtgactaacaaag

SEQ ID NO: 173098 - DNA, 25 bp, Probe sequence
gcatcaaatccaactttatcagatt

SEQ ID NO: 173099 - DNA, 25 bp, Probe sequence
gaaatttcatggatcccgagcaaca

SEQ ID NO: 173100 - DNA, 25 bp, Probe sequence
gacgggtcatcaaaatttgttgact

SEQ ID NO: 173101 - DNA, 25 bp, Probe sequence
gagcatcaaatccaactttatcaga

SEQ ID NO: 173102 - DNA, 25 bp, Probe sequence
gattgatattaatgtgaaacaacac

SEQ ID NO: 173103 - DNA, 25 bp, Probe sequence
gttaagagaattgaagttactgtaa

SEQ ID NO: 173104 - DNA, 25 bp, Probe sequence
gtaagctacagtgatatcacgaaaa

SEQ ID NO: 173105 - DNA, 25 bp, Probe sequence
gtgactaacaaagcgactaaagtga

SEQ ID NO: 173106 - DNA, 25 bp, Probe sequence
gtgtaagctacagtgatatcacgaa

SEQ ID NO: 173107 - DNA, 25 bp, Probe sequence
gggtcatcaaaatttgttgacttaa

SEQ ID NO: 173108 - DNA, 25 bp, Probe sequence
ggatcccgagcaacaacattagcat

SEQ ID NO: 173109 - DNA, 25 bp, Probe sequence
ggagcatcaaatccaactttatcag

SEQ ID NO: 173110 - DNA, 25 bp, Probe sequence
tggatcccgagcaacaacattagca

SEQ ID NO: 173111 - DNA, 25 bp, Probe sequence
tgaaatttcatggatcccgagcaac

SEQ ID NO: 173112 - DNA, 25 bp, Probe sequence
tcatggatcccgagcaacaacatta

SEQ ID NO: 173113 - DNA, 25 bp, Probe sequence
taacaacaaaggtaaaatcagtatt

SEQ ID NO: 173114 - DNA, 25 bp, Probe sequence
tttcatggatcccgagcaacaacat

SEQ ID NO: 173115 - DNA, 25 bp, Probe sequence
ttcatggatcccgagcaacaacatt

SEQ ID NO: 173116 - DNA, 25 bp, Probe sequence
attgcagatgatgtggcaacaatgg

SEQ ID NO: 173117 - DNA, 25 bp, Probe sequence
attgaatatattccggataatgtat

SEQ ID NO: 173118 - DNA, 25 bp, Probe sequence
atttacttttcagcagactatgcac

SEQ ID NO: 173119 - DNA, 25 bp, Probe sequence
atattatgtatatctcattgaaaat

SEQ ID NO: 173120 - DNA, 25 bp, Probe sequence
atagtaggccaacgatttgaaatac

SEQ ID NO: 173121 - DNA, 25 bp, Probe sequence
ataagaggtatagaaaaaggcactg

SEQ ID NO: 173122 - DNA, 25 bp, Probe sequence
atgctatatctactgatttttttaa

SEQ ID NO: 173123 - DNA, 25 bp, Probe sequence
atgtatatctcattgaaaatttaga

SEQ ID NO: 173124 - DNA, 25 bp, Probe sequence
aggggatgaaaatatgtttaatgct

SEQ ID NO: 173125 - DNA, 25 bp, Probe sequence
agcagactatgcacatataagaggt

SEQ ID NO: 173126 - DNA, 25 bp, Probe sequence
acttttcagcagactatgcacatat

SEQ ID NO: 173127 - DNA, 25 bp, Probe sequence
aaagtaggcagcaaacgttacttat

SEQ ID NO: 173128 - DNA, 25 bp, Probe sequence
aacgatttgaaatacaacaacataa

SEQ ID NO: 173129 - DNA, 25 bp, Probe sequence
aagtaggcagcaaacgttacttatt

SEQ ID NO: 173130 - DNA, 25 bp, Probe sequence
gctatatctactgatttttttaagt

SEQ ID NO: 173131 - DNA, 25 bp, Probe sequence
gaatatattccggataatgtattga

SEQ ID NO: 173132 - DNA, 25 bp, Probe sequence
gacattgcagatgatgtggcaacaa

SEQ ID NO: 173133 - DNA, 25 bp, Probe sequence
gactatgcacatataagaggtatag

SEQ ID NO: 173134 - DNA, 25 bp, Probe sequence
gttacttatttattgaatatattcc

SEQ ID NO: 173135 - DNA, 25 bp, Probe sequence
gtttaatgctatatctactgatttt

SEQ ID NO: 173136 - DNA, 25 bp, Probe sequence
gtaggccaacgatttgaaatacaac

SEQ ID NO: 173137 - DNA, 25 bp, Probe sequence
ggccaacgatttgaaatacaacaac

SEQ ID NO: 173138 - DNA, 25 bp, Probe sequence
tgtttaatgctatatctactgattt

SEQ ID NO: 173139 - DNA, 25 bp, Probe sequence
taatgctatatctactgattttttt

SEQ ID NO: 173140 - DNA, 25 bp, Probe sequence
taacatattatgtatatctcattga

SEQ ID NO: 173141 - DNA, 25 bp, Probe sequence
taaaatagtaggccaacgatttgaa

SEQ ID NO: 173142 - DNA, 25 bp, Probe sequence
tacttttcagcagactatgcacata

SEQ ID NO: 173143 - DNA, 25 bp, Probe sequence
tatgtttaatgctatatctactgat

SEQ ID NO: 173144 - DNA, 25 bp, Probe sequence
tttacttttcagcagactatgcaca

SEQ ID NO: 173145 - DNA, 25 bp, Probe sequence
ttttcagcagactatgcacatataa

SEQ ID NO: 173146 - DNA, 25 bp, Probe sequence
ttacttttcagcagactatgcacat

SEQ ID NO: 173147 - DNA, 25 bp, Probe sequence
ttcagcagactatgcacatataaga

SEQ ID NO: 173148 - DNA, 25 bp, Probe sequence
ttccggataatgtattgaattgcaa

SEQ ID NO: 173149 - DNA, 25 bp, Probe sequence
ttgacattgcagatgatgtggcaac

SEQ ID NO: 173150 - DNA, 25 bp, Probe sequence
atttcaggcatttataaaggacaaa

SEQ ID NO: 173151 - DNA, 25 bp, Probe sequence
atagttcgattatttcaggcattta

SEQ ID NO: 173152 - DNA, 25 bp, Probe sequence
atgatgtaggttcgatttttttagt

SEQ ID NO: 173153 - DNA, 25 bp, Probe sequence
atgtttacacctatagttataaatt

SEQ ID NO: 173154 - DNA, 25 bp, Probe sequence
agttcgattatttcaggcatttata

SEQ ID NO: 173155 - DNA, 25 bp, Probe sequence
actattgaaccttatatcaactaag

SEQ ID NO: 173156 - DNA, 25 bp, Probe sequence
aaactattgaaccttatatcaacta

SEQ ID NO: 173157 - DNA, 25 bp, Probe sequence
aaaatacagacttaatgagagatag

SEQ ID NO: 173158 - DNA, 25 bp, Probe sequence
aagattttcaatagctcgtgaattg

SEQ ID NO: 173159 - DNA, 25 bp, Probe sequence
aagtttcgaaagtagctgctggatt

SEQ ID NO: 173160 - DNA, 25 bp, Probe sequence
aagtagctgctggattaaggctgta

SEQ ID NO: 173161 - DNA, 25 bp, Probe sequence
aagtggaagaacaatctatattaat

SEQ ID NO: 173162 - DNA, 25 bp, Probe sequence
gctgctggattaaggctgtataatt

SEQ ID NO: 173163 - DNA, 25 bp, Probe sequence
gaagtttcgaaagtagctgctggat

SEQ ID NO: 173164 - DNA, 25 bp, Probe sequence
gaaagtagctgctggattaaggctg

SEQ ID NO: 173165 - DNA, 25 bp, Probe sequence
gaaacaaactattgaaccttatatc

SEQ ID NO: 173166 - DNA, 25 bp, Probe sequence
gagagatagtaacgataatagtcta

SEQ ID NO: 173167 - DNA, 25 bp, Probe sequence
gttggaagtttcgaaagtagctgct

SEQ ID NO: 173168 - DNA, 25 bp, Probe sequence
gttagggtggggaatcaattgaaag

SEQ ID NO: 173169 - DNA, 25 bp, Probe sequence
gttcgattatttcaggcatttataa

SEQ ID NO: 173170 - DNA, 25 bp, Probe sequence
gtttcgaaagtagctgctggattaa

SEQ ID NO: 173171 - DNA, 25 bp, Probe sequence
gtagctgctggattaaggctgtata

SEQ ID NO: 173172 - DNA, 25 bp, Probe sequence
ggtggggaatcaattgaaagttatt

SEQ ID NO: 173173 - DNA, 25 bp, Probe sequence
ggattaaggctgtataatttaggaa

SEQ ID NO: 173174 - DNA, 25 bp, Probe sequence
ggaagtttcgaaagtagctgctgga

SEQ ID NO: 173175 - DNA, 25 bp, Probe sequence
ttcaatagctcgtgaattgggccgt

SEQ ID NO: 173176 - DNA, 25 bp, Probe sequence
tgatgtaggttcgatttttttagtt

SEQ ID NO: 173177 - DNA, 25 bp, Probe sequence
tgaaccttatatcaactaagttgga

SEQ ID NO: 173178 - DNA, 25 bp, Probe sequence
tcgtgaattgggccgttatttattt

SEQ ID NO: 173179 - DNA, 25 bp, Probe sequence
tcaatagctcgtgaattgggccgtt

SEQ ID NO: 173180 - DNA, 25 bp, Probe sequence
tagctcgtgaattgggccgttattt

SEQ ID NO: 173181 - DNA, 25 bp, Probe sequence
tttagttagggtggggaatcaattg

SEQ ID NO: 173182 - DNA, 25 bp, Probe sequence
tagttcgattatttcaggcatttat

SEQ ID NO: 173183 - DNA, 25 bp, Probe sequence
tatcaactaagttggaagtttcgaa

SEQ ID NO: 173184 - DNA, 25 bp, Probe sequence
atttttgctgtgttacttatgcttt

SEQ ID NO: 173185 - DNA, 25 bp, Probe sequence
atgctttttcaataattatatattc

SEQ ID NO: 173186 - DNA, 25 bp, Probe sequence
atgcttttagtttatatatttttag

SEQ ID NO: 173187 - DNA, 25 bp, Probe sequence
agcattattattattttgtacttta

SEQ ID NO: 173188 - DNA, 25 bp, Probe sequence
acttatgcttttagtttatatattt

SEQ ID NO: 173189 - DNA, 25 bp, Probe sequence
aaagttggaattttagcattattat

SEQ ID NO: 173190 - DNA, 25 bp, Probe sequence
aagttggaattttagcattattatt

SEQ ID NO: 173191 - DNA, 25 bp, Probe sequence
aatgctttttcaataattatatatt

SEQ ID NO: 173192 - DNA, 25 bp, Probe sequence
aatttttgctgtgttacttatgctt

SEQ ID NO: 173193 - DNA, 25 bp, Probe sequence
caatttttgctgtgttacttatgct

SEQ ID NO: 173194 - DNA, 25 bp, Probe sequence
ctgtgttacttatgcttttagttta

SEQ ID NO: 173195 - DNA, 25 bp, Probe sequence
gctgtgttacttatgcttttagttt

SEQ ID NO: 173196 - DNA, 25 bp, Probe sequence
gcattattattattttgtactttaa

SEQ ID NO: 173197 - DNA, 25 bp, Probe sequence
gattaaaatattcacttaaagttgg

SEQ ID NO: 173198 - DNA, 25 bp, Probe sequence
gttggaattttagcattattattat

SEQ ID NO: 173199 - DNA, 25 bp, Probe sequence
gttacttatgcttttagtttatata

SEQ ID NO: 173200 - DNA, 25 bp, Probe sequence
gtgttacttatgcttttagtttata

SEQ ID NO: 173201 - DNA, 25 bp, Probe sequence
tggaattttagcattattattattt

SEQ ID NO: 173202 - DNA, 25 bp, Probe sequence
tgtgttacttatgcttttagtttat

SEQ ID NO: 173203 - DNA, 25 bp, Probe sequence
tgttacttatgcttttagtttatat

SEQ ID NO: 173204 - DNA, 25 bp, Probe sequence
tgcttttagtttatatatttttagg

SEQ ID NO: 173205 - DNA, 25 bp, Probe sequence
tgctgtgttacttatgcttttagtt

SEQ ID NO: 173206 - DNA, 25 bp, Probe sequence
taaattatttagttccaatgcaaag

SEQ ID NO: 173207 - DNA, 25 bp, Probe sequence
tacttatgcttttagtttatatatt

SEQ ID NO: 173208 - DNA, 25 bp, Probe sequence
tagcattattattattttgtacttt

SEQ ID NO: 173209 - DNA, 25 bp, Probe sequence
tttgctgtgttacttatgcttttag

SEQ ID NO: 173210 - DNA, 25 bp, Probe sequence
tttaaattatttagttccaatgcaa

SEQ ID NO: 173211 - DNA, 25 bp, Probe sequence
tttttgctgtgttacttatgctttt

SEQ ID NO: 173212 - DNA, 25 bp, Probe sequence
ttttgctgtgttacttatgctttta

SEQ ID NO: 173213 - DNA, 25 bp, Probe sequence
ttatgcttttagtttatatattttt

SEQ ID NO: 173214 - DNA, 25 bp, Probe sequence
ttacttatgcttttagtttatatat

SEQ ID NO: 173215 - DNA, 25 bp, Probe sequence
ttaaattatttagttccaatgcaaa

SEQ ID NO: 173216 - DNA, 25 bp, Probe sequence
ttcacttaaagttggaattttagca

SEQ ID NO: 173217 - DNA, 25 bp, Probe sequence
ttgctgtgttacttatgcttttagt

SEQ ID NO: 173218 - DNA, 25 bp, Probe sequence
cgcaggtgttggtggtttccttgga

SEQ ID NO: 173219 - DNA, 25 bp, Probe sequence
attatatctttcttctgcatataca

SEQ ID NO: 173220 - DNA, 25 bp, Probe sequence
atagctgcatcgaatattgatacta

SEQ ID NO: 173221 - DNA, 25 bp, Probe sequence
atacaaaaacaatagctgctttagg

SEQ ID NO: 173222 - DNA, 25 bp, Probe sequence
atgcagccggggaatacgttctgac

SEQ ID NO: 173223 - DNA, 25 bp, Probe sequence
atctttcttctgcatatacaaaaac

SEQ ID NO: 173224 - DNA, 25 bp, Probe sequence
aggtgttggtggtttccttggatct

SEQ ID NO: 173225 - DNA, 25 bp, Probe sequence
agctgctttaggtgcgggggctatt

SEQ ID NO: 173226 - DNA, 25 bp, Probe sequence
aaaatttatttgatgaacttgagaa

SEQ ID NO: 173227 - DNA, 25 bp, Probe sequence
aacaggtaaagatactgcaacatta

SEQ ID NO: 173228 - DNA, 25 bp, Probe sequence
aactggaagatatatttacaaaaga

SEQ ID NO: 173229 - DNA, 25 bp, Probe sequence
caatagctgctttaggtgcgggggc

SEQ ID NO: 173230 - DNA, 25 bp, Probe sequence
caacattatatctttcttctgcata

SEQ ID NO: 173231 - DNA, 25 bp, Probe sequence
gccggggaatacgttctgacaggag

SEQ ID NO: 173232 - DNA, 25 bp, Probe sequence
gcagccggggaatacgttctgacag

SEQ ID NO: 173233 - DNA, 25 bp, Probe sequence
gctgcatcgaatattgatactagta

SEQ ID NO: 173234 - DNA, 25 bp, Probe sequence
gctttaggtgcgggggctattagcg

SEQ ID NO: 173235 - DNA, 25 bp, Probe sequence
agcgggtaaaactcaatatgtagaa

SEQ ID NO: 173236 - DNA, 25 bp, Probe sequence
gttggtggtttccttggatctatag

SEQ ID NO: 173237 - DNA, 25 bp, Probe sequence
gtgcgggggctattagcgttatttc

SEQ ID NO: 173238 - DNA, 25 bp, Probe sequence
gtgttggtggtttccttggatctat

SEQ ID NO: 173239 - DNA, 25 bp, Probe sequence
gggaatacgttctgacaggagaaaa

SEQ ID NO: 173240 - DNA, 25 bp, Probe sequence
ggtggtttccttggatctatagctg

SEQ ID NO: 173241 - DNA, 25 bp, Probe sequence
ggggctattagcgttatttctgcac

SEQ ID NO: 173242 - DNA, 25 bp, Probe sequence
ggtttccttggatctatagctgcat

SEQ ID NO: 173243 - DNA, 25 bp, Probe sequence
ggtttagttggcgcaggtgttggtg

SEQ ID NO: 173244 - DNA, 25 bp, Probe sequence
ggatctatagctgcatcgaatattg

SEQ ID NO: 173245 - DNA, 25 bp, Probe sequence
ggctattagcgttatttctgcacta

SEQ ID NO: 173246 - DNA, 25 bp, Probe sequence
tccttggatctatagctgcatcgaa

SEQ ID NO: 173247 - DNA, 25 bp, Probe sequence
tagttggcgcaggtgttggtggttt

SEQ ID NO: 173248 - DNA, 25 bp, Probe sequence
tactgcaacattatatctttcttct

SEQ ID NO: 173249 - DNA, 25 bp, Probe sequence
ttaggtgcgggggctattagcgtta

SEQ ID NO: 173250 - DNA, 25 bp, Probe sequence
ttagcgttatttctgcactaacagg

SEQ ID NO: 173251 - DNA, 25 bp, Probe sequence
ttggcgcaggtgttggtggtttcct

SEQ ID NO: 173252 - DNA, 25 bp, Probe sequence
atttcaaggacatctattaatcaca

SEQ ID NO: 173253 - DNA, 25 bp, Probe sequence
atagtttgctgtacgaaagaatggc

SEQ ID NO: 173254 - DNA, 25 bp, Probe sequence
atacaatttcgattatagtttgctg

SEQ ID NO: 173255 - DNA, 25 bp, Probe sequence
atcacaagttgcaaggaaaaaattt

SEQ ID NO: 173256 - DNA, 25 bp, Probe sequence
acgcaatccctatttcaaggacatc

SEQ ID NO: 173257 - DNA, 25 bp, Probe sequence
acagaaaactgtacaaacatcttaa

SEQ ID NO: 173258 - DNA, 25 bp, Probe sequence
aaatttattcacacaatgggaaata

SEQ ID NO: 173259 - DNA, 25 bp, Probe sequence
aaaacgaatctgtgaattattagaa

SEQ ID NO: 173260 - DNA, 25 bp, Probe sequence
aacgcaatccctatttcaaggacat

SEQ ID NO: 173261 - DNA, 25 bp, Probe sequence
aagttctttagcgaacgcaatccct

SEQ ID NO: 173262 - DNA, 25 bp, Probe sequence
aatccctatttcaaggacatctatt

SEQ ID NO: 173263 - DNA, 25 bp, Probe sequence
aatttcgattatagtttgctgtacg

SEQ ID NO: 173264 - DNA, 25 bp, Probe sequence
caaggacatctattaatcacaagtt

SEQ ID NO: 173265 - DNA, 25 bp, Probe sequence
catctattaatcacaagttgcaagg

SEQ ID NO: 173266 - DNA, 25 bp, Probe sequence
cgattatagtttgctgtacgaaaga

SEQ ID NO: 173267 - DNA, 25 bp, Probe sequence
cgaacgcaatccctatttcaaggac

SEQ ID NO: 173268 - DNA, 25 bp, Probe sequence
ccctatttcaaggacatctattaat

SEQ ID NO: 173269 - DNA, 25 bp, Probe sequence
gccaaagttctttagcgaacgcaat

SEQ ID NO: 173270 - DNA, 25 bp, Probe sequence
gcgaacgcaatccctatttcaagga

SEQ ID NO: 173271 - DNA, 25 bp, Probe sequence
gcaatccctatttcaaggacatcta

SEQ ID NO: 173272 - DNA, 25 bp, Probe sequence
gaacgcaatccctatttcaaggaca

SEQ ID NO: 173273 - DNA, 25 bp, Probe sequence
gaaaaaatttattcacacaatggga

SEQ ID NO: 173274 - DNA, 25 bp, Probe sequence
gacatctattaatcacaagttgcaa

SEQ ID NO: 173275 - DNA, 25 bp, Probe sequence
gatatagccaaagttctttagcgaa

SEQ ID NO: 173276 - DNA, 25 bp, Probe sequence
gttctttagcgaacgcaatccctat

SEQ ID NO: 173277 - DNA, 25 bp, Probe sequence
gggaaataaaacgaatctgtgaatt

SEQ ID NO: 173278 - DNA, 25 bp, Probe sequence
ggacatctattaatcacaagttgca

SEQ ID NO: 173279 - DNA, 25 bp, Probe sequence
ggcagagtatagatatagccaaagt

SEQ ID NO: 173280 - DNA, 25 bp, Probe sequence
tgctgtacgaaagaatggcagagta

SEQ ID NO: 173281 - DNA, 25 bp, Probe sequence
tctttagcgaacgcaatccctattt

SEQ ID NO: 173282 - DNA, 25 bp, Probe sequence
tagcgaacgcaatccctatttcaag

SEQ ID NO: 173283 - DNA, 25 bp, Probe sequence
tagccaaagttctttagcgaacgca

SEQ ID NO: 173284 - DNA, 25 bp, Probe sequence
tttagcgaacgcaatccctatttca

SEQ ID NO: 173285 - DNA, 25 bp, Probe sequence
ttagcgaacgcaatccctatttcaa

SEQ ID NO: 173286 - DNA, 25 bp, Probe sequence
attgatcctactttactattacttg

SEQ ID NO: 173287 - DNA, 25 bp, Probe sequence
attattcaagttaccgcaacgtgta

SEQ ID NO: 173288 - DNA, 25 bp, Probe sequence
atatccgataatgttattccttatg

SEQ ID NO: 173289 - DNA, 25 bp, Probe sequence
atgcaccagcatttgatcttataga

SEQ ID NO: 173290 - DNA, 25 bp, Probe sequence
atgaggaatcctatactgttgttaa

SEQ ID NO: 173291 - DNA, 25 bp, Probe sequence
aggggcgacacttcgaatcgacatt

SEQ ID NO: 173292 - DNA, 25 bp, Probe sequence
agagctacctaagttacctatatta

SEQ ID NO: 173293 - DNA, 25 bp, Probe sequence
agaattatctccgcttttatttgaa

SEQ ID NO: 173294 - DNA, 25 bp, Probe sequence
agccatttacatttttctatcgata

SEQ ID NO: 173295 - DNA, 25 bp, Probe sequence
aaatcacaccttttagcgcatctat

SEQ ID NO: 173296 - DNA, 25 bp, Probe sequence
aatccagaattcaacaatccattat

SEQ ID NO: 173297 - DNA, 25 bp, Probe sequence
caaaaatactagtaccctcaccact

SEQ ID NO: 173298 - DNA, 25 bp, Probe sequence
ccacttccttcgcatcaatcgaatg

SEQ ID NO: 173299 - DNA, 25 bp, Probe sequence
gcttttattattattgatgcgctta

SEQ ID NO: 173300 - DNA, 25 bp, Probe sequence
gaatttagcttcacgatatactgcg

SEQ ID NO: 173301 - DNA, 25 bp, Probe sequence
gaatgcttgttttatccttatttgc

SEQ ID NO: 173302 - DNA, 25 bp, Probe sequence
gaagatccatggcatcaaatactta

SEQ ID NO: 173303 - DNA, 25 bp, Probe sequence
gaagctggcataggaaaatcacacc

SEQ ID NO: 173304 - DNA, 25 bp, Probe sequence
gacccttatatttttctgacagaac

SEQ ID NO: 173305 - DNA, 25 bp, Probe sequence
gagctatttgaagtatttccacagt

SEQ ID NO: 173306 - DNA, 25 bp, Probe sequence
gagactcatgttatttcttagcgat

SEQ ID NO: 173307 - DNA, 25 bp, Probe sequence
gagatctcggtactaaatctttagt

SEQ ID NO: 173308 - DNA, 25 bp, Probe sequence
gatgttcaatattctggactatggg

SEQ ID NO: 173309 - DNA, 25 bp, Probe sequence
gattactttttatcagaataccttt

SEQ ID NO: 173310 - DNA, 25 bp, Probe sequence
gtacaatgttttttatgacgatggc

SEQ ID NO: 173311 - DNA, 25 bp, Probe sequence
ggggcatatggcgattttggcagat

SEQ ID NO: 173312 - DNA, 25 bp, Probe sequence
ggtattaatattcctcgagcacata

SEQ ID NO: 173313 - DNA, 25 bp, Probe sequence
ggaagaggaactggggcatatggcg

SEQ ID NO: 173314 - DNA, 25 bp, Probe sequence
tggttatgctgtacgaaactgggta

SEQ ID NO: 173315 - DNA, 25 bp, Probe sequence
taacgtggatattttctgcaactaa

SEQ ID NO: 173316 - DNA, 25 bp, Probe sequence
tatatgcttctgttttaggggcgac

SEQ ID NO: 173317 - DNA, 25 bp, Probe sequence
tttttcgtatgagcgtatgggagat

SEQ ID NO: 173318 - DNA, 25 bp, Probe sequence
tattttcaaagctttatcaaccata

SEQ ID NO: 173319 - DNA, 25 bp, Probe sequence
ttctattagaaccccttttgaagat

SEQ ID NO: 173320 - DNA, 25 bp, Probe sequence
attgtctttatctctatttactgta

SEQ ID NO: 173321 - DNA, 25 bp, Probe sequence
atctctatttactgtaggagctagt

SEQ ID NO: 173322 - DNA, 25 bp, Probe sequence
atcgccagcaaaaatagggacatct

SEQ ID NO: 173323 - DNA, 25 bp, Probe sequence
atccattcgatcataaagttaacca

SEQ ID NO: 173324 - DNA, 25 bp, Probe sequence
atgtcaagcgcattataaacgagaa

SEQ ID NO: 173325 - DNA, 25 bp, Probe sequence
agttccgggaaattctggatcaggt

SEQ ID NO: 173326 - DNA, 25 bp, Probe sequence
agttttattgtctttatctctattt

SEQ ID NO: 173327 - DNA, 25 bp, Probe sequence
agaaccatttggtgcaggtgttgat

SEQ ID NO: 173328 - DNA, 25 bp, Probe sequence
acggtgtttcattaggcgataaaat

SEQ ID NO: 173329 - DNA, 25 bp, Probe sequence
acggtaatactgaaacaccatatgg

SEQ ID NO: 173330 - DNA, 25 bp, Probe sequence
acattctagcaaagtgtctcatctt

SEQ ID NO: 173331 - DNA, 25 bp, Probe sequence
aaattatggtgttggtattgggaat

SEQ ID NO: 173332 - DNA, 25 bp, Probe sequence
aaaccagatcaaaacggtgtttcat

SEQ ID NO: 173333 - DNA, 25 bp, Probe sequence
aagttaaccaaatgcacagaagtga

SEQ ID NO: 173334 - DNA, 25 bp, Probe sequence
aagtgcaactggtgtgttaattgga

SEQ ID NO: 173335 - DNA, 25 bp, Probe sequence
aattagttggtatacattctagcaa

SEQ ID NO: 173336 - DNA, 25 bp, Probe sequence
ctagcaaagtgtctcatcttgatag

SEQ ID NO: 173337 - DNA, 25 bp, Probe sequence
ccatgcaaaagcagaagtttcagca

SEQ ID NO: 173338 - DNA, 25 bp, Probe sequence
gctaaatttgctaatggagatccat

SEQ ID NO: 173339 - DNA, 25 bp, Probe sequence
gatactatggatttacagttccggg

SEQ ID NO: 173340 - DNA, 25 bp, Probe sequence
gttattcaagacgaactgatgcaaa

SEQ ID NO: 173341 - DNA, 25 bp, Probe sequence
gtgtctcatcttgatagagagcatc

SEQ ID NO: 173342 - DNA, 25 bp, Probe sequence
ggtgtcaatgcatttaatttaccaa

SEQ ID NO: 173343 - DNA, 25 bp, Probe sequence
ggtgcaggtgttgatttagcattaa

SEQ ID NO: 173344 - DNA, 25 bp, Probe sequence
ggtattgggaattatgtcaagcgca

SEQ ID NO: 173345 - DNA, 25 bp, Probe sequence
ggagatccatctaaagtatctttta

SEQ ID NO: 173346 - DNA, 25 bp, Probe sequence
ggagacaaactcgaattaataggct

SEQ ID NO: 173347 - DNA, 25 bp, Probe sequence
ggagctagtgcatttgttattcaag

SEQ ID NO: 173348 - DNA, 25 bp, Probe sequence
ggacaaacaagtgcaactggtgtgt

SEQ ID NO: 173349 - DNA, 25 bp, Probe sequence
ggaataagtactatggtgtcaatgc

SEQ ID NO: 173350 - DNA, 25 bp, Probe sequence
taaagtatcttttagaccttctata

SEQ ID NO: 173351 - DNA, 25 bp, Probe sequence
tagacatatcgctaaatttgctaat

SEQ ID NO: 173352 - DNA, 25 bp, Probe sequence
tagaccttctataaatacagatgat

SEQ ID NO: 173353 - DNA, 25 bp, Probe sequence
ttaataggctatccattcgatcata

SEQ ID NO: 173354 - DNA, 25 bp, Probe sequence
atacccttactatggtgcaactgga

SEQ ID NO: 173355 - DNA, 25 bp, Probe sequence
attaactcatgcgaacttatgcaat

SEQ ID NO: 173356 - DNA, 25 bp, Probe sequence
atttgtcacaggtaatgcaccagct

SEQ ID NO: 173357 - DNA, 25 bp, Probe sequence
ataccttgtctcactgaacaagata

SEQ ID NO: 173358 - DNA, 25 bp, Probe sequence
atgggggcagtttgagacgagtagc

SEQ ID NO: 173359 - DNA, 25 bp, Probe sequence
atggtgaagaatatccagagtggga

SEQ ID NO: 173360 - DNA, 25 bp, Probe sequence
agtaatgatcataatttgtttttta

SEQ ID NO: 173361 - DNA, 25 bp, Probe sequence
agaactacgagcatttgtcacaggt

SEQ ID NO: 173362 - DNA, 25 bp, Probe sequence
agacatctttatctttgaaaataat

SEQ ID NO: 173363 - DNA, 25 bp, Probe sequence
accaattacttcttcattaagagaa

SEQ ID NO: 173364 - DNA, 25 bp, Probe sequence
actgggtaaataatcatgcgcatgt

SEQ ID NO: 173365 - DNA, 25 bp, Probe sequence
actacgagcatttgtcacaggtaat

SEQ ID NO: 173366 - DNA, 25 bp, Probe sequence
aaatcttaaaataccttgtctcact

SEQ ID NO: 173367 - DNA, 25 bp, Probe sequence
aaacaaattcataaaagacatcttt

SEQ ID NO: 173368 - DNA, 25 bp, Probe sequence
aactcatgcgaacttatgcaatata

SEQ ID NO: 173369 - DNA, 25 bp, Probe sequence
aatgcaccagctaaattaactcatg

SEQ ID NO: 173370 - DNA, 25 bp, Probe sequence
aatcttcacacaagaattgcgattc

SEQ ID NO: 173371 - DNA, 25 bp, Probe sequence
cttaaaataccttgtctcactgaac

SEQ ID NO: 173372 - DNA, 25 bp, Probe sequence
cccttactatggtgcaactggaatt

SEQ ID NO: 173373 - DNA, 25 bp, Probe sequence
ccagctaaattaactcatgcgaact

SEQ ID NO: 173374 - DNA, 25 bp, Probe sequence
gcgaacttatgcaatataaatctta

SEQ ID NO: 173375 - DNA, 25 bp, Probe sequence
gaaaaccaattacttcttcattaag

SEQ ID NO: 173376 - DNA, 25 bp, Probe sequence
gagtagctttattgctaatgggcaa

SEQ ID NO: 173377 - DNA, 25 bp, Probe sequence
gatggtgcaaaatgggggcagtttg

SEQ ID NO: 173378 - DNA, 25 bp, Probe sequence
gttatacccttactatggtgcaact

SEQ ID NO: 173379 - DNA, 25 bp, Probe sequence
gtttgagacgagtagctttattgct

SEQ ID NO: 173380 - DNA, 25 bp, Probe sequence
gtaagtgcattgttaaaatctatag

SEQ ID NO: 173381 - DNA, 25 bp, Probe sequence
gtcacaggtaatgcaccagctaaat

SEQ ID NO: 173382 - DNA, 25 bp, Probe sequence
gtgcaactggaattattgattacgt

SEQ ID NO: 173383 - DNA, 25 bp, Probe sequence
ggggttatacccttactatggtgca

SEQ ID NO: 173384 - DNA, 25 bp, Probe sequence
ggggcagtttgagacgagtagcttt

SEQ ID NO: 173385 - DNA, 25 bp, Probe sequence
tgctaatgggcaatactgggtaaat

SEQ ID NO: 173386 - DNA, 25 bp, Probe sequence
tcatgcgcatgtagttaaaagtaat

SEQ ID NO: 173387 - DNA, 25 bp, Probe sequence
ttactaataggagaagatggtgcaa

SEQ ID NO: 173388 - DNA, 25 bp, Probe sequence
attgccatcttatgaagaacaacaa

SEQ ID NO: 173389 - DNA, 25 bp, Probe sequence
atcaatattatttaacattacactt

SEQ ID NO: 173390 - DNA, 25 bp, Probe sequence
agactaaattgccatcttatgaaga

SEQ ID NO: 173391 - DNA, 25 bp, Probe sequence
acatcacaattggtactctcacaaa

SEQ ID NO: 173392 - DNA, 25 bp, Probe sequence
aaatcggtgattttttcagtgaaat

SEQ ID NO: 173393 - DNA, 25 bp, Probe sequence
aaatcatataacataccgttcaaga

SEQ ID NO: 173394 - DNA, 25 bp, Probe sequence
aaacaatcttcaaaagtcggacgat

SEQ ID NO: 173395 - DNA, 25 bp, Probe sequence
aaaacataaagactaaattgccatc

SEQ ID NO: 173396 - DNA, 25 bp, Probe sequence
aacataccgttcaagaagcgacgat

SEQ ID NO: 173397 - DNA, 25 bp, Probe sequence
aacattacacttaaactatcaactg

SEQ ID NO: 173398 - DNA, 25 bp, Probe sequence
aagacaaggtttaatacttcagtca

SEQ ID NO: 173399 - DNA, 25 bp, Probe sequence
aatgaaaatgaatatcctgttttaa

SEQ ID NO: 173400 - DNA, 25 bp, Probe sequence
aatgctatatacagaaaatcttctc

SEQ ID NO: 173401 - DNA, 25 bp, Probe sequence
aatcttctcacaagaattacgattc

SEQ ID NO: 173402 - DNA, 25 bp, Probe sequence
aataggacaattcttcagcaaactt

SEQ ID NO: 173403 - DNA, 25 bp, Probe sequence
aatatgcaactggtacatcacaatt

SEQ ID NO: 173404 - DNA, 25 bp, Probe sequence
aatattgggtatttcatactcccta

SEQ ID NO: 173405 - DNA, 25 bp, Probe sequence
aattcttcagcaaacttgaccaaca

SEQ ID NO: 173406 - DNA, 25 bp, Probe sequence
cttcagtcagactactataaagata

SEQ ID NO: 173407 - DNA, 25 bp, Probe sequence
gaagcgacgatggaatttttaagtt

SEQ ID NO: 173408 - DNA, 25 bp, Probe sequence
gataggaaaacttttgcagagagta

SEQ ID NO: 173409 - DNA, 25 bp, Probe sequence
gattgatgtaggtattattagtaaa

SEQ ID NO: 173410 - DNA, 25 bp, Probe sequence
gtttaatacttcagtcagactacta

SEQ ID NO: 173411 - DNA, 25 bp, Probe sequence
gggatagatgcaaatcaatattatt

SEQ ID NO: 173412 - DNA, 25 bp, Probe sequence
ggtacatcacaattggtactctcac

SEQ ID NO: 173413 - DNA, 25 bp, Probe sequence
ggtactctcacaaaaagacttgcaa

SEQ ID NO: 173414 - DNA, 25 bp, Probe sequence
ggacaattcttcagcaaacttgacc

SEQ ID NO: 173415 - DNA, 25 bp, Probe sequence
tgggtatttcatactccctaaaaat

SEQ ID NO: 173416 - DNA, 25 bp, Probe sequence
taccgttcaagaagcgacgatggaa

SEQ ID NO: 173417 - DNA, 25 bp, Probe sequence
tcttcagcaaacttgaccaacaaat

SEQ ID NO: 173418 - DNA, 25 bp, Probe sequence
tattaccctgtctttaaagggatag

SEQ ID NO: 173419 - DNA, 25 bp, Probe sequence
tattagtaaatattaccctgtcttt

SEQ ID NO: 173420 - DNA, 25 bp, Probe sequence
tttcatactccctaaaaatcatata

SEQ ID NO: 173421 - DNA, 25 bp, Probe sequence
ttacacttaaactatcaactgaaaa

SEQ ID NO: 173422 - DNA, 25 bp, Probe sequence
atcacatgtctattactgaaaaaca

SEQ ID NO: 173423 - DNA, 25 bp, Probe sequence
atcacgtatcaagaagcatgggcag

SEQ ID NO: 173424 - DNA, 25 bp, Probe sequence
atgtcgccaacaagacgacaacgta

SEQ ID NO: 173425 - DNA, 25 bp, Probe sequence
agcaacaagctgaattacataaaaa

SEQ ID NO: 173426 - DNA, 25 bp, Probe sequence
aagagggaacatggatgcgagtgaa

SEQ ID NO: 173427 - DNA, 25 bp, Probe sequence
aagtcggttacttcattgagccaca

SEQ ID NO: 173428 - DNA, 25 bp, Probe sequence
aaggcggaggaatcacatgtctatt

SEQ ID NO: 173429 - DNA, 25 bp, Probe sequence
aattatggtcgattgcgaatgattt

SEQ ID NO: 173430 - DNA, 25 bp, Probe sequence
cggttacttcattgagccacaagat

SEQ ID NO: 173431 - DNA, 25 bp, Probe sequence
ccagcctttttaggcaatacatttg

SEQ ID NO: 173432 - DNA, 25 bp, Probe sequence
gccttgtcaggtgaagacatcacgt

SEQ ID NO: 173433 - DNA, 25 bp, Probe sequence
gcttcttatctgaaaaagccgaaca

SEQ ID NO: 173434 - DNA, 25 bp, Probe sequence
gcaaaggcggaggaatcacatgtct

SEQ ID NO: 173435 - DNA, 25 bp, Probe sequence
gaatatgcagatgccttgtcaggtg

SEQ ID NO: 173436 - DNA, 25 bp, Probe sequence
gaagacatcacgtatcaagaagcat

SEQ ID NO: 173437 - DNA, 25 bp, Probe sequence
gaaaaacaacgtcagcaacaagctg

SEQ ID NO: 173438 - DNA, 25 bp, Probe sequence
gaggaatcacatgtctattactgaa

SEQ ID NO: 173439 - DNA, 25 bp, Probe sequence
gatgccttgtcaggtgaagacatca

SEQ ID NO: 173440 - DNA, 25 bp, Probe sequence
gataaattacttatgcaaaggcgga

SEQ ID NO: 173441 - DNA, 25 bp, Probe sequence
gatttaagagggaacatggatgcga

SEQ ID NO: 173442 - DNA, 25 bp, Probe sequence
gttacttcattgagccacaagattt

SEQ ID NO: 173443 - DNA, 25 bp, Probe sequence
gtatcaagaagcatgggcagatgaa

SEQ ID NO: 173444 - DNA, 25 bp, Probe sequence
gtcaggtgaagacatcacgtatcaa

SEQ ID NO: 173445 - DNA, 25 bp, Probe sequence
gtcggttacttcattgagccacaag

SEQ ID NO: 173446 - DNA, 25 bp, Probe sequence
gtcgaacgtattatagacacatata

SEQ ID NO: 173447 - DNA, 25 bp, Probe sequence
ggtcgattgcgaatgatttaagagg

SEQ ID NO: 173448 - DNA, 25 bp, Probe sequence
ggcggaggaatcacatgtctattac

SEQ ID NO: 173449 - DNA, 25 bp, Probe sequence
tgataaatatagctacagcgcgaca

SEQ ID NO: 173450 - DNA, 25 bp, Probe sequence
tgcagatgccttgtcaggtgaagac

SEQ ID NO: 173451 - DNA, 25 bp, Probe sequence
tgcccaagtcgaacgtattatagac

SEQ ID NO: 173452 - DNA, 25 bp, Probe sequence
tcattgagccacaagatttattcag

SEQ ID NO: 173453 - DNA, 25 bp, Probe sequence
tatgcagatgccttgtcaggtgaag

SEQ ID NO: 173454 - DNA, 25 bp, Probe sequence
tttttaggcaatacatttgatgcgg

SEQ ID NO: 173455 - DNA, 25 bp, Probe sequence
ttaaaaaatgtcgccaacaagacga

SEQ ID NO: 173456 - DNA, 25 bp, Probe sequence
atataatatcggtcttacatcaaaa

SEQ ID NO: 173457 - DNA, 25 bp, Probe sequence
atccgtcttttatcgcgacagtatc

SEQ ID NO: 173458 - DNA, 25 bp, Probe sequence
atgtccaatttgatttcgtaaaaga

SEQ ID NO: 173459 - DNA, 25 bp, Probe sequence
aggctactactaatgcagaagatat

SEQ ID NO: 173460 - DNA, 25 bp, Probe sequence
aggttttatcaattctaggacaact

SEQ ID NO: 173461 - DNA, 25 bp, Probe sequence
acgagcttaatcaattatcttccta

SEQ ID NO: 173462 - DNA, 25 bp, Probe sequence
gtagacgataatgaattgccccctt

SEQ ID NO: 173463 - DNA, 25 bp, Probe sequence
aagaatggtttggccatttcaatat

SEQ ID NO: 173464 - DNA, 25 bp, Probe sequence
aattctaggacaactttcaatgatg

SEQ ID NO: 173465 - DNA, 25 bp, Probe sequence
aattcttttgttatagcagggcatc

SEQ ID NO: 173466 - DNA, 25 bp, Probe sequence
aattgtccctatagctacaccattt

SEQ ID NO: 173467 - DNA, 25 bp, Probe sequence
caaggctctaaggctactactaatg

SEQ ID NO: 173468 - DNA, 25 bp, Probe sequence
ctaaacttggtctttatccagaaag

SEQ ID NO: 173469 - DNA, 25 bp, Probe sequence
gcgaatttgaaattacttacggtag

SEQ ID NO: 173470 - DNA, 25 bp, Probe sequence
gctacaccatttcaaggctctaagg

SEQ ID NO: 173471 - DNA, 25 bp, Probe sequence
gctagagactattttgtagacgata

SEQ ID NO: 173472 - DNA, 25 bp, Probe sequence
gcagggcatcgatggtctgcttacg

SEQ ID NO: 173473 - DNA, 25 bp, Probe sequence
gaattgccccctttaataacaagtg

SEQ ID NO: 173474 - DNA, 25 bp, Probe sequence
gaagatattggcgacgatgcagaag

SEQ ID NO: 173475 - DNA, 25 bp, Probe sequence
gaaatacgacaagaggacctaatgc

SEQ ID NO: 173476 - DNA, 25 bp, Probe sequence
gaaacagttgatgttggtcaaactt

SEQ ID NO: 173477 - DNA, 25 bp, Probe sequence
gaggacctaatgctagagactattt

SEQ ID NO: 173478 - DNA, 25 bp, Probe sequence
gatggtctgcttacgatgaattatt

SEQ ID NO: 173479 - DNA, 25 bp, Probe sequence
gatgcagaagtgattaaacgtacgg

SEQ ID NO: 173480 - DNA, 25 bp, Probe sequence
gattcaggcgatacgagcgaatttg

SEQ ID NO: 173481 - DNA, 25 bp, Probe sequence
gttacaactttgtcgctaggtctaa

SEQ ID NO: 173482 - DNA, 25 bp, Probe sequence
gttatgtcagcgaagttgaacaaca

SEQ ID NO: 173483 - DNA, 25 bp, Probe sequence
gtcagtaccatctataggcggaaat

SEQ ID NO: 173484 - DNA, 25 bp, Probe sequence
gtcgctaggtctaattgtccctata

SEQ ID NO: 173485 - DNA, 25 bp, Probe sequence
ggggtgtaacacaaaatgtccaatt

SEQ ID NO: 173486 - DNA, 25 bp, Probe sequence
ggatttaatccgtcttttatcgcga

SEQ ID NO: 173487 - DNA, 25 bp, Probe sequence
tggatgttacctatgcaacctacct

SEQ ID NO: 173488 - DNA, 25 bp, Probe sequence
taaattccagtcagtaccatctata

SEQ ID NO: 173489 - DNA, 25 bp, Probe sequence
ttatcgcgacagtatctcacgaaaa

SEQ ID NO: 173490 - DNA, 25 bp, Probe sequence
attgatattcgtaaaccgattgaat

SEQ ID NO: 173491 - DNA, 25 bp, Probe sequence
attctgaaaccaactctgtcatgga

SEQ ID NO: 173492 - DNA, 25 bp, Probe sequence
attacattgcctgagcataagtaca

SEQ ID NO: 173493 - DNA, 25 bp, Probe sequence
aggcttcactcaatacaattttgaa

SEQ ID NO: 173494 - DNA, 25 bp, Probe sequence
actctgtcatggaagttacttttca

SEQ ID NO: 173495 - DNA, 25 bp, Probe sequence
acttttcctcctgcatcaagatggt

SEQ ID NO: 173496 - DNA, 25 bp, Probe sequence
acaggtagtctagcaaatacacatt

SEQ ID NO: 173497 - DNA, 25 bp, Probe sequence
acaaaccatgagtaattccatattt

SEQ ID NO: 173498 - DNA, 25 bp, Probe sequence
aagccttgttggacgagaagaagct

SEQ ID NO: 173499 - DNA, 25 bp, Probe sequence
aagcaatatcaattacaggtagtct

SEQ ID NO: 173500 - DNA, 25 bp, Probe sequence
aaggctataggcttcactcaataca

SEQ ID NO: 173501 - DNA, 25 bp, Probe sequence
aatctaaattatcaattcgccatgt

SEQ ID NO: 173502 - DNA, 25 bp, Probe sequence
aatacacaccaaatgctaaataaag

SEQ ID NO: 173503 - DNA, 25 bp, Probe sequence
aatttccagaagaatcagatacagt

SEQ ID NO: 173504 - DNA, 25 bp, Probe sequence
caaccccaaaaatacaaggcacatt

SEQ ID NO: 173505 - DNA, 25 bp, Probe sequence
caaatacacatttggaacaacccca

SEQ ID NO: 173506 - DNA, 25 bp, Probe sequence
gctataggcttcactcaatacaatt

SEQ ID NO: 173507 - DNA, 25 bp, Probe sequence
gcataagtacaaaactgtagccgta

SEQ ID NO: 173508 - DNA, 25 bp, Probe sequence
gaatattctgaaaccaactctgtca

SEQ ID NO: 173509 - DNA, 25 bp, Probe sequence
gaatcagatacagttaatacacacc

SEQ ID NO: 173510 - DNA, 25 bp, Probe sequence
gaaggtctatattgtattttaaatc

SEQ ID NO: 173511 - DNA, 25 bp, Probe sequence
gaaaccaactctgtcatggaagtta

SEQ ID NO: 173512 - DNA, 25 bp, Probe sequence
gagaagaagctgtattgatattcgt

SEQ ID NO: 173513 - DNA, 25 bp, Probe sequence
gaggctatgcataattacttattta

SEQ ID NO: 173514 - DNA, 25 bp, Probe sequence
gtacattcggtagtagagattttac

SEQ ID NO: 173515 - DNA, 25 bp, Probe sequence
gtaaaccgattgaatgaaggtctat

SEQ ID NO: 173516 - DNA, 25 bp, Probe sequence
ggtttaattacattgcctgagcata

SEQ ID NO: 173517 - DNA, 25 bp, Probe sequence
ggagttaataagccttgttggacga

SEQ ID NO: 173518 - DNA, 25 bp, Probe sequence
tgtagccgtaaaaagtacattcggt

SEQ ID NO: 173519 - DNA, 25 bp, Probe sequence
taaatgatgacacacttttcctcct

SEQ ID NO: 173520 - DNA, 25 bp, Probe sequence
tacagttaatacacaccaaatgcta

SEQ ID NO: 173521 - DNA, 25 bp, Probe sequence
ttcaaaaggctataggcttcactca

SEQ ID NO: 173522 - DNA, 25 bp, Probe sequence
ttcctcctgcatcaagatggtttaa

SEQ ID NO: 173523 - DNA, 25 bp, Probe sequence
ttcgccatgtataaagaggctatgc

SEQ ID NO: 173524 - DNA, 25 bp, Probe sequence
atttacttcaaaaacctgtatattg

SEQ ID NO: 173525 - DNA, 25 bp, Probe sequence
atcaaatgcttaattcctcaaccgc

SEQ ID NO: 173526 - DNA, 25 bp, Probe sequence
agtcacgacaatttgaatagtttca

SEQ ID NO: 173527 - DNA, 25 bp, Probe sequence
agatttagatatagacagtcacgac

SEQ ID NO: 173528 - DNA, 25 bp, Probe sequence
agctccaccccttaataagtataca

SEQ ID NO: 173529 - DNA, 25 bp, Probe sequence
aatttctactttgcaaacccttgct

SEQ ID NO: 173530 - DNA, 25 bp, Probe sequence
aaagcacgcatcggcagtactatcg

SEQ ID NO: 173531 - DNA, 25 bp, Probe sequence
aaacctgtatattggaagattagat

SEQ ID NO: 173532 - DNA, 25 bp, Probe sequence
aacccttgctagtaaatttgaagat

SEQ ID NO: 173533 - DNA, 25 bp, Probe sequence
aagcacgcatcggcagtactatcga

SEQ ID NO: 173534 - DNA, 25 bp, Probe sequence
aagattagataaaccttcatcgagg

SEQ ID NO: 173535 - DNA, 25 bp, Probe sequence
caaagcacgcatcggcagtactatc

SEQ ID NO: 173536 - DNA, 25 bp, Probe sequence
ctccaccccttaataagtatacatt

SEQ ID NO: 173537 - DNA, 25 bp, Probe sequence
gcatcggcagtactatcgataagtt

SEQ ID NO: 173538 - DNA, 25 bp, Probe sequence
gcacgcatcggcagtactatcgata

SEQ ID NO: 173539 - DNA, 25 bp, Probe sequence
gaatagtttcaaagcacgcatcggc

SEQ ID NO: 173540 - DNA, 25 bp, Probe sequence
gaagaagttgtaatttctactttgc

SEQ ID NO: 173541 - DNA, 25 bp, Probe sequence
gacagtcacgacaatttgaatagtt

SEQ ID NO: 173542 - DNA, 25 bp, Probe sequence
gataaaccttcatcgaggaagaaaa

SEQ ID NO: 173543 - DNA, 25 bp, Probe sequence
gatatagacagtcacgacaatttga

SEQ ID NO: 173544 - DNA, 25 bp, Probe sequence
gtttcaaagcacgcatcggcagtac

SEQ ID NO: 173545 - DNA, 25 bp, Probe sequence
gtaatttctactttgcaaacccttg

SEQ ID NO: 173546 - DNA, 25 bp, Probe sequence
ggaggtaatttaatttttgagatag

SEQ ID NO: 173547 - DNA, 25 bp, Probe sequence
ggcagtactatcgataagttagcta

SEQ ID NO: 173548 - DNA, 25 bp, Probe sequence
tgcaaacccttgctagtaaatttga

SEQ ID NO: 173549 - DNA, 25 bp, Probe sequence
tctactttgcaaacccttgctagta

SEQ ID NO: 173550 - DNA, 25 bp, Probe sequence
taatcaaatgcttaattcctcaacc

SEQ ID NO: 173551 - DNA, 25 bp, Probe sequence
taagttagctaaagctccacccctt

SEQ ID NO: 173552 - DNA, 25 bp, Probe sequence
taaagctccaccccttaataagtat

SEQ ID NO: 173553 - DNA, 25 bp, Probe sequence
tactttgcaaacccttgctagtaaa

SEQ ID NO: 173554 - DNA, 25 bp, Probe sequence
tagtttcaaagcacgcatcggcagt

SEQ ID NO: 173555 - DNA, 25 bp, Probe sequence
tatcatatctataatttacttcaaa

SEQ ID NO: 173556 - DNA, 25 bp, Probe sequence
tttctactttgcaaacccttgctag

SEQ ID NO: 173557 - DNA, 25 bp, Probe sequence
ttcaaagcacgcatcggcagtacta

SEQ ID NO: 173558 - DNA, 25 bp, Probe sequence
attgcataataaatcattctcctaa

SEQ ID NO: 173559 - DNA, 25 bp, Probe sequence
attaaaccctttgcaattatcagaa

SEQ ID NO: 173560 - DNA, 25 bp, Probe sequence
attcaatcacatataataatcgtaa

SEQ ID NO: 173561 - DNA, 25 bp, Probe sequence
atttttcttcaataaacgttgctga

SEQ ID NO: 173562 - DNA, 25 bp, Probe sequence
atcattctcctaatgaattactgat

SEQ ID NO: 173563 - DNA, 25 bp, Probe sequence
atgttacctctattaataagttatt

SEQ ID NO: 173564 - DNA, 25 bp, Probe sequence
agtcttaatcaatgttacctctatt

SEQ ID NO: 173565 - DNA, 25 bp, Probe sequence
agcgacttttcaagtcttcttctag

SEQ ID NO: 173566 - DNA, 25 bp, Probe sequence
accctttgcaattatcagaagacac

SEQ ID NO: 173567 - DNA, 25 bp, Probe sequence
actgatgtttttgtatgacttagaa

SEQ ID NO: 173568 - DNA, 25 bp, Probe sequence
actcagtcttaatcaatgttacctc

SEQ ID NO: 173569 - DNA, 25 bp, Probe sequence
aaatgagatgtcagagtcactctta

SEQ ID NO: 173570 - DNA, 25 bp, Probe sequence
aacagcgacttttcaagtcttcttc

SEQ ID NO: 173571 - DNA, 25 bp, Probe sequence
aacgttgctgaattaataaacagac

SEQ ID NO: 173572 - DNA, 25 bp, Probe sequence
aatcaatgttacctctattaataag

SEQ ID NO: 173573 - DNA, 25 bp, Probe sequence
aataaacagacaatccattcgtaaa

SEQ ID NO: 173574 - DNA, 25 bp, Probe sequence
cagacaatccattcgtaaaaatttg

SEQ ID NO: 173575 - DNA, 25 bp, Probe sequence
cagaagacacttatttttcttcaat

SEQ ID NO: 173576 - DNA, 25 bp, Probe sequence
cagagtcactcttattatacgtata

SEQ ID NO: 173577 - DNA, 25 bp, Probe sequence
ctacccttaattcagtttacattga

SEQ ID NO: 173578 - DNA, 25 bp, Probe sequence
gaattactgatgtttttgtatgact

SEQ ID NO: 173579 - DNA, 25 bp, Probe sequence
gaatgatcacagtcttatttatcta

SEQ ID NO: 173580 - DNA, 25 bp, Probe sequence
gaagaaaccaatactgtttttagat

SEQ ID NO: 173581 - DNA, 25 bp, Probe sequence
gacttttcaagtcttcttctagaca

SEQ ID NO: 173582 - DNA, 25 bp, Probe sequence
gatgtataacttcaagcataaacga

SEQ ID NO: 173583 - DNA, 25 bp, Probe sequence
gatcacagtcttatttatctaaatg

SEQ ID NO: 173584 - DNA, 25 bp, Probe sequence
gtatgacttagaacaaaggttcaac

SEQ ID NO: 173585 - DNA, 25 bp, Probe sequence
gtcactcttattatacgtatactca

SEQ ID NO: 173586 - DNA, 25 bp, Probe sequence
ggttcaacaattttattaatcgatt

SEQ ID NO: 173587 - DNA, 25 bp, Probe sequence
tcttcttctagacattattgaattg

SEQ ID NO: 173588 - DNA, 25 bp, Probe sequence
tcaagtcttcttctagacattattg

SEQ ID NO: 173589 - DNA, 25 bp, Probe sequence
tactgtttttagatgtataacttca

SEQ ID NO: 173590 - DNA, 25 bp, Probe sequence
ttatacgtatactcagtcttaatca

SEQ ID NO: 173591 - DNA, 25 bp, Probe sequence
ttacattgaattaaaccctttgcaa

SEQ ID NO: 173592 - DNA, 25 bp, Probe sequence
attaatttcattagaccagccttat

SEQ ID NO: 173593 - DNA, 25 bp, Probe sequence
aggaactattttctctttcactggc

SEQ ID NO: 173594 - DNA, 25 bp, Probe sequence
atgagattactaatagcacttctat

SEQ ID NO: 173595 - DNA, 25 bp, Probe sequence
agcaccacacctttatcaacaatat

SEQ ID NO: 173596 - DNA, 25 bp, Probe sequence
aatcgacagccgctatgttagccgc

SEQ ID NO: 173597 - DNA, 25 bp, Probe sequence
acatttcatgatacaacaggtcttc

SEQ ID NO: 173598 - DNA, 25 bp, Probe sequence
acaggtcttctatattcatttgcag

SEQ ID NO: 173599 - DNA, 25 bp, Probe sequence
aaatgagaagcaccacacctttatc

SEQ ID NO: 173600 - DNA, 25 bp, Probe sequence
aactgacgaattcaagctcaaacct

SEQ ID NO: 173601 - DNA, 25 bp, Probe sequence
aagctcaaaccttcgggatggtaca

SEQ ID NO: 173602 - DNA, 25 bp, Probe sequence
aatgttatctggaccgattgctttc

SEQ ID NO: 173603 - DNA, 25 bp, Probe sequence
cacagatcgttttatagaccccgcg

SEQ ID NO: 173604 - DNA, 25 bp, Probe sequence
ctctttcactggccaatcatcaaca

SEQ ID NO: 173605 - DNA, 25 bp, Probe sequence
gctttgcaattaccctccttaattg

SEQ ID NO: 173606 - DNA, 25 bp, Probe sequence
gcttcaatccttactgctttgcaat

SEQ ID NO: 173607 - DNA, 25 bp, Probe sequence
gaattatcagcggcaacatttcatg

SEQ ID NO: 173608 - DNA, 25 bp, Probe sequence
gaccagccttatttttctaatgaga

SEQ ID NO: 173609 - DNA, 25 bp, Probe sequence
gagcttgtcgaaaaggcttcaatcc

SEQ ID NO: 173610 - DNA, 25 bp, Probe sequence
gagatttagggttcgtactgcaaca

SEQ ID NO: 173611 - DNA, 25 bp, Probe sequence
gatggtacaaaaccatccctcctaa

SEQ ID NO: 173612 - DNA, 25 bp, Probe sequence
gatgtgttgtttggcgtatcttcat

SEQ ID NO: 173613 - DNA, 25 bp, Probe sequence
gttagccgcatcggtagctggcaac

SEQ ID NO: 173614 - DNA, 25 bp, Probe sequence
gtactgaaaacctattccggagttg

SEQ ID NO: 173615 - DNA, 25 bp, Probe sequence
gtcactgctttccttaagtatcata

SEQ ID NO: 173616 - DNA, 25 bp, Probe sequence
gtccatgggaacttatctttagaac

SEQ ID NO: 173617 - DNA, 25 bp, Probe sequence
ggtagctggcaacccaacaaaaggt

SEQ ID NO: 173618 - DNA, 25 bp, Probe sequence
ggaccgattgctttcacagatcgtt

SEQ ID NO: 173619 - DNA, 25 bp, Probe sequence
ggcgtatcttcattagtcactgctt

SEQ ID NO: 173620 - DNA, 25 bp, Probe sequence
tgcttcatacattacttggaccatt

SEQ ID NO: 173621 - DNA, 25 bp, Probe sequence
tcaacaggaaaatcgacagccgcta

SEQ ID NO: 173622 - DNA, 25 bp, Probe sequence
taacgtcgagttttcaggaactatt

SEQ ID NO: 173623 - DNA, 25 bp, Probe sequence
ttagcggaaattatggtgtacccat

SEQ ID NO: 173624 - DNA, 25 bp, Probe sequence
tactcaggtgtaggaatgcttcata

SEQ ID NO: 173625 - DNA, 25 bp, Probe sequence
tatagaccccgcgactcgtaaagaa

SEQ ID NO: 173626 - DNA, 25 bp, Probe sequence
attgcctgaaatttcgacctccagc

SEQ ID NO: 173627 - DNA, 25 bp, Probe sequence
atacaacgcaccccttatttagtag

SEQ ID NO: 173628 - DNA, 25 bp, Probe sequence
agagctgcgtgaacttacactcaga

SEQ ID NO: 173629 - DNA, 25 bp, Probe sequence
agcaagctcaaaaatcctctcgttt

SEQ ID NO: 173630 - DNA, 25 bp, Probe sequence
acaacactcaacatccaacatatcg

SEQ ID NO: 173631 - DNA, 25 bp, Probe sequence
aaaggtgtgatttctatccgcttca

SEQ ID NO: 173632 - DNA, 25 bp, Probe sequence
aaacgatctgtgtcttgctcggtat

SEQ ID NO: 173633 - DNA, 25 bp, Probe sequence
aacaccactgacttccattatgggc

SEQ ID NO: 173634 - DNA, 25 bp, Probe sequence
aactcttaactgcttcttatggcga

SEQ ID NO: 173635 - DNA, 25 bp, Probe sequence
aagccacacgttcaaacttcttgca

SEQ ID NO: 173636 - DNA, 25 bp, Probe sequence
aagcgaatccagtgccattatcttg

SEQ ID NO: 173637 - DNA, 25 bp, Probe sequence
aatcggattctttgcgtctatctta

SEQ ID NO: 173638 - DNA, 25 bp, Probe sequence
caagttacagaacgtgtgcccgacc

SEQ ID NO: 173639 - DNA, 25 bp, Probe sequence
cagccacacctttcactatatagat

SEQ ID NO: 173640 - DNA, 25 bp, Probe sequence
ccgcttcaccgacgaaacttacatc

SEQ ID NO: 173641 - DNA, 25 bp, Probe sequence
gcctcatacgcagacaccaagcaaa

SEQ ID NO: 173642 - DNA, 25 bp, Probe sequence
gcatattgcggtagctatcagcggc

SEQ ID NO: 173643 - DNA, 25 bp, Probe sequence
gcacaatatctgcataccttagtca

SEQ ID NO: 173644 - DNA, 25 bp, Probe sequence
gcaagtgctattcaaccttatcgat

SEQ ID NO: 173645 - DNA, 25 bp, Probe sequence
gaatatccgattacgtttgcgacca

SEQ ID NO: 173646 - DNA, 25 bp, Probe sequence
gacagtcagaacagccacgttggaa

SEQ ID NO: 173647 - DNA, 25 bp, Probe sequence
gacctccagccgtaaatttggcagc

SEQ ID NO: 173648 - DNA, 25 bp, Probe sequence
gacgcttcactcattaatatcgaca

SEQ ID NO: 173649 - DNA, 25 bp, Probe sequence
gtttgcgaccagtatttttgctagt

SEQ ID NO: 173650 - DNA, 25 bp, Probe sequence
gtaagaaagtcgctgcttccaactc

SEQ ID NO: 173651 - DNA, 25 bp, Probe sequence
gtgacgaagctagtccttggacagt

SEQ ID NO: 173652 - DNA, 25 bp, Probe sequence
gtgtattcccattggcacaaatcca

SEQ ID NO: 173653 - DNA, 25 bp, Probe sequence
ggtgtgatctcgcttttgtgacgaa

SEQ ID NO: 173654 - DNA, 25 bp, Probe sequence
tgcccgaccaattcattacgtcagc

SEQ ID NO: 173655 - DNA, 25 bp, Probe sequence
tcacgtaccacaccatttcaagtta

SEQ ID NO: 173656 - DNA, 25 bp, Probe sequence
tcaacgccctgaaaccaatgcactg

SEQ ID NO: 173657 - DNA, 25 bp, Probe sequence
taccgacattacaccgcatattgcg

SEQ ID NO: 173658 - DNA, 25 bp, Probe sequence
tagtatctttacgagtgccatctta

SEQ ID NO: 173659 - DNA, 25 bp, Probe sequence
tatcgtgctttctatttggacccaa

SEQ ID NO: 173660 - DNA, 25 bp, Probe sequence
atcaattcggtcagtatgcaatgtt

SEQ ID NO: 173661 - DNA, 25 bp, Probe sequence
atcgtgcaacatatgagtgggcctt

SEQ ID NO: 173662 - DNA, 25 bp, Probe sequence
atgcaatgttgttcttagcgcctac

SEQ ID NO: 173663 - DNA, 25 bp, Probe sequence
atgttaaacgtgcgctactcacact

SEQ ID NO: 173664 - DNA, 25 bp, Probe sequence
atgatttctgacacaatcttgcact

SEQ ID NO: 173665 - DNA, 25 bp, Probe sequence
aggtgtatctttaatcattggttta

SEQ ID NO: 173666 - DNA, 25 bp, Probe sequence
acttttcatcatctatcgtgcaaca

SEQ ID NO: 173667 - DNA, 25 bp, Probe sequence
acaggacaatatggtttaggcgaaa

SEQ ID NO: 173668 - DNA, 25 bp, Probe sequence
aaaaggcactgtagatgcattcgtt

SEQ ID NO: 173669 - DNA, 25 bp, Probe sequence
aatcattggtttagctcgtggaatc

SEQ ID NO: 173670 - DNA, 25 bp, Probe sequence
aatcttgcacttttcatcatctatc

SEQ ID NO: 173671 - DNA, 25 bp, Probe sequence
aatctttaccattgtcatcatgttt

SEQ ID NO: 173672 - DNA, 25 bp, Probe sequence
ctactcacactggttacgtttcgta

SEQ ID NO: 173673 - DNA, 25 bp, Probe sequence
cctgttgtcgcgtttgttttaatat

SEQ ID NO: 173674 - DNA, 25 bp, Probe sequence
gacacaaggatggtggttcccagtc

SEQ ID NO: 173675 - DNA, 25 bp, Probe sequence
gagtgggcctttatttatcattgtt

SEQ ID NO: 173676 - DNA, 25 bp, Probe sequence
gaggcttactcattacacaagtttt

SEQ ID NO: 173677 - DNA, 25 bp, Probe sequence
gatgcattcgttaatggcgcttcaa

SEQ ID NO: 173678 - DNA, 25 bp, Probe sequence
gttacaacatatcaattcggtcagt

SEQ ID NO: 173679 - DNA, 25 bp, Probe sequence
gtaccatcatcatcaggattagcag

SEQ ID NO: 173680 - DNA, 25 bp, Probe sequence
gtcatcatgtttattgctggaacag

SEQ ID NO: 173681 - DNA, 25 bp, Probe sequence
ggatttatcgtaccatcatcatcag

SEQ ID NO: 173682 - DNA, 25 bp, Probe sequence
ggacttgtaatggcaacacttcaaa

SEQ ID NO: 173683 - DNA, 25 bp, Probe sequence
ggcatctgcattcttaatctttacc

SEQ ID NO: 173684 - DNA, 25 bp, Probe sequence
tctttttctgtttaggatttatcgt

SEQ ID NO: 173685 - DNA, 25 bp, Probe sequence
tctttgcgccattagctgatacagt

SEQ ID NO: 173686 - DNA, 25 bp, Probe sequence
taatggcgcttcaagtttagtaggt

SEQ ID NO: 173687 - DNA, 25 bp, Probe sequence
tagctcgtggaatcaacttagtatt

SEQ ID NO: 173688 - DNA, 25 bp, Probe sequence
tattatctatgcctatctttgcgcc

SEQ ID NO: 173689 - DNA, 25 bp, Probe sequence
tttggtggaggcttactcattacac

SEQ ID NO: 173690 - DNA, 25 bp, Probe sequence
ttcttagcgcctactggacttgtaa

SEQ ID NO: 173691 - DNA, 25 bp, Probe sequence
ttatcattgttctgctctttatctt

SEQ ID NO: 173692 - DNA, 25 bp, Probe sequence
ttacgtttcgtatggcctgttgtcg

SEQ ID NO: 173693 - DNA, 25 bp, Probe sequence
ttcccagtcatggcatctgcattct

SEQ ID NO: 173694 - DNA, 25 bp, Probe sequence
atagcgacaaacaatcaggacgcaa

SEQ ID NO: 173695 - DNA, 25 bp, Probe sequence
atcaaaatcaacgcatctacacaaa

SEQ ID NO: 173696 - DNA, 25 bp, Probe sequence
agtcataggctatttacgtcaaagt

SEQ ID NO: 173697 - DNA, 25 bp, Probe sequence
agaaaaacatcacacattgactcaa

SEQ ID NO: 173698 - DNA, 25 bp, Probe sequence
agaatcatacattacgttactacgt

SEQ ID NO: 173699 - DNA, 25 bp, Probe sequence
aaaaatcaaatgcccatgttgtaat

SEQ ID NO: 173700 - DNA, 25 bp, Probe sequence
aacaatctcttgcagcacagaaaca

SEQ ID NO: 173701 - DNA, 25 bp, Probe sequence
aacacgtatatcaatcgacaaccct

SEQ ID NO: 173702 - DNA, 25 bp, Probe sequence
aaggcatcaatgcacaaacacttga

SEQ ID NO: 173703 - DNA, 25 bp, Probe sequence
aattcgacaatatgtttccttctat

SEQ ID NO: 173704 - DNA, 25 bp, Probe sequence
cagcttggccgaacttgaatcagat

SEQ ID NO: 173705 - DNA, 25 bp, Probe sequence
catcaatcaaaatgagtcaccaacg

SEQ ID NO: 173706 - DNA, 25 bp, Probe sequence
cgctttgtctgtgattttaaaggca

SEQ ID NO: 173707 - DNA, 25 bp, Probe sequence
ccgcaacgcactacatctatcaatg

SEQ ID NO: 173708 - DNA, 25 bp, Probe sequence
ccatgcgccctttggttacgaatat

SEQ ID NO: 173709 - DNA, 25 bp, Probe sequence
gcgccctttggttacgaatatcaca

SEQ ID NO: 173710 - DNA, 25 bp, Probe sequence
tcgacaaccctatcaagttcgtaac

SEQ ID NO: 173711 - DNA, 25 bp, Probe sequence
gcgattgacaaacgcatcaaaagac

SEQ ID NO: 173712 - DNA, 25 bp, Probe sequence
gcaatcattacgtcaacaaccgcaa

SEQ ID NO: 173713 - DNA, 25 bp, Probe sequence
gttactacgtctgtcctaaaaacat

SEQ ID NO: 173714 - DNA, 25 bp, Probe sequence
gaacaagtcagaaatgggcttcaag

SEQ ID NO: 173715 - DNA, 25 bp, Probe sequence
gaaacaacaatctcttgcagcacag

SEQ ID NO: 173716 - DNA, 25 bp, Probe sequence
gataatcgtagtgggtatcgacaaa

SEQ ID NO: 173717 - DNA, 25 bp, Probe sequence
gtttccacaagtatatatgagcaag

SEQ ID NO: 173718 - DNA, 25 bp, Probe sequence
gtcaccaacggtaaaggctgtattc

SEQ ID NO: 173719 - DNA, 25 bp, Probe sequence
gtcgattgattacaacccatgcgcc

SEQ ID NO: 173720 - DNA, 25 bp, Probe sequence
tgtttccttctattgtttccacaag

SEQ ID NO: 173721 - DNA, 25 bp, Probe sequence
tgatatggatcaagctttcgaccga

SEQ ID NO: 173722 - DNA, 25 bp, Probe sequence
tcaacatatcaacttttatagcgac

SEQ ID NO: 173723 - DNA, 25 bp, Probe sequence
tagaaaagttggcacaaggcatcat

SEQ ID NO: 173724 - DNA, 25 bp, Probe sequence
tatgagcaagcgcagagacttcgat

SEQ ID NO: 173725 - DNA, 25 bp, Probe sequence
tttcgaccgattcaagcttaatatt

SEQ ID NO: 173726 - DNA, 25 bp, Probe sequence
ttacgtcaacaaccgcaacgcacta

SEQ ID NO: 173727 - DNA, 25 bp, Probe sequence
ttcagagaacaaacgcaatcattac

SEQ ID NO: 173728 - DNA, 25 bp, Probe sequence
atacgctgaccgtggtatttcaggt

SEQ ID NO: 173729 - DNA, 25 bp, Probe sequence
attcgagtcctatgccaaaggccat

SEQ ID NO: 173730 - DNA, 25 bp, Probe sequence
atacttgcgagtttctcagaattcg

SEQ ID NO: 173731 - DNA, 25 bp, Probe sequence
atcaagttgatggcgctgcacttca

SEQ ID NO: 173732 - DNA, 25 bp, Probe sequence
aggaacgaatctgcttacaggcatt

SEQ ID NO: 173733 - DNA, 25 bp, Probe sequence
acaactcgacgaagtgcatctcagc

SEQ ID NO: 173734 - DNA, 25 bp, Probe sequence
acaattctatgtcacactcaaactt

SEQ ID NO: 173735 - DNA, 25 bp, Probe sequence
aaacgtattcgttactattcatgta

SEQ ID NO: 173736 - DNA, 25 bp, Probe sequence
aactattacaacacatctttcatga

SEQ ID NO: 173737 - DNA, 25 bp, Probe sequence
aacgcgtagtaacacacgtcaatca

SEQ ID NO: 173738 - DNA, 25 bp, Probe sequence
aagctcatgttacaaatacttgcga

SEQ ID NO: 173739 - DNA, 25 bp, Probe sequence
aatctcgactcaaagcattgtatct

SEQ ID NO: 173740 - DNA, 25 bp, Probe sequence
aatctatgaatcgacctgagctcca

SEQ ID NO: 173741 - DNA, 25 bp, Probe sequence
aatacttcatcgggtaagctcatgt

SEQ ID NO: 173742 - DNA, 25 bp, Probe sequence
aatttttcagtttatcagagcgtat

SEQ ID NO: 173743 - DNA, 25 bp, Probe sequence
caagggttccaaagtatgttcggca

SEQ ID NO: 173744 - DNA, 25 bp, Probe sequence
cgaggataatccggacttaacatca

SEQ ID NO: 173745 - DNA, 25 bp, Probe sequence
cgacctgagctccaacgtatattga

SEQ ID NO: 173746 - DNA, 25 bp, Probe sequence
cgcacctatggcagcaagcaatacc

SEQ ID NO: 173747 - DNA, 25 bp, Probe sequence
gcgctgcacttcatcacgatattgc

SEQ ID NO: 173748 - DNA, 25 bp, Probe sequence
gctcgtaatacatctgatcttctca

SEQ ID NO: 173749 - DNA, 25 bp, Probe sequence
gcagcaagcaataccacgaatacac

SEQ ID NO: 173750 - DNA, 25 bp, Probe sequence
gaatactgtgacttccatcattttg

SEQ ID NO: 173751 - DNA, 25 bp, Probe sequence
gaagataagcctttatttgatgcca

SEQ ID NO: 173752 - DNA, 25 bp, Probe sequence
gataaagtcattcaacgcgtagtaa

SEQ ID NO: 173753 - DNA, 25 bp, Probe sequence
gtatctatcagtgattgatcgcatt

SEQ ID NO: 173754 - DNA, 25 bp, Probe sequence
gtcaaaaaccccaagtccatggcaa

SEQ ID NO: 173755 - DNA, 25 bp, Probe sequence
gggtcaaacgagacgtgcccaagaa

SEQ ID NO: 173756 - DNA, 25 bp, Probe sequence
ggctatatcgactgtgttatggtct

SEQ ID NO: 173757 - DNA, 25 bp, Probe sequence
taagcattcccccattattaatcaa

SEQ ID NO: 173758 - DNA, 25 bp, Probe sequence
tacaggcattattcactgtccccaa

SEQ ID NO: 173759 - DNA, 25 bp, Probe sequence
tagctaacccattctatatcggcaa

SEQ ID NO: 173760 - DNA, 25 bp, Probe sequence
ttacgaatcaaatcaaccaactcaa

SEQ ID NO: 173761 - DNA, 25 bp, Probe sequence
ttgccccaaacactatatcttacta

SEQ ID NO: 173762 - DNA, 25 bp, Probe sequence
atacctactacaataatgaactaca

SEQ ID NO: 173763 - DNA, 25 bp, Probe sequence
atctgaatcattttgacatggactt

SEQ ID NO: 173764 - DNA, 25 bp, Probe sequence
atcgatgaacgtcatttactaagag

SEQ ID NO: 173765 - DNA, 25 bp, Probe sequence
atgaactacatgacctaagtatcta

SEQ ID NO: 173766 - DNA, 25 bp, Probe sequence
atggactttttatatctcacagata

SEQ ID NO: 173767 - DNA, 25 bp, Probe sequence
agagaaggagggactcaccatgaat

SEQ ID NO: 173768 - DNA, 25 bp, Probe sequence
agaaggagggactcaccatgaataa

SEQ ID NO: 173769 - DNA, 25 bp, Probe sequence
agcgttggttatctgaatcattttg

SEQ ID NO: 173770 - DNA, 25 bp, Probe sequence
actcatcagcgttggttatctgaat

SEQ ID NO: 173771 - DNA, 25 bp, Probe sequence
acttgcacatcttacacttgaaact

SEQ ID NO: 173772 - DNA, 25 bp, Probe sequence
caactcatcagcgttggttatctga

SEQ ID NO: 173773 - DNA, 25 bp, Probe sequence
cacttgaaacttatacctactacaa

SEQ ID NO: 173774 - DNA, 25 bp, Probe sequence
cacttgcacatcttacacttgaaac

SEQ ID NO: 173775 - DNA, 25 bp, Probe sequence
ccatttcttatgtacgctaataacc

SEQ ID NO: 173776 - DNA, 25 bp, Probe sequence
gcagaaaatattctaccggaacgtt

SEQ ID NO: 173777 - DNA, 25 bp, Probe sequence
gcagcagaaaatattctaccggaac

SEQ ID NO: 173778 - DNA, 25 bp, Probe sequence
gcacatcttacacttgaaacttata

SEQ ID NO: 173779 - DNA, 25 bp, Probe sequence
gaatcattttgacatggacttttta

SEQ ID NO: 173780 - DNA, 25 bp, Probe sequence
gaacgtcatttactaagagaaggag

SEQ ID NO: 173781 - DNA, 25 bp, Probe sequence
gaaacttatacctactacaataatg

SEQ ID NO: 173782 - DNA, 25 bp, Probe sequence
gacatggactttttatatctcacag

SEQ ID NO: 173783 - DNA, 25 bp, Probe sequence
gactttttatatctcacagatacta

SEQ ID NO: 173784 - DNA, 25 bp, Probe sequence
gttggttatctgaatcattttgaca

SEQ ID NO: 173785 - DNA, 25 bp, Probe sequence
gttttattaatgattccccacttgc

SEQ ID NO: 173786 - DNA, 25 bp, Probe sequence
ggttatctgaatcattttgacatgg

SEQ ID NO: 173787 - DNA, 25 bp, Probe sequence
tctaccggaacgttttattaatgat

SEQ ID NO: 173788 - DNA, 25 bp, Probe sequence
tctatccatttcttatgtacgctaa

SEQ ID NO: 173789 - DNA, 25 bp, Probe sequence
tatgtacgctaataaccaactcatc

SEQ ID NO: 173790 - DNA, 25 bp, Probe sequence
tatccatttcttatgtacgctaata

SEQ ID NO: 173791 - DNA, 25 bp, Probe sequence
tatctatccatttcttatgtacgct

SEQ ID NO: 173792 - DNA, 25 bp, Probe sequence
tattaatgattccccacttgcacat

SEQ ID NO: 173793 - DNA, 25 bp, Probe sequence
tttattaatgattccccacttgcac

SEQ ID NO: 173794 - DNA, 25 bp, Probe sequence
ttattaatgattccccacttgcaca

SEQ ID NO: 173795 - DNA, 25 bp, Probe sequence
ttgcacatcttacacttgaaactta

SEQ ID NO: 173796 - DNA, 25 bp, Probe sequence
attggttatccaaagggtgcacaaa

SEQ ID NO: 173797 - DNA, 25 bp, Probe sequence
atccaaagggtgcacaaacaaaata

SEQ ID NO: 173798 - DNA, 25 bp, Probe sequence
atttcacaccacaattaaaagaatt

SEQ ID NO: 173799 - DNA, 25 bp, Probe sequence
atttgatgcgtatgcacaaccaggt

SEQ ID NO: 173800 - DNA, 25 bp, Probe sequence
atgcgtatgcacaaccaggtaattc

SEQ ID NO: 173801 - DNA, 25 bp, Probe sequence
atgcaggtagtggaaaagatgaatc

SEQ ID NO: 173802 - DNA, 25 bp, Probe sequence
aggatctcctgtattgaattctaaa

SEQ ID NO: 173803 - DNA, 25 bp, Probe sequence
agaagaccttgcgatagttcatgtt

SEQ ID NO: 173804 - DNA, 25 bp, Probe sequence
agaatttctgttattggttatccaa

SEQ ID NO: 173805 - DNA, 25 bp, Probe sequence
accaggtaattcaggatctcctgta

SEQ ID NO: 173806 - DNA, 25 bp, Probe sequence
accttgcgatagttcatgttcatga

SEQ ID NO: 173807 - DNA, 25 bp, Probe sequence
acaaccaggtaattcaggatctcct

SEQ ID NO: 173808 - DNA, 25 bp, Probe sequence
aaaatgtttgaatcgacaggaacga

SEQ ID NO: 173809 - DNA, 25 bp, Probe sequence
aagaccttgcgatagttcatgttca

SEQ ID NO: 173810 - DNA, 25 bp, Probe sequence
caatcgtaactaacaaacatatcgc

SEQ ID NO: 173811 - DNA, 25 bp, Probe sequence
caggatctcctgtattgaattctaa

SEQ ID NO: 173812 - DNA, 25 bp, Probe sequence
ccttgcgatagttcatgttcatgaa

SEQ ID NO: 173813 - DNA, 25 bp, Probe sequence
gcgtatgcacaaccaggtaattcag

SEQ ID NO: 173814 - DNA, 25 bp, Probe sequence
gcacaaccaggtaattcaggatctc

SEQ ID NO: 173815 - DNA, 25 bp, Probe sequence
gaatttcggtgtttatttcacacca

SEQ ID NO: 173816 - DNA, 25 bp, Probe sequence
gaatttctgttattggttatccaaa

SEQ ID NO: 173817 - DNA, 25 bp, Probe sequence
gaatttgatgcgtatgcacaaccag

SEQ ID NO: 173818 - DNA, 25 bp, Probe sequence
gaatctgaaaagaatttcggtgttt

SEQ ID NO: 173819 - DNA, 25 bp, Probe sequence
gaccttgcgatagttcatgttcatg

SEQ ID NO: 173820 - DNA, 25 bp, Probe sequence
gatgcgtatgcacaaccaggtaatt

SEQ ID NO: 173821 - DNA, 25 bp, Probe sequence
gtttatttcacaccacaattaaaag

SEQ ID NO: 173822 - DNA, 25 bp, Probe sequence
gtgtttatttcacaccacaattaaa

SEQ ID NO: 173823 - DNA, 25 bp, Probe sequence
ggtaattcaggatctcctgtattga

SEQ ID NO: 173824 - DNA, 25 bp, Probe sequence
ggttatccaaagggtgcacaaacaa

SEQ ID NO: 173825 - DNA, 25 bp, Probe sequence
ggaaaagaagaccttgcgatagttc

SEQ ID NO: 173826 - DNA, 25 bp, Probe sequence
tcgtaactaacaaacatatcgctaa

SEQ ID NO: 173827 - DNA, 25 bp, Probe sequence
taacaaacatatcgctaaaagtaat

SEQ ID NO: 173828 - DNA, 25 bp, Probe sequence
tttcggtgtttatttcacaccacaa

SEQ ID NO: 173829 - DNA, 25 bp, Probe sequence
ttcatgttcatgaaacaagtacaga

SEQ ID NO: 173830 - DNA, 25 bp, Probe sequence
atgttacatttgaagcattaagttc

SEQ ID NO: 173831 - DNA, 25 bp, Probe sequence
atgtacgaagtaagaagtgacatcg

SEQ ID NO: 173832 - DNA, 25 bp, Probe sequence
atggcaacgatgtacgaagtaagaa

SEQ ID NO: 173833 - DNA, 25 bp, Probe sequence
agtgacatcgttgcttttattttta

SEQ ID NO: 173834 - DNA, 25 bp, Probe sequence
agtaagaagtgacatcgttgctttt

SEQ ID NO: 173835 - DNA, 25 bp, Probe sequence
agaagtgacatcgttgcttttattt

SEQ ID NO: 173836 - DNA, 25 bp, Probe sequence
acgaagtaagaagtgacatcgttgc

SEQ ID NO: 173837 - DNA, 25 bp, Probe sequence
acgatgtacgaagtaagaagtgaca

SEQ ID NO: 173838 - DNA, 25 bp, Probe sequence
acatttgaagcattaagttcatcat

SEQ ID NO: 173839 - DNA, 25 bp, Probe sequence
aaatcgcctctgctagacaatcatc

SEQ ID NO: 173840 - DNA, 25 bp, Probe sequence
aacgatgtacgaagtaagaagtgac

SEQ ID NO: 173841 - DNA, 25 bp, Probe sequence
aagaagtgacatcgttgcttttatt

SEQ ID NO: 173842 - DNA, 25 bp, Probe sequence
aagtaagaagtgacatcgttgcttt

SEQ ID NO: 173843 - DNA, 25 bp, Probe sequence
aagtgacatcgttgcttttattttt

SEQ ID NO: 173844 - DNA, 25 bp, Probe sequence
aatcgcctctgctagacaatcatct

SEQ ID NO: 173845 - DNA, 25 bp, Probe sequence
caacgatgtacgaagtaagaagtga

SEQ ID NO: 173846 - DNA, 25 bp, Probe sequence
caaatcgcctctgctagacaatcat

SEQ ID NO: 173847 - DNA, 25 bp, Probe sequence
cgaagtaagaagtgacatcgttgct

SEQ ID NO: 173848 - DNA, 25 bp, Probe sequence
cgatgtacgaagtaagaagtgacat

SEQ ID NO: 173849 - DNA, 25 bp, Probe sequence
cgcaaatcgcctctgctagacaatc

SEQ ID NO: 173850 - DNA, 25 bp, Probe sequence
gcaaatcgcctctgctagacaatca

SEQ ID NO: 173851 - DNA, 25 bp, Probe sequence
gcaacgatgtacgaagtaagaagtg

SEQ ID NO: 173852 - DNA, 25 bp, Probe sequence
gaagtgacatcgttgcttttatttt

SEQ ID NO: 173853 - DNA, 25 bp, Probe sequence
gaagtaagaagtgacatcgttgctt

SEQ ID NO: 173854 - DNA, 25 bp, Probe sequence
gttacatttgaagcattaagttcat

SEQ ID NO: 173855 - DNA, 25 bp, Probe sequence
gtacgaagtaagaagtgacatcgtt

SEQ ID NO: 173856 - DNA, 25 bp, Probe sequence
gtaagaagtgacatcgttgctttta

SEQ ID NO: 173857 - DNA, 25 bp, Probe sequence
ggcaacgatgtacgaagtaagaagt

SEQ ID NO: 173858 - DNA, 25 bp, Probe sequence
tggcaacgatgtacgaagtaagaag

SEQ ID NO: 173859 - DNA, 25 bp, Probe sequence
tgttacatttgaagcattaagttca

SEQ ID NO: 173860 - DNA, 25 bp, Probe sequence
taagaagtgacatcgttgcttttat

SEQ ID NO: 173861 - DNA, 25 bp, Probe sequence
tacatttgaagcattaagttcatca

SEQ ID NO: 173862 - DNA, 25 bp, Probe sequence
tacgaagtaagaagtgacatcgttg

SEQ ID NO: 173863 - DNA, 25 bp, Probe sequence
ttacatttgaagcattaagttcatc

SEQ ID NO: 173864 - DNA, 25 bp, Probe sequence
attattatcacgttgctattagcag

SEQ ID NO: 173865 - DNA, 25 bp, Probe sequence
atctatattattatcacgttgctat

SEQ ID NO: 173866 - DNA, 25 bp, Probe sequence
atggaatggtcgacaaataagtttg

SEQ ID NO: 173867 - DNA, 25 bp, Probe sequence
agtgcttggagatcattcgtggttc

SEQ ID NO: 173868 - DNA, 25 bp, Probe sequence
agatgtaatggctattgttgtcgga

SEQ ID NO: 173869 - DNA, 25 bp, Probe sequence
agaaaatattggtcactttaatcat

SEQ ID NO: 173870 - DNA, 25 bp, Probe sequence
agcatcaattaatttattgtggcat

SEQ ID NO: 173871 - DNA, 25 bp, Probe sequence
aacacttatgtttataggcgtatca

SEQ ID NO: 173872 - DNA, 25 bp, Probe sequence
aacgtctatcaagttatcaattttg

SEQ ID NO: 173873 - DNA, 25 bp, Probe sequence
aatggctattgttgtcggagtttta

SEQ ID NO: 173874 - DNA, 25 bp, Probe sequence
cagccatatgtattctattagcatc

SEQ ID NO: 173875 - DNA, 25 bp, Probe sequence
cgctcacatttgtacccattattgt

SEQ ID NO: 173876 - DNA, 25 bp, Probe sequence
gctattagcagttttactctttaaa

SEQ ID NO: 173877 - DNA, 25 bp, Probe sequence
gcatcaatgatttttacttatacta

SEQ ID NO: 173878 - DNA, 25 bp, Probe sequence
gaaattttctaagcaagcgctcaca

SEQ ID NO: 173879 - DNA, 25 bp, Probe sequence
gttacgtttatatgtttatcgaagg

SEQ ID NO: 173880 - DNA, 25 bp, Probe sequence
gttttaatgcaattacatcgctatt

SEQ ID NO: 173881 - DNA, 25 bp, Probe sequence
gtttatcgaagggagtataccagtt

SEQ ID NO: 173882 - DNA, 25 bp, Probe sequence
gtttattttggattagaagtgcttg

SEQ ID NO: 173883 - DNA, 25 bp, Probe sequence
gtttgtttacagcgagttttaatgc

SEQ ID NO: 173884 - DNA, 25 bp, Probe sequence
gggagtataccagttacattaacat

SEQ ID NO: 173885 - DNA, 25 bp, Probe sequence
ggttctatttaccaatcacatatgc

SEQ ID NO: 173886 - DNA, 25 bp, Probe sequence
ggagcggtagaacaattaaagatta

SEQ ID NO: 173887 - DNA, 25 bp, Probe sequence
ggagatcattcgtggttctatttac

SEQ ID NO: 173888 - DNA, 25 bp, Probe sequence
tggtcactttaatcatattttagga

SEQ ID NO: 173889 - DNA, 25 bp, Probe sequence
tgttgtcggagttttaatgtttatt

SEQ ID NO: 173890 - DNA, 25 bp, Probe sequence
tctatttaccaatcacatatgctac

SEQ ID NO: 173891 - DNA, 25 bp, Probe sequence
taatttctataaacgtctatcaagt

SEQ ID NO: 173892 - DNA, 25 bp, Probe sequence
taagcaagcgctcacatttgtaccc

SEQ ID NO: 173893 - DNA, 25 bp, Probe sequence
tacatcgctattaatttctataaac

SEQ ID NO: 173894 - DNA, 25 bp, Probe sequence
tacccattattgtaaccatattgtt

SEQ ID NO: 173895 - DNA, 25 bp, Probe sequence
tataggcgtatcattgtttttcaat

SEQ ID NO: 173896 - DNA, 25 bp, Probe sequence
ttattgtggcattcacatgatatga

SEQ ID NO: 173897 - DNA, 25 bp, Probe sequence
ttacttatactattacagccatatg

SEQ ID NO: 173898 - DNA, 25 bp, Probe sequence
atataactctgatgtttttgatggg

SEQ ID NO: 173899 - DNA, 25 bp, Probe sequence
ataataatcgattgaccgaagagaa

SEQ ID NO: 173900 - DNA, 25 bp, Probe sequence
atcaatttatggctagacggtaaac

SEQ ID NO: 173901 - DNA, 25 bp, Probe sequence
atgtgcgggtggtacaccaaacaaa

SEQ ID NO: 173902 - DNA, 25 bp, Probe sequence
catacttctacagaaccttcggtta

SEQ ID NO: 173903 - DNA, 25 bp, Probe sequence
atggctagacggtaaacaaaataca

SEQ ID NO: 173904 - DNA, 25 bp, Probe sequence
aactctgatgtttttgatgggaagg

SEQ ID NO: 173905 - DNA, 25 bp, Probe sequence
aacgattaactctgaaaacatgcat

SEQ ID NO: 173906 - DNA, 25 bp, Probe sequence
aatcgtgtttcatacttctacagaa

SEQ ID NO: 173907 - DNA, 25 bp, Probe sequence
caagcaagacgttatttacaggaaa

SEQ ID NO: 173908 - DNA, 25 bp, Probe sequence
cacgatcaatttttacagcatacta

SEQ ID NO: 173909 - DNA, 25 bp, Probe sequence
cagctttaggcaatcttaaacaaat

SEQ ID NO: 173910 - DNA, 25 bp, Probe sequence
cagaggggattaatcgtgtttcata

SEQ ID NO: 173911 - DNA, 25 bp, Probe sequence
cttcaagcaagacgttatttacagg

SEQ ID NO: 173912 - DNA, 25 bp, Probe sequence
cgtgtttcatacttctacagaacct

SEQ ID NO: 173913 - DNA, 25 bp, Probe sequence
gcatactatattgtttaaaggcttt

SEQ ID NO: 173914 - DNA, 25 bp, Probe sequence
gaaggttcagaggggattaatcgtg

SEQ ID NO: 173915 - DNA, 25 bp, Probe sequence
gagagtcacgatcaatttttacagc

SEQ ID NO: 173916 - DNA, 25 bp, Probe sequence
gatgtttttgatgggaaggttcaga

SEQ ID NO: 173917 - DNA, 25 bp, Probe sequence
gatcaatttttacagcatactatat

SEQ ID NO: 173918 - DNA, 25 bp, Probe sequence
gatttattagtagattttgattcaa

SEQ ID NO: 173919 - DNA, 25 bp, Probe sequence
gttggatcttcaagcaagacgttat

SEQ ID NO: 173920 - DNA, 25 bp, Probe sequence
gttcaggagttggatcttcaagcaa

SEQ ID NO: 173921 - DNA, 25 bp, Probe sequence
gtttcatacttctacagaaccttcg

SEQ ID NO: 173922 - DNA, 25 bp, Probe sequence
gtaactgttcaggagttggatcttc

SEQ ID NO: 173923 - DNA, 25 bp, Probe sequence
gtcacgatcaatttttacagcatac

SEQ ID NO: 173924 - DNA, 25 bp, Probe sequence
ggtggtacaccaaacaaaacagctt

SEQ ID NO: 173925 - DNA, 25 bp, Probe sequence
ggagttggatcttcaagcaagacgt

SEQ ID NO: 173926 - DNA, 25 bp, Probe sequence
ggcaatcttaaacaaatctattatt

SEQ ID NO: 173927 - DNA, 25 bp, Probe sequence
tcggttaattacgatttatttggtg

SEQ ID NO: 173928 - DNA, 25 bp, Probe sequence
tacagaaccttcggttaattacgat

SEQ ID NO: 173929 - DNA, 25 bp, Probe sequence
tacttctacagaaccttcggttaat

SEQ ID NO: 173930 - DNA, 25 bp, Probe sequence
tatggttatcaatgtgcgggtggta

SEQ ID NO: 173931 - DNA, 25 bp, Probe sequence
tatcaatgtgcgggtggtacaccaa

SEQ ID NO: 173932 - DNA, 25 bp, Probe sequence
attcatcaacacatcgaggtccgtc

SEQ ID NO: 173933 - DNA, 25 bp, Probe sequence
attacgtggattctacgacacatga

SEQ ID NO: 173934 - DNA, 25 bp, Probe sequence
ataacgatgctcccaaatattgtgc

SEQ ID NO: 173935 - DNA, 25 bp, Probe sequence
atctcagatagtgatccgcttctac

SEQ ID NO: 173936 - DNA, 25 bp, Probe sequence
ctggcgaacctgtttgccagacccg

SEQ ID NO: 173937 - DNA, 25 bp, Probe sequence
agctcggtttctcttggatacttaa

SEQ ID NO: 173938 - DNA, 25 bp, Probe sequence
acatcgaggtccgtctgaactttgc

SEQ ID NO: 173939 - DNA, 25 bp, Probe sequence
aaagattgaaaatccgcaccctcta

SEQ ID NO: 173940 - DNA, 25 bp, Probe sequence
aacatcatagacacgccaggacata

SEQ ID NO: 173941 - DNA, 25 bp, Probe sequence
aagagcctacagtcatttatatgga

SEQ ID NO: 173942 - DNA, 25 bp, Probe sequence
caacgtcttgcatatatacgccttt

SEQ ID NO: 173943 - DNA, 25 bp, Probe sequence
ctctgttccctctttatcatggaag

SEQ ID NO: 173944 - DNA, 25 bp, Probe sequence
ctcgtatattatttcatgcacttag

SEQ ID NO: 173945 - DNA, 25 bp, Probe sequence
gccagacccgtcgtctaaatagtcg

SEQ ID NO: 173946 - DNA, 25 bp, Probe sequence
gcagattttcggatgcttactccta

SEQ ID NO: 173947 - DNA, 25 bp, Probe sequence
gcaccacaggaatatctttcacggg

SEQ ID NO: 173948 - DNA, 25 bp, Probe sequence
gcaccctctactacaaacaactgtt

SEQ ID NO: 173949 - DNA, 25 bp, Probe sequence
gacaggaataacctcttttcagtgg

SEQ ID NO: 173950 - DNA, 25 bp, Probe sequence
gagaaatgttgcttgatgccctttt

SEQ ID NO: 173951 - DNA, 25 bp, Probe sequence
gatgcccttttggaaatctcagata

SEQ ID NO: 173952 - DNA, 25 bp, Probe sequence
gattcccacaatcttttttatcaat

SEQ ID NO: 173953 - DNA, 25 bp, Probe sequence
gtatcaccgcttccgttgggaagtg

SEQ ID NO: 173954 - DNA, 25 bp, Probe sequence
gtacggtttatactatagccctgtt

SEQ ID NO: 173955 - DNA, 25 bp, Probe sequence
gtgtgacgaactttaccgaatctga

SEQ ID NO: 173956 - DNA, 25 bp, Probe sequence
gtgatccgcttctacgatattacgt

SEQ ID NO: 173957 - DNA, 25 bp, Probe sequence
ggatatcaggttaccactggcgaac

SEQ ID NO: 173958 - DNA, 25 bp, Probe sequence
ggatgcttactcctattgtactgga

SEQ ID NO: 173959 - DNA, 25 bp, Probe sequence
ggagaaattcctgctcgatgtattc

SEQ ID NO: 173960 - DNA, 25 bp, Probe sequence
tggggcaattctactgatttctgca

SEQ ID NO: 173961 - DNA, 25 bp, Probe sequence
tcctttctgggcttccattggttta

SEQ ID NO: 173962 - DNA, 25 bp, Probe sequence
taccattcacatcgaagtgccgcca

SEQ ID NO: 173963 - DNA, 25 bp, Probe sequence
tagccctgttagtactccagcagat

SEQ ID NO: 173964 - DNA, 25 bp, Probe sequence
ttcagaattgttctctgttccctct

SEQ ID NO: 173965 - DNA, 25 bp, Probe sequence
ttggtttatctgtatcaccgcttcc

SEQ ID NO: 173966 - DNA, 25 bp, Probe sequence
tgggtgttgccgtgggggataatgc

SEQ ID NO: 173967 - DNA, 25 bp, Probe sequence
attgttagcatcattattttcgcga

SEQ ID NO: 173968 - DNA, 25 bp, Probe sequence
attaactcgatactttggtgtgttc

SEQ ID NO: 173969 - DNA, 25 bp, Probe sequence
attattgcttatataggtgacctaa

SEQ ID NO: 173970 - DNA, 25 bp, Probe sequence
atctctaccattgataccgctcaac

SEQ ID NO: 173971 - DNA, 25 bp, Probe sequence
atcccgattgtattatgtatggctt

SEQ ID NO: 173972 - DNA, 25 bp, Probe sequence
actttggtgtgttcgtatcaatatt

SEQ ID NO: 173973 - DNA, 25 bp, Probe sequence
aatcccgcttattacgcttggtata

SEQ ID NO: 173974 - DNA, 25 bp, Probe sequence
aatactttaatgatctcaatgcctt

SEQ ID NO: 173975 - DNA, 25 bp, Probe sequence
aattctttcagtatgtatgttttat

SEQ ID NO: 173976 - DNA, 25 bp, Probe sequence
aattgctttcatcccgattgtatta

SEQ ID NO: 173977 - DNA, 25 bp, Probe sequence
cagtcatttgtgtcttgtttttaac

SEQ ID NO: 173978 - DNA, 25 bp, Probe sequence
catttttggtacattgctttttagt

SEQ ID NO: 173979 - DNA, 25 bp, Probe sequence
gctattttcacagtcttattcgcca

SEQ ID NO: 173980 - DNA, 25 bp, Probe sequence
gcatcattattttcgcgatagtaac

SEQ ID NO: 173981 - DNA, 25 bp, Probe sequence
gaagagtttattttgggtgttgccg

SEQ ID NO: 173982 - DNA, 25 bp, Probe sequence
gagcaaagattttcattttatcaat

SEQ ID NO: 173983 - DNA, 25 bp, Probe sequence
gatctcaatgccttatatatttcga

SEQ ID NO: 173984 - DNA, 25 bp, Probe sequence
gataccgctcaactttttattaact

SEQ ID NO: 173985 - DNA, 25 bp, Probe sequence
gttgatgtatgtagtatctctacca

SEQ ID NO: 173986 - DNA, 25 bp, Probe sequence
gttttattaataagtccgctggtat

SEQ ID NO: 173987 - DNA, 25 bp, Probe sequence
gtattatcagtcatttgtgtcttgt

SEQ ID NO: 173988 - DNA, 25 bp, Probe sequence
gtatttctttgttttgctattttca

SEQ ID NO: 173989 - DNA, 25 bp, Probe sequence
gtatggcttgtaattcgttatttaa

SEQ ID NO: 173990 - DNA, 25 bp, Probe sequence
gtccgctggtatttctttgttttgc

SEQ ID NO: 173991 - DNA, 25 bp, Probe sequence
gtgtgtcaccatatataactttact

SEQ ID NO: 173992 - DNA, 25 bp, Probe sequence
gggaacagcgaatagtgtgtcacca

SEQ ID NO: 173993 - DNA, 25 bp, Probe sequence
ggtgacctaattattaatccacatc

SEQ ID NO: 173994 - DNA, 25 bp, Probe sequence
ggataatgcagagaatcccgcttat

SEQ ID NO: 173995 - DNA, 25 bp, Probe sequence
taatccacatccggttaatgctatg

SEQ ID NO: 173996 - DNA, 25 bp, Probe sequence
tacgcttggtatactacctaatggt

SEQ ID NO: 173997 - DNA, 25 bp, Probe sequence
tatttggccaattgctttcatcccg

SEQ ID NO: 173998 - DNA, 25 bp, Probe sequence
ttaatgctatgttgttattggtgac

SEQ ID NO: 173999 - DNA, 25 bp, Probe sequence
ttcacagtcttattcgccaaaagta

SEQ ID NO: 174000 - DNA, 25 bp, Probe sequence
atagcattaattgttatggtggtga

SEQ ID NO: 174001 - DNA, 25 bp, Probe sequence
atggctcaacatttcaaatctaaaa

SEQ ID NO: 174002 - DNA, 25 bp, Probe sequence
aggtgtcactccacacgaaggtaat

SEQ ID NO: 174003 - DNA, 25 bp, Probe sequence
aggactgcttgtacatatggaggtg

SEQ ID NO: 174004 - DNA, 25 bp, Probe sequence
agtctcttatgatttatttgatgtt

SEQ ID NO: 174005 - DNA, 25 bp, Probe sequence
agtaccgcgctaaataatatgaaac

SEQ ID NO: 174006 - DNA, 25 bp, Probe sequence
agatgcacaagcaaggcgctatttg

SEQ ID NO: 174007 - DNA, 25 bp, Probe sequence
accttcatattgacatctatttata

SEQ ID NO: 174008 - DNA, 25 bp, Probe sequence
ctctcggaggaaaaatacagcgcgg

SEQ ID NO: 174009 - DNA, 25 bp, Probe sequence
aaatctgaattaagtagtaccgcgc

SEQ ID NO: 174010 - DNA, 25 bp, Probe sequence
aaaaaataccaatcaatttgtggat

SEQ ID NO: 174011 - DNA, 25 bp, Probe sequence
aaaacattatccacagagcaccttc

SEQ ID NO: 174012 - DNA, 25 bp, Probe sequence
aacattcttattgcattactctttt

SEQ ID NO: 174013 - DNA, 25 bp, Probe sequence
aagtacaggagatcaatttttagaa

SEQ ID NO: 174014 - DNA, 25 bp, Probe sequence
aaggcgctatttgcaaaaggattta

SEQ ID NO: 174015 - DNA, 25 bp, Probe sequence
aatgtagatgtttaccctataagat

SEQ ID NO: 174016 - DNA, 25 bp, Probe sequence
catatggaggtgtcactccacacga

SEQ ID NO: 174017 - DNA, 25 bp, Probe sequence
cattatccacagagcaccttcatat

SEQ ID NO: 174018 - DNA, 25 bp, Probe sequence
cttattgcattactcttttttacta

SEQ ID NO: 174019 - DNA, 25 bp, Probe sequence
gcattactcttttttactagtttgg

SEQ ID NO: 174020 - DNA, 25 bp, Probe sequence
gagcaccttcatattgacatctatt

SEQ ID NO: 174021 - DNA, 25 bp, Probe sequence
gagtttgattcttctgatgggtcta

SEQ ID NO: 174022 - DNA, 25 bp, Probe sequence
gatgggtctaaagtctcttatgatt

SEQ ID NO: 174023 - DNA, 25 bp, Probe sequence
gattcttctgatgggtctaaagtct

SEQ ID NO: 174024 - DNA, 25 bp, Probe sequence
gttaccgtacaagaattagatgcac

SEQ ID NO: 174025 - DNA, 25 bp, Probe sequence
gtcactccacacgaaggtaataaat

SEQ ID NO: 174026 - DNA, 25 bp, Probe sequence
ggtggtgaaatagataggactgctt

SEQ ID NO: 174027 - DNA, 25 bp, Probe sequence
tgatgttaagggtgattttcccgaa

SEQ ID NO: 174028 - DNA, 25 bp, Probe sequence
tccacagagcaccttcatattgaca

SEQ ID NO: 174029 - DNA, 25 bp, Probe sequence
tctcctttaaacgttaaagccaatg

SEQ ID NO: 174030 - DNA, 25 bp, Probe sequence
tacagcgcggaaaaatagagtttga

SEQ ID NO: 174031 - DNA, 25 bp, Probe sequence
tactagtttggtaatatctccttta

SEQ ID NO: 174032 - DNA, 25 bp, Probe sequence
tataataatgatactctcggaggaa

SEQ ID NO: 174033 - DNA, 25 bp, Probe sequence
tttttactgaccttatcaattttga

SEQ ID NO: 174034 - DNA, 25 bp, Probe sequence
aggtcgaattgcagctcgtgctaga

SEQ ID NO: 174035 - DNA, 25 bp, Probe sequence
agttctacaggacaattgttatttc

SEQ ID NO: 174036 - DNA, 25 bp, Probe sequence
agatagagccattgaatttgcgagg

SEQ ID NO: 174037 - DNA, 25 bp, Probe sequence
agaacgttcttcagcaggtcgaatt

SEQ ID NO: 174038 - DNA, 25 bp, Probe sequence
actttatgataatggaaccccaatt

SEQ ID NO: 174039 - DNA, 25 bp, Probe sequence
aacgtcctggtttagatagagccat

SEQ ID NO: 174040 - DNA, 25 bp, Probe sequence
aagagtttcaactggtttgcaaaat

SEQ ID NO: 174041 - DNA, 25 bp, Probe sequence
aatgaacttaataatcgaggcgtga

SEQ ID NO: 174042 - DNA, 25 bp, Probe sequence
aatcgaggcgtgagttttcatagtt

SEQ ID NO: 174043 - DNA, 25 bp, Probe sequence
aataatcgaggcgtgagttttcata

SEQ ID NO: 174044 - DNA, 25 bp, Probe sequence
aataaacaagatttgactttactca

SEQ ID NO: 174045 - DNA, 25 bp, Probe sequence
aatttgaatttacaggaagatcgat

SEQ ID NO: 174046 - DNA, 25 bp, Probe sequence
aatatttagcgatcacataagtgga

SEQ ID NO: 174047 - DNA, 25 bp, Probe sequence
cagcaggtcgaattgcagctcgtgc

SEQ ID NO: 174048 - DNA, 25 bp, Probe sequence
gcgtgagttttcatagtttagaaga

SEQ ID NO: 174049 - DNA, 25 bp, Probe sequence
gcaggtcgaattgcagctcgtgcta

SEQ ID NO: 174050 - DNA, 25 bp, Probe sequence
gaacgttcttcagcaggtcgaattg

SEQ ID NO: 174051 - DNA, 25 bp, Probe sequence
gactaggacgtaacatggcagattt

SEQ ID NO: 174052 - DNA, 25 bp, Probe sequence
gacgtaacatggcagatttaatcac

SEQ ID NO: 174053 - DNA, 25 bp, Probe sequence
gagcaatggaaagtttcacgtacaa

SEQ ID NO: 174054 - DNA, 25 bp, Probe sequence
gaggcgtgagttttcatagtttaga

SEQ ID NO: 174055 - DNA, 25 bp, Probe sequence
gatttgactttactcaaaacacttt

SEQ ID NO: 174056 - DNA, 25 bp, Probe sequence
gttcttcagcaggtcgaattgcagc

SEQ ID NO: 174057 - DNA, 25 bp, Probe sequence
gtttcaactggtttgcaaaatttga

SEQ ID NO: 174058 - DNA, 25 bp, Probe sequence
gtcgaattgcagctcgtgctagagg

SEQ ID NO: 174059 - DNA, 25 bp, Probe sequence
gtcctggtttagatagagccattga

SEQ ID NO: 174060 - DNA, 25 bp, Probe sequence
gtggagcaaaaagtaaacgtcctgg

SEQ ID NO: 174061 - DNA, 25 bp, Probe sequence
ggaaccccaattaaaactattgcag

SEQ ID NO: 174062 - DNA, 25 bp, Probe sequence
ggaagatcgattaaatcaatatggt

SEQ ID NO: 174063 - DNA, 25 bp, Probe sequence
tcaagttctacaggacaattgttat

SEQ ID NO: 174064 - DNA, 25 bp, Probe sequence
taacatggcagatttaatcacatta

SEQ ID NO: 174065 - DNA, 25 bp, Probe sequence
tagactaggacgtaacatggcagat

SEQ ID NO: 174066 - DNA, 25 bp, Probe sequence
ttagcgatcacataagtggagcaaa

SEQ ID NO: 174067 - DNA, 25 bp, Probe sequence
ttgcagagcaatggaaagtttcacg

SEQ ID NO: 174068 - DNA, 25 bp, Probe sequence
attatcttcttcattattgattaag

SEQ ID NO: 174069 - DNA, 25 bp, Probe sequence
atattattttgattcctagttcata

SEQ ID NO: 174070 - DNA, 25 bp, Probe sequence
atacagcaatgcaaaattcagttaa

SEQ ID NO: 174071 - DNA, 25 bp, Probe sequence
atctccaataactttttggtatggg

SEQ ID NO: 174072 - DNA, 25 bp, Probe sequence
atgacaatgaagtagaagccgatag

SEQ ID NO: 174073 - DNA, 25 bp, Probe sequence
atgggaaaacaggtacaggtatagt

SEQ ID NO: 174074 - DNA, 25 bp, Probe sequence
agtcacacgacttgaaccataacat

SEQ ID NO: 174075 - DNA, 25 bp, Probe sequence
agaaacagtcactttatctaaacga

SEQ ID NO: 174076 - DNA, 25 bp, Probe sequence
aaaacttatgcggaatctattatgg

SEQ ID NO: 174077 - DNA, 25 bp, Probe sequence
aaaatatattaagccattcatttaa

SEQ ID NO: 174078 - DNA, 25 bp, Probe sequence
aagcgcccacagttgaaagtaagtc

SEQ ID NO: 174079 - DNA, 25 bp, Probe sequence
aagcttttgttttatatttctattg

SEQ ID NO: 174080 - DNA, 25 bp, Probe sequence
aatatcttctctattattatgagtt

SEQ ID NO: 174081 - DNA, 25 bp, Probe sequence
aattatctttaatatcttctctatt

SEQ ID NO: 174082 - DNA, 25 bp, Probe sequence
aattcacgtatgtcatggaatcata

SEQ ID NO: 174083 - DNA, 25 bp, Probe sequence
ctattcaatctccaataactttttg

SEQ ID NO: 174084 - DNA, 25 bp, Probe sequence
gaatcaattatcttcttcattattg

SEQ ID NO: 174085 - DNA, 25 bp, Probe sequence
gaagccgatagatttgtccttaata

SEQ ID NO: 174086 - DNA, 25 bp, Probe sequence
gaaaatatctaatcttgaacaagta

SEQ ID NO: 174087 - DNA, 25 bp, Probe sequence
gagttacaatccattagtacatatt

SEQ ID NO: 174088 - DNA, 25 bp, Probe sequence
gatacgatacttttcaaccatcaat

SEQ ID NO: 174089 - DNA, 25 bp, Probe sequence
gatacttttcaaccatcaatataaa

SEQ ID NO: 174090 - DNA, 25 bp, Probe sequence
gatactttacatttaattatcttta

SEQ ID NO: 174091 - DNA, 25 bp, Probe sequence
gattcctagttcatattttaaaagt

SEQ ID NO: 174092 - DNA, 25 bp, Probe sequence
gtataataatgggtggtttgtaggt

SEQ ID NO: 174093 - DNA, 25 bp, Probe sequence
gtaggttacgtaattacaaatcatg

SEQ ID NO: 174094 - DNA, 25 bp, Probe sequence
gtgaataatcaagcgcccacagttg

SEQ ID NO: 174095 - DNA, 25 bp, Probe sequence
ggaatctattatggactccgtatta

SEQ ID NO: 174096 - DNA, 25 bp, Probe sequence
tgaatatgctcatgctaaaaataga

SEQ ID NO: 174097 - DNA, 25 bp, Probe sequence
tcaaataccaaagaactatactgcg

SEQ ID NO: 174098 - DNA, 25 bp, Probe sequence
taggtacatattaaaacgctatttt

SEQ ID NO: 174099 - DNA, 25 bp, Probe sequence
tttgctacacatttatcagatggaa

SEQ ID NO: 174100 - DNA, 25 bp, Probe sequence
ttggttcaaatagtggatctttcgt

SEQ ID NO: 174101 - DNA, 25 bp, Probe sequence
ttcagttaattggtacttcgaacgt

SEQ ID NO: 174102 - DNA, 25 bp, Probe sequence
atttttactcatcaaatattaaaga

SEQ ID NO: 174103 - DNA, 25 bp, Probe sequence
atttatttttactcatcaaatatta

SEQ ID NO: 174104 - DNA, 25 bp, Probe sequence
atatctatggctgaatgggatgtta

SEQ ID NO: 174105 - DNA, 25 bp, Probe sequence
ataagcaagttgaaatatctatggc

SEQ ID NO: 174106 - DNA, 25 bp, Probe sequence
atcagtatcagctaatgaaattgta

SEQ ID NO: 174107 - DNA, 25 bp, Probe sequence
atggctgaatgggatgttatgaata

SEQ ID NO: 174108 - DNA, 25 bp, Probe sequence
atggccaataagcaagttgaaatat

SEQ ID NO: 174109 - DNA, 25 bp, Probe sequence
agttgaaatatctatggctgaatgg

SEQ ID NO: 174110 - DNA, 25 bp, Probe sequence
agaacattaatcacaagactatata

SEQ ID NO: 174111 - DNA, 25 bp, Probe sequence
acctttcttaataaactgtatggag

SEQ ID NO: 174112 - DNA, 25 bp, Probe sequence
acattaatcacaagactatataaaa

SEQ ID NO: 174113 - DNA, 25 bp, Probe sequence
aaatatctatggctgaatgggatgt

SEQ ID NO: 174114 - DNA, 25 bp, Probe sequence
aaatcagtatcagctaatgaaattg

SEQ ID NO: 174115 - DNA, 25 bp, Probe sequence
aaaaaatcagtatcagctaatgaaa

SEQ ID NO: 174116 - DNA, 25 bp, Probe sequence
aagttgaaatatctatggctgaatg

SEQ ID NO: 174117 - DNA, 25 bp, Probe sequence
aatatctatggctgaatgggatgtt

SEQ ID NO: 174118 - DNA, 25 bp, Probe sequence
aatatttatttttactcatcaaata

SEQ ID NO: 174119 - DNA, 25 bp, Probe sequence
caagttgaaatatctatggctgaat

SEQ ID NO: 174120 - DNA, 25 bp, Probe sequence
ctttcttaataaactgtatggaggg

SEQ ID NO: 174121 - DNA, 25 bp, Probe sequence
ctatggctgaatgggatgttatgaa

SEQ ID NO: 174122 - DNA, 25 bp, Probe sequence
gcaagttgaaatatctatggctgaa

SEQ ID NO: 174123 - DNA, 25 bp, Probe sequence
gaacattaatcacaagactatataa

SEQ ID NO: 174124 - DNA, 25 bp, Probe sequence
gaaatatctatggctgaatgggatg

SEQ ID NO: 174125 - DNA, 25 bp, Probe sequence
gacgatattaaaatgaaaactgcta

SEQ ID NO: 174126 - DNA, 25 bp, Probe sequence
gttgaaatatctatggctgaatggg

SEQ ID NO: 174127 - DNA, 25 bp, Probe sequence
gtatcagctaatgaaattgtagttg

SEQ ID NO: 174128 - DNA, 25 bp, Probe sequence
ggctgaatgggatgttatgaatata

SEQ ID NO: 174129 - DNA, 25 bp, Probe sequence
tggctgaatgggatgttatgaatat

SEQ ID NO: 174130 - DNA, 25 bp, Probe sequence
tgctaaaacctttcttaataaactg

SEQ ID NO: 174131 - DNA, 25 bp, Probe sequence
tctatggctgaatgggatgttatga

SEQ ID NO: 174132 - DNA, 25 bp, Probe sequence
ttcttaataaactgtatggagggga

SEQ ID NO: 174133 - DNA, 25 bp, Probe sequence
tatggctgaatgggatgttatgaat

SEQ ID NO: 174134 - DNA, 25 bp, Probe sequence
tatctatggctgaatgggatgttat

SEQ ID NO: 174135 - DNA, 25 bp, Probe sequence
ttgaaatatctatggctgaatggga

SEQ ID NO: 174136 - DNA, 25 bp, Probe sequence
attaacagaacaaggtactagtatt

SEQ ID NO: 174137 - DNA, 25 bp, Probe sequence
attacttggtattaatggagccggt

SEQ ID NO: 174138 - DNA, 25 bp, Probe sequence
attatttcaagtcacattttatctg

SEQ ID NO: 174139 - DNA, 25 bp, Probe sequence
atcggtattattcatgagggtgagc

SEQ ID NO: 174140 - DNA, 25 bp, Probe sequence
atggagccggtaaaacgacacttat

SEQ ID NO: 174141 - DNA, 25 bp, Probe sequence
agagaacttctaaaattattaacag

SEQ ID NO: 174142 - DNA, 25 bp, Probe sequence
agcatattaatatcactttagaaaa

SEQ ID NO: 174143 - DNA, 25 bp, Probe sequence
acacctgcgacatataatcatttaa

SEQ ID NO: 174144 - DNA, 25 bp, Probe sequence
aaagacttggaattgcaatggcatt

SEQ ID NO: 174145 - DNA, 25 bp, Probe sequence
aagcttagtcaatttaaatgtcgat

SEQ ID NO: 174146 - DNA, 25 bp, Probe sequence
aatagtgttttaagcttagtcaatt

SEQ ID NO: 174147 - DNA, 25 bp, Probe sequence
aattgtgtgtttaaatgaaagcgtt

SEQ ID NO: 174148 - DNA, 25 bp, Probe sequence
ctagtattattatttcaagtcacat

SEQ ID NO: 174149 - DNA, 25 bp, Probe sequence
cgcttattgaaacacctgcgacata

SEQ ID NO: 174150 - DNA, 25 bp, Probe sequence
gcagatcatatcggtattattcatg

SEQ ID NO: 174151 - DNA, 25 bp, Probe sequence
gaaacacctgcgacatataatcatt

SEQ ID NO: 174152 - DNA, 25 bp, Probe sequence
gaaagcgttgatttcagcgaaatta

SEQ ID NO: 174153 - DNA, 25 bp, Probe sequence
gaaattttagtattagacgaaccat

SEQ ID NO: 174154 - DNA, 25 bp, Probe sequence
gaaatccaagttttagcagatcata

SEQ ID NO: 174155 - DNA, 25 bp, Probe sequence
gacacttatgaaaattatatgtggc

SEQ ID NO: 174156 - DNA, 25 bp, Probe sequence
gacatataatcatttaagtgcacaa

SEQ ID NO: 174157 - DNA, 25 bp, Probe sequence
gacgaaccatctaatggtttagacc

SEQ ID NO: 174158 - DNA, 25 bp, Probe sequence
gagccggtaaaacgacacttatgaa

SEQ ID NO: 174159 - DNA, 25 bp, Probe sequence
gaccaatgacacgaaatgatttgca

SEQ ID NO: 174160 - DNA, 25 bp, Probe sequence
gagggtgagctaaaatatcagcaaa

SEQ ID NO: 174161 - DNA, 25 bp, Probe sequence
gatttgcacaaagttggttcgctta

SEQ ID NO: 174162 - DNA, 25 bp, Probe sequence
gttggttcgcttattgaaacacctg

SEQ ID NO: 174163 - DNA, 25 bp, Probe sequence
gtcacattttatctgaaatccaagt

SEQ ID NO: 174164 - DNA, 25 bp, Probe sequence
ggtttagacccatatggaatccaag

SEQ ID NO: 174165 - DNA, 25 bp, Probe sequence
ggaatccaagaacttagagaacttc

SEQ ID NO: 174166 - DNA, 25 bp, Probe sequence
ggcatacttcaacaagattcagggg

SEQ ID NO: 174167 - DNA, 25 bp, Probe sequence
taacgaagtttatggattacttggt

SEQ ID NO: 174168 - DNA, 25 bp, Probe sequence
tatatgtggcatacttcaacaagat

SEQ ID NO: 174169 - DNA, 25 bp, Probe sequence
ttagataatagaccaatgacacgaa

SEQ ID NO: 174170 - DNA, 25 bp, Probe sequence
atatgggtaacttgattgtgacgaa

SEQ ID NO: 174171 - DNA, 25 bp, Probe sequence
atatgggcaacttgattgtgacgaa

SEQ ID NO: 174172 - DNA, 25 bp, Probe sequence
aaatcaacgaatgttacggttcata

SEQ ID NO: 174173 - DNA, 25 bp, Probe sequence
actcccccagataagccatcaaaag

SEQ ID NO: 174174 - DNA, 25 bp, Probe sequence
aaaccgaataaaccaatctatcctg

SEQ ID NO: 174175 - DNA, 25 bp, Probe sequence
aaacgttagacgtgacatctgaaac

SEQ ID NO: 174176 - DNA, 25 bp, Probe sequence
aaacaccaccaactaaacctgatca

SEQ ID NO: 174177 - DNA, 25 bp, Probe sequence
aacaattccacaaggctatgggtca

SEQ ID NO: 174178 - DNA, 25 bp, Probe sequence
aacgcaaacaaatacttcagatgac

SEQ ID NO: 174179 - DNA, 25 bp, Probe sequence
tcaaaaggtttgggaaggcactcaa

SEQ ID NO: 174180 - DNA, 25 bp, Probe sequence
aagaatatccgtttactatgaaaga

SEQ ID NO: 174181 - DNA, 25 bp, Probe sequence
aatgccggtattgaaggtactgtaa

SEQ ID NO: 174182 - DNA, 25 bp, Probe sequence
aatcagggatattttacgactattg

SEQ ID NO: 174183 - DNA, 25 bp, Probe sequence
aataattcacaagcttggtatcaag

SEQ ID NO: 174184 - DNA, 25 bp, Probe sequence
caaaagtgacatggtctaatcttcc

SEQ ID NO: 174185 - DNA, 25 bp, Probe sequence
gcagcacgagatatttcatcaacga

SEQ ID NO: 174186 - DNA, 25 bp, Probe sequence
gaagatggtggtaaaacgacagtaa

SEQ ID NO: 174187 - DNA, 25 bp, Probe sequence
gaagcgggaacaagtagtgttttct

SEQ ID NO: 174188 - DNA, 25 bp, Probe sequence
gaaaaaccaatcgaaacaacatcaa

SEQ ID NO: 174189 - DNA, 25 bp, Probe sequence
gacaggtacacatagcaattattat

SEQ ID NO: 174190 - DNA, 25 bp, Probe sequence
gacgtgacatctgaaacaaactgga

SEQ ID NO: 174191 - DNA, 25 bp, Probe sequence
gatacgacacatgtacgatggtttt

SEQ ID NO: 174192 - DNA, 25 bp, Probe sequence
gtagctacgataacatctgggaata

SEQ ID NO: 174193 - DNA, 25 bp, Probe sequence
gtgttgaagtttatggtctttataa

SEQ ID NO: 174194 - DNA, 25 bp, Probe sequence
ggtgaacaggtgggtcaagcagtta

SEQ ID NO: 174195 - DNA, 25 bp, Probe sequence
ggataaagataccaaggctcctata

SEQ ID NO: 174196 - DNA, 25 bp, Probe sequence
ggatcagattcaaggtggacagcag

SEQ ID NO: 174197 - DNA, 25 bp, Probe sequence
ggacagcagttagatttaagcacat

SEQ ID NO: 174198 - DNA, 25 bp, Probe sequence
taaaccaatctatcctgaaaaacca

SEQ ID NO: 174199 - DNA, 25 bp, Probe sequence
taccaaggctcctatagctaatgta

SEQ ID NO: 174200 - DNA, 25 bp, Probe sequence
tattaatgctaatgccggtattgaa

SEQ ID NO: 174201 - DNA, 25 bp, Probe sequence
ttaagtgatgtttcgggatttgcag

SEQ ID NO: 174202 - DNA, 25 bp, Probe sequence
ttcagatgacaaagtagctacgata

SEQ ID NO: 174203 - DNA, 25 bp, Probe sequence
ttgctaatattaaagcgttgcctag

SEQ ID NO: 174204 - DNA, 25 bp, Probe sequence
gccacacctaaagtttcgggagcac

SEQ ID NO: 174205 - DNA, 25 bp, Probe sequence
atcaatgccacatgttcaacttgta

SEQ ID NO: 174206 - DNA, 25 bp, Probe sequence
atgggcatggtgagcttgatgtgta

SEQ ID NO: 174207 - DNA, 25 bp, Probe sequence
aggagaacattttaactactgccaa

SEQ ID NO: 174208 - DNA, 25 bp, Probe sequence
agctggaacttcattagccacacct

SEQ ID NO: 174209 - DNA, 25 bp, Probe sequence
aaataatttctcgactgattctaaa

SEQ ID NO: 174210 - DNA, 25 bp, Probe sequence
aaagcgattgttcaagctgcaaatg

SEQ ID NO: 174211 - DNA, 25 bp, Probe sequence
aaaacagaactgctttgggtatcaa

SEQ ID NO: 174212 - DNA, 25 bp, Probe sequence
aaaatctatcgttgttgctgcagct

SEQ ID NO: 174213 - DNA, 25 bp, Probe sequence
aactactgccaataacggaagatat

SEQ ID NO: 174214 - DNA, 25 bp, Probe sequence
aatgtatcgcgtgtttggtagtaaa

SEQ ID NO: 174215 - DNA, 25 bp, Probe sequence
caatgagtaatgcatcagcgtcaga

SEQ ID NO: 174216 - DNA, 25 bp, Probe sequence
gaggtactgaaccggaggaaacagg

SEQ ID NO: 174217 - DNA, 25 bp, Probe sequence
cgcccggaggatcatttgcttattt

SEQ ID NO: 174218 - DNA, 25 bp, Probe sequence
gcatcagcgtcagaagaactatatt

SEQ ID NO: 174219 - DNA, 25 bp, Probe sequence
gaagtccttaaacgttgtctataat

SEQ ID NO: 174220 - DNA, 25 bp, Probe sequence
gaaagcaatcaattacgccaagaag

SEQ ID NO: 174221 - DNA, 25 bp, Probe sequence
ggacatggcacgatggtgtcgggtc

SEQ ID NO: 174222 - DNA, 25 bp, Probe sequence
gagtaatctatctgagttttccaat

SEQ ID NO: 174223 - DNA, 25 bp, Probe sequence
gatttgccaaaacatgctaacacca

SEQ ID NO: 174224 - DNA, 25 bp, Probe sequence
gttgctgcagctggtaatgatggta

SEQ ID NO: 174225 - DNA, 25 bp, Probe sequence
gttcctgcatctatggacaatgtcg

SEQ ID NO: 174226 - DNA, 25 bp, Probe sequence
gttcaacttgtattactagcgagaa

SEQ ID NO: 174227 - DNA, 25 bp, Probe sequence
gttatatcagcatgggacatctaag

SEQ ID NO: 174228 - DNA, 25 bp, Probe sequence
ggtgatgttcacgatgtcaatgata

SEQ ID NO: 174229 - DNA, 25 bp, Probe sequence
ggtgtcgggtcaaacgagtgctaat

SEQ ID NO: 174230 - DNA, 25 bp, Probe sequence
ggtgcatcgtatgatgatttgccaa

SEQ ID NO: 174231 - DNA, 25 bp, Probe sequence
ggtaagttaataggtgttgcaccga

SEQ ID NO: 174232 - DNA, 25 bp, Probe sequence
ggacaatgtcgttacagtaggatct

SEQ ID NO: 174233 - DNA, 25 bp, Probe sequence
ggagcactagctttaatcattgata

SEQ ID NO: 174234 - DNA, 25 bp, Probe sequence
ggcgaagtgaaagatgttcctgcat

SEQ ID NO: 174235 - DNA, 25 bp, Probe sequence
taaagcgcgctattattagtttaat

SEQ ID NO: 174236 - DNA, 25 bp, Probe sequence
taccggaattacatgtggcacagat

SEQ ID NO: 174237 - DNA, 25 bp, Probe sequence
ttatacagatattgctgcgcccgga

SEQ ID NO: 174238 - DNA, 25 bp, Probe sequence
attattattttacctgcgacttcta

SEQ ID NO: 174239 - DNA, 25 bp, Probe sequence
attttacctgcgacttctaatacga

SEQ ID NO: 174240 - DNA, 25 bp, Probe sequence
atataaagttctggaattcatttga

SEQ ID NO: 174241 - DNA, 25 bp, Probe sequence
acctgcgacttctaatacgattaat

SEQ ID NO: 174242 - DNA, 25 bp, Probe sequence
aaagcaattttgcgataactattat

SEQ ID NO: 174243 - DNA, 25 bp, Probe sequence
aaaactttctatatttccaaatatg

SEQ ID NO: 174244 - DNA, 25 bp, Probe sequence
aaaattgcaaatggtatatgtgaca

SEQ ID NO: 174245 - DNA, 25 bp, Probe sequence
aagaatgttgtcgcacctgaaccat

SEQ ID NO: 174246 - DNA, 25 bp, Probe sequence
aagattatggtgtatcaatatatcc

SEQ ID NO: 174247 - DNA, 25 bp, Probe sequence
aatgtattgatttgtttgtgtggct

SEQ ID NO: 174248 - DNA, 25 bp, Probe sequence
aatgttgtcgcacctgaaccatata

SEQ ID NO: 174249 - DNA, 25 bp, Probe sequence
aatccagttactcaaaataatattc

SEQ ID NO: 174250 - DNA, 25 bp, Probe sequence
caaatatgaatttacgaatgtggga

SEQ ID NO: 174251 - DNA, 25 bp, Probe sequence
gcacctgaaccatataaagttctgg

SEQ ID NO: 174252 - DNA, 25 bp, Probe sequence
gaatgtgggaaaatccagttactca

SEQ ID NO: 174253 - DNA, 25 bp, Probe sequence
gaagacccttttttaaatcatgtag

SEQ ID NO: 174254 - DNA, 25 bp, Probe sequence
gaagtaaatgtaatcgcgtcaacaa

SEQ ID NO: 174255 - DNA, 25 bp, Probe sequence
gacaagattattattttacctgcga

SEQ ID NO: 174256 - DNA, 25 bp, Probe sequence
gacccttttttaaatcatgtagata

SEQ ID NO: 174257 - DNA, 25 bp, Probe sequence
gatttgtttgtgtggctcagttaat

SEQ ID NO: 174258 - DNA, 25 bp, Probe sequence
gttatgaattagcgtcaaaaacatt

SEQ ID NO: 174259 - DNA, 25 bp, Probe sequence
gtaatcgcgtcaacaaacggtagaa

SEQ ID NO: 174260 - DNA, 25 bp, Probe sequence
gtcatacagcttttgaaaaactttc

SEQ ID NO: 174261 - DNA, 25 bp, Probe sequence
gtgacaatttattattaactatttg

SEQ ID NO: 174262 - DNA, 25 bp, Probe sequence
gtgtggctcagttaatagtatcaat

SEQ ID NO: 174263 - DNA, 25 bp, Probe sequence
ggtgtatcaatatatccagcaaata

SEQ ID NO: 174264 - DNA, 25 bp, Probe sequence
taactatttgtcatacagcttttga

SEQ ID NO: 174265 - DNA, 25 bp, Probe sequence
tatgacgaatttgaagacccttttt

SEQ ID NO: 174266 - DNA, 25 bp, Probe sequence
tagtatcaatattagccactatatt

SEQ ID NO: 174267 - DNA, 25 bp, Probe sequence
tatccagcaaatatttcagaaagtt

SEQ ID NO: 174268 - DNA, 25 bp, Probe sequence
tattagccactatattattgaatta

SEQ ID NO: 174269 - DNA, 25 bp, Probe sequence
ttttgcgataactattatgacgaat

SEQ ID NO: 174270 - DNA, 25 bp, Probe sequence
ttacctgcgacttctaatacgatta

SEQ ID NO: 174271 - DNA, 25 bp, Probe sequence
ttgtcgcacctgaaccatataaagt

SEQ ID NO: 174272 - DNA, 25 bp, Probe sequence
tgattgcttccatgggactcgggac

SEQ ID NO: 174273 - DNA, 25 bp, Probe sequence
atttttccatctatagctacacttg

SEQ ID NO: 174274 - DNA, 25 bp, Probe sequence
atacccttgatggcctactttatca

SEQ ID NO: 174275 - DNA, 25 bp, Probe sequence
atgcttctttaattgatgctcttca

SEQ ID NO: 174276 - DNA, 25 bp, Probe sequence
atggaacgccgtctacttacaagca

SEQ ID NO: 174277 - DNA, 25 bp, Probe sequence
aggctttgattttgaacctcgcatc

SEQ ID NO: 174278 - DNA, 25 bp, Probe sequence
agagaactattttttgggcgacgcg

SEQ ID NO: 174279 - DNA, 25 bp, Probe sequence
aaagccttgttcggccagaagaggg

SEQ ID NO: 174280 - DNA, 25 bp, Probe sequence
aagcttcctgttgcagacttttggg

SEQ ID NO: 174281 - DNA, 25 bp, Probe sequence
aatggcccaatcaactcctggaatt

SEQ ID NO: 174282 - DNA, 25 bp, Probe sequence
aataccggcagatacttctactgat

SEQ ID NO: 174283 - DNA, 25 bp, Probe sequence
aattacctccgaagatacacgccaa

SEQ ID NO: 174284 - DNA, 25 bp, Probe sequence
cttcctactaccctaacttatcaga

SEQ ID NO: 174285 - DNA, 25 bp, Probe sequence
gcgatacaactttgtttggcccggt

SEQ ID NO: 174286 - DNA, 25 bp, Probe sequence
gcgtctcagctctaaaatccgatgt

SEQ ID NO: 174287 - DNA, 25 bp, Probe sequence
gcttcagacggaatgcgcgtcccag

SEQ ID NO: 174288 - DNA, 25 bp, Probe sequence
gctacggcgaaggatcactcatgga

SEQ ID NO: 174289 - DNA, 25 bp, Probe sequence
gaatgaccgcattactaggctttga

SEQ ID NO: 174290 - DNA, 25 bp, Probe sequence
gaacaacttctttctgtagaccact

SEQ ID NO: 174291 - DNA, 25 bp, Probe sequence
gaaagctaggctcatacgcacgtaa

SEQ ID NO: 174292 - DNA, 25 bp, Probe sequence
gacttctcccgttttgagcttgaaa

SEQ ID NO: 174293 - DNA, 25 bp, Probe sequence
gactcgtgctcaatctgttttggtt

SEQ ID NO: 174294 - DNA, 25 bp, Probe sequence
gagcgcgatattcgccgacaacttc

SEQ ID NO: 174295 - DNA, 25 bp, Probe sequence
gaggaccctttcgttcaaagcaact

SEQ ID NO: 174296 - DNA, 25 bp, Probe sequence
gatactctttacttattgctttttt

SEQ ID NO: 174297 - DNA, 25 bp, Probe sequence
gattctacagggaaaccgccgagtg

SEQ ID NO: 174298 - DNA, 25 bp, Probe sequence
gggagcatatcacttttcttggaga

SEQ ID NO: 174299 - DNA, 25 bp, Probe sequence
ggaacaggtttcttcagctagctag

SEQ ID NO: 174300 - DNA, 25 bp, Probe sequence
tgagtcgacagctccatcttgatgc

SEQ ID NO: 174301 - DNA, 25 bp, Probe sequence
tcatggccctaactcaactaactga

SEQ ID NO: 174302 - DNA, 25 bp, Probe sequence
tcttattctcagttagccaatgcca

SEQ ID NO: 174303 - DNA, 25 bp, Probe sequence
tcaaagcaactccggcagcaaatcc

SEQ ID NO: 174304 - DNA, 25 bp, Probe sequence
tatgatgcatatgacttctcccgtt

SEQ ID NO: 174305 - DNA, 25 bp, Probe sequence
tttgctgctttgctgggtttaggga

SEQ ID NO: 174306 - DNA, 25 bp, Probe sequence
ataccaggtatcattttgtttttag

SEQ ID NO: 174307 - DNA, 25 bp, Probe sequence
agaaggtgaattaggggtctatcta

SEQ ID NO: 174308 - DNA, 25 bp, Probe sequence
agcaccatatttacagagtggtcaa

SEQ ID NO: 174309 - DNA, 25 bp, Probe sequence
aaagatggttgcagcgttacgattt

SEQ ID NO: 174310 - DNA, 25 bp, Probe sequence
aaaatagctgggtagtcccacaaga

SEQ ID NO: 174311 - DNA, 25 bp, Probe sequence
aatcttggccttgcacatggagtgc

SEQ ID NO: 174312 - DNA, 25 bp, Probe sequence
aattctttgtttggtggactttcag

SEQ ID NO: 174313 - DNA, 25 bp, Probe sequence
caactttatcacatggtataccagg

SEQ ID NO: 174314 - DNA, 25 bp, Probe sequence
cagcgttacgatttaatttctgaac

SEQ ID NO: 174315 - DNA, 25 bp, Probe sequence
catggagtgctaggaccgatgtctt

SEQ ID NO: 174316 - DNA, 25 bp, Probe sequence
ctatttgtcatggattgtcatcaca

SEQ ID NO: 174317 - DNA, 25 bp, Probe sequence
gcatctactgaaaccgattattttg

SEQ ID NO: 174318 - DNA, 25 bp, Probe sequence
gcattttcaatggatttagcatcgc

SEQ ID NO: 174319 - DNA, 25 bp, Probe sequence
gcaaattgtgcataagtacatcatg

SEQ ID NO: 174320 - DNA, 25 bp, Probe sequence
gaagtgtctgattatatcactgtat

SEQ ID NO: 174321 - DNA, 25 bp, Probe sequence
gaacgtaatcatttcaattttattc

SEQ ID NO: 174322 - DNA, 25 bp, Probe sequence
gacgttgtttttaatcggccaagca

SEQ ID NO: 174323 - DNA, 25 bp, Probe sequence
gatactgtcagtggattagctggga

SEQ ID NO: 174324 - DNA, 25 bp, Probe sequence
gatttcatttcaaaagcatctactg

SEQ ID NO: 174325 - DNA, 25 bp, Probe sequence
gttttcgatattaatactgagcaaa

SEQ ID NO: 174326 - DNA, 25 bp, Probe sequence
gtacatcatgaaattagcaccatat

SEQ ID NO: 174327 - DNA, 25 bp, Probe sequence
gggtctatctaacattgatgacact

SEQ ID NO: 174328 - DNA, 25 bp, Probe sequence
ggtgttatggcaatacgggtgtaat

SEQ ID NO: 174329 - DNA, 25 bp, Probe sequence
ggtaatatcaatcttggccttgcac

SEQ ID NO: 174330 - DNA, 25 bp, Probe sequence
ggtagtcccacaagaaagtcaattt

SEQ ID NO: 174331 - DNA, 25 bp, Probe sequence
ggactttcaggtattgcattttcaa

SEQ ID NO: 174332 - DNA, 25 bp, Probe sequence
ggaccaatgcgtttttaattagctg

SEQ ID NO: 174333 - DNA, 25 bp, Probe sequence
ggaccgatgtctttatttgcattat

SEQ ID NO: 174334 - DNA, 25 bp, Probe sequence
taataagtccaactatttgtcatgg

SEQ ID NO: 174335 - DNA, 25 bp, Probe sequence
tacgggtgtaatgacgacgttgttt

SEQ ID NO: 174336 - DNA, 25 bp, Probe sequence
tattcggaatggttggtgttatggc

SEQ ID NO: 174337 - DNA, 25 bp, Probe sequence
tttgaaccttcaactttatcacatg

SEQ ID NO: 174338 - DNA, 25 bp, Probe sequence
ttacaagaaccattaaatccattaa

SEQ ID NO: 174339 - DNA, 25 bp, Probe sequence
ttaatcggccaagcattacaagatg

SEQ ID NO: 174340 - DNA, 25 bp, Probe sequence
atatattcaacaatcagaccaccgt

SEQ ID NO: 174341 - DNA, 25 bp, Probe sequence
atgaacactatttacgaaccgtcaa

SEQ ID NO: 174342 - DNA, 25 bp, Probe sequence
atgatatttatgttggtgctacctt

SEQ ID NO: 174343 - DNA, 25 bp, Probe sequence
agcagcgtacttattgtggctttta

SEQ ID NO: 174344 - DNA, 25 bp, Probe sequence
agcttaattcatatgcgctgcaatc

SEQ ID NO: 174345 - DNA, 25 bp, Probe sequence
aaaaatcatcttatcgaggacccga

SEQ ID NO: 174346 - DNA, 25 bp, Probe sequence
aacacgtccaactccatttggatta

SEQ ID NO: 174347 - DNA, 25 bp, Probe sequence
aacaagcttctactaaatttatcat

SEQ ID NO: 174348 - DNA, 25 bp, Probe sequence
aacggcgtcttttaatgctggcgct

SEQ ID NO: 174349 - DNA, 25 bp, Probe sequence
aagccatcgcaagatacatttatca

SEQ ID NO: 174350 - DNA, 25 bp, Probe sequence
aatgctggcgctacatttgggcgat

SEQ ID NO: 174351 - DNA, 25 bp, Probe sequence
aatgtcattcttaaaccagcatatt

SEQ ID NO: 174352 - DNA, 25 bp, Probe sequence
gcgccaatgagtgcagatgtttatg

SEQ ID NO: 174353 - DNA, 25 bp, Probe sequence
gcgctgcaatcgaatatttggcatt

SEQ ID NO: 174354 - DNA, 25 bp, Probe sequence
gctacatttgggcgatttcatcatt

SEQ ID NO: 174355 - DNA, 25 bp, Probe sequence
gcatcttgaagaattggttaccaca

SEQ ID NO: 174356 - DNA, 25 bp, Probe sequence
gaagccttctttgaatatgacacga

SEQ ID NO: 174357 - DNA, 25 bp, Probe sequence
gaaatcaatcattatcatgcgccaa

SEQ ID NO: 174358 - DNA, 25 bp, Probe sequence
gactggtttgcattacatattcata

SEQ ID NO: 174359 - DNA, 25 bp, Probe sequence
gatcgaccatatattgttgctattt

SEQ ID NO: 174360 - DNA, 25 bp, Probe sequence
gattcatttagttattcaccacgaa

SEQ ID NO: 174361 - DNA, 25 bp, Probe sequence
gtatatatccataatcttgtctcaa

SEQ ID NO: 174362 - DNA, 25 bp, Probe sequence
gtatcatacgagccagaatttttta

SEQ ID NO: 174363 - DNA, 25 bp, Probe sequence
gtatgagcttaccttagatgatatt

SEQ ID NO: 174364 - DNA, 25 bp, Probe sequence
gtagaatcatttttacctcaatcaa

SEQ ID NO: 174365 - DNA, 25 bp, Probe sequence
gtaaatgaaccaacacgtcttaaag

SEQ ID NO: 174366 - DNA, 25 bp, Probe sequence
gtcgatggcgaatggttgtataaac

SEQ ID NO: 174367 - DNA, 25 bp, Probe sequence
ggttaccacatgttcgacaaacgac

SEQ ID NO: 174368 - DNA, 25 bp, Probe sequence
tgtaactatatgtaatcctgctaat

SEQ ID NO: 174369 - DNA, 25 bp, Probe sequence
tgagctcattgttattagtccttta

SEQ ID NO: 174370 - DNA, 25 bp, Probe sequence
tgaaagttcttcacaaccgttttat

SEQ ID NO: 174371 - DNA, 25 bp, Probe sequence
tcagaccaccgttatcatatagcga

SEQ ID NO: 174372 - DNA, 25 bp, Probe sequence
tagaatgtcaacacgtccaactcca

SEQ ID NO: 174373 - DNA, 25 bp, Probe sequence
tactcgtattcatcaaaaccactgt

SEQ ID NO: 174374 - DNA, 25 bp, Probe sequence
atacagtaataaaaacagttcgaga

SEQ ID NO: 174375 - DNA, 25 bp, Probe sequence
ataaacccagccttattaatgcgtg

SEQ ID NO: 174376 - DNA, 25 bp, Probe sequence
atgataaacccagccttattaatgc

SEQ ID NO: 174377 - DNA, 25 bp, Probe sequence
agccttattaatgcgtggagatgat

SEQ ID NO: 174378 - DNA, 25 bp, Probe sequence
acccagccttattaatgcgtggaga

SEQ ID NO: 174379 - DNA, 25 bp, Probe sequence
aaacccagccttattaatgcgtgga

SEQ ID NO: 174380 - DNA, 25 bp, Probe sequence
aaacgttatctcttactagaatttg

SEQ ID NO: 174381 - DNA, 25 bp, Probe sequence
aacgttatctcttactagaatttga

SEQ ID NO: 174382 - DNA, 25 bp, Probe sequence
aacgaattagaacacgctttaaatg

SEQ ID NO: 174383 - DNA, 25 bp, Probe sequence
aacccagccttattaatgcgtggag

SEQ ID NO: 174384 - DNA, 25 bp, Probe sequence
cagccttattaatgcgtggagatga

SEQ ID NO: 174385 - DNA, 25 bp, Probe sequence
cagttcgagaacttgctaaagaaac

SEQ ID NO: 174386 - DNA, 25 bp, Probe sequence
cccagccttattaatgcgtggagat

SEQ ID NO: 174387 - DNA, 25 bp, Probe sequence
ccttattaatgcgtggagatgatag

SEQ ID NO: 174388 - DNA, 25 bp, Probe sequence
gaattagaacacgctttaaatgaat

SEQ ID NO: 174389 - DNA, 25 bp, Probe sequence
gaagtaatgcagtacctttttaaag

SEQ ID NO: 174390 - DNA, 25 bp, Probe sequence
gaagtaatacagtttgataagctat

SEQ ID NO: 174391 - DNA, 25 bp, Probe sequence
gaacacgctttaaatgaatatgaaa

SEQ ID NO: 174392 - DNA, 25 bp, Probe sequence
gactcaggagaagtaatacagtttg

SEQ ID NO: 174393 - DNA, 25 bp, Probe sequence
gagcacaaacaggtggaaacttcgt

SEQ ID NO: 174394 - DNA, 25 bp, Probe sequence
gagaaaacgaattagaacacgcttt

SEQ ID NO: 174395 - DNA, 25 bp, Probe sequence
gagaacttgctaaagaaacaaatac

SEQ ID NO: 174396 - DNA, 25 bp, Probe sequence
gagttataatgataaacccagcctt

SEQ ID NO: 174397 - DNA, 25 bp, Probe sequence
gataaacccagccttattaatgcgt

SEQ ID NO: 174398 - DNA, 25 bp, Probe sequence
gttcgagaacttgctaaagaaacaa

SEQ ID NO: 174399 - DNA, 25 bp, Probe sequence
gttataatgataaacccagccttat

SEQ ID NO: 174400 - DNA, 25 bp, Probe sequence
gtaatgcagtacctttttaaagact

SEQ ID NO: 174401 - DNA, 25 bp, Probe sequence
ggagttataatgataaacccagcct

SEQ ID NO: 174402 - DNA, 25 bp, Probe sequence
tgataaacccagccttattaatgcg

SEQ ID NO: 174403 - DNA, 25 bp, Probe sequence
taatgataaacccagccttattaat

SEQ ID NO: 174404 - DNA, 25 bp, Probe sequence
taatgcagtacctttttaaagactt

SEQ ID NO: 174405 - DNA, 25 bp, Probe sequence
taaacccagccttattaatgcgtgg

SEQ ID NO: 174406 - DNA, 25 bp, Probe sequence
tagaacacgctttaaatgaatatga

SEQ ID NO: 174407 - DNA, 25 bp, Probe sequence
tataatgataaacccagccttatta

SEQ ID NO: 174408 - DNA, 25 bp, Probe sequence
atgcctcaaaaacaaaaataagcga

SEQ ID NO: 174409 - DNA, 25 bp, Probe sequence
atttatattttggtaatcaacaaga

SEQ ID NO: 174410 - DNA, 25 bp, Probe sequence
ataaagcgtatagagaacttcttag

SEQ ID NO: 174411 - DNA, 25 bp, Probe sequence
ataaagaataatgcctcaaaaacaa

SEQ ID NO: 174412 - DNA, 25 bp, Probe sequence
ataagcgaaataaagcgtatagaga

SEQ ID NO: 174413 - DNA, 25 bp, Probe sequence
ataatgcctcaaaaacaaaaataag

SEQ ID NO: 174414 - DNA, 25 bp, Probe sequence
atctcataaagaataatgcctcaaa

SEQ ID NO: 174415 - DNA, 25 bp, Probe sequence
agaataatgcctcaaaaacaaaaat

SEQ ID NO: 174416 - DNA, 25 bp, Probe sequence
agcgaaataaagcgtatagagaact

SEQ ID NO: 174417 - DNA, 25 bp, Probe sequence
aaataaagcgtatagagaacttctt

SEQ ID NO: 174418 - DNA, 25 bp, Probe sequence
aaataagcgaaataaagcgtataga

SEQ ID NO: 174419 - DNA, 25 bp, Probe sequence
aagcgaaataaagcgtatagagaac

SEQ ID NO: 174420 - DNA, 25 bp, Probe sequence
aatgcctcaaaaacaaaaataagcg

SEQ ID NO: 174421 - DNA, 25 bp, Probe sequence
aataagcgaaataaagcgtatagag

SEQ ID NO: 174422 - DNA, 25 bp, Probe sequence
aataaagcgtatagagaacttctta

SEQ ID NO: 174423 - DNA, 25 bp, Probe sequence
aatttatattttggtaatcaacaag

SEQ ID NO: 174424 - DNA, 25 bp, Probe sequence
cataaagaataatgcctcaaaaaca

SEQ ID NO: 174425 - DNA, 25 bp, Probe sequence
ctcataaagaataatgcctcaaaaa

SEQ ID NO: 174426 - DNA, 25 bp, Probe sequence
cgtttaaaggacgctcagagaataa

SEQ ID NO: 174427 - DNA, 25 bp, Probe sequence
gcgaaataaagcgtatagagaactt

SEQ ID NO: 174428 - DNA, 25 bp, Probe sequence
gaataatgcctcaaaaacaaaaata

SEQ ID NO: 174429 - DNA, 25 bp, Probe sequence
gaaataaagcgtatagagaacttct

SEQ ID NO: 174430 - DNA, 25 bp, Probe sequence
gtttaaaggacgctcagagaataaa

SEQ ID NO: 174431 - DNA, 25 bp, Probe sequence
tgcctcaaaaacaaaaataagcgaa

SEQ ID NO: 174432 - DNA, 25 bp, Probe sequence
tctcataaagaataatgcctcaaaa

SEQ ID NO: 174433 - DNA, 25 bp, Probe sequence
tcataaagaataatgcctcaaaaac

SEQ ID NO: 174434 - DNA, 25 bp, Probe sequence
taatgcctcaaaaacaaaaataagc

SEQ ID NO: 174435 - DNA, 25 bp, Probe sequence
taagcgaaataaagcgtatagagaa

SEQ ID NO: 174436 - DNA, 25 bp, Probe sequence
taaagcgtatagagaacttcttaga

SEQ ID NO: 174437 - DNA, 25 bp, Probe sequence
tatctcataaagaataatgcctcaa

SEQ ID NO: 174438 - DNA, 25 bp, Probe sequence
tttaaaggacgctcagagaataaaa

SEQ ID NO: 174439 - DNA, 25 bp, Probe sequence
tttatattttggtaatcaacaagat

SEQ ID NO: 174440 - DNA, 25 bp, Probe sequence
ttatattttggtaatcaacaagatt

SEQ ID NO: 174441 - DNA, 25 bp, Probe sequence
ttaaaggacgctcagagaataaaaa

SEQ ID NO: 174442 - DNA, 25 bp, Probe sequence
atgattcagcaggtgacgaacgtat

SEQ ID NO: 174443 - DNA, 25 bp, Probe sequence
atgtactcctggttgtgctaagact

SEQ ID NO: 174444 - DNA, 25 bp, Probe sequence
agtttatgtactcctggttgtgcta

SEQ ID NO: 174445 - DNA, 25 bp, Probe sequence
agttcttgatttagacgtgcaagtt

SEQ ID NO: 174446 - DNA, 25 bp, Probe sequence
agacgtgcaagttaaagcaaacaat

SEQ ID NO: 174447 - DNA, 25 bp, Probe sequence
actcctggttgtgctaagactggta

SEQ ID NO: 174448 - DNA, 25 bp, Probe sequence
aaatgattcagcaggtgacgaacgt

SEQ ID NO: 174449 - DNA, 25 bp, Probe sequence
acaagtcatagtttatgtactcctg

SEQ ID NO: 174450 - DNA, 25 bp, Probe sequence
aaaagttcttgatttagacgtgcaa

SEQ ID NO: 174451 - DNA, 25 bp, Probe sequence
aactcaaatgattcagcaggtgacg

SEQ ID NO: 174452 - DNA, 25 bp, Probe sequence
aagcaaacaataactcaaatgattc

SEQ ID NO: 174453 - DNA, 25 bp, Probe sequence
catagtttatgtactcctggttgtg

SEQ ID NO: 174454 - DNA, 25 bp, Probe sequence
ctggtagttttaatagcttctgctg

SEQ ID NO: 174455 - DNA, 25 bp, Probe sequence
gcaggtgacgaacgtattacaagtc

SEQ ID NO: 174456 - DNA, 25 bp, Probe sequence
gaacgtattacaagtcatagtttat

SEQ ID NO: 174457 - DNA, 25 bp, Probe sequence
gaaaaagttcttgatttagacgtgc

SEQ ID NO: 174458 - DNA, 25 bp, Probe sequence
gactggtagttttaatagcttctgc

SEQ ID NO: 174459 - DNA, 25 bp, Probe sequence
gacgaacgtattacaagtcatagtt

SEQ ID NO: 174460 - DNA, 25 bp, Probe sequence
gatttagacgtgcaagttaaagcaa

SEQ ID NO: 174461 - DNA, 25 bp, Probe sequence
gattcagcaggtgacgaacgtatta

SEQ ID NO: 174462 - DNA, 25 bp, Probe sequence
gtttatgtactcctggttgtgctaa

SEQ ID NO: 174463 - DNA, 25 bp, Probe sequence
gtactcctggttgtgctaagactgg

SEQ ID NO: 174464 - DNA, 25 bp, Probe sequence
gtcatagtttatgtactcctggttg

SEQ ID NO: 174465 - DNA, 25 bp, Probe sequence
ggttgtgctaagactggtagtttta

SEQ ID NO: 174466 - DNA, 25 bp, Probe sequence
tggtagttttaatagcttctgctgt

SEQ ID NO: 174467 - DNA, 25 bp, Probe sequence
tgtactcctggttgtgctaagactg

SEQ ID NO: 174468 - DNA, 25 bp, Probe sequence
tcctggttgtgctaagactggtagt

SEQ ID NO: 174469 - DNA, 25 bp, Probe sequence
tactcctggttgtgctaagactggt

SEQ ID NO: 174470 - DNA, 25 bp, Probe sequence
tagtttatgtactcctggttgtgct

SEQ ID NO: 174471 - DNA, 25 bp, Probe sequence
tagttttaatagcttctgctgttaa

SEQ ID NO: 174472 - DNA, 25 bp, Probe sequence
tatgtactcctggttgtgctaagac

SEQ ID NO: 174473 - DNA, 25 bp, Probe sequence
tttatgtactcctggttgtgctaag

SEQ ID NO: 174474 - DNA, 25 bp, Probe sequence
ttatgtactcctggttgtgctaaga

SEQ ID NO: 174475 - DNA, 25 bp, Probe sequence
ttcagcaggtgacgaacgtattaca

SEQ ID NO: 174476 - DNA, 25 bp, Probe sequence
atttattggcttgtacgaatggatt

SEQ ID NO: 174477 - DNA, 25 bp, Probe sequence
atatttattcactggtattggtgca

SEQ ID NO: 174478 - DNA, 25 bp, Probe sequence
atgaccgtatgctgcaagaagtaaa

SEQ ID NO: 174479 - DNA, 25 bp, Probe sequence
atgagttttctacatgttgatacat

SEQ ID NO: 174480 - DNA, 25 bp, Probe sequence
atgttgatacattacagaatgccat

SEQ ID NO: 174481 - DNA, 25 bp, Probe sequence
aggtctatttattggcttgtacgaa

SEQ ID NO: 174482 - DNA, 25 bp, Probe sequence
agcaggcaaattaaaagcgtctgaa

SEQ ID NO: 174483 - DNA, 25 bp, Probe sequence
agcgtctgaaggctttatgacattt

SEQ ID NO: 174484 - DNA, 25 bp, Probe sequence
cagaatgccatagcaggcaaattaa

SEQ ID NO: 174485 - DNA, 25 bp, Probe sequence
ctttatgttatttgctttgattatg

SEQ ID NO: 174486 - DNA, 25 bp, Probe sequence
ccttatgtattagcgataggtctat

SEQ ID NO: 174487 - DNA, 25 bp, Probe sequence
gcgataggtctatttattggcttgt

SEQ ID NO: 174488 - DNA, 25 bp, Probe sequence
gaaggctttatgacatttgtttggt

SEQ ID NO: 174489 - DNA, 25 bp, Probe sequence
gaagtaaaaaggtcacatgaacatt

SEQ ID NO: 174490 - DNA, 25 bp, Probe sequence
gaaaatgaccgtatgctgcaagaag

SEQ ID NO: 174491 - DNA, 25 bp, Probe sequence
gaaacatgttgatacagaggaatta

SEQ ID NO: 174492 - DNA, 25 bp, Probe sequence
gacgattggtagtgactttatgagt

SEQ ID NO: 174493 - DNA, 25 bp, Probe sequence
gagaagaaaatgaccgtatgctgca

SEQ ID NO: 174494 - DNA, 25 bp, Probe sequence
gatatattaggcagaggtatttaca

SEQ ID NO: 174495 - DNA, 25 bp, Probe sequence
gattttgtagacgtacttcaagaaa

SEQ ID NO: 174496 - DNA, 25 bp, Probe sequence
gattatgacgattggtagtgacttt

SEQ ID NO: 174497 - DNA, 25 bp, Probe sequence
gattagagcaaagttccatgattaa

SEQ ID NO: 174498 - DNA, 25 bp, Probe sequence
gttgttagtctttatgttatttgct

SEQ ID NO: 174499 - DNA, 25 bp, Probe sequence
gtaatgattttgtagacgtacttca

SEQ ID NO: 174500 - DNA, 25 bp, Probe sequence
gtgactttatgagttttctacatgt

SEQ ID NO: 174501 - DNA, 25 bp, Probe sequence
ggtgcaatgttgttagtctttatgt

SEQ ID NO: 174502 - DNA, 25 bp, Probe sequence
ggtttaccttatgtattagcgatag

SEQ ID NO: 174503 - DNA, 25 bp, Probe sequence
ggcagaggtatttacaaagtacgag

SEQ ID NO: 174504 - DNA, 25 bp, Probe sequence
ggcttgtacgaatggattagagcaa

SEQ ID NO: 174505 - DNA, 25 bp, Probe sequence
ggctttatgacatttgtttggtata

SEQ ID NO: 174506 - DNA, 25 bp, Probe sequence
tgtttggtatattgcttatggttta

SEQ ID NO: 174507 - DNA, 25 bp, Probe sequence
tagtctttatgttatttgctttgat

SEQ ID NO: 174508 - DNA, 25 bp, Probe sequence
tatggtttaccttatgtattagcga

SEQ ID NO: 174509 - DNA, 25 bp, Probe sequence
tattggtgcaatgttgttagtcttt

SEQ ID NO: 174510 - DNA, 25 bp, Probe sequence
caaaatcaactgggacgccgtcgag

SEQ ID NO: 174511 - DNA, 25 bp, Probe sequence
atatctgtcgtgaacatggtttgag

SEQ ID NO: 174512 - DNA, 25 bp, Probe sequence
atacgcatacagataaagaccatta

SEQ ID NO: 174513 - DNA, 25 bp, Probe sequence
atcaacttggcttagagctagcaga

SEQ ID NO: 174514 - DNA, 25 bp, Probe sequence
aggcaataccaaatcggcaagtcga

SEQ ID NO: 174515 - DNA, 25 bp, Probe sequence
agcccctaatcatcaagtagccgta

SEQ ID NO: 174516 - DNA, 25 bp, Probe sequence
acttcggggcgaaacaatctcatat

SEQ ID NO: 174517 - DNA, 25 bp, Probe sequence
acatccgaattgaaagaggcgacga

SEQ ID NO: 174518 - DNA, 25 bp, Probe sequence
acaacaaagagaacccgaatacgca

SEQ ID NO: 174519 - DNA, 25 bp, Probe sequence
acaacgaagagttgagcgagctcaa

SEQ ID NO: 174520 - DNA, 25 bp, Probe sequence
aacctggtgaagtaacgccagaaca

SEQ ID NO: 174521 - DNA, 25 bp, Probe sequence
aacccatacaagcaatttagagacg

SEQ ID NO: 174522 - DNA, 25 bp, Probe sequence
aagcacatacggttattcaatcttt

SEQ ID NO: 174523 - DNA, 25 bp, Probe sequence
aagagccttgtatggcaaagaagat

SEQ ID NO: 174524 - DNA, 25 bp, Probe sequence
aagtggtttgaattgtgatgtagat

SEQ ID NO: 174525 - DNA, 25 bp, Probe sequence
aaggggcaattgatcatgagcatga

SEQ ID NO: 174526 - DNA, 25 bp, Probe sequence
aaggcattgtctttgatagagatga

SEQ ID NO: 174527 - DNA, 25 bp, Probe sequence
caagtagccgtatatacgcatacag

SEQ ID NO: 174528 - DNA, 25 bp, Probe sequence
gccaaaatgagatacacacaagcag

SEQ ID NO: 174529 - DNA, 25 bp, Probe sequence
gccgtcgagcagcacacagaacagc

SEQ ID NO: 174530 - DNA, 25 bp, Probe sequence
gcagaaaaaatagcccctaatcatc

SEQ ID NO: 174531 - DNA, 25 bp, Probe sequence
gaaacaatctcatataagcctgaaa

SEQ ID NO: 174532 - DNA, 25 bp, Probe sequence
gacgaacactaggctcagaatatga

SEQ ID NO: 174533 - DNA, 25 bp, Probe sequence
gagcagcacacagaacagcttaaac

SEQ ID NO: 174534 - DNA, 25 bp, Probe sequence
gagaacccgaatacgcagatgaatt

SEQ ID NO: 174535 - DNA, 25 bp, Probe sequence
gaggcgacgaaggactttcgagata

SEQ ID NO: 174536 - DNA, 25 bp, Probe sequence
gatgggattcaagcacatacggtta

SEQ ID NO: 174537 - DNA, 25 bp, Probe sequence
gtgttacagaacgtggcattgccaa

SEQ ID NO: 174538 - DNA, 25 bp, Probe sequence
gtggacgaacactaggctcagaata

SEQ ID NO: 174539 - DNA, 25 bp, Probe sequence
ggcaagtcgagcaatcaattacgca

SEQ ID NO: 174540 - DNA, 25 bp, Probe sequence
tcaattacgcagagaaacgtgcaga

SEQ ID NO: 174541 - DNA, 25 bp, Probe sequence
tacgtggacgaacactaggctcaga

SEQ ID NO: 174542 - DNA, 25 bp, Probe sequence
tagagacgttttcagagcatttaga

SEQ ID NO: 174543 - DNA, 25 bp, Probe sequence
tattcaatcttttaaacctggtgaa

SEQ ID NO: 174544 - DNA, 25 bp, Probe sequence
agttgcttcatcaattgcactgctt

SEQ ID NO: 174545 - DNA, 25 bp, Probe sequence
acatctacttatgaagttgactggc

SEQ ID NO: 174546 - DNA, 25 bp, Probe sequence
aaaagattacaattactcacagttt

SEQ ID NO: 174547 - DNA, 25 bp, Probe sequence
aacaacagcaacatctgataatgat

SEQ ID NO: 174548 - DNA, 25 bp, Probe sequence
aatgtttcggttagttcagaatcaa

SEQ ID NO: 174549 - DNA, 25 bp, Probe sequence
aatgatgctgtaaatgttgttgact

SEQ ID NO: 174550 - DNA, 25 bp, Probe sequence
aatcatcagttgcttcatcaattgc

SEQ ID NO: 174551 - DNA, 25 bp, Probe sequence
aatcactttatacaaaacaacagca

SEQ ID NO: 174552 - DNA, 25 bp, Probe sequence
aatacagtaacgtttacatctactt

SEQ ID NO: 174553 - DNA, 25 bp, Probe sequence
aatcaattggctggggtgttgaggc

SEQ ID NO: 174554 - DNA, 25 bp, Probe sequence
aatatatctaatggcttatcaggtg

SEQ ID NO: 174555 - DNA, 25 bp, Probe sequence
aattgcactgcttttgctatcgaat

SEQ ID NO: 174556 - DNA, 25 bp, Probe sequence
catactgttaaattaatcggtacgg

SEQ ID NO: 174557 - DNA, 25 bp, Probe sequence
cataaatcaattggctggggtgttg

SEQ ID NO: 174558 - DNA, 25 bp, Probe sequence
ctcacagttttattggggcggtaag

SEQ ID NO: 174559 - DNA, 25 bp, Probe sequence
ctaaagaaactaatcctggagtata

SEQ ID NO: 174560 - DNA, 25 bp, Probe sequence
gcgcgtggtaactttaacccagaat

SEQ ID NO: 174561 - DNA, 25 bp, Probe sequence
gcttcatcaattgcactgcttttgc

SEQ ID NO: 174562 - DNA, 25 bp, Probe sequence
gcactgcttttgctatcgaatacag

SEQ ID NO: 174563 - DNA, 25 bp, Probe sequence
gatagttatgacccaacatatggta

SEQ ID NO: 174564 - DNA, 25 bp, Probe sequence
gttgactggcaaaaccatactgtta

SEQ ID NO: 174565 - DNA, 25 bp, Probe sequence
gtagacaaagtagttcaaatgctgg

SEQ ID NO: 174566 - DNA, 25 bp, Probe sequence
gtaaatgttgttgactatgcaccta

SEQ ID NO: 174567 - DNA, 25 bp, Probe sequence
gtaacgtttacatctacttatgaag

SEQ ID NO: 174568 - DNA, 25 bp, Probe sequence
ggtagagatagttatgacccaacat

SEQ ID NO: 174569 - DNA, 25 bp, Probe sequence
ggttagttcagaatcaaatgatgct

SEQ ID NO: 174570 - DNA, 25 bp, Probe sequence
ggcagccggaaacattaattcaggt

SEQ ID NO: 174571 - DNA, 25 bp, Probe sequence
tggggcggtaagtataatgtttcgg

SEQ ID NO: 174572 - DNA, 25 bp, Probe sequence
tgttgttgactatgcacctaaaaat

SEQ ID NO: 174573 - DNA, 25 bp, Probe sequence
tatctaatggcttatcaggtggatt

SEQ ID NO: 174574 - DNA, 25 bp, Probe sequence
ttggcgcgtggtaactttaacccag

SEQ ID NO: 174575 - DNA, 25 bp, Probe sequence
tttgctatcgaatacagttgatgca

SEQ ID NO: 174576 - DNA, 25 bp, Probe sequence
ttagtacttaaggcagccggaaaca

SEQ ID NO: 174577 - DNA, 25 bp, Probe sequence
ttactcacagttttattggggcggt

SEQ ID NO: 174578 - DNA, 25 bp, Probe sequence
attccctagaactggtatttacgca

SEQ ID NO: 174579 - DNA, 25 bp, Probe sequence
attcgtacaaagtccaaatggtcca

SEQ ID NO: 174580 - DNA, 25 bp, Probe sequence
attagttatacccaaaagagttatg

SEQ ID NO: 174581 - DNA, 25 bp, Probe sequence
atatgcgactttattccctagaact

SEQ ID NO: 174582 - DNA, 25 bp, Probe sequence
atcaattgccacctttagttcaaag

SEQ ID NO: 174583 - DNA, 25 bp, Probe sequence
agaaatggggcgttactcaaaatgt

SEQ ID NO: 174584 - DNA, 25 bp, Probe sequence
agaaactactgatgttggtcaaaca

SEQ ID NO: 174585 - DNA, 25 bp, Probe sequence
aaaaaggttcaagtgatacgagtga

SEQ ID NO: 174586 - DNA, 25 bp, Probe sequence
aagtccaaatggtccaacaggttca

SEQ ID NO: 174587 - DNA, 25 bp, Probe sequence
aagatccaaatgttagcttaatcaa

SEQ ID NO: 174588 - DNA, 25 bp, Probe sequence
aatgcaaggttttattaattccaga

SEQ ID NO: 174589 - DNA, 25 bp, Probe sequence
cagtcagcaccatctataggtggca

SEQ ID NO: 174590 - DNA, 25 bp, Probe sequence
gcgactttattccctagaactggta

SEQ ID NO: 174591 - DNA, 25 bp, Probe sequence
cctttagcatctccgattcaagaat

SEQ ID NO: 174592 - DNA, 25 bp, Probe sequence
gccacctttagttcaaagtggcttt

SEQ ID NO: 174593 - DNA, 25 bp, Probe sequence
gcgcatgatagatatttattcgtac

SEQ ID NO: 174594 - DNA, 25 bp, Probe sequence
gcatctccgattcaagaatctagag

SEQ ID NO: 174595 - DNA, 25 bp, Probe sequence
gaaacttagatattacatatgcgac

SEQ ID NO: 174596 - DNA, 25 bp, Probe sequence
gactgacgactaaagatccaaatgt

SEQ ID NO: 174597 - DNA, 25 bp, Probe sequence
gagaatattttgctcctgataatca

SEQ ID NO: 174598 - DNA, 25 bp, Probe sequence
gataatcaattgccacctttagttc

SEQ ID NO: 174599 - DNA, 25 bp, Probe sequence
gttagcttaatcaattaccttccta

SEQ ID NO: 174600 - DNA, 25 bp, Probe sequence
gtaatcaaacgtacggaggatgtaa

SEQ ID NO: 174601 - DNA, 25 bp, Probe sequence
gtccaacaggttcagcaagagaata

SEQ ID NO: 174602 - DNA, 25 bp, Probe sequence
gtgaagtagacaagcaaaactcaaa

SEQ ID NO: 174603 - DNA, 25 bp, Probe sequence
gtggcaatggctcatttaattattc

SEQ ID NO: 174604 - DNA, 25 bp, Probe sequence
ggtatttacgcagaaagaaagcata

SEQ ID NO: 174605 - DNA, 25 bp, Probe sequence
ggaggtaatttccagtcagcaccat

SEQ ID NO: 174606 - DNA, 25 bp, Probe sequence
tgctcctgataatcaattgccacct

SEQ ID NO: 174607 - DNA, 25 bp, Probe sequence
tctataggtggcaatggctcattta

SEQ ID NO: 174608 - DNA, 25 bp, Probe sequence
taatttccagtcagcaccatctata

SEQ ID NO: 174609 - DNA, 25 bp, Probe sequence
tacatatgcgactttattccctaga

SEQ ID NO: 174610 - DNA, 25 bp, Probe sequence
ttattaattccagaacttcattttc

SEQ ID NO: 174611 - DNA, 25 bp, Probe sequence
tttatcactacactatcacatgaaa

SEQ ID NO: 174612 - DNA, 25 bp, Probe sequence
attgcaggcaatcaagtcgagtttg

SEQ ID NO: 174613 - DNA, 25 bp, Probe sequence
atggtttaccttatatactcgctat

SEQ ID NO: 174614 - DNA, 25 bp, Probe sequence
agacgacggaggactttcaaggtag

SEQ ID NO: 174615 - DNA, 25 bp, Probe sequence
acgcagtagcgtttgaagaatttaa

SEQ ID NO: 174616 - DNA, 25 bp, Probe sequence
aaaggcttctgagggctttatttca

SEQ ID NO: 174617 - DNA, 25 bp, Probe sequence
aaagcggcttaaattgtgatgttga

SEQ ID NO: 174618 - DNA, 25 bp, Probe sequence
aaaaggcgaatgatcagttatgtga

SEQ ID NO: 174619 - DNA, 25 bp, Probe sequence
aagaccattatcacaatcacattat

SEQ ID NO: 174620 - DNA, 25 bp, Probe sequence
aagtccataatgattttgttcgttt

SEQ ID NO: 174621 - DNA, 25 bp, Probe sequence
aagtcgtgccattaattacgcagaa

SEQ ID NO: 174622 - DNA, 25 bp, Probe sequence
aatggctttgcaatcgagaaattca

SEQ ID NO: 174623 - DNA, 25 bp, Probe sequence
cacatacagtcattcaatcttttaa

SEQ ID NO: 174624 - DNA, 25 bp, Probe sequence
gcaccagattatcaagttgcagttt

SEQ ID NO: 174625 - DNA, 25 bp, Probe sequence
gcaaactagggcgttatatggcaaa

SEQ ID NO: 174626 - DNA, 25 bp, Probe sequence
gaatggtgttcaagcacatacagtc

SEQ ID NO: 174627 - DNA, 25 bp, Probe sequence
gaagttgactgggacgcattcgcag

SEQ ID NO: 174628 - DNA, 25 bp, Probe sequence
gaagaaattcattcgatgttgcgtg

SEQ ID NO: 174629 - DNA, 25 bp, Probe sequence
gaacgtggtttatctgtgccagaaa

SEQ ID NO: 174630 - DNA, 25 bp, Probe sequence
gaaacaggcaacaagtatcagtcaa

SEQ ID NO: 174631 - DNA, 25 bp, Probe sequence
gaaatcagatatacgttggcagaac

SEQ ID NO: 174632 - DNA, 25 bp, Probe sequence
gagggctttatttcagttttatggt

SEQ ID NO: 174633 - DNA, 25 bp, Probe sequence
gttgggcgattcttatgacaaagga

SEQ ID NO: 174634 - DNA, 25 bp, Probe sequence
gttgcagtttatacacatacagaca

SEQ ID NO: 174635 - DNA, 25 bp, Probe sequence
gttttatggtacattgcttatggtt

SEQ ID NO: 174636 - DNA, 25 bp, Probe sequence
gtacgtgggaataagttgggcgatt

SEQ ID NO: 174637 - DNA, 25 bp, Probe sequence
gtgtttatgctttttgctttgatta

SEQ ID NO: 174638 - DNA, 25 bp, Probe sequence
gggctatttatttggttgtatgagt

SEQ ID NO: 174639 - DNA, 25 bp, Probe sequence
gggacgcattcgcagaaaattcaga

SEQ ID NO: 174640 - DNA, 25 bp, Probe sequence
ggataagagcaagattccatgatta

SEQ ID NO: 174641 - DNA, 25 bp, Probe sequence
ggcagagattttatgggctttttac

SEQ ID NO: 174642 - DNA, 25 bp, Probe sequence
tacgaagtcggcaagtcgtgccatt

SEQ ID NO: 174643 - DNA, 25 bp, Probe sequence
tatgcagacacgttcgaagttgact

SEQ ID NO: 174644 - DNA, 25 bp, Probe sequence
tatatactcgctatagggctattta

SEQ ID NO: 174645 - DNA, 25 bp, Probe sequence
ttaagcctggcgaagtaacagctaa

SEQ ID NO: 174646 - DNA, 25 bp, Probe sequence
agcatacaagccggcatttatcatg

SEQ ID NO: 174647 - DNA, 25 bp, Probe sequence
aaagcacagcagttcggcaagtcct

SEQ ID NO: 174648 - DNA, 25 bp, Probe sequence
aaacaggtgccatcggtacttttgt

SEQ ID NO: 174649 - DNA, 25 bp, Probe sequence
aaggcatggtgctcggtatacaaac

SEQ ID NO: 174650 - DNA, 25 bp, Probe sequence
caaacaccgttaaagcataccctat

SEQ ID NO: 174651 - DNA, 25 bp, Probe sequence
catttgccgcaatctttttaggtgt

SEQ ID NO: 174652 - DNA, 25 bp, Probe sequence
gctgcaggtctattgttgggtatcg

SEQ ID NO: 174653 - DNA, 25 bp, Probe sequence
gcactcacttcatttttaacaggta

SEQ ID NO: 174654 - DNA, 25 bp, Probe sequence
gaagtattattcaggtgtgtcacgc

SEQ ID NO: 174655 - DNA, 25 bp, Probe sequence
gatgtttttcatttggccaagcata

SEQ ID NO: 174656 - DNA, 25 bp, Probe sequence
gattgttaggtccactcggtttaca

SEQ ID NO: 174657 - DNA, 25 bp, Probe sequence
gttgggtatcggtggtgcattaagt

SEQ ID NO: 174658 - DNA, 25 bp, Probe sequence
gttcggcttatgtggtgccgcactt

SEQ ID NO: 174659 - DNA, 25 bp, Probe sequence
gtcaggccgttttattacgatgatg

SEQ ID NO: 174660 - DNA, 25 bp, Probe sequence
gtcagctgcaggtagtattgttttc

SEQ ID NO: 174661 - DNA, 25 bp, Probe sequence
ggcagacggcacttggtggtacttt

SEQ ID NO: 174662 - DNA, 25 bp, Probe sequence
gtcgcacctattctttatgtaatcc

SEQ ID NO: 174663 - DNA, 25 bp, Probe sequence
gtgccgcacttgcaatttatcacac

SEQ ID NO: 174664 - DNA, 25 bp, Probe sequence
gtgtggttctgtttgtattacatcg

SEQ ID NO: 174665 - DNA, 25 bp, Probe sequence
gtggaggctttatcgatttcttact

SEQ ID NO: 174666 - DNA, 25 bp, Probe sequence
ggcttattaactatcacgggcacat

SEQ ID NO: 174667 - DNA, 25 bp, Probe sequence
ggtgtttttggcgggattatcacag

SEQ ID NO: 174668 - DNA, 25 bp, Probe sequence
ggtacgcagaacatcttctttgctc

SEQ ID NO: 174669 - DNA, 25 bp, Probe sequence
ggtacttttgtttatggcttcatct

SEQ ID NO: 174670 - DNA, 25 bp, Probe sequence
tggctctagatttgtccctattgtc

SEQ ID NO: 174671 - DNA, 25 bp, Probe sequence
tgtgtcacgctttatgtcaggccgt

SEQ ID NO: 174672 - DNA, 25 bp, Probe sequence
tccctattgtcacagcatttgccgc

SEQ ID NO: 174673 - DNA, 25 bp, Probe sequence
tacctatcgcaatcttaccagctgc

SEQ ID NO: 174674 - DNA, 25 bp, Probe sequence
tatgtaatccatgccttctttgatg

SEQ ID NO: 174675 - DNA, 25 bp, Probe sequence
tttagtttcttgtttgtcgcaccta

SEQ ID NO: 174676 - DNA, 25 bp, Probe sequence
ttctttgctcaacttggtgatccag

SEQ ID NO: 174677 - DNA, 25 bp, Probe sequence
ttggtcaaaccttcagtggaggctt

SEQ ID NO: 174678 - DNA, 25 bp, Probe sequence
ttatgaccgcaatacttcacaacaa

SEQ ID NO: 174679 - DNA, 25 bp, Probe sequence
ttaatgttatccgctgcactcactt

SEQ ID NO: 174680 - DNA, 25 bp, Probe sequence
attgtacattctatgcatggaaata

SEQ ID NO: 174681 - DNA, 25 bp, Probe sequence
agatggagggcacttcttagaagag

SEQ ID NO: 174682 - DNA, 25 bp, Probe sequence
acattatttaattttgaatcccctg

SEQ ID NO: 174683 - DNA, 25 bp, Probe sequence
acatttacagcgttgcaagatcgga

SEQ ID NO: 174684 - DNA, 25 bp, Probe sequence
acatggtttaggttcaatcacagct

SEQ ID NO: 174685 - DNA, 25 bp, Probe sequence
acagtggatcagtggattgaagcta

SEQ ID NO: 174686 - DNA, 25 bp, Probe sequence
aaatgattgatcagccgattgaagg

SEQ ID NO: 174687 - DNA, 25 bp, Probe sequence
aaaaatgacaaatacgtttcatata

SEQ ID NO: 174688 - DNA, 25 bp, Probe sequence
aatgaatgcattagaggggaacttg

SEQ ID NO: 174689 - DNA, 25 bp, Probe sequence
cagtggattgaagctatgacgaaac

SEQ ID NO: 174690 - DNA, 25 bp, Probe sequence
gcttcgaaacatttacagcgttgca

SEQ ID NO: 174691 - DNA, 25 bp, Probe sequence
gaaggatatgacgtaacattattta

SEQ ID NO: 174692 - DNA, 25 bp, Probe sequence
gaaagttgacaatttttacggattg

SEQ ID NO: 174693 - DNA, 25 bp, Probe sequence
gacaatttttacggattgagttcta

SEQ ID NO: 174694 - DNA, 25 bp, Probe sequence
gacgaaacaaattaatgtacgcaaa

SEQ ID NO: 174695 - DNA, 25 bp, Probe sequence
gaggatggcttcgaaacatttacag

SEQ ID NO: 174696 - DNA, 25 bp, Probe sequence
gatggcttcgaaacatttacagcgt

SEQ ID NO: 174697 - DNA, 25 bp, Probe sequence
gatgcaagattacatgacacgatag

SEQ ID NO: 174698 - DNA, 25 bp, Probe sequence
gatcggatgcaagattacatgacac

SEQ ID NO: 174699 - DNA, 25 bp, Probe sequence
gtatagcgggctttaaagaagatgc

SEQ ID NO: 174700 - DNA, 25 bp, Probe sequence
gtagaaatcattggtatcagtggtt

SEQ ID NO: 174701 - DNA, 25 bp, Probe sequence
gtaacacatggtttaggttcaatca

SEQ ID NO: 174702 - DNA, 25 bp, Probe sequence
gtggttggagcataacttaacttta

SEQ ID NO: 174703 - DNA, 25 bp, Probe sequence
gtggaagatggagggcacttcttag

SEQ ID NO: 174704 - DNA, 25 bp, Probe sequence
gggcacttcttagaagaggatggct

SEQ ID NO: 174705 - DNA, 25 bp, Probe sequence
ggtttaggttcaatcacagctttaa

SEQ ID NO: 174706 - DNA, 25 bp, Probe sequence
ggttcaatcacagctttaaaatata

SEQ ID NO: 174707 - DNA, 25 bp, Probe sequence
ggatacatattttgtaacacatggt

SEQ ID NO: 174708 - DNA, 25 bp, Probe sequence
ggagcataacttaactttagaagga

SEQ ID NO: 174709 - DNA, 25 bp, Probe sequence
tacggattgagttctaaaaatgaca

SEQ ID NO: 174710 - DNA, 25 bp, Probe sequence
tcattggtatcagtggttggagcat

SEQ ID NO: 174711 - DNA, 25 bp, Probe sequence
tttacagcgttgcaagatcggatgc

SEQ ID NO: 174712 - DNA, 25 bp, Probe sequence
ttaattttgaatcccctgaagcgaa

SEQ ID NO: 174713 - DNA, 25 bp, Probe sequence
ttgatcagccgattgaaggcttttt

SEQ ID NO: 174714 - DNA, 25 bp, Probe sequence
tcttaagttggactaccactccctg

SEQ ID NO: 174715 - DNA, 25 bp, Probe sequence
atactgggttgacatggactccccc

SEQ ID NO: 174716 - DNA, 25 bp, Probe sequence
atagcggctctatgccgtttgctca

SEQ ID NO: 174717 - DNA, 25 bp, Probe sequence
atagagtggtttccttctcatatta

SEQ ID NO: 174718 - DNA, 25 bp, Probe sequence
ataattacgatttcacttccgcagc

SEQ ID NO: 174719 - DNA, 25 bp, Probe sequence
ataatatcactcttagttgccctaa

SEQ ID NO: 174720 - DNA, 25 bp, Probe sequence
atgggatacccatggcttaccagtt

SEQ ID NO: 174721 - DNA, 25 bp, Probe sequence
agtacggagccgattctttaagatg

SEQ ID NO: 174722 - DNA, 25 bp, Probe sequence
agttctcatgaagtagcgcaaggct

SEQ ID NO: 174723 - DNA, 25 bp, Probe sequence
aaacgtgctttatctttaggacata

SEQ ID NO: 174724 - DNA, 25 bp, Probe sequence
aacactttccagctgattttattgc

SEQ ID NO: 174725 - DNA, 25 bp, Probe sequence
aaggtgactccttattgtacacatg

SEQ ID NO: 174726 - DNA, 25 bp, Probe sequence
aatacattcctccttttgaaagcga

SEQ ID NO: 174727 - DNA, 25 bp, Probe sequence
aatttttaatcaacactttccagct

SEQ ID NO: 174728 - DNA, 25 bp, Probe sequence
ctccctggactttgcctgcaaatgt

SEQ ID NO: 174729 - DNA, 25 bp, Probe sequence
ctctttctcgcttaaacaccttaat

SEQ ID NO: 174730 - DNA, 25 bp, Probe sequence
gaattatctagacaggctcgcaaaa

SEQ ID NO: 174731 - DNA, 25 bp, Probe sequence
gataggttccctgaattagttggta

SEQ ID NO: 174732 - DNA, 25 bp, Probe sequence
gactccccctatataactcttgaga

SEQ ID NO: 174733 - DNA, 25 bp, Probe sequence
gagaggctggttttacagtttacta

SEQ ID NO: 174734 - DNA, 25 bp, Probe sequence
gatgtttggtttgatagcggctcta

SEQ ID NO: 174735 - DNA, 25 bp, Probe sequence
gatcaaaccgctttaagttctcatg

SEQ ID NO: 174736 - DNA, 25 bp, Probe sequence
gtttatcttctgatgctgagttaac

SEQ ID NO: 174737 - DNA, 25 bp, Probe sequence
gtattgttcatatagcaccagctca

SEQ ID NO: 174738 - DNA, 25 bp, Probe sequence
gtaatcacgaatacgcaccaagtag

SEQ ID NO: 174739 - DNA, 25 bp, Probe sequence
gggccttaatttcggatagtgctcc

SEQ ID NO: 174740 - DNA, 25 bp, Probe sequence
ggggaagatgactaccaattggttt

SEQ ID NO: 174741 - DNA, 25 bp, Probe sequence
ggctccatttgttccatttatatct

SEQ ID NO: 174742 - DNA, 25 bp, Probe sequence
tgaatttttcttctgtgggaccaaa

SEQ ID NO: 174743 - DNA, 25 bp, Probe sequence
tcctcatgctggccatgttcttgga

SEQ ID NO: 174744 - DNA, 25 bp, Probe sequence
tagataattgggctctttctcgctt

SEQ ID NO: 174745 - DNA, 25 bp, Probe sequence
tttgctcagcatcattatccttttg

SEQ ID NO: 174746 - DNA, 25 bp, Probe sequence
tttcacttccgcagccagattaatt

SEQ ID NO: 174747 - DNA, 25 bp, Probe sequence
tttatcaagactagtggctccattt

SEQ ID NO: 174748 - DNA, 25 bp, Probe sequence
ataggagcggggataacaggtttat

SEQ ID NO: 174749 - DNA, 25 bp, Probe sequence
attaccgcatgtacttggacatcga

SEQ ID NO: 174750 - DNA, 25 bp, Probe sequence
atcgtttgccgaaaagtatgccaca

SEQ ID NO: 174751 - DNA, 25 bp, Probe sequence
atggtgacatttctgttggtgcatt

SEQ ID NO: 174752 - DNA, 25 bp, Probe sequence
agggcctgaatcttatttaggtaga

SEQ ID NO: 174753 - DNA, 25 bp, Probe sequence
aaagacaattatatcctggcgcacc

SEQ ID NO: 174754 - DNA, 25 bp, Probe sequence
aacaaacatatccacgacttagagt

SEQ ID NO: 174755 - DNA, 25 bp, Probe sequence
aacaggtttatcaagtgcatatttt

SEQ ID NO: 174756 - DNA, 25 bp, Probe sequence
aacgatggatagtacgactgttgca

SEQ ID NO: 174757 - DNA, 25 bp, Probe sequence
aagttgctgctgaagaagtaatcgc

SEQ ID NO: 174758 - DNA, 25 bp, Probe sequence
cgaaaagtatgccacagtaccatgt

SEQ ID NO: 174759 - DNA, 25 bp, Probe sequence
ccaggtgatactgtggttgatgatc

SEQ ID NO: 174760 - DNA, 25 bp, Probe sequence
gcaactgttgtattggcatttgatg

SEQ ID NO: 174761 - DNA, 25 bp, Probe sequence
gaattagtatcgattgtacgtagag

SEQ ID NO: 174762 - DNA, 25 bp, Probe sequence
gaagaggcattcggaagtctgataa

SEQ ID NO: 174763 - DNA, 25 bp, Probe sequence
gaagcggttggactacctgattgta

SEQ ID NO: 174764 - DNA, 25 bp, Probe sequence
gacttagagtaactggtgcatcttt

SEQ ID NO: 174765 - DNA, 25 bp, Probe sequence
gagcctttaatgggtggtatttatg

SEQ ID NO: 174766 - DNA, 25 bp, Probe sequence
ggtaaggttttgattcgtgcgtatg

SEQ ID NO: 174767 - DNA, 25 bp, Probe sequence
gatcctgaatttacaattgtcaatc

SEQ ID NO: 174768 - DNA, 25 bp, Probe sequence
gatcctaatattgatgtaaccatct

SEQ ID NO: 174769 - DNA, 25 bp, Probe sequence
gatattgttacaaatacgactggac

SEQ ID NO: 174770 - DNA, 25 bp, Probe sequence
gattcgtgcgtatgtaggtaaacca

SEQ ID NO: 174771 - DNA, 25 bp, Probe sequence
gattcaatcgtatcgtaaagatggt

SEQ ID NO: 174772 - DNA, 25 bp, Probe sequence
gttggtgcatttttcagagcaagat

SEQ ID NO: 174773 - DNA, 25 bp, Probe sequence
gtacgactgttgcaactgttgtatt

SEQ ID NO: 174774 - DNA, 25 bp, Probe sequence
gtaaccatctttgaagcatcgaatc

SEQ ID NO: 174775 - DNA, 25 bp, Probe sequence
gtgactaaatcagtggctattatag

SEQ ID NO: 174776 - DNA, 25 bp, Probe sequence
ggtgcatcttttgaagcggttggac

SEQ ID NO: 174777 - DNA, 25 bp, Probe sequence
ggttcggacaagatccagcatttga

SEQ ID NO: 174778 - DNA, 25 bp, Probe sequence
tgatgagtacgtttcctaattttaa

SEQ ID NO: 174779 - DNA, 25 bp, Probe sequence
tacaattgtcaatcgtttgccgaaa

SEQ ID NO: 174780 - DNA, 25 bp, Probe sequence
ttatatgattgaactagggcctgaa

SEQ ID NO: 174781 - DNA, 25 bp, Probe sequence
ttgaagcatcgaatcgtccgggggg

SEQ ID NO: 174782 - DNA, 25 bp, Probe sequence
ataggtggtttatcaccattagcag

SEQ ID NO: 174783 - DNA, 25 bp, Probe sequence
atgatccatatccacaagaactaga

SEQ ID NO: 174784 - DNA, 25 bp, Probe sequence
aggattaaaacacatttcaccattt

SEQ ID NO: 174785 - DNA, 25 bp, Probe sequence
agaactagaacatactgcgctttta

SEQ ID NO: 174786 - DNA, 25 bp, Probe sequence
agaacatactgcgcttttaattaaa

SEQ ID NO: 174787 - DNA, 25 bp, Probe sequence
acgccagtaggttttgtatgtgagc

SEQ ID NO: 174788 - DNA, 25 bp, Probe sequence
acaggtacaccttggttagggccag

SEQ ID NO: 174789 - DNA, 25 bp, Probe sequence
acatccattatttatcggtgcaatt

SEQ ID NO: 174790 - DNA, 25 bp, Probe sequence
aaacattagctcaaataccggaaga

SEQ ID NO: 174791 - DNA, 25 bp, Probe sequence
aaacgtgctgatgaagaagctgcaa

SEQ ID NO: 174792 - DNA, 25 bp, Probe sequence
aaaactttatatatacgccagtagg

SEQ ID NO: 174793 - DNA, 25 bp, Probe sequence
aaaatgccgaatacacatccattat

SEQ ID NO: 174794 - DNA, 25 bp, Probe sequence
gcaccacattattcttcattttcag

SEQ ID NO: 174795 - DNA, 25 bp, Probe sequence
gaattattatcgtccaaaaatgccg

SEQ ID NO: 174796 - DNA, 25 bp, Probe sequence
gaagatgcggttgaacaaatgcaca

SEQ ID NO: 174797 - DNA, 25 bp, Probe sequence
gaacatatcgcgattggttggcaat

SEQ ID NO: 174798 - DNA, 25 bp, Probe sequence
gaaacattattatgaacaacctaaa

SEQ ID NO: 174799 - DNA, 25 bp, Probe sequence
gacacggtattagttgtttcggcac

SEQ ID NO: 174800 - DNA, 25 bp, Probe sequence
gaggtgctttatgacaatgattatg

SEQ ID NO: 174801 - DNA, 25 bp, Probe sequence
gttgtttcggcacatagtttgccaa

SEQ ID NO: 174802 - DNA, 25 bp, Probe sequence
gtatgtgagcatttagaggtgcttt

SEQ ID NO: 174803 - DNA, 25 bp, Probe sequence
gtaggatcatatgacaaacgtgctg

SEQ ID NO: 174804 - DNA, 25 bp, Probe sequence
gtagtactagcaccacattattctt

SEQ ID NO: 174805 - DNA, 25 bp, Probe sequence
gtacaagatttaacacgtgatttat

SEQ ID NO: 174806 - DNA, 25 bp, Probe sequence
gtgacatagagccatattatacaga

SEQ ID NO: 174807 - DNA, 25 bp, Probe sequence
ggttagggccagatgtacaagattt

SEQ ID NO: 174808 - DNA, 25 bp, Probe sequence
tggcttatggcacaccttataaaga

SEQ ID NO: 174809 - DNA, 25 bp, Probe sequence
tggttggcaatctgaaggtaataca

SEQ ID NO: 174810 - DNA, 25 bp, Probe sequence
tcaccattagcaggtacaacagatg

SEQ ID NO: 174811 - DNA, 25 bp, Probe sequence
taaagtcaacgaaacattagctcaa

SEQ ID NO: 174812 - DNA, 25 bp, Probe sequence
tagacatggtaaacgtccatctgaa

SEQ ID NO: 174813 - DNA, 25 bp, Probe sequence
tatggtattcaacttacacatgtga

SEQ ID NO: 174814 - DNA, 25 bp, Probe sequence
tattcttcattttcagtaggatcat

SEQ ID NO: 174815 - DNA, 25 bp, Probe sequence
tttcaccatttatcgaagatgcggt

SEQ ID NO: 174816 - DNA, 25 bp, Probe sequence
attcgtacacacatatacacaaaga

SEQ ID NO: 174817 - DNA, 25 bp, Probe sequence
attaggcctagattggagaacgtct

SEQ ID NO: 174818 - DNA, 25 bp, Probe sequence
agtgcaaccagagacgttacgtaaa

SEQ ID NO: 174819 - DNA, 25 bp, Probe sequence
acagctcaagtcgaagcaggtgccg

SEQ ID NO: 174820 - DNA, 25 bp, Probe sequence
acatggtttgctttaatgaatcatt

SEQ ID NO: 174821 - DNA, 25 bp, Probe sequence
acacatctttaatttaggacacggt

SEQ ID NO: 174822 - DNA, 25 bp, Probe sequence
acacatttaccagttgataattatc

SEQ ID NO: 174823 - DNA, 25 bp, Probe sequence
aaatgtcgaggattacagacgttac

SEQ ID NO: 174824 - DNA, 25 bp, Probe sequence
aaagttaaatgtgccgctaatagga

SEQ ID NO: 174825 - DNA, 25 bp, Probe sequence
aaagccaattggtgtcgatgtagaa

SEQ ID NO: 174826 - DNA, 25 bp, Probe sequence
aattttcgattcatgggtaggtgca

SEQ ID NO: 174827 - DNA, 25 bp, Probe sequence
aattaaatcgggtattggtccagtg

SEQ ID NO: 174828 - DNA, 25 bp, Probe sequence
cacatacacctgtttggtttatgcg

SEQ ID NO: 174829 - DNA, 25 bp, Probe sequence
cagacgttacattaaaccacatatg

SEQ ID NO: 174830 - DNA, 25 bp, Probe sequence
caggctcaacaattaggcgttacta

SEQ ID NO: 174831 - DNA, 25 bp, Probe sequence
catcagccggagttgtgcgcttatg

SEQ ID NO: 174832 - DNA, 25 bp, Probe sequence
ctattcgatattacacatcagccgg

SEQ ID NO: 174833 - DNA, 25 bp, Probe sequence
ccgattgatgtattaggcctagatt

SEQ ID NO: 174834 - DNA, 25 bp, Probe sequence
gctaataggatttactggggcacca

SEQ ID NO: 174835 - DNA, 25 bp, Probe sequence
gagaaactttctcaaatagaccccg

SEQ ID NO: 174836 - DNA, 25 bp, Probe sequence
gaagcaggtgccgaattgattcaaa

SEQ ID NO: 174837 - DNA, 25 bp, Probe sequence
gaacgtctattaatcaggctcaaca

SEQ ID NO: 174838 - DNA, 25 bp, Probe sequence
gaccccgaacgagatgtaccatatg

SEQ ID NO: 174839 - DNA, 25 bp, Probe sequence
gatccatcaattttattagcaccat

SEQ ID NO: 174840 - DNA, 25 bp, Probe sequence
gatattatgacaccattaaagccaa

SEQ ID NO: 174841 - DNA, 25 bp, Probe sequence
gattgaaggcggaccatcgaaaaat

SEQ ID NO: 174842 - DNA, 25 bp, Probe sequence
ggtattggtccagtgattcataatc

SEQ ID NO: 174843 - DNA, 25 bp, Probe sequence
tggccgttcgcaaccagaatatcga

SEQ ID NO: 174844 - DNA, 25 bp, Probe sequence
tggtttatgcgacaagctggccgtt

SEQ ID NO: 174845 - DNA, 25 bp, Probe sequence
tggggcaccatttacattagcgtca

SEQ ID NO: 174846 - DNA, 25 bp, Probe sequence
tgtaggtgccagtcatttaatcaat

SEQ ID NO: 174847 - DNA, 25 bp, Probe sequence
ttcccagaagtgcaaccagagacgt

SEQ ID NO: 174848 - DNA, 25 bp, Probe sequence
tattcggtgtaggtgccagtcattt

SEQ ID NO: 174849 - DNA, 25 bp, Probe sequence
ttagcaccatggaatgtcattgaag

SEQ ID NO: 174850 - DNA, 25 bp, Probe sequence
attgaaaatacgaacgaatgagcga

SEQ ID NO: 174851 - DNA, 25 bp, Probe sequence
atacgaacgaatgagcgatatgata

SEQ ID NO: 174852 - DNA, 25 bp, Probe sequence
atgagcgatatgataatatagataa

SEQ ID NO: 174853 - DNA, 25 bp, Probe sequence
atgattaaatgtcagttttatgaca

SEQ ID NO: 174854 - DNA, 25 bp, Probe sequence
agttttatgacatttatttattgaa

SEQ ID NO: 174855 - DNA, 25 bp, Probe sequence
agaatgattttaatttaggaggcct

SEQ ID NO: 174856 - DNA, 25 bp, Probe sequence
acgaatgagcgatatgataatatag

SEQ ID NO: 174857 - DNA, 25 bp, Probe sequence
acgaacgaatgagcgatatgataat

SEQ ID NO: 174858 - DNA, 25 bp, Probe sequence
aaatacgaacgaatgagcgatatga

SEQ ID NO: 174859 - DNA, 25 bp, Probe sequence
aaaatacgaacgaatgagcgatatg

SEQ ID NO: 174860 - DNA, 25 bp, Probe sequence
aacgaatgagcgatatgataatata

SEQ ID NO: 174861 - DNA, 25 bp, Probe sequence
aatgagcgatatgataatatagata

SEQ ID NO: 174862 - DNA, 25 bp, Probe sequence
aatacgaacgaatgagcgatatgat

SEQ ID NO: 174863 - DNA, 25 bp, Probe sequence
cagttttatgacatttatttattga

SEQ ID NO: 174864 - DNA, 25 bp, Probe sequence
cgaacgaatgagcgatatgataata

SEQ ID NO: 174865 - DNA, 25 bp, Probe sequence
cgaatgagcgatatgataatataga

SEQ ID NO: 174866 - DNA, 25 bp, Probe sequence
gaatgagcgatatgataatatagat

SEQ ID NO: 174867 - DNA, 25 bp, Probe sequence
gaatgattttaatttaggaggcctt

SEQ ID NO: 174868 - DNA, 25 bp, Probe sequence
gaacgaatgagcgatatgataatat

SEQ ID NO: 174869 - DNA, 25 bp, Probe sequence
gaaaatacgaacgaatgagcgatat

SEQ ID NO: 174870 - DNA, 25 bp, Probe sequence
gattttaatttaggaggcctttatg

SEQ ID NO: 174871 - DNA, 25 bp, Probe sequence
gttttatgacatttatttattgaaa

SEQ ID NO: 174872 - DNA, 25 bp, Probe sequence
gtcagttttatgacatttatttatt

SEQ ID NO: 174873 - DNA, 25 bp, Probe sequence
tgattttaatttaggaggcctttat

SEQ ID NO: 174874 - DNA, 25 bp, Probe sequence
tgagcgatatgataatatagataag

SEQ ID NO: 174875 - DNA, 25 bp, Probe sequence
tgaaaatacgaacgaatgagcgata

SEQ ID NO: 174876 - DNA, 25 bp, Probe sequence
tcagttttatgacatttatttattg

SEQ ID NO: 174877 - DNA, 25 bp, Probe sequence
taatttaggaggcctttatggtgca

SEQ ID NO: 174878 - DNA, 25 bp, Probe sequence
tacgaacgaatgagcgatatgataa

SEQ ID NO: 174879 - DNA, 25 bp, Probe sequence
tattgaaaatacgaacgaatgagcg

SEQ ID NO: 174880 - DNA, 25 bp, Probe sequence
tttaatttaggaggcctttatggtg

SEQ ID NO: 174881 - DNA, 25 bp, Probe sequence
ttttatgacatttatttattgaaaa

SEQ ID NO: 174882 - DNA, 25 bp, Probe sequence
ttaatttaggaggcctttatggtgc

SEQ ID NO: 174883 - DNA, 25 bp, Probe sequence
ttgaaaatacgaacgaatgagcgat

SEQ ID NO: 174884 - DNA, 25 bp, Probe sequence
attacttactattagctccaaaatg

SEQ ID NO: 174885 - DNA, 25 bp, Probe sequence
atttgtgatggttgctttgcctgtg

SEQ ID NO: 174886 - DNA, 25 bp, Probe sequence
atggcctcaagtgtggcctgtacct

SEQ ID NO: 174887 - DNA, 25 bp, Probe sequence
atcaggaaacattattacgagacta

SEQ ID NO: 174888 - DNA, 25 bp, Probe sequence
atcgaacatcgacatcatatgaatt

SEQ ID NO: 174889 - DNA, 25 bp, Probe sequence
atgcgatgtatttattcttatttat

SEQ ID NO: 174890 - DNA, 25 bp, Probe sequence
atggcaatggtatcaatcgggactt

SEQ ID NO: 174891 - DNA, 25 bp, Probe sequence
aaatttaactctaatgcgatgtatt

SEQ ID NO: 174892 - DNA, 25 bp, Probe sequence
aacatttgaaagaatctgcagtcag

SEQ ID NO: 174893 - DNA, 25 bp, Probe sequence
aagagggagagacgcatttaatatt

SEQ ID NO: 174894 - DNA, 25 bp, Probe sequence
aatccaactcattattgttattgta

SEQ ID NO: 174895 - DNA, 25 bp, Probe sequence
aataaaagattacatgcccttcgta

SEQ ID NO: 174896 - DNA, 25 bp, Probe sequence
caagcatatggcttatggcctcaag

SEQ ID NO: 174897 - DNA, 25 bp, Probe sequence
cagtgcattaatttttccatatgtt

SEQ ID NO: 174898 - DNA, 25 bp, Probe sequence
ctcaagtgtggcctgtacctgaaga

SEQ ID NO: 174899 - DNA, 25 bp, Probe sequence
ctttgctctaacatattacttacta

SEQ ID NO: 174900 - DNA, 25 bp, Probe sequence
gaaaaacacatgtctcaatttatgc

SEQ ID NO: 174901 - DNA, 25 bp, Probe sequence
gacgcatttaatattatctttaggt

SEQ ID NO: 174902 - DNA, 25 bp, Probe sequence
gattacatgcccttcgtaaagagaa

SEQ ID NO: 174903 - DNA, 25 bp, Probe sequence
gttgtactcattttctatattgtag

SEQ ID NO: 174904 - DNA, 25 bp, Probe sequence
gtttgttatttgtactgtgtttgca

SEQ ID NO: 174905 - DNA, 25 bp, Probe sequence
gtctttttacttattttgctgggtg

SEQ ID NO: 174906 - DNA, 25 bp, Probe sequence
ggtcatttcatggtctttttactta

SEQ ID NO: 174907 - DNA, 25 bp, Probe sequence
ggtttacgcttaagatggcaatggt

SEQ ID NO: 174908 - DNA, 25 bp, Probe sequence
ggttgctttgcctgtgttaatagaa

SEQ ID NO: 174909 - DNA, 25 bp, Probe sequence
tgttattgtaatgttcccgttgttt

SEQ ID NO: 174910 - DNA, 25 bp, Probe sequence
tggttatcatatccattagtgacag

SEQ ID NO: 174911 - DNA, 25 bp, Probe sequence
tgtggcattttatatttgttttgga

SEQ ID NO: 174912 - DNA, 25 bp, Probe sequence
tccatatgttggtttacgcttaaga

SEQ ID NO: 174913 - DNA, 25 bp, Probe sequence
tcaatcgggacttaaaacatggcaa

SEQ ID NO: 174914 - DNA, 25 bp, Probe sequence
taatgttcccgttgttttacaatat

SEQ ID NO: 174915 - DNA, 25 bp, Probe sequence
tagatatacttttaccagttccaaa

SEQ ID NO: 174916 - DNA, 25 bp, Probe sequence
tatgacgttattctatgttgtactc

SEQ ID NO: 174917 - DNA, 25 bp, Probe sequence
ttgctgggtgcatttatttttggat

SEQ ID NO: 174918 - DNA, 25 bp, Probe sequence
atttgtgcgtttatcgttaatcccg

SEQ ID NO: 174919 - DNA, 25 bp, Probe sequence
atattatagacgaaccattccttgg

SEQ ID NO: 174920 - DNA, 25 bp, Probe sequence
atcaatttcagatatcaacattaat

SEQ ID NO: 174921 - DNA, 25 bp, Probe sequence
atggcgctggtaagagtacaacgat

SEQ ID NO: 174922 - DNA, 25 bp, Probe sequence
agaacagcttacaggtggatatgga

SEQ ID NO: 174923 - DNA, 25 bp, Probe sequence
agaaccgttctaatgagtacacata

SEQ ID NO: 174924 - DNA, 25 bp, Probe sequence
acgatatatatattcatgtgacgca

SEQ ID NO: 174925 - DNA, 25 bp, Probe sequence
aacatatgctaggattgcttacacc

SEQ ID NO: 174926 - DNA, 25 bp, Probe sequence
aagttatcttatattccggaatcac

SEQ ID NO: 174927 - DNA, 25 bp, Probe sequence
aagtcatgattatttgtgcgtttat

SEQ ID NO: 174928 - DNA, 25 bp, Probe sequence
aatcccgaattgtatattatagacg

SEQ ID NO: 174929 - DNA, 25 bp, Probe sequence
cttatattccggaatcaccggttat

SEQ ID NO: 174930 - DNA, 25 bp, Probe sequence
gccattattaaagacattccgttta

SEQ ID NO: 174931 - DNA, 25 bp, Probe sequence
gcgtttatcgttaatcccgaattgt

SEQ ID NO: 174932 - DNA, 25 bp, Probe sequence
gaaggtgaagtcgttgcatttggag

SEQ ID NO: 174933 - DNA, 25 bp, Probe sequence
gaaaacgccctgtaattaaagatat

SEQ ID NO: 174934 - DNA, 25 bp, Probe sequence
gagatgacagcaatggcatatgata

SEQ ID NO: 174935 - DNA, 25 bp, Probe sequence
gagtacaacgattaaacatatgcta

SEQ ID NO: 174936 - DNA, 25 bp, Probe sequence
gatccattaggaattcaatccatgt

SEQ ID NO: 174937 - DNA, 25 bp, Probe sequence
gttggacttattggccttaatggcg

SEQ ID NO: 174938 - DNA, 25 bp, Probe sequence
gattgcttacacctatggaaggatc

SEQ ID NO: 174939 - DNA, 25 bp, Probe sequence
gtacacatattttagcaacagctga

SEQ ID NO: 174940 - DNA, 25 bp, Probe sequence
gtgacgcaaggtggagatgtacatg

SEQ ID NO: 174941 - DNA, 25 bp, Probe sequence
gtgatcgttttatcatactagacga

SEQ ID NO: 174942 - DNA, 25 bp, Probe sequence
ggtggatatggaaaacgccctgtaa

SEQ ID NO: 174943 - DNA, 25 bp, Probe sequence
ggagatttagaagcattgagacaac

SEQ ID NO: 174944 - DNA, 25 bp, Probe sequence
ggaattcaatccatgttagatttaa

SEQ ID NO: 174945 - DNA, 25 bp, Probe sequence
ggcatatgatattgatcgtgatgaa

SEQ ID NO: 174946 - DNA, 25 bp, Probe sequence
tggaaggatctctatcaatttcaga

SEQ ID NO: 174947 - DNA, 25 bp, Probe sequence
tgaagtcgttgcatttggagattta

SEQ ID NO: 174948 - DNA, 25 bp, Probe sequence
tattggccttaatggcgctggtaag

SEQ ID NO: 174949 - DNA, 25 bp, Probe sequence
tattcatgtgacgcaaggtggagat

SEQ ID NO: 174950 - DNA, 25 bp, Probe sequence
ttccgagtcatttttctaaggggat

SEQ ID NO: 174951 - DNA, 25 bp, Probe sequence
ttgagacaacaaactggcttacata

SEQ ID NO: 174952 - DNA, 25 bp, Probe sequence
attctacaatcctgaatcactcgat

SEQ ID NO: 174953 - DNA, 25 bp, Probe sequence
atagtggtattattttgcatgatat

SEQ ID NO: 174954 - DNA, 25 bp, Probe sequence
atcatcataactttgcgagtggctt

SEQ ID NO: 174955 - DNA, 25 bp, Probe sequence
agatggtgcacctttatcaccggca

SEQ ID NO: 174956 - DNA, 25 bp, Probe sequence
acgtatcacacgtcatttattgaaa

SEQ ID NO: 174957 - DNA, 25 bp, Probe sequence
acatatccagctgctagttctcatc

SEQ ID NO: 174958 - DNA, 25 bp, Probe sequence
aagcctgaagaaattgtacatgtta

SEQ ID NO: 174959 - DNA, 25 bp, Probe sequence
aatgctaatttacaacgtatcacac

SEQ ID NO: 174960 - DNA, 25 bp, Probe sequence
aatcccggagattcagttgatcact

SEQ ID NO: 174961 - DNA, 25 bp, Probe sequence
aatttgtgacatttatccattgtta

SEQ ID NO: 174962 - DNA, 25 bp, Probe sequence
aattgagtggtcctgttgcgacgtc

SEQ ID NO: 174963 - DNA, 25 bp, Probe sequence
cagctgctagttctcatcatcataa

SEQ ID NO: 174964 - DNA, 25 bp, Probe sequence
cttagtgcataaagctacacagggt

SEQ ID NO: 174965 - DNA, 25 bp, Probe sequence
ctcgattgcgagtgatgaagtagtt

SEQ ID NO: 174966 - DNA, 25 bp, Probe sequence
gcgacgtcgtatacagtcgaaggta

SEQ ID NO: 174967 - DNA, 25 bp, Probe sequence
gcgagtggcttaagctatcatgtat

SEQ ID NO: 174968 - DNA, 25 bp, Probe sequence
gcacctttatcaccggcagaaatac

SEQ ID NO: 174969 - DNA, 25 bp, Probe sequence
gaagcagctcgtgaattgaacattg

SEQ ID NO: 174970 - DNA, 25 bp, Probe sequence
gaagcgaaattttggacggctacaa

SEQ ID NO: 174971 - DNA, 25 bp, Probe sequence
gaacgattttacacatatccagctg

SEQ ID NO: 174972 - DNA, 25 bp, Probe sequence
gaacaatttgtagatggtgcacctt

SEQ ID NO: 174973 - DNA, 25 bp, Probe sequence
gactagcgacaactgaagatcaatt

SEQ ID NO: 174974 - DNA, 25 bp, Probe sequence
gagatttctcattatttgctagata

SEQ ID NO: 174975 - DNA, 25 bp, Probe sequence
gatgaagtagttgaagcagctcgtg

SEQ ID NO: 174976 - DNA, 25 bp, Probe sequence
gatatggcaacaatcaagcctgaag

SEQ ID NO: 174977 - DNA, 25 bp, Probe sequence
gattttatctcatcatggtaagtta

SEQ ID NO: 174978 - DNA, 25 bp, Probe sequence
gattatatgacattacatttgcaag

SEQ ID NO: 174979 - DNA, 25 bp, Probe sequence
gttgatcactttttcttagtgcata

SEQ ID NO: 174980 - DNA, 25 bp, Probe sequence
gtcaaccaaattagactagcgacaa

SEQ ID NO: 174981 - DNA, 25 bp, Probe sequence
ggtgacatcataaactatcgcggaa

SEQ ID NO: 174982 - DNA, 25 bp, Probe sequence
ggtcctgttgcgacgtcgtatacag

SEQ ID NO: 174983 - DNA, 25 bp, Probe sequence
tgacaagggtcagtttacagataaa

SEQ ID NO: 174984 - DNA, 25 bp, Probe sequence
tacacagggtgtaacagcacaaggt

SEQ ID NO: 174985 - DNA, 25 bp, Probe sequence
tattaggacacatctcgattgcgag

SEQ ID NO: 174986 - DNA, 25 bp, Probe sequence
attcgtgatcactggcaacaagctt

SEQ ID NO: 174987 - DNA, 25 bp, Probe sequence
attacagcactattcgattttatca

SEQ ID NO: 174988 - DNA, 25 bp, Probe sequence
attatagcgaggccatcacagatga

SEQ ID NO: 174989 - DNA, 25 bp, Probe sequence
atggttacggtcaatttgttcaacg

SEQ ID NO: 174990 - DNA, 25 bp, Probe sequence
atgtagctttacgtatcagtttaat

SEQ ID NO: 174991 - DNA, 25 bp, Probe sequence
atggaaactgatacaacgcttgcta

SEQ ID NO: 174992 - DNA, 25 bp, Probe sequence
aggggctttaggatcaactgaattc

SEQ ID NO: 174993 - DNA, 25 bp, Probe sequence
agaagatcatttattggctactcaa

SEQ ID NO: 174994 - DNA, 25 bp, Probe sequence
accatattatccgttcccattaatt

SEQ ID NO: 174995 - DNA, 25 bp, Probe sequence
actgaattcacgtcaatgcgcgaag

SEQ ID NO: 174996 - DNA, 25 bp, Probe sequence
aaagcacaactagccattttagatg

SEQ ID NO: 174997 - DNA, 25 bp, Probe sequence
gaaccacgtctaggtaaccaatacg

SEQ ID NO: 174998 - DNA, 25 bp, Probe sequence
aaggtatcttttcatttgatgtact

SEQ ID NO: 174999 - DNA, 25 bp, Probe sequence
aaggcagtgctcaaggtgatgtgaa

SEQ ID NO: 175000 - DNA, 25 bp, Probe sequence
aattatctttattccacgatgtgca

SEQ ID NO: 175001 - DNA, 25 bp, Probe sequence
caatctgatattgacgccttcatta

SEQ ID NO: 175002 - DNA, 25 bp, Probe sequence
gctgtgcgtgatgatgcttggttac

SEQ ID NO: 175003 - DNA, 25 bp, Probe sequence
gaatttgaacttactgcaatcgaaa

SEQ ID NO: 175004 - DNA, 25 bp, Probe sequence
gaagcgactcaattagagccagtta

SEQ ID NO: 175005 - DNA, 25 bp, Probe sequence
gacgattcaagcattcatccattcg

SEQ ID NO: 175006 - DNA, 25 bp, Probe sequence
gacgccttcattagtttgaatcaac

SEQ ID NO: 175007 - DNA, 25 bp, Probe sequence
gagcaatatcgcattcgtgatcact

SEQ ID NO: 175008 - DNA, 25 bp, Probe sequence
gaggttgctttacatgatcattcac

SEQ ID NO: 175009 - DNA, 25 bp, Probe sequence
gatgcgaaagggcgtcatgatgaat

SEQ ID NO: 175010 - DNA, 25 bp, Probe sequence
gataaacgtttgcctcaagttatta

SEQ ID NO: 175011 - DNA, 25 bp, Probe sequence
gttcatagcgaactagattctgttg

SEQ ID NO: 175012 - DNA, 25 bp, Probe sequence
gtttggtattattttcgcagtatta

SEQ ID NO: 175013 - DNA, 25 bp, Probe sequence
gtactagggcttcaagacattcata

SEQ ID NO: 175014 - DNA, 25 bp, Probe sequence
gtacttattcttgatgatggcttag

SEQ ID NO: 175015 - DNA, 25 bp, Probe sequence
ggttggtctgaaacgcatcatgacg

SEQ ID NO: 175016 - DNA, 25 bp, Probe sequence
tcaacaacgccagcaattggttcaa

SEQ ID NO: 175017 - DNA, 25 bp, Probe sequence
tattgagccaatcacattcccagaa

SEQ ID NO: 175018 - DNA, 25 bp, Probe sequence
tttgttatcggtatcatcatgtcta

SEQ ID NO: 175019 - DNA, 25 bp, Probe sequence
ttacctaatggtgctgtgcgtgatg

SEQ ID NO: 175020 - DNA, 25 bp, Probe sequence
atcaagggttttagtggacaagaca

SEQ ID NO: 175021 - DNA, 25 bp, Probe sequence
atcagcacatgcatgtattggtatg

SEQ ID NO: 175022 - DNA, 25 bp, Probe sequence
atcttgttggttttatgcgtgcaac

SEQ ID NO: 175023 - DNA, 25 bp, Probe sequence
atgcgtgcaacggaagtgacaataa

SEQ ID NO: 175024 - DNA, 25 bp, Probe sequence
atggctcaaggatttcgccgaatga

SEQ ID NO: 175025 - DNA, 25 bp, Probe sequence
acagttcgttggttgtttctcacat

SEQ ID NO: 175026 - DNA, 25 bp, Probe sequence
acaaaaggttgttgctgaagttatt

SEQ ID NO: 175027 - DNA, 25 bp, Probe sequence
aaatcggatatacaatcggcaattg

SEQ ID NO: 175028 - DNA, 25 bp, Probe sequence
aaatccaggctttgtccaatgtgca

SEQ ID NO: 175029 - DNA, 25 bp, Probe sequence
aaatcgctaatgttgattactttga

SEQ ID NO: 175030 - DNA, 25 bp, Probe sequence
aaaaatgtttatgatggcgaagaat

SEQ ID NO: 175031 - DNA, 25 bp, Probe sequence
aacatggcattcagtcacaaaaggt

SEQ ID NO: 175032 - DNA, 25 bp, Probe sequence
aagagtttgtcagatatggctcaag

SEQ ID NO: 175033 - DNA, 25 bp, Probe sequence
aagttgtatcgagtgtggttttgta

SEQ ID NO: 175034 - DNA, 25 bp, Probe sequence
aattcttataatcagcacatgcatg

SEQ ID NO: 175035 - DNA, 25 bp, Probe sequence
caggctttgtccaatgtgcaactgg

SEQ ID NO: 175036 - DNA, 25 bp, Probe sequence
gaacttctgcatattcttgaattta

SEQ ID NO: 175037 - DNA, 25 bp, Probe sequence
gaaattagactatgatccaaatgta

SEQ ID NO: 175038 - DNA, 25 bp, Probe sequence
gacgaaactgcaaaatatcctgtaa

SEQ ID NO: 175039 - DNA, 25 bp, Probe sequence
gatttcgccgaatgatgcaatataa

SEQ ID NO: 175040 - DNA, 25 bp, Probe sequence
gattactttgaacttctgcatattc

SEQ ID NO: 175041 - DNA, 25 bp, Probe sequence
gttcgttggttgtttctcacattaa

SEQ ID NO: 175042 - DNA, 25 bp, Probe sequence
gttttgtaaatccaggctttgtcca

SEQ ID NO: 175043 - DNA, 25 bp, Probe sequence
gtttcttttaatattatgtgtccta

SEQ ID NO: 175044 - DNA, 25 bp, Probe sequence
gtaaaagttcaaatgattcgaccga

SEQ ID NO: 175045 - DNA, 25 bp, Probe sequence
gtccaatgtgcaactggaggagagc

SEQ ID NO: 175046 - DNA, 25 bp, Probe sequence
gtgtcctaatagtagcatttattca

SEQ ID NO: 175047 - DNA, 25 bp, Probe sequence
ggttgtttctcacattaacagttaa

SEQ ID NO: 175048 - DNA, 25 bp, Probe sequence
ggattttatgaccgatgatgaagaa

SEQ ID NO: 175049 - DNA, 25 bp, Probe sequence
ggatacggattttatgaccgatgat

SEQ ID NO: 175050 - DNA, 25 bp, Probe sequence
ggaggagagcaatgaaacatggcat

SEQ ID NO: 175051 - DNA, 25 bp, Probe sequence
ggaaaagtgagaccatggagagaaa

SEQ ID NO: 175052 - DNA, 25 bp, Probe sequence
tgggggtttcttttaatattatgtg

SEQ ID NO: 175053 - DNA, 25 bp, Probe sequence
ttaaacaaaagccaacagttcgttg

SEQ ID NO: 175054 - DNA, 25 bp, Probe sequence
attgggctttaggtcatatacatga

SEQ ID NO: 175055 - DNA, 25 bp, Probe sequence
atattggtgtcttgcatggtacgta

SEQ ID NO: 175056 - DNA, 25 bp, Probe sequence
atctaagagtcatataagccctaaa

SEQ ID NO: 175057 - DNA, 25 bp, Probe sequence
aactggccagataatgtttctgtat

SEQ ID NO: 175058 - DNA, 25 bp, Probe sequence
aagcaaggtttatacgaggtcattc

SEQ ID NO: 175059 - DNA, 25 bp, Probe sequence
aagatataccgagttcattttagaa

SEQ ID NO: 175060 - DNA, 25 bp, Probe sequence
aaggcatacatattggtgtcttgca

SEQ ID NO: 175061 - DNA, 25 bp, Probe sequence
aatgatgagtcacctttagttaatg

SEQ ID NO: 175062 - DNA, 25 bp, Probe sequence
aatctttgtttatgtttgtcatggt

SEQ ID NO: 175063 - DNA, 25 bp, Probe sequence
caaagatttcatcaaactggccaga

SEQ ID NO: 175064 - DNA, 25 bp, Probe sequence
ctaaattttatcctacacagtatat

SEQ ID NO: 175065 - DNA, 25 bp, Probe sequence
gaatatccatcaagtcaaggccaaa

SEQ ID NO: 175066 - DNA, 25 bp, Probe sequence
gaacattacgtgctgaaattttctt

SEQ ID NO: 175067 - DNA, 25 bp, Probe sequence
gaaacaatttatattcacggattta

SEQ ID NO: 175068 - DNA, 25 bp, Probe sequence
gaaacggataagacatctaagcaag

SEQ ID NO: 175069 - DNA, 25 bp, Probe sequence
gaccatacagcattagttaatcgtg

SEQ ID NO: 175070 - DNA, 25 bp, Probe sequence
gagacattaatttcacctcaagatt

SEQ ID NO: 175071 - DNA, 25 bp, Probe sequence
gaggatgttcaaaaaagtgcttatg

SEQ ID NO: 175072 - DNA, 25 bp, Probe sequence
gatagtcctttcaaatctaagagtc

SEQ ID NO: 175073 - DNA, 25 bp, Probe sequence
gttgattttgtaattatcgcgggtg

SEQ ID NO: 175074 - DNA, 25 bp, Probe sequence
gttgcttattaatcgagggtgacca

SEQ ID NO: 175075 - DNA, 25 bp, Probe sequence
gtaaattgtatcattattgggcttt

SEQ ID NO: 175076 - DNA, 25 bp, Probe sequence
gtgatatgcctgtaattaactattc

SEQ ID NO: 175077 - DNA, 25 bp, Probe sequence
gggcatctaagttcctagacgatta

SEQ ID NO: 175078 - DNA, 25 bp, Probe sequence
ggaacattcgaccatacagcattag

SEQ ID NO: 175079 - DNA, 25 bp, Probe sequence
taatcgagggtgaccacttaaaatt

SEQ ID NO: 175080 - DNA, 25 bp, Probe sequence
taagccctaaaatttttgaggatgt

SEQ ID NO: 175081 - DNA, 25 bp, Probe sequence
ttatcgtttaacgcttgttattaat

SEQ ID NO: 175082 - DNA, 25 bp, Probe sequence
tatacgaggtcattcaaaactttaa

SEQ ID NO: 175083 - DNA, 25 bp, Probe sequence
tattcattgttcggatttacattta

SEQ ID NO: 175084 - DNA, 25 bp, Probe sequence
gaagcaattactaaatctggtgaaa

SEQ ID NO: 175085 - DNA, 25 bp, Probe sequence
tttacatttagatagtcctttcaaa

SEQ ID NO: 175086 - DNA, 25 bp, Probe sequence
ttaaatccaagggcatctaagttcc

SEQ ID NO: 175087 - DNA, 25 bp, Probe sequence
ttcagcggaattattagtcgatcaa

SEQ ID NO: 175088 - DNA, 25 bp, Probe sequence
atcgtcaagaactgttatggctaca

SEQ ID NO: 175089 - DNA, 25 bp, Probe sequence
atggctacaagataaattccccgag

SEQ ID NO: 175090 - DNA, 25 bp, Probe sequence
agatgaatggactgcttatagcgat

SEQ ID NO: 175091 - DNA, 25 bp, Probe sequence
acagggttttgagttgaagcgtggt

SEQ ID NO: 175092 - DNA, 25 bp, Probe sequence
aaaaacttagtgactgctgcgagag

SEQ ID NO: 175093 - DNA, 25 bp, Probe sequence
aaaatgttgttatatcggagcgtga

SEQ ID NO: 175094 - DNA, 25 bp, Probe sequence
aacgaggaaagatgctgttcttgta

SEQ ID NO: 175095 - DNA, 25 bp, Probe sequence
aacccctcacatgcatttaggtgtt

SEQ ID NO: 175096 - DNA, 25 bp, Probe sequence
aagcgatttaaagcgtgatgtgagt

SEQ ID NO: 175097 - DNA, 25 bp, Probe sequence
aaggcatgcaatttcataatcaaag

SEQ ID NO: 175098 - DNA, 25 bp, Probe sequence
aatgatgagcaaacccctcacatgc

SEQ ID NO: 175099 - DNA, 25 bp, Probe sequence
aatcagatttagaagtaccagcgaa

SEQ ID NO: 175100 - DNA, 25 bp, Probe sequence
aatcagctggactaaaaggcatgca

SEQ ID NO: 175101 - DNA, 25 bp, Probe sequence
gctgttcttgtaaatgagttgctag

SEQ ID NO: 175102 - DNA, 25 bp, Probe sequence
ggtgaacgtggctctgaccgtaaac

SEQ ID NO: 175103 - DNA, 25 bp, Probe sequence
gaatttgaactaactcataaccgag

SEQ ID NO: 175104 - DNA, 25 bp, Probe sequence
gaagtgccaacgggtgaaaagtcta

SEQ ID NO: 175105 - DNA, 25 bp, Probe sequence
gaagtaccagcgaaacgacacatga

SEQ ID NO: 175106 - DNA, 25 bp, Probe sequence
gaagcgtggtgaacgtggctctgac

SEQ ID NO: 175107 - DNA, 25 bp, Probe sequence
gaacgtacagacggcttaaaagcct

SEQ ID NO: 175108 - DNA, 25 bp, Probe sequence
gaacgaagtcgagatcagggaatga

SEQ ID NO: 175109 - DNA, 25 bp, Probe sequence
gaaatctcatgagtactgatatggc

SEQ ID NO: 175110 - DNA, 25 bp, Probe sequence
gagttgctagtaacatctgaccgag

SEQ ID NO: 175111 - DNA, 25 bp, Probe sequence
gataaaacagcacaattccaagaaa

SEQ ID NO: 175112 - DNA, 25 bp, Probe sequence
gataaattccccgagcatatgaaaa

SEQ ID NO: 175113 - DNA, 25 bp, Probe sequence
gatattgaccatgagcgaacacgtg

SEQ ID NO: 175114 - DNA, 25 bp, Probe sequence
gtgactgctgcgagagataacgata

SEQ ID NO: 175115 - DNA, 25 bp, Probe sequence
gtggctctgaccgtaaacatattga

SEQ ID NO: 175116 - DNA, 25 bp, Probe sequence
ggtgttgtgcctatgcgtgatggaa

SEQ ID NO: 175117 - DNA, 25 bp, Probe sequence
tgaaaagtctatgtttggtttggga

SEQ ID NO: 175118 - DNA, 25 bp, Probe sequence
tctgaccgagatttttttgagcaac

SEQ ID NO: 175119 - DNA, 25 bp, Probe sequence
tatagtggtcttgtagagcgattta

SEQ ID NO: 175120 - DNA, 25 bp, Probe sequence
tattttccgaacgatatggcaagca

SEQ ID NO: 175121 - DNA, 25 bp, Probe sequence
tttttttgagcaactggatccagga

SEQ ID NO: 175122 - DNA, 25 bp, Probe sequence
acgagcgcttcggtcttaactgaag

SEQ ID NO: 175123 - DNA, 25 bp, Probe sequence
attatgcatctcaggtggaatcaga

SEQ ID NO: 175124 - DNA, 25 bp, Probe sequence
accatccttgactgtacaggtagca

SEQ ID NO: 175125 - DNA, 25 bp, Probe sequence
agccatgaatggacaaccggtgagt

SEQ ID NO: 175126 - DNA, 25 bp, Probe sequence
acatttctaccatccttgactgtac

SEQ ID NO: 175127 - DNA, 25 bp, Probe sequence
acacatggtcaatttttctctattt

SEQ ID NO: 175128 - DNA, 25 bp, Probe sequence
aactttccgactctgagaaacttct

SEQ ID NO: 175129 - DNA, 25 bp, Probe sequence
aatgtctggtcaactttccgactct

SEQ ID NO: 175130 - DNA, 25 bp, Probe sequence
ctattggtgtttatggctctcttgg

SEQ ID NO: 175131 - DNA, 25 bp, Probe sequence
gccagttcgtaatgtctggtcaact

SEQ ID NO: 175132 - DNA, 25 bp, Probe sequence
gctctcttggtcgtcagactgatgg

SEQ ID NO: 175133 - DNA, 25 bp, Probe sequence
gcccaaacgttccacgatgcgattt

SEQ ID NO: 175134 - DNA, 25 bp, Probe sequence
gcatctgttatacgacgagcgcttc

SEQ ID NO: 175135 - DNA, 25 bp, Probe sequence
gcaaggaccgacaacatttctacca

SEQ ID NO: 175136 - DNA, 25 bp, Probe sequence
gagaaacttctggaatcgctagaga

SEQ ID NO: 175137 - DNA, 25 bp, Probe sequence
gaggaagcagagttcagccatgaat

SEQ ID NO: 175138 - DNA, 25 bp, Probe sequence
gatgggccctattcggatattgaga

SEQ ID NO: 175139 - DNA, 25 bp, Probe sequence
gatgtgtgtcatgtcaacagaggaa

SEQ ID NO: 175140 - DNA, 25 bp, Probe sequence
gatcttccttcaggttatgaccatc

SEQ ID NO: 175141 - DNA, 25 bp, Probe sequence
gatgcgatttgtgcccttatcgtag

SEQ ID NO: 175142 - DNA, 25 bp, Probe sequence
gttatgaccatctgtgccagttcgt

SEQ ID NO: 175143 - DNA, 25 bp, Probe sequence
gttaagcaatcagatcttccttcag

SEQ ID NO: 175144 - DNA, 25 bp, Probe sequence
gtgcccttatcgtagaagagctgtt

SEQ ID NO: 175145 - DNA, 25 bp, Probe sequence
gtgtatcaaactgctaaatcggtag

SEQ ID NO: 175146 - DNA, 25 bp, Probe sequence
ggtgccatgttgattggtctgcatc

SEQ ID NO: 175147 - DNA, 25 bp, Probe sequence
ggtctgcatcatcgcatctgttata

SEQ ID NO: 175148 - DNA, 25 bp, Probe sequence
ggagtggacagaacgacacggatat

SEQ ID NO: 175149 - DNA, 25 bp, Probe sequence
ggatgtgtcaaaacgcataccattt

SEQ ID NO: 175150 - DNA, 25 bp, Probe sequence
ggaatcagattggccgcttacacat

SEQ ID NO: 175151 - DNA, 25 bp, Probe sequence
ggcgtaatattcgtgtgcaaggacc

SEQ ID NO: 175152 - DNA, 25 bp, Probe sequence
tggccgcttacacatggtcaatttt

SEQ ID NO: 175153 - DNA, 25 bp, Probe sequence
tggggatgatgttaaggctattggt

SEQ ID NO: 175154 - DNA, 25 bp, Probe sequence
tcagactgatgggccctattcggat

SEQ ID NO: 175155 - DNA, 25 bp, Probe sequence
ttttctctattttgccgatttatga

SEQ ID NO: 175156 - DNA, 25 bp, Probe sequence
atttatgtacattgtcaatcaggtg

SEQ ID NO: 175157 - DNA, 25 bp, Probe sequence
atatcgtcacatcatctattcatag

SEQ ID NO: 175158 - DNA, 25 bp, Probe sequence
atcgtcacatcatctattcatagtt

SEQ ID NO: 175159 - DNA, 25 bp, Probe sequence
acaagcaattcatattcctcacggt

SEQ ID NO: 175160 - DNA, 25 bp, Probe sequence
aaatctaccgttcaacaagctattc

SEQ ID NO: 175161 - DNA, 25 bp, Probe sequence
aaacaaatatcgtcacatcatctat

SEQ ID NO: 175162 - DNA, 25 bp, Probe sequence
aagcaattcatattcctcacggtaa

SEQ ID NO: 175163 - DNA, 25 bp, Probe sequence
aaggtcatttaaaacaagcaattca

SEQ ID NO: 175164 - DNA, 25 bp, Probe sequence
aatgtattagatgttcgtaatgatg

SEQ ID NO: 175165 - DNA, 25 bp, Probe sequence
aattcatattcctcacggtaaactt

SEQ ID NO: 175166 - DNA, 25 bp, Probe sequence
caacatttaccagcatttttaaaat

SEQ ID NO: 175167 - DNA, 25 bp, Probe sequence
catagttctgaaatgactggtgaag

SEQ ID NO: 175168 - DNA, 25 bp, Probe sequence
ctatcaacatttaccagcattttta

SEQ ID NO: 175169 - DNA, 25 bp, Probe sequence
gcgataaatctaccgttcaacaagc

SEQ ID NO: 175170 - DNA, 25 bp, Probe sequence
gccacaaacaaatatcgtcacatca

SEQ ID NO: 175171 - DNA, 25 bp, Probe sequence
gctattcatgctttacaattaattg

SEQ ID NO: 175172 - DNA, 25 bp, Probe sequence
gcaattcatattcctcacggtaaac

SEQ ID NO: 175173 - DNA, 25 bp, Probe sequence
gacctaatttatgtacattgtcaat

SEQ ID NO: 175174 - DNA, 25 bp, Probe sequence
gaggtggctatcaacatttaccagc

SEQ ID NO: 175175 - DNA, 25 bp, Probe sequence
gatgaatggcgtaaaggtcatttaa

SEQ ID NO: 175176 - DNA, 25 bp, Probe sequence
gatttacgaatattgttaacgttag

SEQ ID NO: 175177 - DNA, 25 bp, Probe sequence
gttaacgttagaggtggctatcaac

SEQ ID NO: 175178 - DNA, 25 bp, Probe sequence
gttaccgtttgccacaaacaaatat

SEQ ID NO: 175179 - DNA, 25 bp, Probe sequence
gtcacatcatctattcatagttctg

SEQ ID NO: 175180 - DNA, 25 bp, Probe sequence
gtggctatcaacatttaccagcatt

SEQ ID NO: 175181 - DNA, 25 bp, Probe sequence
tggcgataaatctaccgttcaacaa

SEQ ID NO: 175182 - DNA, 25 bp, Probe sequence
tgttagaagttcaatagcggtagga

SEQ ID NO: 175183 - DNA, 25 bp, Probe sequence
taattggcgataaatctaccgttca

SEQ ID NO: 175184 - DNA, 25 bp, Probe sequence
tgactggtgaagaacataatgtatt

SEQ ID NO: 175185 - DNA, 25 bp, Probe sequence
tcgtaatgatgatgaatggcgtaaa

SEQ ID NO: 175186 - DNA, 25 bp, Probe sequence
tcatattcctcacggtaaactttta

SEQ ID NO: 175187 - DNA, 25 bp, Probe sequence
tcaacaagctattcatgctttacaa

SEQ ID NO: 175188 - DNA, 25 bp, Probe sequence
taaatgaagatatacctttcgataa

SEQ ID NO: 175189 - DNA, 25 bp, Probe sequence
tatacctttcgataaaaatgaccta

SEQ ID NO: 175190 - DNA, 25 bp, Probe sequence
attgcatttccgactgaaatttttg

SEQ ID NO: 175191 - DNA, 25 bp, Probe sequence
attcactagcggtgttaataactac

SEQ ID NO: 175192 - DNA, 25 bp, Probe sequence
atttgattcactagcggtgttaata

SEQ ID NO: 175193 - DNA, 25 bp, Probe sequence
atatcaacgtacgctacaaataaaa

SEQ ID NO: 175194 - DNA, 25 bp, Probe sequence
atcaacgtacgctacaaataaaatt

SEQ ID NO: 175195 - DNA, 25 bp, Probe sequence
actacggaaattgcatttccgactg

SEQ ID NO: 175196 - DNA, 25 bp, Probe sequence
aaattgcatttccgactgaaatttt

SEQ ID NO: 175197 - DNA, 25 bp, Probe sequence
aaatatcaacgtacgctacaaataa

SEQ ID NO: 175198 - DNA, 25 bp, Probe sequence
aaaaatatcaacgtacgctacaaat

SEQ ID NO: 175199 - DNA, 25 bp, Probe sequence
aaaatatcaacgtacgctacaaata

SEQ ID NO: 175200 - DNA, 25 bp, Probe sequence
aatatcaacgtacgctacaaataaa

SEQ ID NO: 175201 - DNA, 25 bp, Probe sequence
aattgcatttccgactgaaattttt

SEQ ID NO: 175202 - DNA, 25 bp, Probe sequence
cactagcggtgttaataactacgga

SEQ ID NO: 175203 - DNA, 25 bp, Probe sequence
catttgattcactagcggtgttaat

SEQ ID NO: 175204 - DNA, 25 bp, Probe sequence
ccatttgattcactagcggtgttaa

SEQ ID NO: 175205 - DNA, 25 bp, Probe sequence
gccatttgattcactagcggtgtta

SEQ ID NO: 175206 - DNA, 25 bp, Probe sequence
gcggtgttaataactacggaaattg

SEQ ID NO: 175207 - DNA, 25 bp, Probe sequence
gcatttccgactgaaatttttgaaa

SEQ ID NO: 175208 - DNA, 25 bp, Probe sequence
gaaaaatatcaacgtacgctacaaa

SEQ ID NO: 175209 - DNA, 25 bp, Probe sequence
gaaattgcatttccgactgaaattt

SEQ ID NO: 175210 - DNA, 25 bp, Probe sequence
gattcactagcggtgttaataacta

SEQ ID NO: 175211 - DNA, 25 bp, Probe sequence
gtgccatttgattcactagcggtgt

SEQ ID NO: 175212 - DNA, 25 bp, Probe sequence
gtgttaataactacggaaattgcat

SEQ ID NO: 175213 - DNA, 25 bp, Probe sequence
ggaaattgcatttccgactgaaatt

SEQ ID NO: 175214 - DNA, 25 bp, Probe sequence
tgttaataactacggaaattgcatt

SEQ ID NO: 175215 - DNA, 25 bp, Probe sequence
tgaaaaatatcaacgtacgctacaa

SEQ ID NO: 175216 - DNA, 25 bp, Probe sequence
tgccatttgattcactagcggtgtt

SEQ ID NO: 175217 - DNA, 25 bp, Probe sequence
tcaacgtacgctacaaataaaattt

SEQ ID NO: 175218 - DNA, 25 bp, Probe sequence
tagcggtgttaataactacggaaat

SEQ ID NO: 175219 - DNA, 25 bp, Probe sequence
tttgattcactagcggtgttaataa

SEQ ID NO: 175220 - DNA, 25 bp, Probe sequence
ttaataactacggaaattgcatttc

SEQ ID NO: 175221 - DNA, 25 bp, Probe sequence
ttcactagcggtgttaataactacg

SEQ ID NO: 175222 - DNA, 25 bp, Probe sequence
ttgcatttccgactgaaatttttga

SEQ ID NO: 175223 - DNA, 25 bp, Probe sequence
ttgattcactagcggtgttaataac

SEQ ID NO: 175224 - DNA, 25 bp, Probe sequence
atcgttctcctaaagatttttccat

SEQ ID NO: 175225 - DNA, 25 bp, Probe sequence
atgataataacaccactccttctga

SEQ ID NO: 175226 - DNA, 25 bp, Probe sequence
atgatatactctcaaacaactcagt

SEQ ID NO: 175227 - DNA, 25 bp, Probe sequence
atgtagggctgtagatcaagataat

SEQ ID NO: 175228 - DNA, 25 bp, Probe sequence
acaactcagtttatctacacttttt

SEQ ID NO: 175229 - DNA, 25 bp, Probe sequence
aacatagcaaactttaaatcaggaa

SEQ ID NO: 175230 - DNA, 25 bp, Probe sequence
aagatatagtatactttgcatggaa

SEQ ID NO: 175231 - DNA, 25 bp, Probe sequence
aatgacaacgacatgtttattcaag

SEQ ID NO: 175232 - DNA, 25 bp, Probe sequence
aattggaatcaaatctatcattatt

SEQ ID NO: 175233 - DNA, 25 bp, Probe sequence
caccagagcttcggcacctaaaaat

SEQ ID NO: 175234 - DNA, 25 bp, Probe sequence
catcgagacaccagagcttcggcac

SEQ ID NO: 175235 - DNA, 25 bp, Probe sequence
ctgaaaaaggtatcacttctaaaga

SEQ ID NO: 175236 - DNA, 25 bp, Probe sequence
ccactccttctgactacttttatat

SEQ ID NO: 175237 - DNA, 25 bp, Probe sequence
gctgatgctcatgttaaaaatagta

SEQ ID NO: 175238 - DNA, 25 bp, Probe sequence
gcaaaatatattactcatcgagaca

SEQ ID NO: 175239 - DNA, 25 bp, Probe sequence
gaacatgctctgactaattattatc

SEQ ID NO: 175240 - DNA, 25 bp, Probe sequence
gacatatatagcgatgattttcaaa

SEQ ID NO: 175241 - DNA, 25 bp, Probe sequence
gactacttttatataacttcagatt

SEQ ID NO: 175242 - DNA, 25 bp, Probe sequence
gactaattattatctctattttcta

SEQ ID NO: 175243 - DNA, 25 bp, Probe sequence
gacctagtgtctccaaaagacttag

SEQ ID NO: 175244 - DNA, 25 bp, Probe sequence
gagaacttatattatttcatcaatc

SEQ ID NO: 175245 - DNA, 25 bp, Probe sequence
gagattatgaacatgctctgactaa

SEQ ID NO: 175246 - DNA, 25 bp, Probe sequence
gatactttaaatcgttctcctaaag

SEQ ID NO: 175247 - DNA, 25 bp, Probe sequence
gataaacttcagattcttgaatatt

SEQ ID NO: 175248 - DNA, 25 bp, Probe sequence
gatatagattcttctaatcgtatca

SEQ ID NO: 175249 - DNA, 25 bp, Probe sequence
gattttcaaaatgctttagtagaca

SEQ ID NO: 175250 - DNA, 25 bp, Probe sequence
gtagacataattttgaacattgata

SEQ ID NO: 175251 - DNA, 25 bp, Probe sequence
gtaccaaaattgctgatgctcatgt

SEQ ID NO: 175252 - DNA, 25 bp, Probe sequence
ggcacctaaaaatatgctgttatca

SEQ ID NO: 175253 - DNA, 25 bp, Probe sequence
tgatgattcatgtagggctgtagat

SEQ ID NO: 175254 - DNA, 25 bp, Probe sequence
tctgcaacgctctaggaataaacat

SEQ ID NO: 175255 - DNA, 25 bp, Probe sequence
taaatagtgacctagtgtctccaaa

SEQ ID NO: 175256 - DNA, 25 bp, Probe sequence
ttttaataaattctgcaacgctcta

SEQ ID NO: 175257 - DNA, 25 bp, Probe sequence
ttatctctattttctagtagacagt

SEQ ID NO: 175258 - DNA, 25 bp, Probe sequence
tcccgaaagggaacacctgccgata

SEQ ID NO: 175259 - DNA, 25 bp, Probe sequence
atgtcccgaaagggaacacctgccg

SEQ ID NO: 175260 - DNA, 25 bp, Probe sequence
atcaaatcgatatacctgaggggta

SEQ ID NO: 175261 - DNA, 25 bp, Probe sequence
aggcattatcagaagtatgtcccga

SEQ ID NO: 175262 - DNA, 25 bp, Probe sequence
acaagaccaacgtttagttaatgat

SEQ ID NO: 175263 - DNA, 25 bp, Probe sequence
aaaatacagagaattaatagcctag

SEQ ID NO: 175264 - DNA, 25 bp, Probe sequence
aactctttacatcaataatcagctt

SEQ ID NO: 175265 - DNA, 25 bp, Probe sequence
aagtctgaaactctttacatcaata

SEQ ID NO: 175266 - DNA, 25 bp, Probe sequence
aatagatgataaacaagaccaacgt

SEQ ID NO: 175267 - DNA, 25 bp, Probe sequence
caaggcagcgtttatacatcttatg

SEQ ID NO: 175268 - DNA, 25 bp, Probe sequence
caaaaactaggctacttatcccctg

SEQ ID NO: 175269 - DNA, 25 bp, Probe sequence
ctacttatcccctgtaaaatacaga

SEQ ID NO: 175270 - DNA, 25 bp, Probe sequence
gccccgatagaaagtttccattcct

SEQ ID NO: 175271 - DNA, 25 bp, Probe sequence
gcttaatagctctaatcatattgta

SEQ ID NO: 175272 - DNA, 25 bp, Probe sequence
gaaagggaacacctgccgataacgc

SEQ ID NO: 175273 - DNA, 25 bp, Probe sequence
gaccaacgtttagttaatgatacat

SEQ ID NO: 175274 - DNA, 25 bp, Probe sequence
gaggggtatatattacatagtgatc

SEQ ID NO: 175275 - DNA, 25 bp, Probe sequence
gatagaaagtttccattcctcgcta

SEQ ID NO: 175276 - DNA, 25 bp, Probe sequence
gtttatacatcttatgcttattatc

SEQ ID NO: 175277 - DNA, 25 bp, Probe sequence
gtgatcaaggcagcgtttatacatc

SEQ ID NO: 175278 - DNA, 25 bp, Probe sequence
ggcagcgtttatacatcttatgctt

SEQ ID NO: 175279 - DNA, 25 bp, Probe sequence
ggctacttatcccctgtaaaataca

SEQ ID NO: 175280 - DNA, 25 bp, Probe sequence
tgccgataacgccccgatagaaagt

SEQ ID NO: 175281 - DNA, 25 bp, Probe sequence
tccattcctcgctaaagtctgaaac

SEQ ID NO: 175282 - DNA, 25 bp, Probe sequence
tttccattcctcgctaaagtctgaa

SEQ ID NO: 175283 - DNA, 25 bp, Probe sequence
taatcagcttaatagctctaatcat

SEQ ID NO: 175284 - DNA, 25 bp, Probe sequence
taacgccccgatagaaagtttccat

SEQ ID NO: 175285 - DNA, 25 bp, Probe sequence
tacatcttatgcttattatcaatta

SEQ ID NO: 175286 - DNA, 25 bp, Probe sequence
tacatagtgatcaaggcagcgttta

SEQ ID NO: 175287 - DNA, 25 bp, Probe sequence
tagaaagtttccattcctcgctaaa

SEQ ID NO: 175288 - DNA, 25 bp, Probe sequence
taggctacttatcccctgtaaaata

SEQ ID NO: 175289 - DNA, 25 bp, Probe sequence
ttatcagaagtatgtcccgaaaggg

SEQ ID NO: 175290 - DNA, 25 bp, Probe sequence
ttatgcttattatcaattatgcgaa

SEQ ID NO: 175291 - DNA, 25 bp, Probe sequence
ttcctcgctaaagtctgaaactctt

SEQ ID NO: 175292 - DNA, 25 bp, Probe sequence
attagacgaaatttacgctgactaa

SEQ ID NO: 175293 - DNA, 25 bp, Probe sequence
atcaaccaaattatcgttaaaccat

SEQ ID NO: 175294 - DNA, 25 bp, Probe sequence
atcaattagaacaagctttaagaga

SEQ ID NO: 175295 - DNA, 25 bp, Probe sequence
atgcaaatcaattagaacaagcttt

SEQ ID NO: 175296 - DNA, 25 bp, Probe sequence
atgaatgctgaacaaaaaatgagtc

SEQ ID NO: 175297 - DNA, 25 bp, Probe sequence
atgtaaaagctaacgaagaatctaa

SEQ ID NO: 175298 - DNA, 25 bp, Probe sequence
aaaccattagacgaaatttacgctg

SEQ ID NO: 175299 - DNA, 25 bp, Probe sequence
aaaaatgagtcaagtattccaagaa

SEQ ID NO: 175300 - DNA, 25 bp, Probe sequence
aaaacatctctgcattaatgaatgc

SEQ ID NO: 175301 - DNA, 25 bp, Probe sequence
aagcaatcaaagaagcattcgctaa

SEQ ID NO: 175302 - DNA, 25 bp, Probe sequence
aatgagtcaagtattccaagaaatc

SEQ ID NO: 175303 - DNA, 25 bp, Probe sequence
aatcaaagaagcattcgctaatgta

SEQ ID NO: 175304 - DNA, 25 bp, Probe sequence
caaagcaatcaaagaagcattcgct

SEQ ID NO: 175305 - DNA, 25 bp, Probe sequence
caaattatcgttaaaccattagacg

SEQ ID NO: 175306 - DNA, 25 bp, Probe sequence
ccattagacgaaatttacgctgact

SEQ ID NO: 175307 - DNA, 25 bp, Probe sequence
gcattcgctaatgtaaaagctaacg

SEQ ID NO: 175308 - DNA, 25 bp, Probe sequence
gcaagaacaagcgcaagcaattgaa

SEQ ID NO: 175309 - DNA, 25 bp, Probe sequence
gaagcattcgctaatgtaaaagcta

SEQ ID NO: 175310 - DNA, 25 bp, Probe sequence
gaacaagcgcaagcaattgaaaaag

SEQ ID NO: 175311 - DNA, 25 bp, Probe sequence
gaaaacatctctgcattaatgaatg

SEQ ID NO: 175312 - DNA, 25 bp, Probe sequence
gaaattgctgaagaagatttacaaa

SEQ ID NO: 175313 - DNA, 25 bp, Probe sequence
gagttccgtgaaactcaaattaact

SEQ ID NO: 175314 - DNA, 25 bp, Probe sequence
gagtcaagtattccaagaaatcaac

SEQ ID NO: 175315 - DNA, 25 bp, Probe sequence
gatgaaaacatctctgcattaatga

SEQ ID NO: 175316 - DNA, 25 bp, Probe sequence
gatttacaaaaagcgcaagaacaag

SEQ ID NO: 175317 - DNA, 25 bp, Probe sequence
gtattccaagaaatcaaccaaatta

SEQ ID NO: 175318 - DNA, 25 bp, Probe sequence
gtcaagtattccaagaaatcaacca

SEQ ID NO: 175319 - DNA, 25 bp, Probe sequence
gtgaaactcaaattaacttccaaca

SEQ ID NO: 175320 - DNA, 25 bp, Probe sequence
ggcagtaaatttatatgattatgca

SEQ ID NO: 175321 - DNA, 25 bp, Probe sequence
tgaaactcaaattaacttccaacaa

SEQ ID NO: 175322 - DNA, 25 bp, Probe sequence
tccgtgaaactcaaattaacttcca

SEQ ID NO: 175323 - DNA, 25 bp, Probe sequence
tccaacaaaaacaaatgcaaggtga

SEQ ID NO: 175324 - DNA, 25 bp, Probe sequence
tccaagaaatcaaccaaattatcgt

SEQ ID NO: 175325 - DNA, 25 bp, Probe sequence
ttaacttccaacaaaaacaaatgca

SEQ ID NO: 175326 - DNA, 25 bp, Probe sequence
attacagcactgattaatcaatgtt

SEQ ID NO: 175327 - DNA, 25 bp, Probe sequence
atcaacatattaccgatggaaaaac

SEQ ID NO: 175328 - DNA, 25 bp, Probe sequence
atgttatacatcaccaattaatcat

SEQ ID NO: 175329 - DNA, 25 bp, Probe sequence
accaacagtagtcatagatttagtg

SEQ ID NO: 175330 - DNA, 25 bp, Probe sequence
acggttatcgtaagattacagcact

SEQ ID NO: 175331 - DNA, 25 bp, Probe sequence
aaatgatactgtaacacaaaaagtt

SEQ ID NO: 175332 - DNA, 25 bp, Probe sequence
aaaacagacaatttattacaaagat

SEQ ID NO: 175333 - DNA, 25 bp, Probe sequence
aaaaggaaactattcaatcaaattg

SEQ ID NO: 175334 - DNA, 25 bp, Probe sequence
aagcatcatttgaactgccgagtta

SEQ ID NO: 175335 - DNA, 25 bp, Probe sequence
aagttattgaattatgtgaagctaa

SEQ ID NO: 175336 - DNA, 25 bp, Probe sequence
caatgttatacatcaccaattaatc

SEQ ID NO: 175337 - DNA, 25 bp, Probe sequence
cactgattaatcaatgttatacatc

SEQ ID NO: 175338 - DNA, 25 bp, Probe sequence
cagaagcatcatttgaactgccgag

SEQ ID NO: 175339 - DNA, 25 bp, Probe sequence
cctaaatcaacatattaccgatgga

SEQ ID NO: 175340 - DNA, 25 bp, Probe sequence
ccattatacctacggttatcgtaag

SEQ ID NO: 175341 - DNA, 25 bp, Probe sequence
gctaaccattatacctacggttatc

SEQ ID NO: 175342 - DNA, 25 bp, Probe sequence
gcatcatttgaactgccgagttaga

SEQ ID NO: 175343 - DNA, 25 bp, Probe sequence
gagttagacctaaaaagacgacaag

SEQ ID NO: 175344 - DNA, 25 bp, Probe sequence
gaagcatcatttgaactgccgagtt

SEQ ID NO: 175345 - DNA, 25 bp, Probe sequence
gaactgccgagttagacctaaaaag

SEQ ID NO: 175346 - DNA, 25 bp, Probe sequence
gaagctaaccattatacctacggtt

SEQ ID NO: 175347 - DNA, 25 bp, Probe sequence
gacgacaaggataggtaaaccgtat

SEQ ID NO: 175348 - DNA, 25 bp, Probe sequence
gagtacagagaatgatgcagaagca

SEQ ID NO: 175349 - DNA, 25 bp, Probe sequence
gttatcgtaagattacagcactgat

SEQ ID NO: 175350 - DNA, 25 bp, Probe sequence
gtgaagctaaccattatacctacgg

SEQ ID NO: 175351 - DNA, 25 bp, Probe sequence
tggtaccaacagtagtcatagattt

SEQ ID NO: 175352 - DNA, 25 bp, Probe sequence
tcgtaagattacagcactgattaat

SEQ ID NO: 175353 - DNA, 25 bp, Probe sequence
tcatttgaactgccgagttagacct

SEQ ID NO: 175354 - DNA, 25 bp, Probe sequence
tcaccaattaatcataagagagtac

SEQ ID NO: 175355 - DNA, 25 bp, Probe sequence
tatacctacggttatcgtaagatta

SEQ ID NO: 175356 - DNA, 25 bp, Probe sequence
taaccattatacctacggttatcgt

SEQ ID NO: 175357 - DNA, 25 bp, Probe sequence
taaaccgtattataaaacagacaat

SEQ ID NO: 175358 - DNA, 25 bp, Probe sequence
tatacctaaatcaacatattaccga

SEQ ID NO: 175359 - DNA, 25 bp, Probe sequence
tttgaactgccgagttagacctaaa

SEQ ID NO: 175360 - DNA, 25 bp, Probe sequence
attgatggtttatctctcattcagc

SEQ ID NO: 175361 - DNA, 25 bp, Probe sequence
attatacgcaagacccaaacactga

SEQ ID NO: 175362 - DNA, 25 bp, Probe sequence
atcacacatcctagaatcggctacc

SEQ ID NO: 175363 - DNA, 25 bp, Probe sequence
atgactaagcctttcaatatcgatg

SEQ ID NO: 175364 - DNA, 25 bp, Probe sequence
agaagcggactttcgcctaagaaca

SEQ ID NO: 175365 - DNA, 25 bp, Probe sequence
agaaattaatcatcacacatcctag

SEQ ID NO: 175366 - DNA, 25 bp, Probe sequence
aaatcactctatggctatgtcaatc

SEQ ID NO: 175367 - DNA, 25 bp, Probe sequence
aacagtccgtacatctaacaccgaa

SEQ ID NO: 175368 - DNA, 25 bp, Probe sequence
aacaccgaatgaattccaactccta

SEQ ID NO: 175369 - DNA, 25 bp, Probe sequence
aagagcacgtatcagagtagcatta

SEQ ID NO: 175370 - DNA, 25 bp, Probe sequence
aagtcgtttcacaaatggtccatta

SEQ ID NO: 175371 - DNA, 25 bp, Probe sequence
aatcggctaccaaatgcaacactta

SEQ ID NO: 175372 - DNA, 25 bp, Probe sequence
aatcgatgttgcgctaactatgaat

SEQ ID NO: 175373 - DNA, 25 bp, Probe sequence
aattcagagactttgtggacacacc

SEQ ID NO: 175374 - DNA, 25 bp, Probe sequence
cgaagtattagatcgcggtgccaat

SEQ ID NO: 175375 - DNA, 25 bp, Probe sequence
cgtgtacatatggcctctttacgta

SEQ ID NO: 175376 - DNA, 25 bp, Probe sequence
cgatgcgaaatcagtccttgtcaat

SEQ ID NO: 175377 - DNA, 25 bp, Probe sequence
gaaatggctgccttacgtgtacata

SEQ ID NO: 175378 - DNA, 25 bp, Probe sequence
gacaattcaaagtcgtttcacaaat

SEQ ID NO: 175379 - DNA, 25 bp, Probe sequence
gaggaacaaaccattgtcgaagtat

SEQ ID NO: 175380 - DNA, 25 bp, Probe sequence
gatattatgccatcatgtcggcaaa

SEQ ID NO: 175381 - DNA, 25 bp, Probe sequence
gatttaggcttaccagatattgatg

SEQ ID NO: 175382 - DNA, 25 bp, Probe sequence
gattagtgcacgaacagaggaacaa

SEQ ID NO: 175383 - DNA, 25 bp, Probe sequence
gtttatctctcattcagcaattcag

SEQ ID NO: 175384 - DNA, 25 bp, Probe sequence
gtagcattacgtatgtcacgttcta

SEQ ID NO: 175385 - DNA, 25 bp, Probe sequence
gtcacgttctactgagacaattcaa

SEQ ID NO: 175386 - DNA, 25 bp, Probe sequence
gtcggcaaagtattaacctatcaag

SEQ ID NO: 175387 - DNA, 25 bp, Probe sequence
gtccttgtcaatgaacagtccgtac

SEQ ID NO: 175388 - DNA, 25 bp, Probe sequence
ggtccattaaccattgatttcgatg

SEQ ID NO: 175389 - DNA, 25 bp, Probe sequence
gtggacacacctattattgtgatta

SEQ ID NO: 175390 - DNA, 25 bp, Probe sequence
tcgcctaagaacagaacaaccagat

SEQ ID NO: 175391 - DNA, 25 bp, Probe sequence
tccaactcctaacgatattatgcca

SEQ ID NO: 175392 - DNA, 25 bp, Probe sequence
tcgcggtgccaatgattatatgact

SEQ ID NO: 175393 - DNA, 25 bp, Probe sequence
tataaagtggttacggcgaagacgg

SEQ ID NO: 175394 - DNA, 25 bp, Probe sequence
ccaaggacgcgacaacgtaattcaa

SEQ ID NO: 175395 - DNA, 25 bp, Probe sequence
attgatttagattatgctgacgttc

SEQ ID NO: 175396 - DNA, 25 bp, Probe sequence
agtgaaaacaccacactcattgtgt

SEQ ID NO: 175397 - DNA, 25 bp, Probe sequence
acggtgtcagaacgttctcttgcag

SEQ ID NO: 175398 - DNA, 25 bp, Probe sequence
acagacagtcaattcgaagacacga

SEQ ID NO: 175399 - DNA, 25 bp, Probe sequence
acactaatgatgttacttccctttt

SEQ ID NO: 175400 - DNA, 25 bp, Probe sequence
aaatcaatcactagacctacagtta

SEQ ID NO: 175401 - DNA, 25 bp, Probe sequence
aaacacgtcttgctaatatgattca

SEQ ID NO: 175402 - DNA, 25 bp, Probe sequence
aacaacagcccatattttaaatcaa

SEQ ID NO: 175403 - DNA, 25 bp, Probe sequence
aacattcaaatccatcacagtttaa

SEQ ID NO: 175404 - DNA, 25 bp, Probe sequence
cagtttattgcggaaaacctgggca

SEQ ID NO: 175405 - DNA, 25 bp, Probe sequence
aattcacatcaagtgctcaaaactc

SEQ ID NO: 175406 - DNA, 25 bp, Probe sequence
aattgctcaattcctattagacaac

SEQ ID NO: 175407 - DNA, 25 bp, Probe sequence
caaaactttggtatcctctcactta

SEQ ID NO: 175408 - DNA, 25 bp, Probe sequence
cagtaacactggtattcgaatgatt

SEQ ID NO: 175409 - DNA, 25 bp, Probe sequence
cttctcttgtcttctaccaaatcaa

SEQ ID NO: 175410 - DNA, 25 bp, Probe sequence
gctgacgttcttggattgcaatccc

SEQ ID NO: 175411 - DNA, 25 bp, Probe sequence
gaagacagtgttttttatcaattac

SEQ ID NO: 175412 - DNA, 25 bp, Probe sequence
gaacgttctcttgcagataaagcga

SEQ ID NO: 175413 - DNA, 25 bp, Probe sequence
gaaaattagtttccgatcgggatcg

SEQ ID NO: 175414 - DNA, 25 bp, Probe sequence
gacctacagttaaacgttagcagca

SEQ ID NO: 175415 - DNA, 25 bp, Probe sequence
gatggatacaatcgtacagtttatt

SEQ ID NO: 175416 - DNA, 25 bp, Probe sequence
gatggtttgcgtgttcgtactattg

SEQ ID NO: 175417 - DNA, 25 bp, Probe sequence
gtatcctctcacttaaagatgacta

SEQ ID NO: 175418 - DNA, 25 bp, Probe sequence
gtcatgttttacctataattgctca

SEQ ID NO: 175419 - DNA, 25 bp, Probe sequence
gtgctcaaaactcagatactataaa

SEQ ID NO: 175420 - DNA, 25 bp, Probe sequence
gtgttcgtactattgaggtgtctga

SEQ ID NO: 175421 - DNA, 25 bp, Probe sequence
gtgatttcaacttctgaacatagta

SEQ ID NO: 175422 - DNA, 25 bp, Probe sequence
ggattgcaatcccaaggacgcgaca

SEQ ID NO: 175423 - DNA, 25 bp, Probe sequence
ggcaaaagtacttctcttgtcttct

SEQ ID NO: 175424 - DNA, 25 bp, Probe sequence
tgcaactctaacaacaacagcccat

SEQ ID NO: 175425 - DNA, 25 bp, Probe sequence
tcaattactatcaactgaatccagt

SEQ ID NO: 175426 - DNA, 25 bp, Probe sequence
taatgatgttacttccctttttcaa

SEQ ID NO: 175427 - DNA, 25 bp, Probe sequence
ttttcacaacaaacacgtcttgcta

SEQ ID NO: 175428 - DNA, 25 bp, Probe sequence
atattgaccctgacacgattaatgg

SEQ ID NO: 175429 - DNA, 25 bp, Probe sequence
atacacgcggcgtagactatattaa

SEQ ID NO: 175430 - DNA, 25 bp, Probe sequence
atgctacaatttatattcatccaac

SEQ ID NO: 175431 - DNA, 25 bp, Probe sequence
atgatggggtcagacttcccttact

SEQ ID NO: 175432 - DNA, 25 bp, Probe sequence
agttcaacaatatccggatcgtttc

SEQ ID NO: 175433 - DNA, 25 bp, Probe sequence
agacttcccttacttccaagatgaa

SEQ ID NO: 175434 - DNA, 25 bp, Probe sequence
acaaattatttctgcgacaccacaa

SEQ ID NO: 175435 - DNA, 25 bp, Probe sequence
aaacttccacgaaccttcattgatt

SEQ ID NO: 175436 - DNA, 25 bp, Probe sequence
aagggattaatcaatctgcgtctaa

SEQ ID NO: 175437 - DNA, 25 bp, Probe sequence
cggatcgtttcttggcatatggtgc

SEQ ID NO: 175438 - DNA, 25 bp, Probe sequence
gctttaccattcttcatgactcgta

SEQ ID NO: 175439 - DNA, 25 bp, Probe sequence
gcagcgatgaatgagctcaatgcta

SEQ ID NO: 175440 - DNA, 25 bp, Probe sequence
gaatgggttattggtgcaccgttag

SEQ ID NO: 175441 - DNA, 25 bp, Probe sequence
gaagaagctcaccaaagtgctcaag

SEQ ID NO: 175442 - DNA, 25 bp, Probe sequence
gaaccttcattgattaactctattg

SEQ ID NO: 175443 - DNA, 25 bp, Probe sequence
gaaacgcttcaaaatgatggacgat

SEQ ID NO: 175444 - DNA, 25 bp, Probe sequence
gacaccacaatctccacaatggggt

SEQ ID NO: 175445 - DNA, 25 bp, Probe sequence
gatggacgatgctggcgtagattta

SEQ ID NO: 175446 - DNA, 25 bp, Probe sequence
gatgaatttgtgggcattgccattc

SEQ ID NO: 175447 - DNA, 25 bp, Probe sequence
gataaggtctctgttgctgataaac

SEQ ID NO: 175448 - DNA, 25 bp, Probe sequence
gattgatacacacgcacatttatgg

SEQ ID NO: 175449 - DNA, 25 bp, Probe sequence
gtgcaccgttagagtctacctttat

SEQ ID NO: 175450 - DNA, 25 bp, Probe sequence
gggcattgccattccaactatagta

SEQ ID NO: 175451 - DNA, 25 bp, Probe sequence
ggtagtcaaggtactgaagttgcta

SEQ ID NO: 175452 - DNA, 25 bp, Probe sequence
ggtatgatacagcaaacttccacga

SEQ ID NO: 175453 - DNA, 25 bp, Probe sequence
ggaatgcctttaatattgatcctta

SEQ ID NO: 175454 - DNA, 25 bp, Probe sequence
tggcgctcaaagtccgttagtcaat

SEQ ID NO: 175455 - DNA, 25 bp, Probe sequence
tggcatatggtgctgtctcactacc

SEQ ID NO: 175456 - DNA, 25 bp, Probe sequence
tgaagaagcccaagcccttttgaaa

SEQ ID NO: 175457 - DNA, 25 bp, Probe sequence
tccatatttcacatttaggtggcgc

SEQ ID NO: 175458 - DNA, 25 bp, Probe sequence
tcatccaacaggttgtggcgctcaa

SEQ ID NO: 175459 - DNA, 25 bp, Probe sequence
tcactaccctatgtcgatcaagcta

SEQ ID NO: 175460 - DNA, 25 bp, Probe sequence
tttgaacctttctttgcagcgatga

SEQ ID NO: 175461 - DNA, 25 bp, Probe sequence
ttaggtggcgctttaccattcttca

SEQ ID NO: 175462 - DNA, 25 bp, Probe sequence
attgttatgggtacagctatttata

SEQ ID NO: 175463 - DNA, 25 bp, Probe sequence
attcgcaaacattaattatttggag

SEQ ID NO: 175464 - DNA, 25 bp, Probe sequence
ataaaggtgcacaagctgcttctaa

SEQ ID NO: 175465 - DNA, 25 bp, Probe sequence
atgtattaagcttactagaagtgtt

SEQ ID NO: 175466 - DNA, 25 bp, Probe sequence
agttgttggtacgattatgattaat

SEQ ID NO: 175467 - DNA, 25 bp, Probe sequence
aaggtgcacaagctgcttctaaatt

SEQ ID NO: 175468 - DNA, 25 bp, Probe sequence
aaggctttggtttatctcgtagatc

SEQ ID NO: 175469 - DNA, 25 bp, Probe sequence
aatgagattagctggcgctttcgaa

SEQ ID NO: 175470 - DNA, 25 bp, Probe sequence
aattagtagttgttggtacgattat

SEQ ID NO: 175471 - DNA, 25 bp, Probe sequence
caagctgcttctaaatttttctttt

SEQ ID NO: 175472 - DNA, 25 bp, Probe sequence
gctgggcatggttataaaggtgcac

SEQ ID NO: 175473 - DNA, 25 bp, Probe sequence
gctggcgctttcgaaatgattggtt

SEQ ID NO: 175474 - DNA, 25 bp, Probe sequence
gcagtttaccaaaagtacaaaatag

SEQ ID NO: 175475 - DNA, 25 bp, Probe sequence
gcacaagctgcttctaaatttttct

SEQ ID NO: 175476 - DNA, 25 bp, Probe sequence
gaagtgttaagcttaactcgtaata

SEQ ID NO: 175477 - DNA, 25 bp, Probe sequence
gaacaaggctttggtttatctcgta

SEQ ID NO: 175478 - DNA, 25 bp, Probe sequence
gaaatgattggttcacttcttttat

SEQ ID NO: 175479 - DNA, 25 bp, Probe sequence
gacacgtcattaacacatatgtagg

SEQ ID NO: 175480 - DNA, 25 bp, Probe sequence
gagattagctggcgctttcgaaatg

SEQ ID NO: 175481 - DNA, 25 bp, Probe sequence
gatgaaatggctcaacaattcgaac

SEQ ID NO: 175482 - DNA, 25 bp, Probe sequence
gatcaatgagattagctggcgcttt

SEQ ID NO: 175483 - DNA, 25 bp, Probe sequence
gattaatattgttatgggtacagct

SEQ ID NO: 175484 - DNA, 25 bp, Probe sequence
gattggttcacttcttttatttact

SEQ ID NO: 175485 - DNA, 25 bp, Probe sequence
gttattaagacacgtcattaacaca

SEQ ID NO: 175486 - DNA, 25 bp, Probe sequence
gggtacagctatttataaccattat

SEQ ID NO: 175487 - DNA, 25 bp, Probe sequence
ggctcaacaattcgaacaaggcttt

SEQ ID NO: 175488 - DNA, 25 bp, Probe sequence
ggctttggtttatctcgtagatcaa

SEQ ID NO: 175489 - DNA, 25 bp, Probe sequence
ggcgctttcgaaatgattggttcac

SEQ ID NO: 175490 - DNA, 25 bp, Probe sequence
tggttcacttcttttatttacttct

SEQ ID NO: 175491 - DNA, 25 bp, Probe sequence
tgttaagcttaactcgtaataaata

SEQ ID NO: 175492 - DNA, 25 bp, Probe sequence
tcacttcttttatttacttctattt

SEQ ID NO: 175493 - DNA, 25 bp, Probe sequence
tataaccattataaagctgggcatg

SEQ ID NO: 175494 - DNA, 25 bp, Probe sequence
ttagctggcgctttcgaaatgattg

SEQ ID NO: 175495 - DNA, 25 bp, Probe sequence
ttggtttatctcgtagatcaatgag

SEQ ID NO: 175496 - DNA, 25 bp, Probe sequence
attgcaactaaaattggccaagtga

SEQ ID NO: 175497 - DNA, 25 bp, Probe sequence
attatttatcatctgcaaaaggcac

SEQ ID NO: 175498 - DNA, 25 bp, Probe sequence
atacgtttgacttagattatattga

SEQ ID NO: 175499 - DNA, 25 bp, Probe sequence
aggtttggttgcaatctttgtctaa

SEQ ID NO: 175500 - DNA, 25 bp, Probe sequence
agttgattatgtcattaggtttcat

SEQ ID NO: 175501 - DNA, 25 bp, Probe sequence
agagcatttgcttacagaaacttta

SEQ ID NO: 175502 - DNA, 25 bp, Probe sequence
agcatctttattgccaaatcaactt

SEQ ID NO: 175503 - DNA, 25 bp, Probe sequence
agcatgtagataacgcaacagactt

SEQ ID NO: 175504 - DNA, 25 bp, Probe sequence
acaaattacttctcaaatcgatatt

SEQ ID NO: 175505 - DNA, 25 bp, Probe sequence
aaagacgcgaagaaattgcaactaa

SEQ ID NO: 175506 - DNA, 25 bp, Probe sequence
aacagacttattatgtgatcgtgca

SEQ ID NO: 175507 - DNA, 25 bp, Probe sequence
aagccagtggttacgttaatgcctc

SEQ ID NO: 175508 - DNA, 25 bp, Probe sequence
caagcgaataagccagtggttacgt

SEQ ID NO: 175509 - DNA, 25 bp, Probe sequence
aatttagagtcccatttacaccagg

SEQ ID NO: 175510 - DNA, 25 bp, Probe sequence
cagtggttacgttaatgcctcaatt

SEQ ID NO: 175511 - DNA, 25 bp, Probe sequence
ctgcaaaaggcacacaagatattaa

SEQ ID NO: 175512 - DNA, 25 bp, Probe sequence
gccaaatcaacttgtaacattttta

SEQ ID NO: 175513 - DNA, 25 bp, Probe sequence
gcatcaaaaccaaacaatagcatct

SEQ ID NO: 175514 - DNA, 25 bp, Probe sequence
gaatctatgattcaacagcagttac

SEQ ID NO: 175515 - DNA, 25 bp, Probe sequence
gaatgcactatttattatcatattt

SEQ ID NO: 175516 - DNA, 25 bp, Probe sequence
gtcattaggtttcattttaggtggt

SEQ ID NO: 175517 - DNA, 25 bp, Probe sequence
gtcaactctctagcaaattagcaaa

SEQ ID NO: 175518 - DNA, 25 bp, Probe sequence
ggtatgttgcaaatgtttatgacaa

SEQ ID NO: 175519 - DNA, 25 bp, Probe sequence
ggccaagtgattgaagagcatttgc

SEQ ID NO: 175520 - DNA, 25 bp, Probe sequence
tggatttttccaaggtttggttgca

SEQ ID NO: 175521 - DNA, 25 bp, Probe sequence
tcgcagtttaatgaaatcgctgaaa

SEQ ID NO: 175522 - DNA, 25 bp, Probe sequence
taatgatatgttggatacttttttc

SEQ ID NO: 175523 - DNA, 25 bp, Probe sequence
tagagtcccatttacaccaggttta

SEQ ID NO: 175524 - DNA, 25 bp, Probe sequence
taggtggtattattggatttttcca

SEQ ID NO: 175525 - DNA, 25 bp, Probe sequence
tatttatgattgtagtaggggcgat

SEQ ID NO: 175526 - DNA, 25 bp, Probe sequence
ttatcgattcacttatctacaatta

SEQ ID NO: 175527 - DNA, 25 bp, Probe sequence
ttagaatgctgtttcacccctttaa

SEQ ID NO: 175528 - DNA, 25 bp, Probe sequence
ttcacccctttaaaccatactatat

SEQ ID NO: 175529 - DNA, 25 bp, Probe sequence
ttgtgacatcgttaattaccaatga

SEQ ID NO: 175530 - DNA, 25 bp, Probe sequence
attttcgattggcgctatctgttcc

SEQ ID NO: 175531 - DNA, 25 bp, Probe sequence
atgctttgccacgtcaatacattgc

SEQ ID NO: 175532 - DNA, 25 bp, Probe sequence
atgacgccaatgacaactcaagctt

SEQ ID NO: 175533 - DNA, 25 bp, Probe sequence
atgtcgtcgcattgattgcctttat

SEQ ID NO: 175534 - DNA, 25 bp, Probe sequence
acccgcgattggaccaactgcagct

SEQ ID NO: 175535 - DNA, 25 bp, Probe sequence
aacggaaccgtgttatagctgtcgt

SEQ ID NO: 175536 - DNA, 25 bp, Probe sequence
aactgcagctggttggttcgtcaat

SEQ ID NO: 175537 - DNA, 25 bp, Probe sequence
aactttgatgactacgatacttcca

SEQ ID NO: 175538 - DNA, 25 bp, Probe sequence
aatacattgcacatggtacagccat

SEQ ID NO: 175539 - DNA, 25 bp, Probe sequence
gctatctgttcctagtcgtattact

SEQ ID NO: 175540 - DNA, 25 bp, Probe sequence
gctttggtggcttactatatggttt

SEQ ID NO: 175541 - DNA, 25 bp, Probe sequence
gcaggaaacttaggttggtcacatc

SEQ ID NO: 175542 - DNA, 25 bp, Probe sequence
gacaagtgtcagctgcaataggtac

SEQ ID NO: 175543 - DNA, 25 bp, Probe sequence
gatattacattctatgtcgtcgcat

SEQ ID NO: 175544 - DNA, 25 bp, Probe sequence
gattcctatcacagcatttttaatt

SEQ ID NO: 175545 - DNA, 25 bp, Probe sequence
gattggtgcttttgttggtgtgctg

SEQ ID NO: 175546 - DNA, 25 bp, Probe sequence
gttatcgcctgtcactggtaaatta

SEQ ID NO: 175547 - DNA, 25 bp, Probe sequence
gtattcgggtatctatcattgccaa

SEQ ID NO: 175548 - DNA, 25 bp, Probe sequence
gtagtacagcacaatggctcacgac

SEQ ID NO: 175549 - DNA, 25 bp, Probe sequence
gtaataggttttgcacccgcgattg

SEQ ID NO: 175550 - DNA, 25 bp, Probe sequence
ggcaatgggaatgttcggtcttgta

SEQ ID NO: 175551 - DNA, 25 bp, Probe sequence
ggtgctggtatactgatgccactca

SEQ ID NO: 175552 - DNA, 25 bp, Probe sequence
ggtaatgctatgatcatgacgccaa

SEQ ID NO: 175553 - DNA, 25 bp, Probe sequence
ggtactggtatcttggtcacattga

SEQ ID NO: 175554 - DNA, 25 bp, Probe sequence
ggacgtagtattcaagccttaggtg

SEQ ID NO: 175555 - DNA, 25 bp, Probe sequence
ggaatcgccattgttagagtttaga

SEQ ID NO: 175556 - DNA, 25 bp, Probe sequence
ggctcacgacaatttttatgctagt

SEQ ID NO: 175557 - DNA, 25 bp, Probe sequence
tgaaatggtccccgttagagtcagg

SEQ ID NO: 175558 - DNA, 25 bp, Probe sequence
tccttttcattatgtttccacctga

SEQ ID NO: 175559 - DNA, 25 bp, Probe sequence
tcacacagacactccttttcattat

SEQ ID NO: 175560 - DNA, 25 bp, Probe sequence
tactgatgccactcacacagacact

SEQ ID NO: 175561 - DNA, 25 bp, Probe sequence
taggtactatcattgcattctttat

SEQ ID NO: 175562 - DNA, 25 bp, Probe sequence
tatgggactgttatcgcctgtcact

SEQ ID NO: 175563 - DNA, 25 bp, Probe sequence
tttatcgacggttagctttggtggc

SEQ ID NO: 175564 - DNA, 25 bp, Probe sequence
attgagactcgtaatgggtacattt

SEQ ID NO: 175565 - DNA, 25 bp, Probe sequence
attaccaaactggacaacttgtatt

SEQ ID NO: 175566 - DNA, 25 bp, Probe sequence
atatccaaaccatgcaccaacaagt

SEQ ID NO: 175567 - DNA, 25 bp, Probe sequence
atttgtgcattattcagagactctg

SEQ ID NO: 175568 - DNA, 25 bp, Probe sequence
atcgtgtattaaatccagataacca

SEQ ID NO: 175569 - DNA, 25 bp, Probe sequence
atgcaccaacaagtgatatttattg

SEQ ID NO: 175570 - DNA, 25 bp, Probe sequence
atggatagacagagttttacagatt

SEQ ID NO: 175571 - DNA, 25 bp, Probe sequence
agaggctggttatacgcaagatact

SEQ ID NO: 175572 - DNA, 25 bp, Probe sequence
aaatggttcgtatagaggctggtta

SEQ ID NO: 175573 - DNA, 25 bp, Probe sequence
aaagtaagcaatatttatcgtgtat

SEQ ID NO: 175574 - DNA, 25 bp, Probe sequence
aaacagtacatttggctgtgatcca

SEQ ID NO: 175575 - DNA, 25 bp, Probe sequence
aacttgtatttcaatttgtgcatta

SEQ ID NO: 175576 - DNA, 25 bp, Probe sequence
aaccatgcaccaacaagtgatattt

SEQ ID NO: 175577 - DNA, 25 bp, Probe sequence
aagagagagtattaccaaactggac

SEQ ID NO: 175578 - DNA, 25 bp, Probe sequence
aatccagataaccaaccaattttcg

SEQ ID NO: 175579 - DNA, 25 bp, Probe sequence
aatcgttcaaacaatttcaagaaat

SEQ ID NO: 175580 - DNA, 25 bp, Probe sequence
caattttcggtacttctaaaatgag

SEQ ID NO: 175581 - DNA, 25 bp, Probe sequence
ctgtgatccattagaaatcgttcaa

SEQ ID NO: 175582 - DNA, 25 bp, Probe sequence
tccaaaccatgcaccaacaagtgat

SEQ ID NO: 175583 - DNA, 25 bp, Probe sequence
gcaaacaattggactttctaaaaag

SEQ ID NO: 175584 - DNA, 25 bp, Probe sequence
gcaagatactatggcgcaaacaatt

SEQ ID NO: 175585 - DNA, 25 bp, Probe sequence
gaaacatactttaacagaaatgcta

SEQ ID NO: 175586 - DNA, 25 bp, Probe sequence
gacagagttttacagatttaattca

SEQ ID NO: 175587 - DNA, 25 bp, Probe sequence
gactcgtaatgggtacattttacaa

SEQ ID NO: 175588 - DNA, 25 bp, Probe sequence
gagagaagctgaaacatactttaac

SEQ ID NO: 175589 - DNA, 25 bp, Probe sequence
gagactctgaagtattaaacagtac

SEQ ID NO: 175590 - DNA, 25 bp, Probe sequence
gtacatttggctgtgatccattaga

SEQ ID NO: 175591 - DNA, 25 bp, Probe sequence
ggacaacttgtatttcaatttgtgc

SEQ ID NO: 175592 - DNA, 25 bp, Probe sequence
ggctggttatacgcaagatactatg

SEQ ID NO: 175593 - DNA, 25 bp, Probe sequence
ggctgtgatccattagaaatcgttc

SEQ ID NO: 175594 - DNA, 25 bp, Probe sequence
tggcgcaaacaattggactttctaa

SEQ ID NO: 175595 - DNA, 25 bp, Probe sequence
tgtgcatatccaaaccatgcaccaa

SEQ ID NO: 175596 - DNA, 25 bp, Probe sequence
tccagataaccaaccaattttcggt

SEQ ID NO: 175597 - DNA, 25 bp, Probe sequence
tattggaataacattgagactcgta

SEQ ID NO: 175598 - DNA, 25 bp, Probe sequence
atatcgtcaattgttctcgtattaa

SEQ ID NO: 175599 - DNA, 25 bp, Probe sequence
atgacccaaggtgcgttaaaatatt

SEQ ID NO: 175600 - DNA, 25 bp, Probe sequence
atagcgtaggtgaacatgaacttgt

SEQ ID NO: 175601 - DNA, 25 bp, Probe sequence
atggaacaaaggacgcgactagctt

SEQ ID NO: 175602 - DNA, 25 bp, Probe sequence
atcgggtcaagaacaattcggcatt

SEQ ID NO: 175603 - DNA, 25 bp, Probe sequence
atgcaacggtaccacttaaatcggg

SEQ ID NO: 175604 - DNA, 25 bp, Probe sequence
aggacgcgactagctttattaaaag

SEQ ID NO: 175605 - DNA, 25 bp, Probe sequence
agcagaccactgtcactatattaaa

SEQ ID NO: 175606 - DNA, 25 bp, Probe sequence
aacgtaggctaatgaaagcgtcgaa

SEQ ID NO: 175607 - DNA, 25 bp, Probe sequence
accacaatctttgacagcagaccac

SEQ ID NO: 175608 - DNA, 25 bp, Probe sequence
acttaagccagttggacttgagcaa

SEQ ID NO: 175609 - DNA, 25 bp, Probe sequence
acacatcatgcaacggtaccactta

SEQ ID NO: 175610 - DNA, 25 bp, Probe sequence
aaaatgccgttaatgaaatgcgtgc

SEQ ID NO: 175611 - DNA, 25 bp, Probe sequence
aacagcacatgctgcgtatggcatg

SEQ ID NO: 175612 - DNA, 25 bp, Probe sequence
aagcatttaatcaacgtaggctaat

SEQ ID NO: 175613 - DNA, 25 bp, Probe sequence
aagatgggtcttgttggtgtgtgaa

SEQ ID NO: 175614 - DNA, 25 bp, Probe sequence
aatgcgtgcattgatttggcaactt

SEQ ID NO: 175615 - DNA, 25 bp, Probe sequence
gcgtatggcatgtcaaacgaatcca

SEQ ID NO: 175616 - DNA, 25 bp, Probe sequence
gcgtcgaatatcgtcaattgttctc

SEQ ID NO: 175617 - DNA, 25 bp, Probe sequence
gaaggtttaatcgatttatctaatg

SEQ ID NO: 175618 - DNA, 25 bp, Probe sequence
gacaggctggatatttttcatcaat

SEQ ID NO: 175619 - DNA, 25 bp, Probe sequence
gacctttcattctcagccaacaaag

SEQ ID NO: 175620 - DNA, 25 bp, Probe sequence
gagatcgataatgttcagatagctt

SEQ ID NO: 175621 - DNA, 25 bp, Probe sequence
gagttgctagagtctgtcgcatttc

SEQ ID NO: 175622 - DNA, 25 bp, Probe sequence
gagggcagtaatttcacgacaggct

SEQ ID NO: 175623 - DNA, 25 bp, Probe sequence
gttctcgtattaacttagcctctaa

SEQ ID NO: 175624 - DNA, 25 bp, Probe sequence
gtatagcatgacccaaggtgcgtta

SEQ ID NO: 175625 - DNA, 25 bp, Probe sequence
gtcgcatttcaattagggtcagcca

SEQ ID NO: 175626 - DNA, 25 bp, Probe sequence
gggtcagccatcaaacgtatttatt

SEQ ID NO: 175627 - DNA, 25 bp, Probe sequence
tagcctctaaagcatttcctagcca

SEQ ID NO: 175628 - DNA, 25 bp, Probe sequence
tagctagagatttacatgattcagt

SEQ ID NO: 175629 - DNA, 25 bp, Probe sequence
tatactatatattgacgtgattgat

SEQ ID NO: 175630 - DNA, 25 bp, Probe sequence
ttctcagccaacaaagggtacacaa

SEQ ID NO: 175631 - DNA, 25 bp, Probe sequence
ttcagatagcttcatcacacggtat

SEQ ID NO: 175632 - DNA, 25 bp, Probe sequence
atttacaagatgcaacgccgatcaa

SEQ ID NO: 175633 - DNA, 25 bp, Probe sequence
attttaaatcttgccatcggtggta

SEQ ID NO: 175634 - DNA, 25 bp, Probe sequence
atgatgtgagatggttggcttcagg

SEQ ID NO: 175635 - DNA, 25 bp, Probe sequence
atgatacattcccaactgctatgca

SEQ ID NO: 175636 - DNA, 25 bp, Probe sequence
atggcaaacaggaagcggtacacaa

SEQ ID NO: 175637 - DNA, 25 bp, Probe sequence
agaagatatggtagatcctcattaa

SEQ ID NO: 175638 - DNA, 25 bp, Probe sequence
acgggttatccatttgtatcttctg

SEQ ID NO: 175639 - DNA, 25 bp, Probe sequence
acagttgttggcttcgcaagttcac

SEQ ID NO: 175640 - DNA, 25 bp, Probe sequence
aatattggggtgctcaaacagaaag

SEQ ID NO: 175641 - DNA, 25 bp, Probe sequence
aattggtcgtacacatttacaagat

SEQ ID NO: 175642 - DNA, 25 bp, Probe sequence
caatcattaatgttagttactgcat

SEQ ID NO: 175643 - DNA, 25 bp, Probe sequence
gcctggtaaagttaatcctacacaa

SEQ ID NO: 175644 - DNA, 25 bp, Probe sequence
gctcaaattgctaagaaagcccata

SEQ ID NO: 175645 - DNA, 25 bp, Probe sequence
gcaacgccgatcaaactaggacaag

SEQ ID NO: 175646 - DNA, 25 bp, Probe sequence
gaattgaacatgatacttttggaga

SEQ ID NO: 175647 - DNA, 25 bp, Probe sequence
gaatctgcaattcaaactggatatg

SEQ ID NO: 175648 - DNA, 25 bp, Probe sequence
gaacacttcccactagttgtatggc

SEQ ID NO: 175649 - DNA, 25 bp, Probe sequence
gaagtagtttatggttttgcacaac

SEQ ID NO: 175650 - DNA, 25 bp, Probe sequence
gaagcacattttaaatcttgccatc

SEQ ID NO: 175651 - DNA, 25 bp, Probe sequence
gaaagtatccacccaaatgatgatg

SEQ ID NO: 175652 - DNA, 25 bp, Probe sequence
gagcgtatgccaatcgaagtagttt

SEQ ID NO: 175653 - DNA, 25 bp, Probe sequence
gatgccattgtatacgcatgtgatc

SEQ ID NO: 175654 - DNA, 25 bp, Probe sequence
gttcatcaattatgcctggtaaagt

SEQ ID NO: 175655 - DNA, 25 bp, Probe sequence
gttactgcattaaatccacatattg

SEQ ID NO: 175656 - DNA, 25 bp, Probe sequence
gttatctgaatctaagaagcacatt

SEQ ID NO: 175657 - DNA, 25 bp, Probe sequence
gtaatgatacagttgttggcttcgc

SEQ ID NO: 175658 - DNA, 25 bp, Probe sequence
gtgaattagatgaacacttcccact

SEQ ID NO: 175659 - DNA, 25 bp, Probe sequence
ggagaaatagaagtacctgcagata

SEQ ID NO: 175660 - DNA, 25 bp, Probe sequence
ggacaagagattagtggctggcgtt

SEQ ID NO: 175661 - DNA, 25 bp, Probe sequence
tggctggcgttatatgcttgaccgt

SEQ ID NO: 175662 - DNA, 25 bp, Probe sequence
tggcttcgcaagttcacaaggtaac

SEQ ID NO: 175663 - DNA, 25 bp, Probe sequence
tgcacaactaaagcgtgcagcagca

SEQ ID NO: 175664 - DNA, 25 bp, Probe sequence
ttatgcataatacactacaatcaat

SEQ ID NO: 175665 - DNA, 25 bp, Probe sequence
ttcccagttggtaaagagcgtatgc

SEQ ID NO: 175666 - DNA, 25 bp, Probe sequence
gctacggttgaagctactaaaacaa

SEQ ID NO: 175667 - DNA, 25 bp, Probe sequence
aggtacgcttgttgctctaaatcca

SEQ ID NO: 175668 - DNA, 25 bp, Probe sequence
acgcttgttgctctaaatccatata

SEQ ID NO: 175669 - DNA, 25 bp, Probe sequence
acacttgatgggttttatgcgagtt

SEQ ID NO: 175670 - DNA, 25 bp, Probe sequence
aaatccatatacgacaattgttagt

SEQ ID NO: 175671 - DNA, 25 bp, Probe sequence
aaagtaatcaatcaggtattgtaat

SEQ ID NO: 175672 - DNA, 25 bp, Probe sequence
cttgatgggttttatgcgagtttaa

SEQ ID NO: 175673 - DNA, 25 bp, Probe sequence
gctctaaatccatatacgacaattg

SEQ ID NO: 175674 - DNA, 25 bp, Probe sequence
gctattgctacggttgaagctacta

SEQ ID NO: 175675 - DNA, 25 bp, Probe sequence
gcttgttgctctaaatccatatacg

SEQ ID NO: 175676 - DNA, 25 bp, Probe sequence
gaagctactaaaacaaagtatcgta

SEQ ID NO: 175677 - DNA, 25 bp, Probe sequence
gaaaatactggattcaattattgat

SEQ ID NO: 175678 - DNA, 25 bp, Probe sequence
gacaattgttagtgctgtattatat

SEQ ID NO: 175679 - DNA, 25 bp, Probe sequence
gatgggttttatgcgagtttaacag

SEQ ID NO: 175680 - DNA, 25 bp, Probe sequence
gatagcaacagttattataagttta

SEQ ID NO: 175681 - DNA, 25 bp, Probe sequence
gattcaattattgatagcaacagtt

SEQ ID NO: 175682 - DNA, 25 bp, Probe sequence
gttgctctaaatccatatacgacaa

SEQ ID NO: 175683 - DNA, 25 bp, Probe sequence
gttagtgctgtattatatatactta

SEQ ID NO: 175684 - DNA, 25 bp, Probe sequence
gtacgcttgttgctctaaatccata

SEQ ID NO: 175685 - DNA, 25 bp, Probe sequence
gggttttatgcgagtttaacaggag

SEQ ID NO: 175686 - DNA, 25 bp, Probe sequence
ggcaattggggcattatatttacct

SEQ ID NO: 175687 - DNA, 25 bp, Probe sequence
tgtattatacacttgatgggtttta

SEQ ID NO: 175688 - DNA, 25 bp, Probe sequence
ttacagctattgctacggttgaagc

SEQ ID NO: 175689 - DNA, 25 bp, Probe sequence
tacaactcaatttatcaaaaggatt

SEQ ID NO: 175690 - DNA, 25 bp, Probe sequence
tacttacagctattgctacggttga

SEQ ID NO: 175691 - DNA, 25 bp, Probe sequence
tacgcttgttgctctaaatccatat

SEQ ID NO: 175692 - DNA, 25 bp, Probe sequence
tacgacaattgttagtgctgtatta

SEQ ID NO: 175693 - DNA, 25 bp, Probe sequence
taggtacgcttgttgctctaaatcc

SEQ ID NO: 175694 - DNA, 25 bp, Probe sequence
tatacacttgatgggttttatgcga

SEQ ID NO: 175695 - DNA, 25 bp, Probe sequence
tatacttacagctattgctacggtt

SEQ ID NO: 175696 - DNA, 25 bp, Probe sequence
tatatatacttacagctattgctac

SEQ ID NO: 175697 - DNA, 25 bp, Probe sequence
tattgctacggttgaagctactaaa

SEQ ID NO: 175698 - DNA, 25 bp, Probe sequence
tttccattggcaattggggcattat

SEQ ID NO: 175699 - DNA, 25 bp, Probe sequence
ttgttgctctaaatccatatacgac

SEQ ID NO: 175700 - DNA, 25 bp, Probe sequence
attacagtcactgcgtttctatgtc

SEQ ID NO: 175701 - DNA, 25 bp, Probe sequence
agtcatttcaacgacaacccttgct

SEQ ID NO: 175702 - DNA, 25 bp, Probe sequence
acgatactttccgattgtgattaca

SEQ ID NO: 175703 - DNA, 25 bp, Probe sequence
actgcgtttctatgtcatcaacaat

SEQ ID NO: 175704 - DNA, 25 bp, Probe sequence
acagtcatttcaacgacaacccttg

SEQ ID NO: 175705 - DNA, 25 bp, Probe sequence
cactgcgtttctatgtcatcaacaa

SEQ ID NO: 175706 - DNA, 25 bp, Probe sequence
cagtcatttcaacgacaacccttgc

SEQ ID NO: 175707 - DNA, 25 bp, Probe sequence
ctttccgattgtgattacatttgac

SEQ ID NO: 175708 - DNA, 25 bp, Probe sequence
ctatgtcatcaacaatcatttgtcg

SEQ ID NO: 175709 - DNA, 25 bp, Probe sequence
ctgcgtttctatgtcatcaacaatc

SEQ ID NO: 175710 - DNA, 25 bp, Probe sequence
cgattgtgattacatttgacgttac

SEQ ID NO: 175711 - DNA, 25 bp, Probe sequence
gcgtttctatgtcatcaacaatcat

SEQ ID NO: 175712 - DNA, 25 bp, Probe sequence
gaattacagtcactgcgtttctatg

SEQ ID NO: 175713 - DNA, 25 bp, Probe sequence
gacgttacagtcatttcaacgacaa

SEQ ID NO: 175714 - DNA, 25 bp, Probe sequence
gatactttccgattgtgattacatt

SEQ ID NO: 175715 - DNA, 25 bp, Probe sequence
gattacatttgacgttacagtcatt

SEQ ID NO: 175716 - DNA, 25 bp, Probe sequence
gttacagtcatttcaacgacaaccc

SEQ ID NO: 175717 - DNA, 25 bp, Probe sequence
gtttctatgtcatcaacaatcattt

SEQ ID NO: 175718 - DNA, 25 bp, Probe sequence
gtcatttcaacgacaacccttgcta

SEQ ID NO: 175719 - DNA, 25 bp, Probe sequence
gtcacgatactttccgattgtgatt

SEQ ID NO: 175720 - DNA, 25 bp, Probe sequence
gtcactgcgtttctatgtcatcaac

SEQ ID NO: 175721 - DNA, 25 bp, Probe sequence
tgaattacagtcactgcgtttctat

SEQ ID NO: 175722 - DNA, 25 bp, Probe sequence
tgcgtttctatgtcatcaacaatca

SEQ ID NO: 175723 - DNA, 25 bp, Probe sequence
tctatgtcatcaacaatcatttgtc

SEQ ID NO: 175724 - DNA, 25 bp, Probe sequence
tcactgcgtttctatgtcatcaaca

SEQ ID NO: 175725 - DNA, 25 bp, Probe sequence
tacagtcatttcaacgacaaccctt

SEQ ID NO: 175726 - DNA, 25 bp, Probe sequence
tacagtcactgcgtttctatgtcat

SEQ ID NO: 175727 - DNA, 25 bp, Probe sequence
tacatttgacgttacagtcatttca

SEQ ID NO: 175728 - DNA, 25 bp, Probe sequence
tactttccgattgtgattacatttg

SEQ ID NO: 175729 - DNA, 25 bp, Probe sequence
tttgaattacagtcactgcgtttct

SEQ ID NO: 175730 - DNA, 25 bp, Probe sequence
ttacagtcactgcgtttctatgtca

SEQ ID NO: 175731 - DNA, 25 bp, Probe sequence
ttccgattgtgattacatttgacgt

SEQ ID NO: 175732 - DNA, 25 bp, Probe sequence
ttgacgttacagtcatttcaacgac

SEQ ID NO: 175733 - DNA, 25 bp, Probe sequence
ttgtcacgatactttccgattgtga

SEQ ID NO: 175734 - DNA, 25 bp, Probe sequence
atttcgaagcgttaggtgtaccagc

SEQ ID NO: 175735 - DNA, 25 bp, Probe sequence
atagtcaacttgtagcagaatatgc

SEQ ID NO: 175736 - DNA, 25 bp, Probe sequence
ataaagaagcggctgcaggtttacc

SEQ ID NO: 175737 - DNA, 25 bp, Probe sequence
agttgtttctatcgatgagcaaggt

SEQ ID NO: 175738 - DNA, 25 bp, Probe sequence
agcttactttacgtcacgctttgct

SEQ ID NO: 175739 - DNA, 25 bp, Probe sequence
actacaattgcaggttttcatttag

SEQ ID NO: 175740 - DNA, 25 bp, Probe sequence
aaaaatcatatttcgaagcgttagg

SEQ ID NO: 175741 - DNA, 25 bp, Probe sequence
aaaacatgctgttgattttagccaa

SEQ ID NO: 175742 - DNA, 25 bp, Probe sequence
aacattacaagttgtttctatcgat

SEQ ID NO: 175743 - DNA, 25 bp, Probe sequence
aagtttatccaattgcttatgaaaa

SEQ ID NO: 175744 - DNA, 25 bp, Probe sequence
aagtctttgacaatagtcaacttgt

SEQ ID NO: 175745 - DNA, 25 bp, Probe sequence
aatcctactacaattgcaggttttc

SEQ ID NO: 175746 - DNA, 25 bp, Probe sequence
caattgcaggttttcatttagatac

SEQ ID NO: 175747 - DNA, 25 bp, Probe sequence
caatttaacaataatcctactacaa

SEQ ID NO: 175748 - DNA, 25 bp, Probe sequence
caatgaactttaaagtctttgacaa

SEQ ID NO: 175749 - DNA, 25 bp, Probe sequence
catgctgttgattttagccaaataa

SEQ ID NO: 175750 - DNA, 25 bp, Probe sequence
ccagccgatttaaaagcacatagaa

SEQ ID NO: 175751 - DNA, 25 bp, Probe sequence
gcgttaggtgtaccagcaggtcaag

SEQ ID NO: 175752 - DNA, 25 bp, Probe sequence
gcaggtcaagtttatccaattgctt

SEQ ID NO: 175753 - DNA, 25 bp, Probe sequence
gcagaatatgctgctgatattatta

SEQ ID NO: 175754 - DNA, 25 bp, Probe sequence
ttactttacgtcacgctttgcttaa

SEQ ID NO: 175755 - DNA, 25 bp, Probe sequence
gaatggtaaatgttattcttgataa

SEQ ID NO: 175756 - DNA, 25 bp, Probe sequence
gaaccagccgatttaaaagcacata

SEQ ID NO: 175757 - DNA, 25 bp, Probe sequence
gaagcgttaggtgtaccagcaggtc

SEQ ID NO: 175758 - DNA, 25 bp, Probe sequence
gatgcaatcgaattaatcgctgata

SEQ ID NO: 175759 - DNA, 25 bp, Probe sequence
gttaaatgttagtattcgtcaagga

SEQ ID NO: 175760 - DNA, 25 bp, Probe sequence
gttaaagcttactttacgtcacgct

SEQ ID NO: 175761 - DNA, 25 bp, Probe sequence
gtaccagcaggtcaagtttatccaa

SEQ ID NO: 175762 - DNA, 25 bp, Probe sequence
ggtgctaataaacgagatgtagttg

SEQ ID NO: 175763 - DNA, 25 bp, Probe sequence
ggtcaagtttatccaattgcttatg

SEQ ID NO: 175764 - DNA, 25 bp, Probe sequence
tcgtcaaggactaatggaagcaaga

SEQ ID NO: 175765 - DNA, 25 bp, Probe sequence
tacaagttgtttctatcgatgagca

SEQ ID NO: 175766 - DNA, 25 bp, Probe sequence
tatgctgctgatattattagaaagc

SEQ ID NO: 175767 - DNA, 25 bp, Probe sequence
ttctatcgatgagcaaggtaagtta

SEQ ID NO: 175768 - DNA, 25 bp, Probe sequence
attgggcatgaattttctggcagac

SEQ ID NO: 175769 - DNA, 25 bp, Probe sequence
attttctggcagacattttggaata

SEQ ID NO: 175770 - DNA, 25 bp, Probe sequence
atatcgaatttgatttagacgttat

SEQ ID NO: 175771 - DNA, 25 bp, Probe sequence
atagattatttagatgattttgcaa

SEQ ID NO: 175772 - DNA, 25 bp, Probe sequence
atgaaactcgattttgatagtatga

SEQ ID NO: 175773 - DNA, 25 bp, Probe sequence
atgatagtccatataattctttagt

SEQ ID NO: 175774 - DNA, 25 bp, Probe sequence
aacactttggaacaaaacactatag

SEQ ID NO: 175775 - DNA, 25 bp, Probe sequence
aaaaattaacgctgaagatccttct

SEQ ID NO: 175776 - DNA, 25 bp, Probe sequence
aaaaattctcaaggggatctattat

SEQ ID NO: 175777 - DNA, 25 bp, Probe sequence
aaaacacgcttccctacagaaagag

SEQ ID NO: 175778 - DNA, 25 bp, Probe sequence
aacacgcttccctacagaaagagaa

SEQ ID NO: 175779 - DNA, 25 bp, Probe sequence
aacactatttaccattacaaaatat

SEQ ID NO: 175780 - DNA, 25 bp, Probe sequence
aatacatttgcctgcacacagaatg

SEQ ID NO: 175781 - DNA, 25 bp, Probe sequence
caattaaaacacgcttccctacaga

SEQ ID NO: 175782 - DNA, 25 bp, Probe sequence
aattctttagtaacagttgtaccat

SEQ ID NO: 175783 - DNA, 25 bp, Probe sequence
catttaatttatacaatgacccgaa

SEQ ID NO: 175784 - DNA, 25 bp, Probe sequence
ctcaaggggatctattatatattta

SEQ ID NO: 175785 - DNA, 25 bp, Probe sequence
ctggcagacattttggaatagtatt

SEQ ID NO: 175786 - DNA, 25 bp, Probe sequence
gcctgcacacagaatgtagtaacta

SEQ ID NO: 175787 - DNA, 25 bp, Probe sequence
gaacaagacagttgataatatcgaa

SEQ ID NO: 175788 - DNA, 25 bp, Probe sequence
gagacaacatcatattggtttaata

SEQ ID NO: 175789 - DNA, 25 bp, Probe sequence
gatccttctggtagaatgaaactcg

SEQ ID NO: 175790 - DNA, 25 bp, Probe sequence
gataaaaatacatttgcctgcacac

SEQ ID NO: 175791 - DNA, 25 bp, Probe sequence
gattttggcatcaatattgggcatg

SEQ ID NO: 175792 - DNA, 25 bp, Probe sequence
gtaacagttgtaccattaagttcaa

SEQ ID NO: 175793 - DNA, 25 bp, Probe sequence
gggcatgaattttctggcagacatt

SEQ ID NO: 175794 - DNA, 25 bp, Probe sequence
tgacccgaaaaatttttctgctttg

SEQ ID NO: 175795 - DNA, 25 bp, Probe sequence
tctgctttgtttaattatttgctaa

SEQ ID NO: 175796 - DNA, 25 bp, Probe sequence
taacgctgaagatccttctggtaga

SEQ ID NO: 175797 - DNA, 25 bp, Probe sequence
taccaaattggttagagacaacatc

SEQ ID NO: 175798 - DNA, 25 bp, Probe sequence
ttgcaattaaaacacgcttccctac

SEQ ID NO: 175799 - DNA, 25 bp, Probe sequence
tatttgctaattgatgtaaacgata

SEQ ID NO: 175800 - DNA, 25 bp, Probe sequence
tttttctgctttgtttaattatttg

SEQ ID NO: 175801 - DNA, 25 bp, Probe sequence
ttgtatttaaaacatcattatcaat

SEQ ID NO: 175802 - DNA, 25 bp, Probe sequence
atttactaacactgctggtagccct

SEQ ID NO: 175803 - DNA, 25 bp, Probe sequence
atcagcaagattacgcacacctact

SEQ ID NO: 175804 - DNA, 25 bp, Probe sequence
atgtgggttcgtgaaatcaccaaaa

SEQ ID NO: 175805 - DNA, 25 bp, Probe sequence
agtacggcctatcgctatttagagc

SEQ ID NO: 175806 - DNA, 25 bp, Probe sequence
agagcgtgtaggtcactcggactat

SEQ ID NO: 175807 - DNA, 25 bp, Probe sequence
aaaaccaccttagagatatacacac

SEQ ID NO: 175808 - DNA, 25 bp, Probe sequence
aacttaacgttccatgatgcgtgcg

SEQ ID NO: 175809 - DNA, 25 bp, Probe sequence
cacacatatctacacttgcgcaatt

SEQ ID NO: 175810 - DNA, 25 bp, Probe sequence
ctcttgttattgttattcgttccgt

SEQ ID NO: 175811 - DNA, 25 bp, Probe sequence
ctgctggtagccctattgacttaaa

SEQ ID NO: 175812 - DNA, 25 bp, Probe sequence
gcattacaagacacattcaggctcg

SEQ ID NO: 175813 - DNA, 25 bp, Probe sequence
gagttactagagtgcttcgactatc

SEQ ID NO: 175814 - DNA, 25 bp, Probe sequence
gcacacctacttacaaaacatcatt

SEQ ID NO: 175815 - DNA, 25 bp, Probe sequence
gaatgcgcattggcgaactcctagc

SEQ ID NO: 175816 - DNA, 25 bp, Probe sequence
gacaacgcacacattacgtcacaca

SEQ ID NO: 175817 - DNA, 25 bp, Probe sequence
gatatacctaagaaagcccaaacca

SEQ ID NO: 175818 - DNA, 25 bp, Probe sequence
gatagcaaagtactcatcagcaaga

SEQ ID NO: 175819 - DNA, 25 bp, Probe sequence
gttatcgaacaataggcctcacagc

SEQ ID NO: 175820 - DNA, 25 bp, Probe sequence
gtacgtagccaaaaggacgctcaat

SEQ ID NO: 175821 - DNA, 25 bp, Probe sequence
gtcactcggactataaaaccacctt

SEQ ID NO: 175822 - DNA, 25 bp, Probe sequence
gtgcttcgactatctaattaaacat

SEQ ID NO: 175823 - DNA, 25 bp, Probe sequence
gggctaaatcacatagtattggcca

SEQ ID NO: 175824 - DNA, 25 bp, Probe sequence
ggcgaactcctagcaatcaagacag

SEQ ID NO: 175825 - DNA, 25 bp, Probe sequence
tgatgcgtgcgatgaatggttagag

SEQ ID NO: 175826 - DNA, 25 bp, Probe sequence
tgatggcacaattaactgggttaca

SEQ ID NO: 175827 - DNA, 25 bp, Probe sequence
tgatctgcacgatattagtgtgtta

SEQ ID NO: 175828 - DNA, 25 bp, Probe sequence
taagcgtcatgctacgcgtaaacgt

SEQ ID NO: 175829 - DNA, 25 bp, Probe sequence
tacagaccctttaactggcaagtat

SEQ ID NO: 175830 - DNA, 25 bp, Probe sequence
tacgtcacacacacatatctacact

SEQ ID NO: 175831 - DNA, 25 bp, Probe sequence
tagagcgctatacagaccctttaac

SEQ ID NO: 175832 - DNA, 25 bp, Probe sequence
taggcctcacagctcaaagtattaa

SEQ ID NO: 175833 - DNA, 25 bp, Probe sequence
ttcaggctcgaaaccaaccactatt

SEQ ID NO: 175834 - DNA, 25 bp, Probe sequence
ttcgttccgttttcaaatatgcgtt

SEQ ID NO: 175835 - DNA, 25 bp, Probe sequence
ttggccatgttcaatctcttgttat

SEQ ID NO: 175836 - DNA, 25 bp, Probe sequence
aaaaagggaagacagcaagcgaaat

SEQ ID NO: 175837 - DNA, 25 bp, Probe sequence
attctagagaattcatatcttttga

SEQ ID NO: 175838 - DNA, 25 bp, Probe sequence
attaatgatttgcactttcatctgc

SEQ ID NO: 175839 - DNA, 25 bp, Probe sequence
atttttatgcatggtttatcattaa

SEQ ID NO: 175840 - DNA, 25 bp, Probe sequence
agggcatataagtggcattgaaaat

SEQ ID NO: 175841 - DNA, 25 bp, Probe sequence
aaaatacggaggtgtcgccaatggt

SEQ ID NO: 175842 - DNA, 25 bp, Probe sequence
aaacaaatgcagtattctcaagggc

SEQ ID NO: 175843 - DNA, 25 bp, Probe sequence
aaggcattagattaacggataacga

SEQ ID NO: 175844 - DNA, 25 bp, Probe sequence
aatggtgttaaatcttttccaagca

SEQ ID NO: 175845 - DNA, 25 bp, Probe sequence
aatcttttccaagcaataaacttat

SEQ ID NO: 175846 - DNA, 25 bp, Probe sequence
aatacggaggtgtcgccaatggttg

SEQ ID NO: 175847 - DNA, 25 bp, Probe sequence
catatcttttgatgacaataacgaa

SEQ ID NO: 175848 - DNA, 25 bp, Probe sequence
gcagatttttaaagtctatccgaaa

SEQ ID NO: 175849 - DNA, 25 bp, Probe sequence
gcactttcatctgcaagatattaat

SEQ ID NO: 175850 - DNA, 25 bp, Probe sequence
gacagcaagcgaaataagtaaacaa

SEQ ID NO: 175851 - DNA, 25 bp, Probe sequence
gacactaatgaggagtataattttt

SEQ ID NO: 175852 - DNA, 25 bp, Probe sequence
gagaattcatatcttttgatgacaa

SEQ ID NO: 175853 - DNA, 25 bp, Probe sequence
gagaacacaaaaactttaagagata

SEQ ID NO: 175854 - DNA, 25 bp, Probe sequence
gagtttcacaatttttaacattagc

SEQ ID NO: 175855 - DNA, 25 bp, Probe sequence
gaggtgtcgccaatggttgaatcaa

SEQ ID NO: 175856 - DNA, 25 bp, Probe sequence
gaggagtataatttttatgttgatg

SEQ ID NO: 175857 - DNA, 25 bp, Probe sequence
gatggatataccatattctagagaa

SEQ ID NO: 175858 - DNA, 25 bp, Probe sequence
gatttgcactttcatctgcaagata

SEQ ID NO: 175859 - DNA, 25 bp, Probe sequence
gtattctcaagggcatataagtggc

SEQ ID NO: 175860 - DNA, 25 bp, Probe sequence
gtattatttttatgcatggtttatc

SEQ ID NO: 175861 - DNA, 25 bp, Probe sequence
ggtgttaaatcttttccaagcaata

SEQ ID NO: 175862 - DNA, 25 bp, Probe sequence
tgtcgccaatggttgaatcaaatga

SEQ ID NO: 175863 - DNA, 25 bp, Probe sequence
tgcagtattctcaagggcatataag

SEQ ID NO: 175864 - DNA, 25 bp, Probe sequence
tacggaggtgtcgccaatggttgaa

SEQ ID NO: 175865 - DNA, 25 bp, Probe sequence
taggcagatttttaaagtctatccg

SEQ ID NO: 175866 - DNA, 25 bp, Probe sequence
tattgtattatttttatgcatggtt

SEQ ID NO: 175867 - DNA, 25 bp, Probe sequence
ttttccaagcaataaacttatcgaa

SEQ ID NO: 175868 - DNA, 25 bp, Probe sequence
ttagcattaatgatttgcactttca

SEQ ID NO: 175869 - DNA, 25 bp, Probe sequence
ttcacaatttttaacattagcatta

SEQ ID NO: 175870 - DNA, 25 bp, Probe sequence
attgctaatggcatgcgtatcggtg

SEQ ID NO: 175871 - DNA, 25 bp, Probe sequence
atgcgtatcggtgagctacttgcaa

SEQ ID NO: 175872 - DNA, 25 bp, Probe sequence
atcggtgagctacttgcaataaaaa

SEQ ID NO: 175873 - DNA, 25 bp, Probe sequence
atggcatgcgtatcggtgagctact

SEQ ID NO: 175874 - DNA, 25 bp, Probe sequence
acgctagatatcgatggtacaatta

SEQ ID NO: 175875 - DNA, 25 bp, Probe sequence
aaattgctaatggcatgcgtatcgg

SEQ ID NO: 175876 - DNA, 25 bp, Probe sequence
aactatgaagataaaacgctagata

SEQ ID NO: 175877 - DNA, 25 bp, Probe sequence
aacgctagatatcgatggtacaatt

SEQ ID NO: 175878 - DNA, 25 bp, Probe sequence
aatggcatgcgtatcggtgagctac

SEQ ID NO: 175879 - DNA, 25 bp, Probe sequence
aattgctaatggcatgcgtatcggt

SEQ ID NO: 175880 - DNA, 25 bp, Probe sequence
catgcgtatcggtgagctacttgca

SEQ ID NO: 175881 - DNA, 25 bp, Probe sequence
ctaatggcatgcgtatcggtgagct

SEQ ID NO: 175882 - DNA, 25 bp, Probe sequence
cgtatcggtgagctacttgcaataa

SEQ ID NO: 175883 - DNA, 25 bp, Probe sequence
cggtgagctacttgcaataaaaaga

SEQ ID NO: 175884 - DNA, 25 bp, Probe sequence
cgctagatatcgatggtacaattaa

SEQ ID NO: 175885 - DNA, 25 bp, Probe sequence
gcgtatcggtgagctacttgcaata

SEQ ID NO: 175886 - DNA, 25 bp, Probe sequence
gctaatggcatgcgtatcggtgagc

SEQ ID NO: 175887 - DNA, 25 bp, Probe sequence
gctagatatcgatggtacaattaat

SEQ ID NO: 175888 - DNA, 25 bp, Probe sequence
gcatgcgtatcggtgagctacttgc

SEQ ID NO: 175889 - DNA, 25 bp, Probe sequence
gcagtttcaaattgctaatggcatg

SEQ ID NO: 175890 - DNA, 25 bp, Probe sequence
gatggtacaattaattggataactg

SEQ ID NO: 175891 - DNA, 25 bp, Probe sequence
gatatcgatggtacaattaattgga

SEQ ID NO: 175892 - DNA, 25 bp, Probe sequence
gtttcaaattgctaatggcatgcgt

SEQ ID NO: 175893 - DNA, 25 bp, Probe sequence
gtatcggtgagctacttgcaataaa

SEQ ID NO: 175894 - DNA, 25 bp, Probe sequence
gtgcagtttcaaattgctaatggca

SEQ ID NO: 175895 - DNA, 25 bp, Probe sequence
gtgagctacttgcaataaaaagaga

SEQ ID NO: 175896 - DNA, 25 bp, Probe sequence
ggcatgcgtatcggtgagctacttg

SEQ ID NO: 175897 - DNA, 25 bp, Probe sequence
tggcatgcgtatcggtgagctactt

SEQ ID NO: 175898 - DNA, 25 bp, Probe sequence
tgcgtatcggtgagctacttgcaat

SEQ ID NO: 175899 - DNA, 25 bp, Probe sequence
tgctaatggcatgcgtatcggtgag

SEQ ID NO: 175900 - DNA, 25 bp, Probe sequence
tcaaattgctaatggcatgcgtatc

SEQ ID NO: 175901 - DNA, 25 bp, Probe sequence
taatggcatgcgtatcggtgagcta

SEQ ID NO: 175902 - DNA, 25 bp, Probe sequence
tatcggtgagctacttgcaataaaa

SEQ ID NO: 175903 - DNA, 25 bp, Probe sequence
ttgctaatggcatgcgtatcggtga

SEQ ID NO: 175904 - DNA, 25 bp, Probe sequence
atatcaaccagaaatcccagctaat

SEQ ID NO: 175905 - DNA, 25 bp, Probe sequence
atcatatcgttttatatcaaccaga

SEQ ID NO: 175906 - DNA, 25 bp, Probe sequence
agagccggtttagattattgggaat

SEQ ID NO: 175907 - DNA, 25 bp, Probe sequence
atgacaaatcatatcgttttatatc

SEQ ID NO: 175908 - DNA, 25 bp, Probe sequence
agctaatactggtaacattgcacgt

SEQ ID NO: 175909 - DNA, 25 bp, Probe sequence
acctcttggatttagaactgatgat

SEQ ID NO: 175910 - DNA, 25 bp, Probe sequence
acgacaggattaccagactgggtga

SEQ ID NO: 175911 - DNA, 25 bp, Probe sequence
actggtaacattgcacgtacgtgtg

SEQ ID NO: 175912 - DNA, 25 bp, Probe sequence
acaaacacacatttacatttaatta

SEQ ID NO: 175913 - DNA, 25 bp, Probe sequence
aaacctcttggatttagaactgatg

SEQ ID NO: 175914 - DNA, 25 bp, Probe sequence
aacattgcacgtacgtgtgcaggta

SEQ ID NO: 175915 - DNA, 25 bp, Probe sequence
aacatattcgttcattaaatttatc

SEQ ID NO: 175916 - DNA, 25 bp, Probe sequence
aagacttatagtgattttgattttt

SEQ ID NO: 175917 - DNA, 25 bp, Probe sequence
aatactggtaacattgcacgtacgt

SEQ ID NO: 175918 - DNA, 25 bp, Probe sequence
cacaaatggcgagtattacttatta

SEQ ID NO: 175919 - DNA, 25 bp, Probe sequence
gccggtttagattattgggaatttg

SEQ ID NO: 175920 - DNA, 25 bp, Probe sequence
gcacgtacgtgtgcaggtacaaaca

SEQ ID NO: 175921 - DNA, 25 bp, Probe sequence
gaattcctatgagtgaacatattcg

SEQ ID NO: 175922 - DNA, 25 bp, Probe sequence
gaagcgttacgtcaacaagattttc

SEQ ID NO: 175923 - DNA, 25 bp, Probe sequence
gaaatcccagctaatactggtaaca

SEQ ID NO: 175924 - DNA, 25 bp, Probe sequence
gacaaagatttttacttcatttttg

SEQ ID NO: 175925 - DNA, 25 bp, Probe sequence
gatagtattgaagcattttttgaag

SEQ ID NO: 175926 - DNA, 25 bp, Probe sequence
gatttttcaaatcatgacaaagatt

SEQ ID NO: 175927 - DNA, 25 bp, Probe sequence
gtgcaggtacaaacacacatttaca

SEQ ID NO: 175928 - DNA, 25 bp, Probe sequence
gtgaatattacgtatcatgatagta

SEQ ID NO: 175929 - DNA, 25 bp, Probe sequence
ggtacaaacacacatttacatttaa

SEQ ID NO: 175930 - DNA, 25 bp, Probe sequence
ggattaccagactgggtgaaagaga

SEQ ID NO: 175931 - DNA, 25 bp, Probe sequence
ggcgagtattacttattaacaaaat

SEQ ID NO: 175932 - DNA, 25 bp, Probe sequence
tgggaatttgtgaatattacgtatc

SEQ ID NO: 175933 - DNA, 25 bp, Probe sequence
tcaaccagaaatcccagctaatact

SEQ ID NO: 175934 - DNA, 25 bp, Probe sequence
taaatttatcaaatactgctgcgtt

SEQ ID NO: 175935 - DNA, 25 bp, Probe sequence
tacatttaattaaacctcttggatt

SEQ ID NO: 175936 - DNA, 25 bp, Probe sequence
ttatatcaaccagaaatcccagcta

SEQ ID NO: 175937 - DNA, 25 bp, Probe sequence
ttaatttatgaagcgttacgtcaac

SEQ ID NO: 175938 - DNA, 25 bp, Probe sequence
ataccttttgaacctgatgatccat

SEQ ID NO: 175939 - DNA, 25 bp, Probe sequence
atacgggtgtattatcagatagggc

SEQ ID NO: 175940 - DNA, 25 bp, Probe sequence
atgcaaatggttatgcctcaggatt

SEQ ID NO: 175941 - DNA, 25 bp, Probe sequence
agggcagtagcagaacgtgcaggtt

SEQ ID NO: 175942 - DNA, 25 bp, Probe sequence
agtacctttactacgtatgtctaat

SEQ ID NO: 175943 - DNA, 25 bp, Probe sequence
agaggtgatcgcagaggcttatttg

SEQ ID NO: 175944 - DNA, 25 bp, Probe sequence
agatgacatcattttggaaccagaa

SEQ ID NO: 175945 - DNA, 25 bp, Probe sequence
agcaagatatcattgactatgcata

SEQ ID NO: 175946 - DNA, 25 bp, Probe sequence
actgccgatccctttgatgaattga

SEQ ID NO: 175947 - DNA, 25 bp, Probe sequence
acaaacatatggtcaccttgcaggt

SEQ ID NO: 175948 - DNA, 25 bp, Probe sequence
aacagcaaggtcaatcatagcaatt

SEQ ID NO: 175949 - DNA, 25 bp, Probe sequence
ctaacaaactgaaaggtgcacctaa

SEQ ID NO: 175950 - DNA, 25 bp, Probe sequence
ccttgcaggtgcttggcgtggtaaa

SEQ ID NO: 175951 - DNA, 25 bp, Probe sequence
gcaggtttaggatttgttggtcgta

SEQ ID NO: 175952 - DNA, 25 bp, Probe sequence
gcaattgcagttggttatcctaaca

SEQ ID NO: 175953 - DNA, 25 bp, Probe sequence
gaatctgatattgctttacgaacgg

SEQ ID NO: 175954 - DNA, 25 bp, Probe sequence
gaaatgttagtcagtataccttttg

SEQ ID NO: 175955 - DNA, 25 bp, Probe sequence
gagcatcgtggggtcaagattatca

SEQ ID NO: 175956 - DNA, 25 bp, Probe sequence
gaggcttatttgctagagcatcgtg

SEQ ID NO: 175957 - DNA, 25 bp, Probe sequence
gatgatccattattagatagctgtg

SEQ ID NO: 175958 - DNA, 25 bp, Probe sequence
gatcgttgtccaacaagtgcattag

SEQ ID NO: 175959 - DNA, 25 bp, Probe sequence
gatagctgtggtgattgtacaattt

SEQ ID NO: 175960 - DNA, 25 bp, Probe sequence
gattatatggttgcgatacgtgtca

SEQ ID NO: 175961 - DNA, 25 bp, Probe sequence
gttggtcgtaatggctttgtcatca

SEQ ID NO: 175962 - DNA, 25 bp, Probe sequence
gtacaatttgtgttgatcgttgtcc

SEQ ID NO: 175963 - DNA, 25 bp, Probe sequence
ggggggcatacgattggatacaaag

SEQ ID NO: 175964 - DNA, 25 bp, Probe sequence
ggtattaataccgaacaagatgaca

SEQ ID NO: 175965 - DNA, 25 bp, Probe sequence
ggagcctaaattatccttaccaaca

SEQ ID NO: 175966 - DNA, 25 bp, Probe sequence
ggaacatggacatacctcggtgaaa

SEQ ID NO: 175967 - DNA, 25 bp, Probe sequence
ggctatatgcctgaccaatatcgtt

SEQ ID NO: 175968 - DNA, 25 bp, Probe sequence
ggctttgtcatcaatcctaaactag

SEQ ID NO: 175969 - DNA, 25 bp, Probe sequence
tgattcgagcaactgcttattgggc

SEQ ID NO: 175970 - DNA, 25 bp, Probe sequence
tattgctttacgaacggagcctaaa

SEQ ID NO: 175971 - DNA, 25 bp, Probe sequence
ttggtatcgacagtattggatttac

SEQ ID NO: 175972 - DNA, 25 bp, Probe sequence
attacataaggaagcattgtcgtta

SEQ ID NO: 175973 - DNA, 25 bp, Probe sequence
aggtcaagtgatttttgaaggcaat

SEQ ID NO: 175974 - DNA, 25 bp, Probe sequence
agatatcaatcttgaaatcaatcaa

SEQ ID NO: 175975 - DNA, 25 bp, Probe sequence
agatcctgaggtagttggtgatgta

SEQ ID NO: 175976 - DNA, 25 bp, Probe sequence
aaagcagatgtatatccgaatcaat

SEQ ID NO: 175977 - DNA, 25 bp, Probe sequence
aatcaatcaaggggaagtagtagca

SEQ ID NO: 175978 - DNA, 25 bp, Probe sequence
caacttcagcattagatcctgaggt

SEQ ID NO: 175979 - DNA, 25 bp, Probe sequence
caaaacttcaacctatttccacata

SEQ ID NO: 175980 - DNA, 25 bp, Probe sequence
gcaagagctttagcaatgcatccag

SEQ ID NO: 175981 - DNA, 25 bp, Probe sequence
gaaccaacttcagcattagatcctg

SEQ ID NO: 175982 - DNA, 25 bp, Probe sequence
gaacacaaaatttcttagcaagagt

SEQ ID NO: 175983 - DNA, 25 bp, Probe sequence
gaacaaccgcaacatgaaagaacac

SEQ ID NO: 175984 - DNA, 25 bp, Probe sequence
gaccatggtggttgtgacacatgaa

SEQ ID NO: 175985 - DNA, 25 bp, Probe sequence
gagctttagcaatgcatccagatgt

SEQ ID NO: 175986 - DNA, 25 bp, Probe sequence
gagtcaggcacaccagtcgaaatat

SEQ ID NO: 175987 - DNA, 25 bp, Probe sequence
gatgttattttattcgatgaaccaa

SEQ ID NO: 175988 - DNA, 25 bp, Probe sequence
gtagtagcaataataggtccatctg

SEQ ID NO: 175989 - DNA, 25 bp, Probe sequence
gtcgaaatatttgaacaaccgcaac

SEQ ID NO: 175990 - DNA, 25 bp, Probe sequence
gtcgataatattattttagctccta

SEQ ID NO: 175991 - DNA, 25 bp, Probe sequence
gtgacaaagtcatatttatggcaga

SEQ ID NO: 175992 - DNA, 25 bp, Probe sequence
gtgacacatgaaatgggatttgcca

SEQ ID NO: 175993 - DNA, 25 bp, Probe sequence
gggatttgccaaagatgtaagtgac

SEQ ID NO: 175994 - DNA, 25 bp, Probe sequence
ggtagttggtgatgtattaaaagta

SEQ ID NO: 175995 - DNA, 25 bp, Probe sequence
ggtatgaccatggtggttgtgacac

SEQ ID NO: 175996 - DNA, 25 bp, Probe sequence
ggaagcattgtcgttattagataaa

SEQ ID NO: 175997 - DNA, 25 bp, Probe sequence
ggcacaccagtcgaaatatttgaac

SEQ ID NO: 175998 - DNA, 25 bp, Probe sequence
tggtatttcaaaacttcaacctatt

SEQ ID NO: 175999 - DNA, 25 bp, Probe sequence
taataggtccatctggtagtggtaa

SEQ ID NO: 176000 - DNA, 25 bp, Probe sequence
tatccgaatcaattatcaggtggtc

SEQ ID NO: 176001 - DNA, 25 bp, Probe sequence
tatttatggcagatggcgttgtcgt

SEQ ID NO: 176002 - DNA, 25 bp, Probe sequence
tattcgatgaaccaacttcagcatt

SEQ ID NO: 176003 - DNA, 25 bp, Probe sequence
ttagcaatgcatccagatgttattt

SEQ ID NO: 176004 - DNA, 25 bp, Probe sequence
ttagctcctaaattattaaagaaag

SEQ ID NO: 176005 - DNA, 25 bp, Probe sequence
ttcaacctatttccacataaaaaag

SEQ ID NO: 176006 - DNA, 25 bp, Probe sequence
atttccggaatgacttcaacgcctg

SEQ ID NO: 176007 - DNA, 25 bp, Probe sequence
atgcatctattacttcattaagccg

SEQ ID NO: 176008 - DNA, 25 bp, Probe sequence
atgacttcaacgcctgaacgtaaga

SEQ ID NO: 176009 - DNA, 25 bp, Probe sequence
agggttgttaattagcagtgctatg

SEQ ID NO: 176010 - DNA, 25 bp, Probe sequence
agtatttatcgtattctttggtata

SEQ ID NO: 176011 - DNA, 25 bp, Probe sequence
agccgcacgtagtctaggtttgaat

SEQ ID NO: 176012 - DNA, 25 bp, Probe sequence
acaatattaatttcacttatcggtg

SEQ ID NO: 176013 - DNA, 25 bp, Probe sequence
aaagaatcatctattgtgtcaacaa

SEQ ID NO: 176014 - DNA, 25 bp, Probe sequence
aacaccaatgttagttcaagtattt

SEQ ID NO: 176015 - DNA, 25 bp, Probe sequence
aatggaagccgcacgtagtctaggt

SEQ ID NO: 176016 - DNA, 25 bp, Probe sequence
aagtgtaattatgccacaagcaatt

SEQ ID NO: 176017 - DNA, 25 bp, Probe sequence
aatatatgactaatgctgcaaatgc

SEQ ID NO: 176018 - DNA, 25 bp, Probe sequence
cagtgctatggtgtatatcaatccc

SEQ ID NO: 176019 - DNA, 25 bp, Probe sequence
cattgctgaaattattcgtgcaggt

SEQ ID NO: 176020 - DNA, 25 bp, Probe sequence
gccgtttaccagacgttatattagc

SEQ ID NO: 176021 - DNA, 25 bp, Probe sequence
gcattaggactagacatttcagctc

SEQ ID NO: 176022 - DNA, 25 bp, Probe sequence
gcacaagtggttcaaggtatttcat

SEQ ID NO: 176023 - DNA, 25 bp, Probe sequence
gaagggagattgaatgccagtgatt

SEQ ID NO: 176024 - DNA, 25 bp, Probe sequence
gaagcaagttgatttttcagattca

SEQ ID NO: 176025 - DNA, 25 bp, Probe sequence
gaacgcggtgaacttagagtgggtc

SEQ ID NO: 176026 - DNA, 25 bp, Probe sequence
gacatttcagctcttgtttgtggaa

SEQ ID NO: 176027 - DNA, 25 bp, Probe sequence
gagtgggtctttctgcagattatgc

SEQ ID NO: 176028 - DNA, 25 bp, Probe sequence
gatgacagtggttttatttctaagt

SEQ ID NO: 176029 - DNA, 25 bp, Probe sequence
gatagtttgttaggagctcttaaaa

SEQ ID NO: 176030 - DNA, 25 bp, Probe sequence
gattcaccaaaattattgtcacaaa

SEQ ID NO: 176031 - DNA, 25 bp, Probe sequence
gttctattttaggtgcattcgttgc

SEQ ID NO: 176032 - DNA, 25 bp, Probe sequence
gttattaattcctcagcttacattg

SEQ ID NO: 176033 - DNA, 25 bp, Probe sequence
gtacttacacgcattatgaacatga

SEQ ID NO: 176034 - DNA, 25 bp, Probe sequence
gtggcagcagcattatactttgtct

SEQ ID NO: 176035 - DNA, 25 bp, Probe sequence
tgtcttaacatttgtacttacacgc

SEQ ID NO: 176036 - DNA, 25 bp, Probe sequence
tgcagattatgcaccaatggaattt

SEQ ID NO: 176037 - DNA, 25 bp, Probe sequence
tacttcattaagccgtttaccagac

SEQ ID NO: 176038 - DNA, 25 bp, Probe sequence
taggtgcattcgttgcgttaatgaa

SEQ ID NO: 176039 - DNA, 25 bp, Probe sequence
ttcatttgacccattcacaccatta

SEQ ID NO: 176040 - DNA, 25 bp, Probe sequence
attttgtcataccatttgtatcggc

SEQ ID NO: 176041 - DNA, 25 bp, Probe sequence
atcacattaccttacattcgaaaaa

SEQ ID NO: 176042 - DNA, 25 bp, Probe sequence
atcattgcttacgttcttcaggtta

SEQ ID NO: 176043 - DNA, 25 bp, Probe sequence
atgtctatacttattagtgtggcat

SEQ ID NO: 176044 - DNA, 25 bp, Probe sequence
agtggagcagcaaacctaggtatag

SEQ ID NO: 176045 - DNA, 25 bp, Probe sequence
accgaatgtcaggtgatccaacaat

SEQ ID NO: 176046 - DNA, 25 bp, Probe sequence
acttgttccgaatgctttattaggt

SEQ ID NO: 176047 - DNA, 25 bp, Probe sequence
aaattctattggtgctggtgttgtt

SEQ ID NO: 176048 - DNA, 25 bp, Probe sequence
aaatgatgatcccagtttacttgaa

SEQ ID NO: 176049 - DNA, 25 bp, Probe sequence
aaatccgttgttaatgtctatactt

SEQ ID NO: 176050 - DNA, 25 bp, Probe sequence
aaatgcagttttactcataggagct

SEQ ID NO: 176051 - DNA, 25 bp, Probe sequence
aaaattcattcctatatattctaat

SEQ ID NO: 176052 - DNA, 25 bp, Probe sequence
aattactggaatcattgcttacgtt

SEQ ID NO: 176053 - DNA, 25 bp, Probe sequence
aattatttcgataccattgactata

SEQ ID NO: 176054 - DNA, 25 bp, Probe sequence
ctatcgttagtgggggtatcggtct

SEQ ID NO: 176055 - DNA, 25 bp, Probe sequence
cattgtctgctggatttggatatac

SEQ ID NO: 176056 - DNA, 25 bp, Probe sequence
cattcttttacagacttaaatccgt

SEQ ID NO: 176057 - DNA, 25 bp, Probe sequence
gcaggtgctgctatagtaggtacat

SEQ ID NO: 176058 - DNA, 25 bp, Probe sequence
gatatacaggattagttggcccaat

SEQ ID NO: 176059 - DNA, 25 bp, Probe sequence
gattggttcaggtgctgttgtatat

SEQ ID NO: 176060 - DNA, 25 bp, Probe sequence
gtatcggtctaatcacattacctta

SEQ ID NO: 176061 - DNA, 25 bp, Probe sequence
gttagtagcgattgcaactgcgatt

SEQ ID NO: 176062 - DNA, 25 bp, Probe sequence
ggtgttgttattgcacttgttccga

SEQ ID NO: 176063 - DNA, 25 bp, Probe sequence
ggtaacaccaatatcgttagtagcg

SEQ ID NO: 176064 - DNA, 25 bp, Probe sequence
ggtacatcagctatgattggttcag

SEQ ID NO: 176065 - DNA, 25 bp, Probe sequence
ggaacaccattgtctgctggatttg

SEQ ID NO: 176066 - DNA, 25 bp, Probe sequence
ggctcattgcgtgtcaattctattg

SEQ ID NO: 176067 - DNA, 25 bp, Probe sequence
tggttgttattattgcatgtcttat

SEQ ID NO: 176068 - DNA, 25 bp, Probe sequence
taccagttttagtacctatcgttag

SEQ ID NO: 176069 - DNA, 25 bp, Probe sequence
tagttggcccaataaatgcatttaa

SEQ ID NO: 176070 - DNA, 25 bp, Probe sequence
tatggcatttattattggggtttta

SEQ ID NO: 176071 - DNA, 25 bp, Probe sequence
ttattggggttttagctgctcatca

SEQ ID NO: 176072 - DNA, 25 bp, Probe sequence
ttagtgtggcattttcattattaat

SEQ ID NO: 176073 - DNA, 25 bp, Probe sequence
ttagctgctcatcaatttaaattta

SEQ ID NO: 176074 - DNA, 25 bp, Probe sequence
atatacttggtatacccataggtac

SEQ ID NO: 176075 - DNA, 25 bp, Probe sequence
atatcattgcgattatcactttttt

SEQ ID NO: 176076 - DNA, 25 bp, Probe sequence
atacgtaggctttagtgcagcaaat

SEQ ID NO: 176077 - DNA, 25 bp, Probe sequence
atcacttttttatgtctactaggta

SEQ ID NO: 176078 - DNA, 25 bp, Probe sequence
atcgctaacatatacgtaggcttta

SEQ ID NO: 176079 - DNA, 25 bp, Probe sequence
aggcgatccaagtcaaatattgagc

SEQ ID NO: 176080 - DNA, 25 bp, Probe sequence
atgtctactggagcaaatattgttc

SEQ ID NO: 176081 - DNA, 25 bp, Probe sequence
atgtcatacttttaattttatctat

SEQ ID NO: 176082 - DNA, 25 bp, Probe sequence
aggtattgcaggtgttttaggttca

SEQ ID NO: 176083 - DNA, 25 bp, Probe sequence
aggtcagttggtaacattgtatgct

SEQ ID NO: 176084 - DNA, 25 bp, Probe sequence
aatccaacagttcaatatgctttac

SEQ ID NO: 176085 - DNA, 25 bp, Probe sequence
gaaaggctataggattgctggaaat

SEQ ID NO: 176086 - DNA, 25 bp, Probe sequence
gaggcacattaatcatgttgggctt

SEQ ID NO: 176087 - DNA, 25 bp, Probe sequence
gttgggctttttattaatcatgatg

SEQ ID NO: 176088 - DNA, 25 bp, Probe sequence
gtttattgttggtgtttcagactta

SEQ ID NO: 176089 - DNA, 25 bp, Probe sequence
gtttgtgtttatttttctcaggtat

SEQ ID NO: 176090 - DNA, 25 bp, Probe sequence
gtatgctgttgctttttcaattcta

SEQ ID NO: 176091 - DNA, 25 bp, Probe sequence
gtaaaggtcatagcatctggatagt

SEQ ID NO: 176092 - DNA, 25 bp, Probe sequence
gtaactttgattggctttttcacaa

SEQ ID NO: 176093 - DNA, 25 bp, Probe sequence
gtaatgctttaataggtcagttggt

SEQ ID NO: 176094 - DNA, 25 bp, Probe sequence
gggcatcgcttcattaatcactgta

SEQ ID NO: 176095 - DNA, 25 bp, Probe sequence
ggtggtatattattttctatcgata

SEQ ID NO: 176096 - DNA, 25 bp, Probe sequence
ggtacattaattgcttcccattaca

SEQ ID NO: 176097 - DNA, 25 bp, Probe sequence
ggaagattccgttttatatcattgc

SEQ ID NO: 176098 - DNA, 25 bp, Probe sequence
tgaccaattatttctttctatgtat

SEQ ID NO: 176099 - DNA, 25 bp, Probe sequence
tacaaagcatcagttatcgctaaca

SEQ ID NO: 176100 - DNA, 25 bp, Probe sequence
tactttttattattttcagcatgct

SEQ ID NO: 176101 - DNA, 25 bp, Probe sequence
tagaatctttatggcgggcatcgct

SEQ ID NO: 176102 - DNA, 25 bp, Probe sequence
taggtattatgttatttatcccgaa

SEQ ID NO: 176103 - DNA, 25 bp, Probe sequence
tatgagcatcttattgactggacaa

SEQ ID NO: 176104 - DNA, 25 bp, Probe sequence
ttttcagcatgcttacaactgtaat

SEQ ID NO: 176105 - DNA, 25 bp, Probe sequence
ttagcaatggtttcatctatattat

SEQ ID NO: 176106 - DNA, 25 bp, Probe sequence
ttcaattctaagccctctcttaaca

SEQ ID NO: 176107 - DNA, 25 bp, Probe sequence
ttctatcgataatcagttcaactta

SEQ ID NO: 176108 - DNA, 25 bp, Probe sequence
attgattcttgtgctgtaacttggg

SEQ ID NO: 176109 - DNA, 25 bp, Probe sequence
attcttgtgctgtaacttggggaag

SEQ ID NO: 176110 - DNA, 25 bp, Probe sequence
attataaaccttctcctgatggaat

SEQ ID NO: 176111 - DNA, 25 bp, Probe sequence
atatgttggagatgctgtttttgat

SEQ ID NO: 176112 - DNA, 25 bp, Probe sequence
ataaaccttctcctgatggaattat

SEQ ID NO: 176113 - DNA, 25 bp, Probe sequence
atgccaatattgattcttgtgctgt

SEQ ID NO: 176114 - DNA, 25 bp, Probe sequence
atgacttacataacaaagacactat

SEQ ID NO: 176115 - DNA, 25 bp, Probe sequence
atgttggagatgctgtttttgatat

SEQ ID NO: 176116 - DNA, 25 bp, Probe sequence
accttctcctgatggaattatatat

SEQ ID NO: 176117 - DNA, 25 bp, Probe sequence
acgaattataaaccttctcctgatg

SEQ ID NO: 176118 - DNA, 25 bp, Probe sequence
aaatgccaatattgattcttgtgct

SEQ ID NO: 176119 - DNA, 25 bp, Probe sequence
aaaccttctcctgatggaattatat

SEQ ID NO: 176120 - DNA, 25 bp, Probe sequence
aacttggggaagtcatagtattgaa

SEQ ID NO: 176121 - DNA, 25 bp, Probe sequence
aacgaattataaaccttctcctgat

SEQ ID NO: 176122 - DNA, 25 bp, Probe sequence
aagacactatatatgttggagatgc

SEQ ID NO: 176123 - DNA, 25 bp, Probe sequence
aatattgattcttgtgctgtaactt

SEQ ID NO: 176124 - DNA, 25 bp, Probe sequence
cactatatatgttggagatgctgtt

SEQ ID NO: 176125 - DNA, 25 bp, Probe sequence
gccaatattgattcttgtgctgtaa

SEQ ID NO: 176126 - DNA, 25 bp, Probe sequence
gctgtaacttggggaagtcatagta

SEQ ID NO: 176127 - DNA, 25 bp, Probe sequence
gctgtttttgatattaaaatggcta

SEQ ID NO: 176128 - DNA, 25 bp, Probe sequence
gaattataaaccttctcctgatgga

SEQ ID NO: 176129 - DNA, 25 bp, Probe sequence
gaagtattaaacactgaaaatccaa

SEQ ID NO: 176130 - DNA, 25 bp, Probe sequence
gattcttgtgctgtaacttggggaa

SEQ ID NO: 176131 - DNA, 25 bp, Probe sequence
gttggagatgctgtttttgatatta

SEQ ID NO: 176132 - DNA, 25 bp, Probe sequence
gtaacgaattataaaccttctcctg

SEQ ID NO: 176133 - DNA, 25 bp, Probe sequence
ggggaagtcatagtattgaagtatt

SEQ ID NO: 176134 - DNA, 25 bp, Probe sequence
tggagatgctgtttttgatattaaa

SEQ ID NO: 176135 - DNA, 25 bp, Probe sequence
tgtgctgtaacttggggaagtcata

SEQ ID NO: 176136 - DNA, 25 bp, Probe sequence
tgattcttgtgctgtaacttgggga

SEQ ID NO: 176137 - DNA, 25 bp, Probe sequence
tctcctgatggaattatatatatat

SEQ ID NO: 176138 - DNA, 25 bp, Probe sequence
tcttgtgctgtaacttggggaagtc

SEQ ID NO: 176139 - DNA, 25 bp, Probe sequence
tattgattcttgtgctgtaacttgg

SEQ ID NO: 176140 - DNA, 25 bp, Probe sequence
ttataaaccttctcctgatggaatt

SEQ ID NO: 176141 - DNA, 25 bp, Probe sequence
ttgattcttgtgctgtaacttgggg

SEQ ID NO: 176142 - DNA, 25 bp, Probe sequence
atatccacagttaaatgaaattgaa

SEQ ID NO: 176143 - DNA, 25 bp, Probe sequence
atactcatccaacagctgatgaaat

SEQ ID NO: 176144 - DNA, 25 bp, Probe sequence
agtcgattcgactttaatacacata

SEQ ID NO: 176145 - DNA, 25 bp, Probe sequence
agcactttcacctgattttccaaat

SEQ ID NO: 176146 - DNA, 25 bp, Probe sequence
agcatatgactgactttgacgtaac

SEQ ID NO: 176147 - DNA, 25 bp, Probe sequence
actttcacctgattttccaaatata

SEQ ID NO: 176148 - DNA, 25 bp, Probe sequence
acacctcaaagacaagcaatattac

SEQ ID NO: 176149 - DNA, 25 bp, Probe sequence
aaatttatcaagcactttcacctga

SEQ ID NO: 176150 - DNA, 25 bp, Probe sequence
aagaattacacctcaaagacaagca

SEQ ID NO: 176151 - DNA, 25 bp, Probe sequence
aagacaagcaatattacgttattta

SEQ ID NO: 176152 - DNA, 25 bp, Probe sequence
aatgtggtaagattgttgattttca

SEQ ID NO: 176153 - DNA, 25 bp, Probe sequence
aattgcatcattgcgacaagcaggc

SEQ ID NO: 176154 - DNA, 25 bp, Probe sequence
gaattaacatatggagactcatcaa

SEQ ID NO: 176155 - DNA, 25 bp, Probe sequence
gaatcaattgcatcattgcgacaag

SEQ ID NO: 176156 - DNA, 25 bp, Probe sequence
gaactagaagaatcaattgcatcat

SEQ ID NO: 176157 - DNA, 25 bp, Probe sequence
gaaattgaaagattagctcagcata

SEQ ID NO: 176158 - DNA, 25 bp, Probe sequence
gactttgacgtaacacatcatcgaa

SEQ ID NO: 176159 - DNA, 25 bp, Probe sequence
gactgactttgacgtaacacatcat

SEQ ID NO: 176160 - DNA, 25 bp, Probe sequence
gacgtaacacatcatcgaatggaaa

SEQ ID NO: 176161 - DNA, 25 bp, Probe sequence
gagtgtttaaagatattggaattgt

SEQ ID NO: 176162 - DNA, 25 bp, Probe sequence
gattagctcagcatatgactgactt

SEQ ID NO: 176163 - DNA, 25 bp, Probe sequence
gttgattttcaatatccacagttaa

SEQ ID NO: 176164 - DNA, 25 bp, Probe sequence
gtgttgcgacaatatataataactt

SEQ ID NO: 176165 - DNA, 25 bp, Probe sequence
ggagactcatcaagtcgattcgact

SEQ ID NO: 176166 - DNA, 25 bp, Probe sequence
tggagtttgtaaagaatgccaagat

SEQ ID NO: 176167 - DNA, 25 bp, Probe sequence
tcgaatggaaatttatggagtttgt

SEQ ID NO: 176168 - DNA, 25 bp, Probe sequence
tcaagcactttcacctgattttcca

SEQ ID NO: 176169 - DNA, 25 bp, Probe sequence
taatttcttcacatactcatccaac

SEQ ID NO: 176170 - DNA, 25 bp, Probe sequence
tacgttatttaatttcttcacatac

SEQ ID NO: 176171 - DNA, 25 bp, Probe sequence
tagaatcaattgaacatgaactaga

SEQ ID NO: 176172 - DNA, 25 bp, Probe sequence
tttccaaatataagtgttgcgacaa

SEQ ID NO: 176173 - DNA, 25 bp, Probe sequence
tttcttcacatactcatccaacagc

SEQ ID NO: 176174 - DNA, 25 bp, Probe sequence
ttcacatactcatccaacagctgat

SEQ ID NO: 176175 - DNA, 25 bp, Probe sequence
ttcgactttaatacacataatcatt

SEQ ID NO: 176176 - DNA, 25 bp, Probe sequence
atattagcgatactgattttgaaaa

SEQ ID NO: 176177 - DNA, 25 bp, Probe sequence
atcaagacttaatgctaatttctca

SEQ ID NO: 176178 - DNA, 25 bp, Probe sequence
atcacacttactcaatcaaatatta

SEQ ID NO: 176179 - DNA, 25 bp, Probe sequence
atggaaacttaatcacacttactca

SEQ ID NO: 176180 - DNA, 25 bp, Probe sequence
agttggaaactcaatatacttaaat

SEQ ID NO: 176181 - DNA, 25 bp, Probe sequence
acttaatcacacttactcaatcaaa

SEQ ID NO: 176182 - DNA, 25 bp, Probe sequence
acacttactcaatcaaatattagcg

SEQ ID NO: 176183 - DNA, 25 bp, Probe sequence
aaacttaatcacacttactcaatca

SEQ ID NO: 176184 - DNA, 25 bp, Probe sequence
aacaaccatggaacgctaaagaaat

SEQ ID NO: 176185 - DNA, 25 bp, Probe sequence
aacaatggaattttatcaaatgcca

SEQ ID NO: 176186 - DNA, 25 bp, Probe sequence
aacttaatcacacttactcaatcaa

SEQ ID NO: 176187 - DNA, 25 bp, Probe sequence
aactcaatatacttaaatatcttag

SEQ ID NO: 176188 - DNA, 25 bp, Probe sequence
aagacttaatgctaatttctcaaaa

SEQ ID NO: 176189 - DNA, 25 bp, Probe sequence
aagattttgaagttggaaactcaat

SEQ ID NO: 176190 - DNA, 25 bp, Probe sequence
aagtgctaatgaatcatttgagact

SEQ ID NO: 176191 - DNA, 25 bp, Probe sequence
aatgaatcatttgagactagagaaa

SEQ ID NO: 176192 - DNA, 25 bp, Probe sequence
aatgacaataaaagatccagatgga

SEQ ID NO: 176193 - DNA, 25 bp, Probe sequence
aatgctaatttctcaaaaagatttt

SEQ ID NO: 176194 - DNA, 25 bp, Probe sequence
aatgccaatgtttaataaagtgcta

SEQ ID NO: 176195 - DNA, 25 bp, Probe sequence
aattagaagaacaaccatggaacgc

SEQ ID NO: 176196 - DNA, 25 bp, Probe sequence
cttaatcacacttactcaatcaaat

SEQ ID NO: 176197 - DNA, 25 bp, Probe sequence
gaagaacaaccatggaacgctaaag

SEQ ID NO: 176198 - DNA, 25 bp, Probe sequence
gaaaaatcacaaaacatttcacaaa

SEQ ID NO: 176199 - DNA, 25 bp, Probe sequence
gaaacttaatcacacttactcaatc

SEQ ID NO: 176200 - DNA, 25 bp, Probe sequence
gacttaatgctaatttctcaaaaag

SEQ ID NO: 176201 - DNA, 25 bp, Probe sequence
gagaaatatcaagacttaatgctaa

SEQ ID NO: 176202 - DNA, 25 bp, Probe sequence
gatggaaacttaatcacacttactc

SEQ ID NO: 176203 - DNA, 25 bp, Probe sequence
gatccagatggaaacttaatcacac

SEQ ID NO: 176204 - DNA, 25 bp, Probe sequence
ggaaacttaatcacacttactcaat

SEQ ID NO: 176205 - DNA, 25 bp, Probe sequence
ggaacgctaaagaaatgacaataaa

SEQ ID NO: 176206 - DNA, 25 bp, Probe sequence
ggaattttatcaaatgccaatgttt

SEQ ID NO: 176207 - DNA, 25 bp, Probe sequence
taatcacacttactcaatcaaatat

SEQ ID NO: 176208 - DNA, 25 bp, Probe sequence
tactcaatcaaatattagcgatact

SEQ ID NO: 176209 - DNA, 25 bp, Probe sequence
ttcacaaaaatttatagtaagccaa

SEQ ID NO: 176210 - DNA, 25 bp, Probe sequence
atttcaggagatttaacgataggga

SEQ ID NO: 176211 - DNA, 25 bp, Probe sequence
atggattcattaaaagttctaactg

SEQ ID NO: 176212 - DNA, 25 bp, Probe sequence
aggcttttctattgtttctaaatca

SEQ ID NO: 176213 - DNA, 25 bp, Probe sequence
atggcgaatatcgattgtcacaaca

SEQ ID NO: 176214 - DNA, 25 bp, Probe sequence
acgttatttctatttagtcatacat

SEQ ID NO: 176215 - DNA, 25 bp, Probe sequence
acacagtagacgtattgctcaagat

SEQ ID NO: 176216 - DNA, 25 bp, Probe sequence
aaatgtctttaacaagtgatgggga

SEQ ID NO: 176217 - DNA, 25 bp, Probe sequence
aacgattagaactggaatacgatgt

SEQ ID NO: 176218 - DNA, 25 bp, Probe sequence
aacgtgagcgattagaacaaaactt

SEQ ID NO: 176219 - DNA, 25 bp, Probe sequence
aatcatcatcttcaaataagtcaat

SEQ ID NO: 176220 - DNA, 25 bp, Probe sequence
aatatggtccacgctgataaaggct

SEQ ID NO: 176221 - DNA, 25 bp, Probe sequence
aatatgctttacaacgtgagcgatt

SEQ ID NO: 176222 - DNA, 25 bp, Probe sequence
aatttatatacttcacagccatcaa

SEQ ID NO: 176223 - DNA, 25 bp, Probe sequence
caacattaacaccttatgatttaga

SEQ ID NO: 176224 - DNA, 25 bp, Probe sequence
cacagccatcaataagtcgcgatat

SEQ ID NO: 176225 - DNA, 25 bp, Probe sequence
cagagaacgtggatcagggacaaga

SEQ ID NO: 176226 - DNA, 25 bp, Probe sequence
gcgttatcacaaatgacttcatcct

SEQ ID NO: 176227 - DNA, 25 bp, Probe sequence
gacacgatttgaaaatgcaacctga

SEQ ID NO: 176228 - DNA, 25 bp, Probe sequence
gacatcaaacgttatttctatttag

SEQ ID NO: 176229 - DNA, 25 bp, Probe sequence
gacttcatcctcttatttagtagaa

SEQ ID NO: 176230 - DNA, 25 bp, Probe sequence
gagaaactatttcaatatgctttac

SEQ ID NO: 176231 - DNA, 25 bp, Probe sequence
gatagggagtagttacacttatggc

SEQ ID NO: 176232 - DNA, 25 bp, Probe sequence
gatttagccaaaaattatcctgaat

SEQ ID NO: 176233 - DNA, 25 bp, Probe sequence
gtttctaaatcaacattaacacctt

SEQ ID NO: 176234 - DNA, 25 bp, Probe sequence
gtagttacacttatggcgaatatcg

SEQ ID NO: 176235 - DNA, 25 bp, Probe sequence
gtaacaaacttagacatcaaacgtt

SEQ ID NO: 176236 - DNA, 25 bp, Probe sequence
gtcaatatgttttatcagagaacgt

SEQ ID NO: 176237 - DNA, 25 bp, Probe sequence
gtctatcaggaaaatgcgttatcac

SEQ ID NO: 176238 - DNA, 25 bp, Probe sequence
gtcacaacatcttgctgatttagcc

SEQ ID NO: 176239 - DNA, 25 bp, Probe sequence
gtccacgctgataaaggcttttcta

SEQ ID NO: 176240 - DNA, 25 bp, Probe sequence
ggatcagggacaagagtctatcagg

SEQ ID NO: 176241 - DNA, 25 bp, Probe sequence
tcgattgtcacaacatcttgctgat

SEQ ID NO: 176242 - DNA, 25 bp, Probe sequence
tatcctgaattatacattcatgtgt

SEQ ID NO: 176243 - DNA, 25 bp, Probe sequence
ttcgcaaaaaatcatcatcttcaaa

SEQ ID NO: 176244 - DNA, 25 bp, Probe sequence
attgctgaacaatggcaagtttcac

SEQ ID NO: 176245 - DNA, 25 bp, Probe sequence
atttaacgatcatatgagtggttca

SEQ ID NO: 176246 - DNA, 25 bp, Probe sequence
atttgcaaggtctggagatactatt

SEQ ID NO: 176247 - DNA, 25 bp, Probe sequence
agaggacggtatggtggaagacccg

SEQ ID NO: 176248 - DNA, 25 bp, Probe sequence
agcaattgaatttgcaaggtctgga

SEQ ID NO: 176249 - DNA, 25 bp, Probe sequence
acgtgctagaggacggtatggtgga

SEQ ID NO: 176250 - DNA, 25 bp, Probe sequence
aagaagatcgattaaatgcatatgg

SEQ ID NO: 176251 - DNA, 25 bp, Probe sequence
aagacaattgctgaacaatggcaag

SEQ ID NO: 176252 - DNA, 25 bp, Probe sequence
aagatttaaaattgctcaaaacact

SEQ ID NO: 176253 - DNA, 25 bp, Probe sequence
aatttgcaaggtctggagatactat

SEQ ID NO: 176254 - DNA, 25 bp, Probe sequence
caattgaatttgcaaggtctggaga

SEQ ID NO: 176255 - DNA, 25 bp, Probe sequence
aattgaatttgcaaggtctggagat

SEQ ID NO: 176256 - DNA, 25 bp, Probe sequence
caagttctaccggacaattattatt

SEQ ID NO: 176257 - DNA, 25 bp, Probe sequence
cgtgctagaggacggtatggtggaa

SEQ ID NO: 176258 - DNA, 25 bp, Probe sequence
gctagaggacggtatggtggaagac

SEQ ID NO: 176259 - DNA, 25 bp, Probe sequence
gaatttgcaaggtctggagatacta

SEQ ID NO: 176260 - DNA, 25 bp, Probe sequence
gaggacggtatggtggaagacccga

SEQ ID NO: 176261 - DNA, 25 bp, Probe sequence
gaaaagatatttaacgatcatatga

SEQ ID NO: 176262 - DNA, 25 bp, Probe sequence
gacaattgctgaacaatggcaagtt

SEQ ID NO: 176263 - DNA, 25 bp, Probe sequence
gatttaaaattgctcaaaacacttt

SEQ ID NO: 176264 - DNA, 25 bp, Probe sequence
gtgctagaggacggtatggtggaag

SEQ ID NO: 176265 - DNA, 25 bp, Probe sequence
tgaatttgcaaggtctggagatact

SEQ ID NO: 176266 - DNA, 25 bp, Probe sequence
tgcaaggtctggagatactattgtt

SEQ ID NO: 176267 - DNA, 25 bp, Probe sequence
tgctgaacaatggcaagtttcacgt

SEQ ID NO: 176268 - DNA, 25 bp, Probe sequence
tgctagaggacggtatggtggaaga

SEQ ID NO: 176269 - DNA, 25 bp, Probe sequence
tcgttatctcaataaattagaagat

SEQ ID NO: 176270 - DNA, 25 bp, Probe sequence
tacaagaagatcgattaaatgcata

SEQ ID NO: 176271 - DNA, 25 bp, Probe sequence
tagaggacggtatggtggaagaccc

SEQ ID NO: 176272 - DNA, 25 bp, Probe sequence
tttgcaaggtctggagatactattg

SEQ ID NO: 176273 - DNA, 25 bp, Probe sequence
tttaaaattgctcaaaacactttat

SEQ ID NO: 176274 - DNA, 25 bp, Probe sequence
ttaagacaattgctgaacaatggca

SEQ ID NO: 176275 - DNA, 25 bp, Probe sequence
ttgaatttgcaaggtctggagatac

SEQ ID NO: 176276 - DNA, 25 bp, Probe sequence
ttgcaaggtctggagatactattgt

SEQ ID NO: 176277 - DNA, 25 bp, Probe sequence
ttgctgaacaatggcaagtttcacg

SEQ ID NO: 176278 - DNA, 25 bp, Probe sequence
attagttggttatgatggcggtatc

SEQ ID NO: 176279 - DNA, 25 bp, Probe sequence
atcgtatgcgtgaagttgaaactga

SEQ ID NO: 176280 - DNA, 25 bp, Probe sequence
agttattcgacatgcatatttagat

SEQ ID NO: 176281 - DNA, 25 bp, Probe sequence
agcaaaggcttttaatatgaattta

SEQ ID NO: 176282 - DNA, 25 bp, Probe sequence
acgcctatcaggacaaacagtttta

SEQ ID NO: 176283 - DNA, 25 bp, Probe sequence
acagcgcatataactggtaatgatt

SEQ ID NO: 176284 - DNA, 25 bp, Probe sequence
aaacaatctagttaattttctcaat

SEQ ID NO: 176285 - DNA, 25 bp, Probe sequence
aactggtaaacgcctatcaggacaa

SEQ ID NO: 176286 - DNA, 25 bp, Probe sequence
aagcacattaccaaatgctgacatt

SEQ ID NO: 176287 - DNA, 25 bp, Probe sequence
aagaagcgctcttaatagaagtatt

SEQ ID NO: 176288 - DNA, 25 bp, Probe sequence
aagtatgacttattagatattttta

SEQ ID NO: 176289 - DNA, 25 bp, Probe sequence
aatataggacgaggtagcatagtta

SEQ ID NO: 176290 - DNA, 25 bp, Probe sequence
gctaaacaattatctgaatacattt

SEQ ID NO: 176291 - DNA, 25 bp, Probe sequence
gcatggtttgcaacgggtgtaaata

SEQ ID NO: 176292 - DNA, 25 bp, Probe sequence
gcagatcacggcatacttttaacta

SEQ ID NO: 176293 - DNA, 25 bp, Probe sequence
gcaagaaacgattcatttactaaag

SEQ ID NO: 176294 - DNA, 25 bp, Probe sequence
gaatttaattggtctgagcaagtca

SEQ ID NO: 176295 - DNA, 25 bp, Probe sequence
gaatcacttgaaagcacattaccaa

SEQ ID NO: 176296 - DNA, 25 bp, Probe sequence
gaacctttgaaacctaatcatgaat

SEQ ID NO: 176297 - DNA, 25 bp, Probe sequence
gaactgcgaagttagcaaaggcttt

SEQ ID NO: 176298 - DNA, 25 bp, Probe sequence
gaaaataactggtaaacgcctatca

SEQ ID NO: 176299 - DNA, 25 bp, Probe sequence
gaaaaggtgttcaagctaaacaatt

SEQ ID NO: 176300 - DNA, 25 bp, Probe sequence
gaaactgaattacaacaacgctttt

SEQ ID NO: 176301 - DNA, 25 bp, Probe sequence
gagcaagtcaggtcagaacaaagat

SEQ ID NO: 176302 - DNA, 25 bp, Probe sequence
gatggcggtatcaatgaggcatttt

SEQ ID NO: 176303 - DNA, 25 bp, Probe sequence
gatatatactatcgaatcacttgaa

SEQ ID NO: 176304 - DNA, 25 bp, Probe sequence
gttagattatattgcagatcacggc

SEQ ID NO: 176305 - DNA, 25 bp, Probe sequence
gtagcatagttaaagaagcgctctt

SEQ ID NO: 176306 - DNA, 25 bp, Probe sequence
gtaactataacagcgcatataactg

SEQ ID NO: 176307 - DNA, 25 bp, Probe sequence
ggtgcaattgctactagaactgcga

SEQ ID NO: 176308 - DNA, 25 bp, Probe sequence
tgaattacaacaacgcttttcagat

SEQ ID NO: 176309 - DNA, 25 bp, Probe sequence
tgctttaccagaaacgcaagaaacg

SEQ ID NO: 176310 - DNA, 25 bp, Probe sequence
tcacggcatacttttaactaatgga

SEQ ID NO: 176311 - DNA, 25 bp, Probe sequence
tttaggtacaggtgcaattgctact

SEQ ID NO: 176312 - DNA, 25 bp, Probe sequence
atatggtataagcggtgattcaaag

SEQ ID NO: 176313 - DNA, 25 bp, Probe sequence
atcctagagataatacacctacttg

SEQ ID NO: 176314 - DNA, 25 bp, Probe sequence
atgatttagatgttgcagtatatgg

SEQ ID NO: 176315 - DNA, 25 bp, Probe sequence
atggtataagcggtgattcaaagaa

SEQ ID NO: 176316 - DNA, 25 bp, Probe sequence
aggtaaagtattagatgttatcgag

SEQ ID NO: 176317 - DNA, 25 bp, Probe sequence
agaagcttgtgactttagagacaat

SEQ ID NO: 176318 - DNA, 25 bp, Probe sequence
acggattgaatttcgatttattagt

SEQ ID NO: 176319 - DNA, 25 bp, Probe sequence
aagcttgtgactttagagacaattt

SEQ ID NO: 176320 - DNA, 25 bp, Probe sequence
aatgttcaatgatttagatgttgca

SEQ ID NO: 176321 - DNA, 25 bp, Probe sequence
aatcatttggcaaagaaagtatggg

SEQ ID NO: 176322 - DNA, 25 bp, Probe sequence
gcttgtgactttagagacaatttag

SEQ ID NO: 176323 - DNA, 25 bp, Probe sequence
gcaaaaaggagaacaatttccaata

SEQ ID NO: 176324 - DNA, 25 bp, Probe sequence
gaagcttgtgactttagagacaatt

SEQ ID NO: 176325 - DNA, 25 bp, Probe sequence
gaactgtcattacaaatgatacatt

SEQ ID NO: 176326 - DNA, 25 bp, Probe sequence
gaacaatttccaatatttaaattag

SEQ ID NO: 176327 - DNA, 25 bp, Probe sequence
gacggaactgtcattacaaatgata

SEQ ID NO: 176328 - DNA, 25 bp, Probe sequence
gatgttgcagtatatggtataagcg

SEQ ID NO: 176329 - DNA, 25 bp, Probe sequence
gatttagatgttgcagtatatggta

SEQ ID NO: 176330 - DNA, 25 bp, Probe sequence
gattgaatttcgatttattagtaga

SEQ ID NO: 176331 - DNA, 25 bp, Probe sequence
gttgcagtatatggtataagcggtg

SEQ ID NO: 176332 - DNA, 25 bp, Probe sequence
gttcaatgatttagatgttgcagta

SEQ ID NO: 176333 - DNA, 25 bp, Probe sequence
gtattagatgttatcgagaaggtta

SEQ ID NO: 176334 - DNA, 25 bp, Probe sequence
gtatatggtataagcggtgattcaa

SEQ ID NO: 176335 - DNA, 25 bp, Probe sequence
gtgactttagagacaatttagaaat

SEQ ID NO: 176336 - DNA, 25 bp, Probe sequence
ggtataagcggtgattcaaagaaaa

SEQ ID NO: 176337 - DNA, 25 bp, Probe sequence
ggattgaatttcgatttattagtag

SEQ ID NO: 176338 - DNA, 25 bp, Probe sequence
ggagaacaatttccaatatttaaat

SEQ ID NO: 176339 - DNA, 25 bp, Probe sequence
ggcgtatatcagttaaaaaaatcat

SEQ ID NO: 176340 - DNA, 25 bp, Probe sequence
tgcagtatatggtataagcggtgat

SEQ ID NO: 176341 - DNA, 25 bp, Probe sequence
tagatgttgcagtatatggtataag

SEQ ID NO: 176342 - DNA, 25 bp, Probe sequence
tatggtataagcggtgattcaaaga

SEQ ID NO: 176343 - DNA, 25 bp, Probe sequence
tatcctagagataatacacctactt

SEQ ID NO: 176344 - DNA, 25 bp, Probe sequence
tatcagttaaaaaaatcatttggca

SEQ ID NO: 176345 - DNA, 25 bp, Probe sequence
tttagatgttgcagtatatggtata

SEQ ID NO: 176346 - DNA, 25 bp, Probe sequence
atattttacttggtcgtccaacagc

SEQ ID NO: 176347 - DNA, 25 bp, Probe sequence
attgtcatcggtgttggtgcatatc

SEQ ID NO: 176348 - DNA, 25 bp, Probe sequence
attgcactatccataatgttctttt

SEQ ID NO: 176349 - DNA, 25 bp, Probe sequence
ataacgataacgaagctccaatttt

SEQ ID NO: 176350 - DNA, 25 bp, Probe sequence
atcacagtaggtacacttgcagcat

SEQ ID NO: 176351 - DNA, 25 bp, Probe sequence
aggattcttgcatgaacgtgttcaa

SEQ ID NO: 176352 - DNA, 25 bp, Probe sequence
actattgccattggtatcgcattat

SEQ ID NO: 176353 - DNA, 25 bp, Probe sequence
aaatggctaatgcacatgactttat

SEQ ID NO: 176354 - DNA, 25 bp, Probe sequence
aacagttgctttcgtaggtatgagt

SEQ ID NO: 176355 - DNA, 25 bp, Probe sequence
aaccatttacaagctttaagtgcga

SEQ ID NO: 176356 - DNA, 25 bp, Probe sequence
aatggtgttggtgctcaacctattg

SEQ ID NO: 176357 - DNA, 25 bp, Probe sequence
cacttgcagcatttgttggatactt

SEQ ID NO: 176358 - DNA, 25 bp, Probe sequence
gctatttctggatcaatcacagtag

SEQ ID NO: 176359 - DNA, 25 bp, Probe sequence
gcttgtccactattacacatgctga

SEQ ID NO: 176360 - DNA, 25 bp, Probe sequence
gaacttgccacagggatatgacact

SEQ ID NO: 176361 - DNA, 25 bp, Probe sequence
gaaattgactttagcagcactgttt

SEQ ID NO: 176362 - DNA, 25 bp, Probe sequence
gatcgaacgacacttatcgtagcgc

SEQ ID NO: 176363 - DNA, 25 bp, Probe sequence
gttttgcttcaatggaccgtgtatt

SEQ ID NO: 176364 - DNA, 25 bp, Probe sequence
gtcgcatcatttacaactttaacgc

SEQ ID NO: 176365 - DNA, 25 bp, Probe sequence
gtgttcaaggtatttcagtcgttaa

SEQ ID NO: 176366 - DNA, 25 bp, Probe sequence
ggtcgtccaacagcaacagatgaag

SEQ ID NO: 176367 - DNA, 25 bp, Probe sequence
ggcctttacgtcgtttagtcgcatc

SEQ ID NO: 176368 - DNA, 25 bp, Probe sequence
tggtgcatatcttgctatttctgga

SEQ ID NO: 176369 - DNA, 25 bp, Probe sequence
tgttgaaacaggtacgcatcgtgaa

SEQ ID NO: 176370 - DNA, 25 bp, Probe sequence
tagtgagaccaccaattgaatttat

SEQ ID NO: 176371 - DNA, 25 bp, Probe sequence
tatcttcccattttacattttaacg

SEQ ID NO: 176372 - DNA, 25 bp, Probe sequence
tatacgtcaatatttggcgcaatgg

SEQ ID NO: 176373 - DNA, 25 bp, Probe sequence
ttatcgtagcgcatcgcttgtccac

SEQ ID NO: 176374 - DNA, 25 bp, Probe sequence
tttgccgcaattaatacagttacag

SEQ ID NO: 176375 - DNA, 25 bp, Probe sequence
tttaaataatccgccaattcttatc

SEQ ID NO: 176376 - DNA, 25 bp, Probe sequence
tttagcagcactgtttatcttccca

SEQ ID NO: 176377 - DNA, 25 bp, Probe sequence
ttagctgaggttcaaggattcttgc

SEQ ID NO: 176378 - DNA, 25 bp, Probe sequence
ttacgatgtaacttctgggcaaatt

SEQ ID NO: 176379 - DNA, 25 bp, Probe sequence
ttcatcatttaactattgccattgg

SEQ ID NO: 176380 - DNA, 25 bp, Probe sequence
attcgtggacgatgatgttttatgt

SEQ ID NO: 176381 - DNA, 25 bp, Probe sequence
atttcattatcgtcatgcacagttt

SEQ ID NO: 176382 - DNA, 25 bp, Probe sequence
atattgctaagggctctatcttcga

SEQ ID NO: 176383 - DNA, 25 bp, Probe sequence
atgcacagttttatattcctagtaa

SEQ ID NO: 176384 - DNA, 25 bp, Probe sequence
atgatgatattgctaagggctctat

SEQ ID NO: 176385 - DNA, 25 bp, Probe sequence
accgtctactatttagagcgattaa

SEQ ID NO: 176386 - DNA, 25 bp, Probe sequence
aaatgcagatgataccgtctactat

SEQ ID NO: 176387 - DNA, 25 bp, Probe sequence
aactcacttcaagtgaagcttcatt

SEQ ID NO: 176388 - DNA, 25 bp, Probe sequence
aacgccacctaaatctgtacaagat

SEQ ID NO: 176389 - DNA, 25 bp, Probe sequence
aagcattaggcttattggaacaaga

SEQ ID NO: 176390 - DNA, 25 bp, Probe sequence
aagtatgaacatattgctaagcaac

SEQ ID NO: 176391 - DNA, 25 bp, Probe sequence
caaggcagtggtatttatgtgagaa

SEQ ID NO: 176392 - DNA, 25 bp, Probe sequence
caagtgaagcttcattactacaatt

SEQ ID NO: 176393 - DNA, 25 bp, Probe sequence
cattatcgtcatgcacagttttata

SEQ ID NO: 176394 - DNA, 25 bp, Probe sequence
cgtcatgcacagttttatattccta

SEQ ID NO: 176395 - DNA, 25 bp, Probe sequence
gctaagcaacttaatgcgtttatac

SEQ ID NO: 176396 - DNA, 25 bp, Probe sequence
gcagatgataccgtctactatttag

SEQ ID NO: 176397 - DNA, 25 bp, Probe sequence
gcaacgccacctaaatctgtacaag

SEQ ID NO: 176398 - DNA, 25 bp, Probe sequence
gaatcaaacatgaaacttcgtattg

SEQ ID NO: 176399 - DNA, 25 bp, Probe sequence
gaacgttatcaagtaagtaagagta

SEQ ID NO: 176400 - DNA, 25 bp, Probe sequence
gaaacttcgtattggtttttcagat

SEQ ID NO: 176401 - DNA, 25 bp, Probe sequence
gacatcgtatttcattatcgtcatg

SEQ ID NO: 176402 - DNA, 25 bp, Probe sequence
gagcgattaagattcgtggacgatg

SEQ ID NO: 176403 - DNA, 25 bp, Probe sequence
gatgttttatgtatcgaatattctt

SEQ ID NO: 176404 - DNA, 25 bp, Probe sequence
gatctatcaagcacaaggcagtggt

SEQ ID NO: 176405 - DNA, 25 bp, Probe sequence
gataccgtctactatttagagcgat

SEQ ID NO: 176406 - DNA, 25 bp, Probe sequence
gtatcgaatattcttattatcataa

SEQ ID NO: 176407 - DNA, 25 bp, Probe sequence
gtaagagtactatcattaaagcatt

SEQ ID NO: 176408 - DNA, 25 bp, Probe sequence
gtgacgcaattaaaagaacgttatc

SEQ ID NO: 176409 - DNA, 25 bp, Probe sequence
ggtttttcagatattttctttaatg

SEQ ID NO: 176410 - DNA, 25 bp, Probe sequence
ggaacaagatggtttgatctatcaa

SEQ ID NO: 176411 - DNA, 25 bp, Probe sequence
ttcaaacccggtgataaattgccaa

SEQ ID NO: 176412 - DNA, 25 bp, Probe sequence
tctgacatcgtatttcattatcgtc

SEQ ID NO: 176413 - DNA, 25 bp, Probe sequence
ttaatgcgtttatacatcaatctaa

SEQ ID NO: 176414 - DNA, 25 bp, Probe sequence
attaaagggtactgatcatgttgtc

SEQ ID NO: 176415 - DNA, 25 bp, Probe sequence
atgttatctgcatgtttagagaaga

SEQ ID NO: 176416 - DNA, 25 bp, Probe sequence
atggtaagattcatcgcgtttggtc

SEQ ID NO: 176417 - DNA, 25 bp, Probe sequence
accggcaattgtttactttcactca

SEQ ID NO: 176418 - DNA, 25 bp, Probe sequence
acgtggacattcttcaacaatggat

SEQ ID NO: 176419 - DNA, 25 bp, Probe sequence
acacgtgaaccggcaattgtttact

SEQ ID NO: 176420 - DNA, 25 bp, Probe sequence
aattcagagttataaacatgatggt

SEQ ID NO: 176421 - DNA, 25 bp, Probe sequence
catcgcgtttggtctgaaacaacaa

SEQ ID NO: 176422 - DNA, 25 bp, Probe sequence
cggcaattgtttactttcactcaga

SEQ ID NO: 176423 - DNA, 25 bp, Probe sequence
cgcaacgtggacattcttcaacaat

SEQ ID NO: 176424 - DNA, 25 bp, Probe sequence
ccatttgtttgtgatgaagaggcat

SEQ ID NO: 176425 - DNA, 25 bp, Probe sequence
gcgccagattttatcaaagtttgga

SEQ ID NO: 176426 - DNA, 25 bp, Probe sequence
gcaattgtttactttcactcagaat

SEQ ID NO: 176427 - DNA, 25 bp, Probe sequence
gaattatccgcatgatattgatatt

SEQ ID NO: 176428 - DNA, 25 bp, Probe sequence
gaatattggtttaatgttatctgca

SEQ ID NO: 176429 - DNA, 25 bp, Probe sequence
gaatcaaatgaattatccgcatgat

SEQ ID NO: 176430 - DNA, 25 bp, Probe sequence
gaagatggaatttattactattgca

SEQ ID NO: 176431 - DNA, 25 bp, Probe sequence
gaaccggcaattgtttactttcact

SEQ ID NO: 176432 - DNA, 25 bp, Probe sequence
gaacttggataacacgtgaaccggc

SEQ ID NO: 176433 - DNA, 25 bp, Probe sequence
gagaatccatacctaaagaagggga

SEQ ID NO: 176434 - DNA, 25 bp, Probe sequence
gacattcttcaacaatggatagaac

SEQ ID NO: 176435 - DNA, 25 bp, Probe sequence
gacgcaacgtggacattcttcaaca

SEQ ID NO: 176436 - DNA, 25 bp, Probe sequence
gatattattttaagacgcaacgtgg

SEQ ID NO: 176437 - DNA, 25 bp, Probe sequence
gattcatcgcgtttggtctgaaaca

SEQ ID NO: 176438 - DNA, 25 bp, Probe sequence
gtttactttcactcagaatattggt

SEQ ID NO: 176439 - DNA, 25 bp, Probe sequence
gtaagattcatcgcgtttggtctga

SEQ ID NO: 176440 - DNA, 25 bp, Probe sequence
gtactgatcatgttgtcattggtgg

SEQ ID NO: 176441 - DNA, 25 bp, Probe sequence
gtgacggaagaacttggataacacg

SEQ ID NO: 176442 - DNA, 25 bp, Probe sequence
gggtactgatcatgttgtcattggt

SEQ ID NO: 176443 - DNA, 25 bp, Probe sequence
ggtttaatgttatctgcatgtttag

SEQ ID NO: 176444 - DNA, 25 bp, Probe sequence
ggataacacgtgaaccggcaattgt

SEQ ID NO: 176445 - DNA, 25 bp, Probe sequence
tggtcagagaatccatacctaaaga

SEQ ID NO: 176446 - DNA, 25 bp, Probe sequence
tggtctgaaacaacaatattaaagg

SEQ ID NO: 176447 - DNA, 25 bp, Probe sequence
tttattactattgcaatttgtcatc

SEQ ID NO: 176448 - DNA, 25 bp, Probe sequence
attccctgtacctatgtcaaagatt

SEQ ID NO: 176449 - DNA, 25 bp, Probe sequence
atgcttattttgtccagttcaagaa

SEQ ID NO: 176450 - DNA, 25 bp, Probe sequence
atgtatcagcagtctagttttaaag

SEQ ID NO: 176451 - DNA, 25 bp, Probe sequence
aggtgttggcccatacacacaagct

SEQ ID NO: 176452 - DNA, 25 bp, Probe sequence
cacaagctgcagtaatgagcattgc

SEQ ID NO: 176453 - DNA, 25 bp, Probe sequence
aaatcaaagagaaatgccatggcga

SEQ ID NO: 176454 - DNA, 25 bp, Probe sequence
aaaaaatcggtcatgacattcaacc

SEQ ID NO: 176455 - DNA, 25 bp, Probe sequence
aacagttattgactattatcatcgt

SEQ ID NO: 176456 - DNA, 25 bp, Probe sequence
aatccattatgcttattttgtccag

SEQ ID NO: 176457 - DNA, 25 bp, Probe sequence
aatcaaggtcaatatctgttgcaaa

SEQ ID NO: 176458 - DNA, 25 bp, Probe sequence
aatatacattccctgtacctatgtc

SEQ ID NO: 176459 - DNA, 25 bp, Probe sequence
caatccgtactatatttggttaagt

SEQ ID NO: 176460 - DNA, 25 bp, Probe sequence
ctacagaagctggaacgtttaatca

SEQ ID NO: 176461 - DNA, 25 bp, Probe sequence
gccatggcgacaaacgaccaatccg

SEQ ID NO: 176462 - DNA, 25 bp, Probe sequence
gcccatacacacaagctgcagtaat

SEQ ID NO: 176463 - DNA, 25 bp, Probe sequence
gcatggtatgtggcaatttcctatg

SEQ ID NO: 176464 - DNA, 25 bp, Probe sequence
gaaggcttagttcccaaagatcctg

SEQ ID NO: 176465 - DNA, 25 bp, Probe sequence
gaagcatcaatttactcatttaaca

SEQ ID NO: 176466 - DNA, 25 bp, Probe sequence
gaaaatttgatacactggtttgatg

SEQ ID NO: 176467 - DNA, 25 bp, Probe sequence
gaaaactgtgaggcatttgataaag

SEQ ID NO: 176468 - DNA, 25 bp, Probe sequence
gacaaacgaccaatccgtactatat

SEQ ID NO: 176469 - DNA, 25 bp, Probe sequence
gacattcaaccagtagaaacaccta

SEQ ID NO: 176470 - DNA, 25 bp, Probe sequence
gactattatcatcgttttgttgaac

SEQ ID NO: 176471 - DNA, 25 bp, Probe sequence
gagcattgcatataatgtaccacta

SEQ ID NO: 176472 - DNA, 25 bp, Probe sequence
gagcaatccgtctttttaattagaa

SEQ ID NO: 176473 - DNA, 25 bp, Probe sequence
gttttgagtcaagcttcggaagatg

SEQ ID NO: 176474 - DNA, 25 bp, Probe sequence
gtagagctcgaaattttcatacggc

SEQ ID NO: 176475 - DNA, 25 bp, Probe sequence
gtaattgagcaatccgtctttttaa

SEQ ID NO: 176476 - DNA, 25 bp, Probe sequence
gggaaggcttaggatattatagtag

SEQ ID NO: 176477 - DNA, 25 bp, Probe sequence
ggtctagattgaatgatgactatcg

SEQ ID NO: 176478 - DNA, 25 bp, Probe sequence
tgtaccactagcaactgtagacgga

SEQ ID NO: 176479 - DNA, 25 bp, Probe sequence
tgttgaacgatttccaactgtggaa

SEQ ID NO: 176480 - DNA, 25 bp, Probe sequence
ttagttcccaaagatcctgatcaat

SEQ ID NO: 176481 - DNA, 25 bp, Probe sequence
ttaccgtatgttactacagaagctg

SEQ ID NO: 176482 - DNA, 25 bp, Probe sequence
atatttccgcagcgacgccagtagt

SEQ ID NO: 176483 - DNA, 25 bp, Probe sequence
attcttatgtttaatagctgcagta

SEQ ID NO: 176484 - DNA, 25 bp, Probe sequence
attattgcaagtgaaacgctatttt

SEQ ID NO: 176485 - DNA, 25 bp, Probe sequence
atagctgcagtaaatttcgtattag

SEQ ID NO: 176486 - DNA, 25 bp, Probe sequence
atgtctattttaagttttattatgc

SEQ ID NO: 176487 - DNA, 25 bp, Probe sequence
agtcatttgaccgatgttaaagagg

SEQ ID NO: 176488 - DNA, 25 bp, Probe sequence
agacgaggcggatacttcttcatga

SEQ ID NO: 176489 - DNA, 25 bp, Probe sequence
agcgctattctattttattgtgatg

SEQ ID NO: 176490 - DNA, 25 bp, Probe sequence
accaaatccaaatcatgtatttatc

SEQ ID NO: 176491 - DNA, 25 bp, Probe sequence
acgccagtagttattatgtctattt

SEQ ID NO: 176492 - DNA, 25 bp, Probe sequence
aacattccatatcatttttacttta

SEQ ID NO: 176493 - DNA, 25 bp, Probe sequence
aaccagtaaacttcgaaacatcata

SEQ ID NO: 176494 - DNA, 25 bp, Probe sequence
aagtgacacaaactgataatcaaca

SEQ ID NO: 176495 - DNA, 25 bp, Probe sequence
aatttatatctcttatcatcattat

SEQ ID NO: 176496 - DNA, 25 bp, Probe sequence
ctaatcgtattagctgcatgtttaa

SEQ ID NO: 176497 - DNA, 25 bp, Probe sequence
gctagtcattttgacgatgattagt

SEQ ID NO: 176498 - DNA, 25 bp, Probe sequence
gttacttttggtcttattcgactgt

SEQ ID NO: 176499 - DNA, 25 bp, Probe sequence
gctattttcctttagtcatttgacc

SEQ ID NO: 176500 - DNA, 25 bp, Probe sequence
gcagcgacgccagtagttattatgt

SEQ ID NO: 176501 - DNA, 25 bp, Probe sequence
gcaaggtatacgacacacgcaattt

SEQ ID NO: 176502 - DNA, 25 bp, Probe sequence
gaaacgctattttcctttagtcatt

SEQ ID NO: 176503 - DNA, 25 bp, Probe sequence
gaaacatcatatatagcgctattct

SEQ ID NO: 176504 - DNA, 25 bp, Probe sequence
gatgattagtgcattggttaaacca

SEQ ID NO: 176505 - DNA, 25 bp, Probe sequence
gttatttaatatttccgcagcgacg

SEQ ID NO: 176506 - DNA, 25 bp, Probe sequence
gttttattatgctagtcattttgac

SEQ ID NO: 176507 - DNA, 25 bp, Probe sequence
gtatttatcaatcacatcctaatgc

SEQ ID NO: 176508 - DNA, 25 bp, Probe sequence
gtacagacgaggcggatacttcttc

SEQ ID NO: 176509 - DNA, 25 bp, Probe sequence
gtaaatttcgtattagcaaggtata

SEQ ID NO: 176510 - DNA, 25 bp, Probe sequence
gtgatggcaactatttttgtaggat

SEQ ID NO: 176511 - DNA, 25 bp, Probe sequence
tacgacacacgcaatttataataaa

SEQ ID NO: 176512 - DNA, 25 bp, Probe sequence
tagcacaatctatcatatttggtat

SEQ ID NO: 176513 - DNA, 25 bp, Probe sequence
tatcatttttactttattttattct

SEQ ID NO: 176514 - DNA, 25 bp, Probe sequence
ttagctgcatgtttaatacttatta

SEQ ID NO: 176515 - DNA, 25 bp, Probe sequence
ttggtcttattcgactgttaactga

SEQ ID NO: 176516 - DNA, 25 bp, Probe sequence
atagcttggttttcacatggtcaat

SEQ ID NO: 176517 - DNA, 25 bp, Probe sequence
ataatcatgcaaaaccgcctaagtt

SEQ ID NO: 176518 - DNA, 25 bp, Probe sequence
atgataaccgtttcgttgcatccgt

SEQ ID NO: 176519 - DNA, 25 bp, Probe sequence
agattttacgaatcgtgctacgatg

SEQ ID NO: 176520 - DNA, 25 bp, Probe sequence
agaacatgaacgtgatcgattaagt

SEQ ID NO: 176521 - DNA, 25 bp, Probe sequence
agcgcagttagttcaactatttcca

SEQ ID NO: 176522 - DNA, 25 bp, Probe sequence
agcggcatacgctcaattactatta

SEQ ID NO: 176523 - DNA, 25 bp, Probe sequence
acccggcaggtttatatcaaacgca

SEQ ID NO: 176524 - DNA, 25 bp, Probe sequence
accacaatttatggaacgtgcgatt

SEQ ID NO: 176525 - DNA, 25 bp, Probe sequence
accatatttcgaaagcggcatacgc

SEQ ID NO: 176526 - DNA, 25 bp, Probe sequence
aaaactttagttcctgatgatgata

SEQ ID NO: 176527 - DNA, 25 bp, Probe sequence
caaccgatacaattacttttcaatg

SEQ ID NO: 176528 - DNA, 25 bp, Probe sequence
cacttaaacaagttattccatcttt

SEQ ID NO: 176529 - DNA, 25 bp, Probe sequence
cgtttcgttgcatccgttacacaac

SEQ ID NO: 176530 - DNA, 25 bp, Probe sequence
gccggttaaccatatttcgaaagcg

SEQ ID NO: 176531 - DNA, 25 bp, Probe sequence
gcatccgttacacaacaaccgatac

SEQ ID NO: 176532 - DNA, 25 bp, Probe sequence
gcattgatgatgttgctcattttca

SEQ ID NO: 176533 - DNA, 25 bp, Probe sequence
gcacgctcatcaaaatcaaatatta

SEQ ID NO: 176534 - DNA, 25 bp, Probe sequence
gatcaatcgttaattcatcaaactg

SEQ ID NO: 176535 - DNA, 25 bp, Probe sequence
gataaacaagtcacaattccaaaat

SEQ ID NO: 176536 - DNA, 25 bp, Probe sequence
gttgagcgctataatcatgcaaaac

SEQ ID NO: 176537 - DNA, 25 bp, Probe sequence
gttagcttatggaattgcttttaat

SEQ ID NO: 176538 - DNA, 25 bp, Probe sequence
gtactgaagatttgttctacggata

SEQ ID NO: 176539 - DNA, 25 bp, Probe sequence
gtgcgtttttggactttagcctcag

SEQ ID NO: 176540 - DNA, 25 bp, Probe sequence
gggaatggatattgtattgccaatt

SEQ ID NO: 176541 - DNA, 25 bp, Probe sequence
ggtaggtcaattgttggcaggtgca

SEQ ID NO: 176542 - DNA, 25 bp, Probe sequence
ggtactattttaggcttagcattga

SEQ ID NO: 176543 - DNA, 25 bp, Probe sequence
ggtatttaccttttggatatgatgc

SEQ ID NO: 176544 - DNA, 25 bp, Probe sequence
ggactttagcctcaggtactatttt

SEQ ID NO: 176545 - DNA, 25 bp, Probe sequence
ggaattgcttttaatggcagtgtgg

SEQ ID NO: 176546 - DNA, 25 bp, Probe sequence
tggtgaacctgaatcttccaaagcg

SEQ ID NO: 176547 - DNA, 25 bp, Probe sequence
tcagttatacggttttgtttatcca

SEQ ID NO: 176548 - DNA, 25 bp, Probe sequence
tactattaagtattgcacgctcatc

SEQ ID NO: 176549 - DNA, 25 bp, Probe sequence
ttgactatttaacaccacaatttat

SEQ ID NO: 176550 - DNA, 25 bp, Probe sequence
attgttgccgaaagttacttagtag

SEQ ID NO: 176551 - DNA, 25 bp, Probe sequence
atgacgtttatcaaagtaaagtaat

SEQ ID NO: 176552 - DNA, 25 bp, Probe sequence
agctgagatgaatggtattttaaat

SEQ ID NO: 176553 - DNA, 25 bp, Probe sequence
aaatgaatatgacgtttatcaaagt

SEQ ID NO: 176554 - DNA, 25 bp, Probe sequence
aaagctgagatgaatggtattttaa

SEQ ID NO: 176555 - DNA, 25 bp, Probe sequence
aaactgactgatggcagtaatcaat

SEQ ID NO: 176556 - DNA, 25 bp, Probe sequence
aaaatttataaactgactgatggca

SEQ ID NO: 176557 - DNA, 25 bp, Probe sequence
aactgactgatggcagtaatcaata

SEQ ID NO: 176558 - DNA, 25 bp, Probe sequence
ctgagccagaattaagacacgaaat

SEQ ID NO: 176559 - DNA, 25 bp, Probe sequence
ctgactgatggcagtaatcaatatt

SEQ ID NO: 176560 - DNA, 25 bp, Probe sequence
gccagaattaagacacgaaatacaa

SEQ ID NO: 176561 - DNA, 25 bp, Probe sequence
gccgaaagttacttagtagacagaa

SEQ ID NO: 176562 - DNA, 25 bp, Probe sequence
gaattaagacacgaaatacaacttt

SEQ ID NO: 176563 - DNA, 25 bp, Probe sequence
gaatatgacgtttatcaaagtaaag

SEQ ID NO: 176564 - DNA, 25 bp, Probe sequence
gacacgaaatacaactttataaaga

SEQ ID NO: 176565 - DNA, 25 bp, Probe sequence
gactgatggcagtaatcaatatttt

SEQ ID NO: 176566 - DNA, 25 bp, Probe sequence
gagccagaattaagacacgaaatac

SEQ ID NO: 176567 - DNA, 25 bp, Probe sequence
gagaaaagctgagatgaatggtatt

SEQ ID NO: 176568 - DNA, 25 bp, Probe sequence
gagatgaatggtattttaaatgaat

SEQ ID NO: 176569 - DNA, 25 bp, Probe sequence
gttgccgaaagttacttagtagaca

SEQ ID NO: 176570 - DNA, 25 bp, Probe sequence
gtctgagccagaattaagacacgaa

SEQ ID NO: 176571 - DNA, 25 bp, Probe sequence
tgttgccgaaagttacttagtagac

SEQ ID NO: 176572 - DNA, 25 bp, Probe sequence
tgatggcagtaatcaatattttaaa

SEQ ID NO: 176573 - DNA, 25 bp, Probe sequence
tgccgaaagttacttagtagacaga

SEQ ID NO: 176574 - DNA, 25 bp, Probe sequence
tctgagccagaattaagacacgaaa

SEQ ID NO: 176575 - DNA, 25 bp, Probe sequence
taattgttgccgaaagttacttagt

SEQ ID NO: 176576 - DNA, 25 bp, Probe sequence
taagacacgaaatacaactttataa

SEQ ID NO: 176577 - DNA, 25 bp, Probe sequence
taaactgactgatggcagtaatcaa

SEQ ID NO: 176578 - DNA, 25 bp, Probe sequence
tacctatagcgttattacaattata

SEQ ID NO: 176579 - DNA, 25 bp, Probe sequence
tataaactgactgatggcagtaatc

SEQ ID NO: 176580 - DNA, 25 bp, Probe sequence
ttgttgccgaaagttacttagtaga

SEQ ID NO: 176581 - DNA, 25 bp, Probe sequence
ttacctatagcgttattacaattat

SEQ ID NO: 176582 - DNA, 25 bp, Probe sequence
ttgcgtgggggtttagatttaatag

SEQ ID NO: 176583 - DNA, 25 bp, Probe sequence
ttgccgaaagttacttagtagacag

SEQ ID NO: 176584 - DNA, 25 bp, Probe sequence
atcgaccatcaagattatgcggaaa

SEQ ID NO: 176585 - DNA, 25 bp, Probe sequence
atcgcgaaaagttaatcgaccatca

SEQ ID NO: 176586 - DNA, 25 bp, Probe sequence
atgatattatccaaattgctgaaaa

SEQ ID NO: 176587 - DNA, 25 bp, Probe sequence
agagatatcagagcaagcgatttct

SEQ ID NO: 176588 - DNA, 25 bp, Probe sequence
agagcaagcgatttctgaagtgatt

SEQ ID NO: 176589 - DNA, 25 bp, Probe sequence
acaggaacttgatgatattatccaa

SEQ ID NO: 176590 - DNA, 25 bp, Probe sequence
acagaactttatagagaacaacagg

SEQ ID NO: 176591 - DNA, 25 bp, Probe sequence
acaacttgaagctgctgacatggca

SEQ ID NO: 176592 - DNA, 25 bp, Probe sequence
aaagggcaacaacttgaagctgctg

SEQ ID NO: 176593 - DNA, 25 bp, Probe sequence
aaactatcgaaggccttatgagaaa

SEQ ID NO: 176594 - DNA, 25 bp, Probe sequence
aaaatcgaaagaagtacacgcaaca

SEQ ID NO: 176595 - DNA, 25 bp, Probe sequence
aaaatacaatgattcgcacgacaga

SEQ ID NO: 176596 - DNA, 25 bp, Probe sequence
aagtaatgcaatctttaattcaaaa

SEQ ID NO: 176597 - DNA, 25 bp, Probe sequence
aatggaaaccattcatgctgtattg

SEQ ID NO: 176598 - DNA, 25 bp, Probe sequence
gctgacatggcagagattcaaaagt

SEQ ID NO: 176599 - DNA, 25 bp, Probe sequence
gaatgaaatggattttacacaagat

SEQ ID NO: 176600 - DNA, 25 bp, Probe sequence
gaagctgctgacatggcagagattc

SEQ ID NO: 176601 - DNA, 25 bp, Probe sequence
gaaagtggtattgccgatggaacag

SEQ ID NO: 176602 - DNA, 25 bp, Probe sequence
gacgatttattacaacgagatttag

SEQ ID NO: 176603 - DNA, 25 bp, Probe sequence
gaccatcaagattatgcggaaagtt

SEQ ID NO: 176604 - DNA, 25 bp, Probe sequence
gagaacaacaggaacttgatgatat

SEQ ID NO: 176605 - DNA, 25 bp, Probe sequence
gattcgcacgacagataaaggacct

SEQ ID NO: 176606 - DNA, 25 bp, Probe sequence
gattcaaaagtatgatcattatcgc

SEQ ID NO: 176607 - DNA, 25 bp, Probe sequence
gtatgatcattatcgcataggttta

SEQ ID NO: 176608 - DNA, 25 bp, Probe sequence
gtgccgaagattactaaaatagaag

SEQ ID NO: 176609 - DNA, 25 bp, Probe sequence
gtgattgaatattgttatcgcgaaa

SEQ ID NO: 176610 - DNA, 25 bp, Probe sequence
gggcaacaacttgaagctgctgaca

SEQ ID NO: 176611 - DNA, 25 bp, Probe sequence
gtggtattgccgatggaacagaaga

SEQ ID NO: 176612 - DNA, 25 bp, Probe sequence
ggtatagaaccaaatatcattgaaa

SEQ ID NO: 176613 - DNA, 25 bp, Probe sequence
ggaaaccattcatgctgtattgaat

SEQ ID NO: 176614 - DNA, 25 bp, Probe sequence
tgaagcggttttagacgatttatta

SEQ ID NO: 176615 - DNA, 25 bp, Probe sequence
tcgcacgacagataaaggacctaaa

SEQ ID NO: 176616 - DNA, 25 bp, Probe sequence
tacacaagatgaagcggttttagac

SEQ ID NO: 176617 - DNA, 25 bp, Probe sequence
tttcaaaaactatcgaaggccttat

SEQ ID NO: 176618 - DNA, 25 bp, Probe sequence
atcaatatacgcttgagggcgcagc

SEQ ID NO: 176619 - DNA, 25 bp, Probe sequence
acgcaacgtgtaagcacgaacttag

SEQ ID NO: 176620 - DNA, 25 bp, Probe sequence
actagagctttattttcaacgatta

SEQ ID NO: 176621 - DNA, 25 bp, Probe sequence
acacaatatcaacaggctatgtcac

SEQ ID NO: 176622 - DNA, 25 bp, Probe sequence
aaaagtagttttgtgtcagctgata

SEQ ID NO: 176623 - DNA, 25 bp, Probe sequence
aaaatagtacaacaatgtctcacat

SEQ ID NO: 176624 - DNA, 25 bp, Probe sequence
aaggtgcctttatttcaatggaaga

SEQ ID NO: 176625 - DNA, 25 bp, Probe sequence
aatgcacctagcgtatataatatca

SEQ ID NO: 176626 - DNA, 25 bp, Probe sequence
cattatcgcattgtttattggtatc

SEQ ID NO: 176627 - DNA, 25 bp, Probe sequence
ccattactttggaacaaccgtgaat

SEQ ID NO: 176628 - DNA, 25 bp, Probe sequence
gccagagtatgttaaaggtgccttt

SEQ ID NO: 176629 - DNA, 25 bp, Probe sequence
gcttgagggcgcagcaaaccattac

SEQ ID NO: 176630 - DNA, 25 bp, Probe sequence
gaattatttgtagctcatcgagttg

SEQ ID NO: 176631 - DNA, 25 bp, Probe sequence
gaattttacgcaacgtgtaagcacg

SEQ ID NO: 176632 - DNA, 25 bp, Probe sequence
gaagcgataggtactcaaactcaaa

SEQ ID NO: 176633 - DNA, 25 bp, Probe sequence
gaacgattctacaatcatcatggat

SEQ ID NO: 176634 - DNA, 25 bp, Probe sequence
gaaacacgaacctcactataatacg

SEQ ID NO: 176635 - DNA, 25 bp, Probe sequence
gagcatatgaaacacgaacctcact

SEQ ID NO: 176636 - DNA, 25 bp, Probe sequence
gagatgtgcaaggtggtagtaccat

SEQ ID NO: 176637 - DNA, 25 bp, Probe sequence
gtattttttatctacacgcgataat

SEQ ID NO: 176638 - DNA, 25 bp, Probe sequence
gtaaagtcaatgcacctagcgtata

SEQ ID NO: 176639 - DNA, 25 bp, Probe sequence
gtgtcagctgataacatgccagagt

SEQ ID NO: 176640 - DNA, 25 bp, Probe sequence
gggcgcagcaaaccattactttgga

SEQ ID NO: 176641 - DNA, 25 bp, Probe sequence
ggtactcaaactcaaatgaacattt

SEQ ID NO: 176642 - DNA, 25 bp, Probe sequence
ggtacaactagagctttattttcaa

SEQ ID NO: 176643 - DNA, 25 bp, Probe sequence
ggtagtaccattacacaacaagttg

SEQ ID NO: 176644 - DNA, 25 bp, Probe sequence
ggctatgtcacaattaaatcgttaa

SEQ ID NO: 176645 - DNA, 25 bp, Probe sequence
tctacacgcgataatgtggatgaac

SEQ ID NO: 176646 - DNA, 25 bp, Probe sequence
tcaaccagttggcaaaccgccgaaa

SEQ ID NO: 176647 - DNA, 25 bp, Probe sequence
taatacgtattatcaaccagttggc

SEQ ID NO: 176648 - DNA, 25 bp, Probe sequence
taaccattctaatcattatcgcatt

SEQ ID NO: 176649 - DNA, 25 bp, Probe sequence
tacaaagcgctattttagctagtaa

SEQ ID NO: 176650 - DNA, 25 bp, Probe sequence
tattggtatcatgtattttttatct

SEQ ID NO: 176651 - DNA, 25 bp, Probe sequence
ttcaacgattagcgacagagatgtg

SEQ ID NO: 176652 - DNA, 25 bp, Probe sequence
atcgactcgatctattgggatcaat

SEQ ID NO: 176653 - DNA, 25 bp, Probe sequence
atgagaaatggaggacctaaagatt

SEQ ID NO: 176654 - DNA, 25 bp, Probe sequence
atggaggacctaaagatttctatac

SEQ ID NO: 176655 - DNA, 25 bp, Probe sequence
agctgtcgttaaaatgagaaatgga

SEQ ID NO: 176656 - DNA, 25 bp, Probe sequence
aaatgagaaatggaggacctaaaga

SEQ ID NO: 176657 - DNA, 25 bp, Probe sequence
aaatcgactcgatctattgggatca

SEQ ID NO: 176658 - DNA, 25 bp, Probe sequence
aaatggaggacctaaagatttctat

SEQ ID NO: 176659 - DNA, 25 bp, Probe sequence
aaagctgtcgttaaaatgagaaatg

SEQ ID NO: 176660 - DNA, 25 bp, Probe sequence
aaaagctgtcgttaaaatgagaaat

SEQ ID NO: 176661 - DNA, 25 bp, Probe sequence
aaaatgagaaatggaggacctaaag

SEQ ID NO: 176662 - DNA, 25 bp, Probe sequence
aagctgtcgttaaaatgagaaatgg

SEQ ID NO: 176663 - DNA, 25 bp, Probe sequence
aatgagaaatggaggacctaaagat

SEQ ID NO: 176664 - DNA, 25 bp, Probe sequence
aatggaggacctaaagatttctata

SEQ ID NO: 176665 - DNA, 25 bp, Probe sequence
aatcgactcgatctattgggatcaa

SEQ ID NO: 176666 - DNA, 25 bp, Probe sequence
ctgtcgttaaaatgagaaatggagg

SEQ ID NO: 176667 - DNA, 25 bp, Probe sequence
cgactcgatctattgggatcaataa

SEQ ID NO: 176668 - DNA, 25 bp, Probe sequence
cctaaagatttctatacttttgact

SEQ ID NO: 176669 - DNA, 25 bp, Probe sequence
gctgtcgttaaaatgagaaatggag

SEQ ID NO: 176670 - DNA, 25 bp, Probe sequence
gaaaaaagctgtcgttaaaatgaga

SEQ ID NO: 176671 - DNA, 25 bp, Probe sequence
gaaatcgactcgatctattgggatc

SEQ ID NO: 176672 - DNA, 25 bp, Probe sequence
gaaatggaggacctaaagatttcta

SEQ ID NO: 176673 - DNA, 25 bp, Probe sequence
gacctaaagatttctatacttttga

SEQ ID NO: 176674 - DNA, 25 bp, Probe sequence
gagaaatggaggacctaaagatttc

SEQ ID NO: 176675 - DNA, 25 bp, Probe sequence
gaggacctaaagatttctatacttt

SEQ ID NO: 176676 - DNA, 25 bp, Probe sequence
gttaaaatgagaaatggaggaccta

SEQ ID NO: 176677 - DNA, 25 bp, Probe sequence
gtgaaaaaagctgtcgttaaaatga

SEQ ID NO: 176678 - DNA, 25 bp, Probe sequence
ggaggacctaaagatttctatactt

SEQ ID NO: 176679 - DNA, 25 bp, Probe sequence
ggacctaaagatttctatacttttg

SEQ ID NO: 176680 - DNA, 25 bp, Probe sequence
tggaggacctaaagatttctatact

SEQ ID NO: 176681 - DNA, 25 bp, Probe sequence
tgagaaatggaggacctaaagattt

SEQ ID NO: 176682 - DNA, 25 bp, Probe sequence
tgaaaaaagctgtcgttaaaatgag

SEQ ID NO: 176683 - DNA, 25 bp, Probe sequence
tcgactcgatctattgggatcaata

SEQ ID NO: 176684 - DNA, 25 bp, Probe sequence
taaaatgagaaatggaggacctaaa

SEQ ID NO: 176685 - DNA, 25 bp, Probe sequence
ttaaaatgagaaatggaggacctaa

SEQ ID NO: 176686 - DNA, 25 bp, Probe sequence
atctaacaaagtacttgcgttgatg

SEQ ID NO: 176687 - DNA, 25 bp, Probe sequence
atgatgtcgcaatcgcaatcaatta

SEQ ID NO: 176688 - DNA, 25 bp, Probe sequence
atgttaactatggctctgaatttac

SEQ ID NO: 176689 - DNA, 25 bp, Probe sequence
atgtcgcaatcgcaatcaattattt

SEQ ID NO: 176690 - DNA, 25 bp, Probe sequence
atggctctgaatttacaattgacgc

SEQ ID NO: 176691 - DNA, 25 bp, Probe sequence
agtcatgttaactatggctctgaat

SEQ ID NO: 176692 - DNA, 25 bp, Probe sequence
aaagtacttgcgttgatgattcata

SEQ ID NO: 176693 - DNA, 25 bp, Probe sequence
aacaaagtacttgcgttgatgattc

SEQ ID NO: 176694 - DNA, 25 bp, Probe sequence
aactatggctctgaatttacaattg

SEQ ID NO: 176695 - DNA, 25 bp, Probe sequence
aatgttgtttactcagggaaacatg

SEQ ID NO: 176696 - DNA, 25 bp, Probe sequence
aattgacgcatctaacaaagtactt

SEQ ID NO: 176697 - DNA, 25 bp, Probe sequence
caatcgcaatcaattatttagataa

SEQ ID NO: 176698 - DNA, 25 bp, Probe sequence
cataatccaaatattgacgagaatt

SEQ ID NO: 176699 - DNA, 25 bp, Probe sequence
cttgcgttgatgattcataatccaa

SEQ ID NO: 176700 - DNA, 25 bp, Probe sequence
gcgttgatgattcataatccaaata

SEQ ID NO: 176701 - DNA, 25 bp, Probe sequence
gcatctaacaaagtacttgcgttga

SEQ ID NO: 176702 - DNA, 25 bp, Probe sequence
gaatttacaattgacgcatctaaca

SEQ ID NO: 176703 - DNA, 25 bp, Probe sequence
gaagattatgatgtcgcaatcgcaa

SEQ ID NO: 176704 - DNA, 25 bp, Probe sequence
gaaattaatgttgtttactcaggga

SEQ ID NO: 176705 - DNA, 25 bp, Probe sequence
gatgtcgcaatcgcaatcaattatt

SEQ ID NO: 176706 - DNA, 25 bp, Probe sequence
gattatgatgtcgcaatcgcaatca

SEQ ID NO: 176707 - DNA, 25 bp, Probe sequence
gattcataatccaaatattgacgag

SEQ ID NO: 176708 - DNA, 25 bp, Probe sequence
gttaactatggctctgaatttacaa

SEQ ID NO: 176709 - DNA, 25 bp, Probe sequence
gttagtcatgttaactatggctctg

SEQ ID NO: 176710 - DNA, 25 bp, Probe sequence
gtacttgcgttgatgattcataatc

SEQ ID NO: 176711 - DNA, 25 bp, Probe sequence
gtcatgttaactatggctctgaatt

SEQ ID NO: 176712 - DNA, 25 bp, Probe sequence
gggaaattaatgttgtttactcagg

SEQ ID NO: 176713 - DNA, 25 bp, Probe sequence
gggaaacatgaagtagttacaaacg

SEQ ID NO: 176714 - DNA, 25 bp, Probe sequence
ggctctgaatttacaattgacgcat

SEQ ID NO: 176715 - DNA, 25 bp, Probe sequence
tagtttatttgttattgatgaagat

SEQ ID NO: 176716 - DNA, 25 bp, Probe sequence
tattgatgaagattatgatgtcgca

SEQ ID NO: 176717 - DNA, 25 bp, Probe sequence
tttacaattgacgcatctaacaaag

SEQ ID NO: 176718 - DNA, 25 bp, Probe sequence
ttatgatgtcgcaatcgcaatcaat

SEQ ID NO: 176719 - DNA, 25 bp, Probe sequence
ttgacgcatctaacaaagtacttgc

SEQ ID NO: 176720 - DNA, 25 bp, Probe sequence
atgatgcattattaattcctggagg

SEQ ID NO: 176721 - DNA, 25 bp, Probe sequence
agtaccagacgatttagatgatttt

SEQ ID NO: 176722 - DNA, 25 bp, Probe sequence
acatttgccatttgtcatgggccac

SEQ ID NO: 176723 - DNA, 25 bp, Probe sequence
acagaaggtcgatatggcacatttg

SEQ ID NO: 176724 - DNA, 25 bp, Probe sequence
acacggtgaaaaagttactgtcgat

SEQ ID NO: 176725 - DNA, 25 bp, Probe sequence
aaaccagaagattatgatgcattat

SEQ ID NO: 176726 - DNA, 25 bp, Probe sequence
aagttactgtcgatgtaggcattgc

SEQ ID NO: 176727 - DNA, 25 bp, Probe sequence
aagtagcaattattctagcaaacga

SEQ ID NO: 176728 - DNA, 25 bp, Probe sequence
aagatttatcaaatgcaggcgcaca

SEQ ID NO: 176729 - DNA, 25 bp, Probe sequence
aaggtcgtacgttaacagcagtatt

SEQ ID NO: 176730 - DNA, 25 bp, Probe sequence
caagtcgagtaccagacgatttaga

SEQ ID NO: 176731 - DNA, 25 bp, Probe sequence
aatgcaggcgcacatgtagttgatg

SEQ ID NO: 176732 - DNA, 25 bp, Probe sequence
caccagatcatttacgtggagatac

SEQ ID NO: 176733 - DNA, 25 bp, Probe sequence
gcgcacatgtagttgatgagtcagt

SEQ ID NO: 176734 - DNA, 25 bp, Probe sequence
gcattgcagaagctaaaccagaaga

SEQ ID NO: 176735 - DNA, 25 bp, Probe sequence
gcaggcgcacatgtagttgatgagt

SEQ ID NO: 176736 - DNA, 25 bp, Probe sequence
gcaattattctagcaaacgaatttg

SEQ ID NO: 176737 - DNA, 25 bp, Probe sequence
gaaggtcgatatggcacatttgcta

SEQ ID NO: 176738 - DNA, 25 bp, Probe sequence
gatgtaccaacatttgccatttgtc

SEQ ID NO: 176739 - DNA, 25 bp, Probe sequence
gatgagtcagtagttgtagacaaca

SEQ ID NO: 176740 - DNA, 25 bp, Probe sequence
gatatggcacatttgctaaatactt

SEQ ID NO: 176741 - DNA, 25 bp, Probe sequence
gtaggcattgcagaagctaaaccag

SEQ ID NO: 176742 - DNA, 25 bp, Probe sequence
gtagacaacaatattgtaacaagtc

SEQ ID NO: 176743 - DNA, 25 bp, Probe sequence
gtaccaacatttgccatttgtcatg

SEQ ID NO: 176744 - DNA, 25 bp, Probe sequence
gtaacaagtcgagtaccagacgatt

SEQ ID NO: 176745 - DNA, 25 bp, Probe sequence
gtcatgggccacaaatactaataga

SEQ ID NO: 176746 - DNA, 25 bp, Probe sequence
ggtcgatatggcacatttgctaaat

SEQ ID NO: 176747 - DNA, 25 bp, Probe sequence
ggcacatttgctaaatactttacta

SEQ ID NO: 176748 - DNA, 25 bp, Probe sequence
tgggccacaaatactaatagataca

SEQ ID NO: 176749 - DNA, 25 bp, Probe sequence
taaaaggtcgtacgttaacagcagt

SEQ ID NO: 176750 - DNA, 25 bp, Probe sequence
tactgtcgatgtaggcattgcagaa

SEQ ID NO: 176751 - DNA, 25 bp, Probe sequence
tttgccatttgtcatgggccacaaa

SEQ ID NO: 176752 - DNA, 25 bp, Probe sequence
tttacgtggagatacagaaggtcga

SEQ ID NO: 176753 - DNA, 25 bp, Probe sequence
ttttcaccagatcatttacgtggag

SEQ ID NO: 176754 - DNA, 25 bp, Probe sequence
attctcgtattgatgattacgcaga

SEQ ID NO: 176755 - DNA, 25 bp, Probe sequence
atttaagcgttattcttggtcagcg

SEQ ID NO: 176756 - DNA, 25 bp, Probe sequence
atatgatgacggcaacatttatgtt

SEQ ID NO: 176757 - DNA, 25 bp, Probe sequence
atatcgtgatacatttacaggtggt

SEQ ID NO: 176758 - DNA, 25 bp, Probe sequence
ataacagtcgaagtcctcattgatt

SEQ ID NO: 176759 - DNA, 25 bp, Probe sequence
agattacattctgatcttgcaaatg

SEQ ID NO: 176760 - DNA, 25 bp, Probe sequence
aaatcaccggtggcggcaatgactt

SEQ ID NO: 176761 - DNA, 25 bp, Probe sequence
aaaagacgaagacactagccagtta

SEQ ID NO: 176762 - DNA, 25 bp, Probe sequence
aagcttatcatattggccaagacga

SEQ ID NO: 176763 - DNA, 25 bp, Probe sequence
aatgtttctacagacgctaaagctt

SEQ ID NO: 176764 - DNA, 25 bp, Probe sequence
aattcgccattaaatgtttctacag

SEQ ID NO: 176765 - DNA, 25 bp, Probe sequence
caactgcctctcacattttcaaata

SEQ ID NO: 176766 - DNA, 25 bp, Probe sequence
cggtggcggcaatgactttacaatt

SEQ ID NO: 176767 - DNA, 25 bp, Probe sequence
ccatatagtctttttgtccaataca

SEQ ID NO: 176768 - DNA, 25 bp, Probe sequence
gccagttatggtgggtatatcgtga

SEQ ID NO: 176769 - DNA, 25 bp, Probe sequence
gcctctcacattttcaaatagatgg

SEQ ID NO: 176770 - DNA, 25 bp, Probe sequence
gctgcatcaccttctgataaaccat

SEQ ID NO: 176771 - DNA, 25 bp, Probe sequence
gctatgtagacgtgtttggtttaaa

SEQ ID NO: 176772 - DNA, 25 bp, Probe sequence
gaacaacagctacacaaacctctaa

SEQ ID NO: 176773 - DNA, 25 bp, Probe sequence
gacactagccagttatggtgggtat

SEQ ID NO: 176774 - DNA, 25 bp, Probe sequence
gacgctaaagcttatcatattggcc

SEQ ID NO: 176775 - DNA, 25 bp, Probe sequence
gagaccgctatgtagacgtgtttgg

SEQ ID NO: 176776 - DNA, 25 bp, Probe sequence
gataaaccatatagtctttttgtcc

SEQ ID NO: 176777 - DNA, 25 bp, Probe sequence
gttattcttggtcagcgcatatacg

SEQ ID NO: 176778 - DNA, 25 bp, Probe sequence
ggtggtgtaacacctgctgcatcac

SEQ ID NO: 176779 - DNA, 25 bp, Probe sequence
ggtgcacataagatgtaccaaggta

SEQ ID NO: 176780 - DNA, 25 bp, Probe sequence
ggtcagcgcatatacgattatgggg

SEQ ID NO: 176781 - DNA, 25 bp, Probe sequence
ggttataccaatatgatgacggcaa

SEQ ID NO: 176782 - DNA, 25 bp, Probe sequence
ggccaagacgaaacgaacatcaatg

SEQ ID NO: 176783 - DNA, 25 bp, Probe sequence
tgattttcgagcacgtgaaacacta

SEQ ID NO: 176784 - DNA, 25 bp, Probe sequence
taatcaattaagagaccgctatgta

SEQ ID NO: 176785 - DNA, 25 bp, Probe sequence
tacacaaacctctaattcgccatta

SEQ ID NO: 176786 - DNA, 25 bp, Probe sequence
tacgattatggggtgctgaaagttg

SEQ ID NO: 176787 - DNA, 25 bp, Probe sequence
ttctgatcttgcaaatgtttatgtt

SEQ ID NO: 176788 - DNA, 25 bp, Probe sequence
agcccaagaaacatttactggcggt

SEQ ID NO: 176789 - DNA, 25 bp, Probe sequence
attcctcgcatataacattcctcgt

SEQ ID NO: 176790 - DNA, 25 bp, Probe sequence
ataaacttattattcctcgcatata

SEQ ID NO: 176791 - DNA, 25 bp, Probe sequence
aggcacagctacaagtcaatcccct

SEQ ID NO: 176792 - DNA, 25 bp, Probe sequence
agtcatattcaagtattcggccctg

SEQ ID NO: 176793 - DNA, 25 bp, Probe sequence
agcattgactatgataggcacagct

SEQ ID NO: 176794 - DNA, 25 bp, Probe sequence
acatttactggcggtgttacaccag

SEQ ID NO: 176795 - DNA, 25 bp, Probe sequence
acacaacgccatttaacattttcaa

SEQ ID NO: 176796 - DNA, 25 bp, Probe sequence
aaatcctccttgaaaaatctagcta

SEQ ID NO: 176797 - DNA, 25 bp, Probe sequence
aaagcaggaacatttattggcgaat

SEQ ID NO: 176798 - DNA, 25 bp, Probe sequence
aatattacacacaacgccatttaac

SEQ ID NO: 176799 - DNA, 25 bp, Probe sequence
caatccatgcaacattgttacagtt

SEQ ID NO: 176800 - DNA, 25 bp, Probe sequence
caaactgcacacatcgaaatcctcc

SEQ ID NO: 176801 - DNA, 25 bp, Probe sequence
cacacatcgaaatcctccttgaaaa

SEQ ID NO: 176802 - DNA, 25 bp, Probe sequence
caccgattagtatgtcatctgaagc

SEQ ID NO: 176803 - DNA, 25 bp, Probe sequence
gcaaaacctagcgataaacattata

SEQ ID NO: 176804 - DNA, 25 bp, Probe sequence
gataatggtacaatccatgcaacat

SEQ ID NO: 176805 - DNA, 25 bp, Probe sequence
gatttctctctttttataaacttat

SEQ ID NO: 176806 - DNA, 25 bp, Probe sequence
gatttaattgatttctctcttttta

SEQ ID NO: 176807 - DNA, 25 bp, Probe sequence
gattacaggtggcagcaacaactac

SEQ ID NO: 176808 - DNA, 25 bp, Probe sequence
gattatgaaacctggcgcacttata

SEQ ID NO: 176809 - DNA, 25 bp, Probe sequence
gttgatttccgaatccgccaaacac

SEQ ID NO: 176810 - DNA, 25 bp, Probe sequence
ggtgttacaccagtagcaaaaccta

SEQ ID NO: 176811 - DNA, 25 bp, Probe sequence
ggtggcagcaacaactacacaatag

SEQ ID NO: 176812 - DNA, 25 bp, Probe sequence
ggaagttgatttccgaatccgccaa

SEQ ID NO: 176813 - DNA, 25 bp, Probe sequence
ggcgcacttatatgttagcccaaga

SEQ ID NO: 176814 - DNA, 25 bp, Probe sequence
ggcgaatatcaattttatacaggta

SEQ ID NO: 176815 - DNA, 25 bp, Probe sequence
tgttacagttatcatggtttagtca

SEQ ID NO: 176816 - DNA, 25 bp, Probe sequence
tccgaatccgccaaacactaattaa

SEQ ID NO: 176817 - DNA, 25 bp, Probe sequence
tcccctcattcaccgattagtatgt

SEQ ID NO: 176818 - DNA, 25 bp, Probe sequence
tcggccctgaaagttggggtaatat

SEQ ID NO: 176819 - DNA, 25 bp, Probe sequence
tcgcatataacattcctcgtaaagg

SEQ ID NO: 176820 - DNA, 25 bp, Probe sequence
taaaggccacattaagattacaggt

SEQ ID NO: 176821 - DNA, 25 bp, Probe sequence
taaaaaccctcaaactgcacacatc

SEQ ID NO: 176822 - DNA, 25 bp, Probe sequence
attgaggatatcgatcatgtaaatc

SEQ ID NO: 176823 - DNA, 25 bp, Probe sequence
attggattgttagatcagcttgaag

SEQ ID NO: 176824 - DNA, 25 bp, Probe sequence
atatcgatcatgtaaatcctgatga

SEQ ID NO: 176825 - DNA, 25 bp, Probe sequence
atcctgatgaagtacgtgttgaaga

SEQ ID NO: 176826 - DNA, 25 bp, Probe sequence
atgaatgaacagcaaacaatcgaac

SEQ ID NO: 176827 - DNA, 25 bp, Probe sequence
atgaacagcaaacaatcgaacagat

SEQ ID NO: 176828 - DNA, 25 bp, Probe sequence
atggattggattgttagatcagctt

SEQ ID NO: 176829 - DNA, 25 bp, Probe sequence
aaatcctgatgaagtacgtgttgaa

SEQ ID NO: 176830 - DNA, 25 bp, Probe sequence
aacagcaaacaatcgaacagataaa

SEQ ID NO: 176831 - DNA, 25 bp, Probe sequence
aatcctgatgaagtacgtgttgaag

SEQ ID NO: 176832 - DNA, 25 bp, Probe sequence
aataagtttattgaggatatcgatc

SEQ ID NO: 176833 - DNA, 25 bp, Probe sequence
catgtaaatcctgatgaagtacgtg

SEQ ID NO: 176834 - DNA, 25 bp, Probe sequence
gaatgaacagcaaacaatcgaacag

SEQ ID NO: 176835 - DNA, 25 bp, Probe sequence
gaatggattggattgttagatcagc

SEQ ID NO: 176836 - DNA, 25 bp, Probe sequence
gaagtacgtgttgaagatatagatg

SEQ ID NO: 176837 - DNA, 25 bp, Probe sequence
gatgaagtacgtgttgaagatatag

SEQ ID NO: 176838 - DNA, 25 bp, Probe sequence
gatcatgtaaatcctgatgaagtac

SEQ ID NO: 176839 - DNA, 25 bp, Probe sequence
gatatcgatcatgtaaatcctgatg

SEQ ID NO: 176840 - DNA, 25 bp, Probe sequence
gattgttagatcagcttgaagaaaa

SEQ ID NO: 176841 - DNA, 25 bp, Probe sequence
gattggattgttagatcagcttgaa

SEQ ID NO: 176842 - DNA, 25 bp, Probe sequence
gttagatcagcttgaagaaaaggtt

SEQ ID NO: 176843 - DNA, 25 bp, Probe sequence
gtttattgaggatatcgatcatgta

SEQ ID NO: 176844 - DNA, 25 bp, Probe sequence
gtacgtgttgaagatatagatgaat

SEQ ID NO: 176845 - DNA, 25 bp, Probe sequence
gtgttgaagatatagatgaatggat

SEQ ID NO: 176846 - DNA, 25 bp, Probe sequence
ggattgttagatcagcttgaagaaa

SEQ ID NO: 176847 - DNA, 25 bp, Probe sequence
ggattggattgttagatcagcttga

SEQ ID NO: 176848 - DNA, 25 bp, Probe sequence
ggatatcgatcatgtaaatcctgat

SEQ ID NO: 176849 - DNA, 25 bp, Probe sequence
tgtaaatcctgatgaagtacgtgtt

SEQ ID NO: 176850 - DNA, 25 bp, Probe sequence
tgaacagcaaacaatcgaacagata

SEQ ID NO: 176851 - DNA, 25 bp, Probe sequence
tcctgatgaagtacgtgttgaagat

SEQ ID NO: 176852 - DNA, 25 bp, Probe sequence
tcgatcatgtaaatcctgatgaagt

SEQ ID NO: 176853 - DNA, 25 bp, Probe sequence
taaatcctgatgaagtacgtgttga

SEQ ID NO: 176854 - DNA, 25 bp, Probe sequence
tatcgatcatgtaaatcctgatgaa

SEQ ID NO: 176855 - DNA, 25 bp, Probe sequence
ttggattgttagatcagcttgaaga

SEQ ID NO: 176856 - DNA, 25 bp, Probe sequence
attgatcctgaaaagtttgagaaag

SEQ ID NO: 176857 - DNA, 25 bp, Probe sequence
ataaatcagactagcgatcaatatg

SEQ ID NO: 176858 - DNA, 25 bp, Probe sequence
ataatgacttatatgccttttaaag

SEQ ID NO: 176859 - DNA, 25 bp, Probe sequence
atcagactagcgatcaatatgaaga

SEQ ID NO: 176860 - DNA, 25 bp, Probe sequence
atgacttatatgccttttaaagata

SEQ ID NO: 176861 - DNA, 25 bp, Probe sequence
agaagattctaatattgatcctgaa

SEQ ID NO: 176862 - DNA, 25 bp, Probe sequence
agcggtcaaaaagttattataagat

SEQ ID NO: 176863 - DNA, 25 bp, Probe sequence
aaatcagactagcgatcaatatgaa

SEQ ID NO: 176864 - DNA, 25 bp, Probe sequence
aaaataaatcagactagcgatcaat

SEQ ID NO: 176865 - DNA, 25 bp, Probe sequence
aagattctaatattgatcctgaaaa

SEQ ID NO: 176866 - DNA, 25 bp, Probe sequence
aaggagtgaatttatcatgaggcga

SEQ ID NO: 176867 - DNA, 25 bp, Probe sequence
aatgacttatatgccttttaaagat

SEQ ID NO: 176868 - DNA, 25 bp, Probe sequence
aatattgatcctgaaaagtttgaga

SEQ ID NO: 176869 - DNA, 25 bp, Probe sequence
gaagtataaaaatgttgagcggtca

SEQ ID NO: 176870 - DNA, 25 bp, Probe sequence
gaagattctaatattgatcctgaaa

SEQ ID NO: 176871 - DNA, 25 bp, Probe sequence
gaagaagattctaatattgatcctg

SEQ ID NO: 176872 - DNA, 25 bp, Probe sequence
gacttatatgccttttaaagatagt

SEQ ID NO: 176873 - DNA, 25 bp, Probe sequence
gactagcgatcaatatgaagaagat

SEQ ID NO: 176874 - DNA, 25 bp, Probe sequence
gacgatagcaatgatataatttacg

SEQ ID NO: 176875 - DNA, 25 bp, Probe sequence
gagtgaatttatcatgaggcgatgg

SEQ ID NO: 176876 - DNA, 25 bp, Probe sequence
gatggtgaggttattataatgactt

SEQ ID NO: 176877 - DNA, 25 bp, Probe sequence
gatagcaatgatataatttacgtaa

SEQ ID NO: 176878 - DNA, 25 bp, Probe sequence
gatagtaatacaaaagtttcaagag

SEQ ID NO: 176879 - DNA, 25 bp, Probe sequence
gattctaatattgatcctgaaaagt

SEQ ID NO: 176880 - DNA, 25 bp, Probe sequence
gtttcaagacgatagcaatgatata

SEQ ID NO: 176881 - DNA, 25 bp, Probe sequence
gtgaatttatcatgaggcgatggtt

SEQ ID NO: 176882 - DNA, 25 bp, Probe sequence
ggagtgaatttatcatgaggcgatg

SEQ ID NO: 176883 - DNA, 25 bp, Probe sequence
tgaatttatcatgaggcgatggttt

SEQ ID NO: 176884 - DNA, 25 bp, Probe sequence
tctaatattgatcctgaaaagtttg

SEQ ID NO: 176885 - DNA, 25 bp, Probe sequence
taagatttataatgatggtgaggtt

SEQ ID NO: 176886 - DNA, 25 bp, Probe sequence
tataatgacttatatgccttttaaa

SEQ ID NO: 176887 - DNA, 25 bp, Probe sequence
ttgtttcaagacgatagcaatgata

SEQ ID NO: 176888 - DNA, 25 bp, Probe sequence
ttgagaaagataataaaccagttta

SEQ ID NO: 176889 - DNA, 25 bp, Probe sequence
ttgagcggtcaaaaagttattataa

SEQ ID NO: 176890 - DNA, 25 bp, Probe sequence
agacaagttttccctcaagatacga

SEQ ID NO: 176891 - DNA, 25 bp, Probe sequence
atgctggtgcgcaagtagttaccgc

SEQ ID NO: 176892 - DNA, 25 bp, Probe sequence
atgacaaatcaggacagaccaatga

SEQ ID NO: 176893 - DNA, 25 bp, Probe sequence
agcaccacaacgtgttgaacgaaga

SEQ ID NO: 176894 - DNA, 25 bp, Probe sequence
agctatgaaacatgctggtgcgcaa

SEQ ID NO: 176895 - DNA, 25 bp, Probe sequence
aaatagacaagttttccctcaagat

SEQ ID NO: 176896 - DNA, 25 bp, Probe sequence
aagccgattaaaacaggggacatat

SEQ ID NO: 176897 - DNA, 25 bp, Probe sequence
aacatttgttgcgttagatgatgaa

SEQ ID NO: 176898 - DNA, 25 bp, Probe sequence
aagcacgtcgcattgaaagtaaaca

SEQ ID NO: 176899 - DNA, 25 bp, Probe sequence
ccatcatacaatgtttggtggtaca

SEQ ID NO: 176900 - DNA, 25 bp, Probe sequence
gttttccctcaagatacgaatcacc

SEQ ID NO: 176901 - DNA, 25 bp, Probe sequence
gcatgatttagctgcattaagttac

SEQ ID NO: 176902 - DNA, 25 bp, Probe sequence
gcagcaatcacagctatgaaacatg

SEQ ID NO: 176903 - DNA, 25 bp, Probe sequence
gaacgaagaaaagcacgtcgcattg

SEQ ID NO: 176904 - DNA, 25 bp, Probe sequence
gaaacatgctggtgcgcaagtagtt

SEQ ID NO: 176905 - DNA, 25 bp, Probe sequence
gaaattgcagcaatcacagctatga

SEQ ID NO: 176906 - DNA, 25 bp, Probe sequence
gactcagtagatttcttaaagccga

SEQ ID NO: 176907 - DNA, 25 bp, Probe sequence
gaccaatgaaatctatgtcagaatc

SEQ ID NO: 176908 - DNA, 25 bp, Probe sequence
gatggctaatattgatgaaattgca

SEQ ID NO: 176909 - DNA, 25 bp, Probe sequence
gatacagcaccacaacgtgttgaac

SEQ ID NO: 176910 - DNA, 25 bp, Probe sequence
gatacgaatcaccatcatacaatgt

SEQ ID NO: 176911 - DNA, 25 bp, Probe sequence
gttaccgcatctacagactcagtag

SEQ ID NO: 176912 - DNA, 25 bp, Probe sequence
gtttggtggtacattgatggctaat

SEQ ID NO: 176913 - DNA, 25 bp, Probe sequence
gtatatccagaagatgatgttgaaa

SEQ ID NO: 176914 - DNA, 25 bp, Probe sequence
gtgcgcaagtagttaccgcatctac

SEQ ID NO: 176915 - DNA, 25 bp, Probe sequence
ggggacatattacaatacgtagcga

SEQ ID NO: 176916 - DNA, 25 bp, Probe sequence
ggttttatgatacagcaccacaacg

SEQ ID NO: 176917 - DNA, 25 bp, Probe sequence
ggaagtggtcgttcaaattagaatt

SEQ ID NO: 176918 - DNA, 25 bp, Probe sequence
tccctcaagatacgaatcaccatca

SEQ ID NO: 176919 - DNA, 25 bp, Probe sequence
taacaagcatgatttagctgcatta

SEQ ID NO: 176920 - DNA, 25 bp, Probe sequence
tacaatacgtagcgatggtttcata

SEQ ID NO: 176921 - DNA, 25 bp, Probe sequence
tagaattgacgatgtatttaataac

SEQ ID NO: 176922 - DNA, 25 bp, Probe sequence
tagcgatggtttcatacgctgggac

SEQ ID NO: 176923 - DNA, 25 bp, Probe sequence
tagttaccgcatctacagactcagt

SEQ ID NO: 176924 - DNA, 25 bp, Probe sequence
attaaaccaaattatgctgagcttg

SEQ ID NO: 176925 - DNA, 25 bp, Probe sequence
attatgctgagcttggtcgacaata

SEQ ID NO: 176926 - DNA, 25 bp, Probe sequence
atttatgaaggaatgctattttaca

SEQ ID NO: 176927 - DNA, 25 bp, Probe sequence
atataattgtgattcaagaacagtt

SEQ ID NO: 176928 - DNA, 25 bp, Probe sequence
ataattgtgattcaagaacagttaa

SEQ ID NO: 176929 - DNA, 25 bp, Probe sequence
atgctgagcttggtcgacaatataa

SEQ ID NO: 176930 - DNA, 25 bp, Probe sequence
atgctattttacattatgaaaggta

SEQ ID NO: 176931 - DNA, 25 bp, Probe sequence
atgaaggaatgctattttacattat

SEQ ID NO: 176932 - DNA, 25 bp, Probe sequence
accaaattatgctgagcttggtcga

SEQ ID NO: 176933 - DNA, 25 bp, Probe sequence
aaattatgctgagcttggtcgacaa

SEQ ID NO: 176934 - DNA, 25 bp, Probe sequence
aaaccaaattatgctgagcttggtc

SEQ ID NO: 176935 - DNA, 25 bp, Probe sequence
aaccaaattatgctgagcttggtcg

SEQ ID NO: 176936 - DNA, 25 bp, Probe sequence
aaggtattaaaccaaattatgctga

SEQ ID NO: 176937 - DNA, 25 bp, Probe sequence
aaggaatgctattttacattatgaa

SEQ ID NO: 176938 - DNA, 25 bp, Probe sequence
aattatgctgagcttggtcgacaat

SEQ ID NO: 176939 - DNA, 25 bp, Probe sequence
caaattatgctgagcttggtcgaca

SEQ ID NO: 176940 - DNA, 25 bp, Probe sequence
ctgagcttggtcgacaatataattg

SEQ ID NO: 176941 - DNA, 25 bp, Probe sequence
ccaaattatgctgagcttggtcgac

SEQ ID NO: 176942 - DNA, 25 bp, Probe sequence
gctgagcttggtcgacaatataatt

SEQ ID NO: 176943 - DNA, 25 bp, Probe sequence
gcttggtcgacaatataattgtgat

SEQ ID NO: 176944 - DNA, 25 bp, Probe sequence
gaaggaatgctattttacattatga

SEQ ID NO: 176945 - DNA, 25 bp, Probe sequence
gacatgacatttatgaaggaatgct

SEQ ID NO: 176946 - DNA, 25 bp, Probe sequence
gagcttggtcgacaatataattgtg

SEQ ID NO: 176947 - DNA, 25 bp, Probe sequence
gtattaaaccaaattatgctgagct

SEQ ID NO: 176948 - DNA, 25 bp, Probe sequence
ggtattaaaccaaattatgctgagc

SEQ ID NO: 176949 - DNA, 25 bp, Probe sequence
ggaatgctattttacattatgaaag

SEQ ID NO: 176950 - DNA, 25 bp, Probe sequence
tggtcgacaatataattgtgattca

SEQ ID NO: 176951 - DNA, 25 bp, Probe sequence
tgagcttggtcgacaatataattgt

SEQ ID NO: 176952 - DNA, 25 bp, Probe sequence
tgctgagcttggtcgacaatataat

SEQ ID NO: 176953 - DNA, 25 bp, Probe sequence
tatgctgagcttggtcgacaatata

SEQ ID NO: 176954 - DNA, 25 bp, Probe sequence
tattaaaccaaattatgctgagctt

SEQ ID NO: 176955 - DNA, 25 bp, Probe sequence
ttatgctgagcttggtcgacaatat

SEQ ID NO: 176956 - DNA, 25 bp, Probe sequence
ttaaaccaaattatgctgagcttgg

SEQ ID NO: 176957 - DNA, 25 bp, Probe sequence
ttgagacatgacatttatgaaggaa

SEQ ID NO: 176958 - DNA, 25 bp, Probe sequence
tctacgccccggtggtaaagaagca

SEQ ID NO: 176959 - DNA, 25 bp, Probe sequence
gtactaccgagtcttaaagcctggg

SEQ ID NO: 176960 - DNA, 25 bp, Probe sequence
atttcagcagcaggtcttgaatcat

SEQ ID NO: 176961 - DNA, 25 bp, Probe sequence
atgacgaaggtattgttggaactat

SEQ ID NO: 176962 - DNA, 25 bp, Probe sequence
agtggcatgtaatatgtgcacaaca

SEQ ID NO: 176963 - DNA, 25 bp, Probe sequence
agcaatgttaacaatgttacccatc

SEQ ID NO: 176964 - DNA, 25 bp, Probe sequence
acaacaaggggcattttcacaagat

SEQ ID NO: 176965 - DNA, 25 bp, Probe sequence
aaagcattacgcgagtactaccgag

SEQ ID NO: 176966 - DNA, 25 bp, Probe sequence
aatcgaccaatgttttgtaaaatgt

SEQ ID NO: 176967 - DNA, 25 bp, Probe sequence
aatcatatattcaagttcaacaagc

SEQ ID NO: 176968 - DNA, 25 bp, Probe sequence
caccgcagacgaaacttggctggtt

SEQ ID NO: 176969 - DNA, 25 bp, Probe sequence
catctatttatctagctcatacata

SEQ ID NO: 176970 - DNA, 25 bp, Probe sequence
cattatcatactggtccaatgagtt

SEQ ID NO: 176971 - DNA, 25 bp, Probe sequence
cgatgactaaattgcgtaaagatat

SEQ ID NO: 176972 - DNA, 25 bp, Probe sequence
gccccggtggtaaagaagcaacaga

SEQ ID NO: 176973 - DNA, 25 bp, Probe sequence
gcctgggggtatcttgttaacacat

SEQ ID NO: 176974 - DNA, 25 bp, Probe sequence
gcgaatgctgttaaattgccctttg

SEQ ID NO: 176975 - DNA, 25 bp, Probe sequence
gcagcaggtcttgaatcatatattc

SEQ ID NO: 176976 - DNA, 25 bp, Probe sequence
gcaattaatgtcaatgtctcaccgc

SEQ ID NO: 176977 - DNA, 25 bp, Probe sequence
gaattatattacttttgtcgctaaa

SEQ ID NO: 176978 - DNA, 25 bp, Probe sequence
gaagctggtcatacatttttagcta

SEQ ID NO: 176979 - DNA, 25 bp, Probe sequence
gaaacttggctggttagatttatat

SEQ ID NO: 176980 - DNA, 25 bp, Probe sequence
gagtcttaaagcctgggggtatctt

SEQ ID NO: 176981 - DNA, 25 bp, Probe sequence
gatgacaatcaattcgatatcgttt

SEQ ID NO: 176982 - DNA, 25 bp, Probe sequence
gttaatgaatcacatgccacacatg

SEQ ID NO: 176983 - DNA, 25 bp, Probe sequence
gttaaatcattatctgcagcaatta

SEQ ID NO: 176984 - DNA, 25 bp, Probe sequence
gttaacacatgatattgtcatcgtt

SEQ ID NO: 176985 - DNA, 25 bp, Probe sequence
gttaaattgccctttgatgacaatc

SEQ ID NO: 176986 - DNA, 25 bp, Probe sequence
gtcaatgtctcaccgcagacgaaac

SEQ ID NO: 176987 - DNA, 25 bp, Probe sequence
gtgcacaacatctatttatctagct

SEQ ID NO: 176988 - DNA, 25 bp, Probe sequence
ggtccaatgagtttaatgacaccaa

SEQ ID NO: 176989 - DNA, 25 bp, Probe sequence
ggctgtcacattcaaggcgttgata

SEQ ID NO: 176990 - DNA, 25 bp, Probe sequence
ttacgcgagtactaccgagtcttaa

SEQ ID NO: 176991 - DNA, 25 bp, Probe sequence
ttcaagttcaacaagcgaatgctgt

SEQ ID NO: 176992 - DNA, 25 bp, Probe sequence
atcaatttccatgggtcgtagctgc

SEQ ID NO: 176993 - DNA, 25 bp, Probe sequence
atggcatattcgaagatggttcaaa

SEQ ID NO: 176994 - DNA, 25 bp, Probe sequence
agcttttattgctaatataccaact

SEQ ID NO: 176995 - DNA, 25 bp, Probe sequence
acatcgctaatttaagtgtttacgc

SEQ ID NO: 176996 - DNA, 25 bp, Probe sequence
acagccagtatttattagatcatca

SEQ ID NO: 176997 - DNA, 25 bp, Probe sequence
aacgatccagttgaaaattggcgtc

SEQ ID NO: 176998 - DNA, 25 bp, Probe sequence
aacgcacgcgcatttaaaggatata

SEQ ID NO: 176999 - DNA, 25 bp, Probe sequence
aattggcgtcaacacatcgctaatt

SEQ ID NO: 177000 - DNA, 25 bp, Probe sequence
cgattggatctgcttacgcctttaa

SEQ ID NO: 177001 - DNA, 25 bp, Probe sequence
ccatgcgttgcattatgtatctgaa

SEQ ID NO: 177002 - DNA, 25 bp, Probe sequence
gcttcagatgtacgtgttgtatata

SEQ ID NO: 177003 - DNA, 25 bp, Probe sequence
gcatttcaacaacaaaacgcacgcg

SEQ ID NO: 177004 - DNA, 25 bp, Probe sequence
gcagcatgtcatttagcgattggat

SEQ ID NO: 177005 - DNA, 25 bp, Probe sequence
gaatctgtggaacattttgctaatc

SEQ ID NO: 177006 - DNA, 25 bp, Probe sequence
gaatgttcaaccaaaacagccagta

SEQ ID NO: 177007 - DNA, 25 bp, Probe sequence
gaagtatttacagcaccagatcgaa

SEQ ID NO: 177008 - DNA, 25 bp, Probe sequence
gatctgcttacgcctttaatattca

SEQ ID NO: 177009 - DNA, 25 bp, Probe sequence
gatatcaaatcgtaataccattttt

SEQ ID NO: 177010 - DNA, 25 bp, Probe sequence
gatatgttactaataaattgccttt

SEQ ID NO: 177011 - DNA, 25 bp, Probe sequence
gattgcaagcggattaaatgattca

SEQ ID NO: 177012 - DNA, 25 bp, Probe sequence
gttgaagcgagaatggattacgtta

SEQ ID NO: 177013 - DNA, 25 bp, Probe sequence
gttacaacaatacgctgaactatta

SEQ ID NO: 177014 - DNA, 25 bp, Probe sequence
gtatatagcgatccaaccttaaaac

SEQ ID NO: 177015 - DNA, 25 bp, Probe sequence
gtgcgaattgatggtaacgatccag

SEQ ID NO: 177016 - DNA, 25 bp, Probe sequence
gtgatttgactatttatggcatatt

SEQ ID NO: 177017 - DNA, 25 bp, Probe sequence
gtggcgctgctaatttagcacttat

SEQ ID NO: 177018 - DNA, 25 bp, Probe sequence
ggtggaacggaaatgactgttgagg

SEQ ID NO: 177019 - DNA, 25 bp, Probe sequence
ggaagatgctacaagttatgttaac

SEQ ID NO: 177020 - DNA, 25 bp, Probe sequence
tggaaattgggcatcaacattttaa

SEQ ID NO: 177021 - DNA, 25 bp, Probe sequence
tcgtagctgcttttccatctaaagc

SEQ ID NO: 177022 - DNA, 25 bp, Probe sequence
taatggatggtatcgatagccaaaa

SEQ ID NO: 177023 - DNA, 25 bp, Probe sequence
tagtacctgatgattcaccgatatc

SEQ ID NO: 177024 - DNA, 25 bp, Probe sequence
tttccatctaaagcttgggcgaaga

SEQ ID NO: 177025 - DNA, 25 bp, Probe sequence
ttacgttaaacgtggcgctgctaat

SEQ ID NO: 177026 - DNA, 25 bp, Probe sequence
attgctgacgctttaggacaattgc

SEQ ID NO: 177027 - DNA, 25 bp, Probe sequence
atatgattttgttcaatcaagagaa

SEQ ID NO: 177028 - DNA, 25 bp, Probe sequence
atcaagagaaagattgtcgccaagt

SEQ ID NO: 177029 - DNA, 25 bp, Probe sequence
agtgacagctattgctgacgcttta

SEQ ID NO: 177030 - DNA, 25 bp, Probe sequence
agctattgctgacgctttaggacaa

SEQ ID NO: 177031 - DNA, 25 bp, Probe sequence
acgctttaggacaattgcgacacga

SEQ ID NO: 177032 - DNA, 25 bp, Probe sequence
acagctattgctgacgctttaggac

SEQ ID NO: 177033 - DNA, 25 bp, Probe sequence
acagatatatatgattttgttcaat

SEQ ID NO: 177034 - DNA, 25 bp, Probe sequence
aagtattagctattagagagaagtt

SEQ ID NO: 177035 - DNA, 25 bp, Probe sequence
aagtgacagctattgctgacgcttt

SEQ ID NO: 177036 - DNA, 25 bp, Probe sequence
aatcaaggattattagatcctgaaa

SEQ ID NO: 177037 - DNA, 25 bp, Probe sequence
caagagaaagattgtcgccaagtga

SEQ ID NO: 177038 - DNA, 25 bp, Probe sequence
cagctattgctgacgctttaggaca

SEQ ID NO: 177039 - DNA, 25 bp, Probe sequence
ctattgctgacgctttaggacaatt

SEQ ID NO: 177040 - DNA, 25 bp, Probe sequence
cgccaagtgaagtgacagctattgc

SEQ ID NO: 177041 - DNA, 25 bp, Probe sequence
ccaagtgaagtgacagctattgctg

SEQ ID NO: 177042 - DNA, 25 bp, Probe sequence
gccaagtgaagtgacagctattgct

SEQ ID NO: 177043 - DNA, 25 bp, Probe sequence
gctgacgctttaggacaattgcgac

SEQ ID NO: 177044 - DNA, 25 bp, Probe sequence
gctattgctgacgctttaggacaat

SEQ ID NO: 177045 - DNA, 25 bp, Probe sequence
gaagtgacagctattgctgacgctt

SEQ ID NO: 177046 - DNA, 25 bp, Probe sequence
gaaagattgtcgccaagtgaagtga

SEQ ID NO: 177047 - DNA, 25 bp, Probe sequence
gacagctattgctgacgctttagga

SEQ ID NO: 177048 - DNA, 25 bp, Probe sequence
gacgctttaggacaattgcgacacg

SEQ ID NO: 177049 - DNA, 25 bp, Probe sequence
gagaaagattgtcgccaagtgaagt

SEQ ID NO: 177050 - DNA, 25 bp, Probe sequence
gattgtcgccaagtgaagtgacagc

SEQ ID NO: 177051 - DNA, 25 bp, Probe sequence
gtcgccaagtgaagtgacagctatt

SEQ ID NO: 177052 - DNA, 25 bp, Probe sequence
gtgaagtgacagctattgctgacgc

SEQ ID NO: 177053 - DNA, 25 bp, Probe sequence
gtgacagctattgctgacgctttag

SEQ ID NO: 177054 - DNA, 25 bp, Probe sequence
gtggctatgacaaatgaagagaaag

SEQ ID NO: 177055 - DNA, 25 bp, Probe sequence
ggattattagatcctgaaaaatata

SEQ ID NO: 177056 - DNA, 25 bp, Probe sequence
tgacgctttaggacaattgcgacac

SEQ ID NO: 177057 - DNA, 25 bp, Probe sequence
tgacagctattgctgacgctttagg

SEQ ID NO: 177058 - DNA, 25 bp, Probe sequence
ttgctgacgctttaggacaattgcg

SEQ ID NO: 177059 - DNA, 25 bp, Probe sequence
ttgtcgccaagtgaagtgacagcta

SEQ ID NO: 177060 - DNA, 25 bp, Probe sequence
atctatgcattccaacataatttaa

SEQ ID NO: 177061 - DNA, 25 bp, Probe sequence
atggtacgtataggaatttcaagtt

SEQ ID NO: 177062 - DNA, 25 bp, Probe sequence
agatatcgccgatgcagttcgtaaa

SEQ ID NO: 177063 - DNA, 25 bp, Probe sequence
agcccatgagttgaagccagattta

SEQ ID NO: 177064 - DNA, 25 bp, Probe sequence
acaagtgcaaaagatatcgccgatg

SEQ ID NO: 177065 - DNA, 25 bp, Probe sequence
aaagtgatattgaagtagttggtga

SEQ ID NO: 177066 - DNA, 25 bp, Probe sequence
aaagcgcgcagagttatatgaaatg

SEQ ID NO: 177067 - DNA, 25 bp, Probe sequence
aaccgtatgaaaaagcgcgcagagt

SEQ ID NO: 177068 - DNA, 25 bp, Probe sequence
aagaggtatatcgtgcattagatgc

SEQ ID NO: 177069 - DNA, 25 bp, Probe sequence
aagtattgtttgtggatgatcatga

SEQ ID NO: 177070 - DNA, 25 bp, Probe sequence
aagtgcaagatagaacacaagctgt

SEQ ID NO: 177071 - DNA, 25 bp, Probe sequence
caagttatctatcaacgcaaagtga

SEQ ID NO: 177072 - DNA, 25 bp, Probe sequence
gccaaagcccatgagttgaagccag

SEQ ID NO: 177073 - DNA, 25 bp, Probe sequence
gccgatgcagttcgtaaaacttcta

SEQ ID NO: 177074 - DNA, 25 bp, Probe sequence
gcgaaaggttactcaaatcaagaaa

SEQ ID NO: 177075 - DNA, 25 bp, Probe sequence
gcagttcgtaaaacttctagaggag

SEQ ID NO: 177076 - DNA, 25 bp, Probe sequence
gcaggtgtcgatagttacattttaa

SEQ ID NO: 177077 - DNA, 25 bp, Probe sequence
gaagcaattgccaaagcccatgagt

SEQ ID NO: 177078 - DNA, 25 bp, Probe sequence
gaagcgacgactcagattaaaaaag

SEQ ID NO: 177079 - DNA, 25 bp, Probe sequence
gaaatgcttacagaacgagaaatgg

SEQ ID NO: 177080 - DNA, 25 bp, Probe sequence
gaaattgctagtgcatcgcatatta

SEQ ID NO: 177081 - DNA, 25 bp, Probe sequence
gacacatgtgagtaacattttaagt

SEQ ID NO: 177082 - DNA, 25 bp, Probe sequence
gaggagaatctgtttttgaaccgga

SEQ ID NO: 177083 - DNA, 25 bp, Probe sequence
gagaatctgtttttgaaccggaagt

SEQ ID NO: 177084 - DNA, 25 bp, Probe sequence
gtagttggtgaaggcgcttctggta

SEQ ID NO: 177085 - DNA, 25 bp, Probe sequence
gtgcatcgcatattactattaaaac

SEQ ID NO: 177086 - DNA, 25 bp, Probe sequence
gtggatgatcatgaaatggtacgta

SEQ ID NO: 177087 - DNA, 25 bp, Probe sequence
ggtgtagaagcgacgactcagatta

SEQ ID NO: 177088 - DNA, 25 bp, Probe sequence
ggatggtgtagaagcgacgactcag

SEQ ID NO: 177089 - DNA, 25 bp, Probe sequence
ggaatttcaagttatctatcaacgc

SEQ ID NO: 177090 - DNA, 25 bp, Probe sequence
taaaacggttaagacacatgtgagt

SEQ ID NO: 177091 - DNA, 25 bp, Probe sequence
tattattgattgcgaaaggttactc

SEQ ID NO: 177092 - DNA, 25 bp, Probe sequence
ttagatgcaggtgtcgatagttaca

SEQ ID NO: 177093 - DNA, 25 bp, Probe sequence
ttagtgaaaatgcgtaaccgtatga

SEQ ID NO: 177094 - DNA, 25 bp, Probe sequence
atatcatctattttcaaggtatgtt

SEQ ID NO: 177095 - DNA, 25 bp, Probe sequence
atgcgtgctttgctgttacatttaa

SEQ ID NO: 177096 - DNA, 25 bp, Probe sequence
acattgcgtcattcaaacggtacaa

SEQ ID NO: 177097 - DNA, 25 bp, Probe sequence
aaataaggaggattcgtatgacgat

SEQ ID NO: 177098 - DNA, 25 bp, Probe sequence
aaatctcatcatcatattattgtgt

SEQ ID NO: 177099 - DNA, 25 bp, Probe sequence
aaaatatgcgtgaaagagctttgga

SEQ ID NO: 177100 - DNA, 25 bp, Probe sequence
aactttttgcggcaagtatgatgct

SEQ ID NO: 177101 - DNA, 25 bp, Probe sequence
aacgttccatattgtatcattgcca

SEQ ID NO: 177102 - DNA, 25 bp, Probe sequence
aagacaaatctttaggtgagggtat

SEQ ID NO: 177103 - DNA, 25 bp, Probe sequence
caattggttcaatgctcatcttagt

SEQ ID NO: 177104 - DNA, 25 bp, Probe sequence
caatttcgaatacattgcgtcattc

SEQ ID NO: 177105 - DNA, 25 bp, Probe sequence
caagaattgcataagttgcgactta

SEQ ID NO: 177106 - DNA, 25 bp, Probe sequence
cgaagttagaaccaccattagacca

SEQ ID NO: 177107 - DNA, 25 bp, Probe sequence
gccagattcaggtacacgtatcgag

SEQ ID NO: 177108 - DNA, 25 bp, Probe sequence
gctgttacatttaagaccgcttggt

SEQ ID NO: 177109 - DNA, 25 bp, Probe sequence
gctcatcttagtatatagcatgcta

SEQ ID NO: 177110 - DNA, 25 bp, Probe sequence
gaattacacaggaagcaatttcgaa

SEQ ID NO: 177111 - DNA, 25 bp, Probe sequence
gaagatcatttgttcagaattacac

SEQ ID NO: 177112 - DNA, 25 bp, Probe sequence
gaacttcacgattctgttagtcagc

SEQ ID NO: 177113 - DNA, 25 bp, Probe sequence
gacgattatttattgttgagaattc

SEQ ID NO: 177114 - DNA, 25 bp, Probe sequence
gagctttggaaattggtgcaacgtt

SEQ ID NO: 177115 - DNA, 25 bp, Probe sequence
gattggattaagacgcaaattgagc

SEQ ID NO: 177116 - DNA, 25 bp, Probe sequence
gttagtcagcaactttttgcggcaa

SEQ ID NO: 177117 - DNA, 25 bp, Probe sequence
gtattattgttggttcggtactcgc

SEQ ID NO: 177118 - DNA, 25 bp, Probe sequence
gtatcattgccagattcaggtacac

SEQ ID NO: 177119 - DNA, 25 bp, Probe sequence
gtatgttttatacacaaatattcgg

SEQ ID NO: 177120 - DNA, 25 bp, Probe sequence
gtacacgtatcgaggtgaaagcacc

SEQ ID NO: 177121 - DNA, 25 bp, Probe sequence
gtgcctaaaggtattgaagatcatt

SEQ ID NO: 177122 - DNA, 25 bp, Probe sequence
ggtgcaacgttccatattgtatcat

SEQ ID NO: 177123 - DNA, 25 bp, Probe sequence
ggcgaaacagttggcattaatgatc

SEQ ID NO: 177124 - DNA, 25 bp, Probe sequence
tatatagcatgctagctgcatttct

SEQ ID NO: 177125 - DNA, 25 bp, Probe sequence
tagaaatgcgtgctttgctgttaca

SEQ ID NO: 177126 - DNA, 25 bp, Probe sequence
ttagaaccaccattagaccaacaaa

SEQ ID NO: 177127 - DNA, 25 bp, Probe sequence
ttgagcgttcaatggaaggcgaaac

SEQ ID NO: 177128 - DNA, 25 bp, Probe sequence
attggctttttactcgttctattat

SEQ ID NO: 177129 - DNA, 25 bp, Probe sequence
attaatttacatgtagctgcttttt

SEQ ID NO: 177130 - DNA, 25 bp, Probe sequence
ataccattgttgttagacacatttt

SEQ ID NO: 177131 - DNA, 25 bp, Probe sequence
atcatcatcttgttcgtctttttat

SEQ ID NO: 177132 - DNA, 25 bp, Probe sequence
atgtaggatatctttattttcataa

SEQ ID NO: 177133 - DNA, 25 bp, Probe sequence
acagttaatatctacgtatcaacgt

SEQ ID NO: 177134 - DNA, 25 bp, Probe sequence
aaagtgcaggttatattgccggtta

SEQ ID NO: 177135 - DNA, 25 bp, Probe sequence
aaagtggtttggtgagcaacgtaca

SEQ ID NO: 177136 - DNA, 25 bp, Probe sequence
aattgcattcacattattgtctaat

SEQ ID NO: 177137 - DNA, 25 bp, Probe sequence
catcatcttgttcgtctttttatta

SEQ ID NO: 177138 - DNA, 25 bp, Probe sequence
gccaatttttactacatattttttg

SEQ ID NO: 177139 - DNA, 25 bp, Probe sequence
gcgttttggataggcgcgctattaa

SEQ ID NO: 177140 - DNA, 25 bp, Probe sequence
gcaggttatattgccggttaattac

SEQ ID NO: 177141 - DNA, 25 bp, Probe sequence
gaattggcgacctacatattgactt

SEQ ID NO: 177142 - DNA, 25 bp, Probe sequence
gaagtacttacgtgaatgaaaaatc

SEQ ID NO: 177143 - DNA, 25 bp, Probe sequence
gacacacaaatatatatcaacgcaa

SEQ ID NO: 177144 - DNA, 25 bp, Probe sequence
gacacattttaggtaaagtgcaggt

SEQ ID NO: 177145 - DNA, 25 bp, Probe sequence
gaggttatgacttcaccatctttta

SEQ ID NO: 177146 - DNA, 25 bp, Probe sequence
gatgaaaccggataactatacagtt

SEQ ID NO: 177147 - DNA, 25 bp, Probe sequence
gattattgccaatttttactacata

SEQ ID NO: 177148 - DNA, 25 bp, Probe sequence
gtatacaatcatcatcttgttcgtc

SEQ ID NO: 177149 - DNA, 25 bp, Probe sequence
gtagctgctttttatggaagtactt

SEQ ID NO: 177150 - DNA, 25 bp, Probe sequence
gtgagcaacgtacaccagtttatgt

SEQ ID NO: 177151 - DNA, 25 bp, Probe sequence
gggatgtgtattagtttatgtagga

SEQ ID NO: 177152 - DNA, 25 bp, Probe sequence
ggagacgtagaggtgatttatcgat

SEQ ID NO: 177153 - DNA, 25 bp, Probe sequence
ggcgacctacatattgacttaacaa

SEQ ID NO: 177154 - DNA, 25 bp, Probe sequence
ggcgcgctattaattgcattcacat

SEQ ID NO: 177155 - DNA, 25 bp, Probe sequence
tgttgatcatttttactgcattaat

SEQ ID NO: 177156 - DNA, 25 bp, Probe sequence
tgacttcaccatcttttattaaaca

SEQ ID NO: 177157 - DNA, 25 bp, Probe sequence
tacttattgtgcgttatttaataca

SEQ ID NO: 177158 - DNA, 25 bp, Probe sequence
tactcgttctattattgggatgtgt

SEQ ID NO: 177159 - DNA, 25 bp, Probe sequence
tacgtatcaacgtttatcggagacg

SEQ ID NO: 177160 - DNA, 25 bp, Probe sequence
tagttgcgacggatgaggttatgac

SEQ ID NO: 177161 - DNA, 25 bp, Probe sequence
ttcaacatggaattggcgacctaca

SEQ ID NO: 177162 - DNA, 25 bp, Probe sequence
attatgcacaaattgaaactcaaat

SEQ ID NO: 177163 - DNA, 25 bp, Probe sequence
atagcaacagaaaaaacatcgtatc

SEQ ID NO: 177164 - DNA, 25 bp, Probe sequence
ataatatcaagcactaccttttaat

SEQ ID NO: 177165 - DNA, 25 bp, Probe sequence
atgaactatgttgaacgttatattg

SEQ ID NO: 177166 - DNA, 25 bp, Probe sequence
agcatattatgcacaaattgaaact

SEQ ID NO: 177167 - DNA, 25 bp, Probe sequence
actcaaattcaacaaacttcaactg

SEQ ID NO: 177168 - DNA, 25 bp, Probe sequence
acagtttttgagagcaacagtaaga

SEQ ID NO: 177169 - DNA, 25 bp, Probe sequence
aaattatatgaacgctgtggcatag

SEQ ID NO: 177170 - DNA, 25 bp, Probe sequence
aaacatcgtatctaataaattatat

SEQ ID NO: 177171 - DNA, 25 bp, Probe sequence
aacttagcaagttaattgacagtct

SEQ ID NO: 177172 - DNA, 25 bp, Probe sequence
aacttcaactgaaaaaatagcaaca

SEQ ID NO: 177173 - DNA, 25 bp, Probe sequence
aactcaaattcaacaaacttcaact

SEQ ID NO: 177174 - DNA, 25 bp, Probe sequence
aataatatcaagcactaccttttaa

SEQ ID NO: 177175 - DNA, 25 bp, Probe sequence
aataaattatatgaacgctgtggca

SEQ ID NO: 177176 - DNA, 25 bp, Probe sequence
aataaagttgaagcatattatgcac

SEQ ID NO: 177177 - DNA, 25 bp, Probe sequence
aattgacagtctaatgctaacatta

SEQ ID NO: 177178 - DNA, 25 bp, Probe sequence
caatgtgcaagagaaatcaataatc

SEQ ID NO: 177179 - DNA, 25 bp, Probe sequence
caaattcaacaaacttcaactgaaa

SEQ ID NO: 177180 - DNA, 25 bp, Probe sequence
cagagttgaataaagttgaagcata

SEQ ID NO: 177181 - DNA, 25 bp, Probe sequence
ctcaaattcaacaaacttcaactga

SEQ ID NO: 177182 - DNA, 25 bp, Probe sequence
gcatttcaaattcaatgtgcaagag

SEQ ID NO: 177183 - DNA, 25 bp, Probe sequence
gcaacagaaaaaacatcgtatctaa

SEQ ID NO: 177184 - DNA, 25 bp, Probe sequence
gcaagttaattgacagtctaatgct

SEQ ID NO: 177185 - DNA, 25 bp, Probe sequence
gaagcatttcaaattcaatgtgcaa

SEQ ID NO: 177186 - DNA, 25 bp, Probe sequence
gaacgttatattgaacagtttttga

SEQ ID NO: 177187 - DNA, 25 bp, Probe sequence
gaactatgttgaacgttatattgaa

SEQ ID NO: 177188 - DNA, 25 bp, Probe sequence
gaaaaaacatcgtatctaataaatt

SEQ ID NO: 177189 - DNA, 25 bp, Probe sequence
gaaataatatcaagcactacctttt

SEQ ID NO: 177190 - DNA, 25 bp, Probe sequence
gagagcaacagtaagaaataatatc

SEQ ID NO: 177191 - DNA, 25 bp, Probe sequence
gttgaacgttatattgaacagtttt

SEQ ID NO: 177192 - DNA, 25 bp, Probe sequence
tgaacagtttttgagagcaacagta

SEQ ID NO: 177193 - DNA, 25 bp, Probe sequence
taatatcaagcactaccttttaatg

SEQ ID NO: 177194 - DNA, 25 bp, Probe sequence
taattgacagtctaatgctaacatt

SEQ ID NO: 177195 - DNA, 25 bp, Probe sequence
tattgaacagtttttgagagcaaca

SEQ ID NO: 177196 - DNA, 25 bp, Probe sequence
attggatacatatgcgctaaagtgc

SEQ ID NO: 177197 - DNA, 25 bp, Probe sequence
atgcaattgcaaaagtaaaaccggg

SEQ ID NO: 177198 - DNA, 25 bp, Probe sequence
atgggcttttgaaacgagcgataaa

SEQ ID NO: 177199 - DNA, 25 bp, Probe sequence
agtgcgcaatacaatgcaagctgca

SEQ ID NO: 177200 - DNA, 25 bp, Probe sequence
agcgataaaagttttgttgctcaaa

SEQ ID NO: 177201 - DNA, 25 bp, Probe sequence
accaggtatcactacgaaagagctt

SEQ ID NO: 177202 - DNA, 25 bp, Probe sequence
aaacttaacaggtcatggtgttggt

SEQ ID NO: 177203 - DNA, 25 bp, Probe sequence
caggcatttcatttgtcgttggaga

SEQ ID NO: 177204 - DNA, 25 bp, Probe sequence
ctgaaggtatggtattagctattga

SEQ ID NO: 177205 - DNA, 25 bp, Probe sequence
cgtttatctcatcaaatgcatcatt

SEQ ID NO: 177206 - DNA, 25 bp, Probe sequence
ccagcacatgtacttaattactttg

SEQ ID NO: 177207 - DNA, 25 bp, Probe sequence
gcggtgcataatacagctagacaaa

SEQ ID NO: 177208 - DNA, 25 bp, Probe sequence
gcaagctgcaaccaaaccaggtatc

SEQ ID NO: 177209 - DNA, 25 bp, Probe sequence
gcaaccaaaccaggtatcactacga

SEQ ID NO: 177210 - DNA, 25 bp, Probe sequence
gaatggctattatgcagatacaggc

SEQ ID NO: 177211 - DNA, 25 bp, Probe sequence
gaagaggtggcacatgggattccaa

SEQ ID NO: 177212 - DNA, 25 bp, Probe sequence
gaaccgtttatctcatcaaatgcat

SEQ ID NO: 177213 - DNA, 25 bp, Probe sequence
gaaagagcttgataatattgcgaaa

SEQ ID NO: 177214 - DNA, 25 bp, Probe sequence
gacgtagcaacgatggcatttgaga

SEQ ID NO: 177215 - DNA, 25 bp, Probe sequence
gaggtggcacatgggattccaagta

SEQ ID NO: 177216 - DNA, 25 bp, Probe sequence
gatacaggcatttcatttgtcgttg

SEQ ID NO: 177217 - DNA, 25 bp, Probe sequence
gttatcgtgactaaggatggtccga

SEQ ID NO: 177218 - DNA, 25 bp, Probe sequence
gtatgtgacgtagcaacgatggcat

SEQ ID NO: 177219 - DNA, 25 bp, Probe sequence
gtaacattggtaaagcggtgcataa

SEQ ID NO: 177220 - DNA, 25 bp, Probe sequence
gtaagcgtgtcattcgtgaaggaga

SEQ ID NO: 177221 - DNA, 25 bp, Probe sequence
gtcattcgtgaaggagatttagtaa

SEQ ID NO: 177222 - DNA, 25 bp, Probe sequence
ggtgttggtttatcattacatgaag

SEQ ID NO: 177223 - DNA, 25 bp, Probe sequence
ggtcatggtgttggtttatcattac

SEQ ID NO: 177224 - DNA, 25 bp, Probe sequence
ggattccaagtaagcgtgtcattcg

SEQ ID NO: 177225 - DNA, 25 bp, Probe sequence
tgaaaattttcctggtcaaacgtgt

SEQ ID NO: 177226 - DNA, 25 bp, Probe sequence
taaggatggtccgattttaacgaca

SEQ ID NO: 177227 - DNA, 25 bp, Probe sequence
tagctattgaaccgtttatctcatc

SEQ ID NO: 177228 - DNA, 25 bp, Probe sequence
tttcatttgtcgttggagaatcaga

SEQ ID NO: 177229 - DNA, 25 bp, Probe sequence
ttcctggtcaaacgtgtattagtgt

SEQ ID NO: 177230 - DNA, 25 bp, Probe sequence
attgattttgattctggtttaaggc

SEQ ID NO: 177231 - DNA, 25 bp, Probe sequence
atttcgacactagtgcaactttcga

SEQ ID NO: 177232 - DNA, 25 bp, Probe sequence
atatattttatagaacctgatttac

SEQ ID NO: 177233 - DNA, 25 bp, Probe sequence
atcaagaactgctttgtatttatat

SEQ ID NO: 177234 - DNA, 25 bp, Probe sequence
agatgcatcttatttacatagcaaa

SEQ ID NO: 177235 - DNA, 25 bp, Probe sequence
agcaaaacatcgataacatttattt

SEQ ID NO: 177236 - DNA, 25 bp, Probe sequence
actgctttgtatttatattgatttt

SEQ ID NO: 177237 - DNA, 25 bp, Probe sequence
actagtgcaactttcgaagatcaag

SEQ ID NO: 177238 - DNA, 25 bp, Probe sequence
acactagtgcaactttcgaagatca

SEQ ID NO: 177239 - DNA, 25 bp, Probe sequence
aagaactgctttgtatttatattga

SEQ ID NO: 177240 - DNA, 25 bp, Probe sequence
aatttattatttcgacactagtgca

SEQ ID NO: 177241 - DNA, 25 bp, Probe sequence
caaaacatcgataacatttatttta

SEQ ID NO: 177242 - DNA, 25 bp, Probe sequence
cactagtgcaactttcgaagatcaa

SEQ ID NO: 177243 - DNA, 25 bp, Probe sequence
gcatcttatttacatagcaaaacat

SEQ ID NO: 177244 - DNA, 25 bp, Probe sequence
gaactgctttgtatttatattgatt

SEQ ID NO: 177245 - DNA, 25 bp, Probe sequence
gacactagtgcaactttcgaagatc

SEQ ID NO: 177246 - DNA, 25 bp, Probe sequence
gattttaatcaagaactgctttgta

SEQ ID NO: 177247 - DNA, 25 bp, Probe sequence
gattttgattctggtttaaggcatt

SEQ ID NO: 177248 - DNA, 25 bp, Probe sequence
gattctggtttaaggcattcaaaca

SEQ ID NO: 177249 - DNA, 25 bp, Probe sequence
gtatttatattgattttgattctgg

SEQ ID NO: 177250 - DNA, 25 bp, Probe sequence
tctggtttaaggcattcaaacatgg

SEQ ID NO: 177251 - DNA, 25 bp, Probe sequence
tcgacactagtgcaactttcgaaga

SEQ ID NO: 177252 - DNA, 25 bp, Probe sequence
tcttatttacatagcaaaacatcga

SEQ ID NO: 177253 - DNA, 25 bp, Probe sequence
taatcaagaactgctttgtatttat

SEQ ID NO: 177254 - DNA, 25 bp, Probe sequence
tacatagcaaaacatcgataacatt

SEQ ID NO: 177255 - DNA, 25 bp, Probe sequence
tagtgcaactttcgaagatcaagaa

SEQ ID NO: 177256 - DNA, 25 bp, Probe sequence
tatttcgacactagtgcaactttcg

SEQ ID NO: 177257 - DNA, 25 bp, Probe sequence
tattatttcgacactagtgcaactt

SEQ ID NO: 177258 - DNA, 25 bp, Probe sequence
ttttgattctggtttaaggcattca

SEQ ID NO: 177259 - DNA, 25 bp, Probe sequence
tttcgacactagtgcaactttcgaa

SEQ ID NO: 177260 - DNA, 25 bp, Probe sequence
tttattatttcgacactagtgcaac

SEQ ID NO: 177261 - DNA, 25 bp, Probe sequence
ttatttcgacactagtgcaactttc

SEQ ID NO: 177262 - DNA, 25 bp, Probe sequence
ttatagaacctgatttacattttac

SEQ ID NO: 177263 - DNA, 25 bp, Probe sequence
ttatattgattttgattctggttta

SEQ ID NO: 177264 - DNA, 25 bp, Probe sequence
attgatgtgtgtttttttgttctag

SEQ ID NO: 177265 - DNA, 25 bp, Probe sequence
atacaatgagtatctatcctagaat

SEQ ID NO: 177266 - DNA, 25 bp, Probe sequence
atctatcctagaattatcaatagta

SEQ ID NO: 177267 - DNA, 25 bp, Probe sequence
atgagtatctatcctagaattatca

SEQ ID NO: 177268 - DNA, 25 bp, Probe sequence
atgtgtgtttttttgttctagtgaa

SEQ ID NO: 177269 - DNA, 25 bp, Probe sequence
agtatctatcctagaattatcaata

SEQ ID NO: 177270 - DNA, 25 bp, Probe sequence
acaaccaaattgatgtgtgtttttt

SEQ ID NO: 177271 - DNA, 25 bp, Probe sequence
acaatgagtatctatcctagaatta

SEQ ID NO: 177272 - DNA, 25 bp, Probe sequence
aaattgatgtgtgtttttttgttct

SEQ ID NO: 177273 - DNA, 25 bp, Probe sequence
aatgagtatctatcctagaattatc

SEQ ID NO: 177274 - DNA, 25 bp, Probe sequence
aattgatgtgtgtttttttgttcta

SEQ ID NO: 177275 - DNA, 25 bp, Probe sequence
caatagtaatggtgattatgcaaca

SEQ ID NO: 177276 - DNA, 25 bp, Probe sequence
caatgagtatctatcctagaattat

SEQ ID NO: 177277 - DNA, 25 bp, Probe sequence
caaccaaattgatgtgtgttttttt

SEQ ID NO: 177278 - DNA, 25 bp, Probe sequence
gagtatctatcctagaattatcaat

SEQ ID NO: 177279 - DNA, 25 bp, Probe sequence
gatgtgtgtttttttgttctagtga

SEQ ID NO: 177280 - DNA, 25 bp, Probe sequence
gtatctatcctagaattatcaatag

SEQ ID NO: 177281 - DNA, 25 bp, Probe sequence
gtgtttttttgttctagtgaataat

SEQ ID NO: 177282 - DNA, 25 bp, Probe sequence
gtgtgtttttttgttctagtgaata

SEQ ID NO: 177283 - DNA, 25 bp, Probe sequence
ggatggaaacaaccaaattgatgtg

SEQ ID NO: 177284 - DNA, 25 bp, Probe sequence
ggaaacaaccaaattgatgtgtgtt

SEQ ID NO: 177285 - DNA, 25 bp, Probe sequence
tggaaacaaccaaattgatgtgtgt

SEQ ID NO: 177286 - DNA, 25 bp, Probe sequence
tgtgtgtttttttgttctagtgaat

SEQ ID NO: 177287 - DNA, 25 bp, Probe sequence
tgtgtttttttgttctagtgaataa

SEQ ID NO: 177288 - DNA, 25 bp, Probe sequence
tgtttttttgttctagtgaataatt

SEQ ID NO: 177289 - DNA, 25 bp, Probe sequence
tgatgtgtgtttttttgttctagtg

SEQ ID NO: 177290 - DNA, 25 bp, Probe sequence
tgagtatctatcctagaattatcaa

SEQ ID NO: 177291 - DNA, 25 bp, Probe sequence
tacaatgagtatctatcctagaatt

SEQ ID NO: 177292 - DNA, 25 bp, Probe sequence
tatcctagaattatcaatagtaatg

SEQ ID NO: 177293 - DNA, 25 bp, Probe sequence
tatacaatgagtatctatcctagaa

SEQ ID NO: 177294 - DNA, 25 bp, Probe sequence
tattatacaatgagtatctatccta

SEQ ID NO: 177295 - DNA, 25 bp, Probe sequence
tttttgttctagtgaataattatta

SEQ ID NO: 177296 - DNA, 25 bp, Probe sequence
ttatacaatgagtatctatcctaga

SEQ ID NO: 177297 - DNA, 25 bp, Probe sequence
ttgatgtgtgtttttttgttctagt

SEQ ID NO: 177298 - DNA, 25 bp, Probe sequence
attccgtttgagcctaaagaaatag

SEQ ID NO: 177299 - DNA, 25 bp, Probe sequence
attttctttatcggtggtggaagtg

SEQ ID NO: 177300 - DNA, 25 bp, Probe sequence
atttgtggaggctatcaatttttag

SEQ ID NO: 177301 - DNA, 25 bp, Probe sequence
atattattgctttaagacaacgtgc

SEQ ID NO: 177302 - DNA, 25 bp, Probe sequence
atatcacgcctgatggtacagaatt

SEQ ID NO: 177303 - DNA, 25 bp, Probe sequence
atgcatgaattgactatttatcatt

SEQ ID NO: 177304 - DNA, 25 bp, Probe sequence
aaatcacggtggtagaacatatcat

SEQ ID NO: 177305 - DNA, 25 bp, Probe sequence
aaagtgatacttttggaactattgt

SEQ ID NO: 177306 - DNA, 25 bp, Probe sequence
aaaatatatcacgcctgatggtaca

SEQ ID NO: 177307 - DNA, 25 bp, Probe sequence
aagacaccacttaaagaagcgattg

SEQ ID NO: 177308 - DNA, 25 bp, Probe sequence
aagttaatgtcgtagaaatcaatga

SEQ ID NO: 177309 - DNA, 25 bp, Probe sequence
aaggtattacctttgatgaatgtga

SEQ ID NO: 177310 - DNA, 25 bp, Probe sequence
aatagacagagcaaatagacagaag

SEQ ID NO: 177311 - DNA, 25 bp, Probe sequence
caagcgaaacaagtattaatagaca

SEQ ID NO: 177312 - DNA, 25 bp, Probe sequence
gcgattgaagatggtatgccgggat

SEQ ID NO: 177313 - DNA, 25 bp, Probe sequence
gaatgtgatattttctttatcggtg

SEQ ID NO: 177314 - DNA, 25 bp, Probe sequence
gaagcgattgaagatggtatgccgg

SEQ ID NO: 177315 - DNA, 25 bp, Probe sequence
gacaaaccgattaacaggagatatt

SEQ ID NO: 177316 - DNA, 25 bp, Probe sequence
gactatttatcattttatgtcagat

SEQ ID NO: 177317 - DNA, 25 bp, Probe sequence
gagaacaagcattagcaacaaaaga

SEQ ID NO: 177318 - DNA, 25 bp, Probe sequence
gagatattgttatcgaaagtgatac

SEQ ID NO: 177319 - DNA, 25 bp, Probe sequence
gatggtacagaattagaagggttag

SEQ ID NO: 177320 - DNA, 25 bp, Probe sequence
gatacttttggaactattgtaggtt

SEQ ID NO: 177321 - DNA, 25 bp, Probe sequence
gtattacctttgatgaatgtgatat

SEQ ID NO: 177322 - DNA, 25 bp, Probe sequence
gtgatattttctttatcggtggtgg

SEQ ID NO: 177323 - DNA, 25 bp, Probe sequence
gtgatagagaacaagcattagcaac

SEQ ID NO: 177324 - DNA, 25 bp, Probe sequence
ggtattttagatttttatactgaat

SEQ ID NO: 177325 - DNA, 25 bp, Probe sequence
tgtaggttttgaaaatcacggtggt

SEQ ID NO: 177326 - DNA, 25 bp, Probe sequence
tcggtggtggaagtgatagagaaca

SEQ ID NO: 177327 - DNA, 25 bp, Probe sequence
tcacgcctgatggtacagaattaga

SEQ ID NO: 177328 - DNA, 25 bp, Probe sequence
tagaaaaagcttgtgaacgtaaggg

SEQ ID NO: 177329 - DNA, 25 bp, Probe sequence
tatactgaatcaaagacaaaccgat

SEQ ID NO: 177330 - DNA, 25 bp, Probe sequence
ttatctgttagaaaaagcttgtgaa

SEQ ID NO: 177331 - DNA, 25 bp, Probe sequence
ttgaagatggtatgccgggattaac

SEQ ID NO: 177332 - DNA, 25 bp, Probe sequence
attttaaacactcaagctcatgcac

SEQ ID NO: 177333 - DNA, 25 bp, Probe sequence
atcaatctgcttcgttaattcgttc

SEQ ID NO: 177334 - DNA, 25 bp, Probe sequence
atctgcttcgttaattcgttcaaac

SEQ ID NO: 177335 - DNA, 25 bp, Probe sequence
atggatcaatctgcttcgttaattc

SEQ ID NO: 177336 - DNA, 25 bp, Probe sequence
actcaagctcatgcacgtcttgatc

SEQ ID NO: 177337 - DNA, 25 bp, Probe sequence
acactcaagctcatgcacgtcttga

SEQ ID NO: 177338 - DNA, 25 bp, Probe sequence
acaatggatcaatctgcttcgttaa

SEQ ID NO: 177339 - DNA, 25 bp, Probe sequence
aaacaatggatcaatctgcttcgtt

SEQ ID NO: 177340 - DNA, 25 bp, Probe sequence
aacactcaagctcatgcacgtcttg

SEQ ID NO: 177341 - DNA, 25 bp, Probe sequence
aacaatggatcaatctgcttcgtta

SEQ ID NO: 177342 - DNA, 25 bp, Probe sequence
aagctattcaaacaatggatcaatc

SEQ ID NO: 177343 - DNA, 25 bp, Probe sequence
aagggcaagctattcaaacaatgga

SEQ ID NO: 177344 - DNA, 25 bp, Probe sequence
aatggatcaatctgcttcgttaatt

SEQ ID NO: 177345 - DNA, 25 bp, Probe sequence
aatctgcttcgttaattcgttcaaa

SEQ ID NO: 177346 - DNA, 25 bp, Probe sequence
caatggatcaatctgcttcgttaat

SEQ ID NO: 177347 - DNA, 25 bp, Probe sequence
caatctgcttcgttaattcgttcaa

SEQ ID NO: 177348 - DNA, 25 bp, Probe sequence
caaacaatggatcaatctgcttcgt

SEQ ID NO: 177349 - DNA, 25 bp, Probe sequence
cactcaagctcatgcacgtcttgat

SEQ ID NO: 177350 - DNA, 25 bp, Probe sequence
ctcaagctcatgcacgtcttgatca

SEQ ID NO: 177351 - DNA, 25 bp, Probe sequence
ctgcttcgttaattcgttcaaactt

SEQ ID NO: 177352 - DNA, 25 bp, Probe sequence
gcaagctattcaaacaatggatcaa

SEQ ID NO: 177353 - DNA, 25 bp, Probe sequence
gaagggcaagctattcaaacaatgg

SEQ ID NO: 177354 - DNA, 25 bp, Probe sequence
gaacgaaaatgaagggcaagctatt

SEQ ID NO: 177355 - DNA, 25 bp, Probe sequence
gatcaatctgcttcgttaattcgtt

SEQ ID NO: 177356 - DNA, 25 bp, Probe sequence
gggcaagctattcaaacaatggatc

SEQ ID NO: 177357 - DNA, 25 bp, Probe sequence
ggatcaatctgcttcgttaattcgt

SEQ ID NO: 177358 - DNA, 25 bp, Probe sequence
tggatcaatctgcttcgttaattcg

SEQ ID NO: 177359 - DNA, 25 bp, Probe sequence
tgcttcgttaattcgttcaaactta

SEQ ID NO: 177360 - DNA, 25 bp, Probe sequence
tctgcttcgttaattcgttcaaact

SEQ ID NO: 177361 - DNA, 25 bp, Probe sequence
tcaatctgcttcgttaattcgttca

SEQ ID NO: 177362 - DNA, 25 bp, Probe sequence
taaacactcaagctcatgcacgtct

SEQ ID NO: 177363 - DNA, 25 bp, Probe sequence
tttaaacactcaagctcatgcacgt

SEQ ID NO: 177364 - DNA, 25 bp, Probe sequence
ttttaaacactcaagctcatgcacg

SEQ ID NO: 177365 - DNA, 25 bp, Probe sequence
ttaaacactcaagctcatgcacgtc

SEQ ID NO: 177366 - DNA, 25 bp, Probe sequence
attggtgcatttgtcagtcgcttaa

SEQ ID NO: 177367 - DNA, 25 bp, Probe sequence
aggtgccaaccaggctattgccact

SEQ ID NO: 177368 - DNA, 25 bp, Probe sequence
agacgctataatcaatgcagacttt

SEQ ID NO: 177369 - DNA, 25 bp, Probe sequence
agcacaaaaagcattcggcggaggt

SEQ ID NO: 177370 - DNA, 25 bp, Probe sequence
agacaatgccaattactttttatct

SEQ ID NO: 177371 - DNA, 25 bp, Probe sequence
actgctgcaggcgacacatttattg

SEQ ID NO: 177372 - DNA, 25 bp, Probe sequence
cacaattagaagtacccatcccggc

SEQ ID NO: 177373 - DNA, 25 bp, Probe sequence
aaaacacggcgcgcaagcatctatt

SEQ ID NO: 177374 - DNA, 25 bp, Probe sequence
aagactgttttgattacgctaggta

SEQ ID NO: 177375 - DNA, 25 bp, Probe sequence
aattggcactgatggcgttgctgat

SEQ ID NO: 177376 - DNA, 25 bp, Probe sequence
ctcactgtacaaaaacacggcgcgc

SEQ ID NO: 177377 - DNA, 25 bp, Probe sequence
ccatcccggctattatatctgcatt

SEQ ID NO: 177378 - DNA, 25 bp, Probe sequence
gccaacacatcgaagcttataaagt

SEQ ID NO: 177379 - DNA, 25 bp, Probe sequence
gcgaatatgacgatgacacctgaag

SEQ ID NO: 177380 - DNA, 25 bp, Probe sequence
gcgattgatacaactgctgcaggcg

SEQ ID NO: 177381 - DNA, 25 bp, Probe sequence
gcagactttgtcgttgcacaattag

SEQ ID NO: 177382 - DNA, 25 bp, Probe sequence
gcagaaggacaaaacaccatctatg

SEQ ID NO: 177383 - DNA, 25 bp, Probe sequence
gcaccagcgaaagcattacctaatg

SEQ ID NO: 177384 - DNA, 25 bp, Probe sequence
gcacaaccaggcgaaacattacatg

SEQ ID NO: 177385 - DNA, 25 bp, Probe sequence
gcaagcagacacaacatttattact

SEQ ID NO: 177386 - DNA, 25 bp, Probe sequence
gcaagcatctattcctctactagaa

SEQ ID NO: 177387 - DNA, 25 bp, Probe sequence
gaagccgaattgttatctgggatta

SEQ ID NO: 177388 - DNA, 25 bp, Probe sequence
gtattaaatcctgcaccagcgaaag

SEQ ID NO: 177389 - DNA, 25 bp, Probe sequence
gtcagtcgcttaaacaagtcgcaag

SEQ ID NO: 177390 - DNA, 25 bp, Probe sequence
gtgccaaacgaaacagaagccgaat

SEQ ID NO: 177391 - DNA, 25 bp, Probe sequence
ggttcaacgaatgtcgatcaatttt

SEQ ID NO: 177392 - DNA, 25 bp, Probe sequence
ggcggaggtaaaggtgccaaccagg

SEQ ID NO: 177393 - DNA, 25 bp, Probe sequence
ggccaagcctttatcactgtgaatg

SEQ ID NO: 177394 - DNA, 25 bp, Probe sequence
ggcgttgctgatttcatcttagaag

SEQ ID NO: 177395 - DNA, 25 bp, Probe sequence
taaagcgagctcactcactgtacaa

SEQ ID NO: 177396 - DNA, 25 bp, Probe sequence
ttgccaaggcacatggtgtgacgac

SEQ ID NO: 177397 - DNA, 25 bp, Probe sequence
tagcagatgctattgattttggtaa

SEQ ID NO: 177398 - DNA, 25 bp, Probe sequence
tatctgcatttgaaattgccaaggc

SEQ ID NO: 177399 - DNA, 25 bp, Probe sequence
ttaatcgatattattgtgccaaacg

SEQ ID NO: 177400 - DNA, 25 bp, Probe sequence
atttcgctaaatgataacgctgcag

SEQ ID NO: 177401 - DNA, 25 bp, Probe sequence
atccatctagcgaaattggcgcgta

SEQ ID NO: 177402 - DNA, 25 bp, Probe sequence
actgtcagtgtggtttcaaacgaga

SEQ ID NO: 177403 - DNA, 25 bp, Probe sequence
actatacatcattagcgcctatgct

SEQ ID NO: 177404 - DNA, 25 bp, Probe sequence
acaggtacacgagcagaagaacttc

SEQ ID NO: 177405 - DNA, 25 bp, Probe sequence
aaagcaacggcaaagactatggatt

SEQ ID NO: 177406 - DNA, 25 bp, Probe sequence
aaaagtgtatgttatttcgctaaat

SEQ ID NO: 177407 - DNA, 25 bp, Probe sequence
aacgctgcagatggtcgagatactt

SEQ ID NO: 177408 - DNA, 25 bp, Probe sequence
aagttacaccttcaatgatggtatt

SEQ ID NO: 177409 - DNA, 25 bp, Probe sequence
aaggtttcacagttgcaataccaaa

SEQ ID NO: 177410 - DNA, 25 bp, Probe sequence
aattggtcattatcactgtcagtgt

SEQ ID NO: 177411 - DNA, 25 bp, Probe sequence
caacgacttcaaacttaattggaca

SEQ ID NO: 177412 - DNA, 25 bp, Probe sequence
caaactgtggtcgcttattgcaata

SEQ ID NO: 177413 - DNA, 25 bp, Probe sequence
gcgcctatgcttgaacaattaaacc

SEQ ID NO: 177414 - DNA, 25 bp, Probe sequence
gcgattgaagttagcagaggttgaa

SEQ ID NO: 177415 - DNA, 25 bp, Probe sequence
gcttataacgcgttagcagcatata

SEQ ID NO: 177416 - DNA, 25 bp, Probe sequence
gcattcatcatgcaatcaacaccta

SEQ ID NO: 177417 - DNA, 25 bp, Probe sequence
gcaggtgactttaacgcttataacg

SEQ ID NO: 177418 - DNA, 25 bp, Probe sequence
gcaagtgatacgattgtgtactatg

SEQ ID NO: 177419 - DNA, 25 bp, Probe sequence
gaaggttcgattccacgtgtgttaa

SEQ ID NO: 177420 - DNA, 25 bp, Probe sequence
gaaggtgctaatatggctgcaggta

SEQ ID NO: 177421 - DNA, 25 bp, Probe sequence
gaagtaccaattatagttgagcgtg

SEQ ID NO: 177422 - DNA, 25 bp, Probe sequence
gaagctatcatcgtgacaggtacac

SEQ ID NO: 177423 - DNA, 25 bp, Probe sequence
gacaatggtcgtatgcagtacttta

SEQ ID NO: 177424 - DNA, 25 bp, Probe sequence
gacagtggacggcaatccatctagc

SEQ ID NO: 177425 - DNA, 25 bp, Probe sequence
gagtcgtttgaaaatcgcaagtgat

SEQ ID NO: 177426 - DNA, 25 bp, Probe sequence
gaggaacagatttacctggacaaat

SEQ ID NO: 177427 - DNA, 25 bp, Probe sequence
gatgatccatttgtgagtcgtttga

SEQ ID NO: 177428 - DNA, 25 bp, Probe sequence
gatattgtccaaactgtggtcgctt

SEQ ID NO: 177429 - DNA, 25 bp, Probe sequence
gttgcaataccaaactatacatcat

SEQ ID NO: 177430 - DNA, 25 bp, Probe sequence
ggtcgagatacttcatggatttatg

SEQ ID NO: 177431 - DNA, 25 bp, Probe sequence
ggctttgaaacgtatacatcagaca

SEQ ID NO: 177432 - DNA, 25 bp, Probe sequence
tggcgcgtaaagcaagtagagcagt

SEQ ID NO: 177433 - DNA, 25 bp, Probe sequence
tttacctggacaaatcgctagaaaa

SEQ ID NO: 177434 - DNA, 25 bp, Probe sequence
atctagtgatctccgtaaagcaaaa

SEQ ID NO: 177435 - DNA, 25 bp, Probe sequence
atgaatctagtgatctccgtaaagc

SEQ ID NO: 177436 - DNA, 25 bp, Probe sequence
atgaaaaaacgcagatcaatgattc

SEQ ID NO: 177437 - DNA, 25 bp, Probe sequence
agaaaatgaatctagtgatctccgt

SEQ ID NO: 177438 - DNA, 25 bp, Probe sequence
acgcagatcaatgattcagaaaatg

SEQ ID NO: 177439 - DNA, 25 bp, Probe sequence
aaatgaaaaaacgcagatcaatgat

SEQ ID NO: 177440 - DNA, 25 bp, Probe sequence
aaatgaatctagtgatctccgtaaa

SEQ ID NO: 177441 - DNA, 25 bp, Probe sequence
aaacgcagatcaatgattcagaaaa

SEQ ID NO: 177442 - DNA, 25 bp, Probe sequence
aaaaacgcagatcaatgattcagaa

SEQ ID NO: 177443 - DNA, 25 bp, Probe sequence
aaaaaacgcagatcaatgattcaga

SEQ ID NO: 177444 - DNA, 25 bp, Probe sequence
aaaacgcagatcaatgattcagaaa

SEQ ID NO: 177445 - DNA, 25 bp, Probe sequence
aaaatgaaaaaacgcagatcaatga

SEQ ID NO: 177446 - DNA, 25 bp, Probe sequence
aaaatgaatctagtgatctccgtaa

SEQ ID NO: 177447 - DNA, 25 bp, Probe sequence
aacgcagatcaatgattcagaaaat

SEQ ID NO: 177448 - DNA, 25 bp, Probe sequence
aatgaatctagtgatctccgtaaag

SEQ ID NO: 177449 - DNA, 25 bp, Probe sequence
aatgaaaaaacgcagatcaatgatt

SEQ ID NO: 177450 - DNA, 25 bp, Probe sequence
aatctagtgatctccgtaaagcaaa

SEQ ID NO: 177451 - DNA, 25 bp, Probe sequence
cagaaaatgaatctagtgatctccg

SEQ ID NO: 177452 - DNA, 25 bp, Probe sequence
cgcagatcaatgattcagaaaatga

SEQ ID NO: 177453 - DNA, 25 bp, Probe sequence
gcagatcaatgattcagaaaatgaa

SEQ ID NO: 177454 - DNA, 25 bp, Probe sequence
gaatctagtgatctccgtaaagcaa

SEQ ID NO: 177455 - DNA, 25 bp, Probe sequence
gaaaatgaatctagtgatctccgta

SEQ ID NO: 177456 - DNA, 25 bp, Probe sequence
gaaaatgaaaaaacgcagatcaatg

SEQ ID NO: 177457 - DNA, 25 bp, Probe sequence
gaaaaaacgcagatcaatgattcag

SEQ ID NO: 177458 - DNA, 25 bp, Probe sequence
tgaaaaaacgcagatcaatgattca

SEQ ID NO: 177459 - DNA, 25 bp, Probe sequence
tgaatctagtgatctccgtaaagca

SEQ ID NO: 177460 - DNA, 25 bp, Probe sequence
tcagaaaatgaatctagtgatctcc

SEQ ID NO: 177461 - DNA, 25 bp, Probe sequence
attagtgagaccagaccttcctgct

SEQ ID NO: 177462 - DNA, 25 bp, Probe sequence
atattgcatatttactttataacga

SEQ ID NO: 177463 - DNA, 25 bp, Probe sequence
atgcctatgtcacaagcgcataaat

SEQ ID NO: 177464 - DNA, 25 bp, Probe sequence
atgtccaaatggatactttgtcaca

SEQ ID NO: 177465 - DNA, 25 bp, Probe sequence
agtagggactgaacgcacatttgca

SEQ ID NO: 177466 - DNA, 25 bp, Probe sequence
agcatctgcaggtgtttcttataac

SEQ ID NO: 177467 - DNA, 25 bp, Probe sequence
acgcggtattgaccatagtgaagtg

SEQ ID NO: 177468 - DNA, 25 bp, Probe sequence
acgcacatttgcaacagacgtgaat

SEQ ID NO: 177469 - DNA, 25 bp, Probe sequence
acaaggcacgcggtattgaccatag

SEQ ID NO: 177470 - DNA, 25 bp, Probe sequence
aagatattctagagcagacacattt

SEQ ID NO: 177471 - DNA, 25 bp, Probe sequence
aattcgacttattggtgtcactgta

SEQ ID NO: 177472 - DNA, 25 bp, Probe sequence
cagataaggtagaaccgatgtcatt

SEQ ID NO: 177473 - DNA, 25 bp, Probe sequence
ctgcgcagattatgtctattttccg

SEQ ID NO: 177474 - DNA, 25 bp, Probe sequence
gcgtccattcagcaatgcctatgtc

SEQ ID NO: 177475 - DNA, 25 bp, Probe sequence
gcgagtggtatgaataaacctgatg

SEQ ID NO: 177476 - DNA, 25 bp, Probe sequence
gcttcgaaaattgctcagtatatta

SEQ ID NO: 177477 - DNA, 25 bp, Probe sequence
gaagcacgaaaatacggcgtccatt

SEQ ID NO: 177478 - DNA, 25 bp, Probe sequence
gaagcgtatttagatattacagaat

SEQ ID NO: 177479 - DNA, 25 bp, Probe sequence
gaaaatacggcgtccattcagcaat

SEQ ID NO: 177480 - DNA, 25 bp, Probe sequence
gacacatttaacagcatctgcaggt

SEQ ID NO: 177481 - DNA, 25 bp, Probe sequence
gaccttcctgcttcgaaaattgctc

SEQ ID NO: 177482 - DNA, 25 bp, Probe sequence
gatgacattggatattggagatttt

SEQ ID NO: 177483 - DNA, 25 bp, Probe sequence
gataatggtatttttaacggtagag

SEQ ID NO: 177484 - DNA, 25 bp, Probe sequence
gatatggactatttttttgcacaag

SEQ ID NO: 177485 - DNA, 25 bp, Probe sequence
gtcggggtttatataacaaggcacg

SEQ ID NO: 177486 - DNA, 25 bp, Probe sequence
gtcacaagtaattttggtgcttacc

SEQ ID NO: 177487 - DNA, 25 bp, Probe sequence
gtccatgatattttgatgacattgg

SEQ ID NO: 177488 - DNA, 25 bp, Probe sequence
ggtgtcactgtaggtaatttagaac

SEQ ID NO: 177489 - DNA, 25 bp, Probe sequence
ggtgcttaccgagaaacatctgcgc

SEQ ID NO: 177490 - DNA, 25 bp, Probe sequence
ggtaaaacagctgaacgtctaaata

SEQ ID NO: 177491 - DNA, 25 bp, Probe sequence
tggagattttccaggcgtaggtaaa

SEQ ID NO: 177492 - DNA, 25 bp, Probe sequence
tccaggcgtaggtaaagcttccaaa

SEQ ID NO: 177493 - DNA, 25 bp, Probe sequence
tcagcaatgcctatgtcacaagcgc

SEQ ID NO: 177494 - DNA, 25 bp, Probe sequence
ttaccgagaaacatctgcgcagatt

SEQ ID NO: 177495 - DNA, 25 bp, Probe sequence
atcagatagaatgggcacgcttgga

SEQ ID NO: 177496 - DNA, 25 bp, Probe sequence
atgacgctactcgaactggtggaat

SEQ ID NO: 177497 - DNA, 25 bp, Probe sequence
agtagaactaaacgatattgaaggt

SEQ ID NO: 177498 - DNA, 25 bp, Probe sequence
agatgacgctactcgaactggtgga

SEQ ID NO: 177499 - DNA, 25 bp, Probe sequence
agatatttttactgtagaaatcaca

SEQ ID NO: 177500 - DNA, 25 bp, Probe sequence
actgagtttgattgtctagtagaac

SEQ ID NO: 177501 - DNA, 25 bp, Probe sequence
acttccagagcgttttatatactaa

SEQ ID NO: 177502 - DNA, 25 bp, Probe sequence
aaactatgacattaatttggaaaga

SEQ ID NO: 177503 - DNA, 25 bp, Probe sequence
aagtaaagtgtttcaatcagataga

SEQ ID NO: 177504 - DNA, 25 bp, Probe sequence
ctcgaactggtggaatgggcatgga

SEQ ID NO: 177505 - DNA, 25 bp, Probe sequence
cggtacttccagagcgttttatata

SEQ ID NO: 177506 - DNA, 25 bp, Probe sequence
gctactcgaactggtggaatgggca

SEQ ID NO: 177507 - DNA, 25 bp, Probe sequence
gaatgggcatggaacaatcctgaac

SEQ ID NO: 177508 - DNA, 25 bp, Probe sequence
gaatgggcacgcttggagaatgtag

SEQ ID NO: 177509 - DNA, 25 bp, Probe sequence
gaagtacatttttcaactgatgggc

SEQ ID NO: 177510 - DNA, 25 bp, Probe sequence
gaagatgacgctactcgaactggtg

SEQ ID NO: 177511 - DNA, 25 bp, Probe sequence
gaagatactgagtttgattgtctag

SEQ ID NO: 177512 - DNA, 25 bp, Probe sequence
gaaaaaagaagatgacgctactcga

SEQ ID NO: 177513 - DNA, 25 bp, Probe sequence
gaaatcacagaggaagtcactgaag

SEQ ID NO: 177514 - DNA, 25 bp, Probe sequence
gacggtacttccagagcgttttata

SEQ ID NO: 177515 - DNA, 25 bp, Probe sequence
gacgctactcgaactggtggaatgg

SEQ ID NO: 177516 - DNA, 25 bp, Probe sequence
gagagttgatagacggtacttccag

SEQ ID NO: 177517 - DNA, 25 bp, Probe sequence
gatagaatgggcacgcttggagaat

SEQ ID NO: 177518 - DNA, 25 bp, Probe sequence
gatagacggtacttccagagcgttt

SEQ ID NO: 177519 - DNA, 25 bp, Probe sequence
gttgatagacggtacttccagagcg

SEQ ID NO: 177520 - DNA, 25 bp, Probe sequence
gtagcgaagtacatttttcaactga

SEQ ID NO: 177521 - DNA, 25 bp, Probe sequence
gtacatttttcaactgatgggcatg

SEQ ID NO: 177522 - DNA, 25 bp, Probe sequence
gggcatgggttttatacaaaagtag

SEQ ID NO: 177523 - DNA, 25 bp, Probe sequence
gggcatggaacaatcctgaacaagt

SEQ ID NO: 177524 - DNA, 25 bp, Probe sequence
ggaacaatcctgaacaagttgaaag

SEQ ID NO: 177525 - DNA, 25 bp, Probe sequence
ggaagtcactgaagatactgagttt

SEQ ID NO: 177526 - DNA, 25 bp, Probe sequence
ggcacgcttggagaatgtagcgaag

SEQ ID NO: 177527 - DNA, 25 bp, Probe sequence
tagacggtacttccagagcgtttta

SEQ ID NO: 177528 - DNA, 25 bp, Probe sequence
ttttcaactgatgggcatgggtttt

SEQ ID NO: 177529 - DNA, 25 bp, Probe sequence
atctagtagttttaaatatgttcaa

SEQ ID NO: 177530 - DNA, 25 bp, Probe sequence
atgcgaaggtttattatcttgcaac

SEQ ID NO: 177531 - DNA, 25 bp, Probe sequence
agtgggcgttaggtgtcacagcggt

SEQ ID NO: 177532 - DNA, 25 bp, Probe sequence
aggtatttggttattcatcacttat

SEQ ID NO: 177533 - DNA, 25 bp, Probe sequence
agatattctgcttgttgcattaaca

SEQ ID NO: 177534 - DNA, 25 bp, Probe sequence
aagatagcaaacctatgtttaatat

SEQ ID NO: 177535 - DNA, 25 bp, Probe sequence
aattattatgctgtcaccactaatc

SEQ ID NO: 177536 - DNA, 25 bp, Probe sequence
aattctcaattattatgctgtcacc

SEQ ID NO: 177537 - DNA, 25 bp, Probe sequence
caacttgttattgcgttattcgtga

SEQ ID NO: 177538 - DNA, 25 bp, Probe sequence
ctggcttgcttattttaattaaggt

SEQ ID NO: 177539 - DNA, 25 bp, Probe sequence
gcttcaacaaatggcaattctcaat

SEQ ID NO: 177540 - DNA, 25 bp, Probe sequence
gcttattgctttatagatattctgc

SEQ ID NO: 177541 - DNA, 25 bp, Probe sequence
gcagatgcttgcttcaacaaatggc

SEQ ID NO: 177542 - DNA, 25 bp, Probe sequence
gaacttatccatagagcattatttc

SEQ ID NO: 177543 - DNA, 25 bp, Probe sequence
gacagaatcttattccaaacagcag

SEQ ID NO: 177544 - DNA, 25 bp, Probe sequence
gtatatgggtttgctggattcatta

SEQ ID NO: 177545 - DNA, 25 bp, Probe sequence
gtatttatttgtatcatcaaaagcc

SEQ ID NO: 177546 - DNA, 25 bp, Probe sequence
gtgtcacagcggttgtcgatcaaaa

SEQ ID NO: 177547 - DNA, 25 bp, Probe sequence
ggtttattatcttgcaacttgttat

SEQ ID NO: 177548 - DNA, 25 bp, Probe sequence
ggttgtcgatcaaaatatcatcatc

SEQ ID NO: 177549 - DNA, 25 bp, Probe sequence
ggattcattattttattgattttac

SEQ ID NO: 177550 - DNA, 25 bp, Probe sequence
ggcgttaggtgtcacagcggttgtc

SEQ ID NO: 177551 - DNA, 25 bp, Probe sequence
tgttgcattaacaatatctagtagt

SEQ ID NO: 177552 - DNA, 25 bp, Probe sequence
tccaaacagcagatgcttgcttcaa

SEQ ID NO: 177553 - DNA, 25 bp, Probe sequence
tctcaattattatgctgtcaccact

SEQ ID NO: 177554 - DNA, 25 bp, Probe sequence
tcttgtatatgggtttgctggattc

SEQ ID NO: 177555 - DNA, 25 bp, Probe sequence
tcatcacttatttttatgtttagta

SEQ ID NO: 177556 - DNA, 25 bp, Probe sequence
tacgtataagtgggcgttaggtgtc

SEQ ID NO: 177557 - DNA, 25 bp, Probe sequence
taggtgtcacagcggttgtcgatca

SEQ ID NO: 177558 - DNA, 25 bp, Probe sequence
tatcatcatcaatcttgtatatggg

SEQ ID NO: 177559 - DNA, 25 bp, Probe sequence
tattcgtgattttatttacgtataa

SEQ ID NO: 177560 - DNA, 25 bp, Probe sequence
ttgcgttattcgtgattttatttac

SEQ ID NO: 177561 - DNA, 25 bp, Probe sequence
ttgattttacatgaacttatccata

SEQ ID NO: 177562 - DNA, 25 bp, Probe sequence
ttggttattcatcacttatttttat

SEQ ID NO: 177563 - DNA, 25 bp, Probe sequence
atacaacctagcagcaaaaatttat

SEQ ID NO: 177564 - DNA, 25 bp, Probe sequence
atcaataaaaaactcaatttcgcaa

SEQ ID NO: 177565 - DNA, 25 bp, Probe sequence
atcagcatggcttcgaatcaattca

SEQ ID NO: 177566 - DNA, 25 bp, Probe sequence
atccgattccgctaaaaaagtatca

SEQ ID NO: 177567 - DNA, 25 bp, Probe sequence
aggaagctcaatcatccgattccgc

SEQ ID NO: 177568 - DNA, 25 bp, Probe sequence
aggcgagaaaccaatcagctcaggt

SEQ ID NO: 177569 - DNA, 25 bp, Probe sequence
accaatcagctcaggtgcaattttc

SEQ ID NO: 177570 - DNA, 25 bp, Probe sequence
acattatcaatttttggagtgacac

SEQ ID NO: 177571 - DNA, 25 bp, Probe sequence
aaactcaatttcgcaaaagatttgt

SEQ ID NO: 177572 - DNA, 25 bp, Probe sequence
aaaagtatcagcatggcttcgaatc

SEQ ID NO: 177573 - DNA, 25 bp, Probe sequence
aagtgaatacaacctagcagcaaaa

SEQ ID NO: 177574 - DNA, 25 bp, Probe sequence
aatcagctcaggtgcaattttcagt

SEQ ID NO: 177575 - DNA, 25 bp, Probe sequence
caatcatccgattccgctaaaaaag

SEQ ID NO: 177576 - DNA, 25 bp, Probe sequence
cagaattaactatcgatgatttcga

SEQ ID NO: 177577 - DNA, 25 bp, Probe sequence
ctcaatcatccgattccgctaaaaa

SEQ ID NO: 177578 - DNA, 25 bp, Probe sequence
cgaatcaattcatcaaaaagtttat

SEQ ID NO: 177579 - DNA, 25 bp, Probe sequence
gctcaggtgcaattttcagtaaagt

SEQ ID NO: 177580 - DNA, 25 bp, Probe sequence
gcatggcttcgaatcaattcatcaa

SEQ ID NO: 177581 - DNA, 25 bp, Probe sequence
gcaaaagatttgtcgctaggaagat

SEQ ID NO: 177582 - DNA, 25 bp, Probe sequence
gaaaccaatcagctcaggtgcaatt

SEQ ID NO: 177583 - DNA, 25 bp, Probe sequence
gaaatgctataaaaggcgagaaacc

SEQ ID NO: 177584 - DNA, 25 bp, Probe sequence
gacacttaattcagacttgagtgaa

SEQ ID NO: 177585 - DNA, 25 bp, Probe sequence
gaggaagctcaatcatccgattccg

SEQ ID NO: 177586 - DNA, 25 bp, Probe sequence
gagagtttcagaattaactatcgat

SEQ ID NO: 177587 - DNA, 25 bp, Probe sequence
gagatatcaaaaactattatttata

SEQ ID NO: 177588 - DNA, 25 bp, Probe sequence
gatgttcatgaccatattagaaaat

SEQ ID NO: 177589 - DNA, 25 bp, Probe sequence
gatttgtcgctaggaagattgagga

SEQ ID NO: 177590 - DNA, 25 bp, Probe sequence
gtttatgtacaagatgttcatgacc

SEQ ID NO: 177591 - DNA, 25 bp, Probe sequence
gtacaagatgttcatgaccatatta

SEQ ID NO: 177592 - DNA, 25 bp, Probe sequence
gtcgctaggaagattgaggaagctc

SEQ ID NO: 177593 - DNA, 25 bp, Probe sequence
gtgaaagtgaatacaacctagcagc

SEQ ID NO: 177594 - DNA, 25 bp, Probe sequence
ggagtgacacttaattcagacttga

SEQ ID NO: 177595 - DNA, 25 bp, Probe sequence
tcacgttaaccaaagaagagttgaa

SEQ ID NO: 177596 - DNA, 25 bp, Probe sequence
tcagctcaggtgcaattttcagtaa

SEQ ID NO: 177597 - DNA, 25 bp, Probe sequence
attatgaacgttgtggtgggtgcca

SEQ ID NO: 177598 - DNA, 25 bp, Probe sequence
atcaacttgaagaggtaacaccggt

SEQ ID NO: 177599 - DNA, 25 bp, Probe sequence
agtgagaatcgtgttgcaccgccat

SEQ ID NO: 177600 - DNA, 25 bp, Probe sequence
agtgatcagtcattctaccaaatta

SEQ ID NO: 177601 - DNA, 25 bp, Probe sequence
acaccggtagatatgtttccacaaa

SEQ ID NO: 177602 - DNA, 25 bp, Probe sequence
acaacttttgtctgtgggaaagctg

SEQ ID NO: 177603 - DNA, 25 bp, Probe sequence
aaagaagccatgacattattgacat

SEQ ID NO: 177604 - DNA, 25 bp, Probe sequence
aaaacattaatgatagccactctaa

SEQ ID NO: 177605 - DNA, 25 bp, Probe sequence
aacacttatcatacgaagcacaact

SEQ ID NO: 177606 - DNA, 25 bp, Probe sequence
caagtcccagattccagttggtaag

SEQ ID NO: 177607 - DNA, 25 bp, Probe sequence
caacacagcaacgtgatgcattatt

SEQ ID NO: 177608 - DNA, 25 bp, Probe sequence
caacacatgttgagacagtggcatt

SEQ ID NO: 177609 - DNA, 25 bp, Probe sequence
cagactttgcttacattagaaccta

SEQ ID NO: 177610 - DNA, 25 bp, Probe sequence
cctattttcataccacaagctttaa

SEQ ID NO: 177611 - DNA, 25 bp, Probe sequence
gaacctaagcgtattgtctatattt

SEQ ID NO: 177612 - DNA, 25 bp, Probe sequence
gaacaggatatcatacagacgaaat

SEQ ID NO: 177613 - DNA, 25 bp, Probe sequence
gacgaaacgtttattcagactttgc

SEQ ID NO: 177614 - DNA, 25 bp, Probe sequence
gatccgccaagaaagggctgtgacg

SEQ ID NO: 177615 - DNA, 25 bp, Probe sequence
gagacagtggcattattcaatttga

SEQ ID NO: 177616 - DNA, 25 bp, Probe sequence
gatgttgtaatggttgatccgccaa

SEQ ID NO: 177617 - DNA, 25 bp, Probe sequence
gatgcatttcctaatgtgacaagca

SEQ ID NO: 177618 - DNA, 25 bp, Probe sequence
gatatcgaaacaagtcccagattcc

SEQ ID NO: 177619 - DNA, 25 bp, Probe sequence
gatagccactctaatgttattatgg

SEQ ID NO: 177620 - DNA, 25 bp, Probe sequence
gattaacgatacagttggcatgaca

SEQ ID NO: 177621 - DNA, 25 bp, Probe sequence
gttggcatgacagatccttggagat

SEQ ID NO: 177622 - DNA, 25 bp, Probe sequence
gttattatgggcttttatcgtcaaa

SEQ ID NO: 177623 - DNA, 25 bp, Probe sequence
gtttcagcgaaaagcgcattttgat

SEQ ID NO: 177624 - DNA, 25 bp, Probe sequence
gtgatgcattattattagctgaaaa

SEQ ID NO: 177625 - DNA, 25 bp, Probe sequence
gtgttgcaccgccatgtatatatta

SEQ ID NO: 177626 - DNA, 25 bp, Probe sequence
gtgggtgccaacttcaacacttatc

SEQ ID NO: 177627 - DNA, 25 bp, Probe sequence
ggaacagttgttgatttaacgcatg

SEQ ID NO: 177628 - DNA, 25 bp, Probe sequence
tagatcgctttcctattttcatacc

SEQ ID NO: 177629 - DNA, 25 bp, Probe sequence
tatgcgcaattgacaggtaatgaag

SEQ ID NO: 177630 - DNA, 25 bp, Probe sequence
tattgtctatatttcatgtaatccc

SEQ ID NO: 177631 - DNA, 25 bp, Probe sequence
attcagctttaataggtcgtataat

SEQ ID NO: 177632 - DNA, 25 bp, Probe sequence
attattatctatacccagagaagaa

SEQ ID NO: 177633 - DNA, 25 bp, Probe sequence
ataggtcgtataattgaaaagtatg

SEQ ID NO: 177634 - DNA, 25 bp, Probe sequence
atagatatgcttttgcatacgcgat

SEQ ID NO: 177635 - DNA, 25 bp, Probe sequence
atacgcgataggcttatcagaacga

SEQ ID NO: 177636 - DNA, 25 bp, Probe sequence
atgcttttgcatacgcgataggctt

SEQ ID NO: 177637 - DNA, 25 bp, Probe sequence
atgatgtgttttgattattcagctt

SEQ ID NO: 177638 - DNA, 25 bp, Probe sequence
agctaaagcttgtgaattattatct

SEQ ID NO: 177639 - DNA, 25 bp, Probe sequence
acgcgataggcttatcagaacgaag

SEQ ID NO: 177640 - DNA, 25 bp, Probe sequence
aaattggttggagagattccgaaat

SEQ ID NO: 177641 - DNA, 25 bp, Probe sequence
cagctttaataggtcgtataattga

SEQ ID NO: 177642 - DNA, 25 bp, Probe sequence
cttttgcatacgcgataggcttatc

SEQ ID NO: 177643 - DNA, 25 bp, Probe sequence
cgataggcttatcagaacgaagttt

SEQ ID NO: 177644 - DNA, 25 bp, Probe sequence
gcttttgcatacgcgataggcttat

SEQ ID NO: 177645 - DNA, 25 bp, Probe sequence
gcttatcagaacgaagtttatcttt

SEQ ID NO: 177646 - DNA, 25 bp, Probe sequence
gcttgtgaattattatctataccca

SEQ ID NO: 177647 - DNA, 25 bp, Probe sequence
gcatacgcgataggcttatcagaac

SEQ ID NO: 177648 - DNA, 25 bp, Probe sequence
gaattattatctatacccagagaag

SEQ ID NO: 177649 - DNA, 25 bp, Probe sequence
gagattccgaaatagctaaagcttg

SEQ ID NO: 177650 - DNA, 25 bp, Probe sequence
gatgtgttttgattattcagcttta

SEQ ID NO: 177651 - DNA, 25 bp, Probe sequence
gataaaattggttggagagattccg

SEQ ID NO: 177652 - DNA, 25 bp, Probe sequence
gattattcagctttaataggtcgta

SEQ ID NO: 177653 - DNA, 25 bp, Probe sequence
gtatggtaatagatatgcttttgca

SEQ ID NO: 177654 - DNA, 25 bp, Probe sequence
gtgaattattatctatacccagaga

SEQ ID NO: 177655 - DNA, 25 bp, Probe sequence
gtgttttgattattcagctttaata

SEQ ID NO: 177656 - DNA, 25 bp, Probe sequence
ggttggagagattccgaaatagcta

SEQ ID NO: 177657 - DNA, 25 bp, Probe sequence
ggagagattccgaaatagctaaagc

SEQ ID NO: 177658 - DNA, 25 bp, Probe sequence
tgcttttgcatacgcgataggctta

SEQ ID NO: 177659 - DNA, 25 bp, Probe sequence
tatgcttttgcatacgcgataggct

SEQ ID NO: 177660 - DNA, 25 bp, Probe sequence
tatctatacccagagaagaaataca

SEQ ID NO: 177661 - DNA, 25 bp, Probe sequence
tatcagaacgaagtttatctttaaa

SEQ ID NO: 177662 - DNA, 25 bp, Probe sequence
ttttgcatacgcgataggcttatca

SEQ ID NO: 177663 - DNA, 25 bp, Probe sequence
ttgcatacgcgataggcttatcaga

SEQ ID NO: 177664 - DNA, 25 bp, Probe sequence
ttgtgaattattatctatacccaga

SEQ ID NO: 177665 - DNA, 25 bp, Probe sequence
atttcgggtcaagtacaatcttcta

SEQ ID NO: 177666 - DNA, 25 bp, Probe sequence
ataacttaaaaacagcttcaccaat

SEQ ID NO: 177667 - DNA, 25 bp, Probe sequence
agcggtgaacatatgatttcgggtc

SEQ ID NO: 177668 - DNA, 25 bp, Probe sequence
acattcttgaagttatacattcggt

SEQ ID NO: 177669 - DNA, 25 bp, Probe sequence
acagcttcaccaattttagaaaatc

SEQ ID NO: 177670 - DNA, 25 bp, Probe sequence
aaaaatcttgttggaattgctttca

SEQ ID NO: 177671 - DNA, 25 bp, Probe sequence
caacgtggcatagaaagtttacatg

SEQ ID NO: 177672 - DNA, 25 bp, Probe sequence
caaatttttgaaccatctcattatg

SEQ ID NO: 177673 - DNA, 25 bp, Probe sequence
gaaccagtattaaactacattcttg

SEQ ID NO: 177674 - DNA, 25 bp, Probe sequence
gaaaatcacttagatgacattgtta

SEQ ID NO: 177675 - DNA, 25 bp, Probe sequence
gaaacagctgtgagacatatttatg

SEQ ID NO: 177676 - DNA, 25 bp, Probe sequence
gagagctataatatttcacaggttg

SEQ ID NO: 177677 - DNA, 25 bp, Probe sequence
gatggcgtgacagaggaaatgatga

SEQ ID NO: 177678 - DNA, 25 bp, Probe sequence
gatgcaacggtaatggatggaaact

SEQ ID NO: 177679 - DNA, 25 bp, Probe sequence
gatcatgattttgaagatggcgtga

SEQ ID NO: 177680 - DNA, 25 bp, Probe sequence
gattgtcgaagttgatatccttgaa

SEQ ID NO: 177681 - DNA, 25 bp, Probe sequence
gttgcagtccttatttttgaattaa

SEQ ID NO: 177682 - DNA, 25 bp, Probe sequence
gtacaatcttctaattatttaacta

SEQ ID NO: 177683 - DNA, 25 bp, Probe sequence
gtaatatgttaaccgattgtgtaaa

SEQ ID NO: 177684 - DNA, 25 bp, Probe sequence
gtcgacgaaattgataaaaaccttg

SEQ ID NO: 177685 - DNA, 25 bp, Probe sequence
gtgattatgttcaagaagcttacaa

SEQ ID NO: 177686 - DNA, 25 bp, Probe sequence
gtgtggacaggagattcaatagcga

SEQ ID NO: 177687 - DNA, 25 bp, Probe sequence
gggactcctataaaattaaatctag

SEQ ID NO: 177688 - DNA, 25 bp, Probe sequence
ggatggaaacttatctattaattat

SEQ ID NO: 177689 - DNA, 25 bp, Probe sequence
ggatgcatttagcgcaattgataat

SEQ ID NO: 177690 - DNA, 25 bp, Probe sequence
ggagattcaatagcgagaacgggta

SEQ ID NO: 177691 - DNA, 25 bp, Probe sequence
ggaattgctttcatattttcatcag

SEQ ID NO: 177692 - DNA, 25 bp, Probe sequence
ggctatgggaataaatgtcgacgaa

SEQ ID NO: 177693 - DNA, 25 bp, Probe sequence
tcatcagttgcagtccttatttttg

SEQ ID NO: 177694 - DNA, 25 bp, Probe sequence
tacattcggtagaaacagctgtgag

SEQ ID NO: 177695 - DNA, 25 bp, Probe sequence
taatgtctcatcaagatgcaacggt

SEQ ID NO: 177696 - DNA, 25 bp, Probe sequence
tacatgattcattggataacgtaat

SEQ ID NO: 177697 - DNA, 25 bp, Probe sequence
tatggagagcagataaccgatatta

SEQ ID NO: 177698 - DNA, 25 bp, Probe sequence
tattttcatcagttgcagtccttat

SEQ ID NO: 177699 - DNA, 25 bp, Probe sequence
attaagtctgatggaggcaattctc

SEQ ID NO: 177700 - DNA, 25 bp, Probe sequence
atataagaaaaatccgtctacgtat

SEQ ID NO: 177701 - DNA, 25 bp, Probe sequence
atagtttctacaaaccctgccatgt

SEQ ID NO: 177702 - DNA, 25 bp, Probe sequence
ataagtcaacttctttattagaaca

SEQ ID NO: 177703 - DNA, 25 bp, Probe sequence
atgaattaacaggacaacaagctat

SEQ ID NO: 177704 - DNA, 25 bp, Probe sequence
agtgctaaccaccaagggatgatta

SEQ ID NO: 177705 - DNA, 25 bp, Probe sequence
agatgcagatacacttaaaagctct

SEQ ID NO: 177706 - DNA, 25 bp, Probe sequence
agctattatcttccaaggtacaaat

SEQ ID NO: 177707 - DNA, 25 bp, Probe sequence
accctgccatgttaccaaagtcaat

SEQ ID NO: 177708 - DNA, 25 bp, Probe sequence
actgggcatatcaagatttggacaa

SEQ ID NO: 177709 - DNA, 25 bp, Probe sequence
aatgcttatattaaatcgtatgaac

SEQ ID NO: 177710 - DNA, 25 bp, Probe sequence
catttgccactccgacactaggaaa

SEQ ID NO: 177711 - DNA, 25 bp, Probe sequence
ccaccaagggatgattaacccgaat

SEQ ID NO: 177712 - DNA, 25 bp, Probe sequence
gccactccgacactaggaaaacgag

SEQ ID NO: 177713 - DNA, 25 bp, Probe sequence
gaattaagtggatactgggcatatc

SEQ ID NO: 177714 - DNA, 25 bp, Probe sequence
gaaggttgctgatgattggattgaa

SEQ ID NO: 177715 - DNA, 25 bp, Probe sequence
gaagcaacaatccttttcgtgggaa

SEQ ID NO: 177716 - DNA, 25 bp, Probe sequence
gaaactggtgtgccaacgatggatg

SEQ ID NO: 177717 - DNA, 25 bp, Probe sequence
gacaacaagctattatcttccaagg

SEQ ID NO: 177718 - DNA, 25 bp, Probe sequence
gacaatcctaattctaaaagttttg

SEQ ID NO: 177719 - DNA, 25 bp, Probe sequence
gatacacttaaaagctctgattttt

SEQ ID NO: 177720 - DNA, 25 bp, Probe sequence
gatattttatcttggctgcaggatc

SEQ ID NO: 177721 - DNA, 25 bp, Probe sequence
gattattcagacaatcctaattcta

SEQ ID NO: 177722 - DNA, 25 bp, Probe sequence
gtatcggaagcaacaatccttttcg

SEQ ID NO: 177723 - DNA, 25 bp, Probe sequence
ggaggcaattctcaagggggagcaa

SEQ ID NO: 177724 - DNA, 25 bp, Probe sequence
gtgaatttagaaactggtgtgccaa

SEQ ID NO: 177725 - DNA, 25 bp, Probe sequence
gtgtgccaacgatggatggattagt

SEQ ID NO: 177726 - DNA, 25 bp, Probe sequence
gggggagcaagtgctaaccaccaag

SEQ ID NO: 177727 - DNA, 25 bp, Probe sequence
ggtggtacagatgcaaaagtttttg

SEQ ID NO: 177728 - DNA, 25 bp, Probe sequence
tggctgcaggatccatttgccactc

SEQ ID NO: 177729 - DNA, 25 bp, Probe sequence
tgggaaaatttcaaatctcaaaact

SEQ ID NO: 177730 - DNA, 25 bp, Probe sequence
tacaaaccctgccatgttaccaaag

SEQ ID NO: 177731 - DNA, 25 bp, Probe sequence
tatcttggctgcaggatccatttgc

SEQ ID NO: 177732 - DNA, 25 bp, Probe sequence
ttttcgtgggaaggttgctgatgat

SEQ ID NO: 177733 - DNA, 25 bp, Probe sequence
attcagcaagacctagttacagtaa

SEQ ID NO: 177734 - DNA, 25 bp, Probe sequence
atatataaattcagcaagacctagt

SEQ ID NO: 177735 - DNA, 25 bp, Probe sequence
atataaattcagcaagacctagtta

SEQ ID NO: 177736 - DNA, 25 bp, Probe sequence
ataaattcagcaagacctagttaca

SEQ ID NO: 177737 - DNA, 25 bp, Probe sequence
agtaggagtatttaatcatgaaaaa

SEQ ID NO: 177738 - DNA, 25 bp, Probe sequence
agacctagttacagtaagaaagatt

SEQ ID NO: 177739 - DNA, 25 bp, Probe sequence
agattcaatagaagtaggagtattt

SEQ ID NO: 177740 - DNA, 25 bp, Probe sequence
agcaagacctagttacagtaagaaa

SEQ ID NO: 177741 - DNA, 25 bp, Probe sequence
acctagttacagtaagaaagattca

SEQ ID NO: 177742 - DNA, 25 bp, Probe sequence
aaattcagcaagacctagttacagt

SEQ ID NO: 177743 - DNA, 25 bp, Probe sequence
aaagattcaatagaagtaggagtat

SEQ ID NO: 177744 - DNA, 25 bp, Probe sequence
aagacctagttacagtaagaaagat

SEQ ID NO: 177745 - DNA, 25 bp, Probe sequence
aagattcaatagaagtaggagtatt

SEQ ID NO: 177746 - DNA, 25 bp, Probe sequence
aagtaggagtatttaatcatgaaaa

SEQ ID NO: 177747 - DNA, 25 bp, Probe sequence
aatatataaattcagcaagacctag

SEQ ID NO: 177748 - DNA, 25 bp, Probe sequence
aattcagcaagacctagttacagta

SEQ ID NO: 177749 - DNA, 25 bp, Probe sequence
caagacctagttacagtaagaaaga

SEQ ID NO: 177750 - DNA, 25 bp, Probe sequence
cagcaagacctagttacagtaagaa

SEQ ID NO: 177751 - DNA, 25 bp, Probe sequence
ctagttacagtaagaaagattcaat

SEQ ID NO: 177752 - DNA, 25 bp, Probe sequence
gcaagacctagttacagtaagaaag

SEQ ID NO: 177753 - DNA, 25 bp, Probe sequence
gaaagattcaatagaagtaggagta

SEQ ID NO: 177754 - DNA, 25 bp, Probe sequence
gacctagttacagtaagaaagattc

SEQ ID NO: 177755 - DNA, 25 bp, Probe sequence
gattcaatagaagtaggagtattta

SEQ ID NO: 177756 - DNA, 25 bp, Probe sequence
gttacagtaagaaagattcaataga

SEQ ID NO: 177757 - DNA, 25 bp, Probe sequence
gtttctcttcaaattactgataaat

SEQ ID NO: 177758 - DNA, 25 bp, Probe sequence
gtaggagtatttaatcatgaaaaaa

SEQ ID NO: 177759 - DNA, 25 bp, Probe sequence
tcagcaagacctagttacagtaaga

SEQ ID NO: 177760 - DNA, 25 bp, Probe sequence
taaattcagcaagacctagttacag

SEQ ID NO: 177761 - DNA, 25 bp, Probe sequence
tagttacagtaagaaagattcaata

SEQ ID NO: 177762 - DNA, 25 bp, Probe sequence
taggagtatttaatcatgaaaaaaa

SEQ ID NO: 177763 - DNA, 25 bp, Probe sequence
tataaattcagcaagacctagttac

SEQ ID NO: 177764 - DNA, 25 bp, Probe sequence
tatataaattcagcaagacctagtt

SEQ ID NO: 177765 - DNA, 25 bp, Probe sequence
tttctcttcaaattactgataaata

SEQ ID NO: 177766 - DNA, 25 bp, Probe sequence
ttcagcaagacctagttacagtaag

SEQ ID NO: 177767 - DNA, 25 bp, Probe sequence
atttagctgcaggcggacaattgac

SEQ ID NO: 177768 - DNA, 25 bp, Probe sequence
atcaaaccttgcagaacttggtcat

SEQ ID NO: 177769 - DNA, 25 bp, Probe sequence
atcgtcctaagctaggtgtcattcc

SEQ ID NO: 177770 - DNA, 25 bp, Probe sequence
atcgatactttattaatttagctgc

SEQ ID NO: 177771 - DNA, 25 bp, Probe sequence
atcgcagaaaagcctaatcgtccta

SEQ ID NO: 177772 - DNA, 25 bp, Probe sequence
atgactttggacgtgcattgcatat

SEQ ID NO: 177773 - DNA, 25 bp, Probe sequence
aggtgtcattcctatgggtactgtt

SEQ ID NO: 177774 - DNA, 25 bp, Probe sequence
agatgacggctattttacgttaatt

SEQ ID NO: 177775 - DNA, 25 bp, Probe sequence
agaatcatttataacccgacatcag

SEQ ID NO: 177776 - DNA, 25 bp, Probe sequence
aacgtcatatagatgtctttgcacc

SEQ ID NO: 177777 - DNA, 25 bp, Probe sequence
aagagaattacctgatgccttaata

SEQ ID NO: 177778 - DNA, 25 bp, Probe sequence
aatgttacctcaaatgaaagctgta

SEQ ID NO: 177779 - DNA, 25 bp, Probe sequence
aattgaaatctattgttggtccatt

SEQ ID NO: 177780 - DNA, 25 bp, Probe sequence
catgggggcacttgatgtcatcatt

SEQ ID NO: 177781 - DNA, 25 bp, Probe sequence
gaagtagttaatggtatcgcagaaa

SEQ ID NO: 177782 - DNA, 25 bp, Probe sequence
gaaacgagtgcatatgcaaccgaga

SEQ ID NO: 177783 - DNA, 25 bp, Probe sequence
gacgtgcattgcatatacctaatga

SEQ ID NO: 177784 - DNA, 25 bp, Probe sequence
gacgcaagtctcttatgaaacaccg

SEQ ID NO: 177785 - DNA, 25 bp, Probe sequence
gagaacatactaagcatcctaaagt

SEQ ID NO: 177786 - DNA, 25 bp, Probe sequence
gaggaaacgtgctagaatcatttat

SEQ ID NO: 177787 - DNA, 25 bp, Probe sequence
gatgtattaatcgctgcaggtggtg

SEQ ID NO: 177788 - DNA, 25 bp, Probe sequence
gatttgaaaaattagtgccggacgc

SEQ ID NO: 177789 - DNA, 25 bp, Probe sequence
gttggtccatttgcttattacatca

SEQ ID NO: 177790 - DNA, 25 bp, Probe sequence
gtcatcattgaaggtcattctacta

SEQ ID NO: 177791 - DNA, 25 bp, Probe sequence
gtcatattatgactttagcttcaag

SEQ ID NO: 177792 - DNA, 25 bp, Probe sequence
gtgccggacgctaagttagatgacg

SEQ ID NO: 177793 - DNA, 25 bp, Probe sequence
gtggtaaattaccagcgaatttctt

SEQ ID NO: 177794 - DNA, 25 bp, Probe sequence
gggtactgttaatgactttggacgt

SEQ ID NO: 177795 - DNA, 25 bp, Probe sequence
ggagaagcattattattctttttag

SEQ ID NO: 177796 - DNA, 25 bp, Probe sequence
ggcaattaatatttcatcattcaca

SEQ ID NO: 177797 - DNA, 25 bp, Probe sequence
ggcggacaattgacgcaagtctctt

SEQ ID NO: 177798 - DNA, 25 bp, Probe sequence
tacctaatgacatcatgggggcact

SEQ ID NO: 177799 - DNA, 25 bp, Probe sequence
taggtgatgccacacttgaagcaga

SEQ ID NO: 177800 - DNA, 25 bp, Probe sequence
ttcatcattcacagacttacaacta

SEQ ID NO: 177801 - DNA, 25 bp, Probe sequence
attttattaatgcgttagctttaat

SEQ ID NO: 177802 - DNA, 25 bp, Probe sequence
atcgagggtttatttatatctatag

SEQ ID NO: 177803 - DNA, 25 bp, Probe sequence
atgcgttagctttaattatattaag

SEQ ID NO: 177804 - DNA, 25 bp, Probe sequence
atgcaatcgagggtttatttatatc

SEQ ID NO: 177805 - DNA, 25 bp, Probe sequence
agatgcaatcgagggtttatttata

SEQ ID NO: 177806 - DNA, 25 bp, Probe sequence
acttagatgcaatcgagggtttatt

SEQ ID NO: 177807 - DNA, 25 bp, Probe sequence
actttattcattgtacatgttaatg

SEQ ID NO: 177808 - DNA, 25 bp, Probe sequence
aatgcgttagctttaattatattaa

SEQ ID NO: 177809 - DNA, 25 bp, Probe sequence
aatcgagggtttatttatatctata

SEQ ID NO: 177810 - DNA, 25 bp, Probe sequence
caatcgagggtttatttatatctat

SEQ ID NO: 177811 - DNA, 25 bp, Probe sequence
cttagatgcaatcgagggtttattt

SEQ ID NO: 177812 - DNA, 25 bp, Probe sequence
ctttattcattgtacatgttaatgg

SEQ ID NO: 177813 - DNA, 25 bp, Probe sequence
cgagggtttatttatatctatagaa

SEQ ID NO: 177814 - DNA, 25 bp, Probe sequence
gcaatcgagggtttatttatatcta

SEQ ID NO: 177815 - DNA, 25 bp, Probe sequence
gacttagatgcaatcgagggtttat

SEQ ID NO: 177816 - DNA, 25 bp, Probe sequence
gagggtttatttatatctatagaag

SEQ ID NO: 177817 - DNA, 25 bp, Probe sequence
gatgcaatcgagggtttatttatat

SEQ ID NO: 177818 - DNA, 25 bp, Probe sequence
gggtttatttatatctatagaagtc

SEQ ID NO: 177819 - DNA, 25 bp, Probe sequence
ggtttatttatatctatagaagtca

SEQ ID NO: 177820 - DNA, 25 bp, Probe sequence
tgacttagatgcaatcgagggttta

SEQ ID NO: 177821 - DNA, 25 bp, Probe sequence
tgcaatcgagggtttatttatatct

SEQ ID NO: 177822 - DNA, 25 bp, Probe sequence
tcgagggtttatttatatctataga

SEQ ID NO: 177823 - DNA, 25 bp, Probe sequence
taattttattaatgcgttagcttta

SEQ ID NO: 177824 - DNA, 25 bp, Probe sequence
taatgcgttagctttaattatatta

SEQ ID NO: 177825 - DNA, 25 bp, Probe sequence
tagatgcaatcgagggtttatttat

SEQ ID NO: 177826 - DNA, 25 bp, Probe sequence
tattcattgtacatgttaatggtaa

SEQ ID NO: 177827 - DNA, 25 bp, Probe sequence
tattaatgcgttagctttaattata

SEQ ID NO: 177828 - DNA, 25 bp, Probe sequence
ttttattaatgcgttagctttaatt

SEQ ID NO: 177829 - DNA, 25 bp, Probe sequence
ttattaatgcgttagctttaattat

SEQ ID NO: 177830 - DNA, 25 bp, Probe sequence
ttattcattgtacatgttaatggta

SEQ ID NO: 177831 - DNA, 25 bp, Probe sequence
ttagatgcaatcgagggtttattta

SEQ ID NO: 177832 - DNA, 25 bp, Probe sequence
ttaattttattaatgcgttagcttt

SEQ ID NO: 177833 - DNA, 25 bp, Probe sequence
ttaatgcgttagctttaattatatt

SEQ ID NO: 177834 - DNA, 25 bp, Probe sequence
ttcattgtacatgttaatggtaaaa

SEQ ID NO: 177835 - DNA, 25 bp, Probe sequence
attccaataggtataatcccagcat

SEQ ID NO: 177836 - DNA, 25 bp, Probe sequence
attattggcttgaaaactatgaagt

SEQ ID NO: 177837 - DNA, 25 bp, Probe sequence
atataattaatgacacaggtgcagg

SEQ ID NO: 177838 - DNA, 25 bp, Probe sequence
atgcagattgtgtggttgtagactc

SEQ ID NO: 177839 - DNA, 25 bp, Probe sequence
aaatgttcaacagagttcaaatata

SEQ ID NO: 177840 - DNA, 25 bp, Probe sequence
aaagttcaaaccctgtatcttcgat

SEQ ID NO: 177841 - DNA, 25 bp, Probe sequence
aacacaggaatgttcacttctgtaa

SEQ ID NO: 177842 - DNA, 25 bp, Probe sequence
aaccctgtatcttcgataagcgtat

SEQ ID NO: 177843 - DNA, 25 bp, Probe sequence
aatgcctgttctacagtgagcacta

SEQ ID NO: 177844 - DNA, 25 bp, Probe sequence
aatattgtttgtattggtgcagcaa

SEQ ID NO: 177845 - DNA, 25 bp, Probe sequence
caatatttaattcagttgtgtggaa

SEQ ID NO: 177846 - DNA, 25 bp, Probe sequence
caggtgcaggagatgttttttcagc

SEQ ID NO: 177847 - DNA, 25 bp, Probe sequence
cattgtttaatgcctgttctacagt

SEQ ID NO: 177848 - DNA, 25 bp, Probe sequence
gcctgttctacagtgagcactatat

SEQ ID NO: 177849 - DNA, 25 bp, Probe sequence
gcgtatctggaggtgtagctaggaa

SEQ ID NO: 177850 - DNA, 25 bp, Probe sequence
gctgaagctttttggaacgtttctt

SEQ ID NO: 177851 - DNA, 25 bp, Probe sequence
gcatcagtatttcattattggcttg

SEQ ID NO: 177852 - DNA, 25 bp, Probe sequence
gaagctgaagctttttggaacgttt

SEQ ID NO: 177853 - DNA, 25 bp, Probe sequence
gaagctaataagtttatcgatttaa

SEQ ID NO: 177854 - DNA, 25 bp, Probe sequence
gagcactatatataatacttccatg

SEQ ID NO: 177855 - DNA, 25 bp, Probe sequence
gatgatatcttttatacaaatggag

SEQ ID NO: 177856 - DNA, 25 bp, Probe sequence
gttcaaaccctgtatcttcgataag

SEQ ID NO: 177857 - DNA, 25 bp, Probe sequence
gttttttcagcatcagtatttcatt

SEQ ID NO: 177858 - DNA, 25 bp, Probe sequence
gtatcttcgataagcgtatctggag

SEQ ID NO: 177859 - DNA, 25 bp, Probe sequence
gtagactctaatattcccaaggaaa

SEQ ID NO: 177860 - DNA, 25 bp, Probe sequence
gtggttgtagactctaatattccca

SEQ ID NO: 177861 - DNA, 25 bp, Probe sequence
ggggaaatgatatgtggttttgcag

SEQ ID NO: 177862 - DNA, 25 bp, Probe sequence
ggtataatcccagcatctataaaga

SEQ ID NO: 177863 - DNA, 25 bp, Probe sequence
ggaatttagcgtataatattggcaa

SEQ ID NO: 177864 - DNA, 25 bp, Probe sequence
ggaatgttcacttctgtaatagatt

SEQ ID NO: 177865 - DNA, 25 bp, Probe sequence
tgtggttttgcagatatggatatat

SEQ ID NO: 177866 - DNA, 25 bp, Probe sequence
tctggaggtgtagctaggaatttag

SEQ ID NO: 177867 - DNA, 25 bp, Probe sequence
taattacttagaaatggcattgttt

SEQ ID NO: 177868 - DNA, 25 bp, Probe sequence
ttggtgcagcaaatatagataaaca

SEQ ID NO: 177869 - DNA, 25 bp, Probe sequence
atatcgatatcgaagtcgacggtga

SEQ ID NO: 177870 - DNA, 25 bp, Probe sequence
atctaactggttaatgggtggcgta

SEQ ID NO: 177871 - DNA, 25 bp, Probe sequence
atgttatcgacttagcatatccagg

SEQ ID NO: 177872 - DNA, 25 bp, Probe sequence
aggacttgaagttcacgtagagtta

SEQ ID NO: 177873 - DNA, 25 bp, Probe sequence
agcgcattttggagcagaacctaac

SEQ ID NO: 177874 - DNA, 25 bp, Probe sequence
acaccgctaattgaaatcgtatctg

SEQ ID NO: 177875 - DNA, 25 bp, Probe sequence
aaccagatattcgttcacctaaaga

SEQ ID NO: 177876 - DNA, 25 bp, Probe sequence
aagctatgggcttcttagttggtca

SEQ ID NO: 177877 - DNA, 25 bp, Probe sequence
aagcgtgcagtagactgggcaatgc

SEQ ID NO: 177878 - DNA, 25 bp, Probe sequence
aagaaggttctgatgattaccgtta

SEQ ID NO: 177879 - DNA, 25 bp, Probe sequence
aatttctcaatttgatcaaccaatt

SEQ ID NO: 177880 - DNA, 25 bp, Probe sequence
caaatttctgatgaagcaacacttc

SEQ ID NO: 177881 - DNA, 25 bp, Probe sequence
ctgggcaatgcgtgctgcaatggca

SEQ ID NO: 177882 - DNA, 25 bp, Probe sequence
gcctgacattgtacctttatatatt

SEQ ID NO: 177883 - DNA, 25 bp, Probe sequence
gcgtctaaaggtcaagctaatccac

SEQ ID NO: 177884 - DNA, 25 bp, Probe sequence
gcatatccaggtgtcttaccagttg

SEQ ID NO: 177885 - DNA, 25 bp, Probe sequence
gcagaacctaactcaaatacaaatg

SEQ ID NO: 177886 - DNA, 25 bp, Probe sequence
gcaacagaatctaagtttgaccgta

SEQ ID NO: 177887 - DNA, 25 bp, Probe sequence
gaatcggtattactcgtcttcacat

SEQ ID NO: 177888 - DNA, 25 bp, Probe sequence
gaaccgtcaaggtacaccgctaatt

SEQ ID NO: 177889 - DNA, 25 bp, Probe sequence
gaaagtcttcccagagttagcagct

SEQ ID NO: 177890 - DNA, 25 bp, Probe sequence
gacaagaaacacgtcgatttgatga

SEQ ID NO: 177891 - DNA, 25 bp, Probe sequence
gactcaaaaatgttttctccatcac

SEQ ID NO: 177892 - DNA, 25 bp, Probe sequence
gaccgtaagaactatttctatccag

SEQ ID NO: 177893 - DNA, 25 bp, Probe sequence
gagcgtgttcgtcagacaattcctg

SEQ ID NO: 177894 - DNA, 25 bp, Probe sequence
gatgcttggaaagagcgtgttcgtc

SEQ ID NO: 177895 - DNA, 25 bp, Probe sequence
gatgcacacgtattaacattgacta

SEQ ID NO: 177896 - DNA, 25 bp, Probe sequence
gataatggcttagttcaaatttctg

SEQ ID NO: 177897 - DNA, 25 bp, Probe sequence
ggtattactcgtcttcacatggaag

SEQ ID NO: 177898 - DNA, 25 bp, Probe sequence
ttacttcccagagcctgacattgta

SEQ ID NO: 177899 - DNA, 25 bp, Probe sequence
tattcattagttgacttgaaccgtc

SEQ ID NO: 177900 - DNA, 25 bp, Probe sequence
ttacctgcatacgatgcacacgtat

SEQ ID NO: 177901 - DNA, 25 bp, Probe sequence
ttaccagttgttaataagcgtgcag

SEQ ID NO: 177902 - DNA, 25 bp, Probe sequence
ttctccatcaccagcgcattttgga

SEQ ID NO: 177903 - DNA, 25 bp, Probe sequence
atgtcaagatctgaaggtttcggta

SEQ ID NO: 177904 - DNA, 25 bp, Probe sequence
agtagttggtccaacagcgcctaca

SEQ ID NO: 177905 - DNA, 25 bp, Probe sequence
cagttaacccatttgaccataaagc

SEQ ID NO: 177906 - DNA, 25 bp, Probe sequence
acggtcgtgtatctcgatttggatt

SEQ ID NO: 177907 - DNA, 25 bp, Probe sequence
aaatctttaggtgctgtcgttgagg

SEQ ID NO: 177908 - DNA, 25 bp, Probe sequence
aacagcgcctacaactgcgtttaat

SEQ ID NO: 177909 - DNA, 25 bp, Probe sequence
aacgttatatcgtgtcgcttatcaa

SEQ ID NO: 177910 - DNA, 25 bp, Probe sequence
aattaagtcttttctagcgctggat

SEQ ID NO: 177911 - DNA, 25 bp, Probe sequence
cagaagcttcgtcaaacctttctcg

SEQ ID NO: 177912 - DNA, 25 bp, Probe sequence
ccgaccaatcggtttacagttcatt

SEQ ID NO: 177913 - DNA, 25 bp, Probe sequence
gccaatgatttattaacaacaccag

SEQ ID NO: 177914 - DNA, 25 bp, Probe sequence
gaagcagttcaaaacgctgtagaaa

SEQ ID NO: 177915 - DNA, 25 bp, Probe sequence
gaaaccaacatacggtcgtgtatct

SEQ ID NO: 177916 - DNA, 25 bp, Probe sequence
gagcattcgctacgaatcggttgag

SEQ ID NO: 177917 - DNA, 25 bp, Probe sequence
gacggaattcgttatggttatcatt

SEQ ID NO: 177918 - DNA, 25 bp, Probe sequence
gaccaaattggtccattgactcgaa

SEQ ID NO: 177919 - DNA, 25 bp, Probe sequence
gattacctggtatttctgttccttg

SEQ ID NO: 177920 - DNA, 25 bp, Probe sequence
gattgcatcatcagaagcttcgtca

SEQ ID NO: 177921 - DNA, 25 bp, Probe sequence
gttttgtgccaatttacgaatctac

SEQ ID NO: 177922 - DNA, 25 bp, Probe sequence
gtatttctgttccttgtggacaatc

SEQ ID NO: 177923 - DNA, 25 bp, Probe sequence
gtcgttgaggaagtatcattgccaa

SEQ ID NO: 177924 - DNA, 25 bp, Probe sequence
gtggttcatcaggtggatctgcagc

SEQ ID NO: 177925 - DNA, 25 bp, Probe sequence
gggtggttcaacagaaacatcttat

SEQ ID NO: 177926 - DNA, 25 bp, Probe sequence
ggtgaaggtgtagctgatgacgtaa

SEQ ID NO: 177927 - DNA, 25 bp, Probe sequence
ggtacatttgcattaagttcaggtt

SEQ ID NO: 177928 - DNA, 25 bp, Probe sequence
ggatctgcagcagcagttgcagctg

SEQ ID NO: 177929 - DNA, 25 bp, Probe sequence
ggatgagtttgcaatgggtggttca

SEQ ID NO: 177930 - DNA, 25 bp, Probe sequence
ggacaatcaaatggccgaccaatcg

SEQ ID NO: 177931 - DNA, 25 bp, Probe sequence
tgaagagactgatccaacaattaag

SEQ ID NO: 177932 - DNA, 25 bp, Probe sequence
taaacttagctggattacctggtat

SEQ ID NO: 177933 - DNA, 25 bp, Probe sequence
tttggtattccatcatattacgtga

SEQ ID NO: 177934 - DNA, 25 bp, Probe sequence
ttagaagctatttctggtgcagatg

SEQ ID NO: 177935 - DNA, 25 bp, Probe sequence
ttcaattagacaaccggctgcatat

SEQ ID NO: 177936 - DNA, 25 bp, Probe sequence
ttgcatcttcattagaccaaattgg

SEQ ID NO: 177937 - DNA, 25 bp, Probe sequence
atatcgcgaatcttgcaagacttca

SEQ ID NO: 177938 - DNA, 25 bp, Probe sequence
atcgcgaatcttgcaagacttcaaa

SEQ ID NO: 177939 - DNA, 25 bp, Probe sequence
atgacaaaagtaacacgtgaagaag

SEQ ID NO: 177940 - DNA, 25 bp, Probe sequence
aggcgttgaacctacatatcacgtt

SEQ ID NO: 177941 - DNA, 25 bp, Probe sequence
acgttttacgtgaagataaagcaat

SEQ ID NO: 177942 - DNA, 25 bp, Probe sequence
acatatcacgttttagatttacaaa

SEQ ID NO: 177943 - DNA, 25 bp, Probe sequence
aacaaaatgatagcgctgatacaga

SEQ ID NO: 177944 - DNA, 25 bp, Probe sequence
aatcatgaatgaggaggacgcgtaa

SEQ ID NO: 177945 - DNA, 25 bp, Probe sequence
caaatttctcctgaagaaacggaag

SEQ ID NO: 177946 - DNA, 25 bp, Probe sequence
caagaattagctttgaaaaatgcca

SEQ ID NO: 177947 - DNA, 25 bp, Probe sequence
cttgcaagacttcaaatttctcctg

SEQ ID NO: 177948 - DNA, 25 bp, Probe sequence
cgtgaagaagttgagcatatcgcga

SEQ ID NO: 177949 - DNA, 25 bp, Probe sequence
cctacatatcacgttttagatttac

SEQ ID NO: 177950 - DNA, 25 bp, Probe sequence
gccaacacattagaaagcattttag

SEQ ID NO: 177951 - DNA, 25 bp, Probe sequence
gcgctgatacagaaggcgttgaacc

SEQ ID NO: 177952 - DNA, 25 bp, Probe sequence
gcgttgaacctacatatcacgtttt

SEQ ID NO: 177953 - DNA, 25 bp, Probe sequence
gcatatcgcgaatcttgcaagactt

SEQ ID NO: 177954 - DNA, 25 bp, Probe sequence
gaatcttgcaagacttcaaatttct

SEQ ID NO: 177955 - DNA, 25 bp, Probe sequence
gaaggcgttgaacctacatatcacg

SEQ ID NO: 177956 - DNA, 25 bp, Probe sequence
gaagttgagcatatcgcgaatcttg

SEQ ID NO: 177957 - DNA, 25 bp, Probe sequence
gaacctacatatcacgttttagatt

SEQ ID NO: 177958 - DNA, 25 bp, Probe sequence
gaaagcattttagattttgcaaaac

SEQ ID NO: 177959 - DNA, 25 bp, Probe sequence
gaaacggaagaaatggccaacacat

SEQ ID NO: 177960 - DNA, 25 bp, Probe sequence
gacaatttaaagtgcctacaatcat

SEQ ID NO: 177961 - DNA, 25 bp, Probe sequence
gacttcaaatttctcctgaagaaac

SEQ ID NO: 177962 - DNA, 25 bp, Probe sequence
gagcatatcgcgaatcttgcaagac

SEQ ID NO: 177963 - DNA, 25 bp, Probe sequence
gatggacaatttaaagtgcctacaa

SEQ ID NO: 177964 - DNA, 25 bp, Probe sequence
gatacagaaggcgttgaacctacat

SEQ ID NO: 177965 - DNA, 25 bp, Probe sequence
gatagcgctgatacagaaggcgttg

SEQ ID NO: 177966 - DNA, 25 bp, Probe sequence
gttgagcatatcgcgaatcttgcaa

SEQ ID NO: 177967 - DNA, 25 bp, Probe sequence
gttgaacctacatatcacgttttag

SEQ ID NO: 177968 - DNA, 25 bp, Probe sequence
tggccaacacattagaaagcatttt

SEQ ID NO: 177969 - DNA, 25 bp, Probe sequence
tgcaagacttcaaatttctcctgaa

SEQ ID NO: 177970 - DNA, 25 bp, Probe sequence
taaagtgcctacaatcatgaatgag

SEQ ID NO: 177971 - DNA, 25 bp, Probe sequence
attaaacaattgatttcatcggaaa

SEQ ID NO: 177972 - DNA, 25 bp, Probe sequence
atatttcaaaagcaatcgcgacaat

SEQ ID NO: 177973 - DNA, 25 bp, Probe sequence
ataaaggtaatattcgtactggtga

SEQ ID NO: 177974 - DNA, 25 bp, Probe sequence
ataaccctacacaattgcaacaaat

SEQ ID NO: 177975 - DNA, 25 bp, Probe sequence
atcgaaatcattttcattcctcacg

SEQ ID NO: 177976 - DNA, 25 bp, Probe sequence
atgacgctggcatgccaattccaaa

SEQ ID NO: 177977 - DNA, 25 bp, Probe sequence
agctcacccattaaataaaggtaat

SEQ ID NO: 177978 - DNA, 25 bp, Probe sequence
acataaccctacacaattgcaacaa

SEQ ID NO: 177979 - DNA, 25 bp, Probe sequence
acttagctcacccattaaataaagg

SEQ ID NO: 177980 - DNA, 25 bp, Probe sequence
acaacgccctactctaatattgcat

SEQ ID NO: 177981 - DNA, 25 bp, Probe sequence
aaatcagctgttttaaatgaacata

SEQ ID NO: 177982 - DNA, 25 bp, Probe sequence
aaagcaatcgcgacaattggtcatt

SEQ ID NO: 177983 - DNA, 25 bp, Probe sequence
aaagaacataaccctacacaattgc

SEQ ID NO: 177984 - DNA, 25 bp, Probe sequence
aacgccctactctaatattgcatta

SEQ ID NO: 177985 - DNA, 25 bp, Probe sequence
aagtaacttagctcacccattaaat

SEQ ID NO: 177986 - DNA, 25 bp, Probe sequence
aatcgcgacaattggtcattttgat

SEQ ID NO: 177987 - DNA, 25 bp, Probe sequence
aatcattttcattcctcacgaagaa

SEQ ID NO: 177988 - DNA, 25 bp, Probe sequence
cgctttattgatgtcttagctacag

SEQ ID NO: 177989 - DNA, 25 bp, Probe sequence
gccctactctaatattgcattagaa

SEQ ID NO: 177990 - DNA, 25 bp, Probe sequence
gctggcatgccaattccaaatgatc

SEQ ID NO: 177991 - DNA, 25 bp, Probe sequence
gcattagaatcgaatgttacttttt

SEQ ID NO: 177992 - DNA, 25 bp, Probe sequence
gcatgccaattccaaatgatcatcg

SEQ ID NO: 177993 - DNA, 25 bp, Probe sequence
gcaatcgcgacaattggtcattttg

SEQ ID NO: 177994 - DNA, 25 bp, Probe sequence
gaacataaccctacacaattgcaac

SEQ ID NO: 177995 - DNA, 25 bp, Probe sequence
gaaaagtaacttagctcacccatta

SEQ ID NO: 177996 - DNA, 25 bp, Probe sequence
gaaatcgaaatcattttcattcctc

SEQ ID NO: 177997 - DNA, 25 bp, Probe sequence
gaaatcattttcattcctcacgaag

SEQ ID NO: 177998 - DNA, 25 bp, Probe sequence
gacgctggcatgccaattccaaatg

SEQ ID NO: 177999 - DNA, 25 bp, Probe sequence
gatgtcttagctacagtgttagaag

SEQ ID NO: 178000 - DNA, 25 bp, Probe sequence
gtaacttagctcacccattaaataa

SEQ ID NO: 178001 - DNA, 25 bp, Probe sequence
ggaaatccaaaaaatatacttagca

SEQ ID NO: 178002 - DNA, 25 bp, Probe sequence
tcattttcattcctcacgaagaaat

SEQ ID NO: 178003 - DNA, 25 bp, Probe sequence
taatgacgctggcatgccaattcca

SEQ ID NO: 178004 - DNA, 25 bp, Probe sequence
tattgatgtcttagctacagtgtta

SEQ ID NO: 178005 - DNA, 25 bp, Probe sequence
attgcagaaaaatcaccagcctatt

SEQ ID NO: 178006 - DNA, 25 bp, Probe sequence
atttttctaatttcacacaagcagt

SEQ ID NO: 178007 - DNA, 25 bp, Probe sequence
atcactcaagcgactgcagaaaaga

SEQ ID NO: 178008 - DNA, 25 bp, Probe sequence
atcaccagcctatttatctaacatt

SEQ ID NO: 178009 - DNA, 25 bp, Probe sequence
atggcggcgactttgaagatggttt

SEQ ID NO: 178010 - DNA, 25 bp, Probe sequence
agtacgttactgaacaagcgaataa

SEQ ID NO: 178011 - DNA, 25 bp, Probe sequence
agtattattgattacagctatcttt

SEQ ID NO: 178012 - DNA, 25 bp, Probe sequence
agctatctttatactcgctgcttgt

SEQ ID NO: 178013 - DNA, 25 bp, Probe sequence
aaatcagctttattaccttcttcaa

SEQ ID NO: 178014 - DNA, 25 bp, Probe sequence
aaatgtacaaggtgataactatcgt

SEQ ID NO: 178015 - DNA, 25 bp, Probe sequence
aaagccacaacgattagtagtagat

SEQ ID NO: 178016 - DNA, 25 bp, Probe sequence
aactatcgtacattgttaccattta

SEQ ID NO: 178017 - DNA, 25 bp, Probe sequence
aagccaggcaagaggacttttacaa

SEQ ID NO: 178018 - DNA, 25 bp, Probe sequence
aagatggtaaccaaccacgtgcttt

SEQ ID NO: 178019 - DNA, 25 bp, Probe sequence
aatcgattactatggacaagctgaa

SEQ ID NO: 178020 - DNA, 25 bp, Probe sequence
aattggtattacacagtacgttact

SEQ ID NO: 178021 - DNA, 25 bp, Probe sequence
gctttattaccttcttcaacagcag

SEQ ID NO: 178022 - DNA, 25 bp, Probe sequence
gcaaggtaaacaaatggctagtgag

SEQ ID NO: 178023 - DNA, 25 bp, Probe sequence
gcaagatttttatggtggtggagat

SEQ ID NO: 178024 - DNA, 25 bp, Probe sequence
gaatttatcactcaagcgactgcag

SEQ ID NO: 178025 - DNA, 25 bp, Probe sequence
gaaccgcaagttcatatttacagta

SEQ ID NO: 178026 - DNA, 25 bp, Probe sequence
gataatttgcaatcatatttttcta

SEQ ID NO: 178027 - DNA, 25 bp, Probe sequence
gatataccaattcattttgcaattt

SEQ ID NO: 178028 - DNA, 25 bp, Probe sequence
gttaccatttaaagaaagccaggca

SEQ ID NO: 178029 - DNA, 25 bp, Probe sequence
gtatcaagatggtcaatttttggac

SEQ ID NO: 178030 - DNA, 25 bp, Probe sequence
gtagtagatttaccaatcgattact

SEQ ID NO: 178031 - DNA, 25 bp, Probe sequence
gtaaccataaggatgaccaggctgg

SEQ ID NO: 178032 - DNA, 25 bp, Probe sequence
gtgaagattcaatcacaccaggtga

SEQ ID NO: 178033 - DNA, 25 bp, Probe sequence
ggtatgacgattggtttagctatga

SEQ ID NO: 178034 - DNA, 25 bp, Probe sequence
ggacttttacaagataacatggcaa

SEQ ID NO: 178035 - DNA, 25 bp, Probe sequence
ggacttaatccatcacacgaaggtg

SEQ ID NO: 178036 - DNA, 25 bp, Probe sequence
ggcaaatagttataatggcggcgac

SEQ ID NO: 178037 - DNA, 25 bp, Probe sequence
taaccaaccacgtgctttaattagt

SEQ ID NO: 178038 - DNA, 25 bp, Probe sequence
tactcgctgcttgtggtaaccataa

SEQ ID NO: 178039 - DNA, 25 bp, Probe sequence
atgccgagacgttcatttttacgat

SEQ ID NO: 178040 - DNA, 25 bp, Probe sequence
atggcttgcatcacaaggtgctaaa

SEQ ID NO: 178041 - DNA, 25 bp, Probe sequence
atggctgatttatcgtctcgtgtga

SEQ ID NO: 178042 - DNA, 25 bp, Probe sequence
aggatgctgtcacatatcatatgcc

SEQ ID NO: 178043 - DNA, 25 bp, Probe sequence
agtcaaccatgacacgccaatgtta

SEQ ID NO: 178044 - DNA, 25 bp, Probe sequence
agatgtcgttattgctggtgaagat

SEQ ID NO: 178045 - DNA, 25 bp, Probe sequence
agaggataatccatctgtaccagat

SEQ ID NO: 178046 - DNA, 25 bp, Probe sequence
acgcatacgtgaacaaattggcaac

SEQ ID NO: 178047 - DNA, 25 bp, Probe sequence
aaaacaattcatgcgatacctttga

SEQ ID NO: 178048 - DNA, 25 bp, Probe sequence
aaaagtagctggtacaactgtatca

SEQ ID NO: 178049 - DNA, 25 bp, Probe sequence
aacacgtggtgatggaacaacaggt

SEQ ID NO: 178050 - DNA, 25 bp, Probe sequence
aatccaaaatgccaagcacaacttg

SEQ ID NO: 178051 - DNA, 25 bp, Probe sequence
gccaacccattgtccaagttgtgga

SEQ ID NO: 178052 - DNA, 25 bp, Probe sequence
gaagttgtacgtagtattccagaac

SEQ ID NO: 178053 - DNA, 25 bp, Probe sequence
gaaggacatcctgaatttagtggta

SEQ ID NO: 178054 - DNA, 25 bp, Probe sequence
gaagatattcgtgctttaattcaaa

SEQ ID NO: 178055 - DNA, 25 bp, Probe sequence
gaaaattcgaccaacgcatacgtga

SEQ ID NO: 178056 - DNA, 25 bp, Probe sequence
gaacgtagacctgaggatgctgtca

SEQ ID NO: 178057 - DNA, 25 bp, Probe sequence
gaagcatctaaatggcttgcatcac

SEQ ID NO: 178058 - DNA, 25 bp, Probe sequence
gatggatacttcgttcaaggtttaa

SEQ ID NO: 178059 - DNA, 25 bp, Probe sequence
gatggcttagcagtatcattgaaat

SEQ ID NO: 178060 - DNA, 25 bp, Probe sequence
gatgttgctgatattttctatttaa

SEQ ID NO: 178061 - DNA, 25 bp, Probe sequence
gatgagcagttatttgcaaatccaa

SEQ ID NO: 178062 - DNA, 25 bp, Probe sequence
gataatttattagctgccattcaac

SEQ ID NO: 178063 - DNA, 25 bp, Probe sequence
gatagtactgactggtaagctacat

SEQ ID NO: 178064 - DNA, 25 bp, Probe sequence
gttcgtggtgaagcatatatgccga

SEQ ID NO: 178065 - DNA, 25 bp, Probe sequence
gttaaagcgagccaagtgttagcag

SEQ ID NO: 178066 - DNA, 25 bp, Probe sequence
gtagcacaatctgtagttacttatt

SEQ ID NO: 178067 - DNA, 25 bp, Probe sequence
gtagcacttcgttgcattaatccaa

SEQ ID NO: 178068 - DNA, 25 bp, Probe sequence
gtgtagtcacacctactgctatttt

SEQ ID NO: 178069 - DNA, 25 bp, Probe sequence
ggtgacatcatacctgaagttgtac

SEQ ID NO: 178070 - DNA, 25 bp, Probe sequence
ggtaagctacatcaaatgacacgca

SEQ ID NO: 178071 - DNA, 25 bp, Probe sequence
tgcgcgttcgcaaagtgaagcatta

SEQ ID NO: 178072 - DNA, 25 bp, Probe sequence
tatcatatgccaacccattgtccaa

SEQ ID NO: 178073 - DNA, 25 bp, Probe sequence
atagtggatatcaacgccaattgtc

SEQ ID NO: 178074 - DNA, 25 bp, Probe sequence
atcactcatgcgacatcaagaatgt

SEQ ID NO: 178075 - DNA, 25 bp, Probe sequence
aggactgtggactgcaaatacgaat

SEQ ID NO: 178076 - DNA, 25 bp, Probe sequence
agtgatgcataaagcctggggagaa

SEQ ID NO: 178077 - DNA, 25 bp, Probe sequence
acgacaaacgatacaacctaaggca

SEQ ID NO: 178078 - DNA, 25 bp, Probe sequence
aacgtttgttagcgcaatttgcacc

SEQ ID NO: 178079 - DNA, 25 bp, Probe sequence
aaagatgtctcaccatacaatgttt

SEQ ID NO: 178080 - DNA, 25 bp, Probe sequence
aagaatgttatttggtcgccctcag

SEQ ID NO: 178081 - DNA, 25 bp, Probe sequence
aatgcacaatcacgtgtacttgagg

SEQ ID NO: 178082 - DNA, 25 bp, Probe sequence
aataccccattagaagaacagtcat

SEQ ID NO: 178083 - DNA, 25 bp, Probe sequence
aattatggcaggtgctggttcaggg

SEQ ID NO: 178084 - DNA, 25 bp, Probe sequence
gaatctttattcccacatattagag

SEQ ID NO: 178085 - DNA, 25 bp, Probe sequence
gaagcgttagattttgatgacctta

SEQ ID NO: 178086 - DNA, 25 bp, Probe sequence
gaagccacagattatcactcgcaaa

SEQ ID NO: 178087 - DNA, 25 bp, Probe sequence
gaacgtcgtatttgttatgtagcaa

SEQ ID NO: 178088 - DNA, 25 bp, Probe sequence
gaacttaaaacacctgcagatgctc

SEQ ID NO: 178089 - DNA, 25 bp, Probe sequence
gaaaaatggctcaatcgaactagat

SEQ ID NO: 178090 - DNA, 25 bp, Probe sequence
gagaagctgattttatcggattgtc

SEQ ID NO: 178091 - DNA, 25 bp, Probe sequence
gatgcactcggctaagggccttgaa

SEQ ID NO: 178092 - DNA, 25 bp, Probe sequence
gaggtgtaggtccttcatctgttga

SEQ ID NO: 178093 - DNA, 25 bp, Probe sequence
gatgaccttattatgacaacgatta

SEQ ID NO: 178094 - DNA, 25 bp, Probe sequence
gatcagtcaatttatggttggcgtg

SEQ ID NO: 178095 - DNA, 25 bp, Probe sequence
gtattttacgtcgtgatgcagatcg

SEQ ID NO: 178096 - DNA, 25 bp, Probe sequence
gtaacactaatgacgatgcactcgg

SEQ ID NO: 178097 - DNA, 25 bp, Probe sequence
gtggccaaaagttctatgaccgtaa

SEQ ID NO: 178098 - DNA, 25 bp, Probe sequence
ggttggcgtggtgctgatattcaaa

SEQ ID NO: 178099 - DNA, 25 bp, Probe sequence
ggatgtcaacattccactcaatgtg

SEQ ID NO: 178100 - DNA, 25 bp, Probe sequence
tggttcagggaagacacgtgtttta

SEQ ID NO: 178101 - DNA, 25 bp, Probe sequence
tcactcgcaaatggtagcaacggtt

SEQ ID NO: 178102 - DNA, 25 bp, Probe sequence
tacaatgttttggctattactttta

SEQ ID NO: 178103 - DNA, 25 bp, Probe sequence
tacgataattgatcctacagaccaa

SEQ ID NO: 178104 - DNA, 25 bp, Probe sequence
tatgtgttgtaggtgactcagatca

SEQ ID NO: 178105 - DNA, 25 bp, Probe sequence
ttagagcaaaattatcgttcgacga

SEQ ID NO: 178106 - DNA, 25 bp, Probe sequence
ttgagcgtgtaccagaagttctaga

SEQ ID NO: 178107 - DNA, 25 bp, Probe sequence
attgcctttagtacttgaaatatca

SEQ ID NO: 178108 - DNA, 25 bp, Probe sequence
atagtggcatttatggcgacgtatc

SEQ ID NO: 178109 - DNA, 25 bp, Probe sequence
atacccattgcctttagtacttgaa

SEQ ID NO: 178110 - DNA, 25 bp, Probe sequence
atcgaaagtgtaatgcctggttttg

SEQ ID NO: 178111 - DNA, 25 bp, Probe sequence
atcgtcggtgatattatttataaag

SEQ ID NO: 178112 - DNA, 25 bp, Probe sequence
atgcctggttttgatttttattttg

SEQ ID NO: 178113 - DNA, 25 bp, Probe sequence
atgtcgtgtgcaatgctgatagcaa

SEQ ID NO: 178114 - DNA, 25 bp, Probe sequence
agaagcgcttaaaacatatggacat

SEQ ID NO: 178115 - DNA, 25 bp, Probe sequence
agcatatgcccaaatggtcaatcat

SEQ ID NO: 178116 - DNA, 25 bp, Probe sequence
acatctaacagaaacgcaacttttt

SEQ ID NO: 178117 - DNA, 25 bp, Probe sequence
aaacataccaaagcaaatacagatt

SEQ ID NO: 178118 - DNA, 25 bp, Probe sequence
aagcgacagagatggcagctattgc

SEQ ID NO: 178119 - DNA, 25 bp, Probe sequence
aatggtacattattagaagcgctta

SEQ ID NO: 178120 - DNA, 25 bp, Probe sequence
cagaagatttagaagcatatgccca

SEQ ID NO: 178121 - DNA, 25 bp, Probe sequence
cagatgatgatttagatgcgatttg

SEQ ID NO: 178122 - DNA, 25 bp, Probe sequence
gcgccatatttttaaattagaccca

SEQ ID NO: 178123 - DNA, 25 bp, Probe sequence
gcaacttttttatggtggcggtatt

SEQ ID NO: 178124 - DNA, 25 bp, Probe sequence
gcaaagtggcaaaacataccaaagc

SEQ ID NO: 178125 - DNA, 25 bp, Probe sequence
gaagggtatgtcgtgtgcaatgctg

SEQ ID NO: 178126 - DNA, 25 bp, Probe sequence
gacgttactgaagataatgtcattc

SEQ ID NO: 178127 - DNA, 25 bp, Probe sequence
gagatggcagctattgcagatacaa

SEQ ID NO: 178128 - DNA, 25 bp, Probe sequence
gatgcgatttgtatgtctcaaacag

SEQ ID NO: 178129 - DNA, 25 bp, Probe sequence
gattggtggaactgatgacgttact

SEQ ID NO: 178130 - DNA, 25 bp, Probe sequence
gtatcgattaccggttatgtatata

SEQ ID NO: 178131 - DNA, 25 bp, Probe sequence
gtatgtctcaaacagatgcaattat

SEQ ID NO: 178132 - DNA, 25 bp, Probe sequence
gtggcggtatttcctcagaacaaca

SEQ ID NO: 178133 - DNA, 25 bp, Probe sequence
ggcgacgtatcaaaggttcaagctg

SEQ ID NO: 178134 - DNA, 25 bp, Probe sequence
tgcagatacaattatcgtcggtgat

SEQ ID NO: 178135 - DNA, 25 bp, Probe sequence
tcaagctgtctcagaacatctaaca

SEQ ID NO: 178136 - DNA, 25 bp, Probe sequence
tatggtggcggtatttcctcagaac

SEQ ID NO: 178137 - DNA, 25 bp, Probe sequence
tatcaaaggttcaagctgtctcaga

SEQ ID NO: 178138 - DNA, 25 bp, Probe sequence
tttcctcagaacaacaagcgacaga

SEQ ID NO: 178139 - DNA, 25 bp, Probe sequence
ttgtacctacagtactgaacagtac

SEQ ID NO: 178140 - DNA, 25 bp, Probe sequence
ttgatttttattttgtacctacagt

SEQ ID NO: 178141 - DNA, 25 bp, Probe sequence
atctggagcatcgactgcaacgatt

SEQ ID NO: 178142 - DNA, 25 bp, Probe sequence
atacctatgcaacgattgaacaaga

SEQ ID NO: 178143 - DNA, 25 bp, Probe sequence
aggtgcagcgttagatgaattgttt

SEQ ID NO: 178144 - DNA, 25 bp, Probe sequence
acctatgcaacgattgaacaagaat

SEQ ID NO: 178145 - DNA, 25 bp, Probe sequence
acaagaatctggagcatcgactgca

SEQ ID NO: 178146 - DNA, 25 bp, Probe sequence
acaatgattttagatcgtatgaata

SEQ ID NO: 178147 - DNA, 25 bp, Probe sequence
aaatgaaattcaatcactgtctcaa

SEQ ID NO: 178148 - DNA, 25 bp, Probe sequence
aaatgattaagcaaggttataccta

SEQ ID NO: 178149 - DNA, 25 bp, Probe sequence
aagaatctggagcatcgactgcaac

SEQ ID NO: 178150 - DNA, 25 bp, Probe sequence
aattacgaggtgcagcgttagatga

SEQ ID NO: 178151 - DNA, 25 bp, Probe sequence
caaggttatacctatgcaacgattg

SEQ ID NO: 178152 - DNA, 25 bp, Probe sequence
ctggagcatcgactgcaacgatttc

SEQ ID NO: 178153 - DNA, 25 bp, Probe sequence
cgactgcaacgatttctagagtgaa

SEQ ID NO: 178154 - DNA, 25 bp, Probe sequence
cgaggtgcagcgttagatgaattgt

SEQ ID NO: 178155 - DNA, 25 bp, Probe sequence
gcatcgactgcaacgatttctagag

SEQ ID NO: 178156 - DNA, 25 bp, Probe sequence
gaattgtttgatgcaatactaacgt

SEQ ID NO: 178157 - DNA, 25 bp, Probe sequence
gaatctggagcatcgactgcaacga

SEQ ID NO: 178158 - DNA, 25 bp, Probe sequence
gaatgttaccaatttttcgatgatt

SEQ ID NO: 178159 - DNA, 25 bp, Probe sequence
gaacaagaatctggagcatcgactg

SEQ ID NO: 178160 - DNA, 25 bp, Probe sequence
gaaaaattacgaggtgcagcgttag

SEQ ID NO: 178161 - DNA, 25 bp, Probe sequence
gagaagaatgttaccaatttttcga

SEQ ID NO: 178162 - DNA, 25 bp, Probe sequence
gagcatcgactgcaacgatttctag

SEQ ID NO: 178163 - DNA, 25 bp, Probe sequence
gatgatttgtgtactgtaaatgaaa

SEQ ID NO: 178164 - DNA, 25 bp, Probe sequence
gatgcttatacaatgattttagatc

SEQ ID NO: 178165 - DNA, 25 bp, Probe sequence
gttaccaatttttcgatgatttgtg

SEQ ID NO: 178166 - DNA, 25 bp, Probe sequence
gtttgatgcaatactaacgttagaa

SEQ ID NO: 178167 - DNA, 25 bp, Probe sequence
gggtaatgatgcttatacaatgatt

SEQ ID NO: 178168 - DNA, 25 bp, Probe sequence
ggttatacctatgcaacgattgaac

SEQ ID NO: 178169 - DNA, 25 bp, Probe sequence
ggagcatcgactgcaacgatttcta

SEQ ID NO: 178170 - DNA, 25 bp, Probe sequence
tcgactgcaacgatttctagagtga

SEQ ID NO: 178171 - DNA, 25 bp, Probe sequence
tacaatggggtaatgatgcttatac

SEQ ID NO: 178172 - DNA, 25 bp, Probe sequence
taccaatttttcgatgatttgtgta

SEQ ID NO: 178173 - DNA, 25 bp, Probe sequence
tttttcgatgatttgtgtactgtaa

SEQ ID NO: 178174 - DNA, 25 bp, Probe sequence
ttagatcgtatgaatattgaaacaa

SEQ ID NO: 178175 - DNA, 25 bp, Probe sequence
attcgtggttatattactacagctt

SEQ ID NO: 178176 - DNA, 25 bp, Probe sequence
atttggtctgattttctcacaacgt

SEQ ID NO: 178177 - DNA, 25 bp, Probe sequence
atgcatactatattgcgacattagc

SEQ ID NO: 178178 - DNA, 25 bp, Probe sequence
atggtttaacttctactgatgttgt

SEQ ID NO: 178179 - DNA, 25 bp, Probe sequence
aggtacttttgctaacattcctcct

SEQ ID NO: 178180 - DNA, 25 bp, Probe sequence
agatgagtctattacaagtgtttta

SEQ ID NO: 178181 - DNA, 25 bp, Probe sequence
actacagcttatgagaatgtgccat

SEQ ID NO: 178182 - DNA, 25 bp, Probe sequence
aaaggttcatctgcaatgcctcata

SEQ ID NO: 178183 - DNA, 25 bp, Probe sequence
aacatttaggtattggcacagcgcc

SEQ ID NO: 178184 - DNA, 25 bp, Probe sequence
aacgcgatcgacatgcatactatat

SEQ ID NO: 178185 - DNA, 25 bp, Probe sequence
aattgaacaagaaacgcgccatgat

SEQ ID NO: 178186 - DNA, 25 bp, Probe sequence
ctcacaacgtgtcttattagcatta

SEQ ID NO: 178187 - DNA, 25 bp, Probe sequence
gcgccatgatgttgtagcctttact

SEQ ID NO: 178188 - DNA, 25 bp, Probe sequence
gctgagcgtattatgttaccagatg

SEQ ID NO: 178189 - DNA, 25 bp, Probe sequence
gcacagcgcctgtatcaacgcaaac

SEQ ID NO: 178190 - DNA, 25 bp, Probe sequence
gcaaacattgcaacgcgatcgacat

SEQ ID NO: 178191 - DNA, 25 bp, Probe sequence
gcaatgcctcataaacgaaatccaa

SEQ ID NO: 178192 - DNA, 25 bp, Probe sequence
gatgggacgtacacatggagtgcat

SEQ ID NO: 178193 - DNA, 25 bp, Probe sequence
gagtggtgcagtaggtacttttgct

SEQ ID NO: 178194 - DNA, 25 bp, Probe sequence
gatacagctttaagtttcgttatta

SEQ ID NO: 178195 - DNA, 25 bp, Probe sequence
gatttatcgacgttttagctgaaaa

SEQ ID NO: 178196 - DNA, 25 bp, Probe sequence
gttgacactattttcgaacgcgctg

SEQ ID NO: 178197 - DNA, 25 bp, Probe sequence
gttaccagatgttacaatagcacta

SEQ ID NO: 178198 - DNA, 25 bp, Probe sequence
gtttcgatcctaaacatcatttgaa

SEQ ID NO: 178199 - DNA, 25 bp, Probe sequence
gtagcctttactagacaagtttctg

SEQ ID NO: 178200 - DNA, 25 bp, Probe sequence
ggtacacggaaatgcaacgtaactt

SEQ ID NO: 178201 - DNA, 25 bp, Probe sequence
ggtaaatgtcgaacgtgcacaagaa

SEQ ID NO: 178202 - DNA, 25 bp, Probe sequence
ggagtgcatgcagaaccaactacat

SEQ ID NO: 178203 - DNA, 25 bp, Probe sequence
ggacatataccgaaagctgacgtac

SEQ ID NO: 178204 - DNA, 25 bp, Probe sequence
ggactgatcaaaatcgctatgaagc

SEQ ID NO: 178205 - DNA, 25 bp, Probe sequence
tcaaaatggcattgtggtacacgga

SEQ ID NO: 178206 - DNA, 25 bp, Probe sequence
tttcgaacgcgctggattagcataa

SEQ ID NO: 178207 - DNA, 25 bp, Probe sequence
ttgtggaccgtttaactgtatttga

SEQ ID NO: 178208 - DNA, 25 bp, Probe sequence
ttgctaacattcctcctgaaataga

SEQ ID NO: 178209 - DNA, 25 bp, Probe sequence
atgcaagggtatatgccggtaaaac

SEQ ID NO: 178210 - DNA, 25 bp, Probe sequence
attgtttgtcacgaatgaaaatgca

SEQ ID NO: 178211 - DNA, 25 bp, Probe sequence
atggcacggttgaagtatcacatca

SEQ ID NO: 178212 - DNA, 25 bp, Probe sequence
agatggcacggttgaagtatcacat

SEQ ID NO: 178213 - DNA, 25 bp, Probe sequence
agcaaaaagatggcacggttgaagt

SEQ ID NO: 178214 - DNA, 25 bp, Probe sequence
acggttgaagtatcacatcaagaaa

SEQ ID NO: 178215 - DNA, 25 bp, Probe sequence
aaatgcaagggtatatgccggtaaa

SEQ ID NO: 178216 - DNA, 25 bp, Probe sequence
aaagatggcacggttgaagtatcac

SEQ ID NO: 178217 - DNA, 25 bp, Probe sequence
aaaaagatggcacggttgaagtatc

SEQ ID NO: 178218 - DNA, 25 bp, Probe sequence
aaaatgcaagggtatatgccggtaa

SEQ ID NO: 178219 - DNA, 25 bp, Probe sequence
aaaagatggcacggttgaagtatca

SEQ ID NO: 178220 - DNA, 25 bp, Probe sequence
aagatggcacggttgaagtatcaca

SEQ ID NO: 178221 - DNA, 25 bp, Probe sequence
aatgcaagggtatatgccggtaaaa

SEQ ID NO: 178222 - DNA, 25 bp, Probe sequence
caaaaagatggcacggttgaagtat

SEQ ID NO: 178223 - DNA, 25 bp, Probe sequence
cacggttgaagtatcacatcaagaa

SEQ ID NO: 178224 - DNA, 25 bp, Probe sequence
gcaaaaagatggcacggttgaagta

SEQ ID NO: 178225 - DNA, 25 bp, Probe sequence
gcacggttgaagtatcacatcaaga

SEQ ID NO: 178226 - DNA, 25 bp, Probe sequence
gcaagggtatatgccggtaaaacgt

SEQ ID NO: 178227 - DNA, 25 bp, Probe sequence
gaaaatgcaagggtatatgccggta

SEQ ID NO: 178228 - DNA, 25 bp, Probe sequence
gagcaaaaagatggcacggttgaag

SEQ ID NO: 178229 - DNA, 25 bp, Probe sequence
gatggcacggttgaagtatcacatc

SEQ ID NO: 178230 - DNA, 25 bp, Probe sequence
gattgtttgtcacgaatgaaaatgc

SEQ ID NO: 178231 - DNA, 25 bp, Probe sequence
gtttgtcacgaatgaaaatgcaagg

SEQ ID NO: 178232 - DNA, 25 bp, Probe sequence
gtatatgccggtaaaacgtattgaa

SEQ ID NO: 178233 - DNA, 25 bp, Probe sequence
gtcacgaatgaaaatgcaagggtat

SEQ ID NO: 178234 - DNA, 25 bp, Probe sequence
gggtatatgccggtaaaacgtattg

SEQ ID NO: 178235 - DNA, 25 bp, Probe sequence
ggtatatgccggtaaaacgtattga

SEQ ID NO: 178236 - DNA, 25 bp, Probe sequence
ggttgaagtatcacatcaagaaatc

SEQ ID NO: 178237 - DNA, 25 bp, Probe sequence
ggcacggttgaagtatcacatcaag

SEQ ID NO: 178238 - DNA, 25 bp, Probe sequence
tggcacggttgaagtatcacatcaa

SEQ ID NO: 178239 - DNA, 25 bp, Probe sequence
tgtcacgaatgaaaatgcaagggta

SEQ ID NO: 178240 - DNA, 25 bp, Probe sequence
tgcaagggtatatgccggtaaaacg

SEQ ID NO: 178241 - DNA, 25 bp, Probe sequence
tatatgccggtaaaacgtattgaaa

SEQ ID NO: 178242 - DNA, 25 bp, Probe sequence
ttgtttgtcacgaatgaaaatgcaa

SEQ ID NO: 178243 - DNA, 25 bp, Probe sequence
attgcctacgcatttggtttttcaa

SEQ ID NO: 178244 - DNA, 25 bp, Probe sequence
atgtcattcgtaacagaaaatccat

SEQ ID NO: 178245 - DNA, 25 bp, Probe sequence
aaatattattgcctacgcatttggt

SEQ ID NO: 178246 - DNA, 25 bp, Probe sequence
aaatccatggttaatggtactaact

SEQ ID NO: 178247 - DNA, 25 bp, Probe sequence
aacatacatggtggattctggacta

SEQ ID NO: 178248 - DNA, 25 bp, Probe sequence
aacttcgaaatttaggatatggcgt

SEQ ID NO: 178249 - DNA, 25 bp, Probe sequence
aaggcattcgtcgtagaaagcttaa

SEQ ID NO: 178250 - DNA, 25 bp, Probe sequence
ctggcattaggttatacagttgtaa

SEQ ID NO: 178251 - DNA, 25 bp, Probe sequence
cgatgcgaacaattttaacgttgaa

SEQ ID NO: 178252 - DNA, 25 bp, Probe sequence
gcatcagttagttttttagaagtat

SEQ ID NO: 178253 - DNA, 25 bp, Probe sequence
gaatatgagttagatttaccgaatg

SEQ ID NO: 178254 - DNA, 25 bp, Probe sequence
gaagtattagtttatatcgttggtt

SEQ ID NO: 178255 - DNA, 25 bp, Probe sequence
gaacctcgaaacatacatggtggat

SEQ ID NO: 178256 - DNA, 25 bp, Probe sequence
gaaaggttatcgttatattgctgca

SEQ ID NO: 178257 - DNA, 25 bp, Probe sequence
gatccgaaagcatttatcattgcgt

SEQ ID NO: 178258 - DNA, 25 bp, Probe sequence
gatttaccgaatgaacttcgaaatt

SEQ ID NO: 178259 - DNA, 25 bp, Probe sequence
gatatggcgttacgcactatgctgc

SEQ ID NO: 178260 - DNA, 25 bp, Probe sequence
gtctaatttagaccatattcaaaat

SEQ ID NO: 178261 - DNA, 25 bp, Probe sequence
ggtggattctggactaaaggcattc

SEQ ID NO: 178262 - DNA, 25 bp, Probe sequence
ggtagagatggtagtcgtatggtga

SEQ ID NO: 178263 - DNA, 25 bp, Probe sequence
ggtactaactatatttatcattaac

SEQ ID NO: 178264 - DNA, 25 bp, Probe sequence
ggtagtcgtatggtgatgcaaattt

SEQ ID NO: 178265 - DNA, 25 bp, Probe sequence
ggttatcgttatattgctgcatcag

SEQ ID NO: 178266 - DNA, 25 bp, Probe sequence
tgtaacgtttttaacgatgcgaaca

SEQ ID NO: 178267 - DNA, 25 bp, Probe sequence
tgatgcaaattttaacaccaagaaa

SEQ ID NO: 178268 - DNA, 25 bp, Probe sequence
tctggactaaaggcattcgtcgtag

SEQ ID NO: 178269 - DNA, 25 bp, Probe sequence
tcattgcgtatgaacctcgaaacat

SEQ ID NO: 178270 - DNA, 25 bp, Probe sequence
tcaataggtatcattgttggtatga

SEQ ID NO: 178271 - DNA, 25 bp, Probe sequence
tacgcatttggtttttcaataggta

SEQ ID NO: 178272 - DNA, 25 bp, Probe sequence
taggtttggttatgtctaatttaga

SEQ ID NO: 178273 - DNA, 25 bp, Probe sequence
tatcgttggtttaggtttggttatg

SEQ ID NO: 178274 - DNA, 25 bp, Probe sequence
tatatttatcattaacgtttgttat

SEQ ID NO: 178275 - DNA, 25 bp, Probe sequence
ttgctgcatcagttagttttttaga

SEQ ID NO: 178276 - DNA, 25 bp, Probe sequence
ttgtaaatgtaacttcagcagaata

SEQ ID NO: 178277 - DNA, 25 bp, Probe sequence
attgattgtacgtttattgcagtta

SEQ ID NO: 178278 - DNA, 25 bp, Probe sequence
attaagcctgcagttgatcaaagtg

SEQ ID NO: 178279 - DNA, 25 bp, Probe sequence
atgagtaaattacaagacgttattg

SEQ ID NO: 178280 - DNA, 25 bp, Probe sequence
atggagttcaaaaagatgctgatga

SEQ ID NO: 178281 - DNA, 25 bp, Probe sequence
acagtcaatattaagcctgcagttg

SEQ ID NO: 178282 - DNA, 25 bp, Probe sequence
aaaccacagcttccagatgaagatg

SEQ ID NO: 178283 - DNA, 25 bp, Probe sequence
aacgaattacgtgaagaaggcattg

SEQ ID NO: 178284 - DNA, 25 bp, Probe sequence
aagcctgcagttgatcaaagtgtgc

SEQ ID NO: 178285 - DNA, 25 bp, Probe sequence
aagacgttattgtacaagaaatgaa

SEQ ID NO: 178286 - DNA, 25 bp, Probe sequence
aagatacacgtggccaaaatcctaa

SEQ ID NO: 178287 - DNA, 25 bp, Probe sequence
aatctttagtgttaggtatttcagg

SEQ ID NO: 178288 - DNA, 25 bp, Probe sequence
aattttcaattgcttcaaaccgaca

SEQ ID NO: 178289 - DNA, 25 bp, Probe sequence
caattgcttcaaaccgacaaggtat

SEQ ID NO: 178290 - DNA, 25 bp, Probe sequence
caaatgtctgttaacgaattacgtg

SEQ ID NO: 178291 - DNA, 25 bp, Probe sequence
cacaaacgtgaacttgcatatacaa

SEQ ID NO: 178292 - DNA, 25 bp, Probe sequence
cacagcttccagatgaagatgcatt

SEQ ID NO: 178293 - DNA, 25 bp, Probe sequence
gcttccagatgaagatgcattaggt

SEQ ID NO: 178294 - DNA, 25 bp, Probe sequence
gcatatacaagatacacgtggccaa

SEQ ID NO: 178295 - DNA, 25 bp, Probe sequence
gcagttaaattaccttatggagttc

SEQ ID NO: 178296 - DNA, 25 bp, Probe sequence
gcagttgatcaaagtgtgcaatcat

SEQ ID NO: 178297 - DNA, 25 bp, Probe sequence
gcacacaaacgtgaacttgcatata

SEQ ID NO: 178298 - DNA, 25 bp, Probe sequence
gaaggtaagccagttacgccagaag

SEQ ID NO: 178299 - DNA, 25 bp, Probe sequence
gaaggcattgattgtacgtttattg

SEQ ID NO: 178300 - DNA, 25 bp, Probe sequence
gaaagtacaattttcaattgcttca

SEQ ID NO: 178301 - DNA, 25 bp, Probe sequence
gaggcgattgataattatttagaag

SEQ ID NO: 178302 - DNA, 25 bp, Probe sequence
gtaacagtcaatattaagcctgcag

SEQ ID NO: 178303 - DNA, 25 bp, Probe sequence
ggtgtaacttatgaggcgattgata

SEQ ID NO: 178304 - DNA, 25 bp, Probe sequence
ggtaagccagttacgccagaagaac

SEQ ID NO: 178305 - DNA, 25 bp, Probe sequence
taagccagttacgccagaagaacaa

SEQ ID NO: 178306 - DNA, 25 bp, Probe sequence
tagtgttaggtatttcaggaggaca

SEQ ID NO: 178307 - DNA, 25 bp, Probe sequence
ttagaaggtaagccagttacgccag

SEQ ID NO: 178308 - DNA, 25 bp, Probe sequence
tattgcagttaaattaccttatgga

SEQ ID NO: 178309 - DNA, 25 bp, Probe sequence
ttaggtgtaacttatgaggcgattg

SEQ ID NO: 178310 - DNA, 25 bp, Probe sequence
ttcaattgcttcaaaccgacaaggt

SEQ ID NO: 178311 - DNA, 25 bp, Probe sequence
attgatgcagcattgtggggcgcta

SEQ ID NO: 178312 - DNA, 25 bp, Probe sequence
atcgggggctttgattctacaagta

SEQ ID NO: 178313 - DNA, 25 bp, Probe sequence
atgttgccttcaaaaaatatgctga

SEQ ID NO: 178314 - DNA, 25 bp, Probe sequence
agtagattcttggggcgttggtaca

SEQ ID NO: 178315 - DNA, 25 bp, Probe sequence
acgcgtcattgattttatagaacat

SEQ ID NO: 178316 - DNA, 25 bp, Probe sequence
actgaaactaaaattatcgcgtcta

SEQ ID NO: 178317 - DNA, 25 bp, Probe sequence
aaatccatacgatgaacaaccttta

SEQ ID NO: 178318 - DNA, 25 bp, Probe sequence
aatggagtttggtacacgtcgtgcg

SEQ ID NO: 178319 - DNA, 25 bp, Probe sequence
aattatttggtatacctgtgtctgg

SEQ ID NO: 178320 - DNA, 25 bp, Probe sequence
caacctttaaaattattccatccag

SEQ ID NO: 178321 - DNA, 25 bp, Probe sequence
caggatacgatcaaccagcattagg

SEQ ID NO: 178322 - DNA, 25 bp, Probe sequence
catactttaaaatctggcgtgccaa

SEQ ID NO: 178323 - DNA, 25 bp, Probe sequence
ctttcgaagccattgatttgcatca

SEQ ID NO: 178324 - DNA, 25 bp, Probe sequence
gaattcgtcaaattgcatcaaatga

SEQ ID NO: 178325 - DNA, 25 bp, Probe sequence
gaagcaccattgattcaagcgcaat

SEQ ID NO: 178326 - DNA, 25 bp, Probe sequence
gaaccattgttacgcgtagaagcac

SEQ ID NO: 178327 - DNA, 25 bp, Probe sequence
gatcaaccagcattaggtgcagtat

SEQ ID NO: 178328 - DNA, 25 bp, Probe sequence
gatacattccatactttaaaatctg

SEQ ID NO: 178329 - DNA, 25 bp, Probe sequence
gattctggagatatcgcttatttat

SEQ ID NO: 178330 - DNA, 25 bp, Probe sequence
gttacgcgtagaagcaccattgatt

SEQ ID NO: 178331 - DNA, 25 bp, Probe sequence
gtacacgtcgtgcgcaagaaattga

SEQ ID NO: 178332 - DNA, 25 bp, Probe sequence
gtgtgttcctagtagatacattcca

SEQ ID NO: 178333 - DNA, 25 bp, Probe sequence
gtggctatgctgtttttaatggttt

SEQ ID NO: 178334 - DNA, 25 bp, Probe sequence
ggggcgttggtacaaagctgattac

SEQ ID NO: 178335 - DNA, 25 bp, Probe sequence
ggtgcagtatataaacttgtagcta

SEQ ID NO: 178336 - DNA, 25 bp, Probe sequence
ggcagaaggcgattatattactttg

SEQ ID NO: 178337 - DNA, 25 bp, Probe sequence
tggctacaaggatgatttcttatca

SEQ ID NO: 178338 - DNA, 25 bp, Probe sequence
tacctgtgtctggtacacatgcaca

SEQ ID NO: 178339 - DNA, 25 bp, Probe sequence
tacgagtttgaaagcacaaggtgca

SEQ ID NO: 178340 - DNA, 25 bp, Probe sequence
tagagctgcttacatcgggggcttt

SEQ ID NO: 178341 - DNA, 25 bp, Probe sequence
tatgctttggtaacgaaccattgtt

SEQ ID NO: 178342 - DNA, 25 bp, Probe sequence
tatttaaagtctattggctacaagg

SEQ ID NO: 178343 - DNA, 25 bp, Probe sequence
ttatcgcgtctaatgatttggatga

SEQ ID NO: 178344 - DNA, 25 bp, Probe sequence
ttgtggggcgctagagctgcttaca

SEQ ID NO: 178345 - DNA, 25 bp, Probe sequence
atacttcctactcgctttgtagacc

SEQ ID NO: 178346 - DNA, 25 bp, Probe sequence
atatacttcctactcgctttgtaga

SEQ ID NO: 178347 - DNA, 25 bp, Probe sequence
agcagaaaatatacttcctactcgc

SEQ ID NO: 178348 - DNA, 25 bp, Probe sequence
agaaaatatacttcctactcgcttt

SEQ ID NO: 178349 - DNA, 25 bp, Probe sequence
agcagcagaaaatatacttcctact

SEQ ID NO: 178350 - DNA, 25 bp, Probe sequence
acttcctactcgctttgtagaccat

SEQ ID NO: 178351 - DNA, 25 bp, Probe sequence
acaatgaaacatgggaatgtgaagc

SEQ ID NO: 178352 - DNA, 25 bp, Probe sequence
aaatatacttcctactcgctttgta

SEQ ID NO: 178353 - DNA, 25 bp, Probe sequence
aaaatatacttcctactcgctttgt

SEQ ID NO: 178354 - DNA, 25 bp, Probe sequence
aacaatgaaacatgggaatgtgaag

SEQ ID NO: 178355 - DNA, 25 bp, Probe sequence
aatgaaacatgggaatgtgaagcgt

SEQ ID NO: 178356 - DNA, 25 bp, Probe sequence
aatatacttcctactcgctttgtag

SEQ ID NO: 178357 - DNA, 25 bp, Probe sequence
caatgaaacatgggaatgtgaagcg

SEQ ID NO: 178358 - DNA, 25 bp, Probe sequence
cagcagaaaatatacttcctactcg

SEQ ID NO: 178359 - DNA, 25 bp, Probe sequence
cagaaaatatacttcctactcgctt

SEQ ID NO: 178360 - DNA, 25 bp, Probe sequence
cttcctactcgctttgtagaccata

SEQ ID NO: 178361 - DNA, 25 bp, Probe sequence
ctactcgctttgtagaccatacccc

SEQ ID NO: 178362 - DNA, 25 bp, Probe sequence
ctaacaatgaaacatgggaatgtga

SEQ ID NO: 178363 - DNA, 25 bp, Probe sequence
cctactcgctttgtagaccataccc

SEQ ID NO: 178364 - DNA, 25 bp, Probe sequence
gcagaaaatatacttcctactcgct

SEQ ID NO: 178365 - DNA, 25 bp, Probe sequence
gcagcagaaaatatacttcctactc

SEQ ID NO: 178366 - DNA, 25 bp, Probe sequence
gaaaatatacttcctactcgctttg

SEQ ID NO: 178367 - DNA, 25 bp, Probe sequence
tcctactcgctttgtagaccatacc

SEQ ID NO: 178368 - DNA, 25 bp, Probe sequence
tctaacaatgaaacatgggaatgtg

SEQ ID NO: 178369 - DNA, 25 bp, Probe sequence
tacttcctactcgctttgtagacca

SEQ ID NO: 178370 - DNA, 25 bp, Probe sequence
taacaatgaaacatgggaatgtgaa

SEQ ID NO: 178371 - DNA, 25 bp, Probe sequence
tatacttcctactcgctttgtagac

SEQ ID NO: 178372 - DNA, 25 bp, Probe sequence
ttcctactcgctttgtagaccatac

SEQ ID NO: 178373 - DNA, 25 bp, Probe sequence
attctttctcaaacatccgttgtgc

SEQ ID NO: 178374 - DNA, 25 bp, Probe sequence
atccgttgtgcttgctacattaact

SEQ ID NO: 178375 - DNA, 25 bp, Probe sequence
atgggtatggtaattgttgcagtca

SEQ ID NO: 178376 - DNA, 25 bp, Probe sequence
agtactcattttagtagccgcttct

SEQ ID NO: 178377 - DNA, 25 bp, Probe sequence
acgtcgtgcagtggtacttctgtta

SEQ ID NO: 178378 - DNA, 25 bp, Probe sequence
actggaaccaatttgctattcgcct

SEQ ID NO: 178379 - DNA, 25 bp, Probe sequence
actgcctttttacctcaagcaatgg

SEQ ID NO: 178380 - DNA, 25 bp, Probe sequence
acatatcttatttcagcacaaccta

SEQ ID NO: 178381 - DNA, 25 bp, Probe sequence
aattatttcaggtttcttctttgca

SEQ ID NO: 178382 - DNA, 25 bp, Probe sequence
cagcattccaattattaggcgcatc

SEQ ID NO: 178383 - DNA, 25 bp, Probe sequence
caggtttcttctttgcatttggtgc

SEQ ID NO: 178384 - DNA, 25 bp, Probe sequence
cctgtacatcaaattatcggtgcta

SEQ ID NO: 178385 - DNA, 25 bp, Probe sequence
gccatgccagtcacaacagcattcc

SEQ ID NO: 178386 - DNA, 25 bp, Probe sequence
gctattcgccttattatcaggtgca

SEQ ID NO: 178387 - DNA, 25 bp, Probe sequence
gcaagcaacttctattgatggccta

SEQ ID NO: 178388 - DNA, 25 bp, Probe sequence
gagcattgttgcattacttatcggg

SEQ ID NO: 178389 - DNA, 25 bp, Probe sequence
gatactggttatattcagctgcacc

SEQ ID NO: 178390 - DNA, 25 bp, Probe sequence
gtttggtggtaaacctgtacatcaa

SEQ ID NO: 178391 - DNA, 25 bp, Probe sequence
ggggtgtctttgcattaggaaattg

SEQ ID NO: 178392 - DNA, 25 bp, Probe sequence
ggtgcaggatggggattcggacaaa

SEQ ID NO: 178393 - DNA, 25 bp, Probe sequence
ggatttacagctttagtcgttattc

SEQ ID NO: 178394 - DNA, 25 bp, Probe sequence
ggaaattggccaggcattggtcata

SEQ ID NO: 178395 - DNA, 25 bp, Probe sequence
tgatggcctaactgcctttttacct

SEQ ID NO: 178396 - DNA, 25 bp, Probe sequence
tgttgcagtcatttatggctttatg

SEQ ID NO: 178397 - DNA, 25 bp, Probe sequence
tcgggttaggccccttaattggctg

SEQ ID NO: 178398 - DNA, 25 bp, Probe sequence
tcttcccaacagtcgcttcaaagtt

SEQ ID NO: 178399 - DNA, 25 bp, Probe sequence
taacgccaaaaatttacgtcgtgca

SEQ ID NO: 178400 - DNA, 25 bp, Probe sequence
tagcaactggatttattctttctca

SEQ ID NO: 178401 - DNA, 25 bp, Probe sequence
tatcggtgctactgtaggtacgtta

SEQ ID NO: 178402 - DNA, 25 bp, Probe sequence
taggcgcatctttatggggtgtctt

SEQ ID NO: 178403 - DNA, 25 bp, Probe sequence
tattcagctgcaccgcaagcaactt

SEQ ID NO: 178404 - DNA, 25 bp, Probe sequence
tattagccgtagtcacatcaagtgg

SEQ ID NO: 178405 - DNA, 25 bp, Probe sequence
ttaattggctggggcttcttcccaa

SEQ ID NO: 178406 - DNA, 25 bp, Probe sequence
ttagtagccgcttctgttacagtat

SEQ ID NO: 178407 - DNA, 25 bp, Probe sequence
attactacttatggcacctgcagct

SEQ ID NO: 178408 - DNA, 25 bp, Probe sequence
atttacctggtggtcagacgttaat

SEQ ID NO: 178409 - DNA, 25 bp, Probe sequence
aggattcttatctatgtttgtatcg

SEQ ID NO: 178410 - DNA, 25 bp, Probe sequence
aggtggatttattttggcaattgca

SEQ ID NO: 178411 - DNA, 25 bp, Probe sequence
agagctcccttggggtgtattaatt

SEQ ID NO: 178412 - DNA, 25 bp, Probe sequence
agcaattggctatgcaggtacgatt

SEQ ID NO: 178413 - DNA, 25 bp, Probe sequence
agcgattactttatggattgcgact

SEQ ID NO: 178414 - DNA, 25 bp, Probe sequence
acctgcagctatggcggctaactgt

SEQ ID NO: 178415 - DNA, 25 bp, Probe sequence
acatgttaccagtagggacaccacc

SEQ ID NO: 178416 - DNA, 25 bp, Probe sequence
acaccagaacaagtatcatccgaat

SEQ ID NO: 178417 - DNA, 25 bp, Probe sequence
aaatctctagttttagcaattggct

SEQ ID NO: 178418 - DNA, 25 bp, Probe sequence
aacatcgccgtatcattgactggga

SEQ ID NO: 178419 - DNA, 25 bp, Probe sequence
aatggcatcagtaggattctgggta

SEQ ID NO: 178420 - DNA, 25 bp, Probe sequence
ccaattgtgttattaccattaggtc

SEQ ID NO: 178421 - DNA, 25 bp, Probe sequence
gcaactgcaacgatgattttaccga

SEQ ID NO: 178422 - DNA, 25 bp, Probe sequence
gcaacgagcttattaccaattgtgt

SEQ ID NO: 178423 - DNA, 25 bp, Probe sequence
gcaattcctattgcagcaacgagct

SEQ ID NO: 178424 - DNA, 25 bp, Probe sequence
gaagttgcaaaagagctcccttggg

SEQ ID NO: 178425 - DNA, 25 bp, Probe sequence
gaagcacatgatttacaagaagcca

SEQ ID NO: 178426 - DNA, 25 bp, Probe sequence
gatggtacgattgctatttttatat

SEQ ID NO: 178427 - DNA, 25 bp, Probe sequence
gattgtagggattccaacggtcatt

SEQ ID NO: 178428 - DNA, 25 bp, Probe sequence
gattcatggtggcaacaggattctt

SEQ ID NO: 178429 - DNA, 25 bp, Probe sequence
gttgctgttggagtgcatccattac

SEQ ID NO: 178430 - DNA, 25 bp, Probe sequence
gttaggtattacttggctctattta

SEQ ID NO: 178431 - DNA, 25 bp, Probe sequence
gtttgtatcgaacactgcagctgta

SEQ ID NO: 178432 - DNA, 25 bp, Probe sequence
ggtggcggtttagcattagcgaaag

SEQ ID NO: 178433 - DNA, 25 bp, Probe sequence
ggtggattactgaagcaattcctat

SEQ ID NO: 178434 - DNA, 25 bp, Probe sequence
ggattgcgacttggtggattactga

SEQ ID NO: 178435 - DNA, 25 bp, Probe sequence
ggcttatttcaatcaacatcaatca

SEQ ID NO: 178436 - DNA, 25 bp, Probe sequence
tggcggctaactgtgcatacatgtt

SEQ ID NO: 178437 - DNA, 25 bp, Probe sequence
tgattttaccgattttagcaacgtt

SEQ ID NO: 178438 - DNA, 25 bp, Probe sequence
tgatataaatcaaccactgccattg

SEQ ID NO: 178439 - DNA, 25 bp, Probe sequence
tattaggtccattacttttcctatt

SEQ ID NO: 178440 - DNA, 25 bp, Probe sequence
ttctttcatccacaagacttacctt

SEQ ID NO: 178441 - DNA, 25 bp, Probe sequence
ttttggaccttcagaattgcccgaa

SEQ ID NO: 178442 - DNA, 25 bp, Probe sequence
attaatcgttgggaatacattcaat

SEQ ID NO: 178443 - DNA, 25 bp, Probe sequence
atacattcaataattcgactcaatc

SEQ ID NO: 178444 - DNA, 25 bp, Probe sequence
ataattcgactcaatcaattcattt

SEQ ID NO: 178445 - DNA, 25 bp, Probe sequence
atcgtggttataatggacacagtca

SEQ ID NO: 178446 - DNA, 25 bp, Probe sequence
agggacgtatgatatttgcaaacca

SEQ ID NO: 178447 - DNA, 25 bp, Probe sequence
atggacacagtcatattcatattaa

SEQ ID NO: 178448 - DNA, 25 bp, Probe sequence
actaaagatactcgagcaatacaac

SEQ ID NO: 178449 - DNA, 25 bp, Probe sequence
aaggttatgcattaactcccttgaa

SEQ ID NO: 178450 - DNA, 25 bp, Probe sequence
gcttttccaaaattcggaacgacag

SEQ ID NO: 178451 - DNA, 25 bp, Probe sequence
gcgggtattcaagttactacaatca

SEQ ID NO: 178452 - DNA, 25 bp, Probe sequence
gcattaactcccttgaagtataaag

SEQ ID NO: 178453 - DNA, 25 bp, Probe sequence
gaaaagacttaggttcccaagcagg

SEQ ID NO: 178454 - DNA, 25 bp, Probe sequence
gaatgtagtgagtggtcatgcaatt

SEQ ID NO: 178455 - DNA, 25 bp, Probe sequence
gaagcaatacaattagacattcaag

SEQ ID NO: 178456 - DNA, 25 bp, Probe sequence
gaccttcagaattgcccgaaatggg

SEQ ID NO: 178457 - DNA, 25 bp, Probe sequence
gacattcaagtacctggtgcttttc

SEQ ID NO: 178458 - DNA, 25 bp, Probe sequence
gacagtttatataccgaaagggacg

SEQ ID NO: 178459 - DNA, 25 bp, Probe sequence
gatgcgatacatgtacgtaattata

SEQ ID NO: 178460 - DNA, 25 bp, Probe sequence
gatacagtgtttttaagtcctgttg

SEQ ID NO: 178461 - DNA, 25 bp, Probe sequence
gatatatggcaatacaacacttttg

SEQ ID NO: 178462 - DNA, 25 bp, Probe sequence
gtacctggtgcttttccaaaattcg

SEQ ID NO: 178463 - DNA, 25 bp, Probe sequence
gtgctattggctcacatgcaagtag

SEQ ID NO: 178464 - DNA, 25 bp, Probe sequence
gggaagttggaatcgtgctattggc

SEQ ID NO: 178465 - DNA, 25 bp, Probe sequence
ggaacgacagatggtacgataacga

SEQ ID NO: 178466 - DNA, 25 bp, Probe sequence
ggaagatgtaaaccaacgacagttt

SEQ ID NO: 178467 - DNA, 25 bp, Probe sequence
ggaatcgtgctattggctcacatgc

SEQ ID NO: 178468 - DNA, 25 bp, Probe sequence
ggctcacatgcaagtagacataatc

SEQ ID NO: 178469 - DNA, 25 bp, Probe sequence
tgagtggtcatgcaattgatgcttg

SEQ ID NO: 178470 - DNA, 25 bp, Probe sequence
tgatatttgcaaaccattaacgata

SEQ ID NO: 178471 - DNA, 25 bp, Probe sequence
tcgctttggtttttatcgtggttat

SEQ ID NO: 178472 - DNA, 25 bp, Probe sequence
tcatattcatattaaaggcggcaag

SEQ ID NO: 178473 - DNA, 25 bp, Probe sequence
tatcgaagattgttattttggacct

SEQ ID NO: 178474 - DNA, 25 bp, Probe sequence
ttaagtcctgttgaagcgggtattc

SEQ ID NO: 178475 - DNA, 25 bp, Probe sequence
atttatactcaacatcgcaaatatt

SEQ ID NO: 178476 - DNA, 25 bp, Probe sequence
atagagcgatgaatcgtgtacataa

SEQ ID NO: 178477 - DNA, 25 bp, Probe sequence
atggtctttcgaattatatatgttg

SEQ ID NO: 178478 - DNA, 25 bp, Probe sequence
agttgaaaatagagcgatgaatcgt

SEQ ID NO: 178479 - DNA, 25 bp, Probe sequence
agcgatgaatcgtgtacataataat

SEQ ID NO: 178480 - DNA, 25 bp, Probe sequence
acaaaaatttatactcaacatcgca

SEQ ID NO: 178481 - DNA, 25 bp, Probe sequence
aaatttatactcaacatcgcaaata

SEQ ID NO: 178482 - DNA, 25 bp, Probe sequence
aaatggtctttcgaattatatatgt

SEQ ID NO: 178483 - DNA, 25 bp, Probe sequence
aaaaatttatactcaacatcgcaaa

SEQ ID NO: 178484 - DNA, 25 bp, Probe sequence
aaaatttatactcaacatcgcaaat

SEQ ID NO: 178485 - DNA, 25 bp, Probe sequence
aacaaaaatttatactcaacatcgc

SEQ ID NO: 178486 - DNA, 25 bp, Probe sequence
aatggtctttcgaattatatatgtt

SEQ ID NO: 178487 - DNA, 25 bp, Probe sequence
aataatatttataactttaatcata

SEQ ID NO: 178488 - DNA, 25 bp, Probe sequence
aatagagcgatgaatcgtgtacata

SEQ ID NO: 178489 - DNA, 25 bp, Probe sequence
aatttatactcaacatcgcaaatat

SEQ ID NO: 178490 - DNA, 25 bp, Probe sequence
caaaaatttatactcaacatcgcaa

SEQ ID NO: 178491 - DNA, 25 bp, Probe sequence
gcgatgaatcgtgtacataataata

SEQ ID NO: 178492 - DNA, 25 bp, Probe sequence
gaattatatatgttgaaagttgaaa

SEQ ID NO: 178493 - DNA, 25 bp, Probe sequence
gaaagttgaaaatagagcgatgaat

SEQ ID NO: 178494 - DNA, 25 bp, Probe sequence
gagcgatgaatcgtgtacataataa

SEQ ID NO: 178495 - DNA, 25 bp, Probe sequence
gatgaatcgtgtacataataatatt

SEQ ID NO: 178496 - DNA, 25 bp, Probe sequence
ggtctttcgaattatatatgttgaa

SEQ ID NO: 178497 - DNA, 25 bp, Probe sequence
tgtggccgttaattttaaatggtct

SEQ ID NO: 178498 - DNA, 25 bp, Probe sequence
tggtctttcgaattatatatgttga

SEQ ID NO: 178499 - DNA, 25 bp, Probe sequence
tgttgtggccgttaattttaaatgg

SEQ ID NO: 178500 - DNA, 25 bp, Probe sequence
tgaatcgtgtacataataatattta

SEQ ID NO: 178501 - DNA, 25 bp, Probe sequence
tcgaattatatatgttgaaagttga

SEQ ID NO: 178502 - DNA, 25 bp, Probe sequence
taaatggtctttcgaattatatatg

SEQ ID NO: 178503 - DNA, 25 bp, Probe sequence
tagagcgatgaatcgtgtacataat

SEQ ID NO: 178504 - DNA, 25 bp, Probe sequence
tatttataactttaatcataacgaa

SEQ ID NO: 178505 - DNA, 25 bp, Probe sequence
tttaaatggtctttcgaattatata

SEQ ID NO: 178506 - DNA, 25 bp, Probe sequence
tttatactcaacatcgcaaatattt

SEQ ID NO: 178507 - DNA, 25 bp, Probe sequence
ttttaaatggtctttcgaattatat

SEQ ID NO: 178508 - DNA, 25 bp, Probe sequence
ttaaatggtctttcgaattatatat

SEQ ID NO: 178509 - DNA, 25 bp, Probe sequence
atgattttccaacaggtacacatga

SEQ ID NO: 178510 - DNA, 25 bp, Probe sequence
atggatatattggttcttacactaa

SEQ ID NO: 178511 - DNA, 25 bp, Probe sequence
agatttaggtgctgatcgtatcgtt

SEQ ID NO: 178512 - DNA, 25 bp, Probe sequence
actcgtgtagcatctgaaggtgtat

SEQ ID NO: 178513 - DNA, 25 bp, Probe sequence
aactccagatggtaagtacgttgca

SEQ ID NO: 178514 - DNA, 25 bp, Probe sequence
aacgatatttatttgaagcggtata

SEQ ID NO: 178515 - DNA, 25 bp, Probe sequence
aagaaggagaacaatgcggtgttgc

SEQ ID NO: 178516 - DNA, 25 bp, Probe sequence
caggttgttatgtatcgatttcaga

SEQ ID NO: 178517 - DNA, 25 bp, Probe sequence
gcctcatcagatgaccttttagttt

SEQ ID NO: 178518 - DNA, 25 bp, Probe sequence
gctcgagcgtcatttaacaattcct

SEQ ID NO: 178519 - DNA, 25 bp, Probe sequence
gcattgcaatttttaaagttcttga

SEQ ID NO: 178520 - DNA, 25 bp, Probe sequence
gcatctgaaggtgtatgtgtcatat

SEQ ID NO: 178521 - DNA, 25 bp, Probe sequence
gaaaatttgcttatgtcgtacacga

SEQ ID NO: 178522 - DNA, 25 bp, Probe sequence
gaaagacaagatcatccacacgcac

SEQ ID NO: 178523 - DNA, 25 bp, Probe sequence
gaaagtggtggtcaattcccaagag

SEQ ID NO: 178524 - DNA, 25 bp, Probe sequence
gatgacaacgggtttgaattttata

SEQ ID NO: 178525 - DNA, 25 bp, Probe sequence
gaccttttagtttgtgctcatgagc

SEQ ID NO: 178526 - DNA, 25 bp, Probe sequence
gagcaaggagattcagttgtaactg

SEQ ID NO: 178527 - DNA, 25 bp, Probe sequence
gagattttaatattgcctcatcaga

SEQ ID NO: 178528 - DNA, 25 bp, Probe sequence
gagggcatgatagcattgcaatttt

SEQ ID NO: 178529 - DNA, 25 bp, Probe sequence
gagtgttgcagaatataatgacggt

SEQ ID NO: 178530 - DNA, 25 bp, Probe sequence
gatggagatactaaacttgcagcag

SEQ ID NO: 178531 - DNA, 25 bp, Probe sequence
gatcatccacacgcacattatatta

SEQ ID NO: 178532 - DNA, 25 bp, Probe sequence
gataatggtcaacacttagaactag

SEQ ID NO: 178533 - DNA, 25 bp, Probe sequence
gatcaacaattcttatatgtatcta

SEQ ID NO: 178534 - DNA, 25 bp, Probe sequence
gatactaaacttgcagcagtgcgtt

SEQ ID NO: 178535 - DNA, 25 bp, Probe sequence
gtttgtcttcaaaagctggtacagg

SEQ ID NO: 178536 - DNA, 25 bp, Probe sequence
gtacgttgcagtaacagatttaggt

SEQ ID NO: 178537 - DNA, 25 bp, Probe sequence
gtggtcaattcccaagagattttaa

SEQ ID NO: 178538 - DNA, 25 bp, Probe sequence
gggacaagacatattgaatttcatg

SEQ ID NO: 178539 - DNA, 25 bp, Probe sequence
ggtgctgatcgtatcgttacttata

SEQ ID NO: 178540 - DNA, 25 bp, Probe sequence
ggatttgaattagaagcgtctacat

SEQ ID NO: 178541 - DNA, 25 bp, Probe sequence
tcagtcacgtattgatttattagaa

SEQ ID NO: 178542 - DNA, 25 bp, Probe sequence
taacaattcctgaaaactttgatgg

SEQ ID NO: 178543 - DNA, 25 bp, Probe sequence
attcgtatttagcttagttgctatt

SEQ ID NO: 178544 - DNA, 25 bp, Probe sequence
attagttgctggtgttggtgtagta

SEQ ID NO: 178545 - DNA, 25 bp, Probe sequence
agcatttgcttatatctttaaaaaa

SEQ ID NO: 178546 - DNA, 25 bp, Probe sequence
acattagttgctggtgttggtgtag

SEQ ID NO: 178547 - DNA, 25 bp, Probe sequence
aacattagttgctggtgttggtgta

SEQ ID NO: 178548 - DNA, 25 bp, Probe sequence
aattcgtatttagcttagttgctat

SEQ ID NO: 178549 - DNA, 25 bp, Probe sequence
cattagttgctggtgttggtgtagt

SEQ ID NO: 178550 - DNA, 25 bp, Probe sequence
ctggtgttggtgtagtagcatttgc

SEQ ID NO: 178551 - DNA, 25 bp, Probe sequence
gctattacaacattagttgctggtg

SEQ ID NO: 178552 - DNA, 25 bp, Probe sequence
gcttagttgctattacaacattagt

SEQ ID NO: 178553 - DNA, 25 bp, Probe sequence
gcatttgcttatatctttaaaaaag

SEQ ID NO: 178554 - DNA, 25 bp, Probe sequence
gttggtgtagtagcatttgcttata

SEQ ID NO: 178555 - DNA, 25 bp, Probe sequence
gttgctggtgttggtgtagtagcat

SEQ ID NO: 178556 - DNA, 25 bp, Probe sequence
gttgctattacaacattagttgctg

SEQ ID NO: 178557 - DNA, 25 bp, Probe sequence
gtatttagcttagttgctattacaa

SEQ ID NO: 178558 - DNA, 25 bp, Probe sequence
gtagtagcatttgcttatatcttta

SEQ ID NO: 178559 - DNA, 25 bp, Probe sequence
gtagcatttgcttatatctttaaaa

SEQ ID NO: 178560 - DNA, 25 bp, Probe sequence
gtgttggtgtagtagcatttgctta

SEQ ID NO: 178561 - DNA, 25 bp, Probe sequence
gtgtagtagcatttgcttatatctt

SEQ ID NO: 178562 - DNA, 25 bp, Probe sequence
gtgtgtttaaattcgtatttagctt

SEQ ID NO: 178563 - DNA, 25 bp, Probe sequence
gtggaattttattaaatgtgtgttt

SEQ ID NO: 178564 - DNA, 25 bp, Probe sequence
ggtgtagtagcatttgcttatatct

SEQ ID NO: 178565 - DNA, 25 bp, Probe sequence
ggtgttggtgtagtagcatttgctt

SEQ ID NO: 178566 - DNA, 25 bp, Probe sequence
tggtgttggtgtagtagcatttgct

SEQ ID NO: 178567 - DNA, 25 bp, Probe sequence
tgttggtgtagtagcatttgcttat

SEQ ID NO: 178568 - DNA, 25 bp, Probe sequence
tcgtatttagcttagttgctattac

SEQ ID NO: 178569 - DNA, 25 bp, Probe sequence
taaatgtgtgtttaaattcgtattt

SEQ ID NO: 178570 - DNA, 25 bp, Probe sequence
taaattcgtatttagcttagttgct

SEQ ID NO: 178571 - DNA, 25 bp, Probe sequence
tacaacattagttgctggtgttggt

SEQ ID NO: 178572 - DNA, 25 bp, Probe sequence
tagcttagttgctattacaacatta

SEQ ID NO: 178573 - DNA, 25 bp, Probe sequence
tagttgctggtgttggtgtagtagc

SEQ ID NO: 178574 - DNA, 25 bp, Probe sequence
tattacaacattagttgctggtgtt

SEQ ID NO: 178575 - DNA, 25 bp, Probe sequence
tttagcttagttgctattacaacat

SEQ ID NO: 178576 - DNA, 25 bp, Probe sequence
ttagttgctggtgttggtgtagtag

SEQ ID NO: 178577 - DNA, 25 bp, Probe sequence
atcttgacgcactagattcaaagac

SEQ ID NO: 178578 - DNA, 25 bp, Probe sequence
atgcaattgatatgaatccttttca

SEQ ID NO: 178579 - DNA, 25 bp, Probe sequence
aggaagtgttagaatcagtgatgtt

SEQ ID NO: 178580 - DNA, 25 bp, Probe sequence
accattatttggttcagctatgata

SEQ ID NO: 178581 - DNA, 25 bp, Probe sequence
aaacgatcatggtgacattgaattt

SEQ ID NO: 178582 - DNA, 25 bp, Probe sequence
aaaactcaaatcttgacgcactaga

SEQ ID NO: 178583 - DNA, 25 bp, Probe sequence
aaaacattcaaagacgatgcttttg

SEQ ID NO: 178584 - DNA, 25 bp, Probe sequence
aacgttaacgattgaaatgcctgat

SEQ ID NO: 178585 - DNA, 25 bp, Probe sequence
aagcttctactaaacaaggagatat

SEQ ID NO: 178586 - DNA, 25 bp, Probe sequence
aagagtcaaattaaacaatccatat

SEQ ID NO: 178587 - DNA, 25 bp, Probe sequence
aaggtctaagacaagaggatatgca

SEQ ID NO: 178588 - DNA, 25 bp, Probe sequence
caatccatatttttaaacgatcatg

SEQ ID NO: 178589 - DNA, 25 bp, Probe sequence
gctaaatccgggaacgggtgatagc

SEQ ID NO: 178590 - DNA, 25 bp, Probe sequence
tccgggaacgggtgatagcgtagtt

SEQ ID NO: 178591 - DNA, 25 bp, Probe sequence
gctacaaatcgacaagagtcaaatt

SEQ ID NO: 178592 - DNA, 25 bp, Probe sequence
gcagcaaccattatttggttcagct

SEQ ID NO: 178593 - DNA, 25 bp, Probe sequence
gaaatgcctgataaaatgattaaac

SEQ ID NO: 178594 - DNA, 25 bp, Probe sequence
gacgatgcttttgacaatgtatcta

SEQ ID NO: 178595 - DNA, 25 bp, Probe sequence
gacgcactagattcaaagacaaata

SEQ ID NO: 178596 - DNA, 25 bp, Probe sequence
gatgcaaaagcttctactaaacaag

SEQ ID NO: 178597 - DNA, 25 bp, Probe sequence
gatgcttttgacaatgtatctataa

SEQ ID NO: 178598 - DNA, 25 bp, Probe sequence
gataagacgttgaagattagtgata

SEQ ID NO: 178599 - DNA, 25 bp, Probe sequence
gttttagaattttatacgattgatg

SEQ ID NO: 178600 - DNA, 25 bp, Probe sequence
gtttgttgtcttttttacagcagca

SEQ ID NO: 178601 - DNA, 25 bp, Probe sequence
gtcttttttacagcagcaaccatta

SEQ ID NO: 178602 - DNA, 25 bp, Probe sequence
ggagcaggaagtgttagaatcagtg

SEQ ID NO: 178603 - DNA, 25 bp, Probe sequence
tgggcttttagtgtttgttgtcttt

SEQ ID NO: 178604 - DNA, 25 bp, Probe sequence
tgaagaaattcttttttattgggct

SEQ ID NO: 178605 - DNA, 25 bp, Probe sequence
tgaatccttttcatgagaataagaa

SEQ ID NO: 178606 - DNA, 25 bp, Probe sequence
tgaatttaaaaacatgccatcaaaa

SEQ ID NO: 178607 - DNA, 25 bp, Probe sequence
tcaaagcattaacggtgaagtagtt

SEQ ID NO: 178608 - DNA, 25 bp, Probe sequence
tagagaacacaagtattcaaagcat

SEQ ID NO: 178609 - DNA, 25 bp, Probe sequence
tattgggcttttagtgtttgttgtc

SEQ ID NO: 178610 - DNA, 25 bp, Probe sequence
ttggatagtacagaacttcgtataa

SEQ ID NO: 178611 - DNA, 25 bp, Probe sequence
attctatctatttttgtcatcctta

SEQ ID NO: 178612 - DNA, 25 bp, Probe sequence
atatttcaagagctgttgctgcttc

SEQ ID NO: 178613 - DNA, 25 bp, Probe sequence
atcacttttgctgctgttttgtcca

SEQ ID NO: 178614 - DNA, 25 bp, Probe sequence
atctatttttgtcatccttatacca

SEQ ID NO: 178615 - DNA, 25 bp, Probe sequence
atgaacgttatttttatgagcaaga

SEQ ID NO: 178616 - DNA, 25 bp, Probe sequence
agaatacatttatcgtttaatctta

SEQ ID NO: 178617 - DNA, 25 bp, Probe sequence
acccacaagatgttgcagctgaaac

SEQ ID NO: 178618 - DNA, 25 bp, Probe sequence
actgtcaaaggaagcgttagaaaat

SEQ ID NO: 178619 - DNA, 25 bp, Probe sequence
acttttgctgctgttttgtccaatt

SEQ ID NO: 178620 - DNA, 25 bp, Probe sequence
aagaagttaaaagacccacaagatg

SEQ ID NO: 178621 - DNA, 25 bp, Probe sequence
aagacccacaagatgttgcagctga

SEQ ID NO: 178622 - DNA, 25 bp, Probe sequence
gctgctgttttgtccaattatttta

SEQ ID NO: 178623 - DNA, 25 bp, Probe sequence
gcttcattaagtttaggcattctat

SEQ ID NO: 178624 - DNA, 25 bp, Probe sequence
gagctgttgctgcttcattaagttt

SEQ ID NO: 178625 - DNA, 25 bp, Probe sequence
gagcaagaacttaatggcgttgatg

SEQ ID NO: 178626 - DNA, 25 bp, Probe sequence
gattagtatttatcattgtcatatt

SEQ ID NO: 178627 - DNA, 25 bp, Probe sequence
gttgctgcttcattaagtttaggca

SEQ ID NO: 178628 - DNA, 25 bp, Probe sequence
gtattttttgccatatcatattcag

SEQ ID NO: 178629 - DNA, 25 bp, Probe sequence
gtaatgtattttttgccatatcata

SEQ ID NO: 178630 - DNA, 25 bp, Probe sequence
gtcatccttataccagtatctatag

SEQ ID NO: 178631 - DNA, 25 bp, Probe sequence
gtccaattattttattagcatcagc

SEQ ID NO: 178632 - DNA, 25 bp, Probe sequence
ggattatttgtattagcattatttt

SEQ ID NO: 178633 - DNA, 25 bp, Probe sequence
ggcattctatctatttttgtcatcc

SEQ ID NO: 178634 - DNA, 25 bp, Probe sequence
tgccatatcatattcaggattagga

SEQ ID NO: 178635 - DNA, 25 bp, Probe sequence
tcattgtcatatttaagattttaga

SEQ ID NO: 178636 - DNA, 25 bp, Probe sequence
tcaagagctgttgctgcttcattaa

SEQ ID NO: 178637 - DNA, 25 bp, Probe sequence
taccagtatctatagttggattatt

SEQ ID NO: 178638 - DNA, 25 bp, Probe sequence
tttgctgctgttttgtccaattatt

SEQ ID NO: 178639 - DNA, 25 bp, Probe sequence
ttttgtcatccttataccagtatct

SEQ ID NO: 178640 - DNA, 25 bp, Probe sequence
ttagcatcagcaatatccagaggaa

SEQ ID NO: 178641 - DNA, 25 bp, Probe sequence
ttactttggtatattaaaactgtca

SEQ ID NO: 178642 - DNA, 25 bp, Probe sequence
ttatttttaatatcacttttgctgc

SEQ ID NO: 178643 - DNA, 25 bp, Probe sequence
ttaatatcacttttgctgctgtttt

SEQ ID NO: 178644 - DNA, 25 bp, Probe sequence
ttgattatgctgaatctaaaccaac

SEQ ID NO: 178645 - DNA, 25 bp, Probe sequence
attcaaaatcgctgggttgtgttta

SEQ ID NO: 178646 - DNA, 25 bp, Probe sequence
atctgttcttttggtgtattaattg

SEQ ID NO: 178647 - DNA, 25 bp, Probe sequence
atcgctgggttgtgtttatattatt

SEQ ID NO: 178648 - DNA, 25 bp, Probe sequence
agtgagagaaaaggataacatcgtt

SEQ ID NO: 178649 - DNA, 25 bp, Probe sequence
aaactgtggatttgtctaatcttga

SEQ ID NO: 178650 - DNA, 25 bp, Probe sequence
aaaatcgctgggttgtgtttatatt

SEQ ID NO: 178651 - DNA, 25 bp, Probe sequence
aacgcgattgaaaatcttggattcg

SEQ ID NO: 178652 - DNA, 25 bp, Probe sequence
aagttggcaatgatttctcatcggt

SEQ ID NO: 178653 - DNA, 25 bp, Probe sequence
aagggtgacatcagtgcgtattcaa

SEQ ID NO: 178654 - DNA, 25 bp, Probe sequence
aatgatttctcatcggtaaagtata

SEQ ID NO: 178655 - DNA, 25 bp, Probe sequence
ctgttcttttggtgtattaattggt

SEQ ID NO: 178656 - DNA, 25 bp, Probe sequence
gcgtattcaaaatcgctgggttgtg

SEQ ID NO: 178657 - DNA, 25 bp, Probe sequence
gcgattgaaaatcttggattcggat

SEQ ID NO: 178658 - DNA, 25 bp, Probe sequence
gctgggttgtgtttatattattttt

SEQ ID NO: 178659 - DNA, 25 bp, Probe sequence
gaacaaaagttggcaatgatttctc

SEQ ID NO: 178660 - DNA, 25 bp, Probe sequence
gaaaagatacatactaattttgatg

SEQ ID NO: 178661 - DNA, 25 bp, Probe sequence
gaaagggtgacatcagtgcgtattc

SEQ ID NO: 178662 - DNA, 25 bp, Probe sequence
ggttcgccgataaataacgcgattg

SEQ ID NO: 178663 - DNA, 25 bp, Probe sequence
gataacatcgttaaggggataatat

SEQ ID NO: 178664 - DNA, 25 bp, Probe sequence
gatttctcatcggtaaagtatattg

SEQ ID NO: 178665 - DNA, 25 bp, Probe sequence
gttggcaatgatttctcatcggtaa

SEQ ID NO: 178666 - DNA, 25 bp, Probe sequence
gtatattgatagagataaccattta

SEQ ID NO: 178667 - DNA, 25 bp, Probe sequence
gtcatacgaaaactgtggatttgtc

SEQ ID NO: 178668 - DNA, 25 bp, Probe sequence
gtgcgtattcaaaatcgctgggttg

SEQ ID NO: 178669 - DNA, 25 bp, Probe sequence
gtgacatcagtgcgtattcaaaatc

SEQ ID NO: 178670 - DNA, 25 bp, Probe sequence
gtggatttgtctaatcttgaaataa

SEQ ID NO: 178671 - DNA, 25 bp, Probe sequence
gggtgacatcagtgcgtattcaaaa

SEQ ID NO: 178672 - DNA, 25 bp, Probe sequence
ggtttatatcaatatcgtcatacga

SEQ ID NO: 178673 - DNA, 25 bp, Probe sequence
ggcaatgatttctcatcggtaaagt

SEQ ID NO: 178674 - DNA, 25 bp, Probe sequence
ggaattggttcgccgataaataacg

SEQ ID NO: 178675 - DNA, 25 bp, Probe sequence
tttataacagtaaagctcaccctga

SEQ ID NO: 178676 - DNA, 25 bp, Probe sequence
tttttaatctgttcttttggtgtat

SEQ ID NO: 178677 - DNA, 25 bp, Probe sequence
ttatttttaatctgttcttttggtg

SEQ ID NO: 178678 - DNA, 25 bp, Probe sequence
ttggtgtattaattggtttatatca

SEQ ID NO: 178679 - DNA, 25 bp, Probe sequence
atatcccttttgcttacttaactga

SEQ ID NO: 178680 - DNA, 25 bp, Probe sequence
atttgcattaattcattatgtgatt

SEQ ID NO: 178681 - DNA, 25 bp, Probe sequence
ataattggattaatgtttgttgtta

SEQ ID NO: 178682 - DNA, 25 bp, Probe sequence
atctttttactattctttggcttgt

SEQ ID NO: 178683 - DNA, 25 bp, Probe sequence
atgatattttcattaggtgtatttt

SEQ ID NO: 178684 - DNA, 25 bp, Probe sequence
atggatctgtatttgctgcagcaaa

SEQ ID NO: 178685 - DNA, 25 bp, Probe sequence
atgtgattttgattgttgtgcaggc

SEQ ID NO: 178686 - DNA, 25 bp, Probe sequence
agcaattggcaatgggtaatttcat

SEQ ID NO: 178687 - DNA, 25 bp, Probe sequence
actgataaaatgattagctctaact

SEQ ID NO: 178688 - DNA, 25 bp, Probe sequence
acatatttagcgatactagtcgtat

SEQ ID NO: 178689 - DNA, 25 bp, Probe sequence
aaagtcctttaacatatttagcgat

SEQ ID NO: 178690 - DNA, 25 bp, Probe sequence
aagacaattacgcgtgatttttcac

SEQ ID NO: 178691 - DNA, 25 bp, Probe sequence
aatttggcgttttctaaatatgtag

SEQ ID NO: 178692 - DNA, 25 bp, Probe sequence
gctgcagcaaaatggttattgttaa

SEQ ID NO: 178693 - DNA, 25 bp, Probe sequence
gaatatcttatatgtcgctaaaaaa

SEQ ID NO: 178694 - DNA, 25 bp, Probe sequence
gataatttatggttcttcctaatct

SEQ ID NO: 178695 - DNA, 25 bp, Probe sequence
gattgttgtgcaggcatctagtaat

SEQ ID NO: 178696 - DNA, 25 bp, Probe sequence
gttggatacattatttcgaaaacaa

SEQ ID NO: 178697 - DNA, 25 bp, Probe sequence
gggtaatttcattaggttctatagt

SEQ ID NO: 178698 - DNA, 25 bp, Probe sequence
tgattatatcccttttgcttactta

SEQ ID NO: 178699 - DNA, 25 bp, Probe sequence
tgcttttgattatatcccttttgct

SEQ ID NO: 178700 - DNA, 25 bp, Probe sequence
tcccttttgcttacttaactgataa

SEQ ID NO: 178701 - DNA, 25 bp, Probe sequence
tcacacttgcatcacaaaaaacagc

SEQ ID NO: 178702 - DNA, 25 bp, Probe sequence
taacccgaaacatattattgtctat

SEQ ID NO: 178703 - DNA, 25 bp, Probe sequence
tacgcgtgatttttcacaaggtaca

SEQ ID NO: 178704 - DNA, 25 bp, Probe sequence
tagtcgtatctagtttgattgcaac

SEQ ID NO: 178705 - DNA, 25 bp, Probe sequence
tatggttcttcctaatctttttact

SEQ ID NO: 178706 - DNA, 25 bp, Probe sequence
tattctttggcttgtttttattctt

SEQ ID NO: 178707 - DNA, 25 bp, Probe sequence
ttattcttaatcacacttgcatcac

SEQ ID NO: 178708 - DNA, 25 bp, Probe sequence
ttagctctaactttgattttagcaa

SEQ ID NO: 178709 - DNA, 25 bp, Probe sequence
ttcttcctaatctttttactattct

SEQ ID NO: 178710 - DNA, 25 bp, Probe sequence
ttcttaatcacacttgcatcacaaa

SEQ ID NO: 178711 - DNA, 25 bp, Probe sequence
ttgtctatggatctgtatttgctgc

SEQ ID NO: 178712 - DNA, 25 bp, Probe sequence
ttggcttgtttttattcttaatcac

SEQ ID NO: 178713 - DNA, 25 bp, Probe sequence
attccctgacgtatacagacatata

SEQ ID NO: 178714 - DNA, 25 bp, Probe sequence
attcaatctaattttctatcaaatc

SEQ ID NO: 178715 - DNA, 25 bp, Probe sequence
atatgatgatacttcaaccacgaat

SEQ ID NO: 178716 - DNA, 25 bp, Probe sequence
atagcgctcctatttttaacttcta

SEQ ID NO: 178717 - DNA, 25 bp, Probe sequence
atcaatcctaaaatacacagcgaac

SEQ ID NO: 178718 - DNA, 25 bp, Probe sequence
atgggctaagaactacattaattga

SEQ ID NO: 178719 - DNA, 25 bp, Probe sequence
agtgtttaacaatgcaaccttagac

SEQ ID NO: 178720 - DNA, 25 bp, Probe sequence
agtgaattattccctgacgtataca

SEQ ID NO: 178721 - DNA, 25 bp, Probe sequence
agatttaatagagtatacgtgctta

SEQ ID NO: 178722 - DNA, 25 bp, Probe sequence
agacatgtataatatcaatcctaaa

SEQ ID NO: 178723 - DNA, 25 bp, Probe sequence
aacaatgcaaccttagacatgtata

SEQ ID NO: 178724 - DNA, 25 bp, Probe sequence
aacgcaatctgcttttcaaaaacta

SEQ ID NO: 178725 - DNA, 25 bp, Probe sequence
aagctattgatttttcagaatgaac

SEQ ID NO: 178726 - DNA, 25 bp, Probe sequence
aagttaaatttttcatatgactata

SEQ ID NO: 178727 - DNA, 25 bp, Probe sequence
gctcctatttttaacttctaactca

SEQ ID NO: 178728 - DNA, 25 bp, Probe sequence
gaatcattatgatccaaaattagaa

SEQ ID NO: 178729 - DNA, 25 bp, Probe sequence
gaatacgcaatttaactatgaaaac

SEQ ID NO: 178730 - DNA, 25 bp, Probe sequence
gaagatatggcttataagtacccag

SEQ ID NO: 178731 - DNA, 25 bp, Probe sequence
gaagacctcaaaagaatacgcaatt

SEQ ID NO: 178732 - DNA, 25 bp, Probe sequence
gactagtgaatatttaaggcctgag

SEQ ID NO: 178733 - DNA, 25 bp, Probe sequence
gagaaaacaatatggcttatttaca

SEQ ID NO: 178734 - DNA, 25 bp, Probe sequence
gaggtcaagcaaatgattggccaat

SEQ ID NO: 178735 - DNA, 25 bp, Probe sequence
gaggaaatcttgactagtgaatatt

SEQ ID NO: 178736 - DNA, 25 bp, Probe sequence
gatacttcaaccacgaattattata

SEQ ID NO: 178737 - DNA, 25 bp, Probe sequence
gattttttcaacgttttacatgtag

SEQ ID NO: 178738 - DNA, 25 bp, Probe sequence
gattggccaatgaaagcaggattat

SEQ ID NO: 178739 - DNA, 25 bp, Probe sequence
gttttacatgtagacattaacctta

SEQ ID NO: 178740 - DNA, 25 bp, Probe sequence
gggagttaaatcaaacgcaatctgc

SEQ ID NO: 178741 - DNA, 25 bp, Probe sequence
ggcttatttacaacattatgggcta

SEQ ID NO: 178742 - DNA, 25 bp, Probe sequence
ggcttataagtacccagatttaata

SEQ ID NO: 178743 - DNA, 25 bp, Probe sequence
tactgaaaacccctttatagcgctc

SEQ ID NO: 178744 - DNA, 25 bp, Probe sequence
taatagctcaaaagggtgcgttttt

SEQ ID NO: 178745 - DNA, 25 bp, Probe sequence
taaggcctgagatttgtaaagaatt

SEQ ID NO: 178746 - DNA, 25 bp, Probe sequence
ttaacttctaactcacaagtgttta

SEQ ID NO: 178747 - DNA, 25 bp, Probe sequence
ataggacattttttacacaatcata

SEQ ID NO: 178748 - DNA, 25 bp, Probe sequence
atagcagctgggattagactttata

SEQ ID NO: 178749 - DNA, 25 bp, Probe sequence
ataatagttatgcatatgacactga

SEQ ID NO: 178750 - DNA, 25 bp, Probe sequence
atcacttctgataattttgcaattg

SEQ ID NO: 178751 - DNA, 25 bp, Probe sequence
atgacttttcagctaatttactaat

SEQ ID NO: 178752 - DNA, 25 bp, Probe sequence
atgactgccattgacaaagtttatt

SEQ ID NO: 178753 - DNA, 25 bp, Probe sequence
atgatgtttcgggttatattgatga

SEQ ID NO: 178754 - DNA, 25 bp, Probe sequence
acaattgcccatgaaataggacatt

SEQ ID NO: 178755 - DNA, 25 bp, Probe sequence
aaaggaactttatatcacttctgat

SEQ ID NO: 178756 - DNA, 25 bp, Probe sequence
aaagtgaccgcattactggatttaa

SEQ ID NO: 178757 - DNA, 25 bp, Probe sequence
aagatttacaattgcccatgaaata

SEQ ID NO: 178758 - DNA, 25 bp, Probe sequence
aagggtggctaatgacttttcagct

SEQ ID NO: 178759 - DNA, 25 bp, Probe sequence
aatgcccaaaaagcaaatggaagct

SEQ ID NO: 178760 - DNA, 25 bp, Probe sequence
aataaagtgaccgcattactggatt

SEQ ID NO: 178761 - DNA, 25 bp, Probe sequence
gctaatttactaatgcccaaaaagc

SEQ ID NO: 178762 - DNA, 25 bp, Probe sequence
gcagctgggattagactttataatt

SEQ ID NO: 178763 - DNA, 25 bp, Probe sequence
gaagatgacatacttaatctgctta

SEQ ID NO: 178764 - DNA, 25 bp, Probe sequence
gaagctttagtatataagttttaca

SEQ ID NO: 178765 - DNA, 25 bp, Probe sequence
gaaaaagatttacaattgcccatga

SEQ ID NO: 178766 - DNA, 25 bp, Probe sequence
gacatacttaatctgcttaaaccat

SEQ ID NO: 178767 - DNA, 25 bp, Probe sequence
gactgccattgacaaagtttattat

SEQ ID NO: 178768 - DNA, 25 bp, Probe sequence
gatgatgatgtttcgggttatattg

SEQ ID NO: 178769 - DNA, 25 bp, Probe sequence
gatttggatgatgatgtttcgggtt

SEQ ID NO: 178770 - DNA, 25 bp, Probe sequence
gttatgcatatgacactgaagaaat

SEQ ID NO: 178771 - DNA, 25 bp, Probe sequence
gtgaccgcattactggatttaaaaa

SEQ ID NO: 178772 - DNA, 25 bp, Probe sequence
gtggctaatgacttttcagctaatt

SEQ ID NO: 178773 - DNA, 25 bp, Probe sequence
ggaagtttctaaaatagcagctggg

SEQ ID NO: 178774 - DNA, 25 bp, Probe sequence
tgcttaaaccatatatacaggggaa

SEQ ID NO: 178775 - DNA, 25 bp, Probe sequence
tattaatttaacttctggtttatca

SEQ ID NO: 178776 - DNA, 25 bp, Probe sequence
ttttcagctaatttactaatgccca

SEQ ID NO: 178777 - DNA, 25 bp, Probe sequence
ttaacttctggtttatcaatttcag

SEQ ID NO: 178778 - DNA, 25 bp, Probe sequence
ttaatctgcttaaaccatatataca

SEQ ID NO: 178779 - DNA, 25 bp, Probe sequence
ttcagctaatttactaatgcccaaa

SEQ ID NO: 178780 - DNA, 25 bp, Probe sequence
ttgcaattaagttggaagtttctaa

SEQ ID NO: 178781 - DNA, 25 bp, Probe sequence
attgttattgcatacgcgtttcaca

SEQ ID NO: 178782 - DNA, 25 bp, Probe sequence
attgcatacgcgtttcacaaaagta

SEQ ID NO: 178783 - DNA, 25 bp, Probe sequence
attttaagcataacctgaatcacta

SEQ ID NO: 178784 - DNA, 25 bp, Probe sequence
agtactaattgttattgcatacgcg

SEQ ID NO: 178785 - DNA, 25 bp, Probe sequence
agagatatgtatttgtggtagttgt

SEQ ID NO: 178786 - DNA, 25 bp, Probe sequence
agcgaatcgatttatattttaagca

SEQ ID NO: 178787 - DNA, 25 bp, Probe sequence
actaattgttattgcatacgcgttt

SEQ ID NO: 178788 - DNA, 25 bp, Probe sequence
aaagccctgtgaatgcttactttat

SEQ ID NO: 178789 - DNA, 25 bp, Probe sequence
aaaaagccctgtgaatgcttacttt

SEQ ID NO: 178790 - DNA, 25 bp, Probe sequence
aacctgaatcactataagtctatga

SEQ ID NO: 178791 - DNA, 25 bp, Probe sequence
aagcataacctgaatcactataagt

SEQ ID NO: 178792 - DNA, 25 bp, Probe sequence
aagagaaagatgctaaagaccgatt

SEQ ID NO: 178793 - DNA, 25 bp, Probe sequence
aagaccgattaacagtggatgaaat

SEQ ID NO: 178794 - DNA, 25 bp, Probe sequence
aattgttattgcatacgcgtttcac

SEQ ID NO: 178795 - DNA, 25 bp, Probe sequence
ccctgtgaatgcttactttattaaa

SEQ ID NO: 178796 - DNA, 25 bp, Probe sequence
gccctgtgaatgcttactttattaa

SEQ ID NO: 178797 - DNA, 25 bp, Probe sequence
gcatacgcgtttcacaaaagtaaaa

SEQ ID NO: 178798 - DNA, 25 bp, Probe sequence
gctaaagaccgattaacagtggatg

SEQ ID NO: 178799 - DNA, 25 bp, Probe sequence
gaatcactataagtctatgaaaata

SEQ ID NO: 178800 - DNA, 25 bp, Probe sequence
gaaagatgctaaagaccgattaaca

SEQ ID NO: 178801 - DNA, 25 bp, Probe sequence
gagacacaagaaaagcgaatcgatt

SEQ ID NO: 178802 - DNA, 25 bp, Probe sequence
gatgctaaagaccgattaacagtgg

SEQ ID NO: 178803 - DNA, 25 bp, Probe sequence
gataaacaatataaatttcaggcat

SEQ ID NO: 178804 - DNA, 25 bp, Probe sequence
gatatgtatttgtggtagttgttgc

SEQ ID NO: 178805 - DNA, 25 bp, Probe sequence
gttgttgcattattaatagtactaa

SEQ ID NO: 178806 - DNA, 25 bp, Probe sequence
gttattgcatacgcgtttcacaaaa

SEQ ID NO: 178807 - DNA, 25 bp, Probe sequence
gtttcaaaaaagccctgtgaatgct

SEQ ID NO: 178808 - DNA, 25 bp, Probe sequence
gtatttgtggtagttgttgcattat

SEQ ID NO: 178809 - DNA, 25 bp, Probe sequence
ggtagttgttgcattattaatagta

SEQ ID NO: 178810 - DNA, 25 bp, Probe sequence
ggaaatcagtttaatagtagcatag

SEQ ID NO: 178811 - DNA, 25 bp, Probe sequence
tgttattgcatacgcgtttcacaaa

SEQ ID NO: 178812 - DNA, 25 bp, Probe sequence
tagggcgattattgaaagagaaaga

SEQ ID NO: 178813 - DNA, 25 bp, Probe sequence
ttcaggcatatataaatacaggaga

SEQ ID NO: 178814 - DNA, 25 bp, Probe sequence
ttgtggtagttgttgcattattaat

SEQ ID NO: 178815 - DNA, 25 bp, Probe sequence
attccaagcttttattaatgtaggt

SEQ ID NO: 178816 - DNA, 25 bp, Probe sequence
attttttaagtataacctgaatcat

SEQ ID NO: 178817 - DNA, 25 bp, Probe sequence
ataacaataaagactatgaattcca

SEQ ID NO: 178818 - DNA, 25 bp, Probe sequence
atgaattccaagcttttattaatgt

SEQ ID NO: 178819 - DNA, 25 bp, Probe sequence
atggacagttattttataggtggtt

SEQ ID NO: 178820 - DNA, 25 bp, Probe sequence
agaccattacattgaaacacaagaa

SEQ ID NO: 178821 - DNA, 25 bp, Probe sequence
agcttttattaatgtaggtggtaga

SEQ ID NO: 178822 - DNA, 25 bp, Probe sequence
aaagtcgccaatggacagttatttt

SEQ ID NO: 178823 - DNA, 25 bp, Probe sequence
aaaaagtcgccaatggacagttatt

SEQ ID NO: 178824 - DNA, 25 bp, Probe sequence
aaaagtcgccaatggacagttattt

SEQ ID NO: 178825 - DNA, 25 bp, Probe sequence
aacgagatttaaaaagtcgccaatg

SEQ ID NO: 178826 - DNA, 25 bp, Probe sequence
aacctgaatcattataagtcactta

SEQ ID NO: 178827 - DNA, 25 bp, Probe sequence
aatgtaggtggtagaaagcaatttc

SEQ ID NO: 178828 - DNA, 25 bp, Probe sequence
aagtcgccaatggacagttatttta

SEQ ID NO: 178829 - DNA, 25 bp, Probe sequence
caagcttttattaatgtaggtggta

SEQ ID NO: 178830 - DNA, 25 bp, Probe sequence
ctatgaattccaagcttttattaat

SEQ ID NO: 178831 - DNA, 25 bp, Probe sequence
cgagatttaaaaagtcgccaatgga

SEQ ID NO: 178832 - DNA, 25 bp, Probe sequence
cctgaatcattataagtcacttaaa

SEQ ID NO: 178833 - DNA, 25 bp, Probe sequence
gccaatggacagttattttataggt

SEQ ID NO: 178834 - DNA, 25 bp, Probe sequence
gaattccaagcttttattaatgtag

SEQ ID NO: 178835 - DNA, 25 bp, Probe sequence
gaaagcaatttcaaagagatatagg

SEQ ID NO: 178836 - DNA, 25 bp, Probe sequence
gactatgaattccaagcttttatta

SEQ ID NO: 178837 - DNA, 25 bp, Probe sequence
gatagttatttcatatgcacataat

SEQ ID NO: 178838 - DNA, 25 bp, Probe sequence
gatataggatatgacgaagaaaaac

SEQ ID NO: 178839 - DNA, 25 bp, Probe sequence
gttagtgtaattttaataggtatga

SEQ ID NO: 178840 - DNA, 25 bp, Probe sequence
gttatttcatatgcacataataaac

SEQ ID NO: 178841 - DNA, 25 bp, Probe sequence
gtaggtggtagaaagcaatttcaaa

SEQ ID NO: 178842 - DNA, 25 bp, Probe sequence
gtcgccaatggacagttattttata

SEQ ID NO: 178843 - DNA, 25 bp, Probe sequence
ggtatgatagttatttcatatgcac

SEQ ID NO: 178844 - DNA, 25 bp, Probe sequence
ggacagttattttataggtggttat

SEQ ID NO: 178845 - DNA, 25 bp, Probe sequence
tcgccaatggacagttattttatag

SEQ ID NO: 178846 - DNA, 25 bp, Probe sequence
taagtcacttaaagtaacgagattt

SEQ ID NO: 178847 - DNA, 25 bp, Probe sequence
tttcttttcaggatcactggattag

SEQ ID NO: 178848 - DNA, 25 bp, Probe sequence
ttccaagcttttattaatgtaggtg

SEQ ID NO: 178849 - DNA, 25 bp, Probe sequence
atagctctatgaaagttactagttt

SEQ ID NO: 178850 - DNA, 25 bp, Probe sequence
ataaccttaataattatagctctat

SEQ ID NO: 178851 - DNA, 25 bp, Probe sequence
atctctgtaactgacaatcatcaat

SEQ ID NO: 178852 - DNA, 25 bp, Probe sequence
atgggtggctatattgtggatggat

SEQ ID NO: 178853 - DNA, 25 bp, Probe sequence
agaccattacattgagacgcaagaa

SEQ ID NO: 178854 - DNA, 25 bp, Probe sequence
agcagaaccaccactgttcttcttt

SEQ ID NO: 178855 - DNA, 25 bp, Probe sequence
accactgttcttcttttcagggaga

SEQ ID NO: 178856 - DNA, 25 bp, Probe sequence
actgctagtcattgcttatacgcac

SEQ ID NO: 178857 - DNA, 25 bp, Probe sequence
aaagttctcatctctgtaactgaca

SEQ ID NO: 178858 - DNA, 25 bp, Probe sequence
aaaagacgcctatgggtggctatat

SEQ ID NO: 178859 - DNA, 25 bp, Probe sequence
caccactgttcttcttttcagggag

SEQ ID NO: 178860 - DNA, 25 bp, Probe sequence
cactgttcttcttttcagggagatt

SEQ ID NO: 178861 - DNA, 25 bp, Probe sequence
cagaaccaccactgttcttcttttc

SEQ ID NO: 178862 - DNA, 25 bp, Probe sequence
ctcatctctgtaactgacaatcatc

SEQ ID NO: 178863 - DNA, 25 bp, Probe sequence
gcctatgggtggctatattgtggat

SEQ ID NO: 178864 - DNA, 25 bp, Probe sequence
gctagtcattgcttatacgcacaat

SEQ ID NO: 178865 - DNA, 25 bp, Probe sequence
gaagatagcataggatacgatgata

SEQ ID NO: 178866 - DNA, 25 bp, Probe sequence
gaagcagaaccaccactgttcttct

SEQ ID NO: 178867 - DNA, 25 bp, Probe sequence
gacaatcatcaatttgaagatagca

SEQ ID NO: 178868 - DNA, 25 bp, Probe sequence
gacgcctatgggtggctatattgtg

SEQ ID NO: 178869 - DNA, 25 bp, Probe sequence
gagacgcaagaaaaacgaataaatt

SEQ ID NO: 178870 - DNA, 25 bp, Probe sequence
gattttaaagttctcatctctgtaa

SEQ ID NO: 178871 - DNA, 25 bp, Probe sequence
gttctcatctctgtaactgacaatc

SEQ ID NO: 178872 - DNA, 25 bp, Probe sequence
gtaactgacaatcatcaatttgaag

SEQ ID NO: 178873 - DNA, 25 bp, Probe sequence
gtaattttaataggactgctagtca

SEQ ID NO: 178874 - DNA, 25 bp, Probe sequence
gtcattgcttatacgcacaataaga

SEQ ID NO: 178875 - DNA, 25 bp, Probe sequence
gtggatggatatgttaatcacaaca

SEQ ID NO: 178876 - DNA, 25 bp, Probe sequence
ggtggctatattgtggatggatatg

SEQ ID NO: 178877 - DNA, 25 bp, Probe sequence
ggatacgatgataagacatttggta

SEQ ID NO: 178878 - DNA, 25 bp, Probe sequence
ggactgctagtcattgcttatacgc

SEQ ID NO: 178879 - DNA, 25 bp, Probe sequence
tgttcttcttttcagggagattaga

SEQ ID NO: 178880 - DNA, 25 bp, Probe sequence
taagaaaactaaagaccattacatt

SEQ ID NO: 178881 - DNA, 25 bp, Probe sequence
tactagttttaaaaagacgcctatg

SEQ ID NO: 178882 - DNA, 25 bp, Probe sequence
tagtcattgcttatacgcacaataa

SEQ ID NO: 178883 - DNA, 25 bp, Probe sequence
atgatagtcgtttttccgcaacaac

SEQ ID NO: 178884 - DNA, 25 bp, Probe sequence
accttatgtcgtactggatcaaaat

SEQ ID NO: 178885 - DNA, 25 bp, Probe sequence
acgaggactaattgaacatggcatc

SEQ ID NO: 178886 - DNA, 25 bp, Probe sequence
actgtggcacaacctataactgata

SEQ ID NO: 178887 - DNA, 25 bp, Probe sequence
acatttaatagaactcggtcacaac

SEQ ID NO: 178888 - DNA, 25 bp, Probe sequence
aaattcgtgcaacaactggctatca

SEQ ID NO: 178889 - DNA, 25 bp, Probe sequence
aaattcaaactattggcgtcatttt

SEQ ID NO: 178890 - DNA, 25 bp, Probe sequence
aaatccgtttttctcagcactgatg

SEQ ID NO: 178891 - DNA, 25 bp, Probe sequence
aactggctatcatctttcaaactaa

SEQ ID NO: 178892 - DNA, 25 bp, Probe sequence
aactgtgtcacatattttaaatcat

SEQ ID NO: 178893 - DNA, 25 bp, Probe sequence
aacgatgaactcgctattggcattt

SEQ ID NO: 178894 - DNA, 25 bp, Probe sequence
aaccatctgatgttgatttatgctt

SEQ ID NO: 178895 - DNA, 25 bp, Probe sequence
aaggctatacagattttgttcggac

SEQ ID NO: 178896 - DNA, 25 bp, Probe sequence
catgctgtttcagaacgtttaggct

SEQ ID NO: 178897 - DNA, 25 bp, Probe sequence
catctttaaccttattacttcaacg

SEQ ID NO: 178898 - DNA, 25 bp, Probe sequence
cgctattggcattttacgaggacta

SEQ ID NO: 178899 - DNA, 25 bp, Probe sequence
gcaatcttcgctattaacgatgaac

SEQ ID NO: 178900 - DNA, 25 bp, Probe sequence
gaaacatcatgtaccttatgtcgta

SEQ ID NO: 178901 - DNA, 25 bp, Probe sequence
gacatcatggttcaatctgccactg

SEQ ID NO: 178902 - DNA, 25 bp, Probe sequence
gacggattaattatcgcacaataca

SEQ ID NO: 178903 - DNA, 25 bp, Probe sequence
gatggcgaatatgtcgactcgtgtc

SEQ ID NO: 178904 - DNA, 25 bp, Probe sequence
gatactttgcgcgcgaatcaattgc

SEQ ID NO: 178905 - DNA, 25 bp, Probe sequence
gatttatgctttttaacatctacag

SEQ ID NO: 178906 - DNA, 25 bp, Probe sequence
gttgcaccatatgacatgatggcga

SEQ ID NO: 178907 - DNA, 25 bp, Probe sequence
gtattcatgaccataaaccatctga

SEQ ID NO: 178908 - DNA, 25 bp, Probe sequence
gtgggctaaccattgttgatgacat

SEQ ID NO: 178909 - DNA, 25 bp, Probe sequence
tgtcgactcgtgtcgctggatttgt

SEQ ID NO: 178910 - DNA, 25 bp, Probe sequence
tgattatgcagcgtacgtctcgcca

SEQ ID NO: 178911 - DNA, 25 bp, Probe sequence
tgcgcgcgaatcaattgccagaacc

SEQ ID NO: 178912 - DNA, 25 bp, Probe sequence
tgccagaaccacaaatcgtccatac

SEQ ID NO: 178913 - DNA, 25 bp, Probe sequence
tctcgccacctttaactactgtggc

SEQ ID NO: 178914 - DNA, 25 bp, Probe sequence
tcgtccatactgaattatctaagcg

SEQ ID NO: 178915 - DNA, 25 bp, Probe sequence
tacttcaacgattacagcacttaga

SEQ ID NO: 178916 - DNA, 25 bp, Probe sequence
ttcaatctgccactgcaatcttcgc

SEQ ID NO: 178917 - DNA, 25 bp, Probe sequence
attgagcatcctaaattatatgata

SEQ ID NO: 178918 - DNA, 25 bp, Probe sequence
atttccaattacaaaatgtcgacaa

SEQ ID NO: 178919 - DNA, 25 bp, Probe sequence
atttgcacaagtattaggtaagggt

SEQ ID NO: 178920 - DNA, 25 bp, Probe sequence
atattgattttgactttggcgatag

SEQ ID NO: 178921 - DNA, 25 bp, Probe sequence
atacggctcaaatgtcgttttaaat

SEQ ID NO: 178922 - DNA, 25 bp, Probe sequence
atcggttttttaattgagcatccta

SEQ ID NO: 178923 - DNA, 25 bp, Probe sequence
atggtatggatccagatggctcaat

SEQ ID NO: 178924 - DNA, 25 bp, Probe sequence
aggtgttgcatctgacacaacgata

SEQ ID NO: 178925 - DNA, 25 bp, Probe sequence
agagacggacattttgttcaagatg

SEQ ID NO: 178926 - DNA, 25 bp, Probe sequence
acctaaatttttaatcttggatgag

SEQ ID NO: 178927 - DNA, 25 bp, Probe sequence
aaatatcttgcagagcatttccaat

SEQ ID NO: 178928 - DNA, 25 bp, Probe sequence
aagttatactaaaagcattatctga

SEQ ID NO: 178929 - DNA, 25 bp, Probe sequence
aatcttggatgagcctacaaatggt

SEQ ID NO: 178930 - DNA, 25 bp, Probe sequence
cttgcagagcatttccaattacaaa

SEQ ID NO: 178931 - DNA, 25 bp, Probe sequence
gcgtgatacgtacttcaatataaat

SEQ ID NO: 178932 - DNA, 25 bp, Probe sequence
gcatctgacacaacgatagttactg

SEQ ID NO: 178933 - DNA, 25 bp, Probe sequence
gaattaatttgtgatagagctgtat

SEQ ID NO: 178934 - DNA, 25 bp, Probe sequence
gacacaacgatagttactgttgatc

SEQ ID NO: 178935 - DNA, 25 bp, Probe sequence
gagaattctaatatcaagtcataag

SEQ ID NO: 178936 - DNA, 25 bp, Probe sequence
gatgagcctacaaatggtatggatc

SEQ ID NO: 178937 - DNA, 25 bp, Probe sequence
gatgcatttggtatgagaccttata

SEQ ID NO: 178938 - DNA, 25 bp, Probe sequence
gatccagatggctcaattgatgtgc

SEQ ID NO: 178939 - DNA, 25 bp, Probe sequence
gataatgcagataatatcggttttt

SEQ ID NO: 178940 - DNA, 25 bp, Probe sequence
gattttgactttggcgatagtagaa

SEQ ID NO: 178941 - DNA, 25 bp, Probe sequence
gttcattgcgtgatacgtacttcaa

SEQ ID NO: 178942 - DNA, 25 bp, Probe sequence
gttactgttgatcataaagactttg

SEQ ID NO: 178943 - DNA, 25 bp, Probe sequence
gttagcaattgcagtatctttaatg

SEQ ID NO: 178944 - DNA, 25 bp, Probe sequence
gtataacttgaaattatttgcacaa

SEQ ID NO: 178945 - DNA, 25 bp, Probe sequence
gggttttgataaagcatacacagac

SEQ ID NO: 178946 - DNA, 25 bp, Probe sequence
ggggatgaagcaaaagttagcaatt

SEQ ID NO: 178947 - DNA, 25 bp, Probe sequence
ggctcaattgatgtgctgactacaa

SEQ ID NO: 178948 - DNA, 25 bp, Probe sequence
tgatgtgctgactacaattaagtct

SEQ ID NO: 178949 - DNA, 25 bp, Probe sequence
tgaaacacgtaaaagttcattgcgt

SEQ ID NO: 178950 - DNA, 25 bp, Probe sequence
ttatccgaaatatattgaaacacgt

SEQ ID NO: 178951 - DNA, 25 bp, Probe sequence
atagatccgggaagcgataatcaat

SEQ ID NO: 178952 - DNA, 25 bp, Probe sequence
attttaagcataatcttaacaatta

SEQ ID NO: 178953 - DNA, 25 bp, Probe sequence
atatgaagcggaatcacctttattc

SEQ ID NO: 178954 - DNA, 25 bp, Probe sequence
atgaagcggaatcacctttattctt

SEQ ID NO: 178955 - DNA, 25 bp, Probe sequence
agtatagatccgggaagcgataatc

SEQ ID NO: 178956 - DNA, 25 bp, Probe sequence
agatccgggaagcgataatcaatat

SEQ ID NO: 178957 - DNA, 25 bp, Probe sequence
agcggaatcacctttattcttcttt

SEQ ID NO: 178958 - DNA, 25 bp, Probe sequence
aagtatagatccgggaagcgataat

SEQ ID NO: 178959 - DNA, 25 bp, Probe sequence
aagcggaatcacctttattcttctt

SEQ ID NO: 178960 - DNA, 25 bp, Probe sequence
aagcataatcttaacaattataaaa

SEQ ID NO: 178961 - DNA, 25 bp, Probe sequence
aatatgaagcggaatcacctttatt

SEQ ID NO: 178962 - DNA, 25 bp, Probe sequence
caagtatagatccgggaagcgataa

SEQ ID NO: 178963 - DNA, 25 bp, Probe sequence
gcggaatcacctttattcttctttt

SEQ ID NO: 178964 - DNA, 25 bp, Probe sequence
gaatatgaagcggaatcacctttat

SEQ ID NO: 178965 - DNA, 25 bp, Probe sequence
gaatcacctttattcttcttttcgg

SEQ ID NO: 178966 - DNA, 25 bp, Probe sequence
gaagcggaatcacctttattcttct

SEQ ID NO: 178967 - DNA, 25 bp, Probe sequence
gtattttaagcataatcttaacaat

SEQ ID NO: 178968 - DNA, 25 bp, Probe sequence
gtatagatccgggaagcgataatca

SEQ ID NO: 178969 - DNA, 25 bp, Probe sequence
ggaatcacctttattcttcttttcg

SEQ ID NO: 178970 - DNA, 25 bp, Probe sequence
tgtattttaagcataatcttaacaa

SEQ ID NO: 178971 - DNA, 25 bp, Probe sequence
tgaagcggaatcacctttattcttc

SEQ ID NO: 178972 - DNA, 25 bp, Probe sequence
taagcataatcttaacaattataaa

SEQ ID NO: 178973 - DNA, 25 bp, Probe sequence
tagatccgggaagcgataatcaata

SEQ ID NO: 178974 - DNA, 25 bp, Probe sequence
tatgaagcggaatcacctttattct

SEQ ID NO: 178975 - DNA, 25 bp, Probe sequence
tatagatccgggaagcgataatcaa

SEQ ID NO: 178976 - DNA, 25 bp, Probe sequence
tattttaagcataatcttaacaatt

SEQ ID NO: 178977 - DNA, 25 bp, Probe sequence
tattcttcttttcggggagattaga

SEQ ID NO: 178978 - DNA, 25 bp, Probe sequence
tttaagcataatcttaacaattata

SEQ ID NO: 178979 - DNA, 25 bp, Probe sequence
ttttaagcataatcttaacaattat

SEQ ID NO: 178980 - DNA, 25 bp, Probe sequence
ttattcttcttttcggggagattag

SEQ ID NO: 178981 - DNA, 25 bp, Probe sequence
ttattcaaagaaaaagatcctaaat

SEQ ID NO: 178982 - DNA, 25 bp, Probe sequence
ttaagcataatcttaacaattataa

SEQ ID NO: 178983 - DNA, 25 bp, Probe sequence
ttcaaagaaaaagatcctaaatata

SEQ ID NO: 178984 - DNA, 25 bp, Probe sequence
ttgtattttaagcataatcttaaca

SEQ ID NO: 178985 - DNA, 25 bp, Probe sequence
atgaagccgatccaccgttattttt

SEQ ID NO: 178986 - DNA, 25 bp, Probe sequence
atgatgtttgcatatatgtcgcaca

SEQ ID NO: 178987 - DNA, 25 bp, Probe sequence
atgtttgcatatatgtcgcacaagc

SEQ ID NO: 178988 - DNA, 25 bp, Probe sequence
agattcgggaagcaataatcaatat

SEQ ID NO: 178989 - DNA, 25 bp, Probe sequence
agaacattatatcgccattcaagaa

SEQ ID NO: 178990 - DNA, 25 bp, Probe sequence
agcaatattaatgatgtttgcatat

SEQ ID NO: 178991 - DNA, 25 bp, Probe sequence
acattatatcgccattcaagaaaaa

SEQ ID NO: 178992 - DNA, 25 bp, Probe sequence
aaagaacattatatcgccattcaag

SEQ ID NO: 178993 - DNA, 25 bp, Probe sequence
aaaagaacattatatcgccattcaa

SEQ ID NO: 178994 - DNA, 25 bp, Probe sequence
aacattatatcgccattcaagaaaa

SEQ ID NO: 178995 - DNA, 25 bp, Probe sequence
aagaacattatatcgccattcaaga

SEQ ID NO: 178996 - DNA, 25 bp, Probe sequence
aatgatgtttgcatatatgtcgcac

SEQ ID NO: 178997 - DNA, 25 bp, Probe sequence
caagtatagattcgggaagcaataa

SEQ ID NO: 178998 - DNA, 25 bp, Probe sequence
catatatgtcgcacaagcaaaaaaa

SEQ ID NO: 178999 - DNA, 25 bp, Probe sequence
cattatatcgccattcaagaaaaaa

SEQ ID NO: 179000 - DNA, 25 bp, Probe sequence
gcatatatgtcgcacaagcaaaaaa

SEQ ID NO: 179001 - DNA, 25 bp, Probe sequence
gaacattatatcgccattcaagaaa

SEQ ID NO: 179002 - DNA, 25 bp, Probe sequence
gatgtttgcatatatgtcgcacaag

SEQ ID NO: 179003 - DNA, 25 bp, Probe sequence
gtttgcatatatgtcgcacaagcaa

SEQ ID NO: 179004 - DNA, 25 bp, Probe sequence
gtatagattcgggaagcaataatca

SEQ ID NO: 179005 - DNA, 25 bp, Probe sequence
tgattcggaaaactaaagttattat

SEQ ID NO: 179006 - DNA, 25 bp, Probe sequence
tgtttgcatatatgtcgcacaagca

SEQ ID NO: 179007 - DNA, 25 bp, Probe sequence
tgatgtttgcatatatgtcgcacaa

SEQ ID NO: 179008 - DNA, 25 bp, Probe sequence
tgcatatatgtcgcacaagcaaaaa

SEQ ID NO: 179009 - DNA, 25 bp, Probe sequence
taatgatgtttgcatatatgtcgca

SEQ ID NO: 179010 - DNA, 25 bp, Probe sequence
tatgaagccgatccaccgttatttt

SEQ ID NO: 179011 - DNA, 25 bp, Probe sequence
tatatgtcgcacaagcaaaaaaaag

SEQ ID NO: 179012 - DNA, 25 bp, Probe sequence
tttgcatatatgtcgcacaagcaaa

SEQ ID NO: 179013 - DNA, 25 bp, Probe sequence
tttcttttcaggtccaattgaataa

SEQ ID NO: 179014 - DNA, 25 bp, Probe sequence
tttttcttttcaggtccaattgaat

SEQ ID NO: 179015 - DNA, 25 bp, Probe sequence
ttttcttttcaggtccaattgaata

SEQ ID NO: 179016 - DNA, 25 bp, Probe sequence
ttatatcgccattcaagaaaaaaga

SEQ ID NO: 179017 - DNA, 25 bp, Probe sequence
ttaatgatgtttgcatatatgtcgc

SEQ ID NO: 179018 - DNA, 25 bp, Probe sequence
ttgcatatatgtcgcacaagcaaaa

SEQ ID NO: 179019 - DNA, 25 bp, Probe sequence
attgctttgtttaaatacttataca

SEQ ID NO: 179020 - DNA, 25 bp, Probe sequence
attcatttcattattcattctgtat

SEQ ID NO: 179021 - DNA, 25 bp, Probe sequence
atataagtttatatggcctgcaaaa

SEQ ID NO: 179022 - DNA, 25 bp, Probe sequence
atcaccttgtacatttcattattca

SEQ ID NO: 179023 - DNA, 25 bp, Probe sequence
atgtcttttttgatatagagctaaa

SEQ ID NO: 179024 - DNA, 25 bp, Probe sequence
atggcctgcaaaacttatatgaaat

SEQ ID NO: 179025 - DNA, 25 bp, Probe sequence
agattttaaaatcaccttgtacatt

SEQ ID NO: 179026 - DNA, 25 bp, Probe sequence
agatggacaatggggagtagggaaa

SEQ ID NO: 179027 - DNA, 25 bp, Probe sequence
agagctatttaatggtttttttgat

SEQ ID NO: 179028 - DNA, 25 bp, Probe sequence
aagaagatgctaaagctgatttatt

SEQ ID NO: 179029 - DNA, 25 bp, Probe sequence
aagtgctttgctaataatcgatgat

SEQ ID NO: 179030 - DNA, 25 bp, Probe sequence
aaggatcttcaatttacatataatg

SEQ ID NO: 179031 - DNA, 25 bp, Probe sequence
aatggtgactttacaaatagaacta

SEQ ID NO: 179032 - DNA, 25 bp, Probe sequence
aatacgaaaacatctattgctttgt

SEQ ID NO: 179033 - DNA, 25 bp, Probe sequence
ccaagtagtaccttatttaaatatg

SEQ ID NO: 179034 - DNA, 25 bp, Probe sequence
gaattgttcgccctttttatagatg

SEQ ID NO: 179035 - DNA, 25 bp, Probe sequence
gaagcggaaatttaggtgaatctga

SEQ ID NO: 179036 - DNA, 25 bp, Probe sequence
gaacatctctactaaagagctattt

SEQ ID NO: 179037 - DNA, 25 bp, Probe sequence
gaacaactttgatgacttctatata

SEQ ID NO: 179038 - DNA, 25 bp, Probe sequence
gacttctatatataaccaatactta

SEQ ID NO: 179039 - DNA, 25 bp, Probe sequence
gactagatttagttagcttttcaaa

SEQ ID NO: 179040 - DNA, 25 bp, Probe sequence
gagaactttgaatttagtagtttca

SEQ ID NO: 179041 - DNA, 25 bp, Probe sequence
gatagtgatgaattgttcgcccttt

SEQ ID NO: 179042 - DNA, 25 bp, Probe sequence
gttggagatacgataaatagactag

SEQ ID NO: 179043 - DNA, 25 bp, Probe sequence
gttcgccctttttatagatggacaa

SEQ ID NO: 179044 - DNA, 25 bp, Probe sequence
gttagcttttcaaacgagcaactat

SEQ ID NO: 179045 - DNA, 25 bp, Probe sequence
gttatttgtaaagaacatctctact

SEQ ID NO: 179046 - DNA, 25 bp, Probe sequence
gtggataattacgatttgcatcaga

SEQ ID NO: 179047 - DNA, 25 bp, Probe sequence
tgtacatttcattattcatttcatt

SEQ ID NO: 179048 - DNA, 25 bp, Probe sequence
tgaactagcaaattatgtctttttt

SEQ ID NO: 179049 - DNA, 25 bp, Probe sequence
taacttttctgataacatattacgt

SEQ ID NO: 179050 - DNA, 25 bp, Probe sequence
tacacaaatgtgttttagcatgttg

SEQ ID NO: 179051 - DNA, 25 bp, Probe sequence
tagactgtaaagtgctatttatagg

SEQ ID NO: 179052 - DNA, 25 bp, Probe sequence
ttagcatgttgatcgatacactgaa

SEQ ID NO: 179053 - DNA, 25 bp, Probe sequence
attgatgctgttggtattgggagaa

SEQ ID NO: 179054 - DNA, 25 bp, Probe sequence
atattccatggattcaaagctctga

SEQ ID NO: 179055 - DNA, 25 bp, Probe sequence
agtctatggtactggcggttatatg

SEQ ID NO: 179056 - DNA, 25 bp, Probe sequence
agtctcaaacaaggattacttcaaa

SEQ ID NO: 179057 - DNA, 25 bp, Probe sequence
agcgctaatctacaaggaacttcaa

SEQ ID NO: 179058 - DNA, 25 bp, Probe sequence
aaaccatatttgcttgaggcgccgt

SEQ ID NO: 179059 - DNA, 25 bp, Probe sequence
aaatgatttgattctacgacaatgt

SEQ ID NO: 179060 - DNA, 25 bp, Probe sequence
aaaaggtgatataccagtctatggt

SEQ ID NO: 179061 - DNA, 25 bp, Probe sequence
aacttattcctgccaattcaattgc

SEQ ID NO: 179062 - DNA, 25 bp, Probe sequence
aactgtgtttggtagaatttgatta

SEQ ID NO: 179063 - DNA, 25 bp, Probe sequence
aaccactaagtgaaattgatgctgt

SEQ ID NO: 179064 - DNA, 25 bp, Probe sequence
aataggcgaattcttcatcaaactc

SEQ ID NO: 179065 - DNA, 25 bp, Probe sequence
caagagtcggggttggaaaactgtg

SEQ ID NO: 179066 - DNA, 25 bp, Probe sequence
aattcttcatcaaactcgaccgaca

SEQ ID NO: 179067 - DNA, 25 bp, Probe sequence
ctggcggttatatgacaagtgtttc

SEQ ID NO: 179068 - DNA, 25 bp, Probe sequence
gctttcttctgcaaaacttattcct

SEQ ID NO: 179069 - DNA, 25 bp, Probe sequence
gcaagccaagtatatggaggcggaa

SEQ ID NO: 179070 - DNA, 25 bp, Probe sequence
gaattcaattgagctttcttctgca

SEQ ID NO: 179071 - DNA, 25 bp, Probe sequence
gaatcaacaggtgtgccaagcttaa

SEQ ID NO: 179072 - DNA, 25 bp, Probe sequence
gaaacagacatactatttatattaa

SEQ ID NO: 179073 - DNA, 25 bp, Probe sequence
gacaagtgtttcagaaccactaagt

SEQ ID NO: 179074 - DNA, 25 bp, Probe sequence
gaggcgccgttttggacggtggata

SEQ ID NO: 179075 - DNA, 25 bp, Probe sequence
gataccccataatctagaagaacag

SEQ ID NO: 179076 - DNA, 25 bp, Probe sequence
gattttttatcattaagtagtctta

SEQ ID NO: 179077 - DNA, 25 bp, Probe sequence
gattatgctacaagtcaagattttt

SEQ ID NO: 179078 - DNA, 25 bp, Probe sequence
gtgccaagcttaagtaaacaaacca

SEQ ID NO: 179079 - DNA, 25 bp, Probe sequence
ggattcaaagctctgacgtaaaagt

SEQ ID NO: 179080 - DNA, 25 bp, Probe sequence
ggaggcggaacaccaaatacaaaga

SEQ ID NO: 179081 - DNA, 25 bp, Probe sequence
ggacggtggatacattattttattg

SEQ ID NO: 179082 - DNA, 25 bp, Probe sequence
ggaaacgattatccgaattgggaag

SEQ ID NO: 179083 - DNA, 25 bp, Probe sequence
tgcaatagttacaagagtcggggtt

SEQ ID NO: 179084 - DNA, 25 bp, Probe sequence
tctcacaggaattgcgattcaagga

SEQ ID NO: 179085 - DNA, 25 bp, Probe sequence
tatactcattatattcattgctata

SEQ ID NO: 179086 - DNA, 25 bp, Probe sequence
ttgtcccttcaaataaagagcagca

SEQ ID NO: 179087 - DNA, 25 bp, Probe sequence
attacgacgatatacacttatcatc

SEQ ID NO: 179088 - DNA, 25 bp, Probe sequence
atattacatgcattgttttaacatt

SEQ ID NO: 179089 - DNA, 25 bp, Probe sequence
atacgtgtttactattatcatttta

SEQ ID NO: 179090 - DNA, 25 bp, Probe sequence
atacacttatcatctatgttctatt

SEQ ID NO: 179091 - DNA, 25 bp, Probe sequence
atctaacttcttgtctataccaatt

SEQ ID NO: 179092 - DNA, 25 bp, Probe sequence
atcctttttatataatgcttgactc

SEQ ID NO: 179093 - DNA, 25 bp, Probe sequence
agcattgttatacttattgttaatt

SEQ ID NO: 179094 - DNA, 25 bp, Probe sequence
acttcttgtctataccaattgcatt

SEQ ID NO: 179095 - DNA, 25 bp, Probe sequence
gcttgactcaacaaagttcttttac

SEQ ID NO: 179096 - DNA, 25 bp, Probe sequence
gcatttgtcatatctaacttcttgt

SEQ ID NO: 179097 - DNA, 25 bp, Probe sequence
gaaggcattgttaattaggaatttt

SEQ ID NO: 179098 - DNA, 25 bp, Probe sequence
gaagcagatgtgattgaaccaaatt

SEQ ID NO: 179099 - DNA, 25 bp, Probe sequence
gaaaatttaaaggaggcagtcgatg

SEQ ID NO: 179100 - DNA, 25 bp, Probe sequence
gatgctggtcacttatttagactca

SEQ ID NO: 179101 - DNA, 25 bp, Probe sequence
gattatttggattttagatgctggt

SEQ ID NO: 179102 - DNA, 25 bp, Probe sequence
gattaggtggtaatgattcatatta

SEQ ID NO: 179103 - DNA, 25 bp, Probe sequence
gttccatttttattttcaattgcaa

SEQ ID NO: 179104 - DNA, 25 bp, Probe sequence
gttctattattaaccttatatcctt

SEQ ID NO: 179105 - DNA, 25 bp, Probe sequence
gtcatatctaacttcttgtctatac

SEQ ID NO: 179106 - DNA, 25 bp, Probe sequence
gtctataccaattgcatttagtcaa

SEQ ID NO: 179107 - DNA, 25 bp, Probe sequence
ggtcacttatttagactcaatcgta

SEQ ID NO: 179108 - DNA, 25 bp, Probe sequence
ggattttagatgctggtcacttatt

SEQ ID NO: 179109 - DNA, 25 bp, Probe sequence
tgcaatcttttataagtccaacaat

SEQ ID NO: 179110 - DNA, 25 bp, Probe sequence
tctaagtcaatcatcattcccagat

SEQ ID NO: 179111 - DNA, 25 bp, Probe sequence
tcatctatgttctattattaacctt

SEQ ID NO: 179112 - DNA, 25 bp, Probe sequence
taagtccaacaatattgattatttg

SEQ ID NO: 179113 - DNA, 25 bp, Probe sequence
tagactcaatcgtagattaggtggt

SEQ ID NO: 179114 - DNA, 25 bp, Probe sequence
tatggtatatacgtgtttactatta

SEQ ID NO: 179115 - DNA, 25 bp, Probe sequence
tattaaccttatatcctttttatat

SEQ ID NO: 179116 - DNA, 25 bp, Probe sequence
ttttcaactgcatatgcatttgtca

SEQ ID NO: 179117 - DNA, 25 bp, Probe sequence
ttattagtttatatgcttatgaagc

SEQ ID NO: 179118 - DNA, 25 bp, Probe sequence
ttatcattttagttccatttttatt

SEQ ID NO: 179119 - DNA, 25 bp, Probe sequence
ttgcatttagtcaatttacagaatt

SEQ ID NO: 179120 - DNA, 25 bp, Probe sequence
ttggaacgcttgttattagtttata

SEQ ID NO: 179121 - DNA, 25 bp, Probe sequence
atcttgaaaagttcgatttaccaat

SEQ ID NO: 179122 - DNA, 25 bp, Probe sequence
atctctttcaaagttcctcaaggat

SEQ ID NO: 179123 - DNA, 25 bp, Probe sequence
atgattgcccctttttatcgtaaat

SEQ ID NO: 179124 - DNA, 25 bp, Probe sequence
agttcctcaaggattcgtcactggt

SEQ ID NO: 179125 - DNA, 25 bp, Probe sequence
accacaaactggtgttattagagta

SEQ ID NO: 179126 - DNA, 25 bp, Probe sequence
agaacaactgttacaaagatatcaa

SEQ ID NO: 179127 - DNA, 25 bp, Probe sequence
agcagttgcattttcacatcatgct

SEQ ID NO: 179128 - DNA, 25 bp, Probe sequence
aaagatatcaagttgtgagtggtgc

SEQ ID NO: 179129 - DNA, 25 bp, Probe sequence
aaaacaatattcatgtcgacacaca

SEQ ID NO: 179130 - DNA, 25 bp, Probe sequence
aatagctgattatatcattcactta

SEQ ID NO: 179131 - DNA, 25 bp, Probe sequence
aattatggatttgtatcaaccacaa

SEQ ID NO: 179132 - DNA, 25 bp, Probe sequence
caacttgaaaaaatgattgcccctt

SEQ ID NO: 179133 - DNA, 25 bp, Probe sequence
gcattttcacatcatgctgaattgt

SEQ ID NO: 179134 - DNA, 25 bp, Probe sequence
gaattgtatatttttgatgagccta

SEQ ID NO: 179135 - DNA, 25 bp, Probe sequence
gaatatctctttcaaagttcctcaa

SEQ ID NO: 179136 - DNA, 25 bp, Probe sequence
gaagaggatatggctctcaatccga

SEQ ID NO: 179137 - DNA, 25 bp, Probe sequence
gaacatgcgcaagtatttaaagaaa

SEQ ID NO: 179138 - DNA, 25 bp, Probe sequence
gaaatggcgctggtaaaaccacaat

SEQ ID NO: 179139 - DNA, 25 bp, Probe sequence
gagagatggactacgaagcaacttg

SEQ ID NO: 179140 - DNA, 25 bp, Probe sequence
gatgaattagcatctctacttattt

SEQ ID NO: 179141 - DNA, 25 bp, Probe sequence
gattgcccctttttatcgtaaatgg

SEQ ID NO: 179142 - DNA, 25 bp, Probe sequence
gtatcaaccacaaactggtgttatt

SEQ ID NO: 179143 - DNA, 25 bp, Probe sequence
gtcgacacacattatctcagattta

SEQ ID NO: 179144 - DNA, 25 bp, Probe sequence
gtgacggtgaagttatcttaaatgg

SEQ ID NO: 179145 - DNA, 25 bp, Probe sequence
gggaccatcaagtatttgaatttta

SEQ ID NO: 179146 - DNA, 25 bp, Probe sequence
ggttttattggtagaaatggcgctg

SEQ ID NO: 179147 - DNA, 25 bp, Probe sequence
ggattcgtcactggttttattggta

SEQ ID NO: 179148 - DNA, 25 bp, Probe sequence
tgaggaccttgatgatgaattagca

SEQ ID NO: 179149 - DNA, 25 bp, Probe sequence
tcctcaaggattcgtcactggtttt

SEQ ID NO: 179150 - DNA, 25 bp, Probe sequence
taggattaacagaacatgcgcaagt

SEQ ID NO: 179151 - DNA, 25 bp, Probe sequence
tatggctctcaatccgatagagtta

SEQ ID NO: 179152 - DNA, 25 bp, Probe sequence
tttttatcgtaaatgggaccatcaa

SEQ ID NO: 179153 - DNA, 25 bp, Probe sequence
tttttgatgagcctacttcaggtct

SEQ ID NO: 179154 - DNA, 25 bp, Probe sequence
ttattcaagtgatcagtttaattta

SEQ ID NO: 179155 - DNA, 25 bp, Probe sequence
attactaccaaacgtgcttatgaag

SEQ ID NO: 179156 - DNA, 25 bp, Probe sequence
atgttgctcctggagagcatttgcc

SEQ ID NO: 179157 - DNA, 25 bp, Probe sequence
agggacctttgttaaggagcaagat

SEQ ID NO: 179158 - DNA, 25 bp, Probe sequence
agaattggttaatgaagcgcaagcc

SEQ ID NO: 179159 - DNA, 25 bp, Probe sequence
agcgcaagccatcgaaatgtcactt

SEQ ID NO: 179160 - DNA, 25 bp, Probe sequence
accaaacgtgcttatgaagatttag

SEQ ID NO: 179161 - DNA, 25 bp, Probe sequence
actaccaaacgtgcttatgaagatt

SEQ ID NO: 179162 - DNA, 25 bp, Probe sequence
acaatagtgattttccgatttatga

SEQ ID NO: 179163 - DNA, 25 bp, Probe sequence
aaacaatagtgattttccgatttat

SEQ ID NO: 179164 - DNA, 25 bp, Probe sequence
aacgtgcttatgaagatttagagaa

SEQ ID NO: 179165 - DNA, 25 bp, Probe sequence
aacgttcatttatgaggaggaatca

SEQ ID NO: 179166 - DNA, 25 bp, Probe sequence
aagccatcgaaatgtcacttgagga

SEQ ID NO: 179167 - DNA, 25 bp, Probe sequence
aagggacatgttgctcctggagagc

SEQ ID NO: 179168 - DNA, 25 bp, Probe sequence
aatgaagcgcaagccatcgaaatgt

SEQ ID NO: 179169 - DNA, 25 bp, Probe sequence
ccgatttatgaacagattaagcaac

SEQ ID NO: 179170 - DNA, 25 bp, Probe sequence
ccatcgaaatgtcacttgaggaact

SEQ ID NO: 179171 - DNA, 25 bp, Probe sequence
gccatcgaaatgtcacttgaggaac

SEQ ID NO: 179172 - DNA, 25 bp, Probe sequence
gcgcaagccatcgaaatgtcacttg

SEQ ID NO: 179173 - DNA, 25 bp, Probe sequence
gcaagccatcgaaatgtcacttgag

SEQ ID NO: 179174 - DNA, 25 bp, Probe sequence
gaagcgcaagccatcgaaatgtcac

SEQ ID NO: 179175 - DNA, 25 bp, Probe sequence
gaacttgccaaagatcttcaagtaa

SEQ ID NO: 179176 - DNA, 25 bp, Probe sequence
gaacagattaagcaacaagtaaaac

SEQ ID NO: 179177 - DNA, 25 bp, Probe sequence
gacatgttgctcctggagagcattt

SEQ ID NO: 179178 - DNA, 25 bp, Probe sequence
gatattttaacgttcatttatgagg

SEQ ID NO: 179179 - DNA, 25 bp, Probe sequence
gattttccgatttatgaacagatta

SEQ ID NO: 179180 - DNA, 25 bp, Probe sequence
gttaatgaagcgcaagccatcgaaa

SEQ ID NO: 179181 - DNA, 25 bp, Probe sequence
gttaaggagcaagatagttctattt

SEQ ID NO: 179182 - DNA, 25 bp, Probe sequence
gtgattttccgatttatgaacagat

SEQ ID NO: 179183 - DNA, 25 bp, Probe sequence
gggacatgttgctcctggagagcat

SEQ ID NO: 179184 - DNA, 25 bp, Probe sequence
ggagcaagatagttctattttaaaa

SEQ ID NO: 179185 - DNA, 25 bp, Probe sequence
tggttaatgaagcgcaagccatcga

SEQ ID NO: 179186 - DNA, 25 bp, Probe sequence
taaagggacatgttgctcctggaga

SEQ ID NO: 179187 - DNA, 25 bp, Probe sequence
tttaaagggacatgttgctcctgga

SEQ ID NO: 179188 - DNA, 25 bp, Probe sequence
ttgccaaagatcttcaagtaagttt

SEQ ID NO: 179189 - DNA, 25 bp, Probe sequence
attacaggtggcttactaattattt

SEQ ID NO: 179190 - DNA, 25 bp, Probe sequence
atgacacttattacaggtggcttac

SEQ ID NO: 179191 - DNA, 25 bp, Probe sequence
atgatgacacttattacaggtggct

SEQ ID NO: 179192 - DNA, 25 bp, Probe sequence
atgatgtggtggcaagaagggatga

SEQ ID NO: 179193 - DNA, 25 bp, Probe sequence
atgtggtggcaagaagggatgatga

SEQ ID NO: 179194 - DNA, 25 bp, Probe sequence
agggatgatgacacttattacaggt

SEQ ID NO: 179195 - DNA, 25 bp, Probe sequence
agaagggatgatgacacttattaca

SEQ ID NO: 179196 - DNA, 25 bp, Probe sequence
acttattacaggtggcttactaatt

SEQ ID NO: 179197 - DNA, 25 bp, Probe sequence
acacttattacaggtggcttactaa

SEQ ID NO: 179198 - DNA, 25 bp, Probe sequence
aagaagggatgatgacacttattac

SEQ ID NO: 179199 - DNA, 25 bp, Probe sequence
aagggatgatgacacttattacagg

SEQ ID NO: 179200 - DNA, 25 bp, Probe sequence
cacttattacaggtggcttactaat

SEQ ID NO: 179201 - DNA, 25 bp, Probe sequence
caggtggcttactaattatttttcg

SEQ ID NO: 179202 - DNA, 25 bp, Probe sequence
cttattacaggtggcttactaatta

SEQ ID NO: 179203 - DNA, 25 bp, Probe sequence
gcaagaagggatgatgacacttatt

SEQ ID NO: 179204 - DNA, 25 bp, Probe sequence
gaagggatgatgacacttattacag

SEQ ID NO: 179205 - DNA, 25 bp, Probe sequence
gacacttattacaggtggcttacta

SEQ ID NO: 179206 - DNA, 25 bp, Probe sequence
gatgtggtggcaagaagggatgatg

SEQ ID NO: 179207 - DNA, 25 bp, Probe sequence
gatgatgacacttattacaggtggc

SEQ ID NO: 179208 - DNA, 25 bp, Probe sequence
gatgacacttattacaggtggctta

SEQ ID NO: 179209 - DNA, 25 bp, Probe sequence
gtggtggcaagaagggatgatgaca

SEQ ID NO: 179210 - DNA, 25 bp, Probe sequence
gtggcaagaagggatgatgacactt

SEQ ID NO: 179211 - DNA, 25 bp, Probe sequence
gggatgatgacacttattacaggtg

SEQ ID NO: 179212 - DNA, 25 bp, Probe sequence
ggatgatgacacttattacaggtgg

SEQ ID NO: 179213 - DNA, 25 bp, Probe sequence
ggcaagaagggatgatgacacttat

SEQ ID NO: 179214 - DNA, 25 bp, Probe sequence
tggttagaactgaaatggaaaaata

SEQ ID NO: 179215 - DNA, 25 bp, Probe sequence
tgtggtggcaagaagggatgatgac

SEQ ID NO: 179216 - DNA, 25 bp, Probe sequence
tgatgtggtggcaagaagggatgat

SEQ ID NO: 179217 - DNA, 25 bp, Probe sequence
tgatgacacttattacaggtggctt

SEQ ID NO: 179218 - DNA, 25 bp, Probe sequence
tgacacttattacaggtggcttact

SEQ ID NO: 179219 - DNA, 25 bp, Probe sequence
tacaggtggcttactaattattttt

SEQ ID NO: 179220 - DNA, 25 bp, Probe sequence
tattacaggtggcttactaattatt

SEQ ID NO: 179221 - DNA, 25 bp, Probe sequence
ttattacaggtggcttactaattat

SEQ ID NO: 179222 - DNA, 25 bp, Probe sequence
ttacaggtggcttactaattatttt

SEQ ID NO: 179223 - DNA, 25 bp, Probe sequence
attatgacacaattgccagcggtaa

SEQ ID NO: 179224 - DNA, 25 bp, Probe sequence
atatagatacccagcattagtaaga

SEQ ID NO: 179225 - DNA, 25 bp, Probe sequence
atagaaatacgagaattgctactgt

SEQ ID NO: 179226 - DNA, 25 bp, Probe sequence
atagctactccaaaacgattagtta

SEQ ID NO: 179227 - DNA, 25 bp, Probe sequence
atccaacttatgacaagaatgtatt

SEQ ID NO: 179228 - DNA, 25 bp, Probe sequence
atgacacaattgccagcggtaaaaa

SEQ ID NO: 179229 - DNA, 25 bp, Probe sequence
aggtattggacgaacttcatcaaat

SEQ ID NO: 179230 - DNA, 25 bp, Probe sequence
agtaacatacacacgaaatcaagat

SEQ ID NO: 179231 - DNA, 25 bp, Probe sequence
acgactcaagcaaattcagctcata

SEQ ID NO: 179232 - DNA, 25 bp, Probe sequence
aaagtatccaagtgagtaccatgta

SEQ ID NO: 179233 - DNA, 25 bp, Probe sequence
aacgtgttttaatagcgtcatcatt

SEQ ID NO: 179234 - DNA, 25 bp, Probe sequence
aacgcaatttgaagtaacatacaca

SEQ ID NO: 179235 - DNA, 25 bp, Probe sequence
aaccctgaactaagctttgcttcaa

SEQ ID NO: 179236 - DNA, 25 bp, Probe sequence
aagcaaattcagctcataaagactc

SEQ ID NO: 179237 - DNA, 25 bp, Probe sequence
cagacctggaatacattatgcacct

SEQ ID NO: 179238 - DNA, 25 bp, Probe sequence
catcattatcatgtgcaattttatt

SEQ ID NO: 179239 - DNA, 25 bp, Probe sequence
catatagctcaggtggtaaattcga

SEQ ID NO: 179240 - DNA, 25 bp, Probe sequence
gctttgcttcaaaatatagataccc

SEQ ID NO: 179241 - DNA, 25 bp, Probe sequence
gcattagtaagaagtggctttaatc

SEQ ID NO: 179242 - DNA, 25 bp, Probe sequence
gcagcaacgactcaagcaaattcag

SEQ ID NO: 179243 - DNA, 25 bp, Probe sequence
gaacttcatcaaatagctactccaa

SEQ ID NO: 179244 - DNA, 25 bp, Probe sequence
gaaaaccctgaactaagctttgctt

SEQ ID NO: 179245 - DNA, 25 bp, Probe sequence
gaaatattagaccaattgccgaaaa

SEQ ID NO: 179246 - DNA, 25 bp, Probe sequence
gacagtacattttcatatagctcag

SEQ ID NO: 179247 - DNA, 25 bp, Probe sequence
gttatcagcagcaacgactcaagca

SEQ ID NO: 179248 - DNA, 25 bp, Probe sequence
gttattgcgaatgacttgaagtatg

SEQ ID NO: 179249 - DNA, 25 bp, Probe sequence
gtgagtaccatgtagattttcaagt

SEQ ID NO: 179250 - DNA, 25 bp, Probe sequence
tccagaatttttaacttatttatct

SEQ ID NO: 179251 - DNA, 25 bp, Probe sequence
tcatgtgcaattttattgttatcag

SEQ ID NO: 179252 - DNA, 25 bp, Probe sequence
taataactggcatgtacactggtca

SEQ ID NO: 179253 - DNA, 25 bp, Probe sequence
taattgtcacttatgaagttgattg

SEQ ID NO: 179254 - DNA, 25 bp, Probe sequence
tacactggtcagttattgcgaatga

SEQ ID NO: 179255 - DNA, 25 bp, Probe sequence
tacattttcatatagctcaggtggt

SEQ ID NO: 179256 - DNA, 25 bp, Probe sequence
ttaaaaaacaaggctcaattcattc

SEQ ID NO: 179257 - DNA, 25 bp, Probe sequence
attgatgctcatcattggtccgttg

SEQ ID NO: 179258 - DNA, 25 bp, Probe sequence
atttctcagtattacgcaaccgtcc

SEQ ID NO: 179259 - DNA, 25 bp, Probe sequence
atataggacctctcgttggtcaaac

SEQ ID NO: 179260 - DNA, 25 bp, Probe sequence
atatatgctcaaacacaccttggtt

SEQ ID NO: 179261 - DNA, 25 bp, Probe sequence
atcagcagctatcttgttaccttca

SEQ ID NO: 179262 - DNA, 25 bp, Probe sequence
agcactaagtactacagttttcagt

SEQ ID NO: 179263 - DNA, 25 bp, Probe sequence
agctgcgcaatctggacttgttaca

SEQ ID NO: 179264 - DNA, 25 bp, Probe sequence
actatgcaccaagtgtagctgcaac

SEQ ID NO: 179265 - DNA, 25 bp, Probe sequence
acagtggtctttttcatatatgctc

SEQ ID NO: 179266 - DNA, 25 bp, Probe sequence
acaatcttcaccacgcagtaatatt

SEQ ID NO: 179267 - DNA, 25 bp, Probe sequence
aagtaccttttattgatttctcagt

SEQ ID NO: 179268 - DNA, 25 bp, Probe sequence
aattttacaaggtctatcagcagct

SEQ ID NO: 179269 - DNA, 25 bp, Probe sequence
caaccgtccgttcattggtgcattt

SEQ ID NO: 179270 - DNA, 25 bp, Probe sequence
caccttggtttatcagctgcgcaat

SEQ ID NO: 179271 - DNA, 25 bp, Probe sequence
cgaacgtcgacatgaagtacctttt

SEQ ID NO: 179272 - DNA, 25 bp, Probe sequence
ctgtcatcggcatcactattattag

SEQ ID NO: 179273 - DNA, 25 bp, Probe sequence
cctctcctgccgtgttaaatttatc

SEQ ID NO: 179274 - DNA, 25 bp, Probe sequence
gccattgtggcagttgcgatgattc

SEQ ID NO: 179275 - DNA, 25 bp, Probe sequence
gcaacattacgtttcggtggcaaat

SEQ ID NO: 179276 - DNA, 25 bp, Probe sequence
gaataacacacaatcttcaccacgc

SEQ ID NO: 179277 - DNA, 25 bp, Probe sequence
gacatacatgggtctcataatcagt

SEQ ID NO: 179278 - DNA, 25 bp, Probe sequence
gacttgttacattgccatatgccat

SEQ ID NO: 179279 - DNA, 25 bp, Probe sequence
gatattcatcatcatcgaacgtcga

SEQ ID NO: 179280 - DNA, 25 bp, Probe sequence
gtatgtttgcatctcttctattaat

SEQ ID NO: 179281 - DNA, 25 bp, Probe sequence
gtcgattttcgctgttatgattggt

SEQ ID NO: 179282 - DNA, 25 bp, Probe sequence
gtctgagcatttttatcatcactac

SEQ ID NO: 179283 - DNA, 25 bp, Probe sequence
ggcctagctggtgttatcggcggtt

SEQ ID NO: 179284 - DNA, 25 bp, Probe sequence
ggctcattgtctgcatacatgatca

SEQ ID NO: 179285 - DNA, 25 bp, Probe sequence
tgcactgctcatcatcggtagaatt

SEQ ID NO: 179286 - DNA, 25 bp, Probe sequence
tccttcgccacaggtatcttcatgg

SEQ ID NO: 179287 - DNA, 25 bp, Probe sequence
tctattagtttaacttccttcgcca

SEQ ID NO: 179288 - DNA, 25 bp, Probe sequence
tcttgttaccttcaacagttggcgt

SEQ ID NO: 179289 - DNA, 25 bp, Probe sequence
ttatatcggacatcactgcactgct

SEQ ID NO: 179290 - DNA, 25 bp, Probe sequence
ttgcgattatgttgtctgcattaac

SEQ ID NO: 179291 - DNA, 25 bp, Probe sequence
agatatcaaacgcaagtagatgttg

SEQ ID NO: 179292 - DNA, 25 bp, Probe sequence
agagcaaacaaagatattaaacaga

SEQ ID NO: 179293 - DNA, 25 bp, Probe sequence
agctgatcatgtgcttgaacttaga

SEQ ID NO: 179294 - DNA, 25 bp, Probe sequence
actcgcccaaaataaatggctcgta

SEQ ID NO: 179295 - DNA, 25 bp, Probe sequence
acataagcaacatcataatgaacta

SEQ ID NO: 179296 - DNA, 25 bp, Probe sequence
acactcgcccaaaataaatggctcg

SEQ ID NO: 179297 - DNA, 25 bp, Probe sequence
acagctgatcatgtgcttgaactta

SEQ ID NO: 179298 - DNA, 25 bp, Probe sequence
aaacgcaagtagatgttgcgcaaaa

SEQ ID NO: 179299 - DNA, 25 bp, Probe sequence
aaacagctgatcatgtgcttgaact

SEQ ID NO: 179300 - DNA, 25 bp, Probe sequence
aaaaagagctttctgaattagttga

SEQ ID NO: 179301 - DNA, 25 bp, Probe sequence
aaaagacactcgcccaaaataaatg

SEQ ID NO: 179302 - DNA, 25 bp, Probe sequence
aacagctgatcatgtgcttgaactt

SEQ ID NO: 179303 - DNA, 25 bp, Probe sequence
aagacactcgcccaaaataaatggc

SEQ ID NO: 179304 - DNA, 25 bp, Probe sequence
aagttgtagatgagaatttagagca

SEQ ID NO: 179305 - DNA, 25 bp, Probe sequence
cactcgcccaaaataaatggctcgt

SEQ ID NO: 179306 - DNA, 25 bp, Probe sequence
cagctgatcatgtgcttgaacttag

SEQ ID NO: 179307 - DNA, 25 bp, Probe sequence
catgtgcttgaacttagagaggaac

SEQ ID NO: 179308 - DNA, 25 bp, Probe sequence
catcataatgaactaagagaatctc

SEQ ID NO: 179309 - DNA, 25 bp, Probe sequence
ctgatcatgtgcttgaacttagaga

SEQ ID NO: 179310 - DNA, 25 bp, Probe sequence
cccaaaataaatggctcgtaggtgc

SEQ ID NO: 179311 - DNA, 25 bp, Probe sequence
gctgatcatgtgcttgaacttagag

SEQ ID NO: 179312 - DNA, 25 bp, Probe sequence
gaagaaaagacactcgcccaaaata

SEQ ID NO: 179313 - DNA, 25 bp, Probe sequence
gaagaaagatatcaaacgcaagtag

SEQ ID NO: 179314 - DNA, 25 bp, Probe sequence
gaaaagacactcgcccaaaataaat

SEQ ID NO: 179315 - DNA, 25 bp, Probe sequence
gaaacagctgatcatgtgcttgaac

SEQ ID NO: 179316 - DNA, 25 bp, Probe sequence
gacactcgcccaaaataaatggctc

SEQ ID NO: 179317 - DNA, 25 bp, Probe sequence
gagaatctcataaagaacttaaaga

SEQ ID NO: 179318 - DNA, 25 bp, Probe sequence
gagaggaacataagcaacatcataa

SEQ ID NO: 179319 - DNA, 25 bp, Probe sequence
gaggaacataagcaacatcataatg

SEQ ID NO: 179320 - DNA, 25 bp, Probe sequence
gatcatgtgcttgaacttagagagg

SEQ ID NO: 179321 - DNA, 25 bp, Probe sequence
gtagatgagaatttagagcaaacaa

SEQ ID NO: 179322 - DNA, 25 bp, Probe sequence
gtgcttgaacttagagaggaacata

SEQ ID NO: 179323 - DNA, 25 bp, Probe sequence
tcgcccaaaataaatggctcgtagg

SEQ ID NO: 179324 - DNA, 25 bp, Probe sequence
tcatgtgcttgaacttagagaggaa

SEQ ID NO: 179325 - DNA, 25 bp, Probe sequence
attatgtactttccatatatcaaaa

SEQ ID NO: 179326 - DNA, 25 bp, Probe sequence
atttcattatgtactttccatatat

SEQ ID NO: 179327 - DNA, 25 bp, Probe sequence
atatggatactctcatgatggactt

SEQ ID NO: 179328 - DNA, 25 bp, Probe sequence
atactctcatgatggacttaattga

SEQ ID NO: 179329 - DNA, 25 bp, Probe sequence
atgccatttcattatgtactttcca

SEQ ID NO: 179330 - DNA, 25 bp, Probe sequence
atgatggacttaattgaaaatggta

SEQ ID NO: 179331 - DNA, 25 bp, Probe sequence
atgtactttccatatatcaaaataa

SEQ ID NO: 179332 - DNA, 25 bp, Probe sequence
atggatactctcatgatggacttaa

SEQ ID NO: 179333 - DNA, 25 bp, Probe sequence
aaatatggatactctcatgatggac

SEQ ID NO: 179334 - DNA, 25 bp, Probe sequence
aaatgccatttcattatgtactttc

SEQ ID NO: 179335 - DNA, 25 bp, Probe sequence
aaaaatgccatttcattatgtactt

SEQ ID NO: 179336 - DNA, 25 bp, Probe sequence
aaaaagcagaggctttaattgatgc

SEQ ID NO: 179337 - DNA, 25 bp, Probe sequence
aaaatgccatttcattatgtacttt

SEQ ID NO: 179338 - DNA, 25 bp, Probe sequence
aatgccatttcattatgtactttcc

SEQ ID NO: 179339 - DNA, 25 bp, Probe sequence
aatatggatactctcatgatggact

SEQ ID NO: 179340 - DNA, 25 bp, Probe sequence
catttcattatgtactttccatata

SEQ ID NO: 179341 - DNA, 25 bp, Probe sequence
cattatgtactttccatatatcaaa

SEQ ID NO: 179342 - DNA, 25 bp, Probe sequence
ctctcatgatggacttaattgaaaa

SEQ ID NO: 179343 - DNA, 25 bp, Probe sequence
cgaagttttaaaaatgccatttcat

SEQ ID NO: 179344 - DNA, 25 bp, Probe sequence
ccatttcattatgtactttccatat

SEQ ID NO: 179345 - DNA, 25 bp, Probe sequence
gccatttcattatgtactttccata

SEQ ID NO: 179346 - DNA, 25 bp, Probe sequence
gctaacgaagttttaaaaatgccat

SEQ ID NO: 179347 - DNA, 25 bp, Probe sequence
gaaaatggtaaagacgctaacgaag

SEQ ID NO: 179348 - DNA, 25 bp, Probe sequence
gaaaaatatggatactctcatgatg

SEQ ID NO: 179349 - DNA, 25 bp, Probe sequence
gatactctcatgatggacttaattg

SEQ ID NO: 179350 - DNA, 25 bp, Probe sequence
gtactttccatatatcaaaataaaa

SEQ ID NO: 179351 - DNA, 25 bp, Probe sequence
ggatactctcatgatggacttaatt

SEQ ID NO: 179352 - DNA, 25 bp, Probe sequence
tggatactctcatgatggacttaat

SEQ ID NO: 179353 - DNA, 25 bp, Probe sequence
tgccatttcattatgtactttccat

SEQ ID NO: 179354 - DNA, 25 bp, Probe sequence
tcattatgtactttccatatatcaa

SEQ ID NO: 179355 - DNA, 25 bp, Probe sequence
tactctcatgatggacttaattgaa

SEQ ID NO: 179356 - DNA, 25 bp, Probe sequence
tatggatactctcatgatggactta

SEQ ID NO: 179357 - DNA, 25 bp, Probe sequence
tttcattatgtactttccatatatc

SEQ ID NO: 179358 - DNA, 25 bp, Probe sequence
ttcattatgtactttccatatatca

SEQ ID NO: 179359 - DNA, 25 bp, Probe sequence
attgaggacgaaaatagcacgatga

SEQ ID NO: 179360 - DNA, 25 bp, Probe sequence
attttcattactcaaggtcagcaaa

SEQ ID NO: 179361 - DNA, 25 bp, Probe sequence
agtagaagacccgaaagcaaatgaa

SEQ ID NO: 179362 - DNA, 25 bp, Probe sequence
agaagacccgaaagcaaatgaaatt

SEQ ID NO: 179363 - DNA, 25 bp, Probe sequence
acttaacaccacacttcatttcatt

SEQ ID NO: 179364 - DNA, 25 bp, Probe sequence
aaacgtacttaacaccacacttcat

SEQ ID NO: 179365 - DNA, 25 bp, Probe sequence
aaacgtaacattattcaattagtag

SEQ ID NO: 179366 - DNA, 25 bp, Probe sequence
aaaagaacgtatgcatgcacctgat

SEQ ID NO: 179367 - DNA, 25 bp, Probe sequence
aacaccacacttcatttcatttgaa

SEQ ID NO: 179368 - DNA, 25 bp, Probe sequence
aatttacgataaccaattcacagtt

SEQ ID NO: 179369 - DNA, 25 bp, Probe sequence
caccacacttcatttcatttgaaat

SEQ ID NO: 179370 - DNA, 25 bp, Probe sequence
cagattgatggatatggttgtaaaa

SEQ ID NO: 179371 - DNA, 25 bp, Probe sequence
ctagaaattttatccagaacatgaa

SEQ ID NO: 179372 - DNA, 25 bp, Probe sequence
cgataaccaattcacagttaaagac

SEQ ID NO: 179373 - DNA, 25 bp, Probe sequence
gcacctgatggaatgaatgcacttc

SEQ ID NO: 179374 - DNA, 25 bp, Probe sequence
gaatgaatgcacttcgtgaacaagt

SEQ ID NO: 179375 - DNA, 25 bp, Probe sequence
gaacgtatgcatgcacctgatggaa

SEQ ID NO: 179376 - DNA, 25 bp, Probe sequence
gaaaatagcacgatgaaaccaagag

SEQ ID NO: 179377 - DNA, 25 bp, Probe sequence
gaaactagaaattttatccagaaca

SEQ ID NO: 179378 - DNA, 25 bp, Probe sequence
gaaaccaagagaaatcgctgacaga

SEQ ID NO: 179379 - DNA, 25 bp, Probe sequence
gagaaatcgctgacagattgatgga

SEQ ID NO: 179380 - DNA, 25 bp, Probe sequence
gatggaatgaatgcacttcgtgaac

SEQ ID NO: 179381 - DNA, 25 bp, Probe sequence
gtatgcatgcacctgatggaatgaa

SEQ ID NO: 179382 - DNA, 25 bp, Probe sequence
gtcagcaaactgaggaaactagaaa

SEQ ID NO: 179383 - DNA, 25 bp, Probe sequence
ggatttaatcgatgatattgaggac

SEQ ID NO: 179384 - DNA, 25 bp, Probe sequence
tgtatacgaagcaatggatttaatc

SEQ ID NO: 179385 - DNA, 25 bp, Probe sequence
tcgctgacagattgatggatatggt

SEQ ID NO: 179386 - DNA, 25 bp, Probe sequence
tcaattagtagaagacccgaaagca

SEQ ID NO: 179387 - DNA, 25 bp, Probe sequence
tactcaaggtcagcaaactgaggaa

SEQ ID NO: 179388 - DNA, 25 bp, Probe sequence
tacaaacgtacttaacaccacactt

SEQ ID NO: 179389 - DNA, 25 bp, Probe sequence
tacttaacaccacacttcatttcat

SEQ ID NO: 179390 - DNA, 25 bp, Probe sequence
tttcatttgaaattgtatacgaagc

SEQ ID NO: 179391 - DNA, 25 bp, Probe sequence
ttcattactcaaggtcagcaaactg

SEQ ID NO: 179392 - DNA, 25 bp, Probe sequence
ttaacaccacacttcatttcatttg

SEQ ID NO: 179393 - DNA, 25 bp, Probe sequence
atgtttacaaatcctaaaatcgatg

SEQ ID NO: 179394 - DNA, 25 bp, Probe sequence
aaattttaggcgaagaatatactgg

SEQ ID NO: 179395 - DNA, 25 bp, Probe sequence
aaagattgggatttctcaagtgaag

SEQ ID NO: 179396 - DNA, 25 bp, Probe sequence
aaaacatgcaagtgcgccaaaggcg

SEQ ID NO: 179397 - DNA, 25 bp, Probe sequence
aaaatcgatggagaaacggctgaga

SEQ ID NO: 179398 - DNA, 25 bp, Probe sequence
aacatgcaagtgcgccaaaggcgta

SEQ ID NO: 179399 - DNA, 25 bp, Probe sequence
aaggcgtatattaacattactggtt

SEQ ID NO: 179400 - DNA, 25 bp, Probe sequence
catgcaagtgcgccaaaggcgtata

SEQ ID NO: 179401 - DNA, 25 bp, Probe sequence
gcgccaaaggcgtatattaacatta

SEQ ID NO: 179402 - DNA, 25 bp, Probe sequence
gcgaagaggctttcttaaagaaaat

SEQ ID NO: 179403 - DNA, 25 bp, Probe sequence
gctaaattaacgaaagaaggcgcgg

SEQ ID NO: 179404 - DNA, 25 bp, Probe sequence
gcacttttccctttagttgataata

SEQ ID NO: 179405 - DNA, 25 bp, Probe sequence
gcaagtgcgccaaaggcgtatatta

SEQ ID NO: 179406 - DNA, 25 bp, Probe sequence
gaatatactggaaacgtgacagagg

SEQ ID NO: 179407 - DNA, 25 bp, Probe sequence
gaaggcgcggaattaaaatatagtg

SEQ ID NO: 179408 - DNA, 25 bp, Probe sequence
tgaaggtgaggcacttttcccttta

SEQ ID NO: 179409 - DNA, 25 bp, Probe sequence
gaaggtgaggcacttttccctttag

SEQ ID NO: 179410 - DNA, 25 bp, Probe sequence
gaagaggttgaaggtgaggcacttt

SEQ ID NO: 179411 - DNA, 25 bp, Probe sequence
gaaacggctgagaaagattgggatt

SEQ ID NO: 179412 - DNA, 25 bp, Probe sequence
gaaagaaggcgcggaattaaaatat

SEQ ID NO: 179413 - DNA, 25 bp, Probe sequence
gacggtgaaaaaggcgaagaggctt

SEQ ID NO: 179414 - DNA, 25 bp, Probe sequence
gaggattacaaaaaattggtgttga

SEQ ID NO: 179415 - DNA, 25 bp, Probe sequence
gatattacaaaaacaagaggattac

SEQ ID NO: 179416 - DNA, 25 bp, Probe sequence
gattgggatttctcaagtgaagagg

SEQ ID NO: 179417 - DNA, 25 bp, Probe sequence
gttgaaggtgaggcacttttccctt

SEQ ID NO: 179418 - DNA, 25 bp, Probe sequence
gggatttctcaagtgaagaggttga

SEQ ID NO: 179419 - DNA, 25 bp, Probe sequence
ggttgaaggtgaggcacttttccct

SEQ ID NO: 179420 - DNA, 25 bp, Probe sequence
ggcacttttccctttagttgataat

SEQ ID NO: 179421 - DNA, 25 bp, Probe sequence
ggcagtaaaacatgcaagtgcgcca

SEQ ID NO: 179422 - DNA, 25 bp, Probe sequence
ggcgaagaatatactggaaacgtga

SEQ ID NO: 179423 - DNA, 25 bp, Probe sequence
ggcgtatattaacattactggttta

SEQ ID NO: 179424 - DNA, 25 bp, Probe sequence
tgaaaaaggcgaagaggctttctta

SEQ ID NO: 179425 - DNA, 25 bp, Probe sequence
tcgatggagaaacggctgagaaaga

SEQ ID NO: 179426 - DNA, 25 bp, Probe sequence
taacattactggtttaggtttcgct

SEQ ID NO: 179427 - DNA, 25 bp, Probe sequence
attttgtacaaagttcatgaagtga

SEQ ID NO: 179428 - DNA, 25 bp, Probe sequence
atactgacggagatgagtgtgcata

SEQ ID NO: 179429 - DNA, 25 bp, Probe sequence
atcgcattcaaaagttattatggtc

SEQ ID NO: 179430 - DNA, 25 bp, Probe sequence
agatatctaatcgcattcaaaagtt

SEQ ID NO: 179431 - DNA, 25 bp, Probe sequence
agatgtttttgttaagtacaatgat

SEQ ID NO: 179432 - DNA, 25 bp, Probe sequence
agagagcacgtaaatatcaataata

SEQ ID NO: 179433 - DNA, 25 bp, Probe sequence
agctctcgcgtttacgagggcattt

SEQ ID NO: 179434 - DNA, 25 bp, Probe sequence
acctacaacttatactgacggagat

SEQ ID NO: 179435 - DNA, 25 bp, Probe sequence
acccaatacctacaacttatactga

SEQ ID NO: 179436 - DNA, 25 bp, Probe sequence
acgatatcgacgacccaatacctac

SEQ ID NO: 179437 - DNA, 25 bp, Probe sequence
aagacagaattattagagagcacgt

SEQ ID NO: 179438 - DNA, 25 bp, Probe sequence
aagatactgatgtaccttttattgt

SEQ ID NO: 179439 - DNA, 25 bp, Probe sequence
aatacctacaacttatactgacgga

SEQ ID NO: 179440 - DNA, 25 bp, Probe sequence
aataccctaatgtaaaagatactga

SEQ ID NO: 179441 - DNA, 25 bp, Probe sequence
catatagaagctctcgcgtttacga

SEQ ID NO: 179442 - DNA, 25 bp, Probe sequence
cgacccaatacctacaacttatact

SEQ ID NO: 179443 - DNA, 25 bp, Probe sequence
gaagctctcgcgtttacgagggcat

SEQ ID NO: 179444 - DNA, 25 bp, Probe sequence
gaaataagatatctaatcgcattca

SEQ ID NO: 179445 - DNA, 25 bp, Probe sequence
gacggagatgagtgtgcatatagtt

SEQ ID NO: 179446 - DNA, 25 bp, Probe sequence
gatgtaccttttattgttattgacg

SEQ ID NO: 179447 - DNA, 25 bp, Probe sequence
gatgagtgtgcatatagttatattg

SEQ ID NO: 179448 - DNA, 25 bp, Probe sequence
gttcatgaagtgattagtcaagaca

SEQ ID NO: 179449 - DNA, 25 bp, Probe sequence
gttattatggtctgaactaaaaatg

SEQ ID NO: 179450 - DNA, 25 bp, Probe sequence
gttattgacgatatcgacgacccaa

SEQ ID NO: 179451 - DNA, 25 bp, Probe sequence
gttatattgtccaaatagatgtttt

SEQ ID NO: 179452 - DNA, 25 bp, Probe sequence
gtaccttttattgttattgacgata

SEQ ID NO: 179453 - DNA, 25 bp, Probe sequence
gtacaatgatgaatataatgcgaga

SEQ ID NO: 179454 - DNA, 25 bp, Probe sequence
ggaaaaccggaatatatagaagaat

SEQ ID NO: 179455 - DNA, 25 bp, Probe sequence
tcgcgtttacgagggcattttttat

SEQ ID NO: 179456 - DNA, 25 bp, Probe sequence
taagttcaataaataccctaatgta

SEQ ID NO: 179457 - DNA, 25 bp, Probe sequence
taaaacatatagaagctctcgcgtt

SEQ ID NO: 179458 - DNA, 25 bp, Probe sequence
tactgatgtaccttttattgttatt

SEQ ID NO: 179459 - DNA, 25 bp, Probe sequence
tacgagggcattttttataaggagg

SEQ ID NO: 179460 - DNA, 25 bp, Probe sequence
ttgacgatatcgacgacccaatacc

SEQ ID NO: 179461 - DNA, 25 bp, Probe sequence
atatgatgatctaggttatccaaca

SEQ ID NO: 179462 - DNA, 25 bp, Probe sequence
atagtgataatgggtatgttagcaa

SEQ ID NO: 179463 - DNA, 25 bp, Probe sequence
atctgcacataaactatatagtgat

SEQ ID NO: 179464 - DNA, 25 bp, Probe sequence
atgagaatccttgcgtttgttatac

SEQ ID NO: 179465 - DNA, 25 bp, Probe sequence
atgagcataattacaagattgttta

SEQ ID NO: 179466 - DNA, 25 bp, Probe sequence
atgattacttcctactgcttttgat

SEQ ID NO: 179467 - DNA, 25 bp, Probe sequence
atgatgattacttcctactgctttt

SEQ ID NO: 179468 - DNA, 25 bp, Probe sequence
agactatctgcacataaactatata

SEQ ID NO: 179469 - DNA, 25 bp, Probe sequence
acttcctactgcttttgataaaaga

SEQ ID NO: 179470 - DNA, 25 bp, Probe sequence
acatctgggtttactaaacaactat

SEQ ID NO: 179471 - DNA, 25 bp, Probe sequence
aagtggtatgtgtaaaatgatgttt

SEQ ID NO: 179472 - DNA, 25 bp, Probe sequence
aatgcagagtatatgagaatccttg

SEQ ID NO: 179473 - DNA, 25 bp, Probe sequence
aatccttgcgtttgttatacattct

SEQ ID NO: 179474 - DNA, 25 bp, Probe sequence
aataattggtttaagtggtatgtgt

SEQ ID NO: 179475 - DNA, 25 bp, Probe sequence
aatcatgatgattacttcctactgc

SEQ ID NO: 179476 - DNA, 25 bp, Probe sequence
ccttgcgtttgttatacattctgaa

SEQ ID NO: 179477 - DNA, 25 bp, Probe sequence
gcgtttgttatacattctgaattta

SEQ ID NO: 179478 - DNA, 25 bp, Probe sequence
gcaatacatctgggtttactaaaca

SEQ ID NO: 179479 - DNA, 25 bp, Probe sequence
gaaagactatctgcacataaactat

SEQ ID NO: 179480 - DNA, 25 bp, Probe sequence
gaaagagattattagctgattctga

SEQ ID NO: 179481 - DNA, 25 bp, Probe sequence
gaaatgaaagactatctgcacataa

SEQ ID NO: 179482 - DNA, 25 bp, Probe sequence
gagaatccttgcgtttgttatacat

SEQ ID NO: 179483 - DNA, 25 bp, Probe sequence
gagtatatgagaatccttgcgtttg

SEQ ID NO: 179484 - DNA, 25 bp, Probe sequence
gatgatctaggttatccaacaaatg

SEQ ID NO: 179485 - DNA, 25 bp, Probe sequence
gatctaggttatccaacaaatgaga

SEQ ID NO: 179486 - DNA, 25 bp, Probe sequence
gattattagctgattctgaagaatt

SEQ ID NO: 179487 - DNA, 25 bp, Probe sequence
gattctgaagaattttctaaacggt

SEQ ID NO: 179488 - DNA, 25 bp, Probe sequence
gattacttcctactgcttttgataa

SEQ ID NO: 179489 - DNA, 25 bp, Probe sequence
gttagcaatacatctgggtttacta

SEQ ID NO: 179490 - DNA, 25 bp, Probe sequence
gtatatgagaatccttgcgtttgtt

SEQ ID NO: 179491 - DNA, 25 bp, Probe sequence
gggtatgttagcaatacatctgggt

SEQ ID NO: 179492 - DNA, 25 bp, Probe sequence
tctaaacggttgaattgtaaagcaa

SEQ ID NO: 179493 - DNA, 25 bp, Probe sequence
tcatgatgattacttcctactgctt

SEQ ID NO: 179494 - DNA, 25 bp, Probe sequence
ttacttcctactgcttttgataaaa

SEQ ID NO: 179495 - DNA, 25 bp, Probe sequence
attgtatattcgtgatccgcaaggt

SEQ ID NO: 179496 - DNA, 25 bp, Probe sequence
attcgtgatccgcaaggtgattatt

SEQ ID NO: 179497 - DNA, 25 bp, Probe sequence
atttacccagtgaagaacattatct

SEQ ID NO: 179498 - DNA, 25 bp, Probe sequence
atatagctgttgggcgagtattgat

SEQ ID NO: 179499 - DNA, 25 bp, Probe sequence
agaacattatcttgaaattgaatca

SEQ ID NO: 179500 - DNA, 25 bp, Probe sequence
agctgttgggcgagtattgatggtg

SEQ ID NO: 179501 - DNA, 25 bp, Probe sequence
acgtgaattagaacaagctatctca

SEQ ID NO: 179502 - DNA, 25 bp, Probe sequence
aaattattatatagctgttgggcga

SEQ ID NO: 179503 - DNA, 25 bp, Probe sequence
aaagactttattatgattcgtggag

SEQ ID NO: 179504 - DNA, 25 bp, Probe sequence
aaagcaagtatcaccagatttggat

SEQ ID NO: 179505 - DNA, 25 bp, Probe sequence
caagctatctcaaacggaacccaaa

SEQ ID NO: 179506 - DNA, 25 bp, Probe sequence
ctcaaacggaacccaaaatgacatt

SEQ ID NO: 179507 - DNA, 25 bp, Probe sequence
cgtgttcatttttataagtatactg

SEQ ID NO: 179508 - DNA, 25 bp, Probe sequence
gctatctcaaacggaacccaaaatg

SEQ ID NO: 179509 - DNA, 25 bp, Probe sequence
gcaaggtgattatttacccagtgaa

SEQ ID NO: 179510 - DNA, 25 bp, Probe sequence
gcaagtatcaccagatttggataat

SEQ ID NO: 179511 - DNA, 25 bp, Probe sequence
gaatataaagcaagtatcaccagat

SEQ ID NO: 179512 - DNA, 25 bp, Probe sequence
gaatcaagatatttcaaaaatcgtt

SEQ ID NO: 179513 - DNA, 25 bp, Probe sequence
gaacaagctatctcaaacggaaccc

SEQ ID NO: 179514 - DNA, 25 bp, Probe sequence
gactttattatgattcgtggaggat

SEQ ID NO: 179515 - DNA, 25 bp, Probe sequence
gagtattgatggtgtctggttacgt

SEQ ID NO: 179516 - DNA, 25 bp, Probe sequence
gatggtgtctggttacgtgaattag

SEQ ID NO: 179517 - DNA, 25 bp, Probe sequence
gatccgcaaggtgattatttaccca

SEQ ID NO: 179518 - DNA, 25 bp, Probe sequence
gattcgtggaggatatagttcatga

SEQ ID NO: 179519 - DNA, 25 bp, Probe sequence
gttgggcgagtattgatggtgtctg

SEQ ID NO: 179520 - DNA, 25 bp, Probe sequence
gtatattcgtgatccgcaaggtgat

SEQ ID NO: 179521 - DNA, 25 bp, Probe sequence
gtgattatttacccagtgaagaaca

SEQ ID NO: 179522 - DNA, 25 bp, Probe sequence
gggcgagtattgatggtgtctggtt

SEQ ID NO: 179523 - DNA, 25 bp, Probe sequence
ggtgtctggttacgtgaattagaac

SEQ ID NO: 179524 - DNA, 25 bp, Probe sequence
ggaacccaaaatgacattaaattgt

SEQ ID NO: 179525 - DNA, 25 bp, Probe sequence
tgaaaataatggtccagaagctgga

SEQ ID NO: 179526 - DNA, 25 bp, Probe sequence
tccgcaaggtgattatttacccagt

SEQ ID NO: 179527 - DNA, 25 bp, Probe sequence
tattgatggtgtctggttacgtgaa

SEQ ID NO: 179528 - DNA, 25 bp, Probe sequence
ttaaattgtatattcgtgatccgca

SEQ ID NO: 179529 - DNA, 25 bp, Probe sequence
aggggagttgtatccagctgaaggg

SEQ ID NO: 179530 - DNA, 25 bp, Probe sequence
atcgtacctttagataagctgacaa

SEQ ID NO: 179531 - DNA, 25 bp, Probe sequence
agacatagagcacaatcaacacaag

SEQ ID NO: 179532 - DNA, 25 bp, Probe sequence
agcgtctagttcaatggttaaaagt

SEQ ID NO: 179533 - DNA, 25 bp, Probe sequence
agctgacaaaacaagaattattaga

SEQ ID NO: 179534 - DNA, 25 bp, Probe sequence
aaagtaggggagttgtatccagctg

SEQ ID NO: 179535 - DNA, 25 bp, Probe sequence
aaagacatagagcacaatcaacaca

SEQ ID NO: 179536 - DNA, 25 bp, Probe sequence
aaaagtgaaatcgtcgacttattga

SEQ ID NO: 179537 - DNA, 25 bp, Probe sequence
aagcgtctagttcaatggttaaaag

SEQ ID NO: 179538 - DNA, 25 bp, Probe sequence
aagttgttagagcttttaaagacat

SEQ ID NO: 179539 - DNA, 25 bp, Probe sequence
aatcctcgtgttgaattgttgacaa

SEQ ID NO: 179540 - DNA, 25 bp, Probe sequence
aatcgtcgacttattgaatggtgaa

SEQ ID NO: 179541 - DNA, 25 bp, Probe sequence
aattattagaactatgcgaatcatt

SEQ ID NO: 179542 - DNA, 25 bp, Probe sequence
caatcaacacaagtacaaagtaggg

SEQ ID NO: 179543 - DNA, 25 bp, Probe sequence
caaaaaaaagcgtctagttcaatgg

SEQ ID NO: 179544 - DNA, 25 bp, Probe sequence
cctcgtgttgaattgttgacaaatc

SEQ ID NO: 179545 - DNA, 25 bp, Probe sequence
gcgaatcattacaaaaaaaagcgtc

SEQ ID NO: 179546 - DNA, 25 bp, Probe sequence
gctgaagggtataacaatcctcgtg

SEQ ID NO: 179547 - DNA, 25 bp, Probe sequence
gaatggtgaagacaatgacgattga

SEQ ID NO: 179548 - DNA, 25 bp, Probe sequence
gaagggtataacaatcctcgtgttg

SEQ ID NO: 179549 - DNA, 25 bp, Probe sequence
gaaatcgtcgacttattgaatggtg

SEQ ID NO: 179550 - DNA, 25 bp, Probe sequence
gacaaagtttatatcgtacctttag

SEQ ID NO: 179551 - DNA, 25 bp, Probe sequence
gagttgtatccagctgaagggtata

SEQ ID NO: 179552 - DNA, 25 bp, Probe sequence
gttgtatccagctgaagggtataac

SEQ ID NO: 179553 - DNA, 25 bp, Probe sequence
gttgaattgttgacaaatcaaatca

SEQ ID NO: 179554 - DNA, 25 bp, Probe sequence
gtttatatcgtacctttagataagc

SEQ ID NO: 179555 - DNA, 25 bp, Probe sequence
gtataacaatcctcgtgttgaattg

SEQ ID NO: 179556 - DNA, 25 bp, Probe sequence
gtatccagctgaagggtataacaat

SEQ ID NO: 179557 - DNA, 25 bp, Probe sequence
gtaggggagttgtatccagctgaag

SEQ ID NO: 179558 - DNA, 25 bp, Probe sequence
gtacctttagataagctgacaaaac

SEQ ID NO: 179559 - DNA, 25 bp, Probe sequence
gtcgacttattgaatggtgaagaca

SEQ ID NO: 179560 - DNA, 25 bp, Probe sequence
gggtataacaatcctcgtgttgaat

SEQ ID NO: 179561 - DNA, 25 bp, Probe sequence
gggagttgtatccagctgaagggta

SEQ ID NO: 179562 - DNA, 25 bp, Probe sequence
ggtgaaatttaaagttgttagagct

SEQ ID NO: 179563 - DNA, 25 bp, Probe sequence
ggtactggtaaagaccaaccaatcg

SEQ ID NO: 179564 - DNA, 25 bp, Probe sequence
caaccaatcggcttaaaccgtcaag

SEQ ID NO: 179565 - DNA, 25 bp, Probe sequence
atctgaaacttctggcgtagccgtt

SEQ ID NO: 179566 - DNA, 25 bp, Probe sequence
atggcgtatatgttactgctttacc

SEQ ID NO: 179567 - DNA, 25 bp, Probe sequence
agaagtttcttcatggatatcaata

SEQ ID NO: 179568 - DNA, 25 bp, Probe sequence
acctaaatcagcacaatctttgagt

SEQ ID NO: 179569 - DNA, 25 bp, Probe sequence
acgacgaatcatccgttattagctg

SEQ ID NO: 179570 - DNA, 25 bp, Probe sequence
aagccagctttagaaggtaccgaag

SEQ ID NO: 179571 - DNA, 25 bp, Probe sequence
aaggtcaattagatgctgcgttcag

SEQ ID NO: 179572 - DNA, 25 bp, Probe sequence
aatggttgttaatccgtccgatgct

SEQ ID NO: 179573 - DNA, 25 bp, Probe sequence
aatgcagtaaacaacggtgaaccgc

SEQ ID NO: 179574 - DNA, 25 bp, Probe sequence
cgctggtttgcgtttgaagttctta

SEQ ID NO: 179575 - DNA, 25 bp, Probe sequence
cgcttacatttgctaatccgcgcgc

SEQ ID NO: 179576 - DNA, 25 bp, Probe sequence
gaatgttatcgagtctacagtccaa

SEQ ID NO: 179577 - DNA, 25 bp, Probe sequence
gaagaagcatttgcagtggcgcttg

SEQ ID NO: 179578 - DNA, 25 bp, Probe sequence
gaaacacttgcgttagatgatatgg

SEQ ID NO: 179579 - DNA, 25 bp, Probe sequence
gagtttctagtttacctaaatcagc

SEQ ID NO: 179580 - DNA, 25 bp, Probe sequence
gagtctacagtccaagaagcaggta

SEQ ID NO: 179581 - DNA, 25 bp, Probe sequence
gagggtgcttatccagagaaagaag

SEQ ID NO: 179582 - DNA, 25 bp, Probe sequence
gaggttcaagcacagtatacacatt

SEQ ID NO: 179583 - DNA, 25 bp, Probe sequence
gatggttatttagctggtggtatta

SEQ ID NO: 179584 - DNA, 25 bp, Probe sequence
gatgatatggatttatacactgcaa

SEQ ID NO: 179585 - DNA, 25 bp, Probe sequence
gtagccgtttggggtaaaatctatg

SEQ ID NO: 179586 - DNA, 25 bp, Probe sequence
gttactgctttaccatttaatttga

SEQ ID NO: 179587 - DNA, 25 bp, Probe sequence
gtcctgcgtggattgaaagatttgt

SEQ ID NO: 179588 - DNA, 25 bp, Probe sequence
gtgacatgattaaccaactatttga

SEQ ID NO: 179589 - DNA, 25 bp, Probe sequence
gtgtttaaataccactcaactaacg

SEQ ID NO: 179590 - DNA, 25 bp, Probe sequence
gtggcgcttgaaactgcgttcttaa

SEQ ID NO: 179591 - DNA, 25 bp, Probe sequence
ggtgtatcggtaactgagggtgctt

SEQ ID NO: 179592 - DNA, 25 bp, Probe sequence
ggtacgcttacatttgctaatccgc

SEQ ID NO: 179593 - DNA, 25 bp, Probe sequence
tccgtccgatgcttttgaggttcaa

SEQ ID NO: 179594 - DNA, 25 bp, Probe sequence
taaagttgctgctgtttggaaatta

SEQ ID NO: 179595 - DNA, 25 bp, Probe sequence
taaatgattttggtcctgcgtggat

SEQ ID NO: 179596 - DNA, 25 bp, Probe sequence
ttgacagcgtttgttgttttaccaa

SEQ ID NO: 179597 - DNA, 25 bp, Probe sequence
atcatgctgcagaaacattagaaca

SEQ ID NO: 179598 - DNA, 25 bp, Probe sequence
atgcttggtatggattcgacttgtc

SEQ ID NO: 179599 - DNA, 25 bp, Probe sequence
aggcgtcatcgtttccaacgaagat

SEQ ID NO: 179600 - DNA, 25 bp, Probe sequence
agatgttttaacacaactagaattt

SEQ ID NO: 179601 - DNA, 25 bp, Probe sequence
agaggttaacattgatattgacgca

SEQ ID NO: 179602 - DNA, 25 bp, Probe sequence
aatgatggctagggaaacgtggcta

SEQ ID NO: 179603 - DNA, 25 bp, Probe sequence
aatcgtgtaacagctttggtaagta

SEQ ID NO: 179604 - DNA, 25 bp, Probe sequence
aataatggctgaggcatatgcggtt

SEQ ID NO: 179605 - DNA, 25 bp, Probe sequence
cacatcgaaatgagtccggttgcta

SEQ ID NO: 179606 - DNA, 25 bp, Probe sequence
cacaatccttcaagtattgcgcaag

SEQ ID NO: 179607 - DNA, 25 bp, Probe sequence
cagcaagtgcggcatcgcttatcgc

SEQ ID NO: 179608 - DNA, 25 bp, Probe sequence
gcgaaagatctaaatcatgctgcag

SEQ ID NO: 179609 - DNA, 25 bp, Probe sequence
gcaatagcagcaagtgcggcatcgc

SEQ ID NO: 179610 - DNA, 25 bp, Probe sequence
gcaaatggattttcaagattccttt

SEQ ID NO: 179611 - DNA, 25 bp, Probe sequence
gcaatggctggtgaccacatcgaaa

SEQ ID NO: 179612 - DNA, 25 bp, Probe sequence
gaatgatgattcacaatccttcaag

SEQ ID NO: 179613 - DNA, 25 bp, Probe sequence
gaagccattgaacaaggttttgcgg

SEQ ID NO: 179614 - DNA, 25 bp, Probe sequence
gaacatgttggtcaaataatggctg

SEQ ID NO: 179615 - DNA, 25 bp, Probe sequence
gaaagcggagattaaaggcgtcatc

SEQ ID NO: 179616 - DNA, 25 bp, Probe sequence
gagtccggttgctagaatgatgatt

SEQ ID NO: 179617 - DNA, 25 bp, Probe sequence
gaggcatatgcggttagagctggta

SEQ ID NO: 179618 - DNA, 25 bp, Probe sequence
gattaaaggcgtcatcgtttccaac

SEQ ID NO: 179619 - DNA, 25 bp, Probe sequence
gtagcaagcaatacacaagtgttat

SEQ ID NO: 179620 - DNA, 25 bp, Probe sequence
gtaaaacgccagaggttaacattga

SEQ ID NO: 179621 - DNA, 25 bp, Probe sequence
gtgcggcatcgcttatcgcaatggc

SEQ ID NO: 179622 - DNA, 25 bp, Probe sequence
gggaaacgtggctaaatgctgatga

SEQ ID NO: 179623 - DNA, 25 bp, Probe sequence
ggtggtaacctagtagctggtagtg

SEQ ID NO: 179624 - DNA, 25 bp, Probe sequence
ggattcgacttgtcctaaagatgtt

SEQ ID NO: 179625 - DNA, 25 bp, Probe sequence
ggaatcagaaatcgatgttgcagat

SEQ ID NO: 179626 - DNA, 25 bp, Probe sequence
ggctaaatgctgatgaagccattga

SEQ ID NO: 179627 - DNA, 25 bp, Probe sequence
tcgcttatcgcaatggctggtgacc

SEQ ID NO: 179628 - DNA, 25 bp, Probe sequence
taattaactcaaatggtggtaacct

SEQ ID NO: 179629 - DNA, 25 bp, Probe sequence
taaatgggtttacgaaatgcttggt

SEQ ID NO: 179630 - DNA, 25 bp, Probe sequence
tatatacacatttaagagctcataa

SEQ ID NO: 179631 - DNA, 25 bp, Probe sequence
atcaagcgatagtttttggcaacaa

SEQ ID NO: 179632 - DNA, 25 bp, Probe sequence
atctgcctctagcgcatatgacgaa

SEQ ID NO: 179633 - DNA, 25 bp, Probe sequence
atgctgaagcaattgacaaacttgt

SEQ ID NO: 179634 - DNA, 25 bp, Probe sequence
agaacgaattaaacgcgaaactcat

SEQ ID NO: 179635 - DNA, 25 bp, Probe sequence
accaaatactgacttatcaagcgat

SEQ ID NO: 179636 - DNA, 25 bp, Probe sequence
acgcgaaactcataacacaaagcat

SEQ ID NO: 179637 - DNA, 25 bp, Probe sequence
aagttctggttcatttacaaggaat

SEQ ID NO: 179638 - DNA, 25 bp, Probe sequence
acgtttagcgattgatagttgtatt

SEQ ID NO: 179639 - DNA, 25 bp, Probe sequence
acttatcaacgtactttcacaatgc

SEQ ID NO: 179640 - DNA, 25 bp, Probe sequence
acaagcgttcacaaataaattattc

SEQ ID NO: 179641 - DNA, 25 bp, Probe sequence
aaaaagacccacttcaatatgctga

SEQ ID NO: 179642 - DNA, 25 bp, Probe sequence
aaaatcaactagcaatcgcgccttt

SEQ ID NO: 179643 - DNA, 25 bp, Probe sequence
caagcgtatgtgaaacgtttagcga

SEQ ID NO: 179644 - DNA, 25 bp, Probe sequence
ctagcaatcgcgcctttgatagaag

SEQ ID NO: 179645 - DNA, 25 bp, Probe sequence
gcctttttctgaattgagtgagcta

SEQ ID NO: 179646 - DNA, 25 bp, Probe sequence
gaagatctatcacaacaagcgtatg

SEQ ID NO: 179647 - DNA, 25 bp, Probe sequence
gaagagtacgctttgtatgatgata

SEQ ID NO: 179648 - DNA, 25 bp, Probe sequence
gaaagtctattcgaagattacggga

SEQ ID NO: 179649 - DNA, 25 bp, Probe sequence
gacaatcctgaattagacgaatacc

SEQ ID NO: 179650 - DNA, 25 bp, Probe sequence
gacagcaaagaattacttatcgcag

SEQ ID NO: 179651 - DNA, 25 bp, Probe sequence
gacgaatacctgattactaaaaact

SEQ ID NO: 179652 - DNA, 25 bp, Probe sequence
gagctgtcgctcaaagtcattttaa

SEQ ID NO: 179653 - DNA, 25 bp, Probe sequence
gttgtattgaatttgttgcgcgagc

SEQ ID NO: 179654 - DNA, 25 bp, Probe sequence
gttgcgttgatgattggtatacctc

SEQ ID NO: 179655 - DNA, 25 bp, Probe sequence
gttgcgcgagctgtcgctcaaagtc

SEQ ID NO: 179656 - DNA, 25 bp, Probe sequence
gtactttcacaatgcaagaggtcat

SEQ ID NO: 179657 - DNA, 25 bp, Probe sequence
ggtgaagaaccatcagacaatcctg

SEQ ID NO: 179658 - DNA, 25 bp, Probe sequence
ggttttaatcgtagtaagtgacagc

SEQ ID NO: 179659 - DNA, 25 bp, Probe sequence
ggattttgaaatctgcctctagcgc

SEQ ID NO: 179660 - DNA, 25 bp, Probe sequence
ggaaaaaaacacgcttgtatttgag

SEQ ID NO: 179661 - DNA, 25 bp, Probe sequence
tggtatacctccaggtttgatttac

SEQ ID NO: 179662 - DNA, 25 bp, Probe sequence
tgaggtgcggattatgttaggtgaa

SEQ ID NO: 179663 - DNA, 25 bp, Probe sequence
tagtaacatgcctttttctgaattg

SEQ ID NO: 179664 - DNA, 25 bp, Probe sequence
ttatcgcagatagcttttacagaga

SEQ ID NO: 179665 - DNA, 25 bp, Probe sequence
tctacgcccttacacggagttaaag

SEQ ID NO: 179666 - DNA, 25 bp, Probe sequence
attagtgattttctttctacgccct

SEQ ID NO: 179667 - DNA, 25 bp, Probe sequence
atgaatttgcctgaagttgaccttg

SEQ ID NO: 179668 - DNA, 25 bp, Probe sequence
agactttgcaaacattcgagatttt

SEQ ID NO: 179669 - DNA, 25 bp, Probe sequence
acatggattacttgcaccacgtatc

SEQ ID NO: 179670 - DNA, 25 bp, Probe sequence
aaattcattatttctttggtcctga

SEQ ID NO: 179671 - DNA, 25 bp, Probe sequence
aaaccgatgggttcatggcttttgt

SEQ ID NO: 179672 - DNA, 25 bp, Probe sequence
aatataacgatttaccattcaaccg

SEQ ID NO: 179673 - DNA, 25 bp, Probe sequence
cattcaaccgttcaaataagcccga

SEQ ID NO: 179674 - DNA, 25 bp, Probe sequence
ccgtgcaactaaatcggttattcga

SEQ ID NO: 179675 - DNA, 25 bp, Probe sequence
gctattttcatgggacgtggaggcg

SEQ ID NO: 179676 - DNA, 25 bp, Probe sequence
gcaagtgtagggctattattccgaa

SEQ ID NO: 179677 - DNA, 25 bp, Probe sequence
gaaaaggcgaacccaatgttacata

SEQ ID NO: 179678 - DNA, 25 bp, Probe sequence
gaattgatctctttaattatctaca

SEQ ID NO: 179679 - DNA, 25 bp, Probe sequence
gaatatcacatctccattgttgcta

SEQ ID NO: 179680 - DNA, 25 bp, Probe sequence
gacggtggacgtgaggggtgtgtta

SEQ ID NO: 179681 - DNA, 25 bp, Probe sequence
gaagttgatgacagacagacgtggg

SEQ ID NO: 179682 - DNA, 25 bp, Probe sequence
gaagctttctttacagaatttgcta

SEQ ID NO: 179683 - DNA, 25 bp, Probe sequence
gacatgtctaaagcgcttgatgcat

SEQ ID NO: 179684 - DNA, 25 bp, Probe sequence
gacgtgcgtttgaggatgctggcat

SEQ ID NO: 179685 - DNA, 25 bp, Probe sequence
gagacaatcctttgatgcgttggtt

SEQ ID NO: 179686 - DNA, 25 bp, Probe sequence
gagagggttatatcgatgcaatgaa

SEQ ID NO: 179687 - DNA, 25 bp, Probe sequence
gatgatgtcaaattagaacctccta

SEQ ID NO: 179688 - DNA, 25 bp, Probe sequence
gttcatggcttttgttcacgcatta

SEQ ID NO: 179689 - DNA, 25 bp, Probe sequence
gtattttccaacattaccatttcaa

SEQ ID NO: 179690 - DNA, 25 bp, Probe sequence
gtagattgtttgctttttattgtaa

SEQ ID NO: 179691 - DNA, 25 bp, Probe sequence
gtgaggggtgtgttatttttgatga

SEQ ID NO: 179692 - DNA, 25 bp, Probe sequence
gtgtattggtggtttagactttgca

SEQ ID NO: 179693 - DNA, 25 bp, Probe sequence
gggattattgaccattgtcgatgat

SEQ ID NO: 179694 - DNA, 25 bp, Probe sequence
ggtaaaacgccaaaagctccttatg

SEQ ID NO: 179695 - DNA, 25 bp, Probe sequence
tcacgcattatatagagcagacgat

SEQ ID NO: 179696 - DNA, 25 bp, Probe sequence
taagcccgaattcatgactaagcga

SEQ ID NO: 179697 - DNA, 25 bp, Probe sequence
tacatttggttaggacattcgtttg

SEQ ID NO: 179698 - DNA, 25 bp, Probe sequence
tacttgcaccacgtatcgatacaat

SEQ ID NO: 179699 - DNA, 25 bp, Probe sequence
attgcccgaagagaaagaagacaca

SEQ ID NO: 179700 - DNA, 25 bp, Probe sequence
attatataaagacatacctagcaat

SEQ ID NO: 179701 - DNA, 25 bp, Probe sequence
ataaagacatacctagcaataaatt

SEQ ID NO: 179702 - DNA, 25 bp, Probe sequence
atctgaaaaggcgccaccatatgaa

SEQ ID NO: 179703 - DNA, 25 bp, Probe sequence
aaaggtgactatgatttatttactc

SEQ ID NO: 179704 - DNA, 25 bp, Probe sequence
aaacaattatcggatttattgcccg

SEQ ID NO: 179705 - DNA, 25 bp, Probe sequence
aactatttaatgctagagatgctgc

SEQ ID NO: 179706 - DNA, 25 bp, Probe sequence
aacgccatctgatgattacctatga

SEQ ID NO: 179707 - DNA, 25 bp, Probe sequence
aaggcgccaccatatgaaagggaaa

SEQ ID NO: 179708 - DNA, 25 bp, Probe sequence
aatgctagagatgctgcatatcaaa

SEQ ID NO: 179709 - DNA, 25 bp, Probe sequence
aatgcttgattacatgtgggaagac

SEQ ID NO: 179710 - DNA, 25 bp, Probe sequence
aattatcggatttattgcccgaaga

SEQ ID NO: 179711 - DNA, 25 bp, Probe sequence
caatctgaaaaggcgccaccatatg

SEQ ID NO: 179712 - DNA, 25 bp, Probe sequence
caagcagcaaggctacgtgtaatgc

SEQ ID NO: 179713 - DNA, 25 bp, Probe sequence
ctcaatctgaaaaggcgccaccata

SEQ ID NO: 179714 - DNA, 25 bp, Probe sequence
cggatttattgcccgaagagaaaga

SEQ ID NO: 179715 - DNA, 25 bp, Probe sequence
gcgccaccatatgaaagggaaagac

SEQ ID NO: 179716 - DNA, 25 bp, Probe sequence
gcagcaaggctacgtgtaatgcttg

SEQ ID NO: 179717 - DNA, 25 bp, Probe sequence
gcaaggctacgtgtaatgcttgatt

SEQ ID NO: 179718 - DNA, 25 bp, Probe sequence
gaagacacagaaacgccatctgatg

SEQ ID NO: 179719 - DNA, 25 bp, Probe sequence
gaaaaggcgccaccatatgaaaggg

SEQ ID NO: 179720 - DNA, 25 bp, Probe sequence
gaaacgccatctgatgattacctat

SEQ ID NO: 179721 - DNA, 25 bp, Probe sequence
gaaaggctgcaagtattatataaag

SEQ ID NO: 179722 - DNA, 25 bp, Probe sequence
gacacagaaacgccatctgatgatt

SEQ ID NO: 179723 - DNA, 25 bp, Probe sequence
gactatgatttatttactcaatctg

SEQ ID NO: 179724 - DNA, 25 bp, Probe sequence
gaccagtagccaaactatttaatgc

SEQ ID NO: 179725 - DNA, 25 bp, Probe sequence
gagaaagaagacacagaaacgccat

SEQ ID NO: 179726 - DNA, 25 bp, Probe sequence
gatggtttaattattcaagcagcaa

SEQ ID NO: 179727 - DNA, 25 bp, Probe sequence
gttgatgaaaacttagtgcttaaag

SEQ ID NO: 179728 - DNA, 25 bp, Probe sequence
gggaaagaccagtagccaaactatt

SEQ ID NO: 179729 - DNA, 25 bp, Probe sequence
ggtttaattattcaagcagcaaggc

SEQ ID NO: 179730 - DNA, 25 bp, Probe sequence
ggctacgtgtaatgcttgattacat

SEQ ID NO: 179731 - DNA, 25 bp, Probe sequence
tactcaatctgaaaaggcgccacca

SEQ ID NO: 179732 - DNA, 25 bp, Probe sequence
tattcaagcagcaaggctacgtgta

SEQ ID NO: 179733 - DNA, 25 bp, Probe sequence
attacttgaaagtcatgaaccagat

SEQ ID NO: 179734 - DNA, 25 bp, Probe sequence
atgcgggagctggcaaaagtaattt

SEQ ID NO: 179735 - DNA, 25 bp, Probe sequence
aggtttagatattgggattgtccta

SEQ ID NO: 179736 - DNA, 25 bp, Probe sequence
agatatagcacattactttggtaca

SEQ ID NO: 179737 - DNA, 25 bp, Probe sequence
agcaaagtatattggttatgtgtag

SEQ ID NO: 179738 - DNA, 25 bp, Probe sequence
acattcagcacatcgataactatcg

SEQ ID NO: 179739 - DNA, 25 bp, Probe sequence
aaagcttgaagaatacattcagcac

SEQ ID NO: 179740 - DNA, 25 bp, Probe sequence
aacggtgtagatagattgatagatg

SEQ ID NO: 179741 - DNA, 25 bp, Probe sequence
ccgattgaacgatgtgcaataaaga

SEQ ID NO: 179742 - DNA, 25 bp, Probe sequence
gctggcaaaagtaatttgccgggta

SEQ ID NO: 179743 - DNA, 25 bp, Probe sequence
gcactgatcgataagttagcaaagt

SEQ ID NO: 179744 - DNA, 25 bp, Probe sequence
gaatacattcagcacatcgataact

SEQ ID NO: 179745 - DNA, 25 bp, Probe sequence
gaagtttagtgataacaggtacaat

SEQ ID NO: 179746 - DNA, 25 bp, Probe sequence
gaagagagttgaagatgcgagaata

SEQ ID NO: 179747 - DNA, 25 bp, Probe sequence
gaaccagataatgcgggagctggca

SEQ ID NO: 179748 - DNA, 25 bp, Probe sequence
gaaagtgatgaggatacgcttgagt

SEQ ID NO: 179749 - DNA, 25 bp, Probe sequence
gaaatatagttaacggtgtagatag

SEQ ID NO: 179750 - DNA, 25 bp, Probe sequence
gagaaacacgatatcaaaaagcttg

SEQ ID NO: 179751 - DNA, 25 bp, Probe sequence
gatgaggatacgcttgagttattaa

SEQ ID NO: 179752 - DNA, 25 bp, Probe sequence
gatgcgagaatatgaattacttgaa

SEQ ID NO: 179753 - DNA, 25 bp, Probe sequence
gataatgcgggagctggcaaaagta

SEQ ID NO: 179754 - DNA, 25 bp, Probe sequence
gatacgcttgagttattaaggttta

SEQ ID NO: 179755 - DNA, 25 bp, Probe sequence
gatattgggattgtcctattggttg

SEQ ID NO: 179756 - DNA, 25 bp, Probe sequence
gattgtcctattggttgttatgaat

SEQ ID NO: 179757 - DNA, 25 bp, Probe sequence
gtcatgaaccagataatgcgggagc

SEQ ID NO: 179758 - DNA, 25 bp, Probe sequence
gtagaaggaatgcactgatcgataa

SEQ ID NO: 179759 - DNA, 25 bp, Probe sequence
gtcctattggttgttatgaatggga

SEQ ID NO: 179760 - DNA, 25 bp, Probe sequence
gtgataacaggtacaatacattaag

SEQ ID NO: 179761 - DNA, 25 bp, Probe sequence
gggaagatatagcacattactttgg

SEQ ID NO: 179762 - DNA, 25 bp, Probe sequence
gggattgtcctattggttgttatga

SEQ ID NO: 179763 - DNA, 25 bp, Probe sequence
ggaatgcactgatcgataagttagc

SEQ ID NO: 179764 - DNA, 25 bp, Probe sequence
tacgtagaaggaatgcactgatcga

SEQ ID NO: 179765 - DNA, 25 bp, Probe sequence
tatagcacattactttggtacaagt

SEQ ID NO: 179766 - DNA, 25 bp, Probe sequence
ttgggattgtcctattggttgttat

SEQ ID NO: 179767 - DNA, 25 bp, Probe sequence
atatggtatttttacatcgcctata

SEQ ID NO: 179768 - DNA, 25 bp, Probe sequence
atgacaactttgggaactgctattt

SEQ ID NO: 179769 - DNA, 25 bp, Probe sequence
atggtatttttacatcgcctataga

SEQ ID NO: 179770 - DNA, 25 bp, Probe sequence
agggctattagcgattgggagcaag

SEQ ID NO: 179771 - DNA, 25 bp, Probe sequence
agtttgaatttattgctttcggatg

SEQ ID NO: 179772 - DNA, 25 bp, Probe sequence
aacaatgcattagtttgaatttatt

SEQ ID NO: 179773 - DNA, 25 bp, Probe sequence
aagtagttttagggctattagcgat

SEQ ID NO: 179774 - DNA, 25 bp, Probe sequence
aagatctgatgatgctattaccatt

SEQ ID NO: 179775 - DNA, 25 bp, Probe sequence
aattcgatgggtaataaacaatgca

SEQ ID NO: 179776 - DNA, 25 bp, Probe sequence
ctttcgcagtaatttcagtaatgac

SEQ ID NO: 179777 - DNA, 25 bp, Probe sequence
gctttcggatgatactttcgcagta

SEQ ID NO: 179778 - DNA, 25 bp, Probe sequence
gctattaccatttacattacttagt

SEQ ID NO: 179779 - DNA, 25 bp, Probe sequence
gcatattctaaactatttaatacga

SEQ ID NO: 179780 - DNA, 25 bp, Probe sequence
gcagtaatttcagtaatgacaactt

SEQ ID NO: 179781 - DNA, 25 bp, Probe sequence
gaatttattgctttcggatgatact

SEQ ID NO: 179782 - DNA, 25 bp, Probe sequence
gacaactttgggaactgctatttta

SEQ ID NO: 179783 - DNA, 25 bp, Probe sequence
gatgatgctattaccatttacatta

SEQ ID NO: 179784 - DNA, 25 bp, Probe sequence
gatgctattaccatttacattactt

SEQ ID NO: 179785 - DNA, 25 bp, Probe sequence
gatatgcagatatttttcaaaagaa

SEQ ID NO: 179786 - DNA, 25 bp, Probe sequence
gatttttatttttcagtttgcatat

SEQ ID NO: 179787 - DNA, 25 bp, Probe sequence
gtatttttacatcgcctatagataa

SEQ ID NO: 179788 - DNA, 25 bp, Probe sequence
ggatgatactttcgcagtaatttca

SEQ ID NO: 179789 - DNA, 25 bp, Probe sequence
tgtttatttctctagctatttggtc

SEQ ID NO: 179790 - DNA, 25 bp, Probe sequence
tacttagtattttaattgtgatttt

SEQ ID NO: 179791 - DNA, 25 bp, Probe sequence
taccatttacattacttagtatttt

SEQ ID NO: 179792 - DNA, 25 bp, Probe sequence
tagcaccttcaatatatggtatttt

SEQ ID NO: 179793 - DNA, 25 bp, Probe sequence
tataatacttgttgttatgtttttt

SEQ ID NO: 179794 - DNA, 25 bp, Probe sequence
tatttttcagtttgcatattctaaa

SEQ ID NO: 179795 - DNA, 25 bp, Probe sequence
tattgctttcggatgatactttcgc

SEQ ID NO: 179796 - DNA, 25 bp, Probe sequence
tttgggaactgctattttaggaggt

SEQ ID NO: 179797 - DNA, 25 bp, Probe sequence
tttggtcaataaattcgatgggtaa

SEQ ID NO: 179798 - DNA, 25 bp, Probe sequence
ttagcgattgggagcaagaacaaag

SEQ ID NO: 179799 - DNA, 25 bp, Probe sequence
tttctctagctatttggtcaataaa

SEQ ID NO: 179800 - DNA, 25 bp, Probe sequence
ttatttctctagctatttggtcaat

SEQ ID NO: 179801 - DNA, 25 bp, Probe sequence
attcaactttagaaattgtacaact

SEQ ID NO: 179802 - DNA, 25 bp, Probe sequence
atattagagacacgcattacaagtt

SEQ ID NO: 179803 - DNA, 25 bp, Probe sequence
atctgacggatctattattagtctt

SEQ ID NO: 179804 - DNA, 25 bp, Probe sequence
agagacacgcattacaagttatctg

SEQ ID NO: 179805 - DNA, 25 bp, Probe sequence
acttgttggcgatattagagacacg

SEQ ID NO: 179806 - DNA, 25 bp, Probe sequence
acacgcattacaagttatctgacgg

SEQ ID NO: 179807 - DNA, 25 bp, Probe sequence
acaacttgttggcgatattagagac

SEQ ID NO: 179808 - DNA, 25 bp, Probe sequence
acaagttatctgacggatctattat

SEQ ID NO: 179809 - DNA, 25 bp, Probe sequence
aaatgagcattagtgtaggagacaa

SEQ ID NO: 179810 - DNA, 25 bp, Probe sequence
aaaccaattcatttaatcaaggagg

SEQ ID NO: 179811 - DNA, 25 bp, Probe sequence
aagttatctgacggatctattatta

SEQ ID NO: 179812 - DNA, 25 bp, Probe sequence
aattgtacaacttgttggcgatatt

SEQ ID NO: 179813 - DNA, 25 bp, Probe sequence
cacgcattacaagttatctgacgga

SEQ ID NO: 179814 - DNA, 25 bp, Probe sequence
ctgacggatctattattagtcttat

SEQ ID NO: 179815 - DNA, 25 bp, Probe sequence
cgatattagagacacgcattacaag

SEQ ID NO: 179816 - DNA, 25 bp, Probe sequence
cgcattacaagttatctgacggatc

SEQ ID NO: 179817 - DNA, 25 bp, Probe sequence
gcattacaagttatctgacggatct

SEQ ID NO: 179818 - DNA, 25 bp, Probe sequence
gaaattgtacaacttgttggcgata

SEQ ID NO: 179819 - DNA, 25 bp, Probe sequence
gacacgcattacaagttatctgacg

SEQ ID NO: 179820 - DNA, 25 bp, Probe sequence
gactttgttgttaaaccaattcatt

SEQ ID NO: 179821 - DNA, 25 bp, Probe sequence
gacggatctattattagtcttatag

SEQ ID NO: 179822 - DNA, 25 bp, Probe sequence
gagcattagtgtaggagacaaggtt

SEQ ID NO: 179823 - DNA, 25 bp, Probe sequence
gagacacgcattacaagttatctga

SEQ ID NO: 179824 - DNA, 25 bp, Probe sequence
gttggcgatattagagacacgcatt

SEQ ID NO: 179825 - DNA, 25 bp, Probe sequence
gttatctgacggatctattattagt

SEQ ID NO: 179826 - DNA, 25 bp, Probe sequence
gtaggagacaaggtttttaatccag

SEQ ID NO: 179827 - DNA, 25 bp, Probe sequence
gtacaacttgttggcgatattagag

SEQ ID NO: 179828 - DNA, 25 bp, Probe sequence
ggatctattattagtcttatagact

SEQ ID NO: 179829 - DNA, 25 bp, Probe sequence
tccagaaacaaattcaactttagaa

SEQ ID NO: 179830 - DNA, 25 bp, Probe sequence
tcttatagactttgttgttaaacca

SEQ ID NO: 179831 - DNA, 25 bp, Probe sequence
tagactttgttgttaaaccaattca

SEQ ID NO: 179832 - DNA, 25 bp, Probe sequence
ttagagacacgcattacaagttatc

SEQ ID NO: 179833 - DNA, 25 bp, Probe sequence
ttacaagttatctgacggatctatt

SEQ ID NO: 179834 - DNA, 25 bp, Probe sequence
ttcatttaatcaaggaggagcagga

SEQ ID NO: 179835 - DNA, 25 bp, Probe sequence
acgaatacgaagagttaattgccat

SEQ ID NO: 179836 - DNA, 25 bp, Probe sequence
atacgaagagttaattgccatagat

SEQ ID NO: 179837 - DNA, 25 bp, Probe sequence
ataagtatgtatcacacgacgaata

SEQ ID NO: 179838 - DNA, 25 bp, Probe sequence
atcacacgacgaatacgaagagtta

SEQ ID NO: 179839 - DNA, 25 bp, Probe sequence
atgtatcacacgacgaatacgaaga

SEQ ID NO: 179840 - DNA, 25 bp, Probe sequence
atggaaatgatgaatgctgaaaagc

SEQ ID NO: 179841 - DNA, 25 bp, Probe sequence
agtatgtatcacacgacgaatacga

SEQ ID NO: 179842 - DNA, 25 bp, Probe sequence
acgaagagttaattgccatagataa

SEQ ID NO: 179843 - DNA, 25 bp, Probe sequence
acacgacgaatacgaagagttaatt

SEQ ID NO: 179844 - DNA, 25 bp, Probe sequence
aagtatgtatcacacgacgaatacg

SEQ ID NO: 179845 - DNA, 25 bp, Probe sequence
aatgttacaaaattgtgtgattgat

SEQ ID NO: 179846 - DNA, 25 bp, Probe sequence
aatacggaggatgacactaatgaat

SEQ ID NO: 179847 - DNA, 25 bp, Probe sequence
aattgccatagataagcatggtaat

SEQ ID NO: 179848 - DNA, 25 bp, Probe sequence
cgaatacggaggatgacactaatga

SEQ ID NO: 179849 - DNA, 25 bp, Probe sequence
ccgaatacggaggatgacactaatg

SEQ ID NO: 179850 - DNA, 25 bp, Probe sequence
gcaaatgatgcaaatgttacaaaat

SEQ ID NO: 179851 - DNA, 25 bp, Probe sequence
gaatacgaagagttaattgccatag

SEQ ID NO: 179852 - DNA, 25 bp, Probe sequence
gaatacggaggatgacactaatgaa

SEQ ID NO: 179853 - DNA, 25 bp, Probe sequence
gaagagttaattgccatagataagc

SEQ ID NO: 179854 - DNA, 25 bp, Probe sequence
gacgaatacgaagagttaattgcca

SEQ ID NO: 179855 - DNA, 25 bp, Probe sequence
gagttaattgccatagataagcatg

SEQ ID NO: 179856 - DNA, 25 bp, Probe sequence
gatgcaaatgttacaaaattgtgtg

SEQ ID NO: 179857 - DNA, 25 bp, Probe sequence
gataagtatgtatcacacgacgaat

SEQ ID NO: 179858 - DNA, 25 bp, Probe sequence
gattgataagtatgtatcacacgac

SEQ ID NO: 179859 - DNA, 25 bp, Probe sequence
gttaattgccatagataagcatggt

SEQ ID NO: 179860 - DNA, 25 bp, Probe sequence
gtatcacacgacgaatacgaagagt

SEQ ID NO: 179861 - DNA, 25 bp, Probe sequence
gtatgtatcacacgacgaatacgaa

SEQ ID NO: 179862 - DNA, 25 bp, Probe sequence
tgctgaaaagcatatgcaaatgatg

SEQ ID NO: 179863 - DNA, 25 bp, Probe sequence
tcacacgacgaatacgaagagttaa

SEQ ID NO: 179864 - DNA, 25 bp, Probe sequence
taagtatgtatcacacgacgaatac

SEQ ID NO: 179865 - DNA, 25 bp, Probe sequence
tacgaagagttaattgccatagata

SEQ ID NO: 179866 - DNA, 25 bp, Probe sequence
tatgtatcacacgacgaatacgaag

SEQ ID NO: 179867 - DNA, 25 bp, Probe sequence
tatcacacgacgaatacgaagagtt

SEQ ID NO: 179868 - DNA, 25 bp, Probe sequence
tattaaattttatccgaatacggag

SEQ ID NO: 179869 - DNA, 25 bp, Probe sequence
attgtaggtcttgctaatttattga

SEQ ID NO: 179870 - DNA, 25 bp, Probe sequence
atcatcgtcacattgtgcgcttggg

SEQ ID NO: 179871 - DNA, 25 bp, Probe sequence
atggagatactacatcatcgtcaca

SEQ ID NO: 179872 - DNA, 25 bp, Probe sequence
actgtaggggttagcaatggagata

SEQ ID NO: 179873 - DNA, 25 bp, Probe sequence
actacatcatcgtcacattgtgcgc

SEQ ID NO: 179874 - DNA, 25 bp, Probe sequence
acatcatcgtcacattgtgcgcttg

SEQ ID NO: 179875 - DNA, 25 bp, Probe sequence
aaacttttaggtctagctgacaaca

SEQ ID NO: 179876 - DNA, 25 bp, Probe sequence
aatgattaccacgatatcgctaatg

SEQ ID NO: 179877 - DNA, 25 bp, Probe sequence
caataaagaaactgaatttgccgtt

SEQ ID NO: 179878 - DNA, 25 bp, Probe sequence
catcgtcacattgtgcgcttgggga

SEQ ID NO: 179879 - DNA, 25 bp, Probe sequence
cattgtgcgcttggggatattgtag

SEQ ID NO: 179880 - DNA, 25 bp, Probe sequence
cttttaggtctagctgacaacaagg

SEQ ID NO: 179881 - DNA, 25 bp, Probe sequence
ctagctgacaacaaggaggacgaga

SEQ ID NO: 179882 - DNA, 25 bp, Probe sequence
ctacatcatcgtcacattgtgcgct

SEQ ID NO: 179883 - DNA, 25 bp, Probe sequence
gcgcttggggatattgtaggtcttg

SEQ ID NO: 179884 - DNA, 25 bp, Probe sequence
gcttggggatattgtaggtcttgct

SEQ ID NO: 179885 - DNA, 25 bp, Probe sequence
gaataacgaaaatgattaccacgat

SEQ ID NO: 179886 - DNA, 25 bp, Probe sequence
gcaatggagatactacatcatcgtc

SEQ ID NO: 179887 - DNA, 25 bp, Probe sequence
gaatggagaattgtttgaagtagtg

SEQ ID NO: 179888 - DNA, 25 bp, Probe sequence
gaaaatgattaccacgatatcgcta

SEQ ID NO: 179889 - DNA, 25 bp, Probe sequence
gacatgacgcaggaagaattaagag

SEQ ID NO: 179890 - DNA, 25 bp, Probe sequence
gatactacatcatcgtcacattgtg

SEQ ID NO: 179891 - DNA, 25 bp, Probe sequence
gatatcgctaatgttatcgaaatgt

SEQ ID NO: 179892 - DNA, 25 bp, Probe sequence
gatattgtaggtcttgctaatttat

SEQ ID NO: 179893 - DNA, 25 bp, Probe sequence
gattaccacgatatcgctaatgtta

SEQ ID NO: 179894 - DNA, 25 bp, Probe sequence
gtgcgcttggggatattgtaggtct

SEQ ID NO: 179895 - DNA, 25 bp, Probe sequence
ggtctagctgacaacaaggaggacg

SEQ ID NO: 179896 - DNA, 25 bp, Probe sequence
ggggatattgtaggtcttgctaatt

SEQ ID NO: 179897 - DNA, 25 bp, Probe sequence
ggagatactacatcatcgtcacatt

SEQ ID NO: 179898 - DNA, 25 bp, Probe sequence
ggaggacgagaatgatgtattacaa

SEQ ID NO: 179899 - DNA, 25 bp, Probe sequence
tcgtcacattgtgcgcttggggata

SEQ ID NO: 179900 - DNA, 25 bp, Probe sequence
tcacattgtgcgcttggggatattg

SEQ ID NO: 179901 - DNA, 25 bp, Probe sequence
tttttcaactgtaggggttagcaat

SEQ ID NO: 179902 - DNA, 25 bp, Probe sequence
ttaccacgatatcgctaatgttatc

SEQ ID NO: 179903 - DNA, 25 bp, Probe sequence
atatagatatcctgcgcttgtaaga

SEQ ID NO: 179904 - DNA, 25 bp, Probe sequence
atatcacgttgattttcaagtacaa

SEQ ID NO: 179905 - DNA, 25 bp, Probe sequence
atctactgtagaaaatcctgaatta

SEQ ID NO: 179906 - DNA, 25 bp, Probe sequence
aggtattggacgaacatcatctaat

SEQ ID NO: 179907 - DNA, 25 bp, Probe sequence
agaatgtcttacttgtcaaaaaaca

SEQ ID NO: 179908 - DNA, 25 bp, Probe sequence
agctattctaaatctatcagttata

SEQ ID NO: 179909 - DNA, 25 bp, Probe sequence
acaccaggacctgatgatattggta

SEQ ID NO: 179910 - DNA, 25 bp, Probe sequence
acacgattcgaagttacatatacac

SEQ ID NO: 179911 - DNA, 25 bp, Probe sequence
aaagactcacaagaccaaactaaga

SEQ ID NO: 179912 - DNA, 25 bp, Probe sequence
aaaagcgcgtattcattgcgtcatc

SEQ ID NO: 179913 - DNA, 25 bp, Probe sequence
aacgcatcatggttaaaatacccga

SEQ ID NO: 179914 - DNA, 25 bp, Probe sequence
aagtcgttgaaaaatactctgatca

SEQ ID NO: 179915 - DNA, 25 bp, Probe sequence
aatcctgaattaagttttgcatcaa

SEQ ID NO: 179916 - DNA, 25 bp, Probe sequence
aatacccgagtgaatatcacgttga

SEQ ID NO: 179917 - DNA, 25 bp, Probe sequence
aattacgacacaattgcgagcggta

SEQ ID NO: 179918 - DNA, 25 bp, Probe sequence
ctgaaattttagatcaactgccaaa

SEQ ID NO: 179919 - DNA, 25 bp, Probe sequence
cgaacatcatctaatagctattcta

SEQ ID NO: 179920 - DNA, 25 bp, Probe sequence
gcgtattcattgcgtcatcattatc

SEQ ID NO: 179921 - DNA, 25 bp, Probe sequence
gaattcagcgaataaagactcacaa

SEQ ID NO: 179922 - DNA, 25 bp, Probe sequence
gacacgtacactggtctgttgttgc

SEQ ID NO: 179923 - DNA, 25 bp, Probe sequence
gataaaaatacaccaggacctgatg

SEQ ID NO: 179924 - DNA, 25 bp, Probe sequence
gatattattcacatgtcgataccta

SEQ ID NO: 179925 - DNA, 25 bp, Probe sequence
gttacaaagcgtactgtatctgaat

SEQ ID NO: 179926 - DNA, 25 bp, Probe sequence
gttatcagcagcaaatacagaagcg

SEQ ID NO: 179927 - DNA, 25 bp, Probe sequence
tgtaagaagcggatttaacccagaa

SEQ ID NO: 179928 - DNA, 25 bp, Probe sequence
gtacactggtctgttgttgccaacg

SEQ ID NO: 179929 - DNA, 25 bp, Probe sequence
gtacattttcttatagcttaggtgg

SEQ ID NO: 179930 - DNA, 25 bp, Probe sequence
ggtctgttgttgccaacgatttaaa

SEQ ID NO: 179931 - DNA, 25 bp, Probe sequence
tcatgtgtacttttattgttatcag

SEQ ID NO: 179932 - DNA, 25 bp, Probe sequence
taacccagaattcttaacttatatt

SEQ ID NO: 179933 - DNA, 25 bp, Probe sequence
taaaatttccactgcgaaagtagat

SEQ ID NO: 179934 - DNA, 25 bp, Probe sequence
taaacctggtatacattatggacaa

SEQ ID NO: 179935 - DNA, 25 bp, Probe sequence
tatggacaaccaattttagaacaaa

SEQ ID NO: 179936 - DNA, 25 bp, Probe sequence
ttcacatgtcgatacctatcaacaa

SEQ ID NO: 179937 - DNA, 25 bp, Probe sequence
attgatatgttaggtactgcaagta

SEQ ID NO: 179938 - DNA, 25 bp, Probe sequence
atcgtccaatcttaattgtagctga

SEQ ID NO: 179939 - DNA, 25 bp, Probe sequence
aggtatcgttgatccaactaaagta

SEQ ID NO: 179940 - DNA, 25 bp, Probe sequence
aaatgaaattgctggtgacggtacg

SEQ ID NO: 179941 - DNA, 25 bp, Probe sequence
accaacctaacatgggtggcatgcc

SEQ ID NO: 179942 - DNA, 25 bp, Probe sequence
acgaaaacagcattgatgcacgtgt

SEQ ID NO: 179943 - DNA, 25 bp, Probe sequence
acacgtgcagcagttgaagaaggta

SEQ ID NO: 179944 - DNA, 25 bp, Probe sequence
aaattgctggtgacggtacgacaac

SEQ ID NO: 179945 - DNA, 25 bp, Probe sequence
aaagtaggtaacgatggtgtcatta

SEQ ID NO: 179946 - DNA, 25 bp, Probe sequence
aacaagtggttcaatctaatcgtcc

SEQ ID NO: 179947 - DNA, 25 bp, Probe sequence
aagatatcttacctttattagaaca

SEQ ID NO: 179948 - DNA, 25 bp, Probe sequence
aatggttgctgaattagaacgccca

SEQ ID NO: 179949 - DNA, 25 bp, Probe sequence
aatgaccaacctaacatgggtggca

SEQ ID NO: 179950 - DNA, 25 bp, Probe sequence
aatttgatcgtggttatcaatcacc

SEQ ID NO: 179951 - DNA, 25 bp, Probe sequence
caaggtatcgacaaagcagttaaag

SEQ ID NO: 179952 - DNA, 25 bp, Probe sequence
gctacaaacgagtgggttaatatgt

SEQ ID NO: 179953 - DNA, 25 bp, Probe sequence
gctattttaactggtgcgcaagtga

SEQ ID NO: 179954 - DNA, 25 bp, Probe sequence
gcagttaaagtaacgattggtccta

SEQ ID NO: 179955 - DNA, 25 bp, Probe sequence
gcaagtaggtgcgatttcagcagca

SEQ ID NO: 179956 - DNA, 25 bp, Probe sequence
gcaacagtattagctcaagcaatga

SEQ ID NO: 179957 - DNA, 25 bp, Probe sequence
gaatctgactttgatcgtgaaaaat

SEQ ID NO: 179958 - DNA, 25 bp, Probe sequence
gaaggtatgcaatttgatcgtggtt

SEQ ID NO: 179959 - DNA, 25 bp, Probe sequence
gaaggtattgttgcaggtggtggta

SEQ ID NO: 179960 - DNA, 25 bp, Probe sequence
gaaactgaatctgactttgatcgtg

SEQ ID NO: 179961 - DNA, 25 bp, Probe sequence
gagtttacagcacctttaattacga

SEQ ID NO: 179962 - DNA, 25 bp, Probe sequence
gatttagctattttaactggtgcgc

SEQ ID NO: 179963 - DNA, 25 bp, Probe sequence
gtagctgatgaagttgaaggcgatg

SEQ ID NO: 179964 - DNA, 25 bp, Probe sequence
gtaacacgctcagcattacaacatg

SEQ ID NO: 179965 - DNA, 25 bp, Probe sequence
gtcctaaaggacgtaatgttgtatt

SEQ ID NO: 179966 - DNA, 25 bp, Probe sequence
ggtgacggtgacgaaaacagcattg

SEQ ID NO: 179967 - DNA, 25 bp, Probe sequence
ggtgcgatttcagcagcagatgaag

SEQ ID NO: 179968 - DNA, 25 bp, Probe sequence
ggttcaatctaatcgtccaatctta

SEQ ID NO: 179969 - DNA, 25 bp, Probe sequence
tgaaggcgatgcattaacaaatatc

SEQ ID NO: 179970 - DNA, 25 bp, Probe sequence
tccaactaaagtaacacgctcagca

SEQ ID NO: 179971 - DNA, 25 bp, Probe sequence
atttggcggttcatatatttggata

SEQ ID NO: 179972 - DNA, 25 bp, Probe sequence
ataatttgaagatggctattcttaa

SEQ ID NO: 179973 - DNA, 25 bp, Probe sequence
atgcaaacgatttattaactttagc

SEQ ID NO: 179974 - DNA, 25 bp, Probe sequence
atgtgaaagttttagaaggtgcgaa

SEQ ID NO: 179975 - DNA, 25 bp, Probe sequence
aggtgcgaacatatttggcggttca

SEQ ID NO: 179976 - DNA, 25 bp, Probe sequence
agataaaatatcaaacacgttaaag

SEQ ID NO: 179977 - DNA, 25 bp, Probe sequence
agcattggctacaaaatccataaat

SEQ ID NO: 179978 - DNA, 25 bp, Probe sequence
acagaaatcaaagatcatacaagtg

SEQ ID NO: 179979 - DNA, 25 bp, Probe sequence
aaactcacagtggaaatgacaattt

SEQ ID NO: 179980 - DNA, 25 bp, Probe sequence
aacgatttattaactttagcatatg

SEQ ID NO: 179981 - DNA, 25 bp, Probe sequence
aaggatacttaattgctcaaataga

SEQ ID NO: 179982 - DNA, 25 bp, Probe sequence
catacaaggatacttaattgctcaa

SEQ ID NO: 179983 - DNA, 25 bp, Probe sequence
catatttggcggttcatatatttgg

SEQ ID NO: 179984 - DNA, 25 bp, Probe sequence
gcggttcatatatttggatagagta

SEQ ID NO: 179985 - DNA, 25 bp, Probe sequence
gcaaacgatttattaactttagcat

SEQ ID NO: 179986 - DNA, 25 bp, Probe sequence
gaaggtgcgaacatatttggcggtt

SEQ ID NO: 179987 - DNA, 25 bp, Probe sequence
gaagatggctattcttaaaatataa

SEQ ID NO: 179988 - DNA, 25 bp, Probe sequence
gaagaagcattggctacaaaatcca

SEQ ID NO: 179989 - DNA, 25 bp, Probe sequence
gaagcattggctacaaaatccataa

SEQ ID NO: 179990 - DNA, 25 bp, Probe sequence
gaacatatttggcggttcatatatt

SEQ ID NO: 179991 - DNA, 25 bp, Probe sequence
gacaatttaatcatacaaggatact

SEQ ID NO: 179992 - DNA, 25 bp, Probe sequence
gatttattaactttagcatatgtga

SEQ ID NO: 179993 - DNA, 25 bp, Probe sequence
gttatatcaaaagggtgaaactcac

SEQ ID NO: 179994 - DNA, 25 bp, Probe sequence
gtgcgaacatatttggcggttcata

SEQ ID NO: 179995 - DNA, 25 bp, Probe sequence
gggtgaaactcacagtggaaatgac

SEQ ID NO: 179996 - DNA, 25 bp, Probe sequence
ggtgcgaacatatttggcggttcat

SEQ ID NO: 179997 - DNA, 25 bp, Probe sequence
ggatacttaattgctcaaatagaaa

SEQ ID NO: 179998 - DNA, 25 bp, Probe sequence
ggatagagtatgaggatgtagatag

SEQ ID NO: 179999 - DNA, 25 bp, Probe sequence
ggctacaaaatccataaatgcaaac

SEQ ID NO: 180000 - DNA, 25 bp, Probe sequence
ggcggttcatatatttggatagagt

SEQ ID NO: 180001 - DNA, 25 bp, Probe sequence
tacaaggatacttaattgctcaaat

SEQ ID NO: 180002 - DNA, 25 bp, Probe sequence
tattctgaagaagcattggctacaa

SEQ ID NO: 180003 - DNA, 25 bp, Probe sequence
tttattaactttagcatatgtgaaa

SEQ ID NO: 180004 - DNA, 25 bp, Probe sequence
ttggcggttcatatatttggataga

SEQ ID NO: 180005 - DNA, 25 bp, Probe sequence
atcaaacgaaggcgttatcgttgca

SEQ ID NO: 180006 - DNA, 25 bp, Probe sequence
agtgaaagaaggggaccgtgtcgtg

SEQ ID NO: 180007 - DNA, 25 bp, Probe sequence
attggaaatcgtgtgattattgaga

SEQ ID NO: 180008 - DNA, 25 bp, Probe sequence
atagtgctaaagaaaaatcaaacga

SEQ ID NO: 180009 - DNA, 25 bp, Probe sequence
gaccgtgtcgtgttccaacaatatg

SEQ ID NO: 180010 - DNA, 25 bp, Probe sequence
atgatggtacaagagtgactcctga

SEQ ID NO: 180011 - DNA, 25 bp, Probe sequence
atggtacaagagtgactcctgaagt

SEQ ID NO: 180012 - DNA, 25 bp, Probe sequence
accgtgtcgtgttccaacaatatgc

SEQ ID NO: 180013 - DNA, 25 bp, Probe sequence
acgaaggcgttatcgttgcagtagg

SEQ ID NO: 180014 - DNA, 25 bp, Probe sequence
aaatcgtgtgattattgagaaaaaa

SEQ ID NO: 180015 - DNA, 25 bp, Probe sequence
aaagtggtattgttttaactgatag

SEQ ID NO: 180016 - DNA, 25 bp, Probe sequence
aaaccaattggaaatcgtgtgatta

SEQ ID NO: 180017 - DNA, 25 bp, Probe sequence
aaacgaaggcgttatcgttgcagta

SEQ ID NO: 180018 - DNA, 25 bp, Probe sequence
aaaaccaattggaaatcgtgtgatt

SEQ ID NO: 180019 - DNA, 25 bp, Probe sequence
aagagtgactcctgaagtgaaagaa

SEQ ID NO: 180020 - DNA, 25 bp, Probe sequence
aaggcgttatcgttgcagtaggaac

SEQ ID NO: 180021 - DNA, 25 bp, Probe sequence
aatgatggtacaagagtgactcctg

SEQ ID NO: 180022 - DNA, 25 bp, Probe sequence
caagagtgactcctgaagtgaaaga

SEQ ID NO: 180023 - DNA, 25 bp, Probe sequence
caaacgaaggcgttatcgttgcagt

SEQ ID NO: 180024 - DNA, 25 bp, Probe sequence
cgaaggcgttatcgttgcagtagga

SEQ ID NO: 180025 - DNA, 25 bp, Probe sequence
gaagtgaaagaaggggaccgtgtcg

SEQ ID NO: 180026 - DNA, 25 bp, Probe sequence
gaaggcgttatcgttgcagtaggaa

SEQ ID NO: 180027 - DNA, 25 bp, Probe sequence
gagtgactcctgaagtgaaagaagg

SEQ ID NO: 180028 - DNA, 25 bp, Probe sequence
gatggtacaagagtgactcctgaag

SEQ ID NO: 180029 - DNA, 25 bp, Probe sequence
gtgaaagaaggggaccgtgtcgtgt

SEQ ID NO: 180030 - DNA, 25 bp, Probe sequence
gtattgttttaactgatagtgctaa

SEQ ID NO: 180031 - DNA, 25 bp, Probe sequence
gtacaagagtgactcctgaagtgaa

SEQ ID NO: 180032 - DNA, 25 bp, Probe sequence
gtgactcctgaagtgaaagaagggg

SEQ ID NO: 180033 - DNA, 25 bp, Probe sequence
gtggtattgttttaactgatagtgc

SEQ ID NO: 180034 - DNA, 25 bp, Probe sequence
ggtacagaagttaaacgagataatg

SEQ ID NO: 180035 - DNA, 25 bp, Probe sequence
ggtacaagagtgactcctgaagtga

SEQ ID NO: 180036 - DNA, 25 bp, Probe sequence
ggtattgttttaactgatagtgcta

SEQ ID NO: 180037 - DNA, 25 bp, Probe sequence
tgaaagaaggggaccgtgtcgtgtt

SEQ ID NO: 180038 - DNA, 25 bp, Probe sequence
ttgttttaactgatagtgctaaaga

SEQ ID NO: 180039 - DNA, 25 bp, Probe sequence
atttaccagaaagtgagaaggctat

SEQ ID NO: 180040 - DNA, 25 bp, Probe sequence
atatttattggtacgatgttaactt

SEQ ID NO: 180041 - DNA, 25 bp, Probe sequence
atatattttcctacagatgctgaaa

SEQ ID NO: 180042 - DNA, 25 bp, Probe sequence
atggggtggggaatgaagaagactt

SEQ ID NO: 180043 - DNA, 25 bp, Probe sequence
atcccgaatcatatgcaagaaaaca

SEQ ID NO: 180044 - DNA, 25 bp, Probe sequence
atgctttgatgagtataccacgaca

SEQ ID NO: 180045 - DNA, 25 bp, Probe sequence
accacgacataatttaccagaaagt

SEQ ID NO: 180046 - DNA, 25 bp, Probe sequence
aaatatattttcctacagatgctga

SEQ ID NO: 180047 - DNA, 25 bp, Probe sequence
aacttttttatttgtatgctcattg

SEQ ID NO: 180048 - DNA, 25 bp, Probe sequence
aagtaatttcaactgccattcaaaa

SEQ ID NO: 180049 - DNA, 25 bp, Probe sequence
aagtcagaaatcccgaatcatatgc

SEQ ID NO: 180050 - DNA, 25 bp, Probe sequence
gctcattgattgtgtgtggattttt

SEQ ID NO: 180051 - DNA, 25 bp, Probe sequence
gctttgatgagtataccacgacata

SEQ ID NO: 180052 - DNA, 25 bp, Probe sequence
gcatatgctttgatgagtataccac

SEQ ID NO: 180053 - DNA, 25 bp, Probe sequence
gaatgaagaagactttaggctcaaa

SEQ ID NO: 180054 - DNA, 25 bp, Probe sequence
gaaaataagtcagaaatcccgaatc

SEQ ID NO: 180055 - DNA, 25 bp, Probe sequence
gaaaaagaaaacacgcataatatta

SEQ ID NO: 180056 - DNA, 25 bp, Probe sequence
gaaatcccgaatcatatgcaagaaa

SEQ ID NO: 180057 - DNA, 25 bp, Probe sequence
gacaaagtaatttcaactgccattc

SEQ ID NO: 180058 - DNA, 25 bp, Probe sequence
gagtataccacgacataatttacca

SEQ ID NO: 180059 - DNA, 25 bp, Probe sequence
gatggtatacaaagcgtgcaacctc

SEQ ID NO: 180060 - DNA, 25 bp, Probe sequence
gatgttaacttttttatttgtatgc

SEQ ID NO: 180061 - DNA, 25 bp, Probe sequence
gattgtgtgtggattttttgcttat

SEQ ID NO: 180062 - DNA, 25 bp, Probe sequence
gtatacaaagcgtgcaacctcaata

SEQ ID NO: 180063 - DNA, 25 bp, Probe sequence
gtagtgaagctaatgagaattttaa

SEQ ID NO: 180064 - DNA, 25 bp, Probe sequence
gtcagaaatcccgaatcatatgcaa

SEQ ID NO: 180065 - DNA, 25 bp, Probe sequence
gtgagaaggctatttatgacaaagt

SEQ ID NO: 180066 - DNA, 25 bp, Probe sequence
tggttgaaaggagaacggatttgaa

SEQ ID NO: 180067 - DNA, 25 bp, Probe sequence
tgtgtgtggattttttgcttataaa

SEQ ID NO: 180068 - DNA, 25 bp, Probe sequence
taggctcaaagaaatatacgatggt

SEQ ID NO: 180069 - DNA, 25 bp, Probe sequence
tatgctcattgattgtgtgtggatt

SEQ ID NO: 180070 - DNA, 25 bp, Probe sequence
tatacaaagcgtgcaacctcaataa

SEQ ID NO: 180071 - DNA, 25 bp, Probe sequence
tataccacgacataatttaccagaa

SEQ ID NO: 180072 - DNA, 25 bp, Probe sequence
tttcaactgccattcaaaatataaa

SEQ ID NO: 180073 - DNA, 25 bp, Probe sequence
gccaaatccggatccaaaaccagat

SEQ ID NO: 180074 - DNA, 25 bp, Probe sequence
atgagactgggacacctcacgaatc

SEQ ID NO: 180075 - DNA, 25 bp, Probe sequence
accagacccagataaaccaaagcca

SEQ ID NO: 180076 - DNA, 25 bp, Probe sequence
aagccaaatccgaatccaaaaccag

SEQ ID NO: 180077 - DNA, 25 bp, Probe sequence
aagcccgaagataagccggattcaa

SEQ ID NO: 180078 - DNA, 25 bp, Probe sequence
aatgccagatttgaaaaagcccgaa

SEQ ID NO: 180079 - DNA, 25 bp, Probe sequence
aatcataatataacttcaccatcag

SEQ ID NO: 180080 - DNA, 25 bp, Probe sequence
caaccaaaacccaagtacagattca

SEQ ID NO: 180081 - DNA, 25 bp, Probe sequence
caaaaccagatccagataacccgaa

SEQ ID NO: 180082 - DNA, 25 bp, Probe sequence
cagacccagataaaccaaagccaaa

SEQ ID NO: 180083 - DNA, 25 bp, Probe sequence
ccagatccaaaaccagacccagata

SEQ ID NO: 180084 - DNA, 25 bp, Probe sequence
ccagatccagataacccgaaaccaa

SEQ ID NO: 180085 - DNA, 25 bp, Probe sequence
ccagatccagataaaccaaagccaa

SEQ ID NO: 180086 - DNA, 25 bp, Probe sequence
gaagccagactcaaacaaccaaaac

SEQ ID NO: 180087 - DNA, 25 bp, Probe sequence
gaaaagtgcgtcaactgcatatagt

SEQ ID NO: 180088 - DNA, 25 bp, Probe sequence
gaaactcacaaaatcctactggtaa

SEQ ID NO: 180089 - DNA, 25 bp, Probe sequence
gattccaatatttcaatccattgaa

SEQ ID NO: 180090 - DNA, 25 bp, Probe sequence
gttggctagcaattgtatgttctat

SEQ ID NO: 180091 - DNA, 25 bp, Probe sequence
gtagtttagggcttgcaacgcacac

SEQ ID NO: 180092 - DNA, 25 bp, Probe sequence
gtactcgcattaattactggtgaaa

SEQ ID NO: 180093 - DNA, 25 bp, Probe sequence
gtacagattcaaaaccagacccaaa

SEQ ID NO: 180094 - DNA, 25 bp, Probe sequence
tgtatcccaacgatttttagccttg

SEQ ID NO: 180095 - DNA, 25 bp, Probe sequence
ggggcttacaagtataatccgtata

SEQ ID NO: 180096 - DNA, 25 bp, Probe sequence
ggtggtattttcaatcatgctattc

SEQ ID NO: 180097 - DNA, 25 bp, Probe sequence
ggtaatgattttgtatcccaacgat

SEQ ID NO: 180098 - DNA, 25 bp, Probe sequence
ggatctaatcaaggtcaatggcaac

SEQ ID NO: 180099 - DNA, 25 bp, Probe sequence
ggacacctcacgaatcaaatcaaac

SEQ ID NO: 180100 - DNA, 25 bp, Probe sequence
ggaacccaaatgcttcagatggatc

SEQ ID NO: 180101 - DNA, 25 bp, Probe sequence
ggcttgcaacgcacacagttgaagc

SEQ ID NO: 180102 - DNA, 25 bp, Probe sequence
tccaaaaccagaccctaataagcca

SEQ ID NO: 180103 - DNA, 25 bp, Probe sequence
tcaccagatcccgatcaacctgggg

SEQ ID NO: 180104 - DNA, 25 bp, Probe sequence
taataagccaaatcctaacccgtca

SEQ ID NO: 180105 - DNA, 25 bp, Probe sequence
tagtcgtgatgctaatcctgattcg

SEQ ID NO: 180106 - DNA, 25 bp, Probe sequence
ttagccttggcaaatggggcttaca

SEQ ID NO: 180107 - DNA, 25 bp, Probe sequence
atatctacaatatcatccgtaaaca

SEQ ID NO: 180108 - DNA, 25 bp, Probe sequence
ataagccaaatccaaatccgtctcc

SEQ ID NO: 180109 - DNA, 25 bp, Probe sequence
atccagacaaaccgaagccaaatcc

SEQ ID NO: 180110 - DNA, 25 bp, Probe sequence
atggagaaaagccaacgactaattt

SEQ ID NO: 180111 - DNA, 25 bp, Probe sequence
agtccagattcaaaacctgacccaa

SEQ ID NO: 180112 - DNA, 25 bp, Probe sequence
agatccaaatccgaatccgaatcca

SEQ ID NO: 180113 - DNA, 25 bp, Probe sequence
agacaaaccgaagccaaatccggat

SEQ ID NO: 180114 - DNA, 25 bp, Probe sequence
accagatccaaatccgaatccgaat

SEQ ID NO: 180115 - DNA, 25 bp, Probe sequence
accaaagccagacccagataagccg

SEQ ID NO: 180116 - DNA, 25 bp, Probe sequence
aaaaccagatccagacaaaccgaag

SEQ ID NO: 180117 - DNA, 25 bp, Probe sequence
aaagccagacccagataagccgaaa

SEQ ID NO: 180118 - DNA, 25 bp, Probe sequence
aaagccaacgactaatttgaatcat

SEQ ID NO: 180119 - DNA, 25 bp, Probe sequence
aaaacaacgttcatttgagcctcat

SEQ ID NO: 180120 - DNA, 25 bp, Probe sequence
aaaaccagatccaaatccgaatccg

SEQ ID NO: 180121 - DNA, 25 bp, Probe sequence
aacaacgttcatttgagcctcatga

SEQ ID NO: 180122 - DNA, 25 bp, Probe sequence
aaccagatccagacaaaccgaagcc

SEQ ID NO: 180123 - DNA, 25 bp, Probe sequence
aacgttcatttgagcctcatgaaaa

SEQ ID NO: 180124 - DNA, 25 bp, Probe sequence
caggtccgaatccgaagccagaccc

SEQ ID NO: 180125 - DNA, 25 bp, Probe sequence
aatccgaagccagacccagataagc

SEQ ID NO: 180126 - DNA, 25 bp, Probe sequence
caatatcatccgtaaacaaaacttc

SEQ ID NO: 180127 - DNA, 25 bp, Probe sequence
cacgaatcaaatcaagctggtaatg

SEQ ID NO: 180128 - DNA, 25 bp, Probe sequence
ccaaatcccaatcaacctggggatt

SEQ ID NO: 180129 - DNA, 25 bp, Probe sequence
ctccaaatcccaatcaacctgggga

SEQ ID NO: 180130 - DNA, 25 bp, Probe sequence
cggaaccaaagccagacccagataa

SEQ ID NO: 180131 - DNA, 25 bp, Probe sequence
ccaggtccgaatccgaagccagacc

SEQ ID NO: 180132 - DNA, 25 bp, Probe sequence
ccgaagccagacccagataagccga

SEQ ID NO: 180133 - DNA, 25 bp, Probe sequence
cccaagtccagattcaaaacctgac

SEQ ID NO: 180134 - DNA, 25 bp, Probe sequence
ccagatccagacaaaccgaagccaa

SEQ ID NO: 180135 - DNA, 25 bp, Probe sequence
gctggtaatgaaggaactggttcga

SEQ ID NO: 180136 - DNA, 25 bp, Probe sequence
gaagccagacccagataagccgaaa

SEQ ID NO: 180137 - DNA, 25 bp, Probe sequence
gaatatggtgaggtaactgatgaag

SEQ ID NO: 180138 - DNA, 25 bp, Probe sequence
gaaaaagatgattttacagttgtaa

SEQ ID NO: 180139 - DNA, 25 bp, Probe sequence
gaggtaactgatgaagatatctaca

SEQ ID NO: 180140 - DNA, 25 bp, Probe sequence
gtctccaaatcccaatcaacctggg

SEQ ID NO: 180141 - DNA, 25 bp, Probe sequence
atttgaaccgcatgaaaaagacgat

SEQ ID NO: 180142 - DNA, 25 bp, Probe sequence
atgaaaaagacgattttacagtagt

SEQ ID NO: 180143 - DNA, 25 bp, Probe sequence
accgcatgaaaaagacgattttaca

SEQ ID NO: 180144 - DNA, 25 bp, Probe sequence
acgctcatttgaaccgcatgaaaaa

SEQ ID NO: 180145 - DNA, 25 bp, Probe sequence
acaacgctcatttgaaccgcatgaa

SEQ ID NO: 180146 - DNA, 25 bp, Probe sequence
aaaacaacgctcatttgaaccgcat

SEQ ID NO: 180147 - DNA, 25 bp, Probe sequence
aaacaacgctcatttgaaccgcatg

SEQ ID NO: 180148 - DNA, 25 bp, Probe sequence
aacaacgctcatttgaaccgcatga

SEQ ID NO: 180149 - DNA, 25 bp, Probe sequence
aacgctcatttgaaccgcatgaaaa

SEQ ID NO: 180150 - DNA, 25 bp, Probe sequence
caaaacaacgctcatttgaaccgca

SEQ ID NO: 180151 - DNA, 25 bp, Probe sequence
caacgctcatttgaaccgcatgaaa

SEQ ID NO: 180152 - DNA, 25 bp, Probe sequence
catgaaaaagacgattttacagtag

SEQ ID NO: 180153 - DNA, 25 bp, Probe sequence
catttgaaccgcatgaaaaagacga

SEQ ID NO: 180154 - DNA, 25 bp, Probe sequence
ctcatttgaaccgcatgaaaaagac

SEQ ID NO: 180155 - DNA, 25 bp, Probe sequence
cgcatgaaaaagacgattttacagt

SEQ ID NO: 180156 - DNA, 25 bp, Probe sequence
cgctcatttgaaccgcatgaaaaag

SEQ ID NO: 180157 - DNA, 25 bp, Probe sequence
ccgcatgaaaaagacgattttacag

SEQ ID NO: 180158 - DNA, 25 bp, Probe sequence
gctcatttgaaccgcatgaaaaaga

SEQ ID NO: 180159 - DNA, 25 bp, Probe sequence
gcatgaaaaagacgattttacagta

SEQ ID NO: 180160 - DNA, 25 bp, Probe sequence
gaaccgcatgaaaaagacgatttta

SEQ ID NO: 180161 - DNA, 25 bp, Probe sequence
tgaaaaagacgattttacagtagtt

SEQ ID NO: 180162 - DNA, 25 bp, Probe sequence
tgaaccgcatgaaaaagacgatttt

SEQ ID NO: 180163 - DNA, 25 bp, Probe sequence
tcatttgaaccgcatgaaaaagacg

SEQ ID NO: 180164 - DNA, 25 bp, Probe sequence
tcaaaacaacgctcatttgaaccgc

SEQ ID NO: 180165 - DNA, 25 bp, Probe sequence
tttgaaccgcatgaaaaagacgatt

SEQ ID NO: 180166 - DNA, 25 bp, Probe sequence
ttgaaccgcatgaaaaagacgattt

SEQ ID NO: 180167 - DNA, 25 bp, Probe sequence
attatcgacacagtgaacaaattca

SEQ ID NO: 180168 - DNA, 25 bp, Probe sequence
atcgacacagtgaacaaattcacta

SEQ ID NO: 180169 - DNA, 25 bp, Probe sequence
atggattatcgacacagtgaacaaa

SEQ ID NO: 180170 - DNA, 25 bp, Probe sequence
aggaaggagtgatttcaatggcaca

SEQ ID NO: 180171 - DNA, 25 bp, Probe sequence
aggagtgatttcaatggcacaagat

SEQ ID NO: 180172 - DNA, 25 bp, Probe sequence
agtgatttcaatggcacaagatatc

SEQ ID NO: 180173 - DNA, 25 bp, Probe sequence
agtaaaatggattatcgacacagtg

SEQ ID NO: 180174 - DNA, 25 bp, Probe sequence
acttagtaaaatggattatcgacac

SEQ ID NO: 180175 - DNA, 25 bp, Probe sequence
aaatggattatcgacacagtgaaca

SEQ ID NO: 180176 - DNA, 25 bp, Probe sequence
aaaatggattatcgacacagtgaac

SEQ ID NO: 180177 - DNA, 25 bp, Probe sequence
aaggaaggagtgatttcaatggcac

SEQ ID NO: 180178 - DNA, 25 bp, Probe sequence
aatggattatcgacacagtgaacaa

SEQ ID NO: 180179 - DNA, 25 bp, Probe sequence
aaggagtgatttcaatggcacaaga

SEQ ID NO: 180180 - DNA, 25 bp, Probe sequence
cttagtaaaatggattatcgacaca

SEQ ID NO: 180181 - DNA, 25 bp, Probe sequence
gaaggagtgatttcaatggcacaag

SEQ ID NO: 180182 - DNA, 25 bp, Probe sequence
gacacagtgaacaaattcactaaaa

SEQ ID NO: 180183 - DNA, 25 bp, Probe sequence
gacttagtaaaatggattatcgaca

SEQ ID NO: 180184 - DNA, 25 bp, Probe sequence
gagtgatttcaatggcacaagatat

SEQ ID NO: 180185 - DNA, 25 bp, Probe sequence
gattatcgacacagtgaacaaattc

SEQ ID NO: 180186 - DNA, 25 bp, Probe sequence
gtaaaatggattatcgacacagtga

SEQ ID NO: 180187 - DNA, 25 bp, Probe sequence
gtgacttagtaaaatggattatcga

SEQ ID NO: 180188 - DNA, 25 bp, Probe sequence
ggattatcgacacagtgaacaaatt

SEQ ID NO: 180189 - DNA, 25 bp, Probe sequence
ggagtgatttcaatggcacaagata

SEQ ID NO: 180190 - DNA, 25 bp, Probe sequence
ggaaggagtgatttcaatggcacaa

SEQ ID NO: 180191 - DNA, 25 bp, Probe sequence
tggattatcgacacagtgaacaaat

SEQ ID NO: 180192 - DNA, 25 bp, Probe sequence
tgacttagtaaaatggattatcgac

SEQ ID NO: 180193 - DNA, 25 bp, Probe sequence
tcgacacagtgaacaaattcactaa

SEQ ID NO: 180194 - DNA, 25 bp, Probe sequence
taaggaaggagtgatttcaatggca

SEQ ID NO: 180195 - DNA, 25 bp, Probe sequence
taaaatggattatcgacacagtgaa

SEQ ID NO: 180196 - DNA, 25 bp, Probe sequence
tagtaaaatggattatcgacacagt

SEQ ID NO: 180197 - DNA, 25 bp, Probe sequence
tatcgacacagtgaacaaattcact

SEQ ID NO: 180198 - DNA, 25 bp, Probe sequence
ttagtaaaatggattatcgacacag

SEQ ID NO: 180199 - DNA, 25 bp, Probe sequence
ttatcgacacagtgaacaaattcac

SEQ ID NO: 180200 - DNA, 25 bp, Probe sequence
ttaaggaaggagtgatttcaatggc

SEQ ID NO: 180201 - DNA, 25 bp, Probe sequence
atagtttgccaacattacaagaggt

SEQ ID NO: 180202 - DNA, 25 bp, Probe sequence
agatgtatcaaaagtgtatcgcacg

SEQ ID NO: 180203 - DNA, 25 bp, Probe sequence
agcaaccgatgtgttaaatttaact

SEQ ID NO: 180204 - DNA, 25 bp, Probe sequence
agcaaacactgcgttagcttttgtg

SEQ ID NO: 180205 - DNA, 25 bp, Probe sequence
agcgtttagcaatcgcgttgctgca

SEQ ID NO: 180206 - DNA, 25 bp, Probe sequence
aagccctctgctgatatgttatttg

SEQ ID NO: 180207 - DNA, 25 bp, Probe sequence
aattggtggcgcgccatgcaatgta

SEQ ID NO: 180208 - DNA, 25 bp, Probe sequence
cagatggtgctgccgtatatttgaa

SEQ ID NO: 180209 - DNA, 25 bp, Probe sequence
ctattcatacctttttgccattggc

SEQ ID NO: 180210 - DNA, 25 bp, Probe sequence
gcgttagcttttgtgagtttgactg

SEQ ID NO: 180211 - DNA, 25 bp, Probe sequence
gcaatcgcgttgctgcaatagtgac

SEQ ID NO: 180212 - DNA, 25 bp, Probe sequence
gcaatagtgacaacgaagtatggtg

SEQ ID NO: 180213 - DNA, 25 bp, Probe sequence
gaagcaaattggtggcgcgccatgc

SEQ ID NO: 180214 - DNA, 25 bp, Probe sequence
gaagcgttaattgattttattccaa

SEQ ID NO: 180215 - DNA, 25 bp, Probe sequence
gaagccattcaatcattatttacag

SEQ ID NO: 180216 - DNA, 25 bp, Probe sequence
gaaacgatatcaagtattggtgtag

SEQ ID NO: 180217 - DNA, 25 bp, Probe sequence
gagcgagatttttctttttatcgta

SEQ ID NO: 180218 - DNA, 25 bp, Probe sequence
gatgtagtacatttttgttctgttg

SEQ ID NO: 180219 - DNA, 25 bp, Probe sequence
gatgttcaaacatttacgaagcaaa

SEQ ID NO: 180220 - DNA, 25 bp, Probe sequence
gttatttgaaccaagttttgtgaat

SEQ ID NO: 180221 - DNA, 25 bp, Probe sequence
gtattaatcattatcatagtggcta

SEQ ID NO: 180222 - DNA, 25 bp, Probe sequence
gtatcgcacgaatgaagcaaacact

SEQ ID NO: 180223 - DNA, 25 bp, Probe sequence
ggtactgtcgtatttgatcctaatg

SEQ ID NO: 180224 - DNA, 25 bp, Probe sequence
ggtgaggaaattttagcgtttagca

SEQ ID NO: 180225 - DNA, 25 bp, Probe sequence
ggagcagatggtgctgccgtatatt

SEQ ID NO: 180226 - DNA, 25 bp, Probe sequence
tgttctgttgatttggtcgatagtc

SEQ ID NO: 180227 - DNA, 25 bp, Probe sequence
taagattgccattatgggataacgc

SEQ ID NO: 180228 - DNA, 25 bp, Probe sequence
taagacaaactattcataccttttt

SEQ ID NO: 180229 - DNA, 25 bp, Probe sequence
taaatgcaaatggtactgtcgtatt

SEQ ID NO: 180230 - DNA, 25 bp, Probe sequence
tagcaggattttagcaaccgatgtg

SEQ ID NO: 180231 - DNA, 25 bp, Probe sequence
tttgatcctaatgtaagattgccat

SEQ ID NO: 180232 - DNA, 25 bp, Probe sequence
tattggtgcagttattagcaggatt

SEQ ID NO: 180233 - DNA, 25 bp, Probe sequence
tttatcgtaagccctctgctgatat

SEQ ID NO: 180234 - DNA, 25 bp, Probe sequence
ttgatacaactggggcaggggatgc

SEQ ID NO: 180235 - DNA, 25 bp, Probe sequence
attttggatatatgtgggaatgccc

SEQ ID NO: 180236 - DNA, 25 bp, Probe sequence
atttgtccacaaggtattgaaccaa

SEQ ID NO: 180237 - DNA, 25 bp, Probe sequence
atcatcgagataatcattggcaacg

SEQ ID NO: 180238 - DNA, 25 bp, Probe sequence
atgcacctcaaacatttttagatga

SEQ ID NO: 180239 - DNA, 25 bp, Probe sequence
atgtttcacatcaatggttcccatt

SEQ ID NO: 180240 - DNA, 25 bp, Probe sequence
atggttcccattaggcgcagtacat

SEQ ID NO: 180241 - DNA, 25 bp, Probe sequence
gatggatggggttaccggaaatcga

SEQ ID NO: 180242 - DNA, 25 bp, Probe sequence
agtttccaaagccagtaattagcca

SEQ ID NO: 180243 - DNA, 25 bp, Probe sequence
acaaatgttgaaggtacgacgcgta

SEQ ID NO: 180244 - DNA, 25 bp, Probe sequence
aaacatcaacagaatcagggcaagt

SEQ ID NO: 180245 - DNA, 25 bp, Probe sequence
aacgaatcgaggacgttgatactga

SEQ ID NO: 180246 - DNA, 25 bp, Probe sequence
aagagacagcattaggctacgcaaa

SEQ ID NO: 180247 - DNA, 25 bp, Probe sequence
aaggccgacgagtactaattggatg

SEQ ID NO: 180248 - DNA, 25 bp, Probe sequence
cgtccatatccagcgttggaaaaat

SEQ ID NO: 180249 - DNA, 25 bp, Probe sequence
gcgagtcagatgatcgcacgattga

SEQ ID NO: 180250 - DNA, 25 bp, Probe sequence
gaaggatgggcccattgcttaacaa

SEQ ID NO: 180251 - DNA, 25 bp, Probe sequence
gaacgtgttttgacatctcgaattt

SEQ ID NO: 180252 - DNA, 25 bp, Probe sequence
gaaaattttgtcgagcttgataatg

SEQ ID NO: 180253 - DNA, 25 bp, Probe sequence
gacatctcgaattttcccgacagaa

SEQ ID NO: 180254 - DNA, 25 bp, Probe sequence
gacgcactaggtattaaaacatcaa

SEQ ID NO: 180255 - DNA, 25 bp, Probe sequence
gatgtcatacttatttgtccacaag

SEQ ID NO: 180256 - DNA, 25 bp, Probe sequence
gatcgcagcgacagtggtttattgc

SEQ ID NO: 180257 - DNA, 25 bp, Probe sequence
gatcaatcaaaatttcgtcaacaat

SEQ ID NO: 180258 - DNA, 25 bp, Probe sequence
gtattggtataactacacgagtgat

SEQ ID NO: 180259 - DNA, 25 bp, Probe sequence
gtagcgcttttgaatataacgggca

SEQ ID NO: 180260 - DNA, 25 bp, Probe sequence
ggtacgacgcgtagtacgatattag

SEQ ID NO: 180261 - DNA, 25 bp, Probe sequence
ggctacgcaaataaatttactcgaa

SEQ ID NO: 180262 - DNA, 25 bp, Probe sequence
tgatttctatgcacctcaaacattt

SEQ ID NO: 180263 - DNA, 25 bp, Probe sequence
ttcccgacagaagacgcactaggta

SEQ ID NO: 180264 - DNA, 25 bp, Probe sequence
tcgtcaacaatttcatatacaacca

SEQ ID NO: 180265 - DNA, 25 bp, Probe sequence
tcagcaaggtcgattattactttat

SEQ ID NO: 180266 - DNA, 25 bp, Probe sequence
tttactcgaaaattacatccgtatg

SEQ ID NO: 180267 - DNA, 25 bp, Probe sequence
ttttggataatgatgctaccgaagt

SEQ ID NO: 180268 - DNA, 25 bp, Probe sequence
ttaggcgcagtacatggcttaaagt

SEQ ID NO: 180269 - DNA, 25 bp, Probe sequence
attggccaagatcctttttatcaac

SEQ ID NO: 180270 - DNA, 25 bp, Probe sequence
atattaactacccatcatttagatg

SEQ ID NO: 180271 - DNA, 25 bp, Probe sequence
agatcctttttatcaacatgtttta

SEQ ID NO: 180272 - DNA, 25 bp, Probe sequence
acatcggttatgtgccacaagacat

SEQ ID NO: 180273 - DNA, 25 bp, Probe sequence
acaaacagattttcaatcatttaac

SEQ ID NO: 180274 - DNA, 25 bp, Probe sequence
aaatcacatcggttatgtgccacaa

SEQ ID NO: 180275 - DNA, 25 bp, Probe sequence
aatctagacatgacatccaccaact

SEQ ID NO: 180276 - DNA, 25 bp, Probe sequence
aattatattaactacccatcattta

SEQ ID NO: 180277 - DNA, 25 bp, Probe sequence
cacatgacagtggctgaaaacatta

SEQ ID NO: 180278 - DNA, 25 bp, Probe sequence
gccaaagtatctacattgtccggtg

SEQ ID NO: 180279 - DNA, 25 bp, Probe sequence
gctggaaaatcaacattacttcgta

SEQ ID NO: 180280 - DNA, 25 bp, Probe sequence
gaagcacttgcagatgatatcaagt

SEQ ID NO: 180281 - DNA, 25 bp, Probe sequence
gaactatcaactatttcggcgaaaa

SEQ ID NO: 180282 - DNA, 25 bp, Probe sequence
gatggaactatcaactatttcggcg

SEQ ID NO: 180283 - DNA, 25 bp, Probe sequence
gatgaaccgacagttggtattgatt

SEQ ID NO: 180284 - DNA, 25 bp, Probe sequence
gatacaactatcaacgaatatttac

SEQ ID NO: 180285 - DNA, 25 bp, Probe sequence
gttaattggccaagatcctttttat

SEQ ID NO: 180286 - DNA, 25 bp, Probe sequence
gttatgtgccacaagacattgcgtt

SEQ ID NO: 180287 - DNA, 25 bp, Probe sequence
gtttactaggtcaacctcgaattct

SEQ ID NO: 180288 - DNA, 25 bp, Probe sequence
gtctgccaaagtatctacattgtcc

SEQ ID NO: 180289 - DNA, 25 bp, Probe sequence
gtgccacaagacattgcgttatttg

SEQ ID NO: 180290 - DNA, 25 bp, Probe sequence
tcgtttaaccgtattacttggtgat

SEQ ID NO: 180291 - DNA, 25 bp, Probe sequence
gatgatatcaagttaattggccaag

SEQ ID NO: 180292 - DNA, 25 bp, Probe sequence
ggaaaatcaacattacttcgtatga

SEQ ID NO: 180293 - DNA, 25 bp, Probe sequence
ggccaagatcctttttatcaacatg

SEQ ID NO: 180294 - DNA, 25 bp, Probe sequence
tagtaggtttactaggtcaacctcg

SEQ ID NO: 180295 - DNA, 25 bp, Probe sequence
tgaaaaagctaatgatggaactatc

SEQ ID NO: 180296 - DNA, 25 bp, Probe sequence
taaccgtattacttggtgataatgg

SEQ ID NO: 180297 - DNA, 25 bp, Probe sequence
taactacccatcatttagatgaagt

SEQ ID NO: 180298 - DNA, 25 bp, Probe sequence
taaatcactttgtaaaaatccaatt

SEQ ID NO: 180299 - DNA, 25 bp, Probe sequence
tacgtctgccaaagtatctacattg

SEQ ID NO: 180300 - DNA, 25 bp, Probe sequence
tatcaacgaatatttacagcaatta

SEQ ID NO: 180301 - DNA, 25 bp, Probe sequence
tttgatgatacgtctgccaaagtat

SEQ ID NO: 180302 - DNA, 25 bp, Probe sequence
tttatcaacatgttttagaggacaa

SEQ ID NO: 180303 - DNA, 25 bp, Probe sequence
attggtgccattatacctagaatga

SEQ ID NO: 180304 - DNA, 25 bp, Probe sequence
atatatctgatattgccaaattggc

SEQ ID NO: 180305 - DNA, 25 bp, Probe sequence
atcaaccgaatcaatttgctcaaag

SEQ ID NO: 180306 - DNA, 25 bp, Probe sequence
agatatgccatatagcgtcacagta

SEQ ID NO: 180307 - DNA, 25 bp, Probe sequence
agatattgcagttggtatacataga

SEQ ID NO: 180308 - DNA, 25 bp, Probe sequence
agcacgcagtaaagtagatggtatt

SEQ ID NO: 180309 - DNA, 25 bp, Probe sequence
agctgcctataaatattattctgat

SEQ ID NO: 180310 - DNA, 25 bp, Probe sequence
acacaattagtgtctccatcgataa

SEQ ID NO: 180311 - DNA, 25 bp, Probe sequence
aaaatgaatgtaccaatcgttattg

SEQ ID NO: 180312 - DNA, 25 bp, Probe sequence
aacaatgccaaaaatatgaatcaca

SEQ ID NO: 180313 - DNA, 25 bp, Probe sequence
aactgatacgattgcattagctgcc

SEQ ID NO: 180314 - DNA, 25 bp, Probe sequence
aagcgcttgaaacattagcacgcag

SEQ ID NO: 180315 - DNA, 25 bp, Probe sequence
aagagcgagacaaacacaccttatt

SEQ ID NO: 180316 - DNA, 25 bp, Probe sequence
caatgcgcgatggaagagatacaac

SEQ ID NO: 180317 - DNA, 25 bp, Probe sequence
caccttattggtgccattataccta

SEQ ID NO: 180318 - DNA, 25 bp, Probe sequence
catagtattgtgcatgatgattata

SEQ ID NO: 180319 - DNA, 25 bp, Probe sequence
gccatatagcgtcacagtagatgtt

SEQ ID NO: 180320 - DNA, 25 bp, Probe sequence
gcggttgttggagcaactgatacga

SEQ ID NO: 180321 - DNA, 25 bp, Probe sequence
gcagaacatgactatcaaccgaatc

SEQ ID NO: 180322 - DNA, 25 bp, Probe sequence
gaatggattggtcaacagggatatc

SEQ ID NO: 180323 - DNA, 25 bp, Probe sequence
gactatcaaccgaatcaatttgctc

SEQ ID NO: 180324 - DNA, 25 bp, Probe sequence
gacaaacacaccttattggtgccat

SEQ ID NO: 180325 - DNA, 25 bp, Probe sequence
gagcaagtagatgcggttgttggag

SEQ ID NO: 180326 - DNA, 25 bp, Probe sequence
gagatacaacagatgcttaaaaagc

SEQ ID NO: 180327 - DNA, 25 bp, Probe sequence
gatggtattgttttaatggctacag

SEQ ID NO: 180328 - DNA, 25 bp, Probe sequence
gatacgattgcattagctgcctata

SEQ ID NO: 180329 - DNA, 25 bp, Probe sequence
gtaccaatcgttattgttggtcaac

SEQ ID NO: 180330 - DNA, 25 bp, Probe sequence
gttatgaaaccacatcaaatatatg

SEQ ID NO: 180331 - DNA, 25 bp, Probe sequence
gtctccatcgataaaaacaattcat

SEQ ID NO: 180332 - DNA, 25 bp, Probe sequence
tggtcaacagggatatcaacaagtt

SEQ ID NO: 180333 - DNA, 25 bp, Probe sequence
tgccaaattggcaggcgtttcaaaa

SEQ ID NO: 180334 - DNA, 25 bp, Probe sequence
tcgaagcagaaatacaagcgcttga

SEQ ID NO: 180335 - DNA, 25 bp, Probe sequence
tagaaaacgtggtttacttgaccag

SEQ ID NO: 180336 - DNA, 25 bp, Probe sequence
ttaaataatggatctgtcagtaaaa

SEQ ID NO: 180337 - DNA, 25 bp, Probe sequence
tttacttggacttttactcggtgca

SEQ ID NO: 180338 - DNA, 25 bp, Probe sequence
atgacaccaggattaagtttatttt

SEQ ID NO: 180339 - DNA, 25 bp, Probe sequence
atgtaacatatcttagtgcaacaat

SEQ ID NO: 180340 - DNA, 25 bp, Probe sequence
acttggacttttactcggtgcatta

SEQ ID NO: 180341 - DNA, 25 bp, Probe sequence
aaatgatgttttgtacgattgcaat

SEQ ID NO: 180342 - DNA, 25 bp, Probe sequence
aaactcggtgtattagatttcgctg

SEQ ID NO: 180343 - DNA, 25 bp, Probe sequence
aaacattctgaatcaacaccacata

SEQ ID NO: 180344 - DNA, 25 bp, Probe sequence
aattaattacaccattatctgttac

SEQ ID NO: 180345 - DNA, 25 bp, Probe sequence
aattgtgcttgttacatttgtatgg

SEQ ID NO: 180346 - DNA, 25 bp, Probe sequence
caacaccacataatcttatcattac

SEQ ID NO: 180347 - DNA, 25 bp, Probe sequence
ctgctcttgtatacagtccagtagc

SEQ ID NO: 180348 - DNA, 25 bp, Probe sequence
cgatacgatatttatgtttttgtgt

SEQ ID NO: 180349 - DNA, 25 bp, Probe sequence
gaatcaacaccacataatcttatca

SEQ ID NO: 180350 - DNA, 25 bp, Probe sequence
gaatcttaacgatacgatatttatg

SEQ ID NO: 180351 - DNA, 25 bp, Probe sequence
gacttttactcggtgcattagcagg

SEQ ID NO: 180352 - DNA, 25 bp, Probe sequence
gttcatattacatcaggtgtttctg

SEQ ID NO: 180353 - DNA, 25 bp, Probe sequence
gtttttgtgtacattattagtttgg

SEQ ID NO: 180354 - DNA, 25 bp, Probe sequence
gtatggcagcaattgtgcttgttac

SEQ ID NO: 180355 - DNA, 25 bp, Probe sequence
gtagtaatatggactgctcttgtat

SEQ ID NO: 180356 - DNA, 25 bp, Probe sequence
gtagcacattgggtttggggcggcg

SEQ ID NO: 180357 - DNA, 25 bp, Probe sequence
gtaatatggactgctcttgtataca

SEQ ID NO: 180358 - DNA, 25 bp, Probe sequence
gtcatgacgtttattattgcgaaag

SEQ ID NO: 180359 - DNA, 25 bp, Probe sequence
gtgtaacagcagttgtaatttttag

SEQ ID NO: 180360 - DNA, 25 bp, Probe sequence
gtgtggattggttggtatggattta

SEQ ID NO: 180361 - DNA, 25 bp, Probe sequence
ggtgaacatgcttactttgaaggtg

SEQ ID NO: 180362 - DNA, 25 bp, Probe sequence
ggtgtttctggtttagtattagcta

SEQ ID NO: 180363 - DNA, 25 bp, Probe sequence
ggtgtattagatttcgctggaggta

SEQ ID NO: 180364 - DNA, 25 bp, Probe sequence
ggttcaatcgctgagaaaatgaagt

SEQ ID NO: 180365 - DNA, 25 bp, Probe sequence
ggcggtatattcgtgtggattggtt

SEQ ID NO: 180366 - DNA, 25 bp, Probe sequence
tgaagtttattccttatttattatt

SEQ ID NO: 180367 - DNA, 25 bp, Probe sequence
tacagtccagtagcacattgggttt

SEQ ID NO: 180368 - DNA, 25 bp, Probe sequence
tactgtcatgcaaagtatggcagca

SEQ ID NO: 180369 - DNA, 25 bp, Probe sequence
tactcggtgcattagcaggattagt

SEQ ID NO: 180370 - DNA, 25 bp, Probe sequence
ttgattggcggtatattcgtgtgga

SEQ ID NO: 180371 - DNA, 25 bp, Probe sequence
attgataatgcttcatggacaatta

SEQ ID NO: 180372 - DNA, 25 bp, Probe sequence
atttccgttaattgaagcgcaaaag

SEQ ID NO: 180373 - DNA, 25 bp, Probe sequence
atgatacacgaattaggtacagtag

SEQ ID NO: 180374 - DNA, 25 bp, Probe sequence
atgtccatttccgttaattgaagcg

SEQ ID NO: 180375 - DNA, 25 bp, Probe sequence
atggtatgtccatttccgttaattg

SEQ ID NO: 180376 - DNA, 25 bp, Probe sequence
atggcaacattgcaatctggagatg

SEQ ID NO: 180377 - DNA, 25 bp, Probe sequence
aggaatggtatgtccatttccgtta

SEQ ID NO: 180378 - DNA, 25 bp, Probe sequence
acaaattgataatgcttcatggaca

SEQ ID NO: 180379 - DNA, 25 bp, Probe sequence
aaatggcaacattgcaatctggaga

SEQ ID NO: 180380 - DNA, 25 bp, Probe sequence
aacattgcaatctggagatgaatta

SEQ ID NO: 180381 - DNA, 25 bp, Probe sequence
aagcgcaaaagaaaatggcaacatt

SEQ ID NO: 180382 - DNA, 25 bp, Probe sequence
caaattgataatgcttcatggacaa

SEQ ID NO: 180383 - DNA, 25 bp, Probe sequence
catttccgttaattgaagcgcaaaa

SEQ ID NO: 180384 - DNA, 25 bp, Probe sequence
ccatttccgttaattgaagcgcaaa

SEQ ID NO: 180385 - DNA, 25 bp, Probe sequence
gcaacattgcaatctggagatgaat

SEQ ID NO: 180386 - DNA, 25 bp, Probe sequence
gaatggtatgtccatttccgttaat

SEQ ID NO: 180387 - DNA, 25 bp, Probe sequence
gaacaaattgataatgcttcatgga

SEQ ID NO: 180388 - DNA, 25 bp, Probe sequence
gaaaatggcaacattgcaatctgga

SEQ ID NO: 180389 - DNA, 25 bp, Probe sequence
gatacacgaattaggtacagtagga

SEQ ID NO: 180390 - DNA, 25 bp, Probe sequence
gtaggaatggtatgtccatttccgt

SEQ ID NO: 180391 - DNA, 25 bp, Probe sequence
gtatgtccatttccgttaattgaag

SEQ ID NO: 180392 - DNA, 25 bp, Probe sequence
gtccatttccgttaattgaagcgca

SEQ ID NO: 180393 - DNA, 25 bp, Probe sequence
ggtatgtccatttccgttaattgaa

SEQ ID NO: 180394 - DNA, 25 bp, Probe sequence
ggtacagtaggaatggtatgtccat

SEQ ID NO: 180395 - DNA, 25 bp, Probe sequence
ggaatggtatgtccatttccgttaa

SEQ ID NO: 180396 - DNA, 25 bp, Probe sequence
ggcaacattgcaatctggagatgaa

SEQ ID NO: 180397 - DNA, 25 bp, Probe sequence
tggcaacattgcaatctggagatga

SEQ ID NO: 180398 - DNA, 25 bp, Probe sequence
tgtccatttccgttaattgaagcgc

SEQ ID NO: 180399 - DNA, 25 bp, Probe sequence
tggtatgtccatttccgttaattga

SEQ ID NO: 180400 - DNA, 25 bp, Probe sequence
tgataatgcttcatggacaattaca

SEQ ID NO: 180401 - DNA, 25 bp, Probe sequence
tccatttccgttaattgaagcgcaa

SEQ ID NO: 180402 - DNA, 25 bp, Probe sequence
taggaatggtatgtccatttccgtt

SEQ ID NO: 180403 - DNA, 25 bp, Probe sequence
tatgtccatttccgttaattgaagc

SEQ ID NO: 180404 - DNA, 25 bp, Probe sequence
ttccgttaattgaagcgcaaaagaa

SEQ ID NO: 180405 - DNA, 25 bp, Probe sequence
attgctatcgcaggtcttacactat

SEQ ID NO: 180406 - DNA, 25 bp, Probe sequence
atttgcaccatattgaagcgaagtt

SEQ ID NO: 180407 - DNA, 25 bp, Probe sequence
atattttaggcgttgtatccttgat

SEQ ID NO: 180408 - DNA, 25 bp, Probe sequence
atcgaatgattactttggtctttat

SEQ ID NO: 180409 - DNA, 25 bp, Probe sequence
atccccattcttaccagtagcagaa

SEQ ID NO: 180410 - DNA, 25 bp, Probe sequence
atgggtatcgttggtagcgtttggg

SEQ ID NO: 180411 - DNA, 25 bp, Probe sequence
aggtcttacactattcacggttggt

SEQ ID NO: 180412 - DNA, 25 bp, Probe sequence
aatatcataggttttgtcttagcaa

SEQ ID NO: 180413 - DNA, 25 bp, Probe sequence
cacggttggtagtttaatgtcaggt

SEQ ID NO: 180414 - DNA, 25 bp, Probe sequence
cttggcgcatcaataggttcgacga

SEQ ID NO: 180415 - DNA, 25 bp, Probe sequence
ctggtgtcatgatgtccttgtcaca

SEQ ID NO: 180416 - DNA, 25 bp, Probe sequence
gcatttgaaattccattacgctata

SEQ ID NO: 180417 - DNA, 25 bp, Probe sequence
gaacaactggggttatcgccattgc

SEQ ID NO: 180418 - DNA, 25 bp, Probe sequence
gagaagcggcgtcacaaacaaaaga

SEQ ID NO: 180419 - DNA, 25 bp, Probe sequence
gagaaaaaagtttcatccccattct

SEQ ID NO: 180420 - DNA, 25 bp, Probe sequence
gatgtccttgtcacaaattgtgccc

SEQ ID NO: 180421 - DNA, 25 bp, Probe sequence
gtagggctcatcgttgtatggctca

SEQ ID NO: 180422 - DNA, 25 bp, Probe sequence
gatcttcttacagctgtttgtttaa

SEQ ID NO: 180423 - DNA, 25 bp, Probe sequence
gattatgggatacctttatgcgtta

SEQ ID NO: 180424 - DNA, 25 bp, Probe sequence
gttatttttccactttctgtagcgt

SEQ ID NO: 180425 - DNA, 25 bp, Probe sequence
gttatctatttgtcgtcttttacat

SEQ ID NO: 180426 - DNA, 25 bp, Probe sequence
gtttatggctgcaatcgaatcatca

SEQ ID NO: 180427 - DNA, 25 bp, Probe sequence
gtagcgtttgggggatttcgagtat

SEQ ID NO: 180428 - DNA, 25 bp, Probe sequence
gtatgttggttatatcacgtgtaat

SEQ ID NO: 180429 - DNA, 25 bp, Probe sequence
gtcaggtttaagcacacattttagt

SEQ ID NO: 180430 - DNA, 25 bp, Probe sequence
ggtatcaccctgttttatattttca

SEQ ID NO: 180431 - DNA, 25 bp, Probe sequence
tggtctttattacagatcttcttac

SEQ ID NO: 180432 - DNA, 25 bp, Probe sequence
tcaagggtttggatctggtgtcatg

SEQ ID NO: 180433 - DNA, 25 bp, Probe sequence
taaacataccgattgcgattattgc

SEQ ID NO: 180434 - DNA, 25 bp, Probe sequence
taccaattcttatagcatgtgtctt

SEQ ID NO: 180435 - DNA, 25 bp, Probe sequence
tagttgcacttcgattatttaatgt

SEQ ID NO: 180436 - DNA, 25 bp, Probe sequence
tatatattcctgtgtatcttcaaga

SEQ ID NO: 180437 - DNA, 25 bp, Probe sequence
ttatttctttagcgttaccaacaat

SEQ ID NO: 180438 - DNA, 25 bp, Probe sequence
ttggaccacttctaggtggtggcat

SEQ ID NO: 180439 - DNA, 25 bp, Probe sequence
attggacttatcgcactcttagctt

SEQ ID NO: 180440 - DNA, 25 bp, Probe sequence
agggctaattggtagttggattgca

SEQ ID NO: 180441 - DNA, 25 bp, Probe sequence
acaggtacttggtatcgcgctggtg

SEQ ID NO: 180442 - DNA, 25 bp, Probe sequence
aaattcctgcacatagttttccaat

SEQ ID NO: 180443 - DNA, 25 bp, Probe sequence
aaaacgataccatccatttattgca

SEQ ID NO: 180444 - DNA, 25 bp, Probe sequence
aacagggattttaaagccagtaatg

SEQ ID NO: 180445 - DNA, 25 bp, Probe sequence
aagagaatttaaatggcgattgcca

SEQ ID NO: 180446 - DNA, 25 bp, Probe sequence
ctgcacatagttttccaatattggg

SEQ ID NO: 180447 - DNA, 25 bp, Probe sequence
gctgttccaaaactaaagcaacgtt

SEQ ID NO: 180448 - DNA, 25 bp, Probe sequence
gcttggccaatgagtgcatcaactg

SEQ ID NO: 180449 - DNA, 25 bp, Probe sequence
gcaacgatgacttggcaaggatgga

SEQ ID NO: 180450 - DNA, 25 bp, Probe sequence
gaaagttcgagttgctgttccaaaa

SEQ ID NO: 180451 - DNA, 25 bp, Probe sequence
gagtcattttatctttgttcgtcca

SEQ ID NO: 180452 - DNA, 25 bp, Probe sequence
gatgttctatgcattattaatcgct

SEQ ID NO: 180453 - DNA, 25 bp, Probe sequence
gattggggtgtctttttagttctag

SEQ ID NO: 180454 - DNA, 25 bp, Probe sequence
gttctaggaattttcattggttcat

SEQ ID NO: 180455 - DNA, 25 bp, Probe sequence
gtatgggatttggtgcgtcagttgc

SEQ ID NO: 180456 - DNA, 25 bp, Probe sequence
gtacactttttgattacaggtgaaa

SEQ ID NO: 180457 - DNA, 25 bp, Probe sequence
gtgcgtcagttgctggtggttgttc

SEQ ID NO: 180458 - DNA, 25 bp, Probe sequence
gtgcaacaggtacttggtatcgcgc

SEQ ID NO: 180459 - DNA, 25 bp, Probe sequence
ggtagttggattgcattagtattat

SEQ ID NO: 180460 - DNA, 25 bp, Probe sequence
ggtatcgcgctggtgaagggctaat

SEQ ID NO: 180461 - DNA, 25 bp, Probe sequence
ggcaaggatggattgcgctagcatc

SEQ ID NO: 180462 - DNA, 25 bp, Probe sequence
ggcattccgttttggggattagtcg

SEQ ID NO: 180463 - DNA, 25 bp, Probe sequence
tgttctatcggtaacggtttggttg

SEQ ID NO: 180464 - DNA, 25 bp, Probe sequence
tcgcactcttagcttggccaatgag

SEQ ID NO: 180465 - DNA, 25 bp, Probe sequence
taaagcaacgttatacaggtattag

SEQ ID NO: 180466 - DNA, 25 bp, Probe sequence
taccatccatttattgcagcaattg

SEQ ID NO: 180467 - DNA, 25 bp, Probe sequence
tattaactataatcaccatttttct

SEQ ID NO: 180468 - DNA, 25 bp, Probe sequence
ttgctggtggttgttctatcggtaa

SEQ ID NO: 180469 - DNA, 25 bp, Probe sequence
tttatctttgttcgtccaatgaaaa

SEQ ID NO: 180470 - DNA, 25 bp, Probe sequence
ttagtattatatgctgttactgcag

SEQ ID NO: 180471 - DNA, 25 bp, Probe sequence
ttactgcagcaatcactaaaacagg

SEQ ID NO: 180472 - DNA, 25 bp, Probe sequence
ttggttcatatattgcagctagagg

SEQ ID NO: 180473 - DNA, 25 bp, Probe sequence
attcgtcgtgacttttcatattttg

SEQ ID NO: 180474 - DNA, 25 bp, Probe sequence
attatagatttgtcagttcattaaa

SEQ ID NO: 180475 - DNA, 25 bp, Probe sequence
atttctttaaatctgaactaagcga

SEQ ID NO: 180476 - DNA, 25 bp, Probe sequence
ataacttttcaatacatgacgatat

SEQ ID NO: 180477 - DNA, 25 bp, Probe sequence
atgcgttacaaattgactcggcaac

SEQ ID NO: 180478 - DNA, 25 bp, Probe sequence
atgacgatatgacgattacagaagc

SEQ ID NO: 180479 - DNA, 25 bp, Probe sequence
ttggccagaaaatagggaacgttat

SEQ ID NO: 180480 - DNA, 25 bp, Probe sequence
actcggcaacaattcgtcgtgactt

SEQ ID NO: 180481 - DNA, 25 bp, Probe sequence
acatgatcaaaatcgcaattgtcgg

SEQ ID NO: 180482 - DNA, 25 bp, Probe sequence
aacgtttgccgttatattatagatt

SEQ ID NO: 180483 - DNA, 25 bp, Probe sequence
aagaagatgttattggccagaaaat

SEQ ID NO: 180484 - DNA, 25 bp, Probe sequence
aatacgccttcagatgtgcaagtac

SEQ ID NO: 180485 - DNA, 25 bp, Probe sequence
caaaagcgattagcgatgcgttaca

SEQ ID NO: 180486 - DNA, 25 bp, Probe sequence
ctttgctcacatataacttttcaat

SEQ ID NO: 180487 - DNA, 25 bp, Probe sequence
ctacaccagaaagagttgcacagaa

SEQ ID NO: 180488 - DNA, 25 bp, Probe sequence
gcagatgaactcgtccaagctggtg

SEQ ID NO: 180489 - DNA, 25 bp, Probe sequence
gcaattgtcggagttgggaacctag

SEQ ID NO: 180490 - DNA, 25 bp, Probe sequence
gaattacagtcattattattcttta

SEQ ID NO: 180491 - DNA, 25 bp, Probe sequence
gaactcgtccaagctggtgtgaaag

SEQ ID NO: 180492 - DNA, 25 bp, Probe sequence
gaactaagcgagagtgacatgatca

SEQ ID NO: 180493 - DNA, 25 bp, Probe sequence
gaaagttgcagatgaactcgtccaa

SEQ ID NO: 180494 - DNA, 25 bp, Probe sequence
gaccaagttaaaattcctcgagcaa

SEQ ID NO: 180495 - DNA, 25 bp, Probe sequence
gacgattacagaagcgtttgacgta

SEQ ID NO: 180496 - DNA, 25 bp, Probe sequence
gatgttgtgattctaactacaccag

SEQ ID NO: 180497 - DNA, 25 bp, Probe sequence
gtattttaaacttcactcctggtag

SEQ ID NO: 180498 - DNA, 25 bp, Probe sequence
gtccaagctggtgtgaaaggtattt

SEQ ID NO: 180499 - DNA, 25 bp, Probe sequence
gtgcaagtacatcaaattgacttag

SEQ ID NO: 180500 - DNA, 25 bp, Probe sequence
ggaacctagggaaagctttgctcac

SEQ ID NO: 180501 - DNA, 25 bp, Probe sequence
ggcaacaattcgtcgtgacttttca

SEQ ID NO: 180502 - DNA, 25 bp, Probe sequence
tcctcgagcaactttaaaacgtttg

SEQ ID NO: 180503 - DNA, 25 bp, Probe sequence
taaaggtatagatcgtgtaaattca

SEQ ID NO: 180504 - DNA, 25 bp, Probe sequence
tagatagtttattggatttctttaa

SEQ ID NO: 180505 - DNA, 25 bp, Probe sequence
tttcatattttggcgaattaggtaa

SEQ ID NO: 180506 - DNA, 25 bp, Probe sequence
ttttaaacttcactcctggtagaat

SEQ ID NO: 180507 - DNA, 25 bp, Probe sequence
atttccaaaaataaagggcaatcat

SEQ ID NO: 180508 - DNA, 25 bp, Probe sequence
atatggtggttcttattggaagtta

SEQ ID NO: 180509 - DNA, 25 bp, Probe sequence
ataaagggcaatcatatggtggttc

SEQ ID NO: 180510 - DNA, 25 bp, Probe sequence
atcatatggtggttcttattggaag

SEQ ID NO: 180511 - DNA, 25 bp, Probe sequence
atcctacctggagatatccaaaaat

SEQ ID NO: 180512 - DNA, 25 bp, Probe sequence
atgataagggggtgagtattggtaa

SEQ ID NO: 180513 - DNA, 25 bp, Probe sequence
atggtggttcttattggaagttaat

SEQ ID NO: 180514 - DNA, 25 bp, Probe sequence
agggaaaaatcctacctggagatat

SEQ ID NO: 180515 - DNA, 25 bp, Probe sequence
agggcaatcatatggtggttcttat

SEQ ID NO: 180516 - DNA, 25 bp, Probe sequence
aaaaatcctacctggagatatccaa

SEQ ID NO: 180517 - DNA, 25 bp, Probe sequence
aaatcctacctggagatatccaaaa

SEQ ID NO: 180518 - DNA, 25 bp, Probe sequence
aaatgataagggggtgagtattggt

SEQ ID NO: 180519 - DNA, 25 bp, Probe sequence
aaagggcaatcatatggtggttctt

SEQ ID NO: 180520 - DNA, 25 bp, Probe sequence
aaaatcctacctggagatatccaaa

SEQ ID NO: 180521 - DNA, 25 bp, Probe sequence
aagggcaatcatatggtggttctta

SEQ ID NO: 180522 - DNA, 25 bp, Probe sequence
aatcctacctggagatatccaaaaa

SEQ ID NO: 180523 - DNA, 25 bp, Probe sequence
aatcatatggtggttcttattggaa

SEQ ID NO: 180524 - DNA, 25 bp, Probe sequence
aataaagggcaatcatatggtggtt

SEQ ID NO: 180525 - DNA, 25 bp, Probe sequence
caatcatatggtggttcttattgga

SEQ ID NO: 180526 - DNA, 25 bp, Probe sequence
catatggtggttcttattggaagtt

SEQ ID NO: 180527 - DNA, 25 bp, Probe sequence
cctacctggagatatccaaaaatta

SEQ ID NO: 180528 - DNA, 25 bp, Probe sequence
gcaatcatatggtggttcttattgg

SEQ ID NO: 180529 - DNA, 25 bp, Probe sequence
gaaaaatcctacctggagatatcca

SEQ ID NO: 180530 - DNA, 25 bp, Probe sequence
gataagggggtgagtattggtaaat

SEQ ID NO: 180531 - DNA, 25 bp, Probe sequence
gggaaaaatcctacctggagatatc

SEQ ID NO: 180532 - DNA, 25 bp, Probe sequence
gggcaatcatatggtggttcttatt

SEQ ID NO: 180533 - DNA, 25 bp, Probe sequence
ggaaaaatcctacctggagatatcc

SEQ ID NO: 180534 - DNA, 25 bp, Probe sequence
ggcaatcatatggtggttcttattg

SEQ ID NO: 180535 - DNA, 25 bp, Probe sequence
tggtggttcttattggaagttaata

SEQ ID NO: 180536 - DNA, 25 bp, Probe sequence
tcctacctggagatatccaaaaatt

SEQ ID NO: 180537 - DNA, 25 bp, Probe sequence
tcatatggtggttcttattggaagt

SEQ ID NO: 180538 - DNA, 25 bp, Probe sequence
taaagggcaatcatatggtggttct

SEQ ID NO: 180539 - DNA, 25 bp, Probe sequence
tatggtggttcttattggaagttaa

SEQ ID NO: 180540 - DNA, 25 bp, Probe sequence
tattggtaaatttattcaaaagctt

SEQ ID NO: 180541 - DNA, 25 bp, Probe sequence
attccaatcattgaagctaacgtag

SEQ ID NO: 180542 - DNA, 25 bp, Probe sequence
atcaatcaacttcacaatcaacgac

SEQ ID NO: 180543 - DNA, 25 bp, Probe sequence
atgctaatcacatagaagagccatt

SEQ ID NO: 180544 - DNA, 25 bp, Probe sequence
atgacattcaattaactatcccaag

SEQ ID NO: 180545 - DNA, 25 bp, Probe sequence
agtggcacgaacaattggtttaaat

SEQ ID NO: 180546 - DNA, 25 bp, Probe sequence
agcggttacagaaggccctggacta

SEQ ID NO: 180547 - DNA, 25 bp, Probe sequence
aagtcataaacgatttggcggtgtc

SEQ ID NO: 180548 - DNA, 25 bp, Probe sequence
aaggccctggactaattggtgcgtt

SEQ ID NO: 180549 - DNA, 25 bp, Probe sequence
aattggtgcgttactaataggtgtt

SEQ ID NO: 180550 - DNA, 25 bp, Probe sequence
cattcccgctaattgcacttattgt

SEQ ID NO: 180551 - DNA, 25 bp, Probe sequence
cttattcctgttcatcatattgcag

SEQ ID NO: 180552 - DNA, 25 bp, Probe sequence
ctatcccaagtcctaaattatgcac

SEQ ID NO: 180553 - DNA, 25 bp, Probe sequence
gcgattaattgttgctggtggcgtg

SEQ ID NO: 180554 - DNA, 25 bp, Probe sequence
gctaacgtagcaacgagctttcaaa

SEQ ID NO: 180555 - DNA, 25 bp, Probe sequence
gcattggcatttgcttacgataagc

SEQ ID NO: 180556 - DNA, 25 bp, Probe sequence
gcacttattgtttcaggtggacata

SEQ ID NO: 180557 - DNA, 25 bp, Probe sequence
gcaaggtcgatttgctgatttagca

SEQ ID NO: 180558 - DNA, 25 bp, Probe sequence
gaagagccattaacattcccgctaa

SEQ ID NO: 180559 - DNA, 25 bp, Probe sequence
gaagatacttattcattccctcgtg

SEQ ID NO: 180560 - DNA, 25 bp, Probe sequence
gatgacgcagtaggtgaggcttatg

SEQ ID NO: 180561 - DNA, 25 bp, Probe sequence
gatattgatgccatagcggttacag

SEQ ID NO: 180562 - DNA, 25 bp, Probe sequence
gattacgtcaatctttagcggatca

SEQ ID NO: 180563 - DNA, 25 bp, Probe sequence
gttgctggtggcgtggcgagtaata

SEQ ID NO: 180564 - DNA, 25 bp, Probe sequence
gtgaggcttatgataaagtggcacg

SEQ ID NO: 180565 - DNA, 25 bp, Probe sequence
gtggcaagtagacatcacgttgaag

SEQ ID NO: 180566 - DNA, 25 bp, Probe sequence
ggttggctgctgaaggtgaagatac

SEQ ID NO: 180567 - DNA, 25 bp, Probe sequence
tgcaatgataggcgttgccggccac

SEQ ID NO: 180568 - DNA, 25 bp, Probe sequence
tcattccctcgtgtttggttggata

SEQ ID NO: 180569 - DNA, 25 bp, Probe sequence
taataggtgttaatgcagccaaagc

SEQ ID NO: 180570 - DNA, 25 bp, Probe sequence
taaattatccaggtggtccacaagt

SEQ ID NO: 180571 - DNA, 25 bp, Probe sequence
tatgattttagttttagtgggttga

SEQ ID NO: 180572 - DNA, 25 bp, Probe sequence
ttagcggatcaatgcaaagtcaatg

SEQ ID NO: 180573 - DNA, 25 bp, Probe sequence
ttagcattaaatgggcacagcaata

SEQ ID NO: 180574 - DNA, 25 bp, Probe sequence
ttggtgaaacacgagatgacgcagt

SEQ ID NO: 180575 - DNA, 25 bp, Probe sequence
atctgaaggtagaggtccgggaact

SEQ ID NO: 180576 - DNA, 25 bp, Probe sequence
attagagattatcggatctgaaggt

SEQ ID NO: 180577 - DNA, 25 bp, Probe sequence
atttctgtcagatggtaagttagca

SEQ ID NO: 180578 - DNA, 25 bp, Probe sequence
atctgagttaattgctgaactaaag

SEQ ID NO: 180579 - DNA, 25 bp, Probe sequence
atcggatctgaaggtagaggtccgg

SEQ ID NO: 180580 - DNA, 25 bp, Probe sequence
aggtagaggtccgggaactagatat

SEQ ID NO: 180581 - DNA, 25 bp, Probe sequence
agaggtccgggaactagatattatt

SEQ ID NO: 180582 - DNA, 25 bp, Probe sequence
acatctgagttaattgctgaactaa

SEQ ID NO: 180583 - DNA, 25 bp, Probe sequence
tctgaaggtagaggtccgggaacta

SEQ ID NO: 180584 - DNA, 25 bp, Probe sequence
ctgaaggtagaggtccgggaactag

SEQ ID NO: 180585 - DNA, 25 bp, Probe sequence
aagttatacatctgagttaattgct

SEQ ID NO: 180586 - DNA, 25 bp, Probe sequence
cagatggtaagttagcaagtaggct

SEQ ID NO: 180587 - DNA, 25 bp, Probe sequence
ctgtcagatggtaagttagcaagta

SEQ ID NO: 180588 - DNA, 25 bp, Probe sequence
gaaggtagaggtccgggaactagat

SEQ ID NO: 180589 - DNA, 25 bp, Probe sequence
gatctgaaggtagaggtccgggaac

SEQ ID NO: 180590 - DNA, 25 bp, Probe sequence
gcaagtaggctagaaattcaagaaa

SEQ ID NO: 180591 - DNA, 25 bp, Probe sequence
gaaattagagattatcggatctgaa

SEQ ID NO: 180592 - DNA, 25 bp, Probe sequence
gagattgtagaatttctgtcagatg

SEQ ID NO: 180593 - DNA, 25 bp, Probe sequence
gaggtccgggaactagatattattt

SEQ ID NO: 180594 - DNA, 25 bp, Probe sequence
gattatcggatctgaaggtagaggt

SEQ ID NO: 180595 - DNA, 25 bp, Probe sequence
gattgtagaatttctgtcagatggt

SEQ ID NO: 180596 - DNA, 25 bp, Probe sequence
gtagaggtccgggaactagatatta

SEQ ID NO: 180597 - DNA, 25 bp, Probe sequence
gttatacatctgagttaattgctga

SEQ ID NO: 180598 - DNA, 25 bp, Probe sequence
gtagaatttctgtcagatggtaagt

SEQ ID NO: 180599 - DNA, 25 bp, Probe sequence
gtccgggaactagatattatttaat

SEQ ID NO: 180600 - DNA, 25 bp, Probe sequence
gggacttcaaaaaagttatacatct

SEQ ID NO: 180601 - DNA, 25 bp, Probe sequence
ggtagaggtccgggaactagatatt

SEQ ID NO: 180602 - DNA, 25 bp, Probe sequence
tgaaggtagaggtccgggaactaga

SEQ ID NO: 180603 - DNA, 25 bp, Probe sequence
ggatctgaaggtagaggtccgggaa

SEQ ID NO: 180604 - DNA, 25 bp, Probe sequence
tccgggaactagatattatttaatt

SEQ ID NO: 180605 - DNA, 25 bp, Probe sequence
tatacatctgagttaattgctgaac

SEQ ID NO: 180606 - DNA, 25 bp, Probe sequence
ttatcggatctgaaggtagaggtcc

SEQ ID NO: 180607 - DNA, 25 bp, Probe sequence
ttcaagaaacaatgggacttcaaaa

SEQ ID NO: 180608 - DNA, 25 bp, Probe sequence
ttctgtcagatggtaagttagcaag

SEQ ID NO: 180609 - DNA, 25 bp, Probe sequence
attcttattttcgacattgaaccca

SEQ ID NO: 180610 - DNA, 25 bp, Probe sequence
acgaccgtggttcacgaagattcga

SEQ ID NO: 180611 - DNA, 25 bp, Probe sequence
agctagaggatttatgcgtgaaggt

SEQ ID NO: 180612 - DNA, 25 bp, Probe sequence
accaggcgctagaattcgatttatg

SEQ ID NO: 180613 - DNA, 25 bp, Probe sequence
acttttgataaagctttgccagtag

SEQ ID NO: 180614 - DNA, 25 bp, Probe sequence
acaaatctagaatacgaccgtggtt

SEQ ID NO: 180615 - DNA, 25 bp, Probe sequence
aaattctattgtacatcgcagatat

SEQ ID NO: 180616 - DNA, 25 bp, Probe sequence
aaatcctaaagatgttgctcaacac

SEQ ID NO: 180617 - DNA, 25 bp, Probe sequence
aaaggtctgttcctactgctagaaa

SEQ ID NO: 180618 - DNA, 25 bp, Probe sequence
aacatattatttactcggattcgag

SEQ ID NO: 180619 - DNA, 25 bp, Probe sequence
cattgaacccagttatgatgccata

SEQ ID NO: 180620 - DNA, 25 bp, Probe sequence
ctgcctgcttctgttacgttagaga

SEQ ID NO: 180621 - DNA, 25 bp, Probe sequence
gcgagagcctttatcaatacacaat

SEQ ID NO: 180622 - DNA, 25 bp, Probe sequence
gaatttgcttggtttgaggggatga

SEQ ID NO: 180623 - DNA, 25 bp, Probe sequence
gaatctgggacaagacttaacattg

SEQ ID NO: 180624 - DNA, 25 bp, Probe sequence
gaatcaaatgagggcgtgggacgta

SEQ ID NO: 180625 - DNA, 25 bp, Probe sequence
gaaggacagcttctagatcgaaaga

SEQ ID NO: 180626 - DNA, 25 bp, Probe sequence
gaaggtggcaaactggtaattggta

SEQ ID NO: 180627 - DNA, 25 bp, Probe sequence
gaaggtaaattgacagttgcaggtt

SEQ ID NO: 180628 - DNA, 25 bp, Probe sequence
gaagcacctttcgaacatttatata

SEQ ID NO: 180629 - DNA, 25 bp, Probe sequence
gaaacgcgatggaactatggatgaa

SEQ ID NO: 180630 - DNA, 25 bp, Probe sequence
gaaattagtagcccgggtgcactgc

SEQ ID NO: 180631 - DNA, 25 bp, Probe sequence
gatgatcctgtatactcagagccta

SEQ ID NO: 180632 - DNA, 25 bp, Probe sequence
gatgccataatcaccttaaaagatg

SEQ ID NO: 180633 - DNA, 25 bp, Probe sequence
gttgcaggtttgttattgtttagta

SEQ ID NO: 180634 - DNA, 25 bp, Probe sequence
gtgcgtttgcaaatgctgaaggtgg

SEQ ID NO: 180635 - DNA, 25 bp, Probe sequence
gggcgtgggacgtatatttgacgaa

SEQ ID NO: 180636 - DNA, 25 bp, Probe sequence
ggaagatttgtaactttgccagaat

SEQ ID NO: 180637 - DNA, 25 bp, Probe sequence
ggaatccaaaattagctgcagcatt

SEQ ID NO: 180638 - DNA, 25 bp, Probe sequence
tgctcaacacattagtgcgtttgca

SEQ ID NO: 180639 - DNA, 25 bp, Probe sequence
tcaaggcgaactaacagcatctaaa

SEQ ID NO: 180640 - DNA, 25 bp, Probe sequence
tcaatgtttatttaccaggcgctag

SEQ ID NO: 180641 - DNA, 25 bp, Probe sequence
ttagctgcagcattaactcaatata

SEQ ID NO: 180642 - DNA, 25 bp, Probe sequence
ttgccagaatatccagaatttgctt

SEQ ID NO: 180643 - DNA, 25 bp, Probe sequence
attatggtgaaggtgaggacgcaat

SEQ ID NO: 180644 - DNA, 25 bp, Probe sequence
ataactttgcgaaatattttgtctt

SEQ ID NO: 180645 - DNA, 25 bp, Probe sequence
ataaagtggcacaacatgtatatga

SEQ ID NO: 180646 - DNA, 25 bp, Probe sequence
agttcttggacaattgacgcatttt

SEQ ID NO: 180647 - DNA, 25 bp, Probe sequence
agaagatgtgccacaagtctttgat

SEQ ID NO: 180648 - DNA, 25 bp, Probe sequence
acgcaatggttatgtgggtgaattt

SEQ ID NO: 180649 - DNA, 25 bp, Probe sequence
actatgcaagtcacacttgtgatgt

SEQ ID NO: 180650 - DNA, 25 bp, Probe sequence
acagttgcaatcgatgataattata

SEQ ID NO: 180651 - DNA, 25 bp, Probe sequence
aaatttaggatttcaatatggtggt

SEQ ID NO: 180652 - DNA, 25 bp, Probe sequence
aaatacggaataaactatgcaagtc

SEQ ID NO: 180653 - DNA, 25 bp, Probe sequence
aatattttgtcttagaatttgaaca

SEQ ID NO: 180654 - DNA, 25 bp, Probe sequence
ctttgcgaaatattttgtcttagaa

SEQ ID NO: 180655 - DNA, 25 bp, Probe sequence
gcaagtcacacttgtgatgtgatga

SEQ ID NO: 180656 - DNA, 25 bp, Probe sequence
gaataaactatgcaagtcacacttg

SEQ ID NO: 180657 - DNA, 25 bp, Probe sequence
gaaggtgaggacgcaatggttatgt

SEQ ID NO: 180658 - DNA, 25 bp, Probe sequence
gacaattgacgcattttatcatgaa

SEQ ID NO: 180659 - DNA, 25 bp, Probe sequence
gacgcattttatcatgaaatagagc

SEQ ID NO: 180660 - DNA, 25 bp, Probe sequence
gaggacgcaatggttatgtgggtga

SEQ ID NO: 180661 - DNA, 25 bp, Probe sequence
gttatgtgggtgaatttaaatgact

SEQ ID NO: 180662 - DNA, 25 bp, Probe sequence
gtcaaatgcttttaaaatacggaat

SEQ ID NO: 180663 - DNA, 25 bp, Probe sequence
gtggcacaacatgtatatgaaaatt

SEQ ID NO: 180664 - DNA, 25 bp, Probe sequence
ggtgaggacgcaatggttatgtggg

SEQ ID NO: 180665 - DNA, 25 bp, Probe sequence
ggtgaaggtgaggacgcaatggtta

SEQ ID NO: 180666 - DNA, 25 bp, Probe sequence
ggatttcaatatggtggtaaacgta

SEQ ID NO: 180667 - DNA, 25 bp, Probe sequence
ggattgttatcgatcaagctcaaat

SEQ ID NO: 180668 - DNA, 25 bp, Probe sequence
ggacgcaatggttatgtgggtgaat

SEQ ID NO: 180669 - DNA, 25 bp, Probe sequence
tggacaattgacgcattttatcatg

SEQ ID NO: 180670 - DNA, 25 bp, Probe sequence
tgtgatgtgatgagtttagaagtaa

SEQ ID NO: 180671 - DNA, 25 bp, Probe sequence
tcttggacaattgacgcattttatc

SEQ ID NO: 180672 - DNA, 25 bp, Probe sequence
tatggtttaggtcaaatgcttttaa

SEQ ID NO: 180673 - DNA, 25 bp, Probe sequence
tatggattgttatcgatcaagctca

SEQ ID NO: 180674 - DNA, 25 bp, Probe sequence
tatttaggtttatggattgttatcg

SEQ ID NO: 180675 - DNA, 25 bp, Probe sequence
ttattggttatttaggtttatggat

SEQ ID NO: 180676 - DNA, 25 bp, Probe sequence
ttgttatcgatcaagctcaaattac

SEQ ID NO: 180677 - DNA, 25 bp, Probe sequence
attcagtgcaattaatgcctgcgat

SEQ ID NO: 180678 - DNA, 25 bp, Probe sequence
attctaaacaaaatcattcagtgca

SEQ ID NO: 180679 - DNA, 25 bp, Probe sequence
attagcgtatgcgttagatgttaaa

SEQ ID NO: 180680 - DNA, 25 bp, Probe sequence
atacatcgaatcaaccattatcagt

SEQ ID NO: 180681 - DNA, 25 bp, Probe sequence
actggcttacgtatcggtgttactg

SEQ ID NO: 180682 - DNA, 25 bp, Probe sequence
acgtatcggtgttactgttgctaaa

SEQ ID NO: 180683 - DNA, 25 bp, Probe sequence
aaatgcatcagtcatgtatcaattg

SEQ ID NO: 180684 - DNA, 25 bp, Probe sequence
aacgatgaagttttagctgaaataa

SEQ ID NO: 180685 - DNA, 25 bp, Probe sequence
aagcagtttatacaggcatattcca

SEQ ID NO: 180686 - DNA, 25 bp, Probe sequence
aataccataaattagctgaggcgga

SEQ ID NO: 180687 - DNA, 25 bp, Probe sequence
cagacgtacatacatttactcctaa

SEQ ID NO: 180688 - DNA, 25 bp, Probe sequence
catacatttactcctaaataccata

SEQ ID NO: 180689 - DNA, 25 bp, Probe sequence
gcgcagctaccaaatgcatcagtca

SEQ ID NO: 180690 - DNA, 25 bp, Probe sequence
gctgaaataactacggattctaaac

SEQ ID NO: 180691 - DNA, 25 bp, Probe sequence
gctaaacagcaattagatgcgatta

SEQ ID NO: 180692 - DNA, 25 bp, Probe sequence
gcattgcgagcttttttagaagatt

SEQ ID NO: 180693 - DNA, 25 bp, Probe sequence
gcaagacgacaagcagtttatacag

SEQ ID NO: 180694 - DNA, 25 bp, Probe sequence
gaatcaaccattatcagtagcattg

SEQ ID NO: 180695 - DNA, 25 bp, Probe sequence
gaaggtcctggttcatatactggct

SEQ ID NO: 180696 - DNA, 25 bp, Probe sequence
gaggcggaacgaaattggatcaaca

SEQ ID NO: 180697 - DNA, 25 bp, Probe sequence
gatgttaaattatatggtgtttcat

SEQ ID NO: 180698 - DNA, 25 bp, Probe sequence
gatgcgattattgttgctgaaggtc

SEQ ID NO: 180699 - DNA, 25 bp, Probe sequence
gataaattattggttcctgtgtttg

SEQ ID NO: 180700 - DNA, 25 bp, Probe sequence
gattattgttgctgaaggtcctggt

SEQ ID NO: 180701 - DNA, 25 bp, Probe sequence
gttcctgtgtttgatgcaagacgac

SEQ ID NO: 180702 - DNA, 25 bp, Probe sequence
gtagcattgatgcaaaacgatgaag

SEQ ID NO: 180703 - DNA, 25 bp, Probe sequence
gtcctggttcatatactggcttacg

SEQ ID NO: 180704 - DNA, 25 bp, Probe sequence
gtgattgcgcagctaccaaatgcat

SEQ ID NO: 180705 - DNA, 25 bp, Probe sequence
ggtgtttcatcattaaaggcattgg

SEQ ID NO: 180706 - DNA, 25 bp, Probe sequence
tcgctgctcattgatacatcgaatc

SEQ ID NO: 180707 - DNA, 25 bp, Probe sequence
taatgcctgcgattagtcagctatt

SEQ ID NO: 180708 - DNA, 25 bp, Probe sequence
taaaggcattggcagcaacaatcga

SEQ ID NO: 180709 - DNA, 25 bp, Probe sequence
ttagtcagctatttgagcagagcaa

SEQ ID NO: 180710 - DNA, 25 bp, Probe sequence
ttaaaccaaccatttatttatattg

SEQ ID NO: 180711 - DNA, 25 bp, Probe sequence
attgcatcatatggattgttatcgc

SEQ ID NO: 180712 - DNA, 25 bp, Probe sequence
atttttcgaagatcaggcaattact

SEQ ID NO: 180713 - DNA, 25 bp, Probe sequence
agttgagcaattgaaaagtggtgat

SEQ ID NO: 180714 - DNA, 25 bp, Probe sequence
agacgtacgattaattccccgacat

SEQ ID NO: 180715 - DNA, 25 bp, Probe sequence
aaagctcttggtgtaagacgtacga

SEQ ID NO: 180716 - DNA, 25 bp, Probe sequence
agctcttggtgtaagacgtacgatt

SEQ ID NO: 180717 - DNA, 25 bp, Probe sequence
acttaacggagatttaggagcaggt

SEQ ID NO: 180718 - DNA, 25 bp, Probe sequence
aatttataggaaaagctcttggtgt

SEQ ID NO: 180719 - DNA, 25 bp, Probe sequence
aattgagttgttcgcgcaaggagaa

SEQ ID NO: 180720 - DNA, 25 bp, Probe sequence
caagacaaattgagttgttcgcgca

SEQ ID NO: 180721 - DNA, 25 bp, Probe sequence
caaattgagttgttcgcgcaaggag

SEQ ID NO: 180722 - DNA, 25 bp, Probe sequence
gcatcatatggattgttatcgctta

SEQ ID NO: 180723 - DNA, 25 bp, Probe sequence
gcaattactgttattgaatggagtc

SEQ ID NO: 180724 - DNA, 25 bp, Probe sequence
gaatggagtcaatttataaaagatt

SEQ ID NO: 180725 - DNA, 25 bp, Probe sequence
gaagatcaggcaattactgttattg

SEQ ID NO: 180726 - DNA, 25 bp, Probe sequence
gaaaagctcttggtgtaagacgtac

SEQ ID NO: 180727 - DNA, 25 bp, Probe sequence
gacaaattgagttgttcgcgcaagg

SEQ ID NO: 180728 - DNA, 25 bp, Probe sequence
gagttgttcgcgcaaggagaacatt

SEQ ID NO: 180729 - DNA, 25 bp, Probe sequence
gatgaatttttcgaagatcaggcaa

SEQ ID NO: 180730 - DNA, 25 bp, Probe sequence
gatcaggcaattactgttattgaat

SEQ ID NO: 180731 - DNA, 25 bp, Probe sequence
gatttaggagcaggtaaaacaacgt

SEQ ID NO: 180732 - DNA, 25 bp, Probe sequence
gatttgattttacttaacggagatt

SEQ ID NO: 180733 - DNA, 25 bp, Probe sequence
gattaattccccgacatttaacatc

SEQ ID NO: 180734 - DNA, 25 bp, Probe sequence
gattgttatcgcttagaagattctg

SEQ ID NO: 180735 - DNA, 25 bp, Probe sequence
gttatcgcttagaagattctgatga

SEQ ID NO: 180736 - DNA, 25 bp, Probe sequence
gtggtgatttgattttacttaacgg

SEQ ID NO: 180737 - DNA, 25 bp, Probe sequence
ggtgatttgattttacttaacggag

SEQ ID NO: 180738 - DNA, 25 bp, Probe sequence
tgtaagacgtacgattaattccccg

SEQ ID NO: 180739 - DNA, 25 bp, Probe sequence
tcgcgcaaggagaacattatgaaca

SEQ ID NO: 180740 - DNA, 25 bp, Probe sequence
tcatatggattgttatcgcttagaa

SEQ ID NO: 180741 - DNA, 25 bp, Probe sequence
tagaagattctgatgaagatttagg

SEQ ID NO: 180742 - DNA, 25 bp, Probe sequence
tatggattgttatcgcttagaagat

SEQ ID NO: 180743 - DNA, 25 bp, Probe sequence
ttaattccccgacatttaacatcat

SEQ ID NO: 180744 - DNA, 25 bp, Probe sequence
ttaacggagatttaggagcaggtaa

SEQ ID NO: 180745 - DNA, 25 bp, Probe sequence
ataccgattaccattcaagatttag

SEQ ID NO: 180746 - DNA, 25 bp, Probe sequence
atcaatccatcgatgctatcaacaa

SEQ ID NO: 180747 - DNA, 25 bp, Probe sequence
atgacatttatatatgcacttgcta

SEQ ID NO: 180748 - DNA, 25 bp, Probe sequence
aggtatcgtctttatcttattccat

SEQ ID NO: 180749 - DNA, 25 bp, Probe sequence
agcagcattgcaacgattatcacaa

SEQ ID NO: 180750 - DNA, 25 bp, Probe sequence
accactgcatcaaaatcattcgtca

SEQ ID NO: 180751 - DNA, 25 bp, Probe sequence
accactcagcttaatattttactta

SEQ ID NO: 180752 - DNA, 25 bp, Probe sequence
acatcttgctcgtaacaaccattgt

SEQ ID NO: 180753 - DNA, 25 bp, Probe sequence
aaatcaaatttgtgtcgcttactaa

SEQ ID NO: 180754 - DNA, 25 bp, Probe sequence
aaacaatctgactatgtaactatta

SEQ ID NO: 180755 - DNA, 25 bp, Probe sequence
aatggttacaatacatcttgctcgt

SEQ ID NO: 180756 - DNA, 25 bp, Probe sequence
cagcaaattcctaacattatttatg

SEQ ID NO: 180757 - DNA, 25 bp, Probe sequence
cattatttatgaacaccttgaggat

SEQ ID NO: 180758 - DNA, 25 bp, Probe sequence
ctatttcaattagcttaatctttgc

SEQ ID NO: 180759 - DNA, 25 bp, Probe sequence
ccattgtcatcgcactcgtacttat

SEQ ID NO: 180760 - DNA, 25 bp, Probe sequence
gcacttgctatgggtatcgtatact

SEQ ID NO: 180761 - DNA, 25 bp, Probe sequence
gcaaattcctaaaggtttctctcaa

SEQ ID NO: 180762 - DNA, 25 bp, Probe sequence
gcaacgattatcacaatatcattta

SEQ ID NO: 180763 - DNA, 25 bp, Probe sequence
gacaacttcaaaataccgattacca

SEQ ID NO: 180764 - DNA, 25 bp, Probe sequence
gagatgactttataggtggtattgc

SEQ ID NO: 180765 - DNA, 25 bp, Probe sequence
gatgctatcaacaagtcctatcata

SEQ ID NO: 180766 - DNA, 25 bp, Probe sequence
gatttagaccaaaccactgcatcaa

SEQ ID NO: 180767 - DNA, 25 bp, Probe sequence
gtttaaaccaacaagcagcattgca

SEQ ID NO: 180768 - DNA, 25 bp, Probe sequence
gtaacaaccattgtcatcgcactcg

SEQ ID NO: 180769 - DNA, 25 bp, Probe sequence
gtcatcgcactcgtacttattggta

SEQ ID NO: 180770 - DNA, 25 bp, Probe sequence
gtctttatcttattccatattcaaa

SEQ ID NO: 180771 - DNA, 25 bp, Probe sequence
gtgattttatttgttagcgctgttc

SEQ ID NO: 180772 - DNA, 25 bp, Probe sequence
gtgtcgcttactaaacaagcacaac

SEQ ID NO: 180773 - DNA, 25 bp, Probe sequence
tggcagttagtctatatttgtctca

SEQ ID NO: 180774 - DNA, 25 bp, Probe sequence
tgttattgttggtactattggcagt

SEQ ID NO: 180775 - DNA, 25 bp, Probe sequence
tacttcattatcgtttaaaccaaca

SEQ ID NO: 180776 - DNA, 25 bp, Probe sequence
taccgtgtagcacatgacaacttca

SEQ ID NO: 180777 - DNA, 25 bp, Probe sequence
tatatttgtctcaaccactcagctt

SEQ ID NO: 180778 - DNA, 25 bp, Probe sequence
ttgtctcaaccactcagcttaatat

SEQ ID NO: 180779 - DNA, 25 bp, Probe sequence
atggcttggcgaagtgaaaacgttt

SEQ ID NO: 180780 - DNA, 25 bp, Probe sequence
agatggcttggcgaagtgaaaacgt

SEQ ID NO: 180781 - DNA, 25 bp, Probe sequence
agaaagatggcttggcgaagtgaaa

SEQ ID NO: 180782 - DNA, 25 bp, Probe sequence
acgtttgaatctgacgaaacgagaa

SEQ ID NO: 180783 - DNA, 25 bp, Probe sequence
acaaagaaagatggcttggcgaagt

SEQ ID NO: 180784 - DNA, 25 bp, Probe sequence
cttggcgaagtgaaaacgtttgaat

SEQ ID NO: 180785 - DNA, 25 bp, Probe sequence
acacaaagaaagatggcttggcgaa

SEQ ID NO: 180786 - DNA, 25 bp, Probe sequence
aaacgtttgaatctgacgaaacgag

SEQ ID NO: 180787 - DNA, 25 bp, Probe sequence
aaagatggcttggcgaagtgaaaac

SEQ ID NO: 180788 - DNA, 25 bp, Probe sequence
aaagaaagatggcttggcgaagtga

SEQ ID NO: 180789 - DNA, 25 bp, Probe sequence
aaacacaaagaaagatggcttggcg

SEQ ID NO: 180790 - DNA, 25 bp, Probe sequence
aacacaaagaaagatggcttggcga

SEQ ID NO: 180791 - DNA, 25 bp, Probe sequence
aacgtttgaatctgacgaaacgaga

SEQ ID NO: 180792 - DNA, 25 bp, Probe sequence
aagaaagatggcttggcgaagtgaa

SEQ ID NO: 180793 - DNA, 25 bp, Probe sequence
aagatggcttggcgaagtgaaaacg

SEQ ID NO: 180794 - DNA, 25 bp, Probe sequence
aatctgacgaaacgagaaatgtaaa

SEQ ID NO: 180795 - DNA, 25 bp, Probe sequence
caaagaaagatggcttggcgaagtg

SEQ ID NO: 180796 - DNA, 25 bp, Probe sequence
caaacacaaagaaagatggcttggc

SEQ ID NO: 180797 - DNA, 25 bp, Probe sequence
cacaaagaaagatggcttggcgaag

SEQ ID NO: 180798 - DNA, 25 bp, Probe sequence
ctgacgaaacgagaaatgtaaagta

SEQ ID NO: 180799 - DNA, 25 bp, Probe sequence
gcttggcgaagtgaaaacgtttgaa

SEQ ID NO: 180800 - DNA, 25 bp, Probe sequence
gcaaacacaaagaaagatggcttgg

SEQ ID NO: 180801 - DNA, 25 bp, Probe sequence
gaatctgacgaaacgagaaatgtaa

SEQ ID NO: 180802 - DNA, 25 bp, Probe sequence
gaaaacgtttgaatctgacgaaacg

SEQ ID NO: 180803 - DNA, 25 bp, Probe sequence
gaaagatggcttggcgaagtgaaaa

SEQ ID NO: 180804 - DNA, 25 bp, Probe sequence
gacgaaacgagaaatgtaaagtata

SEQ ID NO: 180805 - DNA, 25 bp, Probe sequence
gatggcttggcgaagtgaaaacgtt

SEQ ID NO: 180806 - DNA, 25 bp, Probe sequence
gtttgaatctgacgaaacgagaaat

SEQ ID NO: 180807 - DNA, 25 bp, Probe sequence
ggcttggcgaagtgaaaacgtttga

SEQ ID NO: 180808 - DNA, 25 bp, Probe sequence
tggcttggcgaagtgaaaacgtttg

SEQ ID NO: 180809 - DNA, 25 bp, Probe sequence
tgaaaacgtttgaatctgacgaaac

SEQ ID NO: 180810 - DNA, 25 bp, Probe sequence
tgaatctgacgaaacgagaaatgta

SEQ ID NO: 180811 - DNA, 25 bp, Probe sequence
tttgaatctgacgaaacgagaaatg

SEQ ID NO: 180812 - DNA, 25 bp, Probe sequence
ttgaatctgacgaaacgagaaatgt

SEQ ID NO: 180813 - DNA, 25 bp, Probe sequence
attgctggtaaaggttatcaacata

SEQ ID NO: 180814 - DNA, 25 bp, Probe sequence
attatcacttgcatattgctggtaa

SEQ ID NO: 180815 - DNA, 25 bp, Probe sequence
gttacgtacaacaggcggacgttat

SEQ ID NO: 180816 - DNA, 25 bp, Probe sequence
atcacttgcatattgctggtaaagg

SEQ ID NO: 180817 - DNA, 25 bp, Probe sequence
atcgtatgcgttgcggacattgcaa

SEQ ID NO: 180818 - DNA, 25 bp, Probe sequence
acgaatcgtatgcgttgcggacatt

SEQ ID NO: 180819 - DNA, 25 bp, Probe sequence
acaggttggagcgcctagattttgt

SEQ ID NO: 180820 - DNA, 25 bp, Probe sequence
aaatgtcatgcaaaatatatacgta

SEQ ID NO: 180821 - DNA, 25 bp, Probe sequence
aagattttaaacgattgagccaaca

SEQ ID NO: 180822 - DNA, 25 bp, Probe sequence
aatccaaaacaatatgagcattatg

SEQ ID NO: 180823 - DNA, 25 bp, Probe sequence
catgcaaaatatatacgtatccgta

SEQ ID NO: 180824 - DNA, 25 bp, Probe sequence
cattatggagaagatgctgttgtaa

SEQ ID NO: 180825 - DNA, 25 bp, Probe sequence
cgtacaacaggcggacgttatcttt

SEQ ID NO: 180826 - DNA, 25 bp, Probe sequence
gccaacaggttggagcgcctagatt

SEQ ID NO: 180827 - DNA, 25 bp, Probe sequence
gcgcctagattttgtaacagcattg

SEQ ID NO: 180828 - DNA, 25 bp, Probe sequence
gcgttgcggacattgcaatggaaaa

SEQ ID NO: 180829 - DNA, 25 bp, Probe sequence
gcattgaaagctatcaacaacgggc

SEQ ID NO: 180830 - DNA, 25 bp, Probe sequence
gaatcgtatgcgttgcggacattgc

SEQ ID NO: 180831 - DNA, 25 bp, Probe sequence
gagcgcctagattttgtaacagcat

SEQ ID NO: 180832 - DNA, 25 bp, Probe sequence
gatgctgttgtaaaaattatactgc

SEQ ID NO: 180833 - DNA, 25 bp, Probe sequence
gatacgaatcgtatgcgttgcggac

SEQ ID NO: 180834 - DNA, 25 bp, Probe sequence
gattgagccaacaggttggagcgcc

SEQ ID NO: 180835 - DNA, 25 bp, Probe sequence
gtatccgtaaagttgatacgaatcg

SEQ ID NO: 180836 - DNA, 25 bp, Probe sequence
gtatgcgttgcggacattgcaatgg

SEQ ID NO: 180837 - DNA, 25 bp, Probe sequence
gtaacagcattgaaagctatcaaca

SEQ ID NO: 180838 - DNA, 25 bp, Probe sequence
gtcattatcacttgcatattgctgg

SEQ ID NO: 180839 - DNA, 25 bp, Probe sequence
ggttggagcgcctagattttgtaac

SEQ ID NO: 180840 - DNA, 25 bp, Probe sequence
ggagcgcctagattttgtaacagca

SEQ ID NO: 180841 - DNA, 25 bp, Probe sequence
tgtcattatcacttgcatattgctg

SEQ ID NO: 180842 - DNA, 25 bp, Probe sequence
tgagccaacaggttggagcgcctag

SEQ ID NO: 180843 - DNA, 25 bp, Probe sequence
tgcatattgctggtaaaggttatca

SEQ ID NO: 180844 - DNA, 25 bp, Probe sequence
tacaacaggcggacgttatctttta

SEQ ID NO: 180845 - DNA, 25 bp, Probe sequence
ttaaacgattgagccaacaggttgg

SEQ ID NO: 180846 - DNA, 25 bp, Probe sequence
ttggagcgcctagattttgtaacag

SEQ ID NO: 180847 - DNA, 25 bp, Probe sequence
atattgtcagtgttggtgatatcgt

SEQ ID NO: 180848 - DNA, 25 bp, Probe sequence
atatgtgtctggtctaagttcgcaa

SEQ ID NO: 180849 - DNA, 25 bp, Probe sequence
atgtcaatacagcatcatcatcatt

SEQ ID NO: 180850 - DNA, 25 bp, Probe sequence
aggtgtgatttatccgcatccacca

SEQ ID NO: 180851 - DNA, 25 bp, Probe sequence
agtgagccaattaaacgcattgcta

SEQ ID NO: 180852 - DNA, 25 bp, Probe sequence
agagcaaactggtggactagatgaa

SEQ ID NO: 180853 - DNA, 25 bp, Probe sequence
acaccaatccttaaatccgatgtgc

SEQ ID NO: 180854 - DNA, 25 bp, Probe sequence
aaatcgatcctaaatctattggtgt

SEQ ID NO: 180855 - DNA, 25 bp, Probe sequence
aaatgcattaactttcgttgttgaa

SEQ ID NO: 180856 - DNA, 25 bp, Probe sequence
aacgcattgctaatcatagagtttt

SEQ ID NO: 180857 - DNA, 25 bp, Probe sequence
aatccttgaaagcacctaatcgaga

SEQ ID NO: 180858 - DNA, 25 bp, Probe sequence
aatccgatgtgctatcaattgaaga

SEQ ID NO: 180859 - DNA, 25 bp, Probe sequence
aatacagtaccatttattgcgaggt

SEQ ID NO: 180860 - DNA, 25 bp, Probe sequence
catcaaggtgtgttaactacatcta

SEQ ID NO: 180861 - DNA, 25 bp, Probe sequence
gctagagatgaatttcctgattttc

SEQ ID NO: 180862 - DNA, 25 bp, Probe sequence
gcttgaaacgcttaattgtcccttc

SEQ ID NO: 180863 - DNA, 25 bp, Probe sequence
gcatcagttgccagtacaattcatc

SEQ ID NO: 180864 - DNA, 25 bp, Probe sequence
gcaagattaagcgtttgggtgctaa

SEQ ID NO: 180865 - DNA, 25 bp, Probe sequence
gaacagcaaggattacttactgagg

SEQ ID NO: 180866 - DNA, 25 bp, Probe sequence
gaaacagcagttaaccaagtaggtg

SEQ ID NO: 180867 - DNA, 25 bp, Probe sequence
gaaatctattactgcaacctccaat

SEQ ID NO: 180868 - DNA, 25 bp, Probe sequence
gagccattggataatacatcgattc

SEQ ID NO: 180869 - DNA, 25 bp, Probe sequence
gatagagcgtgaaatccatgctgat

SEQ ID NO: 180870 - DNA, 25 bp, Probe sequence
gtaaattagcagtcattaacccatt

SEQ ID NO: 180871 - DNA, 25 bp, Probe sequence
gtctggtctaagttcgcaaattgct

SEQ ID NO: 180872 - DNA, 25 bp, Probe sequence
ggatatggatgaactggcgattgaa

SEQ ID NO: 180873 - DNA, 25 bp, Probe sequence
tggacttgtccatgtttcgaaactt

SEQ ID NO: 180874 - DNA, 25 bp, Probe sequence
tcagtatactcagcatcagaaattg

SEQ ID NO: 180875 - DNA, 25 bp, Probe sequence
taattgtcccttcgatagagcgtga

SEQ ID NO: 180876 - DNA, 25 bp, Probe sequence
tacaagtcggtgtacctacattaga

SEQ ID NO: 180877 - DNA, 25 bp, Probe sequence
tacatcgattcatcccgaaagctat

SEQ ID NO: 180878 - DNA, 25 bp, Probe sequence
tacaacgtgttgaagacctatatag

SEQ ID NO: 180879 - DNA, 25 bp, Probe sequence
tacagcatcatcatcattattacaa

SEQ ID NO: 180880 - DNA, 25 bp, Probe sequence
ttagcgatatggatgaaggcacgta

SEQ ID NO: 180881 - DNA, 25 bp, Probe sequence
atcacatcacgaagatttagttcaa

SEQ ID NO: 180882 - DNA, 25 bp, Probe sequence
atctacgagataaaacttggagtgt

SEQ ID NO: 180883 - DNA, 25 bp, Probe sequence
agatggttcaactgttacgctatta

SEQ ID NO: 180884 - DNA, 25 bp, Probe sequence
agatgaccattatgacttaactgaa

SEQ ID NO: 180885 - DNA, 25 bp, Probe sequence
acctatattatctgatcgcgaacga

SEQ ID NO: 180886 - DNA, 25 bp, Probe sequence
accgctgaattagagcgttcacctt

SEQ ID NO: 180887 - DNA, 25 bp, Probe sequence
aaaactaattgagtcattggcatat

SEQ ID NO: 180888 - DNA, 25 bp, Probe sequence
aagagacaggtgagcgtatcggttt

SEQ ID NO: 180889 - DNA, 25 bp, Probe sequence
aataggtgccataaatagattcgat

SEQ ID NO: 180890 - DNA, 25 bp, Probe sequence
cattccattgaagctgataaagatg

SEQ ID NO: 180891 - DNA, 25 bp, Probe sequence
gcctttttagtacctactgtaatcg

SEQ ID NO: 180892 - DNA, 25 bp, Probe sequence
gcgttcaccttctatcagtgaaata

SEQ ID NO: 180893 - DNA, 25 bp, Probe sequence
gaattagagcgttcaccttctatca

SEQ ID NO: 180894 - DNA, 25 bp, Probe sequence
gaagcaatggaaatgggacaaagtt

SEQ ID NO: 180895 - DNA, 25 bp, Probe sequence
gaaatcatacaatgtacgtttattg

SEQ ID NO: 180896 - DNA, 25 bp, Probe sequence
gacaggtgagcgtatcggtttaagt

SEQ ID NO: 180897 - DNA, 25 bp, Probe sequence
gagcgtatcggtttaagtcaaatgc

SEQ ID NO: 180898 - DNA, 25 bp, Probe sequence
gagtcattggcatataaatattcta

SEQ ID NO: 180899 - DNA, 25 bp, Probe sequence
gatcgcgaacgagaaatcatacaat

SEQ ID NO: 180900 - DNA, 25 bp, Probe sequence
gatatgtcctttgaacggaagtttg

SEQ ID NO: 180901 - DNA, 25 bp, Probe sequence
gatttagttcaagttggtatggttg

SEQ ID NO: 180902 - DNA, 25 bp, Probe sequence
gtatcggtttaagtcaaatgcatgt

SEQ ID NO: 180903 - DNA, 25 bp, Probe sequence
gtacctactgtaatcggtgaaatca

SEQ ID NO: 180904 - DNA, 25 bp, Probe sequence
gtgagcgatgaactaaccgctgaat

SEQ ID NO: 180905 - DNA, 25 bp, Probe sequence
gggacaaagttataatgcgttaagt

SEQ ID NO: 180906 - DNA, 25 bp, Probe sequence
ggttcaactgttacgctattagata

SEQ ID NO: 180907 - DNA, 25 bp, Probe sequence
tggtatggttggtttaataggtgcc

SEQ ID NO: 180908 - DNA, 25 bp, Probe sequence
tcctttgaacggaagtttgaagcct

SEQ ID NO: 180909 - DNA, 25 bp, Probe sequence
tctaaaggacaatcacatcacgaag

SEQ ID NO: 180910 - DNA, 25 bp, Probe sequence
tagagcgttcaccttctatcagtga

SEQ ID NO: 180911 - DNA, 25 bp, Probe sequence
tagattcgatatgtcctttgaacgg

SEQ ID NO: 180912 - DNA, 25 bp, Probe sequence
tttgaagcctttttagtacctactg

SEQ ID NO: 180913 - DNA, 25 bp, Probe sequence
tattacctatattatctgatcgcga

SEQ ID NO: 180914 - DNA, 25 bp, Probe sequence
ttcacctgagcaaattaaccaatgg

SEQ ID NO: 180915 - DNA, 25 bp, Probe sequence
attttatcgaaatgcgcgtgccagc

SEQ ID NO: 180916 - DNA, 25 bp, Probe sequence
agtgaagctgtgacaaatgcagtta

SEQ ID NO: 180917 - DNA, 25 bp, Probe sequence
agagctggtgctacatatgatgata

SEQ ID NO: 180918 - DNA, 25 bp, Probe sequence
agagcaggtgcgaaataatggcgaa

SEQ ID NO: 180919 - DNA, 25 bp, Probe sequence
acggaggtcgaataacatgcaatct

SEQ ID NO: 180920 - DNA, 25 bp, Probe sequence
actttctggcgttttttcgagagct

SEQ ID NO: 180921 - DNA, 25 bp, Probe sequence
acactttctggcgttttttcgagag

SEQ ID NO: 180922 - DNA, 25 bp, Probe sequence
aaaggtgacagttttgattatgaaa

SEQ ID NO: 180923 - DNA, 25 bp, Probe sequence
aattgttatttctgataaaggtgac

SEQ ID NO: 180924 - DNA, 25 bp, Probe sequence
ctggcgttttttcgagagctggtgc

SEQ ID NO: 180925 - DNA, 25 bp, Probe sequence
cgcgtgccagcatcggcagagtatg

SEQ ID NO: 180926 - DNA, 25 bp, Probe sequence
gccagcatcggcagagtatgtaagt

SEQ ID NO: 180927 - DNA, 25 bp, Probe sequence
gctggtgctacatatgatgatattg

SEQ ID NO: 180928 - DNA, 25 bp, Probe sequence
gctgtgacaaatgcagttaaacatg

SEQ ID NO: 180929 - DNA, 25 bp, Probe sequence
gaatctggtgtgacaatcagtatga

SEQ ID NO: 180930 - DNA, 25 bp, Probe sequence
gaagattttatcgaaatgcgcgtgc

SEQ ID NO: 180931 - DNA, 25 bp, Probe sequence
gaagatgccaagattgcagttagtg

SEQ ID NO: 180932 - DNA, 25 bp, Probe sequence
gatgatattgaagatgccaagattg

SEQ ID NO: 180933 - DNA, 25 bp, Probe sequence
gttttttcgagagctggtgctacat

SEQ ID NO: 180934 - DNA, 25 bp, Probe sequence
ggtgtgacaatcagtatgactaagt

SEQ ID NO: 180935 - DNA, 25 bp, Probe sequence
ggtgcgaaataatggcgaaagagtc

SEQ ID NO: 180936 - DNA, 25 bp, Probe sequence
ggtcgaataacatgcaatctaaaga

SEQ ID NO: 180937 - DNA, 25 bp, Probe sequence
ggcagagtatgtaagtttaattcgt

SEQ ID NO: 180938 - DNA, 25 bp, Probe sequence
ggcgttttttcgagagctggtgcta

SEQ ID NO: 180939 - DNA, 25 bp, Probe sequence
ggcattattaacatatattttgaaa

SEQ ID NO: 180940 - DNA, 25 bp, Probe sequence
tgccaagattgcagttagtgaagct

SEQ ID NO: 180941 - DNA, 25 bp, Probe sequence
taattcgtttaacactttctggcgt

SEQ ID NO: 180942 - DNA, 25 bp, Probe sequence
taatcgaatctttaatggatgaagt

SEQ ID NO: 180943 - DNA, 25 bp, Probe sequence
taaatcaaaaataggtccttacgat

SEQ ID NO: 180944 - DNA, 25 bp, Probe sequence
taacactttctggcgttttttcgag

SEQ ID NO: 180945 - DNA, 25 bp, Probe sequence
tatcgaaatgcgcgtgccagcatcg

SEQ ID NO: 180946 - DNA, 25 bp, Probe sequence
tataaagaatctggtgtgacaatca

SEQ ID NO: 180947 - DNA, 25 bp, Probe sequence
tttcgagagctggtgctacatatga

SEQ ID NO: 180948 - DNA, 25 bp, Probe sequence
ttctggcgttttttcgagagctggt

SEQ ID NO: 180949 - DNA, 25 bp, Probe sequence
attactggtcttaaggatttaatgc

SEQ ID NO: 180950 - DNA, 25 bp, Probe sequence
atatggattcgacaggtttaggttt

SEQ ID NO: 180951 - DNA, 25 bp, Probe sequence
aaagtcggtggagaattagatgttt

SEQ ID NO: 180952 - DNA, 25 bp, Probe sequence
aggtgtgtcagatcgtatcggtaga

SEQ ID NO: 180953 - DNA, 25 bp, Probe sequence
actgtgcctgaattagaagaggttt

SEQ ID NO: 180954 - DNA, 25 bp, Probe sequence
actcgtgatatttatgttaatttag

SEQ ID NO: 180955 - DNA, 25 bp, Probe sequence
actatttgaaattactggtcttaag

SEQ ID NO: 180956 - DNA, 25 bp, Probe sequence
aacacctatgagacaagatggaact

SEQ ID NO: 180957 - DNA, 25 bp, Probe sequence
aagatggaactcgtgatatttatgt

SEQ ID NO: 180958 - DNA, 25 bp, Probe sequence
caaccactcaagataaattttacga

SEQ ID NO: 180959 - DNA, 25 bp, Probe sequence
cagatcgtatcggtagactatttga

SEQ ID NO: 180960 - DNA, 25 bp, Probe sequence
cattttaggtgtgtcagatcgtatc

SEQ ID NO: 180961 - DNA, 25 bp, Probe sequence
ctatacattttaggtgtgtcagatc

SEQ ID NO: 180962 - DNA, 25 bp, Probe sequence
tacgaagttaaagtcggtggagaat

SEQ ID NO: 180963 - DNA, 25 bp, Probe sequence
gaattagatgtttatactgtgcctg

SEQ ID NO: 180964 - DNA, 25 bp, Probe sequence
gaagaggttttaacacctatgagac

SEQ ID NO: 180965 - DNA, 25 bp, Probe sequence
gacaagatggaactcgtgatattta

SEQ ID NO: 180966 - DNA, 25 bp, Probe sequence
gagttatatggattcgacaggttta

SEQ ID NO: 180967 - DNA, 25 bp, Probe sequence
gatgtttatactgtgcctgaattag

SEQ ID NO: 180968 - DNA, 25 bp, Probe sequence
gatcgtatcggtagactatttgaaa

SEQ ID NO: 180969 - DNA, 25 bp, Probe sequence
gtttatactgtgcctgaattagaag

SEQ ID NO: 180970 - DNA, 25 bp, Probe sequence
gtgagttatatggattcgacaggtt

SEQ ID NO: 180971 - DNA, 25 bp, Probe sequence
gtgtgtcagatcgtatcggtagact

SEQ ID NO: 180972 - DNA, 25 bp, Probe sequence
gtgtcagatcgtatcggtagactat

SEQ ID NO: 180973 - DNA, 25 bp, Probe sequence
ggtagactatttgaaattactggtc

SEQ ID NO: 180974 - DNA, 25 bp, Probe sequence
ggtcttaaggatttaatgcatgtta

SEQ ID NO: 180975 - DNA, 25 bp, Probe sequence
ggttttaacacctatgagacaagat

SEQ ID NO: 180976 - DNA, 25 bp, Probe sequence
ggaactcgtgatatttatgttaatt

SEQ ID NO: 180977 - DNA, 25 bp, Probe sequence
tcgacaggtttaggtttattcgtag

SEQ ID NO: 180978 - DNA, 25 bp, Probe sequence
tggattcgacaggtttaggtttatt

SEQ ID NO: 180979 - DNA, 25 bp, Probe sequence
tcttaatatagaaacaaccactcaa

SEQ ID NO: 180980 - DNA, 25 bp, Probe sequence
tttaggtgtgtcagatcgtatcggt

SEQ ID NO: 180981 - DNA, 25 bp, Probe sequence
ttattcgtaggtacattaaaagcat

SEQ ID NO: 180982 - DNA, 25 bp, Probe sequence
ttagatgtttatactgtgcctgaat

SEQ ID NO: 180983 - DNA, 25 bp, Probe sequence
attaatcaaaatatgttcgtcacaa

SEQ ID NO: 180984 - DNA, 25 bp, Probe sequence
agatgtgttcaagacattagatgtc

SEQ ID NO: 180985 - DNA, 25 bp, Probe sequence
acataaacatatgcacccacaagat

SEQ ID NO: 180986 - DNA, 25 bp, Probe sequence
acaatgcttaaaacagatattccac

SEQ ID NO: 180987 - DNA, 25 bp, Probe sequence
aaacttaacgcgtgaagatgtgttc

SEQ ID NO: 180988 - DNA, 25 bp, Probe sequence
aacggatggtgtgactgaagctaga

SEQ ID NO: 180989 - DNA, 25 bp, Probe sequence
aagagatagacttagcttctagctt

SEQ ID NO: 180990 - DNA, 25 bp, Probe sequence
aaggtataccagctgctttagcaat

SEQ ID NO: 180991 - DNA, 25 bp, Probe sequence
aattgaccataacgatggcacaatg

SEQ ID NO: 180992 - DNA, 25 bp, Probe sequence
gctgctttagcaatgagtatgataa

SEQ ID NO: 180993 - DNA, 25 bp, Probe sequence
gaatcagttcacaaacacgatatca

SEQ ID NO: 180994 - DNA, 25 bp, Probe sequence
gaagacattgtcgatattcacaaaa

SEQ ID NO: 180995 - DNA, 25 bp, Probe sequence
gaaatacactgacgaagtgattcgt

SEQ ID NO: 180996 - DNA, 25 bp, Probe sequence
gagcctggatatatttatcgcgctg

SEQ ID NO: 180997 - DNA, 25 bp, Probe sequence
gagctttgctgttgcagatgtcatt

SEQ ID NO: 180998 - DNA, 25 bp, Probe sequence
gaggtagagtgttaggaatcagttc

SEQ ID NO: 180999 - DNA, 25 bp, Probe sequence
gatgaaagtttaacgtgccaagata

SEQ ID NO: 181000 - DNA, 25 bp, Probe sequence
gatatatttatcgcgctgaaaaaga

SEQ ID NO: 181001 - DNA, 25 bp, Probe sequence
gatattccacaatttgatagtattc

SEQ ID NO: 181002 - DNA, 25 bp, Probe sequence
gttcagctggtcatgagcctggata

SEQ ID NO: 181003 - DNA, 25 bp, Probe sequence
gtagttcagctggtcatgagcctgg

SEQ ID NO: 181004 - DNA, 25 bp, Probe sequence
gtgaaggtacctttatagataaaca

SEQ ID NO: 181005 - DNA, 25 bp, Probe sequence
gtgattcgtaaggacgtcttgcctg

SEQ ID NO: 181006 - DNA, 25 bp, Probe sequence
ggacgtcttgcctgaagacattgtc

SEQ ID NO: 181007 - DNA, 25 bp, Probe sequence
ggacactcacaattaccgagtgatg

SEQ ID NO: 181008 - DNA, 25 bp, Probe sequence
ggcacaatgagctttgctgttgcag

SEQ ID NO: 181009 - DNA, 25 bp, Probe sequence
ggcatggattcttatggacactcac

SEQ ID NO: 181010 - DNA, 25 bp, Probe sequence
tcgtcacaatgttttatggtttata

SEQ ID NO: 181011 - DNA, 25 bp, Probe sequence
tcttatggacactcacaattaccga

SEQ ID NO: 181012 - DNA, 25 bp, Probe sequence
taaacttcaagttcacgataaagag

SEQ ID NO: 181013 - DNA, 25 bp, Probe sequence
tagcttctagcttacaacaaacaat

SEQ ID NO: 181014 - DNA, 25 bp, Probe sequence
tatgcacccacaagatattgttcaa

SEQ ID NO: 181015 - DNA, 25 bp, Probe sequence
tttggttatagttatcgagattatc

SEQ ID NO: 181016 - DNA, 25 bp, Probe sequence
ttcaaattggcgttatttcagtggc

SEQ ID NO: 181017 - DNA, 25 bp, Probe sequence
atatggatcaaacagcttttacgga

SEQ ID NO: 181018 - DNA, 25 bp, Probe sequence
atacagctatcttaatacattgtta

SEQ ID NO: 181019 - DNA, 25 bp, Probe sequence
atcactacaacaacgtatcgaaatt

SEQ ID NO: 181020 - DNA, 25 bp, Probe sequence
agtgttcagaaaaaaggtggggcat

SEQ ID NO: 181021 - DNA, 25 bp, Probe sequence
agattgggtcaaacgaggatataaa

SEQ ID NO: 181022 - DNA, 25 bp, Probe sequence
aaatcgcatacatgatggaatggta

SEQ ID NO: 181023 - DNA, 25 bp, Probe sequence
aaagtgaaactctgacacaagcaat

SEQ ID NO: 181024 - DNA, 25 bp, Probe sequence
aaagatgattttatatacagctatc

SEQ ID NO: 181025 - DNA, 25 bp, Probe sequence
aacgataaatcgcatacatgatgga

SEQ ID NO: 181026 - DNA, 25 bp, Probe sequence
aagagagtcctaaagaagtagcaga

SEQ ID NO: 181027 - DNA, 25 bp, Probe sequence
aaggtcagctcattttgatgttatt

SEQ ID NO: 181028 - DNA, 25 bp, Probe sequence
ctgacacaagcaatattttttaaaa

SEQ ID NO: 181029 - DNA, 25 bp, Probe sequence
gcgaaggtcagctcattttgatgtt

SEQ ID NO: 181030 - DNA, 25 bp, Probe sequence
gcttttacggatagtcgtgtaacga

SEQ ID NO: 181031 - DNA, 25 bp, Probe sequence
gaaggcatataatgatataactgtt

SEQ ID NO: 181032 - DNA, 25 bp, Probe sequence
gaaactctgacacaagcaatatttt

SEQ ID NO: 181033 - DNA, 25 bp, Probe sequence
gagtcaaataagtcggacaaccttt

SEQ ID NO: 181034 - DNA, 25 bp, Probe sequence
gagtgcttataaattacatcaagtc

SEQ ID NO: 181035 - DNA, 25 bp, Probe sequence
gatgatttatttttggctaagcgaa

SEQ ID NO: 181036 - DNA, 25 bp, Probe sequence
gttattaggtgatgagagtgcttat

SEQ ID NO: 181037 - DNA, 25 bp, Probe sequence
gtaaatctattaaaaacgaaggcat

SEQ ID NO: 181038 - DNA, 25 bp, Probe sequence
gtaatgcaatcattggtgtgttaca

SEQ ID NO: 181039 - DNA, 25 bp, Probe sequence
gtcataaaaaaatcactacaacaac

SEQ ID NO: 181040 - DNA, 25 bp, Probe sequence
gtcagctcattttgatgttattagg

SEQ ID NO: 181041 - DNA, 25 bp, Probe sequence
gtcggacaaccttttatacacatta

SEQ ID NO: 181042 - DNA, 25 bp, Probe sequence
ggggcatatggatcaaacagctttt

SEQ ID NO: 181043 - DNA, 25 bp, Probe sequence
ggtgtgttacaagattgggtcaaac

SEQ ID NO: 181044 - DNA, 25 bp, Probe sequence
ggtggggcatatggatcaaacagct

SEQ ID NO: 181045 - DNA, 25 bp, Probe sequence
ggatagtcgtgtaacgaaaacgata

SEQ ID NO: 181046 - DNA, 25 bp, Probe sequence
ggacaaccttttatacacattacaa

SEQ ID NO: 181047 - DNA, 25 bp, Probe sequence
ggctaagcgaaggtcagctcatttt

SEQ ID NO: 181048 - DNA, 25 bp, Probe sequence
tcgaaattaattttgtaccagtatt

SEQ ID NO: 181049 - DNA, 25 bp, Probe sequence
tcaaacagcttttacggatagtcgt

SEQ ID NO: 181050 - DNA, 25 bp, Probe sequence
tacttatttttatgtgtaatgcaat

SEQ ID NO: 181051 - DNA, 25 bp, Probe sequence
acaagggggagtcagacctgtagtc

SEQ ID NO: 181052 - DNA, 25 bp, Probe sequence
atagtcctacagttattgttgcggc

SEQ ID NO: 181053 - DNA, 25 bp, Probe sequence
atcaccagtacagggatctgaacaa

SEQ ID NO: 181054 - DNA, 25 bp, Probe sequence
atgattagacgaggagatgtttatt

SEQ ID NO: 181055 - DNA, 25 bp, Probe sequence
atgtttatttagcagatttatcacc

SEQ ID NO: 181056 - DNA, 25 bp, Probe sequence
agtcctacagttattgttgcggcaa

SEQ ID NO: 181057 - DNA, 25 bp, Probe sequence
agacctgtagtcataattcaaaatg

SEQ ID NO: 181058 - DNA, 25 bp, Probe sequence
agcagatttatcaccagtacaggga

SEQ ID NO: 181059 - DNA, 25 bp, Probe sequence
accgacacatgtagagattgaaaag

SEQ ID NO: 181060 - DNA, 25 bp, Probe sequence
acagggatctgaacaagggggagtc

SEQ ID NO: 181061 - DNA, 25 bp, Probe sequence
aaataccgacacatgtagagattga

SEQ ID NO: 181062 - DNA, 25 bp, Probe sequence
aaagcgaaaataccgacacatgtag

SEQ ID NO: 181063 - DNA, 25 bp, Probe sequence
aagggggagtcagacctgtagtcat

SEQ ID NO: 181064 - DNA, 25 bp, Probe sequence
aatgattagtttagggctgaatgca

SEQ ID NO: 181065 - DNA, 25 bp, Probe sequence
gcgaaaataccgacacatgtagaga

SEQ ID NO: 181066 - DNA, 25 bp, Probe sequence
gaacaagggggagtcagacctgtag

SEQ ID NO: 181067 - DNA, 25 bp, Probe sequence
gaaagaagtagataatgcactaatg

SEQ ID NO: 181068 - DNA, 25 bp, Probe sequence
gacgaggagatgtttatttagcaga

SEQ ID NO: 181069 - DNA, 25 bp, Probe sequence
gagtcagacctgtagtcataattca

SEQ ID NO: 181070 - DNA, 25 bp, Probe sequence
gaggagatgtttatttagcagattt

SEQ ID NO: 181071 - DNA, 25 bp, Probe sequence
gatactggtaataaatatagtccta

SEQ ID NO: 181072 - DNA, 25 bp, Probe sequence
gattagtttagggctgaatgcagta

SEQ ID NO: 181073 - DNA, 25 bp, Probe sequence
gatttatcaccagtacagggatctg

SEQ ID NO: 181074 - DNA, 25 bp, Probe sequence
gggggagtcagacctgtagtcataa

SEQ ID NO: 181075 - DNA, 25 bp, Probe sequence
gtacacttgataaaaaacgattgaa

SEQ ID NO: 181076 - DNA, 25 bp, Probe sequence
gtcctacagttattgttgcggcaat

SEQ ID NO: 181077 - DNA, 25 bp, Probe sequence
gtcagacctgtagtcataattcaaa

SEQ ID NO: 181078 - DNA, 25 bp, Probe sequence
gggagtcagacctgtagtcataatt

SEQ ID NO: 181079 - DNA, 25 bp, Probe sequence
ggataaagactcagttatattatta

SEQ ID NO: 181080 - DNA, 25 bp, Probe sequence
tatttagcagatttatcaccagtac

SEQ ID NO: 181081 - DNA, 25 bp, Probe sequence
ttgttgcggcaataactggtaggat

SEQ ID NO: 181082 - DNA, 25 bp, Probe sequence
ttatcaccagtacagggatctgaac

SEQ ID NO: 181083 - DNA, 25 bp, Probe sequence
ttagcagatttatcaccagtacagg

SEQ ID NO: 181084 - DNA, 25 bp, Probe sequence
ttgcggcaataactggtaggattaa

SEQ ID NO: 181085 - DNA, 25 bp, Probe sequence
atctctccctagcgaacgaagcttt

SEQ ID NO: 181086 - DNA, 25 bp, Probe sequence
atttatcttctaattcaacgaatga

SEQ ID NO: 181087 - DNA, 25 bp, Probe sequence
atgttatcttttagtcaaaatagaa

SEQ ID NO: 181088 - DNA, 25 bp, Probe sequence
atggctgatttaaatctctccctag

SEQ ID NO: 181089 - DNA, 25 bp, Probe sequence
acgaagcttttccgatagagtgtga

SEQ ID NO: 181090 - DNA, 25 bp, Probe sequence
acatatttatcttctaattcaacga

SEQ ID NO: 181091 - DNA, 25 bp, Probe sequence
aaatctctccctagcgaacgaagct

SEQ ID NO: 181092 - DNA, 25 bp, Probe sequence
aaatggctgatttaaatctctccct

SEQ ID NO: 181093 - DNA, 25 bp, Probe sequence
aatctctccctagcgaacgaagctt

SEQ ID NO: 181094 - DNA, 25 bp, Probe sequence
cctagcgaacgaagcttttccgata

SEQ ID NO: 181095 - DNA, 25 bp, Probe sequence
gcgaacgaagcttttccgatagagt

SEQ ID NO: 181096 - DNA, 25 bp, Probe sequence
gcgattgcaacgaaacatatttatc

SEQ ID NO: 181097 - DNA, 25 bp, Probe sequence
gctgatttaaatctctccctagcga

SEQ ID NO: 181098 - DNA, 25 bp, Probe sequence
gcatgcgattgcaacgaaacatatt

SEQ ID NO: 181099 - DNA, 25 bp, Probe sequence
gcaacgaaacatatttatcttctaa

SEQ ID NO: 181100 - DNA, 25 bp, Probe sequence
gaaggatattcacaaatggctgatt

SEQ ID NO: 181101 - DNA, 25 bp, Probe sequence
gaagtcatagcttagaacaatcttt

SEQ ID NO: 181102 - DNA, 25 bp, Probe sequence
gaagcttttccgatagagtgtgaag

SEQ ID NO: 181103 - DNA, 25 bp, Probe sequence
gaagcatgcgattgcaacgaaacat

SEQ ID NO: 181104 - DNA, 25 bp, Probe sequence
gaacgaagcttttccgatagagtgt

SEQ ID NO: 181105 - DNA, 25 bp, Probe sequence
gaaacatatttatcttctaattcaa

SEQ ID NO: 181106 - DNA, 25 bp, Probe sequence
gagtgtgaagcatgcgattgcaacg

SEQ ID NO: 181107 - DNA, 25 bp, Probe sequence
gatagagtgtgaagcatgcgattgc

SEQ ID NO: 181108 - DNA, 25 bp, Probe sequence
gtcatagcttagaacaatctttaaa

SEQ ID NO: 181109 - DNA, 25 bp, Probe sequence
gtgtgaagcatgcgattgcaacgaa

SEQ ID NO: 181110 - DNA, 25 bp, Probe sequence
tggctgatttaaatctctccctagc

SEQ ID NO: 181111 - DNA, 25 bp, Probe sequence
tgatttaaatctctccctagcgaac

SEQ ID NO: 181112 - DNA, 25 bp, Probe sequence
tccgatagagtgtgaagcatgcgat

SEQ ID NO: 181113 - DNA, 25 bp, Probe sequence
tccctagcgaacgaagcttttccga

SEQ ID NO: 181114 - DNA, 25 bp, Probe sequence
tctccctagcgaacgaagcttttcc

SEQ ID NO: 181115 - DNA, 25 bp, Probe sequence
tctctccctagcgaacgaagctttt

SEQ ID NO: 181116 - DNA, 25 bp, Probe sequence
ttaaatctctccctagcgaacgaag

SEQ ID NO: 181117 - DNA, 25 bp, Probe sequence
tagcgaacgaagcttttccgataga

SEQ ID NO: 181118 - DNA, 25 bp, Probe sequence
tttaaatctctccctagcgaacgaa

SEQ ID NO: 181119 - DNA, 25 bp, Probe sequence
attggtcgcgtatgtatggatcaga

SEQ ID NO: 181120 - DNA, 25 bp, Probe sequence
attatccatcagagtatgtacagca

SEQ ID NO: 181121 - DNA, 25 bp, Probe sequence
atatacattgtcagaactcagcagg

SEQ ID NO: 181122 - DNA, 25 bp, Probe sequence
atgcaataagaccaggaatttccct

SEQ ID NO: 181123 - DNA, 25 bp, Probe sequence
atggtgcaacttatacagctactga

SEQ ID NO: 181124 - DNA, 25 bp, Probe sequence
agtacaccttaaaccaagtgtgcaa

SEQ ID NO: 181125 - DNA, 25 bp, Probe sequence
agtattcagtacattgcatccaaat

SEQ ID NO: 181126 - DNA, 25 bp, Probe sequence
gttccgtctaaacagtggttgaaag

SEQ ID NO: 181127 - DNA, 25 bp, Probe sequence
acgtttgccgcgaatctatcatgat

SEQ ID NO: 181128 - DNA, 25 bp, Probe sequence
aaatggtcatcaatgcgaagttatt

SEQ ID NO: 181129 - DNA, 25 bp, Probe sequence
aaagctggagattcggtgattttaa

SEQ ID NO: 181130 - DNA, 25 bp, Probe sequence
aacgctgttgcatcaaatttcaaag

SEQ ID NO: 181131 - DNA, 25 bp, Probe sequence
aatggattgccaattctgtaatgca

SEQ ID NO: 181132 - DNA, 25 bp, Probe sequence
gccaatgcctatggactaggtagtg

SEQ ID NO: 181133 - DNA, 25 bp, Probe sequence
gccacattttttgctgtagcaacgt

SEQ ID NO: 181134 - DNA, 25 bp, Probe sequence
gctgtcgttaaagccaatgcctatg

SEQ ID NO: 181135 - DNA, 25 bp, Probe sequence
gaatttccctttatggatattatcc

SEQ ID NO: 181136 - DNA, 25 bp, Probe sequence
gaaggcgtgtttacacactttgcct

SEQ ID NO: 181137 - DNA, 25 bp, Probe sequence
gaatgcatgggattactgctaaaat

SEQ ID NO: 181138 - DNA, 25 bp, Probe sequence
gaatgtagatttaaacgctgttgca

SEQ ID NO: 181139 - DNA, 25 bp, Probe sequence
gaagtgctttgtaacttgtcgagac

SEQ ID NO: 181140 - DNA, 25 bp, Probe sequence
gaagttattggtcgcgtatgtatgg

SEQ ID NO: 181141 - DNA, 25 bp, Probe sequence
gacgctacaagcgggtgagtctgta

SEQ ID NO: 181142 - DNA, 25 bp, Probe sequence
gagaaagtccacagtcggtagaggt

SEQ ID NO: 181143 - DNA, 25 bp, Probe sequence
gagcaacttgtatttgaaggcgtgt

SEQ ID NO: 181144 - DNA, 25 bp, Probe sequence
gatggtgatcaacgttttgtaacaa

SEQ ID NO: 181145 - DNA, 25 bp, Probe sequence
gtttacacactttgcctgtgctgac

SEQ ID NO: 181146 - DNA, 25 bp, Probe sequence
gtaacttgtcgagacgtttgccgcg

SEQ ID NO: 181147 - DNA, 25 bp, Probe sequence
gggtgagtctgtaagttatggtgca

SEQ ID NO: 181148 - DNA, 25 bp, Probe sequence
ggtagtgttaaagtagcacgtcatt

SEQ ID NO: 181149 - DNA, 25 bp, Probe sequence
tggatatgcagatggctatttacgc

SEQ ID NO: 181150 - DNA, 25 bp, Probe sequence
tgccttaacggttccgtctaaacag

SEQ ID NO: 181151 - DNA, 25 bp, Probe sequence
ttagtcttaggtgtgttaccagcta

SEQ ID NO: 181152 - DNA, 25 bp, Probe sequence
ttgcctgtgctgacgaaccaggaga

SEQ ID NO: 181153 - DNA, 25 bp, Probe sequence
atctggtttaacaatacctacgatt

SEQ ID NO: 181154 - DNA, 25 bp, Probe sequence
atgttatgactgatttgctgattac

SEQ ID NO: 181155 - DNA, 25 bp, Probe sequence
atggagtatcgttggtgtagtttgg

SEQ ID NO: 181156 - DNA, 25 bp, Probe sequence
agaaccgattcatttatacgatacg

SEQ ID NO: 181157 - DNA, 25 bp, Probe sequence
acttcaaggctattttgtttttgat

SEQ ID NO: 181158 - DNA, 25 bp, Probe sequence
aaaggtatgaccaaggcattttata

SEQ ID NO: 181159 - DNA, 25 bp, Probe sequence
aactacattttagaactgcacccta

SEQ ID NO: 181160 - DNA, 25 bp, Probe sequence
aaccgttcaggtgcatttaacttag

SEQ ID NO: 181161 - DNA, 25 bp, Probe sequence
aactgcaccctagtttctatcttag

SEQ ID NO: 181162 - DNA, 25 bp, Probe sequence
aacggtattcatctttgcactatct

SEQ ID NO: 181163 - DNA, 25 bp, Probe sequence
aaccgttcgcagttgtaacaaatca

SEQ ID NO: 181164 - DNA, 25 bp, Probe sequence
aatgggtggcatcttagcttttcaa

SEQ ID NO: 181165 - DNA, 25 bp, Probe sequence
aatgtttcatttttctaaagagcgt

SEQ ID NO: 181166 - DNA, 25 bp, Probe sequence
aatccatgaaaagtgtcgtgctatc

SEQ ID NO: 181167 - DNA, 25 bp, Probe sequence
aatacatttgtttcgcatctaccac

SEQ ID NO: 181168 - DNA, 25 bp, Probe sequence
catcgaacttttaacaacaggcttg

SEQ ID NO: 181169 - DNA, 25 bp, Probe sequence
cgcatctaccactcttttttattga

SEQ ID NO: 181170 - DNA, 25 bp, Probe sequence
gccaacgttagccattcatttaagc

SEQ ID NO: 181171 - DNA, 25 bp, Probe sequence
gctgtattggtttggaggtatcgtc

SEQ ID NO: 181172 - DNA, 25 bp, Probe sequence
gcaccgaaagcatcacattctgaca

SEQ ID NO: 181173 - DNA, 25 bp, Probe sequence
gaactaccaatttcagtatatacat

SEQ ID NO: 181174 - DNA, 25 bp, Probe sequence
gatacgggcagttattatgcaatta

SEQ ID NO: 181175 - DNA, 25 bp, Probe sequence
gatactgtattgaaagcgcgattga

SEQ ID NO: 181176 - DNA, 25 bp, Probe sequence
gattacaggattaaaccgttcaggt

SEQ ID NO: 181177 - DNA, 25 bp, Probe sequence
gttttcaatattcaaccgttcgcag

SEQ ID NO: 181178 - DNA, 25 bp, Probe sequence
gtcatattagctattgtcatcctgg

SEQ ID NO: 181179 - DNA, 25 bp, Probe sequence
gtcatcctggtgttatctggtttaa

SEQ ID NO: 181180 - DNA, 25 bp, Probe sequence
gtgtcgtgctatctcagctaacaga

SEQ ID NO: 181181 - DNA, 25 bp, Probe sequence
gtggtatttgattatctatttacta

SEQ ID NO: 181182 - DNA, 25 bp, Probe sequence
tggattgtgttcagtattccgaata

SEQ ID NO: 181183 - DNA, 25 bp, Probe sequence
tgcactatctttatttacagttttg

SEQ ID NO: 181184 - DNA, 25 bp, Probe sequence
taaagagcgtttattaatcattcgt

SEQ ID NO: 181185 - DNA, 25 bp, Probe sequence
tacctacgatttttttacaacatat

SEQ ID NO: 181186 - DNA, 25 bp, Probe sequence
ttatgttacctttttaatactgtgg

SEQ ID NO: 181187 - DNA, 25 bp, Probe sequence
attcaacaatttcacacatgagcaa

SEQ ID NO: 181188 - DNA, 25 bp, Probe sequence
atcgtacatgttagtatctcacaca

SEQ ID NO: 181189 - DNA, 25 bp, Probe sequence
agctggcaggtttgctacaaaagaa

SEQ ID NO: 181190 - DNA, 25 bp, Probe sequence
acgacgaacttggcaaaccaaagat

SEQ ID NO: 181191 - DNA, 25 bp, Probe sequence
aaattgaatttttagctggcaggtt

SEQ ID NO: 181192 - DNA, 25 bp, Probe sequence
aaatgaacagcacaaattcaacaat

SEQ ID NO: 181193 - DNA, 25 bp, Probe sequence
aacaatttcacacatgagcaacgta

SEQ ID NO: 181194 - DNA, 25 bp, Probe sequence
cacactgagcattatgcgatgagcc

SEQ ID NO: 181195 - DNA, 25 bp, Probe sequence
catgttagtatctcacacactgagc

SEQ ID NO: 181196 - DNA, 25 bp, Probe sequence
ctcacacactgagcattatgcgatg

SEQ ID NO: 181197 - DNA, 25 bp, Probe sequence
ctgagcattatgcgatgagccaagt

SEQ ID NO: 181198 - DNA, 25 bp, Probe sequence
cgtacatgttagtatctcacacact

SEQ ID NO: 181199 - DNA, 25 bp, Probe sequence
gcgttcagtaaagcattaggcacag

SEQ ID NO: 181200 - DNA, 25 bp, Probe sequence
gcattatgcgatgagccaagttgtt

SEQ ID NO: 181201 - DNA, 25 bp, Probe sequence
gcattaggcacaggcttaggaaaac

SEQ ID NO: 181202 - DNA, 25 bp, Probe sequence
gaagcgttcagtaaagcattaggca

SEQ ID NO: 181203 - DNA, 25 bp, Probe sequence
gttgagcggattttaactaaaaatg

SEQ ID NO: 181204 - DNA, 25 bp, Probe sequence
gatacatggaattggtgtagattta

SEQ ID NO: 181205 - DNA, 25 bp, Probe sequence
gttgttttagaaaagtcagcatttt

SEQ ID NO: 181206 - DNA, 25 bp, Probe sequence
gttcagtaaagcattaggcacaggc

SEQ ID NO: 181207 - DNA, 25 bp, Probe sequence
gttagtatctcacacactgagcatt

SEQ ID NO: 181208 - DNA, 25 bp, Probe sequence
gtatctcacacactgagcattatgc

SEQ ID NO: 181209 - DNA, 25 bp, Probe sequence
gtaaagcattaggcacaggcttagg

SEQ ID NO: 181210 - DNA, 25 bp, Probe sequence
ggtttgctacaaaagaagcgttcag

SEQ ID NO: 181211 - DNA, 25 bp, Probe sequence
tgttacaacgacgaacttggcaaac

SEQ ID NO: 181212 - DNA, 25 bp, Probe sequence
tgagccaagttgttttagaaaagtc

SEQ ID NO: 181213 - DNA, 25 bp, Probe sequence
tgaatttttagctggcaggtttgct

SEQ ID NO: 181214 - DNA, 25 bp, Probe sequence
tgcgatgagccaagttgttttagaa

SEQ ID NO: 181215 - DNA, 25 bp, Probe sequence
tacaacgacgaacttggcaaaccaa

SEQ ID NO: 181216 - DNA, 25 bp, Probe sequence
tacatgttagtatctcacacactga

SEQ ID NO: 181217 - DNA, 25 bp, Probe sequence
taggcacaggcttaggaaaacatgt

SEQ ID NO: 181218 - DNA, 25 bp, Probe sequence
tttcacacatgagcaacgtaaaatt

SEQ ID NO: 181219 - DNA, 25 bp, Probe sequence
ttttagctggcaggtttgctacaaa

SEQ ID NO: 181220 - DNA, 25 bp, Probe sequence
ttatgcgatgagccaagttgtttta

SEQ ID NO: 181221 - DNA, 25 bp, Probe sequence
atttgcgtgtacgaaacggcatttt

SEQ ID NO: 181222 - DNA, 25 bp, Probe sequence
attgatatcgatgttggtcctataa

SEQ ID NO: 181223 - DNA, 25 bp, Probe sequence
attaatagatagaagtgaagcacgt

SEQ ID NO: 181224 - DNA, 25 bp, Probe sequence
atacagcgggtggtcaagctgaaat

SEQ ID NO: 181225 - DNA, 25 bp, Probe sequence
atcgatataagcactgcagatatgc

SEQ ID NO: 181226 - DNA, 25 bp, Probe sequence
aatattgatatcgatgttggtccta

SEQ ID NO: 181227 - DNA, 25 bp, Probe sequence
accatttgcgtgtacgaaacggcat

SEQ ID NO: 181228 - DNA, 25 bp, Probe sequence
aacaccatttgcgtgtacgaaacgg

SEQ ID NO: 181229 - DNA, 25 bp, Probe sequence
aagtgatgaggttaagtgctgtgct

SEQ ID NO: 181230 - DNA, 25 bp, Probe sequence
ctttatacagcgggtggtcaagctg

SEQ ID NO: 181231 - DNA, 25 bp, Probe sequence
gcgggtggtcaagctgaaattgaat

SEQ ID NO: 181232 - DNA, 25 bp, Probe sequence
gcgtgtacgaaacggcattttattt

SEQ ID NO: 181233 - DNA, 25 bp, Probe sequence
gcatttgaaaaacaccatttgcgtg

SEQ ID NO: 181234 - DNA, 25 bp, Probe sequence
gcatttaatattttgaactggctat

SEQ ID NO: 181235 - DNA, 25 bp, Probe sequence
gcagatatgcatttgaaaaacacca

SEQ ID NO: 181236 - DNA, 25 bp, Probe sequence
gaaaaacaccatttgcgtgtacgaa

SEQ ID NO: 181237 - DNA, 25 bp, Probe sequence
gaaacggcattttatttttggatga

SEQ ID NO: 181238 - DNA, 25 bp, Probe sequence
gacgctatcgattagcaactttgac

SEQ ID NO: 181239 - DNA, 25 bp, Probe sequence
gagacgctatcgattagcaactttg

SEQ ID NO: 181240 - DNA, 25 bp, Probe sequence
gatgttggtcctataatgagacgct

SEQ ID NO: 181241 - DNA, 25 bp, Probe sequence
gatgaggttaagtgctgtgctgttt

SEQ ID NO: 181242 - DNA, 25 bp, Probe sequence
gatatcgatgttggtcctataatga

SEQ ID NO: 181243 - DNA, 25 bp, Probe sequence
gttggtcctataatgagacgctatc

SEQ ID NO: 181244 - DNA, 25 bp, Probe sequence
gtaataccatattttcgtattcaaa

SEQ ID NO: 181245 - DNA, 25 bp, Probe sequence
tgtacgaaacggcattttatttttg

SEQ ID NO: 181246 - DNA, 25 bp, Probe sequence
gtcctataatgagacgctatcgatt

SEQ ID NO: 181247 - DNA, 25 bp, Probe sequence
gtgatgaggttaagtgctgtgctgt

SEQ ID NO: 181248 - DNA, 25 bp, Probe sequence
gtgtgattataatattacttgttgc

SEQ ID NO: 181249 - DNA, 25 bp, Probe sequence
ggtcctataatgagacgctatcgat

SEQ ID NO: 181250 - DNA, 25 bp, Probe sequence
tgaggttaagtgctgtgctgttttg

SEQ ID NO: 181251 - DNA, 25 bp, Probe sequence
taagcactgcagatatgcatttgaa

SEQ ID NO: 181252 - DNA, 25 bp, Probe sequence
tatcgatgttggtcctataatgaga

SEQ ID NO: 181253 - DNA, 25 bp, Probe sequence
tattttgaactggctattttgggag

SEQ ID NO: 181254 - DNA, 25 bp, Probe sequence
ttttgaactggctattttgggagat

SEQ ID NO: 181255 - DNA, 25 bp, Probe sequence
atatacgaagattatttggctacac

SEQ ID NO: 181256 - DNA, 25 bp, Probe sequence
atacgaatcccgaatcatatttatg

SEQ ID NO: 181257 - DNA, 25 bp, Probe sequence
ataaacgcattcctatatatcagat

SEQ ID NO: 181258 - DNA, 25 bp, Probe sequence
atcatacatttctcaaattgtcgga

SEQ ID NO: 181259 - DNA, 25 bp, Probe sequence
aggtgtgggagcccaatcgattaac

SEQ ID NO: 181260 - DNA, 25 bp, Probe sequence
aggtcgcttagatgaagtgcagaac

SEQ ID NO: 181261 - DNA, 25 bp, Probe sequence
acctagtattattgtcatagctatg

SEQ ID NO: 181262 - DNA, 25 bp, Probe sequence
aacgtattcagtccgttgatatgac

SEQ ID NO: 181263 - DNA, 25 bp, Probe sequence
aattacatccgatttcatattttaa

SEQ ID NO: 181264 - DNA, 25 bp, Probe sequence
cacattataggatttgacacttggc

SEQ ID NO: 181265 - DNA, 25 bp, Probe sequence
gcgccattggtgtaacgttagcagc

SEQ ID NO: 181266 - DNA, 25 bp, Probe sequence
gcaagctgttgttgaacgtcagtca

SEQ ID NO: 181267 - DNA, 25 bp, Probe sequence
gcaatacattttatcatcacaagtg

SEQ ID NO: 181268 - DNA, 25 bp, Probe sequence
gaatcactatttatggcaatgacca

SEQ ID NO: 181269 - DNA, 25 bp, Probe sequence
gaaggtatgcctttgtcaggtttcc

SEQ ID NO: 181270 - DNA, 25 bp, Probe sequence
gaacacgcgatattggattgaggat

SEQ ID NO: 181271 - DNA, 25 bp, Probe sequence
gacagaagtggcgcaaaagtctagt

SEQ ID NO: 181272 - DNA, 25 bp, Probe sequence
gacaatgattcaggtagtgtgccga

SEQ ID NO: 181273 - DNA, 25 bp, Probe sequence
gacacttggcaacatacattactta

SEQ ID NO: 181274 - DNA, 25 bp, Probe sequence
gatatctttatgtcaaacatgcggg

SEQ ID NO: 181275 - DNA, 25 bp, Probe sequence
gattttatggcttttcggtgatgct

SEQ ID NO: 181276 - DNA, 25 bp, Probe sequence
gttagcagctttagtaccgatttac

SEQ ID NO: 181277 - DNA, 25 bp, Probe sequence
gtaccaacgaaacgattgcaagctg

SEQ ID NO: 181278 - DNA, 25 bp, Probe sequence
gtcggaattatgaacacgcgatatt

SEQ ID NO: 181279 - DNA, 25 bp, Probe sequence
gtctgaacctcaaaaattacatccg

SEQ ID NO: 181280 - DNA, 25 bp, Probe sequence
gtgccgatattgccgtttattaaac

SEQ ID NO: 181281 - DNA, 25 bp, Probe sequence
ggtagtgtgccgatattgccgttta

SEQ ID NO: 181282 - DNA, 25 bp, Probe sequence
ggtattgtcttaagtgttatttcga

SEQ ID NO: 181283 - DNA, 25 bp, Probe sequence
ggaagacatcgcagaaggtcgctta

SEQ ID NO: 181284 - DNA, 25 bp, Probe sequence
ggcaatgaccagtggcgccattggt

SEQ ID NO: 181285 - DNA, 25 bp, Probe sequence
tccacagacactttttaatacctag

SEQ ID NO: 181286 - DNA, 25 bp, Probe sequence
tcaggtttccacagacactttttaa

SEQ ID NO: 181287 - DNA, 25 bp, Probe sequence
taggtattgtatttgtattcttttt

SEQ ID NO: 181288 - DNA, 25 bp, Probe sequence
ttgatcccatggtcgaagctaaatc

SEQ ID NO: 181289 - DNA, 25 bp, Probe sequence
attattggtccttcaggtagtggta

SEQ ID NO: 181290 - DNA, 25 bp, Probe sequence
aggacactatcaattaagttctaaa

SEQ ID NO: 181291 - DNA, 25 bp, Probe sequence
agctatttaatgcaacaaagcgatt

SEQ ID NO: 181292 - DNA, 25 bp, Probe sequence
acagaggagttgaaccaacatgagt

SEQ ID NO: 181293 - DNA, 25 bp, Probe sequence
acaaagcgatttgtttggtgaaacg

SEQ ID NO: 181294 - DNA, 25 bp, Probe sequence
aaattagcagatcaaggcgtggcaa

SEQ ID NO: 181295 - DNA, 25 bp, Probe sequence
aaagatttagtgtatgaggcaagtg

SEQ ID NO: 181296 - DNA, 25 bp, Probe sequence
aaaggatcgcgattgcacgccaatt

SEQ ID NO: 181297 - DNA, 25 bp, Probe sequence
aaaccattgcaattattggtccttc

SEQ ID NO: 181298 - DNA, 25 bp, Probe sequence
aaccatatgatgattacgaaccaga

SEQ ID NO: 181299 - DNA, 25 bp, Probe sequence
aatatgatttttccgtctcttgcgc

SEQ ID NO: 181300 - DNA, 25 bp, Probe sequence
caaaagcgtataaccattgttgatg

SEQ ID NO: 181301 - DNA, 25 bp, Probe sequence
cagcgatgaccaaagtatgcgacac

SEQ ID NO: 181302 - DNA, 25 bp, Probe sequence
gcccaaccagtggaacgctttactt

SEQ ID NO: 181303 - DNA, 25 bp, Probe sequence
gcacgccaattaatgtataccccag

SEQ ID NO: 181304 - DNA, 25 bp, Probe sequence
gaaccagaaatattacgccgacaca

SEQ ID NO: 181305 - DNA, 25 bp, Probe sequence
gaacatatgtcaggtggcgagcgtc

SEQ ID NO: 181306 - DNA, 25 bp, Probe sequence
gagcgtcaaaggatcgcgattgcac

SEQ ID NO: 181307 - DNA, 25 bp, Probe sequence
gaggaggggtaaatatgttgttaga

SEQ ID NO: 181308 - DNA, 25 bp, Probe sequence
gaggcaagtgatagagtcatactaa

SEQ ID NO: 181309 - DNA, 25 bp, Probe sequence
gatgtagggttaggacactatcaat

SEQ ID NO: 181310 - DNA, 25 bp, Probe sequence
gatgaatcaacaagtgcgttagata

SEQ ID NO: 181311 - DNA, 25 bp, Probe sequence
gattacccacagcgatgaccaaagt

SEQ ID NO: 181312 - DNA, 25 bp, Probe sequence
gttgatggtcaaatttctaatacag

SEQ ID NO: 181313 - DNA, 25 bp, Probe sequence
gtatgcgacactttcaaaagcgtat

SEQ ID NO: 181314 - DNA, 25 bp, Probe sequence
gtcaggtggcgagcgtcaaaggatc

SEQ ID NO: 181315 - DNA, 25 bp, Probe sequence
tgtaatttaattagcccaaccagtg

SEQ ID NO: 181316 - DNA, 25 bp, Probe sequence
gtctcttgcgcgtaatgataaattt

SEQ ID NO: 181317 - DNA, 25 bp, Probe sequence
gtggattacccacagcgatgaccaa

SEQ ID NO: 181318 - DNA, 25 bp, Probe sequence
ggcgtggcaattatgtggattaccc

SEQ ID NO: 181319 - DNA, 25 bp, Probe sequence
taccccagacatccttctattagat

SEQ ID NO: 181320 - DNA, 25 bp, Probe sequence
ttacgccgacacattagctatttaa

SEQ ID NO: 181321 - DNA, 25 bp, Probe sequence
ttaatgtataccccagacatccttc

SEQ ID NO: 181322 - DNA, 25 bp, Probe sequence
ttccgtctcttgcgcgtaatgataa

SEQ ID NO: 181323 - DNA, 25 bp, Probe sequence
atttaccgatgatgtctcatgacga

SEQ ID NO: 181324 - DNA, 25 bp, Probe sequence
acgagtcgaattgaacgtttacaat

SEQ ID NO: 181325 - DNA, 25 bp, Probe sequence
aggtcatactatttatttaccgatg

SEQ ID NO: 181326 - DNA, 25 bp, Probe sequence
agtgtagctgtgtatgtcatttttt

SEQ ID NO: 181327 - DNA, 25 bp, Probe sequence
agaagaaacgagtcgaattgaacgt

SEQ ID NO: 181328 - DNA, 25 bp, Probe sequence
agctgtgtatgtcattttttatttt

SEQ ID NO: 181329 - DNA, 25 bp, Probe sequence
accgatgatgtctcatgacgatgtt

SEQ ID NO: 181330 - DNA, 25 bp, Probe sequence
acttgtcgattaaatctaatccaat

SEQ ID NO: 181331 - DNA, 25 bp, Probe sequence
acaatacttgtcgattaaatctaat

SEQ ID NO: 181332 - DNA, 25 bp, Probe sequence
aagagtcctaagtcagcattgttgt

SEQ ID NO: 181333 - DNA, 25 bp, Probe sequence
aagttggatttatgactgcaggtca

SEQ ID NO: 181334 - DNA, 25 bp, Probe sequence
aagtgcttaatttgtataaagttgg

SEQ ID NO: 181335 - DNA, 25 bp, Probe sequence
ctaagagtcctaagtcagcattgtt

SEQ ID NO: 181336 - DNA, 25 bp, Probe sequence
ctaatccaattagtaaagtgcttaa

SEQ ID NO: 181337 - DNA, 25 bp, Probe sequence
gcaggtcatactatttatttaccga

SEQ ID NO: 181338 - DNA, 25 bp, Probe sequence
gaatttatattgagtgtagctgtgt

SEQ ID NO: 181339 - DNA, 25 bp, Probe sequence
gaatggcttagaatttatattgagt

SEQ ID NO: 181340 - DNA, 25 bp, Probe sequence
gaacgtttacaatacttgtcgatta

SEQ ID NO: 181341 - DNA, 25 bp, Probe sequence
gaactatgtcgaatttgagaggggt

SEQ ID NO: 181342 - DNA, 25 bp, Probe sequence
gactgcaggtcatactatttattta

SEQ ID NO: 181343 - DNA, 25 bp, Probe sequence
gagaggggttgaaagtgatgtctga

SEQ ID NO: 181344 - DNA, 25 bp, Probe sequence
gagaactatgtcgaatttgagaggg

SEQ ID NO: 181345 - DNA, 25 bp, Probe sequence
gagtcctaagtcagcattgttgtat

SEQ ID NO: 181346 - DNA, 25 bp, Probe sequence
gagtgtagctgtgtatgtcattttt

SEQ ID NO: 181347 - DNA, 25 bp, Probe sequence
gatgatgtctcatgacgatgttaaa

SEQ ID NO: 181348 - DNA, 25 bp, Probe sequence
gtagctgtgtatgtcattttttatt

SEQ ID NO: 181349 - DNA, 25 bp, Probe sequence
gtctcatgacgatgttaaaataatc

SEQ ID NO: 181350 - DNA, 25 bp, Probe sequence
gtcctaagtcagcattgttgtatta

SEQ ID NO: 181351 - DNA, 25 bp, Probe sequence
gtgtacaatatcgtacatcattttt

SEQ ID NO: 181352 - DNA, 25 bp, Probe sequence
tgtgtatgtcattttttattttata

SEQ ID NO: 181353 - DNA, 25 bp, Probe sequence
tacattacgaatggcttagaattta

SEQ ID NO: 181354 - DNA, 25 bp, Probe sequence
tatgtcgaatttgagaggggttgaa

SEQ ID NO: 181355 - DNA, 25 bp, Probe sequence
ttatatggttaagatttgaatggcc

SEQ ID NO: 181356 - DNA, 25 bp, Probe sequence
ttaccgatgatgtctcatgacgatg

SEQ ID NO: 181357 - DNA, 25 bp, Probe sequence
attcactggaggattgacaggaagt

SEQ ID NO: 181358 - DNA, 25 bp, Probe sequence
atatgggtcacctgaagaaaactat

SEQ ID NO: 181359 - DNA, 25 bp, Probe sequence
atcaattcactggaggattgacagg

SEQ ID NO: 181360 - DNA, 25 bp, Probe sequence
atgggtcacctgaagaaaactatca

SEQ ID NO: 181361 - DNA, 25 bp, Probe sequence
agaaaactatcaattcactggagga

SEQ ID NO: 181362 - DNA, 25 bp, Probe sequence
acgctgaaaatttaaaatctcctga

SEQ ID NO: 181363 - DNA, 25 bp, Probe sequence
aaactatcaattcactggaggattg

SEQ ID NO: 181364 - DNA, 25 bp, Probe sequence
aaaactatcaattcactggaggatt

SEQ ID NO: 181365 - DNA, 25 bp, Probe sequence
aactatcaattcactggaggattga

SEQ ID NO: 181366 - DNA, 25 bp, Probe sequence
aacgctgaaaatttaaaatctcctg

SEQ ID NO: 181367 - DNA, 25 bp, Probe sequence
aagaaaactatcaattcactggagg

SEQ ID NO: 181368 - DNA, 25 bp, Probe sequence
aattcactggaggattgacaggaag

SEQ ID NO: 181369 - DNA, 25 bp, Probe sequence
caattcactggaggattgacaggaa

SEQ ID NO: 181370 - DNA, 25 bp, Probe sequence
ctatcaattcactggaggattgaca

SEQ ID NO: 181371 - DNA, 25 bp, Probe sequence
cgctgaaaatttaaaatctcctgaa

SEQ ID NO: 181372 - DNA, 25 bp, Probe sequence
gcatatgggtcacctgaagaaaact

SEQ ID NO: 181373 - DNA, 25 bp, Probe sequence
gaagaaaactatcaattcactggag

SEQ ID NO: 181374 - DNA, 25 bp, Probe sequence
gaacgctgaaaatttaaaatctcct

SEQ ID NO: 181375 - DNA, 25 bp, Probe sequence
gaaaactatcaattcactggaggat

SEQ ID NO: 181376 - DNA, 25 bp, Probe sequence
gacaggaagtaatgaagtcttagga

SEQ ID NO: 181377 - DNA, 25 bp, Probe sequence
gttgcatatgggtcacctgaagaaa

SEQ ID NO: 181378 - DNA, 25 bp, Probe sequence
gtcacctgaagaaaactatcaattc

SEQ ID NO: 181379 - DNA, 25 bp, Probe sequence
gggtcacctgaagaaaactatcaat

SEQ ID NO: 181380 - DNA, 25 bp, Probe sequence
ggtcacctgaagaaaactatcaatt

SEQ ID NO: 181381 - DNA, 25 bp, Probe sequence
ggaggattgacaggaagtaatgaag

SEQ ID NO: 181382 - DNA, 25 bp, Probe sequence
ggaagtaatgaagtcttaggaaaat

SEQ ID NO: 181383 - DNA, 25 bp, Probe sequence
tgggtcacctgaagaaaactatcaa

SEQ ID NO: 181384 - DNA, 25 bp, Probe sequence
tgttgcatatgggtcacctgaagaa

SEQ ID NO: 181385 - DNA, 25 bp, Probe sequence
tgcatatgggtcacctgaagaaaac

SEQ ID NO: 181386 - DNA, 25 bp, Probe sequence
tcactggaggattgacaggaagtaa

SEQ ID NO: 181387 - DNA, 25 bp, Probe sequence
tatgggtcacctgaagaaaactatc

SEQ ID NO: 181388 - DNA, 25 bp, Probe sequence
ttaggaaaattgaagaacgctgaaa

SEQ ID NO: 181389 - DNA, 25 bp, Probe sequence
ttcactggaggattgacaggaagta

SEQ ID NO: 181390 - DNA, 25 bp, Probe sequence
ttgcatatgggtcacctgaagaaaa

SEQ ID NO: 181391 - DNA, 25 bp, Probe sequence
agagtggccgacttgattcaacatc

SEQ ID NO: 181392 - DNA, 25 bp, Probe sequence
agcacctcgtattgctgatgctcgt

SEQ ID NO: 181393 - DNA, 25 bp, Probe sequence
agcactggacagagacacgatattt

SEQ ID NO: 181394 - DNA, 25 bp, Probe sequence
acgggagaccgagtgcagttgatta

SEQ ID NO: 181395 - DNA, 25 bp, Probe sequence
acatcgtaagcagcgtggtgtgtta

SEQ ID NO: 181396 - DNA, 25 bp, Probe sequence
acaatagatgctgcaacaagttctg

SEQ ID NO: 181397 - DNA, 25 bp, Probe sequence
aaatgcattgaagcaagcacctcgt

SEQ ID NO: 181398 - DNA, 25 bp, Probe sequence
aaaattgattggacagcactggaca

SEQ ID NO: 181399 - DNA, 25 bp, Probe sequence
caaatgtaacaatagatgctgcaac

SEQ ID NO: 181400 - DNA, 25 bp, Probe sequence
caaatatttttttatcaacaagcaa

SEQ ID NO: 181401 - DNA, 25 bp, Probe sequence
tatctacttcaagagtggccgactt

SEQ ID NO: 181402 - DNA, 25 bp, Probe sequence
caggtggaagtaatgaatcgaatgg

SEQ ID NO: 181403 - DNA, 25 bp, Probe sequence
cgggcttagatccgcatattacggt

SEQ ID NO: 181404 - DNA, 25 bp, Probe sequence
gccgacttgattcaacatcgtaagc

SEQ ID NO: 181405 - DNA, 25 bp, Probe sequence
gctatcacgttaattggtcaaatat

SEQ ID NO: 181406 - DNA, 25 bp, Probe sequence
gcattgaagcaagcacctcgtattg

SEQ ID NO: 181407 - DNA, 25 bp, Probe sequence
gcagcgtggtgtgttaacaaatgat

SEQ ID NO: 181408 - DNA, 25 bp, Probe sequence
gcaagcacctcgtattgctgatgct

SEQ ID NO: 181409 - DNA, 25 bp, Probe sequence
gaatcgaatggaaacaccgaattaa

SEQ ID NO: 181410 - DNA, 25 bp, Probe sequence
gacacgatattttcacgggagaccg

SEQ ID NO: 181411 - DNA, 25 bp, Probe sequence
gacagagacacgatattttcacggg

SEQ ID NO: 181412 - DNA, 25 bp, Probe sequence
gaccgagtgcagttgattataatat

SEQ ID NO: 181413 - DNA, 25 bp, Probe sequence
gatttttattcccgttagctatcac

SEQ ID NO: 181414 - DNA, 25 bp, Probe sequence
gattatgtgaatgtgcttgaactaa

SEQ ID NO: 181415 - DNA, 25 bp, Probe sequence
gattcaacatcgtaagcagcgtggt

SEQ ID NO: 181416 - DNA, 25 bp, Probe sequence
gttagctatcacgttaattggtcaa

SEQ ID NO: 181417 - DNA, 25 bp, Probe sequence
gtaagcagcgtggtgtgttaacaaa

SEQ ID NO: 181418 - DNA, 25 bp, Probe sequence
gtcgggcttagatccgcatattacg

SEQ ID NO: 181419 - DNA, 25 bp, Probe sequence
gtggccgacttgattcaacatcgta

SEQ ID NO: 181420 - DNA, 25 bp, Probe sequence
tgtggatttttattcccgttagcta

SEQ ID NO: 181421 - DNA, 25 bp, Probe sequence
ggacagcactggacagagacacgat

SEQ ID NO: 181422 - DNA, 25 bp, Probe sequence
tggaaacaccgaattaatagcacgc

SEQ ID NO: 181423 - DNA, 25 bp, Probe sequence
tttattcccgttagctatcacgtta

SEQ ID NO: 181424 - DNA, 25 bp, Probe sequence
ttcccgttagctatcacgttaattg

SEQ ID NO: 181425 - DNA, 25 bp, Probe sequence
attgcaggcatggatcgtgttactc

SEQ ID NO: 181426 - DNA, 25 bp, Probe sequence
attactggtgagtctgcacctgtga

SEQ ID NO: 181427 - DNA, 25 bp, Probe sequence
atattatgcatttatcgtcacctaa

SEQ ID NO: 181428 - DNA, 25 bp, Probe sequence
atatcggtattcaaaggtgcaccta

SEQ ID NO: 181429 - DNA, 25 bp, Probe sequence
atatccaatagcatcttacctgcat

SEQ ID NO: 181430 - DNA, 25 bp, Probe sequence
atcacttatggcaatcgaatcgcta

SEQ ID NO: 181431 - DNA, 25 bp, Probe sequence
atcttacctgcatttaattttacct

SEQ ID NO: 181432 - DNA, 25 bp, Probe sequence
agcaaccgttgatgaatctgcaatt

SEQ ID NO: 181433 - DNA, 25 bp, Probe sequence
cggtggtttgttatcggcgattggt

SEQ ID NO: 181434 - DNA, 25 bp, Probe sequence
acgccacagagttaaaagccggaca

SEQ ID NO: 181435 - DNA, 25 bp, Probe sequence
acgagaggtgcattaacgacattta

SEQ ID NO: 181436 - DNA, 25 bp, Probe sequence
aaatgatgcacctgcgctagcacaa

SEQ ID NO: 181437 - DNA, 25 bp, Probe sequence
aacaatccctgctgatggcgttgta

SEQ ID NO: 181438 - DNA, 25 bp, Probe sequence
aaggtcgtggaaaagcgcaagctga

SEQ ID NO: 181439 - DNA, 25 bp, Probe sequence
aatactttgcaattttacctgcact

SEQ ID NO: 181440 - DNA, 25 bp, Probe sequence
aattttacctattgcgatgctcatt

SEQ ID NO: 181441 - DNA, 25 bp, Probe sequence
cgtatcggatagtgaacgccacaga

SEQ ID NO: 181442 - DNA, 25 bp, Probe sequence
cagaagcctttgctgaaggtcgtgg

SEQ ID NO: 181443 - DNA, 25 bp, Probe sequence
caggtggcgattttgatggagtcat

SEQ ID NO: 181444 - DNA, 25 bp, Probe sequence
gcgatgctcattgcgttaacagtat

SEQ ID NO: 181445 - DNA, 25 bp, Probe sequence
gaatcgctagtgaatttttaccagt

SEQ ID NO: 181446 - DNA, 25 bp, Probe sequence
gagtgaagcgggtacatctttttta

SEQ ID NO: 181447 - DNA, 25 bp, Probe sequence
gatggagtcattggcggtacacttg

SEQ ID NO: 181448 - DNA, 25 bp, Probe sequence
gattaatcgtcccgtttttaggcat

SEQ ID NO: 181449 - DNA, 25 bp, Probe sequence
gtcatgcttggcgtgatttatttaa

SEQ ID NO: 181450 - DNA, 25 bp, Probe sequence
gtgggcgtgctgtagaagtatgtgg

SEQ ID NO: 181451 - DNA, 25 bp, Probe sequence
ggtggcacaccattaatagtcattg

SEQ ID NO: 181452 - DNA, 25 bp, Probe sequence
ggtacacttgtaacatctgattggt

SEQ ID NO: 181453 - DNA, 25 bp, Probe sequence
ggattagctatgaactcagggacaa

SEQ ID NO: 181454 - DNA, 25 bp, Probe sequence
tggatcgtgttactcaattcaatgt

SEQ ID NO: 181455 - DNA, 25 bp, Probe sequence
tcattgttgccttaattccaattgc

SEQ ID NO: 181456 - DNA, 25 bp, Probe sequence
tagtcgctgcttatatgtcatcaat

SEQ ID NO: 181457 - DNA, 25 bp, Probe sequence
tatcgtcacctaaatctgcaattat

SEQ ID NO: 181458 - DNA, 25 bp, Probe sequence
ttttacctgcactaatgatgtcaac

SEQ ID NO: 181459 - DNA, 25 bp, Probe sequence
attgccggttgttataacggctgga

SEQ ID NO: 181460 - DNA, 25 bp, Probe sequence
attaatgtcattaccagttctacaa

SEQ ID NO: 181461 - DNA, 25 bp, Probe sequence
atcaagcgcatctgtctattctggt

SEQ ID NO: 181462 - DNA, 25 bp, Probe sequence
atgtgacacttttttaataataatt

SEQ ID NO: 181463 - DNA, 25 bp, Probe sequence
aacggctggattatgtgacactttt

SEQ ID NO: 181464 - DNA, 25 bp, Probe sequence
aagcgcatctgtctattctggttta

SEQ ID NO: 181465 - DNA, 25 bp, Probe sequence
aattgctgtactgggtgtttcacta

SEQ ID NO: 181466 - DNA, 25 bp, Probe sequence
aattgctgttagtattgttattgta

SEQ ID NO: 181467 - DNA, 25 bp, Probe sequence
gggcttattttgcccctaggagcgc

SEQ ID NO: 181468 - DNA, 25 bp, Probe sequence
gcccctaggagcgcaaaacgtgttt

SEQ ID NO: 181469 - DNA, 25 bp, Probe sequence
ccacatgcaattatggatacagttg

SEQ ID NO: 181470 - DNA, 25 bp, Probe sequence
gcattggggcttattttgcccctag

SEQ ID NO: 181471 - DNA, 25 bp, Probe sequence
gcatctgtctattctggtttagaaa

SEQ ID NO: 181472 - DNA, 25 bp, Probe sequence
gaaaagcctaacactctagagaact

SEQ ID NO: 181473 - DNA, 25 bp, Probe sequence
gagaactatgaaccgatgagtacaa

SEQ ID NO: 181474 - DNA, 25 bp, Probe sequence
gaggatgcgaattgatacaaccagt

SEQ ID NO: 181475 - DNA, 25 bp, Probe sequence
gataaacgcattgccggttgttata

SEQ ID NO: 181476 - DNA, 25 bp, Probe sequence
gatacaaccagttttacacggtatt

SEQ ID NO: 181477 - DNA, 25 bp, Probe sequence
gatacttttttgtattgccacaatt

SEQ ID NO: 181478 - DNA, 25 bp, Probe sequence
gttggtgtaattggatcaagcgcat

SEQ ID NO: 181479 - DNA, 25 bp, Probe sequence
gtttgtatttaatcaaggtgctaat

SEQ ID NO: 181480 - DNA, 25 bp, Probe sequence
gtttcgttgttaaatccacatgcaa

SEQ ID NO: 181481 - DNA, 25 bp, Probe sequence
gtattgccacaattatggtttcttg

SEQ ID NO: 181482 - DNA, 25 bp, Probe sequence
gtacatggcttggtctttatggaaa

SEQ ID NO: 181483 - DNA, 25 bp, Probe sequence
gtaaggttttaggttctatagatag

SEQ ID NO: 181484 - DNA, 25 bp, Probe sequence
gggtgtttcactaatattaatgtca

SEQ ID NO: 181485 - DNA, 25 bp, Probe sequence
ggtttcttggctatggttttttctg

SEQ ID NO: 181486 - DNA, 25 bp, Probe sequence
ggttttgctatatctgtttcgttgt

SEQ ID NO: 181487 - DNA, 25 bp, Probe sequence
ggttttttctgttagcaatattagg

SEQ ID NO: 181488 - DNA, 25 bp, Probe sequence
ggagcgcaaaacgtgtttgtattta

SEQ ID NO: 181489 - DNA, 25 bp, Probe sequence
ttttacacggtattttattagcatt

SEQ ID NO: 181490 - DNA, 25 bp, Probe sequence
ttaccagttctacaattatttattt

SEQ ID NO: 181491 - DNA, 25 bp, Probe sequence
ttctattgtacatggcttggtcttt

SEQ ID NO: 181492 - DNA, 25 bp, Probe sequence
ttggtttgttttttctattgtacat

SEQ ID NO: 181493 - DNA, 25 bp, Probe sequence
attccatgtgcctaaatatgtttta

SEQ ID NO: 181494 - DNA, 25 bp, Probe sequence
attcccagcaattccacattataat

SEQ ID NO: 181495 - DNA, 25 bp, Probe sequence
attaccacaatattttcgctttgat

SEQ ID NO: 181496 - DNA, 25 bp, Probe sequence
atgcacgaagcatgtcatcgttcat

SEQ ID NO: 181497 - DNA, 25 bp, Probe sequence
tcttcaagacgacactaccgggttt

SEQ ID NO: 181498 - DNA, 25 bp, Probe sequence
aaatggattgcttgtcttttagtag

SEQ ID NO: 181499 - DNA, 25 bp, Probe sequence
aaagctgtattttcaatggagataa

SEQ ID NO: 181500 - DNA, 25 bp, Probe sequence
aatatttttatttcatcctcaccat

SEQ ID NO: 181501 - DNA, 25 bp, Probe sequence
catttattcccagcaattccacatt

SEQ ID NO: 181502 - DNA, 25 bp, Probe sequence
cttgtcttttagtagcattccctat

SEQ ID NO: 181503 - DNA, 25 bp, Probe sequence
cattccctatatttacaagctttac

SEQ ID NO: 181504 - DNA, 25 bp, Probe sequence
ctggttggtaattctcgggagtgca

SEQ ID NO: 181505 - DNA, 25 bp, Probe sequence
cgggagtgcatgtataagtatctat

SEQ ID NO: 181506 - DNA, 25 bp, Probe sequence
cgctttgatttttgactggttggta

SEQ ID NO: 181507 - DNA, 25 bp, Probe sequence
gcattgtaggtttagataagccgca

SEQ ID NO: 181508 - DNA, 25 bp, Probe sequence
gcatgtcatcgttcattatttacaa

SEQ ID NO: 181509 - DNA, 25 bp, Probe sequence
gaagtcgaatgagggcgtttgataa

SEQ ID NO: 181510 - DNA, 25 bp, Probe sequence
gaagcacaccattgtactgggttct

SEQ ID NO: 181511 - DNA, 25 bp, Probe sequence
gaaatggctgaacactctggattga

SEQ ID NO: 181512 - DNA, 25 bp, Probe sequence
gacccagatactaaacgatatcgca

SEQ ID NO: 181513 - DNA, 25 bp, Probe sequence
gagggcgtttgataacttaatgcac

SEQ ID NO: 181514 - DNA, 25 bp, Probe sequence
gtttcagctaacttatacagtaggg

SEQ ID NO: 181515 - DNA, 25 bp, Probe sequence
gtactgggttcttcaagacgacact

SEQ ID NO: 181516 - DNA, 25 bp, Probe sequence
gtaattctcattttaaacatcatag

SEQ ID NO: 181517 - DNA, 25 bp, Probe sequence
gtcggaatacttttggtatgccttg

SEQ ID NO: 181518 - DNA, 25 bp, Probe sequence
gtgagttaacagcaagtcggaatac

SEQ ID NO: 181519 - DNA, 25 bp, Probe sequence
ggtactatttttattccatgtgcct

SEQ ID NO: 181520 - DNA, 25 bp, Probe sequence
tggtatgccttggacaatattttta

SEQ ID NO: 181521 - DNA, 25 bp, Probe sequence
tgttattctttattggtttatacca

SEQ ID NO: 181522 - DNA, 25 bp, Probe sequence
tcctcaccatgataattttcactta

SEQ ID NO: 181523 - DNA, 25 bp, Probe sequence
taccacttttaacaacttttcagat

SEQ ID NO: 181524 - DNA, 25 bp, Probe sequence
tatgttttaggtacagtttcagcta

SEQ ID NO: 181525 - DNA, 25 bp, Probe sequence
ttttcagattattcgttattgggca

SEQ ID NO: 181526 - DNA, 25 bp, Probe sequence
ttcacttagttcaccatttattccc

SEQ ID NO: 181527 - DNA, 25 bp, Probe sequence
attgatgactcaaggtgtaccacaa

SEQ ID NO: 181528 - DNA, 25 bp, Probe sequence
attttagtattttcagcacttgctt

SEQ ID NO: 181529 - DNA, 25 bp, Probe sequence
ataacgaatccgtcttttcatggta

SEQ ID NO: 181530 - DNA, 25 bp, Probe sequence
atcagctgctgcgaacaatggatca

SEQ ID NO: 181531 - DNA, 25 bp, Probe sequence
atgttgtatttggtggcgaaggcgt

SEQ ID NO: 181532 - DNA, 25 bp, Probe sequence
atgtattgtcttagtctttctcata

SEQ ID NO: 181533 - DNA, 25 bp, Probe sequence
atgggcagtatgatgttacttccta

SEQ ID NO: 181534 - DNA, 25 bp, Probe sequence
atgtggagtgagtatcgtggtaatc

SEQ ID NO: 181535 - DNA, 25 bp, Probe sequence
agcacttgcttttatgattcctgga

SEQ ID NO: 181536 - DNA, 25 bp, Probe sequence
acgacggcatttacaacgggttctg

SEQ ID NO: 181537 - DNA, 25 bp, Probe sequence
aacattctggaatatctctacagga

SEQ ID NO: 181538 - DNA, 25 bp, Probe sequence
caagatattgttcggtttattgtcc

SEQ ID NO: 181539 - DNA, 25 bp, Probe sequence
caggaatcattatgttgctttctcg

SEQ ID NO: 181540 - DNA, 25 bp, Probe sequence
gccgtttgtatagcgatgttgagac

SEQ ID NO: 181541 - DNA, 25 bp, Probe sequence
gcgtagcattggtgcaatcgtcaag

SEQ ID NO: 181542 - DNA, 25 bp, Probe sequence
gttgttcttatttggtcgcatgtta

SEQ ID NO: 181543 - DNA, 25 bp, Probe sequence
gttgctttctcgttatataccaatt

SEQ ID NO: 181544 - DNA, 25 bp, Probe sequence
gttacttcctatgtcaatgttgttc

SEQ ID NO: 181545 - DNA, 25 bp, Probe sequence
gtttgacatttattccagtactatt

SEQ ID NO: 181546 - DNA, 25 bp, Probe sequence
gtatcactaatcgtatttatcgttt

SEQ ID NO: 181547 - DNA, 25 bp, Probe sequence
gtatgaaatgacatcagctgctgcg

SEQ ID NO: 181548 - DNA, 25 bp, Probe sequence
gtactattacttggtcctattggtg

SEQ ID NO: 181549 - DNA, 25 bp, Probe sequence
gtcagcactatttacagttattacg

SEQ ID NO: 181550 - DNA, 25 bp, Probe sequence
gtggcgaaggcgtaggactcatgaa

SEQ ID NO: 181551 - DNA, 25 bp, Probe sequence
ggtgtaccacaaacgttgcatgcta

SEQ ID NO: 181552 - DNA, 25 bp, Probe sequence
ggatatctatatcgcgtagcattgg

SEQ ID NO: 181553 - DNA, 25 bp, Probe sequence
ggaaattctgcaacaccttttgaaa

SEQ ID NO: 181554 - DNA, 25 bp, Probe sequence
tggacctattgcatcacttgaatca

SEQ ID NO: 181555 - DNA, 25 bp, Probe sequence
tcggactttaagcggacatattcaa

SEQ ID NO: 181556 - DNA, 25 bp, Probe sequence
tcaacatattgcatttggacctatt

SEQ ID NO: 181557 - DNA, 25 bp, Probe sequence
taacatgcatgatagcttaacgcct

SEQ ID NO: 181558 - DNA, 25 bp, Probe sequence
tagtgcatcaggttacgccgtttgt

SEQ ID NO: 181559 - DNA, 25 bp, Probe sequence
tatgccaattggcgcccgtgaaatg

SEQ ID NO: 181560 - DNA, 25 bp, Probe sequence
tatgtcaaacattttctggcattta

SEQ ID NO: 181561 - DNA, 25 bp, Probe sequence
attgcattagttttgtatttatttt

SEQ ID NO: 181562 - DNA, 25 bp, Probe sequence
attttatgccttaattcgtagtgaa

SEQ ID NO: 181563 - DNA, 25 bp, Probe sequence
atttattttatgccttaattcgtag

SEQ ID NO: 181564 - DNA, 25 bp, Probe sequence
atgccttaattcgtagtgaaaaatt

SEQ ID NO: 181565 - DNA, 25 bp, Probe sequence
atgttgttgtgttgtaaggaggtta

SEQ ID NO: 181566 - DNA, 25 bp, Probe sequence
aggaggttatggcaatgctcatcgt

SEQ ID NO: 181567 - DNA, 25 bp, Probe sequence
aggttatggcaatgctcatcgtttt

SEQ ID NO: 181568 - DNA, 25 bp, Probe sequence
agttattgcattagttttgtattta

SEQ ID NO: 181569 - DNA, 25 bp, Probe sequence
aaggaggttatggcaatgctcatcg

SEQ ID NO: 181570 - DNA, 25 bp, Probe sequence
gaggttatggcaatgctcatcgttt

SEQ ID NO: 181571 - DNA, 25 bp, Probe sequence
gttgtaaggaggttatggcaatgct

SEQ ID NO: 181572 - DNA, 25 bp, Probe sequence
gttgtgttgtaaggaggttatggca

SEQ ID NO: 181573 - DNA, 25 bp, Probe sequence
gttgttgtgttgtaaggaggttatg

SEQ ID NO: 181574 - DNA, 25 bp, Probe sequence
gttatggcaatgctcatcgttttat

SEQ ID NO: 181575 - DNA, 25 bp, Probe sequence
gtatttattttatgccttaattcgt

SEQ ID NO: 181576 - DNA, 25 bp, Probe sequence
gtagttattgcattagttttgtatt

SEQ ID NO: 181577 - DNA, 25 bp, Probe sequence
gtaaggaggttatggcaatgctcat

SEQ ID NO: 181578 - DNA, 25 bp, Probe sequence
ggtagttattgcattagttttgtat

SEQ ID NO: 181579 - DNA, 25 bp, Probe sequence
ggttatggcaatgctcatcgtttta

SEQ ID NO: 181580 - DNA, 25 bp, Probe sequence
ggaggttatggcaatgctcatcgtt

SEQ ID NO: 181581 - DNA, 25 bp, Probe sequence
tggtagttattgcattagttttgta

SEQ ID NO: 181582 - DNA, 25 bp, Probe sequence
tgcattagttttgtatttattttat

SEQ ID NO: 181583 - DNA, 25 bp, Probe sequence
tagttttgtatttattttatgcctt

SEQ ID NO: 181584 - DNA, 25 bp, Probe sequence
tatggcaatgctcatcgttttatta

SEQ ID NO: 181585 - DNA, 25 bp, Probe sequence
tatttattttatgccttaattcgta

SEQ ID NO: 181586 - DNA, 25 bp, Probe sequence
tattttatgccttaattcgtagtga

SEQ ID NO: 181587 - DNA, 25 bp, Probe sequence
tttattttatgccttaattcgtagt

SEQ ID NO: 181588 - DNA, 25 bp, Probe sequence
ttttatgccttaattcgtagtgaaa

SEQ ID NO: 181589 - DNA, 25 bp, Probe sequence
ttattttatgccttaattcgtagtg

SEQ ID NO: 181590 - DNA, 25 bp, Probe sequence
ttattgcattagttttgtatttatt

SEQ ID NO: 181591 - DNA, 25 bp, Probe sequence
ttttgtatttattttatgccttaat

SEQ ID NO: 181592 - DNA, 25 bp, Probe sequence
ttatgccttaattcgtagtgaaaaa

SEQ ID NO: 181593 - DNA, 25 bp, Probe sequence
ttatggcaatgctcatcgttttatt

SEQ ID NO: 181594 - DNA, 25 bp, Probe sequence
ttgtatttattttatgccttaattc

SEQ ID NO: 181595 - DNA, 25 bp, Probe sequence
aggcccacaaatcgtagtcggaaca

SEQ ID NO: 181596 - DNA, 25 bp, Probe sequence
atgggatttaaagagccgacaccta

SEQ ID NO: 181597 - DNA, 25 bp, Probe sequence
atgttgttctcagctacaatgccta

SEQ ID NO: 181598 - DNA, 25 bp, Probe sequence
agttgctgcacttttacaagagtta

SEQ ID NO: 181599 - DNA, 25 bp, Probe sequence
acgatgttgatttagttgctgcact

SEQ ID NO: 181600 - DNA, 25 bp, Probe sequence
actgtattcggtggtatgcctatcg

SEQ ID NO: 181601 - DNA, 25 bp, Probe sequence
acaaatttcctagatgttcatcaac

SEQ ID NO: 181602 - DNA, 25 bp, Probe sequence
aaattccagcagtacaacgtcaaac

SEQ ID NO: 181603 - DNA, 25 bp, Probe sequence
aaacggacggaattcatactttgat

SEQ ID NO: 181604 - DNA, 25 bp, Probe sequence
aatcgtagtcggaacacctgggcgt

SEQ ID NO: 181605 - DNA, 25 bp, Probe sequence
aaccattatctcgcaaaggccgtaa

SEQ ID NO: 181606 - DNA, 25 bp, Probe sequence
aaggtcgcacatttgctgaccatca

SEQ ID NO: 181607 - DNA, 25 bp, Probe sequence
aatattttagtcgctactgatgtag

SEQ ID NO: 181608 - DNA, 25 bp, Probe sequence
cacctgggcgtgttatcgaccattt

SEQ ID NO: 181609 - DNA, 25 bp, Probe sequence
cggataatacggttcagtcacttga

SEQ ID NO: 181610 - DNA, 25 bp, Probe sequence
gcgtggtaatcctaaatttgacagt

SEQ ID NO: 181611 - DNA, 25 bp, Probe sequence
gcaatcgtattcggacgtacaaaac

SEQ ID NO: 181612 - DNA, 25 bp, Probe sequence
gcaatccaagctttagtacaacaat

SEQ ID NO: 181613 - DNA, 25 bp, Probe sequence
gaatttagccgtggacaaggtgtcc

SEQ ID NO: 181614 - DNA, 25 bp, Probe sequence
gaaacgcatttctacagagttgtta

SEQ ID NO: 181615 - DNA, 25 bp, Probe sequence
gaaatgtctgatccacaaatcgaag

SEQ ID NO: 181616 - DNA, 25 bp, Probe sequence
gacagtatcccttatgcgttacaag

SEQ ID NO: 181617 - DNA, 25 bp, Probe sequence
gaccatttaaatcgtcgcacattaa

SEQ ID NO: 181618 - DNA, 25 bp, Probe sequence
gagccgacacctatccaaaaagaca

SEQ ID NO: 181619 - DNA, 25 bp, Probe sequence
gagtcagaatcacgcttgaaacgca

SEQ ID NO: 181620 - DNA, 25 bp, Probe sequence
gatatttctggtgtgagtcatgttt

SEQ ID NO: 181621 - DNA, 25 bp, Probe sequence
ggtatgcctatcgaacgccaaatta

SEQ ID NO: 181622 - DNA, 25 bp, Probe sequence
ggtgtccaagttgttactgtattcg

SEQ ID NO: 181623 - DNA, 25 bp, Probe sequence
ggagcattcggtattcctttaattg

SEQ ID NO: 181624 - DNA, 25 bp, Probe sequence
ggaattgatatccttgggcaagctc

SEQ ID NO: 181625 - DNA, 25 bp, Probe sequence
tggtcgtacgggtcgtgctggtaaa

SEQ ID NO: 181626 - DNA, 25 bp, Probe sequence
tgggcaagctcaaaccggtacaggt

SEQ ID NO: 181627 - DNA, 25 bp, Probe sequence
tcatcaacctgaattagcaatcgta

SEQ ID NO: 181628 - DNA, 25 bp, Probe sequence
tcaatcgttgattttagcacctaca

SEQ ID NO: 181629 - DNA, 25 bp, Probe sequence
ttgccgaaaaatattccgaacttat

SEQ ID NO: 181630 - DNA, 25 bp, Probe sequence
atttataccgaaaaacatacgattg

SEQ ID NO: 181631 - DNA, 25 bp, Probe sequence
atatcggcatcaaatatgctgaaga

SEQ ID NO: 181632 - DNA, 25 bp, Probe sequence
atacaattaaaggcgtatcttctaa

SEQ ID NO: 181633 - DNA, 25 bp, Probe sequence
atctacgttaaatatcggcatcaaa

SEQ ID NO: 181634 - DNA, 25 bp, Probe sequence
atggcggcaaaatgtttgaatcaat

SEQ ID NO: 181635 - DNA, 25 bp, Probe sequence
agacctgtcacgttaacacttagca

SEQ ID NO: 181636 - DNA, 25 bp, Probe sequence
agatttcaatagtctatcttcaaaa

SEQ ID NO: 181637 - DNA, 25 bp, Probe sequence
aaagtgactacagcaaaattgccga

SEQ ID NO: 181638 - DNA, 25 bp, Probe sequence
aaacgagaaattactattacagaca

SEQ ID NO: 181639 - DNA, 25 bp, Probe sequence
aaaataacactcagaaatctacgtt

SEQ ID NO: 181640 - DNA, 25 bp, Probe sequence
aacacttagcagagctgacactaaa

SEQ ID NO: 181641 - DNA, 25 bp, Probe sequence
aagtacaaagttagacctgtcacgt

SEQ ID NO: 181642 - DNA, 25 bp, Probe sequence
aataggtggaatcgcatggggagtt

SEQ ID NO: 181643 - DNA, 25 bp, Probe sequence
aatatgctgaagaaccaattaattt

SEQ ID NO: 181644 - DNA, 25 bp, Probe sequence
aatattccgaacttattgtcgacaa

SEQ ID NO: 181645 - DNA, 25 bp, Probe sequence
aatttcattttaaaatctagcacaa

SEQ ID NO: 181646 - DNA, 25 bp, Probe sequence
caatgattaatcttgaaccaacaat

SEQ ID NO: 181647 - DNA, 25 bp, Probe sequence
catggggagtttatgcattttttgc

SEQ ID NO: 181648 - DNA, 25 bp, Probe sequence
cattagaattaagcgcagatgcatc

SEQ ID NO: 181649 - DNA, 25 bp, Probe sequence
gcgacgaaaatgaattcacttttga

SEQ ID NO: 181650 - DNA, 25 bp, Probe sequence
gcagactctgcattagggaaattcc

SEQ ID NO: 181651 - DNA, 25 bp, Probe sequence
gcagatattgattttgatgatagtg

SEQ ID NO: 181652 - DNA, 25 bp, Probe sequence
gttaaaactagattacgcacttgat

SEQ ID NO: 181653 - DNA, 25 bp, Probe sequence
gtagatggcacaaaacgtcaagata

SEQ ID NO: 181654 - DNA, 25 bp, Probe sequence
gtcacgttaacacttagcagagctg

SEQ ID NO: 181655 - DNA, 25 bp, Probe sequence
gggaaattccagttagctgcagata

SEQ ID NO: 181656 - DNA, 25 bp, Probe sequence
tgtcatatggacatgatcctaaaaa

SEQ ID NO: 181657 - DNA, 25 bp, Probe sequence
tgctcaagcacaacaaagtgactac

SEQ ID NO: 181658 - DNA, 25 bp, Probe sequence
taagcattatttcgaatcaccatta

SEQ ID NO: 181659 - DNA, 25 bp, Probe sequence
taaatacacgtatgctgaagcgaaa

SEQ ID NO: 181660 - DNA, 25 bp, Probe sequence
tagattacgcacttgatttcgatca

SEQ ID NO: 181661 - DNA, 25 bp, Probe sequence
tagtctatcttcaaaagaccgtgaa

SEQ ID NO: 181662 - DNA, 25 bp, Probe sequence
ttcgaatcaccattatttaaaggga

SEQ ID NO: 181663 - DNA, 25 bp, Probe sequence
attactgtgataaatgatgcctata

SEQ ID NO: 181664 - DNA, 25 bp, Probe sequence
atactacaggtatttcatttacgat

SEQ ID NO: 181665 - DNA, 25 bp, Probe sequence
atggagtcacaattgattcacgagc

SEQ ID NO: 181666 - DNA, 25 bp, Probe sequence
acctcgctcaaccagatattgcagt

SEQ ID NO: 181667 - DNA, 25 bp, Probe sequence
acaacaattggcacaagcttacttg

SEQ ID NO: 181668 - DNA, 25 bp, Probe sequence
aaatgcgacgattgccattgcggtt

SEQ ID NO: 181669 - DNA, 25 bp, Probe sequence
aaagcacaacacttcaattctaaag

SEQ ID NO: 181670 - DNA, 25 bp, Probe sequence
aaaagcgcatgaccgtgtattagtt

SEQ ID NO: 181671 - DNA, 25 bp, Probe sequence
aaccctaaagtaattgccgtcacag

SEQ ID NO: 181672 - DNA, 25 bp, Probe sequence
aattgccgtcacagggtctaatggt

SEQ ID NO: 181673 - DNA, 25 bp, Probe sequence
aatgttgacggtcatcgctttgtct

SEQ ID NO: 181674 - DNA, 25 bp, Probe sequence
aattcaatcatggattccttgtgaa

SEQ ID NO: 181675 - DNA, 25 bp, Probe sequence
cagggcgtcgcattctaattttagg

SEQ ID NO: 181676 - DNA, 25 bp, Probe sequence
cgggccagcaacatgtcgaaaaagc

SEQ ID NO: 181677 - DNA, 25 bp, Probe sequence
gcttacttgagacatgtaaacccta

SEQ ID NO: 181678 - DNA, 25 bp, Probe sequence
gaagacacattaacggcattacaac

SEQ ID NO: 181679 - DNA, 25 bp, Probe sequence
gaaatgcatatcggtgtaggtaatt

SEQ ID NO: 181680 - DNA, 25 bp, Probe sequence
gagtcacatatgcaagatttaggtt

SEQ ID NO: 181681 - DNA, 25 bp, Probe sequence
gaggggattgctaaagctaaatctg

SEQ ID NO: 181682 - DNA, 25 bp, Probe sequence
gatgcctataatgcaagtcctacaa

SEQ ID NO: 181683 - DNA, 25 bp, Probe sequence
gattcacgagcaatttctaaaaata

SEQ ID NO: 181684 - DNA, 25 bp, Probe sequence
gattgccattgcggttggtcatgaa

SEQ ID NO: 181685 - DNA, 25 bp, Probe sequence
gtaagcgggcctattatatgggttg

SEQ ID NO: 181686 - DNA, 25 bp, Probe sequence
gtatatttatgattcgggccagcaa

SEQ ID NO: 181687 - DNA, 25 bp, Probe sequence
gtacgtttatatatgatggcgatga

SEQ ID NO: 181688 - DNA, 25 bp, Probe sequence
gtcctacaagtatgagagcagctat

SEQ ID NO: 181689 - DNA, 25 bp, Probe sequence
gtgtattgcataccgaatttaaagt

SEQ ID NO: 181690 - DNA, 25 bp, Probe sequence
gtgttgctactgataatgcattagt

SEQ ID NO: 181691 - DNA, 25 bp, Probe sequence
ggggatgtcaggtttccatgaaatt

SEQ ID NO: 181692 - DNA, 25 bp, Probe sequence
ggtttgacatataacacaatctatc

SEQ ID NO: 181693 - DNA, 25 bp, Probe sequence
tgaatttctgtcaaacctcgctcaa

SEQ ID NO: 181694 - DNA, 25 bp, Probe sequence
tgcggttggtcatgaattaggtttg

SEQ ID NO: 181695 - DNA, 25 bp, Probe sequence
tcagcttaactggtatgcgtatgga

SEQ ID NO: 181696 - DNA, 25 bp, Probe sequence
tagatgtgttgtatacgtttggtaa

SEQ ID NO: 181697 - DNA, 25 bp, Probe sequence
attacatggtcctaatggtgaagat

SEQ ID NO: 181698 - DNA, 25 bp, Probe sequence
atctactgatgagcttcatttagaa

SEQ ID NO: 181699 - DNA, 25 bp, Probe sequence
aggaaatggtgtattgtcagctgca

SEQ ID NO: 181700 - DNA, 25 bp, Probe sequence
acgcacgtgaaattgaagtagcagt

SEQ ID NO: 181701 - DNA, 25 bp, Probe sequence
cagattgttctggtttagtccgtgc

SEQ ID NO: 181702 - DNA, 25 bp, Probe sequence
aattccagctgacttagacgaagat

SEQ ID NO: 181703 - DNA, 25 bp, Probe sequence
cacgaagtatcgattctgacagcac

SEQ ID NO: 181704 - DNA, 25 bp, Probe sequence
cttatattagtttcttacgttctga

SEQ ID NO: 181705 - DNA, 25 bp, Probe sequence
gctaaagaacgtcaccaggataaac

SEQ ID NO: 181706 - DNA, 25 bp, Probe sequence
gcaatgcctggatttacggctttca

SEQ ID NO: 181707 - DNA, 25 bp, Probe sequence
gaacatcgagggttaccacagttac

SEQ ID NO: 181708 - DNA, 25 bp, Probe sequence
gaagcattccaatttgaccgtaagc

SEQ ID NO: 181709 - DNA, 25 bp, Probe sequence
gaacaaggcgttaacgcacgtgaaa

SEQ ID NO: 181710 - DNA, 25 bp, Probe sequence
gacaaccatacgatgcagtattccc

SEQ ID NO: 181711 - DNA, 25 bp, Probe sequence
gacgaagatgttcaattaacgctta

SEQ ID NO: 181712 - DNA, 25 bp, Probe sequence
gagaggcgcttgagatttcacagct

SEQ ID NO: 181713 - DNA, 25 bp, Probe sequence
gatgtcgcgttttacgattacaaat

SEQ ID NO: 181714 - DNA, 25 bp, Probe sequence
gatgcagtattcccattattacatg

SEQ ID NO: 181715 - DNA, 25 bp, Probe sequence
gataaattaaattacccagtctttg

SEQ ID NO: 181716 - DNA, 25 bp, Probe sequence
gattacaaaacttatcgagcttgct

SEQ ID NO: 181717 - DNA, 25 bp, Probe sequence
gttaccacagttaccttatattagt

SEQ ID NO: 181718 - DNA, 25 bp, Probe sequence
gtagttcaggacaaccatacgatgc

SEQ ID NO: 181719 - DNA, 25 bp, Probe sequence
gtcagctgcaagttctatggacaaa

SEQ ID NO: 181720 - DNA, 25 bp, Probe sequence
gggaaaatatgggcttatcttatcc

SEQ ID NO: 181721 - DNA, 25 bp, Probe sequence
ggtgaagtcgtaaaagatgtcgcgt

SEQ ID NO: 181722 - DNA, 25 bp, Probe sequence
ggttcaattacaaattccagctgac

SEQ ID NO: 181723 - DNA, 25 bp, Probe sequence
ggcattcaaagcgacagattgttct

SEQ ID NO: 181724 - DNA, 25 bp, Probe sequence
ggcattagaggcattcaaagcgaca

SEQ ID NO: 181725 - DNA, 25 bp, Probe sequence
tgactatcctgaagcgacatggcca

SEQ ID NO: 181726 - DNA, 25 bp, Probe sequence
tgaagcgacatggccaggtgaagtc

SEQ ID NO: 181727 - DNA, 25 bp, Probe sequence
tccaatttgaccgtaagcttgttat

SEQ ID NO: 181728 - DNA, 25 bp, Probe sequence
tacccagtctttgttaaacctgcta

SEQ ID NO: 181729 - DNA, 25 bp, Probe sequence
taaacctgctaacttagggtcaagt

SEQ ID NO: 181730 - DNA, 25 bp, Probe sequence
ttacggctttcagtatgtatccaaa

SEQ ID NO: 181731 - DNA, 25 bp, Probe sequence
attgtcatcattaggtgtgaatatt

SEQ ID NO: 181732 - DNA, 25 bp, Probe sequence
attaatactttgccagcatctaata

SEQ ID NO: 181733 - DNA, 25 bp, Probe sequence
attattaatactttgccagcatcta

SEQ ID NO: 181734 - DNA, 25 bp, Probe sequence
atactttgccagcatctaataaagt

SEQ ID NO: 181735 - DNA, 25 bp, Probe sequence
atctcgtttagacattattaatact

SEQ ID NO: 181736 - DNA, 25 bp, Probe sequence
atgaaacgtcctgaaaagattcaaa

SEQ ID NO: 181737 - DNA, 25 bp, Probe sequence
agtcaaactattgtcatcattaggt

SEQ ID NO: 181738 - DNA, 25 bp, Probe sequence
agacattattaatactttgccagca

SEQ ID NO: 181739 - DNA, 25 bp, Probe sequence
actattgtcatcattaggtgtgaat

SEQ ID NO: 181740 - DNA, 25 bp, Probe sequence
acattattaatactttgccagcatc

SEQ ID NO: 181741 - DNA, 25 bp, Probe sequence
aaatctcgtttagacattattaata

SEQ ID NO: 181742 - DNA, 25 bp, Probe sequence
aaactattgtcatcattaggtgtga

SEQ ID NO: 181743 - DNA, 25 bp, Probe sequence
aaactaaatctcgtttagacattat

SEQ ID NO: 181744 - DNA, 25 bp, Probe sequence
aactattgtcatcattaggtgtgaa

SEQ ID NO: 181745 - DNA, 25 bp, Probe sequence
aagattcaaaatgtagtcaaactat

SEQ ID NO: 181746 - DNA, 25 bp, Probe sequence
aatgtagtcaaactattgtcatcat

SEQ ID NO: 181747 - DNA, 25 bp, Probe sequence
aatactttgccagcatctaataaag

SEQ ID NO: 181748 - DNA, 25 bp, Probe sequence
caaactattgtcatcattaggtgtg

SEQ ID NO: 181749 - DNA, 25 bp, Probe sequence
cattattaatactttgccagcatct

SEQ ID NO: 181750 - DNA, 25 bp, Probe sequence
ctttgccagcatctaataaagtaag

SEQ ID NO: 181751 - DNA, 25 bp, Probe sequence
ctattgtcatcattaggtgtgaata

SEQ ID NO: 181752 - DNA, 25 bp, Probe sequence
gaaacgtcctgaaaagattcaaaat

SEQ ID NO: 181753 - DNA, 25 bp, Probe sequence
gacattattaatactttgccagcat

SEQ ID NO: 181754 - DNA, 25 bp, Probe sequence
gtagtcaaactattgtcatcattag

SEQ ID NO: 181755 - DNA, 25 bp, Probe sequence
gtcaaactattgtcatcattaggtg

SEQ ID NO: 181756 - DNA, 25 bp, Probe sequence
gtcatcattaggtgtgaatattaaa

SEQ ID NO: 181757 - DNA, 25 bp, Probe sequence
tgtagtcaaactattgtcatcatta

SEQ ID NO: 181758 - DNA, 25 bp, Probe sequence
tctcgtttagacattattaatactt

SEQ ID NO: 181759 - DNA, 25 bp, Probe sequence
taatactttgccagcatctaataaa

SEQ ID NO: 181760 - DNA, 25 bp, Probe sequence
taaatctcgtttagacattattaat

SEQ ID NO: 181761 - DNA, 25 bp, Probe sequence
tagtcaaactattgtcatcattagg

SEQ ID NO: 181762 - DNA, 25 bp, Probe sequence
tattaatactttgccagcatctaat

SEQ ID NO: 181763 - DNA, 25 bp, Probe sequence
ttattaatactttgccagcatctaa

SEQ ID NO: 181764 - DNA, 25 bp, Probe sequence
ttaatactttgccagcatctaataa

SEQ ID NO: 181765 - DNA, 25 bp, Probe sequence
atacgatttacacagcgggaattga

SEQ ID NO: 181766 - DNA, 25 bp, Probe sequence
acgatttacacagcgggaattgaaa

SEQ ID NO: 181767 - DNA, 25 bp, Probe sequence
atcaaaatacgatttacacagcggg

SEQ ID NO: 181768 - DNA, 25 bp, Probe sequence
agtcaattgacagaacgcatttcaa

SEQ ID NO: 181769 - DNA, 25 bp, Probe sequence
acatcaaaatacgatttacacagcg

SEQ ID NO: 181770 - DNA, 25 bp, Probe sequence
acacagcgggaattgaaacagaaga

SEQ ID NO: 181771 - DNA, 25 bp, Probe sequence
aaatacgatttacacagcgggaatt

SEQ ID NO: 181772 - DNA, 25 bp, Probe sequence
aaaatacgatttacacagcgggaat

SEQ ID NO: 181773 - DNA, 25 bp, Probe sequence
aagtcaattgacagaacgcatttca

SEQ ID NO: 181774 - DNA, 25 bp, Probe sequence
aatacgatttacacagcgggaattg

SEQ ID NO: 181775 - DNA, 25 bp, Probe sequence
aatatgataggtgttcatcaagtga

SEQ ID NO: 181776 - DNA, 25 bp, Probe sequence
aattgacagaacgcatttcaaatat

SEQ ID NO: 181777 - DNA, 25 bp, Probe sequence
caaaatacgatttacacagcgggaa

SEQ ID NO: 181778 - DNA, 25 bp, Probe sequence
caccagcaaatttgaatagtattga

SEQ ID NO: 181779 - DNA, 25 bp, Probe sequence
cagcgggaattgaaacagaagaaca

SEQ ID NO: 181780 - DNA, 25 bp, Probe sequence
cgtatgagacaccagcaaatttgaa

SEQ ID NO: 181781 - DNA, 25 bp, Probe sequence
cgatttacacagcgggaattgaaac

SEQ ID NO: 181782 - DNA, 25 bp, Probe sequence
gcatttcaaatatgataggtgttca

SEQ ID NO: 181783 - DNA, 25 bp, Probe sequence
gaagaacaagtaagtcaattgacag

SEQ ID NO: 181784 - DNA, 25 bp, Probe sequence
gaacgcatttcaaatatgataggtg

SEQ ID NO: 181785 - DNA, 25 bp, Probe sequence
gaaatctatgatgaaggatacaaaa

SEQ ID NO: 181786 - DNA, 25 bp, Probe sequence
gacaccagcaaatttgaatagtatt

SEQ ID NO: 181787 - DNA, 25 bp, Probe sequence
gacagaacgcatttcaaatatgata

SEQ ID NO: 181788 - DNA, 25 bp, Probe sequence
gagacaccagcaaatttgaatagta

SEQ ID NO: 181789 - DNA, 25 bp, Probe sequence
gatacatcaaaatacgatttacaca

SEQ ID NO: 181790 - DNA, 25 bp, Probe sequence
gatttacacagcgggaattgaaaca

SEQ ID NO: 181791 - DNA, 25 bp, Probe sequence
gtatgagacaccagcaaatttgaat

SEQ ID NO: 181792 - DNA, 25 bp, Probe sequence
gtcaattgacagaacgcatttcaaa

SEQ ID NO: 181793 - DNA, 25 bp, Probe sequence
taagtcaattgacagaacgcatttc

SEQ ID NO: 181794 - DNA, 25 bp, Probe sequence
tcaattgacagaacgcatttcaaat

SEQ ID NO: 181795 - DNA, 25 bp, Probe sequence
tacacagcgggaattgaaacagaag

SEQ ID NO: 181796 - DNA, 25 bp, Probe sequence
tacgatttacacagcgggaattgaa

SEQ ID NO: 181797 - DNA, 25 bp, Probe sequence
tatgagacaccagcaaatttgaata

SEQ ID NO: 181798 - DNA, 25 bp, Probe sequence
tttacacagcgggaattgaaacaga

SEQ ID NO: 181799 - DNA, 25 bp, Probe sequence
agagcgacacgttcggcgttaaaca

SEQ ID NO: 181800 - DNA, 25 bp, Probe sequence
attgtgatgatgtccttacgcaaat

SEQ ID NO: 181801 - DNA, 25 bp, Probe sequence
attagtgacttttcaaaaattgatt

SEQ ID NO: 181802 - DNA, 25 bp, Probe sequence
ataagagcgacacgttcggcgttaa

SEQ ID NO: 181803 - DNA, 25 bp, Probe sequence
atcgcatgattgaagaagatgtcta

SEQ ID NO: 181804 - DNA, 25 bp, Probe sequence
atgactgaacaagataatgcacatc

SEQ ID NO: 181805 - DNA, 25 bp, Probe sequence
atgtctattgtgatgatgtccttac

SEQ ID NO: 181806 - DNA, 25 bp, Probe sequence
agatgtctattgtgatgatgtcctt

SEQ ID NO: 181807 - DNA, 25 bp, Probe sequence
acgttcggcgttaaacagtgttgcg

SEQ ID NO: 181808 - DNA, 25 bp, Probe sequence
aaataagagcgacacgttcggcgtt

SEQ ID NO: 181809 - DNA, 25 bp, Probe sequence
aacagtgttgcgataaagttattag

SEQ ID NO: 181810 - DNA, 25 bp, Probe sequence
aagttaatcaaggtgctcaggaaga

SEQ ID NO: 181811 - DNA, 25 bp, Probe sequence
aatgcacatcattctgaacaaataa

SEQ ID NO: 181812 - DNA, 25 bp, Probe sequence
gcgacacgttcggcgttaaacagtg

SEQ ID NO: 181813 - DNA, 25 bp, Probe sequence
gaataaagttaatcaaggtgctcag

SEQ ID NO: 181814 - DNA, 25 bp, Probe sequence
gaatcttaaatcacgtttaaatcga

SEQ ID NO: 181815 - DNA, 25 bp, Probe sequence
gaagatgtctattgtgatgatgtcc

SEQ ID NO: 181816 - DNA, 25 bp, Probe sequence
gaacaagataatgcacatcattctg

SEQ ID NO: 181817 - DNA, 25 bp, Probe sequence
gacacgttcggcgttaaacagtgtt

SEQ ID NO: 181818 - DNA, 25 bp, Probe sequence
gagcgacacgttcggcgttaaacag

SEQ ID NO: 181819 - DNA, 25 bp, Probe sequence
gagttattagtgacttttcaaaaat

SEQ ID NO: 181820 - DNA, 25 bp, Probe sequence
gatgtccttacgcaaataagagcga

SEQ ID NO: 181821 - DNA, 25 bp, Probe sequence
gatgatgtccttacgcaaataagag

SEQ ID NO: 181822 - DNA, 25 bp, Probe sequence
gataatgcacatcattctgaacaaa

SEQ ID NO: 181823 - DNA, 25 bp, Probe sequence
gttcggcgttaaacagtgttgcgat

SEQ ID NO: 181824 - DNA, 25 bp, Probe sequence
gttaatcaaggtgctcaggaagagg

SEQ ID NO: 181825 - DNA, 25 bp, Probe sequence
gtccttacgcaaataagagcgacac

SEQ ID NO: 181826 - DNA, 25 bp, Probe sequence
gtctattgtgatgatgtccttacgc

SEQ ID NO: 181827 - DNA, 25 bp, Probe sequence
ggaagagttattagtgacttttcaa

SEQ ID NO: 181828 - DNA, 25 bp, Probe sequence
tgtgatgatgtccttacgcaaataa

SEQ ID NO: 181829 - DNA, 25 bp, Probe sequence
tgcacatcattctgaacaaataaaa

SEQ ID NO: 181830 - DNA, 25 bp, Probe sequence
tcggcgttaaacagtgttgcgataa

SEQ ID NO: 181831 - DNA, 25 bp, Probe sequence
tctattgtgatgatgtccttacgca

SEQ ID NO: 181832 - DNA, 25 bp, Probe sequence
taagagcgacacgttcggcgttaaa

SEQ ID NO: 181833 - DNA, 25 bp, Probe sequence
atagcactacatcaagtcgcatcgt

SEQ ID NO: 181834 - DNA, 25 bp, Probe sequence
atcaacgccaaacctgtctataaca

SEQ ID NO: 181835 - DNA, 25 bp, Probe sequence
atcaagtcgcatcgtggtaccagca

SEQ ID NO: 181836 - DNA, 25 bp, Probe sequence
atcatagcactacatcaagtcgcat

SEQ ID NO: 181837 - DNA, 25 bp, Probe sequence
atgccacatcatagcactacatcaa

SEQ ID NO: 181838 - DNA, 25 bp, Probe sequence
atggcatcaacgccaaacctgtcta

SEQ ID NO: 181839 - DNA, 25 bp, Probe sequence
agcactacatcaagtcgcatcgtgg

SEQ ID NO: 181840 - DNA, 25 bp, Probe sequence
actacatcaagtcgcatcgtggtac

SEQ ID NO: 181841 - DNA, 25 bp, Probe sequence
acatcaagtcgcatcgtggtaccag

SEQ ID NO: 181842 - DNA, 25 bp, Probe sequence
acatcatagcactacatcaagtcgc

SEQ ID NO: 181843 - DNA, 25 bp, Probe sequence
acatggcatcaacgccaaacctgtc

SEQ ID NO: 181844 - DNA, 25 bp, Probe sequence
aacatggcatcaacgccaaacctgt

SEQ ID NO: 181845 - DNA, 25 bp, Probe sequence
aacgccaaacctgtctataacacca

SEQ ID NO: 181846 - DNA, 25 bp, Probe sequence
caacgccaaacctgtctataacacc

SEQ ID NO: 181847 - DNA, 25 bp, Probe sequence
cactacatcaagtcgcatcgtggta

SEQ ID NO: 181848 - DNA, 25 bp, Probe sequence
catcaacgccaaacctgtctataac

SEQ ID NO: 181849 - DNA, 25 bp, Probe sequence
catggcatcaacgccaaacctgtct

SEQ ID NO: 181850 - DNA, 25 bp, Probe sequence
catcgtggtaccagcacatcaaagt

SEQ ID NO: 181851 - DNA, 25 bp, Probe sequence
catagcactacatcaagtcgcatcg

SEQ ID NO: 181852 - DNA, 25 bp, Probe sequence
ctacatcaagtcgcatcgtggtacc

SEQ ID NO: 181853 - DNA, 25 bp, Probe sequence
ccagcacatcaaagtaacatggcat

SEQ ID NO: 181854 - DNA, 25 bp, Probe sequence
gccacatcatagcactacatcaagt

SEQ ID NO: 181855 - DNA, 25 bp, Probe sequence
gcatcgtggtaccagcacatcaaag

SEQ ID NO: 181856 - DNA, 25 bp, Probe sequence
gcactacatcaagtcgcatcgtggt

SEQ ID NO: 181857 - DNA, 25 bp, Probe sequence
gtggtaccagcacatcaaagtaaca

SEQ ID NO: 181858 - DNA, 25 bp, Probe sequence
ggtaccagcacatcaaagtaacatg

SEQ ID NO: 181859 - DNA, 25 bp, Probe sequence
tggcatcaacgccaaacctgtctat

SEQ ID NO: 181860 - DNA, 25 bp, Probe sequence
tcaagtcgcatcgtggtaccagcac

SEQ ID NO: 181861 - DNA, 25 bp, Probe sequence
tcgcatcgtggtaccagcacatcaa

SEQ ID NO: 181862 - DNA, 25 bp, Probe sequence
tcgtggtaccagcacatcaaagtaa

SEQ ID NO: 181863 - DNA, 25 bp, Probe sequence
tcaacgccaaacctgtctataacac

SEQ ID NO: 181864 - DNA, 25 bp, Probe sequence
taacatggcatcaacgccaaacctg

SEQ ID NO: 181865 - DNA, 25 bp, Probe sequence
tacatcaagtcgcatcgtggtacca

SEQ ID NO: 181866 - DNA, 25 bp, Probe sequence
tagcactacatcaagtcgcatcgtg

SEQ ID NO: 181867 - DNA, 25 bp, Probe sequence
attcgtattattttattaccattca

SEQ ID NO: 181868 - DNA, 25 bp, Probe sequence
attaccattcatgttgtcaaactat

SEQ ID NO: 181869 - DNA, 25 bp, Probe sequence
attatggtctttttggctggttgtg

SEQ ID NO: 181870 - DNA, 25 bp, Probe sequence
atatccacacttcttatggttcgat

SEQ ID NO: 181871 - DNA, 25 bp, Probe sequence
agtgggtttttctacaatacattcg

SEQ ID NO: 181872 - DNA, 25 bp, Probe sequence
acaatacattcgtagatccaatgaa

SEQ ID NO: 181873 - DNA, 25 bp, Probe sequence
aaatgtattggattggttgggaaat

SEQ ID NO: 181874 - DNA, 25 bp, Probe sequence
aaatggctgcaaaccaagaattaat

SEQ ID NO: 181875 - DNA, 25 bp, Probe sequence
aaaatagtcatatgatgcgtcaaaa

SEQ ID NO: 181876 - DNA, 25 bp, Probe sequence
aacgacaattatggtttagctatta

SEQ ID NO: 181877 - DNA, 25 bp, Probe sequence
aagtaaaacgatgccagacgaacaa

SEQ ID NO: 181878 - DNA, 25 bp, Probe sequence
aagtatgacatgaacccgattaaga

SEQ ID NO: 181879 - DNA, 25 bp, Probe sequence
cacacttcttatggttcgatttagg

SEQ ID NO: 181880 - DNA, 25 bp, Probe sequence
ccgattaagagtatgttgggttgtt

SEQ ID NO: 181881 - DNA, 25 bp, Probe sequence
gctggttgtgactattctaaacctg

SEQ ID NO: 181882 - DNA, 25 bp, Probe sequence
gaccaacttgtagatggtttgttta

SEQ ID NO: 181883 - DNA, 25 bp, Probe sequence
gttgtttaccaatgctaatccaatt

SEQ ID NO: 181884 - DNA, 25 bp, Probe sequence
gtatcaagtaaaacgatgccagacg

SEQ ID NO: 181885 - DNA, 25 bp, Probe sequence
gtgcgcgtacacaagaagaaaaaat

SEQ ID NO: 181886 - DNA, 25 bp, Probe sequence
gtgactattctaaacctgaaaaacg

SEQ ID NO: 181887 - DNA, 25 bp, Probe sequence
ggtgttttatactttatccaagcat

SEQ ID NO: 181888 - DNA, 25 bp, Probe sequence
ggtttgtttaaatatccacacttct

SEQ ID NO: 181889 - DNA, 25 bp, Probe sequence
ggtattatggtctttttggctggtt

SEQ ID NO: 181890 - DNA, 25 bp, Probe sequence
ggattacaattattgccggtgtttt

SEQ ID NO: 181891 - DNA, 25 bp, Probe sequence
ggacgtcctgatatttggattacaa

SEQ ID NO: 181892 - DNA, 25 bp, Probe sequence
tgggttgtttaccaatgctaatcca

SEQ ID NO: 181893 - DNA, 25 bp, Probe sequence
tgaaagttgcaaagccagaagttga

SEQ ID NO: 181894 - DNA, 25 bp, Probe sequence
tcatcatgggattatactttgtact

SEQ ID NO: 181895 - DNA, 25 bp, Probe sequence
tactttgtacttaaagaccaacttg

SEQ ID NO: 181896 - DNA, 25 bp, Probe sequence
tactaccattatttttaggtattat

SEQ ID NO: 181897 - DNA, 25 bp, Probe sequence
tatggttcgatttaggacgtcctga

SEQ ID NO: 181898 - DNA, 25 bp, Probe sequence
tttatccaagcatatgtatcaagta

SEQ ID NO: 181899 - DNA, 25 bp, Probe sequence
ttttggctggttgtgactattctaa

SEQ ID NO: 181900 - DNA, 25 bp, Probe sequence
ttgccggtgttttatactttatcca

SEQ ID NO: 181901 - DNA, 25 bp, Probe sequence
atttcagtcatttcagccatttcta

SEQ ID NO: 181902 - DNA, 25 bp, Probe sequence
atcaatatgatgtgccttttatcgt

SEQ ID NO: 181903 - DNA, 25 bp, Probe sequence
agaattacagcatctctgtcatcaa

SEQ ID NO: 181904 - DNA, 25 bp, Probe sequence
acctccgatgttccgagtcatcgaa

SEQ ID NO: 181905 - DNA, 25 bp, Probe sequence
acgccgtcgaagcatgacgcgcata

SEQ ID NO: 181906 - DNA, 25 bp, Probe sequence
acgcggatggtatacatgtcggtca

SEQ ID NO: 181907 - DNA, 25 bp, Probe sequence
actcatgttgattatataggtgttg

SEQ ID NO: 181908 - DNA, 25 bp, Probe sequence
acagcatctctgtcatcaatatgat

SEQ ID NO: 181909 - DNA, 25 bp, Probe sequence
cagtaggtccagaaatgattgcaac

SEQ ID NO: 181910 - DNA, 25 bp, Probe sequence
gcgccgattgtagaagcaggtgcca

SEQ ID NO: 181911 - DNA, 25 bp, Probe sequence
gcagggattacacttttccaatttc

SEQ ID NO: 181912 - DNA, 25 bp, Probe sequence
gcaggtgccaatggaatttcagtca

SEQ ID NO: 181913 - DNA, 25 bp, Probe sequence
gcaaaatctgatttaactcatgttg

SEQ ID NO: 181914 - DNA, 25 bp, Probe sequence
gaagcagcattaaaggcagggatta

SEQ ID NO: 181915 - DNA, 25 bp, Probe sequence
gagaaaagggtgaatcagctttaaa

SEQ ID NO: 181916 - DNA, 25 bp, Probe sequence
gagatagcacaatatttcactgata

SEQ ID NO: 181917 - DNA, 25 bp, Probe sequence
gagtcatcgaactattcatgaagta

SEQ ID NO: 181918 - DNA, 25 bp, Probe sequence
gatgttccgagtcatcgaactattc

SEQ ID NO: 181919 - DNA, 25 bp, Probe sequence
gatgtgccttttatcgttaatgatg

SEQ ID NO: 181920 - DNA, 25 bp, Probe sequence
gatgatgtatccttggcaaaagaaa

SEQ ID NO: 181921 - DNA, 25 bp, Probe sequence
gttaatgatgatgtatccttggcaa

SEQ ID NO: 181922 - DNA, 25 bp, Probe sequence
gtattagtgatttagatgagtatgc

SEQ ID NO: 181923 - DNA, 25 bp, Probe sequence
gtatacatgtcggtcaagatgatgc

SEQ ID NO: 181924 - DNA, 25 bp, Probe sequence
gtcatttcagccatttctaaaagtg

SEQ ID NO: 181925 - DNA, 25 bp, Probe sequence
gtcggtcaagatgatgcgaaagtca

SEQ ID NO: 181926 - DNA, 25 bp, Probe sequence
gtggcgccgattgtagaagcaggtg

SEQ ID NO: 181927 - DNA, 25 bp, Probe sequence
ggtgttggaccaatctatcctacgc

SEQ ID NO: 181928 - DNA, 25 bp, Probe sequence
ggattacacttttccaatttcgaga

SEQ ID NO: 181929 - DNA, 25 bp, Probe sequence
ggaaacgataaacttgtattagcta

SEQ ID NO: 181930 - DNA, 25 bp, Probe sequence
ggcaaaagaaattaacgcggatggt

SEQ ID NO: 181931 - DNA, 25 bp, Probe sequence
tgaatccgcaactaccgattgtagc

SEQ ID NO: 181932 - DNA, 25 bp, Probe sequence
tctatcctacgccgtcgaagcatga

SEQ ID NO: 181933 - DNA, 25 bp, Probe sequence
taaccaatcgtatctaaatgtgtat

SEQ ID NO: 181934 - DNA, 25 bp, Probe sequence
taaagaaatgaatccgcaactaccg

SEQ ID NO: 181935 - DNA, 25 bp, Probe sequence
attgtatttgaccctgtagctgttg

SEQ ID NO: 181936 - DNA, 25 bp, Probe sequence
attgctgctgaggtagctgctgaaa

SEQ ID NO: 181937 - DNA, 25 bp, Probe sequence
attagcgttgattgatgatacagca

SEQ ID NO: 181938 - DNA, 25 bp, Probe sequence
attttacagcgaatggtttattaag

SEQ ID NO: 181939 - DNA, 25 bp, Probe sequence
aaacggcaaatgaggcaggcttacc

SEQ ID NO: 181940 - DNA, 25 bp, Probe sequence
aaaactgcaatagtaatcacaggta

SEQ ID NO: 181941 - DNA, 25 bp, Probe sequence
caccattgttgcttgatacgttata

SEQ ID NO: 181942 - DNA, 25 bp, Probe sequence
gctgttggtgcttctacatatcgaa

SEQ ID NO: 181943 - DNA, 25 bp, Probe sequence
gctgaagaattttacaaagttgcac

SEQ ID NO: 181944 - DNA, 25 bp, Probe sequence
gcacgagtaactggagctggttgtt

SEQ ID NO: 181945 - DNA, 25 bp, Probe sequence
gaagcgttaattgaagcggtaagcg

SEQ ID NO: 181946 - DNA, 25 bp, Probe sequence
gaacaagatattattgcgattgctc

SEQ ID NO: 181947 - DNA, 25 bp, Probe sequence
gaaaattgtggtggtcctggtacgt

SEQ ID NO: 181948 - DNA, 25 bp, Probe sequence
gaaacaacctatcaacaacggattc

SEQ ID NO: 181949 - DNA, 25 bp, Probe sequence
gaaatcagcgaaagtatcagtaatt

SEQ ID NO: 181950 - DNA, 25 bp, Probe sequence
gagtgaagctcccgaagaagctgaa

SEQ ID NO: 181951 - DNA, 25 bp, Probe sequence
gaggcaggcttacctattgtatttg

SEQ ID NO: 181952 - DNA, 25 bp, Probe sequence
gatacagcaactatgaaaggtacag

SEQ ID NO: 181953 - DNA, 25 bp, Probe sequence
gtacgttttcaccattgttgcttga

SEQ ID NO: 181954 - DNA, 25 bp, Probe sequence
gtaagcgtatttaatattgctgctg

SEQ ID NO: 181955 - DNA, 25 bp, Probe sequence
gtcctggtacgttttcaccattgtt

SEQ ID NO: 181956 - DNA, 25 bp, Probe sequence
ggtaaagaggacgttattgttcaag

SEQ ID NO: 181957 - DNA, 25 bp, Probe sequence
ggatctccattattagcacgagtaa

SEQ ID NO: 181958 - DNA, 25 bp, Probe sequence
ggcaatgcatctgaaatattagcgt

SEQ ID NO: 181959 - DNA, 25 bp, Probe sequence
tggagctggttgtttattaggaggc

SEQ ID NO: 181960 - DNA, 25 bp, Probe sequence
tgtggtggtcctggtacgttttcac

SEQ ID NO: 181961 - DNA, 25 bp, Probe sequence
tgaccctgtagctgttggtgcttct

SEQ ID NO: 181962 - DNA, 25 bp, Probe sequence
tgaaaacccattaacaatttgttat

SEQ ID NO: 181963 - DNA, 25 bp, Probe sequence
tcgtattagctaatggatctccatt

SEQ ID NO: 181964 - DNA, 25 bp, Probe sequence
taatcaatatcggtactttaacagc

SEQ ID NO: 181965 - DNA, 25 bp, Probe sequence
tagtgatgctaatcttgatgcggtt

SEQ ID NO: 181966 - DNA, 25 bp, Probe sequence
tattgcgattgctcaaacggcaaat

SEQ ID NO: 181967 - DNA, 25 bp, Probe sequence
tattgctggatttttatttagagaa

SEQ ID NO: 181968 - DNA, 25 bp, Probe sequence
ttagagaaacagaaccagacataga

SEQ ID NO: 181969 - DNA, 25 bp, Probe sequence
atctgtcgataaagatggacaccga

SEQ ID NO: 181970 - DNA, 25 bp, Probe sequence
agaacacgacctaaatacagataaa

SEQ ID NO: 181971 - DNA, 25 bp, Probe sequence
agaagctaatattaacaattcgaat

SEQ ID NO: 181972 - DNA, 25 bp, Probe sequence
acatcaatgattcgtacaagccctc

SEQ ID NO: 181973 - DNA, 25 bp, Probe sequence
aaattgggttattctgctacaaagc

SEQ ID NO: 181974 - DNA, 25 bp, Probe sequence
aaagggcgtcctcaatatatatctg

SEQ ID NO: 181975 - DNA, 25 bp, Probe sequence
aaaattactgtagatgcttcattaa

SEQ ID NO: 181976 - DNA, 25 bp, Probe sequence
aaggtgcaagcagtattaagaattt

SEQ ID NO: 181977 - DNA, 25 bp, Probe sequence
aaggcagaatttaccgaccaagata

SEQ ID NO: 181978 - DNA, 25 bp, Probe sequence
aatcgtaattacattgacaataact

SEQ ID NO: 181979 - DNA, 25 bp, Probe sequence
caagataattatcctatttctagca

SEQ ID NO: 181980 - DNA, 25 bp, Probe sequence
gccgcgcaggcagctaaaaaattgg

SEQ ID NO: 181981 - DNA, 25 bp, Probe sequence
gcgtcctcaatatatatctgtcgat

SEQ ID NO: 181982 - DNA, 25 bp, Probe sequence
gcttcaattgcacctgtagtggctg

SEQ ID NO: 181983 - DNA, 25 bp, Probe sequence
gctacaaagcatgtatcccatggca

SEQ ID NO: 181984 - DNA, 25 bp, Probe sequence
gcagaagcttctgtggttataaaag

SEQ ID NO: 181985 - DNA, 25 bp, Probe sequence
gcacctgtagtggctgtattagtag

SEQ ID NO: 181986 - DNA, 25 bp, Probe sequence
gcaattattataacttttacttacg

SEQ ID NO: 181987 - DNA, 25 bp, Probe sequence
gaatttaccgaccaagatacgggag

SEQ ID NO: 181988 - DNA, 25 bp, Probe sequence
gaagtggtacatacgatgctaacct

SEQ ID NO: 181989 - DNA, 25 bp, Probe sequence
gatggacaccgaggaggagcatgga

SEQ ID NO: 181990 - DNA, 25 bp, Probe sequence
gattcatcgccaaacaaggacttaa

SEQ ID NO: 181991 - DNA, 25 bp, Probe sequence
gttaaagcttcaattgcacctgtag

SEQ ID NO: 181992 - DNA, 25 bp, Probe sequence
gtatcccatggcaaaaaagtgttca

SEQ ID NO: 181993 - DNA, 25 bp, Probe sequence
gtaggattcatcgccaaacaaggac

SEQ ID NO: 181994 - DNA, 25 bp, Probe sequence
gtacatacgatgctaacctaaaaag

SEQ ID NO: 181995 - DNA, 25 bp, Probe sequence
gtggctgtattagtaggattcatcg

SEQ ID NO: 181996 - DNA, 25 bp, Probe sequence
ggtaagacagttgtaacatcaatga

SEQ ID NO: 181997 - DNA, 25 bp, Probe sequence
ggaggagcatggaaaggtgcaagca

SEQ ID NO: 181998 - DNA, 25 bp, Probe sequence
tgattcgtacaagccctcaagttgc

SEQ ID NO: 181999 - DNA, 25 bp, Probe sequence
tgaaagcagtttagaacacgaccta

SEQ ID NO: 182000 - DNA, 25 bp, Probe sequence
tcaagttgccgcgcaggcagctaaa

SEQ ID NO: 182001 - DNA, 25 bp, Probe sequence
tacggaaactttgcagaagcttctg

SEQ ID NO: 182002 - DNA, 25 bp, Probe sequence
tatcctatttctagcaattattata

SEQ ID NO: 182003 - DNA, 25 bp, Probe sequence
attgctacagcagatactatggaaa

SEQ ID NO: 182004 - DNA, 25 bp, Probe sequence
atttaatgcaacatgaatctattcc

SEQ ID NO: 182005 - DNA, 25 bp, Probe sequence
atttgaggctgtacacaaggctaaa

SEQ ID NO: 182006 - DNA, 25 bp, Probe sequence
atagtgtcttcaatgataccttacc

SEQ ID NO: 182007 - DNA, 25 bp, Probe sequence
agatgaacaacttgatagtgtcttc

SEQ ID NO: 182008 - DNA, 25 bp, Probe sequence
agagggattagacgatgaattatct
